United States Patent Application Publication US 2005/0244851 A1 - sequence listing, part 14

SEQ ID NO: 518952 - DNA, 25 bp, Homo sapien
gaacagcagaaaatcgctgatctac

SEQ ID NO: 518953 - DNA, 25 bp, Homo sapien
ggatgctcaagtacttgaacagcag

SEQ ID NO: 518954 - DNA, 25 bp, Homo sapien
tatcccagtatggagaaggaaagtc

SEQ ID NO: 518955 - DNA, 25 bp, Homo sapien
gaatcggaaacattatcccagtatg

SEQ ID NO: 518956 - DNA, 25 bp, Homo sapien
tcggaaacattatcccagtatggag

SEQ ID NO: 518957 - DNA, 25 bp, Homo sapien
gtatggagaaggaaagtccacctgc

SEQ ID NO: 518958 - DNA, 25 bp, Homo sapien
tataagtgattacacctgctgccca

SEQ ID NO: 518959 - DNA, 25 bp, Homo sapien
caagtattgcttattgtacagaaga

SEQ ID NO: 518960 - DNA, 25 bp, Homo sapien
catgtcccagtagaaagtgtgtctg

SEQ ID NO: 518961 - DNA, 25 bp, Homo sapien
gccaagtagcaaagtcctcattccc

SEQ ID NO: 518962 - DNA, 25 bp, Homo sapien
tcattccctcacatctcgcctcagg

SEQ ID NO: 518963 - DNA, 25 bp, Homo sapien
gggccgtctacaatggtggccagtc

SEQ ID NO: 518964 - DNA, 25 bp, Homo sapien
gatttctggagccacgtatgttggg

SEQ ID NO: 518965 - DNA, 25 bp, Homo sapien
ctgtgtacagggggccgtctacaat

SEQ ID NO: 518966 - DNA, 25 bp, Homo sapien
cagggggccgtctacaatggtggcc

SEQ ID NO: 518967 - DNA, 25 bp, Homo sapien
ttcacgaatgcctcaaggaagcagc

SEQ ID NO: 518968 - DNA, 25 bp, Homo sapien
aaaaggctagtaattccagcaaggg

SEQ ID NO: 518969 - DNA, 25 bp, Homo sapien
ccagcaagggcaatcttcacgaatg

SEQ ID NO: 518970 - DNA, 25 bp, Homo sapien
tacttgatccagcaagccgaggctt

SEQ ID NO: 518971 - DNA, 25 bp, Homo sapien
cagatgtttggccagctaagctgca

SEQ ID NO: 518972 - DNA, 25 bp, Homo sapien
tcaggatcaagtttgggctgccctc

SEQ ID NO: 518973 - DNA, 25 bp, Homo sapien
tgccctctggcaggtatccgaagat

SEQ ID NO: 518974 - DNA, 25 bp, Homo sapien
cccaggagctgttgatcaggatcaa

SEQ ID NO: 518975 - DNA, 25 bp, Homo sapien
tagatggtctcgttgatttccgagg

SEQ ID NO: 518976 - DNA, 25 bp, Homo sapien
aagttgtagtcttaccacgtcagcc

SEQ ID NO: 518977 - DNA, 25 bp, Homo sapien
tccagccttggtcacttagagttaa

SEQ ID NO: 518978 - DNA, 25 bp, Homo sapien
taaaaactttgaggcatcacagctg

SEQ ID NO: 518979 - DNA, 25 bp, Homo sapien
ttgcaggtgaataaatgtccagtcc

SEQ ID NO: 518980 - DNA, 25 bp, Homo sapien
tccctcagtggtttaagaagccctc

SEQ ID NO: 518981 - DNA, 25 bp, Homo sapien
cataaagaggttcaagggacactca

SEQ ID NO: 518982 - DNA, 25 bp, Homo sapien
cattagcacctgctacggcctgagc

SEQ ID NO: 518983 - DNA, 25 bp, Homo sapien
caaaggcccagttgtaagtctgttc

SEQ ID NO: 518984 - DNA, 25 bp, Homo sapien
tgttcccatgagacaatcctacata

SEQ ID NO: 518985 - DNA, 25 bp, Homo sapien
tcagtcgctgaagtttgggagctta

SEQ ID NO: 518986 - DNA, 25 bp, Homo sapien
cagttgatggaggtaactatgcaga

SEQ ID NO: 518987 - DNA, 25 bp, Homo sapien
tatcacggtggacgatgttcaggct

SEQ ID NO: 518988 - DNA, 25 bp, Homo sapien
tatgcaggtatttgatggcgctggc

SEQ ID NO: 518989 - DNA, 25 bp, Homo sapien
gcgtctctctcggtgtatttgttag

SEQ ID NO: 518990 - DNA, 25 bp, Homo sapien
gctaggttgtacagcatcccactgg

SEQ ID NO: 518991 - DNA, 25 bp, Homo sapien
gcttcaggcattctttgggacatcc

SEQ ID NO: 518992 - DNA, 25 bp, Homo sapien
ggctaaagtcctgtgcctgatgagc

SEQ ID NO: 518993 - DNA, 25 bp, Homo sapien
ttcattctcattaactgccgatcca

SEQ ID NO: 518994 - DNA, 25 bp, Homo sapien
gatccactgccgtccggaacatgag

SEQ ID NO: 518995 - DNA, 25 bp, Homo sapien
tattgggatgcttcactcttcttaa

SEQ ID NO: 518996 - DNA, 25 bp, Homo sapien
aagatacagttcagttggcacatcc

SEQ ID NO: 518997 - DNA, 25 bp, Homo sapien
ctcaatcagaagaacgatattggga

SEQ ID NO: 518998 - DNA, 25 bp, Homo sapien
ttactaattccatgacaagatacag

SEQ ID NO: 518999 - DNA, 25 bp, Homo sapien
cctcgacatttgcttttcttgataa

SEQ ID NO: 519000 - DNA, 25 bp, Homo sapien
cagagcatactctctagcagtcgat

SEQ ID NO: 519001 - DNA, 25 bp, Homo sapien
tttgcctcgacatttgcttttcttg

SEQ ID NO: 519002 - DNA, 25 bp, Homo sapien
taattttcagagcatactctctagc

SEQ ID NO: 519003 - DNA, 25 bp, Homo sapien
tccctgcatagcacagtgaacgccg

SEQ ID NO: 519004 - DNA, 25 bp, Homo sapien
aaattggactctgagttctccaggc

SEQ ID NO: 519005 - DNA, 25 bp, Homo sapien
cgcccctcctctgtgataggtgtag

SEQ ID NO: 519006 - DNA, 25 bp, Homo sapien
tagtcgtatcgctacctttaaacag

SEQ ID NO: 519007 - DNA, 25 bp, Homo sapien
cctcctgcagatatgcggctgtcca

SEQ ID NO: 519008 - DNA, 25 bp, Homo sapien
tcctgcagatatgcggctgtccaga

SEQ ID NO: 519009 - DNA, 25 bp, Homo sapien
gcagatatgcggctgtccagaggaa

SEQ ID NO: 519010 - DNA, 25 bp, Homo sapien
tcccctcctgcagatatgcggctgt

SEQ ID NO: 519011 - DNA, 25 bp, Homo sapien
cagaaagacatcgttattgtgtcca

SEQ ID NO: 519012 - DNA, 25 bp, Homo sapien
ggaacaggaccacagaaagacatcg

SEQ ID NO: 519013 - DNA, 25 bp, Homo sapien
gccaaagactatgccggaacaggac

SEQ ID NO: 519014 - DNA, 25 bp, Homo sapien
gtccattgttgtagacaaatcttgc

SEQ ID NO: 519015 - DNA, 25 bp, Homo sapien
tttccatctcctattgttcttccga

SEQ ID NO: 519016 - DNA, 25 bp, Homo sapien
tttctacacattccttgacaacagc

SEQ ID NO: 519017 - DNA, 25 bp, Homo sapien
gttcttccgactttatatcgttctg

SEQ ID NO: 519018 - DNA, 25 bp, Homo sapien
tgtagctggaatctggaagccttcc

SEQ ID NO: 519019 - DNA, 25 bp, Homo sapien
aacacagatgttgcacaaggaaaca

SEQ ID NO: 519020 - DNA, 25 bp, Homo sapien
cacagatgttgcacaaggaaacatt

SEQ ID NO: 519021 - DNA, 25 bp, Homo sapien
gggaacacagatgttgcacaaggaa

SEQ ID NO: 519022 - DNA, 25 bp, Homo sapien
gaacacagatgttgcacaaggaaac

SEQ ID NO: 519023 - DNA, 25 bp, Homo sapien
ttctccagggccatcgttctcatcc

SEQ ID NO: 519024 - DNA, 25 bp, Homo sapien
tccatcgagctgcagactttggtgg

SEQ ID NO: 519025 - DNA, 25 bp, Homo sapien
ctttggtggacgcaagtgacgtaga

SEQ ID NO: 519026 - DNA, 25 bp, Homo sapien
tagaggagccgccatgctgagagct

SEQ ID NO: 519027 - DNA, 25 bp, Homo sapien
aattcaaaaactgggtcagaatgcc

SEQ ID NO: 519028 - DNA, 25 bp, Homo sapien
tcaaaaactgggtcagaatgcctga

SEQ ID NO: 519029 - DNA, 25 bp, Homo sapien
gtaattcaaaaactgggtcagaatg

SEQ ID NO: 519030 - DNA, 25 bp, Homo sapien
aactgggtcagaatgcctgagtttc

SEQ ID NO: 519031 - DNA, 25 bp, Homo sapien
cataagcactgagtaggttattggt

SEQ ID NO: 519032 - DNA, 25 bp, Homo sapien
gcaaacagggtaacaactgtatgag

SEQ ID NO: 519033 - DNA, 25 bp, Homo sapien
acaacaataaaagcctaggccttgt

SEQ ID NO: 519034 - DNA, 25 bp, Homo sapien
taaatgctccaccttaccacaactt

SEQ ID NO: 519035 - DNA, 25 bp, Homo sapien
gggcgggcggcattggctcatggtg

SEQ ID NO: 519036 - DNA, 25 bp, Homo sapien
gggcagtactttaacaatgaatgtt

SEQ ID NO: 519037 - DNA, 25 bp, Homo sapien
gggtttatccacttggttggcctga

SEQ ID NO: 519038 - DNA, 25 bp, Homo sapien
cttgtcctaaaagatcttccttctg

SEQ ID NO: 519039 - DNA, 25 bp, Homo sapien
gcagcacaaatggtatttcataatg

SEQ ID NO: 519040 - DNA, 25 bp, Homo sapien
cttctgggctttctggaccttgaat

SEQ ID NO: 519041 - DNA, 25 bp, Homo sapien
aatggtatttcataatggagacaca

SEQ ID NO: 519042 - DNA, 25 bp, Homo sapien
tctgggctttctggaccttgaattt

SEQ ID NO: 519043 - DNA, 25 bp, Homo sapien
tatcattaggacaaaactgcgtggc

SEQ ID NO: 519044 - DNA, 25 bp, Homo sapien
gagccaatatatgcgcacagggatg

SEQ ID NO: 519045 - DNA, 25 bp, Homo sapien
cctgtctaaacaaagccatgggctc

SEQ ID NO: 519046 - DNA, 25 bp, Homo sapien
tgaaattcatctagagccaggccct

SEQ ID NO: 519047 - DNA, 25 bp, Homo sapien
tacactgagtctcctactgaatcca

SEQ ID NO: 519048 - DNA, 25 bp, Homo sapien
tccaagtcatccgaagagagggggc

SEQ ID NO: 519049 - DNA, 25 bp, Homo sapien
actgaatccaagtcatccgaagaga

SEQ ID NO: 519050 - DNA, 25 bp, Homo sapien
ttacactgagtctcctactgaatcc

SEQ ID NO: 519051 - DNA, 25 bp, Homo sapien
aagatgaagggcagtatagatttgt

SEQ ID NO: 519052 - DNA, 25 bp, Homo sapien
agatgaagggcagtatagatttgtt

SEQ ID NO: 519053 - DNA, 25 bp, Homo sapien
tgtttactcggctttcttgggtgcc

SEQ ID NO: 519054 - DNA, 25 bp, Homo sapien
tatagatttgtttactcggctttct

SEQ ID NO: 519055 - DNA, 25 bp, Homo sapien
tgggtgatgggcttggcgacttgcc

SEQ ID NO: 519056 - DNA, 25 bp, Homo sapien
gcctgagcgcggagtagagagctga

SEQ ID NO: 519057 - DNA, 25 bp, Homo sapien
gcgacttgcctgagcgcggagtaga

SEQ ID NO: 519058 - DNA, 25 bp, Homo sapien
gagctgactaccaggggttccatta

SEQ ID NO: 519059 - DNA, 25 bp, Homo sapien
ggacctgaataccaacggcggaatc

SEQ ID NO: 519060 - DNA, 25 bp, Homo sapien
taaggatggctaaggctgctcccag

SEQ ID NO: 519061 - DNA, 25 bp, Homo sapien
tgtcttaggctacatcaaaggtgtc

SEQ ID NO: 519062 - DNA, 25 bp, Homo sapien
tgcgtaaagctgacgtctcccaagc

SEQ ID NO: 519063 - DNA, 25 bp, Homo sapien
gacaatgggtccaattcaaagaaac

SEQ ID NO: 519064 - DNA, 25 bp, Homo sapien
agacaatgggtccaattcaaagaaa

SEQ ID NO: 519065 - DNA, 25 bp, Homo sapien
gagacaatgggtccaattcaaagaa

SEQ ID NO: 519066 - DNA, 25 bp, Homo sapien
ccccagagctttcccaaatccaaga

SEQ ID NO: 519067 - DNA, 25 bp, Homo sapien
tcaagtgccagcgatgctctgaaac

SEQ ID NO: 519068 - DNA, 25 bp, Homo sapien
ccagcgatgctctgaaacgtatttc

SEQ ID NO: 519069 - DNA, 25 bp, Homo sapien
gaaacgtatttcctgactggctatg

SEQ ID NO: 519070 - DNA, 25 bp, Homo sapien
tatttcctgactggctatgatgcag

SEQ ID NO: 519071 - DNA, 25 bp, Homo sapien
gctcatcttgtgcatacacagcctc

SEQ ID NO: 519072 - DNA, 25 bp, Homo sapien
aaggagaaggtagggttgaggtgct

SEQ ID NO: 519073 - DNA, 25 bp, Homo sapien
tagggttgaggtgctcatcttgtgc

SEQ ID NO: 519074 - DNA, 25 bp, Homo sapien
agggttgaggtgctcatcttgtgca

SEQ ID NO: 519075 - DNA, 25 bp, Homo sapien
gacttgctacgcctggacggtcctg

SEQ ID NO: 519076 - DNA, 25 bp, Homo sapien
gggacttgctacgcctggacggtcc

SEQ ID NO: 519077 - DNA, 25 bp, Homo sapien
tacgcctggacggtcctgggctctt

SEQ ID NO: 519078 - DNA, 25 bp, Homo sapien
tgctacgcctggacggtcctgggct

SEQ ID NO: 519079 - DNA, 25 bp, Homo sapien
gaagtggactttaccactcgacatt

SEQ ID NO: 519080 - DNA, 25 bp, Homo sapien
tggtgtaagaagtggactttaccac

SEQ ID NO: 519081 - DNA, 25 bp, Homo sapien
cgggatgatgaagctattttggtgt

SEQ ID NO: 519082 - DNA, 25 bp, Homo sapien
ctgcgggatgatgaagctattttgg

SEQ ID NO: 519083 - DNA, 25 bp, Homo sapien
tagttgtgggtctttatgatatgtg

SEQ ID NO: 519084 - DNA, 25 bp, Homo sapien
gtggtatttccctgctgcaagggca

SEQ ID NO: 519085 - DNA, 25 bp, Homo sapien
tgcttggaagaggtaaaactggtga

SEQ ID NO: 519086 - DNA, 25 bp, Homo sapien
tatgtgggagatgacagcatttgct

SEQ ID NO: 519087 - DNA, 25 bp, Homo sapien
cttcacccaggacatgaactcctga

SEQ ID NO: 519088 - DNA, 25 bp, Homo sapien
cacccaggacatgaactcctgaaat

SEQ ID NO: 519089 - DNA, 25 bp, Homo sapien
cccaggacatgaactcctgaaatgg

SEQ ID NO: 519090 - DNA, 25 bp, Homo sapien
caggacatgaactcctgaaatgggc

SEQ ID NO: 519091 - DNA, 25 bp, Homo sapien
tgttttgacatcattattcaggaaa

SEQ ID NO: 519092 - DNA, 25 bp, Homo sapien
tcttagaataatacaagtaaggcgc

SEQ ID NO: 519093 - DNA, 25 bp, Homo sapien
gagactttgcttagactgtatatag

SEQ ID NO: 519094 - DNA, 25 bp, Homo sapien
taaacgtatatatgccccaaaagga

SEQ ID NO: 519095 - DNA, 25 bp, Homo sapien
ctgtcattttgctaaagacacccgc

SEQ ID NO: 519096 - DNA, 25 bp, Homo sapien
cattttgctaaagacacccgcatcc

SEQ ID NO: 519097 - DNA, 25 bp, Homo sapien
ttttgctaaagacacccgcatccat

SEQ ID NO: 519098 - DNA, 25 bp, Homo sapien
gtcattttgctaaagacacccgcat

SEQ ID NO: 519099 - DNA, 25 bp, Homo sapien
taaacacttgtaccattgctgctcc

SEQ ID NO: 519100 - DNA, 25 bp, Homo sapien
cccacctctccagggatatttgtct

SEQ ID NO: 519101 - DNA, 25 bp, Homo sapien
attgctgctccaagcaatggcccca

SEQ ID NO: 519102 - DNA, 25 bp, Homo sapien
caacgaccttttcagagataaacac

SEQ ID NO: 519103 - DNA, 25 bp, Homo sapien
tgtgaaacggtcctggaatacagcc

SEQ ID NO: 519104 - DNA, 25 bp, Homo sapien
tttgatgatcgtctgcccaaagggc

SEQ ID NO: 519105 - DNA, 25 bp, Homo sapien
gaatacagccacgtgactttgatga

SEQ ID NO: 519106 - DNA, 25 bp, Homo sapien
cagtgtcttgtaccatgcagcttga

SEQ ID NO: 519107 - DNA, 25 bp, Homo sapien
tgaagaagcagaggcccggagagct

SEQ ID NO: 519108 - DNA, 25 bp, Homo sapien
cctcatgggaacgatgcaccagaaa

SEQ ID NO: 519109 - DNA, 25 bp, Homo sapien
ctgcctcatgggaacgatgcaccag

SEQ ID NO: 519110 - DNA, 25 bp, Homo sapien
tgaagatccaatcctggttaccttt

SEQ ID NO: 519111 - DNA, 25 bp, Homo sapien
gacttggcttctctatcagaacttt

SEQ ID NO: 519112 - DNA, 25 bp, Homo sapien
ttggcttctctatcagaactttaaa

SEQ ID NO: 519113 - DNA, 25 bp, Homo sapien
cttggcttctctatcagaactttaa

SEQ ID NO: 519114 - DNA, 25 bp, Homo sapien
acttggcttctctatcagaacttta

SEQ ID NO: 519115 - DNA, 25 bp, Homo sapien
cttgacaaggtcacactccagtttg

SEQ ID NO: 519116 - DNA, 25 bp, Homo sapien
atctgagtcactgggaacacggcca

SEQ ID NO: 519117 - DNA, 25 bp, Homo sapien
gaggagagcttgacttccaacccgg

SEQ ID NO: 519118 - DNA, 25 bp, Homo sapien
ggagcacagtccaagatgccactag

SEQ ID NO: 519119 - DNA, 25 bp, Homo sapien
cgagaagggtgacaattttgtgaag

SEQ ID NO: 519120 - DNA, 25 bp, Homo sapien
tgaagaatgcccttgaaggacagaa

SEQ ID NO: 519121 - DNA, 25 bp, Homo sapien
gtgaagaatgcccttgaaggacaga

SEQ ID NO: 519122 - DNA, 25 bp, Homo sapien
ttcctggctctgatacatttgcaaa

SEQ ID NO: 519123 - DNA, 25 bp, Homo sapien
tatagacatctactacagattggcc

SEQ ID NO: 519124 - DNA, 25 bp, Homo sapien
agattggcctgtcgtctttggaaac

SEQ ID NO: 519125 - DNA, 25 bp, Homo sapien
tctactacagattggcctgtcgtct

SEQ ID NO: 519126 - DNA, 25 bp, Homo sapien
tacgggcatcttgggtcaagactcc

SEQ ID NO: 519127 - DNA, 25 bp, Homo sapien
catcttgggtcaagactcctttgca

SEQ ID NO: 519128 - DNA, 25 bp, Homo sapien
ctgctacgggcatcttgggtcaaga

SEQ ID NO: 519129 - DNA, 25 bp, Homo sapien
cgggcatcttgggtcaagactcctt

SEQ ID NO: 519130 - DNA, 25 bp, Homo sapien
tccttctgcatctaataattcagct

SEQ ID NO: 519131 - DNA, 25 bp, Homo sapien
tctgcatctaataattcagctaata

SEQ ID NO: 519132 - DNA, 25 bp, Homo sapien
caggctatagtcctcagcatctgat

SEQ ID NO: 519133 - DNA, 25 bp, Homo sapien
cagcatctgatgattgacagatgga

SEQ ID NO: 519134 - DNA, 25 bp, Homo sapien
catcactgtctaccagaaccatcat

SEQ ID NO: 519135 - DNA, 25 bp, Homo sapien
accatcattgctaaagccattaaag

SEQ ID NO: 519136 - DNA, 25 bp, Homo sapien
ctggttgccatttgtcaccatcact

SEQ ID NO: 519137 - DNA, 25 bp, Homo sapien
cattgctaaagccattaaagtagat

SEQ ID NO: 519138 - DNA, 25 bp, Homo sapien
tactggatggcctgttgttggaggt

SEQ ID NO: 519139 - DNA, 25 bp, Homo sapien
gaggcaaataacagactggtattta

SEQ ID NO: 519140 - DNA, 25 bp, Homo sapien
gtttgactttcacccgagagcctct

SEQ ID NO: 519141 - DNA, 25 bp, Homo sapien
gtaagtgcttgatcagtgtcctctg

SEQ ID NO: 519142 - DNA, 25 bp, Homo sapien
ttttcctgttgtacttctcagaaag

SEQ ID NO: 519143 - DNA, 25 bp, Homo sapien
tcctgttgtacttctcagaaagtct

SEQ ID NO: 519144 - DNA, 25 bp, Homo sapien
ctgttgtacttctcagaaagtctac

SEQ ID NO: 519145 - DNA, 25 bp, Homo sapien
tctattatggaatttctggcatttt

SEQ ID NO: 519146 - DNA, 25 bp, Homo sapien
agagcgcattggctgttgcggaggg

SEQ ID NO: 519147 - DNA, 25 bp, Homo sapien
cacaggagtagctgcggcatcctgg

SEQ ID NO: 519148 - DNA, 25 bp, Homo sapien
ctgctggtcatagcaggtgcacagg

SEQ ID NO: 519149 - DNA, 25 bp, Homo sapien
tcctgggtggagagcgcattggctg

SEQ ID NO: 519150 - DNA, 25 bp, Homo sapien
tcatcctggtaacggaacttctccg

SEQ ID NO: 519151 - DNA, 25 bp, Homo sapien
gaacttctccggtccacatgcaata

SEQ ID NO: 519152 - DNA, 25 bp, Homo sapien
ctagcaagaaatcatcctggtaacg

SEQ ID NO: 519153 - DNA, 25 bp, Homo sapien
caagaaatcatcctggtaacggaac

SEQ ID NO: 519154 - DNA, 25 bp, Homo sapien
tataggtcaaagtttcaattcccag

SEQ ID NO: 519155 - DNA, 25 bp, Homo sapien
caaaaaaggcatagttattcaacgc

SEQ ID NO: 519156 - DNA, 25 bp, Homo sapien
gaaacatttgtccacgccaatcata

SEQ ID NO: 519157 - DNA, 25 bp, Homo sapien
tgagatctaagcatgaactaccaca

SEQ ID NO: 519158 - DNA, 25 bp, Homo sapien
tgtatagctcaaacaaccaactgaa

SEQ ID NO: 519159 - DNA, 25 bp, Homo sapien
tgttatcaggataccattttcttga

SEQ ID NO: 519160 - DNA, 25 bp, Homo sapien
caagtgactgtgctatgtcagggta

SEQ ID NO: 519161 - DNA, 25 bp, Homo sapien
gctctttagcactgtatagctcaaa

SEQ ID NO: 519162 - DNA, 25 bp, Homo sapien
gacatcactaataacccacttgcct

SEQ ID NO: 519163 - DNA, 25 bp, Homo sapien
aataacccacttgcctgagtcagca

SEQ ID NO: 519164 - DNA, 25 bp, Homo sapien
cagcagaggagcttccacgaagaca

SEQ ID NO: 519165 - DNA, 25 bp, Homo sapien
acagcagaggagcttccacgaagac

SEQ ID NO: 519166 - DNA, 25 bp, Homo sapien
tgatcctgcagacaggttaaggatg

SEQ ID NO: 519167 - DNA, 25 bp, Homo sapien
gatcctgcagacaggttaaggatgg

SEQ ID NO: 519168 - DNA, 25 bp, Homo sapien
tcctgcagacaggttaaggatggag

SEQ ID NO: 519169 - DNA, 25 bp, Homo sapien
ctgatcctgcagacaggttaaggat

SEQ ID NO: 519170 - DNA, 25 bp, Homo sapien
tctgtaagttgaataagtttatgcc

SEQ ID NO: 519171 - DNA, 25 bp, Homo sapien
taagtttatgccctggtacctcatt

SEQ ID NO: 519172 - DNA, 25 bp, Homo sapien
gacagagaaacccccctttctgaga

SEQ ID NO: 519173 - DNA, 25 bp, Homo sapien
gaacattctgtaagttgaataagtt

SEQ ID NO: 519174 - DNA, 25 bp, Homo sapien
gcaccactgagctgcctagatccag

SEQ ID NO: 519175 - DNA, 25 bp, Homo sapien
taggtcaggtcttacaccaatccat

SEQ ID NO: 519176 - DNA, 25 bp, Homo sapien
tgaccaaagactaggtcaggtctta

SEQ ID NO: 519177 - DNA, 25 bp, Homo sapien
ggtcttacaccaatccatccatgct

SEQ ID NO: 519178 - DNA, 25 bp, Homo sapien
tgtgccaactcaacagggtagggag

SEQ ID NO: 519179 - DNA, 25 bp, Homo sapien
cctgatgtctaatgacatctgggcc

SEQ ID NO: 519180 - DNA, 25 bp, Homo sapien
ggatctcctaccagtggaaacctga

SEQ ID NO: 519181 - DNA, 25 bp, Homo sapien
tagggagccctatccactctgaaag

SEQ ID NO: 519182 - DNA, 25 bp, Homo sapien
gggatggagatttcccatagacctc

SEQ ID NO: 519183 - DNA, 25 bp, Homo sapien
aggaagggatggagatttcccatag

SEQ ID NO: 519184 - DNA, 25 bp, Homo sapien
cagaatccatggtttaccttagggt

SEQ ID NO: 519185 - DNA, 25 bp, Homo sapien
ttgccacatcactaccacccagaat

SEQ ID NO: 519186 - DNA, 25 bp, Homo sapien
ggtttcttttgtcgctcactcgcag

SEQ ID NO: 519187 - DNA, 25 bp, Homo sapien
ttttcacaatctgcctgacattagc

SEQ ID NO: 519188 - DNA, 25 bp, Homo sapien
ctgacattagctccttgagagggtt

SEQ ID NO: 519189 - DNA, 25 bp, Homo sapien
gctttctgcatctctgagtgaatgg

SEQ ID NO: 519190 - DNA, 25 bp, Homo sapien
aggttggacaatacattttatgatc

SEQ ID NO: 519191 - DNA, 25 bp, Homo sapien
cttggaaaatgtcctaggttggaca

SEQ ID NO: 519192 - DNA, 25 bp, Homo sapien
tgttcaatttgcctaggaaagtccc

SEQ ID NO: 519193 - DNA, 25 bp, Homo sapien
actgtcctgaccagtgtagcatttg

SEQ ID NO: 519194 - DNA, 25 bp, Homo sapien
cagcgtttcagactctttcaagtac

SEQ ID NO: 519195 - DNA, 25 bp, Homo sapien
gcaaaacatccttttgagatactgg

SEQ ID NO: 519196 - DNA, 25 bp, Homo sapien
gaaagtgaccagttaacatctctag

SEQ ID NO: 519197 - DNA, 25 bp, Homo sapien
catctctagtccttccagcgtttca

SEQ ID NO: 519198 - DNA, 25 bp, Homo sapien
tgtggtcagcagtttcccatgttct

SEQ ID NO: 519199 - DNA, 25 bp, Homo sapien
gcttctcatggattaactactggca

SEQ ID NO: 519200 - DNA, 25 bp, Homo sapien
gactaaccagaatgcataggtcctg

SEQ ID NO: 519201 - DNA, 25 bp, Homo sapien
gattgctgatccagaccattgttgg

SEQ ID NO: 519202 - DNA, 25 bp, Homo sapien
gcctttatttccactatggccagga

SEQ ID NO: 519203 - DNA, 25 bp, Homo sapien
tttcccaagcacatgaggtcagttc

SEQ ID NO: 519204 - DNA, 25 bp, Homo sapien
taagaaaggacttccaacactgacc

SEQ ID NO: 519205 - DNA, 25 bp, Homo sapien
gccatctgtggcgagaagattcagt

SEQ ID NO: 519206 - DNA, 25 bp, Homo sapien
tgtggtaactttgcatctaattggc

SEQ ID NO: 519207 - DNA, 25 bp, Homo sapien
ctaagtatgctaccaaaatgagatg

SEQ ID NO: 519208 - DNA, 25 bp, Homo sapien
cgtattcccaagatccaagcctatg

SEQ ID NO: 519209 - DNA, 25 bp, Homo sapien
ttatagacccaattgcttgtttcag

SEQ ID NO: 519210 - DNA, 25 bp, Homo sapien
taacacactgagtctggatagtact

SEQ ID NO: 519211 - DNA, 25 bp, Homo sapien
gttatcgatatagggcacagaacaa

SEQ ID NO: 519212 - DNA, 25 bp, Homo sapien
ggtcccagggaatctccccaactga

SEQ ID NO: 519213 - DNA, 25 bp, Homo sapien
gatagtacttgaccattagggaaca

SEQ ID NO: 519214 - DNA, 25 bp, Homo sapien
taaaggatataggtcaaatggactc

SEQ ID NO: 519215 - DNA, 25 bp, Homo sapien
catgccattcggtttggctcttaga

SEQ ID NO: 519216 - DNA, 25 bp, Homo sapien
ggacactctctctgcaaaggttctt

SEQ ID NO: 519217 - DNA, 25 bp, Homo sapien
ccatttttgcaatgatcccttgagc

SEQ ID NO: 519218 - DNA, 25 bp, Homo sapien
ctttgtctgctattgtgtctctccc

SEQ ID NO: 519219 - DNA, 25 bp, Homo sapien
cttaggtaggcggaaaggtcacacg

SEQ ID NO: 519220 - DNA, 25 bp, Homo sapien
ggtcacacgtgcagcatattactag

SEQ ID NO: 519221 - DNA, 25 bp, Homo sapien
aaatcacatcgctgcccatggctgc

SEQ ID NO: 519222 - DNA, 25 bp, Homo sapien
gaggttccctcttgatatagtctgg

SEQ ID NO: 519223 - DNA, 25 bp, Homo sapien
gtatcctttgttaggaaaccatcag

SEQ ID NO: 519224 - DNA, 25 bp, Homo sapien
gaaaccatcagagaaactcttccaa

SEQ ID NO: 519225 - DNA, 25 bp, Homo sapien
cacatgcaatatggttgttaaaagg

SEQ ID NO: 519226 - DNA, 25 bp, Homo sapien
tattcttgagcattggtaagctggg

SEQ ID NO: 519227 - DNA, 25 bp, Homo sapien
gtgtgcaagtttacgactgccatta

SEQ ID NO: 519228 - DNA, 25 bp, Homo sapien
tcaagatcctgcatagtgtgcaagt

SEQ ID NO: 519229 - DNA, 25 bp, Homo sapien
aaaagcctcaggactccggattctg

SEQ ID NO: 519230 - DNA, 25 bp, Homo sapien
tgatagccatctagaaagctatgtt

SEQ ID NO: 519231 - DNA, 25 bp, Homo sapien
gaaagctatgtttaccgattaataa

SEQ ID NO: 519232 - DNA, 25 bp, Homo sapien
gaacttcaatactttccttattata

SEQ ID NO: 519233 - DNA, 25 bp, Homo sapien
ttctttggactaaaagtacaatgcc

SEQ ID NO: 519234 - DNA, 25 bp, Homo sapien
aaattctccatgctacctgtcacac

SEQ ID NO: 519235 - DNA, 25 bp, Homo sapien
tccatgctacctgtcacaccacatc

SEQ ID NO: 519236 - DNA, 25 bp, Homo sapien
ccatgctacctgtcacaccacatcc

SEQ ID NO: 519237 - DNA, 25 bp, Homo sapien
ttctccatgctacctgtcacaccac

SEQ ID NO: 519238 - DNA, 25 bp, Homo sapien
aatgacacgtatttccttggtgagc

SEQ ID NO: 519239 - DNA, 25 bp, Homo sapien
tggattctgggatatctcacctcaa

SEQ ID NO: 519240 - DNA, 25 bp, Homo sapien
tgaattccagcgttgtagccaactg

SEQ ID NO: 519241 - DNA, 25 bp, Homo sapien
tccagaacagcctacgagaagcaaa

SEQ ID NO: 519242 - DNA, 25 bp, Homo sapien
gcaagtggatggtgaaacaccacca

SEQ ID NO: 519243 - DNA, 25 bp, Homo sapien
atctgagcactggagcaagtggatg

SEQ ID NO: 519244 - DNA, 25 bp, Homo sapien
gggatgagctatctccaaatgaaga

SEQ ID NO: 519245 - DNA, 25 bp, Homo sapien
ttacaaattgtagatactgaaacat

SEQ ID NO: 519246 - DNA, 25 bp, Homo sapien
caaggataagactaagacccctggg

SEQ ID NO: 519247 - DNA, 25 bp, Homo sapien
cttttgagaagtgcccggacagctg

SEQ ID NO: 519248 - DNA, 25 bp, Homo sapien
tgtgagaaatttgcagcctagtggc

SEQ ID NO: 519249 - DNA, 25 bp, Homo sapien
tacacaggtggactgcaaagtacac

SEQ ID NO: 519250 - DNA, 25 bp, Homo sapien
gctgttagttgttatgcttattata

SEQ ID NO: 519251 - DNA, 25 bp, Homo sapien
cacaacggcaaatagctgaatagct

SEQ ID NO: 519252 - DNA, 25 bp, Homo sapien
tagtacttaccttctagagttggtg

SEQ ID NO: 519253 - DNA, 25 bp, Homo sapien
catgcatatgaagtgcttaacacag

SEQ ID NO: 519254 - DNA, 25 bp, Homo sapien
taccaagcacctggtcaaagcaaag

SEQ ID NO: 519255 - DNA, 25 bp, Homo sapien
aagtaccatgctagagacccctgag

SEQ ID NO: 519256 - DNA, 25 bp, Homo sapien
cagcaccgtgtgattaaagtaccat

SEQ ID NO: 519257 - DNA, 25 bp, Homo sapien
gaggacctcgatattcccaaagtca

SEQ ID NO: 519258 - DNA, 25 bp, Homo sapien
tgaggaaggaccacatgtctatgtc

SEQ ID NO: 519259 - DNA, 25 bp, Homo sapien
acacaggtggcagaatgtatcctct

SEQ ID NO: 519260 - DNA, 25 bp, Homo sapien
gaaagcaaacccatgcccagttgaa

SEQ ID NO: 519261 - DNA, 25 bp, Homo sapien
gttccagtaaagaatttccagcaag

SEQ ID NO: 519262 - DNA, 25 bp, Homo sapien
gatctcgactcactagcagtggtag

SEQ ID NO: 519263 - DNA, 25 bp, Homo sapien
tatcaacagctactgggatgtcctc

SEQ ID NO: 519264 - DNA, 25 bp, Homo sapien
tcgaaatcagtttatggctacccat

SEQ ID NO: 519265 - DNA, 25 bp, Homo sapien
tctaaggacggattcaagaaccaca

SEQ ID NO: 519266 - DNA, 25 bp, Homo sapien
actgatcctgctatgaagagaacat

SEQ ID NO: 519267 - DNA, 25 bp, Homo sapien
tcctgctatgaagagaacatgccaa

SEQ ID NO: 519268 - DNA, 25 bp, Homo sapien
ttcactgatcctgctatgaagagaa

SEQ ID NO: 519269 - DNA, 25 bp, Homo sapien
cttttcactgatcctgctatgaaga

SEQ ID NO: 519270 - DNA, 25 bp, Homo sapien
ttcttcaggctataagatctatgag

SEQ ID NO: 519271 - DNA, 25 bp, Homo sapien
tcaggctataagatctatgagaaaa

SEQ ID NO: 519272 - DNA, 25 bp, Homo sapien
cttcaggctataagatctatgagaa

SEQ ID NO: 519273 - DNA, 25 bp, Homo sapien
tcattcttcaggctataagatctat

SEQ ID NO: 519274 - DNA, 25 bp, Homo sapien
cactcccgagtccagcttgatggca

SEQ ID NO: 519275 - DNA, 25 bp, Homo sapien
tcttgacgttcaccgaccagttggg

SEQ ID NO: 519276 - DNA, 25 bp, Homo sapien
cagcttgggccgaatgaaatcctta

SEQ ID NO: 519277 - DNA, 25 bp, Homo sapien
gtttcccatccaacgtgtacaggcg

SEQ ID NO: 519278 - DNA, 25 bp, Homo sapien
tgaggacaaaacatgacttctgtgc

SEQ ID NO: 519279 - DNA, 25 bp, Homo sapien
caaatgaggcctgtagttcaactac

SEQ ID NO: 519280 - DNA, 25 bp, Homo sapien
aagaaccgtcatagcttcaaggaga

SEQ ID NO: 519281 - DNA, 25 bp, Homo sapien
gagaagcagacacaacaactaaatg

SEQ ID NO: 519282 - DNA, 25 bp, Homo sapien
gagatggcatacacaatccctttga

SEQ ID NO: 519283 - DNA, 25 bp, Homo sapien
ggcaaattcacgttatccgacagag

SEQ ID NO: 519284 - DNA, 25 bp, Homo sapien
acagagttcgggtcaaatcagccag

SEQ ID NO: 519285 - DNA, 25 bp, Homo sapien
tcttctcggagctgagcgtctgcag

SEQ ID NO: 519286 - DNA, 25 bp, Homo sapien
cttgctgaggggttggttgataaag

SEQ ID NO: 519287 - DNA, 25 bp, Homo sapien
ggtttgtggagccttgcaggggaat

SEQ ID NO: 519288 - DNA, 25 bp, Homo sapien
taaaggtttgtggagccttgcaggg

SEQ ID NO: 519289 - DNA, 25 bp, Homo sapien
tgataaaggtttgtggagccttgca

SEQ ID NO: 519290 - DNA, 25 bp, Homo sapien
tgatcattctcccaacactaggagt

SEQ ID NO: 519291 - DNA, 25 bp, Homo sapien
gagccggtttgaatgaaacctttca

SEQ ID NO: 519292 - DNA, 25 bp, Homo sapien
tgtgcgtgcgctcccactaggagga

SEQ ID NO: 519293 - DNA, 25 bp, Homo sapien
aaaagcagcctcttttgtggggcat

SEQ ID NO: 519294 - DNA, 25 bp, Homo sapien
gaccaagcatctccttgccaaatcc

SEQ ID NO: 519295 - DNA, 25 bp, Homo sapien
gcaattccgcgcaaacctggttttc

SEQ ID NO: 519296 - DNA, 25 bp, Homo sapien
aggcagcctcgctgtccctgaagga

SEQ ID NO: 519297 - DNA, 25 bp, Homo sapien
ggaacttgagaccctgcaaacgtac

SEQ ID NO: 519298 - DNA, 25 bp, Homo sapien
cactgcaggtactaatttgaacatg

SEQ ID NO: 519299 - DNA, 25 bp, Homo sapien
ctctccgcaagcttttagcactgca

SEQ ID NO: 519300 - DNA, 25 bp, Homo sapien
aagcacacacacaataagaggccgg

SEQ ID NO: 519301 - DNA, 25 bp, Homo sapien
gcccgggcacacggaaaagcacaca

SEQ ID NO: 519302 - DNA, 25 bp, Homo sapien
ttctgacaatgacaagcacctctcc

SEQ ID NO: 519303 - DNA, 25 bp, Homo sapien
gctccgcagccagttctgacaatga

SEQ ID NO: 519304 - DNA, 25 bp, Homo sapien
cggtccgcggagagacgccgccggg

SEQ ID NO: 519305 - DNA, 25 bp, Homo sapien
cgccgggggtctttgtggccgcgct

SEQ ID NO: 519306 - DNA, 25 bp, Homo sapien
tcctggtgctgtcctcgccgggctg

SEQ ID NO: 519307 - DNA, 25 bp, Homo sapien
ccgggggtctttgtggccgcgctgg

SEQ ID NO: 519308 - DNA, 25 bp, Homo sapien
ctagtgcagggatgtgcctcggccc

SEQ ID NO: 519309 - DNA, 25 bp, Homo sapien
tcctcattgaaatgcggcgcttcgc

SEQ ID NO: 519310 - DNA, 25 bp, Homo sapien
gtgcctcggcccgtcctcattgaaa

SEQ ID NO: 519311 - DNA, 25 bp, Homo sapien
tgaaatgcggcgcttcgcacagcct

SEQ ID NO: 519312 - DNA, 25 bp, Homo sapien
ctcctcctccgcgtgcgcgccccgt

SEQ ID NO: 519313 - DNA, 25 bp, Homo sapien
tcctccgcgtgcgcgccccgtcgcc

SEQ ID NO: 519314 - DNA, 25 bp, Homo sapien
ctccgcgtgcgcgccccgtcgcccc

SEQ ID NO: 519315 - DNA, 25 bp, Homo sapien
cctcctccgcgtgcgcgccccgtcg

SEQ ID NO: 519316 - DNA, 25 bp, Homo sapien
taaacaatatgcttaatcatgtaga

SEQ ID NO: 519317 - DNA, 25 bp, Homo sapien
tatgcttaatcatgtagatgcgagt

SEQ ID NO: 519318 - DNA, 25 bp, Homo sapien
cttaatcatgtagatgcgagtagaa

SEQ ID NO: 519319 - DNA, 25 bp, Homo sapien
caatatgcttaatcatgtagatgcg

SEQ ID NO: 519320 - DNA, 25 bp, Homo sapien
ttttcttttctcgtcaatacaattg

SEQ ID NO: 519321 - DNA, 25 bp, Homo sapien
gggagtctttcatgactgtcttaga

SEQ ID NO: 519322 - DNA, 25 bp, Homo sapien
ctttctgtaattaagggtctctgga

SEQ ID NO: 519323 - DNA, 25 bp, Homo sapien
gactccaagtcattaggtctattag

SEQ ID NO: 519324 - DNA, 25 bp, Homo sapien
ctgttctctccgtagccttgtatga

SEQ ID NO: 519325 - DNA, 25 bp, Homo sapien
tctctccgtagccttgtatgatcac

SEQ ID NO: 519326 - DNA, 25 bp, Homo sapien
tccgtagccttgtatgatcacattt

SEQ ID NO: 519327 - DNA, 25 bp, Homo sapien
tctccgtagccttgtatgatcacat

SEQ ID NO: 519328 - DNA, 25 bp, Homo sapien
aacaaaacaaaaatggattacaatg

SEQ ID NO: 519329 - DNA, 25 bp, Homo sapien
acaaaacaaaaatggattacaatgc

SEQ ID NO: 519330 - DNA, 25 bp, Homo sapien
cagggtgaaaactgagtattttatt

SEQ ID NO: 519331 - DNA, 25 bp, Homo sapien
caaaaaacctgctagtctgtaactt

SEQ ID NO: 519332 - DNA, 25 bp, Homo sapien
ctaatacccatagggaggaagagat

SEQ ID NO: 519333 - DNA, 25 bp, Homo sapien
tattagccatcgtttcactcaaggg

SEQ ID NO: 519334 - DNA, 25 bp, Homo sapien
acagtgtgtggccagctttttcgct

SEQ ID NO: 519335 - DNA, 25 bp, Homo sapien
tactcagtgacacaaggtatcaaca

SEQ ID NO: 519336 - DNA, 25 bp, Homo sapien
ggaaaagaccacctagaaatgagtg

SEQ ID NO: 519337 - DNA, 25 bp, Homo sapien
tagattgtcaaactgcgcccagtag

SEQ ID NO: 519338 - DNA, 25 bp, Homo sapien
aaaacaatctgaaatgatttgcaaa

SEQ ID NO: 519339 - DNA, 25 bp, Homo sapien
taaatcctcaggtgaataagcttac

SEQ ID NO: 519340 - DNA, 25 bp, Homo sapien
cattaattgaatcctcacccactct

SEQ ID NO: 519341 - DNA, 25 bp, Homo sapien
tgcaaaactatgttaaatcctcagg

SEQ ID NO: 519342 - DNA, 25 bp, Homo sapien
tagttacggggccagttgaggatga

SEQ ID NO: 519343 - DNA, 25 bp, Homo sapien
ttgaggatgagggtgctaaaatggg

SEQ ID NO: 519344 - DNA, 25 bp, Homo sapien
ggatgagggtgctaaaatgggatgt

SEQ ID NO: 519345 - DNA, 25 bp, Homo sapien
gggtgctaaaatgggatgtgccact

SEQ ID NO: 519346 - DNA, 25 bp, Homo sapien
tcactggttctggatatcgagacac

SEQ ID NO: 519347 - DNA, 25 bp, Homo sapien
actggttctggatatcgagacacca

SEQ ID NO: 519348 - DNA, 25 bp, Homo sapien
ggttctggatatcgagacaccagcc

SEQ ID NO: 519349 - DNA, 25 bp, Homo sapien
tggttctggatatcgagacaccagc

SEQ ID NO: 519350 - DNA, 25 bp, Homo sapien
aacccagaagtgcagtgccgaggga

SEQ ID NO: 519351 - DNA, 25 bp, Homo sapien
gatgtgtagtgcacgtctggcccaa

SEQ ID NO: 519352 - DNA, 25 bp, Homo sapien
gaattcagagacagcgctgcactgg

SEQ ID NO: 519353 - DNA, 25 bp, Homo sapien
tacagcagttgcatcgtaggaaggg

SEQ ID NO: 519354 - DNA, 25 bp, Homo sapien
tcacagcttcatccaaggagctctc

SEQ ID NO: 519355 - DNA, 25 bp, Homo sapien
gagtggagcacccattccagcacgt

SEQ ID NO: 519356 - DNA, 25 bp, Homo sapien
cacccattccagcacgtattagtca

SEQ ID NO: 519357 - DNA, 25 bp, Homo sapien
ggagccctctctcaggggagtaagt

SEQ ID NO: 519358 - DNA, 25 bp, Homo sapien
cgctgtgccatgacagtgcctggga

SEQ ID NO: 519359 - DNA, 25 bp, Homo sapien
ctgtgccatgacagtgcctgggaga

SEQ ID NO: 519360 - DNA, 25 bp, Homo sapien
agtgcctgggagagacagctcaatg

SEQ ID NO: 519361 - DNA, 25 bp, Homo sapien
agacagctcaatgggtgtttgttgt

SEQ ID NO: 519362 - DNA, 25 bp, Homo sapien
aaacctcatgttgctctgaagtgct

SEQ ID NO: 519363 - DNA, 25 bp, Homo sapien
acctcatgttgctctgaagtgcttc

SEQ ID NO: 519364 - DNA, 25 bp, Homo sapien
aaaacctcatgttgctctgaagtgc

SEQ ID NO: 519365 - DNA, 25 bp, Homo sapien
ctcatgttgctctgaagtgcttctg

SEQ ID NO: 519366 - DNA, 25 bp, Homo sapien
ggccataacggctggagagattttc

SEQ ID NO: 519367 - DNA, 25 bp, Homo sapien
gaactgaagccgcatcattctttct

SEQ ID NO: 519368 - DNA, 25 bp, Homo sapien
cgcagctgctcacagcaatatttga

SEQ ID NO: 519369 - DNA, 25 bp, Homo sapien
tacggcaagagagtacgcagctgct

SEQ ID NO: 519370 - DNA, 25 bp, Homo sapien
tcaaatattctacatcagtggtgtt

SEQ ID NO: 519371 - DNA, 25 bp, Homo sapien
tctgcgggggtgtctcgggaactat

SEQ ID NO: 519372 - DNA, 25 bp, Homo sapien
tattctacatcagtggtgttctcac

SEQ ID NO: 519373 - DNA, 25 bp, Homo sapien
aatattctacatcagtggtgttctc

SEQ ID NO: 519374 - DNA, 25 bp, Homo sapien
gaaaatccattatcacaaacccaga

SEQ ID NO: 519375 - DNA, 25 bp, Homo sapien
tgatgaacacttgggctgttaccag

SEQ ID NO: 519376 - DNA, 25 bp, Homo sapien
tcttaccacaccaagggagtaccat

SEQ ID NO: 519377 - DNA, 25 bp, Homo sapien
tctaggaatagaaatgatgggccat

SEQ ID NO: 519378 - DNA, 25 bp, Homo sapien
cactctagggcttagcttagcgcca

SEQ ID NO: 519379 - DNA, 25 bp, Homo sapien
atttatttgacaggcctagagcagc

SEQ ID NO: 519380 - DNA, 25 bp, Homo sapien
tttctccaacaaagagtcagggtcc

SEQ ID NO: 519381 - DNA, 25 bp, Homo sapien
cacatgtgtggatgacgctgcgctg

SEQ ID NO: 519382 - DNA, 25 bp, Homo sapien
tcaccagaaacagaagctgctatgc

SEQ ID NO: 519383 - DNA, 25 bp, Homo sapien
cagaagctgctatgcttcctgtaca

SEQ ID NO: 519384 - DNA, 25 bp, Homo sapien
accagaaacagaagctgctatgctt

SEQ ID NO: 519385 - DNA, 25 bp, Homo sapien
gaagctgctatgcttcctgtacagc

SEQ ID NO: 519386 - DNA, 25 bp, Homo sapien
tatagaacattcatcaagggagaac

SEQ ID NO: 519387 - DNA, 25 bp, Homo sapien
caacgacatgctatttacaagggac

SEQ ID NO: 519388 - DNA, 25 bp, Homo sapien
ggagaacatgctttgggccataaaa

SEQ ID NO: 519389 - DNA, 25 bp, Homo sapien
cttaggataagtgggtcaattcagc

SEQ ID NO: 519390 - DNA, 25 bp, Homo sapien
catttaattcaagcccattgccatt

SEQ ID NO: 519391 - DNA, 25 bp, Homo sapien
agcatttaattcaagcccattgcca

SEQ ID NO: 519392 - DNA, 25 bp, Homo sapien
aagcccattgccattccttaaagat

SEQ ID NO: 519393 - DNA, 25 bp, Homo sapien
taattcaagcccattgccattcctt

SEQ ID NO: 519394 - DNA, 25 bp, Homo sapien
ggcccagttgcgttttcagtcttaa

SEQ ID NO: 519395 - DNA, 25 bp, Homo sapien
ggaaaatatcccaggtgttcgctgt

SEQ ID NO: 519396 - DNA, 25 bp, Homo sapien
ccaggtgttcgctgtaggacctctg

SEQ ID NO: 519397 - DNA, 25 bp, Homo sapien
ttcaggcccagttgcgttttcagtc

SEQ ID NO: 519398 - DNA, 25 bp, Homo sapien
tttgagggacatgttgtccagtatt

SEQ ID NO: 519399 - DNA, 25 bp, Homo sapien
cagtggttcagttaaagcaatatcc

SEQ ID NO: 519400 - DNA, 25 bp, Homo sapien
agtggttcagttaaagcaatatcca

SEQ ID NO: 519401 - DNA, 25 bp, Homo sapien
aaaaacaaacagtgaatgtgtattt

SEQ ID NO: 519402 - DNA, 25 bp, Homo sapien
aacaaacagtgaatgtgtatttttc

SEQ ID NO: 519403 - DNA, 25 bp, Homo sapien
tcagggattataaaaacaaacagtg

SEQ ID NO: 519404 - DNA, 25 bp, Homo sapien
caaacagtgaatgtgtatttttctt

SEQ ID NO: 519405 - DNA, 25 bp, Homo sapien
tcctccaccaattcgtaggacaaag

SEQ ID NO: 519406 - DNA, 25 bp, Homo sapien
taaagctacttagatgttttgctgt

SEQ ID NO: 519407 - DNA, 25 bp, Homo sapien
ttcagaggagtaggtcatgtaaact

SEQ ID NO: 519408 - DNA, 25 bp, Homo sapien
tgtcgaatattcagaggagtaggtc

SEQ ID NO: 519409 - DNA, 25 bp, Homo sapien
gaagaaggcaccttcaagagaacca

SEQ ID NO: 519410 - DNA, 25 bp, Homo sapien
aatcatccaaaagcgctgctgcctc

SEQ ID NO: 519411 - DNA, 25 bp, Homo sapien
caagagaaccatgttgaatatgcaa

SEQ ID NO: 519412 - DNA, 25 bp, Homo sapien
ccagctcctcggcacttagtgaaga

SEQ ID NO: 519413 - DNA, 25 bp, Homo sapien
cagtgacatctccaactaataagat

SEQ ID NO: 519414 - DNA, 25 bp, Homo sapien
gcaaatagtttctgtacagtatcag

SEQ ID NO: 519415 - DNA, 25 bp, Homo sapien
tctccaactaataagatgtctattt

SEQ ID NO: 519416 - DNA, 25 bp, Homo sapien
tgtacagtatcagccaggtagccca

SEQ ID NO: 519417 - DNA, 25 bp, Homo sapien
gttgacaatgtaatatgaacacagg

SEQ ID NO: 519418 - DNA, 25 bp, Homo sapien
gaacacaggcgataaaaaagatcta

SEQ ID NO: 519419 - DNA, 25 bp, Homo sapien
gccttttagtacatctaagattttc

SEQ ID NO: 519420 - DNA, 25 bp, Homo sapien
ggaaaactgccttttagtacatcta

SEQ ID NO: 519421 - DNA, 25 bp, Homo sapien
tttctgtttgaattgcttactacac

SEQ ID NO: 519422 - DNA, 25 bp, Homo sapien
tctgaaccagtgttaggcttcgttt

SEQ ID NO: 519423 - DNA, 25 bp, Homo sapien
gtaatctgaaccagtgttaggcttc

SEQ ID NO: 519424 - DNA, 25 bp, Homo sapien
ccagtgttaggcttcgtttgatgaa

SEQ ID NO: 519425 - DNA, 25 bp, Homo sapien
taagccctattaacaccttggtaca

SEQ ID NO: 519426 - DNA, 25 bp, Homo sapien
taacatgtattcactgggaaacact

SEQ ID NO: 519427 - DNA, 25 bp, Homo sapien
aagtgtaattccaccactcagggta

SEQ ID NO: 519428 - DNA, 25 bp, Homo sapien
gatcacagtaacatgcagggcactc

SEQ ID NO: 519429 - DNA, 25 bp, Homo sapien
gaggccagcgggctttttgatttcc

SEQ ID NO: 519430 - DNA, 25 bp, Homo sapien
ggctttggttccacacaaagttgcc

SEQ ID NO: 519431 - DNA, 25 bp, Homo sapien
actttgggatgccacgccagtgccc

SEQ ID NO: 519432 - DNA, 25 bp, Homo sapien
ggcaaatgcgtgcagagcaggtccc

SEQ ID NO: 519433 - DNA, 25 bp, Homo sapien
gctcctggcagataattgaggaagc

SEQ ID NO: 519434 - DNA, 25 bp, Homo sapien
cagtgctcctggcagataattgagg

SEQ ID NO: 519435 - DNA, 25 bp, Homo sapien
ggcagtgctcctggcagataattga

SEQ ID NO: 519436 - DNA, 25 bp, Homo sapien
tggcccgagatctggcagtgctcct

SEQ ID NO: 519437 - DNA, 25 bp, Homo sapien
ccgctgcgcacgtgctgggtcctgg

SEQ ID NO: 519438 - DNA, 25 bp, Homo sapien
gccgctgcgcacgtgctgggtcctg

SEQ ID NO: 519439 - DNA, 25 bp, Homo sapien
ggccgctgcgcacgtgctgggtcct

SEQ ID NO: 519440 - DNA, 25 bp, Homo sapien
cgctgcgcacgtgctgggtcctggg

SEQ ID NO: 519441 - DNA, 25 bp, Homo sapien
tggccctgtcgccagttctggcgcg

SEQ ID NO: 519442 - DNA, 25 bp, Homo sapien
gggcccttaggagaccgcgtcacta

SEQ ID NO: 519443 - DNA, 25 bp, Homo sapien
ctctgaggggtcaacgcggaacccg

SEQ ID NO: 519444 - DNA, 25 bp, Homo sapien
gtcactagctgactgcgcactccaa

SEQ ID NO: 519445 - DNA, 25 bp, Homo sapien
tgtggtggttattgtggatgactgc

SEQ ID NO: 519446 - DNA, 25 bp, Homo sapien
gatttttcactgctgtaagtgtggt

SEQ ID NO: 519447 - DNA, 25 bp, Homo sapien
cgcggaggatccttcctcggatgtg

SEQ ID NO: 519448 - DNA, 25 bp, Homo sapien
tgtgtcttgactactgtgccatgat

SEQ ID NO: 519449 - DNA, 25 bp, Homo sapien
gagcatataacacagaggagctctc

SEQ ID NO: 519450 - DNA, 25 bp, Homo sapien
atataacacagaggagctctccggg

SEQ ID NO: 519451 - DNA, 25 bp, Homo sapien
gcatataacacagaggagctctccg

SEQ ID NO: 519452 - DNA, 25 bp, Homo sapien
tagagcatataacacagaggagctc

SEQ ID NO: 519453 - DNA, 25 bp, Homo sapien
gtccgatttagatcccgggggcatg

SEQ ID NO: 519454 - DNA, 25 bp, Homo sapien
tgtcctgggggtccgatttagatcc

SEQ ID NO: 519455 - DNA, 25 bp, Homo sapien
tagatcccgggggcatgcaaaaata

SEQ ID NO: 519456 - DNA, 25 bp, Homo sapien
tgtgtcctgggggtccgatttagat

SEQ ID NO: 519457 - DNA, 25 bp, Homo sapien
ttcgtcctgaatgcgcaagcaccag

SEQ ID NO: 519458 - DNA, 25 bp, Homo sapien
tatctgtgcgggaagtggtttgctc

SEQ ID NO: 519459 - DNA, 25 bp, Homo sapien
tgaggcagctttgagcatttcgtcc

SEQ ID NO: 519460 - DNA, 25 bp, Homo sapien
gaggtgaagtccttcccaggcattg

SEQ ID NO: 519461 - DNA, 25 bp, Homo sapien
gcatctgaggtccaactagccagtg

SEQ ID NO: 519462 - DNA, 25 bp, Homo sapien
tagccagtgttgagtgtcccagctg

SEQ ID NO: 519463 - DNA, 25 bp, Homo sapien
cttaagactatgacccctgagagga

SEQ ID NO: 519464 - DNA, 25 bp, Homo sapien
tctacgaggtcaagcagagtgccac

SEQ ID NO: 519465 - DNA, 25 bp, Homo sapien
catggatgggtaacagtccacggcc

SEQ ID NO: 519466 - DNA, 25 bp, Homo sapien
tgaagccacactaaaccagcagagt

SEQ ID NO: 519467 - DNA, 25 bp, Homo sapien
gagtgggtcccaatcttttctgtac

SEQ ID NO: 519468 - DNA, 25 bp, Homo sapien
cattctggatgtcggccttgcaaaa

SEQ ID NO: 519469 - DNA, 25 bp, Homo sapien
cagccaaggttgaggacccatgtaa

SEQ ID NO: 519470 - DNA, 25 bp, Homo sapien
tgtccgaggcatgtcctattctctg

SEQ ID NO: 519471 - DNA, 25 bp, Homo sapien
gacccatgtaagcaggcgggccaga

SEQ ID NO: 519472 - DNA, 25 bp, Homo sapien
gcgggccagagtgctttttgtccga

SEQ ID NO: 519473 - DNA, 25 bp, Homo sapien
cagtgatagcactagtgatgatgca

SEQ ID NO: 519474 - DNA, 25 bp, Homo sapien
taaaagctctatacccagtgatagc

SEQ ID NO: 519475 - DNA, 25 bp, Homo sapien
aaagaatcctgtacctattagcagt

SEQ ID NO: 519476 - DNA, 25 bp, Homo sapien
tacaattaacccacttagagtatac

SEQ ID NO: 519477 - DNA, 25 bp, Homo sapien
tgaattctgaactttccaatgaaag

SEQ ID NO: 519478 - DNA, 25 bp, Homo sapien
tttgagtatcaaagaccctaaactg

SEQ ID NO: 519479 - DNA, 25 bp, Homo sapien
tgctgtggttattgcaacaaataat

SEQ ID NO: 519480 - DNA, 25 bp, Homo sapien
ggctgtatcactttatatccccacc

SEQ ID NO: 519481 - DNA, 25 bp, Homo sapien
tgctgaccattaactttataacttg

SEQ ID NO: 519482 - DNA, 25 bp, Homo sapien
gaaatagaaatccatccagttctgg

SEQ ID NO: 519483 - DNA, 25 bp, Homo sapien
tcttatctattttattccctgaaga

SEQ ID NO: 519484 - DNA, 25 bp, Homo sapien
tccctgaagaaatgtgctgaccatt

SEQ ID NO: 519485 - DNA, 25 bp, Homo sapien
gagttctggaagatggtttggtctt

SEQ ID NO: 519486 - DNA, 25 bp, Homo sapien
tttttactggtcctctcttggcact

SEQ ID NO: 519487 - DNA, 25 bp, Homo sapien
ttttttactggtcctctcttggcac

SEQ ID NO: 519488 - DNA, 25 bp, Homo sapien
ctggaagatggtttggtcttgtaat

SEQ ID NO: 519489 - DNA, 25 bp, Homo sapien
cccagggataagagtctgggtcatc

SEQ ID NO: 519490 - DNA, 25 bp, Homo sapien
tccccagggataagagtctgggtca

SEQ ID NO: 519491 - DNA, 25 bp, Homo sapien
cagattccccagggataagagtctg

SEQ ID NO: 519492 - DNA, 25 bp, Homo sapien
gattccccagggataagagtctggg

SEQ ID NO: 519493 - DNA, 25 bp, Homo sapien
tgctttgtattccttagctataaat

SEQ ID NO: 519494 - DNA, 25 bp, Homo sapien
aattcatcccatgtgccttatgcct

SEQ ID NO: 519495 - DNA, 25 bp, Homo sapien
tcttatgtgaccctaacttggagaa

SEQ ID NO: 519496 - DNA, 25 bp, Homo sapien
gaaaactttcggaagcttgagccta

SEQ ID NO: 519497 - DNA, 25 bp, Homo sapien
tatccgttaatggtgatcagtgatc

SEQ ID NO: 519498 - DNA, 25 bp, Homo sapien
tcctgactaaaaagggtagggctga

SEQ ID NO: 519499 - DNA, 25 bp, Homo sapien
gggagccataaaccaagcccatata

SEQ ID NO: 519500 - DNA, 25 bp, Homo sapien
gtttaaactgcactgtcacctacgt

SEQ ID NO: 519501 - DNA, 25 bp, Homo sapien
gcatcctaggcagttgatccacctg

SEQ ID NO: 519502 - DNA, 25 bp, Homo sapien
ctcttgcatcctaggcagttgatcc

SEQ ID NO: 519503 - DNA, 25 bp, Homo sapien
tcttgcatcctaggcagttgatcca

SEQ ID NO: 519504 - DNA, 25 bp, Homo sapien
ttgcatcctaggcagttgatccacc

SEQ ID NO: 519505 - DNA, 25 bp, Homo sapien
aagtcctagagacagcagataagac

SEQ ID NO: 519506 - DNA, 25 bp, Homo sapien
agtcctagagacagcagataagact

SEQ ID NO: 519507 - DNA, 25 bp, Homo sapien
acggcgttcattgttgatcttctgg

SEQ ID NO: 519508 - DNA, 25 bp, Homo sapien
tcagctaggtatgtacggcgttcat

SEQ ID NO: 519509 - DNA, 25 bp, Homo sapien
ctgagacatttcagctaggtatgta

SEQ ID NO: 519510 - DNA, 25 bp, Homo sapien
tatgtacggcgttcattgttgatct

SEQ ID NO: 519511 - DNA, 25 bp, Homo sapien
gcatagtatttcacttgactttcaa

SEQ ID NO: 519512 - DNA, 25 bp, Homo sapien
ccagtttaagtgcatagtatttcac

SEQ ID NO: 519513 - DNA, 25 bp, Homo sapien
catagtatttcacttgactttcaag

SEQ ID NO: 519514 - DNA, 25 bp, Homo sapien
tgttccagtttaagtgcatagtatt

SEQ ID NO: 519515 - DNA, 25 bp, Homo sapien
ctgtttaagtaatgtgtttaaggat

SEQ ID NO: 519516 - DNA, 25 bp, Homo sapien
ccatggactgctgctgagaccccat

SEQ ID NO: 519517 - DNA, 25 bp, Homo sapien
ttgtgaagtctctggtcggggtcca

SEQ ID NO: 519518 - DNA, 25 bp, Homo sapien
gggtccaggcagtaggtgtcctcct

SEQ ID NO: 519519 - DNA, 25 bp, Homo sapien
cttgtgaagtctctggtcggggtcc

SEQ ID NO: 519520 - DNA, 25 bp, Homo sapien
tggccaggacgctgaagaggaccca

SEQ ID NO: 519521 - DNA, 25 bp, Homo sapien
ggccaggacgctgaagaggacccac

SEQ ID NO: 519522 - DNA, 25 bp, Homo sapien
aacttgtggccaggacgctgaagag

SEQ ID NO: 519523 - DNA, 25 bp, Homo sapien
tcagaggaacttgtggccaggacgc

SEQ ID NO: 519524 - DNA, 25 bp, Homo sapien
ccattcactgccaagtcctcgtcct

SEQ ID NO: 519525 - DNA, 25 bp, Homo sapien
tagtctcttaccacccttgaccaga

SEQ ID NO: 519526 - DNA, 25 bp, Homo sapien
cagggaggtcagttgtcccactcca

SEQ ID NO: 519527 - DNA, 25 bp, Homo sapien
tccacgtagtctcttaccacccttg

SEQ ID NO: 519528 - DNA, 25 bp, Homo sapien
ttctccttctttgcctgcaagcgtt

SEQ ID NO: 519529 - DNA, 25 bp, Homo sapien
gtgggctgtttcattcctgtcttgg

SEQ ID NO: 519530 - DNA, 25 bp, Homo sapien
tctttgcctgcaagcgttgcttcca

SEQ ID NO: 519531 - DNA, 25 bp, Homo sapien
ttcattcctgtcttggcctgctcca

SEQ ID NO: 519532 - DNA, 25 bp, Homo sapien
ttcagatcatctgcagtttgccctt

SEQ ID NO: 519533 - DNA, 25 bp, Homo sapien
gatcatctgcagtttgcccttgaag

SEQ ID NO: 519534 - DNA, 25 bp, Homo sapien
tcatctgcagtttgcccttgaagat

SEQ ID NO: 519535 - DNA, 25 bp, Homo sapien
cagatcatctgcagtttgcccttga

SEQ ID NO: 519536 - DNA, 25 bp, Homo sapien
ctctgtgtctgaaactccaaagtac

SEQ ID NO: 519537 - DNA, 25 bp, Homo sapien
tgaaggagagtatcccagctgcgtg

SEQ ID NO: 519538 - DNA, 25 bp, Homo sapien
tccaaagtacaagagctattgcagt

SEQ ID NO: 519539 - DNA, 25 bp, Homo sapien
ttagacctctatctcactcacatgt

SEQ ID NO: 519540 - DNA, 25 bp, Homo sapien
gaagaacagactctctcattccatc

SEQ ID NO: 519541 - DNA, 25 bp, Homo sapien
tcactggactgttcataacttaatg

SEQ ID NO: 519542 - DNA, 25 bp, Homo sapien
caaggagctgcttttatctgattat

SEQ ID NO: 519543 - DNA, 25 bp, Homo sapien
tgactccaaaatgaactagatatct

SEQ ID NO: 519544 - DNA, 25 bp, Homo sapien
agcatatgcactggtgagagatttc

SEQ ID NO: 519545 - DNA, 25 bp, Homo sapien
ctaagcatatgcactggtgagagat

SEQ ID NO: 519546 - DNA, 25 bp, Homo sapien
catatgcactggtgagagatttccc

SEQ ID NO: 519547 - DNA, 25 bp, Homo sapien
tatgcactggtgagagatttccctg

SEQ ID NO: 519548 - DNA, 25 bp, Homo sapien
gaagcagccatctttaaacacgagg

SEQ ID NO: 519549 - DNA, 25 bp, Homo sapien
gattcaaaactgtccatgcggtaag

SEQ ID NO: 519550 - DNA, 25 bp, Homo sapien
cacgaaggtgcccatatgatacagt

SEQ ID NO: 519551 - DNA, 25 bp, Homo sapien
tgaatgataacgtgaagcagctgag

SEQ ID NO: 519552 - DNA, 25 bp, Homo sapien
tagtcaacaacgagtgcccatcctt

SEQ ID NO: 519553 - DNA, 25 bp, Homo sapien
ttcatactctatcccacaaaagcaa

SEQ ID NO: 519554 - DNA, 25 bp, Homo sapien
taaagaatcgggaaatttacagatg

SEQ ID NO: 519555 - DNA, 25 bp, Homo sapien
cctaaacactaaacaatccacaaca

SEQ ID NO: 519556 - DNA, 25 bp, Homo sapien
ttgttgctactctccacaagggtgg

SEQ ID NO: 519557 - DNA, 25 bp, Homo sapien
cactctgttgagctaggactgagcc

SEQ ID NO: 519558 - DNA, 25 bp, Homo sapien
taaacgctccttagatatgccctaa

SEQ ID NO: 519559 - DNA, 25 bp, Homo sapien
ccagagtctcaggtagtagttagaa

SEQ ID NO: 519560 - DNA, 25 bp, Homo sapien
atccagtaggtagtaataaaattct

SEQ ID NO: 519561 - DNA, 25 bp, Homo sapien
tccagtaggtagtaataaaattcta

SEQ ID NO: 519562 - DNA, 25 bp, Homo sapien
tatccagtaggtagtaataaaattc

SEQ ID NO: 519563 - DNA, 25 bp, Homo sapien
cacctgtgaatatagctggcaactt

SEQ ID NO: 519564 - DNA, 25 bp, Homo sapien
ggcactaagcttaacatagccctag

SEQ ID NO: 519565 - DNA, 25 bp, Homo sapien
tctgggttgaaagtaacaagcgtgc

SEQ ID NO: 519566 - DNA, 25 bp, Homo sapien
aaacagtttatttggaccttgcgct

SEQ ID NO: 519567 - DNA, 25 bp, Homo sapien
tctttgtgtttaatcacatttctac

SEQ ID NO: 519568 - DNA, 25 bp, Homo sapien
tgtgtttaatcacatttctactcac

SEQ ID NO: 519569 - DNA, 25 bp, Homo sapien
tttgtgtttaatcacatttctactc

SEQ ID NO: 519570 - DNA, 25 bp, Homo sapien
tattctttgtgtttaatcacatttc

SEQ ID NO: 519571 - DNA, 25 bp, Homo sapien
tcgttcatagacacgaatagaagat

SEQ ID NO: 519572 - DNA, 25 bp, Homo sapien
tcatagacacgaatagaagatagtc

SEQ ID NO: 519573 - DNA, 25 bp, Homo sapien
gttcatagacacgaatagaagatag

SEQ ID NO: 519574 - DNA, 25 bp, Homo sapien
catagacacgaatagaagatagtct

SEQ ID NO: 519575 - DNA, 25 bp, Homo sapien
caagttgtgtctcataacgggtttt

SEQ ID NO: 519576 - DNA, 25 bp, Homo sapien
taattcaagttgtgtctcataacgg

SEQ ID NO: 519577 - DNA, 25 bp, Homo sapien
gttgtgtctcataacgggttttcca

SEQ ID NO: 519578 - DNA, 25 bp, Homo sapien
tgtgtctcataacgggttttccatt

SEQ ID NO: 519579 - DNA, 25 bp, Homo sapien
tggcttccagttccgtaatcttgtg

SEQ ID NO: 519580 - DNA, 25 bp, Homo sapien
ggcttccagttccgtaatcttgtgt

SEQ ID NO: 519581 - DNA, 25 bp, Homo sapien
ttggcttccagttccgtaatcttgt

SEQ ID NO: 519582 - DNA, 25 bp, Homo sapien
cttagttcaaatattgagagttgca

SEQ ID NO: 519583 - DNA, 25 bp, Homo sapien
gttcaaatattgagagttgcactgc

SEQ ID NO: 519584 - DNA, 25 bp, Homo sapien
tcaaatattgagagttgcactgcat

SEQ ID NO: 519585 - DNA, 25 bp, Homo sapien
aaatattgagagttgcactgcatcc

SEQ ID NO: 519586 - DNA, 25 bp, Homo sapien
cctatctaggcacaaaggagagtcc

SEQ ID NO: 519587 - DNA, 25 bp, Homo sapien
tactgtgactggagctacaatagag

SEQ ID NO: 519588 - DNA, 25 bp, Homo sapien
cagaacctgtcctcagaacgcgtgt

SEQ ID NO: 519589 - DNA, 25 bp, Homo sapien
gaacgcgtgtagtttggtagcaaaa

SEQ ID NO: 519590 - DNA, 25 bp, Homo sapien
aaaggcttactcaaagaggcacgtg

SEQ ID NO: 519591 - DNA, 25 bp, Homo sapien
gaggcacgtgaatctttcgcatgga

SEQ ID NO: 519592 - DNA, 25 bp, Homo sapien
gattggatccttaagggcagcacat

SEQ ID NO: 519593 - DNA, 25 bp, Homo sapien
catggaatacttttggaacccagac

SEQ ID NO: 519594 - DNA, 25 bp, Homo sapien
ggcggttggtgctcacaccgtcgaa

SEQ ID NO: 519595 - DNA, 25 bp, Homo sapien
ttcttgcggacttcttccagcaact

SEQ ID NO: 519596 - DNA, 25 bp, Homo sapien
cttgcggacttcttccagcaactgc

SEQ ID NO: 519597 - DNA, 25 bp, Homo sapien
ctgtttcaggcggttggtgctcaca

SEQ ID NO: 519598 - DNA, 25 bp, Homo sapien
gcacgaggcggtgaaccccaaccgc

SEQ ID NO: 519599 - DNA, 25 bp, Homo sapien
agagcacaagacattaagggccacc

SEQ ID NO: 519600 - DNA, 25 bp, Homo sapien
ccagaagccagtacggcacgaggcg

SEQ ID NO: 519601 - DNA, 25 bp, Homo sapien
gtgtcaggccagagacctcccgcgt

SEQ ID NO: 519602 - DNA, 25 bp, Homo sapien
tgacctctggtcaaagctaactgtt

SEQ ID NO: 519603 - DNA, 25 bp, Homo sapien
gcttgtggaccatatactctctgat

SEQ ID NO: 519604 - DNA, 25 bp, Homo sapien
taaacaaatgggtacagctatgctc

SEQ ID NO: 519605 - DNA, 25 bp, Homo sapien
caggtggacatctggatttagccca

SEQ ID NO: 519606 - DNA, 25 bp, Homo sapien
tatccaccatggattacgtctaagg

SEQ ID NO: 519607 - DNA, 25 bp, Homo sapien
gaatggactacagctatgaaaacta

SEQ ID NO: 519608 - DNA, 25 bp, Homo sapien
taaatagggctgtgaatagtctgcc

SEQ ID NO: 519609 - DNA, 25 bp, Homo sapien
tataagctcatgtgataacgaggtc

SEQ ID NO: 519610 - DNA, 25 bp, Homo sapien
taatccaattaagctgataataatc

SEQ ID NO: 519611 - DNA, 25 bp, Homo sapien
gctgataataatcacttcgaatttt

SEQ ID NO: 519612 - DNA, 25 bp, Homo sapien
ggctcataacaatacagtctcaata

SEQ ID NO: 519613 - DNA, 25 bp, Homo sapien
tcccaaatttcctaggctcataaca

SEQ ID NO: 519614 - DNA, 25 bp, Homo sapien
caaggtttgaacaacacatgtacta

SEQ ID NO: 519615 - DNA, 25 bp, Homo sapien
gctttggtataagtgattcccagca

SEQ ID NO: 519616 - DNA, 25 bp, Homo sapien
tcacatttctaaggccagatgcaag

SEQ ID NO: 519617 - DNA, 25 bp, Homo sapien
tactggttaatctgtgaggaattcc

SEQ ID NO: 519618 - DNA, 25 bp, Homo sapien
tatctgatagtcctcaaggagagtg

SEQ ID NO: 519619 - DNA, 25 bp, Homo sapien
tcccctctcacgttgacatttgctg

SEQ ID NO: 519620 - DNA, 25 bp, Homo sapien
gagaattatcaactatctgatagtc

SEQ ID NO: 519621 - DNA, 25 bp, Homo sapien
tcctttacttccttcgtctgctcat

SEQ ID NO: 519622 - DNA, 25 bp, Homo sapien
gcagttacgccaacattgaccgcag

SEQ ID NO: 519623 - DNA, 25 bp, Homo sapien
gataccaatgttgttaatattgtag

SEQ ID NO: 519624 - DNA, 25 bp, Homo sapien
ttgaccgcagaatccaccgcatggt

SEQ ID NO: 519625 - DNA, 25 bp, Homo sapien
accgcatggtgggtagcttctcctg

SEQ ID NO: 519626 - DNA, 25 bp, Homo sapien
gcatcaaatgcatagcaagtgcttg

SEQ ID NO: 519627 - DNA, 25 bp, Homo sapien
ccctattggagaggagaatcttacc

SEQ ID NO: 519628 - DNA, 25 bp, Homo sapien
ccaccaagcactcaaaggccttagg

SEQ ID NO: 519629 - DNA, 25 bp, Homo sapien
gaagcaactaatctagagtcacgta

SEQ ID NO: 519630 - DNA, 25 bp, Homo sapien
tgaccgtaactcttggtggagccgg

SEQ ID NO: 519631 - DNA, 25 bp, Homo sapien
gattctaatgccaactatgccagta

SEQ ID NO: 519632 - DNA, 25 bp, Homo sapien
ggacagtccctgttatgcaacccct

SEQ ID NO: 519633 - DNA, 25 bp, Homo sapien
tttttccagaaccatgtgagctaca

SEQ ID NO: 519634 - DNA, 25 bp, Homo sapien
aactagagccatgtaaatgttcccc

SEQ ID NO: 519635 - DNA, 25 bp, Homo sapien
tttaaactagtcaatccacaggccc

SEQ ID NO: 519636 - DNA, 25 bp, Homo sapien
ggaagaacacccatagactttcgtg

SEQ ID NO: 519637 - DNA, 25 bp, Homo sapien
gctgctgaccacgagaaaatccaat

SEQ ID NO: 519638 - DNA, 25 bp, Homo sapien
aagtatcctgtgaaacgcacactga

SEQ ID NO: 519639 - DNA, 25 bp, Homo sapien
agtatcctgtgaaacgcacactgaa

SEQ ID NO: 519640 - DNA, 25 bp, Homo sapien
taatcagagtcaagtaagatgtgac

SEQ ID NO: 519641 - DNA, 25 bp, Homo sapien
ccagagacagaccttaaggccaaat

SEQ ID NO: 519642 - DNA, 25 bp, Homo sapien
ataccatctacccattccaatacaa

SEQ ID NO: 519643 - DNA, 25 bp, Homo sapien
caaatgtacagtggtaatcagagtc

SEQ ID NO: 519644 - DNA, 25 bp, Homo sapien
agatatcacccatcaaaaacatgta

SEQ ID NO: 519645 - DNA, 25 bp, Homo sapien
tttcaggcagatatcacccatcaaa

SEQ ID NO: 519646 - DNA, 25 bp, Homo sapien
caggcagatatcacccatcaaaaac

SEQ ID NO: 519647 - DNA, 25 bp, Homo sapien
cgagtgggctaatattaacatgggg

SEQ ID NO: 519648 - DNA, 25 bp, Homo sapien
ataaaaatatcttgaccgtcatggg

SEQ ID NO: 519649 - DNA, 25 bp, Homo sapien
ttacaaatgctacaagagatttagt

SEQ ID NO: 519650 - DNA, 25 bp, Homo sapien
gattagtaacataaagcaaagtgac

SEQ ID NO: 519651 - DNA, 25 bp, Homo sapien
gcaaagtgacaagaattctgttatt

SEQ ID NO: 519652 - DNA, 25 bp, Homo sapien
gaaacattgttaacgatgcatttag

SEQ ID NO: 519653 - DNA, 25 bp, Homo sapien
ccaatccttgccagacagttgaaaa

SEQ ID NO: 519654 - DNA, 25 bp, Homo sapien
gcatttagctgcacattccaatcct

SEQ ID NO: 519655 - DNA, 25 bp, Homo sapien
gtttctgctgaaacattgttaacga

SEQ ID NO: 519656 - DNA, 25 bp, Homo sapien
tagcaccatccagaggagatttccc

SEQ ID NO: 519657 - DNA, 25 bp, Homo sapien
tgaacactacttgctgctacaacca

SEQ ID NO: 519658 - DNA, 25 bp, Homo sapien
gacatgtggagctagttcttttcca

SEQ ID NO: 519659 - DNA, 25 bp, Homo sapien
taagagattctggaacaagtttgct

SEQ ID NO: 519660 - DNA, 25 bp, Homo sapien
tttaccactcatcttgcaacattct

SEQ ID NO: 519661 - DNA, 25 bp, Homo sapien
gatttttaccactcatcttgcaaca

SEQ ID NO: 519662 - DNA, 25 bp, Homo sapien
cttaaatgaacatctaaattgtttt

SEQ ID NO: 519663 - DNA, 25 bp, Homo sapien
tttttaccactcatcttgcaacatt

SEQ ID NO: 519664 - DNA, 25 bp, Homo sapien
tttctaaggattccagataggacga

SEQ ID NO: 519665 - DNA, 25 bp, Homo sapien
tgtgatgttgctggtccgcaggtct

SEQ ID NO: 519666 - DNA, 25 bp, Homo sapien
tgatgttgctggtccgcaggtctca

SEQ ID NO: 519667 - DNA, 25 bp, Homo sapien
tccagataggacgatgtgatgttgc

SEQ ID NO: 519668 - DNA, 25 bp, Homo sapien
tccgctctcggagtttagaagcacc

SEQ ID NO: 519669 - DNA, 25 bp, Homo sapien
cagctggactaacttccacgggttt

SEQ ID NO: 519670 - DNA, 25 bp, Homo sapien
tatataaagtcccttggtgacagct

SEQ ID NO: 519671 - DNA, 25 bp, Homo sapien
tagaagcacctttctggattgcctt

SEQ ID NO: 519672 - DNA, 25 bp, Homo sapien
caaaaggcttgaagatgcccattta

SEQ ID NO: 519673 - DNA, 25 bp, Homo sapien
cacatatcaccatggaagtatacag

SEQ ID NO: 519674 - DNA, 25 bp, Homo sapien
cactgtattaatgctgccatatggc

SEQ ID NO: 519675 - DNA, 25 bp, Homo sapien
catatggcagaccatgaacgtttgc

SEQ ID NO: 519676 - DNA, 25 bp, Homo sapien
ctcaaaccccacaacaggatttaat

SEQ ID NO: 519677 - DNA, 25 bp, Homo sapien
ccacaacaggatttaattaacctcg

SEQ ID NO: 519678 - DNA, 25 bp, Homo sapien
attctggccctcaaaccccacaaca

SEQ ID NO: 519679 - DNA, 25 bp, Homo sapien
caacaggatttaattaacctcgcct

SEQ ID NO: 519680 - DNA, 25 bp, Homo sapien
gatctgaagccctttataaccataa

SEQ ID NO: 519681 - DNA, 25 bp, Homo sapien
cagtcgtttaaatgagtcaagaccc

SEQ ID NO: 519682 - DNA, 25 bp, Homo sapien
gaagatttcctctgctttagacatc

SEQ ID NO: 519683 - DNA, 25 bp, Homo sapien
aaagagcttggctataaccctcaga

SEQ ID NO: 519684 - DNA, 25 bp, Homo sapien
gattcctgaagcttttcactatcca

SEQ ID NO: 519685 - DNA, 25 bp, Homo sapien
gtagaacagaataataggccaggaa

SEQ ID NO: 519686 - DNA, 25 bp, Homo sapien
ggaagtacaagactaaggtgctggt

SEQ ID NO: 519687 - DNA, 25 bp, Homo sapien
tcttactgcttcctcacatagtgaa

SEQ ID NO: 519688 - DNA, 25 bp, Homo sapien
gtgagccactttttcactccattca

SEQ ID NO: 519689 - DNA, 25 bp, Homo sapien
tgtgagccactttttcactccattc

SEQ ID NO: 519690 - DNA, 25 bp, Homo sapien
caatgtgactcaggttaacttcttc

SEQ ID NO: 519691 - DNA, 25 bp, Homo sapien
atggtacaatgtgactcaggttaac

SEQ ID NO: 519692 - DNA, 25 bp, Homo sapien
gtacaatgtgactcaggttaacttc

SEQ ID NO: 519693 - DNA, 25 bp, Homo sapien
aatgtgactcaggttaacttcttca

SEQ ID NO: 519694 - DNA, 25 bp, Homo sapien
tgtggacaggaatagggcccagact

SEQ ID NO: 519695 - DNA, 25 bp, Homo sapien
tgctattcataaggccaactcttct

SEQ ID NO: 519696 - DNA, 25 bp, Homo sapien
tatagctggtctaagatgttcaaca

SEQ ID NO: 519697 - DNA, 25 bp, Homo sapien
tactaaactgcctatgatactcaag

SEQ ID NO: 519698 - DNA, 25 bp, Homo sapien
ctttttccactatgtagacctaaca

SEQ ID NO: 519699 - DNA, 25 bp, Homo sapien
gacctaacattctagctctcaataa

SEQ ID NO: 519700 - DNA, 25 bp, Homo sapien
aggctaggctgcatcttctatctaa

SEQ ID NO: 519701 - DNA, 25 bp, Homo sapien
agaaatgatctctttgctaatctgt

SEQ ID NO: 519702 - DNA, 25 bp, Homo sapien
tttatgacgtacatccttattgcct

SEQ ID NO: 519703 - DNA, 25 bp, Homo sapien
cttattgccttggtccaactgtttc

SEQ ID NO: 519704 - DNA, 25 bp, Homo sapien
tgacgtacatccttattgccttggt

SEQ ID NO: 519705 - DNA, 25 bp, Homo sapien
catccttattgccttggtccaactg

SEQ ID NO: 519706 - DNA, 25 bp, Homo sapien
agggtctagttcttccagggatttg

SEQ ID NO: 519707 - DNA, 25 bp, Homo sapien
ttttagttggtcagaggagggtcta

SEQ ID NO: 519708 - DNA, 25 bp, Homo sapien
cttcttttagttggtcagaggaggg

SEQ ID NO: 519709 - DNA, 25 bp, Homo sapien
tcttttagttggtcagaggagggtc

SEQ ID NO: 519710 - DNA, 25 bp, Homo sapien
ttcagaaccggagatctatcaggaa

SEQ ID NO: 519711 - DNA, 25 bp, Homo sapien
gccttaacagatcctcaaagagctc

SEQ ID NO: 519712 - DNA, 25 bp, Homo sapien
tcaggaaacatgtaggctcccgcag

SEQ ID NO: 519713 - DNA, 25 bp, Homo sapien
tgcttgtagcattgtatcaggaaac

SEQ ID NO: 519714 - DNA, 25 bp, Homo sapien
ctagaggatataaccagtcacaaac

SEQ ID NO: 519715 - DNA, 25 bp, Homo sapien
tgttatagcttttatcacccgccac

SEQ ID NO: 519716 - DNA, 25 bp, Homo sapien
tccctagcaagcctcgaattgtctt

SEQ ID NO: 519717 - DNA, 25 bp, Homo sapien
gagtacctcactaaatccacagcaa

SEQ ID NO: 519718 - DNA, 25 bp, Homo sapien
taaaacgagactgtcactggaccac

SEQ ID NO: 519719 - DNA, 25 bp, Homo sapien
aacctcacaattcgaaggtacccag

SEQ ID NO: 519720 - DNA, 25 bp, Homo sapien
gaaccgtatcgagagaattatccaa

SEQ ID NO: 519721 - DNA, 25 bp, Homo sapien
gacggtttagaaccgtatcgagaga

SEQ ID NO: 519722 - DNA, 25 bp, Homo sapien
caattcgaaggtacccaggatacga

SEQ ID NO: 519723 - DNA, 25 bp, Homo sapien
cctaaggtctcaagaggcggtggct

SEQ ID NO: 519724 - DNA, 25 bp, Homo sapien
tggatataacttgggcacctcctga

SEQ ID NO: 519725 - DNA, 25 bp, Homo sapien
tctctagaatttccagcctggtgcg

SEQ ID NO: 519726 - DNA, 25 bp, Homo sapien
tctgcagagaagtggcaagaccctt

SEQ ID NO: 519727 - DNA, 25 bp, Homo sapien
tgagcaggtgtcctattccttgctt

SEQ ID NO: 519728 - DNA, 25 bp, Homo sapien
gacctaattcatctgtattcagacc

SEQ ID NO: 519729 - DNA, 25 bp, Homo sapien
tgatgaaatgctgatccctctgagc

SEQ ID NO: 519730 - DNA, 25 bp, Homo sapien
gttgcatctgtctagcagattccca

SEQ ID NO: 519731 - DNA, 25 bp, Homo sapien
gcctcgcttatctctgttttgttca

SEQ ID NO: 519732 - DNA, 25 bp, Homo sapien
taagcctactattaggtctgtcata

SEQ ID NO: 519733 - DNA, 25 bp, Homo sapien
ttatgattcgtatctcctacctgaa

SEQ ID NO: 519734 - DNA, 25 bp, Homo sapien
agtttcctatcatacatccttatgg

SEQ ID NO: 519735 - DNA, 25 bp, Homo sapien
taaaggtggcaggttaccccacaca

SEQ ID NO: 519736 - DNA, 25 bp, Homo sapien
aggtggcaggttaccccacacagcc

SEQ ID NO: 519737 - DNA, 25 bp, Homo sapien
aaaggtggcaggttaccccacacag

SEQ ID NO: 519738 - DNA, 25 bp, Homo sapien
aaggtggcaggttaccccacacagc

SEQ ID NO: 519739 - DNA, 25 bp, Homo sapien
catactattccctcagaaaagtgaa

SEQ ID NO: 519740 - DNA, 25 bp, Homo sapien
tgaagacaagtggaactcttctacc

SEQ ID NO: 519741 - DNA, 25 bp, Homo sapien
taaaatcgagtgataccaactaggc

SEQ ID NO: 519742 - DNA, 25 bp, Homo sapien
ccaactaggcacttaacagatggct

SEQ ID NO: 519743 - DNA, 25 bp, Homo sapien
cattaaaattggtctagcttccgat

SEQ ID NO: 519744 - DNA, 25 bp, Homo sapien
aattgaccatatacagacccacgta

SEQ ID NO: 519745 - DNA, 25 bp, Homo sapien
gaagtgccactagtcagccttatta

SEQ ID NO: 519746 - DNA, 25 bp, Homo sapien
tgcaacaacttcatggtagtcaaca

SEQ ID NO: 519747 - DNA, 25 bp, Homo sapien
caacaaacaataagtcgaagggctc

SEQ ID NO: 519748 - DNA, 25 bp, Homo sapien
gttattaaagccatgtatcacagag

SEQ ID NO: 519749 - DNA, 25 bp, Homo sapien
ctatggtacactgccccaggatgga

SEQ ID NO: 519750 - DNA, 25 bp, Homo sapien
taatttaggcacaactcccactatc

SEQ ID NO: 519751 - DNA, 25 bp, Homo sapien
ccttagagctagcacaagttgatct

SEQ ID NO: 519752 - DNA, 25 bp, Homo sapien
cgacccgaaaccacattacagaaag

SEQ ID NO: 519753 - DNA, 25 bp, Homo sapien
gacaacgacgtttcagagagtgcca

SEQ ID NO: 519754 - DNA, 25 bp, Homo sapien
cttagggaaaccatagacaacgacg

SEQ ID NO: 519755 - DNA, 25 bp, Homo sapien
gaattaagtcggagggatccgccgc

SEQ ID NO: 519756 - DNA, 25 bp, Homo sapien
aagtgaaaaactgggtcagccctag

SEQ ID NO: 519757 - DNA, 25 bp, Homo sapien
ggatcctcggtggactactagcgca

SEQ ID NO: 519758 - DNA, 25 bp, Homo sapien
aataatgctgcgtcacgaaactgcg

SEQ ID NO: 519759 - DNA, 25 bp, Homo sapien
aagagtaaaatcacgcgcaatccat

SEQ ID NO: 519760 - DNA, 25 bp, Homo sapien
tgcccaaccttgacggggccatggg

SEQ ID NO: 519761 - DNA, 25 bp, Homo sapien
gccttcttgcagagaaaggctgccc

SEQ ID NO: 519762 - DNA, 25 bp, Homo sapien
tataaccgcagttgttcgtgggcct

SEQ ID NO: 519763 - DNA, 25 bp, Homo sapien
gggcgccccggcgttgcctcgagag

SEQ ID NO: 519764 - DNA, 25 bp, Homo sapien
gttgcctcgagagctccctgcgcgg

SEQ ID NO: 519765 - DNA, 25 bp, Homo sapien
gccgcggcacggaccagctcccact

SEQ ID NO: 519766 - DNA, 25 bp, Homo sapien
cgccttccagacctcgggcgccccg

SEQ ID NO: 519767 - DNA, 25 bp, Homo sapien
acgacgcgcgctctcgaacgcttcg

SEQ ID NO: 519768 - DNA, 25 bp, Homo sapien
tctcgaacgcttcgcgtcacgcggc

SEQ ID NO: 519769 - DNA, 25 bp, Homo sapien
tggcaaccaagacgttccacgacgc

SEQ ID NO: 519770 - DNA, 25 bp, Homo sapien
cgcgcgcttgccgtggcaaccaaga

SEQ ID NO: 519771 - DNA, 25 bp, Homo sapien
agcggattcatcaccggcctgctca

SEQ ID NO: 519772 - DNA, 25 bp, Homo sapien
cgcgcgtcttgccagcggattcatc

SEQ ID NO: 519773 - DNA, 25 bp, Homo sapien
caccggcctgctcagactaggttct

SEQ ID NO: 519774 - DNA, 25 bp, Homo sapien
cggcctgctcagactaggttctgcc

SEQ ID NO: 519775 - DNA, 25 bp, Homo sapien
ttcggacccaagagtcaccgtaaca

SEQ ID NO: 519776 - DNA, 25 bp, Homo sapien
tctaaatggtacgtgggaggacgtc

SEQ ID NO: 519777 - DNA, 25 bp, Homo sapien
cttctaaatggtacgtgggaggacg

SEQ ID NO: 519778 - DNA, 25 bp, Homo sapien
tcggacccaagagtcaccgtaacac

SEQ ID NO: 519779 - DNA, 25 bp, Homo sapien
ggagcgagggcggcaggcgacagag

SEQ ID NO: 519780 - DNA, 25 bp, Homo sapien
gaaaaggagcgagggcggcaggcga

SEQ ID NO: 519781 - DNA, 25 bp, Homo sapien
gcgagggcggcaggcgacagagaac

SEQ ID NO: 519782 - DNA, 25 bp, Homo sapien
aaaaggagcgagggcggcaggcgac

SEQ ID NO: 519783 - DNA, 25 bp, Homo sapien
ggcgcctgcgcaatctctttctctc

SEQ ID NO: 519784 - DNA, 25 bp, Homo sapien
tcgcgagtcagcggccccgcgcaga

SEQ ID NO: 519785 - DNA, 25 bp, Homo sapien
tcggcgcctgcgcaatctctttctc

SEQ ID NO: 519786 - DNA, 25 bp, Homo sapien
tctttctctccagcgaaaccgaggc

SEQ ID NO: 519787 - DNA, 25 bp, Homo sapien
tttacaaggagatttgatttggtca

SEQ ID NO: 519788 - DNA, 25 bp, Homo sapien
gtttacaaggagatttgatttggtc

SEQ ID NO: 519789 - DNA, 25 bp, Homo sapien
ttacaaggagatttgatttggtcat

SEQ ID NO: 519790 - DNA, 25 bp, Homo sapien
gcaaacaatacccatgtcagccggg

SEQ ID NO: 519791 - DNA, 25 bp, Homo sapien
taggacactccattgtaggcaggca

SEQ ID NO: 519792 - DNA, 25 bp, Homo sapien
taccttgagcaatgcctaggacact

SEQ ID NO: 519793 - DNA, 25 bp, Homo sapien
tatcactgcagtccttgtactagac

SEQ ID NO: 519794 - DNA, 25 bp, Homo sapien
ttccttccaggactgaagaaaacat

SEQ ID NO: 519795 - DNA, 25 bp, Homo sapien
atcacttatgatttccttccaggac

SEQ ID NO: 519796 - DNA, 25 bp, Homo sapien
tccttttggggcaaatcacttatga

SEQ ID NO: 519797 - DNA, 25 bp, Homo sapien
tcaacagcaatccttttggggcaaa

SEQ ID NO: 519798 - DNA, 25 bp, Homo sapien
ggtgagggcgtgtgtgatgcacctt

SEQ ID NO: 519799 - DNA, 25 bp, Homo sapien
cctgcattgggtgagggcgtgtgtg

SEQ ID NO: 519800 - DNA, 25 bp, Homo sapien
tgagggcgtgtgtgatgcaccttct

SEQ ID NO: 519801 - DNA, 25 bp, Homo sapien
tgcattgggtgagggcgtgtgtgat

SEQ ID NO: 519802 - DNA, 25 bp, Homo sapien
gcttcacgcagttgcgcaggagccc

SEQ ID NO: 519803 - DNA, 25 bp, Homo sapien
atggagacgcaacactgccgcgact

SEQ ID NO: 519804 - DNA, 25 bp, Homo sapien
ttcccgggccggcttcacgcagttg

SEQ ID NO: 519805 - DNA, 25 bp, Homo sapien
cgagcacgacgtgcgaccctaaatc

SEQ ID NO: 519806 - DNA, 25 bp, Homo sapien
gtgagccagagtaatgagggagaag

SEQ ID NO: 519807 - DNA, 25 bp, Homo sapien
tgtttaatatgtccttcatcagtga

SEQ ID NO: 519808 - DNA, 25 bp, Homo sapien
cctggacttgatcgtgagttttgaa

SEQ ID NO: 519809 - DNA, 25 bp, Homo sapien
aaaactaaatggtcagtgctcagtg

SEQ ID NO: 519810 - DNA, 25 bp, Homo sapien
gagttagacccaagcatgacaggaa

SEQ ID NO: 519811 - DNA, 25 bp, Homo sapien
gacaggaaagtacgaccaggatgct

SEQ ID NO: 519812 - DNA, 25 bp, Homo sapien
ccttgcttctgcgagcagctcggga

SEQ ID NO: 519813 - DNA, 25 bp, Homo sapien
tgccctagcctcaaactgacattgg

SEQ ID NO: 519814 - DNA, 25 bp, Homo sapien
cagtttagctccagctgtgtagctt

SEQ ID NO: 519815 - DNA, 25 bp, Homo sapien
taattgcccaattctcttgcagagt

SEQ ID NO: 519816 - DNA, 25 bp, Homo sapien
tgcagagtctgaataaaatcacagt

SEQ ID NO: 519817 - DNA, 25 bp, Homo sapien
tagctttcgacagccccacatgaag

SEQ ID NO: 519818 - DNA, 25 bp, Homo sapien
caggtgttggatggcatgttctata

SEQ ID NO: 519819 - DNA, 25 bp, Homo sapien
ctaaatcgagtgcttcttttttgat

SEQ ID NO: 519820 - DNA, 25 bp, Homo sapien
acttggttttttggcctaacatatg

SEQ ID NO: 519821 - DNA, 25 bp, Homo sapien
tggtctatagtgcagtctaaatcga

SEQ ID NO: 519822 - DNA, 25 bp, Homo sapien
cttgggcagcatcttggcctggatg

SEQ ID NO: 519823 - DNA, 25 bp, Homo sapien
cttgaggtgactctcagtcttcttg

SEQ ID NO: 519824 - DNA, 25 bp, Homo sapien
agtcttcttgggcagcatcttggcc

SEQ ID NO: 519825 - DNA, 25 bp, Homo sapien
ggcagcatcttggcctggatgttgg

SEQ ID NO: 519826 - DNA, 25 bp, Homo sapien
tcattattgcaactggccagctgca

SEQ ID NO: 519827 - DNA, 25 bp, Homo sapien
caggtggtgcaggatgatacatgtc

SEQ ID NO: 519828 - DNA, 25 bp, Homo sapien
gcaggatgatacatgtcttcttgtt

SEQ ID NO: 519829 - DNA, 25 bp, Homo sapien
tgtcacaggtcccattgcctgccaa

SEQ ID NO: 519830 - DNA, 25 bp, Homo sapien
ctgtcaagaactgcagactaaccca

SEQ ID NO: 519831 - DNA, 25 bp, Homo sapien
aagcacagtggcatatcagccctta

SEQ ID NO: 519832 - DNA, 25 bp, Homo sapien
gcatatcagcccttactttctcata

SEQ ID NO: 519833 - DNA, 25 bp, Homo sapien
tctcatagtaattgcccttgaagag

SEQ ID NO: 519834 - DNA, 25 bp, Homo sapien
cattccccttgtaactcacactagt

SEQ ID NO: 519835 - DNA, 25 bp, Homo sapien
gatgctcttggaggactgacatgct

SEQ ID NO: 519836 - DNA, 25 bp, Homo sapien
ctagttgatgctcttggaggactga

SEQ ID NO: 519837 - DNA, 25 bp, Homo sapien
ccttgtaactcacactagttgatgc

SEQ ID NO: 519838 - DNA, 25 bp, Homo sapien
ctcatgtgagatgcgtttttcttca

SEQ ID NO: 519839 - DNA, 25 bp, Homo sapien
gctcatgtgagatgcgtttttcttc

SEQ ID NO: 519840 - DNA, 25 bp, Homo sapien
tcatgtgagatgcgtttttcttcat

SEQ ID NO: 519841 - DNA, 25 bp, Homo sapien
caggacatcggctgctttaacagtg

SEQ ID NO: 519842 - DNA, 25 bp, Homo sapien
cagtgataaatgtgggctacagcag

SEQ ID NO: 519843 - DNA, 25 bp, Homo sapien
gatgagtgaacaaatccccaggtcc

SEQ ID NO: 519844 - DNA, 25 bp, Homo sapien
gagtcctatgctcaaaccgagaaca

SEQ ID NO: 519845 - DNA, 25 bp, Homo sapien
ccacagaactcacggtagtttcaga

SEQ ID NO: 519846 - DNA, 25 bp, Homo sapien
cctttactcctgtcatgaccacaga

SEQ ID NO: 519847 - DNA, 25 bp, Homo sapien
tcatgaccacagaactcacggtagt

SEQ ID NO: 519848 - DNA, 25 bp, Homo sapien
agaactcacggtagtttcagaaagc

SEQ ID NO: 519849 - DNA, 25 bp, Homo sapien
cagctctttctggtaagcactgaag

SEQ ID NO: 519850 - DNA, 25 bp, Homo sapien
tttgacctaatataggaagacacag

SEQ ID NO: 519851 - DNA, 25 bp, Homo sapien
cagaaatagcacgatcattgtcagt

SEQ ID NO: 519852 - DNA, 25 bp, Homo sapien
agtcaattgcaaaggtgtactcctt

SEQ ID NO: 519853 - DNA, 25 bp, Homo sapien
tgtcaatcagtctaccatggcaggc

SEQ ID NO: 519854 - DNA, 25 bp, Homo sapien
aacaaccttgggcaaagccgcagag

SEQ ID NO: 519855 - DNA, 25 bp, Homo sapien
ccaaagatgcagcagacgctcaggg

SEQ ID NO: 519856 - DNA, 25 bp, Homo sapien
gcaaggaagccctgtagcagagtct

SEQ ID NO: 519857 - DNA, 25 bp, Homo sapien
catggaccgtctggtatagtctgtt

SEQ ID NO: 519858 - DNA, 25 bp, Homo sapien
gtatagtctgttgaaggtgatagcc

SEQ ID NO: 519859 - DNA, 25 bp, Homo sapien
cctggttctaagatgctcctccttg

SEQ ID NO: 519860 - DNA, 25 bp, Homo sapien
gtgggtcctggttctaagatgctcc

SEQ ID NO: 519861 - DNA, 25 bp, Homo sapien
tgcctagacccgatccctgtggctg

SEQ ID NO: 519862 - DNA, 25 bp, Homo sapien
gcctgggaggactgcctagacccga

SEQ ID NO: 519863 - DNA, 25 bp, Homo sapien
tcccctgggaatgtgagtgtgaacc

SEQ ID NO: 519864 - DNA, 25 bp, Homo sapien
tgagtgtgaaccaaagaagatttgt

SEQ ID NO: 519865 - DNA, 25 bp, Homo sapien
gtcttcctgccagcgtgccttctgc

SEQ ID NO: 519866 - DNA, 25 bp, Homo sapien
aatgacaggatctgacgcctttctt

SEQ ID NO: 519867 - DNA, 25 bp, Homo sapien
aggatctgacgcctttctttgaagt

SEQ ID NO: 519868 - DNA, 25 bp, Homo sapien
aggtgagcctctggatgggtcttcc

SEQ ID NO: 519869 - DNA, 25 bp, Homo sapien
atcagggaattcaatctccggtcct

SEQ ID NO: 519870 - DNA, 25 bp, Homo sapien
tctccggtcctgctaaagagctgac

SEQ ID NO: 519871 - DNA, 25 bp, Homo sapien
ctagaaaaagatcatggatatcagg

SEQ ID NO: 519872 - DNA, 25 bp, Homo sapien
gaaaaagatcatggatatcagggaa

SEQ ID NO: 519873 - DNA, 25 bp, Homo sapien
gacaaaccaagcctctcaattagag

SEQ ID NO: 519874 - DNA, 25 bp, Homo sapien
catctcagctaaggtattctcacag

SEQ ID NO: 519875 - DNA, 25 bp, Homo sapien
caattagaggcttacaggctttatc

SEQ ID NO: 519876 - DNA, 25 bp, Homo sapien
ggcgctccgggttgaacagagacaa

SEQ ID NO: 519877 - DNA, 25 bp, Homo sapien
ggtgggaaagacaatctccagcaat

SEQ ID NO: 519878 - DNA, 25 bp, Homo sapien
cccagtgcaaaagtctaaacatgag

SEQ ID NO: 519879 - DNA, 25 bp, Homo sapien
tgatacagtgaatgccctcaaatga

SEQ ID NO: 519880 - DNA, 25 bp, Homo sapien
catgtacatggacttatggatggaa

SEQ ID NO: 519881 - DNA, 25 bp, Homo sapien
tctaacaaatgctgattgatcatcc

SEQ ID NO: 519882 - DNA, 25 bp, Homo sapien
gcagccatctaacaaatgctgattg

SEQ ID NO: 519883 - DNA, 25 bp, Homo sapien
ctgattgatcatccttatgccacat

SEQ ID NO: 519884 - DNA, 25 bp, Homo sapien
tccttatgccacattctgtactagt

SEQ ID NO: 519885 - DNA, 25 bp, Homo sapien
caggctctggtcttgaatcgttatc

SEQ ID NO: 519886 - DNA, 25 bp, Homo sapien
caaattgaaatacgctctgggagaa

SEQ ID NO: 519887 - DNA, 25 bp, Homo sapien
gggagaatttgagcctacacttgtc

SEQ ID NO: 519888 - DNA, 25 bp, Homo sapien
cagacttttgagttcgctgtgccgc

SEQ ID NO: 519889 - DNA, 25 bp, Homo sapien
taggaacctatagcagcctaatgga

SEQ ID NO: 519890 - DNA, 25 bp, Homo sapien
gccacagtggcaaatgtcaacccct

SEQ ID NO: 519891 - DNA, 25 bp, Homo sapien
tactcaagaactcactaggactcat

SEQ ID NO: 519892 - DNA, 25 bp, Homo sapien
gactcattagactgcctgtcaccca

SEQ ID NO: 519893 - DNA, 25 bp, Homo sapien
cctctagaggattgggacacatact

SEQ ID NO: 519894 - DNA, 25 bp, Homo sapien
gtttcaatatcctctagaggattgg

SEQ ID NO: 519895 - DNA, 25 bp, Homo sapien
caatatcctctagaggattgggaca

SEQ ID NO: 519896 - DNA, 25 bp, Homo sapien
gattgggacacatactacataaatg

SEQ ID NO: 519897 - DNA, 25 bp, Homo sapien
accgtttctagtagtcttaattgca

SEQ ID NO: 519898 - DNA, 25 bp, Homo sapien
taattgcatgttacaatggtgactc

SEQ ID NO: 519899 - DNA, 25 bp, Homo sapien
caccgtgcatgtaaaaccgtttcta

SEQ ID NO: 519900 - DNA, 25 bp, Homo sapien
acctggtaagttatgttctgaaaag

SEQ ID NO: 519901 - DNA, 25 bp, Homo sapien
cagaagatgctatttgagttacaaa

SEQ ID NO: 519902 - DNA, 25 bp, Homo sapien
cacagttgtaagttaagacacaagt

SEQ ID NO: 519903 - DNA, 25 bp, Homo sapien
acacaagtgaaaatagagacctttc

SEQ ID NO: 519904 - DNA, 25 bp, Homo sapien
ttacaacccaaaggatgaacttctg

SEQ ID NO: 519905 - DNA, 25 bp, Homo sapien
ggcttattcttctgcaccctggcta

SEQ ID NO: 519906 - DNA, 25 bp, Homo sapien
tctaggctgtgttcagagtcagcaa

SEQ ID NO: 519907 - DNA, 25 bp, Homo sapien
tatgcttcattagccccaaagtccc

SEQ ID NO: 519908 - DNA, 25 bp, Homo sapien
ccaggaacaagttctaggctgtgtt

SEQ ID NO: 519909 - DNA, 25 bp, Homo sapien
catgtactgcgtaaagctcagcaca

SEQ ID NO: 519910 - DNA, 25 bp, Homo sapien
caggctttggacccgttcctttcag

SEQ ID NO: 519911 - DNA, 25 bp, Homo sapien
agcctctttcagtgtttgcaggtcc

SEQ ID NO: 519912 - DNA, 25 bp, Homo sapien
ttgcaggtcccgatctctggctgcc

SEQ ID NO: 519913 - DNA, 25 bp, Homo sapien
cacatgcaggcttccatactccagt

SEQ ID NO: 519914 - DNA, 25 bp, Homo sapien
gaaatgctgactgtctcagttccct

SEQ ID NO: 519915 - DNA, 25 bp, Homo sapien
tgtgaccctggctcccagataagag

SEQ ID NO: 519916 - DNA, 25 bp, Homo sapien
tccaaatgccatccgaggcagcact

SEQ ID NO: 519917 - DNA, 25 bp, Homo sapien
ttggcccttgctccactcccatggg

SEQ ID NO: 519918 - DNA, 25 bp, Homo sapien
taaacctggacattcatgctccagc

SEQ ID NO: 519919 - DNA, 25 bp, Homo sapien
ggttcgggcagatctctgtaaacct

SEQ ID NO: 519920 - DNA, 25 bp, Homo sapien
tccacgccacagctgaggttcgggc

SEQ ID NO: 519921 - DNA, 25 bp, Homo sapien
gcattcttgattctcagaccaatgt

SEQ ID NO: 519922 - DNA, 25 bp, Homo sapien
tgcattcttgattctcagaccaatg

SEQ ID NO: 519923 - DNA, 25 bp, Homo sapien
ctgcattcttgattctcagaccaat

SEQ ID NO: 519924 - DNA, 25 bp, Homo sapien
attcttgattctcagaccaatgtcc

SEQ ID NO: 519925 - DNA, 25 bp, Homo sapien
tctttacaccgacataaggcctacc

SEQ ID NO: 519926 - DNA, 25 bp, Homo sapien
gttttccagggtacaagctgcttcc

SEQ ID NO: 519927 - DNA, 25 bp, Homo sapien
tttgtaggacctcacagccatgctg

SEQ ID NO: 519928 - DNA, 25 bp, Homo sapien
gctttcctgggtacaatgtcctcag

SEQ ID NO: 519929 - DNA, 25 bp, Homo sapien
tcctgtactgatgcagaatcctgtg

SEQ ID NO: 519930 - DNA, 25 bp, Homo sapien
tgttaattctgttccggttacaata

SEQ ID NO: 519931 - DNA, 25 bp, Homo sapien
aaagtggtctttcaggcagaacaga

SEQ ID NO: 519932 - DNA, 25 bp, Homo sapien
ggcagaacagaagtaatcaagtcct

SEQ ID NO: 519933 - DNA, 25 bp, Homo sapien
agatcagatgagatcaggtggattc

SEQ ID NO: 519934 - DNA, 25 bp, Homo sapien
tgagatcagatgagatcaggtggat

SEQ ID NO: 519935 - DNA, 25 bp, Homo sapien
gatcagatgagatcaggtggattca

SEQ ID NO: 519936 - DNA, 25 bp, Homo sapien
tcagatgagatcaggtggattcagg

SEQ ID NO: 519937 - DNA, 25 bp, Homo sapien
gactctggccacatgattgattaca

SEQ ID NO: 519938 - DNA, 25 bp, Homo sapien
caagaggataaacaccaaaggccat

SEQ ID NO: 519939 - DNA, 25 bp, Homo sapien
cacccaaaatacatggcttgtcttg

SEQ ID NO: 519940 - DNA, 25 bp, Homo sapien
cattcaaactttagagccatcccca

SEQ ID NO: 519941 - DNA, 25 bp, Homo sapien
caagcccgttaggtacctgtgcgaa

SEQ ID NO: 519942 - DNA, 25 bp, Homo sapien
tgctagtgatgcaaccctgtgctgg

SEQ ID NO: 519943 - DNA, 25 bp, Homo sapien
gccaagcagcgcaaaccgtggatgt

SEQ ID NO: 519944 - DNA, 25 bp, Homo sapien
gatctagaggacgaggagactcact

SEQ ID NO: 519945 - DNA, 25 bp, Homo sapien
catactctccattgttaaacaaaga

SEQ ID NO: 519946 - DNA, 25 bp, Homo sapien
gaacaggatcttttggggatcgtcc

SEQ ID NO: 519947 - DNA, 25 bp, Homo sapien
gggatcgtcctgcaagacctactct

SEQ ID NO: 519948 - DNA, 25 bp, Homo sapien
aagtgcagataacatactctccatt

SEQ ID NO: 519949 - DNA, 25 bp, Homo sapien
agtatagatctcagcccaccaatgc

SEQ ID NO: 519950 - DNA, 25 bp, Homo sapien
tgacggattaactaagcacactggg

SEQ ID NO: 519951 - DNA, 25 bp, Homo sapien
taaagattgtctcacccgcagtgcc

SEQ ID NO: 519952 - DNA, 25 bp, Homo sapien
gggtagtcccacatactaaagattg

SEQ ID NO: 519953 - DNA, 25 bp, Homo sapien
tattgtacattgagtgccctctggt

SEQ ID NO: 519954 - DNA, 25 bp, Homo sapien
tctgtagcatgtctggagcaaggat

SEQ ID NO: 519955 - DNA, 25 bp, Homo sapien
ccccaaggagggtctatcatagact

SEQ ID NO: 519956 - DNA, 25 bp, Homo sapien
tgggacaatttggagccttaaactc

SEQ ID NO: 519957 - DNA, 25 bp, Homo sapien
gatttactaagagaactgccgtgaa

SEQ ID NO: 519958 - DNA, 25 bp, Homo sapien
gatggcaacttggatcggcccagaa

SEQ ID NO: 519959 - DNA, 25 bp, Homo sapien
ccggactgcggactggcaatgcttt

SEQ ID NO: 519960 - DNA, 25 bp, Homo sapien
tgggcacaaagtattatgggaacac

SEQ ID NO: 519961 - DNA, 25 bp, Homo sapien
caaccttaaacgtgtgctgcagtgc

SEQ ID NO: 519962 - DNA, 25 bp, Homo sapien
taatgacacggctgactaaagctgt

SEQ ID NO: 519963 - DNA, 25 bp, Homo sapien
gagcccagctataggtatgtcaacc

SEQ ID NO: 519964 - DNA, 25 bp, Homo sapien
ctctgtggaaagcaggagtctccct

SEQ ID NO: 519965 - DNA, 25 bp, Homo sapien
gacatcctggcgatgatactcagca

SEQ ID NO: 519966 - DNA, 25 bp, Homo sapien
tgctggtgacatcctggcgatgata

SEQ ID NO: 519967 - DNA, 25 bp, Homo sapien
taagacactgaagaaatggggttat

SEQ ID NO: 519968 - DNA, 25 bp, Homo sapien
ctggcgatgatactcagcaccccaa

SEQ ID NO: 519969 - DNA, 25 bp, Homo sapien
ggacctgcatccacatacttggcct

SEQ ID NO: 519970 - DNA, 25 bp, Homo sapien
aaaatgaagggagatcacagccaag

SEQ ID NO: 519971 - DNA, 25 bp, Homo sapien
aaatcagttctgtgactgggagcag

SEQ ID NO: 519972 - DNA, 25 bp, Homo sapien
ttttccctgtccatacctgcaactg

SEQ ID NO: 519973 - DNA, 25 bp, Homo sapien
gctactgccctatgtttttatccca

SEQ ID NO: 519974 - DNA, 25 bp, Homo sapien
ccaccagctactgccctatgttttt

SEQ ID NO: 519975 - DNA, 25 bp, Homo sapien
cctcagaagagtcatccatactagc

SEQ ID NO: 519976 - DNA, 25 bp, Homo sapien
ccctcagaagagtcatccatactag

SEQ ID NO: 519977 - DNA, 25 bp, Homo sapien
tttataacgtgatagcaagcactcc

SEQ ID NO: 519978 - DNA, 25 bp, Homo sapien
cattttataacgtgatagcaagcac

SEQ ID NO: 519979 - DNA, 25 bp, Homo sapien
tataacgtgatagcaagcactcctt

SEQ ID NO: 519980 - DNA, 25 bp, Homo sapien
taacgtgatagcaagcactccttac

SEQ ID NO: 519981 - DNA, 25 bp, Homo sapien
aaagatgctgctgtcactcacgcac

SEQ ID NO: 519982 - DNA, 25 bp, Homo sapien
tccggatagtacacatcttggtcag

SEQ ID NO: 519983 - DNA, 25 bp, Homo sapien
ggtcagttcatacacgacttcaaag

SEQ ID NO: 519984 - DNA, 25 bp, Homo sapien
gacttcaaagccgtggtgaactgac

SEQ ID NO: 519985 - DNA, 25 bp, Homo sapien
gacacaaaaacacagccttccttca

SEQ ID NO: 519986 - DNA, 25 bp, Homo sapien
caaaaacacagccttccttcacatg

SEQ ID NO: 519987 - DNA, 25 bp, Homo sapien
ctgcagacacaaaaacacagccttc

SEQ ID NO: 519988 - DNA, 25 bp, Homo sapien
agccttccttcacatgccctttcat

SEQ ID NO: 519989 - DNA, 25 bp, Homo sapien
agatgactaaaggaataacatcttt

SEQ ID NO: 519990 - DNA, 25 bp, Homo sapien
tgactaaaggaataacatctttgct

SEQ ID NO: 519991 - DNA, 25 bp, Homo sapien
ctagatgactaaaggaataacatct

SEQ ID NO: 519992 - DNA, 25 bp, Homo sapien
actaaaggaataacatctttgctct

SEQ ID NO: 519993 - DNA, 25 bp, Homo sapien
tatttgaagggtcggtgaacccatc

SEQ ID NO: 519994 - DNA, 25 bp, Homo sapien
catctatgagcacacttcgggagga

SEQ ID NO: 519995 - DNA, 25 bp, Homo sapien
ggaagcctggaatgtctccccaact

SEQ ID NO: 519996 - DNA, 25 bp, Homo sapien
tcagttcatagtaggcgaccgagca

SEQ ID NO: 519997 - DNA, 25 bp, Homo sapien
tagcactacatgtctatcagctgtg

SEQ ID NO: 519998 - DNA, 25 bp, Homo sapien
tccatttggtatcgatagcactaca

SEQ ID NO: 519999 - DNA, 25 bp, Homo sapien
tacaggttggccactctgggtctca

SEQ ID NO: 520000 - DNA, 25 bp, Homo sapien
tatcagctgtggcatctacaggttg

SEQ ID NO: 520001 - DNA, 25 bp, Homo sapien
ctgtggcatgataaggcaggggtgg

SEQ ID NO: 520002 - DNA, 25 bp, Homo sapien
gtggcatgataaggcaggggtggtg

SEQ ID NO: 520003 - DNA, 25 bp, Homo sapien
tgataaggcaggggtggtgtgtcaa

SEQ ID NO: 520004 - DNA, 25 bp, Homo sapien
ggcatgataaggcaggggtggtgtg

SEQ ID NO: 520005 - DNA, 25 bp, Homo sapien
cccgtatttccccacagaccatagt

SEQ ID NO: 520006 - DNA, 25 bp, Homo sapien
tatttccccacagaccatagttctt

SEQ ID NO: 520007 - DNA, 25 bp, Homo sapien
tttccccacagaccatagttcttac

SEQ ID NO: 520008 - DNA, 25 bp, Homo sapien
cgtatttccccacagaccatagttc

SEQ ID NO: 520009 - DNA, 25 bp, Homo sapien
ctgagtgttgatagggactctctgg

SEQ ID NO: 520010 - DNA, 25 bp, Homo sapien
tgagtgttgatagggactctctggc

SEQ ID NO: 520011 - DNA, 25 bp, Homo sapien
gggagtgagggtagctggccgtgca

SEQ ID NO: 520012 - DNA, 25 bp, Homo sapien
gtgagggtagctggccgtgcacggg

SEQ ID NO: 520013 - DNA, 25 bp, Homo sapien
gggttatattcactgtgtcttggca

SEQ ID NO: 520014 - DNA, 25 bp, Homo sapien
gaaagagtcaggataggtggcgttg

SEQ ID NO: 520015 - DNA, 25 bp, Homo sapien
ggtggcgttgtgtggcatgagtggc

SEQ ID NO: 520016 - DNA, 25 bp, Homo sapien
aggcgctgcggaacttggccaggag

SEQ ID NO: 520017 - DNA, 25 bp, Homo sapien
tcactctgaaaataaaccttgacgt

SEQ ID NO: 520018 - DNA, 25 bp, Homo sapien
tctgaaaataaaccttgacgtcgta

SEQ ID NO: 520019 - DNA, 25 bp, Homo sapien
actctgaaaataaaccttgacgtcg

SEQ ID NO: 520020 - DNA, 25 bp, Homo sapien
ctctgaaaataaaccttgacgtcgt

SEQ ID NO: 520021 - DNA, 25 bp, Homo sapien
cacacgcgacagtaaatcacatggg

SEQ ID NO: 520022 - DNA, 25 bp, Homo sapien
gaatcgtgacgcatttgctgggctg

SEQ ID NO: 520023 - DNA, 25 bp, Homo sapien
cttcagctcgtggtgggactgcaga

SEQ ID NO: 520024 - DNA, 25 bp, Homo sapien
ttcttcactagagagtccactgcct

SEQ ID NO: 520025 - DNA, 25 bp, Homo sapien
ttgcgaagtgtgttgactttctcct

SEQ ID NO: 520026 - DNA, 25 bp, Homo sapien
gggaccaattcaagttgcgaagtgt

SEQ ID NO: 520027 - DNA, 25 bp, Homo sapien
taagcccttgaacagggtggccaac

SEQ ID NO: 520028 - DNA, 25 bp, Homo sapien
aaagtgggcggcgagtagctctcca

SEQ ID NO: 520029 - DNA, 25 bp, Homo sapien
taaacacaggcccttgcattgaggg

SEQ ID NO: 520030 - DNA, 25 bp, Homo sapien
aaacagactttattgcagagcagct

SEQ ID NO: 520031 - DNA, 25 bp, Homo sapien
cagtggtctcacgacagttccaaaa

SEQ ID NO: 520032 - DNA, 25 bp, Homo sapien
tctagggtctgaaacatctcgggtc

SEQ ID NO: 520033 - DNA, 25 bp, Homo sapien
gcctggccgacttgatcatttttaa

SEQ ID NO: 520034 - DNA, 25 bp, Homo sapien
gctgacaacaaagccactgcaaggg

SEQ ID NO: 520035 - DNA, 25 bp, Homo sapien
caggtttgtctatctggtcacagga

SEQ ID NO: 520036 - DNA, 25 bp, Homo sapien
cataaaaaggagagatgcatgtggc

SEQ ID NO: 520037 - DNA, 25 bp, Homo sapien
acacatgtatgcactcgtaccctct

SEQ ID NO: 520038 - DNA, 25 bp, Homo sapien
ctggatgccctttttaaactctgat

SEQ ID NO: 520039 - DNA, 25 bp, Homo sapien
agagaaatgagctcccctccaacca

SEQ ID NO: 520040 - DNA, 25 bp, Homo sapien
gagagtctggatgccctttttaaac

SEQ ID NO: 520041 - DNA, 25 bp, Homo sapien
tattagcaaatcacacccagcagta

SEQ ID NO: 520042 - DNA, 25 bp, Homo sapien
tgcacccggccgaaatgtcctatgt

SEQ ID NO: 520043 - DNA, 25 bp, Homo sapien
taacatagttggtctacacagaaag

SEQ ID NO: 520044 - DNA, 25 bp, Homo sapien
gaagctagcatgaccctgatgcaaa

SEQ ID NO: 520045 - DNA, 25 bp, Homo sapien
caaagagcaccctactgttaatata

SEQ ID NO: 520046 - DNA, 25 bp, Homo sapien
aaagcagaattacagggcacacgtg

SEQ ID NO: 520047 - DNA, 25 bp, Homo sapien
tgttgctaatggaacagaaggcagt

SEQ ID NO: 520048 - DNA, 25 bp, Homo sapien
gcagccacatcagcaagtctgaaca

SEQ ID NO: 520049 - DNA, 25 bp, Homo sapien
agcgcctgaacagggcatacaagat

SEQ ID NO: 520050 - DNA, 25 bp, Homo sapien
gcagcgcctgaacagggcatacaag

SEQ ID NO: 520051 - DNA, 25 bp, Homo sapien
cagcgcctgaacagggcatacaaga

SEQ ID NO: 520052 - DNA, 25 bp, Homo sapien
catcacagaaagtcccgtgaaggca

SEQ ID NO: 520053 - DNA, 25 bp, Homo sapien
ggccccagccggcgtcagtcagact

SEQ ID NO: 520054 - DNA, 25 bp, Homo sapien
ggcggccccagccggcgtcagtcag

SEQ ID NO: 520055 - DNA, 25 bp, Homo sapien
cggccccagccggcgtcagtcagac

SEQ ID NO: 520056 - DNA, 25 bp, Homo sapien
gcggccccagccggcgtcagtcaga

SEQ ID NO: 520057 - DNA, 25 bp, Homo sapien
caagaatataggatcaccggcccat

SEQ ID NO: 520058 - DNA, 25 bp, Homo sapien
cagaagagttgtcagcccaacaaga

SEQ ID NO: 520059 - DNA, 25 bp, Homo sapien
ggcccatcagtctggagacccttct

SEQ ID NO: 520060 - DNA, 25 bp, Homo sapien
cctggagcccgaaaccagaagagtt

SEQ ID NO: 520061 - DNA, 25 bp, Homo sapien
ctttgcatttgccatatacccagca

SEQ ID NO: 520062 - DNA, 25 bp, Homo sapien
gcatttgccatatacccagcataaa

SEQ ID NO: 520063 - DNA, 25 bp, Homo sapien
tgccatatacccagcataaaaccag

SEQ ID NO: 520064 - DNA, 25 bp, Homo sapien
atatacccagcataaaaccagactg

SEQ ID NO: 520065 - DNA, 25 bp, Homo sapien
ttaagtccatttggcatctctcttt

SEQ ID NO: 520066 - DNA, 25 bp, Homo sapien
tccatttggcatctctctttttgtt

SEQ ID NO: 520067 - DNA, 25 bp, Homo sapien
aagtccatttggcatctctcttttt

SEQ ID NO: 520068 - DNA, 25 bp, Homo sapien
agtccatttggcatctctctttttg

SEQ ID NO: 520069 - DNA, 25 bp, Homo sapien
ttggggtagggcaatataggcaagt

SEQ ID NO: 520070 - DNA, 25 bp, Homo sapien
gtagggcaatataggcaagtcgatc

SEQ ID NO: 520071 - DNA, 25 bp, Homo sapien
tagggcaatataggcaagtcgatca

SEQ ID NO: 520072 - DNA, 25 bp, Homo sapien
gggtagggcaatataggcaagtcga

SEQ ID NO: 520073 - DNA, 25 bp, Homo sapien
tctttgggcccttcttgttgtgctt

SEQ ID NO: 520074 - DNA, 25 bp, Homo sapien
ttggcacgtgcactcatggccttgg

SEQ ID NO: 520075 - DNA, 25 bp, Homo sapien
gagggcctcgatagccttggcacgt

SEQ ID NO: 520076 - DNA, 25 bp, Homo sapien
cttctttgggcccttcttgttgtgc

SEQ ID NO: 520077 - DNA, 25 bp, Homo sapien
ggacaaccccttaggtgaggtcagc

SEQ ID NO: 520078 - DNA, 25 bp, Homo sapien
gcccctcgagactgaaccctggctg

SEQ ID NO: 520079 - DNA, 25 bp, Homo sapien
gcaggacaaccccttaggtgaggtc

SEQ ID NO: 520080 - DNA, 25 bp, Homo sapien
ctcagcccctcgagactgaaccctg

SEQ ID NO: 520081 - DNA, 25 bp, Homo sapien
ctgttcgtgggagggtcgtagttga

SEQ ID NO: 520082 - DNA, 25 bp, Homo sapien
cctgttcgtgggagggtcgtagttg

SEQ ID NO: 520083 - DNA, 25 bp, Homo sapien
gttcgtgggagggtcgtagttgatg

SEQ ID NO: 520084 - DNA, 25 bp, Homo sapien
ttcgtgggagggtcgtagttgatga

SEQ ID NO: 520085 - DNA, 25 bp, Homo sapien
gccagaacgatactccctcatgacc

SEQ ID NO: 520086 - DNA, 25 bp, Homo sapien
tactccctcatgaccacatctcgtt

SEQ ID NO: 520087 - DNA, 25 bp, Homo sapien
agaacgatactccctcatgaccaca

SEQ ID NO: 520088 - DNA, 25 bp, Homo sapien
gaacgatactccctcatgaccacat

SEQ ID NO: 520089 - DNA, 25 bp, Homo sapien
gttgatgaagatgactgcctgggtg

SEQ ID NO: 520090 - DNA, 25 bp, Homo sapien
ggtgatggtcagggtttcattcaag

SEQ ID NO: 520091 - DNA, 25 bp, Homo sapien
aagatgactgcctgggtgatggtca

SEQ ID NO: 520092 - DNA, 25 bp, Homo sapien
cttcaggtgttgatgaagatgactg

SEQ ID NO: 520093 - DNA, 25 bp, Homo sapien
ttccacgttgatgtataattggtgg

SEQ ID NO: 520094 - DNA, 25 bp, Homo sapien
cacgttgatgtataattggtggata

SEQ ID NO: 520095 - DNA, 25 bp, Homo sapien
cactccttttgttccacgttgatgt

SEQ ID NO: 520096 - DNA, 25 bp, Homo sapien
agcttccactccttttgttccacgt

SEQ ID NO: 520097 - DNA, 25 bp, Homo sapien
aagaatccgaatggggtccctcatg

SEQ ID NO: 520098 - DNA, 25 bp, Homo sapien
gacaagaatccgaatggggtccctc

SEQ ID NO: 520099 - DNA, 25 bp, Homo sapien
ccttcttgacaagaatccgaatggg

SEQ ID NO: 520100 - DNA, 25 bp, Homo sapien
cttcagggttaactcttccttcttg

SEQ ID NO: 520101 - DNA, 25 bp, Homo sapien
caagtacatcagaaggaattgtagc

SEQ ID NO: 520102 - DNA, 25 bp, Homo sapien
agtacatcagaaggaattgtagctg

SEQ ID NO: 520103 - DNA, 25 bp, Homo sapien
ctcaagtacatcagaaggaattgta

SEQ ID NO: 520104 - DNA, 25 bp, Homo sapien
gtacatcagaaggaattgtagctga

SEQ ID NO: 520105 - DNA, 25 bp, Homo sapien
gcagtttctgtaccttagcacacat

SEQ ID NO: 520106 - DNA, 25 bp, Homo sapien
taccttagcacacatgttgatgcac

SEQ ID NO: 520107 - DNA, 25 bp, Homo sapien
ttctgtaccttagcacacatgttga

SEQ ID NO: 520108 - DNA, 25 bp, Homo sapien
ctattgagcatttggaatatgtcac

SEQ ID NO: 520109 - DNA, 25 bp, Homo sapien
ccatgtagtctcccagtgccgtgat

SEQ ID NO: 520110 - DNA, 25 bp, Homo sapien
tcccagtgccgtgatcaccttctgt

SEQ ID NO: 520111 - DNA, 25 bp, Homo sapien
tagtctcccagtgccgtgatcacct

SEQ ID NO: 520112 - DNA, 25 bp, Homo sapien
ccagtgccgtgatcaccttctgtat

SEQ ID NO: 520113 - DNA, 25 bp, Homo sapien
cacatcataacccttggtcaaggta

SEQ ID NO: 520114 - DNA, 25 bp, Homo sapien
tgagcgatcacatcataacccttgg

SEQ ID NO: 520115 - DNA, 25 bp, Homo sapien
gcgatcacatcataacccttggtca

SEQ ID NO: 520116 - DNA, 25 bp, Homo sapien
gatcacatcataacccttggtcaag

SEQ ID NO: 520117 - DNA, 25 bp, Homo sapien
gtcagagggcttcccaaaaccatgg

SEQ ID NO: 520118 - DNA, 25 bp, Homo sapien
aaaccatgggcataggtgccacaga

SEQ ID NO: 520119 - DNA, 25 bp, Homo sapien
tgtcagagggcttcccaaaaccatg

SEQ ID NO: 520120 - DNA, 25 bp, Homo sapien
ccatgggcataggtgccacagagga

SEQ ID NO: 520121 - DNA, 25 bp, Homo sapien
tgtacatttaaacttataccctagc

SEQ ID NO: 520122 - DNA, 25 bp, Homo sapien
tcctaaagtttcataggctgaaata

SEQ ID NO: 520123 - DNA, 25 bp, Homo sapien
tgcaggcactttagggtaagaatag

SEQ ID NO: 520124 - DNA, 25 bp, Homo sapien
tagtttatagttaagttcatgagag

SEQ ID NO: 520125 - DNA, 25 bp, Homo sapien
gacactgaagcataagaacacaact

SEQ ID NO: 520126 - DNA, 25 bp, Homo sapien
cagctccagaatggaactaatttag

SEQ ID NO: 520127 - DNA, 25 bp, Homo sapien
atatcgaagtcgtataaaaagtagg

SEQ ID NO: 520128 - DNA, 25 bp, Homo sapien
ttccgagtttgctcaagcctccagg

SEQ ID NO: 520129 - DNA, 25 bp, Homo sapien
ggtctttacccatttgtagccagct

SEQ ID NO: 520130 - DNA, 25 bp, Homo sapien
tttgtccagacctctttgtctcggg

SEQ ID NO: 520131 - DNA, 25 bp, Homo sapien
tacatgatcgttgtgagcctttagc

SEQ ID NO: 520132 - DNA, 25 bp, Homo sapien
tcatacggccctactatagaaagga

SEQ ID NO: 520133 - DNA, 25 bp, Homo sapien
tgtctcgggctacacaagaacacca

SEQ ID NO: 520134 - DNA, 25 bp, Homo sapien
tatacagccagagctgtctaagcct

SEQ ID NO: 520135 - DNA, 25 bp, Homo sapien
ctgcaacaaggactctcaccagaag

SEQ ID NO: 520136 - DNA, 25 bp, Homo sapien
tggacttcgaaaaagtctccagttg

SEQ ID NO: 520137 - DNA, 25 bp, Homo sapien
cattctaaggtaaggagaaaactag

SEQ ID NO: 520138 - DNA, 25 bp, Homo sapien
tctggattgactgtggacatttgga

SEQ ID NO: 520139 - DNA, 25 bp, Homo sapien
atggctctggattgactgtggacat

SEQ ID NO: 520140 - DNA, 25 bp, Homo sapien
tgtggacatttggagtaaaaacact

SEQ ID NO: 520141 - DNA, 25 bp, Homo sapien
ggctctggattgactgtggacattt

SEQ ID NO: 520142 - DNA, 25 bp, Homo sapien
attttaaagaactgtgctatgtaca

SEQ ID NO: 520143 - DNA, 25 bp, Homo sapien
ctgtgctatgtacagtagttctaca

SEQ ID NO: 520144 - DNA, 25 bp, Homo sapien
gctatgtacagtagttctacatcaa

SEQ ID NO: 520145 - DNA, 25 bp, Homo sapien
gtgctatgtacagtagttctacatc

SEQ ID NO: 520146 - DNA, 25 bp, Homo sapien
tgacattttcaactgattcagacag

SEQ ID NO: 520147 - DNA, 25 bp, Homo sapien
actggactagctcaaggtaaagaac

SEQ ID NO: 520148 - DNA, 25 bp, Homo sapien
aaaactagcctcatgggttccaaga

SEQ ID NO: 520149 - DNA, 25 bp, Homo sapien
gaaactcacagaggtaaaactagcc

SEQ ID NO: 520150 - DNA, 25 bp, Homo sapien
cagaaagtggaacccatacatgaga

SEQ ID NO: 520151 - DNA, 25 bp, Homo sapien
tttgacacaaaggaaccacaccaga

SEQ ID NO: 520152 - DNA, 25 bp, Homo sapien
tgaagctgcttctcgagtaaataat

SEQ ID NO: 520153 - DNA, 25 bp, Homo sapien
gagatgaaaacgtccgtgaagctgc

SEQ ID NO: 520154 - DNA, 25 bp, Homo sapien
tactggttgactgattaaacctcca

SEQ ID NO: 520155 - DNA, 25 bp, Homo sapien
taaacctccaaaagagcacttatgc

SEQ ID NO: 520156 - DNA, 25 bp, Homo sapien
tttaggaatctcacaacagcttgct

SEQ ID NO: 520157 - DNA, 25 bp, Homo sapien
aataaaactattcatgactgctctg

SEQ ID NO: 520158 - DNA, 25 bp, Homo sapien
gagattagacataaaagccagtttc

SEQ ID NO: 520159 - DNA, 25 bp, Homo sapien
caattctaaaatgtgccaatccttc

SEQ ID NO: 520160 - DNA, 25 bp, Homo sapien
tccatcctaaggcaaagcgaagtcc

SEQ ID NO: 520161 - DNA, 25 bp, Homo sapien
tgaaaggaacctcatgtttaagaga

SEQ ID NO: 520162 - DNA, 25 bp, Homo sapien
aattggctgtcccatgccaattaat

SEQ ID NO: 520163 - DNA, 25 bp, Homo sapien
cccatgccaattaatgaagtctcac

SEQ ID NO: 520164 - DNA, 25 bp, Homo sapien
gctgtcccatgccaattaatgaagt

SEQ ID NO: 520165 - DNA, 25 bp, Homo sapien
tggctgtcccatgccaattaatgaa

SEQ ID NO: 520166 - DNA, 25 bp, Homo sapien
gagatccacatgctatagccatttg

SEQ ID NO: 520167 - DNA, 25 bp, Homo sapien
taaatgagctcgagatccacatgct

SEQ ID NO: 520168 - DNA, 25 bp, Homo sapien
tgagctcgagatccacatgctatag

SEQ ID NO: 520169 - DNA, 25 bp, Homo sapien
tctttttctaaatgagctcgagatc

SEQ ID NO: 520170 - DNA, 25 bp, Homo sapien
ggcaggaggatggagtttgagtcca

SEQ ID NO: 520171 - DNA, 25 bp, Homo sapien
gagtccagcctgggcaacacagtaa

SEQ ID NO: 520172 - DNA, 25 bp, Homo sapien
gaggcaggaggatggagtttgagtc

SEQ ID NO: 520173 - DNA, 25 bp, Homo sapien
aggccaaggctgtagatcatttagc

SEQ ID NO: 520174 - DNA, 25 bp, Homo sapien
cttttctaatttctcaacatctgga

SEQ ID NO: 520175 - DNA, 25 bp, Homo sapien
acatctggaaactttgtggctccat

SEQ ID NO: 520176 - DNA, 25 bp, Homo sapien
gccataaggatcttttctcctcgag

SEQ ID NO: 520177 - DNA, 25 bp, Homo sapien
gctggtattcaagcagtgggcaaac

SEQ ID NO: 520178 - DNA, 25 bp, Homo sapien
tgctaccatgcataacagcatacct

SEQ ID NO: 520179 - DNA, 25 bp, Homo sapien
tcactaacttgaaatgctggtattc

SEQ ID NO: 520180 - DNA, 25 bp, Homo sapien
ggacagacccaagtcaaattcatct

SEQ ID NO: 520181 - DNA, 25 bp, Homo sapien
tgtcacttccatatttctggcaata

SEQ ID NO: 520182 - DNA, 25 bp, Homo sapien
cattctaatcgctccaccttttcca

SEQ ID NO: 520183 - DNA, 25 bp, Homo sapien
cacacgtactttgtcacttccatat

SEQ ID NO: 520184 - DNA, 25 bp, Homo sapien
cttttccacgattcttcaccagggt

SEQ ID NO: 520185 - DNA, 25 bp, Homo sapien
cacttcataagtgaacgcaggatct

SEQ ID NO: 520186 - DNA, 25 bp, Homo sapien
cataagtgaacgcaggatctcgttt

SEQ ID NO: 520187 - DNA, 25 bp, Homo sapien
gaggtctgatctttactgccatcat

SEQ ID NO: 520188 - DNA, 25 bp, Homo sapien
ggtctgatctttactgccatcatca

SEQ ID NO: 520189 - DNA, 25 bp, Homo sapien
tctagatagctcagagcttcatcca

SEQ ID NO: 520190 - DNA, 25 bp, Homo sapien
tgtttggtaggtgagtcccatatgc

SEQ ID NO: 520191 - DNA, 25 bp, Homo sapien
tcttcatgtcgatggagtgctggca

SEQ ID NO: 520192 - DNA, 25 bp, Homo sapien
tatgaaggcacaacgacagaaagtt

SEQ ID NO: 520193 - DNA, 25 bp, Homo sapien
ccatatgctgggtaaagtttctttc

SEQ ID NO: 520194 - DNA, 25 bp, Homo sapien
gtggagcagaactgcagcggctgca

SEQ ID NO: 520195 - DNA, 25 bp, Homo sapien
ctgggggctcgagacctccctgggt

SEQ ID NO: 520196 - DNA, 25 bp, Homo sapien
gggctcgagacctccctgggtggag

SEQ ID NO: 520197 - DNA, 25 bp, Homo sapien
ggggctcgagacctccctgggtgga

SEQ ID NO: 520198 - DNA, 25 bp, Homo sapien
cgccagctgcaacagaagcggagcc

SEQ ID NO: 520199 - DNA, 25 bp, Homo sapien
gcaccgccagctgcaacagaagcgg

SEQ ID NO: 520200 - DNA, 25 bp, Homo sapien
agtacgagggctgcggccgccagcg

SEQ ID NO: 520201 - DNA, 25 bp, Homo sapien
accgccagctgcaacagaagcggag

SEQ ID NO: 520202 - DNA, 25 bp, Homo sapien
cgtggcagcccgcccaatcccgcac

SEQ ID NO: 520203 - DNA, 25 bp, Homo sapien
tgccgtggcagcccgcccaatcccg

SEQ ID NO: 520204 - DNA, 25 bp, Homo sapien
tccatgccgtggcagcccgcccaat

SEQ ID NO: 520205 - DNA, 25 bp, Homo sapien
catgccgtggcagcccgcccaatcc

SEQ ID NO: 520206 - DNA, 25 bp, Homo sapien
caacacaaggtgatgcttaggagcc

SEQ ID NO: 520207 - DNA, 25 bp, Homo sapien
gccttgagcacgacacagtctacaa

SEQ ID NO: 520208 - DNA, 25 bp, Homo sapien
aaagttcaggtttctcggccgagcg

SEQ ID NO: 520209 - DNA, 25 bp, Homo sapien
gacaatgagcgcacagaaagttcag

SEQ ID NO: 520210 - DNA, 25 bp, Homo sapien
ttgaccctactggagaggaggaaca

SEQ ID NO: 520211 - DNA, 25 bp, Homo sapien
ggagctaaacttcaggactgtatga

SEQ ID NO: 520212 - DNA, 25 bp, Homo sapien
ggaagtgggctaactggagctaaac

SEQ ID NO: 520213 - DNA, 25 bp, Homo sapien
tctgttgtcttcacaaaccaggcat

SEQ ID NO: 520214 - DNA, 25 bp, Homo sapien
ttgtatttgttaacactgtgcacaa

SEQ ID NO: 520215 - DNA, 25 bp, Homo sapien
cactgtgcacaaacgttttatacta

SEQ ID NO: 520216 - DNA, 25 bp, Homo sapien
aatatcaaactacattcttctgaaa

SEQ ID NO: 520217 - DNA, 25 bp, Homo sapien
tatttcttaggtcacttccatatat

SEQ ID NO: 520218 - DNA, 25 bp, Homo sapien
gttgtgcttctgtataaagtttgta

SEQ ID NO: 520219 - DNA, 25 bp, Homo sapien
gtacatctagcaatgtaaaatactg

SEQ ID NO: 520220 - DNA, 25 bp, Homo sapien
gcttctgtataaagtttgtacatct

SEQ ID NO: 520221 - DNA, 25 bp, Homo sapien
gtataaagtttgtacatctagcaat

SEQ ID NO: 520222 - DNA, 25 bp, Homo sapien
gagtggttggcgtgcctctcttcat

SEQ ID NO: 520223 - DNA, 25 bp, Homo sapien
tttggagtggttggcgtgcctctct

SEQ ID NO: 520224 - DNA, 25 bp, Homo sapien
tcaaaattttggagtggttggcgtg

SEQ ID NO: 520225 - DNA, 25 bp, Homo sapien
aattttggagtggttggcgtgcctc

SEQ ID NO: 520226 - DNA, 25 bp, Homo sapien
cctgtatgccgatgatgatgtagct

SEQ ID NO: 520227 - DNA, 25 bp, Homo sapien
tggctgcctgtatgccgatgatgat

SEQ ID NO: 520228 - DNA, 25 bp, Homo sapien
ttgactggctgcctgtatgccgatg

SEQ ID NO: 520229 - DNA, 25 bp, Homo sapien
tgatgatgtagctgagctgtttgtg

SEQ ID NO: 520230 - DNA, 25 bp, Homo sapien
cgagttatgttaaatgcaggcaggt

SEQ ID NO: 520231 - DNA, 25 bp, Homo sapien
tcgagttatgttaaatgcaggcagg

SEQ ID NO: 520232 - DNA, 25 bp, Homo sapien
aaatcgagttatgttaaatgcaggc

SEQ ID NO: 520233 - DNA, 25 bp, Homo sapien
aaaaatcgagttatgttaaatgcag

SEQ ID NO: 520234 - DNA, 25 bp, Homo sapien
gggactataccacattgagacaatg

SEQ ID NO: 520235 - DNA, 25 bp, Homo sapien
gcacagaagcctgctaagggcttta

SEQ ID NO: 520236 - DNA, 25 bp, Homo sapien
attatttgttactttgccctgccag

SEQ ID NO: 520237 - DNA, 25 bp, Homo sapien
gccctgccagtctatattgtagtaa

SEQ ID NO: 520238 - DNA, 25 bp, Homo sapien
taccaattactgtacagtcttaaaa

SEQ ID NO: 520239 - DNA, 25 bp, Homo sapien
tttaccaattactgtacagtcttaa

SEQ ID NO: 520240 - DNA, 25 bp, Homo sapien
tcagtgctccaagttgactggctaa

SEQ ID NO: 520241 - DNA, 25 bp, Homo sapien
tccaagttgactggctaaaatgtca

SEQ ID NO: 520242 - DNA, 25 bp, Homo sapien
aatcagagtgaagttgctggattac

SEQ ID NO: 520243 - DNA, 25 bp, Homo sapien
ttttggagctgagtatctttaaaaa

SEQ ID NO: 520244 - DNA, 25 bp, Homo sapien
aaatgtaatcagagtgaagttgctg

SEQ ID NO: 520245 - DNA, 25 bp, Homo sapien
gtaatcagagtgaagttgctggatt

SEQ ID NO: 520246 - DNA, 25 bp, Homo sapien
tgctcaggtctgttctcggcagagc

SEQ ID NO: 520247 - DNA, 25 bp, Homo sapien
tttgctcaggtctgttctcggcaga

SEQ ID NO: 520248 - DNA, 25 bp, Homo sapien
ctcaggtctgttctcggcagagcca

SEQ ID NO: 520249 - DNA, 25 bp, Homo sapien
gctttgctcaggtctgttctcggca

SEQ ID NO: 520250 - DNA, 25 bp, Homo sapien
aaagcaggccagtcaaaaagtttga

SEQ ID NO: 520251 - DNA, 25 bp, Homo sapien
tcttaagtatcaaatcatagacatt

SEQ ID NO: 520252 - DNA, 25 bp, Homo sapien
ccagggttagaaaaggacaacatag

SEQ ID NO: 520253 - DNA, 25 bp, Homo sapien
gaaaagttagcagtatgattaatct

SEQ ID NO: 520254 - DNA, 25 bp, Homo sapien
gctctggtaacctagtaaagtggat

SEQ ID NO: 520255 - DNA, 25 bp, Homo sapien
ccagaacgagacaaaagattatgca

SEQ ID NO: 520256 - DNA, 25 bp, Homo sapien
tacagaagttatgctattgaccatt

SEQ ID NO: 520257 - DNA, 25 bp, Homo sapien
tgcaactacaagttaccagaacgag

SEQ ID NO: 520258 - DNA, 25 bp, Homo sapien
gaaaataatttaagcggtgagatcc

SEQ ID NO: 520259 - DNA, 25 bp, Homo sapien
tcctgtttactggttgcaagggaag

SEQ ID NO: 520260 - DNA, 25 bp, Homo sapien
caaagctcttaatccactatcaatg

SEQ ID NO: 520261 - DNA, 25 bp, Homo sapien
caactgtggtaattatgttaagtca

SEQ ID NO: 520262 - DNA, 25 bp, Homo sapien
tcctactccagtaaggttaataaca

SEQ ID NO: 520263 - DNA, 25 bp, Homo sapien
ctgagcagataaggcctgttcttga

SEQ ID NO: 520264 - DNA, 25 bp, Homo sapien
tccagtaaggttaataacagcagct

SEQ ID NO: 520265 - DNA, 25 bp, Homo sapien
gactggttgaaccttgctcagaacc

SEQ ID NO: 520266 - DNA, 25 bp, Homo sapien
cctagagctaggtaaagagttccga

SEQ ID NO: 520267 - DNA, 25 bp, Homo sapien
aaatggtatgggagaaaacactgcc

SEQ ID NO: 520268 - DNA, 25 bp, Homo sapien
agtagtaagtccagtaagagggcac

SEQ ID NO: 520269 - DNA, 25 bp, Homo sapien
gaacaacagaataaggcagaccaca

SEQ ID NO: 520270 - DNA, 25 bp, Homo sapien
aattcgatgtaaaagcatatggaag

SEQ ID NO: 520271 - DNA, 25 bp, Homo sapien
aagcatatggaaggctagaaaatcc

SEQ ID NO: 520272 - DNA, 25 bp, Homo sapien
aatgttataaattcgatgtaaaagc

SEQ ID NO: 520273 - DNA, 25 bp, Homo sapien
gcatatggaaggctagaaaatccat

SEQ ID NO: 520274 - DNA, 25 bp, Homo sapien
ctgttgaggactacaagttgtgggc

SEQ ID NO: 520275 - DNA, 25 bp, Homo sapien
aggactacaagttgtgggctgctga

SEQ ID NO: 520276 - DNA, 25 bp, Homo sapien
ctggctgttgaggactacaagttgt

SEQ ID NO: 520277 - DNA, 25 bp, Homo sapien
ttgaggactacaagttgtgggctgc

SEQ ID NO: 520278 - DNA, 25 bp, Homo sapien
cagagtgttaaaaataagtgaacca

SEQ ID NO: 520279 - DNA, 25 bp, Homo sapien
ctgcagagtgttaaaaataagtgaa

SEQ ID NO: 520280 - DNA, 25 bp, Homo sapien
gcagagtgttaaaaataagtgaacc

SEQ ID NO: 520281 - DNA, 25 bp, Homo sapien
tgcagagtgttaaaaataagtgaac

SEQ ID NO: 520282 - DNA, 25 bp, Homo sapien
ttatacatcaatacaaaagagcact

SEQ ID NO: 520283 - DNA, 25 bp, Homo sapien
agtcctattactttgggctcccaag

SEQ ID NO: 520284 - DNA, 25 bp, Homo sapien
ttggatcatttgctatgtgtcactc

SEQ ID NO: 520285 - DNA, 25 bp, Homo sapien
gctagtagttagctattccaattca

SEQ ID NO: 520286 - DNA, 25 bp, Homo sapien
tggagtagatttaagggcctgagac

SEQ ID NO: 520287 - DNA, 25 bp, Homo sapien
agtagatttaagggcctgagacttg

SEQ ID NO: 520288 - DNA, 25 bp, Homo sapien
ctggagtagatttaagggcctgaga

SEQ ID NO: 520289 - DNA, 25 bp, Homo sapien
ggagtagatttaagggcctgagact

SEQ ID NO: 520290 - DNA, 25 bp, Homo sapien
aaaactcatggttataacagaattg

SEQ ID NO: 520291 - DNA, 25 bp, Homo sapien
aaataaaactcatggttataacaga

SEQ ID NO: 520292 - DNA, 25 bp, Homo sapien
aataaaactcatggttataacagaa

SEQ ID NO: 520293 - DNA, 25 bp, Homo sapien
taaaactcatggttataacagaatt

SEQ ID NO: 520294 - DNA, 25 bp, Homo sapien
taacaaaactatcactgctgtgcaa

SEQ ID NO: 520295 - DNA, 25 bp, Homo sapien
ttggctgaacaaagagtaatcaaga

SEQ ID NO: 520296 - DNA, 25 bp, Homo sapien
tgaacaccatgaatataacaaaact

SEQ ID NO: 520297 - DNA, 25 bp, Homo sapien
caaagttgtgaagcaccagatgcac

SEQ ID NO: 520298 - DNA, 25 bp, Homo sapien
atttccaggacttctcgcactaagg

SEQ ID NO: 520299 - DNA, 25 bp, Homo sapien
gcaactgaagccacatgtaactggt

SEQ ID NO: 520300 - DNA, 25 bp, Homo sapien
tagtgacttctgtagaaccccagtt

SEQ ID NO: 520301 - DNA, 25 bp, Homo sapien
cacatgtaacactagcgaagccttg

SEQ ID NO: 520302 - DNA, 25 bp, Homo sapien
aaggccgctcaggtttattcctgca

SEQ ID NO: 520303 - DNA, 25 bp, Homo sapien
cactgggcagtgcatttggtagcag

SEQ ID NO: 520304 - DNA, 25 bp, Homo sapien
tggcaccagtgttacagcccagcat

SEQ ID NO: 520305 - DNA, 25 bp, Homo sapien
tattcctgcaggagttatggcacca

SEQ ID NO: 520306 - DNA, 25 bp, Homo sapien
ttgaaccactcatcaaagcctgggc

SEQ ID NO: 520307 - DNA, 25 bp, Homo sapien
gaaccactcatcaaagcctgggccc

SEQ ID NO: 520308 - DNA, 25 bp, Homo sapien
tgaaccactcatcaaagcctgggcc

SEQ ID NO: 520309 - DNA, 25 bp, Homo sapien
attgatgaagttaagtccagcagag

SEQ ID NO: 520310 - DNA, 25 bp, Homo sapien
aacagagcccactacattgatgaag

SEQ ID NO: 520311 - DNA, 25 bp, Homo sapien
gttaagtccagcagagtttgccatg

SEQ ID NO: 520312 - DNA, 25 bp, Homo sapien
caaacagagcccactacattgatga

SEQ ID NO: 520313 - DNA, 25 bp, Homo sapien
gctgagcaaactgagttaacaaagt

SEQ ID NO: 520314 - DNA, 25 bp, Homo sapien
gaaagaggaatggttgttacaggca

SEQ ID NO: 520315 - DNA, 25 bp, Homo sapien
gagttatagatgttaccatggtgga

SEQ ID NO: 520316 - DNA, 25 bp, Homo sapien
gcaaactgagttaacaaagtgggct

SEQ ID NO: 520317 - DNA, 25 bp, Homo sapien
gtagatggcttaggagttccagatc

SEQ ID NO: 520318 - DNA, 25 bp, Homo sapien
tggctgaaggggtactaggagttga

SEQ ID NO: 520319 - DNA, 25 bp, Homo sapien
tgaaggggttggtgtaggagtagat

SEQ ID NO: 520320 - DNA, 25 bp, Homo sapien
ggggtactaggagttgagctctgag

SEQ ID NO: 520321 - DNA, 25 bp, Homo sapien
tatggttaacaatcatatttggcac

SEQ ID NO: 520322 - DNA, 25 bp, Homo sapien
taatggaatcttacttagcactgac

SEQ ID NO: 520323 - DNA, 25 bp, Homo sapien
caattaaggatgcagtatatcacct

SEQ ID NO: 520324 - DNA, 25 bp, Homo sapien
tacatgctgcctttggcctaaaaag

SEQ ID NO: 520325 - DNA, 25 bp, Homo sapien
gaagctgtcactcaacccttactta

SEQ ID NO: 520326 - DNA, 25 bp, Homo sapien
agtaacaactgtgtgcagtagatta

SEQ ID NO: 520327 - DNA, 25 bp, Homo sapien
tgtcactcaacccttacttaaagta

SEQ ID NO: 520328 - DNA, 25 bp, Homo sapien
caactgtgtgcagtagattaccata

SEQ ID NO: 520329 - DNA, 25 bp, Homo sapien
tacaccttttgagctatcgagatga

SEQ ID NO: 520330 - DNA, 25 bp, Homo sapien
cgaagaccaccctatcactgtgcag

SEQ ID NO: 520331 - DNA, 25 bp, Homo sapien
gaaattctcccaaactaatgctagc

SEQ ID NO: 520332 - DNA, 25 bp, Homo sapien
cactgtgcagtgtactaaaactttc

SEQ ID NO: 520333 - DNA, 25 bp, Homo sapien
tacatacaatcaacaagagctctgc

SEQ ID NO: 520334 - DNA, 25 bp, Homo sapien
ggacctgcagcaacaactcttatga

SEQ ID NO: 520335 - DNA, 25 bp, Homo sapien
tatcaccaccttggaactagttgac

SEQ ID NO: 520336 - DNA, 25 bp, Homo sapien
gcctataagaaaggtacacgcagaa

SEQ ID NO: 520337 - DNA, 25 bp, Homo sapien
tgtctgttgtggtgtaaaatagtta

SEQ ID NO: 520338 - DNA, 25 bp, Homo sapien
gagatccacagatgatttccgagga

SEQ ID NO: 520339 - DNA, 25 bp, Homo sapien
tacttgatggcttagaagaaggagg

SEQ ID NO: 520340 - DNA, 25 bp, Homo sapien
aaagcatgctaacttgattgagatc

SEQ ID NO: 520341 - DNA, 25 bp, Homo sapien
gcttgagggaagtttgattggtggg

SEQ ID NO: 520342 - DNA, 25 bp, Homo sapien
gaagtttgattggtgggggtcgatg

SEQ ID NO: 520343 - DNA, 25 bp, Homo sapien
agcttgagggaagtttgattggtgg

SEQ ID NO: 520344 - DNA, 25 bp, Homo sapien
cttgagggaagtttgattggtgggg

SEQ ID NO: 520345 - DNA, 25 bp, Homo sapien
taatactgctataaaccccagatga

SEQ ID NO: 520346 - DNA, 25 bp, Homo sapien
gacaatgacattaagcttacttgtt

SEQ ID NO: 520347 - DNA, 25 bp, Homo sapien
gctgttgaagccaaatgactagaac

SEQ ID NO: 520348 - DNA, 25 bp, Homo sapien
caaagtgctcttagtggttacagat

SEQ ID NO: 520349 - DNA, 25 bp, Homo sapien
gagatggggtttcacactattggtc

SEQ ID NO: 520350 - DNA, 25 bp, Homo sapien
agatggggtttcacactattggtca

SEQ ID NO: 520351 - DNA, 25 bp, Homo sapien
cactgtgcctagcctccaaaaatga

SEQ ID NO: 520352 - DNA, 25 bp, Homo sapien
tgattcttaacatttctcagattac

SEQ ID NO: 520353 - DNA, 25 bp, Homo sapien
gtgcctagcctccaaaaatgattct

SEQ ID NO: 520354 - DNA, 25 bp, Homo sapien
ctgtgcctagcctccaaaaatgatt

SEQ ID NO: 520355 - DNA, 25 bp, Homo sapien
acaactgggcacaaagaagtaacat

SEQ ID NO: 520356 - DNA, 25 bp, Homo sapien
gagccactggagctgtgtgacatct

SEQ ID NO: 520357 - DNA, 25 bp, Homo sapien
gctgagccactggagctgtgtgaca

SEQ ID NO: 520358 - DNA, 25 bp, Homo sapien
cactggagctgtgtgacatcttgac

SEQ ID NO: 520359 - DNA, 25 bp, Homo sapien
ctgactcagactggctgagccactg

SEQ ID NO: 520360 - DNA, 25 bp, Homo sapien
ggactaattcttggtactgattgac

SEQ ID NO: 520361 - DNA, 25 bp, Homo sapien
tggcttcattctggactaattcttg

SEQ ID NO: 520362 - DNA, 25 bp, Homo sapien
ctaattcttggtactgattgactac

SEQ ID NO: 520363 - DNA, 25 bp, Homo sapien
cattctggactaattcttggtactg

SEQ ID NO: 520364 - DNA, 25 bp, Homo sapien
gaataatgactattaatggcaaaaa

SEQ ID NO: 520365 - DNA, 25 bp, Homo sapien
atcggtctttgatccaataatgaac

SEQ ID NO: 520366 - DNA, 25 bp, Homo sapien
gcatcggtctttgatccaataatga

SEQ ID NO: 520367 - DNA, 25 bp, Homo sapien
cagcatcggtctttgatccaataat

SEQ ID NO: 520368 - DNA, 25 bp, Homo sapien
ctctcagcatcggtctttgatccaa

SEQ ID NO: 520369 - DNA, 25 bp, Homo sapien
aatttgaatgatcatctgtggacga

SEQ ID NO: 520370 - DNA, 25 bp, Homo sapien
caatttgaatgatcatctgtggacg

SEQ ID NO: 520371 - DNA, 25 bp, Homo sapien
atttgaatgatcatctgtggacgag

SEQ ID NO: 520372 - DNA, 25 bp, Homo sapien
tgtgatggagacatctggctgtcac

SEQ ID NO: 520373 - DNA, 25 bp, Homo sapien
tcatctgctttacatggctgtattt

SEQ ID NO: 520374 - DNA, 25 bp, Homo sapien
ggctgtattttaccatagtaaagtg

SEQ ID NO: 520375 - DNA, 25 bp, Homo sapien
gtaaagtggatctccaagcgactgc

SEQ ID NO: 520376 - DNA, 25 bp, Homo sapien
cgactgcaagatggtcagctttgtt

SEQ ID NO: 520377 - DNA, 25 bp, Homo sapien
taagtctgcctatgagaataaagca

SEQ ID NO: 520378 - DNA, 25 bp, Homo sapien
cctaaaaactatatgggcactcagc

SEQ ID NO: 520379 - DNA, 25 bp, Homo sapien
gtatctgacgataggaagacacaca

SEQ ID NO: 520380 - DNA, 25 bp, Homo sapien
aataccttcacaagtaggcaggcaa

SEQ ID NO: 520381 - DNA, 25 bp, Homo sapien
ggctgtgagtcatcagatttgatag

SEQ ID NO: 520382 - DNA, 25 bp, Homo sapien
ttgatagacttttccactttagcat

SEQ ID NO: 520383 - DNA, 25 bp, Homo sapien
ctgtgagtcatcagatttgatagac

SEQ ID NO: 520384 - DNA, 25 bp, Homo sapien
gatagacttttccactttagcatat

SEQ ID NO: 520385 - DNA, 25 bp, Homo sapien
ctacttcagaaggtatggccaaatt

SEQ ID NO: 520386 - DNA, 25 bp, Homo sapien
ttcagaaggtatggccaaattacag

SEQ ID NO: 520387 - DNA, 25 bp, Homo sapien
acttcagaaggtatggccaaattac

SEQ ID NO: 520388 - DNA, 25 bp, Homo sapien
cttcagaaggtatggccaaattaca

SEQ ID NO: 520389 - DNA, 25 bp, Homo sapien
caatgagatagatcttgctgccgat

SEQ ID NO: 520390 - DNA, 25 bp, Homo sapien
cttgctgccgattcagagaggatct

SEQ ID NO: 520391 - DNA, 25 bp, Homo sapien
tgaggtcataatgctgacctgcttt

SEQ ID NO: 520392 - DNA, 25 bp, Homo sapien
gaggaggtggacaatgagatagatc

SEQ ID NO: 520393 - DNA, 25 bp, Homo sapien
gagctggctctcaagcaaaagtttg

SEQ ID NO: 520394 - DNA, 25 bp, Homo sapien
gcaggtgactgctatagaaggatca

SEQ ID NO: 520395 - DNA, 25 bp, Homo sapien
tcattgggcgagtgttcatcttttg

SEQ ID NO: 520396 - DNA, 25 bp, Homo sapien
tatagagcagtctgtttgcagtgca

SEQ ID NO: 520397 - DNA, 25 bp, Homo sapien
tacagttcataacaagaagggcagg

SEQ ID NO: 520398 - DNA, 25 bp, Homo sapien
catcttcaatcagtgggtttgatca

SEQ ID NO: 520399 - DNA, 25 bp, Homo sapien
gaaatactgctgtctagattcacta

SEQ ID NO: 520400 - DNA, 25 bp, Homo sapien
tcttgcatcaaaccaggaggtacac

SEQ ID NO: 520401 - DNA, 25 bp, Homo sapien
gcttagtttataatcacatgtcaca

SEQ ID NO: 520402 - DNA, 25 bp, Homo sapien
tactgatgaactgaagcttagttta

SEQ ID NO: 520403 - DNA, 25 bp, Homo sapien
caaaacacaatacttggtagttact

SEQ ID NO: 520404 - DNA, 25 bp, Homo sapien
tagcaaactctgatggtaaccaatg

SEQ ID NO: 520405 - DNA, 25 bp, Homo sapien
gcatcccgatcagctgcaaaagcag

SEQ ID NO: 520406 - DNA, 25 bp, Homo sapien
cactataggcctctcaactggttca

SEQ ID NO: 520407 - DNA, 25 bp, Homo sapien
taggtatgcaccttacagtccagat

SEQ ID NO: 520408 - DNA, 25 bp, Homo sapien
actcgatgggtaccaaaaccactgc

SEQ ID NO: 520409 - DNA, 25 bp, Homo sapien
tggttatcacttgttattgaatgta

SEQ ID NO: 520410 - DNA, 25 bp, Homo sapien
ttgtggttatcacttgttattgaat

SEQ ID NO: 520411 - DNA, 25 bp, Homo sapien
tgtggttatcacttgttattgaatg

SEQ ID NO: 520412 - DNA, 25 bp, Homo sapien
gtggttatcacttgttattgaatgt

SEQ ID NO: 520413 - DNA, 25 bp, Homo sapien
ttggacgtaagagaatgtgccgact

SEQ ID NO: 520414 - DNA, 25 bp, Homo sapien
ggagatttcatgttactggactgcc

SEQ ID NO: 520415 - DNA, 25 bp, Homo sapien
ctgcattgttggacgtaagagaatg

SEQ ID NO: 520416 - DNA, 25 bp, Homo sapien
aatgtgccgactttggtaaccagga

SEQ ID NO: 520417 - DNA, 25 bp, Homo sapien
gacacatccgcaatgaaaaatatta

SEQ ID NO: 520418 - DNA, 25 bp, Homo sapien
tgacacatccgcaatgaaaaatatt

SEQ ID NO: 520419 - DNA, 25 bp, Homo sapien
ctatgacacatccgcaatgaaaaat

SEQ ID NO: 520420 - DNA, 25 bp, Homo sapien
tatgacacatccgcaatgaaaaata

SEQ ID NO: 520421 - DNA, 25 bp, Homo sapien
ccaaaataggaggtaattcttctgc

SEQ ID NO: 520422 - DNA, 25 bp, Homo sapien
ctccttcttcatagggcagtcgaat

SEQ ID NO: 520423 - DNA, 25 bp, Homo sapien
tccttcttcatagggcagtcgaatg

SEQ ID NO: 520424 - DNA, 25 bp, Homo sapien
tttctaggagatcaaccaaaatagg

SEQ ID NO: 520425 - DNA, 25 bp, Homo sapien
gcttctctaacaagttcacatttct

SEQ ID NO: 520426 - DNA, 25 bp, Homo sapien
ttgaccactaaacatgacaaagtct

SEQ ID NO: 520427 - DNA, 25 bp, Homo sapien
tccctcatttcctgggtatagattg

SEQ ID NO: 520428 - DNA, 25 bp, Homo sapien
gagaatatccctcatttcctgggta

SEQ ID NO: 520429 - DNA, 25 bp, Homo sapien
ccgagggctccaagacatcaataaa

SEQ ID NO: 520430 - DNA, 25 bp, Homo sapien
catagagacgtttagacccttccaa

SEQ ID NO: 520431 - DNA, 25 bp, Homo sapien
gccatgaactcggtttatgaccaag

SEQ ID NO: 520432 - DNA, 25 bp, Homo sapien
tctcaggaggaagtgctataaactc

SEQ ID NO: 520433 - DNA, 25 bp, Homo sapien
gcctggtgccagattagccagagct

SEQ ID NO: 520434 - DNA, 25 bp, Homo sapien
gccagagctctgagtcagctacaga

SEQ ID NO: 520435 - DNA, 25 bp, Homo sapien
cctggtgccagattagccagagctc

SEQ ID NO: 520436 - DNA, 25 bp, Homo sapien
agctctgagtcagctacagaattga

SEQ ID NO: 520437 - DNA, 25 bp, Homo sapien
tactccaaatgtaactcctccaaat

SEQ ID NO: 520438 - DNA, 25 bp, Homo sapien
aataatactccaaatgtaactcctc

SEQ ID NO: 520439 - DNA, 25 bp, Homo sapien
tcaggttaaaaaagatgttagttca

SEQ ID NO: 520440 - DNA, 25 bp, Homo sapien
caaatgtaactcctccaaattcctc

SEQ ID NO: 520441 - DNA, 25 bp, Homo sapien
cacattcttcaatatacaagtcata

SEQ ID NO: 520442 - DNA, 25 bp, Homo sapien
ttttaggaggtctctgtcgggcact

SEQ ID NO: 520443 - DNA, 25 bp, Homo sapien
ttaggaggtctctgtcgggcacttt

SEQ ID NO: 520444 - DNA, 25 bp, Homo sapien
tttaggaggtctctgtcgggcactt

SEQ ID NO: 520445 - DNA, 25 bp, Homo sapien
gtctctgtcgggcactttcaatgac

SEQ ID NO: 520446 - DNA, 25 bp, Homo sapien
ctctgcacgatccaaagctagttct

SEQ ID NO: 520447 - DNA, 25 bp, Homo sapien
tctgcacgatccaaagctagttcta

SEQ ID NO: 520448 - DNA, 25 bp, Homo sapien
gcacgatccaaagctagttctaaag

SEQ ID NO: 520449 - DNA, 25 bp, Homo sapien
tgcacgatccaaagctagttctaaa

SEQ ID NO: 520450 - DNA, 25 bp, Homo sapien
tatggcataaaataagggtccaaaa

SEQ ID NO: 520451 - DNA, 25 bp, Homo sapien
atggcataaaataagggtccaaaag

SEQ ID NO: 520452 - DNA, 25 bp, Homo sapien
ggtgaacaccatgcctttaacatca

SEQ ID NO: 520453 - DNA, 25 bp, Homo sapien
tacgctgatgaagtggggtgaacac

SEQ ID NO: 520454 - DNA, 25 bp, Homo sapien
tgaagtggggtgaacaccatgcctt

SEQ ID NO: 520455 - DNA, 25 bp, Homo sapien
cgctgatgaagtggggtgaacacca

SEQ ID NO: 520456 - DNA, 25 bp, Homo sapien
caaggaggaggtggtaccattcctt

SEQ ID NO: 520457 - DNA, 25 bp, Homo sapien
gaggtacaaggaggaggtggtacca

SEQ ID NO: 520458 - DNA, 25 bp, Homo sapien
gtacaaggaggaggtggtaccattc

SEQ ID NO: 520459 - DNA, 25 bp, Homo sapien
cagaggtacaaggaggaggtggtac

SEQ ID NO: 520460 - DNA, 25 bp, Homo sapien
tggacaccaagaaaaccgccttcga

SEQ ID NO: 520461 - DNA, 25 bp, Homo sapien
tctccacagaggagcgacaagcctt

SEQ ID NO: 520462 - DNA, 25 bp, Homo sapien
caagcctttatgcaatatggacacc

SEQ ID NO: 520463 - DNA, 25 bp, Homo sapien
gaagacacgcaaggcaaaattcttg

SEQ ID NO: 520464 - DNA, 25 bp, Homo sapien
cctggagtttagctgcctcaacctc

SEQ ID NO: 520465 - DNA, 25 bp, Homo sapien
ccgcgaaaggcgatgtaggcgtcca

SEQ ID NO: 520466 - DNA, 25 bp, Homo sapien
tgtaggcgtccacctggagtttagc

SEQ ID NO: 520467 - DNA, 25 bp, Homo sapien
taaaagttcggcttagcaacaccgc

SEQ ID NO: 520468 - DNA, 25 bp, Homo sapien
tgaccctggccggatctcgcgcgtc

SEQ ID NO: 520469 - DNA, 25 bp, Homo sapien
gcgtctaagccaccgcgttgccagt

SEQ ID NO: 520470 - DNA, 25 bp, Homo sapien
ttgccagtcgctggccacccaccta

SEQ ID NO: 520471 - DNA, 25 bp, Homo sapien
ctggccggatctcgcgcgtctaagc

SEQ ID NO: 520472 - DNA, 25 bp, Homo sapien
gtcgcctcgccgctaggccccaaga

SEQ ID NO: 520473 - DNA, 25 bp, Homo sapien
cggcggccgcacttccgattggcag

SEQ ID NO: 520474 - DNA, 25 bp, Homo sapien
gccgcctgctcggcagcaaagccca

SEQ ID NO: 520475 - DNA, 25 bp, Homo sapien
caccaacagccagttccggcggccg

SEQ ID NO: 520476 - DNA, 25 bp, Homo sapien
tgctgtcagggctgttaccttgagc

SEQ ID NO: 520477 - DNA, 25 bp, Homo sapien
ggtacttgtgatgcaaataactcat

SEQ ID NO: 520478 - DNA, 25 bp, Homo sapien
tcagggctgttaccttgagctcccc

SEQ ID NO: 520479 - DNA, 25 bp, Homo sapien
gatgcaaataactcatgaggagcct

SEQ ID NO: 520480 - DNA, 25 bp, Homo sapien
tccttccctaatgctcgccactctg

SEQ ID NO: 520481 - DNA, 25 bp, Homo sapien
tagtgggtcctcgattttagagttg

SEQ ID NO: 520482 - DNA, 25 bp, Homo sapien
ttattttcttatgagtatcactctg

SEQ ID NO: 520483 - DNA, 25 bp, Homo sapien
ctaatgctcgccactctggtaccat

SEQ ID NO: 520484 - DNA, 25 bp, Homo sapien
agccacagccgtgacaacggaaaga

SEQ ID NO: 520485 - DNA, 25 bp, Homo sapien
tccacacttccaatacccagatcat

SEQ ID NO: 520486 - DNA, 25 bp, Homo sapien
ccgtgacaacggaaagacaaagcct

SEQ ID NO: 520487 - DNA, 25 bp, Homo sapien
cagccgtgacaacggaaagacaaag

SEQ ID NO: 520488 - DNA, 25 bp, Homo sapien
ctgtgtttgtgtaagtcttgtgcat

SEQ ID NO: 520489 - DNA, 25 bp, Homo sapien
tgtttgtgtaagtcttgtgcatgtt

SEQ ID NO: 520490 - DNA, 25 bp, Homo sapien
gtgtttgtgtaagtcttgtgcatgt

SEQ ID NO: 520491 - DNA, 25 bp, Homo sapien
tacagaggctacactttgggataca

SEQ ID NO: 520492 - DNA, 25 bp, Homo sapien
ggttactactagatcagctggctta

SEQ ID NO: 520493 - DNA, 25 bp, Homo sapien
cacaggtaagcaggcggaatctttc

SEQ ID NO: 520494 - DNA, 25 bp, Homo sapien
tatttcctagtgaatcagcaaggca

SEQ ID NO: 520495 - DNA, 25 bp, Homo sapien
gtccaatcaaatgtgtagtcatatt

SEQ ID NO: 520496 - DNA, 25 bp, Homo sapien
tccaatcaaatgtgtagtcatattg

SEQ ID NO: 520497 - DNA, 25 bp, Homo sapien
gttcaagtacatggcgaattctgca

SEQ ID NO: 520498 - DNA, 25 bp, Homo sapien
gcagcccacgacagtagttcaagta

SEQ ID NO: 520499 - DNA, 25 bp, Homo sapien
agcccttagtccttgccacggcagg

SEQ ID NO: 520500 - DNA, 25 bp, Homo sapien
gaaaacgtagcctaaggattccatg

SEQ ID NO: 520501 - DNA, 25 bp, Homo sapien
tcctgaccataccagtgcatgtggg

SEQ ID NO: 520502 - DNA, 25 bp, Homo sapien
ttcctgaccataccagtgcatgtgg

SEQ ID NO: 520503 - DNA, 25 bp, Homo sapien
tcccacaacgagttcggctttggag

SEQ ID NO: 520504 - DNA, 25 bp, Homo sapien
gctttggagccgctgttgtttgtca

SEQ ID NO: 520505 - DNA, 25 bp, Homo sapien
actgctacgtcctcgccgttggtgg

SEQ ID NO: 520506 - DNA, 25 bp, Homo sapien
tgcccagataaacgtctccaaagga

SEQ ID NO: 520507 - DNA, 25 bp, Homo sapien
gccctgacccctctaggggaggatg

SEQ ID NO: 520508 - DNA, 25 bp, Homo sapien
tggaaatggccaccgaggcgtttcc

SEQ ID NO: 520509 - DNA, 25 bp, Homo sapien
cccggtgttacagggcgtggagtca

SEQ ID NO: 520510 - DNA, 25 bp, Homo sapien
ttacagggcgtggagtcagcctgat

SEQ ID NO: 520511 - DNA, 25 bp, Homo sapien
acctctttctcggtggcggtcgctg

SEQ ID NO: 520512 - DNA, 25 bp, Homo sapien
caggatttccgccaggccacagttt

SEQ ID NO: 520513 - DNA, 25 bp, Homo sapien
gccacagtttgcgagggtttctcaa

SEQ ID NO: 520514 - DNA, 25 bp, Homo sapien
ggtttctcaaggttccaggctgggc

SEQ ID NO: 520515 - DNA, 25 bp, Homo sapien
gaaagggggcacagcgagttggggc

SEQ ID NO: 520516 - DNA, 25 bp, Homo sapien
aaagggggcacagcgagttggggca

SEQ ID NO: 520517 - DNA, 25 bp, Homo sapien
agaaagggggcacagcgagttgggg

SEQ ID NO: 520518 - DNA, 25 bp, Homo sapien
agagggcccggtcacgccgccggcg

SEQ ID NO: 520519 - DNA, 25 bp, Homo sapien
cagagggcccggtcacgccgccggc

SEQ ID NO: 520520 - DNA, 25 bp, Homo sapien
gccagagggcccggtcacgccgccg

SEQ ID NO: 520521 - DNA, 25 bp, Homo sapien
ccagagggcccggtcacgccgccgg

SEQ ID NO: 520522 - DNA, 25 bp, Homo sapien
gatgactcattactattttcagtgt

SEQ ID NO: 520523 - DNA, 25 bp, Homo sapien
tgggtcagttttggagatgactcat

SEQ ID NO: 520524 - DNA, 25 bp, Homo sapien
aattactttagaagagatacaaaag

SEQ ID NO: 520525 - DNA, 25 bp, Homo sapien
tactttagaagagatacaaaagaac

SEQ ID NO: 520526 - DNA, 25 bp, Homo sapien
ttatcccctggcatcctctgcggca

SEQ ID NO: 520527 - DNA, 25 bp, Homo sapien
cccctggcatcctctgcggcatctg

SEQ ID NO: 520528 - DNA, 25 bp, Homo sapien
tggcatcctctgcggcatctgacct

SEQ ID NO: 520529 - DNA, 25 bp, Homo sapien
cctggcatcctctgcggcatctgac

SEQ ID NO: 520530 - DNA, 25 bp, Homo sapien
attctgctcctatgagggtggtgtc

SEQ ID NO: 520531 - DNA, 25 bp, Homo sapien
ggctggatggaggaattcttttcct

SEQ ID NO: 520532 - DNA, 25 bp, Homo sapien
gtgattctgctcctatgagggtggt

SEQ ID NO: 520533 - DNA, 25 bp, Homo sapien
gaattgctggatcaagatacagttg

SEQ ID NO: 520534 - DNA, 25 bp, Homo sapien
gcctctacaccccatcaaattctca

SEQ ID NO: 520535 - DNA, 25 bp, Homo sapien
agctgtctgcctctacaccccatca

SEQ ID NO: 520536 - DNA, 25 bp, Homo sapien
gtctgcctctacaccccatcaaatt

SEQ ID NO: 520537 - DNA, 25 bp, Homo sapien
caagcagctgtctgcctctacaccc

SEQ ID NO: 520538 - DNA, 25 bp, Homo sapien
aagacagcatagctactcgtatacc

SEQ ID NO: 520539 - DNA, 25 bp, Homo sapien
tctagcaagacagcatagctactcg

SEQ ID NO: 520540 - DNA, 25 bp, Homo sapien
aggttctagcaagacagcatagcta

SEQ ID NO: 520541 - DNA, 25 bp, Homo sapien
gcaagacagcatagctactcgtata

SEQ ID NO: 520542 - DNA, 25 bp, Homo sapien
tgcactgttcctgtctaaagagaaa

SEQ ID NO: 520543 - DNA, 25 bp, Homo sapien
gctgggcatgcttcttctctacatc

SEQ ID NO: 520544 - DNA, 25 bp, Homo sapien
ttaggtgcaacttgctccatctgtc

SEQ ID NO: 520545 - DNA, 25 bp, Homo sapien
aagagaaagcccttaaggcttcttg

SEQ ID NO: 520546 - DNA, 25 bp, Homo sapien
tggacttgctggccgttgcaagctc

SEQ ID NO: 520547 - DNA, 25 bp, Homo sapien
ctggacttgctggccgttgcaagct

SEQ ID NO: 520548 - DNA, 25 bp, Homo sapien
ttaaactctgatgagcatcctctga

SEQ ID NO: 520549 - DNA, 25 bp, Homo sapien
ccttaaactctgatgagcatcctct

SEQ ID NO: 520550 - DNA, 25 bp, Homo sapien
aaactctgatgagcatcctctgatt

SEQ ID NO: 520551 - DNA, 25 bp, Homo sapien
taaactctgatgagcatcctctgat

SEQ ID NO: 520552 - DNA, 25 bp, Homo sapien
cagaactgcaaccaatcactttaaa

SEQ ID NO: 520553 - DNA, 25 bp, Homo sapien
tttgtcagttatgcagaggacaacc

SEQ ID NO: 520554 - DNA, 25 bp, Homo sapien
cttgtatctaaagtactcttcaatg

SEQ ID NO: 520555 - DNA, 25 bp, Homo sapien
agaaaggacatccaccaacttgaca

SEQ ID NO: 520556 - DNA, 25 bp, Homo sapien
tgcagttggatgcaagcatacaaag

SEQ ID NO: 520557 - DNA, 25 bp, Homo sapien
ttggatgcaagcatacaaagacggg

SEQ ID NO: 520558 - DNA, 25 bp, Homo sapien
gttggatgcaagcatacaaagacgg

SEQ ID NO: 520559 - DNA, 25 bp, Homo sapien
cagttggatgcaagcatacaaagac

SEQ ID NO: 520560 - DNA, 25 bp, Homo sapien
tctgtgaattccatgtactgggctc

SEQ ID NO: 520561 - DNA, 25 bp, Homo sapien
gatgaggatagtcttcagcactttt

SEQ ID NO: 520562 - DNA, 25 bp, Homo sapien
gaggatagtcttcagcactttttgc

SEQ ID NO: 520563 - DNA, 25 bp, Homo sapien
tgaggatagtcttcagcactttttg

SEQ ID NO: 520564 - DNA, 25 bp, Homo sapien
ctgtggatgaggatagtcttcagca

SEQ ID NO: 520565 - DNA, 25 bp, Homo sapien
ttagcagcaatgccttcatcgacca

SEQ ID NO: 520566 - DNA, 25 bp, Homo sapien
tagcagcaatgccttcatcgaccat

SEQ ID NO: 520567 - DNA, 25 bp, Homo sapien
ctttagcagcaatgccttcatcgac

SEQ ID NO: 520568 - DNA, 25 bp, Homo sapien
tttagcagcaatgccttcatcgacc

SEQ ID NO: 520569 - DNA, 25 bp, Homo sapien
taaactgtgaaacacttggtacaaa

SEQ ID NO: 520570 - DNA, 25 bp, Homo sapien
ataaactgtgaaacacttggtacaa

SEQ ID NO: 520571 - DNA, 25 bp, Homo sapien
gcaagtattctcacttcttacattt

SEQ ID NO: 520572 - DNA, 25 bp, Homo sapien
ttgcaagtattctcacttcttacat

SEQ ID NO: 520573 - DNA, 25 bp, Homo sapien
caagtattctcacttcttacatttg

SEQ ID NO: 520574 - DNA, 25 bp, Homo sapien
agtattctcacttcttacatttgta

SEQ ID NO: 520575 - DNA, 25 bp, Homo sapien
ccttgactctcatcacttagtaaca

SEQ ID NO: 520576 - DNA, 25 bp, Homo sapien
tgtatgccttgactctcatcactta

SEQ ID NO: 520577 - DNA, 25 bp, Homo sapien
ccttgtatgccttgactctcatcac

SEQ ID NO: 520578 - DNA, 25 bp, Homo sapien
tatgccttgactctcatcacttagt

SEQ ID NO: 520579 - DNA, 25 bp, Homo sapien
ttctttttgaggctagtataatgta

SEQ ID NO: 520580 - DNA, 25 bp, Homo sapien
cctggttttagacttcagcctcagc

SEQ ID NO: 520581 - DNA, 25 bp, Homo sapien
actcctggttttagacttcagcctc

SEQ ID NO: 520582 - DNA, 25 bp, Homo sapien
tctttttgaggctagtataatgtag

SEQ ID NO: 520583 - DNA, 25 bp, Homo sapien
gtaccgcacaccacacgcaagtatt

SEQ ID NO: 520584 - DNA, 25 bp, Homo sapien
cacacgcaagtattcctggcttcta

SEQ ID NO: 520585 - DNA, 25 bp, Homo sapien
tctactttgaatcccaccacatttc

SEQ ID NO: 520586 - DNA, 25 bp, Homo sapien
tgaatcccaccacatttcagggcat

SEQ ID NO: 520587 - DNA, 25 bp, Homo sapien
aaccatcattgggagagtttgaatt

SEQ ID NO: 520588 - DNA, 25 bp, Homo sapien
tgatctttagctcttggtaaatggc

SEQ ID NO: 520589 - DNA, 25 bp, Homo sapien
aaatcatgatctttagctcttggta

SEQ ID NO: 520590 - DNA, 25 bp, Homo sapien
cattgggagagtttgaattctgtac

SEQ ID NO: 520591 - DNA, 25 bp, Homo sapien
gtgcatagaactgctacctgagaag

SEQ ID NO: 520592 - DNA, 25 bp, Homo sapien
tgtggttgtcctttgggcccagact

SEQ ID NO: 520593 - DNA, 25 bp, Homo sapien
aaggttcattactgtcattgcacat

SEQ ID NO: 520594 - DNA, 25 bp, Homo sapien
cagaatgatgtctcaaaatgtccac

SEQ ID NO: 520595 - DNA, 25 bp, Homo sapien
cacagctggcatagttacaagacct

SEQ ID NO: 520596 - DNA, 25 bp, Homo sapien
tctccattgctcataaaggtcagtg

SEQ ID NO: 520597 - DNA, 25 bp, Homo sapien
gagatcatgggaaggcttaacacac

SEQ ID NO: 520598 - DNA, 25 bp, Homo sapien
tagtgggacgggatatccaccagtc

SEQ ID NO: 520599 - DNA, 25 bp, Homo sapien
tagagatgtgaagacaaggtgcctt

SEQ ID NO: 520600 - DNA, 25 bp, Homo sapien
tttgtagagatgtgaagacaaggtg

SEQ ID NO: 520601 - DNA, 25 bp, Homo sapien
tgtagagatgtgaagacaaggtgcc

SEQ ID NO: 520602 - DNA, 25 bp, Homo sapien
gtagagatgtgaagacaaggtgcct

SEQ ID NO: 520603 - DNA, 25 bp, Homo sapien
tcatccataagcacggattttgaaa

SEQ ID NO: 520604 - DNA, 25 bp, Homo sapien
cataagcacggattttgaaaatcat

SEQ ID NO: 520605 - DNA, 25 bp, Homo sapien
catccataagcacggattttgaaaa

SEQ ID NO: 520606 - DNA, 25 bp, Homo sapien
tccataagcacggattttgaaaatc

SEQ ID NO: 520607 - DNA, 25 bp, Homo sapien
ccaaatgtgttgacagcagaggctg

SEQ ID NO: 520608 - DNA, 25 bp, Homo sapien
aacactcagtggaggatgccagcta

SEQ ID NO: 520609 - DNA, 25 bp, Homo sapien
taacatccctgtggaggcaaggtgg

SEQ ID NO: 520610 - DNA, 25 bp, Homo sapien
cgttcctggtctgctgacaataaca

SEQ ID NO: 520611 - DNA, 25 bp, Homo sapien
tgtaggacaacttcaccttctctcc

SEQ ID NO: 520612 - DNA, 25 bp, Homo sapien
tatatcttcttttcaatatcagaca

SEQ ID NO: 520613 - DNA, 25 bp, Homo sapien
atatttgtaggacaacttcaccttc

SEQ ID NO: 520614 - DNA, 25 bp, Homo sapien
tttgtaggacaacttcaccttctct

SEQ ID NO: 520615 - DNA, 25 bp, Homo sapien
cagcgaaggagtagaaataatagaa

SEQ ID NO: 520616 - DNA, 25 bp, Homo sapien
ggataaaagacagcgaaggagtaga

SEQ ID NO: 520617 - DNA, 25 bp, Homo sapien
tcaaaggataaaagacagcgaagga

SEQ ID NO: 520618 - DNA, 25 bp, Homo sapien
taaaagacagcgaaggagtagaaat

SEQ ID NO: 520619 - DNA, 25 bp, Homo sapien
tgaatggtaatacagattcagtctc

SEQ ID NO: 520620 - DNA, 25 bp, Homo sapien
ctccagtcgttcttctgtggaggag

SEQ ID NO: 520621 - DNA, 25 bp, Homo sapien
catctgggtgggcatttgtactcat

SEQ ID NO: 520622 - DNA, 25 bp, Homo sapien
tctgtggaggaggtactttcctctt

SEQ ID NO: 520623 - DNA, 25 bp, Homo sapien
gccagaatcctcatagaataagaga

SEQ ID NO: 520624 - DNA, 25 bp, Homo sapien
tgaggaatgcggcacatgagcttga

SEQ ID NO: 520625 - DNA, 25 bp, Homo sapien
tcagtgttcgatggagagacaaacc

SEQ ID NO: 520626 - DNA, 25 bp, Homo sapien
tgttcaaatcctatggtagagagtg

SEQ ID NO: 520627 - DNA, 25 bp, Homo sapien
tgggcttcccaggtattttcccaca

SEQ ID NO: 520628 - DNA, 25 bp, Homo sapien
cattgcagtttaactcatggaaaca

SEQ ID NO: 520629 - DNA, 25 bp, Homo sapien
gcacctttattcctgccagcctgtt

SEQ ID NO: 520630 - DNA, 25 bp, Homo sapien
tctccagggttgatttccactgtct

SEQ ID NO: 520631 - DNA, 25 bp, Homo sapien
gcacattgatgcgtctttttgaaag

SEQ ID NO: 520632 - DNA, 25 bp, Homo sapien
tctgggcatccacaattaaactgac

SEQ ID NO: 520633 - DNA, 25 bp, Homo sapien
taatcaggtccttaaattgcacatt

SEQ ID NO: 520634 - DNA, 25 bp, Homo sapien
aaggttgagcttgtgtctgggcatc

SEQ ID NO: 520635 - DNA, 25 bp, Homo sapien
tttgttagtgtgtgatggactccag

SEQ ID NO: 520636 - DNA, 25 bp, Homo sapien
tctaagtagacatgggcctgctgac

SEQ ID NO: 520637 - DNA, 25 bp, Homo sapien
gggatctctaagtagacatgggcct

SEQ ID NO: 520638 - DNA, 25 bp, Homo sapien
actctgacacgggtttgttagtgtg

SEQ ID NO: 520639 - DNA, 25 bp, Homo sapien
caggggaagtcgtagaatccccttg

SEQ ID NO: 520640 - DNA, 25 bp, Homo sapien
ccccttgtctccctaattagaatca

SEQ ID NO: 520641 - DNA, 25 bp, Homo sapien
gaagtcgtagaatccccttgtctcc

SEQ ID NO: 520642 - DNA, 25 bp, Homo sapien
tagaatccccttgtctccctaatta

SEQ ID NO: 520643 - DNA, 25 bp, Homo sapien
gcttcctgttcccaccaaagtggcc

SEQ ID NO: 520644 - DNA, 25 bp, Homo sapien
ggccacccttgtgcccattcctgct

SEQ ID NO: 520645 - DNA, 25 bp, Homo sapien
cacccttgtgcccattcctgctgtg

SEQ ID NO: 520646 - DNA, 25 bp, Homo sapien
tcctgttcccaccaaagtggccacc

SEQ ID NO: 520647 - DNA, 25 bp, Homo sapien
gagattctagaacaccttgtacttg

SEQ ID NO: 520648 - DNA, 25 bp, Homo sapien
cttgtgctctagcaattgagggagg

SEQ ID NO: 520649 - DNA, 25 bp, Homo sapien
acaccttgtacttgtgctctagcaa

SEQ ID NO: 520650 - DNA, 25 bp, Homo sapien
tctagaacaccttgtacttgtgctc

SEQ ID NO: 520651 - DNA, 25 bp, Homo sapien
gctactggaggttccaccaatgatt

SEQ ID NO: 520652 - DNA, 25 bp, Homo sapien
ccttgctaagaggtcatagactgaa

SEQ ID NO: 520653 - DNA, 25 bp, Homo sapien
aacataaaatatggcagcatgctac

SEQ ID NO: 520654 - DNA, 25 bp, Homo sapien
ttttaagtgctctggcactttgaga

SEQ ID NO: 520655 - DNA, 25 bp, Homo sapien
aaggctttttgctggtggtttctgt

SEQ ID NO: 520656 - DNA, 25 bp, Homo sapien
ctttccaggaaggctttttgctggt

SEQ ID NO: 520657 - DNA, 25 bp, Homo sapien
caggaaggctttttgctggtggttt

SEQ ID NO: 520658 - DNA, 25 bp, Homo sapien
ttccaggaaggctttttgctggtgg

SEQ ID NO: 520659 - DNA, 25 bp, Homo sapien
cttgacaaggaggaggaacgtctgt

SEQ ID NO: 520660 - DNA, 25 bp, Homo sapien
tggaagatgtggtagagtgctttca

SEQ ID NO: 520661 - DNA, 25 bp, Homo sapien
gaggaggaacgtctgtggaagatgt

SEQ ID NO: 520662 - DNA, 25 bp, Homo sapien
gatgtggtagagtgctttcatccta

SEQ ID NO: 520663 - DNA, 25 bp, Homo sapien
atagaaatttatacttcatgtaagt

SEQ ID NO: 520664 - DNA, 25 bp, Homo sapien
ttatacttcatgtaagttagttaac

SEQ ID NO: 520665 - DNA, 25 bp, Homo sapien
gaaatttatacttcatgtaagttag

SEQ ID NO: 520666 - DNA, 25 bp, Homo sapien
tacttcatgtaagttagttaactgt

SEQ ID NO: 520667 - DNA, 25 bp, Homo sapien
tggcttattacacacccacttaggg

SEQ ID NO: 520668 - DNA, 25 bp, Homo sapien
taagtgtgggagttcatgtatgtac

SEQ ID NO: 520669 - DNA, 25 bp, Homo sapien
tatgtactgacgttgagtagccaca

SEQ ID NO: 520670 - DNA, 25 bp, Homo sapien
gggctgtgactagcaatgcaattgg

SEQ ID NO: 520671 - DNA, 25 bp, Homo sapien
ttgctccctctacttcgtagatggt

SEQ ID NO: 520672 - DNA, 25 bp, Homo sapien
tgctccctctacttcgtagatggtc

SEQ ID NO: 520673 - DNA, 25 bp, Homo sapien
aggaaatttcaggtactaaaggcat

SEQ ID NO: 520674 - DNA, 25 bp, Homo sapien
ttgcctgcatctggacgtgcagatg

SEQ ID NO: 520675 - DNA, 25 bp, Homo sapien
tttgattttgcctgcatctggacgt

SEQ ID NO: 520676 - DNA, 25 bp, Homo sapien
cctgcatctggacgtgcagatgtac

SEQ ID NO: 520677 - DNA, 25 bp, Homo sapien
atttgattttgcctgcatctggacg

SEQ ID NO: 520678 - DNA, 25 bp, Homo sapien
ttctaccaccttttgatctgtcact

SEQ ID NO: 520679 - DNA, 25 bp, Homo sapien
gaagatcttctaccaccttttgatc

SEQ ID NO: 520680 - DNA, 25 bp, Homo sapien
tcttctaccaccttttgatctgtca

SEQ ID NO: 520681 - DNA, 25 bp, Homo sapien
gatcttctaccaccttttgatctgt

SEQ ID NO: 520682 - DNA, 25 bp, Homo sapien
ttctccttgttgcatggcactgacc

SEQ ID NO: 520683 - DNA, 25 bp, Homo sapien
actgcgtaactgacttttctccttg

SEQ ID NO: 520684 - DNA, 25 bp, Homo sapien
tataccctggccaatctgggttagt

SEQ ID NO: 520685 - DNA, 25 bp, Homo sapien
cagagagtaactgcgtaactgactt

SEQ ID NO: 520686 - DNA, 25 bp, Homo sapien
agaactgtgttcatgactaagcgtg

SEQ ID NO: 520687 - DNA, 25 bp, Homo sapien
actgtgttcatgactaagcgtgctg

SEQ ID NO: 520688 - DNA, 25 bp, Homo sapien
tgttcatgactaagcgtgctgggcc

SEQ ID NO: 520689 - DNA, 25 bp, Homo sapien
tcatgactaagcgtgctgggccaca

SEQ ID NO: 520690 - DNA, 25 bp, Homo sapien
gatgggccgcctctaacttcagcat

SEQ ID NO: 520691 - DNA, 25 bp, Homo sapien
ggttttagtctaatcatgtgttttg

SEQ ID NO: 520692 - DNA, 25 bp, Homo sapien
tgtgatgggccgcctctaacttcag

SEQ ID NO: 520693 - DNA, 25 bp, Homo sapien
gtttggttttagtctaatcatgtgt

SEQ ID NO: 520694 - DNA, 25 bp, Homo sapien
tccgaacactagtctctggagagga

SEQ ID NO: 520695 - DNA, 25 bp, Homo sapien
aaagtgtgaaccttccgaacactag

SEQ ID NO: 520696 - DNA, 25 bp, Homo sapien
ttccaaagtgtgaaccttccgaaca

SEQ ID NO: 520697 - DNA, 25 bp, Homo sapien
gaaccttccgaacactagtctctgg

SEQ ID NO: 520698 - DNA, 25 bp, Homo sapien
tgcagagaagggttttatggccaag

SEQ ID NO: 520699 - DNA, 25 bp, Homo sapien
ttatggccaagcacctcctggaact

SEQ ID NO: 520700 - DNA, 25 bp, Homo sapien
gcagagaagggttttatggccaagc

SEQ ID NO: 520701 - DNA, 25 bp, Homo sapien
gggttttatggccaagcacctcctg

SEQ ID NO: 520702 - DNA, 25 bp, Homo sapien
tgctcaggagctgccaaatccccag

SEQ ID NO: 520703 - DNA, 25 bp, Homo sapien
ctcataaactgtggcacagtgctgc

SEQ ID NO: 520704 - DNA, 25 bp, Homo sapien
aatccccaggctcagattagatgcc

SEQ ID NO: 520705 - DNA, 25 bp, Homo sapien
gtactcataaactgtggcacagtgc

SEQ ID NO: 520706 - DNA, 25 bp, Homo sapien
cccatgtaaaagtcggaggagagaa

SEQ ID NO: 520707 - DNA, 25 bp, Homo sapien
tctactcagccatcagatacctagg

SEQ ID NO: 520708 - DNA, 25 bp, Homo sapien
ggcaattgcatcatgcgctgcacca

SEQ ID NO: 520709 - DNA, 25 bp, Homo sapien
tagccagaacttggtcacgtgccac

SEQ ID NO: 520710 - DNA, 25 bp, Homo sapien
ccgggattaggagtcttaacgactg

SEQ ID NO: 520711 - DNA, 25 bp, Homo sapien
taacgactgtctcactcccttttct

SEQ ID NO: 520712 - DNA, 25 bp, Homo sapien
caaatcagccacttgcaatgctgtg

SEQ ID NO: 520713 - DNA, 25 bp, Homo sapien
tgttgagaagcagtaaaaataagcc

SEQ ID NO: 520714 - DNA, 25 bp, Homo sapien
tctgctcacaagtgctactttggga

SEQ ID NO: 520715 - DNA, 25 bp, Homo sapien
cacaagtgctactttgggaagggtg

SEQ ID NO: 520716 - DNA, 25 bp, Homo sapien
tttgggaagggtggctctcatgaca

SEQ ID NO: 520717 - DNA, 25 bp, Homo sapien
tcacctctgctcacaagtgctactt

SEQ ID NO: 520718 - DNA, 25 bp, Homo sapien
tgatggaaggtgaaagccatgtctc

SEQ ID NO: 520719 - DNA, 25 bp, Homo sapien
atggaaggtgaaagccatgtctcac

SEQ ID NO: 520720 - DNA, 25 bp, Homo sapien
catgatggaaggtgaaagccatgtc

SEQ ID NO: 520721 - DNA, 25 bp, Homo sapien
tcatgatggaaggtgaaagccatgt

SEQ ID NO: 520722 - DNA, 25 bp, Homo sapien
caattaatgccctgaaaagctttca

SEQ ID NO: 520723 - DNA, 25 bp, Homo sapien
gatggctccttagatgtatattggc

SEQ ID NO: 520724 - DNA, 25 bp, Homo sapien
ttggctgatggatggctccttagat

SEQ ID NO: 520725 - DNA, 25 bp, Homo sapien
tgtatattggctcttgaagggtttc

SEQ ID NO: 520726 - DNA, 25 bp, Homo sapien
tcctgtgcggctctttctgagctac

SEQ ID NO: 520727 - DNA, 25 bp, Homo sapien
gttgacgctcttggtctcttgccca

SEQ ID NO: 520728 - DNA, 25 bp, Homo sapien
gttaagattaggagtatctgagcat

SEQ ID NO: 520729 - DNA, 25 bp, Homo sapien
gcagtgaattgtccccagagttgac

SEQ ID NO: 520730 - DNA, 25 bp, Homo sapien
caagcgcataggtctgctctgtgcc

SEQ ID NO: 520731 - DNA, 25 bp, Homo sapien
acaggaagaatacaggacaagcgca

SEQ ID NO: 520732 - DNA, 25 bp, Homo sapien
gaagaatacaggacaagcgcatagg

SEQ ID NO: 520733 - DNA, 25 bp, Homo sapien
caggacaagcgcataggtctgctct

SEQ ID NO: 520734 - DNA, 25 bp, Homo sapien
cttgtaggagagacccatatttgtc

SEQ ID NO: 520735 - DNA, 25 bp, Homo sapien
ctgcccttgtaggagagacccatat

SEQ ID NO: 520736 - DNA, 25 bp, Homo sapien
taggagagacccatatttgtccagc

SEQ ID NO: 520737 - DNA, 25 bp, Homo sapien
ggagagacccatatttgtccagctg

SEQ ID NO: 520738 - DNA, 25 bp, Homo sapien
gcatggcagggtctagactttccac

SEQ ID NO: 520739 - DNA, 25 bp, Homo sapien
cacatctggtaacactggaatccag

SEQ ID NO: 520740 - DNA, 25 bp, Homo sapien
tgcatggcagggtctagactttcca

SEQ ID NO: 520741 - DNA, 25 bp, Homo sapien
gactttccacatctggtaacactgg

SEQ ID NO: 520742 - DNA, 25 bp, Homo sapien
catttttgtccaagtggtttactag

SEQ ID NO: 520743 - DNA, 25 bp, Homo sapien
ttctctgttccaactcagtgaccac

SEQ ID NO: 520744 - DNA, 25 bp, Homo sapien
catttggccatttttgtccaagtgg

SEQ ID NO: 520745 - DNA, 25 bp, Homo sapien
cacatgatggtttttctctgttcca

SEQ ID NO: 520746 - DNA, 25 bp, Homo sapien
gacagcctgaatctcactgccaatt

SEQ ID NO: 520747 - DNA, 25 bp, Homo sapien
ttttcccctcaaaatatttgccaga

SEQ ID NO: 520748 - DNA, 25 bp, Homo sapien
ggaggacagcctgaatctcactgcc

SEQ ID NO: 520749 - DNA, 25 bp, Homo sapien
ctcactgccaattttcccctcaaaa

SEQ ID NO: 520750 - DNA, 25 bp, Homo sapien
tctgaattactcaatttgaagtaat

SEQ ID NO: 520751 - DNA, 25 bp, Homo sapien
tttctgaattactcaatttgaagta

SEQ ID NO: 520752 - DNA, 25 bp, Homo sapien
ttctgaattactcaatttgaagtaa

SEQ ID NO: 520753 - DNA, 25 bp, Homo sapien
gagagataatggcttgcgtgcattt

SEQ ID NO: 520754 - DNA, 25 bp, Homo sapien
ttttataacttagcttcccatggag

SEQ ID NO: 520755 - DNA, 25 bp, Homo sapien
acaaggctcggtcttttcaatggga

SEQ ID NO: 520756 - DNA, 25 bp, Homo sapien
ggataacagttcacaactcttcgat

SEQ ID NO: 520757 - DNA, 25 bp, Homo sapien
ccaaagttagccagaacttttaatg

SEQ ID NO: 520758 - DNA, 25 bp, Homo sapien
agttcctgaagtcaacttggctctc

SEQ ID NO: 520759 - DNA, 25 bp, Homo sapien
tctaaggtcaggttattgacttagg

SEQ ID NO: 520760 - DNA, 25 bp, Homo sapien
tattgacttagggttgtataaacat

SEQ ID NO: 520761 - DNA, 25 bp, Homo sapien
gaccttcccttaatcgtcttctaga

SEQ ID NO: 520762 - DNA, 25 bp, Homo sapien
cgaccttcccttaatcgtcttctag

SEQ ID NO: 520763 - DNA, 25 bp, Homo sapien
tcactgagaacgaccttcccttaat

SEQ ID NO: 520764 - DNA, 25 bp, Homo sapien
tgagaacgaccttcccttaatcgtc

SEQ ID NO: 520765 - DNA, 25 bp, Homo sapien
ttaaagtaagaagttcctatagcgc

SEQ ID NO: 520766 - DNA, 25 bp, Homo sapien
gcattgataagccttgtgtctcctt

SEQ ID NO: 520767 - DNA, 25 bp, Homo sapien
atttactctagcttccacaagggaa

SEQ ID NO: 520768 - DNA, 25 bp, Homo sapien
tcaaaggtctgtatattggattggt

SEQ ID NO: 520769 - DNA, 25 bp, Homo sapien
ttggcttgcaacttcctcacgggtg

SEQ ID NO: 520770 - DNA, 25 bp, Homo sapien
gcttgcaacttcctcacgggtgtgt

SEQ ID NO: 520771 - DNA, 25 bp, Homo sapien
ttttgttggcttgcaacttcctcac

SEQ ID NO: 520772 - DNA, 25 bp, Homo sapien
cttttttgttggcttgcaacttcct

SEQ ID NO: 520773 - DNA, 25 bp, Homo sapien
tatggctaaaatcagacaggagacc

SEQ ID NO: 520774 - DNA, 25 bp, Homo sapien
caagtatcttcccagagttagccac

SEQ ID NO: 520775 - DNA, 25 bp, Homo sapien
cacctaatgtgccatttttgcagag

SEQ ID NO: 520776 - DNA, 25 bp, Homo sapien
gagaccatggttaaacagaacagtg

SEQ ID NO: 520777 - DNA, 25 bp, Homo sapien
tatactcagcatgaagtccagtttt

SEQ ID NO: 520778 - DNA, 25 bp, Homo sapien
caaagagtaagtatggtttctacag

SEQ ID NO: 520779 - DNA, 25 bp, Homo sapien
tattgacaagactacctggtcggcc

SEQ ID NO: 520780 - DNA, 25 bp, Homo sapien
cagtttttgggcatttgagatcaaa

SEQ ID NO: 520781 - DNA, 25 bp, Homo sapien
gagaagtctgtgtaaaacaaccaag

SEQ ID NO: 520782 - DNA, 25 bp, Homo sapien
caagaagagacagatccaaccttta

SEQ ID NO: 520783 - DNA, 25 bp, Homo sapien
ggcacattgcttatagtggacttat

SEQ ID NO: 520784 - DNA, 25 bp, Homo sapien
tattctgtttctgtctacttagcac

SEQ ID NO: 520785 - DNA, 25 bp, Homo sapien
tcctttaattgcttgagtcgtttca

SEQ ID NO: 520786 - DNA, 25 bp, Homo sapien
gttgttgttcctttcgacatagtct

SEQ ID NO: 520787 - DNA, 25 bp, Homo sapien
ggcagatttgcgaaaaccttcaaaa

SEQ ID NO: 520788 - DNA, 25 bp, Homo sapien
gcttgagtcgtttcagaatgcataa

SEQ ID NO: 520789 - DNA, 25 bp, Homo sapien
tctacaaagctgcttactatggcaa

SEQ ID NO: 520790 - DNA, 25 bp, Homo sapien
ctaccattctacaaagctgcttact

SEQ ID NO: 520791 - DNA, 25 bp, Homo sapien
acaaagctgcttactatggcaagga

SEQ ID NO: 520792 - DNA, 25 bp, Homo sapien
cattctacaaagctgcttactatgg

SEQ ID NO: 520793 - DNA, 25 bp, Homo sapien
tcttaaggttcatttaatgccacag

SEQ ID NO: 520794 - DNA, 25 bp, Homo sapien
tgttcttaaggttcatttaatgcca

SEQ ID NO: 520795 - DNA, 25 bp, Homo sapien
taaggttcatttaatgccacagaca

SEQ ID NO: 520796 - DNA, 25 bp, Homo sapien
aggttcatttaatgccacagacaga

SEQ ID NO: 520797 - DNA, 25 bp, Homo sapien
caatccatctattaagacaacagtg

SEQ ID NO: 520798 - DNA, 25 bp, Homo sapien
caaatttgggcttgtttaacagcta

SEQ ID NO: 520799 - DNA, 25 bp, Homo sapien
gaatttaaagacatgccttgattgc

SEQ ID NO: 520800 - DNA, 25 bp, Homo sapien
ctcagtcactagaacctgttaaggg

SEQ ID NO: 520801 - DNA, 25 bp, Homo sapien
catcaccaccttcaatgaatttggt

SEQ ID NO: 520802 - DNA, 25 bp, Homo sapien
tcaaataaatgaccatcaccacctt

SEQ ID NO: 520803 - DNA, 25 bp, Homo sapien
cttcaatgaatttggtgaccttggt

SEQ ID NO: 520804 - DNA, 25 bp, Homo sapien
catcttcaaataaatgaccatcacc

SEQ ID NO: 520805 - DNA, 25 bp, Homo sapien
acctccagtagaaatcctagtgtat

SEQ ID NO: 520806 - DNA, 25 bp, Homo sapien
cctccagtagaaatcctagtgtatt

SEQ ID NO: 520807 - DNA, 25 bp, Homo sapien
cacctccagtagaaatcctagtgta

SEQ ID NO: 520808 - DNA, 25 bp, Homo sapien
taatgattcgttcttctcgtgtctc

SEQ ID NO: 520809 - DNA, 25 bp, Homo sapien
tgtaatgattcgttcttctcgtgtc

SEQ ID NO: 520810 - DNA, 25 bp, Homo sapien
ctgtaatgattcgttcttctcgtgt

SEQ ID NO: 520811 - DNA, 25 bp, Homo sapien
gtaatgattcgttcttctcgtgtct

SEQ ID NO: 520812 - DNA, 25 bp, Homo sapien
cataaatcctagtagtggagtggct

SEQ ID NO: 520813 - DNA, 25 bp, Homo sapien
gagagagggccatttgacatcctaa

SEQ ID NO: 520814 - DNA, 25 bp, Homo sapien
gaatgggagccctatcataaatcct

SEQ ID NO: 520815 - DNA, 25 bp, Homo sapien
taatcacagcgaaggtagtcggccc

SEQ ID NO: 520816 - DNA, 25 bp, Homo sapien
ttcaccttctttaatcagtctgaat

SEQ ID NO: 520817 - DNA, 25 bp, Homo sapien
ggatcacttcagttattgtttcacc

SEQ ID NO: 520818 - DNA, 25 bp, Homo sapien
tcaggttcaccttcaattttgactt

SEQ ID NO: 520819 - DNA, 25 bp, Homo sapien
taatcagtctgaattcaggttcacc

SEQ ID NO: 520820 - DNA, 25 bp, Homo sapien
aaattatcatgttaaaacagtcctt

SEQ ID NO: 520821 - DNA, 25 bp, Homo sapien
aattatcatgttaaaacagtccttt

SEQ ID NO: 520822 - DNA, 25 bp, Homo sapien
gagacaaattatcatgttaaaacag

SEQ ID NO: 520823 - DNA, 25 bp, Homo sapien
taggagacaaattatcatgttaaaa

SEQ ID NO: 520824 - DNA, 25 bp, Homo sapien
gtgggtataggagtgaacataagaa

SEQ ID NO: 520825 - DNA, 25 bp, Homo sapien
tgggtataggagtgaacataagaaa

SEQ ID NO: 520826 - DNA, 25 bp, Homo sapien
tgatctagtgggtataggagtgaac

SEQ ID NO: 520827 - DNA, 25 bp, Homo sapien
tatttttgatctagtgggtatagga

SEQ ID NO: 520828 - DNA, 25 bp, Homo sapien
tgccagtagcaatcctggaagctgg

SEQ ID NO: 520829 - DNA, 25 bp, Homo sapien
tcagaaagtacccagcagaatagct

SEQ ID NO: 520830 - DNA, 25 bp, Homo sapien
gacccgccagtatgatcttaactga

SEQ ID NO: 520831 - DNA, 25 bp, Homo sapien
gaagccatgtagagatgacccgcca

SEQ ID NO: 520832 - DNA, 25 bp, Homo sapien
tcaagaagttaccttctcaaaccac

SEQ ID NO: 520833 - DNA, 25 bp, Homo sapien
taaaataccgaattgtcttcatcac

SEQ ID NO: 520834 - DNA, 25 bp, Homo sapien
tttcccaaagattccatcaaagata

SEQ ID NO: 520835 - DNA, 25 bp, Homo sapien
gataactaattagctaggaaataag

SEQ ID NO: 520836 - DNA, 25 bp, Homo sapien
catgtgggagattgcaaacaaagca

SEQ ID NO: 520837 - DNA, 25 bp, Homo sapien
gaagagcttcttgcactgttataag

SEQ ID NO: 520838 - DNA, 25 bp, Homo sapien
tacagcctgtaggagtctgactaaa

SEQ ID NO: 520839 - DNA, 25 bp, Homo sapien
gcaacataaagagtatacagcctgt

SEQ ID NO: 520840 - DNA, 25 bp, Homo sapien
gaagactgccttcaatcactttaat

SEQ ID NO: 520841 - DNA, 25 bp, Homo sapien
gataataggctgaagactgccttca

SEQ ID NO: 520842 - DNA, 25 bp, Homo sapien
gttttgataataggctgaagactgc

SEQ ID NO: 520843 - DNA, 25 bp, Homo sapien
taggctgaagactgccttcaatcac

SEQ ID NO: 520844 - DNA, 25 bp, Homo sapien
taacagcataccgtctaaggaggag

SEQ ID NO: 520845 - DNA, 25 bp, Homo sapien
taacgggccacactgaagctaactg

SEQ ID NO: 520846 - DNA, 25 bp, Homo sapien
tgagggtggcgtgaacaacaagtct

SEQ ID NO: 520847 - DNA, 25 bp, Homo sapien
tgtgtcagagatcaaagaaccctgg

SEQ ID NO: 520848 - DNA, 25 bp, Homo sapien
agtcacggggatttctttgaaggtg

SEQ ID NO: 520849 - DNA, 25 bp, Homo sapien
tatagacagtcacggggatttcttt

SEQ ID NO: 520850 - DNA, 25 bp, Homo sapien
ctttgaaggtgctaccacgaacaaa

SEQ ID NO: 520851 - DNA, 25 bp, Homo sapien
ttctttgaaggtgctaccacgaaca

SEQ ID NO: 520852 - DNA, 25 bp, Homo sapien
atttattaagtatttccagcagttg

SEQ ID NO: 520853 - DNA, 25 bp, Homo sapien
tttattaagtatttccagcagttga

SEQ ID NO: 520854 - DNA, 25 bp, Homo sapien
caattcattcaccagaagtgtatca

SEQ ID NO: 520855 - DNA, 25 bp, Homo sapien
ctgctggatagaggagtttatctac

SEQ ID NO: 520856 - DNA, 25 bp, Homo sapien
gttgtcatgatgtcagattcttttg

SEQ ID NO: 520857 - DNA, 25 bp, Homo sapien
tatctacaacatgaattacaccatt

SEQ ID NO: 520858 - DNA, 25 bp, Homo sapien
tgttagtaacaccaggttcaaatcc

SEQ ID NO: 520859 - DNA, 25 bp, Homo sapien
ccaatgaaaactcctggtgtcaggt

SEQ ID NO: 520860 - DNA, 25 bp, Homo sapien
atgttagtaacaccaggttcaaatc

SEQ ID NO: 520861 - DNA, 25 bp, Homo sapien
caatgaaaactcctggtgtcaggtg

SEQ ID NO: 520862 - DNA, 25 bp, Homo sapien
ccagtctccaggttgtgtcaggagc

SEQ ID NO: 520863 - DNA, 25 bp, Homo sapien
gttggcacaaataatgtccagtctc

SEQ ID NO: 520864 - DNA, 25 bp, Homo sapien
tcactagtcattcccttaaaagcat

SEQ ID NO: 520865 - DNA, 25 bp, Homo sapien
agcatcattggttggcacaaataat

SEQ ID NO: 520866 - DNA, 25 bp, Homo sapien
gatctcgcggaatatgtgaatcgca

SEQ ID NO: 520867 - DNA, 25 bp, Homo sapien
aacttttcatggagggatttctctg

SEQ ID NO: 520868 - DNA, 25 bp, Homo sapien
tatgtgaatcgcaccgtttctccct

SEQ ID NO: 520869 - DNA, 25 bp, Homo sapien
tctctgctggcttgatgatctcgcg

SEQ ID NO: 520870 - DNA, 25 bp, Homo sapien
tctgagctgtttgcctccgatggtt

SEQ ID NO: 520871 - DNA, 25 bp, Homo sapien
cagtatttgcccgttgtaaagctca

SEQ ID NO: 520872 - DNA, 25 bp, Homo sapien
gaattaatttaaggaggcgctgatc

SEQ ID NO: 520873 - DNA, 25 bp, Homo sapien
tgtacgatatacgaagactctgagc

SEQ ID NO: 520874 - DNA, 25 bp, Homo sapien
tgaaggtggtttgctgttttccagc

SEQ ID NO: 520875 - DNA, 25 bp, Homo sapien
tccagccagctcaataacttgtttg

SEQ ID NO: 520876 - DNA, 25 bp, Homo sapien
ggtgccagcaaagtgtattctccat

SEQ ID NO: 520877 - DNA, 25 bp, Homo sapien
taattgggccacaagatccgtgaag

SEQ ID NO: 520878 - DNA, 25 bp, Homo sapien
tttccttccagcgtctcaaagactg

SEQ ID NO: 520879 - DNA, 25 bp, Homo sapien
aaagactgctcctcccataatagac

SEQ ID NO: 520880 - DNA, 25 bp, Homo sapien
catttactgttatactgtcaccgtc

SEQ ID NO: 520881 - DNA, 25 bp, Homo sapien
taggacctgatcaatcaaatggatc

SEQ ID NO: 520882 - DNA, 25 bp, Homo sapien
tttgtctcccatgatcctttctagg

SEQ ID NO: 520883 - DNA, 25 bp, Homo sapien
ttctaggacacctcgtggaagtttc

SEQ ID NO: 520884 - DNA, 25 bp, Homo sapien
gcaaagagtgtgaagtgaccgtctc

SEQ ID NO: 520885 - DNA, 25 bp, Homo sapien
caatatgtccgatgtgatggcagct

SEQ ID NO: 520886 - DNA, 25 bp, Homo sapien
tgtaagcacacggtcaatgacatgg

SEQ ID NO: 520887 - DNA, 25 bp, Homo sapien
gttcccatggatgattcgagcacaa

SEQ ID NO: 520888 - DNA, 25 bp, Homo sapien
caatgacatggacaacaccatttgt

SEQ ID NO: 520889 - DNA, 25 bp, Homo sapien
aattgaggtaccaatttgtgtaagc

SEQ ID NO: 520890 - DNA, 25 bp, Homo sapien
ggataatggttaatgaaaagcccca

SEQ ID NO: 520891 - DNA, 25 bp, Homo sapien
cattctcttattaatcatgtgacta

SEQ ID NO: 520892 - DNA, 25 bp, Homo sapien
taattcaacattcacgttgctctcc

SEQ ID NO: 520893 - DNA, 25 bp, Homo sapien
aaaagccccaaattgttatacattg

SEQ ID NO: 520894 - DNA, 25 bp, Homo sapien
tccaagttgtcccaagcctcattac

SEQ ID NO: 520895 - DNA, 25 bp, Homo sapien
tcggtgcaaagtaagtgaaggatcc

SEQ ID NO: 520896 - DNA, 25 bp, Homo sapien
cgatgcccagagtgccataaacatg

SEQ ID NO: 520897 - DNA, 25 bp, Homo sapien
cgttgtggtggctcccacgatgccc

SEQ ID NO: 520898 - DNA, 25 bp, Homo sapien
tgaggcgtcagaatagcgctgcgtt

SEQ ID NO: 520899 - DNA, 25 bp, Homo sapien
agggcaacattcatataacacagtc

SEQ ID NO: 520900 - DNA, 25 bp, Homo sapien
taaccagggcaacattcatataaca

SEQ ID NO: 520901 - DNA, 25 bp, Homo sapien
tctcatataaccagggcaacattca

SEQ ID NO: 520902 - DNA, 25 bp, Homo sapien
ccttccattctcatataaccagggc

SEQ ID NO: 520903 - DNA, 25 bp, Homo sapien
tggacaatatcttgaccctaggaag

SEQ ID NO: 520904 - DNA, 25 bp, Homo sapien
ttctctagaggaagtttccagaata

SEQ ID NO: 520905 - DNA, 25 bp, Homo sapien
catgagatgccagctaaaaatatca

SEQ ID NO: 520906 - DNA, 25 bp, Homo sapien
tttcattaggcctgctcagtttact

SEQ ID NO: 520907 - DNA, 25 bp, Homo sapien
aagcagatggcagaccagtcagtct

SEQ ID NO: 520908 - DNA, 25 bp, Homo sapien
gcagatggcagaccagtcagtcttc

SEQ ID NO: 520909 - DNA, 25 bp, Homo sapien
tgatcataaagtcctgatgatatct

SEQ ID NO: 520910 - DNA, 25 bp, Homo sapien
catttctgtcatctgatcataaagt

SEQ ID NO: 520911 - DNA, 25 bp, Homo sapien
gaatgactcacaagtctagcagaag

SEQ ID NO: 520912 - DNA, 25 bp, Homo sapien
ttaagccaatgagcaggagatggtc

SEQ ID NO: 520913 - DNA, 25 bp, Homo sapien
catttatttcagtgcccagacgtaa

SEQ ID NO: 520914 - DNA, 25 bp, Homo sapien
cctctggtgccctagacttggttac

SEQ ID NO: 520915 - DNA, 25 bp, Homo sapien
tccacagatggactttttataccag

SEQ ID NO: 520916 - DNA, 25 bp, Homo sapien
cttacaagtgctgaagtatttcttt

SEQ ID NO: 520917 - DNA, 25 bp, Homo sapien
cagatggactttttataccagttct

SEQ ID NO: 520918 - DNA, 25 bp, Homo sapien
ctgtccacagatggactttttatac

SEQ ID NO: 520919 - DNA, 25 bp, Homo sapien
tagggttaacaataagcagcaatag

SEQ ID NO: 520920 - DNA, 25 bp, Homo sapien
tgattgttggcgtttatagggttaa

SEQ ID NO: 520921 - DNA, 25 bp, Homo sapien
tatgagccaagatcttgtcataatg

SEQ ID NO: 520922 - DNA, 25 bp, Homo sapien
gacccctgatacgactatgagccaa

SEQ ID NO: 520923 - DNA, 25 bp, Homo sapien
tctctccgttgcagttagtccccga

SEQ ID NO: 520924 - DNA, 25 bp, Homo sapien
cgttgcagttagtccccgaagagaa

SEQ ID NO: 520925 - DNA, 25 bp, Homo sapien
tccgttgcagttagtccccgaagag

SEQ ID NO: 520926 - DNA, 25 bp, Homo sapien
ttgagtctctccgttgcagttagtc

SEQ ID NO: 520927 - DNA, 25 bp, Homo sapien
aaatgccagtcaactgaagattcat

SEQ ID NO: 520928 - DNA, 25 bp, Homo sapien
ctgtgtttcaaaatgccagtcaact

SEQ ID NO: 520929 - DNA, 25 bp, Homo sapien
caaaatgccagtcaactgaagattc

SEQ ID NO: 520930 - DNA, 25 bp, Homo sapien
ttcaaaatgccagtcaactgaagat

SEQ ID NO: 520931 - DNA, 25 bp, Homo sapien
tatatgcttcctctctacgtctgaa

SEQ ID NO: 520932 - DNA, 25 bp, Homo sapien
tagaaatactctcaggtcccatgct

SEQ ID NO: 520933 - DNA, 25 bp, Homo sapien
gctgatttgtctatgtccgacactg

SEQ ID NO: 520934 - DNA, 25 bp, Homo sapien
gacactgtcctcaaaatccctttgt

SEQ ID NO: 520935 - DNA, 25 bp, Homo sapien
aattgcagaaatcgaatagttacaa

SEQ ID NO: 520936 - DNA, 25 bp, Homo sapien
ccaattgcagaaatcgaatagttac

SEQ ID NO: 520937 - DNA, 25 bp, Homo sapien
ttccaattgcagaaatcgaatagtt

SEQ ID NO: 520938 - DNA, 25 bp, Homo sapien
caattgcagaaatcgaatagttaca

SEQ ID NO: 520939 - DNA, 25 bp, Homo sapien
taggagctacgttactgaacagtgc

SEQ ID NO: 520940 - DNA, 25 bp, Homo sapien
tattgcaaggcacaaatgcaagcca

SEQ ID NO: 520941 - DNA, 25 bp, Homo sapien
gcagctctagaggaaattaacggtt

SEQ ID NO: 520942 - DNA, 25 bp, Homo sapien
catactgtcctagaaatctggtgtg

SEQ ID NO: 520943 - DNA, 25 bp, Homo sapien
atagaaacgaacaccctgaagtacg

SEQ ID NO: 520944 - DNA, 25 bp, Homo sapien
gggtcttacttgctccaaatacatt

SEQ ID NO: 520945 - DNA, 25 bp, Homo sapien
tctagtgatattagtaacatcgggt

SEQ ID NO: 520946 - DNA, 25 bp, Homo sapien
tgaagtacgcacttacaaacctcaa

SEQ ID NO: 520947 - DNA, 25 bp, Homo sapien
catgcaatttctgaggttcgcagag

SEQ ID NO: 520948 - DNA, 25 bp, Homo sapien
taaaaacaggagctacttcagaggg

SEQ ID NO: 520949 - DNA, 25 bp, Homo sapien
tggtgaagaaacttcccgtagtggc

SEQ ID NO: 520950 - DNA, 25 bp, Homo sapien
cttcagagggctgtaaagagcagta

SEQ ID NO: 520951 - DNA, 25 bp, Homo sapien
tctgtgggttattgcaacagtacaa

SEQ ID NO: 520952 - DNA, 25 bp, Homo sapien
ctaaaatgtttctgtgggttattgc

SEQ ID NO: 520953 - DNA, 25 bp, Homo sapien
gggttattgcaacagtacaagaata

SEQ ID NO: 520954 - DNA, 25 bp, Homo sapien
aaagatagctaaaatgtttctgtgg

SEQ ID NO: 520955 - DNA, 25 bp, Homo sapien
cccagagcactacggaaaatacgta

SEQ ID NO: 520956 - DNA, 25 bp, Homo sapien
taatatgccacagctgataaacgct

SEQ ID NO: 520957 - DNA, 25 bp, Homo sapien
tatggtaaacgcttcctccttcaag

SEQ ID NO: 520958 - DNA, 25 bp, Homo sapien
taaacatgttacaggtaatatgcca

SEQ ID NO: 520959 - DNA, 25 bp, Homo sapien
cacacattgttcactgagaccggga

SEQ ID NO: 520960 - DNA, 25 bp, Homo sapien
ggtcaccccgtgaagctaatcctcg

SEQ ID NO: 520961 - DNA, 25 bp, Homo sapien
ggtattataggaaccgtgtcctcca

SEQ ID NO: 520962 - DNA, 25 bp, Homo sapien
cgtaatcttcgtgggtgactgtgtc

SEQ ID NO: 520963 - DNA, 25 bp, Homo sapien
ttgatatcggtcacaaaattcactt

SEQ ID NO: 520964 - DNA, 25 bp, Homo sapien
cagggtggttaaatcaaaaaggctg

SEQ ID NO: 520965 - DNA, 25 bp, Homo sapien
tgatcgtctatgaaataacccaaag

SEQ ID NO: 520966 - DNA, 25 bp, Homo sapien
gcaattgctgctgatctcggatgaa

SEQ ID NO: 520967 - DNA, 25 bp, Homo sapien
ccaggacttcaaagcggaaactaga

SEQ ID NO: 520968 - DNA, 25 bp, Homo sapien
gcattcgcagattgtattgtggaaa

SEQ ID NO: 520969 - DNA, 25 bp, Homo sapien
tcatctgagtctgccgaatttgaag

SEQ ID NO: 520970 - DNA, 25 bp, Homo sapien
gaagactccttcgaggcattcgcag

SEQ ID NO: 520971 - DNA, 25 bp, Homo sapien
tcattgcagcaacgtatcgcttcac

SEQ ID NO: 520972 - DNA, 25 bp, Homo sapien
gcaacgtatcgcttcaccaggttcc

SEQ ID NO: 520973 - DNA, 25 bp, Homo sapien
agcatctctaatcattgcagcaacg

SEQ ID NO: 520974 - DNA, 25 bp, Homo sapien
tcagttttagcatctctaatcattg

SEQ ID NO: 520975 - DNA, 25 bp, Homo sapien
gatgtcttctcaagttatcagcagc

SEQ ID NO: 520976 - DNA, 25 bp, Homo sapien
tcttctcaagttatcagcagctcgc

SEQ ID NO: 520977 - DNA, 25 bp, Homo sapien
ttctcaagttatcagcagctcgcct

SEQ ID NO: 520978 - DNA, 25 bp, Homo sapien
ttggtattggtgatgtcttctcaag

SEQ ID NO: 520979 - DNA, 25 bp, Homo sapien
tttgatggtaattcatgcttgtgga

SEQ ID NO: 520980 - DNA, 25 bp, Homo sapien
gatggtaattcatgcttgtggagca

SEQ ID NO: 520981 - DNA, 25 bp, Homo sapien
tgattttgatggtaattcatgcttg

SEQ ID NO: 520982 - DNA, 25 bp, Homo sapien
tttgcatgattttgatggtaattca

SEQ ID NO: 520983 - DNA, 25 bp, Homo sapien
ttatgtcaatggtatggctgcacca

SEQ ID NO: 520984 - DNA, 25 bp, Homo sapien
cacgtggtgtatcttctgctggaat

SEQ ID NO: 520985 - DNA, 25 bp, Homo sapien
gcttgaaaccctgatttccaaaatg

SEQ ID NO: 520986 - DNA, 25 bp, Homo sapien
tatggctgcaccaaaagcttcacgt

SEQ ID NO: 520987 - DNA, 25 bp, Homo sapien
agatccatttgatcaggtaccagag

SEQ ID NO: 520988 - DNA, 25 bp, Homo sapien
gcagagtacctccttcttcaaaata

SEQ ID NO: 520989 - DNA, 25 bp, Homo sapien
cattgaagggagtaggcagagtacc

SEQ ID NO: 520990 - DNA, 25 bp, Homo sapien
tcttgcacaagtgtgtccagatcca

SEQ ID NO: 520991 - DNA, 25 bp, Homo sapien
tagaacaaccagagagatgacattg

SEQ ID NO: 520992 - DNA, 25 bp, Homo sapien
ttaacatgttgagtagaacaaccag

SEQ ID NO: 520993 - DNA, 25 bp, Homo sapien
tcatcatagctattaacatgttgag

SEQ ID NO: 520994 - DNA, 25 bp, Homo sapien
gcaatcagttggtaagaattattca

SEQ ID NO: 520995 - DNA, 25 bp, Homo sapien
catataaattgatgagcccaaatat

SEQ ID NO: 520996 - DNA, 25 bp, Homo sapien
tataaattgatgagcccaaatattg

SEQ ID NO: 520997 - DNA, 25 bp, Homo sapien
tcacatataaattgatgagcccaaa

SEQ ID NO: 520998 - DNA, 25 bp, Homo sapien
ggtcacatataaattgatgagccca

SEQ ID NO: 520999 - DNA, 25 bp, Homo sapien
aggccatttgcaaatgctagcaaca

SEQ ID NO: 521000 - DNA, 25 bp, Homo sapien
gccatttgcaaatgctagcaacaca

SEQ ID NO: 521001 - DNA, 25 bp, Homo sapien
taggccatttgcaaatgctagcaac

SEQ ID NO: 521002 - DNA, 25 bp, Homo sapien
ggccatttgcaaatgctagcaacac

SEQ ID NO: 521003 - DNA, 25 bp, Homo sapien
aacagtgagatcagacgcagagaac

SEQ ID NO: 521004 - DNA, 25 bp, Homo sapien
ccatgattctcgtggattaagggca

SEQ ID NO: 521005 - DNA, 25 bp, Homo sapien
ccagagtgggatgccacatgtccca

SEQ ID NO: 521006 - DNA, 25 bp, Homo sapien
ggtgagaatttgcagtaaacagtga

SEQ ID NO: 521007 - DNA, 25 bp, Homo sapien
cgatttttgaacacacttgccaatt

SEQ ID NO: 521008 - DNA, 25 bp, Homo sapien
taaatagatcaaggtcagacccaga

SEQ ID NO: 521009 - DNA, 25 bp, Homo sapien
caaacacacgcatataaatagatca

SEQ ID NO: 521010 - DNA, 25 bp, Homo sapien
gttttcgatttttgaacacacttgc

SEQ ID NO: 521011 - DNA, 25 bp, Homo sapien
tcatcactggggtgagtgagtttaa

SEQ ID NO: 521012 - DNA, 25 bp, Homo sapien
ttttcatcactggggtgagtgagtt

SEQ ID NO: 521013 - DNA, 25 bp, Homo sapien
ctccttttcatcactggggtgagtg

SEQ ID NO: 521014 - DNA, 25 bp, Homo sapien
cccctccttttcatcactggggtga

SEQ ID NO: 521015 - DNA, 25 bp, Homo sapien
tataaggagttcattacaaagtcca

SEQ ID NO: 521016 - DNA, 25 bp, Homo sapien
aaggagattgttgctaaatataagg

SEQ ID NO: 521017 - DNA, 25 bp, Homo sapien
tacaaatgcaacaattttcaaggag

SEQ ID NO: 521018 - DNA, 25 bp, Homo sapien
aatataaggagttcattacaaagtc

SEQ ID NO: 521019 - DNA, 25 bp, Homo sapien
caatcatggatgtagtcctgaagtc

SEQ ID NO: 521020 - DNA, 25 bp, Homo sapien
atgtagtcctgaagtccgccatccc

SEQ ID NO: 521021 - DNA, 25 bp, Homo sapien
tcatggatgtagtcctgaagtccgc

SEQ ID NO: 521022 - DNA, 25 bp, Homo sapien
tccaccaatcatggatgtagtcctg

SEQ ID NO: 521023 - DNA, 25 bp, Homo sapien
tgtaagtatgatttcaatagaatca

SEQ ID NO: 521024 - DNA, 25 bp, Homo sapien
tgactgtggatttatgtttgttata

SEQ ID NO: 521025 - DNA, 25 bp, Homo sapien
atgactgtggatttatgtttgttat

SEQ ID NO: 521026 - DNA, 25 bp, Homo sapien
gatgactgtggatttatgtttgtta

SEQ ID NO: 521027 - DNA, 25 bp, Homo sapien
gaaatgttctgcgtttgggaaacta

SEQ ID NO: 521028 - DNA, 25 bp, Homo sapien
tatcaaggaaagattaggactactc

SEQ ID NO: 521029 - DNA, 25 bp, Homo sapien
gcagaagggctctttgttgccttac

SEQ ID NO: 521030 - DNA, 25 bp, Homo sapien
tattccaaaggacacttcggacact

SEQ ID NO: 521031 - DNA, 25 bp, Homo sapien
tgagatagatattatagcagagagg

SEQ ID NO: 521032 - DNA, 25 bp, Homo sapien
taaccatggctataataacaaggag

SEQ ID NO: 521033 - DNA, 25 bp, Homo sapien
ttctcagcaaaccatagtatgatag

SEQ ID NO: 521034 - DNA, 25 bp, Homo sapien
cttcagcagttttgagagttaaccc

SEQ ID NO: 521035 - DNA, 25 bp, Homo sapien
aacaaaaagagagtggcggatatcc

SEQ ID NO: 521036 - DNA, 25 bp, Homo sapien
aatacaactttctatgacaagaaca

SEQ ID NO: 521037 - DNA, 25 bp, Homo sapien
ggttttctacttcacagtgatttgc

SEQ ID NO: 521038 - DNA, 25 bp, Homo sapien
gatttgcttcagacccaatacaact

SEQ ID NO: 521039 - DNA, 25 bp, Homo sapien
gctgattttgtaagcgggtccaccg

SEQ ID NO: 521040 - DNA, 25 bp, Homo sapien
gaggttcttggagctacaatagtca

SEQ ID NO: 521041 - DNA, 25 bp, Homo sapien
aaaaaactcagagggtcagtcgtgg

SEQ ID NO: 521042 - DNA, 25 bp, Homo sapien
gggtccaccgcagcttgtaaaatag

SEQ ID NO: 521043 - DNA, 25 bp, Homo sapien
ggtaatatcatccactcgacgatgg

SEQ ID NO: 521044 - DNA, 25 bp, Homo sapien
catccactcgacgatggttggtggt

SEQ ID NO: 521045 - DNA, 25 bp, Homo sapien
tgttcaagtctgacctgtcgatgtg

SEQ ID NO: 521046 - DNA, 25 bp, Homo sapien
tggtggtggaccttgcctgttcaag

SEQ ID NO: 521047 - DNA, 25 bp, Homo sapien
ctgtgtggcagataaacttgataaa

SEQ ID NO: 521048 - DNA, 25 bp, Homo sapien
gctgtgtggcagataaacttgataa

SEQ ID NO: 521049 - DNA, 25 bp, Homo sapien
tatgaaacatgtcaccatcttcact

SEQ ID NO: 521050 - DNA, 25 bp, Homo sapien
gacaggaaaaagaagtcctattatg

SEQ ID NO: 521051 - DNA, 25 bp, Homo sapien
cttcactgcccagtgtcttctcctc

SEQ ID NO: 521052 - DNA, 25 bp, Homo sapien
tatcaggtagcacacagagaagaca

SEQ ID NO: 521053 - DNA, 25 bp, Homo sapien
ctgttgacaattgggctgggcaaca

SEQ ID NO: 521054 - DNA, 25 bp, Homo sapien
atgccagcagctgttgacaattggg

SEQ ID NO: 521055 - DNA, 25 bp, Homo sapien
gctgttgacaattgggctgggcaac

SEQ ID NO: 521056 - DNA, 25 bp, Homo sapien
cagcagctgttgacaattgggctgg

SEQ ID NO: 521057 - DNA, 25 bp, Homo sapien
cacaaagttccccaaatgtggatgt

SEQ ID NO: 521058 - DNA, 25 bp, Homo sapien
attttacgttaaacacagacacagg

SEQ ID NO: 521059 - DNA, 25 bp, Homo sapien
taacccaaaaagtattctgagaatc

SEQ ID NO: 521060 - DNA, 25 bp, Homo sapien
cagacacagggaggtttttgcagaa

SEQ ID NO: 521061 - DNA, 25 bp, Homo sapien
tttccacttgccacacgtgcaagtg

SEQ ID NO: 521062 - DNA, 25 bp, Homo sapien
gtctctgtggcccttcatgctagct

SEQ ID NO: 521063 - DNA, 25 bp, Homo sapien
cacgtgcaagtgttgcttgttccca

SEQ ID NO: 521064 - DNA, 25 bp, Homo sapien
tcatttcctctccgtcatcattgtc

SEQ ID NO: 521065 - DNA, 25 bp, Homo sapien
acagacatatgcatgtctaatgaaa

SEQ ID NO: 521066 - DNA, 25 bp, Homo sapien
gacatatgcatgtctaatgaaaaaa

SEQ ID NO: 521067 - DNA, 25 bp, Homo sapien
tttcttgtgtaaacagacatatgca

SEQ ID NO: 521068 - DNA, 25 bp, Homo sapien
catatgcatgtctaatgaaaaaatg

SEQ ID NO: 521069 - DNA, 25 bp, Homo sapien
gtacaatttataggtcttcccagag

SEQ ID NO: 521070 - DNA, 25 bp, Homo sapien
tatccacctctaactgaagctaagt

SEQ ID NO: 521071 - DNA, 25 bp, Homo sapien
acttgaggagtcacatttaaggcag

SEQ ID NO: 521072 - DNA, 25 bp, Homo sapien
caaagttttccaccctaggagagtg

SEQ ID NO: 521073 - DNA, 25 bp, Homo sapien
cctattcagtcagttcagattccct

SEQ ID NO: 521074 - DNA, 25 bp, Homo sapien
aattcttaaagaggacacgcccaat

SEQ ID NO: 521075 - DNA, 25 bp, Homo sapien
ggttagctcacccactagccttgct

SEQ ID NO: 521076 - DNA, 25 bp, Homo sapien
gattccctctggcattgttacattg

SEQ ID NO: 521077 - DNA, 25 bp, Homo sapien
ctatacacaaagcttcccaaaagtc

SEQ ID NO: 521078 - DNA, 25 bp, Homo sapien
tgaattgttattataattatgaagt

SEQ ID NO: 521079 - DNA, 25 bp, Homo sapien
catattatgatgaattgttattata

SEQ ID NO: 521080 - DNA, 25 bp, Homo sapien
gatgaattgttattataattatgaa

SEQ ID NO: 521081 - DNA, 25 bp, Homo sapien
aagtgcaaaggtctagcatggctgc

SEQ ID NO: 521082 - DNA, 25 bp, Homo sapien
ttaacaatggtcagctatgccgtca

SEQ ID NO: 521083 - DNA, 25 bp, Homo sapien
tgccgtcaaatttgtagcaagtgca

SEQ ID NO: 521084 - DNA, 25 bp, Homo sapien
aatccactggatctaagaggagaaa

SEQ ID NO: 521085 - DNA, 25 bp, Homo sapien
gatggatcaagtctggcaacactca

SEQ ID NO: 521086 - DNA, 25 bp, Homo sapien
tggcattttgatggatcaagtctgg

SEQ ID NO: 521087 - DNA, 25 bp, Homo sapien
cattttgatggatcaagtctggcaa

SEQ ID NO: 521088 - DNA, 25 bp, Homo sapien
tttgatggatcaagtctggcaacac

SEQ ID NO: 521089 - DNA, 25 bp, Homo sapien
aaaggatcttcgcttgacagtgcaa

SEQ ID NO: 521090 - DNA, 25 bp, Homo sapien
caaattgtttgcactgccgtgacag

SEQ ID NO: 521091 - DNA, 25 bp, Homo sapien
gaacttctcgtctgatccagtaggt

SEQ ID NO: 521092 - DNA, 25 bp, Homo sapien
cacacagttacagcggacctcgtgg

SEQ ID NO: 521093 - DNA, 25 bp, Homo sapien
tatttctactcagcatacgacatgg

SEQ ID NO: 521094 - DNA, 25 bp, Homo sapien
agggcccagctatttctactcagca

SEQ ID NO: 521095 - DNA, 25 bp, Homo sapien
catacgacatggcttgctaggcagc

SEQ ID NO: 521096 - DNA, 25 bp, Homo sapien
taggcagccgtatcctccggagctc

SEQ ID NO: 521097 - DNA, 25 bp, Homo sapien
tattccacacatgacacatcgattt

SEQ ID NO: 521098 - DNA, 25 bp, Homo sapien
tggcaaagtgcctagcggatagttg

SEQ ID NO: 521099 - DNA, 25 bp, Homo sapien
tcttttggaagcgttagaacattcg

SEQ ID NO: 521100 - DNA, 25 bp, Homo sapien
gcgttagaacattcggctgccattc

SEQ ID NO: 521101 - DNA, 25 bp, Homo sapien
ttattctggtcagtacaaatgtcat

SEQ ID NO: 521102 - DNA, 25 bp, Homo sapien
caaatgtcattgactaaagagacac

SEQ ID NO: 521103 - DNA, 25 bp, Homo sapien
cacaaaattattctggtcagtacaa

SEQ ID NO: 521104 - DNA, 25 bp, Homo sapien
taaagagacactgaaatttatggcc

SEQ ID NO: 521105 - DNA, 25 bp, Homo sapien
gcggtctctatagggagcattaaca

SEQ ID NO: 521106 - DNA, 25 bp, Homo sapien
tcaattgcaatgaggagagcagttc

SEQ ID NO: 521107 - DNA, 25 bp, Homo sapien
tactatccttagagggatgcggtct

SEQ ID NO: 521108 - DNA, 25 bp, Homo sapien
ctctagggatttcttgacactggca

SEQ ID NO: 521109 - DNA, 25 bp, Homo sapien
ttcatgccatgctatttcttcgtct

SEQ ID NO: 521110 - DNA, 25 bp, Homo sapien
gagtggttctttacttagccttgcc

SEQ ID NO: 521111 - DNA, 25 bp, Homo sapien
tttcctactagtgaagatgggcagc

SEQ ID NO: 521112 - DNA, 25 bp, Homo sapien
ttgcctttgggtctagaacatcagc

SEQ ID NO: 521113 - DNA, 25 bp, Homo sapien
tgggcagctgacgatcttaaaaatg

SEQ ID NO: 521114 - DNA, 25 bp, Homo sapien
tctttatgatgctgtacaaacacca

SEQ ID NO: 521115 - DNA, 25 bp, Homo sapien
gcatatcctgtcacatgtctttcct

SEQ ID NO: 521116 - DNA, 25 bp, Homo sapien
ggtttctttattcttgcatatcctg

SEQ ID NO: 521117 - DNA, 25 bp, Homo sapien
tcttactagctactgagaacaccca

SEQ ID NO: 521118 - DNA, 25 bp, Homo sapien
ttgggtgaattcagggtcacatggc

SEQ ID NO: 521119 - DNA, 25 bp, Homo sapien
gaattcagggtcacatggctgtaga

SEQ ID NO: 521120 - DNA, 25 bp, Homo sapien
ggtgaattcagggtcacatggctgt

SEQ ID NO: 521121 - DNA, 25 bp, Homo sapien
gagattgggtgaattcagggtcaca

SEQ ID NO: 521122 - DNA, 25 bp, Homo sapien
atttctaggctttcgatagacgtag

SEQ ID NO: 521123 - DNA, 25 bp, Homo sapien
tgagaaaggtagtctatttctaggc

SEQ ID NO: 521124 - DNA, 25 bp, Homo sapien
tctatttctaggctttcgatagacg

SEQ ID NO: 521125 - DNA, 25 bp, Homo sapien
catgagaaaggtagtctatttctag

SEQ ID NO: 521126 - DNA, 25 bp, Homo sapien
tgcagtgtgctagataaagctatca

SEQ ID NO: 521127 - DNA, 25 bp, Homo sapien
acaactttcaggagggtcacttata

SEQ ID NO: 521128 - DNA, 25 bp, Homo sapien
taaatagttcatgaaaccacaaggt

SEQ ID NO: 521129 - DNA, 25 bp, Homo sapien
agtttctcacatagtgccaagtgta

SEQ ID NO: 521130 - DNA, 25 bp, Homo sapien
agatgcccccgagatctccattttc

SEQ ID NO: 521131 - DNA, 25 bp, Homo sapien
atgcataaaaggctaaaaacggcca

SEQ ID NO: 521132 - DNA, 25 bp, Homo sapien
cagatgcccccgagatctccatttt

SEQ ID NO: 521133 - DNA, 25 bp, Homo sapien
cataaaaggctaaaaacggccacat

SEQ ID NO: 521134 - DNA, 25 bp, Homo sapien
taggaaacttaaccgagatcccaga

SEQ ID NO: 521135 - DNA, 25 bp, Homo sapien
tgtagctccggtcgaacggagcccc

SEQ ID NO: 521136 - DNA, 25 bp, Homo sapien
gatcccagaaagaaggcgaggtgta

SEQ ID NO: 521137 - DNA, 25 bp, Homo sapien
gaactcctaaccccgcagggatgtc

SEQ ID NO: 521138 - DNA, 25 bp, Homo sapien
ggaaaacgatcgaagctggagccca

SEQ ID NO: 521139 - DNA, 25 bp, Homo sapien
gcacgcccggcaaattccaatggaa

SEQ ID NO: 521140 - DNA, 25 bp, Homo sapien
tccaatggaattcccttagtcgctg

SEQ ID NO: 521141 - DNA, 25 bp, Homo sapien
aaagttgcaatcttcgggctgaagt

SEQ ID NO: 521142 - DNA, 25 bp, Homo sapien
gcgaagccatgggaggcgggggagg

SEQ ID NO: 521143 - DNA, 25 bp, Homo sapien
aagcgaagccatgggaggcggggga

SEQ ID NO: 521144 - DNA, 25 bp, Homo sapien
gccaggggaggagaacctctcccac

SEQ ID NO: 521145 - DNA, 25 bp, Homo sapien
ctgaaagcgaagccatgggaggcgg

SEQ ID NO: 521146 - DNA, 25 bp, Homo sapien
ctctggataaagttaagagttccca

SEQ ID NO: 521147 - DNA, 25 bp, Homo sapien
cccgcctgcacagatccctctggat

SEQ ID NO: 521148 - DNA, 25 bp, Homo sapien
tccctctggataaagttaagagttc

SEQ ID NO: 521149 - DNA, 25 bp, Homo sapien
agatccctctggataaagttaagag

SEQ ID NO: 521150 - DNA, 25 bp, Homo sapien
acagaccgcgctggaaagggatagt

SEQ ID NO: 521151 - DNA, 25 bp, Homo sapien
gatagtccgggaagatgcgcgtccc

SEQ ID NO: 521152 - DNA, 25 bp, Homo sapien
agaccgcgctggaaagggatagtcc

SEQ ID NO: 521153 - DNA, 25 bp, Homo sapien
tgacagcggatgagcccagagaaag

SEQ ID NO: 521154 - DNA, 25 bp, Homo sapien
gcttgtccccctcgaatagcctcca

SEQ ID NO: 521155 - DNA, 25 bp, Homo sapien
ggaggtggaggagacccgcgcgctg

SEQ ID NO: 521156 - DNA, 25 bp, Homo sapien
cgtccccagcttgtccccctcgaat

SEQ ID NO: 521157 - DNA, 25 bp, Homo sapien
cagcttgtccccctcgaatagcctc

SEQ ID NO: 521158 - DNA, 25 bp, Homo sapien
actgcttgaggtcagccagtgggca

SEQ ID NO: 521159 - DNA, 25 bp, Homo sapien
ctctgcaggcgtgttggacttcagt

SEQ ID NO: 521160 - DNA, 25 bp, Homo sapien
caagtcggtggcgagaatccaccct

SEQ ID NO: 521161 - DNA, 25 bp, Homo sapien
tgcgctccgacacccagcttttgaa

SEQ ID NO: 521162 - DNA, 25 bp, Homo sapien
gacacacctccaggcttagggcggt

SEQ ID NO: 521163 - DNA, 25 bp, Homo sapien
agcccggtaaacaagcacccatgag

SEQ ID NO: 521164 - DNA, 25 bp, Homo sapien
gcccggtaaacaagcacccatgagg

SEQ ID NO: 521165 - DNA, 25 bp, Homo sapien
ccggtaaacaagcacccatgaggcc

SEQ ID NO: 521166 - DNA, 25 bp, Homo sapien
ccagcccggtaaacaagcacccatg

SEQ ID NO: 521167 - DNA, 25 bp, Homo sapien
gattgtatcccagcagacgcctgat

SEQ ID NO: 521168 - DNA, 25 bp, Homo sapien
gccgttattttctgaaagccctgag

SEQ ID NO: 521169 - DNA, 25 bp, Homo sapien
gcgcaaaagcttaggagcaaccgtt

SEQ ID NO: 521170 - DNA, 25 bp, Homo sapien
tgtttctacctgattgccgttattt

SEQ ID NO: 521171 - DNA, 25 bp, Homo sapien
ttgcaggtctttatttatctgggtc

SEQ ID NO: 521172 - DNA, 25 bp, Homo sapien
caattgcaggtctttatttatctgg

SEQ ID NO: 521173 - DNA, 25 bp, Homo sapien
caggtctttatttatctgggtctgc

SEQ ID NO: 521174 - DNA, 25 bp, Homo sapien
gcaggtctttatttatctgggtctg

SEQ ID NO: 521175 - DNA, 25 bp, Homo sapien
gtttcatcgtcattattttgcacag

SEQ ID NO: 521176 - DNA, 25 bp, Homo sapien
agcatctgtttcatcgtcattattt

SEQ ID NO: 521177 - DNA, 25 bp, Homo sapien
tcattattttgcacagacgtcttaa

SEQ ID NO: 521178 - DNA, 25 bp, Homo sapien
gacgtcttaacctcacagcctcaat

SEQ ID NO: 521179 - DNA, 25 bp, Homo sapien
caagctttggttatctcatgcacac

SEQ ID NO: 521180 - DNA, 25 bp, Homo sapien
taatatgagggccaaatgaacatgc

SEQ ID NO: 521181 - DNA, 25 bp, Homo sapien
tgaacatgcagggttccctaagagc

SEQ ID NO: 521182 - DNA, 25 bp, Homo sapien
tgccccaagctttggttatctcatg

SEQ ID NO: 521183 - DNA, 25 bp, Homo sapien
aatatagctgtcaaggtgccaagaa

SEQ ID NO: 521184 - DNA, 25 bp, Homo sapien
caatatagctgtcaaggtgccaaga

SEQ ID NO: 521185 - DNA, 25 bp, Homo sapien
tatagctgtcaaggtgccaagaatt

SEQ ID NO: 521186 - DNA, 25 bp, Homo sapien
atatagctgtcaaggtgccaagaat

SEQ ID NO: 521187 - DNA, 25 bp, Homo sapien
tgaactaaaggccagatatacaagt

SEQ ID NO: 521188 - DNA, 25 bp, Homo sapien
cagatatacaagtatactctcttca

SEQ ID NO: 521189 - DNA, 25 bp, Homo sapien
gaactaaaggccagatatacaagta

SEQ ID NO: 521190 - DNA, 25 bp, Homo sapien
tatacaagtatactctcttcatctt

SEQ ID NO: 521191 - DNA, 25 bp, Homo sapien
agccaatagcatccccttttatagc

SEQ ID NO: 521192 - DNA, 25 bp, Homo sapien
ctcgagccaatagcatcccctttta

SEQ ID NO: 521193 - DNA, 25 bp, Homo sapien
tttctcgagccaatagcatcccctt

SEQ ID NO: 521194 - DNA, 25 bp, Homo sapien
cgagccaatagcatccccttttata

SEQ ID NO: 521195 - DNA, 25 bp, Homo sapien
gaaccggccatgtggatgtgtatgt

SEQ ID NO: 521196 - DNA, 25 bp, Homo sapien
gcaggaaccggccatgtggatgtgt

SEQ ID NO: 521197 - DNA, 25 bp, Homo sapien
aaccggccatgtggatgtgtatgtg

SEQ ID NO: 521198 - DNA, 25 bp, Homo sapien
aggaaccggccatgtggatgtgtat

SEQ ID NO: 521199 - DNA, 25 bp, Homo sapien
gtctagggggcttctgaggcgatcg

SEQ ID NO: 521200 - DNA, 25 bp, Homo sapien
gggcttctgaggcgatcgggcagtg

SEQ ID NO: 521201 - DNA, 25 bp, Homo sapien
ctaaagctcggcatccgtgatggtc

SEQ ID NO: 521202 - DNA, 25 bp, Homo sapien
gggggcttctgaggcgatcgggcag

SEQ ID NO: 521203 - DNA, 25 bp, Homo sapien
tcagaaactttgttggatcaatgat

SEQ ID NO: 521204 - DNA, 25 bp, Homo sapien
tctatagaactttgcgtaattttct

SEQ ID NO: 521205 - DNA, 25 bp, Homo sapien
tagaactttgcgtaattttcttgac

SEQ ID NO: 521206 - DNA, 25 bp, Homo sapien
caacttctatagaactttgcgtaat

SEQ ID NO: 521207 - DNA, 25 bp, Homo sapien
tcataaccaacttctatagaacttt

SEQ ID NO: 521208 - DNA, 25 bp, Homo sapien
ctggaacgtattgaagcagggcaca

SEQ ID NO: 521209 - DNA, 25 bp, Homo sapien
aggctggaacgtattgaagcagggc

SEQ ID NO: 521210 - DNA, 25 bp, Homo sapien
gtacaaggctggaacgtattgaagc

SEQ ID NO: 521211 - DNA, 25 bp, Homo sapien
tacaaggctggaacgtattgaagca

SEQ ID NO: 521212 - DNA, 25 bp, Homo sapien
ttattgcattaagggatctgtaact

SEQ ID NO: 521213 - DNA, 25 bp, Homo sapien
ttttcgtatcactaattgtgacatc

SEQ ID NO: 521214 - DNA, 25 bp, Homo sapien
ccttttcgtatcactaattgtgaca

SEQ ID NO: 521215 - DNA, 25 bp, Homo sapien
ttccttttcgtatcactaattgtga

SEQ ID NO: 521216 - DNA, 25 bp, Homo sapien
cacatattcaagatttagggccaag

SEQ ID NO: 521217 - DNA, 25 bp, Homo sapien
tattcaagatttagggccaagccct

SEQ ID NO: 521218 - DNA, 25 bp, Homo sapien
aactttacctaagtcacgaggctgc

SEQ ID NO: 521219 - DNA, 25 bp, Homo sapien
gtcacgaggctgcacatattcaaga

SEQ ID NO: 521220 - DNA, 25 bp, Homo sapien
tatgaccaaagttttatggtgagca

SEQ ID NO: 521221 - DNA, 25 bp, Homo sapien
caattgttcatcaaatcctggagct

SEQ ID NO: 521222 - DNA, 25 bp, Homo sapien
ctttcaattgttcatcaaatcctgg

SEQ ID NO: 521223 - DNA, 25 bp, Homo sapien
atcttcaacaattatgaccaaagtt

SEQ ID NO: 521224 - DNA, 25 bp, Homo sapien
ctattcactcattagaacatgggca

SEQ ID NO: 521225 - DNA, 25 bp, Homo sapien
tgatggcaacctctctacagtctgt

SEQ ID NO: 521226 - DNA, 25 bp, Homo sapien
tacagtctgtctccatttgtagaaa

SEQ ID NO: 521227 - DNA, 25 bp, Homo sapien
caaacttcaggtcttcaataatgtc

SEQ ID NO: 521228 - DNA, 25 bp, Homo sapien
tctccccatttccaatagattagca

SEQ ID NO: 521229 - DNA, 25 bp, Homo sapien
ctccccatttccaatagattagcac

SEQ ID NO: 521230 - DNA, 25 bp, Homo sapien
ctctccccatttccaatagattagc

SEQ ID NO: 521231 - DNA, 25 bp, Homo sapien
gtacagtggtagtgtcatccccagc

SEQ ID NO: 521232 - DNA, 25 bp, Homo sapien
catgccagaacagtacagtggtagt

SEQ ID NO: 521233 - DNA, 25 bp, Homo sapien
gaacagtacagtggtagtgtcatcc

SEQ ID NO: 521234 - DNA, 25 bp, Homo sapien
tagagcatgccagaacagtacagtg

SEQ ID NO: 521235 - DNA, 25 bp, Homo sapien
gcattaaggcttgggcatctatacc

SEQ ID NO: 521236 - DNA, 25 bp, Homo sapien
tagcataagcccaagtgagataagg

SEQ ID NO: 521237 - DNA, 25 bp, Homo sapien
ttgttactttgggatctccacagct

SEQ ID NO: 521238 - DNA, 25 bp, Homo sapien
tttgggatctccacagctctgttga

SEQ ID NO: 521239 - DNA, 25 bp, Homo sapien
ctagtgaaagactgtgagttatcga

SEQ ID NO: 521240 - DNA, 25 bp, Homo sapien
gtgaaagactgtgagttatcgaagc

SEQ ID NO: 521241 - DNA, 25 bp, Homo sapien
tagtgaaagactgtgagttatcgaa

SEQ ID NO: 521242 - DNA, 25 bp, Homo sapien
gaaagactgtgagttatcgaagcat

SEQ ID NO: 521243 - DNA, 25 bp, Homo sapien
gcacaaggaccagtattggtggcag

SEQ ID NO: 521244 - DNA, 25 bp, Homo sapien
ccctggtactttgtaccctgagaca

SEQ ID NO: 521245 - DNA, 25 bp, Homo sapien
ggctgcagatcaacatagtcaatgg

SEQ ID NO: 521246 - DNA, 25 bp, Homo sapien
aatggtctcttctttagcacaagga

SEQ ID NO: 521247 - DNA, 25 bp, Homo sapien
cccaatgtcataagacggtctccta

SEQ ID NO: 521248 - DNA, 25 bp, Homo sapien
tgatgatcgttgcatccaccaaaca

SEQ ID NO: 521249 - DNA, 25 bp, Homo sapien
tatttcgtaatagtgactgcggaag

SEQ ID NO: 521250 - DNA, 25 bp, Homo sapien
cagttaggcccttacaataggtcta

SEQ ID NO: 521251 - DNA, 25 bp, Homo sapien
ctgctttccttagtgaatgtactaa

SEQ ID NO: 521252 - DNA, 25 bp, Homo sapien
gctttccttagtgaatgtactaatt

SEQ ID NO: 521253 - DNA, 25 bp, Homo sapien
tctgcctactgctttccttagtgaa

SEQ ID NO: 521254 - DNA, 25 bp, Homo sapien
agaaatctgcctactgctttcctta

SEQ ID NO: 521255 - DNA, 25 bp, Homo sapien
gttatgactgtgatcccgtcattat

SEQ ID NO: 521256 - DNA, 25 bp, Homo sapien
tgttatgactgtgatcccgtcatta

SEQ ID NO: 521257 - DNA, 25 bp, Homo sapien
gagaacatgcaaacaccatattttt

SEQ ID NO: 521258 - DNA, 25 bp, Homo sapien
gtgagaacatgcaaacaccatattt

SEQ ID NO: 521259 - DNA, 25 bp, Homo sapien
gaacatgcaaacaccatattttttc

SEQ ID NO: 521260 - DNA, 25 bp, Homo sapien
tgagaacatgcaaacaccatatttt

SEQ ID NO: 521261 - DNA, 25 bp, Homo sapien
tcctgagacctccccagccatgttt

SEQ ID NO: 521262 - DNA, 25 bp, Homo sapien
agacctccccagccatgtttcctgt

SEQ ID NO: 521263 - DNA, 25 bp, Homo sapien
ctgagacctccccagccatgtttcc

SEQ ID NO: 521264 - DNA, 25 bp, Homo sapien
cctcttcactttccaccatgattgt

SEQ ID NO: 521265 - DNA, 25 bp, Homo sapien
aagagatatttggaacatgataaaa

SEQ ID NO: 521266 - DNA, 25 bp, Homo sapien
gaattatagttattgctcagaaaga

SEQ ID NO: 521267 - DNA, 25 bp, Homo sapien
tttacataccgaagcagggaagaaa

SEQ ID NO: 521268 - DNA, 25 bp, Homo sapien
aagaattagtgaccccaaagataag

SEQ ID NO: 521269 - DNA, 25 bp, Homo sapien
gaaaacaatggtgccttgcatgttg

SEQ ID NO: 521270 - DNA, 25 bp, Homo sapien
gtgttcccagtagatatgcctcata

SEQ ID NO: 521271 - DNA, 25 bp, Homo sapien
tgcctcatattcacaaaaggtatct

SEQ ID NO: 521272 - DNA, 25 bp, Homo sapien
aaggtatctggattttagcatctgc

SEQ ID NO: 521273 - DNA, 25 bp, Homo sapien
tccaaagtataaccatcatttgtag

SEQ ID NO: 521274 - DNA, 25 bp, Homo sapien
atttgtagtgtttggagtatgcttc

SEQ ID NO: 521275 - DNA, 25 bp, Homo sapien
agcatctctccaaagtataaccatc

SEQ ID NO: 521276 - DNA, 25 bp, Homo sapien
tctccaaggtccgtgaagttccatt

SEQ ID NO: 521277 - DNA, 25 bp, Homo sapien
ttgttgtcttataggaaccactgct

SEQ ID NO: 521278 - DNA, 25 bp, Homo sapien
cactgctactgaacagatagttatg

SEQ ID NO: 521279 - DNA, 25 bp, Homo sapien
actgaacagatagttatgtctggaa

SEQ ID NO: 521280 - DNA, 25 bp, Homo sapien
gaacagtgaagttgttgtcttatag

SEQ ID NO: 521281 - DNA, 25 bp, Homo sapien
ggtaacgttgctcaagttactctcc

SEQ ID NO: 521282 - DNA, 25 bp, Homo sapien
gctcaagttactctccacgtaagca

SEQ ID NO: 521283 - DNA, 25 bp, Homo sapien
tatgtctcaatgacaatccactctc

SEQ ID NO: 521284 - DNA, 25 bp, Homo sapien
cacatagaggtgggtaacgttgctc

SEQ ID NO: 521285 - DNA, 25 bp, Homo sapien
cttggaattgtcttattaggtatct

SEQ ID NO: 521286 - DNA, 25 bp, Homo sapien
tgggttattggtaggatcacatttt

SEQ ID NO: 521287 - DNA, 25 bp, Homo sapien
tctggctgccacttgagtgggaagt

SEQ ID NO: 521288 - DNA, 25 bp, Homo sapien
attaggtatctttgattattcacag

SEQ ID NO: 521289 - DNA, 25 bp, Homo sapien
cagtacatcataaggttggatgctg

SEQ ID NO: 521290 - DNA, 25 bp, Homo sapien
ctgtagaggacttggaggcaatgct

SEQ ID NO: 521291 - DNA, 25 bp, Homo sapien
tataggtgtgtcagccttaaagccc

SEQ ID NO: 521292 - DNA, 25 bp, Homo sapien
ggcaacacaatatcccagtacatca

SEQ ID NO: 521293 - DNA, 25 bp, Homo sapien
aggaagcagacaggtgcatggacaa

SEQ ID NO: 521294 - DNA, 25 bp, Homo sapien
ctgaagccaaggaagcagacaggtg

SEQ ID NO: 521295 - DNA, 25 bp, Homo sapien
agcagacaggtgcatggacaagatg

SEQ ID NO: 521296 - DNA, 25 bp, Homo sapien
agccaaggaagcagacaggtgcatg

SEQ ID NO: 521297 - DNA, 25 bp, Homo sapien
aatttctgctttgccgaagccaatg

SEQ ID NO: 521298 - DNA, 25 bp, Homo sapien
tgctttgccgaagccaatgcagatg

SEQ ID NO: 521299 - DNA, 25 bp, Homo sapien
tttctgctttgccgaagccaatgca

SEQ ID NO: 521300 - DNA, 25 bp, Homo sapien
tctgctttgccgaagccaatgcaga

SEQ ID NO: 521301 - DNA, 25 bp, Homo sapien
tgccaaaatttgtgcagtgggttcg

SEQ ID NO: 521302 - DNA, 25 bp, Homo sapien
aaatgcaatgatcttaggcagatta

SEQ ID NO: 521303 - DNA, 25 bp, Homo sapien
gggttcgtcacttgtaaatgcaatg

SEQ ID NO: 521304 - DNA, 25 bp, Homo sapien
tgtgcagtgggttcgtcacttgtaa

SEQ ID NO: 521305 - DNA, 25 bp, Homo sapien
tctcttcaagagtgcttctcaggtt

SEQ ID NO: 521306 - DNA, 25 bp, Homo sapien
gattcgaaagttattcagaaacctc

SEQ ID NO: 521307 - DNA, 25 bp, Homo sapien
ctctcttcaagagtgcttctcaggt

SEQ ID NO: 521308 - DNA, 25 bp, Homo sapien
gatatgattcgaaagttattcagaa

SEQ ID NO: 521309 - DNA, 25 bp, Homo sapien
acagacagaacaggcctggcgtgta

SEQ ID NO: 521310 - DNA, 25 bp, Homo sapien
ggtcactcagtgctcatggggattg

SEQ ID NO: 521311 - DNA, 25 bp, Homo sapien
agacagaacaggcctggcgtgtacc

SEQ ID NO: 521312 - DNA, 25 bp, Homo sapien
acaggcctggcgtgtaccttgcttg

SEQ ID NO: 521313 - DNA, 25 bp, Homo sapien
agcccgtggcttaggattgtatata

SEQ ID NO: 521314 - DNA, 25 bp, Homo sapien
taacagcccatggactaagcccgtg

SEQ ID NO: 521315 - DNA, 25 bp, Homo sapien
tagggttcaggcagtaatacttgct

SEQ ID NO: 521316 - DNA, 25 bp, Homo sapien
caaccttttgtacaacagggactgg

SEQ ID NO: 521317 - DNA, 25 bp, Homo sapien
ggaaataagcatccttccatgcaag

SEQ ID NO: 521318 - DNA, 25 bp, Homo sapien
aggaaataagcatccttccatgcaa

SEQ ID NO: 521319 - DNA, 25 bp, Homo sapien
gaaataagcatccttccatgcaagg

SEQ ID NO: 521320 - DNA, 25 bp, Homo sapien
tcactctggaccttttaagagtgca

SEQ ID NO: 521321 - DNA, 25 bp, Homo sapien
gaccttttaagagtgcatcccatat

SEQ ID NO: 521322 - DNA, 25 bp, Homo sapien
tggaccttttaagagtgcatcccat

SEQ ID NO: 521323 - DNA, 25 bp, Homo sapien
tctggaccttttaagagtgcatccc

SEQ ID NO: 521324 - DNA, 25 bp, Homo sapien
ccacatccttgctccggttggatgg

SEQ ID NO: 521325 - DNA, 25 bp, Homo sapien
tgctccggttggatggtgctcattg

SEQ ID NO: 521326 - DNA, 25 bp, Homo sapien
gatggtgctcattgagcattcttct

SEQ ID NO: 521327 - DNA, 25 bp, Homo sapien
tgctcattgagcattcttctttggc

SEQ ID NO: 521328 - DNA, 25 bp, Homo sapien
tttccctctttgcaacatataactg

SEQ ID NO: 521329 - DNA, 25 bp, Homo sapien
tataactgcctaaacgttcttcagt

SEQ ID NO: 521330 - DNA, 25 bp, Homo sapien
tcggcttagctttaccactcagttt

SEQ ID NO: 521331 - DNA, 25 bp, Homo sapien
caaaatctccaatatgccacatgca

SEQ ID NO: 521332 - DNA, 25 bp, Homo sapien
taataacacctaataaactccatat

SEQ ID NO: 521333 - DNA, 25 bp, Homo sapien
tcttttcaaatgtgggttgtgatgg

SEQ ID NO: 521334 - DNA, 25 bp, Homo sapien
tatatacgtaatataggatatacat

SEQ ID NO: 521335 - DNA, 25 bp, Homo sapien
aaccctaatacatgagtgcttctag

SEQ ID NO: 521336 - DNA, 25 bp, Homo sapien
caattaatcactgatgctttcatca

SEQ ID NO: 521337 - DNA, 25 bp, Homo sapien
taatggtggtaatgtaatgggacag

SEQ ID NO: 521338 - DNA, 25 bp, Homo sapien
tctgtccaattaatcactgatgctt

SEQ ID NO: 521339 - DNA, 25 bp, Homo sapien
gcccaaccaatcctgtgtgcaagga

SEQ ID NO: 521340 - DNA, 25 bp, Homo sapien
cttattcgaaggacttcagtcatgt

SEQ ID NO: 521341 - DNA, 25 bp, Homo sapien
tattcgaaggacttcagtcatgttt

SEQ ID NO: 521342 - DNA, 25 bp, Homo sapien
ttattcgaaggacttcagtcatgtt

SEQ ID NO: 521343 - DNA, 25 bp, Homo sapien
acttattcgaaggacttcagtcatg

SEQ ID NO: 521344 - DNA, 25 bp, Homo sapien
agatgggtctgcaaaaggctgcaaa

SEQ ID NO: 521345 - DNA, 25 bp, Homo sapien
gcaaatctggttgtaagcctggtca

SEQ ID NO: 521346 - DNA, 25 bp, Homo sapien
tggtcaggacaatccctcctgatgg

SEQ ID NO: 521347 - DNA, 25 bp, Homo sapien
acgggtcccaaagcactaccacatg

SEQ ID NO: 521348 - DNA, 25 bp, Homo sapien
gatgcttgcaagatagctgtcatca

SEQ ID NO: 521349 - DNA, 25 bp, Homo sapien
ttcactatttaggatgcttgcaaga

SEQ ID NO: 521350 - DNA, 25 bp, Homo sapien
attcactatttaggatgcttgcaag

SEQ ID NO: 521351 - DNA, 25 bp, Homo sapien
ggatgcttgcaagatagctgtcatc

SEQ ID NO: 521352 - DNA, 25 bp, Homo sapien
tgttacaccaggactattagatttc

SEQ ID NO: 521353 - DNA, 25 bp, Homo sapien
taattaacaatgtttcccatataat

SEQ ID NO: 521354 - DNA, 25 bp, Homo sapien
gctgcatacaacctcttaagataat

SEQ ID NO: 521355 - DNA, 25 bp, Homo sapien
ctggaattatgactgatagtgttac

SEQ ID NO: 521356 - DNA, 25 bp, Homo sapien
cttgtacacgaaagcccatgtgagc

SEQ ID NO: 521357 - DNA, 25 bp, Homo sapien
gacagtaccaagtctagatgaggct

SEQ ID NO: 521358 - DNA, 25 bp, Homo sapien
tttcactgataggtacatacacagg

SEQ ID NO: 521359 - DNA, 25 bp, Homo sapien
aacactctcatatactgcttgtgga

SEQ ID NO: 521360 - DNA, 25 bp, Homo sapien
agtaaatatttcttggtgatttagc

SEQ ID NO: 521361 - DNA, 25 bp, Homo sapien
tcacattcacaaagaagacactgcc

SEQ ID NO: 521362 - DNA, 25 bp, Homo sapien
gacactgcccagagtcagagtaaat

SEQ ID NO: 521363 - DNA, 25 bp, Homo sapien
ttctcattcacattcacaaagaaga

SEQ ID NO: 521364 - DNA, 25 bp, Homo sapien
gatggagttaccatgataaaaaccg

SEQ ID NO: 521365 - DNA, 25 bp, Homo sapien
aaaaccgtaagttctagcatgctgg

SEQ ID NO: 521366 - DNA, 25 bp, Homo sapien
gaagattgatggagttaccatgata

SEQ ID NO: 521367 - DNA, 25 bp, Homo sapien
gatataggatagttcagaagccaga

SEQ ID NO: 521368 - DNA, 25 bp, Homo sapien
gattctagccctctcatacaaagtg

SEQ ID NO: 521369 - DNA, 25 bp, Homo sapien
tctgctggcaatgtgaaagcctaaa

SEQ ID NO: 521370 - DNA, 25 bp, Homo sapien
caaaccagtgtctaaggacctcaag

SEQ ID NO: 521371 - DNA, 25 bp, Homo sapien
gaaaactggcatggttggatgtgca

SEQ ID NO: 521372 - DNA, 25 bp, Homo sapien
aggatggtcagcttgttggggaaac

SEQ ID NO: 521373 - DNA, 25 bp, Homo sapien
gatggtcagcttgttggggaaacca

SEQ ID NO: 521374 - DNA, 25 bp, Homo sapien
tggccaggatggtcagcttgttggg

SEQ ID NO: 521375 - DNA, 25 bp, Homo sapien
ccaggatggtcagcttgttggggaa

SEQ ID NO: 521376 - DNA, 25 bp, Homo sapien
taagagagactagcctaaggctggg

SEQ ID NO: 521377 - DNA, 25 bp, Homo sapien
tgagaggagtaagctaagcacccat

SEQ ID NO: 521378 - DNA, 25 bp, Homo sapien
cacagtacctttgcagcagagtggg

SEQ ID NO: 521379 - DNA, 25 bp, Homo sapien
ttgaccagctaagagcagaggacca

SEQ ID NO: 521380 - DNA, 25 bp, Homo sapien
aatgcacaagttgccattcttcagg

SEQ ID NO: 521381 - DNA, 25 bp, Homo sapien
tatgccatttacttctgtagcagac

SEQ ID NO: 521382 - DNA, 25 bp, Homo sapien
gggattaattacaggacacttctga

SEQ ID NO: 521383 - DNA, 25 bp, Homo sapien
gaagctttcacagactcactatgtg

SEQ ID NO: 521384 - DNA, 25 bp, Homo sapien
agcggactggatagacaaaactgca

SEQ ID NO: 521385 - DNA, 25 bp, Homo sapien
tcacccatgtgaataagaagccagg

SEQ ID NO: 521386 - DNA, 25 bp, Homo sapien
gatcaccaggcttctattaaggagg

SEQ ID NO: 521387 - DNA, 25 bp, Homo sapien
tatggaccctggatggcaatttgct

SEQ ID NO: 521388 - DNA, 25 bp, Homo sapien
gcttgacctcctgtattctgaatgg

SEQ ID NO: 521389 - DNA, 25 bp, Homo sapien
cttgaaagacgaaatcaaagcccat

SEQ ID NO: 521390 - DNA, 25 bp, Homo sapien
ctgaatggtgaactctggaagcagg

SEQ ID NO: 521391 - DNA, 25 bp, Homo sapien
tatcataggccctaagttcattggg

SEQ ID NO: 521392 - DNA, 25 bp, Homo sapien
tattcagtttacatgcgttattggt

SEQ ID NO: 521393 - DNA, 25 bp, Homo sapien
taagcaggaatttatgaacacccat

SEQ ID NO: 521394 - DNA, 25 bp, Homo sapien
tcagaggccccgtttcttacaataa

SEQ ID NO: 521395 - DNA, 25 bp, Homo sapien
gttgtcctgtgccataaagtgatat

SEQ ID NO: 521396 - DNA, 25 bp, Homo sapien
catgtgcgtactctttgtgtgtcgg

SEQ ID NO: 521397 - DNA, 25 bp, Homo sapien
ctttgtgtgtcggtgtgacctgtgt

SEQ ID NO: 521398 - DNA, 25 bp, Homo sapien
ctgtgcacatgtgcgtactctttgt

SEQ ID NO: 521399 - DNA, 25 bp, Homo sapien
ttctgtagacaatcggaagaaagac

SEQ ID NO: 521400 - DNA, 25 bp, Homo sapien
tcgtctatgtgattcctgggaagct

SEQ ID NO: 521401 - DNA, 25 bp, Homo sapien
ggtcagttcatccatatccgcaaaa

SEQ ID NO: 521402 - DNA, 25 bp, Homo sapien
ggcaaatgtccaggtacctgtaact

SEQ ID NO: 521403 - DNA, 25 bp, Homo sapien
tgcttctgaacaagagccaccgtgg

SEQ ID NO: 521404 - DNA, 25 bp, Homo sapien
gacctggtatcctgattccagggat

SEQ ID NO: 521405 - DNA, 25 bp, Homo sapien
cctggtatcctgattccagggatat

SEQ ID NO: 521406 - DNA, 25 bp, Homo sapien
taatctactgtgtcttgtagctcct

SEQ ID NO: 521407 - DNA, 25 bp, Homo sapien
ttccagggatataatctactgtgtc

SEQ ID NO: 521408 - DNA, 25 bp, Homo sapien
ttgctccttgttgtgtttatgctga

SEQ ID NO: 521409 - DNA, 25 bp, Homo sapien
tcaggagacgatatttggagaactg

SEQ ID NO: 521410 - DNA, 25 bp, Homo sapien
taatagagcctgtagcgtggaggaa

SEQ ID NO: 521411 - DNA, 25 bp, Homo sapien
tatgctgacgtacccatttaactca

SEQ ID NO: 521412 - DNA, 25 bp, Homo sapien
tcttagttgctgttgtgcttctgcc

SEQ ID NO: 521413 - DNA, 25 bp, Homo sapien
agctctgcaattccccgatcatgta

SEQ ID NO: 521414 - DNA, 25 bp, Homo sapien
cgatcatgtaatccattgctcctga

SEQ ID NO: 521415 - DNA, 25 bp, Homo sapien
tgcttctgcccttgacacctgcgtt

SEQ ID NO: 521416 - DNA, 25 bp, Homo sapien
ttactaccgctctctacttcttggg

SEQ ID NO: 521417 - DNA, 25 bp, Homo sapien
tattaagccatcactctctatggtt

SEQ ID NO: 521418 - DNA, 25 bp, Homo sapien
caagaaagctattgaccccttgtga

SEQ ID NO: 521419 - DNA, 25 bp, Homo sapien
ttcattaggaaagctcctcttctca

SEQ ID NO: 521420 - DNA, 25 bp, Homo sapien
tgtagattaagtggtgtcccaagcc

SEQ ID NO: 521421 - DNA, 25 bp, Homo sapien
tgagtcccttgagcctcatgtagat

SEQ ID NO: 521422 - DNA, 25 bp, Homo sapien
gaacaagctcttttgcatgagtccc

SEQ ID NO: 521423 - DNA, 25 bp, Homo sapien
gactcatgatgcttttttccacgaa

SEQ ID NO: 521424 - DNA, 25 bp, Homo sapien
tctctgctgcctagcagttgtcatt

SEQ ID NO: 521425 - DNA, 25 bp, Homo sapien
ttctctgctgcctagcagttgtcat

SEQ ID NO: 521426 - DNA, 25 bp, Homo sapien
tgctgcctagcagttgtcatttctg

SEQ ID NO: 521427 - DNA, 25 bp, Homo sapien
tctgctgcctagcagttgtcatttc

SEQ ID NO: 521428 - DNA, 25 bp, Homo sapien
tcatttgcttttcagtagacagtat

SEQ ID NO: 521429 - DNA, 25 bp, Homo sapien
ttgcttttcagtagacagtattttg

SEQ ID NO: 521430 - DNA, 25 bp, Homo sapien
cttttcagtagacagtattttgaga

SEQ ID NO: 521431 - DNA, 25 bp, Homo sapien
cttcaaacccttttcaccatattca

SEQ ID NO: 521432 - DNA, 25 bp, Homo sapien
cacaatgagggaattgttcttaatc

SEQ ID NO: 521433 - DNA, 25 bp, Homo sapien
gagaattgtgatagctgtatagtca

SEQ ID NO: 521434 - DNA, 25 bp, Homo sapien
tagctgtatagtcacaatgagggaa

SEQ ID NO: 521435 - DNA, 25 bp, Homo sapien
ttaattgagagaattgtgatagctg

SEQ ID NO: 521436 - DNA, 25 bp, Homo sapien
tgttaatgtgtgctttatgtatgct

SEQ ID NO: 521437 - DNA, 25 bp, Homo sapien
tctatgacctgtaacaacttttaat

SEQ ID NO: 521438 - DNA, 25 bp, Homo sapien
aatgtgtgctttatgtatgctttct

SEQ ID NO: 521439 - DNA, 25 bp, Homo sapien
ttctcacaatttctatgacctgtaa

SEQ ID NO: 521440 - DNA, 25 bp, Homo sapien
ctctccacggcccaattacaaggat

SEQ ID NO: 521441 - DNA, 25 bp, Homo sapien
ctttcacaagttcaggtgggctgtc

SEQ ID NO: 521442 - DNA, 25 bp, Homo sapien
cggcccaattacaaggataaggcat

SEQ ID NO: 521443 - DNA, 25 bp, Homo sapien
ctgtcttgcgtttggtgatgctggc

SEQ ID NO: 521444 - DNA, 25 bp, Homo sapien
taaagattatgccagttccgagtct

SEQ ID NO: 521445 - DNA, 25 bp, Homo sapien
aacaggatggagagccattctcctt

SEQ ID NO: 521446 - DNA, 25 bp, Homo sapien
gaaagatctgcatagtgtctggtga

SEQ ID NO: 521447 - DNA, 25 bp, Homo sapien
gaacactgccttgctatatgcaacg

SEQ ID NO: 521448 - DNA, 25 bp, Homo sapien
aaatgagtgagctgctactgtgatt

SEQ ID NO: 521449 - DNA, 25 bp, Homo sapien
gctggtgaagagctctaagatgtct

SEQ ID NO: 521450 - DNA, 25 bp, Homo sapien
gctctaagatgtctattgaaaatga

SEQ ID NO: 521451 - DNA, 25 bp, Homo sapien
ctattgaaaatgagtgagctgctac

SEQ ID NO: 521452 - DNA, 25 bp, Homo sapien
tcctagaaacccaggtataccgctg

SEQ ID NO: 521453 - DNA, 25 bp, Homo sapien
caggtataccgctgacagatctgag

SEQ ID NO: 521454 - DNA, 25 bp, Homo sapien
aacccaggtataccgctgacagatc

SEQ ID NO: 521455 - DNA, 25 bp, Homo sapien
ctagaaacccaggtataccgctgac

SEQ ID NO: 521456 - DNA, 25 bp, Homo sapien
tgtgtcctcctcttgacaaaaataa

SEQ ID NO: 521457 - DNA, 25 bp, Homo sapien
caaaaataatcaaaccagttgggca

SEQ ID NO: 521458 - DNA, 25 bp, Homo sapien
ttttgtgtcctcctcttgacaaaaa

SEQ ID NO: 521459 - DNA, 25 bp, Homo sapien
tgacaaaaataatcaaaccagttgg

SEQ ID NO: 521460 - DNA, 25 bp, Homo sapien
tatggtgcccaaacattccgtggga

SEQ ID NO: 521461 - DNA, 25 bp, Homo sapien
ttcagcagccgatccaagttccaag

SEQ ID NO: 521462 - DNA, 25 bp, Homo sapien
tccataggccagatctcagtcacgt

SEQ ID NO: 521463 - DNA, 25 bp, Homo sapien
tcttgtaggcagtcaatccaggagt

SEQ ID NO: 521464 - DNA, 25 bp, Homo sapien
ggttctattgatacattcagctgac

SEQ ID NO: 521465 - DNA, 25 bp, Homo sapien
gaatgtgatgtttgaacttgtgtgg

SEQ ID NO: 521466 - DNA, 25 bp, Homo sapien
gcctctcctgtgacaagcacatagc

SEQ ID NO: 521467 - DNA, 25 bp, Homo sapien
gacaagcacatagcagggatttctg

SEQ ID NO: 521468 - DNA, 25 bp, Homo sapien
ctcagggagttcttgaatggtaata

SEQ ID NO: 521469 - DNA, 25 bp, Homo sapien
tcagggagttcttgaatggtaatac

SEQ ID NO: 521470 - DNA, 25 bp, Homo sapien
tctcagggagttcttgaatggtaat

SEQ ID NO: 521471 - DNA, 25 bp, Homo sapien
aactaccccattgctcatgccacag

SEQ ID NO: 521472 - DNA, 25 bp, Homo sapien
taccccattgctcatgccacagggt

SEQ ID NO: 521473 - DNA, 25 bp, Homo sapien
ctcttgtccaactaccccattgctc

SEQ ID NO: 521474 - DNA, 25 bp, Homo sapien
ttgtccaactaccccattgctcatg

SEQ ID NO: 521475 - DNA, 25 bp, Homo sapien
catgatggttatagtgagaatccac

SEQ ID NO: 521476 - DNA, 25 bp, Homo sapien
taccagcacatcatagtctcaggaa

SEQ ID NO: 521477 - DNA, 25 bp, Homo sapien
cagccactgggagatcattgacact

SEQ ID NO: 521478 - DNA, 25 bp, Homo sapien
ttctcgtggatctccagcaactgga

SEQ ID NO: 521479 - DNA, 25 bp, Homo sapien
aatcatattggcatctaaaggttct

SEQ ID NO: 521480 - DNA, 25 bp, Homo sapien
ctctgggtgaagaatcaaagatcac

SEQ ID NO: 521481 - DNA, 25 bp, Homo sapien
aaggttctaggagatggtactctgg

SEQ ID NO: 521482 - DNA, 25 bp, Homo sapien
gatcacatagaggacaccaatagca

SEQ ID NO: 521483 - DNA, 25 bp, Homo sapien
tccagtagcatgtctgggaatataa

SEQ ID NO: 521484 - DNA, 25 bp, Homo sapien
agtattgtaagctacatgctccggg

SEQ ID NO: 521485 - DNA, 25 bp, Homo sapien
catggacagtaaatagctgaagtca

SEQ ID NO: 521486 - DNA, 25 bp, Homo sapien
cggcaatttcttttacatcgtatac

SEQ ID NO: 521487 - DNA, 25 bp, Homo sapien
tctaacagcatacccgataaaagcc

SEQ ID NO: 521488 - DNA, 25 bp, Homo sapien
ctaacagcatacccgataaaagcca

SEQ ID NO: 521489 - DNA, 25 bp, Homo sapien
ctctaacagcatacccgataaaagc

SEQ ID NO: 521490 - DNA, 25 bp, Homo sapien
tgagtccgtagctgtttgtcctcac

SEQ ID NO: 521491 - DNA, 25 bp, Homo sapien
tgctgctctgaaatcgatgaagttt

SEQ ID NO: 521492 - DNA, 25 bp, Homo sapien
gttttgtgtttatggtcaaaccatg

SEQ ID NO: 521493 - DNA, 25 bp, Homo sapien
tcttggttaatgagtccgtagctgt

SEQ ID NO: 521494 - DNA, 25 bp, Homo sapien
gcattgcgtctaactttcccctggg

SEQ ID NO: 521495 - DNA, 25 bp, Homo sapien
ggagtgcaacctgctctagctatgg

SEQ ID NO: 521496 - DNA, 25 bp, Homo sapien
gaatttcttctcaaacgctctgggt

SEQ ID NO: 521497 - DNA, 25 bp, Homo sapien
ggactgtgcccattgtaattcacga

SEQ ID NO: 521498 - DNA, 25 bp, Homo sapien
tgccccactgggatgaatgagttcc

SEQ ID NO: 521499 - DNA, 25 bp, Homo sapien
caatgctgtgcatccaggtatggaa

SEQ ID NO: 521500 - DNA, 25 bp, Homo sapien
tcatacaagtctcaagcaagtctcc

SEQ ID NO: 521501 - DNA, 25 bp, Homo sapien
gatgatttgactaaccgtgaagcag

SEQ ID NO: 521502 - DNA, 25 bp, Homo sapien
ggaaggcgaacatggcaccatggca

SEQ ID NO: 521503 - DNA, 25 bp, Homo sapien
ccatggcagttgctaaagtacttac

SEQ ID NO: 521504 - DNA, 25 bp, Homo sapien
tggaagatgtacagggaaggcgaac

SEQ ID NO: 521505 - DNA, 25 bp, Homo sapien
tggaatttgagaacgtaacatatgg

SEQ ID NO: 521506 - DNA, 25 bp, Homo sapien
gctttcgctgttctatcagtgtgaa

SEQ ID NO: 521507 - DNA, 25 bp, Homo sapien
cctgtgagctttcgctgttctatca

SEQ ID NO: 521508 - DNA, 25 bp, Homo sapien
gggagccctgtgagctttcgctgtt

SEQ ID NO: 521509 - DNA, 25 bp, Homo sapien
gctgttctatcagtgtgaatcagtg

SEQ ID NO: 521510 - DNA, 25 bp, Homo sapien
ttgtcatccctcggtgcctgagtca

SEQ ID NO: 521511 - DNA, 25 bp, Homo sapien
tcatccctcggtgcctgagtcacct

SEQ ID NO: 521512 - DNA, 25 bp, Homo sapien
ctaaagcttgtcatccctcggtgcc

SEQ ID NO: 521513 - DNA, 25 bp, Homo sapien
aaagcttgtcatccctcggtgcctg

SEQ ID NO: 521514 - DNA, 25 bp, Homo sapien
ttataagtcacatgtctgatggtgg

SEQ ID NO: 521515 - DNA, 25 bp, Homo sapien
tataagtcacatgtctgatggtggc

SEQ ID NO: 521516 - DNA, 25 bp, Homo sapien
tggcagttgaaataaggagggtaga

SEQ ID NO: 521517 - DNA, 25 bp, Homo sapien
gcagttgaaataaggagggtagatg

SEQ ID NO: 521518 - DNA, 25 bp, Homo sapien
attatgtagagaaccttacactgac

SEQ ID NO: 521519 - DNA, 25 bp, Homo sapien
aaattatgtagagaaccttacactg

SEQ ID NO: 521520 - DNA, 25 bp, Homo sapien
aattatgtagagaaccttacactga

SEQ ID NO: 521521 - DNA, 25 bp, Homo sapien
aaatagacaaacagctccaacaagg

SEQ ID NO: 521522 - DNA, 25 bp, Homo sapien
tatagagaacttcgagacggaaata

SEQ ID NO: 521523 - DNA, 25 bp, Homo sapien
aacagctccaacaaggcaaagggta

SEQ ID NO: 521524 - DNA, 25 bp, Homo sapien
ttcgagacggaaatagacaaacagc

SEQ ID NO: 521525 - DNA, 25 bp, Homo sapien
tcattgagtgggcagccagtaaact

SEQ ID NO: 521526 - DNA, 25 bp, Homo sapien
tgtctttttaggctgtgacagtctc

SEQ ID NO: 521527 - DNA, 25 bp, Homo sapien
tcacgtgtctttttaggctgtgaca

SEQ ID NO: 521528 - DNA, 25 bp, Homo sapien
cacaaagaatggaggagtctgaatc

SEQ ID NO: 521529 - DNA, 25 bp, Homo sapien
tgagccaagttacagtacaattcag

SEQ ID NO: 521530 - DNA, 25 bp, Homo sapien
tttgggatgagccaagttacagtac

SEQ ID NO: 521531 - DNA, 25 bp, Homo sapien
tgggatgagccaagttacagtacaa

SEQ ID NO: 521532 - DNA, 25 bp, Homo sapien
cagcagttcctgagtttaaacacat

SEQ ID NO: 521533 - DNA, 25 bp, Homo sapien
tgatccaaacgaacttcctatcttg

SEQ ID NO: 521534 - DNA, 25 bp, Homo sapien
tcttgcctggattcttgcacttgcc

SEQ ID NO: 521535 - DNA, 25 bp, Homo sapien
aaacgaacttcctatcttgcctgga

SEQ ID NO: 521536 - DNA, 25 bp, Homo sapien
ttgccaactagctaggccgcctgct

SEQ ID NO: 521537 - DNA, 25 bp, Homo sapien
ttcatcctccagaaccctaaatgca

SEQ ID NO: 521538 - DNA, 25 bp, Homo sapien
cattcatcctccagaaccctaaatg

SEQ ID NO: 521539 - DNA, 25 bp, Homo sapien
accattcatcctccagaaccctaaa

SEQ ID NO: 521540 - DNA, 25 bp, Homo sapien
accctaaatgcacatttcatcatca

SEQ ID NO: 521541 - DNA, 25 bp, Homo sapien
agacgaacaataggtgattcctgcc

SEQ ID NO: 521542 - DNA, 25 bp, Homo sapien
gatgacctcccatacaccagactgt

SEQ ID NO: 521543 - DNA, 25 bp, Homo sapien
gtcagtcttagcttatacctccaca

SEQ ID NO: 521544 - DNA, 25 bp, Homo sapien
tcattggagtttacagacgaacaat

SEQ ID NO: 521545 - DNA, 25 bp, Homo sapien
tccccagtagaatccacctgcaggg

SEQ ID NO: 521546 - DNA, 25 bp, Homo sapien
actcatactgatggtaaaactttgc

SEQ ID NO: 521547 - DNA, 25 bp, Homo sapien
gatggtaaaactttgcctctcccca

SEQ ID NO: 521548 - DNA, 25 bp, Homo sapien
ccccagtagaatccacctgcagggt

SEQ ID NO: 521549 - DNA, 25 bp, Homo sapien
aatcccttgaccatggtatagccac

SEQ ID NO: 521550 - DNA, 25 bp, Homo sapien
tcacggttgccaatccaagcttgaa

SEQ ID NO: 521551 - DNA, 25 bp, Homo sapien
cacggttgccaatccaagcttgaaa

SEQ ID NO: 521552 - DNA, 25 bp, Homo sapien
catggtatagccacatgtagggata

SEQ ID NO: 521553 - DNA, 25 bp, Homo sapien
tctgtggcattcctttatctctgaa

SEQ ID NO: 521554 - DNA, 25 bp, Homo sapien
cattcctttatctctgaagcatcct

SEQ ID NO: 521555 - DNA, 25 bp, Homo sapien
ctgtgtccacgtgtgcttgctgaca

SEQ ID NO: 521556 - DNA, 25 bp, Homo sapien
tgtgtccacgtgtgcttgctgacat

SEQ ID NO: 521557 - DNA, 25 bp, Homo sapien
cttccacagtctgagaggcctttct

SEQ ID NO: 521558 - DNA, 25 bp, Homo sapien
aaagctgcaggccatggcttatgag

SEQ ID NO: 521559 - DNA, 25 bp, Homo sapien
tcaggcttccacagtctgagaggcc

SEQ ID NO: 521560 - DNA, 25 bp, Homo sapien
taaatggttcccgaatcttctccac

SEQ ID NO: 521561 - DNA, 25 bp, Homo sapien
caggcctgtttatagacagagcaaa

SEQ ID NO: 521562 - DNA, 25 bp, Homo sapien
cctgtttatagacagagcaaacctt

SEQ ID NO: 521563 - DNA, 25 bp, Homo sapien
ggcctgtttatagacagagcaaacc

SEQ ID NO: 521564 - DNA, 25 bp, Homo sapien
gcctgtttatagacagagcaaacct

SEQ ID NO: 521565 - DNA, 25 bp, Homo sapien
cctgctgctcccgacttattgtgtg

SEQ ID NO: 521566 - DNA, 25 bp, Homo sapien
gctgctcccgacttattgtgtgtcc

SEQ ID NO: 521567 - DNA, 25 bp, Homo sapien
tgctcccgacttattgtgtgtccac

SEQ ID NO: 521568 - DNA, 25 bp, Homo sapien
atcctgctgctcccgacttattgtg

SEQ ID NO: 521569 - DNA, 25 bp, Homo sapien
ccagtagagccccatgattcacaga

SEQ ID NO: 521570 - DNA, 25 bp, Homo sapien
gtagagccccatgattcacagatgg

SEQ ID NO: 521571 - DNA, 25 bp, Homo sapien
gggcccagtagagccccatgattca

SEQ ID NO: 521572 - DNA, 25 bp, Homo sapien
gagccccatgattcacagatggtcc

SEQ ID NO: 521573 - DNA, 25 bp, Homo sapien
taatatcatgccatcttaactgctc

SEQ ID NO: 521574 - DNA, 25 bp, Homo sapien
aattcttctagatatagctgcttct

SEQ ID NO: 521575 - DNA, 25 bp, Homo sapien
ctaattcgctatcactaaagttttc

SEQ ID NO: 521576 - DNA, 25 bp, Homo sapien
tttacatttgggactgctcagcttc

SEQ ID NO: 521577 - DNA, 25 bp, Homo sapien
gaggtctattacttcttgttcaaac

SEQ ID NO: 521578 - DNA, 25 bp, Homo sapien
tacttatgtctacatgacttttgag

SEQ ID NO: 521579 - DNA, 25 bp, Homo sapien
taattcttctatacgctgtcttgct

SEQ ID NO: 521580 - DNA, 25 bp, Homo sapien
tattgtttgacttgaccacattcta

SEQ ID NO: 521581 - DNA, 25 bp, Homo sapien
aaaaatttattctctgtatccagat

SEQ ID NO: 521582 - DNA, 25 bp, Homo sapien
gaaaaaatttattctctgtatccag

SEQ ID NO: 521583 - DNA, 25 bp, Homo sapien
aatttattctctgtatccagattta

SEQ ID NO: 521584 - DNA, 25 bp, Homo sapien
tttattctctgtatccagatttaga

SEQ ID NO: 521585 - DNA, 25 bp, Homo sapien
aacagtagactgtatcagcagatcc

SEQ ID NO: 521586 - DNA, 25 bp, Homo sapien
taatgtagtaaacagtagactgtat

SEQ ID NO: 521587 - DNA, 25 bp, Homo sapien
tcctgtgaccacgatttgatgaaaa

SEQ ID NO: 521588 - DNA, 25 bp, Homo sapien
gaattatagcgagttaataaaacat

SEQ ID NO: 521589 - DNA, 25 bp, Homo sapien
attaatctgaatatctacatcaaat

SEQ ID NO: 521590 - DNA, 25 bp, Homo sapien
tatctacatcaaattgattggtctt

SEQ ID NO: 521591 - DNA, 25 bp, Homo sapien
tctgaatatctacatcaaattgatt

SEQ ID NO: 521592 - DNA, 25 bp, Homo sapien
catcaaattgattggtctttacatc

SEQ ID NO: 521593 - DNA, 25 bp, Homo sapien
tgatcacactcatttaataactcct

SEQ ID NO: 521594 - DNA, 25 bp, Homo sapien
tatatttatcttctagtgaacaacg

SEQ ID NO: 521595 - DNA, 25 bp, Homo sapien
cattcccaagaaattggtcttgagt

SEQ ID NO: 521596 - DNA, 25 bp, Homo sapien
gtgaacaacgttgcttttcattccc

SEQ ID NO: 521597 - DNA, 25 bp, Homo sapien
tggcgtagatctctttgtagacgtt

SEQ ID NO: 521598 - DNA, 25 bp, Homo sapien
tctgcatcttgtgatcctcatctag

SEQ ID NO: 521599 - DNA, 25 bp, Homo sapien
cattttgtagctgggataatctctc

SEQ ID NO: 521600 - DNA, 25 bp, Homo sapien
ccttcatctgacatcgtgtttggcg

SEQ ID NO: 521601 - DNA, 25 bp, Homo sapien
tggaactaaattgttaggttactga

SEQ ID NO: 521602 - DNA, 25 bp, Homo sapien
atggaactaaattgttaggttactg

SEQ ID NO: 521603 - DNA, 25 bp, Homo sapien
gcactctggagagcaaattctaggt

SEQ ID NO: 521604 - DNA, 25 bp, Homo sapien
ctaggtgtttccttgatatcttgcc

SEQ ID NO: 521605 - DNA, 25 bp, Homo sapien
tataaccataggattcaacttctgt

SEQ ID NO: 521606 - DNA, 25 bp, Homo sapien
tagcagcagccagtgtataaccata

SEQ ID NO: 521607 - DNA, 25 bp, Homo sapien
ccgtttccagtcttagagtgacaat

SEQ ID NO: 521608 - DNA, 25 bp, Homo sapien
ttgtgtccgtttccagtcttagagt

SEQ ID NO: 521609 - DNA, 25 bp, Homo sapien
gtgtccgtttccagtcttagagtga

SEQ ID NO: 521610 - DNA, 25 bp, Homo sapien
tttattgtgtccgtttccagtctta

SEQ ID NO: 521611 - DNA, 25 bp, Homo sapien
tttttcatataacatatcagcattt

SEQ ID NO: 521612 - DNA, 25 bp, Homo sapien
cttcgatttctttcttatattcctc

SEQ ID NO: 521613 - DNA, 25 bp, Homo sapien
gtttcacttcgatttctttcttata

SEQ ID NO: 521614 - DNA, 25 bp, Homo sapien
tgttgtttcacttcgatttctttct

SEQ ID NO: 521615 - DNA, 25 bp, Homo sapien
ttgttcccattcaacttgttggctc

SEQ ID NO: 521616 - DNA, 25 bp, Homo sapien
ccattcaacttgttggctctctagc

SEQ ID NO: 521617 - DNA, 25 bp, Homo sapien
attcaacttgttggctctctagctg

SEQ ID NO: 521618 - DNA, 25 bp, Homo sapien
ttttgttcccattcaacttgttggc

SEQ ID NO: 521619 - DNA, 25 bp, Homo sapien
tcatttttaagttctactgatcttt

SEQ ID NO: 521620 - DNA, 25 bp, Homo sapien
tactgtaagttattcactgtgatca

SEQ ID NO: 521621 - DNA, 25 bp, Homo sapien
ctttcacataggcaaactgcatcca

SEQ ID NO: 521622 - DNA, 25 bp, Homo sapien
tttcaatttctactgtaagttattc

SEQ ID NO: 521623 - DNA, 25 bp, Homo sapien
atccctgcaaatatctgctgagaac

SEQ ID NO: 521624 - DNA, 25 bp, Homo sapien
ctaatcaaatccctgcaaatatctg

SEQ ID NO: 521625 - DNA, 25 bp, Homo sapien
caaatccctgcaaatatctgctgag

SEQ ID NO: 521626 - DNA, 25 bp, Homo sapien
taatcaaatccctgcaaatatctgc

SEQ ID NO: 521627 - DNA, 25 bp, Homo sapien
gaagaatccgatctcagcaggtgct

SEQ ID NO: 521628 - DNA, 25 bp, Homo sapien
gggcccttggcagaagaatccgatc

SEQ ID NO: 521629 - DNA, 25 bp, Homo sapien
tggcagaagaatccgatctcagcag

SEQ ID NO: 521630 - DNA, 25 bp, Homo sapien
ccttggcagaagaatccgatctcag

SEQ ID NO: 521631 - DNA, 25 bp, Homo sapien
gaggcattcggagtctgctcactct

SEQ ID NO: 521632 - DNA, 25 bp, Homo sapien
cattcggagtctgctcactctcagg

SEQ ID NO: 521633 - DNA, 25 bp, Homo sapien
cttccagaggcattcggagtctgct

SEQ ID NO: 521634 - DNA, 25 bp, Homo sapien
ggcattcggagtctgctcactctca

SEQ ID NO: 521635 - DNA, 25 bp, Homo sapien
taagactccatagcagacgttgttg

SEQ ID NO: 521636 - DNA, 25 bp, Homo sapien
gtgagaactcacctccgaagcactg

SEQ ID NO: 521637 - DNA, 25 bp, Homo sapien
gcagttgcatctgacaagggccaca

SEQ ID NO: 521638 - DNA, 25 bp, Homo sapien
gacagttgatccctcatgacctaaa

SEQ ID NO: 521639 - DNA, 25 bp, Homo sapien
gcctgttacactcccaagctatatg

SEQ ID NO: 521640 - DNA, 25 bp, Homo sapien
taagtgaagctaactgcaagagcag

SEQ ID NO: 521641 - DNA, 25 bp, Homo sapien
tggaaagtggtcacctaccaaggaa

SEQ ID NO: 521642 - DNA, 25 bp, Homo sapien
agagatcagcagatggagccccatg

SEQ ID NO: 521643 - DNA, 25 bp, Homo sapien
gagtgaaaacatgaaatccccaggg

SEQ ID NO: 521644 - DNA, 25 bp, Homo sapien
agacctggactgtgagctcatcgca

SEQ ID NO: 521645 - DNA, 25 bp, Homo sapien
caatagctgactaccgcaagaggac

SEQ ID NO: 521646 - DNA, 25 bp, Homo sapien
gcaaataaattgacaggagctggcc

SEQ ID NO: 521647 - DNA, 25 bp, Homo sapien
tcttgtggttatcatagctgacgcc

SEQ ID NO: 521648 - DNA, 25 bp, Homo sapien
tagaattcttctcggtggctaccgt

SEQ ID NO: 521649 - DNA, 25 bp, Homo sapien
gagagctatgggagactcagccagc

SEQ ID NO: 521650 - DNA, 25 bp, Homo sapien
tggctaccgtgctcaaggtctgcag

SEQ ID NO: 521651 - DNA, 25 bp, Homo sapien
tctctgcaactgcacgggaatccga

SEQ ID NO: 521652 - DNA, 25 bp, Homo sapien
ttggctctcgcttcccgggtggcct

SEQ ID NO: 521653 - DNA, 25 bp, Homo sapien
cctcggctgccatggatctctgcaa

SEQ ID NO: 521654 - DNA, 25 bp, Homo sapien
cagttcggtggcatcatcaagtaaa

SEQ ID NO: 521655 - DNA, 25 bp, Homo sapien
tatgggcgatctcttctcgtccagc

SEQ ID NO: 521656 - DNA, 25 bp, Homo sapien
tctacctgagtagttacggagtctc

SEQ ID NO: 521657 - DNA, 25 bp, Homo sapien
gacatcgttgacattagccactgct

SEQ ID NO: 521658 - DNA, 25 bp, Homo sapien
tggtttgagccagcagaaatgttgc

SEQ ID NO: 521659 - DNA, 25 bp, Homo sapien
gcaagtaactgttcggaggtcaact

SEQ ID NO: 521660 - DNA, 25 bp, Homo sapien
tgttgcaagtaactgttcggaggtc

SEQ ID NO: 521661 - DNA, 25 bp, Homo sapien
tcaactttgacaaacacatctatgc

SEQ ID NO: 521662 - DNA, 25 bp, Homo sapien
gtaactgttcggaggtcaactttga

SEQ ID NO: 521663 - DNA, 25 bp, Homo sapien
attcctctaaatcaatgtattccag

SEQ ID NO: 521664 - DNA, 25 bp, Homo sapien
ttcctctaaatcaatgtattccaga

SEQ ID NO: 521665 - DNA, 25 bp, Homo sapien
cctctaaatcaatgtattccagagt

SEQ ID NO: 521666 - DNA, 25 bp, Homo sapien
tcctctaaatcaatgtattccagag

SEQ ID NO: 521667 - DNA, 25 bp, Homo sapien
caggggcagccaccgcgtcattcat

SEQ ID NO: 521668 - DNA, 25 bp, Homo sapien
tattgaaggtggtagcagtagtatt

SEQ ID NO: 521669 - DNA, 25 bp, Homo sapien
aggaaaaatattgaaggtggtagca

SEQ ID NO: 521670 - DNA, 25 bp, Homo sapien
gcagtagtattaggtgtccctgatc

SEQ ID NO: 521671 - DNA, 25 bp, Homo sapien
caacagcacgttcatactccttaat

SEQ ID NO: 521672 - DNA, 25 bp, Homo sapien
gcgtcccagacggaatacaacagca

SEQ ID NO: 521673 - DNA, 25 bp, Homo sapien
tggctttgtcagcttggatgcgtcc

SEQ ID NO: 521674 - DNA, 25 bp, Homo sapien
ttgtcagcttggatgcgtcccagac

SEQ ID NO: 521675 - DNA, 25 bp, Homo sapien
tcaagcacatccatatggagatggg

SEQ ID NO: 521676 - DNA, 25 bp, Homo sapien
gccacatacaccaagccgtttattg

SEQ ID NO: 521677 - DNA, 25 bp, Homo sapien
gagagggaaaacaggatccagccac

SEQ ID NO: 521678 - DNA, 25 bp, Homo sapien
gagatggggaaggtaatgatcacca

SEQ ID NO: 521679 - DNA, 25 bp, Homo sapien
tatttaatcaataccttcctttcaa

SEQ ID NO: 521680 - DNA, 25 bp, Homo sapien
tgtggctgtgacaacagcagcaaaa

SEQ ID NO: 521681 - DNA, 25 bp, Homo sapien
tatgtggagacttccccctgtgtgt

SEQ ID NO: 521682 - DNA, 25 bp, Homo sapien
tctaggaagtctgcagctggtgaaa

SEQ ID NO: 521683 - DNA, 25 bp, Homo sapien
ccatctacccagttgatgtcttcac

SEQ ID NO: 521684 - DNA, 25 bp, Homo sapien
agcttcagtcatgccatctacccag

SEQ ID NO: 521685 - DNA, 25 bp, Homo sapien
tcatgccatctacccagttgatgtc

SEQ ID NO: 521686 - DNA, 25 bp, Homo sapien
gatacagcttcagtcatgccatcta

SEQ ID NO: 521687 - DNA, 25 bp, Homo sapien
ctcaggtgaagacaccctagaatcc

SEQ ID NO: 521688 - DNA, 25 bp, Homo sapien
tctcaggtgaagacaccctagaatc

SEQ ID NO: 521689 - DNA, 25 bp, Homo sapien
tcaggtgaagacaccctagaatcca

SEQ ID NO: 521690 - DNA, 25 bp, Homo sapien
cttctcaggtgaagacaccctagaa

SEQ ID NO: 521691 - DNA, 25 bp, Homo sapien
gtttggagctaagtgtgaagaacag

SEQ ID NO: 521692 - DNA, 25 bp, Homo sapien
tttggagctaagtgtgaagaacagg

SEQ ID NO: 521693 - DNA, 25 bp, Homo sapien
aaagagcaacagaaaaacttcctgt

SEQ ID NO: 521694 - DNA, 25 bp, Homo sapien
gagcaacagaaaaacttcctgtttc

SEQ ID NO: 521695 - DNA, 25 bp, Homo sapien
tggaaagagcaacagaaaaacttcc

SEQ ID NO: 521696 - DNA, 25 bp, Homo sapien
ctctcatggaaagagcaacagaaaa

SEQ ID NO: 521697 - DNA, 25 bp, Homo sapien
ttgccacaatttcagctcctgttat

SEQ ID NO: 521698 - DNA, 25 bp, Homo sapien
tgattattgccacaatttcagctcc

SEQ ID NO: 521699 - DNA, 25 bp, Homo sapien
agactgctgaagttgcttctcagct

SEQ ID NO: 521700 - DNA, 25 bp, Homo sapien
tgagactgctgaagttgcttctcag

SEQ ID NO: 521701 - DNA, 25 bp, Homo sapien
ttagaaagcctatccaagcacttag

SEQ ID NO: 521702 - DNA, 25 bp, Homo sapien
tgttcaataattaactctagcacgt

SEQ ID NO: 521703 - DNA, 25 bp, Homo sapien
tttaaacgaatgagcaatcagtagt

SEQ ID NO: 521704 - DNA, 25 bp, Homo sapien
tccagcaactggtatcagattaaac

SEQ ID NO: 521705 - DNA, 25 bp, Homo sapien
tgtcatatccatagtttattttaaa

SEQ ID NO: 521706 - DNA, 25 bp, Homo sapien
gtcatatccatagtttattttaaaa

SEQ ID NO: 521707 - DNA, 25 bp, Homo sapien
tttgtcatatccatagtttatttta

SEQ ID NO: 521708 - DNA, 25 bp, Homo sapien
tcatatccatagtttattttaaaaa

SEQ ID NO: 521709 - DNA, 25 bp, Homo sapien
ggtggcccaagagtcagtcaagtgt

SEQ ID NO: 521710 - DNA, 25 bp, Homo sapien
tacagtaagtaacagaggtggccca

SEQ ID NO: 521711 - DNA, 25 bp, Homo sapien
tctgccagtggatgctatacaagca

SEQ ID NO: 521712 - DNA, 25 bp, Homo sapien
tgatgctaataggaaccgctcatgc

SEQ ID NO: 521713 - DNA, 25 bp, Homo sapien
catatttacataggggagtgttcac

SEQ ID NO: 521714 - DNA, 25 bp, Homo sapien
tttacataggggagtgttcacactt

SEQ ID NO: 521715 - DNA, 25 bp, Homo sapien
agcatatttacataggggagtgttc

SEQ ID NO: 521716 - DNA, 25 bp, Homo sapien
cataggggagtgttcacactttaaa

SEQ ID NO: 521717 - DNA, 25 bp, Homo sapien
tcaaattgttgtcacaatttctcca

SEQ ID NO: 521718 - DNA, 25 bp, Homo sapien
ttgttgtcacaatttctccaggatt

SEQ ID NO: 521719 - DNA, 25 bp, Homo sapien
gttgtcacaatttctccaggattac

SEQ ID NO: 521720 - DNA, 25 bp, Homo sapien
aattgttgtcacaatttctccagga

SEQ ID NO: 521721 - DNA, 25 bp, Homo sapien
attgcagttctcaggcaattctgat

SEQ ID NO: 521722 - DNA, 25 bp, Homo sapien
ttgcagttctcaggcaattctgatg

SEQ ID NO: 521723 - DNA, 25 bp, Homo sapien
ctggcgctgaaggataactaggaaa

SEQ ID NO: 521724 - DNA, 25 bp, Homo sapien
tagctttccagagccgaagctgaat

SEQ ID NO: 521725 - DNA, 25 bp, Homo sapien
aaaatggtgttcctggcgctgaagg

SEQ ID NO: 521726 - DNA, 25 bp, Homo sapien
tttccagagccgaagctgaatggac

SEQ ID NO: 521727 - DNA, 25 bp, Homo sapien
aactctgaggcacaataaagtctgc

SEQ ID NO: 521728 - DNA, 25 bp, Homo sapien
tgccaagttcattcaagcctgcgct

SEQ ID NO: 521729 - DNA, 25 bp, Homo sapien
cagataatgtgctttaacggtcaat

SEQ ID NO: 521730 - DNA, 25 bp, Homo sapien
tcaagtgaaatctataagcaggaag

SEQ ID NO: 521731 - DNA, 25 bp, Homo sapien
gagccattttttgccaatgttggga

SEQ ID NO: 521732 - DNA, 25 bp, Homo sapien
gttgggatatcgcaaatgatactgc

SEQ ID NO: 521733 - DNA, 25 bp, Homo sapien
aatttggagagaagtaatcatcatc

SEQ ID NO: 521734 - DNA, 25 bp, Homo sapien
catcaaatctctatgcattctgcta

SEQ ID NO: 521735 - DNA, 25 bp, Homo sapien
aattcttgcaaggatgattgtgaag

SEQ ID NO: 521736 - DNA, 25 bp, Homo sapien
tgctgtaacaatgctgactgcgcag

SEQ ID NO: 521737 - DNA, 25 bp, Homo sapien
gccgcattatgctgtaattcttgca

SEQ ID NO: 521738 - DNA, 25 bp, Homo sapien
actgcgcagccgcattatgctgtaa

SEQ ID NO: 521739 - DNA, 25 bp, Homo sapien
tggaaaaacagaactgcctgcagct

SEQ ID NO: 521740 - DNA, 25 bp, Homo sapien
atcagccattccctgatatgaatct

SEQ ID NO: 521741 - DNA, 25 bp, Homo sapien
gcatataatcctttctgctgtctta

SEQ ID NO: 521742 - DNA, 25 bp, Homo sapien
cgaaattcagtaagtctgttttgca

SEQ ID NO: 521743 - DNA, 25 bp, Homo sapien
tgcagacaagacataaaagctactg

SEQ ID NO: 521744 - DNA, 25 bp, Homo sapien
gagtgctaaagttttcacccagaaa

SEQ ID NO: 521745 - DNA, 25 bp, Homo sapien
tcagagtgctaaagttttcacccag

SEQ ID NO: 521746 - DNA, 25 bp, Homo sapien
tgaaatgtgaactacaagttaggtg

SEQ ID NO: 521747 - DNA, 25 bp, Homo sapien
tgtgaactacaagttaggtgaagaa

SEQ ID NO: 521748 - DNA, 25 bp, Homo sapien
cggcttgtgcaacaagagcggagtt

SEQ ID NO: 521749 - DNA, 25 bp, Homo sapien
acaggtagtggtgtgacagctgcga

SEQ ID NO: 521750 - DNA, 25 bp, Homo sapien
gaactgaatgctgaggcgaatcctg

SEQ ID NO: 521751 - DNA, 25 bp, Homo sapien
ctgcagccccgggaatgagggaaga

SEQ ID NO: 521752 - DNA, 25 bp, Homo sapien
cagaggtccttgagtaacagagaaa

SEQ ID NO: 521753 - DNA, 25 bp, Homo sapien
agggatttgaagatgacagaggtcc

SEQ ID NO: 521754 - DNA, 25 bp, Homo sapien
gatgacagaggtccttgagtaacag

SEQ ID NO: 521755 - DNA, 25 bp, Homo sapien
aaaagcctggataggagggatttga

SEQ ID NO: 521756 - DNA, 25 bp, Homo sapien
gatgttgaagtatatgcacggccca

SEQ ID NO: 521757 - DNA, 25 bp, Homo sapien
tggctattaatgaccctgggagaga

SEQ ID NO: 521758 - DNA, 25 bp, Homo sapien
caagcagataaactgatgggcacgg

SEQ ID NO: 521759 - DNA, 25 bp, Homo sapien
taaagtgccatgagagggattccca

SEQ ID NO: 521760 - DNA, 25 bp, Homo sapien
ctggcactgacgtggaagctgatgc

SEQ ID NO: 521761 - DNA, 25 bp, Homo sapien
tcattccagaaacggtggcagctgc

SEQ ID NO: 521762 - DNA, 25 bp, Homo sapien
tagagccaccagcaattacaggagt

SEQ ID NO: 521763 - DNA, 25 bp, Homo sapien
cagtattcagcaggttcattccaga

SEQ ID NO: 521764 - DNA, 25 bp, Homo sapien
tgaagccagcccacttgtgacagca

SEQ ID NO: 521765 - DNA, 25 bp, Homo sapien
catctggaggcactatgtaggacac

SEQ ID NO: 521766 - DNA, 25 bp, Homo sapien
caaatgaggtttccagtatcacaga

SEQ ID NO: 521767 - DNA, 25 bp, Homo sapien
tagaaactaccagctgagaagcacc

SEQ ID NO: 521768 - DNA, 25 bp, Homo sapien
ggaaaaatacaacgtcgcagcactg

SEQ ID NO: 521769 - DNA, 25 bp, Homo sapien
tttgattctgtataggttttgacgg

SEQ ID NO: 521770 - DNA, 25 bp, Homo sapien
ctgtataggttttgacggattcgaa

SEQ ID NO: 521771 - DNA, 25 bp, Homo sapien
gacggattcgaaaggtcttcattct

SEQ ID NO: 521772 - DNA, 25 bp, Homo sapien
ttttgacggattcgaaaggtcttca

SEQ ID NO: 521773 - DNA, 25 bp, Homo sapien
tggaggtggagctatgacattcgct

SEQ ID NO: 521774 - DNA, 25 bp, Homo sapien
taccagacctgcattgttataagca

SEQ ID NO: 521775 - DNA, 25 bp, Homo sapien
caggattaggagtatatggaggtgg

SEQ ID NO: 521776 - DNA, 25 bp, Homo sapien
tatgacattcgctaatggtaccaga

SEQ ID NO: 521777 - DNA, 25 bp, Homo sapien
gcatggaggtatcggataaggaaca

SEQ ID NO: 521778 - DNA, 25 bp, Homo sapien
aatagttgcatgtggtcggcatgga

SEQ ID NO: 521779 - DNA, 25 bp, Homo sapien
ttggtgcaatagttgcatgtggtcg

SEQ ID NO: 521780 - DNA, 25 bp, Homo sapien
cggataaggaacaggtttatgtgga

SEQ ID NO: 521781 - DNA, 25 bp, Homo sapien
ttttacctacagagagagcatgtgc

SEQ ID NO: 521782 - DNA, 25 bp, Homo sapien
ttacagttgatggagcttacctaag

SEQ ID NO: 521783 - DNA, 25 bp, Homo sapien
tggcaacatcctcctaaactgatag

SEQ ID NO: 521784 - DNA, 25 bp, Homo sapien
gactacatgggacaacaaatgaggg

SEQ ID NO: 521785 - DNA, 25 bp, Homo sapien
gcagctattcctttgccttcgttag

SEQ ID NO: 521786 - DNA, 25 bp, Homo sapien
cgttagtacattcttcaccatcttt

SEQ ID NO: 521787 - DNA, 25 bp, Homo sapien
tggatggcccaagaattcgtgcagc

SEQ ID NO: 521788 - DNA, 25 bp, Homo sapien
gaattcgtgcagctattcctttgcc

SEQ ID NO: 521789 - DNA, 25 bp, Homo sapien
ctaggtcttcctttgggatatggat

SEQ ID NO: 521790 - DNA, 25 bp, Homo sapien
ttcctttgggatatggatttcctgg

SEQ ID NO: 521791 - DNA, 25 bp, Homo sapien
ccatttatgcggctaggtcttcctt

SEQ ID NO: 521792 - DNA, 25 bp, Homo sapien
aaattccatttatgcggctaggtct

SEQ ID NO: 521793 - DNA, 25 bp, Homo sapien
gaggagctttgcagccccccttgaa

SEQ ID NO: 521794 - DNA, 25 bp, Homo sapien
agcatgaggagctttgcagcccccc

SEQ ID NO: 521795 - DNA, 25 bp, Homo sapien
aggagctttgcagccccccttgaaa

SEQ ID NO: 521796 - DNA, 25 bp, Homo sapien
atgaggagctttgcagccccccttg

SEQ ID NO: 521797 - DNA, 25 bp, Homo sapien
gaacattgggagctcagctaaaaaa

SEQ ID NO: 521798 - DNA, 25 bp, Homo sapien
taagtattctgaacattgggagctc

SEQ ID NO: 521799 - DNA, 25 bp, Homo sapien
tattctgaacattgggagctcagct

SEQ ID NO: 521800 - DNA, 25 bp, Homo sapien
cttaaaagataagtattctgaacat

SEQ ID NO: 521801 - DNA, 25 bp, Homo sapien
caagtaacatgacattgggtggtcc

SEQ ID NO: 521802 - DNA, 25 bp, Homo sapien
tggtccaaagacctacataccgttc

SEQ ID NO: 521803 - DNA, 25 bp, Homo sapien
gatgccgcacacacactgagttggt

SEQ ID NO: 521804 - DNA, 25 bp, Homo sapien
tgctctttacaacccagtggaggac

SEQ ID NO: 521805 - DNA, 25 bp, Homo sapien
cgagaattctgtgcatcaataatgt

SEQ ID NO: 521806 - DNA, 25 bp, Homo sapien
tctcagacatatttaccctgaataa

SEQ ID NO: 521807 - DNA, 25 bp, Homo sapien
ggacgagaattctgtgcatcaataa

SEQ ID NO: 521808 - DNA, 25 bp, Homo sapien
ttcaagtattctcttgcaccgtttc

SEQ ID NO: 521809 - DNA, 25 bp, Homo sapien
gcaactagtttgtctttactgaaag

SEQ ID NO: 521810 - DNA, 25 bp, Homo sapien
gaggctaacagttcaagagcaacta

SEQ ID NO: 521811 - DNA, 25 bp, Homo sapien
cagttgagtatattgaccacttctg

SEQ ID NO: 521812 - DNA, 25 bp, Homo sapien
tgaaacagttgagtatattgaccac

SEQ ID NO: 521813 - DNA, 25 bp, Homo sapien
taacagacccagacactttcttagg

SEQ ID NO: 521814 - DNA, 25 bp, Homo sapien
gccagatactcctgtgtgatccaga

SEQ ID NO: 521815 - DNA, 25 bp, Homo sapien
gaggaggtcagaaagcagcactaac

SEQ ID NO: 521816 - DNA, 25 bp, Homo sapien
taacttgccaatcgggacactgtag

SEQ ID NO: 521817 - DNA, 25 bp, Homo sapien
gggctcggcccaggaaaaatatctc

SEQ ID NO: 521818 - DNA, 25 bp, Homo sapien
gtaatgctttcattgccttcaactg

SEQ ID NO: 521819 - DNA, 25 bp, Homo sapien
ttgccttcaactggggctcggccca

SEQ ID NO: 521820 - DNA, 25 bp, Homo sapien
atgctgtaatgctttcattgccttc

SEQ ID NO: 521821 - DNA, 25 bp, Homo sapien
taacagctctaatgacagcatgttt

SEQ ID NO: 521822 - DNA, 25 bp, Homo sapien
gaactaacagctctaatgacagcat

SEQ ID NO: 521823 - DNA, 25 bp, Homo sapien
aactaacagctctaatgacagcatg

SEQ ID NO: 521824 - DNA, 25 bp, Homo sapien
agctctaatgacagcatgtttgcaa

SEQ ID NO: 521825 - DNA, 25 bp, Homo sapien
ttctataagatttcagtacttgaaa

SEQ ID NO: 521826 - DNA, 25 bp, Homo sapien
tataagatttcagtacttgaaatta

SEQ ID NO: 521827 - DNA, 25 bp, Homo sapien
tctataagatttcagtacttgaaat

SEQ ID NO: 521828 - DNA, 25 bp, Homo sapien
taagatttcagtacttgaaattata

SEQ ID NO: 521829 - DNA, 25 bp, Homo sapien
gcaagctctgcctcctgggttcaag

SEQ ID NO: 521830 - DNA, 25 bp, Homo sapien
caattctccagcctcagcctcctga

SEQ ID NO: 521831 - DNA, 25 bp, Homo sapien
agccaggctggagcgcaatggcgcg

SEQ ID NO: 521832 - DNA, 25 bp, Homo sapien
cagagttttgctctgttagccaggc

SEQ ID NO: 521833 - DNA, 25 bp, Homo sapien
cactagaaaagtatccatgcacata

SEQ ID NO: 521834 - DNA, 25 bp, Homo sapien
ctgttcactagaaaagtatccatgc

SEQ ID NO: 521835 - DNA, 25 bp, Homo sapien
gaaaagtatccatgcacatattcaa

SEQ ID NO: 521836 - DNA, 25 bp, Homo sapien
gttcactagaaaagtatccatgcac

SEQ ID NO: 521837 - DNA, 25 bp, Homo sapien
ctctgggaaatgcgatccacacaac

SEQ ID NO: 521838 - DNA, 25 bp, Homo sapien
actctgggaaatgcgatccacacaa

SEQ ID NO: 521839 - DNA, 25 bp, Homo sapien
tcactctgggaaatgcgatccacac

SEQ ID NO: 521840 - DNA, 25 bp, Homo sapien
cactctgggaaatgcgatccacaca

SEQ ID NO: 521841 - DNA, 25 bp, Homo sapien
tggaaccgagggctttacaaatgta

SEQ ID NO: 521842 - DNA, 25 bp, Homo sapien
gctattacggatttgtaaagccggc

SEQ ID NO: 521843 - DNA, 25 bp, Homo sapien
gatataaactcctccattacacgtg

SEQ ID NO: 521844 - DNA, 25 bp, Homo sapien
aaatgtaattcccacgacaccgtgc

SEQ ID NO: 521845 - DNA, 25 bp, Homo sapien
taattcatggaatcggtctaattac

SEQ ID NO: 521846 - DNA, 25 bp, Homo sapien
aataattcatggaatcggtctaatt

SEQ ID NO: 521847 - DNA, 25 bp, Homo sapien
aaacacgagaattcatctcataaaa

SEQ ID NO: 521848 - DNA, 25 bp, Homo sapien
ctaaaacacgagaattcatctcata

SEQ ID NO: 521849 - DNA, 25 bp, Homo sapien
ctaatttcatccagcaccatttcaa

SEQ ID NO: 521850 - DNA, 25 bp, Homo sapien
ctttctaatttcatccagcaccatt

SEQ ID NO: 521851 - DNA, 25 bp, Homo sapien
tcatccagcaccatttcaaaggact

SEQ ID NO: 521852 - DNA, 25 bp, Homo sapien
catccagcaccatttcaaaggactt

SEQ ID NO: 521853 - DNA, 25 bp, Homo sapien
gagtagaaacacctgcgctcagagt

SEQ ID NO: 521854 - DNA, 25 bp, Homo sapien
tattcacacaatggttcagggcacc

SEQ ID NO: 521855 - DNA, 25 bp, Homo sapien
tcttgaaggcgctttcccaggtgga

SEQ ID NO: 521856 - DNA, 25 bp, Homo sapien
gactccacgagcaagagaggatgcg

SEQ ID NO: 521857 - DNA, 25 bp, Homo sapien
gaacccggacgcatggtccggctcg

SEQ ID NO: 521858 - DNA, 25 bp, Homo sapien
gcaggctctttgttaccagctgctg

SEQ ID NO: 521859 - DNA, 25 bp, Homo sapien
ggacctacaataaagccagtcgcgc

SEQ ID NO: 521860 - DNA, 25 bp, Homo sapien
aagtaaactcaacactgcgccgcca

SEQ ID NO: 521861 - DNA, 25 bp, Homo sapien
cagacctgaagggactcacacttgt

SEQ ID NO: 521862 - DNA, 25 bp, Homo sapien
catctccgtgaggttaggaaggtaa

SEQ ID NO: 521863 - DNA, 25 bp, Homo sapien
cactgatcggactgtatgaccttaa

SEQ ID NO: 521864 - DNA, 25 bp, Homo sapien
gatgtgcaacaggtacagacttgcc

SEQ ID NO: 521865 - DNA, 25 bp, Homo sapien
aaagtgtttgttagtgtacctgtga

SEQ ID NO: 521866 - DNA, 25 bp, Homo sapien
tgaagcaattcaggctaggtaaacc

SEQ ID NO: 521867 - DNA, 25 bp, Homo sapien
gaaaaggcaatattatctggctccc

SEQ ID NO: 521868 - DNA, 25 bp, Homo sapien
taggtaaaccgattttgccatttca

SEQ ID NO: 521869 - DNA, 25 bp, Homo sapien
gcccagagaacatgaacagcagaag

SEQ ID NO: 521870 - DNA, 25 bp, Homo sapien
ctttctctcaccatggttcgtggcc

SEQ ID NO: 521871 - DNA, 25 bp, Homo sapien
ctctcaccatggttcgtggcccaga

SEQ ID NO: 521872 - DNA, 25 bp, Homo sapien
ggcccagagaacatgaacagcagaa

SEQ ID NO: 521873 - DNA, 25 bp, Homo sapien
cccttaatagggctgatgatggatg

SEQ ID NO: 521874 - DNA, 25 bp, Homo sapien
caggcccttaatagggctgatgatg

SEQ ID NO: 521875 - DNA, 25 bp, Homo sapien
cttaatagggctgatgatggatgac

SEQ ID NO: 521876 - DNA, 25 bp, Homo sapien
taatagggctgatgatggatgactc

SEQ ID NO: 521877 - DNA, 25 bp, Homo sapien
aaggagatggaaaagggacatagag

SEQ ID NO: 521878 - DNA, 25 bp, Homo sapien
agatggaaaagggacatagaggtct

SEQ ID NO: 521879 - DNA, 25 bp, Homo sapien
gaaaagggacatagaggtctgacat

SEQ ID NO: 521880 - DNA, 25 bp, Homo sapien
tggaaaagggacatagaggtctgac

SEQ ID NO: 521881 - DNA, 25 bp, Homo sapien
cttgtatatactgccacattctgcc

SEQ ID NO: 521882 - DNA, 25 bp, Homo sapien
taaatttgtggcacaatccaggcag

SEQ ID NO: 521883 - DNA, 25 bp, Homo sapien
ttcaggcaaactgtctcagcagctt

SEQ ID NO: 521884 - DNA, 25 bp, Homo sapien
atccaggcaggtagtgcttctcttg

SEQ ID NO: 521885 - DNA, 25 bp, Homo sapien
agattctccaaattctgcagcccag

SEQ ID NO: 521886 - DNA, 25 bp, Homo sapien
gaatttgtgtcaaataatagttctg

SEQ ID NO: 521887 - DNA, 25 bp, Homo sapien
tctccaaattctgcagcccagtagt

SEQ ID NO: 521888 - DNA, 25 bp, Homo sapien
gcagcccagtagtgccatattggca

SEQ ID NO: 521889 - DNA, 25 bp, Homo sapien
cttgctcctactcacttcttccctt

SEQ ID NO: 521890 - DNA, 25 bp, Homo sapien
taaccttgctcctactcacttcttc

SEQ ID NO: 521891 - DNA, 25 bp, Homo sapien
cacttccttactcctaaccttgctc

SEQ ID NO: 521892 - DNA, 25 bp, Homo sapien
tcctaaccttgctcctactcacttc

SEQ ID NO: 521893 - DNA, 25 bp, Homo sapien
tccccgttatcgtaagtgatctccc

SEQ ID NO: 521894 - DNA, 25 bp, Homo sapien
tattccccgttatcgtaagtgatct

SEQ ID NO: 521895 - DNA, 25 bp, Homo sapien
cccgttatcgtaagtgatctcccca

SEQ ID NO: 521896 - DNA, 25 bp, Homo sapien
ttattccccgttatcgtaagtgatc

SEQ ID NO: 521897 - DNA, 25 bp, Homo sapien
gggtggaagatacatcagttgtgct

SEQ ID NO: 521898 - DNA, 25 bp, Homo sapien
tgagggtggaagatacatcagttgt

SEQ ID NO: 521899 - DNA, 25 bp, Homo sapien
tggtgagggtggaagatacatcagt

SEQ ID NO: 521900 - DNA, 25 bp, Homo sapien
aaatgactgggaaggtctccttcat

SEQ ID NO: 521901 - DNA, 25 bp, Homo sapien
gcagtgtctttgcaactacagaaat

SEQ ID NO: 521902 - DNA, 25 bp, Homo sapien
gctggcccagtcctggaaacggaag

SEQ ID NO: 521903 - DNA, 25 bp, Homo sapien
ggcccagtcctggaaacggaagcag

SEQ ID NO: 521904 - DNA, 25 bp, Homo sapien
tggcccagtcctggaaacggaagca

SEQ ID NO: 521905 - DNA, 25 bp, Homo sapien
tagctggcccagtcctggaaacgga

SEQ ID NO: 521906 - DNA, 25 bp, Homo sapien
gatcttccacactgtattcctgggt

SEQ ID NO: 521907 - DNA, 25 bp, Homo sapien
tcacttgcgatcttccacactgtat

SEQ ID NO: 521908 - DNA, 25 bp, Homo sapien
tccacactgtattcctgggtgaggc

SEQ ID NO: 521909 - DNA, 25 bp, Homo sapien
gaggcctgggcggtcaggatgaagt

SEQ ID NO: 521910 - DNA, 25 bp, Homo sapien
ctggttgaagtcccattgtttgttc

SEQ ID NO: 521911 - DNA, 25 bp, Homo sapien
tggttgaagtcccattgtttgttcc

SEQ ID NO: 521912 - DNA, 25 bp, Homo sapien
gaccgtggtctggctcattgtggct

SEQ ID NO: 521913 - DNA, 25 bp, Homo sapien
gtggtctggctcattgtggcttcat

SEQ ID NO: 521914 - DNA, 25 bp, Homo sapien
tctggctcattgtggcttcatcatg

SEQ ID NO: 521915 - DNA, 25 bp, Homo sapien
tgaaacagcattgccgttccagacc

SEQ ID NO: 521916 - DNA, 25 bp, Homo sapien
attgccgttccagaccagggtggct

SEQ ID NO: 521917 - DNA, 25 bp, Homo sapien
agattcttgtcctgaaacagcattg

SEQ ID NO: 521918 - DNA, 25 bp, Homo sapien
aaaaactcactcaaagattcttgtc

SEQ ID NO: 521919 - DNA, 25 bp, Homo sapien
tctcctagacactgaaagtcattta

SEQ ID NO: 521920 - DNA, 25 bp, Homo sapien
tgcacacgggctccctatcttccac

SEQ ID NO: 521921 - DNA, 25 bp, Homo sapien
aaagtcatttagcttcttggtgtgg

SEQ ID NO: 521922 - DNA, 25 bp, Homo sapien
ctgctcatgcacacgggctccctat

SEQ ID NO: 521923 - DNA, 25 bp, Homo sapien
ctatacaagtatacaaccaaatatt

SEQ ID NO: 521924 - DNA, 25 bp, Homo sapien
ctgaaactgattgtggaggaataaa

SEQ ID NO: 521925 - DNA, 25 bp, Homo sapien
gaatgactgaaactgattgtggagg

SEQ ID NO: 521926 - DNA, 25 bp, Homo sapien
ttcttttaggtcagatagctgtttg

SEQ ID NO: 521927 - DNA, 25 bp, Homo sapien
tcaactccatttggagcatcaggac

SEQ ID NO: 521928 - DNA, 25 bp, Homo sapien
gcatcaggaccactgaacaccaaga

SEQ ID NO: 521929 - DNA, 25 bp, Homo sapien
tgccatagggattcagaaacctggg

SEQ ID NO: 521930 - DNA, 25 bp, Homo sapien
tagatttagataggaccggaactcc

SEQ ID NO: 521931 - DNA, 25 bp, Homo sapien
tgctgaagccaggattaaatttaca

SEQ ID NO: 521932 - DNA, 25 bp, Homo sapien
aaatggtgattccattgctgaagcc

SEQ ID NO: 521933 - DNA, 25 bp, Homo sapien
aattgcatgttgctgctggatggct

SEQ ID NO: 521934 - DNA, 25 bp, Homo sapien
tttacaaattgcatgttgctgctgg

SEQ ID NO: 521935 - DNA, 25 bp, Homo sapien
tgcactgtgtggaccgacatcactc

SEQ ID NO: 521936 - DNA, 25 bp, Homo sapien
gagctgcactgtgtggaccgacatc

SEQ ID NO: 521937 - DNA, 25 bp, Homo sapien
ctgaatgtgtacccttgctgctgtc

SEQ ID NO: 521938 - DNA, 25 bp, Homo sapien
gtgtggaccgacatcactccctgca

SEQ ID NO: 521939 - DNA, 25 bp, Homo sapien
ttgggctggtaaggtgggccactgt

SEQ ID NO: 521940 - DNA, 25 bp, Homo sapien
tgtttgcaaactcatggcacagcag

SEQ ID NO: 521941 - DNA, 25 bp, Homo sapien
cacagcaggtctggataaaagagga

SEQ ID NO: 521942 - DNA, 25 bp, Homo sapien
ggtaaggtgggccactgtttgcaaa

SEQ ID NO: 521943 - DNA, 25 bp, Homo sapien
tgcactcatcaactggtcatctacg

SEQ ID NO: 521944 - DNA, 25 bp, Homo sapien
tcatcaactggtcatctacgttagg

SEQ ID NO: 521945 - DNA, 25 bp, Homo sapien
cactcatcaactggtcatctacgtt

SEQ ID NO: 521946 - DNA, 25 bp, Homo sapien
ctcatcaactggtcatctacgttag

SEQ ID NO: 521947 - DNA, 25 bp, Homo sapien
aatctataaatcactttcaccagta

SEQ ID NO: 521948 - DNA, 25 bp, Homo sapien
attgtcttgggtatacgggcttgtt

SEQ ID NO: 521949 - DNA, 25 bp, Homo sapien
gaatctataaatcactttcaccagt

SEQ ID NO: 521950 - DNA, 25 bp, Homo sapien
ctgctcccagaccactgtccgggca

SEQ ID NO: 521951 - DNA, 25 bp, Homo sapien
gtccgggcactgtctcatcattcca

SEQ ID NO: 521952 - DNA, 25 bp, Homo sapien
ccagaccactgtccgggcactgtct

SEQ ID NO: 521953 - DNA, 25 bp, Homo sapien
ctcccagaccactgtccgggcactg

SEQ ID NO: 521954 - DNA, 25 bp, Homo sapien
cagtgaccattttcaagaccccttc

SEQ ID NO: 521955 - DNA, 25 bp, Homo sapien
cacctaatgactacgactgccactg

SEQ ID NO: 521956 - DNA, 25 bp, Homo sapien
gtattgtacctcctccacctaatga

SEQ ID NO: 521957 - DNA, 25 bp, Homo sapien
tttacaccctcagctgtattgtacc

SEQ ID NO: 521958 - DNA, 25 bp, Homo sapien
aaagtttgctgcctgagaagttaaa

SEQ ID NO: 521959 - DNA, 25 bp, Homo sapien
ctggacctggcgaggacaatgacct

SEQ ID NO: 521960 - DNA, 25 bp, Homo sapien
tcatcaacgaatccaatcactgcct

SEQ ID NO: 521961 - DNA, 25 bp, Homo sapien
acctcttgctcccctgagggtgaat

SEQ ID NO: 521962 - DNA, 25 bp, Homo sapien
acatgaaggccaatccgaggaagca

SEQ ID NO: 521963 - DNA, 25 bp, Homo sapien
tttctctgctgatccgtactcatta

SEQ ID NO: 521964 - DNA, 25 bp, Homo sapien
aaagaaacatgaaggccaatccgag

SEQ ID NO: 521965 - DNA, 25 bp, Homo sapien
ctgatttcctgatgatgggatggga

SEQ ID NO: 521966 - DNA, 25 bp, Homo sapien
ccacccaatcaaaagagcactgagg

SEQ ID NO: 521967 - DNA, 25 bp, Homo sapien
acccaatcaaaagagcactgaggca

SEQ ID NO: 521968 - DNA, 25 bp, Homo sapien
cccaatcaaaagagcactgaggcag

SEQ ID NO: 521969 - DNA, 25 bp, Homo sapien
cacccaatcaaaagagcactgaggc

SEQ ID NO: 521970 - DNA, 25 bp, Homo sapien
tttcaatgtgcgtgtataatgtata

SEQ ID NO: 521971 - DNA, 25 bp, Homo sapien
tgacaatgaaagtcccacgaccctg

SEQ ID NO: 521972 - DNA, 25 bp, Homo sapien
caaaccagaccttgatagatgcagc

SEQ ID NO: 521973 - DNA, 25 bp, Homo sapien
tgggaacaagaactcaaactactgg

SEQ ID NO: 521974 - DNA, 25 bp, Homo sapien
aaaacgtggtagagcagactaagcc

SEQ ID NO: 521975 - DNA, 25 bp, Homo sapien
agtgcttcctctcccttgagtcaaa

SEQ ID NO: 521976 - DNA, 25 bp, Homo sapien
tcagtgcttcctctcccttgagtca

SEQ ID NO: 521977 - DNA, 25 bp, Homo sapien
ttatttctcagtgcttcctctccct

SEQ ID NO: 521978 - DNA, 25 bp, Homo sapien
ttcctctcccttgagtcaaacccac

SEQ ID NO: 521979 - DNA, 25 bp, Homo sapien
gtcaattgaattaaggaaagcaaac

SEQ ID NO: 521980 - DNA, 25 bp, Homo sapien
aaagttagttgatgcttctggggcc

SEQ ID NO: 521981 - DNA, 25 bp, Homo sapien
ggatgaaagtcaattgaattaagga

SEQ ID NO: 521982 - DNA, 25 bp, Homo sapien
ctcagtaaggatgaaagtcaattga

SEQ ID NO: 521983 - DNA, 25 bp, Homo sapien
cctcgggctggctagagtgacagag

SEQ ID NO: 521984 - DNA, 25 bp, Homo sapien
ctcgggctggctagagtgacagagc

SEQ ID NO: 521985 - DNA, 25 bp, Homo sapien
tcgggctggctagagtgacagagca

SEQ ID NO: 521986 - DNA, 25 bp, Homo sapien
cgggctggctagagtgacagagcat

SEQ ID NO: 521987 - DNA, 25 bp, Homo sapien
gagatctctaggcaaaaacttcact

SEQ ID NO: 521988 - DNA, 25 bp, Homo sapien
ctggtagctgcaaaaaccgaagtaa

SEQ ID NO: 521989 - DNA, 25 bp, Homo sapien
gactgacatttctcctcctggtagc

SEQ ID NO: 521990 - DNA, 25 bp, Homo sapien
tccttgtcggactaggcagactgac

SEQ ID NO: 521991 - DNA, 25 bp, Homo sapien
tagagctctcttcgatctccatatg

SEQ ID NO: 521992 - DNA, 25 bp, Homo sapien
tgtggaggaagatactagagctctc

SEQ ID NO: 521993 - DNA, 25 bp, Homo sapien
tatgtcttaagctagtaatactgtc

SEQ ID NO: 521994 - DNA, 25 bp, Homo sapien
tgtaacatcccatgtggcggcaagc

SEQ ID NO: 521995 - DNA, 25 bp, Homo sapien
gatccagttcatggtatcgtcttgc

SEQ ID NO: 521996 - DNA, 25 bp, Homo sapien
catggtatcgtcttgccttgcagtg

SEQ ID NO: 521997 - DNA, 25 bp, Homo sapien
catcgacctattagtgcagtgatcc

SEQ ID NO: 521998 - DNA, 25 bp, Homo sapien
cagtggagaaatagtccaattcagt

SEQ ID NO: 521999 - DNA, 25 bp, Homo sapien
ctgtgggcttgctggaacctggtaa

SEQ ID NO: 522000 - DNA, 25 bp, Homo sapien
tttcttctcggtcctgtgggcttgc

SEQ ID NO: 522001 - DNA, 25 bp, Homo sapien
tctagtggtcttatctccatgaagg

SEQ ID NO: 522002 - DNA, 25 bp, Homo sapien
caacaattgctgttgaggtgaaggc

SEQ ID NO: 522003 - DNA, 25 bp, Homo sapien
ctggagttacccactccattttatg

SEQ ID NO: 522004 - DNA, 25 bp, Homo sapien
catttgttgatctggcaaattcact

SEQ ID NO: 522005 - DNA, 25 bp, Homo sapien
aatcaaagaagggtgtacgaacatt

SEQ ID NO: 522006 - DNA, 25 bp, Homo sapien
gagttacccactccattttatgaga

SEQ ID NO: 522007 - DNA, 25 bp, Homo sapien
gataatccacgtttgtgcataggcg

SEQ ID NO: 522008 - DNA, 25 bp, Homo sapien
tggaatagaaacacccgatgccctg

SEQ ID NO: 522009 - DNA, 25 bp, Homo sapien
tctcctatagtggacagaaagttgc

SEQ ID NO: 522010 - DNA, 25 bp, Homo sapien
gcttttgggagtgccgtgacctaca

SEQ ID NO: 522011 - DNA, 25 bp, Homo sapien
gaaggtaggtggatgttttgacctc

SEQ ID NO: 522012 - DNA, 25 bp, Homo sapien
cttttgaaggtaggtggatgttttg

SEQ ID NO: 522013 - DNA, 25 bp, Homo sapien
ggtaggtggatgttttgacctctcc

SEQ ID NO: 522014 - DNA, 25 bp, Homo sapien
ttgaaggtaggtggatgttttgacc

SEQ ID NO: 522015 - DNA, 25 bp, Homo sapien
tcagtatgggtagtgcttctgtttc

SEQ ID NO: 522016 - DNA, 25 bp, Homo sapien
cagtagtaggcccagccgatttcac

SEQ ID NO: 522017 - DNA, 25 bp, Homo sapien
gcacctgctcccgtgcagtagtagg

SEQ ID NO: 522018 - DNA, 25 bp, Homo sapien
gtttcttgcccgaaaagcaagccag

SEQ ID NO: 522019 - DNA, 25 bp, Homo sapien
taatgacaagcatccaagtgggtcc

SEQ ID NO: 522020 - DNA, 25 bp, Homo sapien
ccaagaataggtcggtgtccccaga

SEQ ID NO: 522021 - DNA, 25 bp, Homo sapien
tgtctacctctcacacgggctaaga

SEQ ID NO: 522022 - DNA, 25 bp, Homo sapien
cacaccctggccaaaaatagagaag

SEQ ID NO: 522023 - DNA, 25 bp, Homo sapien
caaacataaacaccaagacatttgg

SEQ ID NO: 522024 - DNA, 25 bp, Homo sapien
taaaggccatagattgaaaatcacg

SEQ ID NO: 522025 - DNA, 25 bp, Homo sapien
cagatgatgctccaacagcaaccat

SEQ ID NO: 522026 - DNA, 25 bp, Homo sapien
cttgctttgcattacattagataca

SEQ ID NO: 522027 - DNA, 25 bp, Homo sapien
acagccgatgctgtagattctccag

SEQ ID NO: 522028 - DNA, 25 bp, Homo sapien
tatttgcaacgctcttcagaggacc

SEQ ID NO: 522029 - DNA, 25 bp, Homo sapien
agcttcagggtctcgtaagtggcag

SEQ ID NO: 522030 - DNA, 25 bp, Homo sapien
tcagaggacccatgagtgactggca

SEQ ID NO: 522031 - DNA, 25 bp, Homo sapien
tataatgggaataccgctccctgca

SEQ ID NO: 522032 - DNA, 25 bp, Homo sapien
gattgtcagggctgtcctatacaca

SEQ ID NO: 522033 - DNA, 25 bp, Homo sapien
tatacacaactccaaggcgtctatt

SEQ ID NO: 522034 - DNA, 25 bp, Homo sapien
ggtgctgcacacatgcatataatgg

SEQ ID NO: 522035 - DNA, 25 bp, Homo sapien
tgcactcgagttgtggtttccctta

SEQ ID NO: 522036 - DNA, 25 bp, Homo sapien
gaaccacttgtactagcacccatga

SEQ ID NO: 522037 - DNA, 25 bp, Homo sapien
gcacccatgagtatccagtccggaa

SEQ ID NO: 522038 - DNA, 25 bp, Homo sapien
taaagcttccagtgttagtcaagat

SEQ ID NO: 522039 - DNA, 25 bp, Homo sapien
tgagcatgaagcaacccgaaaagtc

SEQ ID NO: 522040 - DNA, 25 bp, Homo sapien
tgctctggcacacaacgcagatgcc

SEQ ID NO: 522041 - DNA, 25 bp, Homo sapien
agacactttaactgccgctctctgc

SEQ ID NO: 522042 - DNA, 25 bp, Homo sapien
cagtgcatcaagtgttaggagtctc

SEQ ID NO: 522043 - DNA, 25 bp, Homo sapien
tggacaaaatgaagcgagtcatatt

SEQ ID NO: 522044 - DNA, 25 bp, Homo sapien
cgagtcatattgaatgtcacagaga

SEQ ID NO: 522045 - DNA, 25 bp, Homo sapien
tgtcacagagaccaatagcaggttc

SEQ ID NO: 522046 - DNA, 25 bp, Homo sapien
gcaggttctcttgcttgagaagcat

SEQ ID NO: 522047 - DNA, 25 bp, Homo sapien
tgaacaaggatgtttaaagccacaa

SEQ ID NO: 522048 - DNA, 25 bp, Homo sapien
ttatccctttgagcggacacatgac

SEQ ID NO: 522049 - DNA, 25 bp, Homo sapien
aagctggcccaattagagtgaggag

SEQ ID NO: 522050 - DNA, 25 bp, Homo sapien
ataagaagcacgtggcattccctgg

SEQ ID NO: 522051 - DNA, 25 bp, Homo sapien
cttcaagtattattttgtaccatgg

SEQ ID NO: 522052 - DNA, 25 bp, Homo sapien
cttgggaggctcttcaagtattatt

SEQ ID NO: 522053 - DNA, 25 bp, Homo sapien
agtcttcaactatcctgggtcctga

SEQ ID NO: 522054 - DNA, 25 bp, Homo sapien
tacagcgtactagggtaattggatg

SEQ ID NO: 522055 - DNA, 25 bp, Homo sapien
tcagtgcagtcttcaactatcctgg

SEQ ID NO: 522056 - DNA, 25 bp, Homo sapien
gtagtatttatacagcgtactaggg

SEQ ID NO: 522057 - DNA, 25 bp, Homo sapien
ttttctaaaaggagtgccatccatg

SEQ ID NO: 522058 - DNA, 25 bp, Homo sapien
gccttattagaccaacgatgtgaaa

SEQ ID NO: 522059 - DNA, 25 bp, Homo sapien
tattgttacacgtgactactggctg

SEQ ID NO: 522060 - DNA, 25 bp, Homo sapien
tatgtagcactttgttcaagactga

SEQ ID NO: 522061 - DNA, 25 bp, Homo sapien
ccaggtcaaactggccagaagtgta

SEQ ID NO: 522062 - DNA, 25 bp, Homo sapien
gtagccacaagtctgccggacttcc

SEQ ID NO: 522063 - DNA, 25 bp, Homo sapien
caaactggccagaagtgtagccaca

SEQ ID NO: 522064 - DNA, 25 bp, Homo sapien
aagtctgccggacttcctcactgtc

SEQ ID NO: 522065 - DNA, 25 bp, Homo sapien
ggcacagccagcaccaatcaacaag

SEQ ID NO: 522066 - DNA, 25 bp, Homo sapien
gcacagccagcaccaatcaacaagc

SEQ ID NO: 522067 - DNA, 25 bp, Homo sapien
aaggtggtgggatcaatatttagca

SEQ ID NO: 522068 - DNA, 25 bp, Homo sapien
ctggtattccacattcacacctgca

SEQ ID NO: 522069 - DNA, 25 bp, Homo sapien
gataaactggtattccacattcaca

SEQ ID NO: 522070 - DNA, 25 bp, Homo sapien
aactggtattccacattcacacctg

SEQ ID NO: 522071 - DNA, 25 bp, Homo sapien
aaaaggataaactggtattccacat

SEQ ID NO: 522072 - DNA, 25 bp, Homo sapien
gagcgatttacactggccgtgggaa

SEQ ID NO: 522073 - DNA, 25 bp, Homo sapien
tggccgtgggaaatcacgtcttttc

SEQ ID NO: 522074 - DNA, 25 bp, Homo sapien
cttcccggcaggcttgtagagcgat

SEQ ID NO: 522075 - DNA, 25 bp, Homo sapien
acgtcttttctaccgattgcactca

SEQ ID NO: 522076 - DNA, 25 bp, Homo sapien
tttgtggtaagataaattctggcat

SEQ ID NO: 522077 - DNA, 25 bp, Homo sapien
atttgtggtaagataaattctggca

SEQ ID NO: 522078 - DNA, 25 bp, Homo sapien
cttgctctctataggctcttgtgtt

SEQ ID NO: 522079 - DNA, 25 bp, Homo sapien
ttatttccttgctctctataggctc

SEQ ID NO: 522080 - DNA, 25 bp, Homo sapien
tcacagagctagacaatttgcctgt

SEQ ID NO: 522081 - DNA, 25 bp, Homo sapien
gctagacaatttgcctgtttataaa

SEQ ID NO: 522082 - DNA, 25 bp, Homo sapien
gaaacaattttgtggtcatgctgac

SEQ ID NO: 522083 - DNA, 25 bp, Homo sapien
gaggtaagttctgagattgcaagag

SEQ ID NO: 522084 - DNA, 25 bp, Homo sapien
tcaactgcaggttttagcctagagg

SEQ ID NO: 522085 - DNA, 25 bp, Homo sapien
ctgggagtggttgagtatcaactgc

SEQ ID NO: 522086 - DNA, 25 bp, Homo sapien
cttgatgcaggctaaggcatttgtc

SEQ ID NO: 522087 - DNA, 25 bp, Homo sapien
tgatgcaggctaaggcatttgtctg

SEQ ID NO: 522088 - DNA, 25 bp, Homo sapien
gatgcaggctaaggcatttgtctgc

SEQ ID NO: 522089 - DNA, 25 bp, Homo sapien
accttgatgcaggctaaggcatttg

SEQ ID NO: 522090 - DNA, 25 bp, Homo sapien
aaaaagaatcaaccagcaccccagt

SEQ ID NO: 522091 - DNA, 25 bp, Homo sapien
acaagtgtacatataaggtcagagc

SEQ ID NO: 522092 - DNA, 25 bp, Homo sapien
tgtttacgagactcatccatagtga

SEQ ID NO: 522093 - DNA, 25 bp, Homo sapien
caagggttatcctacctcctgacaa

SEQ ID NO: 522094 - DNA, 25 bp, Homo sapien
ttcagggcatgtgtttcaggacaac

SEQ ID NO: 522095 - DNA, 25 bp, Homo sapien
taataccacattatgcttcagggca

SEQ ID NO: 522096 - DNA, 25 bp, Homo sapien
caagggcccctgcatttggtgttat

SEQ ID NO: 522097 - DNA, 25 bp, Homo sapien
caactgagggagtcttcatggtgga

SEQ ID NO: 522098 - DNA, 25 bp, Homo sapien
tttctaacccgtctgtggcacatga

SEQ ID NO: 522099 - DNA, 25 bp, Homo sapien
tgtaatagcaacctaagacggaaac

SEQ ID NO: 522100 - DNA, 25 bp, Homo sapien
ggaaaaataccatgactgagctggt

SEQ ID NO: 522101 - DNA, 25 bp, Homo sapien
tgagctggtgggatcaaagaccaaa

SEQ ID NO: 522102 - DNA, 25 bp, Homo sapien
tactactatattgcctcagccgata

SEQ ID NO: 522103 - DNA, 25 bp, Homo sapien
gaaaagcttgcatactactatattg

SEQ ID NO: 522104 - DNA, 25 bp, Homo sapien
ggaactgacacagaacgcagagtga

SEQ ID NO: 522105 - DNA, 25 bp, Homo sapien
tcagctgggcatgaatcccgttgga

SEQ ID NO: 522106 - DNA, 25 bp, Homo sapien
aatagtgtattcctctgctggcaaa

SEQ ID NO: 522107 - DNA, 25 bp, Homo sapien
aaagtagttcagcaaagttgaggaa

SEQ ID NO: 522108 - DNA, 25 bp, Homo sapien
tgtatgcatacgcacatgtggaaga

SEQ ID NO: 522109 - DNA, 25 bp, Homo sapien
tcaacatgttaatagtgtattcctc

SEQ ID NO: 522110 - DNA, 25 bp, Homo sapien
cagtgtccagtgtcttttctcttct

SEQ ID NO: 522111 - DNA, 25 bp, Homo sapien
agtgtccagtgtcttttctcttctt

SEQ ID NO: 522112 - DNA, 25 bp, Homo sapien
cagtccattgcataggtatatcaca

SEQ ID NO: 522113 - DNA, 25 bp, Homo sapien
cacaggcaactatggattgctttca

SEQ ID NO: 522114 - DNA, 25 bp, Homo sapien
tgagagtcaccctaattgagcatat

SEQ ID NO: 522115 - DNA, 25 bp, Homo sapien
ttccagtgcttgactattgcaaaca

SEQ ID NO: 522116 - DNA, 25 bp, Homo sapien
gcctccaactgtgaggaaatgagtt

SEQ ID NO: 522117 - DNA, 25 bp, Homo sapien
gaatgagtctgtaccagacacctaa

SEQ ID NO: 522118 - DNA, 25 bp, Homo sapien
ttttacccttctgtcccttgcacca

SEQ ID NO: 522119 - DNA, 25 bp, Homo sapien
accacgtgaggacatctagatgaat

SEQ ID NO: 522120 - DNA, 25 bp, Homo sapien
tattagttgatcaggaagtcaaaaa

SEQ ID NO: 522121 - DNA, 25 bp, Homo sapien
ggctattagttgatcaggaagtcaa

SEQ ID NO: 522122 - DNA, 25 bp, Homo sapien
taggctattagttgatcaggaagtc

SEQ ID NO: 522123 - DNA, 25 bp, Homo sapien
tagttgatcaggaagtcaaaaatac

SEQ ID NO: 522124 - DNA, 25 bp, Homo sapien
tttgtcatcaattaaattcagaatt

SEQ ID NO: 522125 - DNA, 25 bp, Homo sapien
aaagtctaccgccttcctgatatat

SEQ ID NO: 522126 - DNA, 25 bp, Homo sapien
gctggggcagcaatttgtaggacca

SEQ ID NO: 522127 - DNA, 25 bp, Homo sapien
agcaatttgtaggaccaccatggag

SEQ ID NO: 522128 - DNA, 25 bp, Homo sapien
atttcagcatgtgtctcagctggtc

SEQ ID NO: 522129 - DNA, 25 bp, Homo sapien
taggatttcagcatgtgtctcagct

SEQ ID NO: 522130 - DNA, 25 bp, Homo sapien
ctgcctgattcagcttcccaaagag

SEQ ID NO: 522131 - DNA, 25 bp, Homo sapien
agagataggatttcagcatgtgtct

SEQ ID NO: 522132 - DNA, 25 bp, Homo sapien
atggtgctgcctcggctcattgcaa

SEQ ID NO: 522133 - DNA, 25 bp, Homo sapien
gtgcaatggtgctgcctcggctcat

SEQ ID NO: 522134 - DNA, 25 bp, Homo sapien
ttcactcttgtcgcctggactggag

SEQ ID NO: 522135 - DNA, 25 bp, Homo sapien
caatggtgctgcctcggctcattgc

SEQ ID NO: 522136 - DNA, 25 bp, Homo sapien
tgtaatctcctccaacagagtaggc

SEQ ID NO: 522137 - DNA, 25 bp, Homo sapien
aagctctcccgatgtacagctggag

SEQ ID NO: 522138 - DNA, 25 bp, Homo sapien
tgaagattcagatacagcctgaagc

SEQ ID NO: 522139 - DNA, 25 bp, Homo sapien
tgtcctcataggcaagctctcaagc

SEQ ID NO: 522140 - DNA, 25 bp, Homo sapien
acatctcacacgttactgtgaaacc

SEQ ID NO: 522141 - DNA, 25 bp, Homo sapien
gccaacatcctaataaggctgaaga

SEQ ID NO: 522142 - DNA, 25 bp, Homo sapien
cacgttactgtgaaacccaatcatc

SEQ ID NO: 522143 - DNA, 25 bp, Homo sapien
acatcctaataaggctgaagaaggc

SEQ ID NO: 522144 - DNA, 25 bp, Homo sapien
gcaacctctgtttctgagctgatga

SEQ ID NO: 522145 - DNA, 25 bp, Homo sapien
aacctctgtttctgagctgatgatg

SEQ ID NO: 522146 - DNA, 25 bp, Homo sapien
cccaggtccctctgctgcaacctct

SEQ ID NO: 522147 - DNA, 25 bp, Homo sapien
ctgtttctgagctgatgatgctctt

SEQ ID NO: 522148 - DNA, 25 bp, Homo sapien
caagtggttactattaccgccaata

SEQ ID NO: 522149 - DNA, 25 bp, Homo sapien
ttaccagtagaagaggcattgcaac

SEQ ID NO: 522150 - DNA, 25 bp, Homo sapien
tatgatgacgatggtcagggtgtct

SEQ ID NO: 522151 - DNA, 25 bp, Homo sapien
tataggtcaccaatgggagcagaca

SEQ ID NO: 522152 - DNA, 25 bp, Homo sapien
tctgcgaacaggtgatggatagctt

SEQ ID NO: 522153 - DNA, 25 bp, Homo sapien
tattacccgcatgtaagggcacagt

SEQ ID NO: 522154 - DNA, 25 bp, Homo sapien
gcttgtgaagtgaggtgactctccc

SEQ ID NO: 522155 - DNA, 25 bp, Homo sapien
tataatcagcgcctagtagccaggc

SEQ ID NO: 522156 - DNA, 25 bp, Homo sapien
ggtgctctgaccctatcatcaatgt

SEQ ID NO: 522157 - DNA, 25 bp, Homo sapien
tagtgaatcaagagtgtcctggtta

SEQ ID NO: 522158 - DNA, 25 bp, Homo sapien
gaaatgctctataatagacgcaatt

SEQ ID NO: 522159 - DNA, 25 bp, Homo sapien
aatagacgcaattttctgttagtga

SEQ ID NO: 522160 - DNA, 25 bp, Homo sapien
taccattcaaatgtcctgggcaggt

SEQ ID NO: 522161 - DNA, 25 bp, Homo sapien
tgcaaggtgacctagctttaaacct

SEQ ID NO: 522162 - DNA, 25 bp, Homo sapien
tatagtcatgaccattgtgctgaag

SEQ ID NO: 522163 - DNA, 25 bp, Homo sapien
tttaggacatcaagagacaagtttc

SEQ ID NO: 522164 - DNA, 25 bp, Homo sapien
tgggcttaaatctggctcaactgct

SEQ ID NO: 522165 - DNA, 25 bp, Homo sapien
aaagacttcaggcttcaggaattca

SEQ ID NO: 522166 - DNA, 25 bp, Homo sapien
tgctagccagctaggtgaccaaggc

SEQ ID NO: 522167 - DNA, 25 bp, Homo sapien
aaatagtggatataaagggtctggc

SEQ ID NO: 522168 - DNA, 25 bp, Homo sapien
ccttcagtaaggagtatggattcaa

SEQ ID NO: 522169 - DNA, 25 bp, Homo sapien
catcttgagcaagtaaactacactc

SEQ ID NO: 522170 - DNA, 25 bp, Homo sapien
tactaatgcgctttaagccaacccc

SEQ ID NO: 522171 - DNA, 25 bp, Homo sapien
cttattacaatctccacaacaggca

SEQ ID NO: 522172 - DNA, 25 bp, Homo sapien
aaggtcaaggtgagagaggcatgaa

SEQ ID NO: 522173 - DNA, 25 bp, Homo sapien
agggaaaggtcaaggtgagagaggc

SEQ ID NO: 522174 - DNA, 25 bp, Homo sapien
gctgattttattctcaatacatgag

SEQ ID NO: 522175 - DNA, 25 bp, Homo sapien
agctgattttattctcaatacatga

SEQ ID NO: 522176 - DNA, 25 bp, Homo sapien
gtatgtttcttcaaacccttcatca

SEQ ID NO: 522177 - DNA, 25 bp, Homo sapien
tctctgtcttgacccccaaggtcct

SEQ ID NO: 522178 - DNA, 25 bp, Homo sapien
ccccaaggtcctgcctcagtatgtt

SEQ ID NO: 522179 - DNA, 25 bp, Homo sapien
ttacccccagataagccagtttctc

SEQ ID NO: 522180 - DNA, 25 bp, Homo sapien
gtctgtagtaactgccaagagagct

SEQ ID NO: 522181 - DNA, 25 bp, Homo sapien
ccagcagtgtaacttttgccctggg

SEQ ID NO: 522182 - DNA, 25 bp, Homo sapien
tctccccaggggtaggtcattagaa

SEQ ID NO: 522183 - DNA, 25 bp, Homo sapien
gcaaactgaggtggcgatgtctgta

SEQ ID NO: 522184 - DNA, 25 bp, Homo sapien
caaacacgctgcaccaaattggcct

SEQ ID NO: 522185 - DNA, 25 bp, Homo sapien
gtgagttttctaggcattcgcagga

SEQ ID NO: 522186 - DNA, 25 bp, Homo sapien
gattaactggctcgctgattgccct

SEQ ID NO: 522187 - DNA, 25 bp, Homo sapien
taaatcagcatcaggaaacaaggtc

SEQ ID NO: 522188 - DNA, 25 bp, Homo sapien
taacatgctcgataaccttggccaa

SEQ ID NO: 522189 - DNA, 25 bp, Homo sapien
tcaagcgtccaagtggtgagccgag

SEQ ID NO: 522190 - DNA, 25 bp, Homo sapien
taatttaatgcacgccacatgatgg

SEQ ID NO: 522191 - DNA, 25 bp, Homo sapien
tataatgcaggaatcaacagggact

SEQ ID NO: 522192 - DNA, 25 bp, Homo sapien
cctgagctccagatacaaatttctg

SEQ ID NO: 522193 - DNA, 25 bp, Homo sapien
ctgttcacgttctaagcattcatga

SEQ ID NO: 522194 - DNA, 25 bp, Homo sapien
cactattgtctatactgaagatccc

SEQ ID NO: 522195 - DNA, 25 bp, Homo sapien
tgtccagctttcctcaactccttga

SEQ ID NO: 522196 - DNA, 25 bp, Homo sapien
tttgtctgagacagtttccatgtac

SEQ ID NO: 522197 - DNA, 25 bp, Homo sapien
tttccatgtacaccttttgtcctgg

SEQ ID NO: 522198 - DNA, 25 bp, Homo sapien
gacagtttccatgtacaccttttgt

SEQ ID NO: 522199 - DNA, 25 bp, Homo sapien
tctgagacagtttccatgtacacct

SEQ ID NO: 522200 - DNA, 25 bp, Homo sapien
tgtttgtctaactcaactgtactgg

SEQ ID NO: 522201 - DNA, 25 bp, Homo sapien
gaatagcgacgctcaaagacctcag

SEQ ID NO: 522202 - DNA, 25 bp, Homo sapien
tcagactgctgaaataagctactgg

SEQ ID NO: 522203 - DNA, 25 bp, Homo sapien
taattcatccattcccgctaggtga

SEQ ID NO: 522204 - DNA, 25 bp, Homo sapien
gaatcaacctataaggaaactcagg

SEQ ID NO: 522205 - DNA, 25 bp, Homo sapien
caaaactttttgacacttcacactg

SEQ ID NO: 522206 - DNA, 25 bp, Homo sapien
caacttatatgtagaatgtgctaga

SEQ ID NO: 522207 - DNA, 25 bp, Homo sapien
tgctagagactctatttgaaatagc

SEQ ID NO: 522208 - DNA, 25 bp, Homo sapien
caccggagccaccagatgtagggat

SEQ ID NO: 522209 - DNA, 25 bp, Homo sapien
tgtttgcagacatatagtcccctgg

SEQ ID NO: 522210 - DNA, 25 bp, Homo sapien
caagaaatatgtaatccaggccgag

SEQ ID NO: 522211 - DNA, 25 bp, Homo sapien
catgaagggcctgtatcaagaacca

SEQ ID NO: 522212 - DNA, 25 bp, Homo sapien
gaggtagcataaggtacctgcagcc

SEQ ID NO: 522213 - DNA, 25 bp, Homo sapien
taaactacctcgctatccagggttg

SEQ ID NO: 522214 - DNA, 25 bp, Homo sapien
gcagcctttaagacagatcattccg

SEQ ID NO: 522215 - DNA, 25 bp, Homo sapien
taggtcctaccttcataggtctgag

SEQ ID NO: 522216 - DNA, 25 bp, Homo sapien
gacgcttcacttaggcagaaactga

SEQ ID NO: 522217 - DNA, 25 bp, Homo sapien
acagggattagcatacagggtactc

SEQ ID NO: 522218 - DNA, 25 bp, Homo sapien
gggctgattccacacgacaaggtta

SEQ ID NO: 522219 - DNA, 25 bp, Homo sapien
tatattgactgatgtaagccccagg

SEQ ID NO: 522220 - DNA, 25 bp, Homo sapien
gcatatgccagggatttaaccaagt

SEQ ID NO: 522221 - DNA, 25 bp, Homo sapien
tatgagttgcttcccgcacatctgg

SEQ ID NO: 522222 - DNA, 25 bp, Homo sapien
gattcatgccagctcaaacagatgg

SEQ ID NO: 522223 - DNA, 25 bp, Homo sapien
catgtgataagcaaggtgacctctg

SEQ ID NO: 522224 - DNA, 25 bp, Homo sapien
gatagttaaaacatgtgggtggccc

SEQ ID NO: 522225 - DNA, 25 bp, Homo sapien
tccactgggtatgaggagacgttct

SEQ ID NO: 522226 - DNA, 25 bp, Homo sapien
ttctaaaggtatggccgggaagtgc

SEQ ID NO: 522227 - DNA, 25 bp, Homo sapien
ttgcatatccgtgactgaacctggg

SEQ ID NO: 522228 - DNA, 25 bp, Homo sapien
taaaccattgttggacagtgacagt

SEQ ID NO: 522229 - DNA, 25 bp, Homo sapien
gctgtgatgaaagggtccgtaatta

SEQ ID NO: 522230 - DNA, 25 bp, Homo sapien
aggctgtgatgaaagggtccgtaat

SEQ ID NO: 522231 - DNA, 25 bp, Homo sapien
tggcacataaaccattgttggacag

SEQ ID NO: 522232 - DNA, 25 bp, Homo sapien
taggcacatattatagcattcagat

SEQ ID NO: 522233 - DNA, 25 bp, Homo sapien
taaggtgctaccagaactcatgcga

SEQ ID NO: 522234 - DNA, 25 bp, Homo sapien
cacacactgtgcctctaacaacaaa

SEQ ID NO: 522235 - DNA, 25 bp, Homo sapien
aatgaatggctgaggctaacttagc

SEQ ID NO: 522236 - DNA, 25 bp, Homo sapien
ttacaccctggcgaagaacttggct

SEQ ID NO: 522237 - DNA, 25 bp, Homo sapien
ctgtactgtgtttatgccctaggga

SEQ ID NO: 522238 - DNA, 25 bp, Homo sapien
gacattcaagaagtggcctagtggc

SEQ ID NO: 522239 - DNA, 25 bp, Homo sapien
cacttcagagtgatgacctagggta

SEQ ID NO: 522240 - DNA, 25 bp, Homo sapien
tcactgaccgccaagagtcagggaa

SEQ ID NO: 522241 - DNA, 25 bp, Homo sapien
cagttttgaggccaagggaggactc

SEQ ID NO: 522242 - DNA, 25 bp, Homo sapien
agataccagttttgaggccaaggga

SEQ ID NO: 522243 - DNA, 25 bp, Homo sapien
accgccaagagtcagggaagatacc

SEQ ID NO: 522244 - DNA, 25 bp, Homo sapien
ccacaggctccattctttaggctgg

SEQ ID NO: 522245 - DNA, 25 bp, Homo sapien
cattctttaggctgggattcagagg

SEQ ID NO: 522246 - DNA, 25 bp, Homo sapien
gccacattcagcagacatgggagag

SEQ ID NO: 522247 - DNA, 25 bp, Homo sapien
cacattcagcagacatgggagaggc

SEQ ID NO: 522248 - DNA, 25 bp, Homo sapien
ggatgggagttgatcagaggagaca

SEQ ID NO: 522249 - DNA, 25 bp, Homo sapien
aggatgggagttgatcagaggagac

SEQ ID NO: 522250 - DNA, 25 bp, Homo sapien
cctaggcaaaaattcatgggagctc

SEQ ID NO: 522251 - DNA, 25 bp, Homo sapien
ttatatagctagaaagcagggaacc

SEQ ID NO: 522252 - DNA, 25 bp, Homo sapien
ggcacttggcaatctatcaacatgg

SEQ ID NO: 522253 - DNA, 25 bp, Homo sapien
tgtttgtctcccaagcctgtggaag

SEQ ID NO: 522254 - DNA, 25 bp, Homo sapien
cctgctgactggagtcttaggtctt

SEQ ID NO: 522255 - DNA, 25 bp, Homo sapien
tctatgaaacctcaagactccctgc

SEQ ID NO: 522256 - DNA, 25 bp, Homo sapien
tgctgggttatgcaaattctctaac

SEQ ID NO: 522257 - DNA, 25 bp, Homo sapien
tgtccactataaccagacctctatg

SEQ ID NO: 522258 - DNA, 25 bp, Homo sapien
atccagaccctggtgagctttccag

SEQ ID NO: 522259 - DNA, 25 bp, Homo sapien
tccagaccctggtgagctttccagc

SEQ ID NO: 522260 - DNA, 25 bp, Homo sapien
ccagaccctggtgagctttccagcc

SEQ ID NO: 522261 - DNA, 25 bp, Homo sapien
cagaccctggtgagctttccagcct

SEQ ID NO: 522262 - DNA, 25 bp, Homo sapien
tgcattcttcactctatgcaggagc

SEQ ID NO: 522263 - DNA, 25 bp, Homo sapien
attcttcactctatgcaggagccag

SEQ ID NO: 522264 - DNA, 25 bp, Homo sapien
aggagccagccggggtccacatcca

SEQ ID NO: 522265 - DNA, 25 bp, Homo sapien
ggagccagccggggtccacatccat

SEQ ID NO: 522266 - DNA, 25 bp, Homo sapien
cattttggactttgacgagaacctc

SEQ ID NO: 522267 - DNA, 25 bp, Homo sapien
ctttctatccaagccgtggcccatg

SEQ ID NO: 522268 - DNA, 25 bp, Homo sapien
aattgactcacctattcagggccca

SEQ ID NO: 522269 - DNA, 25 bp, Homo sapien
tccagggaatcttgagtcgtcttca

SEQ ID NO: 522270 - DNA, 25 bp, Homo sapien
ccagttcacgggagtcacatgagaa

SEQ ID NO: 522271 - DNA, 25 bp, Homo sapien
cgggagtcacatgagaaataacaac

SEQ ID NO: 522272 - DNA, 25 bp, Homo sapien
tggggattccaggacccaccagttc

SEQ ID NO: 522273 - DNA, 25 bp, Homo sapien
gacccaccagttcacgggagtcaca

SEQ ID NO: 522274 - DNA, 25 bp, Homo sapien
gagcagttttaacagagaccctatg

SEQ ID NO: 522275 - DNA, 25 bp, Homo sapien
cttgcatggtgcctgagagaacaca

SEQ ID NO: 522276 - DNA, 25 bp, Homo sapien
agtttaggtggaggccagtgctacc

SEQ ID NO: 522277 - DNA, 25 bp, Homo sapien
cagtgctacctccagagatggactc

SEQ ID NO: 522278 - DNA, 25 bp, Homo sapien
tgactccaagttagcttttcaagct

SEQ ID NO: 522279 - DNA, 25 bp, Homo sapien
agtcatatgggcaggttctgactcc

SEQ ID NO: 522280 - DNA, 25 bp, Homo sapien
gaactaagtaagaagattgccatgc

SEQ ID NO: 522281 - DNA, 25 bp, Homo sapien
gattcaggcaatctctcatctcagc

SEQ ID NO: 522282 - DNA, 25 bp, Homo sapien
tatcttcagattgacgttcagcagc

SEQ ID NO: 522283 - DNA, 25 bp, Homo sapien
caggtttacatacgggtccaaggca

SEQ ID NO: 522284 - DNA, 25 bp, Homo sapien
tacaagaggctggatgtgcaaggca

SEQ ID NO: 522285 - DNA, 25 bp, Homo sapien
caagtgtaccagcaagaatgaggca

SEQ ID NO: 522286 - DNA, 25 bp, Homo sapien
tgtaacctctcgtgtaactagtgca

SEQ ID NO: 522287 - DNA, 25 bp, Homo sapien
gttatgctaagaggccacagtcggg

SEQ ID NO: 522288 - DNA, 25 bp, Homo sapien
gaaattaccagcacaacacagagga

SEQ ID NO: 522289 - DNA, 25 bp, Homo sapien
gaacagcgttcagcaaaggcacaac

SEQ ID NO: 522290 - DNA, 25 bp, Homo sapien
gagcatgaaagggccatgctcacac

SEQ ID NO: 522291 - DNA, 25 bp, Homo sapien
tgaaagggccatgctcacacccaag

SEQ ID NO: 522292 - DNA, 25 bp, Homo sapien
atgaaagggccatgctcacacccaa

SEQ ID NO: 522293 - DNA, 25 bp, Homo sapien
aagggccatgctcacacccaagagg

SEQ ID NO: 522294 - DNA, 25 bp, Homo sapien
tcctggtccaccagcgtagtaactg

SEQ ID NO: 522295 - DNA, 25 bp, Homo sapien
tggtccaccagcgtagtaactgtta

SEQ ID NO: 522296 - DNA, 25 bp, Homo sapien
ccaccagcgtagtaactgttaagca

SEQ ID NO: 522297 - DNA, 25 bp, Homo sapien
ggtccaccagcgtagtaactgttaa

SEQ ID NO: 522298 - DNA, 25 bp, Homo sapien
tctgtacaattccacacaccagatt

SEQ ID NO: 522299 - DNA, 25 bp, Homo sapien
tgaggatatcaaccaaacagcaatc

SEQ ID NO: 522300 - DNA, 25 bp, Homo sapien
gtacaattccacacaccagattttg

SEQ ID NO: 522301 - DNA, 25 bp, Homo sapien
gcaatcatcttagcagctgcatcat

SEQ ID NO: 522302 - DNA, 25 bp, Homo sapien
tatagttcctaagtcaggtgcaccc

SEQ ID NO: 522303 - DNA, 25 bp, Homo sapien
gcaggtcttgactctacttcagaaa

SEQ ID NO: 522304 - DNA, 25 bp, Homo sapien
ccaacattgctataacaggcctgta

SEQ ID NO: 522305 - DNA, 25 bp, Homo sapien
tgagattctcaccatcgctggccaa

SEQ ID NO: 522306 - DNA, 25 bp, Homo sapien
accgcacccagcccagataaagaaa

SEQ ID NO: 522307 - DNA, 25 bp, Homo sapien
cgcacccagcccagataaagaaaat

SEQ ID NO: 522308 - DNA, 25 bp, Homo sapien
gtggcgccacctcggttcactgcag

SEQ ID NO: 522309 - DNA, 25 bp, Homo sapien
cacccagcccagataaagaaaattt

SEQ ID NO: 522310 - DNA, 25 bp, Homo sapien
gcatccttaccacactatatacatg

SEQ ID NO: 522311 - DNA, 25 bp, Homo sapien
ggtggcaattaaagtttctgtacag

SEQ ID NO: 522312 - DNA, 25 bp, Homo sapien
tcagttgagggtaactcaacccaca

SEQ ID NO: 522313 - DNA, 25 bp, Homo sapien
cattaaagcctctattttctcctag

SEQ ID NO: 522314 - DNA, 25 bp, Homo sapien
ggtatgtttacttgtgccctcgaga

SEQ ID NO: 522315 - DNA, 25 bp, Homo sapien
agtaacagtgataaacagcagattc

SEQ ID NO: 522316 - DNA, 25 bp, Homo sapien
gaaattagagaatatcagctgctac

SEQ ID NO: 522317 - DNA, 25 bp, Homo sapien
actgttatctttggtaatgggtatg

SEQ ID NO: 522318 - DNA, 25 bp, Homo sapien
tcctgttgccttccttcattacacg

SEQ ID NO: 522319 - DNA, 25 bp, Homo sapien
ttcctgttgccttccttcattacac

SEQ ID NO: 522320 - DNA, 25 bp, Homo sapien
cctgttgccttccttcattacacgt

SEQ ID NO: 522321 - DNA, 25 bp, Homo sapien
ctgttctgccagaaataatagcagg

SEQ ID NO: 522322 - DNA, 25 bp, Homo sapien
caatgacaacttctttaggtttcct

SEQ ID NO: 522323 - DNA, 25 bp, Homo sapien
cacatgcaagacttttgtcagtgtt

SEQ ID NO: 522324 - DNA, 25 bp, Homo sapien
gtaaatatacatatcacatgcaaga

SEQ ID NO: 522325 - DNA, 25 bp, Homo sapien
gtgtaaatatacatatcacatgcaa

SEQ ID NO: 522326 - DNA, 25 bp, Homo sapien
tatcacatgcaagacttttgtcagt

SEQ ID NO: 522327 - DNA, 25 bp, Homo sapien
cttcttctggattcttcacaaaaga

SEQ ID NO: 522328 - DNA, 25 bp, Homo sapien
catttttcttcttctggattcttca

SEQ ID NO: 522329 - DNA, 25 bp, Homo sapien
ttttcttcttctggattcttcacaa

SEQ ID NO: 522330 - DNA, 25 bp, Homo sapien
ttcttcttctggattcttcacaaaa

SEQ ID NO: 522331 - DNA, 25 bp, Homo sapien
tggagggaatccaagtaaaaatcaa

SEQ ID NO: 522332 - DNA, 25 bp, Homo sapien
tattgaagcaatacttgctggaggg

SEQ ID NO: 522333 - DNA, 25 bp, Homo sapien
aatcaaaccttttctggcgttagtg

SEQ ID NO: 522334 - DNA, 25 bp, Homo sapien
ccagtcaggttgaagaatggaggtg

SEQ ID NO: 522335 - DNA, 25 bp, Homo sapien
aacccaggccggtcactatggtgca

SEQ ID NO: 522336 - DNA, 25 bp, Homo sapien
cacaggatatgagcacctccggaag

SEQ ID NO: 522337 - DNA, 25 bp, Homo sapien
gagatgaggtcggaaacacagcaac

SEQ ID NO: 522338 - DNA, 25 bp, Homo sapien
tgcagatcctccattctgcgctggg

SEQ ID NO: 522339 - DNA, 25 bp, Homo sapien
ccagattactccagtacaagtcagg

SEQ ID NO: 522340 - DNA, 25 bp, Homo sapien
ccagtacaagtcaggctggatgcca

SEQ ID NO: 522341 - DNA, 25 bp, Homo sapien
taaagaaccccacgcaggaggtggc

SEQ ID NO: 522342 - DNA, 25 bp, Homo sapien
gagccagtaaggcataaagaacccc

SEQ ID NO: 522343 - DNA, 25 bp, Homo sapien
ggatcttcagtcttactgggcatca

SEQ ID NO: 522344 - DNA, 25 bp, Homo sapien
cacagataatccacagttccgtaat

SEQ ID NO: 522345 - DNA, 25 bp, Homo sapien
tccgtaatgcagaatggatcttcag

SEQ ID NO: 522346 - DNA, 25 bp, Homo sapien
tcctctgcactaaagatgatggtcc

SEQ ID NO: 522347 - DNA, 25 bp, Homo sapien
gtgaggcgccctcgccaagacaagc

SEQ ID NO: 522348 - DNA, 25 bp, Homo sapien
agacaagcccatatttagccccctg

SEQ ID NO: 522349 - DNA, 25 bp, Homo sapien
cccccatctccaactgcggtgaggc

SEQ ID NO: 522350 - DNA, 25 bp, Homo sapien
aactgcggtgaggcgccctcgccaa

SEQ ID NO: 522351 - DNA, 25 bp, Homo sapien
cacaatgatccctccattctaaaag

SEQ ID NO: 522352 - DNA, 25 bp, Homo sapien
ggagacacacaatgatccctccatt

SEQ ID NO: 522353 - DNA, 25 bp, Homo sapien
tccacccatggagacacacaatgat

SEQ ID NO: 522354 - DNA, 25 bp, Homo sapien
ccatggagacacacaatgatccctc

SEQ ID NO: 522355 - DNA, 25 bp, Homo sapien
gcaccccccggaggcagacgccaag

SEQ ID NO: 522356 - DNA, 25 bp, Homo sapien
gaggggataaggatgggaaggcagc

SEQ ID NO: 522357 - DNA, 25 bp, Homo sapien
ctggacgaagggaggggataaggat

SEQ ID NO: 522358 - DNA, 25 bp, Homo sapien
gggaaggcagcaccccccggaggca

SEQ ID NO: 522359 - DNA, 25 bp, Homo sapien
cgggcgcacacacaacttgctgtct

SEQ ID NO: 522360 - DNA, 25 bp, Homo sapien
aacttgctgtctttctcgggcggga

SEQ ID NO: 522361 - DNA, 25 bp, Homo sapien
ttgcctctgtccctaacagccgcag

SEQ ID NO: 522362 - DNA, 25 bp, Homo sapien
ttctcgggcgggaacatccacggga

SEQ ID NO: 522363 - DNA, 25 bp, Homo sapien
cactcccggcgagtccgcggcggca

SEQ ID NO: 522364 - DNA, 25 bp, Homo sapien
ggtctccagaagcgggctggcacca

SEQ ID NO: 522365 - DNA, 25 bp, Homo sapien
gggcgccggggatcgcacgcagagg

SEQ ID NO: 522366 - DNA, 25 bp, Homo sapien
gcagctctggcggagcgctgtgggc

SEQ ID NO: 522367 - DNA, 25 bp, Homo sapien
tctccctgcgtctcattcaaagctg

SEQ ID NO: 522368 - DNA, 25 bp, Homo sapien
tgcgtctcattcaaagctgagtggg

SEQ ID NO: 522369 - DNA, 25 bp, Homo sapien
cagacagaccgagaagtatgggaga

SEQ ID NO: 522370 - DNA, 25 bp, Homo sapien
gtgccccgctgtccgcgcgggtcca

SEQ ID NO: 522371 - DNA, 25 bp, Homo sapien
taaaaaaacatagttggagatcata

SEQ ID NO: 522372 - DNA, 25 bp, Homo sapien
aaacatagttggagatcatagtaag

SEQ ID NO: 522373 - DNA, 25 bp, Homo sapien
aaaaacatagttggagatcatagta

SEQ ID NO: 522374 - DNA, 25 bp, Homo sapien
catagttggagatcatagtaagttc

SEQ ID NO: 522375 - DNA, 25 bp, Homo sapien
ctggtacaaagtgccggctggtttt

SEQ ID NO: 522376 - DNA, 25 bp, Homo sapien
tctcccctggtacaaagtgccggct

SEQ ID NO: 522377 - DNA, 25 bp, Homo sapien
tcccctggtacaaagtgccggctgg

SEQ ID NO: 522378 - DNA, 25 bp, Homo sapien
ccctggtacaaagtgccggctggtt

SEQ ID NO: 522379 - DNA, 25 bp, Homo sapien
caagcagggttacccggcgaagact

SEQ ID NO: 522380 - DNA, 25 bp, Homo sapien
catgcgcggccgatttgcacatgcg

SEQ ID NO: 522381 - DNA, 25 bp, Homo sapien
cataagatcctggagacgcggctgg

SEQ ID NO: 522382 - DNA, 25 bp, Homo sapien
cgcggctggacaacgacaaggtaac

SEQ ID NO: 522383 - DNA, 25 bp, Homo sapien
gggccaggggcggcgtctgtcaggg

SEQ ID NO: 522384 - DNA, 25 bp, Homo sapien
ctgagccgggccaggggcggcgtct

SEQ ID NO: 522385 - DNA, 25 bp, Homo sapien
gccgggccaggggcggcgtctgtca

SEQ ID NO: 522386 - DNA, 25 bp, Homo sapien
caggggcggcgtctgtcagggaccc

SEQ ID NO: 522387 - DNA, 25 bp, Homo sapien
aaacacccctggaggcgtttggctg

SEQ ID NO: 522388 - DNA, 25 bp, Homo sapien
cagcaacctccggaaaagcgaaggg

SEQ ID NO: 522389 - DNA, 25 bp, Homo sapien
gcgagtgaccccagacctgcgggct

SEQ ID NO: 522390 - DNA, 25 bp, Homo sapien
aacggtggtgcctcgagaagtgtcc

SEQ ID NO: 522391 - DNA, 25 bp, Homo sapien
tcgggagaccaagagagcagtggta

SEQ ID NO: 522392 - DNA, 25 bp, Homo sapien
aacagatgcaaaagagcagattcca

SEQ ID NO: 522393 - DNA, 25 bp, Homo sapien
cagattccaagataaggtagcgcaa

SEQ ID NO: 522394 - DNA, 25 bp, Homo sapien
gaggagagcacaagactggatatga

SEQ ID NO: 522395 - DNA, 25 bp, Homo sapien
aagaactacctttgcccgtggctga

SEQ ID NO: 522396 - DNA, 25 bp, Homo sapien
gcaataatttgcagcgcgaaagaac

SEQ ID NO: 522397 - DNA, 25 bp, Homo sapien
tccacggacaagtgacaacaattgc

SEQ ID NO: 522398 - DNA, 25 bp, Homo sapien
tactagtttttgttgagccaagcgc

SEQ ID NO: 522399 - DNA, 25 bp, Homo sapien
ctctgtgggtcgctaggtaaattgg

SEQ ID NO: 522400 - DNA, 25 bp, Homo sapien
gtctctgtgggtcgctaggtaaatt

SEQ ID NO: 522401 - DNA, 25 bp, Homo sapien
gtgggtcgctaggtaaattggtcat

SEQ ID NO: 522402 - DNA, 25 bp, Homo sapien
ctgtgggtcgctaggtaaattggtc

SEQ ID NO: 522403 - DNA, 25 bp, Homo sapien
cataacgtgtttgctctggtttcta

SEQ ID NO: 522404 - DNA, 25 bp, Homo sapien
agcttccctggaggatttattagat

SEQ ID NO: 522405 - DNA, 25 bp, Homo sapien
tactagagctgtactcctcatctag

SEQ ID NO: 522406 - DNA, 25 bp, Homo sapien
tagctattagaatgctagcagatct

SEQ ID NO: 522407 - DNA, 25 bp, Homo sapien
ggctctaattgtacttccttgggca

SEQ ID NO: 522408 - DNA, 25 bp, Homo sapien
cagaccgctgatttgatgctttgca

SEQ ID NO: 522409 - DNA, 25 bp, Homo sapien
ggttttatctcacggatctgccatc

SEQ ID NO: 522410 - DNA, 25 bp, Homo sapien
tgtctttcagtagtgttgcctcagg

SEQ ID NO: 522411 - DNA, 25 bp, Homo sapien
cgccgcagcaagtgcagacgcttct

SEQ ID NO: 522412 - DNA, 25 bp, Homo sapien
tgcagccgtgatgaatccaatcaat

SEQ ID NO: 522413 - DNA, 25 bp, Homo sapien
attcttcaccgatcgccgcagcaag

SEQ ID NO: 522414 - DNA, 25 bp, Homo sapien
ctatggtgaagtgtatgcagccgtg

SEQ ID NO: 522415 - DNA, 25 bp, Homo sapien
tggaactcaaggtggagctcagcct

SEQ ID NO: 522416 - DNA, 25 bp, Homo sapien
gatttaaacagggtggattccactc

SEQ ID NO: 522417 - DNA, 25 bp, Homo sapien
tctgtgggagccttcgatggaactc

SEQ ID NO: 522418 - DNA, 25 bp, Homo sapien
aatgtgctcctggtgtatatggcag

SEQ ID NO: 522419 - DNA, 25 bp, Homo sapien
gctgcttggaagtatttcacccctg

SEQ ID NO: 522420 - DNA, 25 bp, Homo sapien
tgcttggaagtatttcacccctgca

SEQ ID NO: 522421 - DNA, 25 bp, Homo sapien
ggtgataaagacttgtgcggctgct

SEQ ID NO: 522422 - DNA, 25 bp, Homo sapien
agacttgtgcggctgcttggaagta

SEQ ID NO: 522423 - DNA, 25 bp, Homo sapien
tcactcagcaggtaacagatccaac

SEQ ID NO: 522424 - DNA, 25 bp, Homo sapien
ccaattcccaacaacttaaggcctg

SEQ ID NO: 522425 - DNA, 25 bp, Homo sapien
tcccgcaggtactgaaaggcatttg

SEQ ID NO: 522426 - DNA, 25 bp, Homo sapien
taaggcctgtcctctgcgtatcact

SEQ ID NO: 522427 - DNA, 25 bp, Homo sapien
caagaatagccaggtgtgtgtccca

SEQ ID NO: 522428 - DNA, 25 bp, Homo sapien
agaatagccaggtgtgtgtcccaga

SEQ ID NO: 522429 - DNA, 25 bp, Homo sapien
ctggacaagaatagccaggtgtgtg

SEQ ID NO: 522430 - DNA, 25 bp, Homo sapien
gacaagaatagccaggtgtgtgtcc

SEQ ID NO: 522431 - DNA, 25 bp, Homo sapien
ggactatcttctttcggaacatttg

SEQ ID NO: 522432 - DNA, 25 bp, Homo sapien
gaactgaaggcttttacagagcctc

SEQ ID NO: 522433 - DNA, 25 bp, Homo sapien
ccaaatgttccagccagaggctcta

SEQ ID NO: 522434 - DNA, 25 bp, Homo sapien
tgctagctggtgaagacctgccctc

SEQ ID NO: 522435 - DNA, 25 bp, Homo sapien
tagccagtcaaatttagcagttggg

SEQ ID NO: 522436 - DNA, 25 bp, Homo sapien
ttttataccaactttggtgacacta

SEQ ID NO: 522437 - DNA, 25 bp, Homo sapien
ccagtcaaatttagcagttgggggt

SEQ ID NO: 522438 - DNA, 25 bp, Homo sapien
aaattctgataacccactaccatca

SEQ ID NO: 522439 - DNA, 25 bp, Homo sapien
ccacatggtaatcagtatatggtcc

SEQ ID NO: 522440 - DNA, 25 bp, Homo sapien
tcagtatatggtcctggatgaatat

SEQ ID NO: 522441 - DNA, 25 bp, Homo sapien
cagtatatggtcctggatgaatatt

SEQ ID NO: 522442 - DNA, 25 bp, Homo sapien
catggtaatcagtatatggtcctgg

SEQ ID NO: 522443 - DNA, 25 bp, Homo sapien
caacattgtctttgattgttggcat

SEQ ID NO: 522444 - DNA, 25 bp, Homo sapien
tgtctttgattgttggcatttgctc

SEQ ID NO: 522445 - DNA, 25 bp, Homo sapien
tctttgattgttggcatttgctcac

SEQ ID NO: 522446 - DNA, 25 bp, Homo sapien
catcagcaacattgtctttgattgt

SEQ ID NO: 522447 - DNA, 25 bp, Homo sapien
gaccttgtgcttctggagccattcc

SEQ ID NO: 522448 - DNA, 25 bp, Homo sapien
gaggtgatgtctcggaaaactctgc

SEQ ID NO: 522449 - DNA, 25 bp, Homo sapien
ccaacggcccatgatcatcttgtaa

SEQ ID NO: 522450 - DNA, 25 bp, Homo sapien
ttgtaaccagtgcaggaccttgtgc

SEQ ID NO: 522451 - DNA, 25 bp, Homo sapien
ctgttcttgaagacgggtcctgtta

SEQ ID NO: 522452 - DNA, 25 bp, Homo sapien
tcctcttcgagccttagtggaagga

SEQ ID NO: 522453 - DNA, 25 bp, Homo sapien
gacccaatatgtcagctgccctgtt

SEQ ID NO: 522454 - DNA, 25 bp, Homo sapien
gaaggagagtggacccaatatgtca

SEQ ID NO: 522455 - DNA, 25 bp, Homo sapien
gaaaggcctttattgtaactgaagc

SEQ ID NO: 522456 - DNA, 25 bp, Homo sapien
tactcattcattgaatcacttctgg

SEQ ID NO: 522457 - DNA, 25 bp, Homo sapien
cattcattgaatcacttctggtagt

SEQ ID NO: 522458 - DNA, 25 bp, Homo sapien
actttgtctgaaaggcctttattgt

SEQ ID NO: 522459 - DNA, 25 bp, Homo sapien
agtcagctgcctgtgtattcctgaa

SEQ ID NO: 522460 - DNA, 25 bp, Homo sapien
ttcaggcagccggttgtggtcaatg

SEQ ID NO: 522461 - DNA, 25 bp, Homo sapien
gtgaaggatgaactccaagaagacc

SEQ ID NO: 522462 - DNA, 25 bp, Homo sapien
gctgctctgcgaagtcagctgcctg

SEQ ID NO: 522463 - DNA, 25 bp, Homo sapien
tgttgacttcggagtactcgcttgc

SEQ ID NO: 522464 - DNA, 25 bp, Homo sapien
tatccgaggcaattgggagcaacat

SEQ ID NO: 522465 - DNA, 25 bp, Homo sapien
cagaatcttgtgcatagttcccagg

SEQ ID NO: 522466 - DNA, 25 bp, Homo sapien
gaacttcatgtttccgtcttccaga

SEQ ID NO: 522467 - DNA, 25 bp, Homo sapien
gcctgtccgatgctcatcatgtagt

SEQ ID NO: 522468 - DNA, 25 bp, Homo sapien
tctgcctgtccgatgctcatcatgt

SEQ ID NO: 522469 - DNA, 25 bp, Homo sapien
atcatgtagtgaaggcacccccagg

SEQ ID NO: 522470 - DNA, 25 bp, Homo sapien
tacagcaacctatccctgcccaaat

SEQ ID NO: 522471 - DNA, 25 bp, Homo sapien
tgaggtctaagttgatgtcagccat

SEQ ID NO: 522472 - DNA, 25 bp, Homo sapien
catgctgaggtctaagttgatgtca

SEQ ID NO: 522473 - DNA, 25 bp, Homo sapien
tgctgaggtctaagttgatgtcagc

SEQ ID NO: 522474 - DNA, 25 bp, Homo sapien
gcatgctgaggtctaagttgatgtc

SEQ ID NO: 522475 - DNA, 25 bp, Homo sapien
ctttgagtaagccacacagttgaga

SEQ ID NO: 522476 - DNA, 25 bp, Homo sapien
tgcctaaccattgacagtgactgcg

SEQ ID NO: 522477 - DNA, 25 bp, Homo sapien
tctgcaccgaaggagcgatctgaat

SEQ ID NO: 522478 - DNA, 25 bp, Homo sapien
cattcagaaagtgctccagcctggc

SEQ ID NO: 522479 - DNA, 25 bp, Homo sapien
cctcaatgagaacaactagtgagtt

SEQ ID NO: 522480 - DNA, 25 bp, Homo sapien
gaatggttttatgggggtgccatca

SEQ ID NO: 522481 - DNA, 25 bp, Homo sapien
gttttatgggggtgccatcatcaat

SEQ ID NO: 522482 - DNA, 25 bp, Homo sapien
agcctcaatgagaacaactagtgag

SEQ ID NO: 522483 - DNA, 25 bp, Homo sapien
ttacaggtcgcagaggccaacttcc

SEQ ID NO: 522484 - DNA, 25 bp, Homo sapien
taaggctcgaatgttcaatgtttag

SEQ ID NO: 522485 - DNA, 25 bp, Homo sapien
cttgatgtacattctaaggctcgaa

SEQ ID NO: 522486 - DNA, 25 bp, Homo sapien
ggtcgcagaggccaacttccttgat

SEQ ID NO: 522487 - DNA, 25 bp, Homo sapien
tcttggtgtctctgcgggtctgaga

SEQ ID NO: 522488 - DNA, 25 bp, Homo sapien
gctcccctgatttaaaatccctgtc

SEQ ID NO: 522489 - DNA, 25 bp, Homo sapien
aaaaacagagctctagttggaaggc

SEQ ID NO: 522490 - DNA, 25 bp, Homo sapien
ttggaaggctcttttggcagactga

SEQ ID NO: 522491 - DNA, 25 bp, Homo sapien
tccccagagctgattctaggccaat

SEQ ID NO: 522492 - DNA, 25 bp, Homo sapien
cttttggtctccttgcaataaggga

SEQ ID NO: 522493 - DNA, 25 bp, Homo sapien
aaaacaatgcatcaatccaaacagt

SEQ ID NO: 522494 - DNA, 25 bp, Homo sapien
atcactaacttcaaaacaatgcatc

SEQ ID NO: 522495 - DNA, 25 bp, Homo sapien
actaacttcaaaacaatgcatcaat

SEQ ID NO: 522496 - DNA, 25 bp, Homo sapien
caaaacaatgcatcaatccaaacag

SEQ ID NO: 522497 - DNA, 25 bp, Homo sapien
aaactcagtctgtagggtgctagga

SEQ ID NO: 522498 - DNA, 25 bp, Homo sapien
cgaggtagattgtggctttgtccca

SEQ ID NO: 522499 - DNA, 25 bp, Homo sapien
gcacatgcgaggttttgaagcagct

SEQ ID NO: 522500 - DNA, 25 bp, Homo sapien
aggactactggcctactgcgaggta

SEQ ID NO: 522501 - DNA, 25 bp, Homo sapien
ctgaaagacagccatatcccctgga

SEQ ID NO: 522502 - DNA, 25 bp, Homo sapien
tctgttttcgcattgccacagttcc

SEQ ID NO: 522503 - DNA, 25 bp, Homo sapien
ggccatactcatttctgttttcgca

SEQ ID NO: 522504 - DNA, 25 bp, Homo sapien
tcccctggatgctcatgtggccata

SEQ ID NO: 522505 - DNA, 25 bp, Homo sapien
tttgatttcaaaggcactgccacag

SEQ ID NO: 522506 - DNA, 25 bp, Homo sapien
gtggagtgtccacctttgatttcaa

SEQ ID NO: 522507 - DNA, 25 bp, Homo sapien
tcttctccatatcagcccctgatgt

SEQ ID NO: 522508 - DNA, 25 bp, Homo sapien
cagcccctgatgtccacagtggagt

SEQ ID NO: 522509 - DNA, 25 bp, Homo sapien
agggctcttcttccctttccctcat

SEQ ID NO: 522510 - DNA, 25 bp, Homo sapien
cagggctcttcttccctttccctca

SEQ ID NO: 522511 - DNA, 25 bp, Homo sapien
caagctttctccacccgccaaccaa

SEQ ID NO: 522512 - DNA, 25 bp, Homo sapien
ttctccacccgccaaccaaagctga

SEQ ID NO: 522513 - DNA, 25 bp, Homo sapien
cacccgccaaccaaagctgaggaat

SEQ ID NO: 522514 - DNA, 25 bp, Homo sapien
ccgccaaccaaagctgaggaatcct

SEQ ID NO: 522515 - DNA, 25 bp, Homo sapien
ccttcaaagcgatgaagagatgaga

SEQ ID NO: 522516 - DNA, 25 bp, Homo sapien
gttttactgtgaaagtccttctgat

SEQ ID NO: 522517 - DNA, 25 bp, Homo sapien
ttactgtgaaagtccttctgatgca

SEQ ID NO: 522518 - DNA, 25 bp, Homo sapien
gtaacaaatatagccttccttcaaa

SEQ ID NO: 522519 - DNA, 25 bp, Homo sapien
ggagaagactgagtgaagtcattac

SEQ ID NO: 522520 - DNA, 25 bp, Homo sapien
cagttatgtactgtcttaggaacaa

SEQ ID NO: 522521 - DNA, 25 bp, Homo sapien
aggagaagactgagtgaagtcatta

SEQ ID NO: 522522 - DNA, 25 bp, Homo sapien
cctgcagttatgtactgtcttagga

SEQ ID NO: 522523 - DNA, 25 bp, Homo sapien
ggcagcagaacccatagcacagcca

SEQ ID NO: 522524 - DNA, 25 bp, Homo sapien
gcagcagaacccatagcacagccat

SEQ ID NO: 522525 - DNA, 25 bp, Homo sapien
agctaaaatgcagggacatagactt

SEQ ID NO: 522526 - DNA, 25 bp, Homo sapien
ctgagctaaaatgcagggacataga

SEQ ID NO: 522527 - DNA, 25 bp, Homo sapien
atgccaccaacaggctgactcagga

SEQ ID NO: 522528 - DNA, 25 bp, Homo sapien
ctaaaatgcagggacatagactttg

SEQ ID NO: 522529 - DNA, 25 bp, Homo sapien
aatctgagataccaagatctgctcc

SEQ ID NO: 522530 - DNA, 25 bp, Homo sapien
tcctcagccacattgacacgggatg

SEQ ID NO: 522531 - DNA, 25 bp, Homo sapien
gattttgtgatcattaccctcctca

SEQ ID NO: 522532 - DNA, 25 bp, Homo sapien
ttattaccttaaaatctgagatacc

SEQ ID NO: 522533 - DNA, 25 bp, Homo sapien
tggtctgtggtgaaaatgttgaccc

SEQ ID NO: 522534 - DNA, 25 bp, Homo sapien
aaagaggatgctttgccactgtccc

SEQ ID NO: 522535 - DNA, 25 bp, Homo sapien
tgagtaactcgggacaataatttgg

SEQ ID NO: 522536 - DNA, 25 bp, Homo sapien
cctccatgccttccttgttggtgtc

SEQ ID NO: 522537 - DNA, 25 bp, Homo sapien
tctgcatgtctaactcccaagaaga

SEQ ID NO: 522538 - DNA, 25 bp, Homo sapien
atcatcagggccttagcaatggctg

SEQ ID NO: 522539 - DNA, 25 bp, Homo sapien
gaatcatcagggccttagcaatggc

SEQ ID NO: 522540 - DNA, 25 bp, Homo sapien
agaatcatcagggccttagcaatgg

SEQ ID NO: 522541 - DNA, 25 bp, Homo sapien
aatcatcagggccttagcaatggct

SEQ ID NO: 522542 - DNA, 25 bp, Homo sapien
tgtaatccgcctcacagcaggcatg

SEQ ID NO: 522543 - DNA, 25 bp, Homo sapien
tgcacaggcaatatttcgtgtcggg

SEQ ID NO: 522544 - DNA, 25 bp, Homo sapien
tgtcgggagactgctcctctgagca

SEQ ID NO: 522545 - DNA, 25 bp, Homo sapien
ctactcccacacaatcgcatgtaat

SEQ ID NO: 522546 - DNA, 25 bp, Homo sapien
ttcagccccacataacagccacagt

SEQ ID NO: 522547 - DNA, 25 bp, Homo sapien
gctaattgtatgctttcagccccac

SEQ ID NO: 522548 - DNA, 25 bp, Homo sapien
cagacaaagcgcagatttttggctt

SEQ ID NO: 522549 - DNA, 25 bp, Homo sapien
caggagcttagtgcaataagtcgct

SEQ ID NO: 522550 - DNA, 25 bp, Homo sapien
caaccctggagatatggacttttct

SEQ ID NO: 522551 - DNA, 25 bp, Homo sapien
agtgaaatgtgcgtataaatgcctt

SEQ ID NO: 522552 - DNA, 25 bp, Homo sapien
catcattgagagctgcggggtcatc

SEQ ID NO: 522553 - DNA, 25 bp, Homo sapien
ggacttttcttctaacccactgaca

SEQ ID NO: 522554 - DNA, 25 bp, Homo sapien
gacattgagcatcgaaagggaagag

SEQ ID NO: 522555 - DNA, 25 bp, Homo sapien
gaattccgagaaatgggctgtccac

SEQ ID NO: 522556 - DNA, 25 bp, Homo sapien
agacaactatcaaccacagcgacag

SEQ ID NO: 522557 - DNA, 25 bp, Homo sapien
gatagggactgtgtcgttcctgacc

SEQ ID NO: 522558 - DNA, 25 bp, Homo sapien
aaggtcctgaagtctgcaccccaag

SEQ ID NO: 522559 - DNA, 25 bp, Homo sapien
aatccttggacagatgaagttctgc

SEQ ID NO: 522560 - DNA, 25 bp, Homo sapien
gcctcagaccactcaactgggctat

SEQ ID NO: 522561 - DNA, 25 bp, Homo sapien
caatacagcgataaggcctcagacc

SEQ ID NO: 522562 - DNA, 25 bp, Homo sapien
cacttgcagagatagacgagagtcc

SEQ ID NO: 522563 - DNA, 25 bp, Homo sapien
cagggcatagaacccaaagctggcc

SEQ ID NO: 522564 - DNA, 25 bp, Homo sapien
aaagctggcccacacaatggcatgg

SEQ ID NO: 522565 - DNA, 25 bp, Homo sapien
gcatggttatcttggcatgaaagca

SEQ ID NO: 522566 - DNA, 25 bp, Homo sapien
aatgggaagaattggccaggcccac

SEQ ID NO: 522567 - DNA, 25 bp, Homo sapien
gctgtttcccagcaatgggaagaat

SEQ ID NO: 522568 - DNA, 25 bp, Homo sapien
gtgactgtcttcctctgatgccagg

SEQ ID NO: 522569 - DNA, 25 bp, Homo sapien
tgggtgactgtcttcctctgatgcc

SEQ ID NO: 522570 - DNA, 25 bp, Homo sapien
gaagcccccgctataaagtgacagc

SEQ ID NO: 522571 - DNA, 25 bp, Homo sapien
tgaggggtaccagaggcatagcctt

SEQ ID NO: 522572 - DNA, 25 bp, Homo sapien
aagagaatgcagaagcccccgctat

SEQ ID NO: 522573 - DNA, 25 bp, Homo sapien
gggtaccagaggcatagccttttgg

SEQ ID NO: 522574 - DNA, 25 bp, Homo sapien
gaggccaatagcaggatcgtggctc

SEQ ID NO: 522575 - DNA, 25 bp, Homo sapien
cagaaacctgaatacatcttccaaa

SEQ ID NO: 522576 - DNA, 25 bp, Homo sapien
gcagaactccttttcggcatttcag

SEQ ID NO: 522577 - DNA, 25 bp, Homo sapien
aactccttttcggcatttcagactc

SEQ ID NO: 522578 - DNA, 25 bp, Homo sapien
ctccttttcggcatttcagactctg

SEQ ID NO: 522579 - DNA, 25 bp, Homo sapien
agaactccttttcggcatttcagac

SEQ ID NO: 522580 - DNA, 25 bp, Homo sapien
ccaggcttctccccctcataagtac

SEQ ID NO: 522581 - DNA, 25 bp, Homo sapien
ctggctttagcttggctctgagaag

SEQ ID NO: 522582 - DNA, 25 bp, Homo sapien
tttagcttggctctgagaagagacc

SEQ ID NO: 522583 - DNA, 25 bp, Homo sapien
ccagagcagtggagtggaggctgaa

SEQ ID NO: 522584 - DNA, 25 bp, Homo sapien
agcttggctctgagaagagaccaga

SEQ ID NO: 522585 - DNA, 25 bp, Homo sapien
gacttgttagcccctgacatggaga

SEQ ID NO: 522586 - DNA, 25 bp, Homo sapien
tgacatggagaagttaagctccaga

SEQ ID NO: 522587 - DNA, 25 bp, Homo sapien
acttgttagcccctgacatggagaa

SEQ ID NO: 522588 - DNA, 25 bp, Homo sapien
ggagaagttaagctccagagctttt

SEQ ID NO: 522589 - DNA, 25 bp, Homo sapien
agactgagctgaaccaccaccattt

SEQ ID NO: 522590 - DNA, 25 bp, Homo sapien
actgagctgaaccaccaccatttga

SEQ ID NO: 522591 - DNA, 25 bp, Homo sapien
ctgagctgaaccaccaccatttgat

SEQ ID NO: 522592 - DNA, 25 bp, Homo sapien
ccagactgagctgaaccaccaccat

SEQ ID NO: 522593 - DNA, 25 bp, Homo sapien
caatttcctgacaactctttgcctt

SEQ ID NO: 522594 - DNA, 25 bp, Homo sapien
tacttgacatagtcaagcctgaatc

SEQ ID NO: 522595 - DNA, 25 bp, Homo sapien
gagtcagcaactcaggtttcaaact

SEQ ID NO: 522596 - DNA, 25 bp, Homo sapien
ctttctgaaagccatgaagcatcca

SEQ ID NO: 522597 - DNA, 25 bp, Homo sapien
ctgctccaacatctatggactggga

SEQ ID NO: 522598 - DNA, 25 bp, Homo sapien
tctatggactgggatagaatctggt

SEQ ID NO: 522599 - DNA, 25 bp, Homo sapien
gactgggatagaatctggtggccta

SEQ ID NO: 522600 - DNA, 25 bp, Homo sapien
gaatctggtggcctacactgctgga

SEQ ID NO: 522601 - DNA, 25 bp, Homo sapien
tgaacttgcgttattgatgtgggtt

SEQ ID NO: 522602 - DNA, 25 bp, Homo sapien
cttgaacttgcgttattgatgtggg

SEQ ID NO: 522603 - DNA, 25 bp, Homo sapien
acttgcgttattgatgtgggttttc

SEQ ID NO: 522604 - DNA, 25 bp, Homo sapien
tggagaggagggtagatgatttttc

SEQ ID NO: 522605 - DNA, 25 bp, Homo sapien
agatgtggatgcttggacttccttc

SEQ ID NO: 522606 - DNA, 25 bp, Homo sapien
cagatgtggatgcttggacttcctt

SEQ ID NO: 522607 - DNA, 25 bp, Homo sapien
acagcctgctctaggccgcagatgt

SEQ ID NO: 522608 - DNA, 25 bp, Homo sapien
tgctctaggccgcagatgtggatgc

SEQ ID NO: 522609 - DNA, 25 bp, Homo sapien
cgtgcagtaagcctgactgcaaggc

SEQ ID NO: 522610 - DNA, 25 bp, Homo sapien
caccaagcactgatccaagatctgc

SEQ ID NO: 522611 - DNA, 25 bp, Homo sapien
gcttcaaatagcgtatattctttcc

SEQ ID NO: 522612 - DNA, 25 bp, Homo sapien
tcaggaatgattaggagaagcacgt

SEQ ID NO: 522613 - DNA, 25 bp, Homo sapien
caagcaaattattacgtgcagagag

SEQ ID NO: 522614 - DNA, 25 bp, Homo sapien
aattattacgtgcagagagcccaga

SEQ ID NO: 522615 - DNA, 25 bp, Homo sapien
cagatatcactgaacaattgcaggt

SEQ ID NO: 522616 - DNA, 25 bp, Homo sapien
acatgtcctcccacttacagatatc

SEQ ID NO: 522617 - DNA, 25 bp, Homo sapien
aaaattgaagccagggtctaagagg

SEQ ID NO: 522618 - DNA, 25 bp, Homo sapien
tcttcttaatcagttgtgctaggaa

SEQ ID NO: 522619 - DNA, 25 bp, Homo sapien
gagaacaagacgttaggctaacaaa

SEQ ID NO: 522620 - DNA, 25 bp, Homo sapien
tatcccatagcattgttgtgaacct

SEQ ID NO: 522621 - DNA, 25 bp, Homo sapien
aatgatgatatgattccgtgtagac

SEQ ID NO: 522622 - DNA, 25 bp, Homo sapien
gattccgtgtagacacaggttctgt

SEQ ID NO: 522623 - DNA, 25 bp, Homo sapien
ggttctgtgtatccaatgtacttga

SEQ ID NO: 522624 - DNA, 25 bp, Homo sapien
gagtattggggagcatttctccctc

SEQ ID NO: 522625 - DNA, 25 bp, Homo sapien
cctgatccaattgaggcctctgtga

SEQ ID NO: 522626 - DNA, 25 bp, Homo sapien
catacaaattgcctgatccaattga

SEQ ID NO: 522627 - DNA, 25 bp, Homo sapien
tgagacagatgtcctcgtcccgtgg

SEQ ID NO: 522628 - DNA, 25 bp, Homo sapien
ggttcttctatcagtgcacacccag

SEQ ID NO: 522629 - DNA, 25 bp, Homo sapien
acctggggtcactgctcactttcag

SEQ ID NO: 522630 - DNA, 25 bp, Homo sapien
atcctgccctcgtcttcactgtctg

SEQ ID NO: 522631 - DNA, 25 bp, Homo sapien
ggtcactgctcactttcagacagga

SEQ ID NO: 522632 - DNA, 25 bp, Homo sapien
tcctgccctcgtcttcactgtctgc

SEQ ID NO: 522633 - DNA, 25 bp, Homo sapien
aggccaacgtggaaataaaaagatg

SEQ ID NO: 522634 - DNA, 25 bp, Homo sapien
ggaatcaggctttgcttgtaaaaca

SEQ ID NO: 522635 - DNA, 25 bp, Homo sapien
gagaagcacgacctctgtcacttca

SEQ ID NO: 522636 - DNA, 25 bp, Homo sapien
caccctgagagaagcacgacctctg

SEQ ID NO: 522637 - DNA, 25 bp, Homo sapien
aaacactggcaaggttggcttccac

SEQ ID NO: 522638 - DNA, 25 bp, Homo sapien
caccagcctccgcagcctgggaagg

SEQ ID NO: 522639 - DNA, 25 bp, Homo sapien
ccgcagcctgggaaggaggtgtaat

SEQ ID NO: 522640 - DNA, 25 bp, Homo sapien
tgcgtgcactggcaccaccagcctc

SEQ ID NO: 522641 - DNA, 25 bp, Homo sapien
ctgcgtgcactggcaccaccagcct

SEQ ID NO: 522642 - DNA, 25 bp, Homo sapien
tttaggatgaagtgaagagtatttc

SEQ ID NO: 522643 - DNA, 25 bp, Homo sapien
agagtatttcaaatgtctctcttct

SEQ ID NO: 522644 - DNA, 25 bp, Homo sapien
ctctttaggatgaagtgaagagtat

SEQ ID NO: 522645 - DNA, 25 bp, Homo sapien
taggatgaagtgaagagtatttcaa

SEQ ID NO: 522646 - DNA, 25 bp, Homo sapien
tctgggccagagttgtcctgtgcta

SEQ ID NO: 522647 - DNA, 25 bp, Homo sapien
ttaatgcagaagcagtgaacacgag

SEQ ID NO: 522648 - DNA, 25 bp, Homo sapien
tattctttgccagatttacagggtg

SEQ ID NO: 522649 - DNA, 25 bp, Homo sapien
tgaacacgagagctaggctgagcag

SEQ ID NO: 522650 - DNA, 25 bp, Homo sapien
gagctatgtgagtaagacttaaaac

SEQ ID NO: 522651 - DNA, 25 bp, Homo sapien
ctatgtgagtaagacttaaaacggg

SEQ ID NO: 522652 - DNA, 25 bp, Homo sapien
ccagagctatgtgagtaagacttaa

SEQ ID NO: 522653 - DNA, 25 bp, Homo sapien
atgaaggtaagggcggtcccagtga

SEQ ID NO: 522654 - DNA, 25 bp, Homo sapien
caccctcaccacacctatcttttcc

SEQ ID NO: 522655 - DNA, 25 bp, Homo sapien
ccctcaccacacctatcttttcctc

SEQ ID NO: 522656 - DNA, 25 bp, Homo sapien
ctcctcctttccgcactgtcaccct

SEQ ID NO: 522657 - DNA, 25 bp, Homo sapien
cctcctttccgcactgtcaccctca

SEQ ID NO: 522658 - DNA, 25 bp, Homo sapien
acatgtccccagacccatctgaagg

SEQ ID NO: 522659 - DNA, 25 bp, Homo sapien
ccctcatttctggtgcaaggcatcc

SEQ ID NO: 522660 - DNA, 25 bp, Homo sapien
tcagagcagaccaggtggccgcact

SEQ ID NO: 522661 - DNA, 25 bp, Homo sapien
tctgaaggcttccacatccccttgg

SEQ ID NO: 522662 - DNA, 25 bp, Homo sapien
aatcaactcgccaatagtccttgcc

SEQ ID NO: 522663 - DNA, 25 bp, Homo sapien
gcattggaataaaaggatagtctat

SEQ ID NO: 522664 - DNA, 25 bp, Homo sapien
ctttgcaatttgatcggttgcttgg

SEQ ID NO: 522665 - DNA, 25 bp, Homo sapien
tttctttccgattttaattgtggca

SEQ ID NO: 522666 - DNA, 25 bp, Homo sapien
taagttcagagcttgcatggatccg

SEQ ID NO: 522667 - DNA, 25 bp, Homo sapien
gcatgttcagcgacatcctgccaga

SEQ ID NO: 522668 - DNA, 25 bp, Homo sapien
gcaaatggatccttagtctgaaaca

SEQ ID NO: 522669 - DNA, 25 bp, Homo sapien
tatggaagatgatagtgccacgggc

SEQ ID NO: 522670 - DNA, 25 bp, Homo sapien
gagcaacacaggcttgtgggatgca

SEQ ID NO: 522671 - DNA, 25 bp, Homo sapien
tccaggaatggagcaacacaggctt

SEQ ID NO: 522672 - DNA, 25 bp, Homo sapien
tcttccttccaggaatggagcaaca

SEQ ID NO: 522673 - DNA, 25 bp, Homo sapien
acacaggcttgtgggatgcaagatg

SEQ ID NO: 522674 - DNA, 25 bp, Homo sapien
tccagtacaccaccattagttaacc

SEQ ID NO: 522675 - DNA, 25 bp, Homo sapien
gtacaccaccattagttaacctcat

SEQ ID NO: 522676 - DNA, 25 bp, Homo sapien
caccattagttaacctcatcaggta

SEQ ID NO: 522677 - DNA, 25 bp, Homo sapien
tgagctctccagtacaccaccatta

SEQ ID NO: 522678 - DNA, 25 bp, Homo sapien
gagccaagtggtactatactccatg

SEQ ID NO: 522679 - DNA, 25 bp, Homo sapien
ctgcaaaatgagtgatgagccaagt

SEQ ID NO: 522680 - DNA, 25 bp, Homo sapien
tgagtcagggcctctgatatagagc

SEQ ID NO: 522681 - DNA, 25 bp, Homo sapien
tatactccatgaggatatctctatt

SEQ ID NO: 522682 - DNA, 25 bp, Homo sapien
gcctttgcaggagggggccaaacat

SEQ ID NO: 522683 - DNA, 25 bp, Homo sapien
aacgaatgttttggcctttgcagga

SEQ ID NO: 522684 - DNA, 25 bp, Homo sapien
tggcctttgcaggagggggccaaac

SEQ ID NO: 522685 - DNA, 25 bp, Homo sapien
ccaacgaatgttttggcctttgcag

SEQ ID NO: 522686 - DNA, 25 bp, Homo sapien
ccttgggtgggtctgagcctgcact

SEQ ID NO: 522687 - DNA, 25 bp, Homo sapien
ctgagcctgcactggaaccaggtga

SEQ ID NO: 522688 - DNA, 25 bp, Homo sapien
ctcttggcctgggacccttccttgg

SEQ ID NO: 522689 - DNA, 25 bp, Homo sapien
gtgggtctgagcctgcactggaacc

SEQ ID NO: 522690 - DNA, 25 bp, Homo sapien
aagagggcaaacagataagggcaaa

SEQ ID NO: 522691 - DNA, 25 bp, Homo sapien
gataagggcaaacctcctctggcct

SEQ ID NO: 522692 - DNA, 25 bp, Homo sapien
gggcaaacctcctctggcctatggg

SEQ ID NO: 522693 - DNA, 25 bp, Homo sapien
gcaaacagataagggcaaacctcct

SEQ ID NO: 522694 - DNA, 25 bp, Homo sapien
tctctgaaatccagcactggcccat

SEQ ID NO: 522695 - DNA, 25 bp, Homo sapien
cagcattgccataaacacctacatc

SEQ ID NO: 522696 - DNA, 25 bp, Homo sapien
aaacacctacatcacatttctctga

SEQ ID NO: 522697 - DNA, 25 bp, Homo sapien
atttctctgaaatccagcactggcc

SEQ ID NO: 522698 - DNA, 25 bp, Homo sapien
cctgcatataaggacagcatgactt

SEQ ID NO: 522699 - DNA, 25 bp, Homo sapien
gagtctcgctgacaccaagcgccag

SEQ ID NO: 522700 - DNA, 25 bp, Homo sapien
tcagcccttcctaagaacccttcag

SEQ ID NO: 522701 - DNA, 25 bp, Homo sapien
cacttcaaatgagagtacaagagtc

SEQ ID NO: 522702 - DNA, 25 bp, Homo sapien
gctctgtagctagtgcgtgttaggg

SEQ ID NO: 522703 - DNA, 25 bp, Homo sapien
gacttacaccacagatgtaaagaaa

SEQ ID NO: 522704 - DNA, 25 bp, Homo sapien
atgtttgtggacttacaccacagat

SEQ ID NO: 522705 - DNA, 25 bp, Homo sapien
ctagtgcgtgttaggggctcagcaa

SEQ ID NO: 522706 - DNA, 25 bp, Homo sapien
gaagtatcagcatgactgagaggga

SEQ ID NO: 522707 - DNA, 25 bp, Homo sapien
tcctggagataggtgaacgctagcc

SEQ ID NO: 522708 - DNA, 25 bp, Homo sapien
catgcagggcgctccctgcatagcg

SEQ ID NO: 522709 - DNA, 25 bp, Homo sapien
tcctgtttgcagtttaagagccaac

SEQ ID NO: 522710 - DNA, 25 bp, Homo sapien
gggccatgggcagtcttgaccttca

SEQ ID NO: 522711 - DNA, 25 bp, Homo sapien
tctgactcctgtgctgattccaggg

SEQ ID NO: 522712 - DNA, 25 bp, Homo sapien
gattccagggccatgggcagtcttg

SEQ ID NO: 522713 - DNA, 25 bp, Homo sapien
ctctgactcctgtgctgattccagg

SEQ ID NO: 522714 - DNA, 25 bp, Homo sapien
cagccagagcttggtcaaatatcca

SEQ ID NO: 522715 - DNA, 25 bp, Homo sapien
agccagagcttggtcaaatatccac

SEQ ID NO: 522716 - DNA, 25 bp, Homo sapien
agcaccagcagtgccggttagtgct

SEQ ID NO: 522717 - DNA, 25 bp, Homo sapien
tggcctattcaggacatcagcacca

SEQ ID NO: 522718 - DNA, 25 bp, Homo sapien
ggatggcctattcaggacatcagca

SEQ ID NO: 522719 - DNA, 25 bp, Homo sapien
agtgctacccttttctgtctgttgg

SEQ ID NO: 522720 - DNA, 25 bp, Homo sapien
gatcatggggataaagagagccaaa

SEQ ID NO: 522721 - DNA, 25 bp, Homo sapien
caccttgatatctgagcagactgat

SEQ ID NO: 522722 - DNA, 25 bp, Homo sapien
cgttcaacaccttgatatctgagca

SEQ ID NO: 522723 - DNA, 25 bp, Homo sapien
gatatctgagcagactgatgtttca

SEQ ID NO: 522724 - DNA, 25 bp, Homo sapien
tgatgaggaatctgtgactccaaag

SEQ ID NO: 522725 - DNA, 25 bp, Homo sapien
gatgaaaataatgagctggtcacag

SEQ ID NO: 522726 - DNA, 25 bp, Homo sapien
gatatcagcaattgctctaaatcct

SEQ ID NO: 522727 - DNA, 25 bp, Homo sapien
gtcacagatccccaggatatcagca

SEQ ID NO: 522728 - DNA, 25 bp, Homo sapien
tcactgagaagtctggaaacatatt

SEQ ID NO: 522729 - DNA, 25 bp, Homo sapien
cactgagaagtctggaaacatattt

SEQ ID NO: 522730 - DNA, 25 bp, Homo sapien
ctctggacttcctcaatttgatcgt

SEQ ID NO: 522731 - DNA, 25 bp, Homo sapien
gagcagaattgtttcccctctggac

SEQ ID NO: 522732 - DNA, 25 bp, Homo sapien
gatcgtcttctagagtttggcttgc

SEQ ID NO: 522733 - DNA, 25 bp, Homo sapien
tacccgtgcacaaatctgccctgtg

SEQ ID NO: 522734 - DNA, 25 bp, Homo sapien
cacctgttggatggctgtcccgcat

SEQ ID NO: 522735 - DNA, 25 bp, Homo sapien
ttcacctgttggatggctgtcccgc

SEQ ID NO: 522736 - DNA, 25 bp, Homo sapien
tttcacctgttggatggctgtcccg

SEQ ID NO: 522737 - DNA, 25 bp, Homo sapien
tcacctgttggatggctgtcccgca

SEQ ID NO: 522738 - DNA, 25 bp, Homo sapien
gcttctccttgggagaaacgaaagc

SEQ ID NO: 522739 - DNA, 25 bp, Homo sapien
gacctggttacagtctgtctccaca

SEQ ID NO: 522740 - DNA, 25 bp, Homo sapien
ccgagcctggcggtgtgaatgagct

SEQ ID NO: 522741 - DNA, 25 bp, Homo sapien
cactcaaaggcactctggtcgtggg

SEQ ID NO: 522742 - DNA, 25 bp, Homo sapien
attacacgtatgttttcagcagccg

SEQ ID NO: 522743 - DNA, 25 bp, Homo sapien
acacgtatgttttcagcagccgggc

SEQ ID NO: 522744 - DNA, 25 bp, Homo sapien
ttccttcaattacacgtatgttttc

SEQ ID NO: 522745 - DNA, 25 bp, Homo sapien
ccttcaattacacgtatgttttcag

SEQ ID NO: 522746 - DNA, 25 bp, Homo sapien
aagtaaaaggagcaggttcctgccg

SEQ ID NO: 522747 - DNA, 25 bp, Homo sapien
tgaaatcatgtgtggctacactgaa

SEQ ID NO: 522748 - DNA, 25 bp, Homo sapien
ttatggatgcccatagctgaagtgc

SEQ ID NO: 522749 - DNA, 25 bp, Homo sapien
tgccgaagaatgtacagacgacgtg

SEQ ID NO: 522750 - DNA, 25 bp, Homo sapien
tggtagctacaggtcaacagatggc

SEQ ID NO: 522751 - DNA, 25 bp, Homo sapien
taaggaatactgacccggctactgc

SEQ ID NO: 522752 - DNA, 25 bp, Homo sapien
gaacaagggcatttcctccagccga

SEQ ID NO: 522753 - DNA, 25 bp, Homo sapien
gacaactttgtagggccatgggtaa

SEQ ID NO: 522754 - DNA, 25 bp, Homo sapien
tgcaacttgatggataagcagctca

SEQ ID NO: 522755 - DNA, 25 bp, Homo sapien
ttgatggataagcagctcacagaag

SEQ ID NO: 522756 - DNA, 25 bp, Homo sapien
tccttcacaattgtacccaattggg

SEQ ID NO: 522757 - DNA, 25 bp, Homo sapien
ttgtacccaattgggatggaggaga

SEQ ID NO: 522758 - DNA, 25 bp, Homo sapien
ggcattaagggtgcctttgactgca

SEQ ID NO: 522759 - DNA, 25 bp, Homo sapien
caggcattaagggtgcctttgactg

SEQ ID NO: 522760 - DNA, 25 bp, Homo sapien
gactgctgagcaggagacatcgaag

SEQ ID NO: 522761 - DNA, 25 bp, Homo sapien
gagacatcgaaggacgcagagcagc

SEQ ID NO: 522762 - DNA, 25 bp, Homo sapien
tgagctatgtagtgaggactgcagt

SEQ ID NO: 522763 - DNA, 25 bp, Homo sapien
tggtgtggactccaatgagctatgt

SEQ ID NO: 522764 - DNA, 25 bp, Homo sapien
gactccaatgagctatgtagtgagg

SEQ ID NO: 522765 - DNA, 25 bp, Homo sapien
gtgcacactcgtacgaagccatggt

SEQ ID NO: 522766 - DNA, 25 bp, Homo sapien
caggtgaagataaaaggacatagca

SEQ ID NO: 522767 - DNA, 25 bp, Homo sapien
tgaagataaaaggacatagcatcaa

SEQ ID NO: 522768 - DNA, 25 bp, Homo sapien
taaaaggacatagcatcaaacatct

SEQ ID NO: 522769 - DNA, 25 bp, Homo sapien
gataaaaggacatagcatcaaacat

SEQ ID NO: 522770 - DNA, 25 bp, Homo sapien
catcccaggtttgtgtccagatctc

SEQ ID NO: 522771 - DNA, 25 bp, Homo sapien
aggtttgtgtccagatctcctggac

SEQ ID NO: 522772 - DNA, 25 bp, Homo sapien
atcccaggtttgtgtccagatctcc

SEQ ID NO: 522773 - DNA, 25 bp, Homo sapien
cccaggtttgtgtccagatctcctg

SEQ ID NO: 522774 - DNA, 25 bp, Homo sapien
cactcttccatgacagatcgttaga

SEQ ID NO: 522775 - DNA, 25 bp, Homo sapien
gatatacctcatcgtggcaacacca

SEQ ID NO: 522776 - DNA, 25 bp, Homo sapien
gagctcggcttgcatgacacatagg

SEQ ID NO: 522777 - DNA, 25 bp, Homo sapien
ggttcccaatcataactgccttctg

SEQ ID NO: 522778 - DNA, 25 bp, Homo sapien
tgcatgccagcaaaagtagtcaaag

SEQ ID NO: 522779 - DNA, 25 bp, Homo sapien
tcgcttccatgactctagctgcaag

SEQ ID NO: 522780 - DNA, 25 bp, Homo sapien
gaaagcacagcatcttcaagacctt

SEQ ID NO: 522781 - DNA, 25 bp, Homo sapien
catctaattgtggaaacttcttcgc

SEQ ID NO: 522782 - DNA, 25 bp, Homo sapien
tcttacaagtcagtggccctaggct

SEQ ID NO: 522783 - DNA, 25 bp, Homo sapien
cctaggctgcgtattcatgggctca

SEQ ID NO: 522784 - DNA, 25 bp, Homo sapien
gcctgtctgataccccagggtccag

SEQ ID NO: 522785 - DNA, 25 bp, Homo sapien
gattcacaggaagagtattcagacc

SEQ ID NO: 522786 - DNA, 25 bp, Homo sapien
gcagcttcacatgcactagtcattc

SEQ ID NO: 522787 - DNA, 25 bp, Homo sapien
ggcagcttcacatgcactagtcatt

SEQ ID NO: 522788 - DNA, 25 bp, Homo sapien
gcaggcaccacactggcagcttcac

SEQ ID NO: 522789 - DNA, 25 bp, Homo sapien
aggcaccacactggcagcttcacat

SEQ ID NO: 522790 - DNA, 25 bp, Homo sapien
ggaatgttcatgtacgggcagagca

SEQ ID NO: 522791 - DNA, 25 bp, Homo sapien
catgtacgggcagagcacgagagtt

SEQ ID NO: 522792 - DNA, 25 bp, Homo sapien
aatgttcatgtacgggcagagcacg

SEQ ID NO: 522793 - DNA, 25 bp, Homo sapien
ttcatgtacgggcagagcacgagag

SEQ ID NO: 522794 - DNA, 25 bp, Homo sapien
gccgctgaggttgcgcaaacacatt

SEQ ID NO: 522795 - DNA, 25 bp, Homo sapien
ctctgggttgaatcgcagaaacaaa

SEQ ID NO: 522796 - DNA, 25 bp, Homo sapien
acaggcttcagggaccaagcagttc

SEQ ID NO: 522797 - DNA, 25 bp, Homo sapien
acaaaatgtacttgtcctgcttccg

SEQ ID NO: 522798 - DNA, 25 bp, Homo sapien
aacatctctgggttcagcagttcag

SEQ ID NO: 522799 - DNA, 25 bp, Homo sapien
ggttcagcagttcagaaccagaagt

SEQ ID NO: 522800 - DNA, 25 bp, Homo sapien
cagaagtgagaaaagttggggatcc

SEQ ID NO: 522801 - DNA, 25 bp, Homo sapien
cagaaccagaagtgagaaaagttgg

SEQ ID NO: 522802 - DNA, 25 bp, Homo sapien
ggaagcagagtcacattacatatca

SEQ ID NO: 522803 - DNA, 25 bp, Homo sapien
tagtatagggatctagcagtgacaa

SEQ ID NO: 522804 - DNA, 25 bp, Homo sapien
cagaaggtatgctcaaactcaagtc

SEQ ID NO: 522805 - DNA, 25 bp, Homo sapien
ggttaatacaacttagcttgtgccc

SEQ ID NO: 522806 - DNA, 25 bp, Homo sapien
ggcacgtgattataactaaatcaaa

SEQ ID NO: 522807 - DNA, 25 bp, Homo sapien
aagcagtgtcaaaaggcacgtgatt

SEQ ID NO: 522808 - DNA, 25 bp, Homo sapien
tctagcttcattggaaatttagccc

SEQ ID NO: 522809 - DNA, 25 bp, Homo sapien
cgaactggactggttagcatctcta

SEQ ID NO: 522810 - DNA, 25 bp, Homo sapien
tattgggcggtaagcctttgaagcc

SEQ ID NO: 522811 - DNA, 25 bp, Homo sapien
tgtgctcaaaagtacaacacattag

SEQ ID NO: 522812 - DNA, 25 bp, Homo sapien
cattagcatgtattcggcactggga

SEQ ID NO: 522813 - DNA, 25 bp, Homo sapien
tttggtccaaaactgaagcatctcc

SEQ ID NO: 522814 - DNA, 25 bp, Homo sapien
caaagaaataagcagccagcaggcc

SEQ ID NO: 522815 - DNA, 25 bp, Homo sapien
gtcacagatgggcttaatgagaaca

SEQ ID NO: 522816 - DNA, 25 bp, Homo sapien
cacagatgggcttaatgagaacaaa

SEQ ID NO: 522817 - DNA, 25 bp, Homo sapien
gagaacaaagaaataagcagccagc

SEQ ID NO: 522818 - DNA, 25 bp, Homo sapien
tccacataggaacagccagttgtca

SEQ ID NO: 522819 - DNA, 25 bp, Homo sapien
cataggaacagccagttgtcatgat

SEQ ID NO: 522820 - DNA, 25 bp, Homo sapien
cacataggaacagccagttgtcatg

SEQ ID NO: 522821 - DNA, 25 bp, Homo sapien
atccacataggaacagccagttgtc

SEQ ID NO: 522822 - DNA, 25 bp, Homo sapien
agcatagcccgacccgagggccatg

SEQ ID NO: 522823 - DNA, 25 bp, Homo sapien
gcacatttaatgtttgcagcatagc

SEQ ID NO: 522824 - DNA, 25 bp, Homo sapien
tcgcgcagctgaccgttttcaaagc

SEQ ID NO: 522825 - DNA, 25 bp, Homo sapien
gtttttgaagtattcacatacagtc

SEQ ID NO: 522826 - DNA, 25 bp, Homo sapien
caccacagtgggaaggtcactccca

SEQ ID NO: 522827 - DNA, 25 bp, Homo sapien
tgggaaggtcactcccagggtgacc

SEQ ID NO: 522828 - DNA, 25 bp, Homo sapien
cccaaaccctctgtccctacaggat

SEQ ID NO: 522829 - DNA, 25 bp, Homo sapien
gtccctacaggatgagtcaagctct

SEQ ID NO: 522830 - DNA, 25 bp, Homo sapien
gttcctcctcccgctcttcattcaa

SEQ ID NO: 522831 - DNA, 25 bp, Homo sapien
ttcctcctcccgctcttcattcaaa

SEQ ID NO: 522832 - DNA, 25 bp, Homo sapien
ttcaggatgcaggcaatggactcag

SEQ ID NO: 522833 - DNA, 25 bp, Homo sapien
ctggtcccctgttcaggatgcaggc

SEQ ID NO: 522834 - DNA, 25 bp, Homo sapien
cctgttcaggatgcaggcaatggac

SEQ ID NO: 522835 - DNA, 25 bp, Homo sapien
tgttcaggatgcaggcaatggactc

SEQ ID NO: 522836 - DNA, 25 bp, Homo sapien
tgaccacactcccagcaaactgaga

SEQ ID NO: 522837 - DNA, 25 bp, Homo sapien
cacagctcctttgcaatgggtcctg

SEQ ID NO: 522838 - DNA, 25 bp, Homo sapien
cagccactcctgatgtcgttgttga

SEQ ID NO: 522839 - DNA, 25 bp, Homo sapien
cctggagtctctaccctgaaagctg

SEQ ID NO: 522840 - DNA, 25 bp, Homo sapien
atttgaaagcctcatcttcgagttc

SEQ ID NO: 522841 - DNA, 25 bp, Homo sapien
tctctcttccaactgtaccattcta

SEQ ID NO: 522842 - DNA, 25 bp, Homo sapien
ctcatcttcgagttccgaaattctc

SEQ ID NO: 522843 - DNA, 25 bp, Homo sapien
tttctggagacttttctgtccatat

SEQ ID NO: 522844 - DNA, 25 bp, Homo sapien
gataagctgccattagaaatgaatt

SEQ ID NO: 522845 - DNA, 25 bp, Homo sapien
taagctgccattagaaatgaattgc

SEQ ID NO: 522846 - DNA, 25 bp, Homo sapien
tagataagctgccattagaaatgaa

SEQ ID NO: 522847 - DNA, 25 bp, Homo sapien
agtagataagctgccattagaaatg

SEQ ID NO: 522848 - DNA, 25 bp, Homo sapien
tgaactctagctgccatggtctgcc

SEQ ID NO: 522849 - DNA, 25 bp, Homo sapien
aatctcgtctcttgtgctctgccct

SEQ ID NO: 522850 - DNA, 25 bp, Homo sapien
ttctcaactcaggaaacccaccagt

SEQ ID NO: 522851 - DNA, 25 bp, Homo sapien
tctctttctatgcagcaatctcgtc

SEQ ID NO: 522852 - DNA, 25 bp, Homo sapien
aatgctcaaacttcagggggcttta

SEQ ID NO: 522853 - DNA, 25 bp, Homo sapien
ctgcttcgtgtttgtgttgaatcac

SEQ ID NO: 522854 - DNA, 25 bp, Homo sapien
tgaaatggctttcctaggatcccat

SEQ ID NO: 522855 - DNA, 25 bp, Homo sapien
cacacagcccacatcttcattgtag

SEQ ID NO: 522856 - DNA, 25 bp, Homo sapien
tagaacattggctcagaactttctg

SEQ ID NO: 522857 - DNA, 25 bp, Homo sapien
atggtcgacaagtggccctggagac

SEQ ID NO: 522858 - DNA, 25 bp, Homo sapien
tgagtctcccttgtccatggtcgac

SEQ ID NO: 522859 - DNA, 25 bp, Homo sapien
cccatggcaaggcttagatgaggtt

SEQ ID NO: 522860 - DNA, 25 bp, Homo sapien
tcctgtgcaactcaaaaagccattt

SEQ ID NO: 522861 - DNA, 25 bp, Homo sapien
cctccacagaaaggagaactgcact

SEQ ID NO: 522862 - DNA, 25 bp, Homo sapien
ttcaggaacacctcgagtctgagct

SEQ ID NO: 522863 - DNA, 25 bp, Homo sapien
gaaaggagaactgcactgagggctt

SEQ ID NO: 522864 - DNA, 25 bp, Homo sapien
aaaccgagagatcatagaatcaacc

SEQ ID NO: 522865 - DNA, 25 bp, Homo sapien
accgagagatcatagaatcaaccac

SEQ ID NO: 522866 - DNA, 25 bp, Homo sapien
tgggaaaaaccgagagatcatagaa

SEQ ID NO: 522867 - DNA, 25 bp, Homo sapien
ctgggaaaaaccgagagatcataga

SEQ ID NO: 522868 - DNA, 25 bp, Homo sapien
tgaatgttccaaggttccaaccaga

SEQ ID NO: 522869 - DNA, 25 bp, Homo sapien
tgctatcaccttgaccatgggagtt

SEQ ID NO: 522870 - DNA, 25 bp, Homo sapien
ttgtagacctagcaggaaactctga

SEQ ID NO: 522871 - DNA, 25 bp, Homo sapien
gcagcggaacccaaatcaagactct

SEQ ID NO: 522872 - DNA, 25 bp, Homo sapien
caaatcaatctttggacttggcaag

SEQ ID NO: 522873 - DNA, 25 bp, Homo sapien
gacttggcaagacttgagaatctgt

SEQ ID NO: 522874 - DNA, 25 bp, Homo sapien
tctgttcgttgcttgttttggattc

SEQ ID NO: 522875 - DNA, 25 bp, Homo sapien
gctttcaaagtacaatttctccacc

SEQ ID NO: 522876 - DNA, 25 bp, Homo sapien
tttgtttgtttgttctcccagtgat

SEQ ID NO: 522877 - DNA, 25 bp, Homo sapien
ttgtttgtttgttctcccagtgatt

SEQ ID NO: 522878 - DNA, 25 bp, Homo sapien
cagatctaatgaacgtcagctcctt

SEQ ID NO: 522879 - DNA, 25 bp, Homo sapien
agctccttaatcaacccacacatgg

SEQ ID NO: 522880 - DNA, 25 bp, Homo sapien
cttaatcaacccacacatggatggt

SEQ ID NO: 522881 - DNA, 25 bp, Homo sapien
gaacgtcagctccttaatcaaccca

SEQ ID NO: 522882 - DNA, 25 bp, Homo sapien
gaaggatgtatagggccatgacacc

SEQ ID NO: 522883 - DNA, 25 bp, Homo sapien
gatgtgtcaagttaggtgcgtcgaa

SEQ ID NO: 522884 - DNA, 25 bp, Homo sapien
tatccaggcttagtggcacaaacct

SEQ ID NO: 522885 - DNA, 25 bp, Homo sapien
caagaacgagccctagagtaagctg

SEQ ID NO: 522886 - DNA, 25 bp, Homo sapien
tatgcttgacacatagaaaaggcta

SEQ ID NO: 522887 - DNA, 25 bp, Homo sapien
catagaaaaggctaaacaaatgcac

SEQ ID NO: 522888 - DNA, 25 bp, Homo sapien
aaaggctaaacaaatgcacatcaat

SEQ ID NO: 522889 - DNA, 25 bp, Homo sapien
tagaaaaggctaaacaaatgcacat

SEQ ID NO: 522890 - DNA, 25 bp, Homo sapien
gagtctcaactgtcgtggaaggcaa

SEQ ID NO: 522891 - DNA, 25 bp, Homo sapien
tccagaggacatgcttgaccaaggt

SEQ ID NO: 522892 - DNA, 25 bp, Homo sapien
ttttaaggacaactgcagatggacg

SEQ ID NO: 522893 - DNA, 25 bp, Homo sapien
caaactgcaatgtccaaaggtgccg

SEQ ID NO: 522894 - DNA, 25 bp, Homo sapien
tgaaagcaacatacactccagcaca

SEQ ID NO: 522895 - DNA, 25 bp, Homo sapien
ccagcacatcgtctttgttttcctt

SEQ ID NO: 522896 - DNA, 25 bp, Homo sapien
cacataattatgaaagcaacataca

SEQ ID NO: 522897 - DNA, 25 bp, Homo sapien
tacactccagcacatcgtctttgtt

SEQ ID NO: 522898 - DNA, 25 bp, Homo sapien
ggacatgttccagaggagctccgat

SEQ ID NO: 522899 - DNA, 25 bp, Homo sapien
catgttccagaggagctccgatggt

SEQ ID NO: 522900 - DNA, 25 bp, Homo sapien
ctgagaagacaaggacatgttccag

SEQ ID NO: 522901 - DNA, 25 bp, Homo sapien
gttccagaggagctccgatggtatt

SEQ ID NO: 522902 - DNA, 25 bp, Homo sapien
ggcactttccatcagtggatttatc

SEQ ID NO: 522903 - DNA, 25 bp, Homo sapien
cactttccatcagtggatttatctc

SEQ ID NO: 522904 - DNA, 25 bp, Homo sapien
ttccatcagtggatttatctctgtc

SEQ ID NO: 522905 - DNA, 25 bp, Homo sapien
cctggcactttccatcagtggattt

SEQ ID NO: 522906 - DNA, 25 bp, Homo sapien
agccaatcagatcaatatcaatatc

SEQ ID NO: 522907 - DNA, 25 bp, Homo sapien
aaactaccagagtgcgcagaggagg

SEQ ID NO: 522908 - DNA, 25 bp, Homo sapien
ctgagaaaactaccagagtgcgcag

SEQ ID NO: 522909 - DNA, 25 bp, Homo sapien
gaaaactaccagagtgcgcagagga

SEQ ID NO: 522910 - DNA, 25 bp, Homo sapien
tgagctacgggaggacattcaaacc

SEQ ID NO: 522911 - DNA, 25 bp, Homo sapien
acagagaagtgcttaaaggagctga

SEQ ID NO: 522912 - DNA, 25 bp, Homo sapien
aaattactctgagctacgggaggac

SEQ ID NO: 522913 - DNA, 25 bp, Homo sapien
ttactctgagctacgggaggacatt

SEQ ID NO: 522914 - DNA, 25 bp, Homo sapien
tgccttccgctggttggcaataagc

SEQ ID NO: 522915 - DNA, 25 bp, Homo sapien
ggttggcaataagcccatctaatcc

SEQ ID NO: 522916 - DNA, 25 bp, Homo sapien
aataagcccatctaatccttcctgg

SEQ ID NO: 522917 - DNA, 25 bp, Homo sapien
cttccgctggttggcaataagccca

SEQ ID NO: 522918 - DNA, 25 bp, Homo sapien
cagtagtcgagggaggaatctgaaa

SEQ ID NO: 522919 - DNA, 25 bp, Homo sapien
gaaaacacagttcttcacggtttgc

SEQ ID NO: 522920 - DNA, 25 bp, Homo sapien
gcttcaggagcattaaaacttcaaa

SEQ ID NO: 522921 - DNA, 25 bp, Homo sapien
ctttgcccttataaccactctggtg

SEQ ID NO: 522922 - DNA, 25 bp, Homo sapien
tttccccatgaggccgccccagtgg

SEQ ID NO: 522923 - DNA, 25 bp, Homo sapien
ccccagtggtgctgaaaacagggac

SEQ ID NO: 522924 - DNA, 25 bp, Homo sapien
ccgccccagtggtgctgaaaacagg

SEQ ID NO: 522925 - DNA, 25 bp, Homo sapien
atgaggccgccccagtggtgctgaa

SEQ ID NO: 522926 - DNA, 25 bp, Homo sapien
tgcccttaaaggctgactgccccgt

SEQ ID NO: 522927 - DNA, 25 bp, Homo sapien
gttctttgcatgttcccacactgcc

SEQ ID NO: 522928 - DNA, 25 bp, Homo sapien
cgtgggcactgtacatctgcagatc

SEQ ID NO: 522929 - DNA, 25 bp, Homo sapien
gctttcgacattcagagacctccat

SEQ ID NO: 522930 - DNA, 25 bp, Homo sapien
ccaaaccatcggctgagcgcatgct

SEQ ID NO: 522931 - DNA, 25 bp, Homo sapien
gctgagcgcatgctgctgggacctt

SEQ ID NO: 522932 - DNA, 25 bp, Homo sapien
catgggatgcgacgagatggatcat

SEQ ID NO: 522933 - DNA, 25 bp, Homo sapien
tccagggcagtctgccatttgcaac

SEQ ID NO: 522934 - DNA, 25 bp, Homo sapien
ctgtgaatacaagtggaagtgatga

SEQ ID NO: 522935 - DNA, 25 bp, Homo sapien
ggagtgaagaggccacagggggagg

SEQ ID NO: 522936 - DNA, 25 bp, Homo sapien
tgggagtgaagaggccacaggggga

SEQ ID NO: 522937 - DNA, 25 bp, Homo sapien
ggatgggagtgaagaggccacaggg

SEQ ID NO: 522938 - DNA, 25 bp, Homo sapien
ctggatgggagtgaagaggccacag

SEQ ID NO: 522939 - DNA, 25 bp, Homo sapien
gcttctaaaattaggcattggaaca

SEQ ID NO: 522940 - DNA, 25 bp, Homo sapien
caaatgccattcctgcgtcagatgg

SEQ ID NO: 522941 - DNA, 25 bp, Homo sapien
cctgcttcctgacccgcctggacta

SEQ ID NO: 522942 - DNA, 25 bp, Homo sapien
tatctcataggtcaagaagacatcc

SEQ ID NO: 522943 - DNA, 25 bp, Homo sapien
gaatgaagttcatcatagattaaaa

SEQ ID NO: 522944 - DNA, 25 bp, Homo sapien
tgaagttcatcatagattaaaagag

SEQ ID NO: 522945 - DNA, 25 bp, Homo sapien
tacagaatgaagttcatcatagatt

SEQ ID NO: 522946 - DNA, 25 bp, Homo sapien
ttcactacagaatgaagttcatcat

SEQ ID NO: 522947 - DNA, 25 bp, Homo sapien
aagtgctagcagcagacaaacggcc

SEQ ID NO: 522948 - DNA, 25 bp, Homo sapien
ctttaagtgctagcagcagacaaac

SEQ ID NO: 522949 - DNA, 25 bp, Homo sapien
gtgctagcagcagacaaacggccac

SEQ ID NO: 522950 - DNA, 25 bp, Homo sapien
agcagcagacaaacggccaccacta

SEQ ID NO: 522951 - DNA, 25 bp, Homo sapien
gttaaaactggaggtgtttgtcaca

SEQ ID NO: 522952 - DNA, 25 bp, Homo sapien
aaactggaggtgtttgtcacagtca

SEQ ID NO: 522953 - DNA, 25 bp, Homo sapien
tcacagtcacgtttggcccctgtat

SEQ ID NO: 522954 - DNA, 25 bp, Homo sapien
gtttgtcacagtcacgtttggcccc

SEQ ID NO: 522955 - DNA, 25 bp, Homo sapien
cagagtaagatgcagcttcgtcctt

SEQ ID NO: 522956 - DNA, 25 bp, Homo sapien
tctactgcgagtctaaaaatctggc

SEQ ID NO: 522957 - DNA, 25 bp, Homo sapien
tacttatcaacgtgcttcaaatcat

SEQ ID NO: 522958 - DNA, 25 bp, Homo sapien
gcttcgtccttgagaagcgcctaat

SEQ ID NO: 522959 - DNA, 25 bp, Homo sapien
tgggtcgtagattaacaagcaggga

SEQ ID NO: 522960 - DNA, 25 bp, Homo sapien
tagattaacaagcagggaaggaaat

SEQ ID NO: 522961 - DNA, 25 bp, Homo sapien
ggaagactggtttgatgtgtctggg

SEQ ID NO: 522962 - DNA, 25 bp, Homo sapien
gtctgggtcgtagattaacaagcag

SEQ ID NO: 522963 - DNA, 25 bp, Homo sapien
ggcatatatctatgggccccaaaac

SEQ ID NO: 522964 - DNA, 25 bp, Homo sapien
cctgtggtcttacccaagatgatga

SEQ ID NO: 522965 - DNA, 25 bp, Homo sapien
tggtccctgtggtcttacccaagat

SEQ ID NO: 522966 - DNA, 25 bp, Homo sapien
gtccctgtggtcttacccaagatga

SEQ ID NO: 522967 - DNA, 25 bp, Homo sapien
tgtaagaaatcaggtcccatcttcg

SEQ ID NO: 522968 - DNA, 25 bp, Homo sapien
aatcaggtcccatcttcgattggac

SEQ ID NO: 522969 - DNA, 25 bp, Homo sapien
cccatcttcgattggacttttcatt

SEQ ID NO: 522970 - DNA, 25 bp, Homo sapien
gggtgtaagaaatcaggtcccatct

SEQ ID NO: 522971 - DNA, 25 bp, Homo sapien
ggctagacaccagtcagaacatatt

SEQ ID NO: 522972 - DNA, 25 bp, Homo sapien
gatattcaagtctaaaatgcctagc

SEQ ID NO: 522973 - DNA, 25 bp, Homo sapien
gaggtagatgtaaccacagattctg

SEQ ID NO: 522974 - DNA, 25 bp, Homo sapien
ctcatttgacacattagccactgct

SEQ ID NO: 522975 - DNA, 25 bp, Homo sapien
ggtatgacccctgcactgaagactg

SEQ ID NO: 522976 - DNA, 25 bp, Homo sapien
gcctggtgctgggttccataacaaa

SEQ ID NO: 522977 - DNA, 25 bp, Homo sapien
gaggctaccgtctgttcctgagcac

SEQ ID NO: 522978 - DNA, 25 bp, Homo sapien
tatatcctgaggcttgaaggtcctg

SEQ ID NO: 522979 - DNA, 25 bp, Homo sapien
taaagacaccagttctaatggccag

SEQ ID NO: 522980 - DNA, 25 bp, Homo sapien
tttcctatgcccttgaggtgatgtg

SEQ ID NO: 522981 - DNA, 25 bp, Homo sapien
tgggtgtccctatcattatcaacag

SEQ ID NO: 522982 - DNA, 25 bp, Homo sapien
tctgtacattcacaaataaggcata

SEQ ID NO: 522983 - DNA, 25 bp, Homo sapien
gtactcaggtgtgccaccagtaatg

SEQ ID NO: 522984 - DNA, 25 bp, Homo sapien
agtaatgagaacagctggtacccag

SEQ ID NO: 522985 - DNA, 25 bp, Homo sapien
taatgagaacagctggtacccagtg

SEQ ID NO: 522986 - DNA, 25 bp, Homo sapien
caccagtaatgagaacagctggtac

SEQ ID NO: 522987 - DNA, 25 bp, Homo sapien
gctgtggagccttttacttcaggga

SEQ ID NO: 522988 - DNA, 25 bp, Homo sapien
gggacacgagacatatacagccagt

SEQ ID NO: 522989 - DNA, 25 bp, Homo sapien
cattccaatgcttgccagagaccag

SEQ ID NO: 522990 - DNA, 25 bp, Homo sapien
ggatcttgtcattcgatgcctcagc

SEQ ID NO: 522991 - DNA, 25 bp, Homo sapien
gggtggaaagcgctcttctcccaac

SEQ ID NO: 522992 - DNA, 25 bp, Homo sapien
ctattgccagccataggacagccaa

SEQ ID NO: 522993 - DNA, 25 bp, Homo sapien
ttgccagccataggacagccaagag

SEQ ID NO: 522994 - DNA, 25 bp, Homo sapien
taaggggtgtccaaatcactgatgc

SEQ ID NO: 522995 - DNA, 25 bp, Homo sapien
attttctgaaacaatcctcactcat

SEQ ID NO: 522996 - DNA, 25 bp, Homo sapien
tgattttctgaaacaatcctcactc

SEQ ID NO: 522997 - DNA, 25 bp, Homo sapien
cctgattttctgaaacaatcctcac

SEQ ID NO: 522998 - DNA, 25 bp, Homo sapien
gattttctgaaacaatcctcactca

SEQ ID NO: 522999 - DNA, 25 bp, Homo sapien
tctggccagctcatgaattgtggca

SEQ ID NO: 523000 - DNA, 25 bp, Homo sapien
ccagctcatgaattgtggcaggcag

SEQ ID NO: 523001 - DNA, 25 bp, Homo sapien
cactcgttccttcagcaaacaatta

SEQ ID NO: 523002 - DNA, 25 bp, Homo sapien
ccagcagaggcaagctccaccatga

SEQ ID NO: 523003 - DNA, 25 bp, Homo sapien
ggcttctctggttatcactcgttcc

SEQ ID NO: 523004 - DNA, 25 bp, Homo sapien
ggttatcactcgttccttcagcaaa

SEQ ID NO: 523005 - DNA, 25 bp, Homo sapien
ttccatgttccaggcagtggactag

SEQ ID NO: 523006 - DNA, 25 bp, Homo sapien
ccatgttccaggcagtggactagga

SEQ ID NO: 523007 - DNA, 25 bp, Homo sapien
cttccatgttccaggcagtggacta

SEQ ID NO: 523008 - DNA, 25 bp, Homo sapien
catgttccaggcagtggactaggat

SEQ ID NO: 523009 - DNA, 25 bp, Homo sapien
catcgagccaatttgcacctcacaa

SEQ ID NO: 523010 - DNA, 25 bp, Homo sapien
tcacatctctcccatggtgcgcaga

SEQ ID NO: 523011 - DNA, 25 bp, Homo sapien
ccacagcaatgggtatgcagagatc

SEQ ID NO: 523012 - DNA, 25 bp, Homo sapien
gatcatatttcaaggatcgtgaccc

SEQ ID NO: 523013 - DNA, 25 bp, Homo sapien
gcacaggaatccatcggaagtgaca

SEQ ID NO: 523014 - DNA, 25 bp, Homo sapien
tgagcacaggaatccatcggaagtg

SEQ ID NO: 523015 - DNA, 25 bp, Homo sapien
gaatccatcggaagtgacagcaaag

SEQ ID NO: 523016 - DNA, 25 bp, Homo sapien
acaggaatccatcggaagtgacagc

SEQ ID NO: 523017 - DNA, 25 bp, Homo sapien
tctgttctgttgcaacctggtccaa

SEQ ID NO: 523018 - DNA, 25 bp, Homo sapien
tgaagagtgacgacaaaggctctcg

SEQ ID NO: 523019 - DNA, 25 bp, Homo sapien
caacttcattggtctaagggatacc

SEQ ID NO: 523020 - DNA, 25 bp, Homo sapien
tgctgagggcccaacatcaaagctc

SEQ ID NO: 523021 - DNA, 25 bp, Homo sapien
gcatgtatacgctcatttgtgcaca

SEQ ID NO: 523022 - DNA, 25 bp, Homo sapien
gctcaaacgattggccagcttcggc

SEQ ID NO: 523023 - DNA, 25 bp, Homo sapien
ctccctaggaaaggtgggcacaagg

SEQ ID NO: 523024 - DNA, 25 bp, Homo sapien
cactggccaggtatagatgcacctt

SEQ ID NO: 523025 - DNA, 25 bp, Homo sapien
tgatagatggagctccaacttggga

SEQ ID NO: 523026 - DNA, 25 bp, Homo sapien
aaaagccggagatgctggtgttctg

SEQ ID NO: 523027 - DNA, 25 bp, Homo sapien
agttggaagaaaagccggagatgct

SEQ ID NO: 523028 - DNA, 25 bp, Homo sapien
tgaaagcttagtcaatagtccattg

SEQ ID NO: 523029 - DNA, 25 bp, Homo sapien
caaatagaactgaatccgtggcctg

SEQ ID NO: 523030 - DNA, 25 bp, Homo sapien
tgtagctgccccgaagagaaaactt

SEQ ID NO: 523031 - DNA, 25 bp, Homo sapien
tatccatccaggtggcaagggacac

SEQ ID NO: 523032 - DNA, 25 bp, Homo sapien
gcttctgaatcaccaggcgggaggt

SEQ ID NO: 523033 - DNA, 25 bp, Homo sapien
taatcaaaggtgaggatggtgggtg

SEQ ID NO: 523034 - DNA, 25 bp, Homo sapien
tgggttggcgcaagaggtgggacga

SEQ ID NO: 523035 - DNA, 25 bp, Homo sapien
agagaagtgctgaccattccaggga

SEQ ID NO: 523036 - DNA, 25 bp, Homo sapien
attccagggagtcctctgcatcact

SEQ ID NO: 523037 - DNA, 25 bp, Homo sapien
catcagcgtgatttctaagccggac

SEQ ID NO: 523038 - DNA, 25 bp, Homo sapien
gaatccgagtgctctcatgctgact

SEQ ID NO: 523039 - DNA, 25 bp, Homo sapien
agaccagggataggacgaatctcca

SEQ ID NO: 523040 - DNA, 25 bp, Homo sapien
caacattcttgtcctactgagggaa

SEQ ID NO: 523041 - DNA, 25 bp, Homo sapien
cgaagtggccctgcctcaagtgtcc

SEQ ID NO: 523042 - DNA, 25 bp, Homo sapien
caaagatgtccccaatgaggagggt

SEQ ID NO: 523043 - DNA, 25 bp, Homo sapien
atgaggagggtgaacaaaaagcgcc

SEQ ID NO: 523044 - DNA, 25 bp, Homo sapien
agcgcctttcacaggatctcccagg

SEQ ID NO: 523045 - DNA, 25 bp, Homo sapien
ggaagactcccacaccggagagcag

SEQ ID NO: 523046 - DNA, 25 bp, Homo sapien
aacgtccaggagcaaggattaaggg

SEQ ID NO: 523047 - DNA, 25 bp, Homo sapien
ctgccacaaagggtcgttgtgaaaa

SEQ ID NO: 523048 - DNA, 25 bp, Homo sapien
gaaaatgcaaacgtccaggagcaag

SEQ ID NO: 523049 - DNA, 25 bp, Homo sapien
cattcggccaacagccatcatcgga

SEQ ID NO: 523050 - DNA, 25 bp, Homo sapien
tgcagtgaagttaatgaagccattc

SEQ ID NO: 523051 - DNA, 25 bp, Homo sapien
cagccatcatcggagctctacagcg

SEQ ID NO: 523052 - DNA, 25 bp, Homo sapien
aaggactcctgcgtgttgcagtgaa

SEQ ID NO: 523053 - DNA, 25 bp, Homo sapien
cagctctgacgatgctgtaaggcca

SEQ ID NO: 523054 - DNA, 25 bp, Homo sapien
tgacgatgctgtaaggccagactgt

SEQ ID NO: 523055 - DNA, 25 bp, Homo sapien
tgtagagactaacaatataggcatc

SEQ ID NO: 523056 - DNA, 25 bp, Homo sapien
taaggccagactgtagagactaaca

SEQ ID NO: 523057 - DNA, 25 bp, Homo sapien
ttccagaccggaccgggcgcatggt

SEQ ID NO: 523058 - DNA, 25 bp, Homo sapien
cagaggggacggaaacacagagact

SEQ ID NO: 523059 - DNA, 25 bp, Homo sapien
acagagactcgggtttccagaccgg

SEQ ID NO: 523060 - DNA, 25 bp, Homo sapien
cagaggcttgaggaccaagccagag

SEQ ID NO: 523061 - DNA, 25 bp, Homo sapien
aaggaggacaccggctttccaccag

SEQ ID NO: 523062 - DNA, 25 bp, Homo sapien
gggagccctggagttggtccctcat

SEQ ID NO: 523063 - DNA, 25 bp, Homo sapien
ctcagacaaggctccccataggctc

SEQ ID NO: 523064 - DNA, 25 bp, Homo sapien
tgtatgtgaagtcatcaaagcggac

SEQ ID NO: 523065 - DNA, 25 bp, Homo sapien
cgtgcctccatggaggtgcgcagag

SEQ ID NO: 523066 - DNA, 25 bp, Homo sapien
gaggatgagggtgtgctgaccacag

SEQ ID NO: 523067 - DNA, 25 bp, Homo sapien
acagcaaggttgtgtgcgtgcctcc

SEQ ID NO: 523068 - DNA, 25 bp, Homo sapien
ttgggtcttctcactagcggagtga

SEQ ID NO: 523069 - DNA, 25 bp, Homo sapien
agaccgccttgggagctgtgttcac

SEQ ID NO: 523070 - DNA, 25 bp, Homo sapien
tggccactgtgggactgaacaccac

SEQ ID NO: 523071 - DNA, 25 bp, Homo sapien
aagacgcaacgctgtggccaaatgc

SEQ ID NO: 523072 - DNA, 25 bp, Homo sapien
cagagggcgcagcagcttagaagac

SEQ ID NO: 523073 - DNA, 25 bp, Homo sapien
tatcggggatcccaaactgaaccag

SEQ ID NO: 523074 - DNA, 25 bp, Homo sapien
ggatcccaaactgaaccagccgcct

SEQ ID NO: 523075 - DNA, 25 bp, Homo sapien
tagagtatcggggatcccaaactga

SEQ ID NO: 523076 - DNA, 25 bp, Homo sapien
caaactgaaccagccgcctctctcc

SEQ ID NO: 523077 - DNA, 25 bp, Homo sapien
gttctggaggatgtctgataatcca

SEQ ID NO: 523078 - DNA, 25 bp, Homo sapien
cagaaataaggagggcacgcggata

SEQ ID NO: 523079 - DNA, 25 bp, Homo sapien
tgtctgataatccaaggtcatccaa

SEQ ID NO: 523080 - DNA, 25 bp, Homo sapien
cacgcggatagcagttctggaggat

SEQ ID NO: 523081 - DNA, 25 bp, Homo sapien
agccacgttcttgaacttcctgcag

SEQ ID NO: 523082 - DNA, 25 bp, Homo sapien
gccacgttcttgaacttcctgcagg

SEQ ID NO: 523083 - DNA, 25 bp, Homo sapien
cacgttcttgaacttcctgcagggt

SEQ ID NO: 523084 - DNA, 25 bp, Homo sapien
cgttcttgaacttcctgcagggtcc

SEQ ID NO: 523085 - DNA, 25 bp, Homo sapien
gccagcatctcatctgtagtggatg

SEQ ID NO: 523086 - DNA, 25 bp, Homo sapien
cagagtcgtaaattagggttctcca

SEQ ID NO: 523087 - DNA, 25 bp, Homo sapien
tctcgattgagctgacttgctagga

SEQ ID NO: 523088 - DNA, 25 bp, Homo sapien
tctgtagtggatgactcaaaacatt

SEQ ID NO: 523089 - DNA, 25 bp, Homo sapien
cctggatcttcagagctgtgacctc

SEQ ID NO: 523090 - DNA, 25 bp, Homo sapien
tctgttcctgcctatgcccttcttg

SEQ ID NO: 523091 - DNA, 25 bp, Homo sapien
gggtgagttctgccgctagagcctg

SEQ ID NO: 523092 - DNA, 25 bp, Homo sapien
aatcaggaaaattgtttccctggat

SEQ ID NO: 523093 - DNA, 25 bp, Homo sapien
ggcttcttttcttgatagcccctcc

SEQ ID NO: 523094 - DNA, 25 bp, Homo sapien
tttgccacacccatcgacccatgat

SEQ ID NO: 523095 - DNA, 25 bp, Homo sapien
gatgatgctgaactgtgcttggttt

SEQ ID NO: 523096 - DNA, 25 bp, Homo sapien
ctccccacaattatacacatatgca

SEQ ID NO: 523097 - DNA, 25 bp, Homo sapien
gtataggaactcaagttaagcttgt

SEQ ID NO: 523098 - DNA, 25 bp, Homo sapien
ggcacagtataggaactcaagttaa

SEQ ID NO: 523099 - DNA, 25 bp, Homo sapien
cacagtataggaactcaagttaagc

SEQ ID NO: 523100 - DNA, 25 bp, Homo sapien
cctggcacagtataggaactcaagt

SEQ ID NO: 523101 - DNA, 25 bp, Homo sapien
tgaacagaccgaactgcctcttcag

SEQ ID NO: 523102 - DNA, 25 bp, Homo sapien
aacagaccgaactgcctcttcagca

SEQ ID NO: 523103 - DNA, 25 bp, Homo sapien
gaacagaccgaactgcctcttcagc

SEQ ID NO: 523104 - DNA, 25 bp, Homo sapien
ggccatatcccagcataagcagtag

SEQ ID NO: 523105 - DNA, 25 bp, Homo sapien
gacaatgggactgtccggaaggccc

SEQ ID NO: 523106 - DNA, 25 bp, Homo sapien
ggagagattccagaccagttgctga

SEQ ID NO: 523107 - DNA, 25 bp, Homo sapien
tgtagaccttcagatgggcccaggc

SEQ ID NO: 523108 - DNA, 25 bp, Homo sapien
aatgtgttactatggggcctgcccc

SEQ ID NO: 523109 - DNA, 25 bp, Homo sapien
caccatcgtctgacagaacctcctg

SEQ ID NO: 523110 - DNA, 25 bp, Homo sapien
cagaatgtgttactatggggcctgc

SEQ ID NO: 523111 - DNA, 25 bp, Homo sapien
gccacagaatgtgttactatggggc

SEQ ID NO: 523112 - DNA, 25 bp, Homo sapien
agattgcaggttcatttagggcagg

SEQ ID NO: 523113 - DNA, 25 bp, Homo sapien
caggtagtccatgcccgttcctttc

SEQ ID NO: 523114 - DNA, 25 bp, Homo sapien
ctgcatacaggtagtccatgcccgt

SEQ ID NO: 523115 - DNA, 25 bp, Homo sapien
gggcaggggccgtaactgattcatt

SEQ ID NO: 523116 - DNA, 25 bp, Homo sapien
tcaccatcgacaacttgtaaaaatg

SEQ ID NO: 523117 - DNA, 25 bp, Homo sapien
gccatcaccatcgacaacttgtaaa

SEQ ID NO: 523118 - DNA, 25 bp, Homo sapien
tcagccatcaccatcgacaacttgt

SEQ ID NO: 523119 - DNA, 25 bp, Homo sapien
catcgacaacttgtaaaaatgtggg

SEQ ID NO: 523120 - DNA, 25 bp, Homo sapien
tttgcactgggcttgttcagctgcc

SEQ ID NO: 523121 - DNA, 25 bp, Homo sapien
ttgcactgggcttgttcagctgcct

SEQ ID NO: 523122 - DNA, 25 bp, Homo sapien
ctctttttgcactgggcttgttcag

SEQ ID NO: 523123 - DNA, 25 bp, Homo sapien
tttttgcactgggcttgttcagctg

SEQ ID NO: 523124 - DNA, 25 bp, Homo sapien
ctgagaacaaagtcagctgcagtca

SEQ ID NO: 523125 - DNA, 25 bp, Homo sapien
tgagaacaaagtcagctgcagtcat

SEQ ID NO: 523126 - DNA, 25 bp, Homo sapien
tctcagccgtgctgcggttattcac

SEQ ID NO: 523127 - DNA, 25 bp, Homo sapien
tgttctgtcagctcacccttctcag

SEQ ID NO: 523128 - DNA, 25 bp, Homo sapien
cagccgtgctgcggttattcaccat

SEQ ID NO: 523129 - DNA, 25 bp, Homo sapien
ctgttctgtcagctcacccttctca

SEQ ID NO: 523130 - DNA, 25 bp, Homo sapien
tggcgaatgggtgtgatcacatgag

SEQ ID NO: 523131 - DNA, 25 bp, Homo sapien
ctgccgtggcgaatgggtgtgatca

SEQ ID NO: 523132 - DNA, 25 bp, Homo sapien
gccgtggcgaatgggtgtgatcaca

SEQ ID NO: 523133 - DNA, 25 bp, Homo sapien
cgtggcgaatgggtgtgatcacatg

SEQ ID NO: 523134 - DNA, 25 bp, Homo sapien
ttctacaacgaaagcactaggccca

SEQ ID NO: 523135 - DNA, 25 bp, Homo sapien
tattctctaacactgtaggatgact

SEQ ID NO: 523136 - DNA, 25 bp, Homo sapien
ggtaagaattgtcactattaatgcc

SEQ ID NO: 523137 - DNA, 25 bp, Homo sapien
gatgaaatgtaccaattccttaaag

SEQ ID NO: 523138 - DNA, 25 bp, Homo sapien
tcaaagggctgcggccgtgtctcga

SEQ ID NO: 523139 - DNA, 25 bp, Homo sapien
acgcacgaaaccaccacctccgcag

SEQ ID NO: 523140 - DNA, 25 bp, Homo sapien
aaagggctgccaaagccgtcctcgc

SEQ ID NO: 523141 - DNA, 25 bp, Homo sapien
gtgtctcgagcccacacagaccggt

SEQ ID NO: 523142 - DNA, 25 bp, Homo sapien
gcagagctgcggacgctaacgccag

SEQ ID NO: 523143 - DNA, 25 bp, Homo sapien
agccgcagagctgcggacgctaacg

SEQ ID NO: 523144 - DNA, 25 bp, Homo sapien
gggtgccgacactccctgtgctgtt

SEQ ID NO: 523145 - DNA, 25 bp, Homo sapien
taacgccagcgccaagcgggtgccg

SEQ ID NO: 523146 - DNA, 25 bp, Homo sapien
gcacacgatatcttcggtactaatc

SEQ ID NO: 523147 - DNA, 25 bp, Homo sapien
gatatcttcggtactaatccccgga

SEQ ID NO: 523148 - DNA, 25 bp, Homo sapien
actaatccccggatttcattaatct

SEQ ID NO: 523149 - DNA, 25 bp, Homo sapien
gcgctcatgccagcacacgatatct

SEQ ID NO: 523150 - DNA, 25 bp, Homo sapien
gcgtgaggttacaggccaagccctt

SEQ ID NO: 523151 - DNA, 25 bp, Homo sapien
tccagaagtcctccggtacctgaaa

SEQ ID NO: 523152 - DNA, 25 bp, Homo sapien
agagccaaatatcctgccagccagc

SEQ ID NO: 523153 - DNA, 25 bp, Homo sapien
cctgtttgagcttgtcatccctgca

SEQ ID NO: 523154 - DNA, 25 bp, Homo sapien
ttgcaaaaaggccatagccacttgc

SEQ ID NO: 523155 - DNA, 25 bp, Homo sapien
gagtcagaagttcctcaaatctcct

SEQ ID NO: 523156 - DNA, 25 bp, Homo sapien
cttgctaggatgagtcagaagttcc

SEQ ID NO: 523157 - DNA, 25 bp, Homo sapien
tcaaatctcctgacacaactcaggg

SEQ ID NO: 523158 - DNA, 25 bp, Homo sapien
caatgacaggaatcgggccaaacac

SEQ ID NO: 523159 - DNA, 25 bp, Homo sapien
tattccacaagcgagacacagaaca

SEQ ID NO: 523160 - DNA, 25 bp, Homo sapien
cagagatggcatttccactggcaat

SEQ ID NO: 523161 - DNA, 25 bp, Homo sapien
gcacatatctttagaggagcgttca

SEQ ID NO: 523162 - DNA, 25 bp, Homo sapien
gaagtatacagtaatatcccgggcc

SEQ ID NO: 523163 - DNA, 25 bp, Homo sapien
caaacgtagcgtagcctaagtgcac

SEQ ID NO: 523164 - DNA, 25 bp, Homo sapien
gctgtaccattataccccaggtgtg

SEQ ID NO: 523165 - DNA, 25 bp, Homo sapien
tagctgttgtactgccctagagcaa

SEQ ID NO: 523166 - DNA, 25 bp, Homo sapien
tgtcaccaaaatcattagtccttta

SEQ ID NO: 523167 - DNA, 25 bp, Homo sapien
ccattctgcctgttattgtcaccaa

SEQ ID NO: 523168 - DNA, 25 bp, Homo sapien
cacccagttggtgatgtgttggcca

SEQ ID NO: 523169 - DNA, 25 bp, Homo sapien
tagtcctttaatgccttcatacacc

SEQ ID NO: 523170 - DNA, 25 bp, Homo sapien
tggtggcaatccaaccaggacttga

SEQ ID NO: 523171 - DNA, 25 bp, Homo sapien
tttatccgtagccaacatatggtgg

SEQ ID NO: 523172 - DNA, 25 bp, Homo sapien
gacttgacaaatggactcgcatccc

SEQ ID NO: 523173 - DNA, 25 bp, Homo sapien
tacccatttctgcacataggcaagg

SEQ ID NO: 523174 - DNA, 25 bp, Homo sapien
cctcgatggtggacaagactaacat

SEQ ID NO: 523175 - DNA, 25 bp, Homo sapien
caacacttgtctctcgaatctggct

SEQ ID NO: 523176 - DNA, 25 bp, Homo sapien
catgcaacacagtcgctgccaacaa

SEQ ID NO: 523177 - DNA, 25 bp, Homo sapien
tatggtagcacaccattacacagca

SEQ ID NO: 523178 - DNA, 25 bp, Homo sapien
tgatgggacttacatggccacccct

SEQ ID NO: 523179 - DNA, 25 bp, Homo sapien
cactgttactaaactcgggtagcga

SEQ ID NO: 523180 - DNA, 25 bp, Homo sapien
caagttcagttacatacccgggagg

SEQ ID NO: 523181 - DNA, 25 bp, Homo sapien
cattgggcaaacatcctgtacagga

SEQ ID NO: 523182 - DNA, 25 bp, Homo sapien
tcaaagatgtgctaaccatggcaag

SEQ ID NO: 523183 - DNA, 25 bp, Homo sapien
gatgcagccatcgaactgtcaaaaa

SEQ ID NO: 523184 - DNA, 25 bp, Homo sapien
gataaaagatccctctctgcaaggg

SEQ ID NO: 523185 - DNA, 25 bp, Homo sapien
gctcagaaggaaaactgtaagctgc

SEQ ID NO: 523186 - DNA, 25 bp, Homo sapien
gttgacatgaccgaattagggccca

SEQ ID NO: 523187 - DNA, 25 bp, Homo sapien
tttggtggcgcaaacgagtagcacg

SEQ ID NO: 523188 - DNA, 25 bp, Homo sapien
caaagggctcatgctggattggcca

SEQ ID NO: 523189 - DNA, 25 bp, Homo sapien
tcacttgggtcaggcggttcatacc

SEQ ID NO: 523190 - DNA, 25 bp, Homo sapien
gagctgatcaagaattaaaggcccc

SEQ ID NO: 523191 - DNA, 25 bp, Homo sapien
gaagttttatattactgggcccaca

SEQ ID NO: 523192 - DNA, 25 bp, Homo sapien
cacacctttaaagcccattaagcaa

SEQ ID NO: 523193 - DNA, 25 bp, Homo sapien
aagagttaaacactctgtcgccaaa

SEQ ID NO: 523194 - DNA, 25 bp, Homo sapien
gggctacactgtccaaacagacaac

SEQ ID NO: 523195 - DNA, 25 bp, Homo sapien
caggggctacactgtccaaacagac

SEQ ID NO: 523196 - DNA, 25 bp, Homo sapien
tagccaggggctacactgtccaaac

SEQ ID NO: 523197 - DNA, 25 bp, Homo sapien
tccacgtagccaggggctacactgt

SEQ ID NO: 523198 - DNA, 25 bp, Homo sapien
caccatgaagggaatattagacccc

SEQ ID NO: 523199 - DNA, 25 bp, Homo sapien
atagtggtatcctgcgccccaaagt

SEQ ID NO: 523200 - DNA, 25 bp, Homo sapien
cataaaaatgctcagcggtgcctgg

SEQ ID NO: 523201 - DNA, 25 bp, Homo sapien
gctaaattacagagccttatcaggg

SEQ ID NO: 523202 - DNA, 25 bp, Homo sapien
tttcagcagaaacaccagagccagg

SEQ ID NO: 523203 - DNA, 25 bp, Homo sapien
ccacaactgcaaatatatggtgaaa

SEQ ID NO: 523204 - DNA, 25 bp, Homo sapien
aaatatatggtgaaaggggccagag

SEQ ID NO: 523205 - DNA, 25 bp, Homo sapien
ccagaggtggtctctccaagtttca

SEQ ID NO: 523206 - DNA, 25 bp, Homo sapien
gaccctggaatgtgcacagtctccc

SEQ ID NO: 523207 - DNA, 25 bp, Homo sapien
acagtacagggcacacagccactac

SEQ ID NO: 523208 - DNA, 25 bp, Homo sapien
attctgggtgccctaagaccctgga

SEQ ID NO: 523209 - DNA, 25 bp, Homo sapien
aaggaagggccttgtcttatagctt

SEQ ID NO: 523210 - DNA, 25 bp, Homo sapien
gtgcagccacagcgcccacatcctc

SEQ ID NO: 523211 - DNA, 25 bp, Homo sapien
ccaggggtgcagccacagcgcccac

SEQ ID NO: 523212 - DNA, 25 bp, Homo sapien
gcagccacagcgcccacatcctcat

SEQ ID NO: 523213 - DNA, 25 bp, Homo sapien
aggggtgcagccacagcgcccacat

SEQ ID NO: 523214 - DNA, 25 bp, Homo sapien
cttcctccacacccaagatctaccc

SEQ ID NO: 523215 - DNA, 25 bp, Homo sapien
tcctccacacccaagatctaccctc

SEQ ID NO: 523216 - DNA, 25 bp, Homo sapien
ctccacacccaagatctaccctcac

SEQ ID NO: 523217 - DNA, 25 bp, Homo sapien
ttcctccacacccaagatctaccct

SEQ ID NO: 523218 - DNA, 25 bp, Homo sapien
ccaggggcttagagtaggtacaaga

SEQ ID NO: 523219 - DNA, 25 bp, Homo sapien
gtacaagaatccctaaaagaggcca

SEQ ID NO: 523220 - DNA, 25 bp, Homo sapien
gccaggggcttagagtaggtacaag

SEQ ID NO: 523221 - DNA, 25 bp, Homo sapien
cacagccagcgggacattaaagaag

SEQ ID NO: 523222 - DNA, 25 bp, Homo sapien
aagcgttcactaactcaggtgggac

SEQ ID NO: 523223 - DNA, 25 bp, Homo sapien
tctaagaggacatttcaggtcgctc

SEQ ID NO: 523224 - DNA, 25 bp, Homo sapien
gataagctccgatgaaatctctgga

SEQ ID NO: 523225 - DNA, 25 bp, Homo sapien
tccacagatgggggagtcggggaac

SEQ ID NO: 523226 - DNA, 25 bp, Homo sapien
cagccaagccacatgtgcaggcatc

SEQ ID NO: 523227 - DNA, 25 bp, Homo sapien
ggtgctgcagccaagccacatgtgc

SEQ ID NO: 523228 - DNA, 25 bp, Homo sapien
tgcagccaagccacatgtgcaggca

SEQ ID NO: 523229 - DNA, 25 bp, Homo sapien
caagccacatgtgcaggcatcacac

SEQ ID NO: 523230 - DNA, 25 bp, Homo sapien
tcaacaggccagttgggaagctcca

SEQ ID NO: 523231 - DNA, 25 bp, Homo sapien
gaaggatggttctgatgttctgtct

SEQ ID NO: 523232 - DNA, 25 bp, Homo sapien
ggaagctccatgaaggatggttctg

SEQ ID NO: 523233 - DNA, 25 bp, Homo sapien
ggcagagcagggacctcaacaggcc

SEQ ID NO: 523234 - DNA, 25 bp, Homo sapien
gcagttctatgattaccctggtctt

SEQ ID NO: 523235 - DNA, 25 bp, Homo sapien
gccacttgacatgcatctagcctgt

SEQ ID NO: 523236 - DNA, 25 bp, Homo sapien
cacaccactgctacattctacattt

SEQ ID NO: 523237 - DNA, 25 bp, Homo sapien
agcctgtccctcagcctatatgaag

SEQ ID NO: 523238 - DNA, 25 bp, Homo sapien
aaactatgtattttatagtttactg

SEQ ID NO: 523239 - DNA, 25 bp, Homo sapien
aactatgtattttatagtttactgc

SEQ ID NO: 523240 - DNA, 25 bp, Homo sapien
ctatgtattttatagtttactgctg

SEQ ID NO: 523241 - DNA, 25 bp, Homo sapien
tatgtattttatagtttactgctgt

SEQ ID NO: 523242 - DNA, 25 bp, Homo sapien
gccaggtactgccaaatccacagca

SEQ ID NO: 523243 - DNA, 25 bp, Homo sapien
gaggccaggtactgccaaatccaca

SEQ ID NO: 523244 - DNA, 25 bp, Homo sapien
acagaggccaggtactgccaaatcc

SEQ ID NO: 523245 - DNA, 25 bp, Homo sapien
ggtactgccaaatccacagcagaca

SEQ ID NO: 523246 - DNA, 25 bp, Homo sapien
cacttagcaaatgtgagaccttggc

SEQ ID NO: 523247 - DNA, 25 bp, Homo sapien
tggaatctacatccagtactggcac

SEQ ID NO: 523248 - DNA, 25 bp, Homo sapien
cacaaaactagtggctgaggagcgt

SEQ ID NO: 523249 - DNA, 25 bp, Homo sapien
gagcgtgggcttgctgtcacacaaa

SEQ ID NO: 523250 - DNA, 25 bp, Homo sapien
tatgggccaaatgccgcaaacagaa

SEQ ID NO: 523251 - DNA, 25 bp, Homo sapien
caagtttgtacgatgggagcctctc

SEQ ID NO: 523252 - DNA, 25 bp, Homo sapien
gcatagtgacgcaaagaaaagccat

SEQ ID NO: 523253 - DNA, 25 bp, Homo sapien
ggctgatcactcaagcatgactgga

SEQ ID NO: 523254 - DNA, 25 bp, Homo sapien
cacaatgtttcacttaacgctacac

SEQ ID NO: 523255 - DNA, 25 bp, Homo sapien
tacgagctggccatcaaaatcctct

SEQ ID NO: 523256 - DNA, 25 bp, Homo sapien
actctcctcatttatcactttctgg

SEQ ID NO: 523257 - DNA, 25 bp, Homo sapien
tcaaaaataccaaattgttcacatc

SEQ ID NO: 523258 - DNA, 25 bp, Homo sapien
tattatcaggaacgcctaacattgc

SEQ ID NO: 523259 - DNA, 25 bp, Homo sapien
tacagcctttgtgggctactccata

SEQ ID NO: 523260 - DNA, 25 bp, Homo sapien
gaagactaccttgcatacagccttt

SEQ ID NO: 523261 - DNA, 25 bp, Homo sapien
tctgtgaccataaagcaggactgct

SEQ ID NO: 523262 - DNA, 25 bp, Homo sapien
gtccgagctgcatccctaactgtga

SEQ ID NO: 523263 - DNA, 25 bp, Homo sapien
aacaagcgaatgaaagaggccccag

SEQ ID NO: 523264 - DNA, 25 bp, Homo sapien
tagtcatggcttcaacaaggtcctg

SEQ ID NO: 523265 - DNA, 25 bp, Homo sapien
tgtgataggcaaaacggaacaagcg

SEQ ID NO: 523266 - DNA, 25 bp, Homo sapien
catgacaacaggagtctaaaccaga

SEQ ID NO: 523267 - DNA, 25 bp, Homo sapien
ggcatcaggcaaggacacctagcta

SEQ ID NO: 523268 - DNA, 25 bp, Homo sapien
tacttcatcacaagcctttctcggc

SEQ ID NO: 523269 - DNA, 25 bp, Homo sapien
gatctgtatgtggttctcttggtag

SEQ ID NO: 523270 - DNA, 25 bp, Homo sapien
caaaatgccaggattccaggtgtaa

SEQ ID NO: 523271 - DNA, 25 bp, Homo sapien
tcccaaaatgccaggattccaggtg

SEQ ID NO: 523272 - DNA, 25 bp, Homo sapien
caccgcgcccggccatgaaaagggg

SEQ ID NO: 523273 - DNA, 25 bp, Homo sapien
ccaccgcgcccggccatgaaaaggg

SEQ ID NO: 523274 - DNA, 25 bp, Homo sapien
cctttttcaatggaaagccctcatg

SEQ ID NO: 523275 - DNA, 25 bp, Homo sapien
catgtgaatacatacaaaacctgcc

SEQ ID NO: 523276 - DNA, 25 bp, Homo sapien
gaaccaggaaacaacgttctattgc

SEQ ID NO: 523277 - DNA, 25 bp, Homo sapien
acgttctattgcaactcacttccag

SEQ ID NO: 523278 - DNA, 25 bp, Homo sapien
aggcggaggttgtggtcacgccact

SEQ ID NO: 523279 - DNA, 25 bp, Homo sapien
gaccaacatggagaagactcgcctc

SEQ ID NO: 523280 - DNA, 25 bp, Homo sapien
acatggagaagactcgcctctacta

SEQ ID NO: 523281 - DNA, 25 bp, Homo sapien
ggcggaggttgtggtcacgccactg

SEQ ID NO: 523282 - DNA, 25 bp, Homo sapien
ggagagctgtgagtcgaacaaactc

SEQ ID NO: 523283 - DNA, 25 bp, Homo sapien
actcgaacagtggagagtttcggtt

SEQ ID NO: 523284 - DNA, 25 bp, Homo sapien
gctgtgagtcgaacaaactcgaaca

SEQ ID NO: 523285 - DNA, 25 bp, Homo sapien
tcgaacaaactcgaacagtggagag

SEQ ID NO: 523286 - DNA, 25 bp, Homo sapien
gctaagcacttttgtatctgcacaa

SEQ ID NO: 523287 - DNA, 25 bp, Homo sapien
ccttttcatgagagtatgtggctga

SEQ ID NO: 523288 - DNA, 25 bp, Homo sapien
tagcacagcagactttactttcaag

SEQ ID NO: 523289 - DNA, 25 bp, Homo sapien
ctgcacaattcaataggttaaaaac

SEQ ID NO: 523290 - DNA, 25 bp, Homo sapien
gagctagacttacagagatgtttat

SEQ ID NO: 523291 - DNA, 25 bp, Homo sapien
actgtaggaagagctagacttacag

SEQ ID NO: 523292 - DNA, 25 bp, Homo sapien
tgatagctcactgaaggagtttctt

SEQ ID NO: 523293 - DNA, 25 bp, Homo sapien
tcaactttgaaatgatagctcactg

SEQ ID NO: 523294 - DNA, 25 bp, Homo sapien
tacagcagcatcactcataaaagct

SEQ ID NO: 523295 - DNA, 25 bp, Homo sapien
acattgaagcattaaggaatacagc

SEQ ID NO: 523296 - DNA, 25 bp, Homo sapien
catacataaaggatgcaagcaaatt

SEQ ID NO: 523297 - DNA, 25 bp, Homo sapien
aaagctacccttgactgggttggca

SEQ ID NO: 523298 - DNA, 25 bp, Homo sapien
ctaggattggatcacaatggttgaa

SEQ ID NO: 523299 - DNA, 25 bp, Homo sapien
acctttatgtgccagcccaaagcct

SEQ ID NO: 523300 - DNA, 25 bp, Homo sapien
gaggcccaaccaacaaatggcaatg

SEQ ID NO: 523301 - DNA, 25 bp, Homo sapien
tgttcattcatcctaagacctcaat

SEQ ID NO: 523302 - DNA, 25 bp, Homo sapien
tgtgggcttcggctaaaacctggga

SEQ ID NO: 523303 - DNA, 25 bp, Homo sapien
aaggtcgaacaaacagttcttatgg

SEQ ID NO: 523304 - DNA, 25 bp, Homo sapien
gaacaaacagttcttatggcccaag

SEQ ID NO: 523305 - DNA, 25 bp, Homo sapien
caaacagttcttatggcccaagcca

SEQ ID NO: 523306 - DNA, 25 bp, Homo sapien
ctcaaaaggtcgaacaaacagttct

SEQ ID NO: 523307 - DNA, 25 bp, Homo sapien
ggcactgaaggcagtagaaacttca

SEQ ID NO: 523308 - DNA, 25 bp, Homo sapien
gatgggcactgtattcatactgtga

SEQ ID NO: 523309 - DNA, 25 bp, Homo sapien
tgaaggcagtagaaacttcagacca

SEQ ID NO: 523310 - DNA, 25 bp, Homo sapien
ggcagtagaaacttcagaccatcac

SEQ ID NO: 523311 - DNA, 25 bp, Homo sapien
tacaagtgttggtgccgtgagctgc

SEQ ID NO: 523312 - DNA, 25 bp, Homo sapien
tctagcttaaccaatttccctccgc

SEQ ID NO: 523313 - DNA, 25 bp, Homo sapien
tcatcgaattttggacatttgaact

SEQ ID NO: 523314 - DNA, 25 bp, Homo sapien
ctactgtgacttctaaaaggtgaat

SEQ ID NO: 523315 - DNA, 25 bp, Homo sapien
gccatattgtgttcccctacaggga

SEQ ID NO: 523316 - DNA, 25 bp, Homo sapien
aatacacaccggctaagagttccct

SEQ ID NO: 523317 - DNA, 25 bp, Homo sapien
gaaggatgtcaaattcccaggcata

SEQ ID NO: 523318 - DNA, 25 bp, Homo sapien
ccaggcatagccaagcaggatgtca

SEQ ID NO: 523319 - DNA, 25 bp, Homo sapien
tggacgagtccctagagtaaagtga

SEQ ID NO: 523320 - DNA, 25 bp, Homo sapien
tattgaagcctgtgacaatcatgct

SEQ ID NO: 523321 - DNA, 25 bp, Homo sapien
agggacaggccgattccaagaccaa

SEQ ID NO: 523322 - DNA, 25 bp, Homo sapien
agggtccactcctcaagcacaggga

SEQ ID NO: 523323 - DNA, 25 bp, Homo sapien
cactgctgcaagatgaagaccctct

SEQ ID NO: 523324 - DNA, 25 bp, Homo sapien
ttgccactgctgcaagatgaagacc

SEQ ID NO: 523325 - DNA, 25 bp, Homo sapien
aggtacagaatgcagggtgcctttt

SEQ ID NO: 523326 - DNA, 25 bp, Homo sapien
tgtgctggggattcctcactcaaag

SEQ ID NO: 523327 - DNA, 25 bp, Homo sapien
tggcctatccaaatttaacctcctc

SEQ ID NO: 523328 - DNA, 25 bp, Homo sapien
tgccttctgatgtgccacaatgcca

SEQ ID NO: 523329 - DNA, 25 bp, Homo sapien
tcacaggtctgaggcattttcgtgc

SEQ ID NO: 523330 - DNA, 25 bp, Homo sapien
catgagctagtcagactcactccaa

SEQ ID NO: 523331 - DNA, 25 bp, Homo sapien
ccgcctcctggattcacaccattct

SEQ ID NO: 523332 - DNA, 25 bp, Homo sapien
gcacgatccaggctcactgtaagct

SEQ ID NO: 523333 - DNA, 25 bp, Homo sapien
attcacaccattctcccgcctcagc

SEQ ID NO: 523334 - DNA, 25 bp, Homo sapien
gtggcacgatccaggctcactgtaa

SEQ ID NO: 523335 - DNA, 25 bp, Homo sapien
taccagatattcactcagaggacaa

SEQ ID NO: 523336 - DNA, 25 bp, Homo sapien
tacaatgtaactgagaagccaagac

SEQ ID NO: 523337 - DNA, 25 bp, Homo sapien
caaagcctggttcaacggccaatac

SEQ ID NO: 523338 - DNA, 25 bp, Homo sapien
gaagagttaacagacttgggaacac

SEQ ID NO: 523339 - DNA, 25 bp, Homo sapien
tacaagttgataaaccacagggaga

SEQ ID NO: 523340 - DNA, 25 bp, Homo sapien
ctaaattgtatgatgaggagctgca

SEQ ID NO: 523341 - DNA, 25 bp, Homo sapien
cctagattcaactattggcggtgct

SEQ ID NO: 523342 - DNA, 25 bp, Homo sapien
tggcggtgcttaacctacaagttga

SEQ ID NO: 523343 - DNA, 25 bp, Homo sapien
gctgctatcttagaaagcctaacac

SEQ ID NO: 523344 - DNA, 25 bp, Homo sapien
gaaagcctaacacaaaactgcagtt

SEQ ID NO: 523345 - DNA, 25 bp, Homo sapien
aggcttccccagagaaattccagcc

SEQ ID NO: 523346 - DNA, 25 bp, Homo sapien
gaaattccagccaaatacagctgct

SEQ ID NO: 523347 - DNA, 25 bp, Homo sapien
ctcaaccaaggacatgccacaaaac

SEQ ID NO: 523348 - DNA, 25 bp, Homo sapien
gattcaggtaactttcagcccttaa

SEQ ID NO: 523349 - DNA, 25 bp, Homo sapien
gatgctacatttagctgcataaccc

SEQ ID NO: 523350 - DNA, 25 bp, Homo sapien
aaccatgcgtaaaaagtaaagctct

SEQ ID NO: 523351 - DNA, 25 bp, Homo sapien
tcagatctgagagtgaaacttggtt

SEQ ID NO: 523352 - DNA, 25 bp, Homo sapien
cagatctgagagtgaaacttggttt

SEQ ID NO: 523353 - DNA, 25 bp, Homo sapien
tcgctctgacgtccacttcttggcg

SEQ ID NO: 523354 - DNA, 25 bp, Homo sapien
cacttcttggcgcactttctttact

SEQ ID NO: 523355 - DNA, 25 bp, Homo sapien
tggcaaacttttcggcctcgctctg

SEQ ID NO: 523356 - DNA, 25 bp, Homo sapien
aaacttttcggcctcgctctgacgt

SEQ ID NO: 523357 - DNA, 25 bp, Homo sapien
tgactggcgcgcacgcacacctact

SEQ ID NO: 523358 - DNA, 25 bp, Homo sapien
gtcccacgcgaactcctgactggcg

SEQ ID NO: 523359 - DNA, 25 bp, Homo sapien
aggccaccgcgaccaccgcttctcg

SEQ ID NO: 523360 - DNA, 25 bp, Homo sapien
tgctccgcaccttcaggccgagcaa

SEQ ID NO: 523361 - DNA, 25 bp, Homo sapien
cggcgggacgagctgctcttgcgcg

SEQ ID NO: 523362 - DNA, 25 bp, Homo sapien
acaggttgccccacgcgttgcggcg

SEQ ID NO: 523363 - DNA, 25 bp, Homo sapien
gcgttgcggcgggacgagctgctct

SEQ ID NO: 523364 - DNA, 25 bp, Homo sapien
gacaggttgccccacgcgttgcggc

SEQ ID NO: 523365 - DNA, 25 bp, Homo sapien
ggcgggtgctgcgacagcggcccgg

SEQ ID NO: 523366 - DNA, 25 bp, Homo sapien
cgcacagccccccggtggcggccgc

SEQ ID NO: 523367 - DNA, 25 bp, Homo sapien
gcgggtgctgcgacagcggcccggg

SEQ ID NO: 523368 - DNA, 25 bp, Homo sapien
gggtgctgcgacagcggcccgggcg

SEQ ID NO: 523369 - DNA, 25 bp, Homo sapien
ttggactggctaaactccggcctgg

SEQ ID NO: 523370 - DNA, 25 bp, Homo sapien
ggcgcctgcgggaagtcctcgctct

SEQ ID NO: 523371 - DNA, 25 bp, Homo sapien
cagcggctcgaagtccgggtcgatc

SEQ ID NO: 523372 - DNA, 25 bp, Homo sapien
gctctcctccagcaagctcaggttg

SEQ ID NO: 523373 - DNA, 25 bp, Homo sapien
aaggcgcggcggagtggaagcgcga

SEQ ID NO: 523374 - DNA, 25 bp, Homo sapien
cgctgcgctgctgcctgttgaatgt

SEQ ID NO: 523375 - DNA, 25 bp, Homo sapien
gaagcgcgagcccagaacttaactt

SEQ ID NO: 523376 - DNA, 25 bp, Homo sapien
ccggtgcggcgagcggacggaaact

SEQ ID NO: 523377 - DNA, 25 bp, Homo sapien
ctggtaattctcgagtgtttctgtg

SEQ ID NO: 523378 - DNA, 25 bp, Homo sapien
gctaggaagcaaaccagcgtggagg

SEQ ID NO: 523379 - DNA, 25 bp, Homo sapien
cgtggaggcgccggcgacactttgt

SEQ ID NO: 523380 - DNA, 25 bp, Homo sapien
ggtaattctcgagtgtttctgtgat

SEQ ID NO: 523381 - DNA, 25 bp, Homo sapien
gcagcagagccgagtactcgggaag

SEQ ID NO: 523382 - DNA, 25 bp, Homo sapien
tgggaggaggcgctcgctgctccct

SEQ ID NO: 523383 - DNA, 25 bp, Homo sapien
ggaggcgctcgctgctccctgacct

SEQ ID NO: 523384 - DNA, 25 bp, Homo sapien
cagcagagccgagtactcgggaagc

SEQ ID NO: 523385 - DNA, 25 bp, Homo sapien
ttcgctgcgatctgtcaagtcctcc

SEQ ID NO: 523386 - DNA, 25 bp, Homo sapien
attcggtctagccagaggcgcgtca

SEQ ID NO: 523387 - DNA, 25 bp, Homo sapien
gaggagattatctggcctccctgaa

SEQ ID NO: 523388 - DNA, 25 bp, Homo sapien
tgaacacacgaatccaaaggcaccc

SEQ ID NO: 523389 - DNA, 25 bp, Homo sapien
cattcttggcaaaggaagccagctt

SEQ ID NO: 523390 - DNA, 25 bp, Homo sapien
ttccaattacactctgcagaagcag

SEQ ID NO: 523391 - DNA, 25 bp, Homo sapien
taggcggtgccctactggatcattc

SEQ ID NO: 523392 - DNA, 25 bp, Homo sapien
gacagccgcaccctaaaaataggcg

SEQ ID NO: 523393 - DNA, 25 bp, Homo sapien
ttgatcttcccattgaactatgttt

SEQ ID NO: 523394 - DNA, 25 bp, Homo sapien
tttgatcttcccattgaactatgtt

SEQ ID NO: 523395 - DNA, 25 bp, Homo sapien
ttttgatcttcccattgaactatgt

SEQ ID NO: 523396 - DNA, 25 bp, Homo sapien
taaaatgtccaaaaccatggaatgt

SEQ ID NO: 523397 - DNA, 25 bp, Homo sapien
aatcttaattctaggtgttttagct

SEQ ID NO: 523398 - DNA, 25 bp, Homo sapien
gtccaaaaccatggaatgtctcagt

SEQ ID NO: 523399 - DNA, 25 bp, Homo sapien
tgccaaaatcttaattctaggtgtt

SEQ ID NO: 523400 - DNA, 25 bp, Homo sapien
ctaatagatgtaggatgattttaca

SEQ ID NO: 523401 - DNA, 25 bp, Homo sapien
taatagatgtaggatgattttacag

SEQ ID NO: 523402 - DNA, 25 bp, Homo sapien
gaccataatcagagaagagggacca

SEQ ID NO: 523403 - DNA, 25 bp, Homo sapien
tggcctgaaaggatggttctggtca

SEQ ID NO: 523404 - DNA, 25 bp, Homo sapien
gttctggtcaatagggactatggtc

SEQ ID NO: 523405 - DNA, 25 bp, Homo sapien
tgagctggacatggttgaccataat

SEQ ID NO: 523406 - DNA, 25 bp, Homo sapien
cactgtgcagctcttcatccagaac

SEQ ID NO: 523407 - DNA, 25 bp, Homo sapien
tgaacaccgttcagaatttccccta

SEQ ID NO: 523408 - DNA, 25 bp, Homo sapien
cgttcagaatttcccctagcactgt

SEQ ID NO: 523409 - DNA, 25 bp, Homo sapien
gaatttcccctagcactgtgcagct

SEQ ID NO: 523410 - DNA, 25 bp, Homo sapien
aactgtggtgttaggtgttgatttt

SEQ ID NO: 523411 - DNA, 25 bp, Homo sapien
ttaactgtggtgttaggtgttgatt

SEQ ID NO: 523412 - DNA, 25 bp, Homo sapien
actgtggtgttaggtgttgatttta

SEQ ID NO: 523413 - DNA, 25 bp, Homo sapien
ctgtggtgttaggtgttgattttag

SEQ ID NO: 523414 - DNA, 25 bp, Homo sapien
caactcttataacatagtactgtga

SEQ ID NO: 523415 - DNA, 25 bp, Homo sapien
ttaatttctctatagtgacccagac

SEQ ID NO: 523416 - DNA, 25 bp, Homo sapien
ttcaaagaagtatggtcaccgagtg

SEQ ID NO: 523417 - DNA, 25 bp, Homo sapien
ccagacttaggtgagggtagttaat

SEQ ID NO: 523418 - DNA, 25 bp, Homo sapien
atttataccagccaaatcaaatgta

SEQ ID NO: 523419 - DNA, 25 bp, Homo sapien
gtaacatttataccagccaaatcaa

SEQ ID NO: 523420 - DNA, 25 bp, Homo sapien
taacatttataccagccaaatcaaa

SEQ ID NO: 523421 - DNA, 25 bp, Homo sapien
acatttataccagccaaatcaaatg

SEQ ID NO: 523422 - DNA, 25 bp, Homo sapien
aatatccatctctaattgtttgaaa

SEQ ID NO: 523423 - DNA, 25 bp, Homo sapien
tatccatctctaattgtttgaaata

SEQ ID NO: 523424 - DNA, 25 bp, Homo sapien
tgtaatatccatctctaattgtttg

SEQ ID NO: 523425 - DNA, 25 bp, Homo sapien
tagttgtaatatccatctctaattg

SEQ ID NO: 523426 - DNA, 25 bp, Homo sapien
atgttactttcttttagaatatcct

SEQ ID NO: 523427 - DNA, 25 bp, Homo sapien
agtcaccagctccatgaagtggcga

SEQ ID NO: 523428 - DNA, 25 bp, Homo sapien
ttctgtttaacactaagatatgggt

SEQ ID NO: 523429 - DNA, 25 bp, Homo sapien
cactctatgtgttcaaccttctgtt

SEQ ID NO: 523430 - DNA, 25 bp, Homo sapien
ttttggaaaggccacaagtcaccag

SEQ ID NO: 523431 - DNA, 25 bp, Homo sapien
acattatacactccacctctcaggt

SEQ ID NO: 523432 - DNA, 25 bp, Homo sapien
aatagcaaagacattatacactcca

SEQ ID NO: 523433 - DNA, 25 bp, Homo sapien
aaagacattatacactccacctctc

SEQ ID NO: 523434 - DNA, 25 bp, Homo sapien
tagcaaagacattatacactccacc

SEQ ID NO: 523435 - DNA, 25 bp, Homo sapien
gaacaattccacctaatagcgcttg

SEQ ID NO: 523436 - DNA, 25 bp, Homo sapien
caatccaacatataaaactagtgcc

SEQ ID NO: 523437 - DNA, 25 bp, Homo sapien
taatagcgcttgtaaatctccatgc

SEQ ID NO: 523438 - DNA, 25 bp, Homo sapien
ccaagtctaagtgagaacaattcca

SEQ ID NO: 523439 - DNA, 25 bp, Homo sapien
aaatccattctgaaggggttgttca

SEQ ID NO: 523440 - DNA, 25 bp, Homo sapien
ttactgtggctaactgcttagcaaa

SEQ ID NO: 523441 - DNA, 25 bp, Homo sapien
ttcattgttaattgggaactcccat

SEQ ID NO: 523442 - DNA, 25 bp, Homo sapien
gggttgttcatttactgtggctaac

SEQ ID NO: 523443 - DNA, 25 bp, Homo sapien
aacatagtcgtttcatccctggata

SEQ ID NO: 523444 - DNA, 25 bp, Homo sapien
cacaaggaaactttggagggtcatg

SEQ ID NO: 523445 - DNA, 25 bp, Homo sapien
caacaatgccaggtaatcactgccc

SEQ ID NO: 523446 - DNA, 25 bp, Homo sapien
gaatactgagtacttcctctgcgct

SEQ ID NO: 523447 - DNA, 25 bp, Homo sapien
cttttacttggtggtcactgaccca

SEQ ID NO: 523448 - DNA, 25 bp, Homo sapien
tagctcaattactcttctacctggg

SEQ ID NO: 523449 - DNA, 25 bp, Homo sapien
gattgcatatgacctatcctccagc

SEQ ID NO: 523450 - DNA, 25 bp, Homo sapien
ttccgggttagaggcatagattgca

SEQ ID NO: 523451 - DNA, 25 bp, Homo sapien
aaaacttcaatgcttccttgccaac

SEQ ID NO: 523452 - DNA, 25 bp, Homo sapien
cctaactagagtataataatttgat

SEQ ID NO: 523453 - DNA, 25 bp, Homo sapien
gatggttccttcaagactctcaaga

SEQ ID NO: 523454 - DNA, 25 bp, Homo sapien
ctttagactcatgcaagtatagcat

SEQ ID NO: 523455 - DNA, 25 bp, Homo sapien
aacctccgcctcctgggtgcaagtg

SEQ ID NO: 523456 - DNA, 25 bp, Homo sapien
tgattctcctgcctcaaccttccga

SEQ ID NO: 523457 - DNA, 25 bp, Homo sapien
taatggtacaatcttggctcactgc

SEQ ID NO: 523458 - DNA, 25 bp, Homo sapien
gctcgtcacttaggctggagtgtaa

SEQ ID NO: 523459 - DNA, 25 bp, Homo sapien
tctgatgcacgcttaaccatttgag

SEQ ID NO: 523460 - DNA, 25 bp, Homo sapien
tctcatcatacacaagagaatgcag

SEQ ID NO: 523461 - DNA, 25 bp, Homo sapien
tccttgtccctacgcattttgcact

SEQ ID NO: 523462 - DNA, 25 bp, Homo sapien
gaagaggcgattccttgtccctacg

SEQ ID NO: 523463 - DNA, 25 bp, Homo sapien
aagattaaatgagcctttggaggcc

SEQ ID NO: 523464 - DNA, 25 bp, Homo sapien
gccacatgagtaggtgctacatgaa

SEQ ID NO: 523465 - DNA, 25 bp, Homo sapien
gaggcccgcctaggaacttatctat

SEQ ID NO: 523466 - DNA, 25 bp, Homo sapien
aactcctagtcgcaagccatcatgt

SEQ ID NO: 523467 - DNA, 25 bp, Homo sapien
tattctttggtctcttgacgccttc

SEQ ID NO: 523468 - DNA, 25 bp, Homo sapien
gacgccttcccagtttaggcggaca

SEQ ID NO: 523469 - DNA, 25 bp, Homo sapien
taggcggacattacagtcccaagtt

SEQ ID NO: 523470 - DNA, 25 bp, Homo sapien
caggaatgtccagtatgtaatgtaa

SEQ ID NO: 523471 - DNA, 25 bp, Homo sapien
ttctttagtaactgccatcatgtca

SEQ ID NO: 523472 - DNA, 25 bp, Homo sapien
taactgccatcatgtcaaaaatatt

SEQ ID NO: 523473 - DNA, 25 bp, Homo sapien
tattaagtcttttccctgtgaatat

SEQ ID NO: 523474 - DNA, 25 bp, Homo sapien
caggtgcttctttagtaactgccat

SEQ ID NO: 523475 - DNA, 25 bp, Homo sapien
tacgctccataactctcttcagtgc

SEQ ID NO: 523476 - DNA, 25 bp, Homo sapien
gaggaacgtactacaaagagaggga

SEQ ID NO: 523477 - DNA, 25 bp, Homo sapien
aatcttccctctaacaggttccaag

SEQ ID NO: 523478 - DNA, 25 bp, Homo sapien
tcaaccgcacgtctgataaacagga

SEQ ID NO: 523479 - DNA, 25 bp, Homo sapien
tattctcgaggattaactgattcag

SEQ ID NO: 523480 - DNA, 25 bp, Homo sapien
aaaaaatcaatccaggcctgggttg

SEQ ID NO: 523481 - DNA, 25 bp, Homo sapien
gatcctgccccagtcatagcagggt

SEQ ID NO: 523482 - DNA, 25 bp, Homo sapien
tagcagggtgaaaaacttggcgtct

SEQ ID NO: 523483 - DNA, 25 bp, Homo sapien
tgaaaggacccctattcatcgtggg

SEQ ID NO: 523484 - DNA, 25 bp, Homo sapien
tccgcttactctaaatgaaaggacc

SEQ ID NO: 523485 - DNA, 25 bp, Homo sapien
ttcagatatccaacagcaataatac

SEQ ID NO: 523486 - DNA, 25 bp, Homo sapien
gcccgttttgatttcaggtatggaa

SEQ ID NO: 523487 - DNA, 25 bp, Homo sapien
cttcatcaaactgaatccgaagctc

SEQ ID NO: 523488 - DNA, 25 bp, Homo sapien
atccgaagctctggtcttgaacgaa

SEQ ID NO: 523489 - DNA, 25 bp, Homo sapien
cgaagctctggtcttgaacgaactc

SEQ ID NO: 523490 - DNA, 25 bp, Homo sapien
ttttaagatcatccgtcttctcctg

SEQ ID NO: 523491 - DNA, 25 bp, Homo sapien
gatgcagctgccaccaactcaggac

SEQ ID NO: 523492 - DNA, 25 bp, Homo sapien
ggatggatgcacaagccccttacat

SEQ ID NO: 523493 - DNA, 25 bp, Homo sapien
aagacatttgtctgcggaacccagc

SEQ ID NO: 523494 - DNA, 25 bp, Homo sapien
tatcaactactggaaaagggccctc

SEQ ID NO: 523495 - DNA, 25 bp, Homo sapien
gatcccagcccggaatctagcttag

SEQ ID NO: 523496 - DNA, 25 bp, Homo sapien
caactgccagacctatgagtgagca

SEQ ID NO: 523497 - DNA, 25 bp, Homo sapien
gagtgagcaaacttcagacaattcc

SEQ ID NO: 523498 - DNA, 25 bp, Homo sapien
cagaacctgcacatacagaggacca

SEQ ID NO: 523499 - DNA, 25 bp, Homo sapien
tcaatgtggaacaagggtaaacacg

SEQ ID NO: 523500 - DNA, 25 bp, Homo sapien
tggaagtctcctcagttcgaacaga

SEQ ID NO: 523501 - DNA, 25 bp, Homo sapien
tacagatcacactgttagtgccaaa

SEQ ID NO: 523502 - DNA, 25 bp, Homo sapien
cctgccaagtgtagcttccaaactt

SEQ ID NO: 523503 - DNA, 25 bp, Homo sapien
tgtagctcttcgaagcctgccaagt

SEQ ID NO: 523504 - DNA, 25 bp, Homo sapien
agagaaaatggcaatttcaaaaaat

SEQ ID NO: 523505 - DNA, 25 bp, Homo sapien
atgaaagagaaaatggcaatttcaa

SEQ ID NO: 523506 - DNA, 25 bp, Homo sapien
gaaaatggcaatttcaaaaaatgct

SEQ ID NO: 523507 - DNA, 25 bp, Homo sapien
gaaagagaaaatggcaatttcaaaa

SEQ ID NO: 523508 - DNA, 25 bp, Homo sapien
atcttcactgctactaacctgcttc

SEQ ID NO: 523509 - DNA, 25 bp, Homo sapien
tcactgctactaacctgcttcagca

SEQ ID NO: 523510 - DNA, 25 bp, Homo sapien
ctgtgcaatttttctcctccattca

SEQ ID NO: 523511 - DNA, 25 bp, Homo sapien
tcttcactgctactaacctgcttca

SEQ ID NO: 523512 - DNA, 25 bp, Homo sapien
gtactggcacgctgtttttcgagtt

SEQ ID NO: 523513 - DNA, 25 bp, Homo sapien
tactggcacgctgtttttcgagttt

SEQ ID NO: 523514 - DNA, 25 bp, Homo sapien
actggcacgctgtttttcgagtttt

SEQ ID NO: 523515 - DNA, 25 bp, Homo sapien
tgtagtagagcacagcgaccaggtt

SEQ ID NO: 523516 - DNA, 25 bp, Homo sapien
aatagcttctaagacccagcaggtg

SEQ ID NO: 523517 - DNA, 25 bp, Homo sapien
ttttcacgcacactatgaccttggg

SEQ ID NO: 523518 - DNA, 25 bp, Homo sapien
gaccaggtttgtaatcgtagctctg

SEQ ID NO: 523519 - DNA, 25 bp, Homo sapien
cgggccaacagcgctgaactgcggt

SEQ ID NO: 523520 - DNA, 25 bp, Homo sapien
gggccaacagcgctgaactgcggta

SEQ ID NO: 523521 - DNA, 25 bp, Homo sapien
ggccaacagcgctgaactgcggtac

SEQ ID NO: 523522 - DNA, 25 bp, Homo sapien
gaacagtgagtagcataatcgcagc

SEQ ID NO: 523523 - DNA, 25 bp, Homo sapien
tccgtgccgaacagtgagtagcata

SEQ ID NO: 523524 - DNA, 25 bp, Homo sapien
tgagtagcataatcgcagccgctga

SEQ ID NO: 523525 - DNA, 25 bp, Homo sapien
ctgactgttccgtgccgaacagtga

SEQ ID NO: 523526 - DNA, 25 bp, Homo sapien
aactgaaatggtgcgtcccgctgcc

SEQ ID NO: 523527 - DNA, 25 bp, Homo sapien
cgccgagacacgaaatgaaccaaga

SEQ ID NO: 523528 - DNA, 25 bp, Homo sapien
agccagttgcctccaagcgacccga

SEQ ID NO: 523529 - DNA, 25 bp, Homo sapien
ctttgcgctccggtgggctacaggg

SEQ ID NO: 523530 - DNA, 25 bp, Homo sapien
gatggtgccagtgagatcagtctct

SEQ ID NO: 523531 - DNA, 25 bp, Homo sapien
gattgtagtcctagaggcggagtcc

SEQ ID NO: 523532 - DNA, 25 bp, Homo sapien
tcagcaaaggttcgctggccgaggc

SEQ ID NO: 523533 - DNA, 25 bp, Homo sapien
gaagggtctacagcgttcaccacgt

SEQ ID NO: 523534 - DNA, 25 bp, Homo sapien
gaggtgaggcctatgctaattgccc

SEQ ID NO: 523535 - DNA, 25 bp, Homo sapien
ataaaagttacatcagcaagccaag

SEQ ID NO: 523536 - DNA, 25 bp, Homo sapien
gataagaggaacaaattctagcact

SEQ ID NO: 523537 - DNA, 25 bp, Homo sapien
taatatatcactctctacccaacaa

SEQ ID NO: 523538 - DNA, 25 bp, Homo sapien
aggctaagtgactcactaaaggtca

SEQ ID NO: 523539 - DNA, 25 bp, Homo sapien
ttctaatctataacagggtctttcc

SEQ ID NO: 523540 - DNA, 25 bp, Homo sapien
gggacatttacacaaacatcctggc

SEQ ID NO: 523541 - DNA, 25 bp, Homo sapien
aacacagctcaagagctcttgccac

SEQ ID NO: 523542 - DNA, 25 bp, Homo sapien
tctgcgaagatgcaagggaacccac

SEQ ID NO: 523543 - DNA, 25 bp, Homo sapien
tacagcatgtgtactgaccgggcag

SEQ ID NO: 523544 - DNA, 25 bp, Homo sapien
gaactgtagcctcgtactagagcag

SEQ ID NO: 523545 - DNA, 25 bp, Homo sapien
ccttcagggtgggacttagatgcca

SEQ ID NO: 523546 - DNA, 25 bp, Homo sapien
gtaagcagccacgtgagattctggg

SEQ ID NO: 523547 - DNA, 25 bp, Homo sapien
gaattcggtttcttgtgcacagcac

SEQ ID NO: 523548 - DNA, 25 bp, Homo sapien
tccagccacaggatagacagtgact

SEQ ID NO: 523549 - DNA, 25 bp, Homo sapien
gcttcaagattgcaaagggcagtct

SEQ ID NO: 523550 - DNA, 25 bp, Homo sapien
gaaactgaggggtaactgtctgctt

SEQ ID NO: 523551 - DNA, 25 bp, Homo sapien
ctgcagaatgcagccgccggttcct

SEQ ID NO: 523552 - DNA, 25 bp, Homo sapien
tttgctgcactggtgctctgcccca

SEQ ID NO: 523553 - DNA, 25 bp, Homo sapien
ctgctttatcaccaaagtgctgtct

SEQ ID NO: 523554 - DNA, 25 bp, Homo sapien
gacttgatccttcatctgtccaagc

SEQ ID NO: 523555 - DNA, 25 bp, Homo sapien
ggacttgatccttcatctgtccaag

SEQ ID NO: 523556 - DNA, 25 bp, Homo sapien
tgggacttgatccttcatctgtcca

SEQ ID NO: 523557 - DNA, 25 bp, Homo sapien
cttgggacttgatccttcatctgtc

SEQ ID NO: 523558 - DNA, 25 bp, Homo sapien
gaatcacagcgataagggactgggc

SEQ ID NO: 523559 - DNA, 25 bp, Homo sapien
gggttctaccatggactctcaagca

SEQ ID NO: 523560 - DNA, 25 bp, Homo sapien
tattcttaggaaagatggccccttg

SEQ ID NO: 523561 - DNA, 25 bp, Homo sapien
agaagaaattctcccgcatccctgg

SEQ ID NO: 523562 - DNA, 25 bp, Homo sapien
ttggccatatggtataagaggatca

SEQ ID NO: 523563 - DNA, 25 bp, Homo sapien
cagggtatctcccaataaagtgttc

SEQ ID NO: 523564 - DNA, 25 bp, Homo sapien
tatactgagtgcaagcaggctatca

SEQ ID NO: 523565 - DNA, 25 bp, Homo sapien
caattgtacttcactatgccatatg

SEQ ID NO: 523566 - DNA, 25 bp, Homo sapien
cacaggccgtccattagagatttaa

SEQ ID NO: 523567 - DNA, 25 bp, Homo sapien
gtcagtcatccctgttggcagtaaa

SEQ ID NO: 523568 - DNA, 25 bp, Homo sapien
gctcagtgtccggaaagaagtcagt

SEQ ID NO: 523569 - DNA, 25 bp, Homo sapien
tctgaggcaagtggaaatgaggaac

SEQ ID NO: 523570 - DNA, 25 bp, Homo sapien
gttcagccgcccagccgctgattct

SEQ ID NO: 523571 - DNA, 25 bp, Homo sapien
ccagccgctgattcttttaacactg

SEQ ID NO: 523572 - DNA, 25 bp, Homo sapien
gccgcccagccgctgattcttttaa

SEQ ID NO: 523573 - DNA, 25 bp, Homo sapien
tgagccactgcgttcagccgcccag

SEQ ID NO: 523574 - DNA, 25 bp, Homo sapien
attaaatacatagcactctgcagtc

SEQ ID NO: 523575 - DNA, 25 bp, Homo sapien
gtatctaccttattcagccttctcc

SEQ ID NO: 523576 - DNA, 25 bp, Homo sapien
taacaataaactcaagacacaaagg

SEQ ID NO: 523577 - DNA, 25 bp, Homo sapien
caatgtgactgatcctggtatctac

SEQ ID NO: 523578 - DNA, 25 bp, Homo sapien
gtttcacccaactgagtcacccaaa

SEQ ID NO: 523579 - DNA, 25 bp, Homo sapien
ggaagtgtagtaaagcaaatcttaa

SEQ ID NO: 523580 - DNA, 25 bp, Homo sapien
tgttgggaagtgtagtaaagcaaat

SEQ ID NO: 523581 - DNA, 25 bp, Homo sapien
tctgtgtttcacccaactgagtcac

SEQ ID NO: 523582 - DNA, 25 bp, Homo sapien
tgaatacatcaattattgctctgtt

SEQ ID NO: 523583 - DNA, 25 bp, Homo sapien
gttgaatacatcaattattgctctg

SEQ ID NO: 523584 - DNA, 25 bp, Homo sapien
tgttgaatacatcaattattgctct

SEQ ID NO: 523585 - DNA, 25 bp, Homo sapien
ttgaatacatcaattattgctctgt

SEQ ID NO: 523586 - DNA, 25 bp, Homo sapien
tttgacttttagatcatatccatcg

SEQ ID NO: 523587 - DNA, 25 bp, Homo sapien
ttagatcatatccatcgcctgctcc

SEQ ID NO: 523588 - DNA, 25 bp, Homo sapien
ttttctccatcactattttgacttt

SEQ ID NO: 523589 - DNA, 25 bp, Homo sapien
ctaacaatttcttaagtaagtacag

SEQ ID NO: 523590 - DNA, 25 bp, Homo sapien
tggtcttgcatggattttgtctttg

SEQ ID NO: 523591 - DNA, 25 bp, Homo sapien
caagcccagttctgtctcctaaagc

SEQ ID NO: 523592 - DNA, 25 bp, Homo sapien
gtctttgaaagacaaggcttcaagc

SEQ ID NO: 523593 - DNA, 25 bp, Homo sapien
cagttctgtctcctaaagcagattt

SEQ ID NO: 523594 - DNA, 25 bp, Homo sapien
tcactatgatgttttcaggatcttg

SEQ ID NO: 523595 - DNA, 25 bp, Homo sapien
gaatcactatgatgttttcaggatc

SEQ ID NO: 523596 - DNA, 25 bp, Homo sapien
agtgaatcactatgatgttttcagg

SEQ ID NO: 523597 - DNA, 25 bp, Homo sapien
ctatgatgttttcaggatcttgagt

SEQ ID NO: 523598 - DNA, 25 bp, Homo sapien
ccctcttctgatagtcaacttagca

SEQ ID NO: 523599 - DNA, 25 bp, Homo sapien
gatagtcaacttagcataaaactta

SEQ ID NO: 523600 - DNA, 25 bp, Homo sapien
atattttcagaaaaccaagcccaat

SEQ ID NO: 523601 - DNA, 25 bp, Homo sapien
tattttcagaaaaccaagcccaata

SEQ ID NO: 523602 - DNA, 25 bp, Homo sapien
agagtggggacataatgatcatcaa

SEQ ID NO: 523603 - DNA, 25 bp, Homo sapien
gtggggacataatgatcatcaatca

SEQ ID NO: 523604 - DNA, 25 bp, Homo sapien
tggggacataatgatcatcaatcat

SEQ ID NO: 523605 - DNA, 25 bp, Homo sapien
tgtagagtggggacataatgatcat

SEQ ID NO: 523606 - DNA, 25 bp, Homo sapien
tctactgaccctaatatggaagtgc

SEQ ID NO: 523607 - DNA, 25 bp, Homo sapien
attctactgaccctaatatggaagt

SEQ ID NO: 523608 - DNA, 25 bp, Homo sapien
ctgaccctaatatggaagtgcttag

SEQ ID NO: 523609 - DNA, 25 bp, Homo sapien
tactgaccctaatatggaagtgctt

SEQ ID NO: 523610 - DNA, 25 bp, Homo sapien
acaggtaataacacagtaaataatg

SEQ ID NO: 523611 - DNA, 25 bp, Homo sapien
tctctacaggtaataacacagtaaa

SEQ ID NO: 523612 - DNA, 25 bp, Homo sapien
tatatctctacaggtaataacacag

SEQ ID NO: 523613 - DNA, 25 bp, Homo sapien
tgtatgttatatctctacaggtaat

SEQ ID NO: 523614 - DNA, 25 bp, Homo sapien
tgtagctgaccaaaatgattgcccc

SEQ ID NO: 523615 - DNA, 25 bp, Homo sapien
tagttagaacccacacaagaggcaa

SEQ ID NO: 523616 - DNA, 25 bp, Homo sapien
cagacagtggtaagctgggttacaa

SEQ ID NO: 523617 - DNA, 25 bp, Homo sapien
tctagcatcattggtcctgccagag

SEQ ID NO: 523618 - DNA, 25 bp, Homo sapien
cttcttgtctagaaactgcacgact

SEQ ID NO: 523619 - DNA, 25 bp, Homo sapien
gcttcttgtctagaaactgcacgac

SEQ ID NO: 523620 - DNA, 25 bp, Homo sapien
atgcttcttgtctagaaactgcacg

SEQ ID NO: 523621 - DNA, 25 bp, Homo sapien
tcttgtctagaaactgcacgacttc

SEQ ID NO: 523622 - DNA, 25 bp, Homo sapien
ttcaaaattggctaagggagtggta

SEQ ID NO: 523623 - DNA, 25 bp, Homo sapien
tagacatgctataattaactcacag

SEQ ID NO: 523624 - DNA, 25 bp, Homo sapien
gggccctggtcacattactccatga

SEQ ID NO: 523625 - DNA, 25 bp, Homo sapien
caagtgtagtgacgcctggttgcag

SEQ ID NO: 523626 - DNA, 25 bp, Homo sapien
tatagacacgtcataatgaaaggac

SEQ ID NO: 523627 - DNA, 25 bp, Homo sapien
cggaaattcaaaaaatctaggagag

SEQ ID NO: 523628 - DNA, 25 bp, Homo sapien
tgtggtctggacttaagtatagaca

SEQ ID NO: 523629 - DNA, 25 bp, Homo sapien
gatttgcactaaacatacctctgcc

SEQ ID NO: 523630 - DNA, 25 bp, Homo sapien
tgtgaatcttgcatggttttgagac

SEQ ID NO: 523631 - DNA, 25 bp, Homo sapien
ataaagtaaacattgctaccttatc

SEQ ID NO: 523632 - DNA, 25 bp, Homo sapien
gtgaatcttgcatggttttgagaca

SEQ ID NO: 523633 - DNA, 25 bp, Homo sapien
ttctgccttcttaatgccggcaaag

SEQ ID NO: 523634 - DNA, 25 bp, Homo sapien
atcaagtctgcctttctgccttctt

SEQ ID NO: 523635 - DNA, 25 bp, Homo sapien
aatccaatggcctgacctgtctcct

SEQ ID NO: 523636 - DNA, 25 bp, Homo sapien
tgcctttctgccttcttaatgccgg

SEQ ID NO: 523637 - DNA, 25 bp, Homo sapien
tccctttccacggtgtggcactggg

SEQ ID NO: 523638 - DNA, 25 bp, Homo sapien
ttgcctccctttccacggtgtggca

SEQ ID NO: 523639 - DNA, 25 bp, Homo sapien
gcctccctttccacggtgtggcact

SEQ ID NO: 523640 - DNA, 25 bp, Homo sapien
tgcttgcctccctttccacggtgtg

SEQ ID NO: 523641 - DNA, 25 bp, Homo sapien
tttataagacaatgatttaggctgg

SEQ ID NO: 523642 - DNA, 25 bp, Homo sapien
tcatcgctggcactacaaaggtttc

SEQ ID NO: 523643 - DNA, 25 bp, Homo sapien
tgtcccattctctctatgtaccaca

SEQ ID NO: 523644 - DNA, 25 bp, Homo sapien
gtttctgctcggaagccagatgtcc

SEQ ID NO: 523645 - DNA, 25 bp, Homo sapien
tacaaatactcgaagaagaccattc

SEQ ID NO: 523646 - DNA, 25 bp, Homo sapien
ccttctacaaatactcgaagaagac

SEQ ID NO: 523647 - DNA, 25 bp, Homo sapien
caaatactcgaagaagaccattcat

SEQ ID NO: 523648 - DNA, 25 bp, Homo sapien
tctacaaatactcgaagaagaccat

SEQ ID NO: 523649 - DNA, 25 bp, Homo sapien
gagccacatccaataagataaaaaa

SEQ ID NO: 523650 - DNA, 25 bp, Homo sapien
ggatgagagccacatccaataagat

SEQ ID NO: 523651 - DNA, 25 bp, Homo sapien
gaaaaaatagaatgataatccaaag

SEQ ID NO: 523652 - DNA, 25 bp, Homo sapien
gcaaggatgagagccacatccaata

SEQ ID NO: 523653 - DNA, 25 bp, Homo sapien
gtgctatccctccccactaccccca

SEQ ID NO: 523654 - DNA, 25 bp, Homo sapien
ccagtgctatccctccccactaccc

SEQ ID NO: 523655 - DNA, 25 bp, Homo sapien
tcccagtgctatccctccccactac

SEQ ID NO: 523656 - DNA, 25 bp, Homo sapien
ctcccagtgctatccctccccacta

SEQ ID NO: 523657 - DNA, 25 bp, Homo sapien
gcagttttgagttagattcttaatg

SEQ ID NO: 523658 - DNA, 25 bp, Homo sapien
cagttttgagttagattcttaatgc

SEQ ID NO: 523659 - DNA, 25 bp, Homo sapien
ttgagcagttttgagttagattctt

SEQ ID NO: 523660 - DNA, 25 bp, Homo sapien
gagcagttttgagttagattcttaa

SEQ ID NO: 523661 - DNA, 25 bp, Homo sapien
ttgaaagttaatcgtgttatgtgtg

SEQ ID NO: 523662 - DNA, 25 bp, Homo sapien
cattgaaagttaatcgtgttatgtg

SEQ ID NO: 523663 - DNA, 25 bp, Homo sapien
tacattgaaagttaatcgtgttatg

SEQ ID NO: 523664 - DNA, 25 bp, Homo sapien
atttacattgaaagttaatcgtgtt

SEQ ID NO: 523665 - DNA, 25 bp, Homo sapien
gacacatcagaccaacacttcaaga

SEQ ID NO: 523666 - DNA, 25 bp, Homo sapien
atcatgcccttttatagaagacaca

SEQ ID NO: 523667 - DNA, 25 bp, Homo sapien
tcctcctagaagcagttcttaataa

SEQ ID NO: 523668 - DNA, 25 bp, Homo sapien
tcttaataaatacagttcccaccaa

SEQ ID NO: 523669 - DNA, 25 bp, Homo sapien
cacgcggtaggctagttggcatacg

SEQ ID NO: 523670 - DNA, 25 bp, Homo sapien
acattacctttgcagattgaagaaa

SEQ ID NO: 523671 - DNA, 25 bp, Homo sapien
ttggcatacggcgttgcgcccaggt

SEQ ID NO: 523672 - DNA, 25 bp, Homo sapien
cagctccgtggtgactcttcttaca

SEQ ID NO: 523673 - DNA, 25 bp, Homo sapien
taacttgttgccctactcagtgacc

SEQ ID NO: 523674 - DNA, 25 bp, Homo sapien
gccccatgcattggtagttaagaca

SEQ ID NO: 523675 - DNA, 25 bp, Homo sapien
tatttaattagcagaccaggcctgg

SEQ ID NO: 523676 - DNA, 25 bp, Homo sapien
tgtacactaatcctactgagccaag

SEQ ID NO: 523677 - DNA, 25 bp, Homo sapien
tgcagaaccctaagaacagctccta

SEQ ID NO: 523678 - DNA, 25 bp, Homo sapien
taaatcctaggtagcgtacctgctg

SEQ ID NO: 523679 - DNA, 25 bp, Homo sapien
gcgggaaactttcgcaggtcttgag

SEQ ID NO: 523680 - DNA, 25 bp, Homo sapien
gcagggcgtctgttcctttggcgca

SEQ ID NO: 523681 - DNA, 25 bp, Homo sapien
tcatcttgaccatgggctcattggg

SEQ ID NO: 523682 - DNA, 25 bp, Homo sapien
tctgctagattaaacaaggcccctt

SEQ ID NO: 523683 - DNA, 25 bp, Homo sapien
gggcacttgtctttccaatgcgctg

SEQ ID NO: 523684 - DNA, 25 bp, Homo sapien
gggaactcctctaatagctgcagct

SEQ ID NO: 523685 - DNA, 25 bp, Homo sapien
gggcttacaattccaaggaggtcca

SEQ ID NO: 523686 - DNA, 25 bp, Homo sapien
tttttaactaccagaccaggcctga

SEQ ID NO: 523687 - DNA, 25 bp, Homo sapien
cagacaccaggttgagaaaggaagt

SEQ ID NO: 523688 - DNA, 25 bp, Homo sapien
ggctgcatgcatcggtaatcaagac

SEQ ID NO: 523689 - DNA, 25 bp, Homo sapien
tacaaaaaagctggccagtactcat

SEQ ID NO: 523690 - DNA, 25 bp, Homo sapien
caaggaaatacggaacaactgtcac

SEQ ID NO: 523691 - DNA, 25 bp, Homo sapien
gaaacaggatgctagcacagtctaa

SEQ ID NO: 523692 - DNA, 25 bp, Homo sapien
gttggcatcctgtaccccgatagga

SEQ ID NO: 523693 - DNA, 25 bp, Homo sapien
tatgtggcagaggtaattgggttct

SEQ ID NO: 523694 - DNA, 25 bp, Homo sapien
taacagctttggtgtagaagtgacc

SEQ ID NO: 523695 - DNA, 25 bp, Homo sapien
tcacattaaccaaagacagcccatg

SEQ ID NO: 523696 - DNA, 25 bp, Homo sapien
gaagtgaccagagattatatatacc

SEQ ID NO: 523697 - DNA, 25 bp, Homo sapien
taaagaatatggcatatggaggcca

SEQ ID NO: 523698 - DNA, 25 bp, Homo sapien
gctaaatcatagtccattgtacata

SEQ ID NO: 523699 - DNA, 25 bp, Homo sapien
tgtgttaaggagagcaataatagtc

SEQ ID NO: 523700 - DNA, 25 bp, Homo sapien
caaagactgggatttctaattctag

SEQ ID NO: 523701 - DNA, 25 bp, Homo sapien
tctatatcccagaattaaacaggtc

SEQ ID NO: 523702 - DNA, 25 bp, Homo sapien
caaagttgatttcggagaatgcagc

SEQ ID NO: 523703 - DNA, 25 bp, Homo sapien
cagatggccatcttaattctatatc

SEQ ID NO: 523704 - DNA, 25 bp, Homo sapien
aacaggtctcccagccactcataga

SEQ ID NO: 523705 - DNA, 25 bp, Homo sapien
gcattcaagtcttctgtcaacagag

SEQ ID NO: 523706 - DNA, 25 bp, Homo sapien
aaagatatatggcagtgtccggaga

SEQ ID NO: 523707 - DNA, 25 bp, Homo sapien
cacctcgaggtcaaggagtacttca

SEQ ID NO: 523708 - DNA, 25 bp, Homo sapien
tatactctggtgtccagtagagaca

SEQ ID NO: 523709 - DNA, 25 bp, Homo sapien
agaagcccaatttgcctcaagtcca

SEQ ID NO: 523710 - DNA, 25 bp, Homo sapien
acagggagtggcctaactggagcac

SEQ ID NO: 523711 - DNA, 25 bp, Homo sapien
tatggagaagcccaatttgcctcaa

SEQ ID NO: 523712 - DNA, 25 bp, Homo sapien
tgaaaagacactgcatagaggggta

SEQ ID NO: 523713 - DNA, 25 bp, Homo sapien
agggatctttcccagagactaaaga

SEQ ID NO: 523714 - DNA, 25 bp, Homo sapien
gggatctttcccagagactaaagag

SEQ ID NO: 523715 - DNA, 25 bp, Homo sapien
ggttaacatgaagggatctttccca

SEQ ID NO: 523716 - DNA, 25 bp, Homo sapien
caccacaggttaacatgaagggatc

SEQ ID NO: 523717 - DNA, 25 bp, Homo sapien
gcttcttgacaccttttaattcagt

SEQ ID NO: 523718 - DNA, 25 bp, Homo sapien
tgacaccttttaattcagtcactga

SEQ ID NO: 523719 - DNA, 25 bp, Homo sapien
ttcagtcactgaaattaaaatctgc

SEQ ID NO: 523720 - DNA, 25 bp, Homo sapien
aattcagtcactgaaattaaaatct

SEQ ID NO: 523721 - DNA, 25 bp, Homo sapien
ttaagatattattcgggtgggcaca

SEQ ID NO: 523722 - DNA, 25 bp, Homo sapien
attaagatattattcgggtgggcac

SEQ ID NO: 523723 - DNA, 25 bp, Homo sapien
gggcgagactccgtggaaagaaata

SEQ ID NO: 523724 - DNA, 25 bp, Homo sapien
tccaggctgggcgagactccgtgga

SEQ ID NO: 523725 - DNA, 25 bp, Homo sapien
cgagactccgtggaaagaaataaag

SEQ ID NO: 523726 - DNA, 25 bp, Homo sapien
ggctgggcgagactccgtggaaaga

SEQ ID NO: 523727 - DNA, 25 bp, Homo sapien
ttctagagaagcagcatagtttttt

SEQ ID NO: 523728 - DNA, 25 bp, Homo sapien
tccttctataaaagtttctagagaa

SEQ ID NO: 523729 - DNA, 25 bp, Homo sapien
ttgtccttctataaaagtttctaga

SEQ ID NO: 523730 - DNA, 25 bp, Homo sapien
tataaaagtttctagagaagcagca

SEQ ID NO: 523731 - DNA, 25 bp, Homo sapien
taagcatatgttagtaagccaagag

SEQ ID NO: 523732 - DNA, 25 bp, Homo sapien
taggatgttcaccagtcagttaaat

SEQ ID NO: 523733 - DNA, 25 bp, Homo sapien
cagtttcatctataccctgcagtta

SEQ ID NO: 523734 - DNA, 25 bp, Homo sapien
gatataaagcacatagatacagagc

SEQ ID NO: 523735 - DNA, 25 bp, Homo sapien
ttacagtccaagctcaacaaaaaga

SEQ ID NO: 523736 - DNA, 25 bp, Homo sapien
acagtccaagctcaacaaaaagagt

SEQ ID NO: 523737 - DNA, 25 bp, Homo sapien
tacagtccaagctcaacaaaaagag

SEQ ID NO: 523738 - DNA, 25 bp, Homo sapien
cagtccaagctcaacaaaaagagta

SEQ ID NO: 523739 - DNA, 25 bp, Homo sapien
gattgagttcacgagacttctttac

SEQ ID NO: 523740 - DNA, 25 bp, Homo sapien
attgagttcacgagacttctttaca

SEQ ID NO: 523741 - DNA, 25 bp, Homo sapien
tgagttcacgagacttctttacatc

SEQ ID NO: 523742 - DNA, 25 bp, Homo sapien
gagttcacgagacttctttacatca

SEQ ID NO: 523743 - DNA, 25 bp, Homo sapien
ctatgtagaaaaagatgggtttttg

SEQ ID NO: 523744 - DNA, 25 bp, Homo sapien
aaaagatgggtttttggccaggcat

SEQ ID NO: 523745 - DNA, 25 bp, Homo sapien
aggtcagcagatcgagactagtctg

SEQ ID NO: 523746 - DNA, 25 bp, Homo sapien
tcagcagatcgagactagtctggct

SEQ ID NO: 523747 - DNA, 25 bp, Homo sapien
tggctaacatggtgaaaccccgtct

SEQ ID NO: 523748 - DNA, 25 bp, Homo sapien
cagcagatcgagactagtctggcta

SEQ ID NO: 523749 - DNA, 25 bp, Homo sapien
caacatgtctgtcacacttgagcta

SEQ ID NO: 523750 - DNA, 25 bp, Homo sapien
tttatttgattaattggccatgggt

SEQ ID NO: 523751 - DNA, 25 bp, Homo sapien
tactttaccttgtatgaaagaccaa

SEQ ID NO: 523752 - DNA, 25 bp, Homo sapien
gcctacccaataactacgaatgaaa

SEQ ID NO: 523753 - DNA, 25 bp, Homo sapien
gacaataatattgtgtatcatctgg

SEQ ID NO: 523754 - DNA, 25 bp, Homo sapien
aatattgtgtatcatctggtttctg

SEQ ID NO: 523755 - DNA, 25 bp, Homo sapien
aagctctttgacaataatattgtgt

SEQ ID NO: 523756 - DNA, 25 bp, Homo sapien
cacagtaattcccaagaagaatgtg

SEQ ID NO: 523757 - DNA, 25 bp, Homo sapien
gacagtaagaagaattgctggctgg

SEQ ID NO: 523758 - DNA, 25 bp, Homo sapien
aacaggagtcagcaggacagtaaga

SEQ ID NO: 523759 - DNA, 25 bp, Homo sapien
cttgatctgggtggtgtacatatac

SEQ ID NO: 523760 - DNA, 25 bp, Homo sapien
cagactgcctacattgaacgaacca

SEQ ID NO: 523761 - DNA, 25 bp, Homo sapien
gcatcatttatctttagcttagtct

SEQ ID NO: 523762 - DNA, 25 bp, Homo sapien
tgctcttttacattcctttacagct

SEQ ID NO: 523763 - DNA, 25 bp, Homo sapien
cctgttaaaattctgtgacccacag

SEQ ID NO: 523764 - DNA, 25 bp, Homo sapien
aaagatctcctgttaaaattctgtg

SEQ ID NO: 523765 - DNA, 25 bp, Homo sapien
gcaatgagcgcctttgcacacagca

SEQ ID NO: 523766 - DNA, 25 bp, Homo sapien
taagactaacccatagcaatgagcg

SEQ ID NO: 523767 - DNA, 25 bp, Homo sapien
aaattaattttcatcgagcccagag

SEQ ID NO: 523768 - DNA, 25 bp, Homo sapien
caggagtctgaggtaacgcggctac

SEQ ID NO: 523769 - DNA, 25 bp, Homo sapien
ggcgggtcagccgggagtggaggaa

SEQ ID NO: 523770 - DNA, 25 bp, Homo sapien
cgggtcagccgggagtggaggaagc

SEQ ID NO: 523771 - DNA, 25 bp, Homo sapien
ggaggcgggtcagccgggagtggag

SEQ ID NO: 523772 - DNA, 25 bp, Homo sapien
aggaggcgggtcagccgggagtgga

SEQ ID NO: 523773 - DNA, 25 bp, Homo sapien
ctctaacgccgcctgggggtcctgg

SEQ ID NO: 523774 - DNA, 25 bp, Homo sapien
tgcaggtcctgcggcagccgccgcc

SEQ ID NO: 523775 - DNA, 25 bp, Homo sapien
ctctgggatgctgcaggtcctgcgg

SEQ ID NO: 523776 - DNA, 25 bp, Homo sapien
caggtcctgcggcagccgccgccat

SEQ ID NO: 523777 - DNA, 25 bp, Homo sapien
ctgggatgctgcaggtcctgcggca

SEQ ID NO: 523778 - DNA, 25 bp, Homo sapien
ggagctgctactatcgcgctcagca

SEQ ID NO: 523779 - DNA, 25 bp, Homo sapien
ctgctactatcgcgctcagcagctc

SEQ ID NO: 523780 - DNA, 25 bp, Homo sapien
gagctgctactatcgcgctcagcag

SEQ ID NO: 523781 - DNA, 25 bp, Homo sapien
agctgctactatcgcgctcagcagc

SEQ ID NO: 523782 - DNA, 25 bp, Homo sapien
ggcgcctggattcccgcgatcattg

SEQ ID NO: 523783 - DNA, 25 bp, Homo sapien
tcgtctccgtgatgtcactggcggc

SEQ ID NO: 523784 - DNA, 25 bp, Homo sapien
gcggctgcgtggtcttttcagtgaa

SEQ ID NO: 523785 - DNA, 25 bp, Homo sapien
catggctttcgtctccgtgatgtca

SEQ ID NO: 523786 - DNA, 25 bp, Homo sapien
aggtcctccctcagcgccctttgac

SEQ ID NO: 523787 - DNA, 25 bp, Homo sapien
tccctcagcgccctttgacccatgc

SEQ ID NO: 523788 - DNA, 25 bp, Homo sapien
tcctccctcagcgccctttgaccca

SEQ ID NO: 523789 - DNA, 25 bp, Homo sapien
ggtcctccctcagcgccctttgacc

SEQ ID NO: 523790 - DNA, 25 bp, Homo sapien
atcttcccaatctaatgtcgaggcc

SEQ ID NO: 523791 - DNA, 25 bp, Homo sapien
cttcccaatctaatgtcgaggccat

SEQ ID NO: 523792 - DNA, 25 bp, Homo sapien
tcttcccaatctaatgtcgaggcca

SEQ ID NO: 523793 - DNA, 25 bp, Homo sapien
ggtgcattgatatcggacttcccag

SEQ ID NO: 523794 - DNA, 25 bp, Homo sapien
ttctgtcttcgccatttgaagatga

SEQ ID NO: 523795 - DNA, 25 bp, Homo sapien
cttttggaagtggaagtgggctgtc

SEQ ID NO: 523796 - DNA, 25 bp, Homo sapien
gagaaccgtcaaacctgctggtgca

SEQ ID NO: 523797 - DNA, 25 bp, Homo sapien
tattctctgcacacttattctttaa

SEQ ID NO: 523798 - DNA, 25 bp, Homo sapien
tctctgcacacttattctttaagaa

SEQ ID NO: 523799 - DNA, 25 bp, Homo sapien
gatgttctagtaatattctctgcac

SEQ ID NO: 523800 - DNA, 25 bp, Homo sapien
attaagtaatgctgatgttctagta

SEQ ID NO: 523801 - DNA, 25 bp, Homo sapien
cccaaagaggtcaagattacatagc

SEQ ID NO: 523802 - DNA, 25 bp, Homo sapien
gactactcagccagattagcccaag

SEQ ID NO: 523803 - DNA, 25 bp, Homo sapien
gcaacacaagtttactaatggaccg

SEQ ID NO: 523804 - DNA, 25 bp, Homo sapien
aatggaccgcaaagcacagtggcct

SEQ ID NO: 523805 - DNA, 25 bp, Homo sapien
ggttccagcagttcgttttgtttca

SEQ ID NO: 523806 - DNA, 25 bp, Homo sapien
gaactgcgaggagaaaaggtcacca

SEQ ID NO: 523807 - DNA, 25 bp, Homo sapien
gagagcccgccttttgtgactgcag

SEQ ID NO: 523808 - DNA, 25 bp, Homo sapien
caagacaattgaaggaggagagccc

SEQ ID NO: 523809 - DNA, 25 bp, Homo sapien
gaacattgctagtaaggacctgctg

SEQ ID NO: 523810 - DNA, 25 bp, Homo sapien
gagacaattagcatattctacatca

SEQ ID NO: 523811 - DNA, 25 bp, Homo sapien
aactatgataccatctgctgagtgc

SEQ ID NO: 523812 - DNA, 25 bp, Homo sapien
gagcatgaccaatatcatgccagac

SEQ ID NO: 523813 - DNA, 25 bp, Homo sapien
ctaacacaaaactctcaggccatta

SEQ ID NO: 523814 - DNA, 25 bp, Homo sapien
tataattaacctgtcagggctcttg

SEQ ID NO: 523815 - DNA, 25 bp, Homo sapien
cttggactggtagagaaaatatggc

SEQ ID NO: 523816 - DNA, 25 bp, Homo sapien
tgttttagcagttttccaggttcaa

SEQ ID NO: 523817 - DNA, 25 bp, Homo sapien
tagactagtctccataaaccaagcg

SEQ ID NO: 523818 - DNA, 25 bp, Homo sapien
gctgagactagtcccaaatttctgc

SEQ ID NO: 523819 - DNA, 25 bp, Homo sapien
tactcccattctaagtcagctgaga

SEQ ID NO: 523820 - DNA, 25 bp, Homo sapien
aatttttgaagcttctgacttggcc

SEQ ID NO: 523821 - DNA, 25 bp, Homo sapien
gactgacataatagtaactgctcct

SEQ ID NO: 523822 - DNA, 25 bp, Homo sapien
agcatcagtagtttggttttctcac

SEQ ID NO: 523823 - DNA, 25 bp, Homo sapien
gttttagaactgtagtggctcctcc

SEQ ID NO: 523824 - DNA, 25 bp, Homo sapien
tacatgaacagtccggaagagctgg

SEQ ID NO: 523825 - DNA, 25 bp, Homo sapien
tgaagatactctcgaccggctggtt

SEQ ID NO: 523826 - DNA, 25 bp, Homo sapien
gaagactctatgctggaacttggat

SEQ ID NO: 523827 - DNA, 25 bp, Homo sapien
gtgctcttcccatggtctcataatt

SEQ ID NO: 523828 - DNA, 25 bp, Homo sapien
ctgagtgctcttcccatggtctcat

SEQ ID NO: 523829 - DNA, 25 bp, Homo sapien
ctcttcccatggtctcataattcat

SEQ ID NO: 523830 - DNA, 25 bp, Homo sapien
gagtgctcttcccatggtctcataa

SEQ ID NO: 523831 - DNA, 25 bp, Homo sapien
ttgatgtatttaggacaagtagcct

SEQ ID NO: 523832 - DNA, 25 bp, Homo sapien
agtgccagtaaaaactcccaaagat

SEQ ID NO: 523833 - DNA, 25 bp, Homo sapien
cacaacctggacactgctttagaat

SEQ ID NO: 523834 - DNA, 25 bp, Homo sapien
gtatttaggacaagtagccttgtcc

SEQ ID NO: 523835 - DNA, 25 bp, Homo sapien
gaatttcaagacaacatattaaagg

SEQ ID NO: 523836 - DNA, 25 bp, Homo sapien
tgtgaactctctcaacagtagttct

SEQ ID NO: 523837 - DNA, 25 bp, Homo sapien
gcaggtcggccataacagttttctt

SEQ ID NO: 523838 - DNA, 25 bp, Homo sapien
gggcaacagttatacaaatgcttga

SEQ ID NO: 523839 - DNA, 25 bp, Homo sapien
tcacagatatatttggcgtagtggc

SEQ ID NO: 523840 - DNA, 25 bp, Homo sapien
cttcacagatatatttggcgtagtg

SEQ ID NO: 523841 - DNA, 25 bp, Homo sapien
acagatatatttggcgtagtggctg

SEQ ID NO: 523842 - DNA, 25 bp, Homo sapien
tcttcacagatatatttggcgtagt

SEQ ID NO: 523843 - DNA, 25 bp, Homo sapien
ctgaaataaaaacagctctgcataa

SEQ ID NO: 523844 - DNA, 25 bp, Homo sapien
tgaaataaaaacagctctgcataaa

SEQ ID NO: 523845 - DNA, 25 bp, Homo sapien
aataaaaacagctctgcataaatat

SEQ ID NO: 523846 - DNA, 25 bp, Homo sapien
aaaacagctctgcataaatatttgc

SEQ ID NO: 523847 - DNA, 25 bp, Homo sapien
tttcctcttaggctgttctggtgat

SEQ ID NO: 523848 - DNA, 25 bp, Homo sapien
atgaggctcccggtgagtctgcata

SEQ ID NO: 523849 - DNA, 25 bp, Homo sapien
ctcccggtgagtctgcatatttttc

SEQ ID NO: 523850 - DNA, 25 bp, Homo sapien
tcttaggctgttctggtgatgaggc

SEQ ID NO: 523851 - DNA, 25 bp, Homo sapien
acatgggtgactggggcaacaacca

SEQ ID NO: 523852 - DNA, 25 bp, Homo sapien
ctaatgtgacggacacatgggtgac

SEQ ID NO: 523853 - DNA, 25 bp, Homo sapien
aatgtgacggacacatgggtgactg

SEQ ID NO: 523854 - DNA, 25 bp, Homo sapien
gtgactggggcaacaaccatgtcat

SEQ ID NO: 523855 - DNA, 25 bp, Homo sapien
taaagcagatcaataatgtggcagt

SEQ ID NO: 523856 - DNA, 25 bp, Homo sapien
cttgtcatttacagcccaggtcaga

SEQ ID NO: 523857 - DNA, 25 bp, Homo sapien
tagaatacccactgctactagagca

SEQ ID NO: 523858 - DNA, 25 bp, Homo sapien
gagcaattcgctatcactcttgtgg

SEQ ID NO: 523859 - DNA, 25 bp, Homo sapien
ttttcatccagcatagggccagggg

SEQ ID NO: 523860 - DNA, 25 bp, Homo sapien
gtgcctcagcagcctcaatagtttc

SEQ ID NO: 523861 - DNA, 25 bp, Homo sapien
tcaattgtttcatccccgtcatgac

SEQ ID NO: 523862 - DNA, 25 bp, Homo sapien
gggaatccatattgaggagtgcctc

SEQ ID NO: 523863 - DNA, 25 bp, Homo sapien
caggagtctgagactggccaacatg

SEQ ID NO: 523864 - DNA, 25 bp, Homo sapien
gggaagccgaggcaagcagattgct

SEQ ID NO: 523865 - DNA, 25 bp, Homo sapien
tgaggtcaggagtctgagactggcc

SEQ ID NO: 523866 - DNA, 25 bp, Homo sapien
ccaacatggagaaaccctgtttcta

SEQ ID NO: 523867 - DNA, 25 bp, Homo sapien
tatcatctattataggctgaatggt

SEQ ID NO: 523868 - DNA, 25 bp, Homo sapien
cggcctacagtaattctttaatatc

SEQ ID NO: 523869 - DNA, 25 bp, Homo sapien
ccggcctacagtaattctttaatat

SEQ ID NO: 523870 - DNA, 25 bp, Homo sapien
ttaatatcatctattataggctgaa

SEQ ID NO: 523871 - DNA, 25 bp, Homo sapien
tgaagcgccacctaacacgtgtaag

SEQ ID NO: 523872 - DNA, 25 bp, Homo sapien
tctcatttgagccactcagtctgtg

SEQ ID NO: 523873 - DNA, 25 bp, Homo sapien
cccactgtggaataacgaagattac

SEQ ID NO: 523874 - DNA, 25 bp, Homo sapien
catgacattgctcagaaaaggatgg

SEQ ID NO: 523875 - DNA, 25 bp, Homo sapien
gcctattacatgttttaaggtcata

SEQ ID NO: 523876 - DNA, 25 bp, Homo sapien
cttgatttgtgtaaggtctggctgc

SEQ ID NO: 523877 - DNA, 25 bp, Homo sapien
gaaaccttgcacatatcttactgta

SEQ ID NO: 523878 - DNA, 25 bp, Homo sapien
taaactacacgtgtatgccaccata

SEQ ID NO: 523879 - DNA, 25 bp, Homo sapien
aggtcctactggatggagacacacg

SEQ ID NO: 523880 - DNA, 25 bp, Homo sapien
ggacactgcctaaagctgtgctgca

SEQ ID NO: 523881 - DNA, 25 bp, Homo sapien
cccacatcctcaggattaggacact

SEQ ID NO: 523882 - DNA, 25 bp, Homo sapien
agcaaggtcctactggatggagaca

SEQ ID NO: 523883 - DNA, 25 bp, Homo sapien
cacacaggctagaccggcataacta

SEQ ID NO: 523884 - DNA, 25 bp, Homo sapien
gaacatgttccacaattacggcagg

SEQ ID NO: 523885 - DNA, 25 bp, Homo sapien
tgtcattgggctcttccacacaggc

SEQ ID NO: 523886 - DNA, 25 bp, Homo sapien
gcaacatccagtgaactctcagtaa

SEQ ID NO: 523887 - DNA, 25 bp, Homo sapien
tcagagacaggcgtgtaaaatgcaa

SEQ ID NO: 523888 - DNA, 25 bp, Homo sapien
gcaaaaacccatgtacaaggtagga

SEQ ID NO: 523889 - DNA, 25 bp, Homo sapien
aaggtaggaacagagctcatcactt

SEQ ID NO: 523890 - DNA, 25 bp, Homo sapien
gcaatcccacctagcataaacatgg

SEQ ID NO: 523891 - DNA, 25 bp, Homo sapien
gaaccaggagacctagggccttctc

SEQ ID NO: 523892 - DNA, 25 bp, Homo sapien
tctgctggcatacttacttggctct

SEQ ID NO: 523893 - DNA, 25 bp, Homo sapien
taaacctaacttgaactgactccag

SEQ ID NO: 523894 - DNA, 25 bp, Homo sapien
gaatgaagagcaccagttgatccta

SEQ ID NO: 523895 - DNA, 25 bp, Homo sapien
ggtctggtgccttactcctcccaca

SEQ ID NO: 523896 - DNA, 25 bp, Homo sapien
cacagtcttcaacagctcccctgac

SEQ ID NO: 523897 - DNA, 25 bp, Homo sapien
acaccaagaggggtctggtgcctta

SEQ ID NO: 523898 - DNA, 25 bp, Homo sapien
acagtcttcaacagctcccctgact

SEQ ID NO: 523899 - DNA, 25 bp, Homo sapien
gcaacaacatttagcttcaactaaa

SEQ ID NO: 523900 - DNA, 25 bp, Homo sapien
tgttgatacatatgtgtgttcactt

SEQ ID NO: 523901 - DNA, 25 bp, Homo sapien
tcaaaacataggtgaacaaacctta

SEQ ID NO: 523902 - DNA, 25 bp, Homo sapien
taaccatccacacttagcaacaaca

SEQ ID NO: 523903 - DNA, 25 bp, Homo sapien
aagagttgtcacaccatacaggctt

SEQ ID NO: 523904 - DNA, 25 bp, Homo sapien
aatataaaatgcatatcacgtgcag

SEQ ID NO: 523905 - DNA, 25 bp, Homo sapien
tataaaatgcatatcacgtgcaggg

SEQ ID NO: 523906 - DNA, 25 bp, Homo sapien
ataaaatgcatatcacgtgcagggc

SEQ ID NO: 523907 - DNA, 25 bp, Homo sapien
gattagcctagtgtttatatgtgtg

SEQ ID NO: 523908 - DNA, 25 bp, Homo sapien
tgtaaaactgaattaggaaactctc

SEQ ID NO: 523909 - DNA, 25 bp, Homo sapien
ggaaactctctctgaaccgaaactg

SEQ ID NO: 523910 - DNA, 25 bp, Homo sapien
tggcaagggtaagagacaataagtg

SEQ ID NO: 523911 - DNA, 25 bp, Homo sapien
tcttagaactgtagtgacatggcta

SEQ ID NO: 523912 - DNA, 25 bp, Homo sapien
ccagatcatctagcaacaggtaagt

SEQ ID NO: 523913 - DNA, 25 bp, Homo sapien
catggctacattgtccctgcaccaa

SEQ ID NO: 523914 - DNA, 25 bp, Homo sapien
gatggcaaacgtgagactgataata

SEQ ID NO: 523915 - DNA, 25 bp, Homo sapien
tgaatagaaaaatcataataaagtc

SEQ ID NO: 523916 - DNA, 25 bp, Homo sapien
ggaaataattttctgatatgaatag

SEQ ID NO: 523917 - DNA, 25 bp, Homo sapien
ttcaataaagtttctctcattgtct

SEQ ID NO: 523918 - DNA, 25 bp, Homo sapien
atgaaattttctctgaatctcatac

SEQ ID NO: 523919 - DNA, 25 bp, Homo sapien
atactaggtcgttctgttggacaac

SEQ ID NO: 523920 - DNA, 25 bp, Homo sapien
tcgttcatcctccatgacgttacta

SEQ ID NO: 523921 - DNA, 25 bp, Homo sapien
ccatgacgttactagcaaattcaaa

SEQ ID NO: 523922 - DNA, 25 bp, Homo sapien
gcaaattcaaatactaggtcgttct

SEQ ID NO: 523923 - DNA, 25 bp, Homo sapien
attcacgtatcaggcagcaaaatcc

SEQ ID NO: 523924 - DNA, 25 bp, Homo sapien
aattccaagaagattcacgtatcag

SEQ ID NO: 523925 - DNA, 25 bp, Homo sapien
tcctggttcattgatattctagtca

SEQ ID NO: 523926 - DNA, 25 bp, Homo sapien
tgtggagtaattgtatacccaagtt

SEQ ID NO: 523927 - DNA, 25 bp, Homo sapien
aatttttcttctctcaagcttcttg

SEQ ID NO: 523928 - DNA, 25 bp, Homo sapien
tttttcttctctcaagcttcttggc

SEQ ID NO: 523929 - DNA, 25 bp, Homo sapien
tgaaatttttcttctctcaagcttc

SEQ ID NO: 523930 - DNA, 25 bp, Homo sapien
gaaatttttcttctctcaagcttct

SEQ ID NO: 523931 - DNA, 25 bp, Homo sapien
gtcgtgctcaaattctactacatgg

SEQ ID NO: 523932 - DNA, 25 bp, Homo sapien
acattattgtcgtgctcaaattcta

SEQ ID NO: 523933 - DNA, 25 bp, Homo sapien
aactcaaagaaagctacctagtttg

SEQ ID NO: 523934 - DNA, 25 bp, Homo sapien
caaagaaagctacctagtttgagac

SEQ ID NO: 523935 - DNA, 25 bp, Homo sapien
aaaattcactttcgcctctattagg

SEQ ID NO: 523936 - DNA, 25 bp, Homo sapien
gtattagtaatcacttaatggaacc

SEQ ID NO: 523937 - DNA, 25 bp, Homo sapien
aattatttacccagatagttcaagg

SEQ ID NO: 523938 - DNA, 25 bp, Homo sapien
ctaatatcagggttgaagaatctgc

SEQ ID NO: 523939 - DNA, 25 bp, Homo sapien
tgtcaatctcttatatcttagtctt

SEQ ID NO: 523940 - DNA, 25 bp, Homo sapien
atcttagtcttaggcctataactca

SEQ ID NO: 523941 - DNA, 25 bp, Homo sapien
gaaaatcatactaccttaatattga

SEQ ID NO: 523942 - DNA, 25 bp, Homo sapien
catgcctggcccgttaccacctttt

SEQ ID NO: 523943 - DNA, 25 bp, Homo sapien
gatgtttttacactacgctccctaa

SEQ ID NO: 523944 - DNA, 25 bp, Homo sapien
ggaccttctatcagttagggcaaca

SEQ ID NO: 523945 - DNA, 25 bp, Homo sapien
cgatttgcccaaagtcgcatgagac

SEQ ID NO: 523946 - DNA, 25 bp, Homo sapien
catgtgaggattaggagccaacaaa

SEQ ID NO: 523947 - DNA, 25 bp, Homo sapien
agaatcaagactgacctcttttggt

SEQ ID NO: 523948 - DNA, 25 bp, Homo sapien
cttttggtgatagtacagaaatgta

SEQ ID NO: 523949 - DNA, 25 bp, Homo sapien
acaggcaatccagaaaagtaggttc

SEQ ID NO: 523950 - DNA, 25 bp, Homo sapien
cagaaatgtaatcttcatatatcat

SEQ ID NO: 523951 - DNA, 25 bp, Homo sapien
atcatcttgtcaaaattttgagacc

SEQ ID NO: 523952 - DNA, 25 bp, Homo sapien
catcatcttgtcaaaattttgagac

SEQ ID NO: 523953 - DNA, 25 bp, Homo sapien
ggacctggatactctccatttttgt

SEQ ID NO: 523954 - DNA, 25 bp, Homo sapien
ttcatcatcttgtcaaaattttgag

SEQ ID NO: 523955 - DNA, 25 bp, Homo sapien
caaccaggtgaaaagttccaggact

SEQ ID NO: 523956 - DNA, 25 bp, Homo sapien
caatatgatcaaactaaacagactg

SEQ ID NO: 523957 - DNA, 25 bp, Homo sapien
caaacttctggtgacttaagcaaac

SEQ ID NO: 523958 - DNA, 25 bp, Homo sapien
aagtgcccaggacgttatcaaaagt

SEQ ID NO: 523959 - DNA, 25 bp, Homo sapien
ttgaagaagccgaagtcagccctgc

SEQ ID NO: 523960 - DNA, 25 bp, Homo sapien
gacctttccaactactctctgacaa

SEQ ID NO: 523961 - DNA, 25 bp, Homo sapien
tgtactcactgccaccgaatccaga

SEQ ID NO: 523962 - DNA, 25 bp, Homo sapien
attccttgtgcacaaaacttcctgc

SEQ ID NO: 523963 - DNA, 25 bp, Homo sapien
gtcaaccaaaagatgacagaatgaa

SEQ ID NO: 523964 - DNA, 25 bp, Homo sapien
taaacaagtcaaccaaaagatgaca

SEQ ID NO: 523965 - DNA, 25 bp, Homo sapien
gaaacaatgtaaacagataattaca

SEQ ID NO: 523966 - DNA, 25 bp, Homo sapien
acaagtcaaccaaaagatgacagaa

SEQ ID NO: 523967 - DNA, 25 bp, Homo sapien
tgaatgggttagaagtcatcatcgg

SEQ ID NO: 523968 - DNA, 25 bp, Homo sapien
agtcatcatcggcagatatctgatc

SEQ ID NO: 523969 - DNA, 25 bp, Homo sapien
tagaagtcatcatcggcagatatct

SEQ ID NO: 523970 - DNA, 25 bp, Homo sapien
tgggttagaagtcatcatcggcaga

SEQ ID NO: 523971 - DNA, 25 bp, Homo sapien
caagagggctctgacaatgaggatg

SEQ ID NO: 523972 - DNA, 25 bp, Homo sapien
atcactttgatagcttttaatataa

SEQ ID NO: 523973 - DNA, 25 bp, Homo sapien
aaccaatcttcatacaaactataga

SEQ ID NO: 523974 - DNA, 25 bp, Homo sapien
gaatggtgtgcatatatcactttga

SEQ ID NO: 523975 - DNA, 25 bp, Homo sapien
tatcagagggttaaagaacacattc

SEQ ID NO: 523976 - DNA, 25 bp, Homo sapien
tcaatcaggcatgtgactgaccaca

SEQ ID NO: 523977 - DNA, 25 bp, Homo sapien
cacctatggctgagttgtcccaaaa

SEQ ID NO: 523978 - DNA, 25 bp, Homo sapien
aacagtcaatgagcaacacctatgg

SEQ ID NO: 523979 - DNA, 25 bp, Homo sapien
aaagcaatccgacaagttttagctg

SEQ ID NO: 523980 - DNA, 25 bp, Homo sapien
tctaagggaggcacgcccatgttgc

SEQ ID NO: 523981 - DNA, 25 bp, Homo sapien
tgtctgtgcttcagcttatgagtca

SEQ ID NO: 523982 - DNA, 25 bp, Homo sapien
gagtcatacatgaaaccaagtgttt

SEQ ID NO: 523983 - DNA, 25 bp, Homo sapien
tgattagaccattactaagctcata

SEQ ID NO: 523984 - DNA, 25 bp, Homo sapien
agagtaagaacctacaagggagcaa

SEQ ID NO: 523985 - DNA, 25 bp, Homo sapien
ggcaaggagcaagatctaccttgat

SEQ ID NO: 523986 - DNA, 25 bp, Homo sapien
aatagagtaagaacctacaagggag

SEQ ID NO: 523987 - DNA, 25 bp, Homo sapien
ggagattcacttgttccctggaaag

SEQ ID NO: 523988 - DNA, 25 bp, Homo sapien
tgcaccaagaaacaaggtccgctga

SEQ ID NO: 523989 - DNA, 25 bp, Homo sapien
gagcagtcacgggagattcacttgt

SEQ ID NO: 523990 - DNA, 25 bp, Homo sapien
aaatgactattcagagcccatgcac

SEQ ID NO: 523991 - DNA, 25 bp, Homo sapien
gatcaagttagataaggtctgagaa

SEQ ID NO: 523992 - DNA, 25 bp, Homo sapien
gaaagttttcatggtacagcaaagg

SEQ ID NO: 523993 - DNA, 25 bp, Homo sapien
aagatgaggcataacaacaaagaag

SEQ ID NO: 523994 - DNA, 25 bp, Homo sapien
aatgacagactcttgggacactcca

SEQ ID NO: 523995 - DNA, 25 bp, Homo sapien
tgttaagtcataatgtcctacggac

SEQ ID NO: 523996 - DNA, 25 bp, Homo sapien
cctacggactgatgactgacttggc

SEQ ID NO: 523997 - DNA, 25 bp, Homo sapien
aaacttagtactatggttacaatgc

SEQ ID NO: 523998 - DNA, 25 bp, Homo sapien
gtactatggttacaatgctcataaa

SEQ ID NO: 523999 - DNA, 25 bp, Homo sapien
taaaggaatgtctcaaattctaccc

SEQ ID NO: 524000 - DNA, 25 bp, Homo sapien
tctaccttatcatgccttacctcgg

SEQ ID NO: 524001 - DNA, 25 bp, Homo sapien
gacttattagccataatcattgcca

SEQ ID NO: 524002 - DNA, 25 bp, Homo sapien
ttgttagttcagagcattgtcatgc

SEQ ID NO: 524003 - DNA, 25 bp, Homo sapien
tagaattcttggtttttctgctctg

SEQ ID NO: 524004 - DNA, 25 bp, Homo sapien
ttccagaccctgtgtgcccgggtat

SEQ ID NO: 524005 - DNA, 25 bp, Homo sapien
cattccagaccctgtgtgcccgggt

SEQ ID NO: 524006 - DNA, 25 bp, Homo sapien
tctaagggtcaggaccctcaggctg

SEQ ID NO: 524007 - DNA, 25 bp, Homo sapien
caaggttatgtagcatgttgtcaga

SEQ ID NO: 524008 - DNA, 25 bp, Homo sapien
cattgtggtgcaacaaaactctttt

SEQ ID NO: 524009 - DNA, 25 bp, Homo sapien
cactgactgatctttgggttgcttc

SEQ ID NO: 524010 - DNA, 25 bp, Homo sapien
tattgtaacgctgctaagaacatac

SEQ ID NO: 524011 - DNA, 25 bp, Homo sapien
tcctgacacacccttcaagtagctg

SEQ ID NO: 524012 - DNA, 25 bp, Homo sapien
tttgtgaaatgaactcaggagtgaa

SEQ ID NO: 524013 - DNA, 25 bp, Homo sapien
gaaatagtaaccattatagcataaa

SEQ ID NO: 524014 - DNA, 25 bp, Homo sapien
tgaactcaggagtgaacacttccat

SEQ ID NO: 524015 - DNA, 25 bp, Homo sapien
cagcactgtttgtagaatgtgagac

SEQ ID NO: 524016 - DNA, 25 bp, Homo sapien
taaagtctcttaagtgctggtgaaa

SEQ ID NO: 524017 - DNA, 25 bp, Homo sapien
tcacctgaacccagcatttagaggt

SEQ ID NO: 524018 - DNA, 25 bp, Homo sapien
tgtaaacctacataaacgtgcactt

SEQ ID NO: 524019 - DNA, 25 bp, Homo sapien
gcaaaagcctaaccagccttcaaag

SEQ ID NO: 524020 - DNA, 25 bp, Homo sapien
tgtggaactaactaggagctgaagt

SEQ ID NO: 524021 - DNA, 25 bp, Homo sapien
aactgttgacatgcctctgctcctg

SEQ ID NO: 524022 - DNA, 25 bp, Homo sapien
caaacacttatgacccctggcttag

SEQ ID NO: 524023 - DNA, 25 bp, Homo sapien
tatacaaggtttggtgtgggcatgt

SEQ ID NO: 524024 - DNA, 25 bp, Homo sapien
atttgtatacaaggtttggtgtggg

SEQ ID NO: 524025 - DNA, 25 bp, Homo sapien
tgtatacaaggtttggtgtgggcat

SEQ ID NO: 524026 - DNA, 25 bp, Homo sapien
tacaaggtttggtgtgggcatgttt

SEQ ID NO: 524027 - DNA, 25 bp, Homo sapien
attacacctaacagtagcaaatatt

SEQ ID NO: 524028 - DNA, 25 bp, Homo sapien
tgtatcttctaattacacctaacag

SEQ ID NO: 524029 - DNA, 25 bp, Homo sapien
tcatgtatcttctaattacacctaa

SEQ ID NO: 524030 - DNA, 25 bp, Homo sapien
ttctaattacacctaacagtagcaa

SEQ ID NO: 524031 - DNA, 25 bp, Homo sapien
tgggtaaatccacagcactcagtgt

SEQ ID NO: 524032 - DNA, 25 bp, Homo sapien
cacaagcgttaagaatgaatcctca

SEQ ID NO: 524033 - DNA, 25 bp, Homo sapien
gagcagctctgtcttcgaataccaa

SEQ ID NO: 524034 - DNA, 25 bp, Homo sapien
tgtcactaatttatggcccaagaga

SEQ ID NO: 524035 - DNA, 25 bp, Homo sapien
gtactttccgtgactgcgaccagcg

SEQ ID NO: 524036 - DNA, 25 bp, Homo sapien
ttaagtcaagttgggaagacctcgc

SEQ ID NO: 524037 - DNA, 25 bp, Homo sapien
gaccagcgccccttaagtcaagttg

SEQ ID NO: 524038 - DNA, 25 bp, Homo sapien
catcagagtggtatttttctcctcc

SEQ ID NO: 524039 - DNA, 25 bp, Homo sapien
accaggaatcctaaccgctagacca

SEQ ID NO: 524040 - DNA, 25 bp, Homo sapien
gccacctgggtgaaaaccaggaatc

SEQ ID NO: 524041 - DNA, 25 bp, Homo sapien
gaatcctaaccgctagaccatatgg

SEQ ID NO: 524042 - DNA, 25 bp, Homo sapien
atcctaaccgctagaccatatggga

SEQ ID NO: 524043 - DNA, 25 bp, Homo sapien
cacctctttggagccgggagtaccg

SEQ ID NO: 524044 - DNA, 25 bp, Homo sapien
tggaaccctggacgacttgcagagc

SEQ ID NO: 524045 - DNA, 25 bp, Homo sapien
aacgcggattggatcgtctgggcac

SEQ ID NO: 524046 - DNA, 25 bp, Homo sapien
aaagcgcgagtctgagtggaaccct

SEQ ID NO: 524047 - DNA, 25 bp, Homo sapien
gactttttctactccgctggcaaca

SEQ ID NO: 524048 - DNA, 25 bp, Homo sapien
tcaattgactgtgctccaaccagat

SEQ ID NO: 524049 - DNA, 25 bp, Homo sapien
taactgagagtctgggaggaactac

SEQ ID NO: 524050 - DNA, 25 bp, Homo sapien
cagttttccccagagtagtcttgta

SEQ ID NO: 524051 - DNA, 25 bp, Homo sapien
tgtagacacaagttcttattccagc

SEQ ID NO: 524052 - DNA, 25 bp, Homo sapien
tacagtagactatgagaatgtacca

SEQ ID NO: 524053 - DNA, 25 bp, Homo sapien
tagtttaaccagtcagtcccttaga

SEQ ID NO: 524054 - DNA, 25 bp, Homo sapien
tgtatccatacataaagagcttctt

SEQ ID NO: 524055 - DNA, 25 bp, Homo sapien
taggctctttttaatcaggtgctga

SEQ ID NO: 524056 - DNA, 25 bp, Homo sapien
tgctgatatcaggaccactcaactg

SEQ ID NO: 524057 - DNA, 25 bp, Homo sapien
cagaccagttgactatctagggagt

SEQ ID NO: 524058 - DNA, 25 bp, Homo sapien
caacaggttttacgctctcagctac

SEQ ID NO: 524059 - DNA, 25 bp, Homo sapien
gtatatatgggtaacccttatgaca

SEQ ID NO: 524060 - DNA, 25 bp, Homo sapien
ttatgacatctggacctatgaggtc

SEQ ID NO: 524061 - DNA, 25 bp, Homo sapien
atacattccaagaactgtactaggg

SEQ ID NO: 524062 - DNA, 25 bp, Homo sapien
atcaaccctaccagatatttatgaa

SEQ ID NO: 524063 - DNA, 25 bp, Homo sapien
tattactgcgatcttagtaggtaca

SEQ ID NO: 524064 - DNA, 25 bp, Homo sapien
gctgttcaccatttgatggacacgg

SEQ ID NO: 524065 - DNA, 25 bp, Homo sapien
tggagtactagtatctgagtccctg

SEQ ID NO: 524066 - DNA, 25 bp, Homo sapien
gcttttatacaatctgccaaactgt

SEQ ID NO: 524067 - DNA, 25 bp, Homo sapien
taaatatggtccatgccatgacggc

SEQ ID NO: 524068 - DNA, 25 bp, Homo sapien
gtttaataacagctctaccgcaaag

SEQ ID NO: 524069 - DNA, 25 bp, Homo sapien
ggttgtctggtagaatatgcacatc

SEQ ID NO: 524070 - DNA, 25 bp, Homo sapien
cattgagtgccaatgccgcacctgg

SEQ ID NO: 524071 - DNA, 25 bp, Homo sapien
gcactgtcatgtttcaaccttagag

SEQ ID NO: 524072 - DNA, 25 bp, Homo sapien
gagacatgatcatagctgcagtgag

SEQ ID NO: 524073 - DNA, 25 bp, Homo sapien
tgcagatgatagctgcagccccgaa

SEQ ID NO: 524074 - DNA, 25 bp, Homo sapien
gggatttagtctctgttccaggacc

SEQ ID NO: 524075 - DNA, 25 bp, Homo sapien
tgaaatttatacatgtccagcagaa

SEQ ID NO: 524076 - DNA, 25 bp, Homo sapien
gaagcatgtatcaggtttagatcaa

SEQ ID NO: 524077 - DNA, 25 bp, Homo sapien
aataaatactggacccttagcacag

SEQ ID NO: 524078 - DNA, 25 bp, Homo sapien
tcagtcaccctaatacacatatggt

SEQ ID NO: 524079 - DNA, 25 bp, Homo sapien
catggtcaggagagatacagacagc

SEQ ID NO: 524080 - DNA, 25 bp, Homo sapien
tcctcattgaagacgcaggcttcct

SEQ ID NO: 524081 - DNA, 25 bp, Homo sapien
tcaaactgcaagaggcctaatgtgg

SEQ ID NO: 524082 - DNA, 25 bp, Homo sapien
gagatagtctcgaattaccattagg

SEQ ID NO: 524083 - DNA, 25 bp, Homo sapien
gccagacaggtcaaaggtgacggca

SEQ ID NO: 524084 - DNA, 25 bp, Homo sapien
caaaggtgacggcactttgtaaagg

SEQ ID NO: 524085 - DNA, 25 bp, Homo sapien
gagccagacaggtcaaaggtgacgg

SEQ ID NO: 524086 - DNA, 25 bp, Homo sapien
ccccgagtatggatcacagcagaga

SEQ ID NO: 524087 - DNA, 25 bp, Homo sapien
ctgcagatacaagagagttgctgct

SEQ ID NO: 524088 - DNA, 25 bp, Homo sapien
gtttggcactggcaccagagacttg

SEQ ID NO: 524089 - DNA, 25 bp, Homo sapien
tggcaccagagacttgtacaacagg

SEQ ID NO: 524090 - DNA, 25 bp, Homo sapien
accagagacttgtacaacaggtcac

SEQ ID NO: 524091 - DNA, 25 bp, Homo sapien
tgcagggccccttcaataacgtcca

SEQ ID NO: 524092 - DNA, 25 bp, Homo sapien
gcagggccccttcaataacgtccag

SEQ ID NO: 524093 - DNA, 25 bp, Homo sapien
tggcacactgtctgctcactctcca

SEQ ID NO: 524094 - DNA, 25 bp, Homo sapien
acgtccagactatccaagcgcagga

SEQ ID NO: 524095 - DNA, 25 bp, Homo sapien
cctgggatcgcagcttgcgatggcc

SEQ ID NO: 524096 - DNA, 25 bp, Homo sapien
gcttgcgatggccaaaggcatctgc

SEQ ID NO: 524097 - DNA, 25 bp, Homo sapien
actgtgggtttgtgaatcttcttgg

SEQ ID NO: 524098 - DNA, 25 bp, Homo sapien
cgcggccagcacattgcggttgcag

SEQ ID NO: 524099 - DNA, 25 bp, Homo sapien
ggccgaaactgtgggtttgtgaatc

SEQ ID NO: 524100 - DNA, 25 bp, Homo sapien
cttgaagtagggacatgccgcggcc

SEQ ID NO: 524101 - DNA, 25 bp, Homo sapien
agcgcggggcgtcttcccgggactg

SEQ ID NO: 524102 - DNA, 25 bp, Homo sapien
ggcgagagcgcggggcgtcttcccg

SEQ ID NO: 524103 - DNA, 25 bp, Homo sapien
gcggggcgtcttcccgggactgcat

SEQ ID NO: 524104 - DNA, 25 bp, Homo sapien
gcgagagcgcggggcgtcttcccgg

SEQ ID NO: 524105 - DNA, 25 bp, Homo sapien
ggtggagatggcgacgggcgctgat

SEQ ID NO: 524106 - DNA, 25 bp, Homo sapien
gagaaacgctgcaggacccggctct

SEQ ID NO: 524107 - DNA, 25 bp, Homo sapien
gcgagaaacgctgcaggacccggct

SEQ ID NO: 524108 - DNA, 25 bp, Homo sapien
cctcctcaaccttccctcgctgacg

SEQ ID NO: 524109 - DNA, 25 bp, Homo sapien
aacgctgcaggacccggctctggct

SEQ ID NO: 524110 - DNA, 25 bp, Homo sapien
tccgaagagacagcagcacgagccc

SEQ ID NO: 524111 - DNA, 25 bp, Homo sapien
gcagcacgagcccatttactgaatt

SEQ ID NO: 524112 - DNA, 25 bp, Homo sapien
gacagcagcacgagcccatttactg

SEQ ID NO: 524113 - DNA, 25 bp, Homo sapien
acgagcccatttactgaattcaacc

SEQ ID NO: 524114 - DNA, 25 bp, Homo sapien
tcccgttatcgtttagacagtggct

SEQ ID NO: 524115 - DNA, 25 bp, Homo sapien
cgttatcgtttagacagtggctgac

SEQ ID NO: 524116 - DNA, 25 bp, Homo sapien
cccgttatcgtttagacagtggctg

SEQ ID NO: 524117 - DNA, 25 bp, Homo sapien
ccgttatcgtttagacagtggctga

SEQ ID NO: 524118 - DNA, 25 bp, Homo sapien
actcccgcgtcctttctccgcgtct

SEQ ID NO: 524119 - DNA, 25 bp, Homo sapien
cgctggcttggagccgcagaagccg

SEQ ID NO: 524120 - DNA, 25 bp, Homo sapien
tccgcgtctgctcgccttcacagga

SEQ ID NO: 524121 - DNA, 25 bp, Homo sapien
tcctttctccgcgtctgctcgcctt

SEQ ID NO: 524122 - DNA, 25 bp, Homo sapien
tgttttagctgacgacactcgagag

SEQ ID NO: 524123 - DNA, 25 bp, Homo sapien
ccgagaccgagggaaagaatccgct

SEQ ID NO: 524124 - DNA, 25 bp, Homo sapien
aagaatccgctttgcatgtcgggag

SEQ ID NO: 524125 - DNA, 25 bp, Homo sapien
taatatcgcgatccttctctggtgt

SEQ ID NO: 524126 - DNA, 25 bp, Homo sapien
tcttcacatgagctttcacagagta

SEQ ID NO: 524127 - DNA, 25 bp, Homo sapien
tgcatcagttggattgtttgactcg

SEQ ID NO: 524128 - DNA, 25 bp, Homo sapien
tgtgttttccatgttagggctaaga

SEQ ID NO: 524129 - DNA, 25 bp, Homo sapien
taccactagccctagatgctaaagg

SEQ ID NO: 524130 - DNA, 25 bp, Homo sapien
acttcattaatcttgtgggcagcct

SEQ ID NO: 524131 - DNA, 25 bp, Homo sapien
aaaacttcattaatcttgtgggcag

SEQ ID NO: 524132 - DNA, 25 bp, Homo sapien
taaggatcattagtctttaaagaaa

SEQ ID NO: 524133 - DNA, 25 bp, Homo sapien
ctaaggatcattagtctttaaagaa

SEQ ID NO: 524134 - DNA, 25 bp, Homo sapien
taatccttgttgtagagtgtatcag

SEQ ID NO: 524135 - DNA, 25 bp, Homo sapien
caaaggtttgaatttctcgacatct

SEQ ID NO: 524136 - DNA, 25 bp, Homo sapien
tagccatagttgtataattataccc

SEQ ID NO: 524137 - DNA, 25 bp, Homo sapien
aatacctgttgccaattctttggga

SEQ ID NO: 524138 - DNA, 25 bp, Homo sapien
ttcatagatcatttgaccatcacca

SEQ ID NO: 524139 - DNA, 25 bp, Homo sapien
tcttcatagatcatttgaccatcac

SEQ ID NO: 524140 - DNA, 25 bp, Homo sapien
catagatcatttgaccatcaccatc

SEQ ID NO: 524141 - DNA, 25 bp, Homo sapien
ctcttcatagatcatttgaccatca

SEQ ID NO: 524142 - DNA, 25 bp, Homo sapien
atcaacctcgtcatctgttaaattc

SEQ ID NO: 524143 - DNA, 25 bp, Homo sapien
catcaacctcgtcatctgttaaatt

SEQ ID NO: 524144 - DNA, 25 bp, Homo sapien
ttcatcaacctcgtcatctgttaaa

SEQ ID NO: 524145 - DNA, 25 bp, Homo sapien
tcatcaacctcgtcatctgttaaat

SEQ ID NO: 524146 - DNA, 25 bp, Homo sapien
tgtgggattctgcccaagagacctc

SEQ ID NO: 524147 - DNA, 25 bp, Homo sapien
gtgggattctgcccaagagacctca

SEQ ID NO: 524148 - DNA, 25 bp, Homo sapien
ctgtgggattctgcccaagagacct

SEQ ID NO: 524149 - DNA, 25 bp, Homo sapien
tgggattctgcccaagagacctcat

SEQ ID NO: 524150 - DNA, 25 bp, Homo sapien
gattccttgttgttatagttccatc

SEQ ID NO: 524151 - DNA, 25 bp, Homo sapien
tacagttcctgattccttgttgtta

SEQ ID NO: 524152 - DNA, 25 bp, Homo sapien
tcctgattccttgttgttatagttc

SEQ ID NO: 524153 - DNA, 25 bp, Homo sapien
ttccttgttgttatagttccatcac

SEQ ID NO: 524154 - DNA, 25 bp, Homo sapien
tctgagatgtgaccacgcagccact

SEQ ID NO: 524155 - DNA, 25 bp, Homo sapien
gcagtctgcctttcagtcagttggt

SEQ ID NO: 524156 - DNA, 25 bp, Homo sapien
tgcaagcgctaccagtttctgagat

SEQ ID NO: 524157 - DNA, 25 bp, Homo sapien
atgtgaccacgcagccactcagctt

SEQ ID NO: 524158 - DNA, 25 bp, Homo sapien
taccagcaggtatgaggatttcagt

SEQ ID NO: 524159 - DNA, 25 bp, Homo sapien
tattgtccatatgttcacgccccag

SEQ ID NO: 524160 - DNA, 25 bp, Homo sapien
gcactgatattgaccttttgctcat

SEQ ID NO: 524161 - DNA, 25 bp, Homo sapien
aagagtcatctctgttatagcatgc

SEQ ID NO: 524162 - DNA, 25 bp, Homo sapien
aatgttccaatgaggtcataacaag

SEQ ID NO: 524163 - DNA, 25 bp, Homo sapien
gtcaaaggggtaatgttccaatgag

SEQ ID NO: 524164 - DNA, 25 bp, Homo sapien
gattctcggtgtgacattactgtac

SEQ ID NO: 524165 - DNA, 25 bp, Homo sapien
cagagtgtactctgaaataggtcga

SEQ ID NO: 524166 - DNA, 25 bp, Homo sapien
aataaatgccctgtacatcaagctg

SEQ ID NO: 524167 - DNA, 25 bp, Homo sapien
cagtgagctgttaggtcaactcgtg

SEQ ID NO: 524168 - DNA, 25 bp, Homo sapien
ttttaagacaaatcatgaccagtgg

SEQ ID NO: 524169 - DNA, 25 bp, Homo sapien
tgtagactgttcaaatggccaatca

SEQ ID NO: 524170 - DNA, 25 bp, Homo sapien
ggtcagccatcctacttcactggaa

SEQ ID NO: 524171 - DNA, 25 bp, Homo sapien
gaaacatgtattgctaggtcagcca

SEQ ID NO: 524172 - DNA, 25 bp, Homo sapien
ttgggatagaaaattggtcacatat

SEQ ID NO: 524173 - DNA, 25 bp, Homo sapien
tttttgggatagaaaattggtcaca

SEQ ID NO: 524174 - DNA, 25 bp, Homo sapien
agggtgtttaattcatgacattact

SEQ ID NO: 524175 - DNA, 25 bp, Homo sapien
gtttaattcatgacattactaagaa

SEQ ID NO: 524176 - DNA, 25 bp, Homo sapien
aaatacattccgtagcagtagaaac

SEQ ID NO: 524177 - DNA, 25 bp, Homo sapien
ctttctgtgagcttatgaggccatt

SEQ ID NO: 524178 - DNA, 25 bp, Homo sapien
catggactgtctaaaccttgtagta

SEQ ID NO: 524179 - DNA, 25 bp, Homo sapien
ttaaacaggtcgatttcatggactg

SEQ ID NO: 524180 - DNA, 25 bp, Homo sapien
tcactacgtttaagagaagcacagt

SEQ ID NO: 524181 - DNA, 25 bp, Homo sapien
catttcgctgaggtgctacttgcac

SEQ ID NO: 524182 - DNA, 25 bp, Homo sapien
actgcaaaaggcctaacatggtacc

SEQ ID NO: 524183 - DNA, 25 bp, Homo sapien
caaagaaccctgctgatcctgtgca

SEQ ID NO: 524184 - DNA, 25 bp, Homo sapien
acttaactccagtaatagggtctcg

SEQ ID NO: 524185 - DNA, 25 bp, Homo sapien
tgctgccaactattctgagctggtt

SEQ ID NO: 524186 - DNA, 25 bp, Homo sapien
tgagctggtttatacacccagaggt

SEQ ID NO: 524187 - DNA, 25 bp, Homo sapien
gacacagcaagcgatctgcaagttg

SEQ ID NO: 524188 - DNA, 25 bp, Homo sapien
tgagcagctagatagatgtcatggt

SEQ ID NO: 524189 - DNA, 25 bp, Homo sapien
ctgagcagctagatagatgtcatgg

SEQ ID NO: 524190 - DNA, 25 bp, Homo sapien
aggaggtgacagtcttagtgtgagc

SEQ ID NO: 524191 - DNA, 25 bp, Homo sapien
tgaggaggtgacagtcttagtgtga

SEQ ID NO: 524192 - DNA, 25 bp, Homo sapien
gaggaggtgacagtcttagtgtgag

SEQ ID NO: 524193 - DNA, 25 bp, Homo sapien
aatgtcccccgagtaagggtcatag

SEQ ID NO: 524194 - DNA, 25 bp, Homo sapien
ccccgagtaagggtcatagcagaga

SEQ ID NO: 524195 - DNA, 25 bp, Homo sapien
gtcaaaggggatggcattgtgtaaa

SEQ ID NO: 524196 - DNA, 25 bp, Homo sapien
cgagtaagggtcatagcagagaaag

SEQ ID NO: 524197 - DNA, 25 bp, Homo sapien
ctgcagatacaagagagttgctgct

SEQ ID NO: 524198 - DNA, 25 bp, Homo sapien
gcagggccccttcaataacgtccag

SEQ ID NO: 524199 - DNA, 25 bp, Homo sapien
ccaggcagtacttcttcacgatggg

SEQ ID NO: 524200 - DNA, 25 bp, Homo sapien
taagtagtcctgatcttcttcagtg

SEQ ID NO: 524201 - DNA, 25 bp, Homo sapien
ttcttcagtgaagtgcatccagcgc

SEQ ID NO: 524202 - DNA, 25 bp, Homo sapien
tatgtccagactatccaggcgtagg

SEQ ID NO: 524203 - DNA, 25 bp, Homo sapien
tgcgattgcaggaaaagaggcgacc

SEQ ID NO: 524204 - DNA, 25 bp, Homo sapien
cttgaagtagggacacgcagctgct

SEQ ID NO: 524205 - DNA, 25 bp, Homo sapien
aattgaacccattcggctgagctgc

SEQ ID NO: 524206 - DNA, 25 bp, Homo sapien
tcgctgacgctaagacaagccgcgt

SEQ ID NO: 524207 - DNA, 25 bp, Homo sapien
cgctgacgctaagacaagccgcgtc

SEQ ID NO: 524208 - DNA, 25 bp, Homo sapien
ggtgaggcctccctttattgcatag

SEQ ID NO: 524209 - DNA, 25 bp, Homo sapien
aattcagccctatcccgcggtgagg

SEQ ID NO: 524210 - DNA, 25 bp, Homo sapien
ggcacgggccgcacttctgaattca

SEQ ID NO: 524211 - DNA, 25 bp, Homo sapien
aacagactgcggcacgggccgcact

SEQ ID NO: 524212 - DNA, 25 bp, Homo sapien
tagttcagtcataaagcaaggttct

SEQ ID NO: 524213 - DNA, 25 bp, Homo sapien
tatcaacagatgtggtcttccatac

SEQ ID NO: 524214 - DNA, 25 bp, Homo sapien
tcaaggatttcagcatgctggagtc

SEQ ID NO: 524215 - DNA, 25 bp, Homo sapien
atacccctggaacttgagtgcctct

SEQ ID NO: 524216 - DNA, 25 bp, Homo sapien
gtatcccatccaattcagcgtcagg

SEQ ID NO: 524217 - DNA, 25 bp, Homo sapien
cccggtttctacagattggtgttca

SEQ ID NO: 524218 - DNA, 25 bp, Homo sapien
tcagagtttaggcttcagtaccatt

SEQ ID NO: 524219 - DNA, 25 bp, Homo sapien
gaggtatctcattggtactgctcca

SEQ ID NO: 524220 - DNA, 25 bp, Homo sapien
ttcttcgtccattcagctgttgatg

SEQ ID NO: 524221 - DNA, 25 bp, Homo sapien
ttgatggacactttggacactgttc

SEQ ID NO: 524222 - DNA, 25 bp, Homo sapien
ttttcttcgtccattcagctgttga

SEQ ID NO: 524223 - DNA, 25 bp, Homo sapien
cataagtttacctctgtgcctggct

SEQ ID NO: 524224 - DNA, 25 bp, Homo sapien
ttctgtgatattttcgctttcaaga

SEQ ID NO: 524225 - DNA, 25 bp, Homo sapien
cgtggtgttctatagcctttttgta

SEQ ID NO: 524226 - DNA, 25 bp, Homo sapien
ttttgtattgaatatcagtatcttc

SEQ ID NO: 524227 - DNA, 25 bp, Homo sapien
ggtagtcatctttgggttagattgg

SEQ ID NO: 524228 - DNA, 25 bp, Homo sapien
tcaaagggctttactgtctgtaccc

SEQ ID NO: 524229 - DNA, 25 bp, Homo sapien
gtctgtacccagatgctcattgtta

SEQ ID NO: 524230 - DNA, 25 bp, Homo sapien
gctcattgttattgaatgactcata

SEQ ID NO: 524231 - DNA, 25 bp, Homo sapien
ttatatagtgtggaattcatacagc

SEQ ID NO: 524232 - DNA, 25 bp, Homo sapien
tataaagagaacaagtgacttgtcc

SEQ ID NO: 524233 - DNA, 25 bp, Homo sapien
tcttaggtcaggaaatgtgacttcg

SEQ ID NO: 524234 - DNA, 25 bp, Homo sapien
cagtctgcctcttgatataggtcca

SEQ ID NO: 524235 - DNA, 25 bp, Homo sapien
tacaggcataagcatccactatagg

SEQ ID NO: 524236 - DNA, 25 bp, Homo sapien
ctgctgattgaagcagtctctgaat

SEQ ID NO: 524237 - DNA, 25 bp, Homo sapien
ttttgctgatttaaggtgttcatcc

SEQ ID NO: 524238 - DNA, 25 bp, Homo sapien
gattgaagcagtctctgaattagct

SEQ ID NO: 524239 - DNA, 25 bp, Homo sapien
ttaaggtgttcatccaaaagttcag

SEQ ID NO: 524240 - DNA, 25 bp, Homo sapien
ctaccacccgtggaatgagactgag

SEQ ID NO: 524241 - DNA, 25 bp, Homo sapien
caaggataggaatgtggaatgtgca

SEQ ID NO: 524242 - DNA, 25 bp, Homo sapien
gaagtcataatgagaataccaggtg

SEQ ID NO: 524243 - DNA, 25 bp, Homo sapien
tgatctcacagaatccaaggatagg

SEQ ID NO: 524244 - DNA, 25 bp, Homo sapien
tcctgggtgaaattatatgtccgaa

SEQ ID NO: 524245 - DNA, 25 bp, Homo sapien
tatgtccgaattcgctctgactggg

SEQ ID NO: 524246 - DNA, 25 bp, Homo sapien
tatcacgaacttcatatgctatcct

SEQ ID NO: 524247 - DNA, 25 bp, Homo sapien
cttcatatgctatcctgtggtcact

SEQ ID NO: 524248 - DNA, 25 bp, Homo sapien
tccccaacacccgatatacacagca

SEQ ID NO: 524249 - DNA, 25 bp, Homo sapien
catggcacaccacagtttgtctcat

SEQ ID NO: 524250 - DNA, 25 bp, Homo sapien
cacagtttgtctcatgctacagtta

SEQ ID NO: 524251 - DNA, 25 bp, Homo sapien
tctggccccagcaattgaaatacat

SEQ ID NO: 524252 - DNA, 25 bp, Homo sapien
tagcactttgttgctgacgcttgtc

SEQ ID NO: 524253 - DNA, 25 bp, Homo sapien
agagtctagctctcaacacacgaaa

SEQ ID NO: 524254 - DNA, 25 bp, Homo sapien
tctagctctcaacacacgaaaggct

SEQ ID NO: 524255 - DNA, 25 bp, Homo sapien
tcttgttggcattctactactagcc

SEQ ID NO: 524256 - DNA, 25 bp, Homo sapien
tgctatagtgctacagaacaccagg

SEQ ID NO: 524257 - DNA, 25 bp, Homo sapien
cagagttttgatcaccttttaccca

SEQ ID NO: 524258 - DNA, 25 bp, Homo sapien
gactaattcctcctatccagctgta

SEQ ID NO: 524259 - DNA, 25 bp, Homo sapien
tggctacatagggtggttttacaac

SEQ ID NO: 524260 - DNA, 25 bp, Homo sapien
gtggacaagtctgacggcactatca

SEQ ID NO: 524261 - DNA, 25 bp, Homo sapien
acaagtctgacggcactatcagttt

SEQ ID NO: 524262 - DNA, 25 bp, Homo sapien
aagtctgacggcactatcagtttta

SEQ ID NO: 524263 - DNA, 25 bp, Homo sapien
ggacaagtctgacggcactatcagt

SEQ ID NO: 524264 - DNA, 25 bp, Homo sapien
ctattcgcaaatccttggggtccaa

SEQ ID NO: 524265 - DNA, 25 bp, Homo sapien
aatgtatctattcgcaaatccttgg

SEQ ID NO: 524266 - DNA, 25 bp, Homo sapien
gaaatgtatctattcgcaaatcctt

SEQ ID NO: 524267 - DNA, 25 bp, Homo sapien
ctcgaaatgtatctattcgcaaatc

SEQ ID NO: 524268 - DNA, 25 bp, Homo sapien
ctacactccgtgaatactttaatat

SEQ ID NO: 524269 - DNA, 25 bp, Homo sapien
tactggtgcgcactaccgtgccatg

SEQ ID NO: 524270 - DNA, 25 bp, Homo sapien
gactaagagaagtaacttataccaa

SEQ ID NO: 524271 - DNA, 25 bp, Homo sapien
ccattccaatgggatgctatttttt

SEQ ID NO: 524272 - DNA, 25 bp, Homo sapien
gatgcgctgaactcggtgaatccca

SEQ ID NO: 524273 - DNA, 25 bp, Homo sapien
gacatcgttcctgtgtgaatgcgct

SEQ ID NO: 524274 - DNA, 25 bp, Homo sapien
gaatgcgctgcatccttgaggacag

SEQ ID NO: 524275 - DNA, 25 bp, Homo sapien
aaatgcttatagacaccgtcaccgg

SEQ ID NO: 524276 - DNA, 25 bp, Homo sapien
ttacaagtacgcactgccacgcctg

SEQ ID NO: 524277 - DNA, 25 bp, Homo sapien
cacacccagcccttagtctttaact

SEQ ID NO: 524278 - DNA, 25 bp, Homo sapien
ctttaactttaaagatatatgagta

SEQ ID NO: 524279 - DNA, 25 bp, Homo sapien
ttgtagtagacatggtggccaggct

SEQ ID NO: 524280 - DNA, 25 bp, Homo sapien
agatacgtatctaagttcctcaggg

SEQ ID NO: 524281 - DNA, 25 bp, Homo sapien
tatggttctaatcaagatcagaggt

SEQ ID NO: 524282 - DNA, 25 bp, Homo sapien
tgattgatgagcctatgccacagtg

SEQ ID NO: 524283 - DNA, 25 bp, Homo sapien
caactctgctataatagtaagccac

SEQ ID NO: 524284 - DNA, 25 bp, Homo sapien
gtatctcctacaggcaaattcctca

SEQ ID NO: 524285 - DNA, 25 bp, Homo sapien
tctcctacaggcaaattcctcaata

SEQ ID NO: 524286 - DNA, 25 bp, Homo sapien
cctacaggcaaattcctcaatatgc

SEQ ID NO: 524287 - DNA, 25 bp, Homo sapien
tcctacaggcaaattcctcaatatg

SEQ ID NO: 524288 - DNA, 25 bp, Homo sapien
gcacgaataattctggtacatgtca

SEQ ID NO: 524289 - DNA, 25 bp, Homo sapien
ttgccagtgtttatagcacgaataa

SEQ ID NO: 524290 - DNA, 25 bp, Homo sapien
ttctcgggtaaattgttggcagatg

SEQ ID NO: 524291 - DNA, 25 bp, Homo sapien
tggtacatgtcaaatatttctcggg

SEQ ID NO: 524292 - DNA, 25 bp, Homo sapien
ccttccagctgtcacctctaaaata

SEQ ID NO: 524293 - DNA, 25 bp, Homo sapien
tccagctgtcacctctaaaataaca

SEQ ID NO: 524294 - DNA, 25 bp, Homo sapien
atttctcctttggcacaaggctctg

SEQ ID NO: 524295 - DNA, 25 bp, Homo sapien
agctgtcacctctaaaataacatca

SEQ ID NO: 524296 - DNA, 25 bp, Homo sapien
cattctcattctgcagcaaattaca

SEQ ID NO: 524297 - DNA, 25 bp, Homo sapien
tatgagcaccgaagcagagtctagc

SEQ ID NO: 524298 - DNA, 25 bp, Homo sapien
caggagaccagcttgatcacttatc

SEQ ID NO: 524299 - DNA, 25 bp, Homo sapien
tattgaaactagtcgacctctgaaa

SEQ ID NO: 524300 - DNA, 25 bp, Homo sapien
gcctttcttccagtgcaagttcttg

SEQ ID NO: 524301 - DNA, 25 bp, Homo sapien
gattttttgatcaatggtttgcctt

SEQ ID NO: 524302 - DNA, 25 bp, Homo sapien
ttttgatcaatggtttgcctttctt

SEQ ID NO: 524303 - DNA, 25 bp, Homo sapien
ttcttccagtgcaagttcttgtaac

SEQ ID NO: 524304 - DNA, 25 bp, Homo sapien
aaggttaaagtgagctatgattaca

SEQ ID NO: 524305 - DNA, 25 bp, Homo sapien
caagaggtgccaactcagcatgcct

SEQ ID NO: 524306 - DNA, 25 bp, Homo sapien
ggatatgctgcagacattgctcaag

SEQ ID NO: 524307 - DNA, 25 bp, Homo sapien
gaccttcggttttcctcattcacag

SEQ ID NO: 524308 - DNA, 25 bp, Homo sapien
tcttgatggcaatatctcctggacc

SEQ ID NO: 524309 - DNA, 25 bp, Homo sapien
tctagaattgagtgtgtaaacaagc

SEQ ID NO: 524310 - DNA, 25 bp, Homo sapien
gggacaataccaagacttcgtctca

SEQ ID NO: 524311 - DNA, 25 bp, Homo sapien
taaggcggttcataaagtcattttc

SEQ ID NO: 524312 - DNA, 25 bp, Homo sapien
gatacatgcataataaacctggaag

SEQ ID NO: 524313 - DNA, 25 bp, Homo sapien
tattcagtcggctggatggagacag

SEQ ID NO: 524314 - DNA, 25 bp, Homo sapien
taagttgcctgttcaggactcagta

SEQ ID NO: 524315 - DNA, 25 bp, Homo sapien
cactctcaattgtgcaatcactttt

SEQ ID NO: 524316 - DNA, 25 bp, Homo sapien
gctggtattagaatgtaagttgcct

SEQ ID NO: 524317 - DNA, 25 bp, Homo sapien
gaccaagaaagtagggctggtgaaa

SEQ ID NO: 524318 - DNA, 25 bp, Homo sapien
tagggctggtgaaaagctctacagt

SEQ ID NO: 524319 - DNA, 25 bp, Homo sapien
aagttcaagtattaatagaccaaga

SEQ ID NO: 524320 - DNA, 25 bp, Homo sapien
tctacaatataaggtatacatgtaa

SEQ ID NO: 524321 - DNA, 25 bp, Homo sapien
caaaatgtgccgagcacagtggctc

SEQ ID NO: 524322 - DNA, 25 bp, Homo sapien
aattagctgagcgtgatggcacaca

SEQ ID NO: 524323 - DNA, 25 bp, Homo sapien
acgcctgtaatcctaccactttggg

SEQ ID NO: 524324 - DNA, 25 bp, Homo sapien
aggccgaggcgggcagatcatctga

SEQ ID NO: 524325 - DNA, 25 bp, Homo sapien
atcgcaccactgcaaccagcgtggg

SEQ ID NO: 524326 - DNA, 25 bp, Homo sapien
tgcaaccagcgtgggcgacaaagca

SEQ ID NO: 524327 - DNA, 25 bp, Homo sapien
tcgcaccactgcaaccagcgtgggc

SEQ ID NO: 524328 - DNA, 25 bp, Homo sapien
cactgcaaccagcgtgggcgacaaa

SEQ ID NO: 524329 - DNA, 25 bp, Homo sapien
ttcttgcacatgtagcatggaatac

SEQ ID NO: 524330 - DNA, 25 bp, Homo sapien
ttcagtgttttccaagtttcttgca

SEQ ID NO: 524331 - DNA, 25 bp, Homo sapien
tccaagtttcttgcacatgtagcat

SEQ ID NO: 524332 - DNA, 25 bp, Homo sapien
tgcacatgtagcatggaatactttc

SEQ ID NO: 524333 - DNA, 25 bp, Homo sapien
tatgtttgtacgaatacttattgct

SEQ ID NO: 524334 - DNA, 25 bp, Homo sapien
gtgtatccatttgctaacagacaga

SEQ ID NO: 524335 - DNA, 25 bp, Homo sapien
ccccgtatttcaagcacgttagaga

SEQ ID NO: 524336 - DNA, 25 bp, Homo sapien
gaataaaaggatgacaaatatatgt

SEQ ID NO: 524337 - DNA, 25 bp, Homo sapien
cagcacgggcaaaccatgctgtgta

SEQ ID NO: 524338 - DNA, 25 bp, Homo sapien
tgtaggcaggtcagaagcgacagcc

SEQ ID NO: 524339 - DNA, 25 bp, Homo sapien
tctccattacccatcacagtaacag

SEQ ID NO: 524340 - DNA, 25 bp, Homo sapien
gtgattccataaagaggcaatacag

SEQ ID NO: 524341 - DNA, 25 bp, Homo sapien
taccgctctccggaggagttgtcct

SEQ ID NO: 524342 - DNA, 25 bp, Homo sapien
cacttcttccgggttaacgcacgct

SEQ ID NO: 524343 - DNA, 25 bp, Homo sapien
tctctttactgaggtcggaaccttc

SEQ ID NO: 524344 - DNA, 25 bp, Homo sapien
gagatcacgttcacttcctggttca

SEQ ID NO: 524345 - DNA, 25 bp, Homo sapien
aaaacgagaatgaaattgtcatcag

SEQ ID NO: 524346 - DNA, 25 bp, Homo sapien
acaaaacgagaatgaaattgtcatc

SEQ ID NO: 524347 - DNA, 25 bp, Homo sapien
aaatgacaaaacgagaatgaaattg

SEQ ID NO: 524348 - DNA, 25 bp, Homo sapien
tgacaaaacgagaatgaaattgtca

SEQ ID NO: 524349 - DNA, 25 bp, Homo sapien
cgtgagcccagagcggggatggaga

SEQ ID NO: 524350 - DNA, 25 bp, Homo sapien
gcgtgagcccagagcggggatggag

SEQ ID NO: 524351 - DNA, 25 bp, Homo sapien
ccctggagagaccattataatttct

SEQ ID NO: 524352 - DNA, 25 bp, Homo sapien
tttttacatcaagcccaatccctgg

SEQ ID NO: 524353 - DNA, 25 bp, Homo sapien
gggaaacaaaacttatatgagctga

SEQ ID NO: 524354 - DNA, 25 bp, Homo sapien
gcatcaggctacaacaaacagaact

SEQ ID NO: 524355 - DNA, 25 bp, Homo sapien
ttaagatgtagctatttccattaaa

SEQ ID NO: 524356 - DNA, 25 bp, Homo sapien
tttagttatgaaaactatgatagtc

SEQ ID NO: 524357 - DNA, 25 bp, Homo sapien
atttaagatgtagctatttccatta

SEQ ID NO: 524358 - DNA, 25 bp, Homo sapien
ctaaatttaagatgtagctatttcc

SEQ ID NO: 524359 - DNA, 25 bp, Homo sapien
aacgttcctttctgttgattccagg

SEQ ID NO: 524360 - DNA, 25 bp, Homo sapien
caaacgttcctttctgttgattcca

SEQ ID NO: 524361 - DNA, 25 bp, Homo sapien
tggaagcctcccttctagttcctga

SEQ ID NO: 524362 - DNA, 25 bp, Homo sapien
tgattctgtctttgaagcctgctac

SEQ ID NO: 524363 - DNA, 25 bp, Homo sapien
gggcagagaactgctcagatagctt

SEQ ID NO: 524364 - DNA, 25 bp, Homo sapien
cagagaactgctcagatagctttgt

SEQ ID NO: 524365 - DNA, 25 bp, Homo sapien
ggcagagaactgctcagatagcttt

SEQ ID NO: 524366 - DNA, 25 bp, Homo sapien
gcagagaactgctcagatagctttg

SEQ ID NO: 524367 - DNA, 25 bp, Homo sapien
ttttaaagcgccaatctccttattc

SEQ ID NO: 524368 - DNA, 25 bp, Homo sapien
gtttctcaatcgtgtctttaacaac

SEQ ID NO: 524369 - DNA, 25 bp, Homo sapien
cctggctaaaaactgcagataggtg

SEQ ID NO: 524370 - DNA, 25 bp, Homo sapien
tcgtgtctttaacaacattaagatc

SEQ ID NO: 524371 - DNA, 25 bp, Homo sapien
aaatgatgcaagactcacaagggag

SEQ ID NO: 524372 - DNA, 25 bp, Homo sapien
caagactcacaagggagaagcatat

SEQ ID NO: 524373 - DNA, 25 bp, Homo sapien
actcacaagggagaagcatattaaa

SEQ ID NO: 524374 - DNA, 25 bp, Homo sapien
tgcaagactcacaagggagaagcat

SEQ ID NO: 524375 - DNA, 25 bp, Homo sapien
ttacagatagaatgggggcataatc

SEQ ID NO: 524376 - DNA, 25 bp, Homo sapien
gacaatagtgataatgcattgggaa

SEQ ID NO: 524377 - DNA, 25 bp, Homo sapien
gaaatgcattgggtgtaacactgat

SEQ ID NO: 524378 - DNA, 25 bp, Homo sapien
cattgggtgtaacactgattagtag

SEQ ID NO: 524379 - DNA, 25 bp, Homo sapien
ttgtagctccatctccaaccaccac

SEQ ID NO: 524380 - DNA, 25 bp, Homo sapien
caaccaccacacacttgatggcttg

SEQ ID NO: 524381 - DNA, 25 bp, Homo sapien
aaccaccacacacttgatggcttgc

SEQ ID NO: 524382 - DNA, 25 bp, Homo sapien
tagctccatctccaaccaccacaca

SEQ ID NO: 524383 - DNA, 25 bp, Homo sapien
ctgggtcactcgctgggccctggca

SEQ ID NO: 524384 - DNA, 25 bp, Homo sapien
gatagaagcatggtaggcaggtgca

SEQ ID NO: 524385 - DNA, 25 bp, Homo sapien
ctaaggcaagaagtggtgggataga

SEQ ID NO: 524386 - DNA, 25 bp, Homo sapien
tggtgggatagaagcatggtaggca

SEQ ID NO: 524387 - DNA, 25 bp, Homo sapien
atggggtgccaaggtcgttgtccat

SEQ ID NO: 524388 - DNA, 25 bp, Homo sapien
agcccaggggaagcgtgtcctgctc

SEQ ID NO: 524389 - DNA, 25 bp, Homo sapien
gccgctggccaaaaagcggagccca

SEQ ID NO: 524390 - DNA, 25 bp, Homo sapien
tgctcagaccgccttccttctccat

SEQ ID NO: 524391 - DNA, 25 bp, Homo sapien
tctccattgccacccgtgccgaaca

SEQ ID NO: 524392 - DNA, 25 bp, Homo sapien
catcttggtgagtggccgtaggccg

SEQ ID NO: 524393 - DNA, 25 bp, Homo sapien
tgccgcccaaggagagcaacctctt

SEQ ID NO: 524394 - DNA, 25 bp, Homo sapien
acgatgccgaacgtgctgctgccgc

SEQ ID NO: 524395 - DNA, 25 bp, Homo sapien
ggagagcaacctcttcaaacgcatc

SEQ ID NO: 524396 - DNA, 25 bp, Homo sapien
ccgctgcccaccgctctttgtttac

SEQ ID NO: 524397 - DNA, 25 bp, Homo sapien
tccgctgcccaccgctctttgttta

SEQ ID NO: 524398 - DNA, 25 bp, Homo sapien
tgccgagccgctcctccgtgcgctt

SEQ ID NO: 524399 - DNA, 25 bp, Homo sapien
gctctccgcagtgcccgggcacagc

SEQ ID NO: 524400 - DNA, 25 bp, Homo sapien
tttccagaaacttcacgccgctctc

SEQ ID NO: 524401 - DNA, 25 bp, Homo sapien
ttcctttccgcggtcttctgcggct

SEQ ID NO: 524402 - DNA, 25 bp, Homo sapien
gaatatttgacttgaagtgcgtttc

SEQ ID NO: 524403 - DNA, 25 bp, Homo sapien
tgtttgctttttagtcgcacaggcc

SEQ ID NO: 524404 - DNA, 25 bp, Homo sapien
gaagtgcgtttctgagttgtcacca

SEQ ID NO: 524405 - DNA, 25 bp, Homo sapien
tgagtaattaaagccgcgtggactg

SEQ ID NO: 524406 - DNA, 25 bp, Homo sapien
taggcacttaaatcttggtcttaaa

SEQ ID NO: 524407 - DNA, 25 bp, Homo sapien
cgaaaataggcacttaaatcttggt

SEQ ID NO: 524408 - DNA, 25 bp, Homo sapien
atttcgaaaataggcacttaaatct

SEQ ID NO: 524409 - DNA, 25 bp, Homo sapien
tggtcttaaattagaaagataatta

SEQ ID NO: 524410 - DNA, 25 bp, Homo sapien
acaggcgccatgccaatctcttact

SEQ ID NO: 524411 - DNA, 25 bp, Homo sapien
ttcacaggcgccatgccaatctctt

SEQ ID NO: 524412 - DNA, 25 bp, Homo sapien
ggcgccatgccaatctcttactgtt

SEQ ID NO: 524413 - DNA, 25 bp, Homo sapien
aggcgccatgccaatctcttactgt

SEQ ID NO: 524414 - DNA, 25 bp, Homo sapien
gaaatgtgctccaagttcacaaggg

SEQ ID NO: 524415 - DNA, 25 bp, Homo sapien
ttcacaagggtaggaaatagcatgc

SEQ ID NO: 524416 - DNA, 25 bp, Homo sapien
taatggaacagggtagaaagctcag

SEQ ID NO: 524417 - DNA, 25 bp, Homo sapien
taatctcaaagaagctgcaaagtgg

SEQ ID NO: 524418 - DNA, 25 bp, Homo sapien
catctgccatggaaaatctaaatga

SEQ ID NO: 524419 - DNA, 25 bp, Homo sapien
ggaaggaacatctgccatggaaaat

SEQ ID NO: 524420 - DNA, 25 bp, Homo sapien
gcatttcagcttatcagcgtctggg

SEQ ID NO: 524421 - DNA, 25 bp, Homo sapien
cagaatgcatttcagcttatcagcg

SEQ ID NO: 524422 - DNA, 25 bp, Homo sapien
acatactgcatgagaaagatgaccc

SEQ ID NO: 524423 - DNA, 25 bp, Homo sapien
gatgacccttcgtgcctatgttgac

SEQ ID NO: 524424 - DNA, 25 bp, Homo sapien
tatttcaaggctgctagatcagcga

SEQ ID NO: 524425 - DNA, 25 bp, Homo sapien
tgagataactgatgaccaattcgac

SEQ ID NO: 524426 - DNA, 25 bp, Homo sapien
tctgaaacgtaacgctacctctctt

SEQ ID NO: 524427 - DNA, 25 bp, Homo sapien
catagtaatcttccagacattgtga

SEQ ID NO: 524428 - DNA, 25 bp, Homo sapien
tgtttttatagtgtctaatcatagt

SEQ ID NO: 524429 - DNA, 25 bp, Homo sapien
taatgaggattttctgaaacgtaac

SEQ ID NO: 524430 - DNA, 25 bp, Homo sapien
gatggcctgtcataacctgcttcct

SEQ ID NO: 524431 - DNA, 25 bp, Homo sapien
ggcattattttagactgaggcagct

SEQ ID NO: 524432 - DNA, 25 bp, Homo sapien
gtgaatgaagtcgacaatcctaatg

SEQ ID NO: 524433 - DNA, 25 bp, Homo sapien
taaagtggttattaactgcgagctt

SEQ ID NO: 524434 - DNA, 25 bp, Homo sapien
gctggtttgcctgtcagtcatggaa

SEQ ID NO: 524435 - DNA, 25 bp, Homo sapien
tactgaggtgtgcttcaagggagca

SEQ ID NO: 524436 - DNA, 25 bp, Homo sapien
tcgctgtaaaataatgccaacctag

SEQ ID NO: 524437 - DNA, 25 bp, Homo sapien
tctcccagtcttaaaagcccacagg

SEQ ID NO: 524438 - DNA, 25 bp, Homo sapien
gatgggaaatggacatacttagaaa

SEQ ID NO: 524439 - DNA, 25 bp, Homo sapien
gcagaaacctaggtttcccagagtg

SEQ ID NO: 524440 - DNA, 25 bp, Homo sapien
agggagattgaaagtggagataata

SEQ ID NO: 524441 - DNA, 25 bp, Homo sapien
gaatggcagaaacctaggtttccca

SEQ ID NO: 524442 - DNA, 25 bp, Homo sapien
gtcttcggcctcctcaacaaaatcc

SEQ ID NO: 524443 - DNA, 25 bp, Homo sapien
ggctctgtcataggcctcgtcttcg

SEQ ID NO: 524444 - DNA, 25 bp, Homo sapien
tgtcataggcctcgtcttcggcctc

SEQ ID NO: 524445 - DNA, 25 bp, Homo sapien
tgggggctctgtcataggcctcgtc

SEQ ID NO: 524446 - DNA, 25 bp, Homo sapien
gacgaggtcgttcacgttgctctca

SEQ ID NO: 524447 - DNA, 25 bp, Homo sapien
tcagagacgaggtcgttcacgttgc

SEQ ID NO: 524448 - DNA, 25 bp, Homo sapien
cagagacgaggtcgttcacgttgct

SEQ ID NO: 524449 - DNA, 25 bp, Homo sapien
gagacgaggtcgttcacgttgctct

SEQ ID NO: 524450 - DNA, 25 bp, Homo sapien
ctagtccatgccctcgcctgtgtac

SEQ ID NO: 524451 - DNA, 25 bp, Homo sapien
tatccgaccatggaagacagcagcc

SEQ ID NO: 524452 - DNA, 25 bp, Homo sapien
cgagctattgccaatgaaggtgact

SEQ ID NO: 524453 - DNA, 25 bp, Homo sapien
gaaggccttcctgccgaacatggca

SEQ ID NO: 524454 - DNA, 25 bp, Homo sapien
tcctggatggccgagctattgccaa

SEQ ID NO: 524455 - DNA, 25 bp, Homo sapien
agaggttctctaaaggcagggtcca

SEQ ID NO: 524456 - DNA, 25 bp, Homo sapien
ggctaagctcacagcaggtactcat

SEQ ID NO: 524457 - DNA, 25 bp, Homo sapien
gcagggtccaggctaagctcacagc

SEQ ID NO: 524458 - DNA, 25 bp, Homo sapien
tccaggctaagctcacagcaggtac

SEQ ID NO: 524459 - DNA, 25 bp, Homo sapien
catgggagggactcagtagttcttc

SEQ ID NO: 524460 - DNA, 25 bp, Homo sapien
gcttgtggtttttcagggagattac

SEQ ID NO: 524461 - DNA, 25 bp, Homo sapien
ggttgcagaaagtatctaccagtag

SEQ ID NO: 524462 - DNA, 25 bp, Homo sapien
tctagatgcaggttcttagatcccc

SEQ ID NO: 524463 - DNA, 25 bp, Homo sapien
gtttggatcatgcactctcgactca

SEQ ID NO: 524464 - DNA, 25 bp, Homo sapien
tgtttggatcatgcactctcgactc

SEQ ID NO: 524465 - DNA, 25 bp, Homo sapien
tttggatcatgcactctcgactcat

SEQ ID NO: 524466 - DNA, 25 bp, Homo sapien
tggccgcaactgattgcaccagggg

SEQ ID NO: 524467 - DNA, 25 bp, Homo sapien
cgcaactgattgcaccagggggagc

SEQ ID NO: 524468 - DNA, 25 bp, Homo sapien
cagcaagcctggtgacaccacctcc

SEQ ID NO: 524469 - DNA, 25 bp, Homo sapien
gcagcaagcctggtgacaccacctc

SEQ ID NO: 524470 - DNA, 25 bp, Homo sapien
ggatgagatggtcactcatcatctc

SEQ ID NO: 524471 - DNA, 25 bp, Homo sapien
gggatgagatggtcactcatcatct

SEQ ID NO: 524472 - DNA, 25 bp, Homo sapien
gagggatgagatggtcactcatcat

SEQ ID NO: 524473 - DNA, 25 bp, Homo sapien
tgagggatgagatggtcactcatca

SEQ ID NO: 524474 - DNA, 25 bp, Homo sapien
tgacactccatttgagtccgggccc

SEQ ID NO: 524475 - DNA, 25 bp, Homo sapien
ggtgacactccatttgagtccgggc

SEQ ID NO: 524476 - DNA, 25 bp, Homo sapien
actccatttgagtccgggccccttg

SEQ ID NO: 524477 - DNA, 25 bp, Homo sapien
ctggtgacactccatttgagtccgg

SEQ ID NO: 524478 - DNA, 25 bp, Homo sapien
gattgtttagctgacagggaccctg

SEQ ID NO: 524479 - DNA, 25 bp, Homo sapien
aagatgggactgttttgtaggctcc

SEQ ID NO: 524480 - DNA, 25 bp, Homo sapien
gagctgggttggatatctacttccc

SEQ ID NO: 524481 - DNA, 25 bp, Homo sapien
tgagccatcatgcaagagctgggtt

SEQ ID NO: 524482 - DNA, 25 bp, Homo sapien
gtgcggccgccgcaggacaccttta

SEQ ID NO: 524483 - DNA, 25 bp, Homo sapien
ttagactgtgctgccgtgcggccgc

SEQ ID NO: 524484 - DNA, 25 bp, Homo sapien
tgaccaccgtgtacatcactgaggc

SEQ ID NO: 524485 - DNA, 25 bp, Homo sapien
gacacctttaatatccctgtttctc

SEQ ID NO: 524486 - DNA, 25 bp, Homo sapien
atcatctgaactgaggtaacctcca

SEQ ID NO: 524487 - DNA, 25 bp, Homo sapien
acacatcatctgaactgaggtaacc

SEQ ID NO: 524488 - DNA, 25 bp, Homo sapien
gatgacacatcatctgaactgaggt

SEQ ID NO: 524489 - DNA, 25 bp, Homo sapien
catcatctgaactgaggtaacctcc

SEQ ID NO: 524490 - DNA, 25 bp, Homo sapien
aactcagcaaacaactgacaggtga

SEQ ID NO: 524491 - DNA, 25 bp, Homo sapien
taaactcagcaaacaactgacaggt

SEQ ID NO: 524492 - DNA, 25 bp, Homo sapien
ccataaactcagcaaacaactgaca

SEQ ID NO: 524493 - DNA, 25 bp, Homo sapien
ataaactcagcaaacaactgacagg

SEQ ID NO: 524494 - DNA, 25 bp, Homo sapien
gggaaatacatgattatcttattgg

SEQ ID NO: 524495 - DNA, 25 bp, Homo sapien
gagtaagagaaaagggtccctgaga

SEQ ID NO: 524496 - DNA, 25 bp, Homo sapien
tagagtaagagaaaagggtccctga

SEQ ID NO: 524497 - DNA, 25 bp, Homo sapien
cagcagggaaatacatgattatctt

SEQ ID NO: 524498 - DNA, 25 bp, Homo sapien
catgatggctgaatgatatagaggg

SEQ ID NO: 524499 - DNA, 25 bp, Homo sapien
aagacaacaaaactaggaagccaca

SEQ ID NO: 524500 - DNA, 25 bp, Homo sapien
gacaacaaaactaggaagccacaga

SEQ ID NO: 524501 - DNA, 25 bp, Homo sapien
acagaaacacgggttcatgatggct

SEQ ID NO: 524502 - DNA, 25 bp, Homo sapien
ctcttccatgcctccaaaaatggca

SEQ ID NO: 524503 - DNA, 25 bp, Homo sapien
ctcaggagcatgtctctcttccatg

SEQ ID NO: 524504 - DNA, 25 bp, Homo sapien
tctctcttccatgcctccaaaaatg

SEQ ID NO: 524505 - DNA, 25 bp, Homo sapien
actcaggagcatgtctctcttccat

SEQ ID NO: 524506 - DNA, 25 bp, Homo sapien
ggacaggaacagcccagtgaggacc

SEQ ID NO: 524507 - DNA, 25 bp, Homo sapien
aggagatgactctgctgtgagactg

SEQ ID NO: 524508 - DNA, 25 bp, Homo sapien
tgactctgctgtgagactggatgtc

SEQ ID NO: 524509 - DNA, 25 bp, Homo sapien
acaggaacagcccagtgaggaccgg

SEQ ID NO: 524510 - DNA, 25 bp, Homo sapien
ctgccgttctggatcctctgtagtt

SEQ ID NO: 524511 - DNA, 25 bp, Homo sapien
tgtgggtctgtagagattgaacacc

SEQ ID NO: 524512 - DNA, 25 bp, Homo sapien
tctgtagagattgaacaccttttgc

SEQ ID NO: 524513 - DNA, 25 bp, Homo sapien
tcctctgtagttctaggaggaggaa

SEQ ID NO: 524514 - DNA, 25 bp, Homo sapien
acccagcatcgtgtctgcattttgg

SEQ ID NO: 524515 - DNA, 25 bp, Homo sapien
cagcatcgtgtctgcattttggata

SEQ ID NO: 524516 - DNA, 25 bp, Homo sapien
ttggatagaagcaattcacaagtaa

SEQ ID NO: 524517 - DNA, 25 bp, Homo sapien
ctgcattttggatagaagcaattca

SEQ ID NO: 524518 - DNA, 25 bp, Homo sapien
atgactccttggaggaagtcgagag

SEQ ID NO: 524519 - DNA, 25 bp, Homo sapien
cccgaactgatgactccttggagga

SEQ ID NO: 524520 - DNA, 25 bp, Homo sapien
actgatgactccttggaggaagtcg

SEQ ID NO: 524521 - DNA, 25 bp, Homo sapien
tgatgactccttggaggaagtcgag

SEQ ID NO: 524522 - DNA, 25 bp, Homo sapien
tctctgcgtgttgcatgacggaggc

SEQ ID NO: 524523 - DNA, 25 bp, Homo sapien
cctctctgcgtgttgcatgacggag

SEQ ID NO: 524524 - DNA, 25 bp, Homo sapien
ctctctgcgtgttgcatgacggagg

SEQ ID NO: 524525 - DNA, 25 bp, Homo sapien
acagagggtgaggattcacaatgac

SEQ ID NO: 524526 - DNA, 25 bp, Homo sapien
cagagggtgaggattcacaatgact

SEQ ID NO: 524527 - DNA, 25 bp, Homo sapien
gaaactgaggttagcccagcacagg

SEQ ID NO: 524528 - DNA, 25 bp, Homo sapien
cgaggtgaaactgaggttagcccag

SEQ ID NO: 524529 - DNA, 25 bp, Homo sapien
tcctcagcaccgtgaccagatacat

SEQ ID NO: 524530 - DNA, 25 bp, Homo sapien
gagtcagggttgacagccaggatga

SEQ ID NO: 524531 - DNA, 25 bp, Homo sapien
ttcctcagcaccgtgaccagataca

SEQ ID NO: 524532 - DNA, 25 bp, Homo sapien
aggtgggagtcagggttgacagcca

SEQ ID NO: 524533 - DNA, 25 bp, Homo sapien
ggacagcaaagcaaggaccggctgc

SEQ ID NO: 524534 - DNA, 25 bp, Homo sapien
gacagcaaagcaaggaccggctgca

SEQ ID NO: 524535 - DNA, 25 bp, Homo sapien
cagcaaagcaaggaccggctgcagt

SEQ ID NO: 524536 - DNA, 25 bp, Homo sapien
agggacagcaaagcaaggaccggct

SEQ ID NO: 524537 - DNA, 25 bp, Homo sapien
gcagcccttcatgctgaatgcaagc

SEQ ID NO: 524538 - DNA, 25 bp, Homo sapien
aaagacaaaaagcagcccttcatgc

SEQ ID NO: 524539 - DNA, 25 bp, Homo sapien
tgtgagactccgtggctctgtgtga

SEQ ID NO: 524540 - DNA, 25 bp, Homo sapien
ataaaagacaaaaagcagcccttca

SEQ ID NO: 524541 - DNA, 25 bp, Homo sapien
tattatcatccttaggtttcctgac

SEQ ID NO: 524542 - DNA, 25 bp, Homo sapien
tttattatcatccttaggtttcctg

SEQ ID NO: 524543 - DNA, 25 bp, Homo sapien
tatttattatcatccttaggtttcc

SEQ ID NO: 524544 - DNA, 25 bp, Homo sapien
tcatatttattatcatccttaggtt

SEQ ID NO: 524545 - DNA, 25 bp, Homo sapien
tatccaaaatgcagacacaatgctg

SEQ ID NO: 524546 - DNA, 25 bp, Homo sapien
tccaaaatgcagacacaatgctggg

SEQ ID NO: 524547 - DNA, 25 bp, Homo sapien
ccaaaatgcagacacaatgctgggt

SEQ ID NO: 524548 - DNA, 25 bp, Homo sapien
ttatatccaaaatgcagacacaatg

SEQ ID NO: 524549 - DNA, 25 bp, Homo sapien
cttttctaggcaaaaggtgtccaat

SEQ ID NO: 524550 - DNA, 25 bp, Homo sapien
tccaatctctacagacccacagaat

SEQ ID NO: 524551 - DNA, 25 bp, Homo sapien
aaaggtgtccaatctctacagaccc

SEQ ID NO: 524552 - DNA, 25 bp, Homo sapien
ggcaaaaggtgtccaatctctacag

SEQ ID NO: 524553 - DNA, 25 bp, Homo sapien
ccgggaatcgaacgcaggcagcagc

SEQ ID NO: 524554 - DNA, 25 bp, Homo sapien
cgggaatcgaacgcaggcagcagcg

SEQ ID NO: 524555 - DNA, 25 bp, Homo sapien
agcggtgagagcaccgaatcctaag

SEQ ID NO: 524556 - DNA, 25 bp, Homo sapien
gcggcttcagcgactcggagagtaa

SEQ ID NO: 524557 - DNA, 25 bp, Homo sapien
gggcccctgacgataatcacgggaa

SEQ ID NO: 524558 - DNA, 25 bp, Homo sapien
ttaagcagcttgtcccgactcagcc

SEQ ID NO: 524559 - DNA, 25 bp, Homo sapien
tgaagctcaacgcagtaggccgagt

SEQ ID NO: 524560 - DNA, 25 bp, Homo sapien
ctggtgatctttctcacaatggaga

SEQ ID NO: 524561 - DNA, 25 bp, Homo sapien
gcacatgggcatgaaggtggttcct

SEQ ID NO: 524562 - DNA, 25 bp, Homo sapien
agggtctctttgtcctgaacaactt

SEQ ID NO: 524563 - DNA, 25 bp, Homo sapien
cacaatggagactaccccagggtct

SEQ ID NO: 524564 - DNA, 25 bp, Homo sapien
gaagtagtagcaggagcaccacaaa

SEQ ID NO: 524565 - DNA, 25 bp, Homo sapien
tccacggagtccaagggtcctgaga

SEQ ID NO: 524566 - DNA, 25 bp, Homo sapien
aagaagtgtcccgtggtcaggtaca

SEQ ID NO: 524567 - DNA, 25 bp, Homo sapien
tagcaggagcaccacaaagaagtgt

SEQ ID NO: 524568 - DNA, 25 bp, Homo sapien
gatgtactagctcaaaggcacccta

SEQ ID NO: 524569 - DNA, 25 bp, Homo sapien
tattgataagtaagctaggcccaga

SEQ ID NO: 524570 - DNA, 25 bp, Homo sapien
cccttagcaggacttagagaatctc

SEQ ID NO: 524571 - DNA, 25 bp, Homo sapien
cttagtagttgactggatggtcccc

SEQ ID NO: 524572 - DNA, 25 bp, Homo sapien
ggtgcagattcactttataggaaca

SEQ ID NO: 524573 - DNA, 25 bp, Homo sapien
tccaacagactctaccccagctctt

SEQ ID NO: 524574 - DNA, 25 bp, Homo sapien
tcactttataggaacagcttcagct

SEQ ID NO: 524575 - DNA, 25 bp, Homo sapien
tgatgaaaaactgaattctccaaca

SEQ ID NO: 524576 - DNA, 25 bp, Homo sapien
gctgatcttgacaaaactttagcaa

SEQ ID NO: 524577 - DNA, 25 bp, Homo sapien
gacacaaaagagctagaagccttca

SEQ ID NO: 524578 - DNA, 25 bp, Homo sapien
ggagacacaaaagagctagaagcct

SEQ ID NO: 524579 - DNA, 25 bp, Homo sapien
aaagagctagaagccttcattgctg

SEQ ID NO: 524580 - DNA, 25 bp, Homo sapien
tgcttgcagcatattagaacagacg

SEQ ID NO: 524581 - DNA, 25 bp, Homo sapien
gctactagaatctgctgccagaggg

SEQ ID NO: 524582 - DNA, 25 bp, Homo sapien
cttcagaaagttccgaggacctgct

SEQ ID NO: 524583 - DNA, 25 bp, Homo sapien
gggacaaagacgtgcactcaacctt

SEQ ID NO: 524584 - DNA, 25 bp, Homo sapien
aagatctaactgtgtttggctgctg

SEQ ID NO: 524585 - DNA, 25 bp, Homo sapien
cttctggaatggaagatctaactgt

SEQ ID NO: 524586 - DNA, 25 bp, Homo sapien
gctgtttcttcacgagctcctggga

SEQ ID NO: 524587 - DNA, 25 bp, Homo sapien
tctggaatggaagatctaactgtgt

SEQ ID NO: 524588 - DNA, 25 bp, Homo sapien
tctcttcatggcttggtatcaagtg

SEQ ID NO: 524589 - DNA, 25 bp, Homo sapien
catgggaagggcccattcccttggg

SEQ ID NO: 524590 - DNA, 25 bp, Homo sapien
ttgcttgtcgacattacagaacagg

SEQ ID NO: 524591 - DNA, 25 bp, Homo sapien
cagcacgacggcctctggaagctcg

SEQ ID NO: 524592 - DNA, 25 bp, Homo sapien
taactggggtttcatgcagcacatg

SEQ ID NO: 524593 - DNA, 25 bp, Homo sapien
gaccccagggttaagggacagcaca

SEQ ID NO: 524594 - DNA, 25 bp, Homo sapien
aagttggacacacttatctggtggg

SEQ ID NO: 524595 - DNA, 25 bp, Homo sapien
taagcttttcctgtcccgtggctgc

SEQ ID NO: 524596 - DNA, 25 bp, Homo sapien
ctctaatgggtgtagggaagtccct

SEQ ID NO: 524597 - DNA, 25 bp, Homo sapien
aatccgctgatgacatcaccaccag

SEQ ID NO: 524598 - DNA, 25 bp, Homo sapien
ctcactgctgaatccgctgatgaca

SEQ ID NO: 524599 - DNA, 25 bp, Homo sapien
gctgatgacatcaccaccagtgtga

SEQ ID NO: 524600 - DNA, 25 bp, Homo sapien
tgctgaatccgctgatgacatcacc

SEQ ID NO: 524601 - DNA, 25 bp, Homo sapien
acacccgacacttcctgccatccac

SEQ ID NO: 524602 - DNA, 25 bp, Homo sapien
ccatccaccccctctgcatggcctg

SEQ ID NO: 524603 - DNA, 25 bp, Homo sapien
cacacccgacacttcctgccatcca

SEQ ID NO: 524604 - DNA, 25 bp, Homo sapien
tcctgccatccaccccctctgcatg

SEQ ID NO: 524605 - DNA, 25 bp, Homo sapien
ctggataactccttcaaagctcagt

SEQ ID NO: 524606 - DNA, 25 bp, Homo sapien
tggataactccttcaaagctcagtt

SEQ ID NO: 524607 - DNA, 25 bp, Homo sapien
atttgttagccaccgggcaatggga

SEQ ID NO: 524608 - DNA, 25 bp, Homo sapien
ggtgcaatttgtctgatcagatttg

SEQ ID NO: 524609 - DNA, 25 bp, Homo sapien
ggtttgttcacatactttggtgcaa

SEQ ID NO: 524610 - DNA, 25 bp, Homo sapien
cgtttacgtggacggacaatgagag

SEQ ID NO: 524611 - DNA, 25 bp, Homo sapien
ttcctcctctcgtacttcgtgtctg

SEQ ID NO: 524612 - DNA, 25 bp, Homo sapien
tcctctcgtacttcgtgtctgaggc

SEQ ID NO: 524613 - DNA, 25 bp, Homo sapien
cctcctctcgtacttcgtgtctgag

SEQ ID NO: 524614 - DNA, 25 bp, Homo sapien
agcttcctcctctcgtacttcgtgt

SEQ ID NO: 524615 - DNA, 25 bp, Homo sapien
aggacagacaccgtgatgccttcta

SEQ ID NO: 524616 - DNA, 25 bp, Homo sapien
caggaatcctctgcaccaggacaga

SEQ ID NO: 524617 - DNA, 25 bp, Homo sapien
ggaatcctctgcaccaggacagaca

SEQ ID NO: 524618 - DNA, 25 bp, Homo sapien
cgtgatgccttctatgaggtgagtg

SEQ ID NO: 524619 - DNA, 25 bp, Homo sapien
caatgtgggtcaaggcaatgggcca

SEQ ID NO: 524620 - DNA, 25 bp, Homo sapien
tccatcaggcgtcacaatgtgggtc

SEQ ID NO: 524621 - DNA, 25 bp, Homo sapien
ggtgccccatggtgatggaaacaag

SEQ ID NO: 524622 - DNA, 25 bp, Homo sapien
gagacccagatggttccatcaggcg

SEQ ID NO: 524623 - DNA, 25 bp, Homo sapien
gctccttggaaaagatggcggatct

SEQ ID NO: 524624 - DNA, 25 bp, Homo sapien
tctgagaacccagtgctcacaggag

SEQ ID NO: 524625 - DNA, 25 bp, Homo sapien
gaaggaagttgtgttacatccatgg

SEQ ID NO: 524626 - DNA, 25 bp, Homo sapien
gataagacgccggactagagggctc

SEQ ID NO: 524627 - DNA, 25 bp, Homo sapien
tcagcagaccacatgtgtaattagc

SEQ ID NO: 524628 - DNA, 25 bp, Homo sapien
gtaattagcatagggaggcttctgg

SEQ ID NO: 524629 - DNA, 25 bp, Homo sapien
ccaggcttctcagacatagccatac

SEQ ID NO: 524630 - DNA, 25 bp, Homo sapien
gccatacgtgaaggaaaagacccac

SEQ ID NO: 524631 - DNA, 25 bp, Homo sapien
acaggcagcccgcattgaggcaggc

SEQ ID NO: 524632 - DNA, 25 bp, Homo sapien
agcatcacagcacagcgcgggagag

SEQ ID NO: 524633 - DNA, 25 bp, Homo sapien
tctgtgtgtactcaccttcccagac

SEQ ID NO: 524634 - DNA, 25 bp, Homo sapien
ttgctggtggctctttacttccgac

SEQ ID NO: 524635 - DNA, 25 bp, Homo sapien
cctgtttgagatgtatgggaaagcc

SEQ ID NO: 524636 - DNA, 25 bp, Homo sapien
tagcattcggcggtacagactagga

SEQ ID NO: 524637 - DNA, 25 bp, Homo sapien
gactaggaagtctacaatgctcaga

SEQ ID NO: 524638 - DNA, 25 bp, Homo sapien
catttttgattgtcgcagcttggag

SEQ ID NO: 524639 - DNA, 25 bp, Homo sapien
gatccacttcttatggctgtgctga

SEQ ID NO: 524640 - DNA, 25 bp, Homo sapien
tgatgggttcccttcaagtactccc

SEQ ID NO: 524641 - DNA, 25 bp, Homo sapien
gaggtcattttgtcgggcacacaga

SEQ ID NO: 524642 - DNA, 25 bp, Homo sapien
cagttcacaggaaagagtgtagtat

SEQ ID NO: 524643 - DNA, 25 bp, Homo sapien
gaagggcacttcctcagattgctgc

SEQ ID NO: 524644 - DNA, 25 bp, Homo sapien
gcagttagaagtgttcccccgacag

SEQ ID NO: 524645 - DNA, 25 bp, Homo sapien
cccacacctctgagtgctcgaatat

SEQ ID NO: 524646 - DNA, 25 bp, Homo sapien
gaggatttgctaaaggttggctgtt

SEQ ID NO: 524647 - DNA, 25 bp, Homo sapien
tggacagggtacaagaagagaagtc

SEQ ID NO: 524648 - DNA, 25 bp, Homo sapien
tgaatgtggacagggtacaagaaga

SEQ ID NO: 524649 - DNA, 25 bp, Homo sapien
acagggtacaagaagagaagtcaca

SEQ ID NO: 524650 - DNA, 25 bp, Homo sapien
aagagagccctgtgaatgtggacag

SEQ ID NO: 524651 - DNA, 25 bp, Homo sapien
tgctatcaatcgtgaagaggagttt

SEQ ID NO: 524652 - DNA, 25 bp, Homo sapien
taaaggtcagcccaagagtgtgtgg

SEQ ID NO: 524653 - DNA, 25 bp, Homo sapien
tatggacctgtacaatttcaataga

SEQ ID NO: 524654 - DNA, 25 bp, Homo sapien
cactggtgccctaacgtttctgatt

SEQ ID NO: 524655 - DNA, 25 bp, Homo sapien
ccagatgatgtgttaaggcaaaagc

SEQ ID NO: 524656 - DNA, 25 bp, Homo sapien
tgagcattacagtttggaccccaaa

SEQ ID NO: 524657 - DNA, 25 bp, Homo sapien
ggaagacccaggaatgccggaatca

SEQ ID NO: 524658 - DNA, 25 bp, Homo sapien
ttacggagcaagtgtaggaagaccc

SEQ ID NO: 524659 - DNA, 25 bp, Homo sapien
ttagacactcgacaacatggtggag

SEQ ID NO: 524660 - DNA, 25 bp, Homo sapien
gaagatctgttgtaaaatctgaggg

SEQ ID NO: 524661 - DNA, 25 bp, Homo sapien
gtatccatggcaacgaaagaccgac

SEQ ID NO: 524662 - DNA, 25 bp, Homo sapien
aatctgagggatatccttggtatcc

SEQ ID NO: 524663 - DNA, 25 bp, Homo sapien
tatgttgtcgccaagtgtttcacct

SEQ ID NO: 524664 - DNA, 25 bp, Homo sapien
cccactggtatttattgtctgatca

SEQ ID NO: 524665 - DNA, 25 bp, Homo sapien
gcaataagaagggatacatgtgagt

SEQ ID NO: 524666 - DNA, 25 bp, Homo sapien
cagtgtagtatctaactatatgtat

SEQ ID NO: 524667 - DNA, 25 bp, Homo sapien
ggttgcttgatcacctaaagagcca

SEQ ID NO: 524668 - DNA, 25 bp, Homo sapien
ctggttgcttgatcacctaaagagc

SEQ ID NO: 524669 - DNA, 25 bp, Homo sapien
gcttgatcacctaaagagccaataa

SEQ ID NO: 524670 - DNA, 25 bp, Homo sapien
gttgcttgatcacctaaagagccaa

SEQ ID NO: 524671 - DNA, 25 bp, Homo sapien
tatcgtgacagatttgcatcactca

SEQ ID NO: 524672 - DNA, 25 bp, Homo sapien
gagcaaacttagcaggatgtattcc

SEQ ID NO: 524673 - DNA, 25 bp, Homo sapien
tttccttgatggcatgttctgtccc

SEQ ID NO: 524674 - DNA, 25 bp, Homo sapien
cactcaagactatgacaaagtactc

SEQ ID NO: 524675 - DNA, 25 bp, Homo sapien
cagaccaatgttgtagccatctcca

SEQ ID NO: 524676 - DNA, 25 bp, Homo sapien
ttttgttcattggaaccagaccaat

SEQ ID NO: 524677 - DNA, 25 bp, Homo sapien
aatttctagtctttgcttattgtcc

SEQ ID NO: 524678 - DNA, 25 bp, Homo sapien
tctccagagtgtccaacgatgtcat

SEQ ID NO: 524679 - DNA, 25 bp, Homo sapien
tatagtcagccctttgcatatgcag

SEQ ID NO: 524680 - DNA, 25 bp, Homo sapien
cagccactgaatgtatgtgcatcaa

SEQ ID NO: 524681 - DNA, 25 bp, Homo sapien
taatgaccccatgtgtgatgccatt

SEQ ID NO: 524682 - DNA, 25 bp, Homo sapien
gaacagaatgcatggtacacagcca

SEQ ID NO: 524683 - DNA, 25 bp, Homo sapien
taacaaagttgtcatagctggtctt

SEQ ID NO: 524684 - DNA, 25 bp, Homo sapien
tgcaagccatgagacataacaaagt

SEQ ID NO: 524685 - DNA, 25 bp, Homo sapien
ctgaagggagcaagggtgaagaaaa

SEQ ID NO: 524686 - DNA, 25 bp, Homo sapien
aaaaagtcgaacactggtctgcaag

SEQ ID NO: 524687 - DNA, 25 bp, Homo sapien
caccaggcgcagacgcttgggtttc

SEQ ID NO: 524688 - DNA, 25 bp, Homo sapien
gaaacggtacatgctaccagacaca

SEQ ID NO: 524689 - DNA, 25 bp, Homo sapien
ggccatccatcctgttgaaacggta

SEQ ID NO: 524690 - DNA, 25 bp, Homo sapien
agcctccattgtgcgctcaagccgg

SEQ ID NO: 524691 - DNA, 25 bp, Homo sapien
tagactatgcagagctgaggctagc

SEQ ID NO: 524692 - DNA, 25 bp, Homo sapien
gtttctgtaaagagggctagactat

SEQ ID NO: 524693 - DNA, 25 bp, Homo sapien
caactcacgaaagcaagtttctgta

SEQ ID NO: 524694 - DNA, 25 bp, Homo sapien
gatattttgacacaactcacgaaag

SEQ ID NO: 524695 - DNA, 25 bp, Homo sapien
caccccgacgtttgtagatggcttt

SEQ ID NO: 524696 - DNA, 25 bp, Homo sapien
taattctccagtagcttgatgtctt

SEQ ID NO: 524697 - DNA, 25 bp, Homo sapien
gatcttggcatcatctaattctcca

SEQ ID NO: 524698 - DNA, 25 bp, Homo sapien
tccagtcagcccatcaatgatcttg

SEQ ID NO: 524699 - DNA, 25 bp, Homo sapien
ctttgtgcatgaataacaggaaaca

SEQ ID NO: 524700 - DNA, 25 bp, Homo sapien
cagtcatataaatgaagtggtttct

SEQ ID NO: 524701 - DNA, 25 bp, Homo sapien
tagttatgcagagtctctgacatac

SEQ ID NO: 524702 - DNA, 25 bp, Homo sapien
ggatcttttcagtaagtgatggttc

SEQ ID NO: 524703 - DNA, 25 bp, Homo sapien
caccagcatggcacatgtatacata

SEQ ID NO: 524704 - DNA, 25 bp, Homo sapien
tgtatacatatgtaactaacctgca

SEQ ID NO: 524705 - DNA, 25 bp, Homo sapien
ggggaggggatagctttgggagata

SEQ ID NO: 524706 - DNA, 25 bp, Homo sapien
agatgacgagttagtgggtgcagcg

SEQ ID NO: 524707 - DNA, 25 bp, Homo sapien
cgtattcactcatttggatctcctt

SEQ ID NO: 524708 - DNA, 25 bp, Homo sapien
caggatgattcggagggagtgcacc

SEQ ID NO: 524709 - DNA, 25 bp, Homo sapien
cctgtcgccgaacagcacctgaaaa

SEQ ID NO: 524710 - DNA, 25 bp, Homo sapien
tgaaaacctttcataggttgcagca

SEQ ID NO: 524711 - DNA, 25 bp, Homo sapien
aaaatgcagcatcttaaaccgtcag

SEQ ID NO: 524712 - DNA, 25 bp, Homo sapien
caagtcaatgattgcctcctccagg

SEQ ID NO: 524713 - DNA, 25 bp, Homo sapien
gaatttgctctccatgctgtaacta

SEQ ID NO: 524714 - DNA, 25 bp, Homo sapien
gcatggaacctaacatataatgggt

SEQ ID NO: 524715 - DNA, 25 bp, Homo sapien
gcattcattatatgttcctctcaac

SEQ ID NO: 524716 - DNA, 25 bp, Homo sapien
gaagtcttggattagcttcaaaaca

SEQ ID NO: 524717 - DNA, 25 bp, Homo sapien
ggtccatcgcattcattatatgttc

SEQ ID NO: 524718 - DNA, 25 bp, Homo sapien
gatagaagtcttggattagcttcaa

SEQ ID NO: 524719 - DNA, 25 bp, Homo sapien
tgtcctgaagagaaccacactcctt

SEQ ID NO: 524720 - DNA, 25 bp, Homo sapien
tagggcaattgtcctgaagagaacc

SEQ ID NO: 524721 - DNA, 25 bp, Homo sapien
caattgtcctgaagagaaccacact

SEQ ID NO: 524722 - DNA, 25 bp, Homo sapien
ctgtagggcaattgtcctgaagaga

SEQ ID NO: 524723 - DNA, 25 bp, Homo sapien
gcacagcatgtaatgtaataccaga

SEQ ID NO: 524724 - DNA, 25 bp, Homo sapien
tgtctctattgtcctgtactgttta

SEQ ID NO: 524725 - DNA, 25 bp, Homo sapien
tttacttgcaggatgtggaagcaca

SEQ ID NO: 524726 - DNA, 25 bp, Homo sapien
gaaccctcgagggtctgagctggca

SEQ ID NO: 524727 - DNA, 25 bp, Homo sapien
atctctctagcagctctcttgacct

SEQ ID NO: 524728 - DNA, 25 bp, Homo sapien
tggtacaccgtatggcctgcatcca

SEQ ID NO: 524729 - DNA, 25 bp, Homo sapien
tttctcagcctgagagacctggtac

SEQ ID NO: 524730 - DNA, 25 bp, Homo sapien
ctcttcgggaactgcatctttctca

SEQ ID NO: 524731 - DNA, 25 bp, Homo sapien
agcccaagtgttgccgcccacgtga

SEQ ID NO: 524732 - DNA, 25 bp, Homo sapien
gccagcccaagtgttgccgcccacg

SEQ ID NO: 524733 - DNA, 25 bp, Homo sapien
ccgcccacgtgaggcatgttgtctg

SEQ ID NO: 524734 - DNA, 25 bp, Homo sapien
tgttccgccagcccaagtgttgccg

SEQ ID NO: 524735 - DNA, 25 bp, Homo sapien
tcaaaattacgctgttgaagttgca

SEQ ID NO: 524736 - DNA, 25 bp, Homo sapien
tacgctgttgaagttgcaaagaaac

SEQ ID NO: 524737 - DNA, 25 bp, Homo sapien
aattacgctgttgaagttgcaaaga

SEQ ID NO: 524738 - DNA, 25 bp, Homo sapien
caaaattacgctgttgaagttgcaa

SEQ ID NO: 524739 - DNA, 25 bp, Homo sapien
cttttgatgcaacccgatgctgagc

SEQ ID NO: 524740 - DNA, 25 bp, Homo sapien
tatggccccttataacttttgatgc

SEQ ID NO: 524741 - DNA, 25 bp, Homo sapien
taagtgtgctataatcgtaagaatc

SEQ ID NO: 524742 - DNA, 25 bp, Homo sapien
gatgctgagccccttgatgtatttc

SEQ ID NO: 524743 - DNA, 25 bp, Homo sapien
taattctgggcaaggcccatatatt

SEQ ID NO: 524744 - DNA, 25 bp, Homo sapien
gcaaggcccatatattttaggctcc

SEQ ID NO: 524745 - DNA, 25 bp, Homo sapien
tgtaattctgggcaaggcccatata

SEQ ID NO: 524746 - DNA, 25 bp, Homo sapien
ctgggcaaggcccatatattttagg

SEQ ID NO: 524747 - DNA, 25 bp, Homo sapien
tggaggtatgactggacaacacagc

SEQ ID NO: 524748 - DNA, 25 bp, Homo sapien
caaagcagacatttctcatgtgagc

SEQ ID NO: 524749 - DNA, 25 bp, Homo sapien
tagccagattataatcctggaagaa

SEQ ID NO: 524750 - DNA, 25 bp, Homo sapien
cacagctggagactagtgtggcaaa

SEQ ID NO: 524751 - DNA, 25 bp, Homo sapien
gagtatgaaacagcacttggagcat

SEQ ID NO: 524752 - DNA, 25 bp, Homo sapien
cagagtatgaaacagcacttggagc

SEQ ID NO: 524753 - DNA, 25 bp, Homo sapien
aaccttccaggttgctgcgctggct

SEQ ID NO: 524754 - DNA, 25 bp, Homo sapien
gcgctggctccgatacagagtatga

SEQ ID NO: 524755 - DNA, 25 bp, Homo sapien
tggactcccagccattgccagtcat

SEQ ID NO: 524756 - DNA, 25 bp, Homo sapien
gaacttttccgatctggactcccag

SEQ ID NO: 524757 - DNA, 25 bp, Homo sapien
gggcctgtttgtgtgatcctgaact

SEQ ID NO: 524758 - DNA, 25 bp, Homo sapien
tgatcctgaacttttccgatctgga

SEQ ID NO: 524759 - DNA, 25 bp, Homo sapien
ttcctcatacagaacaacttagatt

SEQ ID NO: 524760 - DNA, 25 bp, Homo sapien
agccctctttcctcatacagaacaa

SEQ ID NO: 524761 - DNA, 25 bp, Homo sapien
gcttgagattacattatttatctgg

SEQ ID NO: 524762 - DNA, 25 bp, Homo sapien
tggaagcttgagattacattattta

SEQ ID NO: 524763 - DNA, 25 bp, Homo sapien
tcaaagacttaactgtgaactttcc

SEQ ID NO: 524764 - DNA, 25 bp, Homo sapien
taaaaacaaggtgactcaaaggatg

SEQ ID NO: 524765 - DNA, 25 bp, Homo sapien
gatcctttcacagtatgtcaaagac

SEQ ID NO: 524766 - DNA, 25 bp, Homo sapien
ctgtgaactttcccgaatgtaaaca

SEQ ID NO: 524767 - DNA, 25 bp, Homo sapien
ttcaaatggcaaaaggaatttcatc

SEQ ID NO: 524768 - DNA, 25 bp, Homo sapien
tactttacatacagacctacaaaaa

SEQ ID NO: 524769 - DNA, 25 bp, Homo sapien
cttgcttgaagctacttttgacggg

SEQ ID NO: 524770 - DNA, 25 bp, Homo sapien
aaggaatttcatctatgtctataaa

SEQ ID NO: 524771 - DNA, 25 bp, Homo sapien
ttatagtcaggcagataataatatt

SEQ ID NO: 524772 - DNA, 25 bp, Homo sapien
gaatatgtcctatagtaaaatgcaa

SEQ ID NO: 524773 - DNA, 25 bp, Homo sapien
ccaaaaggaattatgagatatcagt

SEQ ID NO: 524774 - DNA, 25 bp, Homo sapien
aacatagggcagtagatttctttaa

SEQ ID NO: 524775 - DNA, 25 bp, Homo sapien
cactggatagaacttggaatcaaac

SEQ ID NO: 524776 - DNA, 25 bp, Homo sapien
taagttatgaacctagtattagccc

SEQ ID NO: 524777 - DNA, 25 bp, Homo sapien
tggctgggacgggaaataatctaat

SEQ ID NO: 524778 - DNA, 25 bp, Homo sapien
gcaacacgtgttgtgcctttacaaa

SEQ ID NO: 524779 - DNA, 25 bp, Homo sapien
aatttagcaacacaggaaagcctgg

SEQ ID NO: 524780 - DNA, 25 bp, Homo sapien
aaatttagcaacacaggaaagcctg

SEQ ID NO: 524781 - DNA, 25 bp, Homo sapien
caaatttagcaacacaggaaagcct

SEQ ID NO: 524782 - DNA, 25 bp, Homo sapien
tgagagtaacccgaagcagactgga

SEQ ID NO: 524783 - DNA, 25 bp, Homo sapien
aacttgtttccgatattgtgtcaga

SEQ ID NO: 524784 - DNA, 25 bp, Homo sapien
gaacacatgaacttgtttccgatat

SEQ ID NO: 524785 - DNA, 25 bp, Homo sapien
cccgaagcagactggaacacatgaa

SEQ ID NO: 524786 - DNA, 25 bp, Homo sapien
cagacactggtaacttgctaacgca

SEQ ID NO: 524787 - DNA, 25 bp, Homo sapien
ggcagcttaaccctagcacagcaga

SEQ ID NO: 524788 - DNA, 25 bp, Homo sapien
ttagctgggcacagtcacttgcacc

SEQ ID NO: 524789 - DNA, 25 bp, Homo sapien
gcaacctggcaatgtcatgagtcag

SEQ ID NO: 524790 - DNA, 25 bp, Homo sapien
tcacagttgcccagcttcactcgga

SEQ ID NO: 524791 - DNA, 25 bp, Homo sapien
ccttctaaacacagccaatgctttt

SEQ ID NO: 524792 - DNA, 25 bp, Homo sapien
cattggtggttcagttcttgggcta

SEQ ID NO: 524793 - DNA, 25 bp, Homo sapien
tagcagtttttgagtggaagcagag

SEQ ID NO: 524794 - DNA, 25 bp, Homo sapien
gggacaacctactgaaccaaggcag

SEQ ID NO: 524795 - DNA, 25 bp, Homo sapien
tcagaaactgttacgtgtcctatag

SEQ ID NO: 524796 - DNA, 25 bp, Homo sapien
gaaaacagtgttcacaactggagta

SEQ ID NO: 524797 - DNA, 25 bp, Homo sapien
actcccagggtgttagtctttcttg

SEQ ID NO: 524798 - DNA, 25 bp, Homo sapien
gagaagcagtatccctgtgtgggtc

SEQ ID NO: 524799 - DNA, 25 bp, Homo sapien
tgaatcacgctgctgcaactgtgct

SEQ ID NO: 524800 - DNA, 25 bp, Homo sapien
taaagagagattgaggactcccaag

SEQ ID NO: 524801 - DNA, 25 bp, Homo sapien
gatcacccttcttaaatcccagagg

SEQ ID NO: 524802 - DNA, 25 bp, Homo sapien
ttacaacaatgaatgatgacatggg

SEQ ID NO: 524803 - DNA, 25 bp, Homo sapien
tggatgtccaattgtcaaagcacca

SEQ ID NO: 524804 - DNA, 25 bp, Homo sapien
actgttggcaatatgtctgtgggtc

SEQ ID NO: 524805 - DNA, 25 bp, Homo sapien
ttttgcgaacattgcactgtcttga

SEQ ID NO: 524806 - DNA, 25 bp, Homo sapien
gcattacagggaaagcgttcagtct

SEQ ID NO: 524807 - DNA, 25 bp, Homo sapien
catggtcattgccttattcccagca

SEQ ID NO: 524808 - DNA, 25 bp, Homo sapien
tcattaaaatatggtgccagctgtg

SEQ ID NO: 524809 - DNA, 25 bp, Homo sapien
ggtatacatgtgatgttgaatagga

SEQ ID NO: 524810 - DNA, 25 bp, Homo sapien
caagggaacttagggatcaaaggag

SEQ ID NO: 524811 - DNA, 25 bp, Homo sapien
cattgtgctacaagctaggagtaca

SEQ ID NO: 524812 - DNA, 25 bp, Homo sapien
tacacatgtcctggaaaatgtttgg

SEQ ID NO: 524813 - DNA, 25 bp, Homo sapien
gaagagaaggcctacatgattaaaa

SEQ ID NO: 524814 - DNA, 25 bp, Homo sapien
agagataaggtgaattcaaatggta

SEQ ID NO: 524815 - DNA, 25 bp, Homo sapien
gagataaggtgaattcaaatggtac

SEQ ID NO: 524816 - DNA, 25 bp, Homo sapien
taagagataaggtgaattcaaatgg

SEQ ID NO: 524817 - DNA, 25 bp, Homo sapien
ctaagagataaggtgaattcaaatg

SEQ ID NO: 524818 - DNA, 25 bp, Homo sapien
cattccatgagtgatcgctgcagac

SEQ ID NO: 524819 - DNA, 25 bp, Homo sapien
atttctgtcatcttgtccaatcatg

SEQ ID NO: 524820 - DNA, 25 bp, Homo sapien
gcagacgttcaagtccagtttccca

SEQ ID NO: 524821 - DNA, 25 bp, Homo sapien
caatcatgtttctccattccatgag

SEQ ID NO: 524822 - DNA, 25 bp, Homo sapien
tggtcgacagccatgtggtatacgg

SEQ ID NO: 524823 - DNA, 25 bp, Homo sapien
ccatgtggtatacggcgagagagat

SEQ ID NO: 524824 - DNA, 25 bp, Homo sapien
ctgaaatggtcgacagccatgtggt

SEQ ID NO: 524825 - DNA, 25 bp, Homo sapien
cagccatgtggtatacggcgagaga

SEQ ID NO: 524826 - DNA, 25 bp, Homo sapien
gcctaatgtcagtgctgaaaccaat

SEQ ID NO: 524827 - DNA, 25 bp, Homo sapien
ccttagaggcctaatgtcagtgctg

SEQ ID NO: 524828 - DNA, 25 bp, Homo sapien
atgtcagtgctgaaaccaatttctt

SEQ ID NO: 524829 - DNA, 25 bp, Homo sapien
tagaggcctaatgtcagtgctgaaa

SEQ ID NO: 524830 - DNA, 25 bp, Homo sapien
ctgggaatagggatatatcggagtt

SEQ ID NO: 524831 - DNA, 25 bp, Homo sapien
cggagtttctttgattgaagatcag

SEQ ID NO: 524832 - DNA, 25 bp, Homo sapien
tgacttctatataaccagatgtttg

SEQ ID NO: 524833 - DNA, 25 bp, Homo sapien
ggaatagggatatatcggagtttct

SEQ ID NO: 524834 - DNA, 25 bp, Homo sapien
ggtaaaatcctcactacctgattcg

SEQ ID NO: 524835 - DNA, 25 bp, Homo sapien
cagtgccacttcgtttatgcaaaga

SEQ ID NO: 524836 - DNA, 25 bp, Homo sapien
tatagaatgatgtatcagtgccact

SEQ ID NO: 524837 - DNA, 25 bp, Homo sapien
atcttttagagggacttctcctggg

SEQ ID NO: 524838 - DNA, 25 bp, Homo sapien
ttactccctgggcagatgctccact

SEQ ID NO: 524839 - DNA, 25 bp, Homo sapien
actccctgggcagatgctccactct

SEQ ID NO: 524840 - DNA, 25 bp, Homo sapien
tccctgggcagatgctccactctac

SEQ ID NO: 524841 - DNA, 25 bp, Homo sapien
cttactccctgggcagatgctccac

SEQ ID NO: 524842 - DNA, 25 bp, Homo sapien
cttacttgggctcctacatcccatt

SEQ ID NO: 524843 - DNA, 25 bp, Homo sapien
tacttcaccttacttgggctcctac

SEQ ID NO: 524844 - DNA, 25 bp, Homo sapien
tctgacagcccataggggctgcact

SEQ ID NO: 524845 - DNA, 25 bp, Homo sapien
cacagggacacatacttcaccttac

SEQ ID NO: 524846 - DNA, 25 bp, Homo sapien
ataattctatcatcccatctaaaag

SEQ ID NO: 524847 - DNA, 25 bp, Homo sapien
aaataattctatcatcccatctaaa

SEQ ID NO: 524848 - DNA, 25 bp, Homo sapien
aataattctatcatcccatctaaaa

SEQ ID NO: 524849 - DNA, 25 bp, Homo sapien
ctgaacttagatgttcagatgatag

SEQ ID NO: 524850 - DNA, 25 bp, Homo sapien
tagatgttcagatgatagttgatca

SEQ ID NO: 524851 - DNA, 25 bp, Homo sapien
acttagatgttcagatgatagttga

SEQ ID NO: 524852 - DNA, 25 bp, Homo sapien
tgatagttgatcactggaaatttta

SEQ ID NO: 524853 - DNA, 25 bp, Homo sapien
tgtgcaggcttagttaaaagatatt

SEQ ID NO: 524854 - DNA, 25 bp, Homo sapien
ctctttcagcacatacaactggcaa

SEQ ID NO: 524855 - DNA, 25 bp, Homo sapien
tcagattcgatgtgtgcaggcttag

SEQ ID NO: 524856 - DNA, 25 bp, Homo sapien
tggcaaaccccactaccctcagatt

SEQ ID NO: 524857 - DNA, 25 bp, Homo sapien
tttgttttgctctccaccagaagcc

SEQ ID NO: 524858 - DNA, 25 bp, Homo sapien
aaaactgtcttgaggttgatgggaa

SEQ ID NO: 524859 - DNA, 25 bp, Homo sapien
aagtgagatggtgtgagttcgccct

SEQ ID NO: 524860 - DNA, 25 bp, Homo sapien
tgagttcgcccttctagaacatcca

SEQ ID NO: 524861 - DNA, 25 bp, Homo sapien
tctttgtagaacaccagccagtttt

SEQ ID NO: 524862 - DNA, 25 bp, Homo sapien
gtagaacaccagccagtttttgtgt

SEQ ID NO: 524863 - DNA, 25 bp, Homo sapien
tttgtagaacaccagccagtttttg

SEQ ID NO: 524864 - DNA, 25 bp, Homo sapien
ttctttgtagaacaccagccagttt

SEQ ID NO: 524865 - DNA, 25 bp, Homo sapien
ggccagtagtatctaacaacaggat

SEQ ID NO: 524866 - DNA, 25 bp, Homo sapien
taaacttctcggaagggaggatgag

SEQ ID NO: 524867 - DNA, 25 bp, Homo sapien
tgttccaccagaaaggtttcttaga

SEQ ID NO: 524868 - DNA, 25 bp, Homo sapien
aggatgagacgatgaagggcccggc

SEQ ID NO: 524869 - DNA, 25 bp, Homo sapien
tgctgctcatggagaaccacttgac

SEQ ID NO: 524870 - DNA, 25 bp, Homo sapien
tcataaagtacagggaagcgggatt

SEQ ID NO: 524871 - DNA, 25 bp, Homo sapien
tgtcacaaaagggtgccaaacgcca

SEQ ID NO: 524872 - DNA, 25 bp, Homo sapien
tttgagaggacttcccagcggtgcc

SEQ ID NO: 524873 - DNA, 25 bp, Homo sapien
tgatgtagcaatgtcacagattata

SEQ ID NO: 524874 - DNA, 25 bp, Homo sapien
aagtttagggatctttcttcatgtc

SEQ ID NO: 524875 - DNA, 25 bp, Homo sapien
tcttcatgtctttctattggatact

SEQ ID NO: 524876 - DNA, 25 bp, Homo sapien
tccaatggtattctccatgaggcac

SEQ ID NO: 524877 - DNA, 25 bp, Homo sapien
gaacgtttgttctggcagagtcaac

SEQ ID NO: 524878 - DNA, 25 bp, Homo sapien
tgtccagtagcccatgaacgtttgt

SEQ ID NO: 524879 - DNA, 25 bp, Homo sapien
tgtctatatgatgagtttccactgg

SEQ ID NO: 524880 - DNA, 25 bp, Homo sapien
cacaagagtttttgcatcccacttc

SEQ ID NO: 524881 - DNA, 25 bp, Homo sapien
atggaacccttcagggctgttccaa

SEQ ID NO: 524882 - DNA, 25 bp, Homo sapien
acccttcagggctgttccaacaact

SEQ ID NO: 524883 - DNA, 25 bp, Homo sapien
cagggctgttccaacaactctcaaa

SEQ ID NO: 524884 - DNA, 25 bp, Homo sapien
gaactactaattttcatgggaataa

SEQ ID NO: 524885 - DNA, 25 bp, Homo sapien
tatttattacatctactcatgggac

SEQ ID NO: 524886 - DNA, 25 bp, Homo sapien
aatcaagaactatcagcatttaaga

SEQ ID NO: 524887 - DNA, 25 bp, Homo sapien
ctcagttttgtagaatggaatgata

SEQ ID NO: 524888 - DNA, 25 bp, Homo sapien
caatttacaggcctataaataatgc

SEQ ID NO: 524889 - DNA, 25 bp, Homo sapien
tttgccagctgcacactggtaggct

SEQ ID NO: 524890 - DNA, 25 bp, Homo sapien
cacatttcgaactacactggagaga

SEQ ID NO: 524891 - DNA, 25 bp, Homo sapien
aggctttgctccgataggtatcccg

SEQ ID NO: 524892 - DNA, 25 bp, Homo sapien
ctggagagaccttcagtcggaaatt

SEQ ID NO: 524893 - DNA, 25 bp, Homo sapien
cttggatcaacatcttcccctgtgt

SEQ ID NO: 524894 - DNA, 25 bp, Homo sapien
tctatcttgtgaaacttccttgcgg

SEQ ID NO: 524895 - DNA, 25 bp, Homo sapien
tgtgactgttagcttggagaccctt

SEQ ID NO: 524896 - DNA, 25 bp, Homo sapien
tacacattgtacatggtcgcaggaa

SEQ ID NO: 524897 - DNA, 25 bp, Homo sapien
tctgagcatctcgagctccgagtgg

SEQ ID NO: 524898 - DNA, 25 bp, Homo sapien
catttggtccatactgtctgagcat

SEQ ID NO: 524899 - DNA, 25 bp, Homo sapien
gttaataatcccttggtcagccaaa

SEQ ID NO: 524900 - DNA, 25 bp, Homo sapien
gggttatcaactgcatggcagctaa

SEQ ID NO: 524901 - DNA, 25 bp, Homo sapien
catgttaaattcgagatacaggagc

SEQ ID NO: 524902 - DNA, 25 bp, Homo sapien
tccaggtaagagacgatggtggctc

SEQ ID NO: 524903 - DNA, 25 bp, Homo sapien
aggctggaagcagggcgacccatta

SEQ ID NO: 524904 - DNA, 25 bp, Homo sapien
cgagggtatagccaataagattgca

SEQ ID NO: 524905 - DNA, 25 bp, Homo sapien
tggcacagcacatgataagcattca

SEQ ID NO: 524906 - DNA, 25 bp, Homo sapien
cagccattacagcagtgttactaat

SEQ ID NO: 524907 - DNA, 25 bp, Homo sapien
gtggcacagcacatgataagcattc

SEQ ID NO: 524908 - DNA, 25 bp, Homo sapien
aatgacagccattacagcagtgtta

SEQ ID NO: 524909 - DNA, 25 bp, Homo sapien
aaatcaggatgaatcactacaacat

SEQ ID NO: 524910 - DNA, 25 bp, Homo sapien
caggatgaatcactacaacattttc

SEQ ID NO: 524911 - DNA, 25 bp, Homo sapien
tcaggatgaatcactacaacatttt

SEQ ID NO: 524912 - DNA, 25 bp, Homo sapien
aaatccaggtctatttgccagaaca

SEQ ID NO: 524913 - DNA, 25 bp, Homo sapien
taagggagaatccaaggaatagcta

SEQ ID NO: 524914 - DNA, 25 bp, Homo sapien
tagacttacagtacttaagcctggc

SEQ ID NO: 524915 - DNA, 25 bp, Homo sapien
tatttggctgtgataacttggttgc

SEQ ID NO: 524916 - DNA, 25 bp, Homo sapien
tatactaaattgtacagggacttgc

SEQ ID NO: 524917 - DNA, 25 bp, Homo sapien
ttaaaatacacgtgacatttgttgg

SEQ ID NO: 524918 - DNA, 25 bp, Homo sapien
tctactaccagaatatgacccaact

SEQ ID NO: 524919 - DNA, 25 bp, Homo sapien
aatacacgtgacatttgttggagct

SEQ ID NO: 524920 - DNA, 25 bp, Homo sapien
caacaatgcgtcttccatctgctag

SEQ ID NO: 524921 - DNA, 25 bp, Homo sapien
catatacaataagtccgtctttaac

SEQ ID NO: 524922 - DNA, 25 bp, Homo sapien
caaaggtgagtcttcatatacaata

SEQ ID NO: 524923 - DNA, 25 bp, Homo sapien
tgaagcgtaagagtttgtactgtgg

SEQ ID NO: 524924 - DNA, 25 bp, Homo sapien
ccgtctttaaccgaaggctgaagcg

SEQ ID NO: 524925 - DNA, 25 bp, Homo sapien
tatcagactttaaccacccaggtca

SEQ ID NO: 524926 - DNA, 25 bp, Homo sapien
gatagatattcgtaaaggaagacac

SEQ ID NO: 524927 - DNA, 25 bp, Homo sapien
tagtctggtgcagtttaaacctacc

SEQ ID NO: 524928 - DNA, 25 bp, Homo sapien
ggagtcacgctctctaggaagttgg

SEQ ID NO: 524929 - DNA, 25 bp, Homo sapien
cacatacgatgaggccatactgagc

SEQ ID NO: 524930 - DNA, 25 bp, Homo sapien
gatggacgcatttcagatacttcaa

SEQ ID NO: 524931 - DNA, 25 bp, Homo sapien
tctcaatgcttgctgagatggacgc

SEQ ID NO: 524932 - DNA, 25 bp, Homo sapien
taaccagcacgtagtaggagttctc

SEQ ID NO: 524933 - DNA, 25 bp, Homo sapien
ccactgtgaattaagaaccacacca

SEQ ID NO: 524934 - DNA, 25 bp, Homo sapien
taatacaggtacattagtaggtgtg

SEQ ID NO: 524935 - DNA, 25 bp, Homo sapien
atacaggtacattagtaggtgtgta

SEQ ID NO: 524936 - DNA, 25 bp, Homo sapien
actaatacaggtacattagtaggtg

SEQ ID NO: 524937 - DNA, 25 bp, Homo sapien
acaggtacattagtaggtgtgtata

SEQ ID NO: 524938 - DNA, 25 bp, Homo sapien
cctttatgttgatgagatctgttcc

SEQ ID NO: 524939 - DNA, 25 bp, Homo sapien
ctgcttgtgagagaataggcttaga

SEQ ID NO: 524940 - DNA, 25 bp, Homo sapien
catgtttataaagcattagccactt

SEQ ID NO: 524941 - DNA, 25 bp, Homo sapien
tgtaatgttcatcactctctgtcca

SEQ ID NO: 524942 - DNA, 25 bp, Homo sapien
gtctgttgagcaggtgaaggaatct

SEQ ID NO: 524943 - DNA, 25 bp, Homo sapien
tctgttgagcaggtgaaggaatctg

SEQ ID NO: 524944 - DNA, 25 bp, Homo sapien
tatcattactgttctgctggactgt

SEQ ID NO: 524945 - DNA, 25 bp, Homo sapien
gactgtgctcttcatgatgacgtac

SEQ ID NO: 524946 - DNA, 25 bp, Homo sapien
agaagcaggagtagggcggcccttt

SEQ ID NO: 524947 - DNA, 25 bp, Homo sapien
tggactgtgctcttcatgatgacgt

SEQ ID NO: 524948 - DNA, 25 bp, Homo sapien
acaagttcctttcagccactgtctc

SEQ ID NO: 524949 - DNA, 25 bp, Homo sapien
ccctgcaacagcagataaatttgca

SEQ ID NO: 524950 - DNA, 25 bp, Homo sapien
aagcatgctcatcagccctctgtga

SEQ ID NO: 524951 - DNA, 25 bp, Homo sapien
tgtgactctcactcaaacaagttcc

SEQ ID NO: 524952 - DNA, 25 bp, Homo sapien
tgggttcctaaaccactctctctca

SEQ ID NO: 524953 - DNA, 25 bp, Homo sapien
gctttgcctatctgtcccgttgttt

SEQ ID NO: 524954 - DNA, 25 bp, Homo sapien
taactctcagcaccagaatgatttc

SEQ ID NO: 524955 - DNA, 25 bp, Homo sapien
ctctgaagctttgcctatctgtccc

SEQ ID NO: 524956 - DNA, 25 bp, Homo sapien
cagcatgaagctcctaatagtaatg

SEQ ID NO: 524957 - DNA, 25 bp, Homo sapien
cagtaggtagaaagtaatgcatgct

SEQ ID NO: 524958 - DNA, 25 bp, Homo sapien
tgctgcacttactggaaagactatg

SEQ ID NO: 524959 - DNA, 25 bp, Homo sapien
catggtactctatcccacttggcag

SEQ ID NO: 524960 - DNA, 25 bp, Homo sapien
aaccaataataagtgttctccaagg

SEQ ID NO: 524961 - DNA, 25 bp, Homo sapien
aagtctttcagcatatcttccatca

SEQ ID NO: 524962 - DNA, 25 bp, Homo sapien
ctggttgccaaccaataataagtgt

SEQ ID NO: 524963 - DNA, 25 bp, Homo sapien
aaagtctttcagcatatcttccatc

SEQ ID NO: 524964 - DNA, 25 bp, Homo sapien
tatgagaaaaaggatgcataggaca

SEQ ID NO: 524965 - DNA, 25 bp, Homo sapien
taataaaagttgttcggccagacat

SEQ ID NO: 524966 - DNA, 25 bp, Homo sapien
ggacatatccctctgaactactgaa

SEQ ID NO: 524967 - DNA, 25 bp, Homo sapien
taattattggctagtttacaaggag

SEQ ID NO: 524968 - DNA, 25 bp, Homo sapien
tatagatcggtgcactaacagcacc

SEQ ID NO: 524969 - DNA, 25 bp, Homo sapien
gcactaacagcaccaatcctcagag

SEQ ID NO: 524970 - DNA, 25 bp, Homo sapien
acagcaccaatcctcagagttccag

SEQ ID NO: 524971 - DNA, 25 bp, Homo sapien
ctcatgtgcattatagatcggtgca

SEQ ID NO: 524972 - DNA, 25 bp, Homo sapien
aaaccagaatacagtcaagccacct

SEQ ID NO: 524973 - DNA, 25 bp, Homo sapien
aattactattttcagccaagtgcag

SEQ ID NO: 524974 - DNA, 25 bp, Homo sapien
tagtgtgcaccaatttagaaacccc

SEQ ID NO: 524975 - DNA, 25 bp, Homo sapien
catgcctgtcaccagcatttcagga

SEQ ID NO: 524976 - DNA, 25 bp, Homo sapien
tcagcagatttacggcttaaggaca

SEQ ID NO: 524977 - DNA, 25 bp, Homo sapien
tagaatgcgacttttgtgctaagcg

SEQ ID NO: 524978 - DNA, 25 bp, Homo sapien
tggagtgctacacatttgacacagc

SEQ ID NO: 524979 - DNA, 25 bp, Homo sapien
gcttctatggagtgctgtgaacaaa

SEQ ID NO: 524980 - DNA, 25 bp, Homo sapien
gctccaaattgtcatcagtatttat

SEQ ID NO: 524981 - DNA, 25 bp, Homo sapien
tgacctagcaagactgggtaaaaac

SEQ ID NO: 524982 - DNA, 25 bp, Homo sapien
tgctgacctagcaagactgggtaaa

SEQ ID NO: 524983 - DNA, 25 bp, Homo sapien
aatgctgacctagcaagactgggta

SEQ ID NO: 524984 - DNA, 25 bp, Homo sapien
gcttggtaacattaggccctgcagc

SEQ ID NO: 524985 - DNA, 25 bp, Homo sapien
tctcccagtccaatagctggctttt

SEQ ID NO: 524986 - DNA, 25 bp, Homo sapien
tgtcttggcaccctgcttaaccttc

SEQ ID NO: 524987 - DNA, 25 bp, Homo sapien
ccagaggctggcttggtaacattag

SEQ ID NO: 524988 - DNA, 25 bp, Homo sapien
gctgtgcagtatcatcacaatgtat

SEQ ID NO: 524989 - DNA, 25 bp, Homo sapien
catgtctattaacaaccctttcagg

SEQ ID NO: 524990 - DNA, 25 bp, Homo sapien
gaacaattattctccctcagtctct

SEQ ID NO: 524991 - DNA, 25 bp, Homo sapien
cctacttgggaactgatatatttct

SEQ ID NO: 524992 - DNA, 25 bp, Homo sapien
aaagtgatgccgctaatgattgtgc

SEQ ID NO: 524993 - DNA, 25 bp, Homo sapien
ttgtctggtagaaagtgatgccgct

SEQ ID NO: 524994 - DNA, 25 bp, Homo sapien
cgacgagaaattcgcaacagttgtc

SEQ ID NO: 524995 - DNA, 25 bp, Homo sapien
cattaggatactgtgacagccgacg

SEQ ID NO: 524996 - DNA, 25 bp, Homo sapien
gagcttcctgaggtacatttgggac

SEQ ID NO: 524997 - DNA, 25 bp, Homo sapien
gagtttgtgtgtaaatgataataac

SEQ ID NO: 524998 - DNA, 25 bp, Homo sapien
gataataacttatccagagcttcct

SEQ ID NO: 524999 - DNA, 25 bp, Homo sapien
cgttggatcctgtgtttctctgagt

SEQ ID NO: 525000 - DNA, 25 bp, Homo sapien
cacttttcacaagtggtttcatgta

SEQ ID NO: 525001 - DNA, 25 bp, Homo sapien
cacaagtggtttcatgtaatggaaa

SEQ ID NO: 525002 - DNA, 25 bp, Homo sapien
ggtttcatgtaatggaaaaagaaca

SEQ ID NO: 525003 - DNA, 25 bp, Homo sapien
tttcacaagtggtttcatgtaatgg

SEQ ID NO: 525004 - DNA, 25 bp, Homo sapien
ggagggatggataggaaaaatggat

SEQ ID NO: 525005 - DNA, 25 bp, Homo sapien
tgaaggagggatggataggaaaaat

SEQ ID NO: 525006 - DNA, 25 bp, Homo sapien
ctgaaggagggatggataggaaaaa

SEQ ID NO: 525007 - DNA, 25 bp, Homo sapien
aaggagggatggataggaaaaatgg

SEQ ID NO: 525008 - DNA, 25 bp, Homo sapien
caagtggaaagaatcagatgagtac

SEQ ID NO: 525009 - DNA, 25 bp, Homo sapien
aggtaggacacaagtggaaagaatc

SEQ ID NO: 525010 - DNA, 25 bp, Homo sapien
catcaatacaacaggcaggtctacc

SEQ ID NO: 525011 - DNA, 25 bp, Homo sapien
tctgaagagttaagaccaagtgcca

SEQ ID NO: 525012 - DNA, 25 bp, Homo sapien
gagaaggtttcacagaggacatcac

SEQ ID NO: 525013 - DNA, 25 bp, Homo sapien
tctctgaaagcaggacaggtatcta

SEQ ID NO: 525014 - DNA, 25 bp, Homo sapien
tgtcttggtcttggaaagggctaga

SEQ ID NO: 525015 - DNA, 25 bp, Homo sapien
aatttaccaactgggtctagaagca

SEQ ID NO: 525016 - DNA, 25 bp, Homo sapien
aaactgcctgtgaccattagagaac

SEQ ID NO: 525017 - DNA, 25 bp, Homo sapien
tgacctctggaaatagagctaagcc

SEQ ID NO: 525018 - DNA, 25 bp, Homo sapien
caggcatgctgtgaactattgcaaa

SEQ ID NO: 525019 - DNA, 25 bp, Homo sapien
cctgaagtttgaaagtagtagcctc

SEQ ID NO: 525020 - DNA, 25 bp, Homo sapien
gcagctcctcctttaaacgcatata

SEQ ID NO: 525021 - DNA, 25 bp, Homo sapien
cgcatatacctgtcttctctcagca

SEQ ID NO: 525022 - DNA, 25 bp, Homo sapien
tcttctgtagctgttcatcagacag

SEQ ID NO: 525023 - DNA, 25 bp, Homo sapien
agcagcctagaaccatcatagaggc

SEQ ID NO: 525024 - DNA, 25 bp, Homo sapien
ggtgaggaccgccaggcagtgtctc

SEQ ID NO: 525025 - DNA, 25 bp, Homo sapien
ctttgcaatacagcaagcgtgcccg

SEQ ID NO: 525026 - DNA, 25 bp, Homo sapien
attcacccggtgaatgccatccagc

SEQ ID NO: 525027 - DNA, 25 bp, Homo sapien
cattcacaaggggtgaggaccgcca

SEQ ID NO: 525028 - DNA, 25 bp, Homo sapien
tgctgtagcagatcacgcgctgtca

SEQ ID NO: 525029 - DNA, 25 bp, Homo sapien
gctgtagcagatcacgcgctgtcat

SEQ ID NO: 525030 - DNA, 25 bp, Homo sapien
ctgctgtagcagatcacgcgctgtc

SEQ ID NO: 525031 - DNA, 25 bp, Homo sapien
tgctggttgaactctcagggtaata

SEQ ID NO: 525032 - DNA, 25 bp, Homo sapien
gtgtcatgggcggaaccaggtggag

SEQ ID NO: 525033 - DNA, 25 bp, Homo sapien
ggttgaactctcagggtaatatggc

SEQ ID NO: 525034 - DNA, 25 bp, Homo sapien
aactctcagggtaatatggcttggc

SEQ ID NO: 525035 - DNA, 25 bp, Homo sapien
gtcccataaacttacgtgcacttga

SEQ ID NO: 525036 - DNA, 25 bp, Homo sapien
gaaatatgcccttatctggttgtga

SEQ ID NO: 525037 - DNA, 25 bp, Homo sapien
gaaaaacttagctaagaggtcagtg

SEQ ID NO: 525038 - DNA, 25 bp, Homo sapien
gaatctgacctaacacttgagccaa

SEQ ID NO: 525039 - DNA, 25 bp, Homo sapien
tccttttacttcatatgaaatgcag

SEQ ID NO: 525040 - DNA, 25 bp, Homo sapien
tgcctcaaatctgtgttaaagctct

SEQ ID NO: 525041 - DNA, 25 bp, Homo sapien
aatctgtgttaaagctctgttttcc

SEQ ID NO: 525042 - DNA, 25 bp, Homo sapien
tttacgtactgcctcaaatctgtgt

SEQ ID NO: 525043 - DNA, 25 bp, Homo sapien
acagatggtgtatctactttttccc

SEQ ID NO: 525044 - DNA, 25 bp, Homo sapien
gaaaacagatggtgtatctactttt

SEQ ID NO: 525045 - DNA, 25 bp, Homo sapien
taagtgtagctttatacatgtacaa

SEQ ID NO: 525046 - DNA, 25 bp, Homo sapien
tgtacaaataacagggaagtctcca

SEQ ID NO: 525047 - DNA, 25 bp, Homo sapien
tatgcttatagtccaagtgcagcta

SEQ ID NO: 525048 - DNA, 25 bp, Homo sapien
gctgatggcctaagcatatatgctt

SEQ ID NO: 525049 - DNA, 25 bp, Homo sapien
ctgctgatggcctaagcatatatgc

SEQ ID NO: 525050 - DNA, 25 bp, Homo sapien
gtccaagtgcagctaaaaatgaaca

SEQ ID NO: 525051 - DNA, 25 bp, Homo sapien
tcggcaaagttcttagcgatcactg

SEQ ID NO: 525052 - DNA, 25 bp, Homo sapien
tatcctaaggtatcggcaaagttct

SEQ ID NO: 525053 - DNA, 25 bp, Homo sapien
gcataataggttctatgttgtatcc

SEQ ID NO: 525054 - DNA, 25 bp, Homo sapien
tcttagcgatcactgtttttccaca

SEQ ID NO: 525055 - DNA, 25 bp, Homo sapien
gaaacggtctgacgcacaaggttga

SEQ ID NO: 525056 - DNA, 25 bp, Homo sapien
tatatctttaaccatgtgagactgc

SEQ ID NO: 525057 - DNA, 25 bp, Homo sapien
ttaatagcctggtcccggctggcac

SEQ ID NO: 525058 - DNA, 25 bp, Homo sapien
gctcaaagtctgtatgaaacggtct

SEQ ID NO: 525059 - DNA, 25 bp, Homo sapien
ggtcacctctttatctgcaatccgg

SEQ ID NO: 525060 - DNA, 25 bp, Homo sapien
tgcaatccggatggtcacagaagct

SEQ ID NO: 525061 - DNA, 25 bp, Homo sapien
tctctttaggaagtagagagcttcc

SEQ ID NO: 525062 - DNA, 25 bp, Homo sapien
gggacacatggttttccatcatctt

SEQ ID NO: 525063 - DNA, 25 bp, Homo sapien
gaacttaagccctcccacttgacag

SEQ ID NO: 525064 - DNA, 25 bp, Homo sapien
cataattaaggtgagaagacagcca

SEQ ID NO: 525065 - DNA, 25 bp, Homo sapien
gctaatctggttgtatacatcattg

SEQ ID NO: 525066 - DNA, 25 bp, Homo sapien
gttacaactgtccattaactagctc

SEQ ID NO: 525067 - DNA, 25 bp, Homo sapien
aatactatatggataaagccactgg

SEQ ID NO: 525068 - DNA, 25 bp, Homo sapien
tgattggcatcataggaaaggaatc

SEQ ID NO: 525069 - DNA, 25 bp, Homo sapien
tcccttcatgacctagtaaaatact

SEQ ID NO: 525070 - DNA, 25 bp, Homo sapien
taaagccactggattgcatgtttga

SEQ ID NO: 525071 - DNA, 25 bp, Homo sapien
caatgtcaacaatacctaggctccc

SEQ ID NO: 525072 - DNA, 25 bp, Homo sapien
taggctccctgactcacatgaaaca

SEQ ID NO: 525073 - DNA, 25 bp, Homo sapien
tacaaaagcttcctagtcattccct

SEQ ID NO: 525074 - DNA, 25 bp, Homo sapien
tattcccactatcttggatggtgcc

SEQ ID NO: 525075 - DNA, 25 bp, Homo sapien
gatttgaaccgcagctgctaaacta

SEQ ID NO: 525076 - DNA, 25 bp, Homo sapien
taaactatctaaaggaaagtctgga

SEQ ID NO: 525077 - DNA, 25 bp, Homo sapien
ccaagagtagaagattcttgggaac

SEQ ID NO: 525078 - DNA, 25 bp, Homo sapien
gggaacacagagttgtggcaaagga

SEQ ID NO: 525079 - DNA, 25 bp, Homo sapien
ggctccaattgaatataacaactta

SEQ ID NO: 525080 - DNA, 25 bp, Homo sapien
aattgaatataacaacttaagttgg

SEQ ID NO: 525081 - DNA, 25 bp, Homo sapien
cattggctccaattgaatataacaa

SEQ ID NO: 525082 - DNA, 25 bp, Homo sapien
agcagaaacattggctccaattgaa

SEQ ID NO: 525083 - DNA, 25 bp, Homo sapien
gcaagcccaaggcaatcactcggaa

SEQ ID NO: 525084 - DNA, 25 bp, Homo sapien
taatggattcccagaataccttggc

SEQ ID NO: 525085 - DNA, 25 bp, Homo sapien
ccctggcttgaaatcgagaacgaag

SEQ ID NO: 525086 - DNA, 25 bp, Homo sapien
tcactaactcggacaattttccaag

SEQ ID NO: 525087 - DNA, 25 bp, Homo sapien
agacatcaggaagcgtccatcttca

SEQ ID NO: 525088 - DNA, 25 bp, Homo sapien
tcagcagacatcaggaagcgtccat

SEQ ID NO: 525089 - DNA, 25 bp, Homo sapien
gtcgtaacgctcagcagacatcagg

SEQ ID NO: 525090 - DNA, 25 bp, Homo sapien
tcggagaagtttgtcgtaacgctca

SEQ ID NO: 525091 - DNA, 25 bp, Homo sapien
ttccagcaagttgttcaaaacaggc

SEQ ID NO: 525092 - DNA, 25 bp, Homo sapien
tccagcaagttgttcaaaacaggca

SEQ ID NO: 525093 - DNA, 25 bp, Homo sapien
ccatctcctgatattagttgcctca

SEQ ID NO: 525094 - DNA, 25 bp, Homo sapien
ctgatattagttgcctcacatgtgg

SEQ ID NO: 525095 - DNA, 25 bp, Homo sapien
tctcctgatattagttgcctcacat

SEQ ID NO: 525096 - DNA, 25 bp, Homo sapien
gatattagttgcctcacatgtggta

SEQ ID NO: 525097 - DNA, 25 bp, Homo sapien
ttaataatccattagacaaattgcc

SEQ ID NO: 525098 - DNA, 25 bp, Homo sapien
taatccattagacaaattgccagga

SEQ ID NO: 525099 - DNA, 25 bp, Homo sapien
tgtctctaactttcctttaataatc

SEQ ID NO: 525100 - DNA, 25 bp, Homo sapien
tgacagtggcttctaaatgtctcta

SEQ ID NO: 525101 - DNA, 25 bp, Homo sapien
tagacacagggtgctccaaggcccc

SEQ ID NO: 525102 - DNA, 25 bp, Homo sapien
agacacagggtgctccaaggcccca

SEQ ID NO: 525103 - DNA, 25 bp, Homo sapien
gagctagacataaagactctccaca

SEQ ID NO: 525104 - DNA, 25 bp, Homo sapien
tagacataaagactctccacatccc

SEQ ID NO: 525105 - DNA, 25 bp, Homo sapien
tgtaagatggaaaagtcatcttcct

SEQ ID NO: 525106 - DNA, 25 bp, Homo sapien
gcccctgttacttaatctgtaagat

SEQ ID NO: 525107 - DNA, 25 bp, Homo sapien
atcaccttctaagcccctgttactt

SEQ ID NO: 525108 - DNA, 25 bp, Homo sapien
tctgctatttatcagttgtacaacc

SEQ ID NO: 525109 - DNA, 25 bp, Homo sapien
gcacatctttcctatcagtacgtac

SEQ ID NO: 525110 - DNA, 25 bp, Homo sapien
taactgttgagtccaaatgcatgtg

SEQ ID NO: 525111 - DNA, 25 bp, Homo sapien
gtctctttaagtatacatcactctg

SEQ ID NO: 525112 - DNA, 25 bp, Homo sapien
taactaaagagtattctacttacca

SEQ ID NO: 525113 - DNA, 25 bp, Homo sapien
cagggcaatgtattcgacctcccgt

SEQ ID NO: 525114 - DNA, 25 bp, Homo sapien
gtttgagatcagtttcagtggtgtc

SEQ ID NO: 525115 - DNA, 25 bp, Homo sapien
tcagtggtgtcccttgacagggcaa

SEQ ID NO: 525116 - DNA, 25 bp, Homo sapien
aaggctgtgcctgcacggatctctc

SEQ ID NO: 525117 - DNA, 25 bp, Homo sapien
aacatcttgccccaaaagatccttc

SEQ ID NO: 525118 - DNA, 25 bp, Homo sapien
caagtactgcatagcaatagagcgt

SEQ ID NO: 525119 - DNA, 25 bp, Homo sapien
aatagagcgtcgaagaggcccagga

SEQ ID NO: 525120 - DNA, 25 bp, Homo sapien
ccaggaggtcctattagaaaaacat

SEQ ID NO: 525121 - DNA, 25 bp, Homo sapien
gctgaactacagattgagccagaga

SEQ ID NO: 525122 - DNA, 25 bp, Homo sapien
tgaactacagattgagccagagagt

SEQ ID NO: 525123 - DNA, 25 bp, Homo sapien
ctgaactacagattgagccagagag

SEQ ID NO: 525124 - DNA, 25 bp, Homo sapien
gcaaccactgatatgctggaaagca

SEQ ID NO: 525125 - DNA, 25 bp, Homo sapien
tcaaggaagtacttctatttcctgc

SEQ ID NO: 525126 - DNA, 25 bp, Homo sapien
aacaacatcaaggaagtacttctat

SEQ ID NO: 525127 - DNA, 25 bp, Homo sapien
caaccactgatatgctggaaagcac

SEQ ID NO: 525128 - DNA, 25 bp, Homo sapien
aattcactcattttggaaacagtcc

SEQ ID NO: 525129 - DNA, 25 bp, Homo sapien
tataattcactcattttggaaacag

SEQ ID NO: 525130 - DNA, 25 bp, Homo sapien
taattcactcattttggaaacagtc

SEQ ID NO: 525131 - DNA, 25 bp, Homo sapien
ctataattcactcattttggaaaca

SEQ ID NO: 525132 - DNA, 25 bp, Homo sapien
ctccaccttcactgaagtggcctct

SEQ ID NO: 525133 - DNA, 25 bp, Homo sapien
tccaccttcactgaagtggcctctg

SEQ ID NO: 525134 - DNA, 25 bp, Homo sapien
tctccaccttcactgaagtggcctc

SEQ ID NO: 525135 - DNA, 25 bp, Homo sapien
caccttcactgaagtggcctctgga

SEQ ID NO: 525136 - DNA, 25 bp, Homo sapien
gtagttctgtggcacaagttctgga

SEQ ID NO: 525137 - DNA, 25 bp, Homo sapien
acttgtaggatacatctccaatatt

SEQ ID NO: 525138 - DNA, 25 bp, Homo sapien
ggatacatctccaatattaactgta

SEQ ID NO: 525139 - DNA, 25 bp, Homo sapien
tgtaggatacatctccaatattaac

SEQ ID NO: 525140 - DNA, 25 bp, Homo sapien
taatcacttggcctaaatgacattt

SEQ ID NO: 525141 - DNA, 25 bp, Homo sapien
tggcaaagaccaagtatagacgtaa

SEQ ID NO: 525142 - DNA, 25 bp, Homo sapien
gtagctctcttggtaaataatggaa

SEQ ID NO: 525143 - DNA, 25 bp, Homo sapien
tatggaacactacacccaacaacag

SEQ ID NO: 525144 - DNA, 25 bp, Homo sapien
aactgctcttactcaagtccagatc

SEQ ID NO: 525145 - DNA, 25 bp, Homo sapien
ttactcaagtccagatctctggtgg

SEQ ID NO: 525146 - DNA, 25 bp, Homo sapien
ttcagttacagttctcacaccctca

SEQ ID NO: 525147 - DNA, 25 bp, Homo sapien
tctcacaccctcaaaaaatacctct

SEQ ID NO: 525148 - DNA, 25 bp, Homo sapien
ggcgtgcaacagtctgacctccggc

SEQ ID NO: 525149 - DNA, 25 bp, Homo sapien
cccgagccggcgtgcaacagtctga

SEQ ID NO: 525150 - DNA, 25 bp, Homo sapien
gacctccggccgctgcctgtcgcca

SEQ ID NO: 525151 - DNA, 25 bp, Homo sapien
tgcctgtcgccacccggcctgcgct

SEQ ID NO: 525152 - DNA, 25 bp, Homo sapien
ggagcagccgcatgcgccgcgaggc

SEQ ID NO: 525153 - DNA, 25 bp, Homo sapien
tccgggtgccccgaggagtagaagc

SEQ ID NO: 525154 - DNA, 25 bp, Homo sapien
gcagccgcatgcgccgcgaggccgg

SEQ ID NO: 525155 - DNA, 25 bp, Homo sapien
cgggtgccccgaggagtagaagccg

SEQ ID NO: 525156 - DNA, 25 bp, Homo sapien
ctcggggatcgagcggcgtcccgtg

SEQ ID NO: 525157 - DNA, 25 bp, Homo sapien
ggcaccgtgaggcagcgcggagaag

SEQ ID NO: 525158 - DNA, 25 bp, Homo sapien
ggcagcgcggagaaggggacaggaa

SEQ ID NO: 525159 - DNA, 25 bp, Homo sapien
gggctcggggatcgagcggcgtccc

SEQ ID NO: 525160 - DNA, 25 bp, Homo sapien
tcaacatatttcacgttcctcacaa

SEQ ID NO: 525161 - DNA, 25 bp, Homo sapien
atcataaggattccaagctagctgc

SEQ ID NO: 525162 - DNA, 25 bp, Homo sapien
ttcacgttcctcacaaacaacgact

SEQ ID NO: 525163 - DNA, 25 bp, Homo sapien
gctgcccggcatcatcttcaacata

SEQ ID NO: 525164 - DNA, 25 bp, Homo sapien
cagagcaacacagggcattacaaat

SEQ ID NO: 525165 - DNA, 25 bp, Homo sapien
taccagaaaggccttggcttatcag

SEQ ID NO: 525166 - DNA, 25 bp, Homo sapien
ttagctttagactggaccacagaag

SEQ ID NO: 525167 - DNA, 25 bp, Homo sapien
cttatcaggttggtacagaaacagg

SEQ ID NO: 525168 - DNA, 25 bp, Homo sapien
taacacagtcttaggctctttctgc

SEQ ID NO: 525169 - DNA, 25 bp, Homo sapien
tctttctctcgttgatattcaggtt

SEQ ID NO: 525170 - DNA, 25 bp, Homo sapien
ggttgacaggcctgaagatcctttc

SEQ ID NO: 525171 - DNA, 25 bp, Homo sapien
ttttaacacagtcttaggctctttc

SEQ ID NO: 525172 - DNA, 25 bp, Homo sapien
tctgtgtgagtacccacaggttggg

SEQ ID NO: 525173 - DNA, 25 bp, Homo sapien
cctcactgggtgcatgatctgtgtg

SEQ ID NO: 525174 - DNA, 25 bp, Homo sapien
tctccagcagccactaatgggaccc

SEQ ID NO: 525175 - DNA, 25 bp, Homo sapien
ggtgcatgatctgtgtgagtaccca

SEQ ID NO: 525176 - DNA, 25 bp, Homo sapien
aggaggtaacaccagccaggtcagg

SEQ ID NO: 525177 - DNA, 25 bp, Homo sapien
caggcatgacacaggaggtaacacc

SEQ ID NO: 525178 - DNA, 25 bp, Homo sapien
tggaacccatttgtggcacaggcat

SEQ ID NO: 525179 - DNA, 25 bp, Homo sapien
caggccaagctcctgaagtcctagc

SEQ ID NO: 525180 - DNA, 25 bp, Homo sapien
tgcagtgcgtttctcttccttgtgt

SEQ ID NO: 525181 - DNA, 25 bp, Homo sapien
agggcagctgctgtatcctggggca

SEQ ID NO: 525182 - DNA, 25 bp, Homo sapien
cagtccaggtcataacaacagttaa

SEQ ID NO: 525183 - DNA, 25 bp, Homo sapien
gaaaacacactttagcactggattc

SEQ ID NO: 525184 - DNA, 25 bp, Homo sapien
ctgcccctggtgtcgaaggccaaca

SEQ ID NO: 525185 - DNA, 25 bp, Homo sapien
ccttttctgccgatgggcactcagc

SEQ ID NO: 525186 - DNA, 25 bp, Homo sapien
tgactcccgattccttttctgccga

SEQ ID NO: 525187 - DNA, 25 bp, Homo sapien
gaaggccaacaattggccactgctc

SEQ ID NO: 525188 - DNA, 25 bp, Homo sapien
ctcttggagatagggagaaataccc

SEQ ID NO: 525189 - DNA, 25 bp, Homo sapien
taggtggctccataaggcatgcatt

SEQ ID NO: 525190 - DNA, 25 bp, Homo sapien
taagacccctctagataggtggctc

SEQ ID NO: 525191 - DNA, 25 bp, Homo sapien
gtaaacctatagattcctggcagag

SEQ ID NO: 525192 - DNA, 25 bp, Homo sapien
accgctggcaaaccgctggcgacgg

SEQ ID NO: 525193 - DNA, 25 bp, Homo sapien
ctttgtccggctgatcgaggctctc

SEQ ID NO: 525194 - DNA, 25 bp, Homo sapien
gcctggagcgcctttgtccggctga

SEQ ID NO: 525195 - DNA, 25 bp, Homo sapien
gaggctctccccgaggaaccgctgg

SEQ ID NO: 525196 - DNA, 25 bp, Homo sapien
ggcgcgcaggttcccggggacacgc

SEQ ID NO: 525197 - DNA, 25 bp, Homo sapien
cgcaggttcccggggacacgcgcct

SEQ ID NO: 525198 - DNA, 25 bp, Homo sapien
ctgggcgcgcaggttcccggggaca

SEQ ID NO: 525199 - DNA, 25 bp, Homo sapien
caggttcccggggacacgcgcctgg

SEQ ID NO: 525200 - DNA, 25 bp, Homo sapien
tttgccggggacgaagcagaaagct

SEQ ID NO: 525201 - DNA, 25 bp, Homo sapien
cgactcctgccagccgctaaagctt

SEQ ID NO: 525202 - DNA, 25 bp, Homo sapien
gctgacttcgctttcgcctgggatt

SEQ ID NO: 525203 - DNA, 25 bp, Homo sapien
aagcttgggcgtctggagggtgcaa

SEQ ID NO: 525204 - DNA, 25 bp, Homo sapien
cagagtacgtttctcggcctgattc

SEQ ID NO: 525205 - DNA, 25 bp, Homo sapien
tgcctgttgagagccgctaggtcag

SEQ ID NO: 525206 - DNA, 25 bp, Homo sapien
cagggactctccgagtctgctcagg

SEQ ID NO: 525207 - DNA, 25 bp, Homo sapien
aacgtgttcggatgctgttttccca

SEQ ID NO: 525208 - DNA, 25 bp, Homo sapien
tcgtgaatttgaacatgtcgtcagg

SEQ ID NO: 525209 - DNA, 25 bp, Homo sapien
gaacatgtcgtcaggttgcccatct

SEQ ID NO: 525210 - DNA, 25 bp, Homo sapien
gctgtctttgctttcgtgaatttga

SEQ ID NO: 525211 - DNA, 25 bp, Homo sapien
ctttcagaagcgtccttcgactctg

SEQ ID NO: 525212 - DNA, 25 bp, Homo sapien
gcacctattatgttccgggactgtt

SEQ ID NO: 525213 - DNA, 25 bp, Homo sapien
ggatagcagttaccaacaacagaga

SEQ ID NO: 525214 - DNA, 25 bp, Homo sapien
cattcagagatcatggctatgtggc

SEQ ID NO: 525215 - DNA, 25 bp, Homo sapien
ggtcgtacagatatcaccaagtcca

SEQ ID NO: 525216 - DNA, 25 bp, Homo sapien
taccataaaagtatgctcatttaca

SEQ ID NO: 525217 - DNA, 25 bp, Homo sapien
aggtcagagttatgtaaaatttgct

SEQ ID NO: 525218 - DNA, 25 bp, Homo sapien
tttaccataaaagtatgctcattta

SEQ ID NO: 525219 - DNA, 25 bp, Homo sapien
ccataaaagtatgctcatttacatt

SEQ ID NO: 525220 - DNA, 25 bp, Homo sapien
gttcaataatgaacagatcctgttg

SEQ ID NO: 525221 - DNA, 25 bp, Homo sapien
tatgggataacataagggcatgtac

SEQ ID NO: 525222 - DNA, 25 bp, Homo sapien
gatcctgttgcattatcccttatgg

SEQ ID NO: 525223 - DNA, 25 bp, Homo sapien
actctcctcattgtttgaggcagtg

SEQ ID NO: 525224 - DNA, 25 bp, Homo sapien
ttttgatggaacctaaaacatgatg

SEQ ID NO: 525225 - DNA, 25 bp, Homo sapien
taaaacatgatggtgtgattctgcg

SEQ ID NO: 525226 - DNA, 25 bp, Homo sapien
tgattctgcgtggaactattcaggc

SEQ ID NO: 525227 - DNA, 25 bp, Homo sapien
ctgcgtggaactattcaggcagaag

SEQ ID NO: 525228 - DNA, 25 bp, Homo sapien
cagtttaatcactcgctgcctggat

SEQ ID NO: 525229 - DNA, 25 bp, Homo sapien
ccgagaagaggctagtaagtcaggt

SEQ ID NO: 525230 - DNA, 25 bp, Homo sapien
taatggattcgttgaaactggctct

SEQ ID NO: 525231 - DNA, 25 bp, Homo sapien
tggacttgtccatgaccaaacaggt

SEQ ID NO: 525232 - DNA, 25 bp, Homo sapien
tcgtcttgggctgcgtgtagtctct

SEQ ID NO: 525233 - DNA, 25 bp, Homo sapien
gggatcgctctttctgaacgaaaag

SEQ ID NO: 525234 - DNA, 25 bp, Homo sapien
gaacgaaaagttctcagagcggagc

SEQ ID NO: 525235 - DNA, 25 bp, Homo sapien
ggagctgaacctcccggaaaatgct

SEQ ID NO: 525236 - DNA, 25 bp, Homo sapien
cattcttccccagggatcggcgttg

SEQ ID NO: 525237 - DNA, 25 bp, Homo sapien
gaggcccaagtgtctctggagagat

SEQ ID NO: 525238 - DNA, 25 bp, Homo sapien
agcccccgactgtcttggtggcaga

SEQ ID NO: 525239 - DNA, 25 bp, Homo sapien
ttttattcagctggaaccgcgcggc

SEQ ID NO: 525240 - DNA, 25 bp, Homo sapien
tgcgggatgcctattgggctcgagc

SEQ ID NO: 525241 - DNA, 25 bp, Homo sapien
cttaacttgttcatcctttcttact

SEQ ID NO: 525242 - DNA, 25 bp, Homo sapien
ttgggctcgagctgcttattaaaga

SEQ ID NO: 525243 - DNA, 25 bp, Homo sapien
tcagatgttcagaatgccgctgtat

SEQ ID NO: 525244 - DNA, 25 bp, Homo sapien
gggtacaaagtttctaattgagcca

SEQ ID NO: 525245 - DNA, 25 bp, Homo sapien
cagtagactcatgttggaaactaaa

SEQ ID NO: 525246 - DNA, 25 bp, Homo sapien
tagactcatgttggaaactaaattg

SEQ ID NO: 525247 - DNA, 25 bp, Homo sapien
agtagactcatgttggaaactaaat

SEQ ID NO: 525248 - DNA, 25 bp, Homo sapien
gactcatgttggaaactaaattgaa

SEQ ID NO: 525249 - DNA, 25 bp, Homo sapien
tgatcatgacctcgttttgtaatta

SEQ ID NO: 525250 - DNA, 25 bp, Homo sapien
gatcatgacctcgttttgtaattac

SEQ ID NO: 525251 - DNA, 25 bp, Homo sapien
tatgatcatgacctcgttttgtaat

SEQ ID NO: 525252 - DNA, 25 bp, Homo sapien
aatatgatcatgacctcgttttgta

SEQ ID NO: 525253 - DNA, 25 bp, Homo sapien
tggtatggaaagcaggatcccccag

SEQ ID NO: 525254 - DNA, 25 bp, Homo sapien
gccaacaaggctcagcagagtaatt

SEQ ID NO: 525255 - DNA, 25 bp, Homo sapien
gtatggaaagcaggatcccccagat

SEQ ID NO: 525256 - DNA, 25 bp, Homo sapien
gctcagcagagtaattggtatggaa

SEQ ID NO: 525257 - DNA, 25 bp, Homo sapien
catccaaataatttcagggatcgac

SEQ ID NO: 525258 - DNA, 25 bp, Homo sapien
tccatccaaataatttcagggatcg

SEQ ID NO: 525259 - DNA, 25 bp, Homo sapien
ctccatccaaataatttcagggatc

SEQ ID NO: 525260 - DNA, 25 bp, Homo sapien
ccatccaaataatttcagggatcga

SEQ ID NO: 525261 - DNA, 25 bp, Homo sapien
gttgttatgtataggccaatcatgc

SEQ ID NO: 525262 - DNA, 25 bp, Homo sapien
tatgtataggccaatcatgctctga

SEQ ID NO: 525263 - DNA, 25 bp, Homo sapien
acagagctcttggattaagctgaac

SEQ ID NO: 525264 - DNA, 25 bp, Homo sapien
gattaagctgaacttcatcaatatc

SEQ ID NO: 525265 - DNA, 25 bp, Homo sapien
cagtgcttcgcgactaattcctgga

SEQ ID NO: 525266 - DNA, 25 bp, Homo sapien
tgtgcaacaggaatagattctaaag

SEQ ID NO: 525267 - DNA, 25 bp, Homo sapien
tgacgatcttcctcatgtgcaacag

SEQ ID NO: 525268 - DNA, 25 bp, Homo sapien
gaacatatgctcatgtaaggatggg

SEQ ID NO: 525269 - DNA, 25 bp, Homo sapien
ttttacaaaacagtcagcatttcag

SEQ ID NO: 525270 - DNA, 25 bp, Homo sapien
atttcagcagagatgcagcctgcag

SEQ ID NO: 525271 - DNA, 25 bp, Homo sapien
gcatttcagcagagatgcagcctgc

SEQ ID NO: 525272 - DNA, 25 bp, Homo sapien
agggttttacaaaacagtcagcatt

SEQ ID NO: 525273 - DNA, 25 bp, Homo sapien
gaaagtaaaagacatggagatctgt

SEQ ID NO: 525274 - DNA, 25 bp, Homo sapien
caatggctttagtataattattagg

SEQ ID NO: 525275 - DNA, 25 bp, Homo sapien
ttaggagaaagtaaaagacatggag

SEQ ID NO: 525276 - DNA, 25 bp, Homo sapien
ggctttagtataattattaggagaa

SEQ ID NO: 525277 - DNA, 25 bp, Homo sapien
agtaaccaatccttcaaaagatgac

SEQ ID NO: 525278 - DNA, 25 bp, Homo sapien
ttagtaaccaatccttcaaaagatg

SEQ ID NO: 525279 - DNA, 25 bp, Homo sapien
catttagtaaccaatccttcaaaag

SEQ ID NO: 525280 - DNA, 25 bp, Homo sapien
tagtaaccaatccttcaaaagatga

SEQ ID NO: 525281 - DNA, 25 bp, Homo sapien
cacatcatctgttaattggctccca

SEQ ID NO: 525282 - DNA, 25 bp, Homo sapien
ggctcccactgggaccaggaatttc

SEQ ID NO: 525283 - DNA, 25 bp, Homo sapien
gtttagttccgtaagagagcccaca

SEQ ID NO: 525284 - DNA, 25 bp, Homo sapien
gatttcacatagagcatgtttgaca

SEQ ID NO: 525285 - DNA, 25 bp, Homo sapien
gttttaagtccatatacgtagaatc

SEQ ID NO: 525286 - DNA, 25 bp, Homo sapien
acaagtaattgcctccacaacccag

SEQ ID NO: 525287 - DNA, 25 bp, Homo sapien
ccatatacgtagaatccagatcaaa

SEQ ID NO: 525288 - DNA, 25 bp, Homo sapien
taattgcctccacaacccagtggtt

SEQ ID NO: 525289 - DNA, 25 bp, Homo sapien
ccactttgaaacccttatgattgcc

SEQ ID NO: 525290 - DNA, 25 bp, Homo sapien
tgccactttgaaacccttatgattg

SEQ ID NO: 525291 - DNA, 25 bp, Homo sapien
gccactttgaaacccttatgattgc

SEQ ID NO: 525292 - DNA, 25 bp, Homo sapien
cactttgaaacccttatgattgcct

SEQ ID NO: 525293 - DNA, 25 bp, Homo sapien
gaagaaaactggcatcaaaaggaaa

SEQ ID NO: 525294 - DNA, 25 bp, Homo sapien
agaaaactggcatcaaaaggaaaga

SEQ ID NO: 525295 - DNA, 25 bp, Homo sapien
aaggaagaaaactggcatcaaaagg

SEQ ID NO: 525296 - DNA, 25 bp, Homo sapien
aggaagaaaactggcatcaaaagga

SEQ ID NO: 525297 - DNA, 25 bp, Homo sapien
acaccgacccgtgagagagggccat

SEQ ID NO: 525298 - DNA, 25 bp, Homo sapien
taacaccgacccgtgagagagggcc

SEQ ID NO: 525299 - DNA, 25 bp, Homo sapien
aacaccgacccgtgagagagggcca

SEQ ID NO: 525300 - DNA, 25 bp, Homo sapien
gataatggccaattgaagagagaaa

SEQ ID NO: 525301 - DNA, 25 bp, Homo sapien
aagaaaatcaacccccaacatagag

SEQ ID NO: 525302 - DNA, 25 bp, Homo sapien
ctgtcatattcttgtcacgcaaact

SEQ ID NO: 525303 - DNA, 25 bp, Homo sapien
tgtcacgcaaactttctgtactggc

SEQ ID NO: 525304 - DNA, 25 bp, Homo sapien
gcagtttggtttagatattcttctt

SEQ ID NO: 525305 - DNA, 25 bp, Homo sapien
gagaaaggcactccatattgacatt

SEQ ID NO: 525306 - DNA, 25 bp, Homo sapien
aaataatgctaggttgctccaagta

SEQ ID NO: 525307 - DNA, 25 bp, Homo sapien
tttcttgtagaaggttagatgcccc

SEQ ID NO: 525308 - DNA, 25 bp, Homo sapien
tctgtggacatcagtaatactctgt

SEQ ID NO: 525309 - DNA, 25 bp, Homo sapien
gctaaaagcctacactcattaaggt

SEQ ID NO: 525310 - DNA, 25 bp, Homo sapien
cactcattaaggtgtttttaattag

SEQ ID NO: 525311 - DNA, 25 bp, Homo sapien
aattgaaaattaggccagggcacgg

SEQ ID NO: 525312 - DNA, 25 bp, Homo sapien
gtagagctaaaagcctacactcatt

SEQ ID NO: 525313 - DNA, 25 bp, Homo sapien
ccgcatgagtgctatccttagcaaa

SEQ ID NO: 525314 - DNA, 25 bp, Homo sapien
gcaaagtgcctgaatcaattccagg

SEQ ID NO: 525315 - DNA, 25 bp, Homo sapien
ttgctgtgcaccaaatgcagtcccc

SEQ ID NO: 525316 - DNA, 25 bp, Homo sapien
aagtccctgctctcccgcatgagtg

SEQ ID NO: 525317 - DNA, 25 bp, Homo sapien
ctccccttgttcccgctgtagttct

SEQ ID NO: 525318 - DNA, 25 bp, Homo sapien
cttgttcccgctgtagttcttccac

SEQ ID NO: 525319 - DNA, 25 bp, Homo sapien
cgccattctcctgtaagcggggaca

SEQ ID NO: 525320 - DNA, 25 bp, Homo sapien
cattctcctgtaagcggggacatca

SEQ ID NO: 525321 - DNA, 25 bp, Homo sapien
ccgatgaaggaggttgacagatgga

SEQ ID NO: 525322 - DNA, 25 bp, Homo sapien
ggctgatacgaaagccaggcttgaa

SEQ ID NO: 525323 - DNA, 25 bp, Homo sapien
gcagtttcacaggtggccgatgaag

SEQ ID NO: 525324 - DNA, 25 bp, Homo sapien
cattgctgagatatgagttccggca

SEQ ID NO: 525325 - DNA, 25 bp, Homo sapien
gtctttgccctcttaaaggccgcga

SEQ ID NO: 525326 - DNA, 25 bp, Homo sapien
ttgccctcttaaaggccgcgacctg

SEQ ID NO: 525327 - DNA, 25 bp, Homo sapien
aaatgggtaggttgctgtctttgcc

SEQ ID NO: 525328 - DNA, 25 bp, Homo sapien
ttacaaaaatgggtaggttgctgtc

SEQ ID NO: 525329 - DNA, 25 bp, Homo sapien
tgaatgggcatgactggactgcata

SEQ ID NO: 525330 - DNA, 25 bp, Homo sapien
gctcatcatataactctccggaatc

SEQ ID NO: 525331 - DNA, 25 bp, Homo sapien
agtggctgcaggcttcccgtatttc

SEQ ID NO: 525332 - DNA, 25 bp, Homo sapien
ccagatgctacggtgatgcagctca

SEQ ID NO: 525333 - DNA, 25 bp, Homo sapien
caccttcactagtagccttccagaa

SEQ ID NO: 525334 - DNA, 25 bp, Homo sapien
tttgtagctagacgaaaatcttggg

SEQ ID NO: 525335 - DNA, 25 bp, Homo sapien
agaagaacagaaccggtgtctccac

SEQ ID NO: 525336 - DNA, 25 bp, Homo sapien
agtcttagggcgtaagaaaccattg

SEQ ID NO: 525337 - DNA, 25 bp, Homo sapien
ggtcttggggctggttataaatctg

SEQ ID NO: 525338 - DNA, 25 bp, Homo sapien
tgtgtgccatgttgtagctcccagt

SEQ ID NO: 525339 - DNA, 25 bp, Homo sapien
gccatgttgtagctcccagtgcatg

SEQ ID NO: 525340 - DNA, 25 bp, Homo sapien
ggttataaatctgcagttcactcat

SEQ ID NO: 525341 - DNA, 25 bp, Homo sapien
gaggtggagggttggccagctgtca

SEQ ID NO: 525342 - DNA, 25 bp, Homo sapien
gatgctctcggaaccttctggtaag

SEQ ID NO: 525343 - DNA, 25 bp, Homo sapien
tagcacatctaaggtctttgggaca

SEQ ID NO: 525344 - DNA, 25 bp, Homo sapien
tcggttgccacaggttgagacttgc

SEQ ID NO: 525345 - DNA, 25 bp, Homo sapien
ccaggataaggacatagattagctt

SEQ ID NO: 525346 - DNA, 25 bp, Homo sapien
ggattcagcaggaagaccaccttag

SEQ ID NO: 525347 - DNA, 25 bp, Homo sapien
tgtcaggatgttcagggaaaccagg

SEQ ID NO: 525348 - DNA, 25 bp, Homo sapien
tttgataggagtgatggattcagca

SEQ ID NO: 525349 - DNA, 25 bp, Homo sapien
gacttctgtgaagtaacagttagaa

SEQ ID NO: 525350 - DNA, 25 bp, Homo sapien
agacttctgtgaagtaacagttaga

SEQ ID NO: 525351 - DNA, 25 bp, Homo sapien
gagacttctgtgaagtaacagttag

SEQ ID NO: 525352 - DNA, 25 bp, Homo sapien
cagctgcagtggttgccatctggac

SEQ ID NO: 525353 - DNA, 25 bp, Homo sapien
agctgcagtggttgccatctggacc

SEQ ID NO: 525354 - DNA, 25 bp, Homo sapien
atctggaccatcagacctggctgcc

SEQ ID NO: 525355 - DNA, 25 bp, Homo sapien
acctggctgccaggatgcagcagca

SEQ ID NO: 525356 - DNA, 25 bp, Homo sapien
ttgttagccaatagaatagcctccc

SEQ ID NO: 525357 - DNA, 25 bp, Homo sapien
tgccattgtaataggaggccttcct

SEQ ID NO: 525358 - DNA, 25 bp, Homo sapien
tatggcatcccctgattgacttttg

SEQ ID NO: 525359 - DNA, 25 bp, Homo sapien
tatagcaacctctgtgtcaagtcag

SEQ ID NO: 525360 - DNA, 25 bp, Homo sapien
taaatgtggatcagaccataccctg

SEQ ID NO: 525361 - DNA, 25 bp, Homo sapien
caatacctagagatgggaacatggt

SEQ ID NO: 525362 - DNA, 25 bp, Homo sapien
ggagaactagtcagacacacttagc

SEQ ID NO: 525363 - DNA, 25 bp, Homo sapien
cttggtgtccccagttagaaatggc

SEQ ID NO: 525364 - DNA, 25 bp, Homo sapien
tacttggcactcaattagattctgg

SEQ ID NO: 525365 - DNA, 25 bp, Homo sapien
taattaactgaaatgccctgttcct

SEQ ID NO: 525366 - DNA, 25 bp, Homo sapien
gctcccatctggtagagtccaagtt

SEQ ID NO: 525367 - DNA, 25 bp, Homo sapien
caggttacttcagagaggagtctcc

SEQ ID NO: 525368 - DNA, 25 bp, Homo sapien
ctttgctgaaagtaatggttgatcc

SEQ ID NO: 525369 - DNA, 25 bp, Homo sapien
tattgtacggaagtcactgacgtgt

SEQ ID NO: 525370 - DNA, 25 bp, Homo sapien
tcggtgccttttattgtgggatgca

SEQ ID NO: 525371 - DNA, 25 bp, Homo sapien
tactaagtgaccagttttcggtgcc

SEQ ID NO: 525372 - DNA, 25 bp, Homo sapien
tatagacataaagttgattggctgc

SEQ ID NO: 525373 - DNA, 25 bp, Homo sapien
ctgtaaatctaccagaagcactgaa

SEQ ID NO: 525374 - DNA, 25 bp, Homo sapien
ggctgctactgagtatgtgagtttc

SEQ ID NO: 525375 - DNA, 25 bp, Homo sapien
tatggtaaatggattacatctcagt

SEQ ID NO: 525376 - DNA, 25 bp, Homo sapien
ctctggctaggcttcccagtgacca

SEQ ID NO: 525377 - DNA, 25 bp, Homo sapien
ggctaggcttcccagtgaccaaagc

SEQ ID NO: 525378 - DNA, 25 bp, Homo sapien
ctggctaggcttcccagtgaccaaa

SEQ ID NO: 525379 - DNA, 25 bp, Homo sapien
tctggctaggcttcccagtgaccaa

SEQ ID NO: 525380 - DNA, 25 bp, Homo sapien
cctgagaaccctggaagctacttct

SEQ ID NO: 525381 - DNA, 25 bp, Homo sapien
tccataccacgtaaagacatcaggg

SEQ ID NO: 525382 - DNA, 25 bp, Homo sapien
gctacttcttggctgggatagggct

SEQ ID NO: 525383 - DNA, 25 bp, Homo sapien
catcagggtgagcactagggccctg

SEQ ID NO: 525384 - DNA, 25 bp, Homo sapien
tagccttgtggcgaagaaggagccc

SEQ ID NO: 525385 - DNA, 25 bp, Homo sapien
aaagcaaaactagccttgtggcgaa

SEQ ID NO: 525386 - DNA, 25 bp, Homo sapien
ttccttgggccttcggatctggtgg

SEQ ID NO: 525387 - DNA, 25 bp, Homo sapien
ggcggagccatcagaaaggatgagc

SEQ ID NO: 525388 - DNA, 25 bp, Homo sapien
acggaaggcgtcaaggggctcctca

SEQ ID NO: 525389 - DNA, 25 bp, Homo sapien
catttgcagcggttgggaggacgtt

SEQ ID NO: 525390 - DNA, 25 bp, Homo sapien
tgctcagatcttgtaaacggaaggc

SEQ ID NO: 525391 - DNA, 25 bp, Homo sapien
ttgcactttgttcccgaacagcatc

SEQ ID NO: 525392 - DNA, 25 bp, Homo sapien
tcctcctgacaaaactgacccaggg

SEQ ID NO: 525393 - DNA, 25 bp, Homo sapien
ttgtcgttgttcctcctgacaaaac

SEQ ID NO: 525394 - DNA, 25 bp, Homo sapien
gggtggacagtgaatgtcactattg

SEQ ID NO: 525395 - DNA, 25 bp, Homo sapien
tcaaacggtaccctgattattcatt

SEQ ID NO: 525396 - DNA, 25 bp, Homo sapien
gactgccatttatttgtggttcctt

SEQ ID NO: 525397 - DNA, 25 bp, Homo sapien
actgccatttatttgtggttccttt

SEQ ID NO: 525398 - DNA, 25 bp, Homo sapien
tgtggttccttttatgccggtcctg

SEQ ID NO: 525399 - DNA, 25 bp, Homo sapien
gttggcttctatgttttatgttaca

SEQ ID NO: 525400 - DNA, 25 bp, Homo sapien
ggaacccttatgttggcttctatgt

SEQ ID NO: 525401 - DNA, 25 bp, Homo sapien
gacagtctctggtttcttggaaccc

SEQ ID NO: 525402 - DNA, 25 bp, Homo sapien
catttgagaaaagcccacttgcctc

SEQ ID NO: 525403 - DNA, 25 bp, Homo sapien
gggaactccttgtgttaggctgagc

SEQ ID NO: 525404 - DNA, 25 bp, Homo sapien
gaactccttgtgttaggctgagcct

SEQ ID NO: 525405 - DNA, 25 bp, Homo sapien
gtgctgttgggaactccttgtgtta

SEQ ID NO: 525406 - DNA, 25 bp, Homo sapien
tgttgggaactccttgtgttaggct

SEQ ID NO: 525407 - DNA, 25 bp, Homo sapien
ttttgagtgtttcacctggcaggtg

SEQ ID NO: 525408 - DNA, 25 bp, Homo sapien
ggtcaaatgcagataccgagtggtt

SEQ ID NO: 525409 - DNA, 25 bp, Homo sapien
atgaatggacaagatactgtggtca

SEQ ID NO: 525410 - DNA, 25 bp, Homo sapien
agttccccacttctactctttattg

SEQ ID NO: 525411 - DNA, 25 bp, Homo sapien
tacagtcacctagttagaagtggca

SEQ ID NO: 525412 - DNA, 25 bp, Homo sapien
cttcccacttaggatagtttggctt

SEQ ID NO: 525413 - DNA, 25 bp, Homo sapien
aatacccatttggaggcacaaagag

SEQ ID NO: 525414 - DNA, 25 bp, Homo sapien
tcctggttagatgaaaaatgtatac

SEQ ID NO: 525415 - DNA, 25 bp, Homo sapien
ttatctgacaatgaactacatgggt

SEQ ID NO: 525416 - DNA, 25 bp, Homo sapien
ctgtgtgatgggtagaaaaatttta

SEQ ID NO: 525417 - DNA, 25 bp, Homo sapien
gacagtttgatcatgttagagtgaa

SEQ ID NO: 525418 - DNA, 25 bp, Homo sapien
gaacatatgttaaaaagaccctgct

SEQ ID NO: 525419 - DNA, 25 bp, Homo sapien
gacctgagagaatgttaacctgttt

SEQ ID NO: 525420 - DNA, 25 bp, Homo sapien
tgttttgcactatctaaagacctga

SEQ ID NO: 525421 - DNA, 25 bp, Homo sapien
gactggccaactagacaagtgtaat

SEQ ID NO: 525422 - DNA, 25 bp, Homo sapien
ggctattctagctgtattctgaaga

SEQ ID NO: 525423 - DNA, 25 bp, Homo sapien
gccttttctcaagtaacatctgtga

SEQ ID NO: 525424 - DNA, 25 bp, Homo sapien
gattgtttaactagctttactgagg

SEQ ID NO: 525425 - DNA, 25 bp, Homo sapien
taaatgcatgtggttacgtattctc

SEQ ID NO: 525426 - DNA, 25 bp, Homo sapien
cagttattctaaaggctatacatcg

SEQ ID NO: 525427 - DNA, 25 bp, Homo sapien
cattgactaggacactttgggtgaa

SEQ ID NO: 525428 - DNA, 25 bp, Homo sapien
gaggctagagtgtgtattccagaaa

SEQ ID NO: 525429 - DNA, 25 bp, Homo sapien
cacactatatgttgtggaaggaaaa

SEQ ID NO: 525430 - DNA, 25 bp, Homo sapien
caaaagcatgtcgtgagtggtgaca

SEQ ID NO: 525431 - DNA, 25 bp, Homo sapien
tatttggttgctctatagtcaaaca

SEQ ID NO: 525432 - DNA, 25 bp, Homo sapien
cattgtaatattgctgtgctgtaca

SEQ ID NO: 525433 - DNA, 25 bp, Homo sapien
gatgtacatcgagctgaattctgtt

SEQ ID NO: 525434 - DNA, 25 bp, Homo sapien
tacaaattggcttgacatatttata

SEQ ID NO: 525435 - DNA, 25 bp, Homo sapien
tcctttcatagggtagagttctagt

SEQ ID NO: 525436 - DNA, 25 bp, Homo sapien
caaaatacgaactttgagatgcact

SEQ ID NO: 525437 - DNA, 25 bp, Homo sapien
ggctgtgctcagttactatattaag

SEQ ID NO: 525438 - DNA, 25 bp, Homo sapien
caagactcctctaagcatttactca

SEQ ID NO: 525439 - DNA, 25 bp, Homo sapien
gaaaatacagagctcccgtataccc

SEQ ID NO: 525440 - DNA, 25 bp, Homo sapien
tttgcccagcctccttcggtgtcaa

SEQ ID NO: 525441 - DNA, 25 bp, Homo sapien
tttgttacaatctgtggtcctgcgt

SEQ ID NO: 525442 - DNA, 25 bp, Homo sapien
ggtcctgcgttgacacacacaccat

SEQ ID NO: 525443 - DNA, 25 bp, Homo sapien
ggccttttcaagtttggcaatgatg

SEQ ID NO: 525444 - DNA, 25 bp, Homo sapien
ctttggccttttcaagtttggcaat

SEQ ID NO: 525445 - DNA, 25 bp, Homo sapien
ttggccttttcaagtttggcaatga

SEQ ID NO: 525446 - DNA, 25 bp, Homo sapien
ccttttcaagtttggcaatgatgaa

SEQ ID NO: 525447 - DNA, 25 bp, Homo sapien
ggcctgtcttcataggcgccacctg

SEQ ID NO: 525448 - DNA, 25 bp, Homo sapien
catccccactcggaatcgggagggt

SEQ ID NO: 525449 - DNA, 25 bp, Homo sapien
ccaggttccctcctcagattcaggc

SEQ ID NO: 525450 - DNA, 25 bp, Homo sapien
agaactgctcccctgtggtcatggg

SEQ ID NO: 525451 - DNA, 25 bp, Homo sapien
gaacaagttagcttccctgcagtcc

SEQ ID NO: 525452 - DNA, 25 bp, Homo sapien
ccatttgaaatgtgcgttctcctct

SEQ ID NO: 525453 - DNA, 25 bp, Homo sapien
ttaggagatgaactttccatttgaa

SEQ ID NO: 525454 - DNA, 25 bp, Homo sapien
gacttgagctcagaattaggagatg

SEQ ID NO: 525455 - DNA, 25 bp, Homo sapien
ggtaggattcttggcataccctgaa

SEQ ID NO: 525456 - DNA, 25 bp, Homo sapien
tgcattgtcaacagcagctgtcctc

SEQ ID NO: 525457 - DNA, 25 bp, Homo sapien
ggattcttggcataccctgaagcat

SEQ ID NO: 525458 - DNA, 25 bp, Homo sapien
cctccaggtaggattcttggcatac

SEQ ID NO: 525459 - DNA, 25 bp, Homo sapien
ctggaagcacttgtgttttttagca

SEQ ID NO: 525460 - DNA, 25 bp, Homo sapien
tctggaagcacttgtgttttttagc

SEQ ID NO: 525461 - DNA, 25 bp, Homo sapien
ttctcttgctgttgacgtgtggatc

SEQ ID NO: 525462 - DNA, 25 bp, Homo sapien
ctctgttaaccctggatccttaatg

SEQ ID NO: 525463 - DNA, 25 bp, Homo sapien
tgtggatcaactctgttaaccctgg

SEQ ID NO: 525464 - DNA, 25 bp, Homo sapien
gctgttgacgtgtggatcaactctg

SEQ ID NO: 525465 - DNA, 25 bp, Homo sapien
tgtataatgtgccaaaccttcccac

SEQ ID NO: 525466 - DNA, 25 bp, Homo sapien
gtataatgtgccaaaccttcccacc

SEQ ID NO: 525467 - DNA, 25 bp, Homo sapien
ataaaacttcgatgtataatgtgcc

SEQ ID NO: 525468 - DNA, 25 bp, Homo sapien
ctaatataaaacttcgatgtataat

SEQ ID NO: 525469 - DNA, 25 bp, Homo sapien
gaggtagataggcattttcataatc

SEQ ID NO: 525470 - DNA, 25 bp, Homo sapien
ttcgagggagaggtagataggcatt

SEQ ID NO: 525471 - DNA, 25 bp, Homo sapien
atttcgagggagaggtagataggca

SEQ ID NO: 525472 - DNA, 25 bp, Homo sapien
agggagaggtagataggcattttca

SEQ ID NO: 525473 - DNA, 25 bp, Homo sapien
gtcaaagggtaacagaggaacagtc

SEQ ID NO: 525474 - DNA, 25 bp, Homo sapien
cagtgacagcgcaggcagacgatac

SEQ ID NO: 525475 - DNA, 25 bp, Homo sapien
cagaggaacagtcagtgacagcgca

SEQ ID NO: 525476 - DNA, 25 bp, Homo sapien
aagggtaacagaggaacagtcagtg

SEQ ID NO: 525477 - DNA, 25 bp, Homo sapien
tgcgagtgtaaaccgcagtgccctg

SEQ ID NO: 525478 - DNA, 25 bp, Homo sapien
gagtttcccatcacttagctctggc

SEQ ID NO: 525479 - DNA, 25 bp, Homo sapien
gagcttccaggtgcacaggaaggca

SEQ ID NO: 525480 - DNA, 25 bp, Homo sapien
gcccgttacacttctgcaggtgaaa

SEQ ID NO: 525481 - DNA, 25 bp, Homo sapien
gcattgattgttgacaggacaccaa

SEQ ID NO: 525482 - DNA, 25 bp, Homo sapien
tctgctttaggattgatagatgccc

SEQ ID NO: 525483 - DNA, 25 bp, Homo sapien
catttaagctgatttgtggcccatc

SEQ ID NO: 525484 - DNA, 25 bp, Homo sapien
gcaggtctcacataatctgtccagg

SEQ ID NO: 525485 - DNA, 25 bp, Homo sapien
tgtgaggccagtacactctgtgtgt

SEQ ID NO: 525486 - DNA, 25 bp, Homo sapien
gtgtgtctcctctagtctacagcca

SEQ ID NO: 525487 - DNA, 25 bp, Homo sapien
tgtctcctctagtctacagccaatt

SEQ ID NO: 525488 - DNA, 25 bp, Homo sapien
tgaggccagtacactctgtgtgtct

SEQ ID NO: 525489 - DNA, 25 bp, Homo sapien
tgaggtatgaggactctccctgaga

SEQ ID NO: 525490 - DNA, 25 bp, Homo sapien
tcagaactgttgtgccttgtcatca

SEQ ID NO: 525491 - DNA, 25 bp, Homo sapien
tatatcgtagcctctgtcagaactg

SEQ ID NO: 525492 - DNA, 25 bp, Homo sapien
tactgcaggtgaccgaaactggact

SEQ ID NO: 525493 - DNA, 25 bp, Homo sapien
gccacaaccgcaggcgtcctttgct

SEQ ID NO: 525494 - DNA, 25 bp, Homo sapien
cacaaccgcaggcgtcctttgctga

SEQ ID NO: 525495 - DNA, 25 bp, Homo sapien
ctgccacaaccgcaggcgtcctttg

SEQ ID NO: 525496 - DNA, 25 bp, Homo sapien
tgccacaaccgcaggcgtcctttgc

SEQ ID NO: 525497 - DNA, 25 bp, Homo sapien
gctgacatgagtgtgccggtgctcc

SEQ ID NO: 525498 - DNA, 25 bp, Homo sapien
ggccagctgacatgagtgtgccggt

SEQ ID NO: 525499 - DNA, 25 bp, Homo sapien
gaggccagctgacatgagtgtgccg

SEQ ID NO: 525500 - DNA, 25 bp, Homo sapien
ccagctgacatgagtgtgccggtgc

SEQ ID NO: 525501 - DNA, 25 bp, Homo sapien
gaaaccagcgcacgcagatggctat

SEQ ID NO: 525502 - DNA, 25 bp, Homo sapien
tattgtctgtatgttgatttcctcc

SEQ ID NO: 525503 - DNA, 25 bp, Homo sapien
catttgaaggaagccgaaaccagcg

SEQ ID NO: 525504 - DNA, 25 bp, Homo sapien
tgacctggaccatcagttctcaaaa

SEQ ID NO: 525505 - DNA, 25 bp, Homo sapien
ggcaaggagcgtgcctctgaaagct

SEQ ID NO: 525506 - DNA, 25 bp, Homo sapien
cactgttacgctgtaagctttcttc

SEQ ID NO: 525507 - DNA, 25 bp, Homo sapien
ctgatggccataggcaaggagcgtg

SEQ ID NO: 525508 - DNA, 25 bp, Homo sapien
ggccataggcaaggagcgtgcctct

SEQ ID NO: 525509 - DNA, 25 bp, Homo sapien
cagaaaggacaaagaacagctggcc

SEQ ID NO: 525510 - DNA, 25 bp, Homo sapien
gcagaaaggacaaagaacagctggc

SEQ ID NO: 525511 - DNA, 25 bp, Homo sapien
caggcagaaaggacaaagaacagct

SEQ ID NO: 525512 - DNA, 25 bp, Homo sapien
ctgcaggcagaaaggacaaagaaca

SEQ ID NO: 525513 - DNA, 25 bp, Homo sapien
ctgggctggtgtgccgtcacccgaa

SEQ ID NO: 525514 - DNA, 25 bp, Homo sapien
caggcttgcctggatgggaatccac

SEQ ID NO: 525515 - DNA, 25 bp, Homo sapien
cacccgaagcagtatagttgaacag

SEQ ID NO: 525516 - DNA, 25 bp, Homo sapien
agagcaacactaaacccatgcagct

SEQ ID NO: 525517 - DNA, 25 bp, Homo sapien
tttccatctcctggatgcttttccc

SEQ ID NO: 525518 - DNA, 25 bp, Homo sapien
cctttccatctcctggatgcttttc

SEQ ID NO: 525519 - DNA, 25 bp, Homo sapien
ctccctttccatctcctggatgctt

SEQ ID NO: 525520 - DNA, 25 bp, Homo sapien
ccatctcctggatgcttttccccat

SEQ ID NO: 525521 - DNA, 25 bp, Homo sapien
tgacatgctgtttcaagacctgtat

SEQ ID NO: 525522 - DNA, 25 bp, Homo sapien
atttggaacatggagtcatagctgc

SEQ ID NO: 525523 - DNA, 25 bp, Homo sapien
gtcttctttcggcaatgcttggatt

SEQ ID NO: 525524 - DNA, 25 bp, Homo sapien
tgtattgtcttctttcggcaatgct

SEQ ID NO: 525525 - DNA, 25 bp, Homo sapien
ccattagtcatctttgccagatggg

SEQ ID NO: 525526 - DNA, 25 bp, Homo sapien
gatgtcagtgggaaagtcccattag

SEQ ID NO: 525527 - DNA, 25 bp, Homo sapien
gacacctccgcatggctgtacatgt

SEQ ID NO: 525528 - DNA, 25 bp, Homo sapien
tgggttttggccacacgtctcatcc

SEQ ID NO: 525529 - DNA, 25 bp, Homo sapien
aattctggctcaagatagaacccag

SEQ ID NO: 525530 - DNA, 25 bp, Homo sapien
tattacatgtaaccagagtcagagg

SEQ ID NO: 525531 - DNA, 25 bp, Homo sapien
ttccactgggtactccgccggcgat

SEQ ID NO: 525532 - DNA, 25 bp, Homo sapien
gaacccagagagtaaagtcccctga

SEQ ID NO: 525533 - DNA, 25 bp, Homo sapien
ctctcctgctccgtggaggtgatgt

SEQ ID NO: 525534 - DNA, 25 bp, Homo sapien
tctcctgctccgtggaggtgatgtg

SEQ ID NO: 525535 - DNA, 25 bp, Homo sapien
ctaaaatgcatgcccaggaccagac

SEQ ID NO: 525536 - DNA, 25 bp, Homo sapien
aggaccagaccccttgctctgttct

SEQ ID NO: 525537 - DNA, 25 bp, Homo sapien
atattctttggggaccatcaggtca

SEQ ID NO: 525538 - DNA, 25 bp, Homo sapien
ccagtaattagaaagatattctttg

SEQ ID NO: 525539 - DNA, 25 bp, Homo sapien
tcaggtcacaaagtttgatggggtt

SEQ ID NO: 525540 - DNA, 25 bp, Homo sapien
ttttccagtaattagaaagatattc

SEQ ID NO: 525541 - DNA, 25 bp, Homo sapien
ctgcagaatgagcttgatggagccc

SEQ ID NO: 525542 - DNA, 25 bp, Homo sapien
gcagaatgagcttgatggagcccat

SEQ ID NO: 525543 - DNA, 25 bp, Homo sapien
cctgcagaatgagcttgatggagcc

SEQ ID NO: 525544 - DNA, 25 bp, Homo sapien
tgcagaatgagcttgatggagccca

SEQ ID NO: 525545 - DNA, 25 bp, Homo sapien
tgggatgaagccctttccagtggct

SEQ ID NO: 525546 - DNA, 25 bp, Homo sapien
ctgggatgaagccctttccagtggc

SEQ ID NO: 525547 - DNA, 25 bp, Homo sapien
tggcttctctaactcccctggataa

SEQ ID NO: 525548 - DNA, 25 bp, Homo sapien
gcttctctaactcccctggataagg

SEQ ID NO: 525549 - DNA, 25 bp, Homo sapien
tctctaactcccctggataagggac

SEQ ID NO: 525550 - DNA, 25 bp, Homo sapien
ctaactcccctggataagggacaat

SEQ ID NO: 525551 - DNA, 25 bp, Homo sapien
cactagatgttttcacccttgtcag

SEQ ID NO: 525552 - DNA, 25 bp, Homo sapien
tgcactgggcaaagtcgtacgtata

SEQ ID NO: 525553 - DNA, 25 bp, Homo sapien
cactcgcgctttcgtttgcttaagg

SEQ ID NO: 525554 - DNA, 25 bp, Homo sapien
cgtacgtataaagaagtgactgcgg

SEQ ID NO: 525555 - DNA, 25 bp, Homo sapien
ggagcttgcaatgtccctcacaggg

SEQ ID NO: 525556 - DNA, 25 bp, Homo sapien
tgaactcagacaaccgacaacttgg

SEQ ID NO: 525557 - DNA, 25 bp, Homo sapien
gactgatcctggaattggcctggca

SEQ ID NO: 525558 - DNA, 25 bp, Homo sapien
tactgccaagtcatgtcggtgagct

SEQ ID NO: 525559 - DNA, 25 bp, Homo sapien
caagcctccatgtgcattgggagct

SEQ ID NO: 525560 - DNA, 25 bp, Homo sapien
tcaagcctccatgtgcattgggagc

SEQ ID NO: 525561 - DNA, 25 bp, Homo sapien
aaaataccaatagctacaatcgtta

SEQ ID NO: 525562 - DNA, 25 bp, Homo sapien
ataccaatagctacaatcgttatac

SEQ ID NO: 525563 - DNA, 25 bp, Homo sapien
cttaaaataccaatagctacaatcg

SEQ ID NO: 525564 - DNA, 25 bp, Homo sapien
taaaataccaatagctacaatcgtt

SEQ ID NO: 525565 - DNA, 25 bp, Homo sapien
tgccttcgtgcagggaaggccgccg

SEQ ID NO: 525566 - DNA, 25 bp, Homo sapien
gaaggccgccggagcaatttcatct

SEQ ID NO: 525567 - DNA, 25 bp, Homo sapien
cagggaaggccgccggagcaatttc

SEQ ID NO: 525568 - DNA, 25 bp, Homo sapien
cttcgtgcagggaaggccgccggag

SEQ ID NO: 525569 - DNA, 25 bp, Homo sapien
tggctcatggcatcgccattcttca

SEQ ID NO: 525570 - DNA, 25 bp, Homo sapien
tcatggcatcgccattcttcagatg

SEQ ID NO: 525571 - DNA, 25 bp, Homo sapien
catcgccattcttcagatgctgttt

SEQ ID NO: 525572 - DNA, 25 bp, Homo sapien
tggcatcgccattcttcagatgctg

SEQ ID NO: 525573 - DNA, 25 bp, Homo sapien
tctagcgccaggcttcagtaggtag

SEQ ID NO: 525574 - DNA, 25 bp, Homo sapien
tgtggtcagtcactggtctagcgcc

SEQ ID NO: 525575 - DNA, 25 bp, Homo sapien
tagatatggtgtaatgtacatcccc

SEQ ID NO: 525576 - DNA, 25 bp, Homo sapien
taagctctgcctcatatcagtctgc

SEQ ID NO: 525577 - DNA, 25 bp, Homo sapien
cttcagagtttcgactttatcaaca

SEQ ID NO: 525578 - DNA, 25 bp, Homo sapien
cagagtttcgactttatcaacaaca

SEQ ID NO: 525579 - DNA, 25 bp, Homo sapien
taatcttcagagtttcgactttatc

SEQ ID NO: 525580 - DNA, 25 bp, Homo sapien
gagtttcgactttatcaacaacact

SEQ ID NO: 525581 - DNA, 25 bp, Homo sapien
caagacacaactctggagagtcaag

SEQ ID NO: 525582 - DNA, 25 bp, Homo sapien
taatacctgattcatgtaggagaat

SEQ ID NO: 525583 - DNA, 25 bp, Homo sapien
cacaactctggagagtcaagataca

SEQ ID NO: 525584 - DNA, 25 bp, Homo sapien
gtaggagaattaaacaggcctttca

SEQ ID NO: 525585 - DNA, 25 bp, Homo sapien
tgtgagatggagattctgtgtccgt

SEQ ID NO: 525586 - DNA, 25 bp, Homo sapien
tgtgtccgtgttctcattttctggg

SEQ ID NO: 525587 - DNA, 25 bp, Homo sapien
ttgatccagggctctgatgagaagc

SEQ ID NO: 525588 - DNA, 25 bp, Homo sapien
agttgtaactcttggtcctttgctg

SEQ ID NO: 525589 - DNA, 25 bp, Homo sapien
gtgcaaaacctgtgtgtacgttata

SEQ ID NO: 525590 - DNA, 25 bp, Homo sapien
cacaaacagtgaccccagtgcaaaa

SEQ ID NO: 525591 - DNA, 25 bp, Homo sapien
cctgtgtgtacgttatatacctgca

SEQ ID NO: 525592 - DNA, 25 bp, Homo sapien
ggtagaacacaaacagtgaccccag

SEQ ID NO: 525593 - DNA, 25 bp, Homo sapien
gaattacaacatatcgttggatcac

SEQ ID NO: 525594 - DNA, 25 bp, Homo sapien
ttacaacatatcgttggatcacagc

SEQ ID NO: 525595 - DNA, 25 bp, Homo sapien
acatatcgttggatcacagcacatc

SEQ ID NO: 525596 - DNA, 25 bp, Homo sapien
caacatatcgttggatcacagcaca

SEQ ID NO: 525597 - DNA, 25 bp, Homo sapien
gtaagcatggatccatacatctgta

SEQ ID NO: 525598 - DNA, 25 bp, Homo sapien
tacatctgtatgaaatcccacaggg

SEQ ID NO: 525599 - DNA, 25 bp, Homo sapien
ttggctataataatatggtttctct

SEQ ID NO: 525600 - DNA, 25 bp, Homo sapien
gtcactactattttggctataataa

SEQ ID NO: 525601 - DNA, 25 bp, Homo sapien
gttagatctggccaagaggagcaag

SEQ ID NO: 525602 - DNA, 25 bp, Homo sapien
gaagctcagccttttgctcatctca

SEQ ID NO: 525603 - DNA, 25 bp, Homo sapien
attaatgccaccgacatcccatctg

SEQ ID NO: 525604 - DNA, 25 bp, Homo sapien
ggagcaagcttgaagctcagccttt

SEQ ID NO: 525605 - DNA, 25 bp, Homo sapien
gaggaaatcagcatcgaggtctcca

SEQ ID NO: 525606 - DNA, 25 bp, Homo sapien
cataccctgatgaaaggaggaagca

SEQ ID NO: 525607 - DNA, 25 bp, Homo sapien
gttcgagatatagattgagccccag

SEQ ID NO: 525608 - DNA, 25 bp, Homo sapien
tcaggagacctagctacagagtatc

SEQ ID NO: 525609 - DNA, 25 bp, Homo sapien
ggtggaccagctagatggagctttc

SEQ ID NO: 525610 - DNA, 25 bp, Homo sapien
taataaatacggaataagatggaga

SEQ ID NO: 525611 - DNA, 25 bp, Homo sapien
gccacacgacgatcatgtgggtgat

SEQ ID NO: 525612 - DNA, 25 bp, Homo sapien
ggctggagatttagcatggtgttct

SEQ ID NO: 525613 - DNA, 25 bp, Homo sapien
ggaagcagggccgtatgaaaggagg

SEQ ID NO: 525614 - DNA, 25 bp, Homo sapien
agatgaggaagcagggccgtatgaa

SEQ ID NO: 525615 - DNA, 25 bp, Homo sapien
agcagggccgtatgaaaggaggatg

SEQ ID NO: 525616 - DNA, 25 bp, Homo sapien
gatgaggaagcagggccgtatgaaa

SEQ ID NO: 525617 - DNA, 25 bp, Homo sapien
tagaaatgaattagggtgtcagggc

SEQ ID NO: 525618 - DNA, 25 bp, Homo sapien
tgaattagggtgtcagggccaaatc

SEQ ID NO: 525619 - DNA, 25 bp, Homo sapien
aattagggtgtcagggccaaatcca

SEQ ID NO: 525620 - DNA, 25 bp, Homo sapien
tcttccaggtagaaatgaattaggg

SEQ ID NO: 525621 - DNA, 25 bp, Homo sapien
gaaaaggctcctacatagaacaagg

SEQ ID NO: 525622 - DNA, 25 bp, Homo sapien
tctgggtccaaaagtcagaccgagc

SEQ ID NO: 525623 - DNA, 25 bp, Homo sapien
cactttggtcagattgctcaggtat

SEQ ID NO: 525624 - DNA, 25 bp, Homo sapien
taaggcagttttgttgtggcagaaa

SEQ ID NO: 525625 - DNA, 25 bp, Homo sapien
ctcagccccaacacataggactttt

SEQ ID NO: 525626 - DNA, 25 bp, Homo sapien
tgtaagcaggctcttgactttgaac

SEQ ID NO: 525627 - DNA, 25 bp, Homo sapien
tgttgagatggagtcctcagcccca

SEQ ID NO: 525628 - DNA, 25 bp, Homo sapien
cataggacttttctggatcccagtc

SEQ ID NO: 525629 - DNA, 25 bp, Homo sapien
atttgggacccagcgtagtagtagc

SEQ ID NO: 525630 - DNA, 25 bp, Homo sapien
tagtagcagtaccttcatcgagctg

SEQ ID NO: 525631 - DNA, 25 bp, Homo sapien
tctttatggagaatgagctgtgccc

SEQ ID NO: 525632 - DNA, 25 bp, Homo sapien
gattgacaggatgggaaactcttct

SEQ ID NO: 525633 - DNA, 25 bp, Homo sapien
cagtcagtggtgtggctccattccc

SEQ ID NO: 525634 - DNA, 25 bp, Homo sapien
tcagcctgagtgggtgaagctctgg

SEQ ID NO: 525635 - DNA, 25 bp, Homo sapien
caagggtgtcttgtagctggtgatt

SEQ ID NO: 525636 - DNA, 25 bp, Homo sapien
cagcaaagtgcagcagagactcagg

SEQ ID NO: 525637 - DNA, 25 bp, Homo sapien
tgattgcagagtgtaggagaaggcc

SEQ ID NO: 525638 - DNA, 25 bp, Homo sapien
aatttcctataagcctgtggggtga

SEQ ID NO: 525639 - DNA, 25 bp, Homo sapien
ccaaatttcctataagcctgtgggg

SEQ ID NO: 525640 - DNA, 25 bp, Homo sapien
cagaggatgggtgtctgattgcaga

SEQ ID NO: 525641 - DNA, 25 bp, Homo sapien
taatgttactgtcaccccagatgcc

SEQ ID NO: 525642 - DNA, 25 bp, Homo sapien
aagacatccaggatatgaatttctt

SEQ ID NO: 525643 - DNA, 25 bp, Homo sapien
tgcataaggaacaaggaggctgtgt

SEQ ID NO: 525644 - DNA, 25 bp, Homo sapien
tggtttcttgtggtagaccagcagc

SEQ ID NO: 525645 - DNA, 25 bp, Homo sapien
tttaaaaggagcactgattttagca

SEQ ID NO: 525646 - DNA, 25 bp, Homo sapien
gcactgattttagcagatttacaaa

SEQ ID NO: 525647 - DNA, 25 bp, Homo sapien
tttacaaacagaggcatcgctatcc

SEQ ID NO: 525648 - DNA, 25 bp, Homo sapien
tacaaacagaggcatcgctatccat

SEQ ID NO: 525649 - DNA, 25 bp, Homo sapien
tctggtgacgtataccactttgcgg

SEQ ID NO: 525650 - DNA, 25 bp, Homo sapien
atcttgttgggagaaggtagacttc

SEQ ID NO: 525651 - DNA, 25 bp, Homo sapien
cccttggctagaagacattcttatg

SEQ ID NO: 525652 - DNA, 25 bp, Homo sapien
ccttttgtagttgacttaacctcag

SEQ ID NO: 525653 - DNA, 25 bp, Homo sapien
gcatggtctggcagcatggccaagt

SEQ ID NO: 525654 - DNA, 25 bp, Homo sapien
aatgcatggtctggcagcatggcca

SEQ ID NO: 525655 - DNA, 25 bp, Homo sapien
gtctggcagcatggccaagtccagt

SEQ ID NO: 525656 - DNA, 25 bp, Homo sapien
tcaatgcatggtctggcagcatggc

SEQ ID NO: 525657 - DNA, 25 bp, Homo sapien
ctcttccataggcaaccccagttgt

SEQ ID NO: 525658 - DNA, 25 bp, Homo sapien
gtctcttccataggcaaccccagtt

SEQ ID NO: 525659 - DNA, 25 bp, Homo sapien
tctcttccataggcaaccccagttg

SEQ ID NO: 525660 - DNA, 25 bp, Homo sapien
tcttccataggcaaccccagttgtc

SEQ ID NO: 525661 - DNA, 25 bp, Homo sapien
caatggtatatgacggggtagagca

SEQ ID NO: 525662 - DNA, 25 bp, Homo sapien
ctattgcaccatcataattgttagc

SEQ ID NO: 525663 - DNA, 25 bp, Homo sapien
tgttagcatcataaacaatggtata

SEQ ID NO: 525664 - DNA, 25 bp, Homo sapien
gaaggcgggagctgatgagtcactg

SEQ ID NO: 525665 - DNA, 25 bp, Homo sapien
cacaagtgatggtttaagctgttcc

SEQ ID NO: 525666 - DNA, 25 bp, Homo sapien
agatctaagatctaaggaccctgaa

SEQ ID NO: 525667 - DNA, 25 bp, Homo sapien
ttcatttcgaaagccaccacaagtg

SEQ ID NO: 525668 - DNA, 25 bp, Homo sapien
caagcgctaagtatcctgaagatct

SEQ ID NO: 525669 - DNA, 25 bp, Homo sapien
catacagtcgaataatagtttgctc

SEQ ID NO: 525670 - DNA, 25 bp, Homo sapien
gctctgtgtagcaaactattaagtc

SEQ ID NO: 525671 - DNA, 25 bp, Homo sapien
actgtaaagaagtgccgcacaggta

SEQ ID NO: 525672 - DNA, 25 bp, Homo sapien
cagtggactcatagcaaaaatttct

SEQ ID NO: 525673 - DNA, 25 bp, Homo sapien
caaacatcagcttgctgccggacct

SEQ ID NO: 525674 - DNA, 25 bp, Homo sapien
catgtggtggtatcctctgccgttc

SEQ ID NO: 525675 - DNA, 25 bp, Homo sapien
gggctaaggagaccacgtcttcaaa

SEQ ID NO: 525676 - DNA, 25 bp, Homo sapien
gatacagtctggaaggacactgagc

SEQ ID NO: 525677 - DNA, 25 bp, Homo sapien
caagaccgatgttgtttgagctgaa

SEQ ID NO: 525678 - DNA, 25 bp, Homo sapien
tataaaatgacgataagcctgcata

SEQ ID NO: 525679 - DNA, 25 bp, Homo sapien
caacggaaggctgtaacaggagcca

SEQ ID NO: 525680 - DNA, 25 bp, Homo sapien
gaggcccatgcaagccttctttact

SEQ ID NO: 525681 - DNA, 25 bp, Homo sapien
ctggcaataatgtaaactcataatg

SEQ ID NO: 525682 - DNA, 25 bp, Homo sapien
agaatgttttatggtctccaaaatg

SEQ ID NO: 525683 - DNA, 25 bp, Homo sapien
cagacacatcaaaagccaatgtaga

SEQ ID NO: 525684 - DNA, 25 bp, Homo sapien
tctctgggaagtatgtatgtttcac

SEQ ID NO: 525685 - DNA, 25 bp, Homo sapien
ggaagtacacttctctcatagcggg

SEQ ID NO: 525686 - DNA, 25 bp, Homo sapien
ctttggagagctaggagaccacata

SEQ ID NO: 525687 - DNA, 25 bp, Homo sapien
tttataacatggaaactgagctggc

SEQ ID NO: 525688 - DNA, 25 bp, Homo sapien
tatttaggagtgagacccttgagga

SEQ ID NO: 525689 - DNA, 25 bp, Homo sapien
taaacagtagagatgtgggcaaaag

SEQ ID NO: 525690 - DNA, 25 bp, Homo sapien
ctaaacagtagagatgtgggcaaaa

SEQ ID NO: 525691 - DNA, 25 bp, Homo sapien
aaacagtagagatgtgggcaaaagg

SEQ ID NO: 525692 - DNA, 25 bp, Homo sapien
gcttcaaccagacacatctgccttt

SEQ ID NO: 525693 - DNA, 25 bp, Homo sapien
ctgcctttgcttgcaaaaatgtgct

SEQ ID NO: 525694 - DNA, 25 bp, Homo sapien
ccaaagcctactgctgcttcaacca

SEQ ID NO: 525695 - DNA, 25 bp, Homo sapien
tgtgagtatctctatctccaaagcc

SEQ ID NO: 525696 - DNA, 25 bp, Homo sapien
agtgtcactgatgtagtgtccaagc

SEQ ID NO: 525697 - DNA, 25 bp, Homo sapien
tgatgtagtgtccaagctgaagagg

SEQ ID NO: 525698 - DNA, 25 bp, Homo sapien
cggcttctccgacagggcagaggcc

SEQ ID NO: 525699 - DNA, 25 bp, Homo sapien
agaggatcccggcttctccgacagg

SEQ ID NO: 525700 - DNA, 25 bp, Homo sapien
cctttccaagcattgaatcttggct

SEQ ID NO: 525701 - DNA, 25 bp, Homo sapien
cttggctgcctcaaattcccagaca

SEQ ID NO: 525702 - DNA, 25 bp, Homo sapien
tactgcctataattttgagttcagg

SEQ ID NO: 525703 - DNA, 25 bp, Homo sapien
gacaacccaatatacaatactgcct

SEQ ID NO: 525704 - DNA, 25 bp, Homo sapien
tagctttctgatgagttctgcttca

SEQ ID NO: 525705 - DNA, 25 bp, Homo sapien
aggtgtgtcctcctccatgtgctct

SEQ ID NO: 525706 - DNA, 25 bp, Homo sapien
tcctcctccatgtgctctttcagca

SEQ ID NO: 525707 - DNA, 25 bp, Homo sapien
gagttctgcttcaggtgtgtcctcc

SEQ ID NO: 525708 - DNA, 25 bp, Homo sapien
aaagtaacccctgcaggaaggatca

SEQ ID NO: 525709 - DNA, 25 bp, Homo sapien
gaatgctgataactctccggtttac

SEQ ID NO: 525710 - DNA, 25 bp, Homo sapien
cctggaaaaaactgtggcgtggatt

SEQ ID NO: 525711 - DNA, 25 bp, Homo sapien
gcgtggattcagtgtgtactcatta

SEQ ID NO: 525712 - DNA, 25 bp, Homo sapien
ctggaagcggtgttgaggtgaatgg

SEQ ID NO: 525713 - DNA, 25 bp, Homo sapien
cagcatggagcccaagaggagccag

SEQ ID NO: 525714 - DNA, 25 bp, Homo sapien
tagggagaggacctgggtacaggca

SEQ ID NO: 525715 - DNA, 25 bp, Homo sapien
gaaggagagcagacaaaagagaaca

SEQ ID NO: 525716 - DNA, 25 bp, Homo sapien
accacgggctgactgattgcaagct

SEQ ID NO: 525717 - DNA, 25 bp, Homo sapien
acgggctgactgattgcaagctgac

SEQ ID NO: 525718 - DNA, 25 bp, Homo sapien
ctaccacgggctgactgattgcaag

SEQ ID NO: 525719 - DNA, 25 bp, Homo sapien
cacgggctgactgattgcaagctga

SEQ ID NO: 525720 - DNA, 25 bp, Homo sapien
ttttcttgagaccttctacgtttgc

SEQ ID NO: 525721 - DNA, 25 bp, Homo sapien
gaccttctacgtttgcaggactcgg

SEQ ID NO: 525722 - DNA, 25 bp, Homo sapien
atctgctcctgtgtgagtattgatg

SEQ ID NO: 525723 - DNA, 25 bp, Homo sapien
gctgtagacgataggatctgctcct

SEQ ID NO: 525724 - DNA, 25 bp, Homo sapien
taaggacatcactatctagcaacga

SEQ ID NO: 525725 - DNA, 25 bp, Homo sapien
cttttgggaagcattgttagcactc

SEQ ID NO: 525726 - DNA, 25 bp, Homo sapien
tgctccactgcatttccggtgcttc

SEQ ID NO: 525727 - DNA, 25 bp, Homo sapien
aatgttgtaagttctcccattgtgg

SEQ ID NO: 525728 - DNA, 25 bp, Homo sapien
agtagaacccggaatcttctgttca

SEQ ID NO: 525729 - DNA, 25 bp, Homo sapien
gcatgggaacactaataaatttaaa

SEQ ID NO: 525730 - DNA, 25 bp, Homo sapien
tttctagtgactgagatatttaaga

SEQ ID NO: 525731 - DNA, 25 bp, Homo sapien
tcagagcaagattttcaaatagatc

SEQ ID NO: 525732 - DNA, 25 bp, Homo sapien
gatgctgactatggataaggctttt

SEQ ID NO: 525733 - DNA, 25 bp, Homo sapien
tttggatgctgactatggataaggc

SEQ ID NO: 525734 - DNA, 25 bp, Homo sapien
gactatggataaggctttttgcttg

SEQ ID NO: 525735 - DNA, 25 bp, Homo sapien
ggtatagtactttttggatgctgac

SEQ ID NO: 525736 - DNA, 25 bp, Homo sapien
gagaagtgtatacataaaaaccaaa

SEQ ID NO: 525737 - DNA, 25 bp, Homo sapien
ggaacaagtatgtaaagagaagtgt

SEQ ID NO: 525738 - DNA, 25 bp, Homo sapien
caaggctgattggatgttgaggaac

SEQ ID NO: 525739 - DNA, 25 bp, Homo sapien
tggatgttgaggaacaagtatgtaa

SEQ ID NO: 525740 - DNA, 25 bp, Homo sapien
tgttgtgaagtgcttggctttgtcc

SEQ ID NO: 525741 - DNA, 25 bp, Homo sapien
gcaactgacagtgttgtgaagtgct

SEQ ID NO: 525742 - DNA, 25 bp, Homo sapien
tcgcaggccatctgggctaagtagt

SEQ ID NO: 525743 - DNA, 25 bp, Homo sapien
gtagtgagatccacgtggccaggaa

SEQ ID NO: 525744 - DNA, 25 bp, Homo sapien
ccctgaagcagttacgtcattcatt

SEQ ID NO: 525745 - DNA, 25 bp, Homo sapien
cctgaagcagttacgtcattcatta

SEQ ID NO: 525746 - DNA, 25 bp, Homo sapien
gccctgaagcagttacgtcattcat

SEQ ID NO: 525747 - DNA, 25 bp, Homo sapien
tgccctgaagcagttacgtcattca

SEQ ID NO: 525748 - DNA, 25 bp, Homo sapien
tttttcaaaggcgagacagccacct

SEQ ID NO: 525749 - DNA, 25 bp, Homo sapien
agctctctttgaagaaatcgcacag

SEQ ID NO: 525750 - DNA, 25 bp, Homo sapien
gtatggctccgtgctctgaacatgc

SEQ ID NO: 525751 - DNA, 25 bp, Homo sapien
cctcgaggccagtcagaccatgaat

SEQ ID NO: 525752 - DNA, 25 bp, Homo sapien
tatctgccctgctacactgatggtc

SEQ ID NO: 525753 - DNA, 25 bp, Homo sapien
gaacatctggcagcctacctctagt

SEQ ID NO: 525754 - DNA, 25 bp, Homo sapien
gtggcgaagggttcacacctacatt

SEQ ID NO: 525755 - DNA, 25 bp, Homo sapien
tactgggcaatcaggccatgtggtc

SEQ ID NO: 525756 - DNA, 25 bp, Homo sapien
gctaccccgtataggacgatctgtt

SEQ ID NO: 525757 - DNA, 25 bp, Homo sapien
ccgtataggacgatctgtttactta

SEQ ID NO: 525758 - DNA, 25 bp, Homo sapien
tagcgttggctaccccgtataggac

SEQ ID NO: 525759 - DNA, 25 bp, Homo sapien
tcagatgatagcgttggctaccccg

SEQ ID NO: 525760 - DNA, 25 bp, Homo sapien
ccaccaggactggtgtctttattgt

SEQ ID NO: 525761 - DNA, 25 bp, Homo sapien
tccaccaggactggtgtctttattg

SEQ ID NO: 525762 - DNA, 25 bp, Homo sapien
ggtccaccaggactggtgtctttat

SEQ ID NO: 525763 - DNA, 25 bp, Homo sapien
gtccaccaggactggtgtctttatt

SEQ ID NO: 525764 - DNA, 25 bp, Homo sapien
gcagagcatgacagctttagtagat

SEQ ID NO: 525765 - DNA, 25 bp, Homo sapien
ctgcacagtgatgcattacgtgttt

SEQ ID NO: 525766 - DNA, 25 bp, Homo sapien
tggaagactcaagtattccccgagg

SEQ ID NO: 525767 - DNA, 25 bp, Homo sapien
ctgttagcaatgtattggaagactc

SEQ ID NO: 525768 - DNA, 25 bp, Homo sapien
gggtaagcaccatcatatttagggt

SEQ ID NO: 525769 - DNA, 25 bp, Homo sapien
aagtaatgaaggcagcacgggatgc

SEQ ID NO: 525770 - DNA, 25 bp, Homo sapien
tgcattgtcaacctagaggctaacc

SEQ ID NO: 525771 - DNA, 25 bp, Homo sapien
gttaaagtgcagattacatgggctc

SEQ ID NO: 525772 - DNA, 25 bp, Homo sapien
caaaagactaaagcctactgcaaca

SEQ ID NO: 525773 - DNA, 25 bp, Homo sapien
tcccagactaacacaaagtagaggt

SEQ ID NO: 525774 - DNA, 25 bp, Homo sapien
ggtgaggagaccagtcaaaagacta

SEQ ID NO: 525775 - DNA, 25 bp, Homo sapien
ggtgatcctacaacagaagaaaagg

SEQ ID NO: 525776 - DNA, 25 bp, Homo sapien
cagtttggacaaggagacatgacac

SEQ ID NO: 525777 - DNA, 25 bp, Homo sapien
ggacaaggagacatgacactgggtc

SEQ ID NO: 525778 - DNA, 25 bp, Homo sapien
ttggacaaggagacatgacactggg

SEQ ID NO: 525779 - DNA, 25 bp, Homo sapien
catgaaggggccacagtttggacaa

SEQ ID NO: 525780 - DNA, 25 bp, Homo sapien
aatggacttcttaggccttaggtct

SEQ ID NO: 525781 - DNA, 25 bp, Homo sapien
gacttcttaggccttaggtcttcta

SEQ ID NO: 525782 - DNA, 25 bp, Homo sapien
gattcattgaaatggacttcttagg

SEQ ID NO: 525783 - DNA, 25 bp, Homo sapien
cattgaaatggacttcttaggcctt

SEQ ID NO: 525784 - DNA, 25 bp, Homo sapien
agcacatcttactggctcttcctgg

SEQ ID NO: 525785 - DNA, 25 bp, Homo sapien
cttctgtcatcttcagttctacgta

SEQ ID NO: 525786 - DNA, 25 bp, Homo sapien
tcagcacatcttactggctcttcct

SEQ ID NO: 525787 - DNA, 25 bp, Homo sapien
tgtcatcttcagttctacgtagatg

SEQ ID NO: 525788 - DNA, 25 bp, Homo sapien
caagatcagacagttttacatggtt

SEQ ID NO: 525789 - DNA, 25 bp, Homo sapien
taatgcttgtaagtagccaagtctc

SEQ ID NO: 525790 - DNA, 25 bp, Homo sapien
gtttctgagtttcctatctgctgcg

SEQ ID NO: 525791 - DNA, 25 bp, Homo sapien
tctgctgcgttgattacttactacc

SEQ ID NO: 525792 - DNA, 25 bp, Homo sapien
atgctctaggattatcaagtaaaac

SEQ ID NO: 525793 - DNA, 25 bp, Homo sapien
gctctaggattatcaagtaaaacca

SEQ ID NO: 525794 - DNA, 25 bp, Homo sapien
tctaggattatcaagtaaaaccaaa

SEQ ID NO: 525795 - DNA, 25 bp, Homo sapien
ctaggattatcaagtaaaaccaaat

SEQ ID NO: 525796 - DNA, 25 bp, Homo sapien
aaacaaatcagacgagttctccact

SEQ ID NO: 525797 - DNA, 25 bp, Homo sapien
tcagacgagttctccactctggcac

SEQ ID NO: 525798 - DNA, 25 bp, Homo sapien
ggtggaaacaaatcagacgagttct

SEQ ID NO: 525799 - DNA, 25 bp, Homo sapien
ctggggtggaaacaaatcagacgag

SEQ ID NO: 525800 - DNA, 25 bp, Homo sapien
gtatgagaatagatttggcctcccc

SEQ ID NO: 525801 - DNA, 25 bp, Homo sapien
ttttctgccagtcatgaagacgaag

SEQ ID NO: 525802 - DNA, 25 bp, Homo sapien
tactagtgcaattgctggtactgcc

SEQ ID NO: 525803 - DNA, 25 bp, Homo sapien
catcatggtaacacatctggcttca

SEQ ID NO: 525804 - DNA, 25 bp, Homo sapien
taccagtgtcaggacttgaacgtat

SEQ ID NO: 525805 - DNA, 25 bp, Homo sapien
ttcacaggtaccagtgtcaggactt

SEQ ID NO: 525806 - DNA, 25 bp, Homo sapien
attcacaggtaccagtgtcaggact

SEQ ID NO: 525807 - DNA, 25 bp, Homo sapien
aggtaccagtgtcaggacttgaacg

SEQ ID NO: 525808 - DNA, 25 bp, Homo sapien
ttgctcaagccccagatataggatt

SEQ ID NO: 525809 - DNA, 25 bp, Homo sapien
gccccagatataggattcatccttg

SEQ ID NO: 525810 - DNA, 25 bp, Homo sapien
tttccccatcagcagtccctgttag

SEQ ID NO: 525811 - DNA, 25 bp, Homo sapien
caagccccagatataggattcatcc

SEQ ID NO: 525812 - DNA, 25 bp, Homo sapien
tctgctcatagcctaagggagtgtg

SEQ ID NO: 525813 - DNA, 25 bp, Homo sapien
ggagatgagtttctatgttttacaa

SEQ ID NO: 525814 - DNA, 25 bp, Homo sapien
atgcacgggacacgcagccagagtg

SEQ ID NO: 525815 - DNA, 25 bp, Homo sapien
gagtacagggtgagggccaaataat

SEQ ID NO: 525816 - DNA, 25 bp, Homo sapien
tcaaggctgttaatgtaagctgttc

SEQ ID NO: 525817 - DNA, 25 bp, Homo sapien
ggctgttaatgtaagctgttctttc

SEQ ID NO: 525818 - DNA, 25 bp, Homo sapien
caaggctgttaatgtaagctgttct

SEQ ID NO: 525819 - DNA, 25 bp, Homo sapien
cttcaaggctgttaatgtaagctgt

SEQ ID NO: 525820 - DNA, 25 bp, Homo sapien
tcttgtgagttgattcttcctaata

SEQ ID NO: 525821 - DNA, 25 bp, Homo sapien
tctacttttcttggaggaccataag

SEQ ID NO: 525822 - DNA, 25 bp, Homo sapien
attctacttttcttggaggaccata

SEQ ID NO: 525823 - DNA, 25 bp, Homo sapien
ccctgtagcattacgaggacaggcc

SEQ ID NO: 525824 - DNA, 25 bp, Homo sapien
agtccattctacttttcttggagga

SEQ ID NO: 525825 - DNA, 25 bp, Homo sapien
ctgcaatgagatacagctgtagtcc

SEQ ID NO: 525826 - DNA, 25 bp, Homo sapien
cgtgctgcgggatgggatattggtg

SEQ ID NO: 525827 - DNA, 25 bp, Homo sapien
tttagttaaagtgtctcagcctaaa

SEQ ID NO: 525828 - DNA, 25 bp, Homo sapien
gtgtctcagcctaaaaagggaactg

SEQ ID NO: 525829 - DNA, 25 bp, Homo sapien
tgttagagttacccgaagctcggca

SEQ ID NO: 525830 - DNA, 25 bp, Homo sapien
gcttccgaggcgatcggccggtgtc

SEQ ID NO: 525831 - DNA, 25 bp, Homo sapien
ttccgaggcgatcggccggtgtcag

SEQ ID NO: 525832 - DNA, 25 bp, Homo sapien
cttccactgttagagttacccgaag

SEQ ID NO: 525833 - DNA, 25 bp, Homo sapien
ctgggaaggagtcagtcagagagcc

SEQ ID NO: 525834 - DNA, 25 bp, Homo sapien
gcggagggttcttgccctccaggaa

SEQ ID NO: 525835 - DNA, 25 bp, Homo sapien
gaaggtggaagcttacccatagtga

SEQ ID NO: 525836 - DNA, 25 bp, Homo sapien
aagaggtcagggtgcagaaataagt

SEQ ID NO: 525837 - DNA, 25 bp, Homo sapien
tcagggtgcagaaataagtgattgg

SEQ ID NO: 525838 - DNA, 25 bp, Homo sapien
ttgtgtgagagcagtaaagctgttt

SEQ ID NO: 525839 - DNA, 25 bp, Homo sapien
gtgtgagagcagtaaagctgtttat

SEQ ID NO: 525840 - DNA, 25 bp, Homo sapien
caggctttgtgtgagagcagtaaag

SEQ ID NO: 525841 - DNA, 25 bp, Homo sapien
ctttgtgtgagagcagtaaagctgt

SEQ ID NO: 525842 - DNA, 25 bp, Homo sapien
taaagactcgcagcctacaatgtgg

SEQ ID NO: 525843 - DNA, 25 bp, Homo sapien
gagacatacgttttgttgaacaggt

SEQ ID NO: 525844 - DNA, 25 bp, Homo sapien
gcagtctttcgtccagatattcatg

SEQ ID NO: 525845 - DNA, 25 bp, Homo sapien
tacgggaggagctatgcagtctttc

SEQ ID NO: 525846 - DNA, 25 bp, Homo sapien
aatgtcacccccgatgactgacgac

SEQ ID NO: 525847 - DNA, 25 bp, Homo sapien
tcactggtgtaaggttttgtaggga

SEQ ID NO: 525848 - DNA, 25 bp, Homo sapien
gatgactgacgacgattccttcagc

SEQ ID NO: 525849 - DNA, 25 bp, Homo sapien
ataatctggtgccaatcactggtgt

SEQ ID NO: 525850 - DNA, 25 bp, Homo sapien
cagggacggtgagaaggaatgttca

SEQ ID NO: 525851 - DNA, 25 bp, Homo sapien
gggacggtgagaaggaatgttcaga

SEQ ID NO: 525852 - DNA, 25 bp, Homo sapien
cggtgagaaggaatgttcagagcac

SEQ ID NO: 525853 - DNA, 25 bp, Homo sapien
gacggtgagaaggaatgttcagagc

SEQ ID NO: 525854 - DNA, 25 bp, Homo sapien
tattacacacctgtattgcctaaag

SEQ ID NO: 525855 - DNA, 25 bp, Homo sapien
tacacacctgtattgcctaaagttt

SEQ ID NO: 525856 - DNA, 25 bp, Homo sapien
attttattacacacctgtattgcct

SEQ ID NO: 525857 - DNA, 25 bp, Homo sapien
cacacctgtattgcctaaagtttct

SEQ ID NO: 525858 - DNA, 25 bp, Homo sapien
agtgaggcacaccaagcatagacgc

SEQ ID NO: 525859 - DNA, 25 bp, Homo sapien
cacaaaatctttgggagtgcagggt

SEQ ID NO: 525860 - DNA, 25 bp, Homo sapien
caactcctggttgcatgctggaaaa

SEQ ID NO: 525861 - DNA, 25 bp, Homo sapien
gatttcctgtccagtcacctgcgag

SEQ ID NO: 525862 - DNA, 25 bp, Homo sapien
gattgagctagattacacagcgtag

SEQ ID NO: 525863 - DNA, 25 bp, Homo sapien
gaaagccaactgaactagcaatagg

SEQ ID NO: 525864 - DNA, 25 bp, Homo sapien
taagtcaagaccaaaacaagagcca

SEQ ID NO: 525865 - DNA, 25 bp, Homo sapien
aaatcaatgctcttacactctaggg

SEQ ID NO: 525866 - DNA, 25 bp, Homo sapien
gtacatatttgtaccataaagaaag

SEQ ID NO: 525867 - DNA, 25 bp, Homo sapien
gataagaatatgtcacttagaaaga

SEQ ID NO: 525868 - DNA, 25 bp, Homo sapien
caacatcactctaattatacttcca

SEQ ID NO: 525869 - DNA, 25 bp, Homo sapien
gcctgtagcacccatagctctgatt

SEQ ID NO: 525870 - DNA, 25 bp, Homo sapien
agtcactcctgactgcacggtcaag

SEQ ID NO: 525871 - DNA, 25 bp, Homo sapien
taatgtagcatttccctggcagtag

SEQ ID NO: 525872 - DNA, 25 bp, Homo sapien
tatgagttcaggaatcagctcctcc

SEQ ID NO: 525873 - DNA, 25 bp, Homo sapien
cgaggtcagttgatgaaggccagat

SEQ ID NO: 525874 - DNA, 25 bp, Homo sapien
taggtgcctcgaaaaaactaataga

SEQ ID NO: 525875 - DNA, 25 bp, Homo sapien
tgcctcgaaaaaactaatagagaac

SEQ ID NO: 525876 - DNA, 25 bp, Homo sapien
aggtgcctcgaaaaaactaatagag

SEQ ID NO: 525877 - DNA, 25 bp, Homo sapien
ggtgcctcgaaaaaactaatagaga

SEQ ID NO: 525878 - DNA, 25 bp, Homo sapien
tgtctatatgacatttcaagaaacc

SEQ ID NO: 525879 - DNA, 25 bp, Homo sapien
tccttgtttactctgtctctggctt

SEQ ID NO: 525880 - DNA, 25 bp, Homo sapien
gaaaccactgcttctttccatggct

SEQ ID NO: 525881 - DNA, 25 bp, Homo sapien
gggcctactgcttaagtgtctatat

SEQ ID NO: 525882 - DNA, 25 bp, Homo sapien
caataagccaagcttgcaattctgg

SEQ ID NO: 525883 - DNA, 25 bp, Homo sapien
cacagccttgccaacagagtatatt

SEQ ID NO: 525884 - DNA, 25 bp, Homo sapien
taggcctggtcttcgtttaatggga

SEQ ID NO: 525885 - DNA, 25 bp, Homo sapien
ttggctctaatatgtataggcctgg

SEQ ID NO: 525886 - DNA, 25 bp, Homo sapien
ccttggagtcggtccagaaaagcat

SEQ ID NO: 525887 - DNA, 25 bp, Homo sapien
tccagattgctcgaggccacctggt

SEQ ID NO: 525888 - DNA, 25 bp, Homo sapien
gccacctggttgacttttgccttgg

SEQ ID NO: 525889 - DNA, 25 bp, Homo sapien
tattcatattccaacagcctccaga

SEQ ID NO: 525890 - DNA, 25 bp, Homo sapien
ctcctgtgttcagtctggtggattt

SEQ ID NO: 525891 - DNA, 25 bp, Homo sapien
tcctgtgttcagtctggtggatttt

SEQ ID NO: 525892 - DNA, 25 bp, Homo sapien
tcagtaggaatttattatcagtgtg

SEQ ID NO: 525893 - DNA, 25 bp, Homo sapien
ggaatttattatcagtgtgagaggc

SEQ ID NO: 525894 - DNA, 25 bp, Homo sapien
catcagtaggaatttattatcagtg

SEQ ID NO: 525895 - DNA, 25 bp, Homo sapien
atttattatcagtgtgagaggccat

SEQ ID NO: 525896 - DNA, 25 bp, Homo sapien
tccaaaccttgttccattcagtaaa

SEQ ID NO: 525897 - DNA, 25 bp, Homo sapien
tatccaaaccttgttccattcagta

SEQ ID NO: 525898 - DNA, 25 bp, Homo sapien
aatatccaaaccttgttccattcag

SEQ ID NO: 525899 - DNA, 25 bp, Homo sapien
aaatatccaaaccttgttccattca

SEQ ID NO: 525900 - DNA, 25 bp, Homo sapien
tagcatgaggttggaattcccagaa

SEQ ID NO: 525901 - DNA, 25 bp, Homo sapien
tgtgtaactaaagagccaaatattc

SEQ ID NO: 525902 - DNA, 25 bp, Homo sapien
gacctatcctattgcagtgataaga

SEQ ID NO: 525903 - DNA, 25 bp, Homo sapien
cagaataatactgggtaacaaccaa

SEQ ID NO: 525904 - DNA, 25 bp, Homo sapien
gaccttatcaaagaacaagctgtta

SEQ ID NO: 525905 - DNA, 25 bp, Homo sapien
tgagtacagctttacatgacttccc

SEQ ID NO: 525906 - DNA, 25 bp, Homo sapien
ccaaatctatggttctagtccctca

SEQ ID NO: 525907 - DNA, 25 bp, Homo sapien
ctcatttctaatgccgtgtatttgc

SEQ ID NO: 525908 - DNA, 25 bp, Homo sapien
gataaattggagctaagtccacctg

SEQ ID NO: 525909 - DNA, 25 bp, Homo sapien
gaaaactgcactaagagcagcttgg

SEQ ID NO: 525910 - DNA, 25 bp, Homo sapien
ggagacaggttacattaccagggaa

SEQ ID NO: 525911 - DNA, 25 bp, Homo sapien
ccaggagggaatactgggacagtca

SEQ ID NO: 525912 - DNA, 25 bp, Homo sapien
ggctcagggaaacagggcaacgtcc

SEQ ID NO: 525913 - DNA, 25 bp, Homo sapien
agggcaacgtcccaagtacctactg

SEQ ID NO: 525914 - DNA, 25 bp, Homo sapien
acgtcccaagtacctactgactata

SEQ ID NO: 525915 - DNA, 25 bp, Homo sapien
gtgaatgagagaggcatggctgggc

SEQ ID NO: 525916 - DNA, 25 bp, Homo sapien
cctttagagaatctctgtaagccca

SEQ ID NO: 525917 - DNA, 25 bp, Homo sapien
tttagagaatctctgtaagcccagc

SEQ ID NO: 525918 - DNA, 25 bp, Homo sapien
ttcttctgcctttagagaatctctg

SEQ ID NO: 525919 - DNA, 25 bp, Homo sapien
tctgcctttagagaatctctgtaag

SEQ ID NO: 525920 - DNA, 25 bp, Homo sapien
cagctgtgatccctaggcaggatag

SEQ ID NO: 525921 - DNA, 25 bp, Homo sapien
tgtgatccctaggcaggataggaag

SEQ ID NO: 525922 - DNA, 25 bp, Homo sapien
gatccctaggcaggataggaagttt

SEQ ID NO: 525923 - DNA, 25 bp, Homo sapien
ccagctgtgatccctaggcaggata

SEQ ID NO: 525924 - DNA, 25 bp, Homo sapien
agaagcaaagatttagactcgaggc

SEQ ID NO: 525925 - DNA, 25 bp, Homo sapien
gcaaagatttagactcgaggccagt

SEQ ID NO: 525926 - DNA, 25 bp, Homo sapien
aaagatttagactcgaggccagtcc

SEQ ID NO: 525927 - DNA, 25 bp, Homo sapien
gatttagactcgaggccagtcctcc

SEQ ID NO: 525928 - DNA, 25 bp, Homo sapien
acaggcacttctgtctggcgattct

SEQ ID NO: 525929 - DNA, 25 bp, Homo sapien
aggcacttctgtctggcgattctgt

SEQ ID NO: 525930 - DNA, 25 bp, Homo sapien
ggcacttctgtctggcgattctgtg

SEQ ID NO: 525931 - DNA, 25 bp, Homo sapien
caggcacttctgtctggcgattctg

SEQ ID NO: 525932 - DNA, 25 bp, Homo sapien
ttgatgttgacggctttggctgctg

SEQ ID NO: 525933 - DNA, 25 bp, Homo sapien
tgatgttgacggctttggctgctgc

SEQ ID NO: 525934 - DNA, 25 bp, Homo sapien
cttgatgttgacggctttggctgct

SEQ ID NO: 525935 - DNA, 25 bp, Homo sapien
tgtggtccacttgacctgcctagct

SEQ ID NO: 525936 - DNA, 25 bp, Homo sapien
aaggcacgcctgtacttttctctgc

SEQ ID NO: 525937 - DNA, 25 bp, Homo sapien
caggttatccctgtggcttgaaaaa

SEQ ID NO: 525938 - DNA, 25 bp, Homo sapien
caggttgctgagtaccctatatgcc

SEQ ID NO: 525939 - DNA, 25 bp, Homo sapien
ggttcacttggtctgttaatttcta

SEQ ID NO: 525940 - DNA, 25 bp, Homo sapien
tgtagtagattttagtcagtcttct

SEQ ID NO: 525941 - DNA, 25 bp, Homo sapien
ggcaaatccatagtctatattagag

SEQ ID NO: 525942 - DNA, 25 bp, Homo sapien
tatgcttagcattgttattcaaatc

SEQ ID NO: 525943 - DNA, 25 bp, Homo sapien
gaatgctgacttattggacttaata

SEQ ID NO: 525944 - DNA, 25 bp, Homo sapien
gtatacattttttgtgaatgctgac

SEQ ID NO: 525945 - DNA, 25 bp, Homo sapien
taagataatttagcctgtatacatt

SEQ ID NO: 525946 - DNA, 25 bp, Homo sapien
taaaggcagaaattgacgatcaaat

SEQ ID NO: 525947 - DNA, 25 bp, Homo sapien
agaagctcccatgaagggcattaga

SEQ ID NO: 525948 - DNA, 25 bp, Homo sapien
agttttgtgagcatattggaaggca

SEQ ID NO: 525949 - DNA, 25 bp, Homo sapien
tattcagctgacttgcctggattct

SEQ ID NO: 525950 - DNA, 25 bp, Homo sapien
aaacttggtgcctatgtgtgcatat

SEQ ID NO: 525951 - DNA, 25 bp, Homo sapien
accctgcacaccggcgccacccaaa

SEQ ID NO: 525952 - DNA, 25 bp, Homo sapien
aggcctcaccccacagcgctctcca

SEQ ID NO: 525953 - DNA, 25 bp, Homo sapien
caggcctcaccccacagcgctctcc

SEQ ID NO: 525954 - DNA, 25 bp, Homo sapien
gcacaccggcgccacccaaagcggc

SEQ ID NO: 525955 - DNA, 25 bp, Homo sapien
agcagaggcttgcttgtccttggac

SEQ ID NO: 525956 - DNA, 25 bp, Homo sapien
gcagagcagaggcttgcttgtcctt

SEQ ID NO: 525957 - DNA, 25 bp, Homo sapien
cagagcagaggcttgcttgtccttg

SEQ ID NO: 525958 - DNA, 25 bp, Homo sapien
cagaggcttgcttgtccttggaccc

SEQ ID NO: 525959 - DNA, 25 bp, Homo sapien
cctttggatgtcaataaaagcctag

SEQ ID NO: 525960 - DNA, 25 bp, Homo sapien
tccctttggatgtcaataaaagcct

SEQ ID NO: 525961 - DNA, 25 bp, Homo sapien
gagtccctttggatgtcaataaaag

SEQ ID NO: 525962 - DNA, 25 bp, Homo sapien
gtccctttggatgtcaataaaagcc

SEQ ID NO: 525963 - DNA, 25 bp, Homo sapien
cccaacatctgagtgatcttaaatt

SEQ ID NO: 525964 - DNA, 25 bp, Homo sapien
gccaataactactaaatgatttctc

SEQ ID NO: 525965 - DNA, 25 bp, Homo sapien
gacttttgccaataactactaaatg

SEQ ID NO: 525966 - DNA, 25 bp, Homo sapien
ttgccaataactactaaatgatttc

SEQ ID NO: 525967 - DNA, 25 bp, Homo sapien
agttgagacttttgccaataactac

SEQ ID NO: 525968 - DNA, 25 bp, Homo sapien
tattgctgatgctctctaaatgctt

SEQ ID NO: 525969 - DNA, 25 bp, Homo sapien
gagagcctggagataaaggccttca

SEQ ID NO: 525970 - DNA, 25 bp, Homo sapien
ttttgctcaccatgacacactgtca

SEQ ID NO: 525971 - DNA, 25 bp, Homo sapien
gaggctccaagatggtactccctgt

SEQ ID NO: 525972 - DNA, 25 bp, Homo sapien
gagattttcagtaagacaacccaac

SEQ ID NO: 525973 - DNA, 25 bp, Homo sapien
tccttcttgattcttacagattctt

SEQ ID NO: 525974 - DNA, 25 bp, Homo sapien
tgccttcattttttggagttcagct

SEQ ID NO: 525975 - DNA, 25 bp, Homo sapien
cagcttccttcttgattcttacaga

SEQ ID NO: 525976 - DNA, 25 bp, Homo sapien
ctgaattgccttcattttttggagt

SEQ ID NO: 525977 - DNA, 25 bp, Homo sapien
gagttgttgtttctgtctgacttca

SEQ ID NO: 525978 - DNA, 25 bp, Homo sapien
catcagctggagttgttgtttctgt

SEQ ID NO: 525979 - DNA, 25 bp, Homo sapien
atttagattgcatcagctggagttg

SEQ ID NO: 525980 - DNA, 25 bp, Homo sapien
tagattgcatcagctggagttgttg

SEQ ID NO: 525981 - DNA, 25 bp, Homo sapien
gctcattttctgctaaggcttcaag

SEQ ID NO: 525982 - DNA, 25 bp, Homo sapien
ttcaagacaacagatgccgagcgct

SEQ ID NO: 525983 - DNA, 25 bp, Homo sapien
gataatgcatataacaggaagtcaa

SEQ ID NO: 525984 - DNA, 25 bp, Homo sapien
tcaaattccaaagggaggtaatggc

SEQ ID NO: 525985 - DNA, 25 bp, Homo sapien
agtatttcctgtacttttaatgtga

SEQ ID NO: 525986 - DNA, 25 bp, Homo sapien
tacaaatggcccacattcacagttt

SEQ ID NO: 525987 - DNA, 25 bp, Homo sapien
tgagtcctcaagaagaggtagctac

SEQ ID NO: 525988 - DNA, 25 bp, Homo sapien
ttgtccattggccactgagatgagt

SEQ ID NO: 525989 - DNA, 25 bp, Homo sapien
ccttttcacgaaatacagtgggatg

SEQ ID NO: 525990 - DNA, 25 bp, Homo sapien
tctgattgtacccttcgagtctggc

SEQ ID NO: 525991 - DNA, 25 bp, Homo sapien
ggagggaacttctctaaaactatca

SEQ ID NO: 525992 - DNA, 25 bp, Homo sapien
atcacaaccgtaagtggcccctgac

SEQ ID NO: 525993 - DNA, 25 bp, Homo sapien
aaattttcggctgctgatagaagag

SEQ ID NO: 525994 - DNA, 25 bp, Homo sapien
agacaattcatcacactggcagcac

SEQ ID NO: 525995 - DNA, 25 bp, Homo sapien
aaaggcggcccagacaattcatcac

SEQ ID NO: 525996 - DNA, 25 bp, Homo sapien
aatgattcaaacaccggcaaaggcg

SEQ ID NO: 525997 - DNA, 25 bp, Homo sapien
gcaccaggtgaaccggtttagctct

SEQ ID NO: 525998 - DNA, 25 bp, Homo sapien
tgggcaccaggtgaaccggtttagc

SEQ ID NO: 525999 - DNA, 25 bp, Homo sapien
aaccggtttagctctgttctgctcc

SEQ ID NO: 526000 - DNA, 25 bp, Homo sapien
ggtgaaccggtttagctctgttctg

SEQ ID NO: 526001 - DNA, 25 bp, Homo sapien
agtcagcacagagggttcgaatttg

SEQ ID NO: 526002 - DNA, 25 bp, Homo sapien
taagccaggcgagaaatatcaaatc

SEQ ID NO: 526003 - DNA, 25 bp, Homo sapien
tgtggcacattctcaccaagagtca

SEQ ID NO: 526004 - DNA, 25 bp, Homo sapien
aatattcagccctgacccgtacagg

SEQ ID NO: 526005 - DNA, 25 bp, Homo sapien
gtttcaggcactccagaccactgtg

SEQ ID NO: 526006 - DNA, 25 bp, Homo sapien
ctcggtgctacaggtggagaccctt

SEQ ID NO: 526007 - DNA, 25 bp, Homo sapien
agaccactgtgcagagtcggcttcc

SEQ ID NO: 526008 - DNA, 25 bp, Homo sapien
tgcgactctagggaatgagggctcg

SEQ ID NO: 526009 - DNA, 25 bp, Homo sapien
tagtccctgcatggctgtgattgtc

SEQ ID NO: 526010 - DNA, 25 bp, Homo sapien
gcttgtaagataccagaactgctgg

SEQ ID NO: 526011 - DNA, 25 bp, Homo sapien
tcgaatttcagcatagccccacagc

SEQ ID NO: 526012 - DNA, 25 bp, Homo sapien
caaaaacgagtaagatgtggtccct

SEQ ID NO: 526013 - DNA, 25 bp, Homo sapien
atttctccggtttatatttggtgct

SEQ ID NO: 526014 - DNA, 25 bp, Homo sapien
tgctatcaaggtgtatgcacttgtg

SEQ ID NO: 526015 - DNA, 25 bp, Homo sapien
tttctccggtttatatttggtgcta

SEQ ID NO: 526016 - DNA, 25 bp, Homo sapien
tatatttggtgctatcaaggtgtat

SEQ ID NO: 526017 - DNA, 25 bp, Homo sapien
tagaggccatttgcaatgcagccac

SEQ ID NO: 526018 - DNA, 25 bp, Homo sapien
tgttcccacagactgatcctagagg

SEQ ID NO: 526019 - DNA, 25 bp, Homo sapien
tgtgagtaaattcctttaagatggc

SEQ ID NO: 526020 - DNA, 25 bp, Homo sapien
cctctaggtggtgcttgtgagtaaa

SEQ ID NO: 526021 - DNA, 25 bp, Homo sapien
acttttctaggcctatgtccactgg

SEQ ID NO: 526022 - DNA, 25 bp, Homo sapien
ggcctatgtccactggtctcttctt

SEQ ID NO: 526023 - DNA, 25 bp, Homo sapien
gatgatctgagtaactaactggctt

SEQ ID NO: 526024 - DNA, 25 bp, Homo sapien
tcctcttgatgatctgagtaactaa

SEQ ID NO: 526025 - DNA, 25 bp, Homo sapien
ggccaaaaaccaatgatgggaccat

SEQ ID NO: 526026 - DNA, 25 bp, Homo sapien
ctttaagaggccaaaaaccaatgat

SEQ ID NO: 526027 - DNA, 25 bp, Homo sapien
gaggccaaaaaccaatgatgggacc

SEQ ID NO: 526028 - DNA, 25 bp, Homo sapien
ttaagaggccaaaaaccaatgatgg

SEQ ID NO: 526029 - DNA, 25 bp, Homo sapien
tgcgcccgaccacaagtaggtgttt

SEQ ID NO: 526030 - DNA, 25 bp, Homo sapien
cattcgacttaagggtgacagcata

SEQ ID NO: 526031 - DNA, 25 bp, Homo sapien
gatggcataatcagaacttgaaccc

SEQ ID NO: 526032 - DNA, 25 bp, Homo sapien
tgacagcatagtactttaccaggaa

SEQ ID NO: 526033 - DNA, 25 bp, Homo sapien
cactcctctggttgtaagaggctag

SEQ ID NO: 526034 - DNA, 25 bp, Homo sapien
tcttgctgggacgtaggcttgctcc

SEQ ID NO: 526035 - DNA, 25 bp, Homo sapien
ggctagtttatctgcgagtcttgct

SEQ ID NO: 526036 - DNA, 25 bp, Homo sapien
agtcttgctgggacgtaggcttgct

SEQ ID NO: 526037 - DNA, 25 bp, Homo sapien
tgaaccttctaccccatatcacatt

SEQ ID NO: 526038 - DNA, 25 bp, Homo sapien
gaatttgaaccttctaccccatatc

SEQ ID NO: 526039 - DNA, 25 bp, Homo sapien
tttgaaccttctaccccatatcaca

SEQ ID NO: 526040 - DNA, 25 bp, Homo sapien
aatttgaaccttctaccccatatca

SEQ ID NO: 526041 - DNA, 25 bp, Homo sapien
tatttccatactggttggagtatga

SEQ ID NO: 526042 - DNA, 25 bp, Homo sapien
agttatttccatactggttggagta

SEQ ID NO: 526043 - DNA, 25 bp, Homo sapien
tccatactggttggagtatgagttc

SEQ ID NO: 526044 - DNA, 25 bp, Homo sapien
catactggttggagtatgagttctg

SEQ ID NO: 526045 - DNA, 25 bp, Homo sapien
aatcctgtagccagtcacaaaaatc

SEQ ID NO: 526046 - DNA, 25 bp, Homo sapien
cccatatctttcaatcctgtagcca

SEQ ID NO: 526047 - DNA, 25 bp, Homo sapien
ctgtagccagtcacaaaaatcagga

SEQ ID NO: 526048 - DNA, 25 bp, Homo sapien
tctttcaatcctgtagccagtcaca

SEQ ID NO: 526049 - DNA, 25 bp, Homo sapien
aaatccctgttgttgggcccctgtg

SEQ ID NO: 526050 - DNA, 25 bp, Homo sapien
taaggtgcggcatggatactttcat

SEQ ID NO: 526051 - DNA, 25 bp, Homo sapien
tagccgactcaatttataaggtgcg

SEQ ID NO: 526052 - DNA, 25 bp, Homo sapien
caaaggactgcaaactagccgactc

SEQ ID NO: 526053 - DNA, 25 bp, Homo sapien
gaagggcccttaggggctgcctcca

SEQ ID NO: 526054 - DNA, 25 bp, Homo sapien
ggagttcaccactctattgcgggtg

SEQ ID NO: 526055 - DNA, 25 bp, Homo sapien
gtgcacgacgctctcccgcgaaggg

SEQ ID NO: 526056 - DNA, 25 bp, Homo sapien
tctctggtcttccacggggctcagc

SEQ ID NO: 526057 - DNA, 25 bp, Homo sapien
aacagctgagtttcggtttctcaga

SEQ ID NO: 526058 - DNA, 25 bp, Homo sapien
gcttagcgagtctcaagatgggatt

SEQ ID NO: 526059 - DNA, 25 bp, Homo sapien
tcagaatcagcagcagactgcgccc

SEQ ID NO: 526060 - DNA, 25 bp, Homo sapien
cagaggcagcggttttaacagctga

SEQ ID NO: 526061 - DNA, 25 bp, Homo sapien
tgacagggagattaccctgaagggt

SEQ ID NO: 526062 - DNA, 25 bp, Homo sapien
gtagctgtcacaagatctctgctag

SEQ ID NO: 526063 - DNA, 25 bp, Homo sapien
tgctagctgcaggaatggaaggaat

SEQ ID NO: 526064 - DNA, 25 bp, Homo sapien
ctgtagactcagtggcgttgacagg

SEQ ID NO: 526065 - DNA, 25 bp, Homo sapien
cagtgaagctggaactctgttgtca

SEQ ID NO: 526066 - DNA, 25 bp, Homo sapien
ttccagtgaagctggaactctgttg

SEQ ID NO: 526067 - DNA, 25 bp, Homo sapien
gagacactgggcattccatagacat

SEQ ID NO: 526068 - DNA, 25 bp, Homo sapien
tgttgtcataactaggagacactgg

SEQ ID NO: 526069 - DNA, 25 bp, Homo sapien
tatagagtcattccttgaaggttgg

SEQ ID NO: 526070 - DNA, 25 bp, Homo sapien
tactatgtctgcaccaatgaagaag

SEQ ID NO: 526071 - DNA, 25 bp, Homo sapien
ggtgtgacttaaaactggaactgat

SEQ ID NO: 526072 - DNA, 25 bp, Homo sapien
taaagttagaacaccttcatgcggc

SEQ ID NO: 526073 - DNA, 25 bp, Homo sapien
tggtcatcatatctagtctgatttg

SEQ ID NO: 526074 - DNA, 25 bp, Homo sapien
gagataaacctaacttggtcatcat

SEQ ID NO: 526075 - DNA, 25 bp, Homo sapien
aacctaacttggtcatcatatctag

SEQ ID NO: 526076 - DNA, 25 bp, Homo sapien
ctagtctgatttgataagtgagtat

SEQ ID NO: 526077 - DNA, 25 bp, Homo sapien
cagttgcttaactggcctaaaggtc

SEQ ID NO: 526078 - DNA, 25 bp, Homo sapien
ggccgagtgtatgttgcagttgctt

SEQ ID NO: 526079 - DNA, 25 bp, Homo sapien
cagttagacattctgtgggccgagt

SEQ ID NO: 526080 - DNA, 25 bp, Homo sapien
tcatgatatcatgggcactatcgag

SEQ ID NO: 526081 - DNA, 25 bp, Homo sapien
gactggtagtgttgggcttgcataa

SEQ ID NO: 526082 - DNA, 25 bp, Homo sapien
tgttgggcttgcataacataaaggg

SEQ ID NO: 526083 - DNA, 25 bp, Homo sapien
gcttgcataacataaagggcctgtc

SEQ ID NO: 526084 - DNA, 25 bp, Homo sapien
taaagggcctgtctaccataaaaca

SEQ ID NO: 526085 - DNA, 25 bp, Homo sapien
ttccccttctgaaataccactcacc

SEQ ID NO: 526086 - DNA, 25 bp, Homo sapien
cccttctgaaataccactcacctac

SEQ ID NO: 526087 - DNA, 25 bp, Homo sapien
ttgctttccccttctgaaataccac

SEQ ID NO: 526088 - DNA, 25 bp, Homo sapien
tgctttccccttctgaaataccact

SEQ ID NO: 526089 - DNA, 25 bp, Homo sapien
ggccctcgcagttttccgcagcctc

SEQ ID NO: 526090 - DNA, 25 bp, Homo sapien
agggggccctcgcagttttccgcag

SEQ ID NO: 526091 - DNA, 25 bp, Homo sapien
agagcccactggcccttttgcatct

SEQ ID NO: 526092 - DNA, 25 bp, Homo sapien
gagagcccactggcccttttgcatc

SEQ ID NO: 526093 - DNA, 25 bp, Homo sapien
cattttaagataactccaggagcgt

SEQ ID NO: 526094 - DNA, 25 bp, Homo sapien
gataactccaggagcgtaattggat

SEQ ID NO: 526095 - DNA, 25 bp, Homo sapien
ctccaggagcgtaattggattgttt

SEQ ID NO: 526096 - DNA, 25 bp, Homo sapien
taagataactccaggagcgtaattg

SEQ ID NO: 526097 - DNA, 25 bp, Homo sapien
caaagaacgtcagtcctctgctgag

SEQ ID NO: 526098 - DNA, 25 bp, Homo sapien
caaggccctggttgtaacctcaaag

SEQ ID NO: 526099 - DNA, 25 bp, Homo sapien
caccttgaaaagtggagccctcttg

SEQ ID NO: 526100 - DNA, 25 bp, Homo sapien
aggtcacaatcttgttgctcaaggc

SEQ ID NO: 526101 - DNA, 25 bp, Homo sapien
cagtattgatcgcacaggcagctgt

SEQ ID NO: 526102 - DNA, 25 bp, Homo sapien
ggaatcaataagcagccctgatgtg

SEQ ID NO: 526103 - DNA, 25 bp, Homo sapien
gggcccccagttttctcaagagtca

SEQ ID NO: 526104 - DNA, 25 bp, Homo sapien
tctcaaaatcgaggaataggagccc

SEQ ID NO: 526105 - DNA, 25 bp, Homo sapien
cacatcccgaatgaggggtttgaag

SEQ ID NO: 526106 - DNA, 25 bp, Homo sapien
cttggagtaggttttggatgcattt

SEQ ID NO: 526107 - DNA, 25 bp, Homo sapien
tgttgatttaatgctgtggttgcta

SEQ ID NO: 526108 - DNA, 25 bp, Homo sapien
gggtttgaaggttgaactgctatgt

SEQ ID NO: 526109 - DNA, 25 bp, Homo sapien
tgccacaattcaggctgcatgctgc

SEQ ID NO: 526110 - DNA, 25 bp, Homo sapien
tggcagagggaacgaagggaatgca

SEQ ID NO: 526111 - DNA, 25 bp, Homo sapien
ttgccacaattcaggctgcatgctg

SEQ ID NO: 526112 - DNA, 25 bp, Homo sapien
tcttgccacaattcaggctgcatgc

SEQ ID NO: 526113 - DNA, 25 bp, Homo sapien
tgcagcagaactaccagcctcgcat

SEQ ID NO: 526114 - DNA, 25 bp, Homo sapien
ggctgccaactttggctctattgac

SEQ ID NO: 526115 - DNA, 25 bp, Homo sapien
tttggctctattgacttgtcagggc

SEQ ID NO: 526116 - DNA, 25 bp, Homo sapien
gcagtcttggcccatattgaccaga

SEQ ID NO: 526117 - DNA, 25 bp, Homo sapien
gctctctgctggccctgatccaaat

SEQ ID NO: 526118 - DNA, 25 bp, Homo sapien
tattgttgccataagaagtggcagc

SEQ ID NO: 526119 - DNA, 25 bp, Homo sapien
aaacatttgcaatgggattccaggg

SEQ ID NO: 526120 - DNA, 25 bp, Homo sapien
cctgatccaaatggggcattgtgct

SEQ ID NO: 526121 - DNA, 25 bp, Homo sapien
tcccatttggtcctgactgaactgc

SEQ ID NO: 526122 - DNA, 25 bp, Homo sapien
cctgactgaactgctgaccatgagg

SEQ ID NO: 526123 - DNA, 25 bp, Homo sapien
tgactgaactgctgaccatgaggct

SEQ ID NO: 526124 - DNA, 25 bp, Homo sapien
tcttggtcccatttggtcctgactg

SEQ ID NO: 526125 - DNA, 25 bp, Homo sapien
tcttcacatggctccacattgctgg

SEQ ID NO: 526126 - DNA, 25 bp, Homo sapien
ttgacagtcttgagtctgatgacct

SEQ ID NO: 526127 - DNA, 25 bp, Homo sapien
agtcttgagtctgatgacctccacc

SEQ ID NO: 526128 - DNA, 25 bp, Homo sapien
ggcccttggtccttggtccttgaca

SEQ ID NO: 526129 - DNA, 25 bp, Homo sapien
cagcgccaggcaaaagccttgattt

SEQ ID NO: 526130 - DNA, 25 bp, Homo sapien
ttcagagcacttatcttcaaagtat

SEQ ID NO: 526131 - DNA, 25 bp, Homo sapien
gaatgtgatagctatcttgctctgc

SEQ ID NO: 526132 - DNA, 25 bp, Homo sapien
caggatgtctgaatccatccagacc

SEQ ID NO: 526133 - DNA, 25 bp, Homo sapien
tcttgggtcgctgttaagaactgta

SEQ ID NO: 526134 - DNA, 25 bp, Homo sapien
gggaagctttgctcagtttgcaaat

SEQ ID NO: 526135 - DNA, 25 bp, Homo sapien
tcccttctgggattgcttctcttat

SEQ ID NO: 526136 - DNA, 25 bp, Homo sapien
caaatcacataaaagggaagagttg

SEQ ID NO: 526137 - DNA, 25 bp, Homo sapien
cagttgcaagatgagtgtctcctcc

SEQ ID NO: 526138 - DNA, 25 bp, Homo sapien
cagtctcgacttggtggccttcgga

SEQ ID NO: 526139 - DNA, 25 bp, Homo sapien
tttaacagaagcctccaccggtgtc

SEQ ID NO: 526140 - DNA, 25 bp, Homo sapien
tagtcgttgtgtgcaaacttcagcc

SEQ ID NO: 526141 - DNA, 25 bp, Homo sapien
taccactggcaattaaatcagagtt

SEQ ID NO: 526142 - DNA, 25 bp, Homo sapien
agatttccgccaatttcttactcag

SEQ ID NO: 526143 - DNA, 25 bp, Homo sapien
gggcagaacttaactcccatccctg

SEQ ID NO: 526144 - DNA, 25 bp, Homo sapien
tcacgactgctgtcgactaccactg

SEQ ID NO: 526145 - DNA, 25 bp, Homo sapien
tcaagctatttcccaagaaatgaac

SEQ ID NO: 526146 - DNA, 25 bp, Homo sapien
caagctatttcccaagaaatgaaca

SEQ ID NO: 526147 - DNA, 25 bp, Homo sapien
ctttgccaatgtaaagggctgaatc

SEQ ID NO: 526148 - DNA, 25 bp, Homo sapien
ccataagtccagatactgtttccct

SEQ ID NO: 526149 - DNA, 25 bp, Homo sapien
tctcttgttccacggtgagtgtcgc

SEQ ID NO: 526150 - DNA, 25 bp, Homo sapien
gggacttggcagctagcctgaacct

SEQ ID NO: 526151 - DNA, 25 bp, Homo sapien
gctcaggccccataggcttgtcact

SEQ ID NO: 526152 - DNA, 25 bp, Homo sapien
gaactcagagggtattttcctgtgc

SEQ ID NO: 526153 - DNA, 25 bp, Homo sapien
gcttgtcactagatgaaataatctg

SEQ ID NO: 526154 - DNA, 25 bp, Homo sapien
tgaaggaactcagagggtattttcc

SEQ ID NO: 526155 - DNA, 25 bp, Homo sapien
ctaatctccaagcatagatttcaag

SEQ ID NO: 526156 - DNA, 25 bp, Homo sapien
aaaataagtcagatctaatctccaa

SEQ ID NO: 526157 - DNA, 25 bp, Homo sapien
aataagtcagatctaatctccaagc

SEQ ID NO: 526158 - DNA, 25 bp, Homo sapien
aatctccaagcatagatttcaaggc

SEQ ID NO: 526159 - DNA, 25 bp, Homo sapien
ggtacggactgttacactggtggca

SEQ ID NO: 526160 - DNA, 25 bp, Homo sapien
tcttagccagtggagattttgcccc

SEQ ID NO: 526161 - DNA, 25 bp, Homo sapien
aatgaagagtaagcagccccggtac

SEQ ID NO: 526162 - DNA, 25 bp, Homo sapien
agtcgcatggcttctcgcaggagag

SEQ ID NO: 526163 - DNA, 25 bp, Homo sapien
tttggtatgcttttccctcactgta

SEQ ID NO: 526164 - DNA, 25 bp, Homo sapien
taaagcattctcaatgtgtccaatc

SEQ ID NO: 526165 - DNA, 25 bp, Homo sapien
caataaggcaaaagtccctggaaca

SEQ ID NO: 526166 - DNA, 25 bp, Homo sapien
tttgatgcataaacctgaatgttac

SEQ ID NO: 526167 - DNA, 25 bp, Homo sapien
cattacatatacaactctgtagcct

SEQ ID NO: 526168 - DNA, 25 bp, Homo sapien
acaatcattgctacaccatcattaa

SEQ ID NO: 526169 - DNA, 25 bp, Homo sapien
aatcattgctacaccatcattaact

SEQ ID NO: 526170 - DNA, 25 bp, Homo sapien
caactctgtagcctagcaacaatca

SEQ ID NO: 526171 - DNA, 25 bp, Homo sapien
taactaaaggcaggcttcgatggct

SEQ ID NO: 526172 - DNA, 25 bp, Homo sapien
tccagagatgctttgctcttcgcag

SEQ ID NO: 526173 - DNA, 25 bp, Homo sapien
aaggttgcgtgctggaccaacccca

SEQ ID NO: 526174 - DNA, 25 bp, Homo sapien
agaacgccacagatataactaaagg

SEQ ID NO: 526175 - DNA, 25 bp, Homo sapien
tccatcttttttccagcgtggctcc

SEQ ID NO: 526176 - DNA, 25 bp, Homo sapien
acacccgtgaattcctgtttgaaca

SEQ ID NO: 526177 - DNA, 25 bp, Homo sapien
tttgaacatgcgtggcagcctcatc

SEQ ID NO: 526178 - DNA, 25 bp, Homo sapien
agcgtggctcccacacccgtgaatt

SEQ ID NO: 526179 - DNA, 25 bp, Homo sapien
gctgggcggaaagtgccaagttcac

SEQ ID NO: 526180 - DNA, 25 bp, Homo sapien
gccaagttcacccttcatatggatg

SEQ ID NO: 526181 - DNA, 25 bp, Homo sapien
cttcatatggatggctaccttactg

SEQ ID NO: 526182 - DNA, 25 bp, Homo sapien
ggaaagtgccaagttcacccttcat

SEQ ID NO: 526183 - DNA, 25 bp, Homo sapien
ctcctttccatagccaagacattta

SEQ ID NO: 526184 - DNA, 25 bp, Homo sapien
tatagtctgggaaagaatgctatcc

SEQ ID NO: 526185 - DNA, 25 bp, Homo sapien
tgtgtttgcagaggtatgctattag

SEQ ID NO: 526186 - DNA, 25 bp, Homo sapien
taattaaacaggatctgaatctcct

SEQ ID NO: 526187 - DNA, 25 bp, Homo sapien
tcgtgccaaaatagcaggtccttct

SEQ ID NO: 526188 - DNA, 25 bp, Homo sapien
tgtggccacattacgctgagtctgg

SEQ ID NO: 526189 - DNA, 25 bp, Homo sapien
tggtcacagtggtgtcgtgccaaaa

SEQ ID NO: 526190 - DNA, 25 bp, Homo sapien
tctggttttcagaaccaaatcttcc

SEQ ID NO: 526191 - DNA, 25 bp, Homo sapien
aaccagacacgcttggaaaactgag

SEQ ID NO: 526192 - DNA, 25 bp, Homo sapien
gggcaaccagacacgcttggaaaac

SEQ ID NO: 526193 - DNA, 25 bp, Homo sapien
gtagagggggcaaccagacacgctt

SEQ ID NO: 526194 - DNA, 25 bp, Homo sapien
ctgcaggtgtgtagagggggcaacc

SEQ ID NO: 526195 - DNA, 25 bp, Homo sapien
tattcatctgctaatgctcaagtca

SEQ ID NO: 526196 - DNA, 25 bp, Homo sapien
aacagggaagagcagacgaaccctc

SEQ ID NO: 526197 - DNA, 25 bp, Homo sapien
cttgactgtaagaagtattcatctg

SEQ ID NO: 526198 - DNA, 25 bp, Homo sapien
tgtttcttctgggctgcttcggaga

SEQ ID NO: 526199 - DNA, 25 bp, Homo sapien
gacgtgaagaaacgttgatatgata

SEQ ID NO: 526200 - DNA, 25 bp, Homo sapien
tccagctgctgcatgtatgaccaaa

SEQ ID NO: 526201 - DNA, 25 bp, Homo sapien
ggctccaaaaggatggacgtgaaga

SEQ ID NO: 526202 - DNA, 25 bp, Homo sapien
aagatattctatgttggctccaaaa

SEQ ID NO: 526203 - DNA, 25 bp, Homo sapien
agcattcctcgggtggacatctgct

SEQ ID NO: 526204 - DNA, 25 bp, Homo sapien
tgctcctagtcggaagctttttttc

SEQ ID NO: 526205 - DNA, 25 bp, Homo sapien
gtggacatctgcttacgcagcaggg

SEQ ID NO: 526206 - DNA, 25 bp, Homo sapien
cagctttggctttgtgagcaggtga

SEQ ID NO: 526207 - DNA, 25 bp, Homo sapien
gagacacagccgaaaggaaagcatg

SEQ ID NO: 526208 - DNA, 25 bp, Homo sapien
gagaaaatgtttctaggccctgtga

SEQ ID NO: 526209 - DNA, 25 bp, Homo sapien
gatgacaacccaattatccagtgtt

SEQ ID NO: 526210 - DNA, 25 bp, Homo sapien
gaagcatcagtcatgccacttgaga

SEQ ID NO: 526211 - DNA, 25 bp, Homo sapien
ggaactgggacattccctggggatg

SEQ ID NO: 526212 - DNA, 25 bp, Homo sapien
ggctgtaactcaaaagttaatgaaa

SEQ ID NO: 526213 - DNA, 25 bp, Homo sapien
atggctgtaactcaaaagttaatga

SEQ ID NO: 526214 - DNA, 25 bp, Homo sapien
aggaactgggacattccctggggat

SEQ ID NO: 526215 - DNA, 25 bp, Homo sapien
cccatataaatggtccacggatgtt

SEQ ID NO: 526216 - DNA, 25 bp, Homo sapien
cacggatgttggagaatcagcagga

SEQ ID NO: 526217 - DNA, 25 bp, Homo sapien
gctgggaattaccagaggcctgacc

SEQ ID NO: 526218 - DNA, 25 bp, Homo sapien
taggaaaccgatcaaacacttgtgg

SEQ ID NO: 526219 - DNA, 25 bp, Homo sapien
catatgggttcgttttgggttcctg

SEQ ID NO: 526220 - DNA, 25 bp, Homo sapien
tggacatgttttccaatagaagaaa

SEQ ID NO: 526221 - DNA, 25 bp, Homo sapien
ggttcctggaactgatagcacatca

SEQ ID NO: 526222 - DNA, 25 bp, Homo sapien
aatccagttaccaactacatatggg

SEQ ID NO: 526223 - DNA, 25 bp, Homo sapien
tcaatattgttctctcggtcttggt

SEQ ID NO: 526224 - DNA, 25 bp, Homo sapien
tcttggttgactaatgcaactgtca

SEQ ID NO: 526225 - DNA, 25 bp, Homo sapien
gactaatgcaactgtcaacacattg

SEQ ID NO: 526226 - DNA, 25 bp, Homo sapien
tgttctctcggtcttggttgactaa

SEQ ID NO: 526227 - DNA, 25 bp, Homo sapien
tctcgtgggttcagctatgatcaat

SEQ ID NO: 526228 - DNA, 25 bp, Homo sapien
tgggttcagctatgatcaatcttaa

SEQ ID NO: 526229 - DNA, 25 bp, Homo sapien
ctttcattctcgtgggttcagctat

SEQ ID NO: 526230 - DNA, 25 bp, Homo sapien
cttctgttctttaccaccaactgac

SEQ ID NO: 526231 - DNA, 25 bp, Homo sapien
ccagttcatctcactcgtcaaactg

SEQ ID NO: 526232 - DNA, 25 bp, Homo sapien
cattctctactatcccctaagtgct

SEQ ID NO: 526233 - DNA, 25 bp, Homo sapien
attttatgactaaaacccagttcat

SEQ ID NO: 526234 - DNA, 25 bp, Homo sapien
acttgctggcgctcaaaccctcatt

SEQ ID NO: 526235 - DNA, 25 bp, Homo sapien
gcctccatagctgctagtgcaagat

SEQ ID NO: 526236 - DNA, 25 bp, Homo sapien
tgccagcagcataccacaaggctcg

SEQ ID NO: 526237 - DNA, 25 bp, Homo sapien
tgcaagatgagtgggacagtcgaca

SEQ ID NO: 526238 - DNA, 25 bp, Homo sapien
tcagttctgctaattgctcataggc

SEQ ID NO: 526239 - DNA, 25 bp, Homo sapien
gcctttgatggtcaaggtctgtata

SEQ ID NO: 526240 - DNA, 25 bp, Homo sapien
cccaatagttttcagcatcagagag

SEQ ID NO: 526241 - DNA, 25 bp, Homo sapien
caaggtctgtataaggggagcctca

SEQ ID NO: 526242 - DNA, 25 bp, Homo sapien
agaggcccaatagttttcagcatca

SEQ ID NO: 526243 - DNA, 25 bp, Homo sapien
gagctgtggttcttgcataaacatg

SEQ ID NO: 526244 - DNA, 25 bp, Homo sapien
gcaggcctggtgagctgtggttctt

SEQ ID NO: 526245 - DNA, 25 bp, Homo sapien
ctgctgctgtttgcgggtgacggac

SEQ ID NO: 526246 - DNA, 25 bp, Homo sapien
tgtttgcgggtgacggacttcttta

SEQ ID NO: 526247 - DNA, 25 bp, Homo sapien
ttctttagtgtgacttttaaccaca

SEQ ID NO: 526248 - DNA, 25 bp, Homo sapien
cgggtgacggacttctttagtgtga

SEQ ID NO: 526249 - DNA, 25 bp, Homo sapien
ggcgtggacttgagtagctatagca

SEQ ID NO: 526250 - DNA, 25 bp, Homo sapien
tagtacttcaggctgtgaagggcgt

SEQ ID NO: 526251 - DNA, 25 bp, Homo sapien
ggaagcgtcaggagatttttcatgg

SEQ ID NO: 526252 - DNA, 25 bp, Homo sapien
caaggtctgcacaatggaagcgtca

SEQ ID NO: 526253 - DNA, 25 bp, Homo sapien
ctggaaattgtccagacagagaaag

SEQ ID NO: 526254 - DNA, 25 bp, Homo sapien
gacgtgttactgagcatcacggcca

SEQ ID NO: 526255 - DNA, 25 bp, Homo sapien
gaaacgacgtgttactgagcatcac

SEQ ID NO: 526256 - DNA, 25 bp, Homo sapien
tagaacaatagaaacgacgtgttac

SEQ ID NO: 526257 - DNA, 25 bp, Homo sapien
caatagaaacgacgtgttactgagc

SEQ ID NO: 526258 - DNA, 25 bp, Homo sapien
agtctcatttgggtacggatggcca

SEQ ID NO: 526259 - DNA, 25 bp, Homo sapien
taggccacaaagaaggttcggacat

SEQ ID NO: 526260 - DNA, 25 bp, Homo sapien
ttttctcgagaggatggacaagtct

SEQ ID NO: 526261 - DNA, 25 bp, Homo sapien
ggatggccattaaccttggtctggg

SEQ ID NO: 526262 - DNA, 25 bp, Homo sapien
ctgtggccattggtctcgaccaatt

SEQ ID NO: 526263 - DNA, 25 bp, Homo sapien
gccattggtctcgaccaattccttg

SEQ ID NO: 526264 - DNA, 25 bp, Homo sapien
ttggtctcgaccaattccttggtac

SEQ ID NO: 526265 - DNA, 25 bp, Homo sapien
tggtctcgaccaattccttggtacc

SEQ ID NO: 526266 - DNA, 25 bp, Homo sapien
ctccgctgtgctccattgccagaac

SEQ ID NO: 526267 - DNA, 25 bp, Homo sapien
actccgctgtgctccattgccagaa

SEQ ID NO: 526268 - DNA, 25 bp, Homo sapien
tcactccgctgtgctccattgccag

SEQ ID NO: 526269 - DNA, 25 bp, Homo sapien
cactccgctgtgctccattgccaga

SEQ ID NO: 526270 - DNA, 25 bp, Homo sapien
tctctcctttagctgctactctccc

SEQ ID NO: 526271 - DNA, 25 bp, Homo sapien
ccctccccactctagtcaaagctat

SEQ ID NO: 526272 - DNA, 25 bp, Homo sapien
gcttgtgtatgggactgctcttcct

SEQ ID NO: 526273 - DNA, 25 bp, Homo sapien
actcctcctggatggttagcaattg

SEQ ID NO: 526274 - DNA, 25 bp, Homo sapien
cctttgcttgttccaattctgactt

SEQ ID NO: 526275 - DNA, 25 bp, Homo sapien
tgttcctgcaggacttttagtaacg

SEQ ID NO: 526276 - DNA, 25 bp, Homo sapien
cacaacctctttgccggttccttga

SEQ ID NO: 526277 - DNA, 25 bp, Homo sapien
atccttgctgtcatagtaaaggcta

SEQ ID NO: 526278 - DNA, 25 bp, Homo sapien
tgttccccctgccatttacccgaca

SEQ ID NO: 526279 - DNA, 25 bp, Homo sapien
cttgctgtcatagtaaaggctacca

SEQ ID NO: 526280 - DNA, 25 bp, Homo sapien
tcatgggggtgcctgaggcatgaag

SEQ ID NO: 526281 - DNA, 25 bp, Homo sapien
tgaggcatgaaggaccctgctgcac

SEQ ID NO: 526282 - DNA, 25 bp, Homo sapien
tgggggtgcctgaggcatgaaggac

SEQ ID NO: 526283 - DNA, 25 bp, Homo sapien
gtgcctgaggcatgaaggaccctgc

SEQ ID NO: 526284 - DNA, 25 bp, Homo sapien
tgtgcgtacatctgagcaatgtctc

SEQ ID NO: 526285 - DNA, 25 bp, Homo sapien
cctgtggaccgagtaaggcatgagc

SEQ ID NO: 526286 - DNA, 25 bp, Homo sapien
agctgaaggatgcacactgtgtgcg

SEQ ID NO: 526287 - DNA, 25 bp, Homo sapien
tgagcaatgtctcccagcgcagggg

SEQ ID NO: 526288 - DNA, 25 bp, Homo sapien
ttcttaggatgtaccaggagtgtaa

SEQ ID NO: 526289 - DNA, 25 bp, Homo sapien
tcttaggatgtaccaggagtgtaat

SEQ ID NO: 526290 - DNA, 25 bp, Homo sapien
cttcttaggatgtaccaggagtgta

SEQ ID NO: 526291 - DNA, 25 bp, Homo sapien
tgccagcggagactgtcattctcct

SEQ ID NO: 526292 - DNA, 25 bp, Homo sapien
tcttctgttcggaaaagctgttctt

SEQ ID NO: 526293 - DNA, 25 bp, Homo sapien
tttcttctgttcggaaaagctgttc

SEQ ID NO: 526294 - DNA, 25 bp, Homo sapien
gccagcggagactgtcattctcctc

SEQ ID NO: 526295 - DNA, 25 bp, Homo sapien
attccccacttgtgtaagcaagaga

SEQ ID NO: 526296 - DNA, 25 bp, Homo sapien
ccacttgtgtaagcaagagaaaagt

SEQ ID NO: 526297 - DNA, 25 bp, Homo sapien
atgtaacttccagtagataagggca

SEQ ID NO: 526298 - DNA, 25 bp, Homo sapien
ttccagtagataagggcacggtgtg

SEQ ID NO: 526299 - DNA, 25 bp, Homo sapien
tcttcttgtgaggtgccttgaggcc

SEQ ID NO: 526300 - DNA, 25 bp, Homo sapien
acaatatctgtgtgccttcaacggc

SEQ ID NO: 526301 - DNA, 25 bp, Homo sapien
ggagctgtagttatggcccagtgac

SEQ ID NO: 526302 - DNA, 25 bp, Homo sapien
tcctgctccactaggaaagggagct

SEQ ID NO: 526303 - DNA, 25 bp, Homo sapien
tctgcacagtccctcagtctctgcc

SEQ ID NO: 526304 - DNA, 25 bp, Homo sapien
aatggagtgtgagggggagtgagga

SEQ ID NO: 526305 - DNA, 25 bp, Homo sapien
agtgaggatgccttctgcacagtcc

SEQ ID NO: 526306 - DNA, 25 bp, Homo sapien
tgtgagggggagtgaggatgccttc

SEQ ID NO: 526307 - DNA, 25 bp, Homo sapien
taaaaggtgtggctctaggactata

SEQ ID NO: 526308 - DNA, 25 bp, Homo sapien
tattcctccatgtaatgccaccagg

SEQ ID NO: 526309 - DNA, 25 bp, Homo sapien
cgtgccctggctatctcctatggaa

SEQ ID NO: 526310 - DNA, 25 bp, Homo sapien
gccaggcactgaggtaagcatattc

SEQ ID NO: 526311 - DNA, 25 bp, Homo sapien
ggtagcctcattctcagtggctgct

SEQ ID NO: 526312 - DNA, 25 bp, Homo sapien
tgtcagaagattaacagaggcttgg

SEQ ID NO: 526313 - DNA, 25 bp, Homo sapien
cctgagtctactttgcttgggctaa

SEQ ID NO: 526314 - DNA, 25 bp, Homo sapien
gggtccttcatcattggtagcctca

SEQ ID NO: 526315 - DNA, 25 bp, Homo sapien
cctcccagtggccaggcacagagct

SEQ ID NO: 526316 - DNA, 25 bp, Homo sapien
agtggccaggcacagagctggaaag

SEQ ID NO: 526317 - DNA, 25 bp, Homo sapien
tggccaggcacagagctggaaagta

SEQ ID NO: 526318 - DNA, 25 bp, Homo sapien
gccaggcacagagctggaaagtatc

SEQ ID NO: 526319 - DNA, 25 bp, Homo sapien
cacaccagtctctagattcgcagag

SEQ ID NO: 526320 - DNA, 25 bp, Homo sapien
tttctccttggcgagtggccaggca

SEQ ID NO: 526321 - DNA, 25 bp, Homo sapien
ctctagattcgcagaggcttttctc

SEQ ID NO: 526322 - DNA, 25 bp, Homo sapien
gatgagcaaacagttcctgtctatt

SEQ ID NO: 526323 - DNA, 25 bp, Homo sapien
tctgctctacaccagcatcaactct

SEQ ID NO: 526324 - DNA, 25 bp, Homo sapien
gctctacaccagcatcaactctcca

SEQ ID NO: 526325 - DNA, 25 bp, Homo sapien
cttctgctctacaccagcatcaact

SEQ ID NO: 526326 - DNA, 25 bp, Homo sapien
tctacaccagcatcaactctccaca

SEQ ID NO: 526327 - DNA, 25 bp, Homo sapien
gcctaagtgttacgtagaagggtca

SEQ ID NO: 526328 - DNA, 25 bp, Homo sapien
tattgaacatgagagggaagggact

SEQ ID NO: 526329 - DNA, 25 bp, Homo sapien
catgacactgatgatccagcatcaa

SEQ ID NO: 526330 - DNA, 25 bp, Homo sapien
gaaaaaagcttcagtcattacctct

SEQ ID NO: 526331 - DNA, 25 bp, Homo sapien
tctggtccatctcgttttgaaaagc

SEQ ID NO: 526332 - DNA, 25 bp, Homo sapien
gaaaccacatgccacattctctggt

SEQ ID NO: 526333 - DNA, 25 bp, Homo sapien
caacagttagcagggatttgtctga

SEQ ID NO: 526334 - DNA, 25 bp, Homo sapien
gtttgaacaaaagaccagatgggaa

SEQ ID NO: 526335 - DNA, 25 bp, Homo sapien
ccaaattttatccatatttttagca

SEQ ID NO: 526336 - DNA, 25 bp, Homo sapien
gcaaatatccctgaaaaaagcttaa

SEQ ID NO: 526337 - DNA, 25 bp, Homo sapien
ggcaaatatccctgaaaaaagctta

SEQ ID NO: 526338 - DNA, 25 bp, Homo sapien
gtggctgccgtactctggaaaagga

SEQ ID NO: 526339 - DNA, 25 bp, Homo sapien
gctgtggctgccgtactctggaaaa

SEQ ID NO: 526340 - DNA, 25 bp, Homo sapien
ctcatgggtctgtggcagttatcgg

SEQ ID NO: 526341 - DNA, 25 bp, Homo sapien
tcatgggtctgtggcagttatcggc

SEQ ID NO: 526342 - DNA, 25 bp, Homo sapien
ggtctgtggcagttatcggcattac

SEQ ID NO: 526343 - DNA, 25 bp, Homo sapien
atgggtctgtggcagttatcggcat

SEQ ID NO: 526344 - DNA, 25 bp, Homo sapien
tccatttcttcttcgcggcggatgc

SEQ ID NO: 526345 - DNA, 25 bp, Homo sapien
gctcactttgagcattccggagctc

SEQ ID NO: 526346 - DNA, 25 bp, Homo sapien
ttcttcgcggcggatgcccatgagc

SEQ ID NO: 526347 - DNA, 25 bp, Homo sapien
ggatgcccatgagctgctcactttg

SEQ ID NO: 526348 - DNA, 25 bp, Homo sapien
aagtctctaaataaaaatcaaatag

SEQ ID NO: 526349 - DNA, 25 bp, Homo sapien
tctctaaataaaaatcaaatagtta

SEQ ID NO: 526350 - DNA, 25 bp, Homo sapien
ctctgtaaagtctctaaataaaaat

SEQ ID NO: 526351 - DNA, 25 bp, Homo sapien
tgtaaagtctctaaataaaaatcaa

SEQ ID NO: 526352 - DNA, 25 bp, Homo sapien
tctccttagctcacagattttaact

SEQ ID NO: 526353 - DNA, 25 bp, Homo sapien
attttaactacagcatgatggagag

SEQ ID NO: 526354 - DNA, 25 bp, Homo sapien
tgctaacagcatttgaatggtcaac

SEQ ID NO: 526355 - DNA, 25 bp, Homo sapien
catatatcactccatgttatgggtt

SEQ ID NO: 526356 - DNA, 25 bp, Homo sapien
cctgggaatcacccttgcagaagac

SEQ ID NO: 526357 - DNA, 25 bp, Homo sapien
tgggaatcacccttgcagaagacag

SEQ ID NO: 526358 - DNA, 25 bp, Homo sapien
acaaggtccgaggtggggtgcaggg

SEQ ID NO: 526359 - DNA, 25 bp, Homo sapien
gagacaaggtccgaggtggggtgca

SEQ ID NO: 526360 - DNA, 25 bp, Homo sapien
tcccaaagaggtggcttaacacttg

SEQ ID NO: 526361 - DNA, 25 bp, Homo sapien
gacaaagagcccaattcccaaagag

SEQ ID NO: 526362 - DNA, 25 bp, Homo sapien
aatcaattcagcgacatgcaagaga

SEQ ID NO: 526363 - DNA, 25 bp, Homo sapien
cggaaatttttaggctgtggacagc

SEQ ID NO: 526364 - DNA, 25 bp, Homo sapien
tctgtctcctagtaccaaacaaagc

SEQ ID NO: 526365 - DNA, 25 bp, Homo sapien
aaagcaagcaggctccttagacctg

SEQ ID NO: 526366 - DNA, 25 bp, Homo sapien
catggaagccttcacacgtcctgct

SEQ ID NO: 526367 - DNA, 25 bp, Homo sapien
cacccacgcagaggaggcagggtta

SEQ ID NO: 526368 - DNA, 25 bp, Homo sapien
tctaatgatggcctttttatgctca

SEQ ID NO: 526369 - DNA, 25 bp, Homo sapien
tttatgctcaggtttattcggcagc

SEQ ID NO: 526370 - DNA, 25 bp, Homo sapien
aggtttattcggcagcaggccacca

SEQ ID NO: 526371 - DNA, 25 bp, Homo sapien
taatgatggcctttttatgctcagg

SEQ ID NO: 526372 - DNA, 25 bp, Homo sapien
cagactgatcattcccaaatctgaa

SEQ ID NO: 526373 - DNA, 25 bp, Homo sapien
aataattcacagactgatcattccc

SEQ ID NO: 526374 - DNA, 25 bp, Homo sapien
catagtttatggactccaatttgtg

SEQ ID NO: 526375 - DNA, 25 bp, Homo sapien
gatcattcccaaatctgaatcatag

SEQ ID NO: 526376 - DNA, 25 bp, Homo sapien
gacccagttggcctagatattcact

SEQ ID NO: 526377 - DNA, 25 bp, Homo sapien
caaagcgtacactactctgtggagt

SEQ ID NO: 526378 - DNA, 25 bp, Homo sapien
tgagatcagacaatggcaggcggac

SEQ ID NO: 526379 - DNA, 25 bp, Homo sapien
ttaaaaataacagctggacgaccag

SEQ ID NO: 526380 - DNA, 25 bp, Homo sapien
gccaaatgtctatgttcttgcgctg

SEQ ID NO: 526381 - DNA, 25 bp, Homo sapien
cttgcgctgggctttcgagaaatgg

SEQ ID NO: 526382 - DNA, 25 bp, Homo sapien
tgtctggtagaagcgttgaaaacgg

SEQ ID NO: 526383 - DNA, 25 bp, Homo sapien
aaatggtcccaagctttttgtctgg

SEQ ID NO: 526384 - DNA, 25 bp, Homo sapien
aacaaggaagtcaaacaagacaagt

SEQ ID NO: 526385 - DNA, 25 bp, Homo sapien
acaaggaagtcaaacaagacaagta

SEQ ID NO: 526386 - DNA, 25 bp, Homo sapien
gaacaaggaagtcaaacaagacaag

SEQ ID NO: 526387 - DNA, 25 bp, Homo sapien
tccaatttgtgcctttcgtacttac

SEQ ID NO: 526388 - DNA, 25 bp, Homo sapien
ccatccaatttgtgcctttcgtact

SEQ ID NO: 526389 - DNA, 25 bp, Homo sapien
aagacactaggagtctatggatgat

SEQ ID NO: 526390 - DNA, 25 bp, Homo sapien
tggatgatgtcacaatagaaacaac

SEQ ID NO: 526391 - DNA, 25 bp, Homo sapien
attttagcaaggttggggatgtctc

SEQ ID NO: 526392 - DNA, 25 bp, Homo sapien
ggttggggatgtctcccttcaagtc

SEQ ID NO: 526393 - DNA, 25 bp, Homo sapien
gcaaggttggggatgtctcccttca

SEQ ID NO: 526394 - DNA, 25 bp, Homo sapien
gatgtctcccttcaagtctgtctcc

SEQ ID NO: 526395 - DNA, 25 bp, Homo sapien
gagagaacctgttccagtggatcac

SEQ ID NO: 526396 - DNA, 25 bp, Homo sapien
gggatcattgggaatttcagctgcc

SEQ ID NO: 526397 - DNA, 25 bp, Homo sapien
actgatccttagtgctctggttggc

SEQ ID NO: 526398 - DNA, 25 bp, Homo sapien
ctttctgcatgttttgtctgtacac

SEQ ID NO: 526399 - DNA, 25 bp, Homo sapien
tcagccccaaatctaggctggcagg

SEQ ID NO: 526400 - DNA, 25 bp, Homo sapien
gagtaatgggcttcgttgcttataa

SEQ ID NO: 526401 - DNA, 25 bp, Homo sapien
gaagaactatgatgtcctgacacca

SEQ ID NO: 526402 - DNA, 25 bp, Homo sapien
gcttataataacatagctctttggc

SEQ ID NO: 526403 - DNA, 25 bp, Homo sapien
gataacggtactctaatactcctac

SEQ ID NO: 526404 - DNA, 25 bp, Homo sapien
tccaggttgaaatgatattgataac

SEQ ID NO: 526405 - DNA, 25 bp, Homo sapien
actaaagtatatgccgtatgctcca

SEQ ID NO: 526406 - DNA, 25 bp, Homo sapien
aaattctcaactaaagtatatgccg

SEQ ID NO: 526407 - DNA, 25 bp, Homo sapien
tatatctaggaaatgaggtctatcc

SEQ ID NO: 526408 - DNA, 25 bp, Homo sapien
aggtgccacagcaggatagacgatg

SEQ ID NO: 526409 - DNA, 25 bp, Homo sapien
ggaaatgaggtctatccagctggcc

SEQ ID NO: 526410 - DNA, 25 bp, Homo sapien
ggatagacgatgtcctcatctaaca

SEQ ID NO: 526411 - DNA, 25 bp, Homo sapien
tgttataaggcttgatatatattga

SEQ ID NO: 526412 - DNA, 25 bp, Homo sapien
ctcttcctttgtgatgcctgctata

SEQ ID NO: 526413 - DNA, 25 bp, Homo sapien
atattgatgacttgatatatattga

SEQ ID NO: 526414 - DNA, 25 bp, Homo sapien
tctatgttataaggcttgatatata

SEQ ID NO: 526415 - DNA, 25 bp, Homo sapien
ccaagcaagagaacatcggcagctg

SEQ ID NO: 526416 - DNA, 25 bp, Homo sapien
aagcaagagaacatcggcagctgtg

SEQ ID NO: 526417 - DNA, 25 bp, Homo sapien
gcaagagaacatcggcagctgtgat

SEQ ID NO: 526418 - DNA, 25 bp, Homo sapien
caagagaacatcggcagctgtgatg

SEQ ID NO: 526419 - DNA, 25 bp, Homo sapien
tctgtgcggacagcctgcaggtgaa

SEQ ID NO: 526420 - DNA, 25 bp, Homo sapien
tgcaggtgaacggtggcggccctgc

SEQ ID NO: 526421 - DNA, 25 bp, Homo sapien
gccctgcagctatgatatgaaccat

SEQ ID NO: 526422 - DNA, 25 bp, Homo sapien
caggcacagatgcatctagctgccc

SEQ ID NO: 526423 - DNA, 25 bp, Homo sapien
tttttcattcattagccggcggacg

SEQ ID NO: 526424 - DNA, 25 bp, Homo sapien
gagtgagaatcccagttaaggcatt

SEQ ID NO: 526425 - DNA, 25 bp, Homo sapien
gccgactgcaccatggaatagaact

SEQ ID NO: 526426 - DNA, 25 bp, Homo sapien
tagaactggtttgcagagcgccgat

SEQ ID NO: 526427 - DNA, 25 bp, Homo sapien
agctgcagttgattaaggattctca

SEQ ID NO: 526428 - DNA, 25 bp, Homo sapien
ttacggtgcgggtatttcagtggca

SEQ ID NO: 526429 - DNA, 25 bp, Homo sapien
aagcattccttggttacggtgcggg

SEQ ID NO: 526430 - DNA, 25 bp, Homo sapien
gcagttgattaaggattctcaagcc

SEQ ID NO: 526431 - DNA, 25 bp, Homo sapien
taaggcatagcagacattgtgctga

SEQ ID NO: 526432 - DNA, 25 bp, Homo sapien
ggacaatggtggacgcaggagaaac

SEQ ID NO: 526433 - DNA, 25 bp, Homo sapien
cttcttaaggcatagcagacattgt

SEQ ID NO: 526434 - DNA, 25 bp, Homo sapien
aaacgcacagggttccgtgtctggg

SEQ ID NO: 526435 - DNA, 25 bp, Homo sapien
gcagagcggcttcgtgctccgagta

SEQ ID NO: 526436 - DNA, 25 bp, Homo sapien
ttgtcggtgctagaccctaatcgca

SEQ ID NO: 526437 - DNA, 25 bp, Homo sapien
cctgggcaaagtccacatgaaggcg

SEQ ID NO: 526438 - DNA, 25 bp, Homo sapien
tccgagtagtgcattatggcaggcg

SEQ ID NO: 526439 - DNA, 25 bp, Homo sapien
aacaccctcactttcacagaaacat

SEQ ID NO: 526440 - DNA, 25 bp, Homo sapien
ctttcccctgctcatgtccagagaa

SEQ ID NO: 526441 - DNA, 25 bp, Homo sapien
catttctggctccagaaacaccctc

SEQ ID NO: 526442 - DNA, 25 bp, Homo sapien
tccagagaagcagttttcaaacatt

SEQ ID NO: 526443 - DNA, 25 bp, Homo sapien
gggaataagctcatattaacatcac

SEQ ID NO: 526444 - DNA, 25 bp, Homo sapien
aaactccttatgtaatgcaaagtac

SEQ ID NO: 526445 - DNA, 25 bp, Homo sapien
gaaaactccttatgtaatgcaaagt

SEQ ID NO: 526446 - DNA, 25 bp, Homo sapien
ttgcatgaaggccaaagggaataag

SEQ ID NO: 526447 - DNA, 25 bp, Homo sapien
tggtaatcctccgacaaacacggtc

SEQ ID NO: 526448 - DNA, 25 bp, Homo sapien
taatatcaccgcactgttcaaagac

SEQ ID NO: 526449 - DNA, 25 bp, Homo sapien
acacggtcttacacccaggaggtcg

SEQ ID NO: 526450 - DNA, 25 bp, Homo sapien
tgcaaagcgaatgtgacaaaaattc

SEQ ID NO: 526451 - DNA, 25 bp, Homo sapien
ggttaatgggggtgattccagtcat

SEQ ID NO: 526452 - DNA, 25 bp, Homo sapien
aaaaagagtacagcttttgcagtgg

SEQ ID NO: 526453 - DNA, 25 bp, Homo sapien
gattttgaggaaaaagagtacagct

SEQ ID NO: 526454 - DNA, 25 bp, Homo sapien
caaggcctggtatcattgggttaat

SEQ ID NO: 526455 - DNA, 25 bp, Homo sapien
tctttgtctgctgcccgctagccat

SEQ ID NO: 526456 - DNA, 25 bp, Homo sapien
taagctgaaacaatccatcaccagc

SEQ ID NO: 526457 - DNA, 25 bp, Homo sapien
gaagacactagaatagcacctttaa

SEQ ID NO: 526458 - DNA, 25 bp, Homo sapien
tacatacagaggaactaagataaaa

SEQ ID NO: 526459 - DNA, 25 bp, Homo sapien
aacaatgtaagccagaagacactag

SEQ ID NO: 526460 - DNA, 25 bp, Homo sapien
tttgccccacgcaacatgccatgga

SEQ ID NO: 526461 - DNA, 25 bp, Homo sapien
ccaagcacaccaagttcatgggaga

SEQ ID NO: 526462 - DNA, 25 bp, Homo sapien
aggcatagccgctggcacgaacatc

SEQ ID NO: 526463 - DNA, 25 bp, Homo sapien
gccacgaggtgaccaagaacacaag

SEQ ID NO: 526464 - DNA, 25 bp, Homo sapien
tcagagctttaagggagcctgaata

SEQ ID NO: 526465 - DNA, 25 bp, Homo sapien
ttagaaagtcagagctttaagggag

SEQ ID NO: 526466 - DNA, 25 bp, Homo sapien
gaaagtcagagctttaagggagcct

SEQ ID NO: 526467 - DNA, 25 bp, Homo sapien
gtcagagctttaagggagcctgaat

SEQ ID NO: 526468 - DNA, 25 bp, Homo sapien
tttgccaccgtgtgatagagcaggg

SEQ ID NO: 526469 - DNA, 25 bp, Homo sapien
ctttgacagctaggcaccacaaggg

SEQ ID NO: 526470 - DNA, 25 bp, Homo sapien
cacaagggcctcgaaatctgtgcaa

SEQ ID NO: 526471 - DNA, 25 bp, Homo sapien
cagtcttctccggtgggtgaggcct

SEQ ID NO: 526472 - DNA, 25 bp, Homo sapien
ccctctcttggcgaagccccagcaa

SEQ ID NO: 526473 - DNA, 25 bp, Homo sapien
cctctcttggcgaagccccagcaag

SEQ ID NO: 526474 - DNA, 25 bp, Homo sapien
gcccctctcttggcgaagccccagc

SEQ ID NO: 526475 - DNA, 25 bp, Homo sapien
ctctcttggcgaagccccagcaagg

SEQ ID NO: 526476 - DNA, 25 bp, Homo sapien
atgactaggcagtatttcctcacag

SEQ ID NO: 526477 - DNA, 25 bp, Homo sapien
catgactaggcagtatttcctcaca

SEQ ID NO: 526478 - DNA, 25 bp, Homo sapien
ccatgactaggcagtatttcctcac

SEQ ID NO: 526479 - DNA, 25 bp, Homo sapien
gcaagtctagaagcctaggagtcac

SEQ ID NO: 526480 - DNA, 25 bp, Homo sapien
tggttaaccccacttgcaagtctag

SEQ ID NO: 526481 - DNA, 25 bp, Homo sapien
tgtactgctcaggataatcgctggc

SEQ ID NO: 526482 - DNA, 25 bp, Homo sapien
tgaaacttgaaggagcatctgagag

SEQ ID NO: 526483 - DNA, 25 bp, Homo sapien
tcaaggaatgtagtcggctggtggc

SEQ ID NO: 526484 - DNA, 25 bp, Homo sapien
caaggaatgtagtcggctggtggcc

SEQ ID NO: 526485 - DNA, 25 bp, Homo sapien
gccccagtgaccgatctgattatta

SEQ ID NO: 526486 - DNA, 25 bp, Homo sapien
tgcattgtattaggatttcaccacg

SEQ ID NO: 526487 - DNA, 25 bp, Homo sapien
gctggaaaagtcaccgaaactctgc

SEQ ID NO: 526488 - DNA, 25 bp, Homo sapien
acagggaatttagtgtcagctgagc

SEQ ID NO: 526489 - DNA, 25 bp, Homo sapien
acccttcggcactgctgcaagcatc

SEQ ID NO: 526490 - DNA, 25 bp, Homo sapien
ccttcggcactgctgcaagcatctc

SEQ ID NO: 526491 - DNA, 25 bp, Homo sapien
tcacctacacccttcggcactgctg

SEQ ID NO: 526492 - DNA, 25 bp, Homo sapien
tacacccttcggcactgctgcaagc

SEQ ID NO: 526493 - DNA, 25 bp, Homo sapien
tgttgagctgggtcgtgtctatcgc

SEQ ID NO: 526494 - DNA, 25 bp, Homo sapien
cgtgtctatcgctatactccccaaa

SEQ ID NO: 526495 - DNA, 25 bp, Homo sapien
gctgtgggatctgtcacggacatgt

SEQ ID NO: 526496 - DNA, 25 bp, Homo sapien
cccaggttattcatggctgtagccc

SEQ ID NO: 526497 - DNA, 25 bp, Homo sapien
ctgcagccatcatctgaggaagctc

SEQ ID NO: 526498 - DNA, 25 bp, Homo sapien
cagccatcatctgaggaagctcctg

SEQ ID NO: 526499 - DNA, 25 bp, Homo sapien
agctgggtgatgttctcaactccac

SEQ ID NO: 526500 - DNA, 25 bp, Homo sapien
gggaagctgggtgatgttctcaact

SEQ ID NO: 526501 - DNA, 25 bp, Homo sapien
gggtcccctcggaggtcatcagatt

SEQ ID NO: 526502 - DNA, 25 bp, Homo sapien
ggggcaggaacactttgatggctga

SEQ ID NO: 526503 - DNA, 25 bp, Homo sapien
aggggcaggaacactttgatggctg

SEQ ID NO: 526504 - DNA, 25 bp, Homo sapien
tgcagggtcccctcggaggtcatca

SEQ ID NO: 526505 - DNA, 25 bp, Homo sapien
aggagcctgggctggctgaataaac

SEQ ID NO: 526506 - DNA, 25 bp, Homo sapien
agcctgggctggctgaataaacagc

SEQ ID NO: 526507 - DNA, 25 bp, Homo sapien
cctgggctggctgaataaacagccc

SEQ ID NO: 526508 - DNA, 25 bp, Homo sapien
gggctggctgaataaacagccccat

SEQ ID NO: 526509 - DNA, 25 bp, Homo sapien
gggttcaattctcaacaacaggtga

SEQ ID NO: 526510 - DNA, 25 bp, Homo sapien
gcactgcactgtcaaaaagaacttc

SEQ ID NO: 526511 - DNA, 25 bp, Homo sapien
aaagaacttctgatcagttgagcag

SEQ ID NO: 526512 - DNA, 25 bp, Homo sapien
taattcaaatggaagctaagggttc

SEQ ID NO: 526513 - DNA, 25 bp, Homo sapien
tcaaatggccctgtagcagagctgt

SEQ ID NO: 526514 - DNA, 25 bp, Homo sapien
caaatgaagtttagtggctagcctc

SEQ ID NO: 526515 - DNA, 25 bp, Homo sapien
tatgggtgccatcagacaaagagat

SEQ ID NO: 526516 - DNA, 25 bp, Homo sapien
catttcagagtagcaaggcagagtc

SEQ ID NO: 526517 - DNA, 25 bp, Homo sapien
ctaatactttcatggccatcttaac

SEQ ID NO: 526518 - DNA, 25 bp, Homo sapien
taatactttcatggccatcttaaca

SEQ ID NO: 526519 - DNA, 25 bp, Homo sapien
caatgtattacatctcttcagtctc

SEQ ID NO: 526520 - DNA, 25 bp, Homo sapien
taaacctagatttatcccccaatga

SEQ ID NO: 526521 - DNA, 25 bp, Homo sapien
gatgtggtgtataaacctagattta

SEQ ID NO: 526522 - DNA, 25 bp, Homo sapien
ccaatgaaactcttgtgacattcaa

SEQ ID NO: 526523 - DNA, 25 bp, Homo sapien
gttttctgtgccacacctcagttgg

SEQ ID NO: 526524 - DNA, 25 bp, Homo sapien
caaggctgccgtgacattgttcaca

SEQ ID NO: 526525 - DNA, 25 bp, Homo sapien
gtgtttccattaagataccctggga

SEQ ID NO: 526526 - DNA, 25 bp, Homo sapien
taggaatttccaatagtctcaaggc

SEQ ID NO: 526527 - DNA, 25 bp, Homo sapien
tggcagtttctacttacagctttaa

SEQ ID NO: 526528 - DNA, 25 bp, Homo sapien
tgcctatgcaactacaaaaactttc

SEQ ID NO: 526529 - DNA, 25 bp, Homo sapien
gtatgagcaccacaaaacaatctga

SEQ ID NO: 526530 - DNA, 25 bp, Homo sapien
tacagctttgtttggccttaacaga

SEQ ID NO: 526531 - DNA, 25 bp, Homo sapien
tctataggtatcagcgatgcacaca

SEQ ID NO: 526532 - DNA, 25 bp, Homo sapien
agggtagagatcagctaggtattga

SEQ ID NO: 526533 - DNA, 25 bp, Homo sapien
tagagatcagctaggtattgaaaaa

SEQ ID NO: 526534 - DNA, 25 bp, Homo sapien
ggtatcagcgatgcacacatcatga

SEQ ID NO: 526535 - DNA, 25 bp, Homo sapien
ttgtggtgaaagaatcagatttctt

SEQ ID NO: 526536 - DNA, 25 bp, Homo sapien
aattgtggtgaaagaatcagatttc

SEQ ID NO: 526537 - DNA, 25 bp, Homo sapien
aataattgtggtgaaagaatcagat

SEQ ID NO: 526538 - DNA, 25 bp, Homo sapien
aaataattgtggtgaaagaatcaga

SEQ ID NO: 526539 - DNA, 25 bp, Homo sapien
ttttataagaactctccattagcat

SEQ ID NO: 526540 - DNA, 25 bp, Homo sapien
ttcacatagtcagtgccatactctc

SEQ ID NO: 526541 - DNA, 25 bp, Homo sapien
tcactaaggaaatacctaacttcga

SEQ ID NO: 526542 - DNA, 25 bp, Homo sapien
taccaaaggaagcttatttcatatg

SEQ ID NO: 526543 - DNA, 25 bp, Homo sapien
tctgaaagctcccacgaggaaaaca

SEQ ID NO: 526544 - DNA, 25 bp, Homo sapien
tctccaatctgggtaatagctaacc

SEQ ID NO: 526545 - DNA, 25 bp, Homo sapien
gaaagctcccacgaggaaaacatct

SEQ ID NO: 526546 - DNA, 25 bp, Homo sapien
gtaatagctaaccacacactcagaa

SEQ ID NO: 526547 - DNA, 25 bp, Homo sapien
taaatgcctactgggctgatggctc

SEQ ID NO: 526548 - DNA, 25 bp, Homo sapien
tgatggctctaactcacccgcttgt

SEQ ID NO: 526549 - DNA, 25 bp, Homo sapien
taatcttgagtacaatacgaactgg

SEQ ID NO: 526550 - DNA, 25 bp, Homo sapien
tggttgaatacatcccagtggctcc

SEQ ID NO: 526551 - DNA, 25 bp, Homo sapien
actcagagcggcatcgccaccaaca

SEQ ID NO: 526552 - DNA, 25 bp, Homo sapien
tcagagcggcatcgccaccaacaag

SEQ ID NO: 526553 - DNA, 25 bp, Homo sapien
ttaactcagagcggcatcgccacca

SEQ ID NO: 526554 - DNA, 25 bp, Homo sapien
agcggcatcgccaccaacaagcatt

SEQ ID NO: 526555 - DNA, 25 bp, Homo sapien
cttggagagcaatttctacactggg

SEQ ID NO: 526556 - DNA, 25 bp, Homo sapien
cagggctgaatcgagaaatccgcac

SEQ ID NO: 526557 - DNA, 25 bp, Homo sapien
ctgcagggctgaatcgagaaatccg

SEQ ID NO: 526558 - DNA, 25 bp, Homo sapien
ggctgaatcgagaaatccgcaccat

SEQ ID NO: 526559 - DNA, 25 bp, Homo sapien
tgtcagaactcacggaaattcactc

SEQ ID NO: 526560 - DNA, 25 bp, Homo sapien
ttcactcataaaagttgtgtgtctt

SEQ ID NO: 526561 - DNA, 25 bp, Homo sapien
tcgggtgcaacaggcagatacattt

SEQ ID NO: 526562 - DNA, 25 bp, Homo sapien
agttgtgtgtcttatcatatgtaaa

SEQ ID NO: 526563 - DNA, 25 bp, Homo sapien
aattctggtaataatgcacacgttc

SEQ ID NO: 526564 - DNA, 25 bp, Homo sapien
ggtaataatgcacacgttcaagtat

SEQ ID NO: 526565 - DNA, 25 bp, Homo sapien
tttaaattctggtaataatgcacac

SEQ ID NO: 526566 - DNA, 25 bp, Homo sapien
atttaggaggatatgtactaatgtc

SEQ ID NO: 526567 - DNA, 25 bp, Homo sapien
aatagtctaagcataatttcctcat

SEQ ID NO: 526568 - DNA, 25 bp, Homo sapien
gttactagccatgcttcataaatag

SEQ ID NO: 526569 - DNA, 25 bp, Homo sapien
gacagagggatagaatgatgcacag

SEQ ID NO: 526570 - DNA, 25 bp, Homo sapien
gcacagtggtgggtatatgagtatt

SEQ ID NO: 526571 - DNA, 25 bp, Homo sapien
catagaacgtctgtagccataaacc

SEQ ID NO: 526572 - DNA, 25 bp, Homo sapien
ggagcccagaaaagaaagcctgcca

SEQ ID NO: 526573 - DNA, 25 bp, Homo sapien
cacagcaataaatagagtagggcct

SEQ ID NO: 526574 - DNA, 25 bp, Homo sapien
aggaaaattctaacacacggcacgg

SEQ ID NO: 526575 - DNA, 25 bp, Homo sapien
tgtagcctaatatgagccaagttct

SEQ ID NO: 526576 - DNA, 25 bp, Homo sapien
gccaagttctatgaaggtcttccag

SEQ ID NO: 526577 - DNA, 25 bp, Homo sapien
tggaaattcacctttgtaggctacc

SEQ ID NO: 526578 - DNA, 25 bp, Homo sapien
catctggtatttagcccactgaggt

SEQ ID NO: 526579 - DNA, 25 bp, Homo sapien
tctctgggctatcaatagaagctaa

SEQ ID NO: 526580 - DNA, 25 bp, Homo sapien
aatgatctcagaaattttatcttga

SEQ ID NO: 526581 - DNA, 25 bp, Homo sapien
ctggctgcatgccaaattttgggtt

SEQ ID NO: 526582 - DNA, 25 bp, Homo sapien
tccagcatacgcactcatctctggg

SEQ ID NO: 526583 - DNA, 25 bp, Homo sapien
ggtagcttgaccctcttgtctggta

SEQ ID NO: 526584 - DNA, 25 bp, Homo sapien
gtctggtattcctgagagaatgggc

SEQ ID NO: 526585 - DNA, 25 bp, Homo sapien
gaccctcttgtctggtattcctgag

SEQ ID NO: 526586 - DNA, 25 bp, Homo sapien
tcatgtttctcggtagcttgaccct

SEQ ID NO: 526587 - DNA, 25 bp, Homo sapien
tagatatacgcccacaataagaggg

SEQ ID NO: 526588 - DNA, 25 bp, Homo sapien
cacaagtggtattatacagtgggca

SEQ ID NO: 526589 - DNA, 25 bp, Homo sapien
tcaactagtagaggaacgtgttctc

SEQ ID NO: 526590 - DNA, 25 bp, Homo sapien
tacagctagtagtgcatttcaggaa

SEQ ID NO: 526591 - DNA, 25 bp, Homo sapien
ccccaccacttctcctgaggtccaa

SEQ ID NO: 526592 - DNA, 25 bp, Homo sapien
agccccaccacttctcctgaggtcc

SEQ ID NO: 526593 - DNA, 25 bp, Homo sapien
ccaccacttctcctgaggtccaagc

SEQ ID NO: 526594 - DNA, 25 bp, Homo sapien
ccacttctcctgaggtccaagcctg

SEQ ID NO: 526595 - DNA, 25 bp, Homo sapien
taaaagtcttttaaatggatgctct

SEQ ID NO: 526596 - DNA, 25 bp, Homo sapien
gggacttgattgaaaccatgtattc

SEQ ID NO: 526597 - DNA, 25 bp, Homo sapien
gaagacagcatggttctgacatatc

SEQ ID NO: 526598 - DNA, 25 bp, Homo sapien
tggatgctcttcacaaaggaagtct

SEQ ID NO: 526599 - DNA, 25 bp, Homo sapien
tgttggtctggcagccagacaaact

SEQ ID NO: 526600 - DNA, 25 bp, Homo sapien
gacaaactgggccacccaaagacca

SEQ ID NO: 526601 - DNA, 25 bp, Homo sapien
cagaaagcttatactggatgttggt

SEQ ID NO: 526602 - DNA, 25 bp, Homo sapien
ggcagaaagcttatactggatgttg

SEQ ID NO: 526603 - DNA, 25 bp, Homo sapien
caagtaatctgctccctttctttcc

SEQ ID NO: 526604 - DNA, 25 bp, Homo sapien
taatctgctccctttctttcctcac

SEQ ID NO: 526605 - DNA, 25 bp, Homo sapien
gtaatctgctccctttctttcctca

SEQ ID NO: 526606 - DNA, 25 bp, Homo sapien
aagtaatctgctccctttctttcct

SEQ ID NO: 526607 - DNA, 25 bp, Homo sapien
cggacccatggaatctgttgcttcc

SEQ ID NO: 526608 - DNA, 25 bp, Homo sapien
catttgtacgattcacttttgcttt

SEQ ID NO: 526609 - DNA, 25 bp, Homo sapien
gatgtcatttgtacgattcactttt

SEQ ID NO: 526610 - DNA, 25 bp, Homo sapien
ttttgatgtcatttgtacgattcac

SEQ ID NO: 526611 - DNA, 25 bp, Homo sapien
tatatctgccttatccctttttgat

SEQ ID NO: 526612 - DNA, 25 bp, Homo sapien
ttaggcacttaacagcagtctgggc

SEQ ID NO: 526613 - DNA, 25 bp, Homo sapien
gaaaggcaggtatacatgagaatcc

SEQ ID NO: 526614 - DNA, 25 bp, Homo sapien
caaaaatagggagccacattaggca

SEQ ID NO: 526615 - DNA, 25 bp, Homo sapien
tcccgaatcatatggaatgcgaaag

SEQ ID NO: 526616 - DNA, 25 bp, Homo sapien
gaactaattatatcttggatgagaa

SEQ ID NO: 526617 - DNA, 25 bp, Homo sapien
ttgacccctagcccaatattctctt

SEQ ID NO: 526618 - DNA, 25 bp, Homo sapien
taattatatcttggatgagaatact

SEQ ID NO: 526619 - DNA, 25 bp, Homo sapien
tttgacccctagcccaatattctct

SEQ ID NO: 526620 - DNA, 25 bp, Homo sapien
taaatggaacctagtgtcttgctgg

SEQ ID NO: 526621 - DNA, 25 bp, Homo sapien
ggtaggtcaggacattagagtccca

SEQ ID NO: 526622 - DNA, 25 bp, Homo sapien
cattctggcctagaaatagcacccc

SEQ ID NO: 526623 - DNA, 25 bp, Homo sapien
gggtttccataaagcggtctgaggc

SEQ ID NO: 526624 - DNA, 25 bp, Homo sapien
taagcaaatctaggcccagtgtccc

SEQ ID NO: 526625 - DNA, 25 bp, Homo sapien
catgagtacatgctacttggaaggc

SEQ ID NO: 526626 - DNA, 25 bp, Homo sapien
cactgagggaaatcacaagaggact

SEQ ID NO: 526627 - DNA, 25 bp, Homo sapien
tgggaaaccaacctggtgctgagct

SEQ ID NO: 526628 - DNA, 25 bp, Homo sapien
tgtgaagtccaactttgaacgtcaa

SEQ ID NO: 526629 - DNA, 25 bp, Homo sapien
gtccaactttgaacgtcaagcacac

SEQ ID NO: 526630 - DNA, 25 bp, Homo sapien
gaagtccaactttgaacgtcaagca

SEQ ID NO: 526631 - DNA, 25 bp, Homo sapien
taattgtgaagtccaactttgaacg

SEQ ID NO: 526632 - DNA, 25 bp, Homo sapien
gctcctcagaagctccagtggcctg

SEQ ID NO: 526633 - DNA, 25 bp, Homo sapien
aggaggaagccttgggatcaagagc

SEQ ID NO: 526634 - DNA, 25 bp, Homo sapien
ccttcgttctgttgactgccagagc

SEQ ID NO: 526635 - DNA, 25 bp, Homo sapien
cagctctggacacaaaatgcatggt

SEQ ID NO: 526636 - DNA, 25 bp, Homo sapien
ataaactggcccactccacttgagc

SEQ ID NO: 526637 - DNA, 25 bp, Homo sapien
tgataaactggcccactccacttga

SEQ ID NO: 526638 - DNA, 25 bp, Homo sapien
aaactggcccactccacttgagctt

SEQ ID NO: 526639 - DNA, 25 bp, Homo sapien
tttgataaactggcccactccactt

SEQ ID NO: 526640 - DNA, 25 bp, Homo sapien
taagacatagattcctcggtaattt

SEQ ID NO: 526641 - DNA, 25 bp, Homo sapien
cccagtaaaatgcttggctagccct

SEQ ID NO: 526642 - DNA, 25 bp, Homo sapien
tcctcggtaatttagcaaatttcca

SEQ ID NO: 526643 - DNA, 25 bp, Homo sapien
ccagctgtagtactccttgcccagt

SEQ ID NO: 526644 - DNA, 25 bp, Homo sapien
ggataaaggagataattttctagaa

SEQ ID NO: 526645 - DNA, 25 bp, Homo sapien
aaattataattgattcctttgctca

SEQ ID NO: 526646 - DNA, 25 bp, Homo sapien
gattcctttgctcaactctgtgcaa

SEQ ID NO: 526647 - DNA, 25 bp, Homo sapien
gtatgtcaacctacttccagaagag

SEQ ID NO: 526648 - DNA, 25 bp, Homo sapien
caaccttcaattccaggcacggagg

SEQ ID NO: 526649 - DNA, 25 bp, Homo sapien
gaagacttgcgaagaatagtttccc

SEQ ID NO: 526650 - DNA, 25 bp, Homo sapien
cttaaacattttgacgcacgagcac

SEQ ID NO: 526651 - DNA, 25 bp, Homo sapien
tgacagtaacagctattgcaggagg

SEQ ID NO: 526652 - DNA, 25 bp, Homo sapien
gaagagctatacacttatcagataa

SEQ ID NO: 526653 - DNA, 25 bp, Homo sapien
gagtgggggaagagctatacactta

SEQ ID NO: 526654 - DNA, 25 bp, Homo sapien
gggaagagctatacacttatcagat

SEQ ID NO: 526655 - DNA, 25 bp, Homo sapien
gctatacacttatcagataaccaga

SEQ ID NO: 526656 - DNA, 25 bp, Homo sapien
gactgagggacatcattccaagcca

SEQ ID NO: 526657 - DNA, 25 bp, Homo sapien
cttcttgatgactgagggacatcat

SEQ ID NO: 526658 - DNA, 25 bp, Homo sapien
gatgactgagggacatcattccaag

SEQ ID NO: 526659 - DNA, 25 bp, Homo sapien
tgagggacatcattccaagccagct

SEQ ID NO: 526660 - DNA, 25 bp, Homo sapien
gctactggtcataggagttaaccaa

SEQ ID NO: 526661 - DNA, 25 bp, Homo sapien
tcagggctactggtcataggagtta

SEQ ID NO: 526662 - DNA, 25 bp, Homo sapien
gtcataggagttaaccaagaactgc

SEQ ID NO: 526663 - DNA, 25 bp, Homo sapien
gagctcagggctactggtcatagga

SEQ ID NO: 526664 - DNA, 25 bp, Homo sapien
ctcctttcatcacttgaatttctaa

SEQ ID NO: 526665 - DNA, 25 bp, Homo sapien
tcacttgaatttctaaaccaactgg

SEQ ID NO: 526666 - DNA, 25 bp, Homo sapien
cctttcatcacttgaatttctaaac

SEQ ID NO: 526667 - DNA, 25 bp, Homo sapien
catcacttgaatttctaaaccaact

SEQ ID NO: 526668 - DNA, 25 bp, Homo sapien
tcatgtaagaaatttttccatcttc

SEQ ID NO: 526669 - DNA, 25 bp, Homo sapien
cattcatgtaagaaatttttccatc

SEQ ID NO: 526670 - DNA, 25 bp, Homo sapien
ttcatgtaagaaatttttccatctt

SEQ ID NO: 526671 - DNA, 25 bp, Homo sapien
ttcattcatgtaagaaatttttcca

SEQ ID NO: 526672 - DNA, 25 bp, Homo sapien
ctggaaccatgcctgatctaattaa

SEQ ID NO: 526673 - DNA, 25 bp, Homo sapien
ccaaaagaggcggagcaaggcataa

SEQ ID NO: 526674 - DNA, 25 bp, Homo sapien
tcaacaggtgaatccagcatggcat

SEQ ID NO: 526675 - DNA, 25 bp, Homo sapien
gaataatagtgagcaataacgcccc

SEQ ID NO: 526676 - DNA, 25 bp, Homo sapien
gtatctggaaacttcgctggattct

SEQ ID NO: 526677 - DNA, 25 bp, Homo sapien
ctggaaacttcgctggattctttta

SEQ ID NO: 526678 - DNA, 25 bp, Homo sapien
tggaaacttcgctggattcttttat

SEQ ID NO: 526679 - DNA, 25 bp, Homo sapien
atctggaaacttcgctggattcttt

SEQ ID NO: 526680 - DNA, 25 bp, Homo sapien
tattctgcggttgtcggatgaactt

SEQ ID NO: 526681 - DNA, 25 bp, Homo sapien
taagaattgctaccccagctcgttt

SEQ ID NO: 526682 - DNA, 25 bp, Homo sapien
tgtcttatgtaagaattgctacccc

SEQ ID NO: 526683 - DNA, 25 bp, Homo sapien
gcctatcatatggtttaccttgaag

SEQ ID NO: 526684 - DNA, 25 bp, Homo sapien
tctcaggagaaacacgctgtccttc

SEQ ID NO: 526685 - DNA, 25 bp, Homo sapien
tcctgaaggataattccactgggtt

SEQ ID NO: 526686 - DNA, 25 bp, Homo sapien
ccttatcctgagatggtctttattt

SEQ ID NO: 526687 - DNA, 25 bp, Homo sapien
tcaaatcgcatttctagggcaggtt

SEQ ID NO: 526688 - DNA, 25 bp, Homo sapien
gttattcctctgggtctcatgtcct

SEQ ID NO: 526689 - DNA, 25 bp, Homo sapien
caccaggttattcctctgggtctca

SEQ ID NO: 526690 - DNA, 25 bp, Homo sapien
aggttattcctctgggtctcatgtc

SEQ ID NO: 526691 - DNA, 25 bp, Homo sapien
ccaggttattcctctgggtctcatg

SEQ ID NO: 526692 - DNA, 25 bp, Homo sapien
taagacagcagtaactaggaatccc

SEQ ID NO: 526693 - DNA, 25 bp, Homo sapien
tgccattaatacacagtccccagaa

SEQ ID NO: 526694 - DNA, 25 bp, Homo sapien
taagtggacaccctttataggcagc

SEQ ID NO: 526695 - DNA, 25 bp, Homo sapien
gccagatgagtatccactttcgctg

SEQ ID NO: 526696 - DNA, 25 bp, Homo sapien
ttcttctccagcacgacctactaaa

SEQ ID NO: 526697 - DNA, 25 bp, Homo sapien
gcacgacctactaaacaaggatagt

SEQ ID NO: 526698 - DNA, 25 bp, Homo sapien
aggatagtaaatttctgggagatgc

SEQ ID NO: 526699 - DNA, 25 bp, Homo sapien
aacaaggatagtaaatttctgggag

SEQ ID NO: 526700 - DNA, 25 bp, Homo sapien
tgtcagcacagctaggtagggcttc

SEQ ID NO: 526701 - DNA, 25 bp, Homo sapien
cagaattgctgtcagcacagctagg

SEQ ID NO: 526702 - DNA, 25 bp, Homo sapien
acagccagaattgctgtcagcacag

SEQ ID NO: 526703 - DNA, 25 bp, Homo sapien
tgctgtcagcacagctaggtagggc

SEQ ID NO: 526704 - DNA, 25 bp, Homo sapien
gaagccatgacttaaggagagcagc

SEQ ID NO: 526705 - DNA, 25 bp, Homo sapien
gagagcagcctatctgccacagatg

SEQ ID NO: 526706 - DNA, 25 bp, Homo sapien
catgtcttgtttcaaccgggaagcc

SEQ ID NO: 526707 - DNA, 25 bp, Homo sapien
gatactcaaaaacactggtcccaaa

SEQ ID NO: 526708 - DNA, 25 bp, Homo sapien
catttaagaagtagaccatagtcca

SEQ ID NO: 526709 - DNA, 25 bp, Homo sapien
gagggcaaaaggtctggaagatcca

SEQ ID NO: 526710 - DNA, 25 bp, Homo sapien
catagtccacagttgtatagtccac

SEQ ID NO: 526711 - DNA, 25 bp, Homo sapien
gaaagcggctctgtccaatcttttg

SEQ ID NO: 526712 - DNA, 25 bp, Homo sapien
tctgtctggagatactgatgatttc

SEQ ID NO: 526713 - DNA, 25 bp, Homo sapien
aatgtctcacgatccttggctgtct

SEQ ID NO: 526714 - DNA, 25 bp, Homo sapien
ttaagggccgagcactagaaggtcc

SEQ ID NO: 526715 - DNA, 25 bp, Homo sapien
tctctcatgatattagacatttcct

SEQ ID NO: 526716 - DNA, 25 bp, Homo sapien
caggtttggtcactggatgatatag

SEQ ID NO: 526717 - DNA, 25 bp, Homo sapien
tatagatcactgtcatccacgtcag

SEQ ID NO: 526718 - DNA, 25 bp, Homo sapien
cactggatgatatagatcactgtca

SEQ ID NO: 526719 - DNA, 25 bp, Homo sapien
tcagttaatgggtccaggtttggtc

SEQ ID NO: 526720 - DNA, 25 bp, Homo sapien
ctgcttgttatttgtggtgcacata

SEQ ID NO: 526721 - DNA, 25 bp, Homo sapien
tgcttgttatttgtggtgcacatac

SEQ ID NO: 526722 - DNA, 25 bp, Homo sapien
atacgacatcatgctggcagcaaag

SEQ ID NO: 526723 - DNA, 25 bp, Homo sapien
tataaatacgacatcatgctggcag

SEQ ID NO: 526724 - DNA, 25 bp, Homo sapien
attataaatacgacatcatgctggc

SEQ ID NO: 526725 - DNA, 25 bp, Homo sapien
taaatacgacatcatgctggcagca

SEQ ID NO: 526726 - DNA, 25 bp, Homo sapien
gatctgctcgtaccaaatgttccca

SEQ ID NO: 526727 - DNA, 25 bp, Homo sapien
gtcagtagatctgctcgtaccaaat

SEQ ID NO: 526728 - DNA, 25 bp, Homo sapien
tagatctgctcgtaccaaatgttcc

SEQ ID NO: 526729 - DNA, 25 bp, Homo sapien
ctgctcgtaccaaatgttcccagat

SEQ ID NO: 526730 - DNA, 25 bp, Homo sapien
gccacaaatataacaggagttgaga

SEQ ID NO: 526731 - DNA, 25 bp, Homo sapien
cacaaatataacaggagttgagatc

SEQ ID NO: 526732 - DNA, 25 bp, Homo sapien
atataacaggagttgagatcctggg

SEQ ID NO: 526733 - DNA, 25 bp, Homo sapien
caaatataacaggagttgagatcct

SEQ ID NO: 526734 - DNA, 25 bp, Homo sapien
tcctcaattgcctttcgatatccca

SEQ ID NO: 526735 - DNA, 25 bp, Homo sapien
cctcaattgcctttcgatatcccat

SEQ ID NO: 526736 - DNA, 25 bp, Homo sapien
cctggaacatctctgaggactatcg

SEQ ID NO: 526737 - DNA, 25 bp, Homo sapien
catctctgaggactatcgccctaca

SEQ ID NO: 526738 - DNA, 25 bp, Homo sapien
tctctgaggactatcgccctacaga

SEQ ID NO: 526739 - DNA, 25 bp, Homo sapien
gaacatctctgaggactatcgccct

SEQ ID NO: 526740 - DNA, 25 bp, Homo sapien
actttattccctttgctaattgaga

SEQ ID NO: 526741 - DNA, 25 bp, Homo sapien
tgtaaattgtcaccccatggatatg

SEQ ID NO: 526742 - DNA, 25 bp, Homo sapien
ccatggatatgcataatcaacttta

SEQ ID NO: 526743 - DNA, 25 bp, Homo sapien
cttagagctgctaatccgatgtaaa

SEQ ID NO: 526744 - DNA, 25 bp, Homo sapien
tttgcaagagactccacgaaagtgc

SEQ ID NO: 526745 - DNA, 25 bp, Homo sapien
tgactgtatatgttgtggtgaccca

SEQ ID NO: 526746 - DNA, 25 bp, Homo sapien
gctgggtgcacacggttacaaacca

SEQ ID NO: 526747 - DNA, 25 bp, Homo sapien
gaccacaggtacaaagctgggtgca

SEQ ID NO: 526748 - DNA, 25 bp, Homo sapien
tgtgcaacagaagagcgaagaccag

SEQ ID NO: 526749 - DNA, 25 bp, Homo sapien
gagtaagccacatcgtatgaggcga

SEQ ID NO: 526750 - DNA, 25 bp, Homo sapien
tgtcagaagcatcaaaaggcattag

SEQ ID NO: 526751 - DNA, 25 bp, Homo sapien
cgaagaccagatagcaattcccata

SEQ ID NO: 526752 - DNA, 25 bp, Homo sapien
tctggaaacttcccgtaaaagtgca

SEQ ID NO: 526753 - DNA, 25 bp, Homo sapien
catagcacagacaatgacaggaaga

SEQ ID NO: 526754 - DNA, 25 bp, Homo sapien
tgaccatagcacagacaatgacagg

SEQ ID NO: 526755 - DNA, 25 bp, Homo sapien
ttaggggtgaccatagcacagacaa

SEQ ID NO: 526756 - DNA, 25 bp, Homo sapien
tgagaagatggtcaaggcacaactt

SEQ ID NO: 526757 - DNA, 25 bp, Homo sapien
tcctcccctggccttaagagaggca

SEQ ID NO: 526758 - DNA, 25 bp, Homo sapien
taaagctctagtgtcctttgaagag

SEQ ID NO: 526759 - DNA, 25 bp, Homo sapien
caagttctagtaaagcctcttgaga

SEQ ID NO: 526760 - DNA, 25 bp, Homo sapien
tgacaacagcaaggacaacatcagc

SEQ ID NO: 526761 - DNA, 25 bp, Homo sapien
gctcctcacgggcaattagcaaggt

SEQ ID NO: 526762 - DNA, 25 bp, Homo sapien
ataaggctgaaggtccactcccagg

SEQ ID NO: 526763 - DNA, 25 bp, Homo sapien
aaatgcaaatgctggctggatctca

SEQ ID NO: 526764 - DNA, 25 bp, Homo sapien
tttaaagcctacacaaccactgatc

SEQ ID NO: 526765 - DNA, 25 bp, Homo sapien
taatagctgccctaacaacagagca

SEQ ID NO: 526766 - DNA, 25 bp, Homo sapien
tcaacaggtagggtaaggcaaagac

SEQ ID NO: 526767 - DNA, 25 bp, Homo sapien
gatctggaaccttttgtcaaacgag

SEQ ID NO: 526768 - DNA, 25 bp, Homo sapien
caaacgtggcctgttactcctcaga

SEQ ID NO: 526769 - DNA, 25 bp, Homo sapien
tcaatgcttactggcaatatctctg

SEQ ID NO: 526770 - DNA, 25 bp, Homo sapien
tgcctattcatctttcccagctcag

SEQ ID NO: 526771 - DNA, 25 bp, Homo sapien
gtctttgtagcatttcaacaaatgc

SEQ ID NO: 526772 - DNA, 25 bp, Homo sapien
ctctgcacctagaatgttttgtctt

SEQ ID NO: 526773 - DNA, 25 bp, Homo sapien
cactgctcttctggttgccacagca

SEQ ID NO: 526774 - DNA, 25 bp, Homo sapien
tagtttcagcatggataggctatac

SEQ ID NO: 526775 - DNA, 25 bp, Homo sapien
tgccacagcactttactgcactggg

SEQ ID NO: 526776 - DNA, 25 bp, Homo sapien
tcatccccagggaacgactgatctg

SEQ ID NO: 526777 - DNA, 25 bp, Homo sapien
gaattgcactttcagtgtcatatct

SEQ ID NO: 526778 - DNA, 25 bp, Homo sapien
tacacatgtggatctacttctgcct

SEQ ID NO: 526779 - DNA, 25 bp, Homo sapien
ggacaccagtcccacactcttttga

SEQ ID NO: 526780 - DNA, 25 bp, Homo sapien
catgccttggtctaaaatccacggt

SEQ ID NO: 526781 - DNA, 25 bp, Homo sapien
aaatttctctcaacaagattgggag

SEQ ID NO: 526782 - DNA, 25 bp, Homo sapien
tatttatggatattgcaccccagaa

SEQ ID NO: 526783 - DNA, 25 bp, Homo sapien
gagaaatattgtacggcttctgcac

SEQ ID NO: 526784 - DNA, 25 bp, Homo sapien
gctggtatatagtaacacaattgat

SEQ ID NO: 526785 - DNA, 25 bp, Homo sapien
tgcagctttaagccaaatctgtgtc

SEQ ID NO: 526786 - DNA, 25 bp, Homo sapien
aaaggaattggaaagatcattccaa

SEQ ID NO: 526787 - DNA, 25 bp, Homo sapien
cttccagctccaattagtaaaatat

SEQ ID NO: 526788 - DNA, 25 bp, Homo sapien
aattggaaagatcattccaagtagt

SEQ ID NO: 526789 - DNA, 25 bp, Homo sapien
ttctttacaccacatacagtgtaca

SEQ ID NO: 526790 - DNA, 25 bp, Homo sapien
tattttcaattactaagataacatc

SEQ ID NO: 526791 - DNA, 25 bp, Homo sapien
aatctaacaaaaacgcctgctttca

SEQ ID NO: 526792 - DNA, 25 bp, Homo sapien
caagcaataatatcagctaagagct

SEQ ID NO: 526793 - DNA, 25 bp, Homo sapien
agttgttttcaattatttctaacat

SEQ ID NO: 526794 - DNA, 25 bp, Homo sapien
ctttatcctccttcttcaagttgtt

SEQ ID NO: 526795 - DNA, 25 bp, Homo sapien
tcactttatcctccttcttcaagtt

SEQ ID NO: 526796 - DNA, 25 bp, Homo sapien
cttcactttatcctccttcttcaag

SEQ ID NO: 526797 - DNA, 25 bp, Homo sapien
catgaggtaagagtgcttgcaactt

SEQ ID NO: 526798 - DNA, 25 bp, Homo sapien
ccctctaaactagggctaaggtcat

SEQ ID NO: 526799 - DNA, 25 bp, Homo sapien
tatacataatctgtgagccctctaa

SEQ ID NO: 526800 - DNA, 25 bp, Homo sapien
acatttgcaagtgccaaatatacat

SEQ ID NO: 526801 - DNA, 25 bp, Homo sapien
gaagcctccacttaaaggttcagag

SEQ ID NO: 526802 - DNA, 25 bp, Homo sapien
caaatagtctatctctaggccatca

SEQ ID NO: 526803 - DNA, 25 bp, Homo sapien
cagttccaatttgtcatgctcagag

SEQ ID NO: 526804 - DNA, 25 bp, Homo sapien
tattgacagcaagatacaggtggcc

SEQ ID NO: 526805 - DNA, 25 bp, Homo sapien
acaggtgtgcatccctaatattttt

SEQ ID NO: 526806 - DNA, 25 bp, Homo sapien
ttagagacaaagcctcccatgatct

SEQ ID NO: 526807 - DNA, 25 bp, Homo sapien
tatacttccggaggcaataaggtgg

SEQ ID NO: 526808 - DNA, 25 bp, Homo sapien
tgtgtgtgaccactatggtggcccc

SEQ ID NO: 526809 - DNA, 25 bp, Homo sapien
caaaccaaaccctatggagcagagg

SEQ ID NO: 526810 - DNA, 25 bp, Homo sapien
gcagaggtatgaactgaaagccaac

SEQ ID NO: 526811 - DNA, 25 bp, Homo sapien
ggtcctccatggtctgtgtcttctg

SEQ ID NO: 526812 - DNA, 25 bp, Homo sapien
caggtcctccatggtctgtgtcttc

SEQ ID NO: 526813 - DNA, 25 bp, Homo sapien
catggtctgtgtcttctgccctgct

SEQ ID NO: 526814 - DNA, 25 bp, Homo sapien
tccatggtctgtgtcttctgccctg

SEQ ID NO: 526815 - DNA, 25 bp, Homo sapien
gccagaacacattgaatctgtgcac

SEQ ID NO: 526816 - DNA, 25 bp, Homo sapien
atgcacagtccacttgccagaacac

SEQ ID NO: 526817 - DNA, 25 bp, Homo sapien
ccacttgccagaacacattgaatct

SEQ ID NO: 526818 - DNA, 25 bp, Homo sapien
acattgaatctgtgcacttccctgc

SEQ ID NO: 526819 - DNA, 25 bp, Homo sapien
tgaattgttctccatggaatagcct

SEQ ID NO: 526820 - DNA, 25 bp, Homo sapien
ctcttgcatatttcactagcttaca

SEQ ID NO: 526821 - DNA, 25 bp, Homo sapien
tgtttcacattgacaaggcttctaa

SEQ ID NO: 526822 - DNA, 25 bp, Homo sapien
aacatcaaaacagcctgaaggaatt

SEQ ID NO: 526823 - DNA, 25 bp, Homo sapien
tcacgaataacaacagtacccagcg

SEQ ID NO: 526824 - DNA, 25 bp, Homo sapien
gaagacctgtccaaggtgtccgagc

SEQ ID NO: 526825 - DNA, 25 bp, Homo sapien
cagtgcctcctttacctcgcgttgg

SEQ ID NO: 526826 - DNA, 25 bp, Homo sapien
ggaggaaagtttccggcccgcagca

SEQ ID NO: 526827 - DNA, 25 bp, Homo sapien
gggagcggaggcaacccgctgcgcg

SEQ ID NO: 526828 - DNA, 25 bp, Homo sapien
gcgcggctcctcctagcctcggcgt

SEQ ID NO: 526829 - DNA, 25 bp, Homo sapien
ctggggccgccgtatggggagcgga

SEQ ID NO: 526830 - DNA, 25 bp, Homo sapien
gagcggaggcaacccgctgcgcgga

SEQ ID NO: 526831 - DNA, 25 bp, Homo sapien
gggagacgcggccgggctgcagtcg

SEQ ID NO: 526832 - DNA, 25 bp, Homo sapien
agcagacagaggacgccccgtggcg

SEQ ID NO: 526833 - DNA, 25 bp, Homo sapien
gcagacagaggacgccccgtggcgg

SEQ ID NO: 526834 - DNA, 25 bp, Homo sapien
ctgggagacgcggccgggctgcagt

SEQ ID NO: 526835 - DNA, 25 bp, Homo sapien
ctggaagcctgtgtgagtagcggcg

SEQ ID NO: 526836 - DNA, 25 bp, Homo sapien
gggcgctggagactccgcggctgga

SEQ ID NO: 526837 - DNA, 25 bp, Homo sapien
gcgctggagactccgcggctggagg

SEQ ID NO: 526838 - DNA, 25 bp, Homo sapien
cctgtgtgagtagcggcgcccggga

SEQ ID NO: 526839 - DNA, 25 bp, Homo sapien
catccttcgacctcggtatttctac

SEQ ID NO: 526840 - DNA, 25 bp, Homo sapien
accccagactgctaattctgctgtc

SEQ ID NO: 526841 - DNA, 25 bp, Homo sapien
cttcgacctcggtatttctacaatc

SEQ ID NO: 526842 - DNA, 25 bp, Homo sapien
aagtccacatccttcgacctcggta

SEQ ID NO: 526843 - DNA, 25 bp, Homo sapien
ccccaagggataccaggtgtatgta

SEQ ID NO: 526844 - DNA, 25 bp, Homo sapien
tctctaccaaacagaccacggaggt

SEQ ID NO: 526845 - DNA, 25 bp, Homo sapien
gagatttaccatcagattgagctgg

SEQ ID NO: 526846 - DNA, 25 bp, Homo sapien
tgggtctatcagaagtgaacttggg

SEQ ID NO: 526847 - DNA, 25 bp, Homo sapien
tgtgatgatggtgctcttgagtata

SEQ ID NO: 526848 - DNA, 25 bp, Homo sapien
gatggtgctcttgagtatagttaga

SEQ ID NO: 526849 - DNA, 25 bp, Homo sapien
caggcttctattgggtcatctcgct

SEQ ID NO: 526850 - DNA, 25 bp, Homo sapien
tatagttagaatttgatgctcctgc

SEQ ID NO: 526851 - DNA, 25 bp, Homo sapien
tatttatgggctactgtgaaggcag

SEQ ID NO: 526852 - DNA, 25 bp, Homo sapien
taccttctggataaaagagaaaatg

SEQ ID NO: 526853 - DNA, 25 bp, Homo sapien
tcatcgtatcactcaaaatatgtta

SEQ ID NO: 526854 - DNA, 25 bp, Homo sapien
aactttaatttagtcacagaatacg

SEQ ID NO: 526855 - DNA, 25 bp, Homo sapien
aaacaacaaccgaagacatctgtca

SEQ ID NO: 526856 - DNA, 25 bp, Homo sapien
tccaaatagtcacagagactcttgc

SEQ ID NO: 526857 - DNA, 25 bp, Homo sapien
tacttcatagggtagtgaatgcaac

SEQ ID NO: 526858 - DNA, 25 bp, Homo sapien
ctatcaagtgtagggttagaaggca

SEQ ID NO: 526859 - DNA, 25 bp, Homo sapien
gccactgtcgtctatttgactgaag

SEQ ID NO: 526860 - DNA, 25 bp, Homo sapien
gcattttcttaattcggctgcagtt

SEQ ID NO: 526861 - DNA, 25 bp, Homo sapien
ccaattgttgaatgttccattgcca

SEQ ID NO: 526862 - DNA, 25 bp, Homo sapien
tcacctgacaatgcaaacgcttaag

SEQ ID NO: 526863 - DNA, 25 bp, Homo sapien
tcttccctgggtgagaatttcagta

SEQ ID NO: 526864 - DNA, 25 bp, Homo sapien
catgcctgcaataaggttaactccc

SEQ ID NO: 526865 - DNA, 25 bp, Homo sapien
caagagatatcttgtggtcagcaag

SEQ ID NO: 526866 - DNA, 25 bp, Homo sapien
tgtcattacatgtgccgggtggagc

SEQ ID NO: 526867 - DNA, 25 bp, Homo sapien
gggttaaagtctaccatcataatgt

SEQ ID NO: 526868 - DNA, 25 bp, Homo sapien
cttgatattaacacagctacaccag

SEQ ID NO: 526869 - DNA, 25 bp, Homo sapien
gaagaggttatgcttgccacttgat

SEQ ID NO: 526870 - DNA, 25 bp, Homo sapien
aagattggtgtattcatcgtgtatc

SEQ ID NO: 526871 - DNA, 25 bp, Homo sapien
tgaactgtaacaaggccatggctaa

SEQ ID NO: 526872 - DNA, 25 bp, Homo sapien
gaaagcatttacttgacaggaaaac

SEQ ID NO: 526873 - DNA, 25 bp, Homo sapien
cgttttaagaaaatggtctgactat

SEQ ID NO: 526874 - DNA, 25 bp, Homo sapien
tgactatattggtccttcagcttca

SEQ ID NO: 526875 - DNA, 25 bp, Homo sapien
cagaggggtccctattatgaaaact

SEQ ID NO: 526876 - DNA, 25 bp, Homo sapien
tcttaacagaggggtccctattatg

SEQ ID NO: 526877 - DNA, 25 bp, Homo sapien
taacagaggggtccctattatgaaa

SEQ ID NO: 526878 - DNA, 25 bp, Homo sapien
agaatcttaacagaggggtccctat

SEQ ID NO: 526879 - DNA, 25 bp, Homo sapien
ttgaagacaccaagaaagaaatacc

SEQ ID NO: 526880 - DNA, 25 bp, Homo sapien
gcagacctaccctaaaagaatgatt

SEQ ID NO: 526881 - DNA, 25 bp, Homo sapien
taaaagaatgtgttaccagcagacc

SEQ ID NO: 526882 - DNA, 25 bp, Homo sapien
tgtggaaagaactgtcaacccagaa

SEQ ID NO: 526883 - DNA, 25 bp, Homo sapien
gaaccgggaagaaatcgaatctctg

SEQ ID NO: 526884 - DNA, 25 bp, Homo sapien
cacatacacgtgtaagtgcattgca

SEQ ID NO: 526885 - DNA, 25 bp, Homo sapien
tctagaaaacccaacagtcctggcc

SEQ ID NO: 526886 - DNA, 25 bp, Homo sapien
tatataacaccaatcaaactgagtc

SEQ ID NO: 526887 - DNA, 25 bp, Homo sapien
ctctagcctgggcgatggggcgaga

SEQ ID NO: 526888 - DNA, 25 bp, Homo sapien
tctagcctgggcgatggggcgagac

SEQ ID NO: 526889 - DNA, 25 bp, Homo sapien
ataatgacaatagaagtccacaggc

SEQ ID NO: 526890 - DNA, 25 bp, Homo sapien
tggaagaaccctcgcccagatttaa

SEQ ID NO: 526891 - DNA, 25 bp, Homo sapien
tgggcatcctctttgactacatagc

SEQ ID NO: 526892 - DNA, 25 bp, Homo sapien
caggcagcaccacaacacattatga

SEQ ID NO: 526893 - DNA, 25 bp, Homo sapien
ttttttcaatgatagattcttttac

SEQ ID NO: 526894 - DNA, 25 bp, Homo sapien
ttttcaatgatagattcttttacag

SEQ ID NO: 526895 - DNA, 25 bp, Homo sapien
tttcaatgatagattcttttacagt

SEQ ID NO: 526896 - DNA, 25 bp, Homo sapien
agttttttcaatgatagattctttt

SEQ ID NO: 526897 - DNA, 25 bp, Homo sapien
catctagggtcgttgttatataaca

SEQ ID NO: 526898 - DNA, 25 bp, Homo sapien
gacagctatgggcattttattaact

SEQ ID NO: 526899 - DNA, 25 bp, Homo sapien
cctttatgcatttgagcatctaggg

SEQ ID NO: 526900 - DNA, 25 bp, Homo sapien
tagtttctgaaggtaataggacagc

SEQ ID NO: 526901 - DNA, 25 bp, Homo sapien
tgtgttattcggttccctcctggat

SEQ ID NO: 526902 - DNA, 25 bp, Homo sapien
aaggatttgatttgagtttccaggc

SEQ ID NO: 526903 - DNA, 25 bp, Homo sapien
aacaaaatctcgcttttcatggagt

SEQ ID NO: 526904 - DNA, 25 bp, Homo sapien
tccaggctatcacaatgaagtttgg

SEQ ID NO: 526905 - DNA, 25 bp, Homo sapien
gctttatcgaagcaaaattaatata

SEQ ID NO: 526906 - DNA, 25 bp, Homo sapien
ttttctcctgatactctgtaaattc

SEQ ID NO: 526907 - DNA, 25 bp, Homo sapien
tcataagaccatcaccacaactaag

SEQ ID NO: 526908 - DNA, 25 bp, Homo sapien
ccttctctaaagattagtttgcttt

SEQ ID NO: 526909 - DNA, 25 bp, Homo sapien
aaatagggccctaccagtaccatgt

SEQ ID NO: 526910 - DNA, 25 bp, Homo sapien
aaacaggagcacaacaaattcacgg

SEQ ID NO: 526911 - DNA, 25 bp, Homo sapien
tgaaaagcttatgggcacgtcctat

SEQ ID NO: 526912 - DNA, 25 bp, Homo sapien
gaactaggcagttcagctcctgagc

SEQ ID NO: 526913 - DNA, 25 bp, Homo sapien
cttcaaattgaacagaacctttttg

SEQ ID NO: 526914 - DNA, 25 bp, Homo sapien
ctctgatgcttgtgattgttgttgc

SEQ ID NO: 526915 - DNA, 25 bp, Homo sapien
tctctgatgcttgtgattgttgttg

SEQ ID NO: 526916 - DNA, 25 bp, Homo sapien
gcatcagctaatgaacttgtgtctt

SEQ ID NO: 526917 - DNA, 25 bp, Homo sapien
atcagctaatgaacttgtgtcttgg

SEQ ID NO: 526918 - DNA, 25 bp, Homo sapien
ctacagcatcagctaatgaacttgt

SEQ ID NO: 526919 - DNA, 25 bp, Homo sapien
cagcatcagctaatgaacttgtgtc

SEQ ID NO: 526920 - DNA, 25 bp, Homo sapien
aaagtaaaggcaacaataataggca

SEQ ID NO: 526921 - DNA, 25 bp, Homo sapien
aatgtcatacccgttcctctacgga

SEQ ID NO: 526922 - DNA, 25 bp, Homo sapien
tgatatgcctttgctaaacactgta

SEQ ID NO: 526923 - DNA, 25 bp, Homo sapien
tgtatatgtttgtcccagctaaatg

SEQ ID NO: 526924 - DNA, 25 bp, Homo sapien
taggaaatccttgactcttcctttc

SEQ ID NO: 526925 - DNA, 25 bp, Homo sapien
gactcttcctttctttgttgtctga

SEQ ID NO: 526926 - DNA, 25 bp, Homo sapien
ttctttaggaaatccttgactcttc

SEQ ID NO: 526927 - DNA, 25 bp, Homo sapien
aaatccttgactcttcctttctttg

SEQ ID NO: 526928 - DNA, 25 bp, Homo sapien
ctgtgtctgtaatctcttttcccct

SEQ ID NO: 526929 - DNA, 25 bp, Homo sapien
tctgtgtctgtaatctcttttcccc

SEQ ID NO: 526930 - DNA, 25 bp, Homo sapien
tgtgtctgtaatctcttttcccctt

SEQ ID NO: 526931 - DNA, 25 bp, Homo sapien
tttctgtgtctgtaatctcttttcc

SEQ ID NO: 526932 - DNA, 25 bp, Homo sapien
ctcaataatctatattgataatctt

SEQ ID NO: 526933 - DNA, 25 bp, Homo sapien
gacatgcaactatgctgttgactca

SEQ ID NO: 526934 - DNA, 25 bp, Homo sapien
gacttccaatccatcgactcttgta

SEQ ID NO: 526935 - DNA, 25 bp, Homo sapien
gtatatctaaatccctgaacgttca

SEQ ID NO: 526936 - DNA, 25 bp, Homo sapien
tatgtgctgtttaaccccgcaagac

SEQ ID NO: 526937 - DNA, 25 bp, Homo sapien
agagaagttagaacatcatcagaga

SEQ ID NO: 526938 - DNA, 25 bp, Homo sapien
gacatccaaaaagaattaattgaat

SEQ ID NO: 526939 - DNA, 25 bp, Homo sapien
gttagaacatcatcagagacatcca

SEQ ID NO: 526940 - DNA, 25 bp, Homo sapien
tagaacatcatcagagacatccaaa

SEQ ID NO: 526941 - DNA, 25 bp, Homo sapien
tggccaggcaatgagattagagttt

SEQ ID NO: 526942 - DNA, 25 bp, Homo sapien
gctgacactagggattacttccttt

SEQ ID NO: 526943 - DNA, 25 bp, Homo sapien
cgctgaatctgctgacactagggat

SEQ ID NO: 526944 - DNA, 25 bp, Homo sapien
ctattatacaccagtaccgctgaat

SEQ ID NO: 526945 - DNA, 25 bp, Homo sapien
catctcttgttttggagtgtagaca

SEQ ID NO: 526946 - DNA, 25 bp, Homo sapien
tgcttctaggtttctaccaaaggag

SEQ ID NO: 526947 - DNA, 25 bp, Homo sapien
tactggactaccaaaacatctcttg

SEQ ID NO: 526948 - DNA, 25 bp, Homo sapien
gctgaatgtatagacagtactggac

SEQ ID NO: 526949 - DNA, 25 bp, Homo sapien
tatgcatctaactcatacatagagg

SEQ ID NO: 526950 - DNA, 25 bp, Homo sapien
caggcctaactcctagagattctga

SEQ ID NO: 526951 - DNA, 25 bp, Homo sapien
taggacatgacactaggaccagatg

SEQ ID NO: 526952 - DNA, 25 bp, Homo sapien
gcaaagcaaaacatgctcaggccta

SEQ ID NO: 526953 - DNA, 25 bp, Homo sapien
gacagatcagggatgctaaactgca

SEQ ID NO: 526954 - DNA, 25 bp, Homo sapien
gcgcctaccaaatgagcaacaatga

SEQ ID NO: 526955 - DNA, 25 bp, Homo sapien
tctagtcaagcacaagaacatgcct

SEQ ID NO: 526956 - DNA, 25 bp, Homo sapien
gacaaaggttctttagcgcctacca

SEQ ID NO: 526957 - DNA, 25 bp, Homo sapien
gaaaagctgccaagagctagcatga

SEQ ID NO: 526958 - DNA, 25 bp, Homo sapien
agctgccaagagctagcatgacaag

SEQ ID NO: 526959 - DNA, 25 bp, Homo sapien
ttgagccctgcatgggaaaagctgc

SEQ ID NO: 526960 - DNA, 25 bp, Homo sapien
aaagctgccaagagctagcatgaca

SEQ ID NO: 526961 - DNA, 25 bp, Homo sapien
actgcggtttagtcccgaggtcgct

SEQ ID NO: 526962 - DNA, 25 bp, Homo sapien
gaaacgcggacttcagctcgcttgg

SEQ ID NO: 526963 - DNA, 25 bp, Homo sapien
tccattagcagaagggagactgcgg

SEQ ID NO: 526964 - DNA, 25 bp, Homo sapien
gctcgcttgggaaacggcttccatt

SEQ ID NO: 526965 - DNA, 25 bp, Homo sapien
cgccccgtgccctctggagacctgc

SEQ ID NO: 526966 - DNA, 25 bp, Homo sapien
ccgccccgtgccctctggagacctg

SEQ ID NO: 526967 - DNA, 25 bp, Homo sapien
gggctgcgggatgccgactccgcgg

SEQ ID NO: 526968 - DNA, 25 bp, Homo sapien
cagacccggaactgctgaggcagca

SEQ ID NO: 526969 - DNA, 25 bp, Homo sapien
gcggcgcttggctcatcccgggatt

SEQ ID NO: 526970 - DNA, 25 bp, Homo sapien
tcgcgcggctctggttcctgttcct

SEQ ID NO: 526971 - DNA, 25 bp, Homo sapien
ccgcctcccggcagctggcacgagg

SEQ ID NO: 526972 - DNA, 25 bp, Homo sapien
cacgagggaacctggccgtcaggtt

SEQ ID NO: 526973 - DNA, 25 bp, Homo sapien
ctgggacggtatcaggcggggaatc

SEQ ID NO: 526974 - DNA, 25 bp, Homo sapien
tatcaggcggggaatctgtgcggcc

SEQ ID NO: 526975 - DNA, 25 bp, Homo sapien
tcgcggctgcccaatttcgttgagg

SEQ ID NO: 526976 - DNA, 25 bp, Homo sapien
caaattgtcacagaggtcgccgtag

SEQ ID NO: 526977 - DNA, 25 bp, Homo sapien
cgtagaccggtgtgcaaccgaaggt

SEQ ID NO: 526978 - DNA, 25 bp, Homo sapien
tgtccgacaggaagtcccgaatggg

SEQ ID NO: 526979 - DNA, 25 bp, Homo sapien
agccgccggtggaggtgcccgggca

SEQ ID NO: 526980 - DNA, 25 bp, Homo sapien
tgagccgccggtggaggtgcccggg

SEQ ID NO: 526981 - DNA, 25 bp, Homo sapien
cacagcctgcgccccgtgagccgag

SEQ ID NO: 526982 - DNA, 25 bp, Homo sapien
agccacagcctgcgccccgtgagcc

SEQ ID NO: 526983 - DNA, 25 bp, Homo sapien
ttcacaaaacgaattaaaagatggc

SEQ ID NO: 526984 - DNA, 25 bp, Homo sapien
gaaataaacgtaatcacagctcaag

SEQ ID NO: 526985 - DNA, 25 bp, Homo sapien
gaatttgagattgttagctgtccca

SEQ ID NO: 526986 - DNA, 25 bp, Homo sapien
tattctttcaaggatggcagaagct

SEQ ID NO: 526987 - DNA, 25 bp, Homo sapien
ttaaggtaattgtacccaggcacag

SEQ ID NO: 526988 - DNA, 25 bp, Homo sapien
tattggataccctctattggtcagg

SEQ ID NO: 526989 - DNA, 25 bp, Homo sapien
tccaggcaatgagtaggcagccaaa

SEQ ID NO: 526990 - DNA, 25 bp, Homo sapien
gaaaatcacatatcacatgggctcg

SEQ ID NO: 526991 - DNA, 25 bp, Homo sapien
gaacaccatgaaccagggcatgaaa

SEQ ID NO: 526992 - DNA, 25 bp, Homo sapien
taatatccagtgaaaagtgacagtc

SEQ ID NO: 526993 - DNA, 25 bp, Homo sapien
aaatacagttgtagccctcaggata

SEQ ID NO: 526994 - DNA, 25 bp, Homo sapien
tcagggaaggcactaaacataaagc

SEQ ID NO: 526995 - DNA, 25 bp, Homo sapien
aaatttggagtatcctgcagacaca

SEQ ID NO: 526996 - DNA, 25 bp, Homo sapien
cacgtgtgaccagccctttacaaaa

SEQ ID NO: 526997 - DNA, 25 bp, Homo sapien
tcttatcacacgttacaacatgcag

SEQ ID NO: 526998 - DNA, 25 bp, Homo sapien
cattcataaaccagatccacgtgtg

SEQ ID NO: 526999 - DNA, 25 bp, Homo sapien
catgcagataacacaaagaaaggtc

SEQ ID NO: 527000 - DNA, 25 bp, Homo sapien
aaattccatccattgtctgcgtgta

SEQ ID NO: 527001 - DNA, 25 bp, Homo sapien
atgacccaaattccatccattgtct

SEQ ID NO: 527002 - DNA, 25 bp, Homo sapien
catccattgtctgcgtgtatttcca

SEQ ID NO: 527003 - DNA, 25 bp, Homo sapien
cattgtctgcgtgtatttccactct

SEQ ID NO: 527004 - DNA, 25 bp, Homo sapien
cataggatctatggccttcactgaa

SEQ ID NO: 527005 - DNA, 25 bp, Homo sapien
tctagttgcctcaatctaacggaat

SEQ ID NO: 527006 - DNA, 25 bp, Homo sapien
tcttcgttcgcaaatgctttgtgca

SEQ ID NO: 527007 - DNA, 25 bp, Homo sapien
cacagatatatccactgggtggcag

SEQ ID NO: 527008 - DNA, 25 bp, Homo sapien
ctggaaaatagccattgtagtgaat

SEQ ID NO: 527009 - DNA, 25 bp, Homo sapien
ccattgtagtgaatcttaagaaaca

SEQ ID NO: 527010 - DNA, 25 bp, Homo sapien
gaatcttaagaaacagtattgtctg

SEQ ID NO: 527011 - DNA, 25 bp, Homo sapien
aatagccattgtagtgaatcttaag

SEQ ID NO: 527012 - DNA, 25 bp, Homo sapien
gtatggcctggatactcataggaag

SEQ ID NO: 527013 - DNA, 25 bp, Homo sapien
caaaataggaggaatgtcatctaga

SEQ ID NO: 527014 - DNA, 25 bp, Homo sapien
gggtcaaatgtgctgtgtaggaggg

SEQ ID NO: 527015 - DNA, 25 bp, Homo sapien
tgtgagtatggcctggatactcata

SEQ ID NO: 527016 - DNA, 25 bp, Homo sapien
ggaggaattaggaagggctgcacca

SEQ ID NO: 527017 - DNA, 25 bp, Homo sapien
tccagaaagtggctctcattttggg

SEQ ID NO: 527018 - DNA, 25 bp, Homo sapien
ccatttagtggtaaactgcaatgtt

SEQ ID NO: 527019 - DNA, 25 bp, Homo sapien
tgttgtaaggtttccggggcatcca

SEQ ID NO: 527020 - DNA, 25 bp, Homo sapien
gcagcctgcagtgatcccactctta

SEQ ID NO: 527021 - DNA, 25 bp, Homo sapien
aggcagcctgcagtgatcccactct

SEQ ID NO: 527022 - DNA, 25 bp, Homo sapien
tgtgtggtaaataacccaggcagcc

SEQ ID NO: 527023 - DNA, 25 bp, Homo sapien
tgcccttcacctccgcgtgctgtgt

SEQ ID NO: 527024 - DNA, 25 bp, Homo sapien
caacatcttggtcaattgaccccag

SEQ ID NO: 527025 - DNA, 25 bp, Homo sapien
tgatactgggctcttggtatctgta

SEQ ID NO: 527026 - DNA, 25 bp, Homo sapien
tgaccccaggataacagatttagaa

SEQ ID NO: 527027 - DNA, 25 bp, Homo sapien
tctgtaaggtgacataatgccaaca

SEQ ID NO: 527028 - DNA, 25 bp, Homo sapien
caagtgttatatgtcccctattatt

SEQ ID NO: 527029 - DNA, 25 bp, Homo sapien
agtgttatatgtcccctattattaa

SEQ ID NO: 527030 - DNA, 25 bp, Homo sapien
ttcaagtgttatatgtcccctatta

SEQ ID NO: 527031 - DNA, 25 bp, Homo sapien
aattcaagtgttatatgtcccctat

SEQ ID NO: 527032 - DNA, 25 bp, Homo sapien
ccttccctattttggtcctggcatg

SEQ ID NO: 527033 - DNA, 25 bp, Homo sapien
tatgcatacacttactctaatctgc

SEQ ID NO: 527034 - DNA, 25 bp, Homo sapien
aaatcaagtttgtactcgttccaat

SEQ ID NO: 527035 - DNA, 25 bp, Homo sapien
taactggaccatacttgggactaaa

SEQ ID NO: 527036 - DNA, 25 bp, Homo sapien
tctttttgatcatttgaaacatcaa

SEQ ID NO: 527037 - DNA, 25 bp, Homo sapien
ttccagtactcacagtttgactctt

SEQ ID NO: 527038 - DNA, 25 bp, Homo sapien
tactcacagtttgactcttcctctc

SEQ ID NO: 527039 - DNA, 25 bp, Homo sapien
aacatcaaattgttttaccaacaca

SEQ ID NO: 527040 - DNA, 25 bp, Homo sapien
ttgacagttgaataacagatatgca

SEQ ID NO: 527041 - DNA, 25 bp, Homo sapien
cagttttgccgtatattgacagttg

SEQ ID NO: 527042 - DNA, 25 bp, Homo sapien
taacagatatgcatctgctgccata

SEQ ID NO: 527043 - DNA, 25 bp, Homo sapien
ggcttcgctaagacctgagttttgt

SEQ ID NO: 527044 - DNA, 25 bp, Homo sapien
cctgtggtctgttgcagtctgcatg

SEQ ID NO: 527045 - DNA, 25 bp, Homo sapien
ggtctgttgcagtctgcatgtgaaa

SEQ ID NO: 527046 - DNA, 25 bp, Homo sapien
tctgttgcagtctgcatgtgaaata

SEQ ID NO: 527047 - DNA, 25 bp, Homo sapien
cctccctgtggtctgttgcagtctg

SEQ ID NO: 527048 - DNA, 25 bp, Homo sapien
tgcctgctctttcctgaatattcac

SEQ ID NO: 527049 - DNA, 25 bp, Homo sapien
cctgcctgctctttcctgaatattc

SEQ ID NO: 527050 - DNA, 25 bp, Homo sapien
ctgcctgctctttcctgaatattca

SEQ ID NO: 527051 - DNA, 25 bp, Homo sapien
aattggtttagtgaatgggctggac

SEQ ID NO: 527052 - DNA, 25 bp, Homo sapien
gactctagtgtataatccagaaaca

SEQ ID NO: 527053 - DNA, 25 bp, Homo sapien
agagcagtttcacacccgtccagct

SEQ ID NO: 527054 - DNA, 25 bp, Homo sapien
tatctccgtccgagttacaactggg

SEQ ID NO: 527055 - DNA, 25 bp, Homo sapien
gagaaattcaacagccgctttcgga

SEQ ID NO: 527056 - DNA, 25 bp, Homo sapien
ccagagaaattcaacagccgctttc

SEQ ID NO: 527057 - DNA, 25 bp, Homo sapien
tcaacagccgctttcggaataagat

SEQ ID NO: 527058 - DNA, 25 bp, Homo sapien
caacagccgctttcggaataagatg

SEQ ID NO: 527059 - DNA, 25 bp, Homo sapien
tgcgggcaccatgccctgcggccac

SEQ ID NO: 527060 - DNA, 25 bp, Homo sapien
gggcaccatgccctgcggccaccct

SEQ ID NO: 527061 - DNA, 25 bp, Homo sapien
tgtgcgggcaccatgccctgcggcc

SEQ ID NO: 527062 - DNA, 25 bp, Homo sapien
gcaccatgccctgcggccaccctgg

SEQ ID NO: 527063 - DNA, 25 bp, Homo sapien
caaggccatcccggtgcaggtggat

SEQ ID NO: 527064 - DNA, 25 bp, Homo sapien
gcgagcggctgacgcagtgtcgcga

SEQ ID NO: 527065 - DNA, 25 bp, Homo sapien
cgcgaggtggtgctcaccacatcca

SEQ ID NO: 527066 - DNA, 25 bp, Homo sapien
ccgcgctgcaggtgggcggacacgg

SEQ ID NO: 527067 - DNA, 25 bp, Homo sapien
gccagagcagttgcgcatccaggtg

SEQ ID NO: 527068 - DNA, 25 bp, Homo sapien
cggtgccagagcagttgcgcatcca

SEQ ID NO: 527069 - DNA, 25 bp, Homo sapien
cagccggtgccagagcagttgcgca

SEQ ID NO: 527070 - DNA, 25 bp, Homo sapien
gtgccagagcagttgcgcatccagg

SEQ ID NO: 527071 - DNA, 25 bp, Homo sapien
cgccgcctggtagtcgttattaaca

SEQ ID NO: 527072 - DNA, 25 bp, Homo sapien
aggaacaaagagcactcgccgcctg

SEQ ID NO: 527073 - DNA, 25 bp, Homo sapien
cgacgtgttgcaaacttcttttcag

SEQ ID NO: 527074 - DNA, 25 bp, Homo sapien
gggccccacggcgacgtgttgcaaa

SEQ ID NO: 527075 - DNA, 25 bp, Homo sapien
cccaagaaacccgtctgaattggtg

SEQ ID NO: 527076 - DNA, 25 bp, Homo sapien
gaaacccgtctgaattggtgatgtt

SEQ ID NO: 527077 - DNA, 25 bp, Homo sapien
caagaaacccgtctgaattggtgat

SEQ ID NO: 527078 - DNA, 25 bp, Homo sapien
cagctgtgtttaaccttgtccatta

SEQ ID NO: 527079 - DNA, 25 bp, Homo sapien
cagttttgtccatttgtccatttcc

SEQ ID NO: 527080 - DNA, 25 bp, Homo sapien
catttgtccatttcccacagcttct

SEQ ID NO: 527081 - DNA, 25 bp, Homo sapien
gtccatttgtccatttcccacagct

SEQ ID NO: 527082 - DNA, 25 bp, Homo sapien
ttttgtccatttgtccatttcccac

SEQ ID NO: 527083 - DNA, 25 bp, Homo sapien
gaggtctgcgttctattcttgctgg

SEQ ID NO: 527084 - DNA, 25 bp, Homo sapien
aaaatggagagagtggtgcatcctc

SEQ ID NO: 527085 - DNA, 25 bp, Homo sapien
tcttgctggcactatccttagaagg

SEQ ID NO: 527086 - DNA, 25 bp, Homo sapien
gcacatgagttatccgctcagtttt

SEQ ID NO: 527087 - DNA, 25 bp, Homo sapien
cattaaacagtataaggcctaattt

SEQ ID NO: 527088 - DNA, 25 bp, Homo sapien
tttcaaagaaggttgtaatatccat

SEQ ID NO: 527089 - DNA, 25 bp, Homo sapien
gggatagaacttataagcgtgtgtt

SEQ ID NO: 527090 - DNA, 25 bp, Homo sapien
aaaactttgctgaatgatttcattg

SEQ ID NO: 527091 - DNA, 25 bp, Homo sapien
tgtgagtaatagctccctccagaca

SEQ ID NO: 527092 - DNA, 25 bp, Homo sapien
tgccaccgagcgaaattaagaaggg

SEQ ID NO: 527093 - DNA, 25 bp, Homo sapien
tcctgaagtgatagagattggtctg

SEQ ID NO: 527094 - DNA, 25 bp, Homo sapien
gattggtctgtgactgctgctactg

SEQ ID NO: 527095 - DNA, 25 bp, Homo sapien
tatgtcttgctcgaattgttgccat

SEQ ID NO: 527096 - DNA, 25 bp, Homo sapien
atttctttccgataatatgtcttgc

SEQ ID NO: 527097 - DNA, 25 bp, Homo sapien
ccgataatatgtcttgctcgaattg

SEQ ID NO: 527098 - DNA, 25 bp, Homo sapien
aggacaatttctttccgataatatg

SEQ ID NO: 527099 - DNA, 25 bp, Homo sapien
ttgcttgaattatctgggcctgtgg

SEQ ID NO: 527100 - DNA, 25 bp, Homo sapien
tcagatgtgaactctttacagtacc

SEQ ID NO: 527101 - DNA, 25 bp, Homo sapien
tattcttgccggaaaactgtccaaa

SEQ ID NO: 527102 - DNA, 25 bp, Homo sapien
ggttgattaagcacaaagtggacac

SEQ ID NO: 527103 - DNA, 25 bp, Homo sapien
agacaagtcctctagagagtgtatg

SEQ ID NO: 527104 - DNA, 25 bp, Homo sapien
caacaccaaccaacagagcagtaga

SEQ ID NO: 527105 - DNA, 25 bp, Homo sapien
tgtatgtgctcatcttgacattcca

SEQ ID NO: 527106 - DNA, 25 bp, Homo sapien
ttccaaggaatagcccacaccttgc

SEQ ID NO: 527107 - DNA, 25 bp, Homo sapien
agagtggacagttttgcaaacagga

SEQ ID NO: 527108 - DNA, 25 bp, Homo sapien
aggagaatttatgtgcttcaggaag

SEQ ID NO: 527109 - DNA, 25 bp, Homo sapien
agaatttatgtgcttcaggaagggc

SEQ ID NO: 527110 - DNA, 25 bp, Homo sapien
gagtggacagttttgcaaacaggaa

SEQ ID NO: 527111 - DNA, 25 bp, Homo sapien
attatttccagggattttgctcgtt

SEQ ID NO: 527112 - DNA, 25 bp, Homo sapien
ccagggattttgctcgttcctcgaa

SEQ ID NO: 527113 - DNA, 25 bp, Homo sapien
gctcgttcctcgaattccttcctga

SEQ ID NO: 527114 - DNA, 25 bp, Homo sapien
gattttgctcgttcctcgaattcct

SEQ ID NO: 527115 - DNA, 25 bp, Homo sapien
atcaatactaatggcatcttctttc

SEQ ID NO: 527116 - DNA, 25 bp, Homo sapien
ggtgtataccttgtgtcttagcatc

SEQ ID NO: 527117 - DNA, 25 bp, Homo sapien
tgggtgactggaagtccgacattgc

SEQ ID NO: 527118 - DNA, 25 bp, Homo sapien
cctgaagtaggcttggtgtatacct

SEQ ID NO: 527119 - DNA, 25 bp, Homo sapien
taatatgaggctaaccatgatgtcc

SEQ ID NO: 527120 - DNA, 25 bp, Homo sapien
caattgccttgacttttggatgaaa

SEQ ID NO: 527121 - DNA, 25 bp, Homo sapien
cacagagtcatagaggtcaagtcct

SEQ ID NO: 527122 - DNA, 25 bp, Homo sapien
gaaatgcgatttgaggacatatcat

SEQ ID NO: 527123 - DNA, 25 bp, Homo sapien
gcgtcaagcagtcttagcaccatcg

SEQ ID NO: 527124 - DNA, 25 bp, Homo sapien
caaagtgtggtgttagcgtcaagca

SEQ ID NO: 527125 - DNA, 25 bp, Homo sapien
gaatcgtggcgtcctgttcttgcaa

SEQ ID NO: 527126 - DNA, 25 bp, Homo sapien
ccttgcttgatgtgagtgggcagcc

SEQ ID NO: 527127 - DNA, 25 bp, Homo sapien
ctcggtccatatccctgtccttgtg

SEQ ID NO: 527128 - DNA, 25 bp, Homo sapien
tacccagtgaaattcagactgaaat

SEQ ID NO: 527129 - DNA, 25 bp, Homo sapien
tattcttcttggtgcaaacactccc

SEQ ID NO: 527130 - DNA, 25 bp, Homo sapien
tacatcttagtctctccccataaga

SEQ ID NO: 527131 - DNA, 25 bp, Homo sapien
cagtaaagacaagccatccacttag

SEQ ID NO: 527132 - DNA, 25 bp, Homo sapien
tccacttagcggtccttctgttcca

SEQ ID NO: 527133 - DNA, 25 bp, Homo sapien
agccatccacttagcggtccttctg

SEQ ID NO: 527134 - DNA, 25 bp, Homo sapien
cttagcggtccttctgttccatcct

SEQ ID NO: 527135 - DNA, 25 bp, Homo sapien
tgaaaatttgggtctacactaaaga

SEQ ID NO: 527136 - DNA, 25 bp, Homo sapien
gggtctacactaaagaatgaagagt

SEQ ID NO: 527137 - DNA, 25 bp, Homo sapien
tacaactcttgtcaccgggtgcagt

SEQ ID NO: 527138 - DNA, 25 bp, Homo sapien
aatgaagagtatcagcaatggttga

SEQ ID NO: 527139 - DNA, 25 bp, Homo sapien
tcttcacctctttcactttgattct

SEQ ID NO: 527140 - DNA, 25 bp, Homo sapien
tcatatttaagaaatggctgaacca

SEQ ID NO: 527141 - DNA, 25 bp, Homo sapien
gtcctattatctcatatttaagaaa

SEQ ID NO: 527142 - DNA, 25 bp, Homo sapien
tctcatatttaagaaatggctgaac

SEQ ID NO: 527143 - DNA, 25 bp, Homo sapien
ctgtcctattatctcatatttaaga

SEQ ID NO: 527144 - DNA, 25 bp, Homo sapien
ggctctacaggaaacatagcagcat

SEQ ID NO: 527145 - DNA, 25 bp, Homo sapien
tctacaggaaacatagcagcatctg

SEQ ID NO: 527146 - DNA, 25 bp, Homo sapien
tgcaggctctacaggaaacatagca

SEQ ID NO: 527147 - DNA, 25 bp, Homo sapien
gcaggctctacaggaaacatagcag

SEQ ID NO: 527148 - DNA, 25 bp, Homo sapien
tctctggaagccgtaaaggatcaca

SEQ ID NO: 527149 - DNA, 25 bp, Homo sapien
gaccattctagcacatttcagcgtt

SEQ ID NO: 527150 - DNA, 25 bp, Homo sapien
aaccatctgggatcgtgtgtttgcc

SEQ ID NO: 527151 - DNA, 25 bp, Homo sapien
gcatttgttaccatcgatgaaccca

SEQ ID NO: 527152 - DNA, 25 bp, Homo sapien
ctgtgccttcttgcgaaaagctctt

SEQ ID NO: 527153 - DNA, 25 bp, Homo sapien
tgccttcttgcgaaaagctctttgg

SEQ ID NO: 527154 - DNA, 25 bp, Homo sapien
ccttcttgcgaaaagctctttggtg

SEQ ID NO: 527155 - DNA, 25 bp, Homo sapien
gcctgtgccttcttgcgaaaagctc

SEQ ID NO: 527156 - DNA, 25 bp, Homo sapien
tttgggttcatggttcattccggga

SEQ ID NO: 527157 - DNA, 25 bp, Homo sapien
ggttcatggttcattccgggaggct

SEQ ID NO: 527158 - DNA, 25 bp, Homo sapien
gttcatggttcattccgggaggctg

SEQ ID NO: 527159 - DNA, 25 bp, Homo sapien
tgctttgggttcatggttcattccg

SEQ ID NO: 527160 - DNA, 25 bp, Homo sapien
caacccaagttacctttgctctgca

SEQ ID NO: 527161 - DNA, 25 bp, Homo sapien
gggagacagctgtcaacttgtgcaa

SEQ ID NO: 527162 - DNA, 25 bp, Homo sapien
tgggagacagctgtcaacttgtgca

SEQ ID NO: 527163 - DNA, 25 bp, Homo sapien
ccgtagaattgttaccaacagcagc

SEQ ID NO: 527164 - DNA, 25 bp, Homo sapien
tgaattgcctcatattcccatctga

SEQ ID NO: 527165 - DNA, 25 bp, Homo sapien
ctgagggatgcttgcacccctttct

SEQ ID NO: 527166 - DNA, 25 bp, Homo sapien
tctgagggatgcttgcacccctttc

SEQ ID NO: 527167 - DNA, 25 bp, Homo sapien
aatgaattgcctcatattcccatct

SEQ ID NO: 527168 - DNA, 25 bp, Homo sapien
cattgtagagattgtgggcttcttg

SEQ ID NO: 527169 - DNA, 25 bp, Homo sapien
tgggcttcttggtgtgaaagctgtt

SEQ ID NO: 527170 - DNA, 25 bp, Homo sapien
gcttcttggtgtgaaagctgttttt

SEQ ID NO: 527171 - DNA, 25 bp, Homo sapien
attccattgtagagattgtgggctt

SEQ ID NO: 527172 - DNA, 25 bp, Homo sapien
ctaatgtgcagcaagctgccatttt

SEQ ID NO: 527173 - DNA, 25 bp, Homo sapien
tcctttgatctcatgatcagcattt

SEQ ID NO: 527174 - DNA, 25 bp, Homo sapien
taatgtgcagcaagctgccattttc

SEQ ID NO: 527175 - DNA, 25 bp, Homo sapien
ttgatctcatgatcagcatttccaa

SEQ ID NO: 527176 - DNA, 25 bp, Homo sapien
tgcctgctgattgttctggtactgc

SEQ ID NO: 527177 - DNA, 25 bp, Homo sapien
ggtactgctgtgctcgtaacttcaa

SEQ ID NO: 527178 - DNA, 25 bp, Homo sapien
ggaaactttcggagatgcctgctga

SEQ ID NO: 527179 - DNA, 25 bp, Homo sapien
taacttcaaagcaagtgcgacagcc

SEQ ID NO: 527180 - DNA, 25 bp, Homo sapien
gcccagattcagtcccaaccagctt

SEQ ID NO: 527181 - DNA, 25 bp, Homo sapien
ccagattcagtcccaaccagcttcc

SEQ ID NO: 527182 - DNA, 25 bp, Homo sapien
agattcagtcccaaccagcttccta

SEQ ID NO: 527183 - DNA, 25 bp, Homo sapien
tctgcccagattcagtcccaaccag

SEQ ID NO: 527184 - DNA, 25 bp, Homo sapien
tcttgctttcggtgtctgcctgtgc

SEQ ID NO: 527185 - DNA, 25 bp, Homo sapien
tttgacacatactgagtctccatgg

SEQ ID NO: 527186 - DNA, 25 bp, Homo sapien
tgtgccctttccttacgaggctgta

SEQ ID NO: 527187 - DNA, 25 bp, Homo sapien
gatgtgcaccctccatctgctcatg

SEQ ID NO: 527188 - DNA, 25 bp, Homo sapien
cccactcaacccagtgtccccctgg

SEQ ID NO: 527189 - DNA, 25 bp, Homo sapien
ccctggccctgtgtggcagtaatgt

SEQ ID NO: 527190 - DNA, 25 bp, Homo sapien
tcttgcccactcaacccagtgtccc

SEQ ID NO: 527191 - DNA, 25 bp, Homo sapien
ccccctggccctgtgtggcagtaat

SEQ ID NO: 527192 - DNA, 25 bp, Homo sapien
gaaggtgttctaggtcagcctttcc

SEQ ID NO: 527193 - DNA, 25 bp, Homo sapien
cagtgtatgtggcatgcccaggaga

SEQ ID NO: 527194 - DNA, 25 bp, Homo sapien
tctctggcaatattttcgaaaattg

SEQ ID NO: 527195 - DNA, 25 bp, Homo sapien
tgtagcatccacttgaaggtgttct

SEQ ID NO: 527196 - DNA, 25 bp, Homo sapien
tatgtgcctcattcaacaggtgtca

SEQ ID NO: 527197 - DNA, 25 bp, Homo sapien
gatagaccagaggagaccaaagact

SEQ ID NO: 527198 - DNA, 25 bp, Homo sapien
aaaagtgaatttgcctacagggcca

SEQ ID NO: 527199 - DNA, 25 bp, Homo sapien
gcagtcctgagtcttgcctgagaaa

SEQ ID NO: 527200 - DNA, 25 bp, Homo sapien
tagtagctaaaacagttattatctg

SEQ ID NO: 527201 - DNA, 25 bp, Homo sapien
tattatctgttaatttgcctggatg

SEQ ID NO: 527202 - DNA, 25 bp, Homo sapien
gaaggctctcaaatgaagcagcctc

SEQ ID NO: 527203 - DNA, 25 bp, Homo sapien
agggcggcatatgcaccagcatgga

SEQ ID NO: 527204 - DNA, 25 bp, Homo sapien
gggctccatccttgactcttttcat

SEQ ID NO: 527205 - DNA, 25 bp, Homo sapien
gtcttctgggctctgcgcctcaggg

SEQ ID NO: 527206 - DNA, 25 bp, Homo sapien
tcattccacgctgatgtcttctggg

SEQ ID NO: 527207 - DNA, 25 bp, Homo sapien
ttggcattcttgctaagtcctgtgg

SEQ ID NO: 527208 - DNA, 25 bp, Homo sapien
tcttgtgtcctgtccgccagtaagt

SEQ ID NO: 527209 - DNA, 25 bp, Homo sapien
ttgtaggaagactcaaaaggagcca

SEQ ID NO: 527210 - DNA, 25 bp, Homo sapien
gccctatttgcctccaagagttgta

SEQ ID NO: 527211 - DNA, 25 bp, Homo sapien
gctgttttgcttaagccctgctgaa

SEQ ID NO: 527212 - DNA, 25 bp, Homo sapien
ccattttggaggcacacaaggactc

SEQ ID NO: 527213 - DNA, 25 bp, Homo sapien
tgtttgcaatcagtccaagcagatc

SEQ ID NO: 527214 - DNA, 25 bp, Homo sapien
cagatcaagttaaggaccaggccat

SEQ ID NO: 527215 - DNA, 25 bp, Homo sapien
tgcagactgagtggtgaacagcccc

SEQ ID NO: 527216 - DNA, 25 bp, Homo sapien
catttgggtaaagaatactcagtcc

SEQ ID NO: 527217 - DNA, 25 bp, Homo sapien
gaagactcacgtatactaatgccga

SEQ ID NO: 527218 - DNA, 25 bp, Homo sapien
ccatacattgtagctaagggcatca

SEQ ID NO: 527219 - DNA, 25 bp, Homo sapien
tactcagtcctctgctgtgacaaga

SEQ ID NO: 527220 - DNA, 25 bp, Homo sapien
aaaatagctgcctccaaagaactga

SEQ ID NO: 527221 - DNA, 25 bp, Homo sapien
aatagctgcagtaaagtggttctat

SEQ ID NO: 527222 - DNA, 25 bp, Homo sapien
tagctgcagtaaagtggttctatta

SEQ ID NO: 527223 - DNA, 25 bp, Homo sapien
tctattaaaatagctgcctccaaag

SEQ ID NO: 527224 - DNA, 25 bp, Homo sapien
gatgaaactcgtccagaagccgaac

SEQ ID NO: 527225 - DNA, 25 bp, Homo sapien
ccaagcgaggactatgtaggtgtca

SEQ ID NO: 527226 - DNA, 25 bp, Homo sapien
ctggattctggcgtatggctcatca

SEQ ID NO: 527227 - DNA, 25 bp, Homo sapien
tcagaggaggcactaacatcagggc

SEQ ID NO: 527228 - DNA, 25 bp, Homo sapien
cttgggtcagaaatgcaattctttg

SEQ ID NO: 527229 - DNA, 25 bp, Homo sapien
gaaatgcaattctttgatggtgcca

SEQ ID NO: 527230 - DNA, 25 bp, Homo sapien
tttgatggtgccagacagccagatg

SEQ ID NO: 527231 - DNA, 25 bp, Homo sapien
ccatccacccataagctcttcttgg

SEQ ID NO: 527232 - DNA, 25 bp, Homo sapien
tgacagtggtacttttggggcccca

SEQ ID NO: 527233 - DNA, 25 bp, Homo sapien
tcaagggtgaactgttgctcagcag

SEQ ID NO: 527234 - DNA, 25 bp, Homo sapien
caaaaagtggagtctgcaatgctgt

SEQ ID NO: 527235 - DNA, 25 bp, Homo sapien
tggaggctcaacaggtcaaatacat

SEQ ID NO: 527236 - DNA, 25 bp, Homo sapien
tacggagacagtccttagagcactg

SEQ ID NO: 527237 - DNA, 25 bp, Homo sapien
gagaaattggcacatagcatcattt

SEQ ID NO: 527238 - DNA, 25 bp, Homo sapien
agatcagagaaattggcacatagca

SEQ ID NO: 527239 - DNA, 25 bp, Homo sapien
agaaattggcacatagcatcattta

SEQ ID NO: 527240 - DNA, 25 bp, Homo sapien
aagatcagagaaattggcacatagc

SEQ ID NO: 527241 - DNA, 25 bp, Homo sapien
cctttggtcttggactgaattacac

SEQ ID NO: 527242 - DNA, 25 bp, Homo sapien
tctccagcttgcaggtggcatattg

SEQ ID NO: 527243 - DNA, 25 bp, Homo sapien
tgccctcggacatcagagctccttg

SEQ ID NO: 527244 - DNA, 25 bp, Homo sapien
gaattacactatcagctttcttggg

SEQ ID NO: 527245 - DNA, 25 bp, Homo sapien
tcccagtactcccataggtataagg

SEQ ID NO: 527246 - DNA, 25 bp, Homo sapien
cttggtggagcccataatgaggcct

SEQ ID NO: 527247 - DNA, 25 bp, Homo sapien
gggttgactgatcgccatcccagca

SEQ ID NO: 527248 - DNA, 25 bp, Homo sapien
taattgcttaagagtgcctcatcca

SEQ ID NO: 527249 - DNA, 25 bp, Homo sapien
tgtcaaatcccacagtgtagtcatt

SEQ ID NO: 527250 - DNA, 25 bp, Homo sapien
gagtggtaccatttccaatcacggt

SEQ ID NO: 527251 - DNA, 25 bp, Homo sapien
caatcacggtcatctcttggttctg

SEQ ID NO: 527252 - DNA, 25 bp, Homo sapien
tgaggtgaactgtgagccagccaat

SEQ ID NO: 527253 - DNA, 25 bp, Homo sapien
tcactgaatgtaagcgtccctggca

SEQ ID NO: 527254 - DNA, 25 bp, Homo sapien
gcagagaaaaccctagacatagagt

SEQ ID NO: 527255 - DNA, 25 bp, Homo sapien
gctgtgcagacttcaccaagacaca

SEQ ID NO: 527256 - DNA, 25 bp, Homo sapien
gacatagagtcacaagaccagccag

SEQ ID NO: 527257 - DNA, 25 bp, Homo sapien
gtgtcagtatccaaggagcttttgg

SEQ ID NO: 527258 - DNA, 25 bp, Homo sapien
gaagtggtagtgcttgcagtcagat

SEQ ID NO: 527259 - DNA, 25 bp, Homo sapien
gccagtgtcagtatccaaggagctt

SEQ ID NO: 527260 - DNA, 25 bp, Homo sapien
cagatgggtggtcaggcagtagttc

SEQ ID NO: 527261 - DNA, 25 bp, Homo sapien
acatttttcctattccagccaccct

SEQ ID NO: 527262 - DNA, 25 bp, Homo sapien
attcccacagctgtgactcagacct

SEQ ID NO: 527263 - DNA, 25 bp, Homo sapien
gcttttgcattcccacagctgtgac

SEQ ID NO: 527264 - DNA, 25 bp, Homo sapien
gggtgtcttggcttttgcattccca

SEQ ID NO: 527265 - DNA, 25 bp, Homo sapien
gtgtcttggcttttgcattcccaca

SEQ ID NO: 527266 - DNA, 25 bp, Homo sapien
ctgcatgtccccgagatctgtagac

SEQ ID NO: 527267 - DNA, 25 bp, Homo sapien
tccccgagatctgtagacatagctg

SEQ ID NO: 527268 - DNA, 25 bp, Homo sapien
cgagatctgtagacatagctggcac

SEQ ID NO: 527269 - DNA, 25 bp, Homo sapien
tgtccccgagatctgtagacatagc

SEQ ID NO: 527270 - DNA, 25 bp, Homo sapien
tcttctgcagtatggcagacaacca

SEQ ID NO: 527271 - DNA, 25 bp, Homo sapien
gatgtacggttgttcaacaaggacc

SEQ ID NO: 527272 - DNA, 25 bp, Homo sapien
cagacaaccatcaataaccacaggg

SEQ ID NO: 527273 - DNA, 25 bp, Homo sapien
tgtttaaggatgtacggttgttcaa

SEQ ID NO: 527274 - DNA, 25 bp, Homo sapien
ctctctgggatctgcctgcactgtg

SEQ ID NO: 527275 - DNA, 25 bp, Homo sapien
gcctgcactgtggacctggtcatgt

SEQ ID NO: 527276 - DNA, 25 bp, Homo sapien
gatctgcctgcactgtggacctggt

SEQ ID NO: 527277 - DNA, 25 bp, Homo sapien
tctctgggatctgcctgcactgtgg

SEQ ID NO: 527278 - DNA, 25 bp, Homo sapien
tcatccccaagaaaaccctgcaaga

SEQ ID NO: 527279 - DNA, 25 bp, Homo sapien
gaaaaccctgcaagagtggtgggcc

SEQ ID NO: 527280 - DNA, 25 bp, Homo sapien
cccttagcctttgctgttttgtaca

SEQ ID NO: 527281 - DNA, 25 bp, Homo sapien
gcctgcatgtggtgcctcttctcat

SEQ ID NO: 527282 - DNA, 25 bp, Homo sapien
gatctctctagaagccgagtgtcca

SEQ ID NO: 527283 - DNA, 25 bp, Homo sapien
taccatcgaatgtagccagctcgcc

SEQ ID NO: 527284 - DNA, 25 bp, Homo sapien
caacttgggaaactcgaactgcaca

SEQ ID NO: 527285 - DNA, 25 bp, Homo sapien
tttaagctgccaccgagttgtttgc

SEQ ID NO: 527286 - DNA, 25 bp, Homo sapien
agcatgtcatagttttccgatgaaa

SEQ ID NO: 527287 - DNA, 25 bp, Homo sapien
gttttccgatgaaagacaatcaaag

SEQ ID NO: 527288 - DNA, 25 bp, Homo sapien
gacaatcaaagatgcaaaaggatca

SEQ ID NO: 527289 - DNA, 25 bp, Homo sapien
gcaaaaggatcacaattgcaacagt

SEQ ID NO: 527290 - DNA, 25 bp, Homo sapien
ccagtaccatgattaagggcaatag

SEQ ID NO: 527291 - DNA, 25 bp, Homo sapien
gattaagggcaatagtgtcacaggg

SEQ ID NO: 527292 - DNA, 25 bp, Homo sapien
catcccagtaccatgattaagggca

SEQ ID NO: 527293 - DNA, 25 bp, Homo sapien
taccatgattaagggcaatagtgtc

SEQ ID NO: 527294 - DNA, 25 bp, Homo sapien
ggcttcaaataaaagctatgctgag

SEQ ID NO: 527295 - DNA, 25 bp, Homo sapien
tttcttgcacaaccctcaaagaact

SEQ ID NO: 527296 - DNA, 25 bp, Homo sapien
cactgtgaaaactagaggcttcaaa

SEQ ID NO: 527297 - DNA, 25 bp, Homo sapien
tccactgtgaaaactagaggcttca

SEQ ID NO: 527298 - DNA, 25 bp, Homo sapien
aaaatcctgaggttgaatatagagg

SEQ ID NO: 527299 - DNA, 25 bp, Homo sapien
tatagaggtctagaacatcttcaaa

SEQ ID NO: 527300 - DNA, 25 bp, Homo sapien
caaattcaccagatcatgactcaga

SEQ ID NO: 527301 - DNA, 25 bp, Homo sapien
tcctttccttcgtgtcttgaccaaa

SEQ ID NO: 527302 - DNA, 25 bp, Homo sapien
cttgtccacggcgagtgaggccaca

SEQ ID NO: 527303 - DNA, 25 bp, Homo sapien
ttgtccacggcgagtgaggccacag

SEQ ID NO: 527304 - DNA, 25 bp, Homo sapien
gacttgtccacggcgagtgaggcca

SEQ ID NO: 527305 - DNA, 25 bp, Homo sapien
caggacttgtccacggcgagtgagg

SEQ ID NO: 527306 - DNA, 25 bp, Homo sapien
cactggagcaaaatcctcgggcagc

SEQ ID NO: 527307 - DNA, 25 bp, Homo sapien
cacactggagcaaaatcctcgggca

SEQ ID NO: 527308 - DNA, 25 bp, Homo sapien
tggagcaaaatcctcgggcagccat

SEQ ID NO: 527309 - DNA, 25 bp, Homo sapien
cagcacactggagcaaaatcctcgg

SEQ ID NO: 527310 - DNA, 25 bp, Homo sapien
cctgggactgtactgaggagacagc

SEQ ID NO: 527311 - DNA, 25 bp, Homo sapien
gcccatttctcaaagcggtcatcgt

SEQ ID NO: 527312 - DNA, 25 bp, Homo sapien
gtttataatgaagtcctgcctggga

SEQ ID NO: 527313 - DNA, 25 bp, Homo sapien
gcaaatccatcgttagaggccggcc

SEQ ID NO: 527314 - DNA, 25 bp, Homo sapien
aagatcatgcaaagcaactttctgg

SEQ ID NO: 527315 - DNA, 25 bp, Homo sapien
cagttgtttaacatacccttcaaga

SEQ ID NO: 527316 - DNA, 25 bp, Homo sapien
ggaaatcagttccacacatggtaat

SEQ ID NO: 527317 - DNA, 25 bp, Homo sapien
tgagctatcaaacctaactattgct

SEQ ID NO: 527318 - DNA, 25 bp, Homo sapien
aactgagccacagtaaggatatggg

SEQ ID NO: 527319 - DNA, 25 bp, Homo sapien
tcctacacaaactgcctgaaaattg

SEQ ID NO: 527320 - DNA, 25 bp, Homo sapien
ggcattaagccatcggaatattgac

SEQ ID NO: 527321 - DNA, 25 bp, Homo sapien
tgaggccattgccaggccatgtttc

SEQ ID NO: 527322 - DNA, 25 bp, Homo sapien
acttgctcccagagaaagactatta

SEQ ID NO: 527323 - DNA, 25 bp, Homo sapien
ttaacttgctcccagagaaagacta

SEQ ID NO: 527324 - DNA, 25 bp, Homo sapien
aacttgctcccagagaaagactatt

SEQ ID NO: 527325 - DNA, 25 bp, Homo sapien
taacttgctcccagagaaagactat

SEQ ID NO: 527326 - DNA, 25 bp, Homo sapien
tatagggctaagctatggactacag

SEQ ID NO: 527327 - DNA, 25 bp, Homo sapien
gaagaatcccgtcaggcttttagga

SEQ ID NO: 527328 - DNA, 25 bp, Homo sapien
tgctgcctactacagaggcctgagt

SEQ ID NO: 527329 - DNA, 25 bp, Homo sapien
gacacttggctgacccctatacgat

SEQ ID NO: 527330 - DNA, 25 bp, Homo sapien
cacagcgattgtacaactgagacag

SEQ ID NO: 527331 - DNA, 25 bp, Homo sapien
tcaacatgccacttggtccacagcg

SEQ ID NO: 527332 - DNA, 25 bp, Homo sapien
agaaaccaatacatgaggcagtgag

SEQ ID NO: 527333 - DNA, 25 bp, Homo sapien
gcaaatttgggtcttgcctactcca

SEQ ID NO: 527334 - DNA, 25 bp, Homo sapien
tgggtcagtcaattaacctctgagt

SEQ ID NO: 527335 - DNA, 25 bp, Homo sapien
ggtcagtcaattaacctctgagtct

SEQ ID NO: 527336 - DNA, 25 bp, Homo sapien
ctcagctcaggtgctcgctctatac

SEQ ID NO: 527337 - DNA, 25 bp, Homo sapien
gctcgctctatactagctgtgtggc

SEQ ID NO: 527338 - DNA, 25 bp, Homo sapien
cataaggagcccgatactctaaggc

SEQ ID NO: 527339 - DNA, 25 bp, Homo sapien
atctttgttgggagccggaggcttc

SEQ ID NO: 527340 - DNA, 25 bp, Homo sapien
gctaactagccccacagaaggaagt

SEQ ID NO: 527341 - DNA, 25 bp, Homo sapien
acctcacagtgggtggttagccctg

SEQ ID NO: 527342 - DNA, 25 bp, Homo sapien
tggaggaagcaatactgtgtcaagg

SEQ ID NO: 527343 - DNA, 25 bp, Homo sapien
gccagtggctgtgaagggcacttat

SEQ ID NO: 527344 - DNA, 25 bp, Homo sapien
ttctcgtggtgacccactgcaaagc

SEQ ID NO: 527345 - DNA, 25 bp, Homo sapien
cctgccgttgaaggattctcgtggt

SEQ ID NO: 527346 - DNA, 25 bp, Homo sapien
gtgagtgtttgtgctcggagataca

SEQ ID NO: 527347 - DNA, 25 bp, Homo sapien
gatgaatgggtgagtgtttgtgctc

SEQ ID NO: 527348 - DNA, 25 bp, Homo sapien
agtgtttgtgctcggagatacagga

SEQ ID NO: 527349 - DNA, 25 bp, Homo sapien
tgtgctcggagatacaggaagacac

SEQ ID NO: 527350 - DNA, 25 bp, Homo sapien
ctaattcccctatttcaactgtttg

SEQ ID NO: 527351 - DNA, 25 bp, Homo sapien
tgtttgaatctttctgggagactga

SEQ ID NO: 527352 - DNA, 25 bp, Homo sapien
cttctaattcccctatttcaactgt

SEQ ID NO: 527353 - DNA, 25 bp, Homo sapien
aactgtttgaatctttctgggagac

SEQ ID NO: 527354 - DNA, 25 bp, Homo sapien
tcagagacatcgctgttgaagtcgc

SEQ ID NO: 527355 - DNA, 25 bp, Homo sapien
catatgaagcaatgcacactgtatt

SEQ ID NO: 527356 - DNA, 25 bp, Homo sapien
acatcatgggcacacatatgaagca

SEQ ID NO: 527357 - DNA, 25 bp, Homo sapien
tgttgaagtcgcacatcatgggcac

SEQ ID NO: 527358 - DNA, 25 bp, Homo sapien
ccgcaaggacagccaatgcaggagg

SEQ ID NO: 527359 - DNA, 25 bp, Homo sapien
gaaggagccactggaagtccacagg

SEQ ID NO: 527360 - DNA, 25 bp, Homo sapien
caaggacagccaatgcaggagggtc

SEQ ID NO: 527361 - DNA, 25 bp, Homo sapien
gagagaaggagccactggaagtcca

SEQ ID NO: 527362 - DNA, 25 bp, Homo sapien
catagagccccatgggagtcaaatt

SEQ ID NO: 527363 - DNA, 25 bp, Homo sapien
tgccaacacttcgaacccctacatt

SEQ ID NO: 527364 - DNA, 25 bp, Homo sapien
tggatatcaactgaccccatagagc

SEQ ID NO: 527365 - DNA, 25 bp, Homo sapien
actggactggatatcaactgacccc

SEQ ID NO: 527366 - DNA, 25 bp, Homo sapien
tcttgaagtctgagtgcctggtact

SEQ ID NO: 527367 - DNA, 25 bp, Homo sapien
atctcttgaagtctgagtgcctggt

SEQ ID NO: 527368 - DNA, 25 bp, Homo sapien
ctgacatgatctcttgaagtctgag

SEQ ID NO: 527369 - DNA, 25 bp, Homo sapien
catgatctcttgaagtctgagtgcc

SEQ ID NO: 527370 - DNA, 25 bp, Homo sapien
tgtctgtttgtacacctgaaagcat

SEQ ID NO: 527371 - DNA, 25 bp, Homo sapien
caaaggtgggcccaacagtatagaa

SEQ ID NO: 527372 - DNA, 25 bp, Homo sapien
gcatactcggattgtcagacccagc

SEQ ID NO: 527373 - DNA, 25 bp, Homo sapien
gctatcaatatcacggcatactcgg

SEQ ID NO: 527374 - DNA, 25 bp, Homo sapien
taaaataggtgaagtgcgaggacca

SEQ ID NO: 527375 - DNA, 25 bp, Homo sapien
gcttcttgaagcatctggtggcagt

SEQ ID NO: 527376 - DNA, 25 bp, Homo sapien
tctttgcggactctaagcttagggc

SEQ ID NO: 527377 - DNA, 25 bp, Homo sapien
ttgaggagcaagtagcagcatggaa

SEQ ID NO: 527378 - DNA, 25 bp, Homo sapien
gagacattggcagttattgggtccc

SEQ ID NO: 527379 - DNA, 25 bp, Homo sapien
actttgtcgtcgaggaagtctaact

SEQ ID NO: 527380 - DNA, 25 bp, Homo sapien
tcgaggaagtctaactcttgctccc

SEQ ID NO: 527381 - DNA, 25 bp, Homo sapien
tgtcgtcgaggaagtctaactcttg

SEQ ID NO: 527382 - DNA, 25 bp, Homo sapien
tcgtcgaggaagtctaactcttgct

SEQ ID NO: 527383 - DNA, 25 bp, Homo sapien
agaccaaagactcctctagactctg

SEQ ID NO: 527384 - DNA, 25 bp, Homo sapien
ttataagaccaaagactcctctaga

SEQ ID NO: 527385 - DNA, 25 bp, Homo sapien
tataagaccaaagactcctctagac

SEQ ID NO: 527386 - DNA, 25 bp, Homo sapien
taagaccaaagactcctctagactc

SEQ ID NO: 527387 - DNA, 25 bp, Homo sapien
tgctcagagaggcagcgctttcttc

SEQ ID NO: 527388 - DNA, 25 bp, Homo sapien
gagaggcagcgctttcttcacaggg

SEQ ID NO: 527389 - DNA, 25 bp, Homo sapien
agaggcaaggtcaaggtggcgagtg

SEQ ID NO: 527390 - DNA, 25 bp, Homo sapien
caaggtggcgagtgtgggattggaa

SEQ ID NO: 527391 - DNA, 25 bp, Homo sapien
tggctgcgccatcttagctcctcgt

SEQ ID NO: 527392 - DNA, 25 bp, Homo sapien
tacatcgcctgtcttctggtaagga

SEQ ID NO: 527393 - DNA, 25 bp, Homo sapien
gaatggtatcctgaaaaagcactga

SEQ ID NO: 527394 - DNA, 25 bp, Homo sapien
aataaaaaggagaatggtatcctga

SEQ ID NO: 527395 - DNA, 25 bp, Homo sapien
tcccctgccccattaatctgtattt

SEQ ID NO: 527396 - DNA, 25 bp, Homo sapien
cccctgccccattaatctgtatttt

SEQ ID NO: 527397 - DNA, 25 bp, Homo sapien
ttcccctgccccattaatctgtatt

SEQ ID NO: 527398 - DNA, 25 bp, Homo sapien
ccctgccccattaatctgtattttc

SEQ ID NO: 527399 - DNA, 25 bp, Homo sapien
ggtactaccagtctctagaaactcg

SEQ ID NO: 527400 - DNA, 25 bp, Homo sapien
aagaatgtttgcatgctggtcagcc

SEQ ID NO: 527401 - DNA, 25 bp, Homo sapien
gttgggagaccaagtatgtggcccc

SEQ ID NO: 527402 - DNA, 25 bp, Homo sapien
tagaaactcgaccaccaagatgaat

SEQ ID NO: 527403 - DNA, 25 bp, Homo sapien
ccttgtttggactaatctgctagag

SEQ ID NO: 527404 - DNA, 25 bp, Homo sapien
tatacaggcttcattgcatatgtct

SEQ ID NO: 527405 - DNA, 25 bp, Homo sapien
agggctgtggcgcttccatatcctc

SEQ ID NO: 527406 - DNA, 25 bp, Homo sapien
tatgaggaaggatattacaaagcat

SEQ ID NO: 527407 - DNA, 25 bp, Homo sapien
tattaagttagaagagcacgtggca

SEQ ID NO: 527408 - DNA, 25 bp, Homo sapien
tactcactgaatgtgaagacccaaa

SEQ ID NO: 527409 - DNA, 25 bp, Homo sapien
tttccttaatgtcgctcagagccag

SEQ ID NO: 527410 - DNA, 25 bp, Homo sapien
tgccggaaaagtgaagcatagcagg

SEQ ID NO: 527411 - DNA, 25 bp, Homo sapien
tcccgctccaagagaaggcctagag

SEQ ID NO: 527412 - DNA, 25 bp, Homo sapien
cctggtatttggacatgatctgaga

SEQ ID NO: 527413 - DNA, 25 bp, Homo sapien
cagactgggtttatggtcctgttac

SEQ ID NO: 527414 - DNA, 25 bp, Homo sapien
cccagaatggcctttattgaagcct

SEQ ID NO: 527415 - DNA, 25 bp, Homo sapien
ctctctctggagtcggctagccggg

SEQ ID NO: 527416 - DNA, 25 bp, Homo sapien
agattacttccgtccgggctgcggc

SEQ ID NO: 527417 - DNA, 25 bp, Homo sapien
gcctctctctggagtcggctagccg

SEQ ID NO: 527418 - DNA, 25 bp, Homo sapien
tttcctgagatgagagattacttcc

SEQ ID NO: 527419 - DNA, 25 bp, Homo sapien
aatagctcctttagatccgtccctg

SEQ ID NO: 527420 - DNA, 25 bp, Homo sapien
gaatgtgcggtcctcaagtctagcc

SEQ ID NO: 527421 - DNA, 25 bp, Homo sapien
tgcaagcctcagctcaagtcgggca

SEQ ID NO: 527422 - DNA, 25 bp, Homo sapien
tttagggtcacaggccataagtgcc

SEQ ID NO: 527423 - DNA, 25 bp, Homo sapien
gttgggagtcgctctgccatttctg

SEQ ID NO: 527424 - DNA, 25 bp, Homo sapien
gggacattcctttcgtctgtcagtt

SEQ ID NO: 527425 - DNA, 25 bp, Homo sapien
tgtcagttaacaggcggcactttcc

SEQ ID NO: 527426 - DNA, 25 bp, Homo sapien
caggcaccatccgttgggagtcgct

SEQ ID NO: 527427 - DNA, 25 bp, Homo sapien
tgcaggtcaaccacataaattggcc

SEQ ID NO: 527428 - DNA, 25 bp, Homo sapien
ccccaagaccggcaactgagatgtt

SEQ ID NO: 527429 - DNA, 25 bp, Homo sapien
tgtaacatccagagggagtcacccc

SEQ ID NO: 527430 - DNA, 25 bp, Homo sapien
gggatctgagatgcacagcctgaag

SEQ ID NO: 527431 - DNA, 25 bp, Homo sapien
taaaacccagctgtccaagaacgat

SEQ ID NO: 527432 - DNA, 25 bp, Homo sapien
aactctgttttaccgtggatcctgg

SEQ ID NO: 527433 - DNA, 25 bp, Homo sapien
tccttgaagcgcagtgtctgacaca

SEQ ID NO: 527434 - DNA, 25 bp, Homo sapien
tacaggacccactgcagattggtgt

SEQ ID NO: 527435 - DNA, 25 bp, Homo sapien
agtttctgcgggaaacaagcaggcc

SEQ ID NO: 527436 - DNA, 25 bp, Homo sapien
cgttctcaagcggaaaggacatttt

SEQ ID NO: 527437 - DNA, 25 bp, Homo sapien
aggattagtagccacgcgggtcgtc

SEQ ID NO: 527438 - DNA, 25 bp, Homo sapien
caacggaagcggtcagccagtttct

SEQ ID NO: 527439 - DNA, 25 bp, Homo sapien
aattggtccccagagctttggaggc

SEQ ID NO: 527440 - DNA, 25 bp, Homo sapien
tgctacttgacttgacttttgaggc

SEQ ID NO: 527441 - DNA, 25 bp, Homo sapien
ggacatcatcacaggtcaaacactg

SEQ ID NO: 527442 - DNA, 25 bp, Homo sapien
tgcttcggaagtgcctaaacacagg

SEQ ID NO: 527443 - DNA, 25 bp, Homo sapien
ttgaaccggggagttcgaggttgca

SEQ ID NO: 527444 - DNA, 25 bp, Homo sapien
gtgagctatgatagtgccactgcac

SEQ ID NO: 527445 - DNA, 25 bp, Homo sapien
cacatgcctgaaatcccagttactg

SEQ ID NO: 527446 - DNA, 25 bp, Homo sapien
aggctgaggtgggaggatcccttga

SEQ ID NO: 527447 - DNA, 25 bp, Homo sapien
ctctcttcaggctagataagctggg

SEQ ID NO: 527448 - DNA, 25 bp, Homo sapien
gggctctccgtgatgtggaacaagc

SEQ ID NO: 527449 - DNA, 25 bp, Homo sapien
ggagcgagacgcacatgcaggataa

SEQ ID NO: 527450 - DNA, 25 bp, Homo sapien
cacaaataggcttgtcagggagcga

SEQ ID NO: 527451 - DNA, 25 bp, Homo sapien
cgctcagtgcacaattgaattttcc

SEQ ID NO: 527452 - DNA, 25 bp, Homo sapien
tcttcacgctgtcgctcagtgcaca

SEQ ID NO: 527453 - DNA, 25 bp, Homo sapien
cacaattgaattttcctcctgagga

SEQ ID NO: 527454 - DNA, 25 bp, Homo sapien
tgcttggcccggtctcttcacgctg

SEQ ID NO: 527455 - DNA, 25 bp, Homo sapien
cgcaacgacgttcaatacgatgatg

SEQ ID NO: 527456 - DNA, 25 bp, Homo sapien
ctggaacacgcaacgacgttcaata

SEQ ID NO: 527457 - DNA, 25 bp, Homo sapien
caatacgatgatgaacaaaaagtat

SEQ ID NO: 527458 - DNA, 25 bp, Homo sapien
gaacacgcaacgacgttcaatacga

SEQ ID NO: 527459 - DNA, 25 bp, Homo sapien
gtttgctgtgtcttaaaggaggttg

SEQ ID NO: 527460 - DNA, 25 bp, Homo sapien
tttgctgtgtcttaaaggaggttgt

SEQ ID NO: 527461 - DNA, 25 bp, Homo sapien
aattagacatacctccgcagcactg

SEQ ID NO: 527462 - DNA, 25 bp, Homo sapien
ctgcaattagacatacctccgcagc

SEQ ID NO: 527463 - DNA, 25 bp, Homo sapien
gtcgctgatgtcataacccagcttg

SEQ ID NO: 527464 - DNA, 25 bp, Homo sapien
ggatgggagtaagccagcgagcagc

SEQ ID NO: 527465 - DNA, 25 bp, Homo sapien
gatgtcataacccagcttggttttg

SEQ ID NO: 527466 - DNA, 25 bp, Homo sapien
agaaggggaaaagtcgctgatgtca

SEQ ID NO: 527467 - DNA, 25 bp, Homo sapien
ggaaagcaagctctatccctgctga

SEQ ID NO: 527468 - DNA, 25 bp, Homo sapien
tatgaaggcctcagtattcagacct

SEQ ID NO: 527469 - DNA, 25 bp, Homo sapien
aacttggctgaagatcgtgaacagg

SEQ ID NO: 527470 - DNA, 25 bp, Homo sapien
ggccaaggctggatctactctctct

SEQ ID NO: 527471 - DNA, 25 bp, Homo sapien
gacagggtttgggaatttgactcag

SEQ ID NO: 527472 - DNA, 25 bp, Homo sapien
tcagaatcacagctatatatctatg

SEQ ID NO: 527473 - DNA, 25 bp, Homo sapien
ggtttgggaatttgactcagaatca

SEQ ID NO: 527474 - DNA, 25 bp, Homo sapien
ttgcagggaggtgatgacagggttt

SEQ ID NO: 527475 - DNA, 25 bp, Homo sapien
cttctagttgggcatatactactgt

SEQ ID NO: 527476 - DNA, 25 bp, Homo sapien
ctactgtattcatgttgatcgtttc

SEQ ID NO: 527477 - DNA, 25 bp, Homo sapien
catgttgatcgtttctctttttgtt

SEQ ID NO: 527478 - DNA, 25 bp, Homo sapien
tgaagctgaatttctgtcctagcgc

SEQ ID NO: 527479 - DNA, 25 bp, Homo sapien
tggtttctccgtgctgtggaactga

SEQ ID NO: 527480 - DNA, 25 bp, Homo sapien
gagaaatttggtttctccgtgctgt

SEQ ID NO: 527481 - DNA, 25 bp, Homo sapien
ggagaaatttggtttctccgtgctg

SEQ ID NO: 527482 - DNA, 25 bp, Homo sapien
tttggtttctccgtgctgtggaact

SEQ ID NO: 527483 - DNA, 25 bp, Homo sapien
caattctgtccctgggctgtcgcat

SEQ ID NO: 527484 - DNA, 25 bp, Homo sapien
tcacaattctgtccctgggctgtcg

SEQ ID NO: 527485 - DNA, 25 bp, Homo sapien
tccccgctcactcacaattctgtcc

SEQ ID NO: 527486 - DNA, 25 bp, Homo sapien
gctcactcacaattctgtccctggg

SEQ ID NO: 527487 - DNA, 25 bp, Homo sapien
tcctgcaatggtttcagtcacaggc

SEQ ID NO: 527488 - DNA, 25 bp, Homo sapien
tggtctcaggtatgcctcttcctca

SEQ ID NO: 527489 - DNA, 25 bp, Homo sapien
gaccttcctgcaatggtttcagtca

SEQ ID NO: 527490 - DNA, 25 bp, Homo sapien
ccttcctgcaatggtttcagtcaca

SEQ ID NO: 527491 - DNA, 25 bp, Homo sapien
gatggccagccctagagtctggtct

SEQ ID NO: 527492 - DNA, 25 bp, Homo sapien
ccagccctagagtctggtctccagg

SEQ ID NO: 527493 - DNA, 25 bp, Homo sapien
gtcagcaactccgtgatctctcatc

SEQ ID NO: 527494 - DNA, 25 bp, Homo sapien
cctggtcagcaactccgtgatctct

SEQ ID NO: 527495 - DNA, 25 bp, Homo sapien
tcccctcgtgtgtgtgattccaatt

SEQ ID NO: 527496 - DNA, 25 bp, Homo sapien
gcagactgatttatctttgcactga

SEQ ID NO: 527497 - DNA, 25 bp, Homo sapien
accctgattcccctcgtgtgtgtga

SEQ ID NO: 527498 - DNA, 25 bp, Homo sapien
gctctgtgattgataggcttgtgcc

SEQ ID NO: 527499 - DNA, 25 bp, Homo sapien
atggaaagacatcttttaataattc

SEQ ID NO: 527500 - DNA, 25 bp, Homo sapien
tatttcacaaatattcagctgccaa

SEQ ID NO: 527501 - DNA, 25 bp, Homo sapien
ttcacaaatattcagctgccaaaat

SEQ ID NO: 527502 - DNA, 25 bp, Homo sapien
tcttatttcacaaatattcagctgc

SEQ ID NO: 527503 - DNA, 25 bp, Homo sapien
tataacacatgcacgctatcgaaca

SEQ ID NO: 527504 - DNA, 25 bp, Homo sapien
tgacaactgctatcagcctatggca

SEQ ID NO: 527505 - DNA, 25 bp, Homo sapien
tcccaccagctctagatgagagaaa

SEQ ID NO: 527506 - DNA, 25 bp, Homo sapien
tcatttcaacaggatgcccgtgtca

SEQ ID NO: 527507 - DNA, 25 bp, Homo sapien
gttgtggaaatgactgccattatgt

SEQ ID NO: 527508 - DNA, 25 bp, Homo sapien
cttcaggattttactagtcaaattg

SEQ ID NO: 527509 - DNA, 25 bp, Homo sapien
cccttcaggattttactagtcaaat

SEQ ID NO: 527510 - DNA, 25 bp, Homo sapien
gtggaaatgactgccattatgttaa

SEQ ID NO: 527511 - DNA, 25 bp, Homo sapien
tatatgctttattgaaagttgacaa

SEQ ID NO: 527512 - DNA, 25 bp, Homo sapien
tttatatgctttattgaaagttgac

SEQ ID NO: 527513 - DNA, 25 bp, Homo sapien
tgctttattgaaagttgacaagtgc

SEQ ID NO: 527514 - DNA, 25 bp, Homo sapien
ttattgaaagttgacaagtgcaaca

SEQ ID NO: 527515 - DNA, 25 bp, Homo sapien
tacttcagcgtattcagcagctaga

SEQ ID NO: 527516 - DNA, 25 bp, Homo sapien
cagtgaacaaggatttacttcagcg

SEQ ID NO: 527517 - DNA, 25 bp, Homo sapien
tacacaaagtgagtaactgtgccaa

SEQ ID NO: 527518 - DNA, 25 bp, Homo sapien
tatataaaagtccacacctcctcag

SEQ ID NO: 527519 - DNA, 25 bp, Homo sapien
tccagtgaggagctccatcgcttca

SEQ ID NO: 527520 - DNA, 25 bp, Homo sapien
tgtaggacactaagcgcaagcagga

SEQ ID NO: 527521 - DNA, 25 bp, Homo sapien
catcgcttcacaaccccatgtagga

SEQ ID NO: 527522 - DNA, 25 bp, Homo sapien
gctgcatgaggtcccggtatatcca

SEQ ID NO: 527523 - DNA, 25 bp, Homo sapien
gactgtggaggcagattctccctag

SEQ ID NO: 527524 - DNA, 25 bp, Homo sapien
tttcgcagcgagcaatgaaatgggt

SEQ ID NO: 527525 - DNA, 25 bp, Homo sapien
tagcacatcttctccgtctgttcag

SEQ ID NO: 527526 - DNA, 25 bp, Homo sapien
taatggcatatgtcagtctcacgtc

SEQ ID NO: 527527 - DNA, 25 bp, Homo sapien
aactgggcaagctgctcaggactgg

SEQ ID NO: 527528 - DNA, 25 bp, Homo sapien
gatttgctctttgaggacctccact

SEQ ID NO: 527529 - DNA, 25 bp, Homo sapien
tctctgaccgcatacatcaaatggc

SEQ ID NO: 527530 - DNA, 25 bp, Homo sapien
tggccagtgtcttcagcagattgtt

SEQ ID NO: 527531 - DNA, 25 bp, Homo sapien
tggatctccctaactatttacatat

SEQ ID NO: 527532 - DNA, 25 bp, Homo sapien
cagaaaaggtttaactcattatttg

SEQ ID NO: 527533 - DNA, 25 bp, Homo sapien
agacattattttacatggatctccc

SEQ ID NO: 527534 - DNA, 25 bp, Homo sapien
tattttacatggatctccctaacta

SEQ ID NO: 527535 - DNA, 25 bp, Homo sapien
aagttggttcaatgacacttgggga

SEQ ID NO: 527536 - DNA, 25 bp, Homo sapien
taaagttggttcaatgacacttggg

SEQ ID NO: 527537 - DNA, 25 bp, Homo sapien
ctttaaagttggttcaatgacactt

SEQ ID NO: 527538 - DNA, 25 bp, Homo sapien
ttaaagttggttcaatgacacttgg

SEQ ID NO: 527539 - DNA, 25 bp, Homo sapien
gctgggtccccgactgagaccagca

SEQ ID NO: 527540 - DNA, 25 bp, Homo sapien
agaaacgcccaagtaaggcttcctg

SEQ ID NO: 527541 - DNA, 25 bp, Homo sapien
agcagcggggacgtccaagccacag

SEQ ID NO: 527542 - DNA, 25 bp, Homo sapien
gagtttaacgtataaatgatcaagc

SEQ ID NO: 527543 - DNA, 25 bp, Homo sapien
agttggccagcgcttccctaataaa

SEQ ID NO: 527544 - DNA, 25 bp, Homo sapien
tggccagcgcttccctaataaatcc

SEQ ID NO: 527545 - DNA, 25 bp, Homo sapien
gaccagccgaaggagatagttggcc

SEQ ID NO: 527546 - DNA, 25 bp, Homo sapien
gagatagttggccagcgcttcccta

SEQ ID NO: 527547 - DNA, 25 bp, Homo sapien
ccgaatggagacagcgccggcattt

SEQ ID NO: 527548 - DNA, 25 bp, Homo sapien
gctccacgctggccgaatggagaca

SEQ ID NO: 527549 - DNA, 25 bp, Homo sapien
tgagaaaatcccgtcgtgtgaaacc

SEQ ID NO: 527550 - DNA, 25 bp, Homo sapien
gaagaccatttaatacccgcagggc

SEQ ID NO: 527551 - DNA, 25 bp, Homo sapien
gtgctgtgcccacatttagtataaa

SEQ ID NO: 527552 - DNA, 25 bp, Homo sapien
cttagggatgcactggttccacaaa

SEQ ID NO: 527553 - DNA, 25 bp, Homo sapien
ctgaacttagggatgcactggttcc

SEQ ID NO: 527554 - DNA, 25 bp, Homo sapien
ctacgcgcatcaagagcaatcatca

SEQ ID NO: 527555 - DNA, 25 bp, Homo sapien
gattttgttgtcaatagctaccaca

SEQ ID NO: 527556 - DNA, 25 bp, Homo sapien
tcaatagctaccacacttgcaccag

SEQ ID NO: 527557 - DNA, 25 bp, Homo sapien
tgttgtcaatagctaccacacttgc

SEQ ID NO: 527558 - DNA, 25 bp, Homo sapien
agctaccacacttgcaccagaggag

SEQ ID NO: 527559 - DNA, 25 bp, Homo sapien
ctattatcaagtctcacagaagcgt

SEQ ID NO: 527560 - DNA, 25 bp, Homo sapien
tattatcaagtctcacagaagcgtt

SEQ ID NO: 527561 - DNA, 25 bp, Homo sapien
tagatccatcgccactggtctacac

SEQ ID NO: 527562 - DNA, 25 bp, Homo sapien
gtctcagttggtaaactcctagatc

SEQ ID NO: 527563 - DNA, 25 bp, Homo sapien
gagaaacagaaaacggcagccctaa

SEQ ID NO: 527564 - DNA, 25 bp, Homo sapien
gatcccagtgccgtgaagaggcgct

SEQ ID NO: 527565 - DNA, 25 bp, Homo sapien
tctagggcttgatgatcccaggcag

SEQ ID NO: 527566 - DNA, 25 bp, Homo sapien
ctggctttccgcagcccagggagaa

SEQ ID NO: 527567 - DNA, 25 bp, Homo sapien
actgctgtctaaggactcccacgtc

SEQ ID NO: 527568 - DNA, 25 bp, Homo sapien
ctaaggactcccacgtcacctccat

SEQ ID NO: 527569 - DNA, 25 bp, Homo sapien
tgtctaaggactcccacgtcacctc

SEQ ID NO: 527570 - DNA, 25 bp, Homo sapien
tgctgtctaaggactcccacgtcac

SEQ ID NO: 527571 - DNA, 25 bp, Homo sapien
taaatgagatgaccaaatgcccacc

SEQ ID NO: 527572 - DNA, 25 bp, Homo sapien
caaacacagggactaggaacagaac

SEQ ID NO: 527573 - DNA, 25 bp, Homo sapien
ggaacagaaccactttgctggcagt

SEQ ID NO: 527574 - DNA, 25 bp, Homo sapien
gaaataggaaccaggaactcagata

SEQ ID NO: 527575 - DNA, 25 bp, Homo sapien
gttaaagatgtatgctataaactct

SEQ ID NO: 527576 - DNA, 25 bp, Homo sapien
tagcagatttaaaccaactgtatca

SEQ ID NO: 527577 - DNA, 25 bp, Homo sapien
aatctaataaagctaacacaggagg

SEQ ID NO: 527578 - DNA, 25 bp, Homo sapien
aaaatgaataccaagatagcagatt

SEQ ID NO: 527579 - DNA, 25 bp, Homo sapien
ggagactttaagaggaactactgca

SEQ ID NO: 527580 - DNA, 25 bp, Homo sapien
tcattgaggagacctaaaaatgcct

SEQ ID NO: 527581 - DNA, 25 bp, Homo sapien
tcaatgcccttcagcaacaggactc

SEQ ID NO: 527582 - DNA, 25 bp, Homo sapien
tctatttcgagaacctcatgcaagt

SEQ ID NO: 527583 - DNA, 25 bp, Homo sapien
tcccgacagagaaaggggctcacca

SEQ ID NO: 527584 - DNA, 25 bp, Homo sapien
cacattacttagtgaatgtgcctaa

SEQ ID NO: 527585 - DNA, 25 bp, Homo sapien
cttgctgacggacacattacttagt

SEQ ID NO: 527586 - DNA, 25 bp, Homo sapien
caaggtcccgacagagaaaggggct

SEQ ID NO: 527587 - DNA, 25 bp, Homo sapien
gaagaatgcggcatgaagccacacg

SEQ ID NO: 527588 - DNA, 25 bp, Homo sapien
taaggaagcctgctaccagagtgaa

SEQ ID NO: 527589 - DNA, 25 bp, Homo sapien
gaggatcaactgtgagatgaggcca

SEQ ID NO: 527590 - DNA, 25 bp, Homo sapien
aactggaaagcgatggaaatgggtc

SEQ ID NO: 527591 - DNA, 25 bp, Homo sapien
cgatcaccaataggacatccgccat

SEQ ID NO: 527592 - DNA, 25 bp, Homo sapien
gtatctatcccaccgatcaccaata

SEQ ID NO: 527593 - DNA, 25 bp, Homo sapien
gggccactgcatgcccgtatctatc

SEQ ID NO: 527594 - DNA, 25 bp, Homo sapien
gctgttggggccactgcatgcccgt

SEQ ID NO: 527595 - DNA, 25 bp, Homo sapien
caagtcagtcggctttggtacaggg

SEQ ID NO: 527596 - DNA, 25 bp, Homo sapien
aagatccaaactcaagtcagtcggc

SEQ ID NO: 527597 - DNA, 25 bp, Homo sapien
tggtacagggcatgactcaataatc

SEQ ID NO: 527598 - DNA, 25 bp, Homo sapien
tcggctttggtacagggcatgactc

SEQ ID NO: 527599 - DNA, 25 bp, Homo sapien
caactgaataactgagcaattgtat

SEQ ID NO: 527600 - DNA, 25 bp, Homo sapien
aataactgagcaattgtatctggaa

SEQ ID NO: 527601 - DNA, 25 bp, Homo sapien
actgaataactgagcaattgtatct

SEQ ID NO: 527602 - DNA, 25 bp, Homo sapien
tgaataactgagcaattgtatctgg

SEQ ID NO: 527603 - DNA, 25 bp, Homo sapien
cactagactataggaaaagcttcac

SEQ ID NO: 527604 - DNA, 25 bp, Homo sapien
taggaaaagcttcacgctacagact

SEQ ID NO: 527605 - DNA, 25 bp, Homo sapien
ggattatcactagactataggaaaa

SEQ ID NO: 527606 - DNA, 25 bp, Homo sapien
cacgctacagactatggtggctttc

SEQ ID NO: 527607 - DNA, 25 bp, Homo sapien
tttcgtcttgatcccaaaatcagga

SEQ ID NO: 527608 - DNA, 25 bp, Homo sapien
ttttcattcccagtacaataaggcc

SEQ ID NO: 527609 - DNA, 25 bp, Homo sapien
gacacacttatgtcagaggtgaaaa

SEQ ID NO: 527610 - DNA, 25 bp, Homo sapien
gaagcctcagaaatgtagaaacgag

SEQ ID NO: 527611 - DNA, 25 bp, Homo sapien
ggtgcatgccaccaattttttaatt

SEQ ID NO: 527612 - DNA, 25 bp, Homo sapien
aagaacacagaagtattaacactat

SEQ ID NO: 527613 - DNA, 25 bp, Homo sapien
gaacacagaagtattaacactattt

SEQ ID NO: 527614 - DNA, 25 bp, Homo sapien
agaacacagaagtattaacactatt

SEQ ID NO: 527615 - DNA, 25 bp, Homo sapien
tattgaactccacacactaagtact

SEQ ID NO: 527616 - DNA, 25 bp, Homo sapien
caggcttggaacctggcagtctgat

SEQ ID NO: 527617 - DNA, 25 bp, Homo sapien
cagtctgatgccagagtgtatatgc

SEQ ID NO: 527618 - DNA, 25 bp, Homo sapien
tcctcatgataactctaactttgtt

SEQ ID NO: 527619 - DNA, 25 bp, Homo sapien
gacaaaaagtaagtactggccacca

SEQ ID NO: 527620 - DNA, 25 bp, Homo sapien
ttgaatgcggcctaactcgtgaact

SEQ ID NO: 527621 - DNA, 25 bp, Homo sapien
tggccctaggagcagatccaatgaa

SEQ ID NO: 527622 - DNA, 25 bp, Homo sapien
gattggacacccctactctaaacag

SEQ ID NO: 527623 - DNA, 25 bp, Homo sapien
tagcaataataacaaagtcggtggg

SEQ ID NO: 527624 - DNA, 25 bp, Homo sapien
caattatacttcttaagatgtcaca

SEQ ID NO: 527625 - DNA, 25 bp, Homo sapien
tcctagaatgtgcaatgggccatac

SEQ ID NO: 527626 - DNA, 25 bp, Homo sapien
tatggaaacacgtgcatgttagtaa

SEQ ID NO: 527627 - DNA, 25 bp, Homo sapien
ctactttaacaagaattatgggccg

SEQ ID NO: 527628 - DNA, 25 bp, Homo sapien
ttgtaggaaatttgccattgctact

SEQ ID NO: 527629 - DNA, 25 bp, Homo sapien
ggaaatttgccattgctactttaac

SEQ ID NO: 527630 - DNA, 25 bp, Homo sapien
ttgctactttaacaagaattatggg

SEQ ID NO: 527631 - DNA, 25 bp, Homo sapien
agaaattataggaaactctcttgat

SEQ ID NO: 527632 - DNA, 25 bp, Homo sapien
aattataggaaactctcttgatgac

SEQ ID NO: 527633 - DNA, 25 bp, Homo sapien
agatgtcttaaacccaagaattgct

SEQ ID NO: 527634 - DNA, 25 bp, Homo sapien
ataggaaactctcttgatgacattg

SEQ ID NO: 527635 - DNA, 25 bp, Homo sapien
tcagagtgccatataattcagcatg

SEQ ID NO: 527636 - DNA, 25 bp, Homo sapien
tacgacagcacaaagagggatcctt

SEQ ID NO: 527637 - DNA, 25 bp, Homo sapien
agcatgataaatgcctaccacaggg

SEQ ID NO: 527638 - DNA, 25 bp, Homo sapien
tgcaacccctcagactgaagaagat

SEQ ID NO: 527639 - DNA, 25 bp, Homo sapien
tgctgctgcaaaatagaggtaaaca

SEQ ID NO: 527640 - DNA, 25 bp, Homo sapien
tcctccagcgttggcctccaagtgt

SEQ ID NO: 527641 - DNA, 25 bp, Homo sapien
aagaagttaaacatctcagaagtgc

SEQ ID NO: 527642 - DNA, 25 bp, Homo sapien
aacaaacgacagtcacaaaaggtat

SEQ ID NO: 527643 - DNA, 25 bp, Homo sapien
tacttaatatgtagaagacttgggc

SEQ ID NO: 527644 - DNA, 25 bp, Homo sapien
tcacatttgaaagggatcagacttg

SEQ ID NO: 527645 - DNA, 25 bp, Homo sapien
ttgctctgtcgtctcaaactaggat

SEQ ID NO: 527646 - DNA, 25 bp, Homo sapien
acttgggcttggaattgatgggaaa

SEQ ID NO: 527647 - DNA, 25 bp, Homo sapien
taataagcctcaagaccagcgaaga

SEQ ID NO: 527648 - DNA, 25 bp, Homo sapien
tcacaggccacacaaagcggtttct

SEQ ID NO: 527649 - DNA, 25 bp, Homo sapien
caagtcgggagtaaaagctgtaatc

SEQ ID NO: 527650 - DNA, 25 bp, Homo sapien
actgcaggtgctggcatgtgtgaca

SEQ ID NO: 527651 - DNA, 25 bp, Homo sapien
tatcaagatacctggagtcacagaa

SEQ ID NO: 527652 - DNA, 25 bp, Homo sapien
atcaagatacctggagtcacagaag

SEQ ID NO: 527653 - DNA, 25 bp, Homo sapien
gccaaaggtaacaagttcacattct

SEQ ID NO: 527654 - DNA, 25 bp, Homo sapien
acttgccaaaggtaacaagttcaca

SEQ ID NO: 527655 - DNA, 25 bp, Homo sapien
gaagctggatattctgtctccaagg

SEQ ID NO: 527656 - DNA, 25 bp, Homo sapien
cctgacgtcaaaagctctccgtggt

SEQ ID NO: 527657 - DNA, 25 bp, Homo sapien
gcacctctggtaggagagaagcact

SEQ ID NO: 527658 - DNA, 25 bp, Homo sapien
tggagaaagtggacccctgacgtca

SEQ ID NO: 527659 - DNA, 25 bp, Homo sapien
ggtctaagccataacacactctgtg

SEQ ID NO: 527660 - DNA, 25 bp, Homo sapien
gaagggacctgtattggtctaagcc

SEQ ID NO: 527661 - DNA, 25 bp, Homo sapien
tattaagaagggacctgtattggtc

SEQ ID NO: 527662 - DNA, 25 bp, Homo sapien
cactcaactctgagtggaagaccaa

SEQ ID NO: 527663 - DNA, 25 bp, Homo sapien
ctaaatataaaggtgctgcgtatcc

SEQ ID NO: 527664 - DNA, 25 bp, Homo sapien
tctacggagtacagtcagtcacagt

SEQ ID NO: 527665 - DNA, 25 bp, Homo sapien
cagggactgcaggataaattttaac

SEQ ID NO: 527666 - DNA, 25 bp, Homo sapien
tcataccaactagttatcacaaggg

SEQ ID NO: 527667 - DNA, 25 bp, Homo sapien
gttagtggaacgaggattgtgttct

SEQ ID NO: 527668 - DNA, 25 bp, Homo sapien
ttagtggaacgaggattgtgttctc

SEQ ID NO: 527669 - DNA, 25 bp, Homo sapien
tgttagtggaacgaggattgtgttc

SEQ ID NO: 527670 - DNA, 25 bp, Homo sapien
cggtagcaaccaaccaaagttagtg

SEQ ID NO: 527671 - DNA, 25 bp, Homo sapien
taaaatcagtacgttggagctatct

SEQ ID NO: 527672 - DNA, 25 bp, Homo sapien
gagaaatgacagtttggcctaagta

SEQ ID NO: 527673 - DNA, 25 bp, Homo sapien
tagtctcagcactaagacggtagca

SEQ ID NO: 527674 - DNA, 25 bp, Homo sapien
ctttacgttaaatgcatccaaatct

SEQ ID NO: 527675 - DNA, 25 bp, Homo sapien
caggaactttacgttaaatgcatcc

SEQ ID NO: 527676 - DNA, 25 bp, Homo sapien
caacaggaactttacgttaaatgca

SEQ ID NO: 527677 - DNA, 25 bp, Homo sapien
gaactttacgttaaatgcatccaaa

SEQ ID NO: 527678 - DNA, 25 bp, Homo sapien
ccagtttgactctaggactctgagg

SEQ ID NO: 527679 - DNA, 25 bp, Homo sapien
tagttacgggtacaatcacggcaca

SEQ ID NO: 527680 - DNA, 25 bp, Homo sapien
cctaagatcacatgtctagtaaaga

SEQ ID NO: 527681 - DNA, 25 bp, Homo sapien
acaggaacttgccactgtgtgcatt

SEQ ID NO: 527682 - DNA, 25 bp, Homo sapien
cctctggattaagtggagtgttacc

SEQ ID NO: 527683 - DNA, 25 bp, Homo sapien
gttaccatatgtggactgggtccta

SEQ ID NO: 527684 - DNA, 25 bp, Homo sapien
cagctggtttaacctctggattaag

SEQ ID NO: 527685 - DNA, 25 bp, Homo sapien
agtgttaccatatgtggactgggtc

SEQ ID NO: 527686 - DNA, 25 bp, Homo sapien
cgaataaacattagtattgtggctc

SEQ ID NO: 527687 - DNA, 25 bp, Homo sapien
agccaccaagtccagaccaaaaaat

SEQ ID NO: 527688 - DNA, 25 bp, Homo sapien
tgcaaaagggcaccaacaaagaacc

SEQ ID NO: 527689 - DNA, 25 bp, Homo sapien
tgaaaatgacaacgtgcaaaagggc

SEQ ID NO: 527690 - DNA, 25 bp, Homo sapien
gaaggcactttccacatgtctaaac

SEQ ID NO: 527691 - DNA, 25 bp, Homo sapien
cacggcctgacattaagacctttta

SEQ ID NO: 527692 - DNA, 25 bp, Homo sapien
tatagtctctcccagtgatcaactg

SEQ ID NO: 527693 - DNA, 25 bp, Homo sapien
tcctgagactaatggtgaccaagcc

SEQ ID NO: 527694 - DNA, 25 bp, Homo sapien
gaactcctggtcttgtgggagagac

SEQ ID NO: 527695 - DNA, 25 bp, Homo sapien
gatcttacaaggtgttttagggcta

SEQ ID NO: 527696 - DNA, 25 bp, Homo sapien
tcacagaatttaagataccgctaaa

SEQ ID NO: 527697 - DNA, 25 bp, Homo sapien
ttagggctacattccgatttcacag

SEQ ID NO: 527698 - DNA, 25 bp, Homo sapien
gggcaagctgtggaaaatcctatca

SEQ ID NO: 527699 - DNA, 25 bp, Homo sapien
caatctacgtgaaaaaacgcttggt

SEQ ID NO: 527700 - DNA, 25 bp, Homo sapien
gaggtgaaagtcaagccaggagacc

SEQ ID NO: 527701 - DNA, 25 bp, Homo sapien
ccaggagaccacaaatggcaattac

SEQ ID NO: 527702 - DNA, 25 bp, Homo sapien
tatgagggcaacctatataacccag

SEQ ID NO: 527703 - DNA, 25 bp, Homo sapien
tatctgactaggaaaagtaggcaac

SEQ ID NO: 527704 - DNA, 25 bp, Homo sapien
cattaaataagtacgcaaaagttgg

SEQ ID NO: 527705 - DNA, 25 bp, Homo sapien
aaatggctaccaccttgatctacca

SEQ ID NO: 527706 - DNA, 25 bp, Homo sapien
cacttgcgaagatggaggagcaccc

SEQ ID NO: 527707 - DNA, 25 bp, Homo sapien
tcagcggtagcaccttcaacgggaa

SEQ ID NO: 527708 - DNA, 25 bp, Homo sapien
cactgatagtctgaggtaagccaac

SEQ ID NO: 527709 - DNA, 25 bp, Homo sapien
catttacaggcgatggctggatacc

SEQ ID NO: 527710 - DNA, 25 bp, Homo sapien
gttcttgagactgtaattgtacttg

SEQ ID NO: 527711 - DNA, 25 bp, Homo sapien
ttgagactgtaattgtacttgtgag

SEQ ID NO: 527712 - DNA, 25 bp, Homo sapien
tcagttcttgagactgtaattgtac

SEQ ID NO: 527713 - DNA, 25 bp, Homo sapien
tcttgagactgtaattgtacttgtg

SEQ ID NO: 527714 - DNA, 25 bp, Homo sapien
gtggaccagtgctaccaaaatccat

SEQ ID NO: 527715 - DNA, 25 bp, Homo sapien
tactaactgctggaatactctgtgg

SEQ ID NO: 527716 - DNA, 25 bp, Homo sapien
aaatactctgtggtatactaactgc

SEQ ID NO: 527717 - DNA, 25 bp, Homo sapien
tgctggaatactctgtggaccagtg

SEQ ID NO: 527718 - DNA, 25 bp, Homo sapien
ctgttggagggtcacaccttggaga

SEQ ID NO: 527719 - DNA, 25 bp, Homo sapien
tgttggagggtcacaccttggagag

SEQ ID NO: 527720 - DNA, 25 bp, Homo sapien
ttgttgttgttgctgctgctgctgc

SEQ ID NO: 527721 - DNA, 25 bp, Homo sapien
ttgttgttgttgttgctgctgctgc

SEQ ID NO: 527722 - DNA, 25 bp, Homo sapien
tgttgttgttgttgctgctgctgct

SEQ ID NO: 527723 - DNA, 25 bp, Homo sapien
ctggttgttgctgttgttgttgttg

SEQ ID NO: 527724 - DNA, 25 bp, Homo sapien
gaagtcacttctatcggattttgct

SEQ ID NO: 527725 - DNA, 25 bp, Homo sapien
gattttgctttacagtctccaccac

SEQ ID NO: 527726 - DNA, 25 bp, Homo sapien
gctgacactactgctcactgaactc

SEQ ID NO: 527727 - DNA, 25 bp, Homo sapien
ctctctgtatagtgactcagtgtgc

SEQ ID NO: 527728 - DNA, 25 bp, Homo sapien
cacctgtagtacttggagcacgcat

SEQ ID NO: 527729 - DNA, 25 bp, Homo sapien
tgctgctgacttgaaaccgatcccc

SEQ ID NO: 527730 - DNA, 25 bp, Homo sapien
gaagaaatagtaccattgcccatgc

SEQ ID NO: 527731 - DNA, 25 bp, Homo sapien
tacagatgcaggtgaaccactggat

SEQ ID NO: 527732 - DNA, 25 bp, Homo sapien
tgggcttgagggtggcccaccagta

SEQ ID NO: 527733 - DNA, 25 bp, Homo sapien
gagggtggcccaccagtaatggatg

SEQ ID NO: 527734 - DNA, 25 bp, Homo sapien
ggcttgagggtggcccaccagtaat

SEQ ID NO: 527735 - DNA, 25 bp, Homo sapien
gggtggcccaccagtaatggatgca

SEQ ID NO: 527736 - DNA, 25 bp, Homo sapien
tcccctaagtcagtagccctggaaa

SEQ ID NO: 527737 - DNA, 25 bp, Homo sapien
ggtggtgcccatgatgaatctgatg

SEQ ID NO: 527738 - DNA, 25 bp, Homo sapien
caggtgtctcggcttcctggaagtt

SEQ ID NO: 527739 - DNA, 25 bp, Homo sapien
tcttctgaggagctgcgttcgggct

SEQ ID NO: 527740 - DNA, 25 bp, Homo sapien
catcaaggatctccgaagaagagag

SEQ ID NO: 527741 - DNA, 25 bp, Homo sapien
gagatcttccgtgtgagattcatcc

SEQ ID NO: 527742 - DNA, 25 bp, Homo sapien
gtgtcctctgctatactgttgttag

SEQ ID NO: 527743 - DNA, 25 bp, Homo sapien
cagatcatcatagctctcagtgtcc

SEQ ID NO: 527744 - DNA, 25 bp, Homo sapien
tgtggtcccgacgtagaagatgctg

SEQ ID NO: 527745 - DNA, 25 bp, Homo sapien
tttcatttgagttccgcctggcgca

SEQ ID NO: 527746 - DNA, 25 bp, Homo sapien
gaagatgtggcattactaccgacgc

SEQ ID NO: 527747 - DNA, 25 bp, Homo sapien
agcagcgacggaggcggaaaatcct

SEQ ID NO: 527748 - DNA, 25 bp, Homo sapien
cggaggagacgagtgcaatttcctt

SEQ ID NO: 527749 - DNA, 25 bp, Homo sapien
cgcggaggagacgagtgcaatttcc

SEQ ID NO: 527750 - DNA, 25 bp, Homo sapien
gcggaggagacgagtgcaatttcct

SEQ ID NO: 527751 - DNA, 25 bp, Homo sapien
ggcgcggaggagacgagtgcaattt

SEQ ID NO: 527752 - DNA, 25 bp, Homo sapien
tccgcctggcgcgattcctccttct

SEQ ID NO: 527753 - DNA, 25 bp, Homo sapien
gctccgcctggcgcgattcctcctt

SEQ ID NO: 527754 - DNA, 25 bp, Homo sapien
cgggacctgacgctccgcctggcgc

SEQ ID NO: 527755 - DNA, 25 bp, Homo sapien
aaaacgggacctgacgctccgcctg

SEQ ID NO: 527756 - DNA, 25 bp, Homo sapien
ccggtcgctcctgccttcgagagcg

SEQ ID NO: 527757 - DNA, 25 bp, Homo sapien
tcagccaaaggcgccggtcgctcct

SEQ ID NO: 527758 - DNA, 25 bp, Homo sapien
aaaggcgccggtcgctcctgccttc

SEQ ID NO: 527759 - DNA, 25 bp, Homo sapien
ggtcgctcctgccttcgagagcgag

SEQ ID NO: 527760 - DNA, 25 bp, Homo sapien
ggcagcgccaagcaaatgtcgcctt

SEQ ID NO: 527761 - DNA, 25 bp, Homo sapien
tatattctgcttcacgtggggtgcg

SEQ ID NO: 527762 - DNA, 25 bp, Homo sapien
atgaacgagggtgaacagggcggcc

SEQ ID NO: 527763 - DNA, 25 bp, Homo sapien
cccgagctcagtgtcgctcaaacct

SEQ ID NO: 527764 - DNA, 25 bp, Homo sapien
gggtgcgaccctctcttatcctctt

SEQ ID NO: 527765 - DNA, 25 bp, Homo sapien
tacggtgagcccagcaacgaggcgc

SEQ ID NO: 527766 - DNA, 25 bp, Homo sapien
tttctccgcggcgttggtggccaga

SEQ ID NO: 527767 - DNA, 25 bp, Homo sapien
gcagccgacgccgttcaaaggaacg

SEQ ID NO: 527768 - DNA, 25 bp, Homo sapien
tggggtctatggaaggccggtggct

SEQ ID NO: 527769 - DNA, 25 bp, Homo sapien
cggtggctcccggtgataggtgttg

SEQ ID NO: 527770 - DNA, 25 bp, Homo sapien
tgtggggtctatggaaggccggtgg

SEQ ID NO: 527771 - DNA, 25 bp, Homo sapien
ggtggctcccggtgataggtgttgt

SEQ ID NO: 527772 - DNA, 25 bp, Homo sapien
acgcctttttcgttcatcgtcctgg

SEQ ID NO: 527773 - DNA, 25 bp, Homo sapien
cccattggtttgactcaggaggcaa

SEQ ID NO: 527774 - DNA, 25 bp, Homo sapien
tcctggctatatcccccattggttt

SEQ ID NO: 527775 - DNA, 25 bp, Homo sapien
caacaggtgtctccaagcagcgacg

SEQ ID NO: 527776 - DNA, 25 bp, Homo sapien
taggctctcgcaaatattcaaagtg

SEQ ID NO: 527777 - DNA, 25 bp, Homo sapien
ccatttatccagtgtcaaagctatg

SEQ ID NO: 527778 - DNA, 25 bp, Homo sapien
cctctgctagaagtaaataggctct

SEQ ID NO: 527779 - DNA, 25 bp, Homo sapien
tagaagtgcactcttaacatcccat

SEQ ID NO: 527780 - DNA, 25 bp, Homo sapien
taattaaggaatgggtcttctctga

SEQ ID NO: 527781 - DNA, 25 bp, Homo sapien
aattaagcatgtaaaacctggctcc

SEQ ID NO: 527782 - DNA, 25 bp, Homo sapien
tcgtctacatctaaatgcctccagg

SEQ ID NO: 527783 - DNA, 25 bp, Homo sapien
tatgagctggctacagtaactggta

SEQ ID NO: 527784 - DNA, 25 bp, Homo sapien
cgcctggccaaaaagcgcaaaaatg

SEQ ID NO: 527785 - DNA, 25 bp, Homo sapien
tatttgccaataagaaaaacaggct

SEQ ID NO: 527786 - DNA, 25 bp, Homo sapien
caggctcagcatgttaaaatattga

SEQ ID NO: 527787 - DNA, 25 bp, Homo sapien
tacagaactacagaaaagtgtagtt

SEQ ID NO: 527788 - DNA, 25 bp, Homo sapien
gacaattgaggtggtacagttctga

SEQ ID NO: 527789 - DNA, 25 bp, Homo sapien
tgtcactggactgttctgaagggcg

SEQ ID NO: 527790 - DNA, 25 bp, Homo sapien
tactcaactgccaacacagaactgg

SEQ ID NO: 527791 - DNA, 25 bp, Homo sapien
cacttgcagcaggattaggattgaa

SEQ ID NO: 527792 - DNA, 25 bp, Homo sapien
tttctgcccctttaatttattctgc

SEQ ID NO: 527793 - DNA, 25 bp, Homo sapien
gaccccatggctttagtttctgccc

SEQ ID NO: 527794 - DNA, 25 bp, Homo sapien
tttttatcccctttgccgccatcat

SEQ ID NO: 527795 - DNA, 25 bp, Homo sapien
ccgccatcatattttggtccttcta

SEQ ID NO: 527796 - DNA, 25 bp, Homo sapien
acacatgtgtgaaacacccaaccat

SEQ ID NO: 527797 - DNA, 25 bp, Homo sapien
atgtgtgaaacacccaaccatcatc

SEQ ID NO: 527798 - DNA, 25 bp, Homo sapien
tttcacacacatgtgtgaaacaccc

SEQ ID NO: 527799 - DNA, 25 bp, Homo sapien
gggtggtacatttcacacacatgtg

SEQ ID NO: 527800 - DNA, 25 bp, Homo sapien
gcctgaacaatcaaatcaataccca

SEQ ID NO: 527801 - DNA, 25 bp, Homo sapien
tcatccgcctgaacaatcaaatcaa

SEQ ID NO: 527802 - DNA, 25 bp, Homo sapien
ttaatcatccgcctgaacaatcaaa

SEQ ID NO: 527803 - DNA, 25 bp, Homo sapien
caaatcaatacccatgacctttcct

SEQ ID NO: 527804 - DNA, 25 bp, Homo sapien
gtagcactccggcttgcctctaagc

SEQ ID NO: 527805 - DNA, 25 bp, Homo sapien
gctgagggtcccctatctgaagtct

SEQ ID NO: 527806 - DNA, 25 bp, Homo sapien
tctgggtgtcttcctctagaaagcc

SEQ ID NO: 527807 - DNA, 25 bp, Homo sapien
aaagccctccttgcacttctgtcgg

SEQ ID NO: 527808 - DNA, 25 bp, Homo sapien
gactctctgctttgaagtgcctgcc

SEQ ID NO: 527809 - DNA, 25 bp, Homo sapien
catggaatcagagtccaggtccttt

SEQ ID NO: 527810 - DNA, 25 bp, Homo sapien
tagagctcatctagaccatgtgttt

SEQ ID NO: 527811 - DNA, 25 bp, Homo sapien
ccgagtttgcggtggcatggaatca

SEQ ID NO: 527812 - DNA, 25 bp, Homo sapien
ggaagcaggagcttcacatgaacag

SEQ ID NO: 527813 - DNA, 25 bp, Homo sapien
gaagcaggagcttcacatgaacagc

SEQ ID NO: 527814 - DNA, 25 bp, Homo sapien
aagagaacatcagagcttgcaaaaa

SEQ ID NO: 527815 - DNA, 25 bp, Homo sapien
tatagcttaacttagggtttataca

SEQ ID NO: 527816 - DNA, 25 bp, Homo sapien
ctgtgcaatgcatgtccaagaagga

SEQ ID NO: 527817 - DNA, 25 bp, Homo sapien
tctgctctgtgcaatgcatgtccaa

SEQ ID NO: 527818 - DNA, 25 bp, Homo sapien
gctctgtgcaatgcatgtccaagaa

SEQ ID NO: 527819 - DNA, 25 bp, Homo sapien
tgttctgctctgtgcaatgcatgtc

SEQ ID NO: 527820 - DNA, 25 bp, Homo sapien
tagtctgaatatatacatccatgtc

SEQ ID NO: 527821 - DNA, 25 bp, Homo sapien
tatacatccatgtcagcagcacggc

SEQ ID NO: 527822 - DNA, 25 bp, Homo sapien
accatagagccaggtgctaatgctg

SEQ ID NO: 527823 - DNA, 25 bp, Homo sapien
aatgctggtcttacggaattcaggg

SEQ ID NO: 527824 - DNA, 25 bp, Homo sapien
ctttcttactttgacaatgaccaat

SEQ ID NO: 527825 - DNA, 25 bp, Homo sapien
ttctcccatcctaggccacactgtt

SEQ ID NO: 527826 - DNA, 25 bp, Homo sapien
tcccatcctaggccacactgttgca

SEQ ID NO: 527827 - DNA, 25 bp, Homo sapien
tctttcttactttgacaatgaccaa

SEQ ID NO: 527828 - DNA, 25 bp, Homo sapien
ccgtggttgtaggagaagagataaa

SEQ ID NO: 527829 - DNA, 25 bp, Homo sapien
ggttgtaggagaagagataaacaca

SEQ ID NO: 527830 - DNA, 25 bp, Homo sapien
tgccctctagaaccgtggttgtagg

SEQ ID NO: 527831 - DNA, 25 bp, Homo sapien
ctagaaccgtggttgtaggagaaga

SEQ ID NO: 527832 - DNA, 25 bp, Homo sapien
ttttgcaataggaaactcttgcaca

SEQ ID NO: 527833 - DNA, 25 bp, Homo sapien
tttgcaataggaaactcttgcacat

SEQ ID NO: 527834 - DNA, 25 bp, Homo sapien
tttttgcaataggaaactcttgcac

SEQ ID NO: 527835 - DNA, 25 bp, Homo sapien
ggcaatgaggatcttcctgtaagtg

SEQ ID NO: 527836 - DNA, 25 bp, Homo sapien
ttttctgcaggacgtttgaggctcc

SEQ ID NO: 527837 - DNA, 25 bp, Homo sapien
taagtgtttgagttagggtttggca

SEQ ID NO: 527838 - DNA, 25 bp, Homo sapien
ctgtaagtgtttgagttagggtttg

SEQ ID NO: 527839 - DNA, 25 bp, Homo sapien
agtggcatgcactctacttagggaa

SEQ ID NO: 527840 - DNA, 25 bp, Homo sapien
aaaatattgatgtaccaccagtggc

SEQ ID NO: 527841 - DNA, 25 bp, Homo sapien
tggacacggtgatgcatccagctac

SEQ ID NO: 527842 - DNA, 25 bp, Homo sapien
cagccagtttttaccgcaagccagg

SEQ ID NO: 527843 - DNA, 25 bp, Homo sapien
ggcagagtggcaggtcgacatttct

SEQ ID NO: 527844 - DNA, 25 bp, Homo sapien
tcgaggtgtccccaaggtgtttctg

SEQ ID NO: 527845 - DNA, 25 bp, Homo sapien
ggtactgccaaatgcacctcagtgg

SEQ ID NO: 527846 - DNA, 25 bp, Homo sapien
gaggcacttcatgctgacccgaaaa

SEQ ID NO: 527847 - DNA, 25 bp, Homo sapien
gacccatgaagctgacacgaagaga

SEQ ID NO: 527848 - DNA, 25 bp, Homo sapien
catgaagctgacacgaagagaggag

SEQ ID NO: 527849 - DNA, 25 bp, Homo sapien
gctgacacgaagagaggaggatgcc

SEQ ID NO: 527850 - DNA, 25 bp, Homo sapien
gagacccatgaagctgacacgaaga

SEQ ID NO: 527851 - DNA, 25 bp, Homo sapien
gaagtaggctctactgggcccttaa

SEQ ID NO: 527852 - DNA, 25 bp, Homo sapien
gccacagtacctggcagaaaagaaa

SEQ ID NO: 527853 - DNA, 25 bp, Homo sapien
gatgcacagtcccaatctacctagg

SEQ ID NO: 527854 - DNA, 25 bp, Homo sapien
ggaatttcaaacagttcaccatggt

SEQ ID NO: 527855 - DNA, 25 bp, Homo sapien
aacccaatctggagaagaaagcaga

SEQ ID NO: 527856 - DNA, 25 bp, Homo sapien
gagagctctcccagtatggaaatga

SEQ ID NO: 527857 - DNA, 25 bp, Homo sapien
ggtgtactgagcatctgaggtctcc

SEQ ID NO: 527858 - DNA, 25 bp, Homo sapien
taggtggtatcaactacagctaggg

SEQ ID NO: 527859 - DNA, 25 bp, Homo sapien
tggtgggctccgtggttgaggaagc

SEQ ID NO: 527860 - DNA, 25 bp, Homo sapien
ggtgggctccgtggttgaggaagca

SEQ ID NO: 527861 - DNA, 25 bp, Homo sapien
gatcaatcccagtatggttttgtct

SEQ ID NO: 527862 - DNA, 25 bp, Homo sapien
aatcccagtatggttttgtcttctg

SEQ ID NO: 527863 - DNA, 25 bp, Homo sapien
tcagtatggcctttagggttttcaa

SEQ ID NO: 527864 - DNA, 25 bp, Homo sapien
gggtgtgcatgttttcagtatggcc

SEQ ID NO: 527865 - DNA, 25 bp, Homo sapien
cggcctccagatcatcttcttgtgg

SEQ ID NO: 527866 - DNA, 25 bp, Homo sapien
tcgggctgcgtgacggcctccagat

SEQ ID NO: 527867 - DNA, 25 bp, Homo sapien
ctcagtggtctcactgtatgggaaa

SEQ ID NO: 527868 - DNA, 25 bp, Homo sapien
taaggcttgagtgagtagccacact

SEQ ID NO: 527869 - DNA, 25 bp, Homo sapien
ggtctcactgtatgggaaagattct

SEQ ID NO: 527870 - DNA, 25 bp, Homo sapien
gaagtgaaatgaagctgagtaaggc

SEQ ID NO: 527871 - DNA, 25 bp, Homo sapien
cagtggctaacacagcacggtggtc

SEQ ID NO: 527872 - DNA, 25 bp, Homo sapien
cacaggatacttggatagcaggcag

SEQ ID NO: 527873 - DNA, 25 bp, Homo sapien
tagtgttgcccacaagagaaaagcc

SEQ ID NO: 527874 - DNA, 25 bp, Homo sapien
tatgtcaccgtgtcatcaaggctgg

SEQ ID NO: 527875 - DNA, 25 bp, Homo sapien
ttaatggttccgcttctctgatcaa

SEQ ID NO: 527876 - DNA, 25 bp, Homo sapien
tctgatcaaaccctgattatgccca

SEQ ID NO: 527877 - DNA, 25 bp, Homo sapien
gcatcagggctaacccgtggaataa

SEQ ID NO: 527878 - DNA, 25 bp, Homo sapien
cagattcaagaagcaacagccctgc

SEQ ID NO: 527879 - DNA, 25 bp, Homo sapien
ccagattcttcaaggatgggccaag

SEQ ID NO: 527880 - DNA, 25 bp, Homo sapien
tccctttgggttcatcaatgttcag

SEQ ID NO: 527881 - DNA, 25 bp, Homo sapien
atgccccaaaccagtgagccaaggt

SEQ ID NO: 527882 - DNA, 25 bp, Homo sapien
gggccaagatcagattccaacatca

SEQ ID NO: 527883 - DNA, 25 bp, Homo sapien
agagcttctcattcggcattttaac

SEQ ID NO: 527884 - DNA, 25 bp, Homo sapien
ctgacccactgggatggaagattgt

SEQ ID NO: 527885 - DNA, 25 bp, Homo sapien
gagcttctcattcggcattttaaca

SEQ ID NO: 527886 - DNA, 25 bp, Homo sapien
cccactgggatggaagattgtctca

SEQ ID NO: 527887 - DNA, 25 bp, Homo sapien
ttgggttggagtagcaccagttcac

SEQ ID NO: 527888 - DNA, 25 bp, Homo sapien
catttgtcggacacaaatgctgctc

SEQ ID NO: 527889 - DNA, 25 bp, Homo sapien
tcatttgtcggacacaaatgctgct

SEQ ID NO: 527890 - DNA, 25 bp, Homo sapien
tggagtagcaccagttcaccactgc

SEQ ID NO: 527891 - DNA, 25 bp, Homo sapien
taggttccaggagccagcgttattg

SEQ ID NO: 527892 - DNA, 25 bp, Homo sapien
atgctcttcagagcctgatcatccc

SEQ ID NO: 527893 - DNA, 25 bp, Homo sapien
cctgatcatcccacatgtcggcggg

SEQ ID NO: 527894 - DNA, 25 bp, Homo sapien
cagcgttattggtgttggaagggca

SEQ ID NO: 527895 - DNA, 25 bp, Homo sapien
ctgggaattcttgaatctcatgatg

SEQ ID NO: 527896 - DNA, 25 bp, Homo sapien
tgcctacacaacgtgacactaaatt

SEQ ID NO: 527897 - DNA, 25 bp, Homo sapien
caacgtgacactaaatttctgggaa

SEQ ID NO: 527898 - DNA, 25 bp, Homo sapien
gatgtccatccatgacttcaggcac

SEQ ID NO: 527899 - DNA, 25 bp, Homo sapien
cgactgccggtggaccttcatgcat

SEQ ID NO: 527900 - DNA, 25 bp, Homo sapien
ttggctgattcgactgccggtggac

SEQ ID NO: 527901 - DNA, 25 bp, Homo sapien
ttgtgctttggctgattcgactgcc

SEQ ID NO: 527902 - DNA, 25 bp, Homo sapien
gctgattcgactgccggtggacctt

SEQ ID NO: 527903 - DNA, 25 bp, Homo sapien
ttcctcttgtcgtgtgctctggaga

SEQ ID NO: 527904 - DNA, 25 bp, Homo sapien
agattgtgaggtaaagttgctcggg

SEQ ID NO: 527905 - DNA, 25 bp, Homo sapien
ttgtcgtgtgctctggagaccctgt

SEQ ID NO: 527906 - DNA, 25 bp, Homo sapien
agatgcagccgttccaatgagattg

SEQ ID NO: 527907 - DNA, 25 bp, Homo sapien
gtgaccagccatctatccgtactgt

SEQ ID NO: 527908 - DNA, 25 bp, Homo sapien
gagtgaccagccatctatccgtact

SEQ ID NO: 527909 - DNA, 25 bp, Homo sapien
tgagagtgaccagccatctatccgt

SEQ ID NO: 527910 - DNA, 25 bp, Homo sapien
cacttgagagtgaccagccatctat

SEQ ID NO: 527911 - DNA, 25 bp, Homo sapien
tgaatcttcgcaccgtccctaggta

SEQ ID NO: 527912 - DNA, 25 bp, Homo sapien
cactttcggatatgagtattgtgga

SEQ ID NO: 527913 - DNA, 25 bp, Homo sapien
gaaagcgtggtctggtataagatcg

SEQ ID NO: 527914 - DNA, 25 bp, Homo sapien
gaaccaatgttgagtgtcaccgatg

SEQ ID NO: 527915 - DNA, 25 bp, Homo sapien
ccaggggccctgtctgatctatcca

SEQ ID NO: 527916 - DNA, 25 bp, Homo sapien
gatctatccaactcctgctggcagg

SEQ ID NO: 527917 - DNA, 25 bp, Homo sapien
ctctgcctgccacgttctgaagtca

SEQ ID NO: 527918 - DNA, 25 bp, Homo sapien
tctgaagtcacaaaactgtgcagcc

SEQ ID NO: 527919 - DNA, 25 bp, Homo sapien
ggagggggtagtggagctgaaaata

SEQ ID NO: 527920 - DNA, 25 bp, Homo sapien
ggggtagtggagctgaaaatagcct

SEQ ID NO: 527921 - DNA, 25 bp, Homo sapien
ctgagatcatgaagtggggaggggg

SEQ ID NO: 527922 - DNA, 25 bp, Homo sapien
agatcatgaagtggggagggggtag

SEQ ID NO: 527923 - DNA, 25 bp, Homo sapien
cctgaacacggctttccgatttccg

SEQ ID NO: 527924 - DNA, 25 bp, Homo sapien
gctttccgatttccgcaccgctttg

SEQ ID NO: 527925 - DNA, 25 bp, Homo sapien
cacaagcagccctgaacacggcttt

SEQ ID NO: 527926 - DNA, 25 bp, Homo sapien
tttgcctccgctcctccaaactcag

SEQ ID NO: 527927 - DNA, 25 bp, Homo sapien
gtggagagggggctatctgcgccac

SEQ ID NO: 527928 - DNA, 25 bp, Homo sapien
ggctatctgcgccactccttcccag

SEQ ID NO: 527929 - DNA, 25 bp, Homo sapien
agggggctatctgcgccactccttc

SEQ ID NO: 527930 - DNA, 25 bp, Homo sapien
gagagggggctatctgcgccactcc

SEQ ID NO: 527931 - DNA, 25 bp, Homo sapien
tgggaacggcaccacagattttcaa

SEQ ID NO: 527932 - DNA, 25 bp, Homo sapien
ggctgttgggaacggcaccacagat

SEQ ID NO: 527933 - DNA, 25 bp, Homo sapien
ctgtttgaataaggctgttgggaac

SEQ ID NO: 527934 - DNA, 25 bp, Homo sapien
gaataaggctgttgggaacggcacc

SEQ ID NO: 527935 - DNA, 25 bp, Homo sapien
agctcattactataaagcactgcgt

SEQ ID NO: 527936 - DNA, 25 bp, Homo sapien
gcagttgtgtgatgaggctttgtat

SEQ ID NO: 527937 - DNA, 25 bp, Homo sapien
acagctcattactataaagcactgc

SEQ ID NO: 527938 - DNA, 25 bp, Homo sapien
tgtgatgaggctttgtatacattcc

SEQ ID NO: 527939 - DNA, 25 bp, Homo sapien
tctttcgtgaagatttacggtcaag

SEQ ID NO: 527940 - DNA, 25 bp, Homo sapien
tgctttagaagggacactatgcctg

SEQ ID NO: 527941 - DNA, 25 bp, Homo sapien
actttcccggtaggcgagccatgct

SEQ ID NO: 527942 - DNA, 25 bp, Homo sapien
agatttacggtcaagcactttcccg

SEQ ID NO: 527943 - DNA, 25 bp, Homo sapien
gtcttccttgaacttgtcatctggc

SEQ ID NO: 527944 - DNA, 25 bp, Homo sapien
ttccagttgttattcttctctgtct

SEQ ID NO: 527945 - DNA, 25 bp, Homo sapien
tgcctgttcagggtccttccagttg

SEQ ID NO: 527946 - DNA, 25 bp, Homo sapien
ttcagggtccttccagttgttattc

SEQ ID NO: 527947 - DNA, 25 bp, Homo sapien
ggctctgattctctcttaatttcca

SEQ ID NO: 527948 - DNA, 25 bp, Homo sapien
ctctcttaatttccaatacaaccag

SEQ ID NO: 527949 - DNA, 25 bp, Homo sapien
ttctctcttaatttccaatacaacc

SEQ ID NO: 527950 - DNA, 25 bp, Homo sapien
ctcttaatttccaatacaaccagaa

SEQ ID NO: 527951 - DNA, 25 bp, Homo sapien
gaactgggtgagtgttatgtaaaga

SEQ ID NO: 527952 - DNA, 25 bp, Homo sapien
tatgtaaagatcagcatctatccac

SEQ ID NO: 527953 - DNA, 25 bp, Homo sapien
tccgacaaatggtaataacgaaaca

SEQ ID NO: 527954 - DNA, 25 bp, Homo sapien
tctgcttcagggtactcatccgaca

SEQ ID NO: 527955 - DNA, 25 bp, Homo sapien
gaaaaattcatagtcaagccaggtg

SEQ ID NO: 527956 - DNA, 25 bp, Homo sapien
gagagtggtacaaatgcagagtcct

SEQ ID NO: 527957 - DNA, 25 bp, Homo sapien
gcagagtccttgaccttcaacgctg

SEQ ID NO: 527958 - DNA, 25 bp, Homo sapien
ttcataaagacgtggaatcagtccc

SEQ ID NO: 527959 - DNA, 25 bp, Homo sapien
cagagtctgctgcagggcagtcgcg

SEQ ID NO: 527960 - DNA, 25 bp, Homo sapien
cacagcacagataatcgcttgaccg

SEQ ID NO: 527961 - DNA, 25 bp, Homo sapien
acagataatcgcttgaccgggattc

SEQ ID NO: 527962 - DNA, 25 bp, Homo sapien
cagcacagataatcgcttgaccggg

SEQ ID NO: 527963 - DNA, 25 bp, Homo sapien
ctagtgatttcaatgtggttggggg

SEQ ID NO: 527964 - DNA, 25 bp, Homo sapien
tgatttcaatgtggttgggggcagg

SEQ ID NO: 527965 - DNA, 25 bp, Homo sapien
gatttcaatgtggttgggggcaggg

SEQ ID NO: 527966 - DNA, 25 bp, Homo sapien
agtgatttcaatgtggttgggggca

SEQ ID NO: 527967 - DNA, 25 bp, Homo sapien
acaatgagaacacttgaacacagga

SEQ ID NO: 527968 - DNA, 25 bp, Homo sapien
caaggacaaaaaacaaataccacat

SEQ ID NO: 527969 - DNA, 25 bp, Homo sapien
aggggaacatcacaccccagggcct

SEQ ID NO: 527970 - DNA, 25 bp, Homo sapien
gttctcactcatagataggaattga

SEQ ID NO: 527971 - DNA, 25 bp, Homo sapien
cactgtccccctttttcaaagtgtg

SEQ ID NO: 527972 - DNA, 25 bp, Homo sapien
tatatgcactgtccccctttttcaa

SEQ ID NO: 527973 - DNA, 25 bp, Homo sapien
tgactctatatatgcactgtccccc

SEQ ID NO: 527974 - DNA, 25 bp, Homo sapien
actctatatatgcactgtccccctt

SEQ ID NO: 527975 - DNA, 25 bp, Homo sapien
caaagtatcccaaggttaaatgtgg

SEQ ID NO: 527976 - DNA, 25 bp, Homo sapien
agcactgtctccttgcgatggtcca

SEQ ID NO: 527977 - DNA, 25 bp, Homo sapien
tctctcctgccacgagcactgtctc

SEQ ID NO: 527978 - DNA, 25 bp, Homo sapien
cttgcgatggtccaggttgcctctc

SEQ ID NO: 527979 - DNA, 25 bp, Homo sapien
tctaatgattcaagttctccaggca

SEQ ID NO: 527980 - DNA, 25 bp, Homo sapien
atcagcaacctcagcagaagtctcc

SEQ ID NO: 527981 - DNA, 25 bp, Homo sapien
ggaaacgtctggacagtgtgccgaa

SEQ ID NO: 527982 - DNA, 25 bp, Homo sapien
tgtgccgaaggagctctaatgattc

SEQ ID NO: 527983 - DNA, 25 bp, Homo sapien
ttctctcttgtattctctatgggtc

SEQ ID NO: 527984 - DNA, 25 bp, Homo sapien
gctggaattgccggaagtcctgttc

SEQ ID NO: 527985 - DNA, 25 bp, Homo sapien
tcttgtattctctatgggtcaggaa

SEQ ID NO: 527986 - DNA, 25 bp, Homo sapien
ccacagcatagtggctggactccaa

SEQ ID NO: 527987 - DNA, 25 bp, Homo sapien
agcctgtaccacatggcaagactcc

SEQ ID NO: 527988 - DNA, 25 bp, Homo sapien
cagcctgtaccacatggcaagactc

SEQ ID NO: 527989 - DNA, 25 bp, Homo sapien
gtgacacgatcgtcttctccagtgg

SEQ ID NO: 527990 - DNA, 25 bp, Homo sapien
tcgaggaacaaacagtaggagaaga

SEQ ID NO: 527991 - DNA, 25 bp, Homo sapien
ccagtggcaactaattatgatgtca

SEQ ID NO: 527992 - DNA, 25 bp, Homo sapien
taggtcctaatccttttgtgacacg

SEQ ID NO: 527993 - DNA, 25 bp, Homo sapien
tgaaagactattgcatgatccatag

SEQ ID NO: 527994 - DNA, 25 bp, Homo sapien
tattgcatgatccatagaattaaga

SEQ ID NO: 527995 - DNA, 25 bp, Homo sapien
caggaagtgactagctaagcagaag

SEQ ID NO: 527996 - DNA, 25 bp, Homo sapien
accaggcctcttcatggttctagca

SEQ ID NO: 527997 - DNA, 25 bp, Homo sapien
gagaaggttggagaactcgaggaca

SEQ ID NO: 527998 - DNA, 25 bp, Homo sapien
gaaggttggagaactcgaggacaaa

SEQ ID NO: 527999 - DNA, 25 bp, Homo sapien
agaaggttggagaactcgaggacaa

SEQ ID NO: 528000 - DNA, 25 bp, Homo sapien
cctgattgggtcaccatcctctgtt

SEQ ID NO: 528001 - DNA, 25 bp, Homo sapien
caatgttgggttgagacgtgttccc

SEQ ID NO: 528002 - DNA, 25 bp, Homo sapien
ctttgtcctttcaatgttgggttga

SEQ ID NO: 528003 - DNA, 25 bp, Homo sapien
acgtgttccctgattgggtcaccat

SEQ ID NO: 528004 - DNA, 25 bp, Homo sapien
gggaaagcacatggactggccacag

SEQ ID NO: 528005 - DNA, 25 bp, Homo sapien
gacacagatactgtgcaagtaatgt

SEQ ID NO: 528006 - DNA, 25 bp, Homo sapien
gccacagtccctcaagtcttgtgga

SEQ ID NO: 528007 - DNA, 25 bp, Homo sapien
caatggggaaagcacatggactggc

SEQ ID NO: 528008 - DNA, 25 bp, Homo sapien
ctctctcagactggtgtcaagtaaa

SEQ ID NO: 528009 - DNA, 25 bp, Homo sapien
tcagactggtgtcaagtaaagattt

SEQ ID NO: 528010 - DNA, 25 bp, Homo sapien
aattcctttcaatccagatcagagt

SEQ ID NO: 528011 - DNA, 25 bp, Homo sapien
agaaaattcctttcaatccagatca

SEQ ID NO: 528012 - DNA, 25 bp, Homo sapien
cttggcttgtccatgaagtctgtcc

SEQ ID NO: 528013 - DNA, 25 bp, Homo sapien
tggcttgtccatgaagtctgtcccg

SEQ ID NO: 528014 - DNA, 25 bp, Homo sapien
ttgtccatgaagtctgtcccgtttg

SEQ ID NO: 528015 - DNA, 25 bp, Homo sapien
gcttgtccatgaagtctgtcccgtt

SEQ ID NO: 528016 - DNA, 25 bp, Homo sapien
accaagaagccttgctcagcctggc

SEQ ID NO: 528017 - DNA, 25 bp, Homo sapien
gatttacacttggtctgggaggcaa

SEQ ID NO: 528018 - DNA, 25 bp, Homo sapien
gggaggcaagtcctctctctcagga

SEQ ID NO: 528019 - DNA, 25 bp, Homo sapien
cacttgaccagaacgttcatccgca

SEQ ID NO: 528020 - DNA, 25 bp, Homo sapien
aacaagaatgtcctaatcctctgct

SEQ ID NO: 528021 - DNA, 25 bp, Homo sapien
ccacagaggcctttgcgttgaagct

SEQ ID NO: 528022 - DNA, 25 bp, Homo sapien
cagctcaagcacgagcttcctttct

SEQ ID NO: 528023 - DNA, 25 bp, Homo sapien
gaagctccagcagttgccaggtgac

SEQ ID NO: 528024 - DNA, 25 bp, Homo sapien
aaggttgggtttagcaggagcatca

SEQ ID NO: 528025 - DNA, 25 bp, Homo sapien
ggaagtaacaatgccccagtatcag

SEQ ID NO: 528026 - DNA, 25 bp, Homo sapien
gctggagaatgaatctgtgacacga

SEQ ID NO: 528027 - DNA, 25 bp, Homo sapien
tggctgcacggttgatccctcagaa

SEQ ID NO: 528028 - DNA, 25 bp, Homo sapien
atcttcctttcttggaggtctgttt

SEQ ID NO: 528029 - DNA, 25 bp, Homo sapien
cactctgacaagagggaagttaccc

SEQ ID NO: 528030 - DNA, 25 bp, Homo sapien
aatcaacgggatctaggttatgcgg

SEQ ID NO: 528031 - DNA, 25 bp, Homo sapien
cccagctaaggaatagcagaccaag

SEQ ID NO: 528032 - DNA, 25 bp, Homo sapien
tgcaaggcccaaggcatctaggttt

SEQ ID NO: 528033 - DNA, 25 bp, Homo sapien
agcatcagattcaccccaaggacct

SEQ ID NO: 528034 - DNA, 25 bp, Homo sapien
ttctgatgacgcagaaatccccagc

SEQ ID NO: 528035 - DNA, 25 bp, Homo sapien
tccccagcatcagattcaccccaag

SEQ ID NO: 528036 - DNA, 25 bp, Homo sapien
ctgcagttctgatgacgcagaaatc

SEQ ID NO: 528037 - DNA, 25 bp, Homo sapien
atcttttggcaaacagtttgtggca

SEQ ID NO: 528038 - DNA, 25 bp, Homo sapien
tatcttttggcaaacagtttgtggc

SEQ ID NO: 528039 - DNA, 25 bp, Homo sapien
ctatcttttggcaaacagtttgtgg

SEQ ID NO: 528040 - DNA, 25 bp, Homo sapien
tccaattcctgctcgagtgatactc

SEQ ID NO: 528041 - DNA, 25 bp, Homo sapien
taatccttgattaagcactctgcta

SEQ ID NO: 528042 - DNA, 25 bp, Homo sapien
tatatcacgagtttcctacagggcc

SEQ ID NO: 528043 - DNA, 25 bp, Homo sapien
tacagggccgcgattgatacaggga

SEQ ID NO: 528044 - DNA, 25 bp, Homo sapien
gaatctaaatcgactgaacgccagt

SEQ ID NO: 528045 - DNA, 25 bp, Homo sapien
ggaagaatctaaatcgactgaacgc

SEQ ID NO: 528046 - DNA, 25 bp, Homo sapien
taaatcgactgaacgccagtctaaa

SEQ ID NO: 528047 - DNA, 25 bp, Homo sapien
ctgaacgccagtctaaaatttcggc

SEQ ID NO: 528048 - DNA, 25 bp, Homo sapien
atcctaaccgctagaccatgtggga

SEQ ID NO: 528049 - DNA, 25 bp, Homo sapien
gaatcctaaccgctagaccatgtgg

SEQ ID NO: 528050 - DNA, 25 bp, Homo sapien
accaggaatcctaaccgctagacca

SEQ ID NO: 528051 - DNA, 25 bp, Homo sapien
gccgcctgggtgaaaaccaggaatc

SEQ ID NO: 528052 - DNA, 25 bp, Homo sapien
tgggatccctgcactactgttctgg

SEQ ID NO: 528053 - DNA, 25 bp, Homo sapien
aaaaggaggcctggacactacctgg

SEQ ID NO: 528054 - DNA, 25 bp, Homo sapien
taggatacatcttacacactggcac

SEQ ID NO: 528055 - DNA, 25 bp, Homo sapien
taaacttattaccataggaccctgc

SEQ ID NO: 528056 - DNA, 25 bp, Homo sapien
tagcaataggtttaattacttccaa

SEQ ID NO: 528057 - DNA, 25 bp, Homo sapien
agaaatagcaataggtttaattact

SEQ ID NO: 528058 - DNA, 25 bp, Homo sapien
aagagagcatgatatatagaaaata

SEQ ID NO: 528059 - DNA, 25 bp, Homo sapien
caagagagcatgatatatagaaaat

SEQ ID NO: 528060 - DNA, 25 bp, Homo sapien
tgtcagacatacagccaagggagta

SEQ ID NO: 528061 - DNA, 25 bp, Homo sapien
gggtcacatgccaggtgttccaaga

SEQ ID NO: 528062 - DNA, 25 bp, Homo sapien
tcaatgaaagtagtccaggagtcca

SEQ ID NO: 528063 - DNA, 25 bp, Homo sapien
taccaacatggaggagctatcagct

SEQ ID NO: 528064 - DNA, 25 bp, Homo sapien
catacatcctacgaggcttacaatt

SEQ ID NO: 528065 - DNA, 25 bp, Homo sapien
aaattccaacatacatcctacgagg

SEQ ID NO: 528066 - DNA, 25 bp, Homo sapien
gcttcagttatgtatgctgaaacac

SEQ ID NO: 528067 - DNA, 25 bp, Homo sapien
cagttatgtatgctgaaacaccaga

SEQ ID NO: 528068 - DNA, 25 bp, Homo sapien
tttgatgatgtaccgaacacactgc

SEQ ID NO: 528069 - DNA, 25 bp, Homo sapien
ttttcgcagaattagtatccagtcc

SEQ ID NO: 528070 - DNA, 25 bp, Homo sapien
catgtcgaatgtccggagctagaag

SEQ ID NO: 528071 - DNA, 25 bp, Homo sapien
taccgaacacactgcaaaatcacat

SEQ ID NO: 528072 - DNA, 25 bp, Homo sapien
taacgtttgatagttgtgataatct

SEQ ID NO: 528073 - DNA, 25 bp, Homo sapien
gccaaaacgtctgcttcagtcttga

SEQ ID NO: 528074 - DNA, 25 bp, Homo sapien
gcactgctatcaagaacctggtttt

SEQ ID NO: 528075 - DNA, 25 bp, Homo sapien
gatggtgtgttcttggttcgaataa

SEQ ID NO: 528076 - DNA, 25 bp, Homo sapien
cagaaagtgatctctatgaaagaaa

SEQ ID NO: 528077 - DNA, 25 bp, Homo sapien
ttcaaattggaagctgtaactacca

SEQ ID NO: 528078 - DNA, 25 bp, Homo sapien
gaaacttggatctatacaaaggaag

SEQ ID NO: 528079 - DNA, 25 bp, Homo sapien
gactaccatgaagagctacagaaag

SEQ ID NO: 528080 - DNA, 25 bp, Homo sapien
tgtggtttctcctccttatcagact

SEQ ID NO: 528081 - DNA, 25 bp, Homo sapien
tgttgtggtttctcctccttatcag

SEQ ID NO: 528082 - DNA, 25 bp, Homo sapien
atgttgtggtttctcctccttatca

SEQ ID NO: 528083 - DNA, 25 bp, Homo sapien
gttgtggtttctcctccttatcaga

SEQ ID NO: 528084 - DNA, 25 bp, Homo sapien
ggacttattactggcaatgttgacc

SEQ ID NO: 528085 - DNA, 25 bp, Homo sapien
tgtggtgctctaatgctgacttgct

SEQ ID NO: 528086 - DNA, 25 bp, Homo sapien
gaattaagcttcaactcaagtaagg

SEQ ID NO: 528087 - DNA, 25 bp, Homo sapien
aacccaggtccataatatcagtagg

SEQ ID NO: 528088 - DNA, 25 bp, Homo sapien
tctctttcaactgctcctcagaatc

SEQ ID NO: 528089 - DNA, 25 bp, Homo sapien
actgctcctcagaatccaactgaat

SEQ ID NO: 528090 - DNA, 25 bp, Homo sapien
tgagatctctctttcaactgctcct

SEQ ID NO: 528091 - DNA, 25 bp, Homo sapien
tgcccagcctgagatctctctttca

SEQ ID NO: 528092 - DNA, 25 bp, Homo sapien
gctctctgtctagaattgtcgtttt

SEQ ID NO: 528093 - DNA, 25 bp, Homo sapien
ccatttgtgattcttgccaggactt

SEQ ID NO: 528094 - DNA, 25 bp, Homo sapien
ctgtctagaattgtcgtttttccat

SEQ ID NO: 528095 - DNA, 25 bp, Homo sapien
tccatttgtgattcttgccaggact

SEQ ID NO: 528096 - DNA, 25 bp, Homo sapien
ttcttcctttcaatattggccagag

SEQ ID NO: 528097 - DNA, 25 bp, Homo sapien
gcaatttcctctggagtgtctaact

SEQ ID NO: 528098 - DNA, 25 bp, Homo sapien
tggagtgtctaacttgatcttcttc

SEQ ID NO: 528099 - DNA, 25 bp, Homo sapien
tcctctggagtgtctaacttgatct

SEQ ID NO: 528100 - DNA, 25 bp, Homo sapien
ccctccaccgtgcaatttcctctgg

SEQ ID NO: 528101 - DNA, 25 bp, Homo sapien
ctggacaatcttctcgtgtgcagta

SEQ ID NO: 528102 - DNA, 25 bp, Homo sapien
cgtgtgcagtaaaagagcaatctaa

SEQ ID NO: 528103 - DNA, 25 bp, Homo sapien
tctccaatggaactggacaatcttc

SEQ ID NO: 528104 - DNA, 25 bp, Homo sapien
tcttctcgtgtgcagtaaaagagca

SEQ ID NO: 528105 - DNA, 25 bp, Homo sapien
ttttaaaaccacgatcacaggtatc

SEQ ID NO: 528106 - DNA, 25 bp, Homo sapien
tttgtatgttcagacatgtgtttgt

SEQ ID NO: 528107 - DNA, 25 bp, Homo sapien
taaaaccacgatcacaggtatcaca

SEQ ID NO: 528108 - DNA, 25 bp, Homo sapien
cagacatgtgtttgtcatacttttc

SEQ ID NO: 528109 - DNA, 25 bp, Homo sapien
ttgcatcatactttcgtggataata

SEQ ID NO: 528110 - DNA, 25 bp, Homo sapien
tctgttttctactgggaggtaagct

SEQ ID NO: 528111 - DNA, 25 bp, Homo sapien
gtaagctgaagtctgtgaattttgc

SEQ ID NO: 528112 - DNA, 25 bp, Homo sapien
tcatactttcgtggataataagaat

SEQ ID NO: 528113 - DNA, 25 bp, Homo sapien
cttctgatgccgaggaaacctatca

SEQ ID NO: 528114 - DNA, 25 bp, Homo sapien
gacttctgatgccgaggaaacctat

SEQ ID NO: 528115 - DNA, 25 bp, Homo sapien
tctgatgccgaggaaacctatcaga

SEQ ID NO: 528116 - DNA, 25 bp, Homo sapien
aggacttctgatgccgaggaaacct

SEQ ID NO: 528117 - DNA, 25 bp, Homo sapien
aatcaaggggagactgggcgtcgaa

SEQ ID NO: 528118 - DNA, 25 bp, Homo sapien
tcgggagacgcatgccacccgatag

SEQ ID NO: 528119 - DNA, 25 bp, Homo sapien
gtgggagtcagctcgggagacgcat

SEQ ID NO: 528120 - DNA, 25 bp, Homo sapien
ccgggaagaatctgggcgtcgaagg

SEQ ID NO: 528121 - DNA, 25 bp, Homo sapien
acgtcatgtcattagaaaccctggg

SEQ ID NO: 528122 - DNA, 25 bp, Homo sapien
gacaagcatgaccagagtaaagagg

SEQ ID NO: 528123 - DNA, 25 bp, Homo sapien
taagctggagtagtgagtctaccct

SEQ ID NO: 528124 - DNA, 25 bp, Homo sapien
tattttctcaagagcgatccacaga

SEQ ID NO: 528125 - DNA, 25 bp, Homo sapien
ggtgtctcacaagtaccctctaagg

SEQ ID NO: 528126 - DNA, 25 bp, Homo sapien
gaaatatacctaacctgccctagag

SEQ ID NO: 528127 - DNA, 25 bp, Homo sapien
gtcaggactgaccaccaaatctcta

SEQ ID NO: 528128 - DNA, 25 bp, Homo sapien
ccctagagtcagtgtgtcaagtcct

SEQ ID NO: 528129 - DNA, 25 bp, Homo sapien
gtggctacacccctactaagactgc

SEQ ID NO: 528130 - DNA, 25 bp, Homo sapien
caaaacacgagagatggtggctaca

SEQ ID NO: 528131 - DNA, 25 bp, Homo sapien
ccaagtgtcataggaatgtggcctc

SEQ ID NO: 528132 - DNA, 25 bp, Homo sapien
ttgtccagctctctaaattgtcatc

SEQ ID NO: 528133 - DNA, 25 bp, Homo sapien
ttgcatagcaacaaacaccagcacc

SEQ ID NO: 528134 - DNA, 25 bp, Homo sapien
gcaatacttgcctcttgaagaatgg

SEQ ID NO: 528135 - DNA, 25 bp, Homo sapien
ttcaaacatctaccagccagttgct

SEQ ID NO: 528136 - DNA, 25 bp, Homo sapien
tccctaagaggaatagtcagattgt

SEQ ID NO: 528137 - DNA, 25 bp, Homo sapien
aggcactaggaatggctagagatga

SEQ ID NO: 528138 - DNA, 25 bp, Homo sapien
agaggcactaggaatggctagagat

SEQ ID NO: 528139 - DNA, 25 bp, Homo sapien
agaggagaggcactaggaatggcta

SEQ ID NO: 528140 - DNA, 25 bp, Homo sapien
tcacagaggagaggcactaggaatg

SEQ ID NO: 528141 - DNA, 25 bp, Homo sapien
ctaattgtcataacccatcttccct

SEQ ID NO: 528142 - DNA, 25 bp, Homo sapien
tcccttcacggtcccatctgggtct

SEQ ID NO: 528143 - DNA, 25 bp, Homo sapien
atcttcccttcacggtcccatctgg

SEQ ID NO: 528144 - DNA, 25 bp, Homo sapien
acctctccctgaccacttgcttttc

SEQ ID NO: 528145 - DNA, 25 bp, Homo sapien
ggtttttccgccagcactgtctgtg

SEQ ID NO: 528146 - DNA, 25 bp, Homo sapien
tgcttgcaaatgtcccgaagaggct

SEQ ID NO: 528147 - DNA, 25 bp, Homo sapien
cctgaagagctgtttggaaggtagc

SEQ ID NO: 528148 - DNA, 25 bp, Homo sapien
cgaagaggctttcgtatgtggtcta

SEQ ID NO: 528149 - DNA, 25 bp, Homo sapien
agatgcctgctttagccgagtaagc

SEQ ID NO: 528150 - DNA, 25 bp, Homo sapien
tgctttagccgagtaagccaagaaa

SEQ ID NO: 528151 - DNA, 25 bp, Homo sapien
cctgctttagccgagtaagccaaga

SEQ ID NO: 528152 - DNA, 25 bp, Homo sapien
agccgagtaagccaagaaaaatgat

SEQ ID NO: 528153 - DNA, 25 bp, Homo sapien
gccccacaggcaacgtgtacagggt

SEQ ID NO: 528154 - DNA, 25 bp, Homo sapien
tgagaacatcggcttcatgagcccc

SEQ ID NO: 528155 - DNA, 25 bp, Homo sapien
gagccccacaggcaacgtgtacagg

SEQ ID NO: 528156 - DNA, 25 bp, Homo sapien
catcccgaactccacatgagaacat

SEQ ID NO: 528157 - DNA, 25 bp, Homo sapien
gacaacacgggatcaataatgcggc

SEQ ID NO: 528158 - DNA, 25 bp, Homo sapien
gatttctcatcaatcagggttaggg

SEQ ID NO: 528159 - DNA, 25 bp, Homo sapien
aagttccaccactgacaacacggga

SEQ ID NO: 528160 - DNA, 25 bp, Homo sapien
aatgcggctacggtcactgccatca

SEQ ID NO: 528161 - DNA, 25 bp, Homo sapien
ctcccacgtcccagggtggatccat

SEQ ID NO: 528162 - DNA, 25 bp, Homo sapien
ggaaccataatactccacctttcgc

SEQ ID NO: 528163 - DNA, 25 bp, Homo sapien
acctttcgccatacgaatctaccat

SEQ ID NO: 528164 - DNA, 25 bp, Homo sapien
ttttcccctcatagtattcatatgg

SEQ ID NO: 528165 - DNA, 25 bp, Homo sapien
catatggaaccataatactccacct

SEQ ID NO: 528166 - DNA, 25 bp, Homo sapien
gccagtaaatatgcagtttattcac

SEQ ID NO: 528167 - DNA, 25 bp, Homo sapien
gtaaatatgcagtttattcacagaa

SEQ ID NO: 528168 - DNA, 25 bp, Homo sapien
cccttggccagtaaatatgcagttt

SEQ ID NO: 528169 - DNA, 25 bp, Homo sapien
tggccagtaaatatgcagtttattc

SEQ ID NO: 528170 - DNA, 25 bp, Homo sapien
acttgccgtcagaaattggctctcc

SEQ ID NO: 528171 - DNA, 25 bp, Homo sapien
caacacttgccgtcagaaattggct

SEQ ID NO: 528172 - DNA, 25 bp, Homo sapien
tcttcaacacttgccgtcagaaatt

SEQ ID NO: 528173 - DNA, 25 bp, Homo sapien
cttcttcaacacttgccgtcagaaa

SEQ ID NO: 528174 - DNA, 25 bp, Homo sapien
ttcccctgtgtaatgggggagattc

SEQ ID NO: 528175 - DNA, 25 bp, Homo sapien
cctgccaacttcaaattttcccctg

SEQ ID NO: 528176 - DNA, 25 bp, Homo sapien
cccctgtgtaatgggggagattcat

SEQ ID NO: 528177 - DNA, 25 bp, Homo sapien
cttcaaattttcccctgtgtaatgg

SEQ ID NO: 528178 - DNA, 25 bp, Homo sapien
ttctttctggttgcttcacaggcaa

SEQ ID NO: 528179 - DNA, 25 bp, Homo sapien
aggcaaatgctgtagaaatccacta

SEQ ID NO: 528180 - DNA, 25 bp, Homo sapien
gcaaatgctgtagaaatccactata

SEQ ID NO: 528181 - DNA, 25 bp, Homo sapien
tttctggttgcttcacaggcaaatg

SEQ ID NO: 528182 - DNA, 25 bp, Homo sapien
ggaaacgatcaggtttgtctcttac

SEQ ID NO: 528183 - DNA, 25 bp, Homo sapien
ggtgctccgcttgcttcatcagaac

SEQ ID NO: 528184 - DNA, 25 bp, Homo sapien
tactaagtttgatcccagtgcccat

SEQ ID NO: 528185 - DNA, 25 bp, Homo sapien
tcatcagaacagctcgggtagcctc

SEQ ID NO: 528186 - DNA, 25 bp, Homo sapien
ccatttgtgctaatgacgttggcca

SEQ ID NO: 528187 - DNA, 25 bp, Homo sapien
aatacttcctaattcgcatgtcatc

SEQ ID NO: 528188 - DNA, 25 bp, Homo sapien
cttggattagagtggtagcagtgac

SEQ ID NO: 528189 - DNA, 25 bp, Homo sapien
catgttaaagacctactctgactgg

SEQ ID NO: 528190 - DNA, 25 bp, Homo sapien
accgggaggctcttatagtaatcca

SEQ ID NO: 528191 - DNA, 25 bp, Homo sapien
ctgactggtaggttgagaagagacc

SEQ ID NO: 528192 - DNA, 25 bp, Homo sapien
taggagtggaatgtagtgtgtgagg

SEQ ID NO: 528193 - DNA, 25 bp, Homo sapien
cctaggagtggaatgtagtgtgtga

SEQ ID NO: 528194 - DNA, 25 bp, Homo sapien
gagtggaatgtagtgtgtgagggtt

SEQ ID NO: 528195 - DNA, 25 bp, Homo sapien
agtggaatgtagtgtgtgagggttc

SEQ ID NO: 528196 - DNA, 25 bp, Homo sapien
cactggtcccattcagatttcccta

SEQ ID NO: 528197 - DNA, 25 bp, Homo sapien
ggtactatacaaaccactgacattg

SEQ ID NO: 528198 - DNA, 25 bp, Homo sapien
gacattgatatagtccactggtccc

SEQ ID NO: 528199 - DNA, 25 bp, Homo sapien
caagaatccctcaggttaccctttg

SEQ ID NO: 528200 - DNA, 25 bp, Homo sapien
gtttgtcagtcttgtctttgtggct

SEQ ID NO: 528201 - DNA, 25 bp, Homo sapien
tctttaatagtccagtttgtcagtc

SEQ ID NO: 528202 - DNA, 25 bp, Homo sapien
cagtaagtgatagaagataaatcaa

SEQ ID NO: 528203 - DNA, 25 bp, Homo sapien
caaatgctatgatacctaatgtaaa

SEQ ID NO: 528204 - DNA, 25 bp, Homo sapien
tgtaaatgataattggtctaattct

SEQ ID NO: 528205 - DNA, 25 bp, Homo sapien
ccaaactggagtgtaatagctcgat

SEQ ID NO: 528206 - DNA, 25 bp, Homo sapien
tgtagcctgccggttgacatcaatg

SEQ ID NO: 528207 - DNA, 25 bp, Homo sapien
tacaatcaaagaaggtagcagtgct

SEQ ID NO: 528208 - DNA, 25 bp, Homo sapien
gagactaagttacccatgctttgtg

SEQ ID NO: 528209 - DNA, 25 bp, Homo sapien
tatgcaaaatcatcaagtggtactg

SEQ ID NO: 528210 - DNA, 25 bp, Homo sapien
gttttccgaagcttgctggctgcat

SEQ ID NO: 528211 - DNA, 25 bp, Homo sapien
cagtaattgattagtagcagggctc

SEQ ID NO: 528212 - DNA, 25 bp, Homo sapien
tctgtagtacagagctagctgggca

SEQ ID NO: 528213 - DNA, 25 bp, Homo sapien
gagtctgatcagtaggaacacccca

SEQ ID NO: 528214 - DNA, 25 bp, Homo sapien
tataaatatccaccaacgttgaggg

SEQ ID NO: 528215 - DNA, 25 bp, Homo sapien
catcagcatcaaacgggcagaggat

SEQ ID NO: 528216 - DNA, 25 bp, Homo sapien
gaaagtagtctctctgggtgttagc

SEQ ID NO: 528217 - DNA, 25 bp, Homo sapien
tcttaatccttgtgaacgatcgtgg

SEQ ID NO: 528218 - DNA, 25 bp, Homo sapien
aagagacactaccacacaagcacgc

SEQ ID NO: 528219 - DNA, 25 bp, Homo sapien
gcgctgtcagctcggttttgcagta

SEQ ID NO: 528220 - DNA, 25 bp, Homo sapien
cgtatcagcctatgtatgcaggagc

SEQ ID NO: 528221 - DNA, 25 bp, Homo sapien
ttttgcagtaggtggcgtatcagcc

SEQ ID NO: 528222 - DNA, 25 bp, Homo sapien
tcacttaacatctgcttgtgtcttc

SEQ ID NO: 528223 - DNA, 25 bp, Homo sapien
tgcttgtgtcttcagtgatgaggtg

SEQ ID NO: 528224 - DNA, 25 bp, Homo sapien
ttcagtgatgaggtggtgtggagaa

SEQ ID NO: 528225 - DNA, 25 bp, Homo sapien
tgaggtggtgtggagaagagagaag

SEQ ID NO: 528226 - DNA, 25 bp, Homo sapien
gtaacttcgaggtctggaggatcag

SEQ ID NO: 528227 - DNA, 25 bp, Homo sapien
gctggaagttctcttaaaggcctcc

SEQ ID NO: 528228 - DNA, 25 bp, Homo sapien
cagagagtgtcgacacaggtgtgat

SEQ ID NO: 528229 - DNA, 25 bp, Homo sapien
aagagtcaggagagtaaggagagta

SEQ ID NO: 528230 - DNA, 25 bp, Homo sapien
agatctttttctgtggccgtaattt

SEQ ID NO: 528231 - DNA, 25 bp, Homo sapien
tgagatcaggcaggtcacctgctgt

SEQ ID NO: 528232 - DNA, 25 bp, Homo sapien
ctaaagatttctgatgatgagatca

SEQ ID NO: 528233 - DNA, 25 bp, Homo sapien
atgagatcaggcaggtcacctgctg

SEQ ID NO: 528234 - DNA, 25 bp, Homo sapien
cctgtgcattgcaaggaaagtttac

SEQ ID NO: 528235 - DNA, 25 bp, Homo sapien
tgtgaatatcccagattggctccct

SEQ ID NO: 528236 - DNA, 25 bp, Homo sapien
tggttgtggaatgggagattcttct

SEQ ID NO: 528237 - DNA, 25 bp, Homo sapien
aatatcccagattggctccctgctg

SEQ ID NO: 528238 - DNA, 25 bp, Homo sapien
tgatgagaggagagggacagggaag

SEQ ID NO: 528239 - DNA, 25 bp, Homo sapien
ctgatgagaggagagggacagggaa

SEQ ID NO: 528240 - DNA, 25 bp, Homo sapien
gatgagaggagagggacagggaagt

SEQ ID NO: 528241 - DNA, 25 bp, Homo sapien
tgagaggagagggacagggaagttt

SEQ ID NO: 528242 - DNA, 25 bp, Homo sapien
ggtcagagctgtcatgtttggccct

SEQ ID NO: 528243 - DNA, 25 bp, Homo sapien
tggtcagagctgtcatgtttggccc

SEQ ID NO: 528244 - DNA, 25 bp, Homo sapien
cagagctgtcatgtttggccctgtg

SEQ ID NO: 528245 - DNA, 25 bp, Homo sapien
aagtggtcagagctgtcatgtttgg

SEQ ID NO: 528246 - DNA, 25 bp, Homo sapien
agcaaattcctagcaaggccatcac

SEQ ID NO: 528247 - DNA, 25 bp, Homo sapien
caccgccttctttgtacagcaaatt

SEQ ID NO: 528248 - DNA, 25 bp, Homo sapien
cagcaaattcctagcaaggccatca

SEQ ID NO: 528249 - DNA, 25 bp, Homo sapien
tacagcaaattcctagcaaggccat

SEQ ID NO: 528250 - DNA, 25 bp, Homo sapien
gaaaagcctccctatcctcctccag

SEQ ID NO: 528251 - DNA, 25 bp, Homo sapien
tgccccctcttcccatgtgcttcac

SEQ ID NO: 528252 - DNA, 25 bp, Homo sapien
ggaaaagcctccctatcctcctcca

SEQ ID NO: 528253 - DNA, 25 bp, Homo sapien
tcttcccatgtgcttcacttgtctc

SEQ ID NO: 528254 - DNA, 25 bp, Homo sapien
ccaaatctgccagcagtttagattg

SEQ ID NO: 528255 - DNA, 25 bp, Homo sapien
gcagtttagattgagagtttggcat

SEQ ID NO: 528256 - DNA, 25 bp, Homo sapien
tctgccagcagtttagattgagagt

SEQ ID NO: 528257 - DNA, 25 bp, Homo sapien
gccagcagtttagattgagagtttg

SEQ ID NO: 528258 - DNA, 25 bp, Homo sapien
aaatgtatcccattgttttcgaagc

SEQ ID NO: 528259 - DNA, 25 bp, Homo sapien
ttggccccttcaacaagtttctgat

SEQ ID NO: 528260 - DNA, 25 bp, Homo sapien
gaagctagtccccagattataatta

SEQ ID NO: 528261 - DNA, 25 bp, Homo sapien
gtttccacccaacctactgatgctt

SEQ ID NO: 528262 - DNA, 25 bp, Homo sapien
ttttaattaagcaataggccacaaa

SEQ ID NO: 528263 - DNA, 25 bp, Homo sapien
cgtaaggtattacatggataagagc

SEQ ID NO: 528264 - DNA, 25 bp, Homo sapien
cttactatgttgcttgctgtggtct

SEQ ID NO: 528265 - DNA, 25 bp, Homo sapien
agagcaatatctgggataggtaccc

SEQ ID NO: 528266 - DNA, 25 bp, Homo sapien
ttaaagcaagaagatatctatccat

SEQ ID NO: 528267 - DNA, 25 bp, Homo sapien
aataaggaaggagcaatgccaaaaa

SEQ ID NO: 528268 - DNA, 25 bp, Homo sapien
ctagatgctgcaatcaagaagtagc

SEQ ID NO: 528269 - DNA, 25 bp, Homo sapien
gtagcaaatgcccaagttgccatag

SEQ ID NO: 528270 - DNA, 25 bp, Homo sapien
tgacagccgcgaatgctgactgcag

SEQ ID NO: 528271 - DNA, 25 bp, Homo sapien
tgtgagtgcagtcctcggtgcttat

SEQ ID NO: 528272 - DNA, 25 bp, Homo sapien
ccagctgagagttgttgacagccgc

SEQ ID NO: 528273 - DNA, 25 bp, Homo sapien
tatccaagtctattggaacattctg

SEQ ID NO: 528274 - DNA, 25 bp, Homo sapien
gaacaaacagcttgtaggagagttc

SEQ ID NO: 528275 - DNA, 25 bp, Homo sapien
ggtggtagggttttcctggccatga

SEQ ID NO: 528276 - DNA, 25 bp, Homo sapien
gaaaaccattgcactcataaaacat

SEQ ID NO: 528277 - DNA, 25 bp, Homo sapien
tatttctgatgatcaagcaggtctg

SEQ ID NO: 528278 - DNA, 25 bp, Homo sapien
tccttcatgaaggaatcagctactt

SEQ ID NO: 528279 - DNA, 25 bp, Homo sapien
tcatgaaggaatcagctacttctta

SEQ ID NO: 528280 - DNA, 25 bp, Homo sapien
cttcatgaaggaatcagctacttct

SEQ ID NO: 528281 - DNA, 25 bp, Homo sapien
aggaatcagctacttcttatttatt

SEQ ID NO: 528282 - DNA, 25 bp, Homo sapien
agttatcagtcctgtgtttccaaaa

SEQ ID NO: 528283 - DNA, 25 bp, Homo sapien
acggaagttatcagtcctgtgtttc

SEQ ID NO: 528284 - DNA, 25 bp, Homo sapien
cagtggaacggaagttatcagtcct

SEQ ID NO: 528285 - DNA, 25 bp, Homo sapien
tggaacggaagttatcagtcctgtg

SEQ ID NO: 528286 - DNA, 25 bp, Homo sapien
ccgtcgctaagcaacgtgccacgtt

SEQ ID NO: 528287 - DNA, 25 bp, Homo sapien
tgtcttttattgtaagtgttcaccc

SEQ ID NO: 528288 - DNA, 25 bp, Homo sapien
ttattaacgctttggcttccgtcgc

SEQ ID NO: 528289 - DNA, 25 bp, Homo sapien
gcatccattgactttgtaccacctg

SEQ ID NO: 528290 - DNA, 25 bp, Homo sapien
ggattggtaaacataagcaggctct

SEQ ID NO: 528291 - DNA, 25 bp, Homo sapien
tgcagagaagtggagggtatgttgg

SEQ ID NO: 528292 - DNA, 25 bp, Homo sapien
tctggattggtaaacataagcaggc

SEQ ID NO: 528293 - DNA, 25 bp, Homo sapien
ttatctggattggtaaacataagca

SEQ ID NO: 528294 - DNA, 25 bp, Homo sapien
tcctcctcgcagatgggtcacctat

SEQ ID NO: 528295 - DNA, 25 bp, Homo sapien
aatgctgcggtgctgtcatgtggca

SEQ ID NO: 528296 - DNA, 25 bp, Homo sapien
gttctccataatggccttgggcaca

SEQ ID NO: 528297 - DNA, 25 bp, Homo sapien
cattctccaactgcataggtgtttg

SEQ ID NO: 528298 - DNA, 25 bp, Homo sapien
agggtgaggccagagcgacaggatg

SEQ ID NO: 528299 - DNA, 25 bp, Homo sapien
gcgacaggatgtcatccgcctctca

SEQ ID NO: 528300 - DNA, 25 bp, Homo sapien
tgaggccagagcgacaggatgtcat

SEQ ID NO: 528301 - DNA, 25 bp, Homo sapien
ccagagcgacaggatgtcatccgcc

SEQ ID NO: 528302 - DNA, 25 bp, Homo sapien
tggggaactgcagggccttcacgca

SEQ ID NO: 528303 - DNA, 25 bp, Homo sapien
ctggggaactgcagggccttcacgc

SEQ ID NO: 528304 - DNA, 25 bp, Homo sapien
tattgtatttcatgcctgcgactgt

SEQ ID NO: 528305 - DNA, 25 bp, Homo sapien
tagtgaaatccaacggtagtcaagt

SEQ ID NO: 528306 - DNA, 25 bp, Homo sapien
aattagacttcctttcccactagtg

SEQ ID NO: 528307 - DNA, 25 bp, Homo sapien
ctttttccacctgacctctgggagg

SEQ ID NO: 528308 - DNA, 25 bp, Homo sapien
tactaccctagactaagccactatc

SEQ ID NO: 528309 - DNA, 25 bp, Homo sapien
tccaaacgctcagaccaaaatactt

SEQ ID NO: 528310 - DNA, 25 bp, Homo sapien
acaattattctatgcttttaccctg

SEQ ID NO: 528311 - DNA, 25 bp, Homo sapien
atgcttttaccctgccacctggcag

SEQ ID NO: 528312 - DNA, 25 bp, Homo sapien
ttcccttcctgctatcatttcagag

SEQ ID NO: 528313 - DNA, 25 bp, Homo sapien
tcccttcctgctatcatttcagagg

SEQ ID NO: 528314 - DNA, 25 bp, Homo sapien
cttcctgctatcatttcagaggaca

SEQ ID NO: 528315 - DNA, 25 bp, Homo sapien
ccttcctgctatcatttcagaggac

SEQ ID NO: 528316 - DNA, 25 bp, Homo sapien
ggcaactaagcgatactcggtctct

SEQ ID NO: 528317 - DNA, 25 bp, Homo sapien
tcacatgttcaagcagaccagagtc

SEQ ID NO: 528318 - DNA, 25 bp, Homo sapien
cagtctggaatttgacactagggca

SEQ ID NO: 528319 - DNA, 25 bp, Homo sapien
caggttttggacactatggacagtc

SEQ ID NO: 528320 - DNA, 25 bp, Homo sapien
cacaattagacagacggaaagcgca

SEQ ID NO: 528321 - DNA, 25 bp, Homo sapien
tcagctgccacaattagacagacgg

SEQ ID NO: 528322 - DNA, 25 bp, Homo sapien
agacggaaagcgcaaggacatgttc

SEQ ID NO: 528323 - DNA, 25 bp, Homo sapien
aatctcagctgccacaattagacag

SEQ ID NO: 528324 - DNA, 25 bp, Homo sapien
gtggtggaaaccatagcagcagata

SEQ ID NO: 528325 - DNA, 25 bp, Homo sapien
gaaaccatagcagcagatagcaact

SEQ ID NO: 528326 - DNA, 25 bp, Homo sapien
tggaaaccatagcagcagatagcaa

SEQ ID NO: 528327 - DNA, 25 bp, Homo sapien
ggtggaaaccatagcagcagatagc

SEQ ID NO: 528328 - DNA, 25 bp, Homo sapien
caaaacaggtggtcagataggctag

SEQ ID NO: 528329 - DNA, 25 bp, Homo sapien
gccagtccctgttctagttaccagg

SEQ ID NO: 528330 - DNA, 25 bp, Homo sapien
aagacttcgctctctttatgtgaaa

SEQ ID NO: 528331 - DNA, 25 bp, Homo sapien
taccagggagtttaattaacattca

SEQ ID NO: 528332 - DNA, 25 bp, Homo sapien
taaggctccacacttcagatgttgg

SEQ ID NO: 528333 - DNA, 25 bp, Homo sapien
aaatgggtaaggctccacacttcag

SEQ ID NO: 528334 - DNA, 25 bp, Homo sapien
gggtaaggctccacacttcagatgt

SEQ ID NO: 528335 - DNA, 25 bp, Homo sapien
tgatgaaatgggtaaggctccacac

SEQ ID NO: 528336 - DNA, 25 bp, Homo sapien
gagtagtagcctacaatcaggctct

SEQ ID NO: 528337 - DNA, 25 bp, Homo sapien
agttaattgatgagtagtagcctac

SEQ ID NO: 528338 - DNA, 25 bp, Homo sapien
tgatgagtagtagcctacaatcagg

SEQ ID NO: 528339 - DNA, 25 bp, Homo sapien
ctacaatcaggctctagcttctcca

SEQ ID NO: 528340 - DNA, 25 bp, Homo sapien
gaccgtgcgggcgtcggtccacgtc

SEQ ID NO: 528341 - DNA, 25 bp, Homo sapien
gacgtggaccgacgcccgcacggtc

SEQ ID NO: 528342 - DNA, 25 bp, Homo sapien
tttatttttagacaacctacatgac

SEQ ID NO: 528343 - DNA, 25 bp, Homo sapien
tttttagacaacctacatgacatgt

SEQ ID NO: 528344 - DNA, 25 bp, Homo sapien
agacaacctacatgacatgtttttc

SEQ ID NO: 528345 - DNA, 25 bp, Homo sapien
tttagacaacctacatgacatgttt

SEQ ID NO: 528346 - DNA, 25 bp, Homo sapien
gtgatagatccaaaataattgccac

SEQ ID NO: 528347 - DNA, 25 bp, Homo sapien
tgacaagcagaagccagttatgatg

SEQ ID NO: 528348 - DNA, 25 bp, Homo sapien
taagtcctggtgttgtgtggatgac

SEQ ID NO: 528349 - DNA, 25 bp, Homo sapien
catcagtcccatttgtcttaagtcc

SEQ ID NO: 528350 - DNA, 25 bp, Homo sapien
ttcaaacattacactgcaaaagtta

SEQ ID NO: 528351 - DNA, 25 bp, Homo sapien
ttacactgcaaaagttacattacca

SEQ ID NO: 528352 - DNA, 25 bp, Homo sapien
tacattaccattaacatgcagccta

SEQ ID NO: 528353 - DNA, 25 bp, Homo sapien
caaacattacactgcaaaagttaca

SEQ ID NO: 528354 - DNA, 25 bp, Homo sapien
ttcaatctgggccgccacaaagaca

SEQ ID NO: 528355 - DNA, 25 bp, Homo sapien
tcaatctgggccgccacaaagacag

SEQ ID NO: 528356 - DNA, 25 bp, Homo sapien
attcaatctgggccgccacaaagac

SEQ ID NO: 528357 - DNA, 25 bp, Homo sapien
acagaaagcgcagggatttctttct

SEQ ID NO: 528358 - DNA, 25 bp, Homo sapien
gttcaaggtctatcagtggatgcag

SEQ ID NO: 528359 - DNA, 25 bp, Homo sapien
tagtgcaaaccaaaagaacaacagt

SEQ ID NO: 528360 - DNA, 25 bp, Homo sapien
aaattgttcaaggtctatcagtgga

SEQ ID NO: 528361 - DNA, 25 bp, Homo sapien
aagaacaacagtaaattgttcaagg

SEQ ID NO: 528362 - DNA, 25 bp, Homo sapien
aacacccttaccaaatcagcggtag

SEQ ID NO: 528363 - DNA, 25 bp, Homo sapien
cagcggtagctcatttttcagaagg

SEQ ID NO: 528364 - DNA, 25 bp, Homo sapien
ccaaatcagcggtagctcatttttc

SEQ ID NO: 528365 - DNA, 25 bp, Homo sapien
ccttaccaaatcagcggtagctcat

SEQ ID NO: 528366 - DNA, 25 bp, Homo sapien
tatacagaagcctatgaaaactagg

SEQ ID NO: 528367 - DNA, 25 bp, Homo sapien
aatttctgtctactgttgactctaa

SEQ ID NO: 528368 - DNA, 25 bp, Homo sapien
gatactgtctgaataacccctttgg

SEQ ID NO: 528369 - DNA, 25 bp, Homo sapien
ccctttggtaagtcatcttatactg

SEQ ID NO: 528370 - DNA, 25 bp, Homo sapien
agtgaaaaccactgatactgatcca

SEQ ID NO: 528371 - DNA, 25 bp, Homo sapien
aaagtgaggccatatctagaggaag

SEQ ID NO: 528372 - DNA, 25 bp, Homo sapien
taggcttttcaatgatcagctgccc

SEQ ID NO: 528373 - DNA, 25 bp, Homo sapien
ttactaagctagtactgcactaggc

SEQ ID NO: 528374 - DNA, 25 bp, Homo sapien
acaccatcctcacggtagtccaata

SEQ ID NO: 528375 - DNA, 25 bp, Homo sapien
catctggattcatgttttcaccaat

SEQ ID NO: 528376 - DNA, 25 bp, Homo sapien
gtagtccaatagagcaaccatgcca

SEQ ID NO: 528377 - DNA, 25 bp, Homo sapien
tatggggtcacaccatcctcacggt

SEQ ID NO: 528378 - DNA, 25 bp, Homo sapien
aaaataacgtacagagcaatccagg

SEQ ID NO: 528379 - DNA, 25 bp, Homo sapien
catctgttcactggattaaggcacc

SEQ ID NO: 528380 - DNA, 25 bp, Homo sapien
gatttggaaacacctgcgagctggg

SEQ ID NO: 528381 - DNA, 25 bp, Homo sapien
tacaatcccaaaccctaaagcgtgc

SEQ ID NO: 528382 - DNA, 25 bp, Homo sapien
tgcttgatttgttctgcagcccctg

SEQ ID NO: 528383 - DNA, 25 bp, Homo sapien
ttctgcagcccctgtcataaaaggt

SEQ ID NO: 528384 - DNA, 25 bp, Homo sapien
ctggtctctgttcttcaagtttccc

SEQ ID NO: 528385 - DNA, 25 bp, Homo sapien
ttctggtctctgttcttcaagtttc

SEQ ID NO: 528386 - DNA, 25 bp, Homo sapien
tagacatcagctaggtactgccagt

SEQ ID NO: 528387 - DNA, 25 bp, Homo sapien
tatacccactgcgaaagaacctcaa

SEQ ID NO: 528388 - DNA, 25 bp, Homo sapien
tactagttcacagaaggtatctttc

SEQ ID NO: 528389 - DNA, 25 bp, Homo sapien
tctaattctaaacggaaacagactg

SEQ ID NO: 528390 - DNA, 25 bp, Homo sapien
actgtgctttcggtaccttcgccct

SEQ ID NO: 528391 - DNA, 25 bp, Homo sapien
gaaacttgtttcctgcaggtgatgg

SEQ ID NO: 528392 - DNA, 25 bp, Homo sapien
ggttcatgacaatatcgacaccagt

SEQ ID NO: 528393 - DNA, 25 bp, Homo sapien
caatatcgacaccagtgattactgt

SEQ ID NO: 528394 - DNA, 25 bp, Homo sapien
tagttcacggataagaagtattctt

SEQ ID NO: 528395 - DNA, 25 bp, Homo sapien
gacacaaacgcatccaaagcacctt

SEQ ID NO: 528396 - DNA, 25 bp, Homo sapien
caaagcaccttccacgccaatagtt

SEQ ID NO: 528397 - DNA, 25 bp, Homo sapien
gaaaaagcagtataattgcaaaaga

SEQ ID NO: 528398 - DNA, 25 bp, Homo sapien
ttaaaagagttgtctgttggccgga

SEQ ID NO: 528399 - DNA, 25 bp, Homo sapien
taaaagagttgtctgttggccggaa

SEQ ID NO: 528400 - DNA, 25 bp, Homo sapien
agagttgtctgttggccggaacaaa

SEQ ID NO: 528401 - DNA, 25 bp, Homo sapien
aaagagttgtctgttggccggaaca

SEQ ID NO: 528402 - DNA, 25 bp, Homo sapien
aggcacaacccgtccgcgatctccc

SEQ ID NO: 528403 - DNA, 25 bp, Homo sapien
cgtccgcgatctcccggatcttgta

SEQ ID NO: 528404 - DNA, 25 bp, Homo sapien
aacccgtccgcgatctcccggatct

SEQ ID NO: 528405 - DNA, 25 bp, Homo sapien
ctccaggcacaacccgtccgcgatc

SEQ ID NO: 528406 - DNA, 25 bp, Homo sapien
ctgccggatacacagagccgcccat

SEQ ID NO: 528407 - DNA, 25 bp, Homo sapien
gccggatacacagagccgcccatca

SEQ ID NO: 528408 - DNA, 25 bp, Homo sapien
cggatacacagagccgcccatcacc

SEQ ID NO: 528409 - DNA, 25 bp, Homo sapien
cacagagccgcccatcaccgtgcgc

SEQ ID NO: 528410 - DNA, 25 bp, Homo sapien
cgccatttcccgcatttcccgcgcc

SEQ ID NO: 528411 - DNA, 25 bp, Homo sapien
ccatttcccgcatttcccgcgccgg

SEQ ID NO: 528412 - DNA, 25 bp, Homo sapien
tctgcccctccgtagcacaccagag

SEQ ID NO: 528413 - DNA, 25 bp, Homo sapien
ggccgcacgcgggatctgcccctcc

SEQ ID NO: 528414 - DNA, 25 bp, Homo sapien
ctaggcccgcgacggctgcgccttc

SEQ ID NO: 528415 - DNA, 25 bp, Homo sapien
ctccgcgctcggctaagaccgccgg

SEQ ID NO: 528416 - DNA, 25 bp, Homo sapien
gctcggctaagaccgccggcgtccc

SEQ ID NO: 528417 - DNA, 25 bp, Homo sapien
gcgtcccctaggcccgcgacggctg

SEQ ID NO: 528418 - DNA, 25 bp, Homo sapien
ccccgtgtgcggcagtaaggatagt

SEQ ID NO: 528419 - DNA, 25 bp, Homo sapien
gcagtaaggatagtgcagtgaggac

SEQ ID NO: 528420 - DNA, 25 bp, Homo sapien
agacccccgtgtgcggcagtaagga

SEQ ID NO: 528421 - DNA, 25 bp, Homo sapien
tgtgcggcagtaaggatagtgcagt

SEQ ID NO: 528422 - DNA, 25 bp, Homo sapien
gctgatgaggtcccggtagataatc

SEQ ID NO: 528423 - DNA, 25 bp, Homo sapien
tgatgaggtcccggtagataatcat

SEQ ID NO: 528424 - DNA, 25 bp, Homo sapien
ggctgatgaggtcccggtagataat

SEQ ID NO: 528425 - DNA, 25 bp, Homo sapien
ctgatgaggtcccggtagataatca

SEQ ID NO: 528426 - DNA, 25 bp, Homo sapien
acttgaggcggagacacaaggctcc

SEQ ID NO: 528427 - DNA, 25 bp, Homo sapien
tagcacgagcctgaaactcggagcg

SEQ ID NO: 528428 - DNA, 25 bp, Homo sapien
acgacgacggcgctagcttagcacg

SEQ ID NO: 528429 - DNA, 25 bp, Homo sapien
caacctcatatagagggcacgtccc

SEQ ID NO: 528430 - DNA, 25 bp, Homo sapien
tgttttcccataaagaggcagcata

SEQ ID NO: 528431 - DNA, 25 bp, Homo sapien
ttccagcaatctgccacaagtattg

SEQ ID NO: 528432 - DNA, 25 bp, Homo sapien
gaacattggcacataccctctaggg

SEQ ID NO: 528433 - DNA, 25 bp, Homo sapien
aaactctgagtgtccctgtgcttaa

SEQ ID NO: 528434 - DNA, 25 bp, Homo sapien
ggtaggccagctcctaataggaaaa

SEQ ID NO: 528435 - DNA, 25 bp, Homo sapien
gacagacaggcctctaaaccttact

SEQ ID NO: 528436 - DNA, 25 bp, Homo sapien
accttactaagtagaggagggagtg

SEQ ID NO: 528437 - DNA, 25 bp, Homo sapien
tcagtttgtccttccagattcccca

SEQ ID NO: 528438 - DNA, 25 bp, Homo sapien
gtgtctccttcacttgctcaaagga

SEQ ID NO: 528439 - DNA, 25 bp, Homo sapien
cttcccggtagtcatggagcctgtg

SEQ ID NO: 528440 - DNA, 25 bp, Homo sapien
tgtggtttggctggctccgcacagg

SEQ ID NO: 528441 - DNA, 25 bp, Homo sapien
ctccgcacagggttaacaaatgcct

SEQ ID NO: 528442 - DNA, 25 bp, Homo sapien
ttcccggtagtcatggagcctgtgg

SEQ ID NO: 528443 - DNA, 25 bp, Homo sapien
tagcaatggaagaatggcctcgtac

SEQ ID NO: 528444 - DNA, 25 bp, Homo sapien
tatcattctccagacttaggcttgg

SEQ ID NO: 528445 - DNA, 25 bp, Homo sapien
caggcgaggaggcaaatcatcagtt

SEQ ID NO: 528446 - DNA, 25 bp, Homo sapien
gcctcgtacacacgctagagtggaa

SEQ ID NO: 528447 - DNA, 25 bp, Homo sapien
cggcctattaataaaatcggatgac

SEQ ID NO: 528448 - DNA, 25 bp, Homo sapien
gcactttctcagtcagcgagtatta

SEQ ID NO: 528449 - DNA, 25 bp, Homo sapien
tctgcaagatcgagacggtatctca

SEQ ID NO: 528450 - DNA, 25 bp, Homo sapien
tcttgggctacagggatcctctcgc

SEQ ID NO: 528451 - DNA, 25 bp, Homo sapien
ccacttagcagtagggagctgtatt

SEQ ID NO: 528452 - DNA, 25 bp, Homo sapien
tttcgccgaatgtccggcagagggc

SEQ ID NO: 528453 - DNA, 25 bp, Homo sapien
tgatattcccaatgaccgcagtcag

SEQ ID NO: 528454 - DNA, 25 bp, Homo sapien
ttgctgcagttacggtttcgccgaa

SEQ ID NO: 528455 - DNA, 25 bp, Homo sapien
cttcataccccggtaaagtgaatgg

SEQ ID NO: 528456 - DNA, 25 bp, Homo sapien
cccgctgagtactgggatctggaga

SEQ ID NO: 528457 - DNA, 25 bp, Homo sapien
caagttcccgctgagtactgggatc

SEQ ID NO: 528458 - DNA, 25 bp, Homo sapien
gtggcttcataccccggtaaagtga

SEQ ID NO: 528459 - DNA, 25 bp, Homo sapien
ctgaatccatgcccctcgctttccc

SEQ ID NO: 528460 - DNA, 25 bp, Homo sapien
tttcctgcatccatgccacgcgatt

SEQ ID NO: 528461 - DNA, 25 bp, Homo sapien
cccctcgctttcccgcatccatgct

SEQ ID NO: 528462 - DNA, 25 bp, Homo sapien
tttcctgaatccatgcccctcgctt

SEQ ID NO: 528463 - DNA, 25 bp, Homo sapien
tatttcaaagatcaggcctacctca

SEQ ID NO: 528464 - DNA, 25 bp, Homo sapien
gcatattagcagatccatactggaa

SEQ ID NO: 528465 - DNA, 25 bp, Homo sapien
tccgtttggcttcccaaggatccca

SEQ ID NO: 528466 - DNA, 25 bp, Homo sapien
caggttgtgtctgccagttcagtcc

SEQ ID NO: 528467 - DNA, 25 bp, Homo sapien
atctcatctttgtctaacttcccgt

SEQ ID NO: 528468 - DNA, 25 bp, Homo sapien
atctttgtctaacttcccgtccttg

SEQ ID NO: 528469 - DNA, 25 bp, Homo sapien
gagatcttccccgtaattggtagct

SEQ ID NO: 528470 - DNA, 25 bp, Homo sapien
tgagatcttccccgtaattggtagc

SEQ ID NO: 528471 - DNA, 25 bp, Homo sapien
cataggtggcttgtttgtattcttc

SEQ ID NO: 528472 - DNA, 25 bp, Homo sapien
aaggcctcgtggtcgtactggaagc

SEQ ID NO: 528473 - DNA, 25 bp, Homo sapien
cgtggtcgtactggaagctctggtt

SEQ ID NO: 528474 - DNA, 25 bp, Homo sapien
gcttggcccgcagaacccgcggcgc

SEQ ID NO: 528475 - DNA, 25 bp, Homo sapien
atccttgtccctatcataatccttc

SEQ ID NO: 528476 - DNA, 25 bp, Homo sapien
taaccccaggcggccaccgcgcgcc

SEQ ID NO: 528477 - DNA, 25 bp, Homo sapien
accccaggcggccaccgcgcgccat

SEQ ID NO: 528478 - DNA, 25 bp, Homo sapien
aaccccaggcggccaccgcgcgcca

SEQ ID NO: 528479 - DNA, 25 bp, Homo sapien
ctaaccccaggcggccaccgcgcgc

SEQ ID NO: 528480 - DNA, 25 bp, Homo sapien
ccgggagggagacgctgagcgagcg

SEQ ID NO: 528481 - DNA, 25 bp, Homo sapien
gggagggagacgctgagcgagcgac

SEQ ID NO: 528482 - DNA, 25 bp, Homo sapien
cggccgggagggagacgctgagcga

SEQ ID NO: 528483 - DNA, 25 bp, Homo sapien
gccgggagggagacgctgagcgagc

SEQ ID NO: 528484 - DNA, 25 bp, Homo sapien
taatgcatactatttctagcacatg

SEQ ID NO: 528485 - DNA, 25 bp, Homo sapien
tgtttcttggttagaagcttcaaca

SEQ ID NO: 528486 - DNA, 25 bp, Homo sapien
ggtacttatagccagaaccctgaca

SEQ ID NO: 528487 - DNA, 25 bp, Homo sapien
caaggcttatgccacatattccaac

SEQ ID NO: 528488 - DNA, 25 bp, Homo sapien
aatcgtgcttaagttttaccatgag

SEQ ID NO: 528489 - DNA, 25 bp, Homo sapien
tctgacattcgctctttacatggtc

SEQ ID NO: 528490 - DNA, 25 bp, Homo sapien
tccaccttggtaggaacatgtatgt

SEQ ID NO: 528491 - DNA, 25 bp, Homo sapien
aaaagcaggttaagatcctgttcaa

SEQ ID NO: 528492 - DNA, 25 bp, Homo sapien
tcaaagggaccattcatgcataagg

SEQ ID NO: 528493 - DNA, 25 bp, Homo sapien
gaatttggccgcactactgtggaag

SEQ ID NO: 528494 - DNA, 25 bp, Homo sapien
tagtttagaacaagcagcaaggcct

SEQ ID NO: 528495 - DNA, 25 bp, Homo sapien
ggagccccagctaacatgtatttaa

SEQ ID NO: 528496 - DNA, 25 bp, Homo sapien
gagacccaaataaatatgttccctg

SEQ ID NO: 528497 - DNA, 25 bp, Homo sapien
ccaaataaatatgttccctgtcctg

SEQ ID NO: 528498 - DNA, 25 bp, Homo sapien
gaactgaagagacccaaataaatat

SEQ ID NO: 528499 - DNA, 25 bp, Homo sapien
actgaagagacccaaataaatatgt

SEQ ID NO: 528500 - DNA, 25 bp, Homo sapien
caattaccatgagaagcccatgaga

SEQ ID NO: 528501 - DNA, 25 bp, Homo sapien
catagactgtttagagctgttccac

SEQ ID NO: 528502 - DNA, 25 bp, Homo sapien
caaagggcttcattcacaattacca

SEQ ID NO: 528503 - DNA, 25 bp, Homo sapien
tgacctaagacagaacctaagctgc

SEQ ID NO: 528504 - DNA, 25 bp, Homo sapien
cataacaccaccacgaatttagaga

SEQ ID NO: 528505 - DNA, 25 bp, Homo sapien
tcacaaatgtcaagtcttcaaagct

SEQ ID NO: 528506 - DNA, 25 bp, Homo sapien
ggatccatttcctgcaccgtttata

SEQ ID NO: 528507 - DNA, 25 bp, Homo sapien
gtggaagatcctgccaaaataggaa

SEQ ID NO: 528508 - DNA, 25 bp, Homo sapien
ctgagatgcatcaggagctactctc

SEQ ID NO: 528509 - DNA, 25 bp, Homo sapien
gcttttctagagcagtctgattctc

SEQ ID NO: 528510 - DNA, 25 bp, Homo sapien
tgaataaaacaatacatcgctcctg

SEQ ID NO: 528511 - DNA, 25 bp, Homo sapien
agcaaaatctcccagaaattcagaa

SEQ ID NO: 528512 - DNA, 25 bp, Homo sapien
tgttgctcacatcccagaatctgtg

SEQ ID NO: 528513 - DNA, 25 bp, Homo sapien
gatgttgaagggcacttcagtggta

SEQ ID NO: 528514 - DNA, 25 bp, Homo sapien
gaagagcatccaatgccaacacaca

SEQ ID NO: 528515 - DNA, 25 bp, Homo sapien
cattaaacgtttgatgaagagcatc

SEQ ID NO: 528516 - DNA, 25 bp, Homo sapien
tcttcaactgctcgtatgtcacaaa

SEQ ID NO: 528517 - DNA, 25 bp, Homo sapien
tcaactgctcgtatgtcacaaagaa

SEQ ID NO: 528518 - DNA, 25 bp, Homo sapien
ttcaactgctcgtatgtcacaaaga

SEQ ID NO: 528519 - DNA, 25 bp, Homo sapien
ttcttcaactgctcgtatgtcacaa

SEQ ID NO: 528520 - DNA, 25 bp, Homo sapien
tgatgaagagcaacaagaggacagc

SEQ ID NO: 528521 - DNA, 25 bp, Homo sapien
ggcagacccacgctatggacacgat

SEQ ID NO: 528522 - DNA, 25 bp, Homo sapien
taattaactgcctcacgggcgcggt

SEQ ID NO: 528523 - DNA, 25 bp, Homo sapien
tgagatggcatctacgctgataagc

SEQ ID NO: 528524 - DNA, 25 bp, Homo sapien
ttttttcagatctattgcaacagaa

SEQ ID NO: 528525 - DNA, 25 bp, Homo sapien
acaaatagtattctttagctgtatc

SEQ ID NO: 528526 - DNA, 25 bp, Homo sapien
tacaaatagtattctttagctgtat

SEQ ID NO: 528527 - DNA, 25 bp, Homo sapien
caaggaccaagtctcaaccaatttg

SEQ ID NO: 528528 - DNA, 25 bp, Homo sapien
tattccaaggaccaagtctcaacca

SEQ ID NO: 528529 - DNA, 25 bp, Homo sapien
gaccaagtctcaaccaatttggcca

SEQ ID NO: 528530 - DNA, 25 bp, Homo sapien
aatgatattccaaggaccaagtctc

SEQ ID NO: 528531 - DNA, 25 bp, Homo sapien
gattgaatgaactccacacaaagga

SEQ ID NO: 528532 - DNA, 25 bp, Homo sapien
caaccccacacgaaggattgaatga

SEQ ID NO: 528533 - DNA, 25 bp, Homo sapien
gaagactaaggctccatgcccaaca

SEQ ID NO: 528534 - DNA, 25 bp, Homo sapien
cattaataattagtggccaggccag

SEQ ID NO: 528535 - DNA, 25 bp, Homo sapien
taagtgtctttgcttcattaaggca

SEQ ID NO: 528536 - DNA, 25 bp, Homo sapien
ggtctgttgcttccgtgccatgtgg

SEQ ID NO: 528537 - DNA, 25 bp, Homo sapien
gccatgtgggctcctgaacaggtca

SEQ ID NO: 528538 - DNA, 25 bp, Homo sapien
caagatgtcaggtggatgaatacga

SEQ ID NO: 528539 - DNA, 25 bp, Homo sapien
catgtacatctctgggctttaaagc

SEQ ID NO: 528540 - DNA, 25 bp, Homo sapien
catactagtttgacccaacaggaag

SEQ ID NO: 528541 - DNA, 25 bp, Homo sapien
tactggcaatctagtggcagagaca

SEQ ID NO: 528542 - DNA, 25 bp, Homo sapien
taagcacagtgtggcaaaaatggtc

SEQ ID NO: 528543 - DNA, 25 bp, Homo sapien
ccctgcagagacagacatctgctct

SEQ ID NO: 528544 - DNA, 25 bp, Homo sapien
tataattcacaaccctgcagagaca

SEQ ID NO: 528545 - DNA, 25 bp, Homo sapien
atatataattcacaaccctgcagag

SEQ ID NO: 528546 - DNA, 25 bp, Homo sapien
accctgcagagacagacatctgctc

SEQ ID NO: 528547 - DNA, 25 bp, Homo sapien
cactctctgattcatcatacgtgtc

SEQ ID NO: 528548 - DNA, 25 bp, Homo sapien
tctgccatctcgaagcactctctga

SEQ ID NO: 528549 - DNA, 25 bp, Homo sapien
tgtagccagaacatctgccatctcg

SEQ ID NO: 528550 - DNA, 25 bp, Homo sapien
tctgattcatcatacgtgtcctcac

SEQ ID NO: 528551 - DNA, 25 bp, Homo sapien
aacatcaacagggtttgaggccagg

SEQ ID NO: 528552 - DNA, 25 bp, Homo sapien
tcaacagggtttgaggccagggccc

SEQ ID NO: 528553 - DNA, 25 bp, Homo sapien
catcaacagggtttgaggccagggc

SEQ ID NO: 528554 - DNA, 25 bp, Homo sapien
gggcccctgccagaccacaggtgaa

SEQ ID NO: 528555 - DNA, 25 bp, Homo sapien
ggcctgagagaataagatgcttctt

SEQ ID NO: 528556 - DNA, 25 bp, Homo sapien
gaagtgggtatacacagtgtctccc

SEQ ID NO: 528557 - DNA, 25 bp, Homo sapien
aatagcagccctctgcgcagtaagg

SEQ ID NO: 528558 - DNA, 25 bp, Homo sapien
tgatgtcatagaccggcagctccac

SEQ ID NO: 528559 - DNA, 25 bp, Homo sapien
ctccttgaatggtgttgctttgcgc

SEQ ID NO: 528560 - DNA, 25 bp, Homo sapien
catgaagttgcctatcattcctcct

SEQ ID NO: 528561 - DNA, 25 bp, Homo sapien
tgttgctttgcgcttgcatccgaat

SEQ ID NO: 528562 - DNA, 25 bp, Homo sapien
gaagttgcctatcattcctccttga

SEQ ID NO: 528563 - DNA, 25 bp, Homo sapien
tgaagatatgactccagacagaatt

SEQ ID NO: 528564 - DNA, 25 bp, Homo sapien
gcaatggttgaagatatgactccag

SEQ ID NO: 528565 - DNA, 25 bp, Homo sapien
caaaacatcagttggattagcaatg

SEQ ID NO: 528566 - DNA, 25 bp, Homo sapien
tatcacatttatcggtagagtttca

SEQ ID NO: 528567 - DNA, 25 bp, Homo sapien
acagtggaaaacagattccccactc

SEQ ID NO: 528568 - DNA, 25 bp, Homo sapien
ctcctgtccacagtggaaaacagat

SEQ ID NO: 528569 - DNA, 25 bp, Homo sapien
agtggaaaacagattccccactcac

SEQ ID NO: 528570 - DNA, 25 bp, Homo sapien
cctgtccacagtggaaaacagattc

SEQ ID NO: 528571 - DNA, 25 bp, Homo sapien
agtcgcttcaagctctggtaagtgc

SEQ ID NO: 528572 - DNA, 25 bp, Homo sapien
gaatagtcgcttcaagctctggtaa

SEQ ID NO: 528573 - DNA, 25 bp, Homo sapien
aatgaatagtcgcttcaagctctgg

SEQ ID NO: 528574 - DNA, 25 bp, Homo sapien
cgttcaatgaatagtcgcttcaagc

SEQ ID NO: 528575 - DNA, 25 bp, Homo sapien
tgccataggatgcctggcgtaacat

SEQ ID NO: 528576 - DNA, 25 bp, Homo sapien
ggtgccataggatgcctggcgtaac

SEQ ID NO: 528577 - DNA, 25 bp, Homo sapien
gtgccataggatgcctggcgtaaca

SEQ ID NO: 528578 - DNA, 25 bp, Homo sapien
gcgtgcaacattcctcggtatctaa

SEQ ID NO: 528579 - DNA, 25 bp, Homo sapien
cccgagtagagtgctttcagccctt

SEQ ID NO: 528580 - DNA, 25 bp, Homo sapien
taaattttgcatcattcgtctggcc

SEQ ID NO: 528581 - DNA, 25 bp, Homo sapien
gccttgaatctggagccgtgtcttg

SEQ ID NO: 528582 - DNA, 25 bp, Homo sapien
tacacaaacggcttccagttgaggg

SEQ ID NO: 528583 - DNA, 25 bp, Homo sapien
cccgtacacaaacggcttccagttg

SEQ ID NO: 528584 - DNA, 25 bp, Homo sapien
cgtacacaaacggcttccagttgag

SEQ ID NO: 528585 - DNA, 25 bp, Homo sapien
gtacacaaacggcttccagttgagg

SEQ ID NO: 528586 - DNA, 25 bp, Homo sapien
aacattgcctccagtgctgtttttc

SEQ ID NO: 528587 - DNA, 25 bp, Homo sapien
gatttatagaaacattgcctccagt

SEQ ID NO: 528588 - DNA, 25 bp, Homo sapien
cttctttgatttatagaaacattgc

SEQ ID NO: 528589 - DNA, 25 bp, Homo sapien
tatagaaacattgcctccagtgctg

SEQ ID NO: 528590 - DNA, 25 bp, Homo sapien
ggttttcttcttcgccaacaccatc

SEQ ID NO: 528591 - DNA, 25 bp, Homo sapien
caacacaaccaattagggggacatc

SEQ ID NO: 528592 - DNA, 25 bp, Homo sapien
cacaaccaattagggggacatccat

SEQ ID NO: 528593 - DNA, 25 bp, Homo sapien
tcggttttcttcttcgccaacacca

SEQ ID NO: 528594 - DNA, 25 bp, Homo sapien
caacccggactcagttgtaacaaga

SEQ ID NO: 528595 - DNA, 25 bp, Homo sapien
gttgtaacaagaacctgaggccgct

SEQ ID NO: 528596 - DNA, 25 bp, Homo sapien
gtaacaagaacctgaggccgctgga

SEQ ID NO: 528597 - DNA, 25 bp, Homo sapien
tcctccaacccggactcagttgtaa

SEQ ID NO: 528598 - DNA, 25 bp, Homo sapien
cactatggaagctgaaaatgttaaa

SEQ ID NO: 528599 - DNA, 25 bp, Homo sapien
tccactatggaagctgaaaatgtta

SEQ ID NO: 528600 - DNA, 25 bp, Homo sapien
actatggaagctgaaaatgttaaat

SEQ ID NO: 528601 - DNA, 25 bp, Homo sapien
ccactatggaagctgaaaatgttaa

SEQ ID NO: 528602 - DNA, 25 bp, Homo sapien
cagacatgccggaaagagaatgctt

SEQ ID NO: 528603 - DNA, 25 bp, Homo sapien
aggcagccctgcatgaaattgttag

SEQ ID NO: 528604 - DNA, 25 bp, Homo sapien
gatttgcgacaatacggacggacct

SEQ ID NO: 528605 - DNA, 25 bp, Homo sapien
ggacggacctaaaggacattatgct

SEQ ID NO: 528606 - DNA, 25 bp, Homo sapien
gagtcaagtgttcccagtagttcaa

SEQ ID NO: 528607 - DNA, 25 bp, Homo sapien
caggactgtcttcgtgttgccagaa

SEQ ID NO: 528608 - DNA, 25 bp, Homo sapien
ggctgcttgcttcacctctacgggt

SEQ ID NO: 528609 - DNA, 25 bp, Homo sapien
tcatttgggaacatagccaggcact

SEQ ID NO: 528610 - DNA, 25 bp, Homo sapien
tttttgagatggagtctcgctctgt

SEQ ID NO: 528611 - DNA, 25 bp, Homo sapien
gcaagcttcacttcccgggttcatg

SEQ ID NO: 528612 - DNA, 25 bp, Homo sapien
gagtgcttcacgtttctgagtgaaa

SEQ ID NO: 528613 - DNA, 25 bp, Homo sapien
aagcaaggtcatcaccgagagggag

SEQ ID NO: 528614 - DNA, 25 bp, Homo sapien
tcttgacaatgtgggtggaatttca

SEQ ID NO: 528615 - DNA, 25 bp, Homo sapien
cacacgggggttcagtcatggtaac

SEQ ID NO: 528616 - DNA, 25 bp, Homo sapien
gtttctaaataagcaggccagccgg

SEQ ID NO: 528617 - DNA, 25 bp, Homo sapien
tcttgcagtctgcaggacaccgagg

SEQ ID NO: 528618 - DNA, 25 bp, Homo sapien
cgggctgtgcacctaaatgtctgtc

SEQ ID NO: 528619 - DNA, 25 bp, Homo sapien
tatgtgggaacgtccccgagaacca

SEQ ID NO: 528620 - DNA, 25 bp, Homo sapien
tgcctcgtttaaatggtcacaagaa

SEQ ID NO: 528621 - DNA, 25 bp, Homo sapien
gaaatcaagcgaattagaaggcctg

SEQ ID NO: 528622 - DNA, 25 bp, Homo sapien
tctgtgattggtgataactgcctcg

SEQ ID NO: 528623 - DNA, 25 bp, Homo sapien
aagagagagctagggcagacatgca

SEQ ID NO: 528624 - DNA, 25 bp, Homo sapien
gctgagtaggtaatagtgacccaac

SEQ ID NO: 528625 - DNA, 25 bp, Homo sapien
aatttgatttacagagcggagtgtg

SEQ ID NO: 528626 - DNA, 25 bp, Homo sapien
taagtgttcacttatacaaagagtg

SEQ ID NO: 528627 - DNA, 25 bp, Homo sapien
gtgacccaacttgtttgctaaatga

SEQ ID NO: 528628 - DNA, 25 bp, Homo sapien
ctctcataaaaggtcaacaggtctt

SEQ ID NO: 528629 - DNA, 25 bp, Homo sapien
ttggtggatgccagataagccccgc

SEQ ID NO: 528630 - DNA, 25 bp, Homo sapien
gccacgacaggtcccaaattacaaa

SEQ ID NO: 528631 - DNA, 25 bp, Homo sapien
tcaaatcaaggagccacgacaggtc

SEQ ID NO: 528632 - DNA, 25 bp, Homo sapien
aaaccagagtttagagagcatcttc

SEQ ID NO: 528633 - DNA, 25 bp, Homo sapien
tatactgacggcctctatgaagttt

SEQ ID NO: 528634 - DNA, 25 bp, Homo sapien
ggtggtcgcgtaattcaggagccta

SEQ ID NO: 528635 - DNA, 25 bp, Homo sapien
gaaggacccggatcttctgggctgt

SEQ ID NO: 528636 - DNA, 25 bp, Homo sapien
atggtgatgtgggctgaggccacac

SEQ ID NO: 528637 - DNA, 25 bp, Homo sapien
catggtgatgtgggctgaggccaca

SEQ ID NO: 528638 - DNA, 25 bp, Homo sapien
gcggtgctttcctgcggctgccggg

SEQ ID NO: 528639 - DNA, 25 bp, Homo sapien
gatgcctcacagtggctacccgtga

SEQ ID NO: 528640 - DNA, 25 bp, Homo sapien
gctgggatgcctcacagtggctacc

SEQ ID NO: 528641 - DNA, 25 bp, Homo sapien
gaggccgcctctatgccaagttctg

SEQ ID NO: 528642 - DNA, 25 bp, Homo sapien
tgcctcattcccaggggacatgtcc

SEQ ID NO: 528643 - DNA, 25 bp, Homo sapien
tgtctgtctgccaaggcagtcctgc

SEQ ID NO: 528644 - DNA, 25 bp, Homo sapien
gccccgggacacctctctggtggtg

SEQ ID NO: 528645 - DNA, 25 bp, Homo sapien
tgggggtctgtaagtggagccttcc

SEQ ID NO: 528646 - DNA, 25 bp, Homo sapien
tgcccaggtttaaacaaatctgctt

SEQ ID NO: 528647 - DNA, 25 bp, Homo sapien
tgcgtggacatggatgttcagattc

SEQ ID NO: 528648 - DNA, 25 bp, Homo sapien
aggccttctggcgtttgtctttggg

SEQ ID NO: 528649 - DNA, 25 bp, Homo sapien
cagaagatgatcttatcctggctcc

SEQ ID NO: 528650 - DNA, 25 bp, Homo sapien
taaaatcttctcctaggtcaatgag

SEQ ID NO: 528651 - DNA, 25 bp, Homo sapien
ggactaagcccttcctctgtgggta

SEQ ID NO: 528652 - DNA, 25 bp, Homo sapien
caatgagactgcagttttgctgatg

SEQ ID NO: 528653 - DNA, 25 bp, Homo sapien
taagcccttcctctgtgggtaacat

SEQ ID NO: 528654 - DNA, 25 bp, Homo sapien
gaagaacatcgtgcctcctctgtgg

SEQ ID NO: 528655 - DNA, 25 bp, Homo sapien
gtccatcatggtgctcattctccca

SEQ ID NO: 528656 - DNA, 25 bp, Homo sapien
gacctcatggactggtccatcatgg

SEQ ID NO: 528657 - DNA, 25 bp, Homo sapien
cattctcccatttccaacatgtgta

SEQ ID NO: 528658 - DNA, 25 bp, Homo sapien
gagttgttgataagggcccggatcc

SEQ ID NO: 528659 - DNA, 25 bp, Homo sapien
cattttcgcatataagatgagcata

SEQ ID NO: 528660 - DNA, 25 bp, Homo sapien
gcatagccaggtttcctgatggata

SEQ ID NO: 528661 - DNA, 25 bp, Homo sapien
cggatcctcccttctagactgtctt

SEQ ID NO: 528662 - DNA, 25 bp, Homo sapien
cataaaaaatcgtagacattttagg

SEQ ID NO: 528663 - DNA, 25 bp, Homo sapien
tatgtcaatacgagcatccctgtgc

SEQ ID NO: 528664 - DNA, 25 bp, Homo sapien
aaatcgtagacattttaggtgccaa

SEQ ID NO: 528665 - DNA, 25 bp, Homo sapien
ttaggtgccaatatatgtcaatacg

SEQ ID NO: 528666 - DNA, 25 bp, Homo sapien
gaaagagaatttgatagacattctt

SEQ ID NO: 528667 - DNA, 25 bp, Homo sapien
gaatttgatagacattcttgttggg

SEQ ID NO: 528668 - DNA, 25 bp, Homo sapien
gagaatttgatagacattcttgttg

SEQ ID NO: 528669 - DNA, 25 bp, Homo sapien
tagacattcttgttggggtagagaa

SEQ ID NO: 528670 - DNA, 25 bp, Homo sapien
acttctgagattagacaagattgaa

SEQ ID NO: 528671 - DNA, 25 bp, Homo sapien
aggctcagctctgcttaacttctga

SEQ ID NO: 528672 - DNA, 25 bp, Homo sapien
caggctcagctctgcttaacttctg

SEQ ID NO: 528673 - DNA, 25 bp, Homo sapien
gattgaaagcattcagggtgatatg

SEQ ID NO: 528674 - DNA, 25 bp, Homo sapien
tggccatggagtcctgtctggctgc

SEQ ID NO: 528675 - DNA, 25 bp, Homo sapien
tgtagttgcaagacattccttaaac

SEQ ID NO: 528676 - DNA, 25 bp, Homo sapien
atttcttgtagttgcaagacattcc

SEQ ID NO: 528677 - DNA, 25 bp, Homo sapien
taagcaatgttctgagcggatggtc

SEQ ID NO: 528678 - DNA, 25 bp, Homo sapien
ctggcctggaggggttggatttggc

SEQ ID NO: 528679 - DNA, 25 bp, Homo sapien
tcctggcctggaggggttggatttg

SEQ ID NO: 528680 - DNA, 25 bp, Homo sapien
catggctgctgtgaggccctgggtc

SEQ ID NO: 528681 - DNA, 25 bp, Homo sapien
cctgggtcctggcctggaggggttg

SEQ ID NO: 528682 - DNA, 25 bp, Homo sapien
caatgcaggcccaagtgttgaagga

SEQ ID NO: 528683 - DNA, 25 bp, Homo sapien
gttctgactggtcccacagacttcc

SEQ ID NO: 528684 - DNA, 25 bp, Homo sapien
cccaagtgttgaaggaatactgaac

SEQ ID NO: 528685 - DNA, 25 bp, Homo sapien
ccccttctcctgtctataggagttc

SEQ ID NO: 528686 - DNA, 25 bp, Homo sapien
cacttttgccacaattgaggccaca

SEQ ID NO: 528687 - DNA, 25 bp, Homo sapien
ttttgccacaattgaggccacactc

SEQ ID NO: 528688 - DNA, 25 bp, Homo sapien
ttgccacaattgaggccacactcat

SEQ ID NO: 528689 - DNA, 25 bp, Homo sapien
ttcacttttgccacaattgaggcca

SEQ ID NO: 528690 - DNA, 25 bp, Homo sapien
ggtgttggtttgctcattaaatgaa

SEQ ID NO: 528691 - DNA, 25 bp, Homo sapien
ccattccttatctcgttctaatttc

SEQ ID NO: 528692 - DNA, 25 bp, Homo sapien
tgtctcaggcttctcaggtgttggt

SEQ ID NO: 528693 - DNA, 25 bp, Homo sapien
tcttcctatgatgaacaacacgttg

SEQ ID NO: 528694 - DNA, 25 bp, Homo sapien
cgtctcctcttaatccgtaagattg

SEQ ID NO: 528695 - DNA, 25 bp, Homo sapien
cttcacgtctcctcttaatccgtaa

SEQ ID NO: 528696 - DNA, 25 bp, Homo sapien
atccgtaagattgtttccttgaact

SEQ ID NO: 528697 - DNA, 25 bp, Homo sapien
cttaatccgtaagattgtttccttg

SEQ ID NO: 528698 - DNA, 25 bp, Homo sapien
agctttcttcgagtcaatgcccagg

SEQ ID NO: 528699 - DNA, 25 bp, Homo sapien
gcagagtctctttcgcaggtggaaa

SEQ ID NO: 528700 - DNA, 25 bp, Homo sapien
gcagacagtactggagcctgcagag

SEQ ID NO: 528701 - DNA, 25 bp, Homo sapien
catgatatccatttagtgcttccct

SEQ ID NO: 528702 - DNA, 25 bp, Homo sapien
ggaaagagcaggcttccattctgag

SEQ ID NO: 528703 - DNA, 25 bp, Homo sapien
ctggctctccaggtttctgagagtg

SEQ ID NO: 528704 - DNA, 25 bp, Homo sapien
caggtttctgagagtggataaagga

SEQ ID NO: 528705 - DNA, 25 bp, Homo sapien
gagcaggcttccattctgagagcat

SEQ ID NO: 528706 - DNA, 25 bp, Homo sapien
gggaatgtcaaaatcctcttccagt

SEQ ID NO: 528707 - DNA, 25 bp, Homo sapien
tcttccagttcattgtgagcagcca

SEQ ID NO: 528708 - DNA, 25 bp, Homo sapien
tcactttccagtagcttagttaggg

SEQ ID NO: 528709 - DNA, 25 bp, Homo sapien
gttttaaatactgtctgataggagc

SEQ ID NO: 528710 - DNA, 25 bp, Homo sapien
tggcattcgctccattgcagctgca

SEQ ID NO: 528711 - DNA, 25 bp, Homo sapien
acttgtccatatctgctgcctacca

SEQ ID NO: 528712 - DNA, 25 bp, Homo sapien
gtccctacttgtccatatctgctgc

SEQ ID NO: 528713 - DNA, 25 bp, Homo sapien
tctgtccctacttgtccatatctgc

SEQ ID NO: 528714 - DNA, 25 bp, Homo sapien
cctacttgtccatatctgctgccta

SEQ ID NO: 528715 - DNA, 25 bp, Homo sapien
ccacttccagcttgtcaatggactc

SEQ ID NO: 528716 - DNA, 25 bp, Homo sapien
gttttcatctaaatcttccacttcc

SEQ ID NO: 528717 - DNA, 25 bp, Homo sapien
tccacttccagcttgtcaatggact

SEQ ID NO: 528718 - DNA, 25 bp, Homo sapien
cacttccagcttgtcaatggactca

SEQ ID NO: 528719 - DNA, 25 bp, Homo sapien
ataccatcccaaaagttctctttag

SEQ ID NO: 528720 - DNA, 25 bp, Homo sapien
tggaaggagcgtcgaaaggaagggc

SEQ ID NO: 528721 - DNA, 25 bp, Homo sapien
tttcgattttggaaggagcgtcgaa

SEQ ID NO: 528722 - DNA, 25 bp, Homo sapien
ctttcgattttggaaggagcgtcga

SEQ ID NO: 528723 - DNA, 25 bp, Homo sapien
ttcgattttggaaggagcgtcgaaa

SEQ ID NO: 528724 - DNA, 25 bp, Homo sapien
ttgctgtactttagtgttaacatgc

SEQ ID NO: 528725 - DNA, 25 bp, Homo sapien
ttttgctgtactttagtgttaacat

SEQ ID NO: 528726 - DNA, 25 bp, Homo sapien
tgctgtactttagtgttaacatgct

SEQ ID NO: 528727 - DNA, 25 bp, Homo sapien
tttgctgtactttagtgttaacatg

SEQ ID NO: 528728 - DNA, 25 bp, Homo sapien
agccagcttcgtggtggtttcttgc

SEQ ID NO: 528729 - DNA, 25 bp, Homo sapien
tctgatttcgattttaaagatttta

SEQ ID NO: 528730 - DNA, 25 bp, Homo sapien
ttccggagccagcttcgtggtggtt

SEQ ID NO: 528731 - DNA, 25 bp, Homo sapien
cggagccagcttcgtggtggtttct

SEQ ID NO: 528732 - DNA, 25 bp, Homo sapien
ttcccctcctgcacggatggttttc

SEQ ID NO: 528733 - DNA, 25 bp, Homo sapien
tgactgggttttgcacttccctacc

SEQ ID NO: 528734 - DNA, 25 bp, Homo sapien
ctcctcctgactgggttttgcactt

SEQ ID NO: 528735 - DNA, 25 bp, Homo sapien
gcaggaagaccgctttcccctcctg

SEQ ID NO: 528736 - DNA, 25 bp, Homo sapien
ttgtcgccatcttcaggcatgtggc

SEQ ID NO: 528737 - DNA, 25 bp, Homo sapien
tttgtcgccatcttcaggcatgtgg

SEQ ID NO: 528738 - DNA, 25 bp, Homo sapien
accaagcaagggaacatggacactg

SEQ ID NO: 528739 - DNA, 25 bp, Homo sapien
acatggacactgctcagtgctcctt

SEQ ID NO: 528740 - DNA, 25 bp, Homo sapien
aacatggacactgctcagtgctcct

SEQ ID NO: 528741 - DNA, 25 bp, Homo sapien
ccaagcaagggaacatggacactgc

SEQ ID NO: 528742 - DNA, 25 bp, Homo sapien
ttatctggatatggcctgtcacccc

SEQ ID NO: 528743 - DNA, 25 bp, Homo sapien
ttagctgtagccacgaaagttcact

SEQ ID NO: 528744 - DNA, 25 bp, Homo sapien
ggctttgacccccactgagactgtc

SEQ ID NO: 528745 - DNA, 25 bp, Homo sapien
cacgaaagttcactacatggatagt

SEQ ID NO: 528746 - DNA, 25 bp, Homo sapien
gttctgtcgtagcaccagtctgtct

SEQ ID NO: 528747 - DNA, 25 bp, Homo sapien
atgtcagaagcaactcagaagactc

SEQ ID NO: 528748 - DNA, 25 bp, Homo sapien
cggcagttctgtcgtagcaccagtc

SEQ ID NO: 528749 - DNA, 25 bp, Homo sapien
tacaatgtcagaagcaactcagaag

SEQ ID NO: 528750 - DNA, 25 bp, Homo sapien
ctgagaggggccagcgtctggactc

SEQ ID NO: 528751 - DNA, 25 bp, Homo sapien
ggtgcccactgggacccacagagat

SEQ ID NO: 528752 - DNA, 25 bp, Homo sapien
cactgggacccacagagatgatgcc

SEQ ID NO: 528753 - DNA, 25 bp, Homo sapien
ccagtcctcatgaaaggacttagaa

SEQ ID NO: 528754 - DNA, 25 bp, Homo sapien
tgatgccagtcctcatgaaaggact

SEQ ID NO: 528755 - DNA, 25 bp, Homo sapien
ctaaaggagtctgtggaaggtttgg

SEQ ID NO: 528756 - DNA, 25 bp, Homo sapien
acttggaggcccagatctggcccct

SEQ ID NO: 528757 - DNA, 25 bp, Homo sapien
ttggaggcccagatctggcccctgg

SEQ ID NO: 528758 - DNA, 25 bp, Homo sapien
tgcctaaaggagtctgtggaaggtt

SEQ ID NO: 528759 - DNA, 25 bp, Homo sapien
tcgccgggtcaagggacagccccat

SEQ ID NO: 528760 - DNA, 25 bp, Homo sapien
gggctgcctcgccgggtcaagggac

SEQ ID NO: 528761 - DNA, 25 bp, Homo sapien
tggggaacagagcggccagtgcagg

SEQ ID NO: 528762 - DNA, 25 bp, Homo sapien
ctgtcagaggccttgcagtgcccct

SEQ ID NO: 528763 - DNA, 25 bp, Homo sapien
cgaagaagcatggtttgtgatgaat

SEQ ID NO: 528764 - DNA, 25 bp, Homo sapien
tgtgatgaataacttgccttgggtt

SEQ ID NO: 528765 - DNA, 25 bp, Homo sapien
catggtttgtgatgaataacttgcc

SEQ ID NO: 528766 - DNA, 25 bp, Homo sapien
gaagcatggtttgtgatgaataact

SEQ ID NO: 528767 - DNA, 25 bp, Homo sapien
tgcagtcacgacatcaagagaagac

SEQ ID NO: 528768 - DNA, 25 bp, Homo sapien
catgaagatgatgtaggtgacctga

SEQ ID NO: 528769 - DNA, 25 bp, Homo sapien
tctgtacctagttgaatatggccat

SEQ ID NO: 528770 - DNA, 25 bp, Homo sapien
ctacttataggccagcatgaagatg

SEQ ID NO: 528771 - DNA, 25 bp, Homo sapien
ttcctcccatagatgctctccctcc

SEQ ID NO: 528772 - DNA, 25 bp, Homo sapien
gatacgctttcttccccagataatc

SEQ ID NO: 528773 - DNA, 25 bp, Homo sapien
ttcctcttctagatatgatttcttc

SEQ ID NO: 528774 - DNA, 25 bp, Homo sapien
tttcctcttctagatatgatttctt

SEQ ID NO: 528775 - DNA, 25 bp, Homo sapien
cagatacgctttcttccccagataa

SEQ ID NO: 528776 - DNA, 25 bp, Homo sapien
catcctgtagactttcctcatctag

SEQ ID NO: 528777 - DNA, 25 bp, Homo sapien
agattcatcctgtagactttcctca

SEQ ID NO: 528778 - DNA, 25 bp, Homo sapien
tggagattcatcctgtagactttcc

SEQ ID NO: 528779 - DNA, 25 bp, Homo sapien
gattcatcctgtagactttcctcat

SEQ ID NO: 528780 - DNA, 25 bp, Homo sapien
aggcaagttctgtgtggaatattgg

SEQ ID NO: 528781 - DNA, 25 bp, Homo sapien
tgctcctgataactgattattttca

SEQ ID NO: 528782 - DNA, 25 bp, Homo sapien
aggaggtgatgctcctgataactga

SEQ ID NO: 528783 - DNA, 25 bp, Homo sapien
ctctgaaggcaagttctgtgtggaa

SEQ ID NO: 528784 - DNA, 25 bp, Homo sapien
cagcagccaacgtcactttattatc

SEQ ID NO: 528785 - DNA, 25 bp, Homo sapien
aagtcgtaggtggtgaactccttct

SEQ ID NO: 528786 - DNA, 25 bp, Homo sapien
gctggggaagtcgtaggtggtgaac

SEQ ID NO: 528787 - DNA, 25 bp, Homo sapien
ttctgcagcagccaacgtcacttta

SEQ ID NO: 528788 - DNA, 25 bp, Homo sapien
aagtttagagattggggtccgtctg

SEQ ID NO: 528789 - DNA, 25 bp, Homo sapien
tgctccaaggactgtctgcagccca

SEQ ID NO: 528790 - DNA, 25 bp, Homo sapien
ctgagaagtttagagattggggtcc

SEQ ID NO: 528791 - DNA, 25 bp, Homo sapien
gcagcccagctgagaagtttagaga

SEQ ID NO: 528792 - DNA, 25 bp, Homo sapien
gtaaactgagtccaagccaagagag

SEQ ID NO: 528793 - DNA, 25 bp, Homo sapien
actgagtccaagccaagagagtttt

SEQ ID NO: 528794 - DNA, 25 bp, Homo sapien
taaactgagtccaagccaagagagt

SEQ ID NO: 528795 - DNA, 25 bp, Homo sapien
ccaagagagttttcaacaataacag

SEQ ID NO: 528796 - DNA, 25 bp, Homo sapien
tgacctccctaaagaatcaagggca

SEQ ID NO: 528797 - DNA, 25 bp, Homo sapien
tcccgctgctgacctccctaaagaa

SEQ ID NO: 528798 - DNA, 25 bp, Homo sapien
tgccttggctagagggtctgtgttt

SEQ ID NO: 528799 - DNA, 25 bp, Homo sapien
cttggctagagggtctgtgttttca

SEQ ID NO: 528800 - DNA, 25 bp, Homo sapien
tggagagaaagtgaccccttatcct

SEQ ID NO: 528801 - DNA, 25 bp, Homo sapien
gaaatatcatgacccaacaacggcc

SEQ ID NO: 528802 - DNA, 25 bp, Homo sapien
ttgcctttgggccacaggagtcgct

SEQ ID NO: 528803 - DNA, 25 bp, Homo sapien
gactggtctatattcaggctgtcaa

SEQ ID NO: 528804 - DNA, 25 bp, Homo sapien
cgtttgtggcagctctcggttacca

SEQ ID NO: 528805 - DNA, 25 bp, Homo sapien
tcagcggcggccagaaagttttcct

SEQ ID NO: 528806 - DNA, 25 bp, Homo sapien
gaactgtttggaccagtcgtcagcg

SEQ ID NO: 528807 - DNA, 25 bp, Homo sapien
ggagaattctaagcctctgcacctg

SEQ ID NO: 528808 - DNA, 25 bp, Homo sapien
tggagctggtccccaggaaaggaac

SEQ ID NO: 528809 - DNA, 25 bp, Homo sapien
agctggtccccaggaaaggaactgc

SEQ ID NO: 528810 - DNA, 25 bp, Homo sapien
gagctggtccccaggaaaggaactg

SEQ ID NO: 528811 - DNA, 25 bp, Homo sapien
gctggtccccaggaaaggaactgcc

SEQ ID NO: 528812 - DNA, 25 bp, Homo sapien
gggttggagaaagctgagttcccat

SEQ ID NO: 528813 - DNA, 25 bp, Homo sapien
agggttggagaaagctgagttccca

SEQ ID NO: 528814 - DNA, 25 bp, Homo sapien
tatggtttgcaggttcagtatgcaa

SEQ ID NO: 528815 - DNA, 25 bp, Homo sapien
caatacggtaggcttttggagtctg

SEQ ID NO: 528816 - DNA, 25 bp, Homo sapien
tatccacattgtttgccgtgctgca

SEQ ID NO: 528817 - DNA, 25 bp, Homo sapien
gacacaactacccagcaatacggta

SEQ ID NO: 528818 - DNA, 25 bp, Homo sapien
tcttggaatatgtgggagggcattc

SEQ ID NO: 528819 - DNA, 25 bp, Homo sapien
gggcagatagagtcagatcaacact

SEQ ID NO: 528820 - DNA, 25 bp, Homo sapien
ggaggtgtgctccaaatttaagtga

SEQ ID NO: 528821 - DNA, 25 bp, Homo sapien
tatgccaaagcgttcatagaccctg

SEQ ID NO: 528822 - DNA, 25 bp, Homo sapien
tcttggatttgatcagtgggaaccc

SEQ ID NO: 528823 - DNA, 25 bp, Homo sapien
cacccctgacatactctgaaattgg

SEQ ID NO: 528824 - DNA, 25 bp, Homo sapien
caggacgctgactacattgaggaac

SEQ ID NO: 528825 - DNA, 25 bp, Homo sapien
tgggaaccctcaacaggagatcaga

SEQ ID NO: 528826 - DNA, 25 bp, Homo sapien
tgcattgtctgcttgtctcgtctcc

SEQ ID NO: 528827 - DNA, 25 bp, Homo sapien
caccctggctgaattcctctcgagt

SEQ ID NO: 528828 - DNA, 25 bp, Homo sapien
tgaccaccctggctgaattcctctc

SEQ ID NO: 528829 - DNA, 25 bp, Homo sapien
gaattcctctcgagttctctctgct

SEQ ID NO: 528830 - DNA, 25 bp, Homo sapien
tatcgctggcagtagccttttacct

SEQ ID NO: 528831 - DNA, 25 bp, Homo sapien
cagtagccttttacctgaagccact

SEQ ID NO: 528832 - DNA, 25 bp, Homo sapien
gctggcagtagccttttacctgaag

SEQ ID NO: 528833 - DNA, 25 bp, Homo sapien
gtccatatcgctggcagtagccttt

SEQ ID NO: 528834 - DNA, 25 bp, Homo sapien
tcgggcccagattcataaaaagcta

SEQ ID NO: 528835 - DNA, 25 bp, Homo sapien
ggagatcgggcccagattcataaaa

SEQ ID NO: 528836 - DNA, 25 bp, Homo sapien
gcaatcgggagatcgggcccagatt

SEQ ID NO: 528837 - DNA, 25 bp, Homo sapien
tctggaggggcaatcgggagatcgg

SEQ ID NO: 528838 - DNA, 25 bp, Homo sapien
tccatggaggccttggtaacacgca

SEQ ID NO: 528839 - DNA, 25 bp, Homo sapien
aatcacccagacacatgtgactggt

SEQ ID NO: 528840 - DNA, 25 bp, Homo sapien
tcttgagccattcagcgcagcgttc

SEQ ID NO: 528841 - DNA, 25 bp, Homo sapien
taatttgcggcgagtactggctaat

SEQ ID NO: 528842 - DNA, 25 bp, Homo sapien
gcttgagccggggatgttggggctg

SEQ ID NO: 528843 - DNA, 25 bp, Homo sapien
ttgcttgagccggggatgttggggc

SEQ ID NO: 528844 - DNA, 25 bp, Homo sapien
gattgcttgagccggggatgttggg

SEQ ID NO: 528845 - DNA, 25 bp, Homo sapien
ggattgcttgagccggggatgttgg

SEQ ID NO: 528846 - DNA, 25 bp, Homo sapien
cgggggctgcggcgggaagatcact

SEQ ID NO: 528847 - DNA, 25 bp, Homo sapien
tcccagctacctcgggggctgcggc

SEQ ID NO: 528848 - DNA, 25 bp, Homo sapien
tcacttgagtccagtaagtcgaggc

SEQ ID NO: 528849 - DNA, 25 bp, Homo sapien
ccagctacctcgggggctgcggcgg

SEQ ID NO: 528850 - DNA, 25 bp, Homo sapien
tggaaggctcagctcacaaaggcac

SEQ ID NO: 528851 - DNA, 25 bp, Homo sapien
aaggctcagctcacaaaggcacaga

SEQ ID NO: 528852 - DNA, 25 bp, Homo sapien
aagaggtaatccttgtggaaggctc

SEQ ID NO: 528853 - DNA, 25 bp, Homo sapien
gaagaggtaatccttgtggaaggct

SEQ ID NO: 528854 - DNA, 25 bp, Homo sapien
ggctgcccagttcaaagttgaagac

SEQ ID NO: 528855 - DNA, 25 bp, Homo sapien
gttcctgctgtagctgagtaaggta

SEQ ID NO: 528856 - DNA, 25 bp, Homo sapien
gctgtagctgagtaaggtagtcata

SEQ ID NO: 528857 - DNA, 25 bp, Homo sapien
atcctggctgcccagttcaaagttg

SEQ ID NO: 528858 - DNA, 25 bp, Homo sapien
tgaagttcccagcaatgtgttttgg

SEQ ID NO: 528859 - DNA, 25 bp, Homo sapien
agttcccagcaatgtgttttggtgt

SEQ ID NO: 528860 - DNA, 25 bp, Homo sapien
gaagttcccagcaatgtgttttggt

SEQ ID NO: 528861 - DNA, 25 bp, Homo sapien
cttgaagttcccagcaatgtgtttt

SEQ ID NO: 528862 - DNA, 25 bp, Homo sapien
gagatgccaatagcgttcgccagct

SEQ ID NO: 528863 - DNA, 25 bp, Homo sapien
tgagccaggcttgtttaagatcctc

SEQ ID NO: 528864 - DNA, 25 bp, Homo sapien
taactgccagcttacactttgagcc

SEQ ID NO: 528865 - DNA, 25 bp, Homo sapien
ggctgtgattgcttcgatcctggga

SEQ ID NO: 528866 - DNA, 25 bp, Homo sapien
tgcccatgtgtccacatgtcagtgt

SEQ ID NO: 528867 - DNA, 25 bp, Homo sapien
cccatgtgtccacatgtcagtgtca

SEQ ID NO: 528868 - DNA, 25 bp, Homo sapien
ccatgtgtccacatgtcagtgtcac

SEQ ID NO: 528869 - DNA, 25 bp, Homo sapien
ctgcccatgtgtccacatgtcagtg

SEQ ID NO: 528870 - DNA, 25 bp, Homo sapien
tagtccagctttaggttgctgaata

SEQ ID NO: 528871 - DNA, 25 bp, Homo sapien
agatagagggccatgtagtccagct

SEQ ID NO: 528872 - DNA, 25 bp, Homo sapien
gtccagctttaggttgctgaatatc

SEQ ID NO: 528873 - DNA, 25 bp, Homo sapien
agtgaataagatagagggccatgta

SEQ ID NO: 528874 - DNA, 25 bp, Homo sapien
taccagccccttctcatggtatgtg

SEQ ID NO: 528875 - DNA, 25 bp, Homo sapien
ggctccttttaccagccccttctca

SEQ ID NO: 528876 - DNA, 25 bp, Homo sapien
ctccttttaccagccccttctcatg

SEQ ID NO: 528877 - DNA, 25 bp, Homo sapien
ttttaccagccccttctcatggtat

SEQ ID NO: 528878 - DNA, 25 bp, Homo sapien
tgaggaggtcctcacgcttcaccac

SEQ ID NO: 528879 - DNA, 25 bp, Homo sapien
ctgggccacctgcacctcatgcttg

SEQ ID NO: 528880 - DNA, 25 bp, Homo sapien
gatgaggaggtcctcacgcttcacc

SEQ ID NO: 528881 - DNA, 25 bp, Homo sapien
gggccacctgcacctcatgcttgtt

SEQ ID NO: 528882 - DNA, 25 bp, Homo sapien
ggtgtaggtgcagtcagtgtggtgg

SEQ ID NO: 528883 - DNA, 25 bp, Homo sapien
tggtgtaggtgcagtcagtgtggtg

SEQ ID NO: 528884 - DNA, 25 bp, Homo sapien
ctggtgtaggtgcagtcagtgtggt

SEQ ID NO: 528885 - DNA, 25 bp, Homo sapien
atgccaatcgccatcttcatagcct

SEQ ID NO: 528886 - DNA, 25 bp, Homo sapien
aatgccaatcgccatcttcatagcc

SEQ ID NO: 528887 - DNA, 25 bp, Homo sapien
caatgccaatcgccatcttcatagc

SEQ ID NO: 528888 - DNA, 25 bp, Homo sapien
ccaatgccaatcgccatcttcatag

SEQ ID NO: 528889 - DNA, 25 bp, Homo sapien
gggacttccaggtgcccagcctcag

SEQ ID NO: 528890 - DNA, 25 bp, Homo sapien
cctggaggggacttccaggtgccca

SEQ ID NO: 528891 - DNA, 25 bp, Homo sapien
ggacttccaggtgcccagcctcagg

SEQ ID NO: 528892 - DNA, 25 bp, Homo sapien
gaggggacttccaggtgcccagcct

SEQ ID NO: 528893 - DNA, 25 bp, Homo sapien
gtgttgttgagcttgaggtggctgg

SEQ ID NO: 528894 - DNA, 25 bp, Homo sapien
tttggcagtgttgttgagcttgagg

SEQ ID NO: 528895 - DNA, 25 bp, Homo sapien
tgttgagcttgaggtggctggccat

SEQ ID NO: 528896 - DNA, 25 bp, Homo sapien
gttgttgagcttgaggtggctggcc

SEQ ID NO: 528897 - DNA, 25 bp, Homo sapien
agagccagaacatagagcccacatc

SEQ ID NO: 528898 - DNA, 25 bp, Homo sapien
gactcctgtcccaaaagctacagtt

SEQ ID NO: 528899 - DNA, 25 bp, Homo sapien
ggagatgagaggcatcctgacgatt

SEQ ID NO: 528900 - DNA, 25 bp, Homo sapien
gcatcctgacgatttgctacatcca

SEQ ID NO: 528901 - DNA, 25 bp, Homo sapien
aacgtggatgattgatgatggtgtt

SEQ ID NO: 528902 - DNA, 25 bp, Homo sapien
ctgctctatgtagcgcccaattgct

SEQ ID NO: 528903 - DNA, 25 bp, Homo sapien
gatgattgatgatggtgttaatctc

SEQ ID NO: 528904 - DNA, 25 bp, Homo sapien
tccctgctctatgtagcgcccaatt

SEQ ID NO: 528905 - DNA, 25 bp, Homo sapien
gatgtctaatccagaagcaatttat

SEQ ID NO: 528906 - DNA, 25 bp, Homo sapien
ggagaagaaggaaccctatagtcga

SEQ ID NO: 528907 - DNA, 25 bp, Homo sapien
gaagtgccaagggagcctgaagtgc

SEQ ID NO: 528908 - DNA, 25 bp, Homo sapien
tatagtcgagcctctggacaccctg

SEQ ID NO: 528909 - DNA, 25 bp, Homo sapien
tagactgttaagcatgatcaggatg

SEQ ID NO: 528910 - DNA, 25 bp, Homo sapien
aagtgtagagtttgtgatagaagga

SEQ ID NO: 528911 - DNA, 25 bp, Homo sapien
ttgtttctggattgtcccagaggaa

SEQ ID NO: 528912 - DNA, 25 bp, Homo sapien
tccagtgggaaaagtgaccaccttc

SEQ ID NO: 528913 - DNA, 25 bp, Homo sapien
gtgctgaacactcagttagtgggaa

SEQ ID NO: 528914 - DNA, 25 bp, Homo sapien
tagcataataccctgtcaaccagaa

SEQ ID NO: 528915 - DNA, 25 bp, Homo sapien
tgggaacactcaattagcataatac

SEQ ID NO: 528916 - DNA, 25 bp, Homo sapien
aacactcagttagtgggaacactca

SEQ ID NO: 528917 - DNA, 25 bp, Homo sapien
tctcccccactgcttgtgacaccat

SEQ ID NO: 528918 - DNA, 25 bp, Homo sapien
tctggctgccttattgctaagtctt

SEQ ID NO: 528919 - DNA, 25 bp, Homo sapien
tttctggctgccttattgctaagtc

SEQ ID NO: 528920 - DNA, 25 bp, Homo sapien
gcagaaggattttccattaatcgtt

SEQ ID NO: 528921 - DNA, 25 bp, Homo sapien
tgcggggagtcaaatgggaccaggg

SEQ ID NO: 528922 - DNA, 25 bp, Homo sapien
gtgctccacgttttaagtgccatgt

SEQ ID NO: 528923 - DNA, 25 bp, Homo sapien
ctccacgttttaagtgccatgtgac

SEQ ID NO: 528924 - DNA, 25 bp, Homo sapien
ggctgcggggagtcaaatgggacca

SEQ ID NO: 528925 - DNA, 25 bp, Homo sapien
gtcagccatattgaatgggggatgg

SEQ ID NO: 528926 - DNA, 25 bp, Homo sapien
tgtcagccatattgaatgggggatg

SEQ ID NO: 528927 - DNA, 25 bp, Homo sapien
ctgtcagccatattgaatgggggat

SEQ ID NO: 528928 - DNA, 25 bp, Homo sapien
tcagccatattgaatgggggatggc

SEQ ID NO: 528929 - DNA, 25 bp, Homo sapien
aataattggattctgctccagacag

SEQ ID NO: 528930 - DNA, 25 bp, Homo sapien
gacagtgcaataaacaagccccctc

SEQ ID NO: 528931 - DNA, 25 bp, Homo sapien
gctaaatgagtgatacatttgcatc

SEQ ID NO: 528932 - DNA, 25 bp, Homo sapien
tttgcatctaaatggtccataaata

SEQ ID NO: 528933 - DNA, 25 bp, Homo sapien
tttatagtatagtagccaaggtgaa

SEQ ID NO: 528934 - DNA, 25 bp, Homo sapien
cattttctatgagagggcagagatg

SEQ ID NO: 528935 - DNA, 25 bp, Homo sapien
tagttcatgtgatgacctgatttgg

SEQ ID NO: 528936 - DNA, 25 bp, Homo sapien
gagatgaagtagcagtttgagtttg

SEQ ID NO: 528937 - DNA, 25 bp, Homo sapien
ttcaatggacttagctggaagtttc

SEQ ID NO: 528938 - DNA, 25 bp, Homo sapien
aactgatgcactattgaccttgaag

SEQ ID NO: 528939 - DNA, 25 bp, Homo sapien
ctgggatcagagtaactgatgcact

SEQ ID NO: 528940 - DNA, 25 bp, Homo sapien
gaccttgaagattctgcctgcttca

SEQ ID NO: 528941 - DNA, 25 bp, Homo sapien
gactcctgggactctaaggtgagaa

SEQ ID NO: 528942 - DNA, 25 bp, Homo sapien
taaaatgtccagagtagccacagct

SEQ ID NO: 528943 - DNA, 25 bp, Homo sapien
ggtcagaagccatacgtacccggtc

SEQ ID NO: 528944 - DNA, 25 bp, Homo sapien
aagacaatcttcgtgtggcctgacc

SEQ ID NO: 528945 - DNA, 25 bp, Homo sapien
taaatcttgtatcgactggcacctc

SEQ ID NO: 528946 - DNA, 25 bp, Homo sapien
aatacatacttgagccgtggtcacg

SEQ ID NO: 528947 - DNA, 25 bp, Homo sapien
gtttgtaagtgatgaccagcccgcc

SEQ ID NO: 528948 - DNA, 25 bp, Homo sapien
tgatatgaaagaactgcaccctagg

SEQ ID NO: 528949 - DNA, 25 bp, Homo sapien
tgtcaaccctatggatctgccgcag

SEQ ID NO: 528950 - DNA, 25 bp, Homo sapien
atgatgatccaatcagccggcgcgg

SEQ ID NO: 528951 - DNA, 25 bp, Homo sapien
tctgtcgcggtgatggcaatcccaa

SEQ ID NO: 528952 - DNA, 25 bp, Homo sapien
gcaaggctgccgttgtcagagaaga

SEQ ID NO: 528953 - DNA, 25 bp, Homo sapien
tgacggcgcgccgactggacacata

SEQ ID NO: 528954 - DNA, 25 bp, Homo sapien
aggcagggcgtcaccgggttggcgt

SEQ ID NO: 528955 - DNA, 25 bp, Homo sapien
accgggttggcgtgcagccccgcct

SEQ ID NO: 528956 - DNA, 25 bp, Homo sapien
tctggagcgctctgagtgacggcgc

SEQ ID NO: 528957 - DNA, 25 bp, Homo sapien
ccttccccaaggtgaacagtgtgtc

SEQ ID NO: 528958 - DNA, 25 bp, Homo sapien
tccccaaggtgaacagtgtgtcttc

SEQ ID NO: 528959 - DNA, 25 bp, Homo sapien
ccccaaggtgaacagtgtgtcttca

SEQ ID NO: 528960 - DNA, 25 bp, Homo sapien
cttccccaaggtgaacagtgtgtct

SEQ ID NO: 528961 - DNA, 25 bp, Homo sapien
tcacacacgagcagcaatctgggct

SEQ ID NO: 528962 - DNA, 25 bp, Homo sapien
cacacgagcagcaatctgggctgag

SEQ ID NO: 528963 - DNA, 25 bp, Homo sapien
tttcacacacgagcagcaatctggg

SEQ ID NO: 528964 - DNA, 25 bp, Homo sapien
cgagcagcaatctgggctgagtgca

SEQ ID NO: 528965 - DNA, 25 bp, Homo sapien
cagcctcacacttggcctggggcca

SEQ ID NO: 528966 - DNA, 25 bp, Homo sapien
agaacccagcctcacacttggcctg

SEQ ID NO: 528967 - DNA, 25 bp, Homo sapien
tggggccaccagtcccagtgctgac

SEQ ID NO: 528968 - DNA, 25 bp, Homo sapien
ctggagaacccagcctcacacttgg

SEQ ID NO: 528969 - DNA, 25 bp, Homo sapien
cttgctacgtagatggatgagatct

SEQ ID NO: 528970 - DNA, 25 bp, Homo sapien
ctgggataggaacatcttaattaga

SEQ ID NO: 528971 - DNA, 25 bp, Homo sapien
gattcagctcttgctacgtagatgg

SEQ ID NO: 528972 - DNA, 25 bp, Homo sapien
gaaaatgtatcttatgctccttctc

SEQ ID NO: 528973 - DNA, 25 bp, Homo sapien
atatggaggtattgatgtgttctgg

SEQ ID NO: 528974 - DNA, 25 bp, Homo sapien
ctgcagagaatggtacccttgaggc

SEQ ID NO: 528975 - DNA, 25 bp, Homo sapien
ctgcagagaatggtgccctgcagag

SEQ ID NO: 528976 - DNA, 25 bp, Homo sapien
cctgcagagaatggtacccttgagg

SEQ ID NO: 528977 - DNA, 25 bp, Homo sapien
aaacagcccacggtaactacatgtg

SEQ ID NO: 528978 - DNA, 25 bp, Homo sapien
gacatcacctacattcagcaagggt

SEQ ID NO: 528979 - DNA, 25 bp, Homo sapien
ttggccgccttgctgctgcgctcag

SEQ ID NO: 528980 - DNA, 25 bp, Homo sapien
tgtgacagctcagagtatgatgacc

SEQ ID NO: 528981 - DNA, 25 bp, Homo sapien
caaaagatgcaaaggccttcagggc

SEQ ID NO: 528982 - DNA, 25 bp, Homo sapien
aaagatgcaaaggccttcagggcca

SEQ ID NO: 528983 - DNA, 25 bp, Homo sapien
aaaagatgcaaaggccttcagggcc

SEQ ID NO: 528984 - DNA, 25 bp, Homo sapien
catcttttcttcactcttaaacatg

SEQ ID NO: 528985 - DNA, 25 bp, Homo sapien
cttttcttcactcttaaacatgaag

SEQ ID NO: 528986 - DNA, 25 bp, Homo sapien
tcttttcttcactcttaaacatgaa

SEQ ID NO: 528987 - DNA, 25 bp, Homo sapien
ccatcttttcttcactcttaaacat

SEQ ID NO: 528988 - DNA, 25 bp, Homo sapien
tacttgggacagtactttctgttgc

SEQ ID NO: 528989 - DNA, 25 bp, Homo sapien
gcttcctcatctgttcgttcattca

SEQ ID NO: 528990 - DNA, 25 bp, Homo sapien
taggaaacaacttggtgagcaagaa

SEQ ID NO: 528991 - DNA, 25 bp, Homo sapien
tgctgagtctcttaggaaacaactt

SEQ ID NO: 528992 - DNA, 25 bp, Homo sapien
gaatatgtagcctttggatccatcc

SEQ ID NO: 528993 - DNA, 25 bp, Homo sapien
tgaaggtctgggataatggctgcaa

SEQ ID NO: 528994 - DNA, 25 bp, Homo sapien
atttggagcctcatccctgtccctc

SEQ ID NO: 528995 - DNA, 25 bp, Homo sapien
gatggtgccatagtcaagatgaata

SEQ ID NO: 528996 - DNA, 25 bp, Homo sapien
caaagaaagctttccgtatctattt

SEQ ID NO: 528997 - DNA, 25 bp, Homo sapien
caagtaattcagacctctctgcgga

SEQ ID NO: 528998 - DNA, 25 bp, Homo sapien
cctctctgcggatttcaaagaaagc

SEQ ID NO: 528999 - DNA, 25 bp, Homo sapien
cagggaagccatccaagtaattcag

SEQ ID NO: 529000 - DNA, 25 bp, Homo sapien
ctttatccagcccctctggcaaagt

SEQ ID NO: 529001 - DNA, 25 bp, Homo sapien
ttatccagcccctctggcaaagtgg

SEQ ID NO: 529002 - DNA, 25 bp, Homo sapien
gcccctctggcaaagtggctccaga

SEQ ID NO: 529003 - DNA, 25 bp, Homo sapien
cagcccctctggcaaagtggctcca

SEQ ID NO: 529004 - DNA, 25 bp, Homo sapien
ctggcgccctctccaaatcctgtgt

SEQ ID NO: 529005 - DNA, 25 bp, Homo sapien
tctccctacctggcgccctctccaa

SEQ ID NO: 529006 - DNA, 25 bp, Homo sapien
acctggcgccctctccaaatcctgt

SEQ ID NO: 529007 - DNA, 25 bp, Homo sapien
ctacctggcgccctctccaaatcct

SEQ ID NO: 529008 - DNA, 25 bp, Homo sapien
ctcaacttgctttgtttatctgggg

SEQ ID NO: 529009 - DNA, 25 bp, Homo sapien
gcattagcagcactcaacttgcttt

SEQ ID NO: 529010 - DNA, 25 bp, Homo sapien
actcaacttgctttgtttatctggg

SEQ ID NO: 529011 - DNA, 25 bp, Homo sapien
ttgctttgccaaggatgactggtag

SEQ ID NO: 529012 - DNA, 25 bp, Homo sapien
ggatgactggtagtaaattctcatt

SEQ ID NO: 529013 - DNA, 25 bp, Homo sapien
tttgccaaggatgactggtagtaaa

SEQ ID NO: 529014 - DNA, 25 bp, Homo sapien
caaggatgactggtagtaaattctc

SEQ ID NO: 529015 - DNA, 25 bp, Homo sapien
gggttgacgacacagacaagttgcc

SEQ ID NO: 529016 - DNA, 25 bp, Homo sapien
tgagatctaatacagccccaaagca

SEQ ID NO: 529017 - DNA, 25 bp, Homo sapien
caagttgcccggcagcggagaaaac

SEQ ID NO: 529018 - DNA, 25 bp, Homo sapien
gctgaaaccggagatgaatgagatc

SEQ ID NO: 529019 - DNA, 25 bp, Homo sapien
cttaatttaacatgagagcctttct

SEQ ID NO: 529020 - DNA, 25 bp, Homo sapien
aaattgattgcttaatgtgtctcca

SEQ ID NO: 529021 - DNA, 25 bp, Homo sapien
gggagataggctgacaaaattgatt

SEQ ID NO: 529022 - DNA, 25 bp, Homo sapien
taacatgagagcctttcttaatgcc

SEQ ID NO: 529023 - DNA, 25 bp, Homo sapien
caccccgctccaaagtaggcagatg

SEQ ID NO: 529024 - DNA, 25 bp, Homo sapien
taagccgccaaatagtacaacaccc

SEQ ID NO: 529025 - DNA, 25 bp, Homo sapien
taggcagatggataacgcagatcat

SEQ ID NO: 529026 - DNA, 25 bp, Homo sapien
tggcaagaacgtaaagcgtttaagc

SEQ ID NO: 529027 - DNA, 25 bp, Homo sapien
attacagatgcagagaacctttgct

SEQ ID NO: 529028 - DNA, 25 bp, Homo sapien
gcttgtaaatcagcaaaataattac

SEQ ID NO: 529029 - DNA, 25 bp, Homo sapien
aagaggcttgtaaatcagcaaaata

SEQ ID NO: 529030 - DNA, 25 bp, Homo sapien
gaggcttgtaaatcagcaaaataat

SEQ ID NO: 529031 - DNA, 25 bp, Homo sapien
gcctgaagggctgcagagtgccgat

SEQ ID NO: 529032 - DNA, 25 bp, Homo sapien
agcctgaagggctgcagagtgccga

SEQ ID NO: 529033 - DNA, 25 bp, Homo sapien
cctgaagggctgcagagtgccgatc

SEQ ID NO: 529034 - DNA, 25 bp, Homo sapien
aagcctgaagggctgcagagtgccg

SEQ ID NO: 529035 - DNA, 25 bp, Homo sapien
tacagatggtccacgagcaacaagt

SEQ ID NO: 529036 - DNA, 25 bp, Homo sapien
gaactgttcaggatggtcagtagct

SEQ ID NO: 529037 - DNA, 25 bp, Homo sapien
cacagcccggttgggtacagatggt

SEQ ID NO: 529038 - DNA, 25 bp, Homo sapien
tggtagataacaagcaaaggaggca

SEQ ID NO: 529039 - DNA, 25 bp, Homo sapien
ctggcaacaaggagggtggtgggag

SEQ ID NO: 529040 - DNA, 25 bp, Homo sapien
tggcaacaaggagggtggtgggagg

SEQ ID NO: 529041 - DNA, 25 bp, Homo sapien
tgtgggaataaagaggcagatgatt

SEQ ID NO: 529042 - DNA, 25 bp, Homo sapien
agagtggccaacaggatcccctcca

SEQ ID NO: 529043 - DNA, 25 bp, Homo sapien
cagcaaggagggagcgagagattat

SEQ ID NO: 529044 - DNA, 25 bp, Homo sapien
aaggcagaagaatgcggcagcaagg

SEQ ID NO: 529045 - DNA, 25 bp, Homo sapien
cgagagattatgagagggtgctaaa

SEQ ID NO: 529046 - DNA, 25 bp, Homo sapien
aacaggccctagagaaggatccaag

SEQ ID NO: 529047 - DNA, 25 bp, Homo sapien
tgtaacaggccctagagaaggatcc

SEQ ID NO: 529048 - DNA, 25 bp, Homo sapien
taacaggccctagagaaggatccaa

SEQ ID NO: 529049 - DNA, 25 bp, Homo sapien
ctgtaacaggccctagagaaggatc

SEQ ID NO: 529050 - DNA, 25 bp, Homo sapien
tccctgagggcaccaacaatttcta

SEQ ID NO: 529051 - DNA, 25 bp, Homo sapien
aatgatgtacagcacctagcagata

SEQ ID NO: 529052 - DNA, 25 bp, Homo sapien
ggcatgaatgatgtacagcacctag

SEQ ID NO: 529053 - DNA, 25 bp, Homo sapien
ctgagggcaccaacaatttctaaat

SEQ ID NO: 529054 - DNA, 25 bp, Homo sapien
tgaatagagtgtgtcccaaagtact

SEQ ID NO: 529055 - DNA, 25 bp, Homo sapien
cttctcaaagcttgaatagagtgtg

SEQ ID NO: 529056 - DNA, 25 bp, Homo sapien
cccaaagtactcagaagcagccaga

SEQ ID NO: 529057 - DNA, 25 bp, Homo sapien
cacacactgaagaagggtctgagac

SEQ ID NO: 529058 - DNA, 25 bp, Homo sapien
tcagctgttgaaatgcaaatgtcgg

SEQ ID NO: 529059 - DNA, 25 bp, Homo sapien
gcccttgctacattgggctttacca

SEQ ID NO: 529060 - DNA, 25 bp, Homo sapien
tgagaataagggctgcccttgctac

SEQ ID NO: 529061 - DNA, 25 bp, Homo sapien
caaaagaggtgaatcccttctgaga

SEQ ID NO: 529062 - DNA, 25 bp, Homo sapien
agcaaaacacttgatttctttagca

SEQ ID NO: 529063 - DNA, 25 bp, Homo sapien
gcaaaacacttgatttctttagcat

SEQ ID NO: 529064 - DNA, 25 bp, Homo sapien
aaaacacttgatttctttagcattg

SEQ ID NO: 529065 - DNA, 25 bp, Homo sapien
cagcaaaacacttgatttctttagc

SEQ ID NO: 529066 - DNA, 25 bp, Homo sapien
cagagtcacagttgagatcatttat

SEQ ID NO: 529067 - DNA, 25 bp, Homo sapien
cacagttgagatcatttataaggcc

SEQ ID NO: 529068 - DNA, 25 bp, Homo sapien
caagtggcaaggagcactgaccacc

SEQ ID NO: 529069 - DNA, 25 bp, Homo sapien
taaggccaatggacaagatcaagtg

SEQ ID NO: 529070 - DNA, 25 bp, Homo sapien
ctaatgaaataaaatgagtttccat

SEQ ID NO: 529071 - DNA, 25 bp, Homo sapien
tagggtttgtagatgtgtgcagaaa

SEQ ID NO: 529072 - DNA, 25 bp, Homo sapien
tgtgcagaaagatctgtaaatgtta

SEQ ID NO: 529073 - DNA, 25 bp, Homo sapien
gaagcattaggctttccaatcctct

SEQ ID NO: 529074 - DNA, 25 bp, Homo sapien
ccaggaagattccacaaaagtccat

SEQ ID NO: 529075 - DNA, 25 bp, Homo sapien
ctgcctgatctctctggccatcata

SEQ ID NO: 529076 - DNA, 25 bp, Homo sapien
cctctgcctgatctctctggccatc

SEQ ID NO: 529077 - DNA, 25 bp, Homo sapien
cccctctgcctgatctctctggcca

SEQ ID NO: 529078 - DNA, 25 bp, Homo sapien
gcctgatctctctggccatcatagt

SEQ ID NO: 529079 - DNA, 25 bp, Homo sapien
gaccatgagctccacccagtcatcc

SEQ ID NO: 529080 - DNA, 25 bp, Homo sapien
ttgaccatgagctccacccagtcat

SEQ ID NO: 529081 - DNA, 25 bp, Homo sapien
ccatgagctccacccagtcatccat

SEQ ID NO: 529082 - DNA, 25 bp, Homo sapien
cattgaccatgagctccacccagtc

SEQ ID NO: 529083 - DNA, 25 bp, Homo sapien
taacaatttgttcaggtgtcactga

SEQ ID NO: 529084 - DNA, 25 bp, Homo sapien
tttttcttcctacaatgcgatttgc

SEQ ID NO: 529085 - DNA, 25 bp, Homo sapien
tcttcctacaatgcgatttgctttg

SEQ ID NO: 529086 - DNA, 25 bp, Homo sapien
tcagtattccgttcacagcttcttc

SEQ ID NO: 529087 - DNA, 25 bp, Homo sapien
tttcctcagggtctgtcagtattcc

SEQ ID NO: 529088 - DNA, 25 bp, Homo sapien
tcctttgtgatggtgttgggccctt

SEQ ID NO: 529089 - DNA, 25 bp, Homo sapien
ttgggcccttgccaggtggaagatt

SEQ ID NO: 529090 - DNA, 25 bp, Homo sapien
caacaatatttgacgccagggtact

SEQ ID NO: 529091 - DNA, 25 bp, Homo sapien
tttgaaaccacccatcctgaagagc

SEQ ID NO: 529092 - DNA, 25 bp, Homo sapien
gatattctgaacgtttatcccctct

SEQ ID NO: 529093 - DNA, 25 bp, Homo sapien
gtaccaagcaaaagaggtggtagga

SEQ ID NO: 529094 - DNA, 25 bp, Homo sapien
tatcccctctaagggtaccaagcaa

SEQ ID NO: 529095 - DNA, 25 bp, Homo sapien
tggtaggagagtgtgcccgggaaca

SEQ ID NO: 529096 - DNA, 25 bp, Homo sapien
cacttgtttcgctgctccctgttca

SEQ ID NO: 529097 - DNA, 25 bp, Homo sapien
catattctcccaggcggtgggaatg

SEQ ID NO: 529098 - DNA, 25 bp, Homo sapien
cagtgggcagtttgcgagtgggccg

SEQ ID NO: 529099 - DNA, 25 bp, Homo sapien
gcagacactcaactgccagtgggca

SEQ ID NO: 529100 - DNA, 25 bp, Homo sapien
tagtcaggctctgagttctttctga

SEQ ID NO: 529101 - DNA, 25 bp, Homo sapien
tgactaggcctgaccttgggtttcc

SEQ ID NO: 529102 - DNA, 25 bp, Homo sapien
ctgtccttgtagaaactggtttgag

SEQ ID NO: 529103 - DNA, 25 bp, Homo sapien
tgtatgggtattagcgaagactctc

SEQ ID NO: 529104 - DNA, 25 bp, Homo sapien
ctctctttatctaaactgggaggca

SEQ ID NO: 529105 - DNA, 25 bp, Homo sapien
tctctttatctaaactgggaggcag

SEQ ID NO: 529106 - DNA, 25 bp, Homo sapien
ctctttatctaaactgggaggcagc

SEQ ID NO: 529107 - DNA, 25 bp, Homo sapien
tgaacatccttcctatgcttcaggg

SEQ ID NO: 529108 - DNA, 25 bp, Homo sapien
ggtatcccttgacaatgttgccaca

SEQ ID NO: 529109 - DNA, 25 bp, Homo sapien
gtagtcactcaaccaatagctcctg

SEQ ID NO: 529110 - DNA, 25 bp, Homo sapien
ggccatgtgatcaggctccaccaat

SEQ ID NO: 529111 - DNA, 25 bp, Homo sapien
ccataatcaacggaggtctgggtta

SEQ ID NO: 529112 - DNA, 25 bp, Homo sapien
agtatccacggaatgccagtgcaag

SEQ ID NO: 529113 - DNA, 25 bp, Homo sapien
tgggttatagtctctccctgaatgc

SEQ ID NO: 529114 - DNA, 25 bp, Homo sapien
aatgccagtgcaagccataatcaac

SEQ ID NO: 529115 - DNA, 25 bp, Homo sapien
acagaagacaagcacacggagccgt

SEQ ID NO: 529116 - DNA, 25 bp, Homo sapien
caagcacacggagccgtgaaggtct

SEQ ID NO: 529117 - DNA, 25 bp, Homo sapien
acacggagccgtgaaggtctattgg

SEQ ID NO: 529118 - DNA, 25 bp, Homo sapien
tctattgggtgtaggaagcagataa

SEQ ID NO: 529119 - DNA, 25 bp, Homo sapien
ccggcatttggcaagcattacagca

SEQ ID NO: 529120 - DNA, 25 bp, Homo sapien
ttaggtcagtctcataagcaacatg

SEQ ID NO: 529121 - DNA, 25 bp, Homo sapien
taaagctccctatgttttaggtcag

SEQ ID NO: 529122 - DNA, 25 bp, Homo sapien
cagtggaattagaaaaccggcattt

SEQ ID NO: 529123 - DNA, 25 bp, Homo sapien
ggtgacgacaatctgcaattactgg

SEQ ID NO: 529124 - DNA, 25 bp, Homo sapien
gcaattatggcaactggacagacct

SEQ ID NO: 529125 - DNA, 25 bp, Homo sapien
ttactaaatggtgaggatagctgcc

SEQ ID NO: 529126 - DNA, 25 bp, Homo sapien
tcagagtgaagcgaagtgacaggtc

SEQ ID NO: 529127 - DNA, 25 bp, Homo sapien
tactgtctgctcacaaattctgtgg

SEQ ID NO: 529128 - DNA, 25 bp, Homo sapien
taagagtccacttcatgagttaaac

SEQ ID NO: 529129 - DNA, 25 bp, Homo sapien
gactaatgttctagatcatcaggaa

SEQ ID NO: 529130 - DNA, 25 bp, Homo sapien
gaagatgccttaagtatcaatgagc

SEQ ID NO: 529131 - DNA, 25 bp, Homo sapien
tcttcagttttaacaaaaggcgcag

SEQ ID NO: 529132 - DNA, 25 bp, Homo sapien
cattccctttcacgtggtctgtaca

SEQ ID NO: 529133 - DNA, 25 bp, Homo sapien
taagttggccaaaactagtgtctct

SEQ ID NO: 529134 - DNA, 25 bp, Homo sapien
tataaacataccacgccagctagac

SEQ ID NO: 529135 - DNA, 25 bp, Homo sapien
catggcaagtagtcttccgcttaaa

SEQ ID NO: 529136 - DNA, 25 bp, Homo sapien
taattcattgtctaccattggagca

SEQ ID NO: 529137 - DNA, 25 bp, Homo sapien
tcctgttggatactggactgtgaaa

SEQ ID NO: 529138 - DNA, 25 bp, Homo sapien
cattggagcactcgtgtaagcttgt

SEQ ID NO: 529139 - DNA, 25 bp, Homo sapien
taacaagctgctttcgaattgcaga

SEQ ID NO: 529140 - DNA, 25 bp, Homo sapien
agaatcccgtctgaagcacaacgcc

SEQ ID NO: 529141 - DNA, 25 bp, Homo sapien
catgggccaagattactaagaagac

SEQ ID NO: 529142 - DNA, 25 bp, Homo sapien
tcttcttttcgtagtaatgcagcca

SEQ ID NO: 529143 - DNA, 25 bp, Homo sapien
taagagtcggtcaagagtacgaaag

SEQ ID NO: 529144 - DNA, 25 bp, Homo sapien
aaagaaatgcattgagcctacaccc

SEQ ID NO: 529145 - DNA, 25 bp, Homo sapien
tgaagctgcaatacatagccgattt

SEQ ID NO: 529146 - DNA, 25 bp, Homo sapien
caaacactggagtctatcaggatca

SEQ ID NO: 529147 - DNA, 25 bp, Homo sapien
gaagaagtctgattgttaagccaca

SEQ ID NO: 529148 - DNA, 25 bp, Homo sapien
ggtgtgcctactgaaatccagatca

SEQ ID NO: 529149 - DNA, 25 bp, Homo sapien
agatcatccggccttacagaccaag

SEQ ID NO: 529150 - DNA, 25 bp, Homo sapien
taagggccgaactgtatttcatggg

SEQ ID NO: 529151 - DNA, 25 bp, Homo sapien
gaaatcccaactcttagcataacag

SEQ ID NO: 529152 - DNA, 25 bp, Homo sapien
cccaggctctcgtggttcttttgga

SEQ ID NO: 529153 - DNA, 25 bp, Homo sapien
ctttggcaaagagttcagaacctgc

SEQ ID NO: 529154 - DNA, 25 bp, Homo sapien
caggtgtgaattttaagagtgcagc

SEQ ID NO: 529155 - DNA, 25 bp, Homo sapien
cagcaccagagcctaatgaatgtgc

SEQ ID NO: 529156 - DNA, 25 bp, Homo sapien
gattggctcgtatccttctccagca

SEQ ID NO: 529157 - DNA, 25 bp, Homo sapien
tctagttcgtcatcactgattggct

SEQ ID NO: 529158 - DNA, 25 bp, Homo sapien
aatgtgcatcatctaacttggactc

SEQ ID NO: 529159 - DNA, 25 bp, Homo sapien
tagatccctttcatgttcaccttcc

SEQ ID NO: 529160 - DNA, 25 bp, Homo sapien
tccaaggctagagagtctcgggaag

SEQ ID NO: 529161 - DNA, 25 bp, Homo sapien
cagactctcagttctctcggattta

SEQ ID NO: 529162 - DNA, 25 bp, Homo sapien
tctcgggaagtgctttctagatccc

SEQ ID NO: 529163 - DNA, 25 bp, Homo sapien
tgtctctgctatcaaatgacccaga

SEQ ID NO: 529164 - DNA, 25 bp, Homo sapien
cccagatcttgaatggacctgtcga

SEQ ID NO: 529165 - DNA, 25 bp, Homo sapien
gacctgtcgatctgactctggagaa

SEQ ID NO: 529166 - DNA, 25 bp, Homo sapien
tatctcgatccctgttgcgtggcca

SEQ ID NO: 529167 - DNA, 25 bp, Homo sapien
gaagtacttcgactgggttctccac

SEQ ID NO: 529168 - DNA, 25 bp, Homo sapien
ccactgtgcagtactctctttcgac

SEQ ID NO: 529169 - DNA, 25 bp, Homo sapien
ctttggtcatctccacttcgatggg

SEQ ID NO: 529170 - DNA, 25 bp, Homo sapien
cacgctttaactgatcaatcctaga

SEQ ID NO: 529171 - DNA, 25 bp, Homo sapien
ggagcgaagacgaccagacgtatga

SEQ ID NO: 529172 - DNA, 25 bp, Homo sapien
ccataggcttgcgatgctgtgcatc

SEQ ID NO: 529173 - DNA, 25 bp, Homo sapien
tcctcttttgatccataggcttgcg

SEQ ID NO: 529174 - DNA, 25 bp, Homo sapien
gttactccgattgctcccgaggctg

SEQ ID NO: 529175 - DNA, 25 bp, Homo sapien
ctatagtcacgtgaggcgtctctac

SEQ ID NO: 529176 - DNA, 25 bp, Homo sapien
ttttctactcgtgttctgtggcatt

SEQ ID NO: 529177 - DNA, 25 bp, Homo sapien
gtcacgtgaggcgtctctacttttt

SEQ ID NO: 529178 - DNA, 25 bp, Homo sapien
tttttctactcgtgttctgtggcat

SEQ ID NO: 529179 - DNA, 25 bp, Homo sapien
tgcaggcacagttgtagcagtggca

SEQ ID NO: 529180 - DNA, 25 bp, Homo sapien
tggcagtagccacaggcggtggagg

SEQ ID NO: 529181 - DNA, 25 bp, Homo sapien
cagttgtagcagtggcagtagccac

SEQ ID NO: 529182 - DNA, 25 bp, Homo sapien
agatgtgctgaaagaggtggcggca

SEQ ID NO: 529183 - DNA, 25 bp, Homo sapien
tggcagtatgctctgcttctgtcac

SEQ ID NO: 529184 - DNA, 25 bp, Homo sapien
gtggcagtatgctctgcttctgtca

SEQ ID NO: 529185 - DNA, 25 bp, Homo sapien
ctctgtacggtcagggacatcctca

SEQ ID NO: 529186 - DNA, 25 bp, Homo sapien
tctgtacggtcagggacatcctcat

SEQ ID NO: 529187 - DNA, 25 bp, Homo sapien
tgaatgctgtatcttcttttttctg

SEQ ID NO: 529188 - DNA, 25 bp, Homo sapien
tgggagtcctctagaataccattct

SEQ ID NO: 529189 - DNA, 25 bp, Homo sapien
ttctgggagtcctctagaataccat

SEQ ID NO: 529190 - DNA, 25 bp, Homo sapien
ggagtcctctagaataccattctta

SEQ ID NO: 529191 - DNA, 25 bp, Homo sapien
cagaatcacctttggattttttacg

SEQ ID NO: 529192 - DNA, 25 bp, Homo sapien
cacatttcaaccaattcctctttag

SEQ ID NO: 529193 - DNA, 25 bp, Homo sapien
tatgttacccctctctattccaaca

SEQ ID NO: 529194 - DNA, 25 bp, Homo sapien
tttttggtgaaaatacttgaccatc

SEQ ID NO: 529195 - DNA, 25 bp, Homo sapien
tgtgcacgcattcttgagctttcca

SEQ ID NO: 529196 - DNA, 25 bp, Homo sapien
cgatcagatgtctctcgatcttcag

SEQ ID NO: 529197 - DNA, 25 bp, Homo sapien
tcttcgtagcgccttgaactctctt

SEQ ID NO: 529198 - DNA, 25 bp, Homo sapien
ttgagttcctgttcttcgtagcgcc

SEQ ID NO: 529199 - DNA, 25 bp, Homo sapien
gtcgtacaacttggctcaagagtct

SEQ ID NO: 529200 - DNA, 25 bp, Homo sapien
agagaacgagattcttgaggtcgta

SEQ ID NO: 529201 - DNA, 25 bp, Homo sapien
gattcttgaggtcgtacaacttggc

SEQ ID NO: 529202 - DNA, 25 bp, Homo sapien
tcttctgtgaggtgcgagggactaa

SEQ ID NO: 529203 - DNA, 25 bp, Homo sapien
caatcacactctcaccaggttagta

SEQ ID NO: 529204 - DNA, 25 bp, Homo sapien
atcacactctcaccaggttagtaac

SEQ ID NO: 529205 - DNA, 25 bp, Homo sapien
tcacactctcaccaggttagtaacc

SEQ ID NO: 529206 - DNA, 25 bp, Homo sapien
aatcacactctcaccaggttagtaa

SEQ ID NO: 529207 - DNA, 25 bp, Homo sapien
tctccactgttgtaggcatcactgt

SEQ ID NO: 529208 - DNA, 25 bp, Homo sapien
gggactcccttcatttctatagcgc

SEQ ID NO: 529209 - DNA, 25 bp, Homo sapien
gagaatgttcacgccggcgcttcgg

SEQ ID NO: 529210 - DNA, 25 bp, Homo sapien
acgccggcgcttcggggactgtcta

SEQ ID NO: 529211 - DNA, 25 bp, Homo sapien
catctcttggattcctatcttctcg

SEQ ID NO: 529212 - DNA, 25 bp, Homo sapien
cttttctctgcggtcatctcgtcct

SEQ ID NO: 529213 - DNA, 25 bp, Homo sapien
gatctcttctcgcttttctctgcgg

SEQ ID NO: 529214 - DNA, 25 bp, Homo sapien
tatcttctcggatctcttctcgctt

SEQ ID NO: 529215 - DNA, 25 bp, Homo sapien
ggtctcggtctctatccctttcacg

SEQ ID NO: 529216 - DNA, 25 bp, Homo sapien
gatgtcgaattggtgagcttggtct

SEQ ID NO: 529217 - DNA, 25 bp, Homo sapien
tctttcccgctctcgatcgtggtct

SEQ ID NO: 529218 - DNA, 25 bp, Homo sapien
caagctcgtcattccttccctgatg

SEQ ID NO: 529219 - DNA, 25 bp, Homo sapien
tgccctctaacgaccatgtttcctg

SEQ ID NO: 529220 - DNA, 25 bp, Homo sapien
atccaagtaacaatcgcccctagac

SEQ ID NO: 529221 - DNA, 25 bp, Homo sapien
cctattggtaagacagcatggtaaa

SEQ ID NO: 529222 - DNA, 25 bp, Homo sapien
ttttatctgtgatagggtcacactg

SEQ ID NO: 529223 - DNA, 25 bp, Homo sapien
actttctgccatctctacccttcac

SEQ ID NO: 529224 - DNA, 25 bp, Homo sapien
actgctccaaccccactttctgcca

SEQ ID NO: 529225 - DNA, 25 bp, Homo sapien
caaccccactttctgccatctctac

SEQ ID NO: 529226 - DNA, 25 bp, Homo sapien
ccagcccactgctccaaccccactt

SEQ ID NO: 529227 - DNA, 25 bp, Homo sapien
cactggtggcaaaggataggggcag

SEQ ID NO: 529228 - DNA, 25 bp, Homo sapien
ccagcaggacctgagaacactggtg

SEQ ID NO: 529229 - DNA, 25 bp, Homo sapien
aacactggtggcaaaggataggggc

SEQ ID NO: 529230 - DNA, 25 bp, Homo sapien
ctggtggcaaaggataggggcagca

SEQ ID NO: 529231 - DNA, 25 bp, Homo sapien
gcaactactgcggtctgatctagga

SEQ ID NO: 529232 - DNA, 25 bp, Homo sapien
ccaacaggttggtaagtggaacatc

SEQ ID NO: 529233 - DNA, 25 bp, Homo sapien
tacccagttgagcagaaaattagtc

SEQ ID NO: 529234 - DNA, 25 bp, Homo sapien
tcatattataatcaggccaacaggt

SEQ ID NO: 529235 - DNA, 25 bp, Homo sapien
ggaagaatcccttgcttgatctctg

SEQ ID NO: 529236 - DNA, 25 bp, Homo sapien
ggatagctacttcgagtttcccagc

SEQ ID NO: 529237 - DNA, 25 bp, Homo sapien
tctctctgttgtcacgacggtctcg

SEQ ID NO: 529238 - DNA, 25 bp, Homo sapien
tgactatcaatttgagaacctcttg

SEQ ID NO: 529239 - DNA, 25 bp, Homo sapien
actgacctgagtagacgaagtccca

SEQ ID NO: 529240 - DNA, 25 bp, Homo sapien
ttccaaagtgtggtaatcactcctg

SEQ ID NO: 529241 - DNA, 25 bp, Homo sapien
tatcaagcaatgaatcagaacaacc

SEQ ID NO: 529242 - DNA, 25 bp, Homo sapien
caaccaaggtgtccaatgactgacc

SEQ ID NO: 529243 - DNA, 25 bp, Homo sapien
tcattccttatttccgtacgagaac

SEQ ID NO: 529244 - DNA, 25 bp, Homo sapien
cataactccgggattcttctggata

SEQ ID NO: 529245 - DNA, 25 bp, Homo sapien
ctcaaatggtttcggccataactcc

SEQ ID NO: 529246 - DNA, 25 bp, Homo sapien
tacttcggcccattcggtcatttct

SEQ ID NO: 529247 - DNA, 25 bp, Homo sapien
ctttcgatgagtatctcgaccttca

SEQ ID NO: 529248 - DNA, 25 bp, Homo sapien
tttcgatgagtatctcgaccttcac

SEQ ID NO: 529249 - DNA, 25 bp, Homo sapien
ccttcggtccctagtatctctggca

SEQ ID NO: 529250 - DNA, 25 bp, Homo sapien
ccttgagtcccgcatgtctctggag

SEQ ID NO: 529251 - DNA, 25 bp, Homo sapien
tagtcatgggcatcacgagtggacc

SEQ ID NO: 529252 - DNA, 25 bp, Homo sapien
tctctgggatcacggctctctttgg

SEQ ID NO: 529253 - DNA, 25 bp, Homo sapien
aaataggtgctttctccagtccctg

SEQ ID NO: 529254 - DNA, 25 bp, Homo sapien
catgtttcataggagactgccgtac

SEQ ID NO: 529255 - DNA, 25 bp, Homo sapien
gaacccgactgattattgcttgcat

SEQ ID NO: 529256 - DNA, 25 bp, Homo sapien
gaatctacgaagaccagaagcttag

SEQ ID NO: 529257 - DNA, 25 bp, Homo sapien
gagactgtgaagttcgttcatgatc

SEQ ID NO: 529258 - DNA, 25 bp, Homo sapien
cgttcatgatcatgtctccctttct

SEQ ID NO: 529259 - DNA, 25 bp, Homo sapien
ttccctcctttcatggcgtcgatca

SEQ ID NO: 529260 - DNA, 25 bp, Homo sapien
cgatcatgagactgtgaagttcgtt

SEQ ID NO: 529261 - DNA, 25 bp, Homo sapien
gaatagatgatcctgattgtgagga

SEQ ID NO: 529262 - DNA, 25 bp, Homo sapien
ttagtgtccgctgataagatggtga

SEQ ID NO: 529263 - DNA, 25 bp, Homo sapien
caaagaatgtgaaggataaggagag

SEQ ID NO: 529264 - DNA, 25 bp, Homo sapien
ttctttttcgacgaggagaaggaga

SEQ ID NO: 529265 - DNA, 25 bp, Homo sapien
gtataatgtaatcaagagcactgtg

SEQ ID NO: 529266 - DNA, 25 bp, Homo sapien
cacaaaggtaatatgggcactacca

SEQ ID NO: 529267 - DNA, 25 bp, Homo sapien
tgcaaactaataggtttaccccaga

SEQ ID NO: 529268 - DNA, 25 bp, Homo sapien
gatctttggtctgactagattccaa

SEQ ID NO: 529269 - DNA, 25 bp, Homo sapien
gaacagagtctcatgagggaatcag

SEQ ID NO: 529270 - DNA, 25 bp, Homo sapien
caataagcacaaaggaggtaggagg

SEQ ID NO: 529271 - DNA, 25 bp, Homo sapien
tgtgtgtggcaggaataccggctat

SEQ ID NO: 529272 - DNA, 25 bp, Homo sapien
tcagggtgactactctaggttgctt

SEQ ID NO: 529273 - DNA, 25 bp, Homo sapien
gaattttcaaaactgcagtcggctg

SEQ ID NO: 529274 - DNA, 25 bp, Homo sapien
gactgacgaggatgaaggttgcaaa

SEQ ID NO: 529275 - DNA, 25 bp, Homo sapien
ttagctgagtgtggcaacgcaagcc

SEQ ID NO: 529276 - DNA, 25 bp, Homo sapien
ggctcaagcctataactacaatgtt

SEQ ID NO: 529277 - DNA, 25 bp, Homo sapien
tcaataaaattggtgcgcctgtaat

SEQ ID NO: 529278 - DNA, 25 bp, Homo sapien
gcttgtttaatgcagggatgccaca

SEQ ID NO: 529279 - DNA, 25 bp, Homo sapien
ataacagccccacctaagaaccttg

SEQ ID NO: 529280 - DNA, 25 bp, Homo sapien
tttagaactccagtgcgtgcagatc

SEQ ID NO: 529281 - DNA, 25 bp, Homo sapien
agcgatatcttctggtataggaggg

SEQ ID NO: 529282 - DNA, 25 bp, Homo sapien
tggactaggagtacgtggtcctttc

SEQ ID NO: 529283 - DNA, 25 bp, Homo sapien
ctctttgtcgttcaaaatctcgtcc

SEQ ID NO: 529284 - DNA, 25 bp, Homo sapien
tcttctatcctgtcttttactttat

SEQ ID NO: 529285 - DNA, 25 bp, Homo sapien
ttctcgatactatttatcaccctac

SEQ ID NO: 529286 - DNA, 25 bp, Homo sapien
aaagctattttctcgatactattta

SEQ ID NO: 529287 - DNA, 25 bp, Homo sapien
attttctcgatactatttatcaccc

SEQ ID NO: 529288 - DNA, 25 bp, Homo sapien
cgatactatttatcaccctactgac

SEQ ID NO: 529289 - DNA, 25 bp, Homo sapien
cggagatttgctagactttcttaga

SEQ ID NO: 529290 - DNA, 25 bp, Homo sapien
gatactgcagatgtcttcctatctt

SEQ ID NO: 529291 - DNA, 25 bp, Homo sapien
tcttgctagctgaagacgacttcgg

SEQ ID NO: 529292 - DNA, 25 bp, Homo sapien
gacgacttcgggcttgattttcgct

SEQ ID NO: 529293 - DNA, 25 bp, Homo sapien
tttcttgttccagcttcattaattc

SEQ ID NO: 529294 - DNA, 25 bp, Homo sapien
aattccctctgtatcttctgacgct

SEQ ID NO: 529295 - DNA, 25 bp, Homo sapien
ttgttccagcttcattaattccctc

SEQ ID NO: 529296 - DNA, 25 bp, Homo sapien
ccctctgtatcttctgacgcttcat

SEQ ID NO: 529297 - DNA, 25 bp, Homo sapien
aatcataattaatatctccattgtc

SEQ ID NO: 529298 - DNA, 25 bp, Homo sapien
cataattaatatctccattgtcaga

SEQ ID NO: 529299 - DNA, 25 bp, Homo sapien
taattaatatctccattgtcagaat

SEQ ID NO: 529300 - DNA, 25 bp, Homo sapien
tcataattaatatctccattgtcag

SEQ ID NO: 529301 - DNA, 25 bp, Homo sapien
gattttggagtcactacacgtacga

SEQ ID NO: 529302 - DNA, 25 bp, Homo sapien
cagtctgtgaacatccaatgggttg

SEQ ID NO: 529303 - DNA, 25 bp, Homo sapien
caagactataagcaagggatgggat

SEQ ID NO: 529304 - DNA, 25 bp, Homo sapien
tatctatctggtaatgcctgggtgg

SEQ ID NO: 529305 - DNA, 25 bp, Homo sapien
ttccctatgtctccctcttgaagat

SEQ ID NO: 529306 - DNA, 25 bp, Homo sapien
tttccctatgtctccctcttgaaga

SEQ ID NO: 529307 - DNA, 25 bp, Homo sapien
tccttttccctatgtctccctcttg

SEQ ID NO: 529308 - DNA, 25 bp, Homo sapien
cttttccctatgtctccctcttgaa

SEQ ID NO: 529309 - DNA, 25 bp, Homo sapien
agtagtactactgttccagtggagt

SEQ ID NO: 529310 - DNA, 25 bp, Homo sapien
caaatgtctgtgtcttaggaaaaat

SEQ ID NO: 529311 - DNA, 25 bp, Homo sapien
gaacagtagcctgtgaccaaacata

SEQ ID NO: 529312 - DNA, 25 bp, Homo sapien
tatgcgtgggcagattatgttcatc

SEQ ID NO: 529313 - DNA, 25 bp, Homo sapien
gattgggaatagttctaacctctgg

SEQ ID NO: 529314 - DNA, 25 bp, Homo sapien
tcttctctgggcatattaatcggct

SEQ ID NO: 529315 - DNA, 25 bp, Homo sapien
taatcggctagtgtgcttcaatgaa

SEQ ID NO: 529316 - DNA, 25 bp, Homo sapien
taatacttctttcacgtgctagccc

SEQ ID NO: 529317 - DNA, 25 bp, Homo sapien
aatctgggtctcctcagtgtatctc

SEQ ID NO: 529318 - DNA, 25 bp, Homo sapien
gactaggccaacttcagtcacatgg

SEQ ID NO: 529319 - DNA, 25 bp, Homo sapien
tctcccacaagcacaaataagaatt

SEQ ID NO: 529320 - DNA, 25 bp, Homo sapien
ttccttcagagtgactaggccaact

SEQ ID NO: 529321 - DNA, 25 bp, Homo sapien
caagtcaccctattctacaccagtg

SEQ ID NO: 529322 - DNA, 25 bp, Homo sapien
caactattgtcaggtcaagtcaccc

SEQ ID NO: 529323 - DNA, 25 bp, Homo sapien
ccacaattacttggagaaatttcct

SEQ ID NO: 529324 - DNA, 25 bp, Homo sapien
tgagcttcctatataatcacacctc

SEQ ID NO: 529325 - DNA, 25 bp, Homo sapien
caaagagagtaatttagtcctacac

SEQ ID NO: 529326 - DNA, 25 bp, Homo sapien
gcgtgatccacgataccaggtctaa

SEQ ID NO: 529327 - DNA, 25 bp, Homo sapien
cagcctgctcagtctatatacagtt

SEQ ID NO: 529328 - DNA, 25 bp, Homo sapien
gtgctttggcctgaacgttagacca

SEQ ID NO: 529329 - DNA, 25 bp, Homo sapien
taaggtcactgatcgcaacaaatgc

SEQ ID NO: 529330 - DNA, 25 bp, Homo sapien
tacctgtaaatacatgaagatgccc

SEQ ID NO: 529331 - DNA, 25 bp, Homo sapien
cactgatagtggtgcaagtcctgca

SEQ ID NO: 529332 - DNA, 25 bp, Homo sapien
gaatagccgaactttacactgtgga

SEQ ID NO: 529333 - DNA, 25 bp, Homo sapien
taaaaaggcaggctgcacactggga

SEQ ID NO: 529334 - DNA, 25 bp, Homo sapien
tacagaggattactaaagtggtctc

SEQ ID NO: 529335 - DNA, 25 bp, Homo sapien
gctgggaatacgtgatcttcagaga

SEQ ID NO: 529336 - DNA, 25 bp, Homo sapien
tatacccactagaagggctaacatg

SEQ ID NO: 529337 - DNA, 25 bp, Homo sapien
tccattgtgcattttgctcgtatct

SEQ ID NO: 529338 - DNA, 25 bp, Homo sapien
ctctccattgtgcattttgctcgta

SEQ ID NO: 529339 - DNA, 25 bp, Homo sapien
ttttgctcgtatctttctgacacac

SEQ ID NO: 529340 - DNA, 25 bp, Homo sapien
tgtgcattttgctcgtatctttctg

SEQ ID NO: 529341 - DNA, 25 bp, Homo sapien
tacatgaagatcaacagtcatgtgt

SEQ ID NO: 529342 - DNA, 25 bp, Homo sapien
ttcattacatgaagatcaacagtca

SEQ ID NO: 529343 - DNA, 25 bp, Homo sapien
aacataggcctgatcttcctagaga

SEQ ID NO: 529344 - DNA, 25 bp, Homo sapien
ctaacataggcctgatcttcctaga

SEQ ID NO: 529345 - DNA, 25 bp, Homo sapien
cctaacaggtgaggatgactcctct

SEQ ID NO: 529346 - DNA, 25 bp, Homo sapien
tctttctctaagatcccctgtaggt

SEQ ID NO: 529347 - DNA, 25 bp, Homo sapien
acgtcttggcgcttgttcttcattc

SEQ ID NO: 529348 - DNA, 25 bp, Homo sapien
gggctcagtgtccacgtcttggcgc

SEQ ID NO: 529349 - DNA, 25 bp, Homo sapien
tccatagaggcagttgccagtcttc

SEQ ID NO: 529350 - DNA, 25 bp, Homo sapien
ggtgaagggccatgtacgaatctac

SEQ ID NO: 529351 - DNA, 25 bp, Homo sapien
tcttcagccagttacggcactgtgt

SEQ ID NO: 529352 - DNA, 25 bp, Homo sapien
aattgctgctataacctttaccacg

SEQ ID NO: 529353 - DNA, 25 bp, Homo sapien
gggtccaagcctctcaaatacactg

SEQ ID NO: 529354 - DNA, 25 bp, Homo sapien
tgggtcttcgggatgtgctatcaga

SEQ ID NO: 529355 - DNA, 25 bp, Homo sapien
tcagatatagtcttggtattttcca

SEQ ID NO: 529356 - DNA, 25 bp, Homo sapien
ttccactgtgaccttccttctaatt

SEQ ID NO: 529357 - DNA, 25 bp, Homo sapien
tcaattcccaggacctaaatcgtta

SEQ ID NO: 529358 - DNA, 25 bp, Homo sapien
gaagataaagtagcactcaattccc

SEQ ID NO: 529359 - DNA, 25 bp, Homo sapien
tcccaggacctaaatcgttatcact

SEQ ID NO: 529360 - DNA, 25 bp, Homo sapien
gtagcactcaattcccaggacctaa

SEQ ID NO: 529361 - DNA, 25 bp, Homo sapien
ttcgcaagtgcagtccggaggcacc

SEQ ID NO: 529362 - DNA, 25 bp, Homo sapien
aagctcccttcgcaagtgcagtccg

SEQ ID NO: 529363 - DNA, 25 bp, Homo sapien
aagtgcagtccggaggcaccaccgc

SEQ ID NO: 529364 - DNA, 25 bp, Homo sapien
tcccttcgcaagtgcagtccggagg

SEQ ID NO: 529365 - DNA, 25 bp, Homo sapien
gacgacgacgaggagaaagcgatgc

SEQ ID NO: 529366 - DNA, 25 bp, Homo sapien
ccgggaaccggctcttggctagcga

SEQ ID NO: 529367 - DNA, 25 bp, Homo sapien
cgaagagattgtagattaagaaaag

SEQ ID NO: 529368 - DNA, 25 bp, Homo sapien
ctctccagggtcaagcgaaactggg

SEQ ID NO: 529369 - DNA, 25 bp, Homo sapien
gccgctaggaggaccgcctcaaaat

SEQ ID NO: 529370 - DNA, 25 bp, Homo sapien
aaaatgccgccggaagtcagaggtt

SEQ ID NO: 529371 - DNA, 25 bp, Homo sapien
gccgccggaagtcagaggtttgccc

SEQ ID NO: 529372 - DNA, 25 bp, Homo sapien
accgcctcaaaatgccgccggaagt

SEQ ID NO: 529373 - DNA, 25 bp, Homo sapien
catttgttgacagtacctagagcca

SEQ ID NO: 529374 - DNA, 25 bp, Homo sapien
taccgtggagcaaacggaatgcatg

SEQ ID NO: 529375 - DNA, 25 bp, Homo sapien
gggccatcgcctaattaccgtggag

SEQ ID NO: 529376 - DNA, 25 bp, Homo sapien
gttgtaaatgcgcaaaatgcggcat

SEQ ID NO: 529377 - DNA, 25 bp, Homo sapien
gagatggctagtcaaacgtcgaaac

SEQ ID NO: 529378 - DNA, 25 bp, Homo sapien
gagatggctagtcaaacgtcgaaaa

SEQ ID NO: 529379 - DNA, 25 bp, Homo sapien
tgaaccctagtctgccttaatggca

SEQ ID NO: 529380 - DNA, 25 bp, Homo sapien
ttctctgacagaaccaaggaatagg

SEQ ID NO: 529381 - DNA, 25 bp, Homo sapien
taaacattcctaatgacatgccaag

SEQ ID NO: 529382 - DNA, 25 bp, Homo sapien
ttaaacattcctaatgacatgccaa

SEQ ID NO: 529383 - DNA, 25 bp, Homo sapien
ctattttagagacagcggcaaaagc

SEQ ID NO: 529384 - DNA, 25 bp, Homo sapien
tttagagacagcggcaaaagcttct

SEQ ID NO: 529385 - DNA, 25 bp, Homo sapien
ttagagacagcggcaaaagcttctc

SEQ ID NO: 529386 - DNA, 25 bp, Homo sapien
attttagagacagcggcaaaagctt

SEQ ID NO: 529387 - DNA, 25 bp, Homo sapien
gtatgtgcccgtatctcgaagttca

SEQ ID NO: 529388 - DNA, 25 bp, Homo sapien
gaatccgtatgtgcccgtatctcga

SEQ ID NO: 529389 - DNA, 25 bp, Homo sapien
cagcaagaatccgtatgtgcccgta

SEQ ID NO: 529390 - DNA, 25 bp, Homo sapien
tccggcagcaagaatccgtatgtgc

SEQ ID NO: 529391 - DNA, 25 bp, Homo sapien
aaatcatagatccaatcgtccccac

SEQ ID NO: 529392 - DNA, 25 bp, Homo sapien
gcccaaatcatagatccaatcgtcc

SEQ ID NO: 529393 - DNA, 25 bp, Homo sapien
tatttgatgcccaaatcatagatcc

SEQ ID NO: 529394 - DNA, 25 bp, Homo sapien
gatgcccaaatcatagatccaatcg

SEQ ID NO: 529395 - DNA, 25 bp, Homo sapien
tgccaattctgtaattcctacttga

SEQ ID NO: 529396 - DNA, 25 bp, Homo sapien
ccctgggaatcatgcaaaagtttta

SEQ ID NO: 529397 - DNA, 25 bp, Homo sapien
tctgcttcactcaactagtatgatg

SEQ ID NO: 529398 - DNA, 25 bp, Homo sapien
gattagtgtagtgtacaacctgcac

SEQ ID NO: 529399 - DNA, 25 bp, Homo sapien
aattttctcaatagcacgaactgct

SEQ ID NO: 529400 - DNA, 25 bp, Homo sapien
tttctgagccatggccatgtgtata

SEQ ID NO: 529401 - DNA, 25 bp, Homo sapien
ttttctcaatagcacgaactgcttc

SEQ ID NO: 529402 - DNA, 25 bp, Homo sapien
tcaatagcacgaactgcttcactgg

SEQ ID NO: 529403 - DNA, 25 bp, Homo sapien
taaagtccacagtaggtttccgagc

SEQ ID NO: 529404 - DNA, 25 bp, Homo sapien
tccgagcatgaggaactggatgcac

SEQ ID NO: 529405 - DNA, 25 bp, Homo sapien
tggaaacactatatgctgggagtat

SEQ ID NO: 529406 - DNA, 25 bp, Homo sapien
tctcaagaaactagccactgccttc

SEQ ID NO: 529407 - DNA, 25 bp, Homo sapien
gcacatacttgctacgtgcccttga

SEQ ID NO: 529408 - DNA, 25 bp, Homo sapien
cttccaaaagggaactgataacttg

SEQ ID NO: 529409 - DNA, 25 bp, Homo sapien
gataacttgggtttatagcccagct

SEQ ID NO: 529410 - DNA, 25 bp, Homo sapien
gaactatgtcaatggctcagcgctg

SEQ ID NO: 529411 - DNA, 25 bp, Homo sapien
cataggattgtatagggtccaggtc

SEQ ID NO: 529412 - DNA, 25 bp, Homo sapien
catggagtttctaacctagacaggg

SEQ ID NO: 529413 - DNA, 25 bp, Homo sapien
ggcactgcactagataatgggtatt

SEQ ID NO: 529414 - DNA, 25 bp, Homo sapien
tgatgcatactccttgtcaggttag

SEQ ID NO: 529415 - DNA, 25 bp, Homo sapien
tccgatgcaatgattgttcgcatag

SEQ ID NO: 529416 - DNA, 25 bp, Homo sapien
gattgttcgcatagaaagaacggtt

SEQ ID NO: 529417 - DNA, 25 bp, Homo sapien
gttcctattcaggtctgttccgatg

SEQ ID NO: 529418 - DNA, 25 bp, Homo sapien
cacaccagtgtttggaagcaaagtt

SEQ ID NO: 529419 - DNA, 25 bp, Homo sapien
tcaggagattggtatattgccctat

SEQ ID NO: 529420 - DNA, 25 bp, Homo sapien
ccatgagtagtcataaccatccaca

SEQ ID NO: 529421 - DNA, 25 bp, Homo sapien
ttgccctattatcccatagaattga

SEQ ID NO: 529422 - DNA, 25 bp, Homo sapien
ctttttccatgagtagtcataacca

SEQ ID NO: 529423 - DNA, 25 bp, Homo sapien
tgaaaattgtagattcccaagcttc

SEQ ID NO: 529424 - DNA, 25 bp, Homo sapien
tagattcccaagcttcatgatgtga

SEQ ID NO: 529425 - DNA, 25 bp, Homo sapien
aacttgtgaaaattgtagattccca

SEQ ID NO: 529426 - DNA, 25 bp, Homo sapien
cacctgggaaacttgtgaaaattgt

SEQ ID NO: 529427 - DNA, 25 bp, Homo sapien
cagaaagcaggagagatccattctc

SEQ ID NO: 529428 - DNA, 25 bp, Homo sapien
tggattccacagtcaatccatatgg

SEQ ID NO: 529429 - DNA, 25 bp, Homo sapien
agtcaatccatatggcatttttggc

SEQ ID NO: 529430 - DNA, 25 bp, Homo sapien
ggcctatgaaccacaagcagaaagc

SEQ ID NO: 529431 - DNA, 25 bp, Homo sapien
tcttggcactggttctgacaccgaa

SEQ ID NO: 529432 - DNA, 25 bp, Homo sapien
cactggttctgacaccgaaaagttg

SEQ ID NO: 529433 - DNA, 25 bp, Homo sapien
caattttcttggcactggttctgac

SEQ ID NO: 529434 - DNA, 25 bp, Homo sapien
tgggccaattttcttggcactggtt

SEQ ID NO: 529435 - DNA, 25 bp, Homo sapien
gttccagataagtatgttccaagga

SEQ ID NO: 529436 - DNA, 25 bp, Homo sapien
gtaagagtaggaccaaaccatccag

SEQ ID NO: 529437 - DNA, 25 bp, Homo sapien
caacgtgtacaggttccagataagt

SEQ ID NO: 529438 - DNA, 25 bp, Homo sapien
cttgatcaagtaagagtaggaccaa

SEQ ID NO: 529439 - DNA, 25 bp, Homo sapien
cttctcaaatgaggatccaatgtgg

SEQ ID NO: 529440 - DNA, 25 bp, Homo sapien
gtggatttttgtaagcatatcagga

SEQ ID NO: 529441 - DNA, 25 bp, Homo sapien
tctcaaatgaggatccaatgtggat

SEQ ID NO: 529442 - DNA, 25 bp, Homo sapien
atatcaggatgcctctcagttataa

SEQ ID NO: 529443 - DNA, 25 bp, Homo sapien
tagtgagtgatactgttcatagtac

SEQ ID NO: 529444 - DNA, 25 bp, Homo sapien
gggctgactgtgtcgttggaaatct

SEQ ID NO: 529445 - DNA, 25 bp, Homo sapien
ttcatagtacgatgcggaggctcgg

SEQ ID NO: 529446 - DNA, 25 bp, Homo sapien
gactgtgtcgttggaaatctgctgt

SEQ ID NO: 529447 - DNA, 25 bp, Homo sapien
cattctatcgcctgagatggacaag

SEQ ID NO: 529448 - DNA, 25 bp, Homo sapien
taaaagccgcagtgttgacatcaga

SEQ ID NO: 529449 - DNA, 25 bp, Homo sapien
ggcatctcattcaagttctcttcag

SEQ ID NO: 529450 - DNA, 25 bp, Homo sapien
gcaccacatttgttaaccaggcaaa

SEQ ID NO: 529451 - DNA, 25 bp, Homo sapien
tgagagcctttaccaatcactgagt

SEQ ID NO: 529452 - DNA, 25 bp, Homo sapien
cagagctggaccttaggctttatca

SEQ ID NO: 529453 - DNA, 25 bp, Homo sapien
tctctgcagagtccaaccacctgtt

SEQ ID NO: 529454 - DNA, 25 bp, Homo sapien
gcagtgccagactaacccgaggtct

SEQ ID NO: 529455 - DNA, 25 bp, Homo sapien
tcacaataaggtcagctgttaccgg

SEQ ID NO: 529456 - DNA, 25 bp, Homo sapien
gctttcacattgtcgacatcagatg

SEQ ID NO: 529457 - DNA, 25 bp, Homo sapien
gaattccgctcacatttaaatgggc

SEQ ID NO: 529458 - DNA, 25 bp, Homo sapien
ctgcatggaattccgctcacattta

SEQ ID NO: 529459 - DNA, 25 bp, Homo sapien
taggaagagcagctagaacttggcc

SEQ ID NO: 529460 - DNA, 25 bp, Homo sapien
tatgttgtagtaagattctgtagaa

SEQ ID NO: 529461 - DNA, 25 bp, Homo sapien
cttgcctagaggttctaggaagagc

SEQ ID NO: 529462 - DNA, 25 bp, Homo sapien
tagtaagattctgtagaacttgaac

SEQ ID NO: 529463 - DNA, 25 bp, Homo sapien
agctagccatagttcacacgtgaaa

SEQ ID NO: 529464 - DNA, 25 bp, Homo sapien
ggatagtgtcatatcagtcctcaag

SEQ ID NO: 529465 - DNA, 25 bp, Homo sapien
tcatctgtgttgaagtagctagcca

SEQ ID NO: 529466 - DNA, 25 bp, Homo sapien
gaaacaatacccttagatttgcctg

SEQ ID NO: 529467 - DNA, 25 bp, Homo sapien
gatggagtcgcaagtgaaaacctag

SEQ ID NO: 529468 - DNA, 25 bp, Homo sapien
tgataaagctaaacctgcatgtggc

SEQ ID NO: 529469 - DNA, 25 bp, Homo sapien
cacctaaagggatggaaggttctca

SEQ ID NO: 529470 - DNA, 25 bp, Homo sapien
aaggttctcaacaacaagagcccag

SEQ ID NO: 529471 - DNA, 25 bp, Homo sapien
catgtggccaactgatcagcctatg

SEQ ID NO: 529472 - DNA, 25 bp, Homo sapien
tcagcctatgcccagtaagacaact

SEQ ID NO: 529473 - DNA, 25 bp, Homo sapien
gaggatgcctcgtaacttgagtcgc

SEQ ID NO: 529474 - DNA, 25 bp, Homo sapien
tgtactaacgaggtgagtctcagcc

SEQ ID NO: 529475 - DNA, 25 bp, Homo sapien
tgggtacaaggactgcaaggctgca

SEQ ID NO: 529476 - DNA, 25 bp, Homo sapien
caatgggtacaaggactgcaaggct

SEQ ID NO: 529477 - DNA, 25 bp, Homo sapien
agaacaatgggtacaaggactgcaa

SEQ ID NO: 529478 - DNA, 25 bp, Homo sapien
gtacaaggactgcaaggctgcaaag

SEQ ID NO: 529479 - DNA, 25 bp, Homo sapien
caacagcaattttctgtacaacaaa

SEQ ID NO: 529480 - DNA, 25 bp, Homo sapien
aagagaaaaacccagatcattgatt

SEQ ID NO: 529481 - DNA, 25 bp, Homo sapien
gaaaaacccagatcattgattgcat

SEQ ID NO: 529482 - DNA, 25 bp, Homo sapien
gagaaaaacccagatcattgattgc

SEQ ID NO: 529483 - DNA, 25 bp, Homo sapien
ctgaagagaaaaacccagatcattg

SEQ ID NO: 529484 - DNA, 25 bp, Homo sapien
gtggatcttgttgcttcacacctga

SEQ ID NO: 529485 - DNA, 25 bp, Homo sapien
tgttgcttcacacctgaaacatcat

SEQ ID NO: 529486 - DNA, 25 bp, Homo sapien
aaacatcatttgagaagcccgggaa

SEQ ID NO: 529487 - DNA, 25 bp, Homo sapien
catcatttgagaagcccgggaagtg

SEQ ID NO: 529488 - DNA, 25 bp, Homo sapien
agttcacgaagatagcactgctggc

SEQ ID NO: 529489 - DNA, 25 bp, Homo sapien
cactgctggcgtttactgcaagccc

SEQ ID NO: 529490 - DNA, 25 bp, Homo sapien
gaaattggcaggaacgtactgggca

SEQ ID NO: 529491 - DNA, 25 bp, Homo sapien
ggatcggtcaatgcctctaacttgt

SEQ ID NO: 529492 - DNA, 25 bp, Homo sapien
agagggcgtcttgcattggttcaca

SEQ ID NO: 529493 - DNA, 25 bp, Homo sapien
tctgaagtcaaaaccaaccaatttg

SEQ ID NO: 529494 - DNA, 25 bp, Homo sapien
ggctaagttccattacataccacca

SEQ ID NO: 529495 - DNA, 25 bp, Homo sapien
tacctcattgatggagcttttcacc

SEQ ID NO: 529496 - DNA, 25 bp, Homo sapien
gaaattgctcaacctatgagacctg

SEQ ID NO: 529497 - DNA, 25 bp, Homo sapien
cagttccaccatttcttatccagca

SEQ ID NO: 529498 - DNA, 25 bp, Homo sapien
tagctcttcataacgcagttccacc

SEQ ID NO: 529499 - DNA, 25 bp, Homo sapien
tatccagcatagattcattctgccc

SEQ ID NO: 529500 - DNA, 25 bp, Homo sapien
taaatacaggagaggctacttggct

SEQ ID NO: 529501 - DNA, 25 bp, Homo sapien
aatggcaaaagcgagaagggtacct

SEQ ID NO: 529502 - DNA, 25 bp, Homo sapien
caaaagcaaggtaggattgcctcca

SEQ ID NO: 529503 - DNA, 25 bp, Homo sapien
gatgttagatctggtccaagcccaa

SEQ ID NO: 529504 - DNA, 25 bp, Homo sapien
tgaggcaggcaaacacggtcatgac

SEQ ID NO: 529505 - DNA, 25 bp, Homo sapien
cattttggggttcacttcaaccagg

SEQ ID NO: 529506 - DNA, 25 bp, Homo sapien
ttttcgggccatagagatggcatat

SEQ ID NO: 529507 - DNA, 25 bp, Homo sapien
agggcatacactcttgctccaattt

SEQ ID NO: 529508 - DNA, 25 bp, Homo sapien
gcagacttgtactaatcttcgggtc

SEQ ID NO: 529509 - DNA, 25 bp, Homo sapien
gaaggtcatagttaatggaacctgg

SEQ ID NO: 529510 - DNA, 25 bp, Homo sapien
gaacctggttggatggcatcgatga

SEQ ID NO: 529511 - DNA, 25 bp, Homo sapien
tttctgtcttcagaaggtcatagtt

SEQ ID NO: 529512 - DNA, 25 bp, Homo sapien
gaaaaaccacctgttcagcactatg

SEQ ID NO: 529513 - DNA, 25 bp, Homo sapien
aaatgagccccgagtgttacaagga

SEQ ID NO: 529514 - DNA, 25 bp, Homo sapien
tattttacggagagaagcacccctg

SEQ ID NO: 529515 - DNA, 25 bp, Homo sapien
tctaatagtgaaccccagcatcgct

SEQ ID NO: 529516 - DNA, 25 bp, Homo sapien
caccaatttcttcgaggatattcag

SEQ ID NO: 529517 - DNA, 25 bp, Homo sapien
gccaccaccaatttcttcgaggata

SEQ ID NO: 529518 - DNA, 25 bp, Homo sapien
ttcttcgaggatattcagtgtatac

SEQ ID NO: 529519 - DNA, 25 bp, Homo sapien
gtcatcattgaccttctggccacca

SEQ ID NO: 529520 - DNA, 25 bp, Homo sapien
tagaagacagtctggacaccattac

SEQ ID NO: 529521 - DNA, 25 bp, Homo sapien
tagactaggccaggcgccagtaatc

SEQ ID NO: 529522 - DNA, 25 bp, Homo sapien
caatgttggaaaagtctgagtagcc

SEQ ID NO: 529523 - DNA, 25 bp, Homo sapien
acatggcagcgcttgtctgtagtcc

SEQ ID NO: 529524 - DNA, 25 bp, Homo sapien
tagtacgggatggaccacagacaca

SEQ ID NO: 529525 - DNA, 25 bp, Homo sapien
gaatacaggttaagctccagcacac

SEQ ID NO: 529526 - DNA, 25 bp, Homo sapien
taatgtgattcgacatggcccaaag

SEQ ID NO: 529527 - DNA, 25 bp, Homo sapien
tattcacaggtatggtcatggctca

SEQ ID NO: 529528 - DNA, 25 bp, Homo sapien
ttggtatccaccgtgtgccctcgga

SEQ ID NO: 529529 - DNA, 25 bp, Homo sapien
gatggcattggtatccaccgtgtgc

SEQ ID NO: 529530 - DNA, 25 bp, Homo sapien
cagaacttgtgatggcattggtatc

SEQ ID NO: 529531 - DNA, 25 bp, Homo sapien
accgtgtgccctcggacagggtcca

SEQ ID NO: 529532 - DNA, 25 bp, Homo sapien
agtgagaagctactaaggaacaggg

SEQ ID NO: 529533 - DNA, 25 bp, Homo sapien
ggtatagcaaattgtggaggcagct

SEQ ID NO: 529534 - DNA, 25 bp, Homo sapien
ttgagaacagcctctcatagtggca

SEQ ID NO: 529535 - DNA, 25 bp, Homo sapien
cagggaaccttatagaggtatagca

SEQ ID NO: 529536 - DNA, 25 bp, Homo sapien
gggagagtttcctaattgtctgctt

SEQ ID NO: 529537 - DNA, 25 bp, Homo sapien
ttatgcatatgctgtttgccaactg

SEQ ID NO: 529538 - DNA, 25 bp, Homo sapien
tgcttcaagggttttatctgcaagt

SEQ ID NO: 529539 - DNA, 25 bp, Homo sapien
catttgcttcagagccatcattgcc

SEQ ID NO: 529540 - DNA, 25 bp, Homo sapien
tctttccagacagaatgtaatgtga

SEQ ID NO: 529541 - DNA, 25 bp, Homo sapien
taggaaaatgaattgagtcacacta

SEQ ID NO: 529542 - DNA, 25 bp, Homo sapien
ttgccattatctttccagacagaat

SEQ ID NO: 529543 - DNA, 25 bp, Homo sapien
cacactaacataggatctaatgagg

SEQ ID NO: 529544 - DNA, 25 bp, Homo sapien
tccttcattgagatcttgtccaccg

SEQ ID NO: 529545 - DNA, 25 bp, Homo sapien
aaccagggagaacttcgcttgattc

SEQ ID NO: 529546 - DNA, 25 bp, Homo sapien
ttgtccaccgatgccaaccagggag

SEQ ID NO: 529547 - DNA, 25 bp, Homo sapien
ccagtgtgagagtgcggtttccttc

SEQ ID NO: 529548 - DNA, 25 bp, Homo sapien
cttcttcatattgcctcccagtttg

SEQ ID NO: 529549 - DNA, 25 bp, Homo sapien
tcttcatattgcctcccagtttggg

SEQ ID NO: 529550 - DNA, 25 bp, Homo sapien
tattgcctcccagtttggggtatgg

SEQ ID NO: 529551 - DNA, 25 bp, Homo sapien
ttgcctcccagtttggggtatggcg

SEQ ID NO: 529552 - DNA, 25 bp, Homo sapien
attgactcgagggttaacacccagg

SEQ ID NO: 529553 - DNA, 25 bp, Homo sapien
gttcatccagttcctaaatgtccgc

SEQ ID NO: 529554 - DNA, 25 bp, Homo sapien
taacacccagggagttcatccagtt

SEQ ID NO: 529555 - DNA, 25 bp, Homo sapien
aaatgtccgctcttctctcgtctca

SEQ ID NO: 529556 - DNA, 25 bp, Homo sapien
tagctgttcagttggctctcaaagg

SEQ ID NO: 529557 - DNA, 25 bp, Homo sapien
tattaatagtgtgtggaatcctgtg

SEQ ID NO: 529558 - DNA, 25 bp, Homo sapien
taaactgtattggatttggacgagg

SEQ ID NO: 529559 - DNA, 25 bp, Homo sapien
tggacgagggttcttatactgtgtt

SEQ ID NO: 529560 - DNA, 25 bp, Homo sapien
tgttgtacagcccaatgagataagc

SEQ ID NO: 529561 - DNA, 25 bp, Homo sapien
tctattaagaacatcaggaactggt

SEQ ID NO: 529562 - DNA, 25 bp, Homo sapien
tacaaagggagcaacaggcaaggtc

SEQ ID NO: 529563 - DNA, 25 bp, Homo sapien
ttttagttgacagacaacggcagtc

SEQ ID NO: 529564 - DNA, 25 bp, Homo sapien
gtggctgtgacaaactgccggcagc

SEQ ID NO: 529565 - DNA, 25 bp, Homo sapien
cctcggacaacatctgtggctgtga

SEQ ID NO: 529566 - DNA, 25 bp, Homo sapien
tgcagggcagggtatctgttaaaga

SEQ ID NO: 529567 - DNA, 25 bp, Homo sapien
gggttccctcggacaacatctgtgg

SEQ ID NO: 529568 - DNA, 25 bp, Homo sapien
ttggagccacctgctcaagcaggtg

SEQ ID NO: 529569 - DNA, 25 bp, Homo sapien
caagcaggtggtaataagcttttga

SEQ ID NO: 529570 - DNA, 25 bp, Homo sapien
ccgcagtcctgacatgtcaataaca

SEQ ID NO: 529571 - DNA, 25 bp, Homo sapien
cctgacatgtcaataacaacagcag

SEQ ID NO: 529572 - DNA, 25 bp, Homo sapien
tttatattgctgtagaagtcagtca

SEQ ID NO: 529573 - DNA, 25 bp, Homo sapien
ctttatattgctgtagaagtcagtc

SEQ ID NO: 529574 - DNA, 25 bp, Homo sapien
ttatattgctgtagaagtcagtcag

SEQ ID NO: 529575 - DNA, 25 bp, Homo sapien
ttgccaattttgttgcagcctgcat

SEQ ID NO: 529576 - DNA, 25 bp, Homo sapien
cttgatgtcagtactgaagttgcca

SEQ ID NO: 529577 - DNA, 25 bp, Homo sapien
aggtggtaattagcccacctcagca

SEQ ID NO: 529578 - DNA, 25 bp, Homo sapien
gctcttcaggggagagtttcatcaa

SEQ ID NO: 529579 - DNA, 25 bp, Homo sapien
aatgtcagcaaacaacccaatcttg

SEQ ID NO: 529580 - DNA, 25 bp, Homo sapien
gaagtcccaggaccagataaggctt

SEQ ID NO: 529581 - DNA, 25 bp, Homo sapien
caacccaatcttgatgacttgccac

SEQ ID NO: 529582 - DNA, 25 bp, Homo sapien
ctcagcccctatgttgaccacatgg

SEQ ID NO: 529583 - DNA, 25 bp, Homo sapien
gcagtggtccattcaatcaaaccag

SEQ ID NO: 529584 - DNA, 25 bp, Homo sapien
gcatgagactgatgaggcctatatt

SEQ ID NO: 529585 - DNA, 25 bp, Homo sapien
aagttgaaggcccattctggttggc

SEQ ID NO: 529586 - DNA, 25 bp, Homo sapien
tcatgcagtggtccattcaatcaaa

SEQ ID NO: 529587 - DNA, 25 bp, Homo sapien
ctgaatggtgaaaggggttagcttc

SEQ ID NO: 529588 - DNA, 25 bp, Homo sapien
gtgtctggcactgacaggttgatca

SEQ ID NO: 529589 - DNA, 25 bp, Homo sapien
gtctggcactgacaggttgatcatt

SEQ ID NO: 529590 - DNA, 25 bp, Homo sapien
tggcactgacaggttgatcatttta

SEQ ID NO: 529591 - DNA, 25 bp, Homo sapien
tgacatgccgacaatcaggatcatt

SEQ ID NO: 529592 - DNA, 25 bp, Homo sapien
ttaaagagatcattcgtgtttgggt

SEQ ID NO: 529593 - DNA, 25 bp, Homo sapien
cgtgtttgggttcattgggatgaca

SEQ ID NO: 529594 - DNA, 25 bp, Homo sapien
ggttcattgggatgacatgccgaca

SEQ ID NO: 529595 - DNA, 25 bp, Homo sapien
ggccaaaactatctctctgttccta

SEQ ID NO: 529596 - DNA, 25 bp, Homo sapien
ataatgcttacaggacaaaactcag

SEQ ID NO: 529597 - DNA, 25 bp, Homo sapien
gttcctatatatacgcataatccag

SEQ ID NO: 529598 - DNA, 25 bp, Homo sapien
caaatgtggtataatgcttacagga

SEQ ID NO: 529599 - DNA, 25 bp, Homo sapien
tattggaccctacccagagctagga

SEQ ID NO: 529600 - DNA, 25 bp, Homo sapien
gaatctgtaatcctgaaatcctgct

SEQ ID NO: 529601 - DNA, 25 bp, Homo sapien
tggatggcagccttcggaataaatt

SEQ ID NO: 529602 - DNA, 25 bp, Homo sapien
tgtgcccggcctcatgagtttatct

SEQ ID NO: 529603 - DNA, 25 bp, Homo sapien
tctaaaggtcttggcaacatctgtg

SEQ ID NO: 529604 - DNA, 25 bp, Homo sapien
gctctgaagtaccaccgattgcaca

SEQ ID NO: 529605 - DNA, 25 bp, Homo sapien
gtaccaccgattgcacaaatccctt

SEQ ID NO: 529606 - DNA, 25 bp, Homo sapien
tgggtgccaacgctagactgctctg

SEQ ID NO: 529607 - DNA, 25 bp, Homo sapien
caagcagtgatcaagaaaatcacaa

SEQ ID NO: 529608 - DNA, 25 bp, Homo sapien
tcaagcagtgatcaagaaaatcaca

SEQ ID NO: 529609 - DNA, 25 bp, Homo sapien
taatgtcgaagcaaggaggtaagga

SEQ ID NO: 529610 - DNA, 25 bp, Homo sapien
atatgtaatgtcgaagcaaggaggt

SEQ ID NO: 529611 - DNA, 25 bp, Homo sapien
cttggtccagatcacctgtagccat

SEQ ID NO: 529612 - DNA, 25 bp, Homo sapien
tcttggtccagatcacctgtagcca

SEQ ID NO: 529613 - DNA, 25 bp, Homo sapien
aaactcatcaaagctgatccttcca

SEQ ID NO: 529614 - DNA, 25 bp, Homo sapien
taaactcatcaaagctgatccttcc

SEQ ID NO: 529615 - DNA, 25 bp, Homo sapien
ctgatgtatccattgccatcagtat

SEQ ID NO: 529616 - DNA, 25 bp, Homo sapien
gaacaagtcattcaactcattgaag

SEQ ID NO: 529617 - DNA, 25 bp, Homo sapien
caagcaagcagccttgaacaagtca

SEQ ID NO: 529618 - DNA, 25 bp, Homo sapien
tcgtactctatacccaggcaaaggc

SEQ ID NO: 529619 - DNA, 25 bp, Homo sapien
gaatctaccctgaagctactcagtg

SEQ ID NO: 529620 - DNA, 25 bp, Homo sapien
gacgagagaggctatcattcagaca

SEQ ID NO: 529621 - DNA, 25 bp, Homo sapien
cagacattaaggcatgatcccaggg

SEQ ID NO: 529622 - DNA, 25 bp, Homo sapien
gaagcttcaggacgattcaggcaac

SEQ ID NO: 529623 - DNA, 25 bp, Homo sapien
tccatcatttcctcatcggacactg

SEQ ID NO: 529624 - DNA, 25 bp, Homo sapien
ctgagctccatcatttcctcatcgg

SEQ ID NO: 529625 - DNA, 25 bp, Homo sapien
catttcctcatcggacactgatcct

SEQ ID NO: 529626 - DNA, 25 bp, Homo sapien
caactttggcaaaagcttctctgag

SEQ ID NO: 529627 - DNA, 25 bp, Homo sapien
ccctctcataattcagctatgggaa

SEQ ID NO: 529628 - DNA, 25 bp, Homo sapien
cagaaaagcgacagtcttgctgaga

SEQ ID NO: 529629 - DNA, 25 bp, Homo sapien
gaatctgaggcgctttctaggtgtt

SEQ ID NO: 529630 - DNA, 25 bp, Homo sapien
tcttctcagaaaagcgacagtcttg

SEQ ID NO: 529631 - DNA, 25 bp, Homo sapien
gagtgtggccctttttaatgactac

SEQ ID NO: 529632 - DNA, 25 bp, Homo sapien
caggtcttctgcaaatccgtggtca

SEQ ID NO: 529633 - DNA, 25 bp, Homo sapien
ccgtggtcaatctgggaaatcccct

SEQ ID NO: 529634 - DNA, 25 bp, Homo sapien
tcatctaaatatgccctgccacaaa

SEQ ID NO: 529635 - DNA, 25 bp, Homo sapien
gctgagaaatagctgctggcgccat

SEQ ID NO: 529636 - DNA, 25 bp, Homo sapien
cagcagctgtagctttggctcggag

SEQ ID NO: 529637 - DNA, 25 bp, Homo sapien
gctggcgccatcagcagctgtagct

SEQ ID NO: 529638 - DNA, 25 bp, Homo sapien
aagtattgcaaatgagctgagaaat

SEQ ID NO: 529639 - DNA, 25 bp, Homo sapien
cccgcacagatcagggaagttccca

SEQ ID NO: 529640 - DNA, 25 bp, Homo sapien
tttatgggatgttaccacacacagc

SEQ ID NO: 529641 - DNA, 25 bp, Homo sapien
gagcagcacgtgagacctgttttat

SEQ ID NO: 529642 - DNA, 25 bp, Homo sapien
cacagcttaagacacgttgatccag

SEQ ID NO: 529643 - DNA, 25 bp, Homo sapien
ttagtgctgacacccaattgacatg

SEQ ID NO: 529644 - DNA, 25 bp, Homo sapien
gtcccctgctcccatattgatgcca

SEQ ID NO: 529645 - DNA, 25 bp, Homo sapien
ctccatttctggtgtgagccagtgc

SEQ ID NO: 529646 - DNA, 25 bp, Homo sapien
gccagtgcacccactcctccttaaa

SEQ ID NO: 529647 - DNA, 25 bp, Homo sapien
tgtagggcctgcttgtaagctgagc

SEQ ID NO: 529648 - DNA, 25 bp, Homo sapien
gggtctctatccaactctgtagggc

SEQ ID NO: 529649 - DNA, 25 bp, Homo sapien
aaagcgattctgtctgagattgcag

SEQ ID NO: 529650 - DNA, 25 bp, Homo sapien
cttgccagccgcaaaagcgattctg

SEQ ID NO: 529651 - DNA, 25 bp, Homo sapien
tgactactaccagactgaggaaaca

SEQ ID NO: 529652 - DNA, 25 bp, Homo sapien
tacttcacacatttggatacatagc

SEQ ID NO: 529653 - DNA, 25 bp, Homo sapien
tttaaactttgcctaaggaatgctg

SEQ ID NO: 529654 - DNA, 25 bp, Homo sapien
gaaacaaaatgcagggtattattta

SEQ ID NO: 529655 - DNA, 25 bp, Homo sapien
gtacttgcaagtggggctgacacag

SEQ ID NO: 529656 - DNA, 25 bp, Homo sapien
catctttgagtaacaggctccttgt

SEQ ID NO: 529657 - DNA, 25 bp, Homo sapien
agtaacaggctccttgtacttgcaa

SEQ ID NO: 529658 - DNA, 25 bp, Homo sapien
ttgagtaacaggctccttgtacttg

SEQ ID NO: 529659 - DNA, 25 bp, Homo sapien
ttgaaactattcaggtgagatgtgc

SEQ ID NO: 529660 - DNA, 25 bp, Homo sapien
ggtggtcacattttgcagtttccag

SEQ ID NO: 529661 - DNA, 25 bp, Homo sapien
gttcaagtccctcttatctcagttt

SEQ ID NO: 529662 - DNA, 25 bp, Homo sapien
tgagatgtgcaaagtaacattggtg

SEQ ID NO: 529663 - DNA, 25 bp, Homo sapien
tccatcttggatggccacgcgaggt

SEQ ID NO: 529664 - DNA, 25 bp, Homo sapien
gaaacagtgccgaagtgcatcacaa

SEQ ID NO: 529665 - DNA, 25 bp, Homo sapien
taaatagcctccgtgaaatagagca

SEQ ID NO: 529666 - DNA, 25 bp, Homo sapien
ccagttagacagtggcaggaatcac

SEQ ID NO: 529667 - DNA, 25 bp, Homo sapien
tatgaccaggaaccccttctttctg

SEQ ID NO: 529668 - DNA, 25 bp, Homo sapien
caagcctgggtgtgtggtcacaagg

SEQ ID NO: 529669 - DNA, 25 bp, Homo sapien
gtccttggtagtactggtgtatgac

SEQ ID NO: 529670 - DNA, 25 bp, Homo sapien
gtagtactggtgtatgaccaggaac

SEQ ID NO: 529671 - DNA, 25 bp, Homo sapien
gaatgacaaatcatcagccaggaaa

SEQ ID NO: 529672 - DNA, 25 bp, Homo sapien
agaatgacaaatcatcagccaggaa

SEQ ID NO: 529673 - DNA, 25 bp, Homo sapien
aagcacagtgttctgtatctagtgg

SEQ ID NO: 529674 - DNA, 25 bp, Homo sapien
gtatctagtggtgcctggtcatctg

SEQ ID NO: 529675 - DNA, 25 bp, Homo sapien
tagtggtgcctggtcatctgaggcc

SEQ ID NO: 529676 - DNA, 25 bp, Homo sapien
tgttctgtatctagtggtgcctggt

SEQ ID NO: 529677 - DNA, 25 bp, Homo sapien
tcatgaaacaccagtctcccgacac

SEQ ID NO: 529678 - DNA, 25 bp, Homo sapien
catgaaacaccagtctcccgacaca

SEQ ID NO: 529679 - DNA, 25 bp, Homo sapien
ctcatgaaacaccagtctcccgaca

SEQ ID NO: 529680 - DNA, 25 bp, Homo sapien
cttttgtaagatatgatgctgctgc

SEQ ID NO: 529681 - DNA, 25 bp, Homo sapien
ttttgtaagatatgatgctgctgct

SEQ ID NO: 529682 - DNA, 25 bp, Homo sapien
caacttttgtaagatatgatgctgc

SEQ ID NO: 529683 - DNA, 25 bp, Homo sapien
tcctcaacttttgtaagatatgatg

SEQ ID NO: 529684 - DNA, 25 bp, Homo sapien
tgccttccgccatgagtgaaagcag

SEQ ID NO: 529685 - DNA, 25 bp, Homo sapien
aaccatgagccaaatgtgtctgttt

SEQ ID NO: 529686 - DNA, 25 bp, Homo sapien
tggaccctcaccacaagcagatgct

SEQ ID NO: 529687 - DNA, 25 bp, Homo sapien
tgctgttgctgtgtgatctctgcac

SEQ ID NO: 529688 - DNA, 25 bp, Homo sapien
tattctgtcagagctggatctttcc

SEQ ID NO: 529689 - DNA, 25 bp, Homo sapien
gcattttgcagcagttcaattcctc

SEQ ID NO: 529690 - DNA, 25 bp, Homo sapien
gctttctttgaactactgctatctc

SEQ ID NO: 529691 - DNA, 25 bp, Homo sapien
tatctccggtgatgtcatttggcct

SEQ ID NO: 529692 - DNA, 25 bp, Homo sapien
gaagggtgcctgttaatctttgggc

SEQ ID NO: 529693 - DNA, 25 bp, Homo sapien
tctagagatcaagcagaagagccgg

SEQ ID NO: 529694 - DNA, 25 bp, Homo sapien
tccacatctccacgactgtaagaag

SEQ ID NO: 529695 - DNA, 25 bp, Homo sapien
gaagagccggtcttccattttggct

SEQ ID NO: 529696 - DNA, 25 bp, Homo sapien
tcccaggatctccagttcaaacaaa

SEQ ID NO: 529697 - DNA, 25 bp, Homo sapien
tgataaaggttgcatgacatttcct

SEQ ID NO: 529698 - DNA, 25 bp, Homo sapien
attccatgataaaggttgcatgaca

SEQ ID NO: 529699 - DNA, 25 bp, Homo sapien
ccaggatctccagttcaaacaaagg

SEQ ID NO: 529700 - DNA, 25 bp, Homo sapien
gatcttgaagagcataggtacctga

SEQ ID NO: 529701 - DNA, 25 bp, Homo sapien
ggaatgatacctggatgcctgcgga

SEQ ID NO: 529702 - DNA, 25 bp, Homo sapien
ggaaatcgatagcattacctgcggg

SEQ ID NO: 529703 - DNA, 25 bp, Homo sapien
gaagccttgctttcgactacacaaa

SEQ ID NO: 529704 - DNA, 25 bp, Homo sapien
tttgcaaacacacacgatgtatcta

SEQ ID NO: 529705 - DNA, 25 bp, Homo sapien
aaacacacacgatgtatctatgact

SEQ ID NO: 529706 - DNA, 25 bp, Homo sapien
atttttgcaaacacacacgatgtat

SEQ ID NO: 529707 - DNA, 25 bp, Homo sapien
tgcaaacacacacgatgtatctatg

SEQ ID NO: 529708 - DNA, 25 bp, Homo sapien
tcggaggaaggcgagggctccgcgc

SEQ ID NO: 529709 - DNA, 25 bp, Homo sapien
cagctgcgcgtggagccggcttctc

SEQ ID NO: 529710 - DNA, 25 bp, Homo sapien
agcagctgcgcgtggagccggcttc

SEQ ID NO: 529711 - DNA, 25 bp, Homo sapien
gcagccccacagtgcgtcggaggaa

SEQ ID NO: 529712 - DNA, 25 bp, Homo sapien
gaggcatattttattcatgagcata

SEQ ID NO: 529713 - DNA, 25 bp, Homo sapien
tattcatgagcataaaaagccaatc

SEQ ID NO: 529714 - DNA, 25 bp, Homo sapien
gccaatgtcataaaaaggcttgagg

SEQ ID NO: 529715 - DNA, 25 bp, Homo sapien
gagggaggcatattttattcatgag

SEQ ID NO: 529716 - DNA, 25 bp, Homo sapien
aaggatcctcggctgtgaaaccagg

SEQ ID NO: 529717 - DNA, 25 bp, Homo sapien
gagtattcggtacctgtccatgaca

SEQ ID NO: 529718 - DNA, 25 bp, Homo sapien
gatggagcctgcatatgactcagca

SEQ ID NO: 529719 - DNA, 25 bp, Homo sapien
tattgcatcacaaccactaagtggc

SEQ ID NO: 529720 - DNA, 25 bp, Homo sapien
gtttcctagaatacctgatcagcag

SEQ ID NO: 529721 - DNA, 25 bp, Homo sapien
aatgcgccccatcagtaatatccgt

SEQ ID NO: 529722 - DNA, 25 bp, Homo sapien
caatactattgtcagtgggacccca

SEQ ID NO: 529723 - DNA, 25 bp, Homo sapien
gattaaggctgctcagcaatgcgcc

SEQ ID NO: 529724 - DNA, 25 bp, Homo sapien
gggcagctactgagatcccacatgg

SEQ ID NO: 529725 - DNA, 25 bp, Homo sapien
acatggatccacacggacccagatg

SEQ ID NO: 529726 - DNA, 25 bp, Homo sapien
gagacaacatgtcacaacttcaggt

SEQ ID NO: 529727 - DNA, 25 bp, Homo sapien
gctttggccatctggacgctacagc

SEQ ID NO: 529728 - DNA, 25 bp, Homo sapien
cacaggactagaagtgaaaggatcc

SEQ ID NO: 529729 - DNA, 25 bp, Homo sapien
caaccttgtgagacagattgtcagc

SEQ ID NO: 529730 - DNA, 25 bp, Homo sapien
gcttctggctctaaattctggatca

SEQ ID NO: 529731 - DNA, 25 bp, Homo sapien
gagcaacttatcacaaatcacagga

SEQ ID NO: 529732 - DNA, 25 bp, Homo sapien
ggatgcaaaggttctcgatttctca

SEQ ID NO: 529733 - DNA, 25 bp, Homo sapien
gagagctgcccagatatgcgaggat

SEQ ID NO: 529734 - DNA, 25 bp, Homo sapien
tatgcgaggatgcaaaggttctcga

SEQ ID NO: 529735 - DNA, 25 bp, Homo sapien
cccagatatgcgaggatgcaaaggt

SEQ ID NO: 529736 - DNA, 25 bp, Homo sapien
tttagttagggcatgtgaatcccag

SEQ ID NO: 529737 - DNA, 25 bp, Homo sapien
tgtaatgcccaagccctaggttgca

SEQ ID NO: 529738 - DNA, 25 bp, Homo sapien
gaggcactgcggatgagaaaacaat

SEQ ID NO: 529739 - DNA, 25 bp, Homo sapien
aatctgtgacgctttattgcctgcc

SEQ ID NO: 529740 - DNA, 25 bp, Homo sapien
cttgacattgcagtgtgtggaacag

SEQ ID NO: 529741 - DNA, 25 bp, Homo sapien
agtgccatctagaagcagttgcttc

SEQ ID NO: 529742 - DNA, 25 bp, Homo sapien
taaaagccagagcaaacagatttgg

SEQ ID NO: 529743 - DNA, 25 bp, Homo sapien
aaatacaggttcaatttgtgccacc

SEQ ID NO: 529744 - DNA, 25 bp, Homo sapien
tcaccaataatagacacaaatcggt

SEQ ID NO: 529745 - DNA, 25 bp, Homo sapien
cacaaatcggtgttatcataaggca

SEQ ID NO: 529746 - DNA, 25 bp, Homo sapien
tatcataaggcatgttgaacagtct

SEQ ID NO: 529747 - DNA, 25 bp, Homo sapien
taaggcatgttgaacagtctttttc

SEQ ID NO: 529748 - DNA, 25 bp, Homo sapien
ttttctcctcgctgtgatcctcgca

SEQ ID NO: 529749 - DNA, 25 bp, Homo sapien
caccgggggcactcggaggactgga

SEQ ID NO: 529750 - DNA, 25 bp, Homo sapien
gtgatcctcgcacaccgggggcact

SEQ ID NO: 529751 - DNA, 25 bp, Homo sapien
gcagaggccacactttccagaagtt

SEQ ID NO: 529752 - DNA, 25 bp, Homo sapien
atttctgcagacattcgtctccatc

SEQ ID NO: 529753 - DNA, 25 bp, Homo sapien
gatgacagtcgtattctggcaaaat

SEQ ID NO: 529754 - DNA, 25 bp, Homo sapien
gaagatgacagtcgtattctggcaa

SEQ ID NO: 529755 - DNA, 25 bp, Homo sapien
aagatgacagtcgtattctggcaaa

SEQ ID NO: 529756 - DNA, 25 bp, Homo sapien
gggaagatgacagtcgtattctggc

SEQ ID NO: 529757 - DNA, 25 bp, Homo sapien
tgtccttgagtaagggtgccagcag

SEQ ID NO: 529758 - DNA, 25 bp, Homo sapien
gccagccacatgtgcaagggaagct

SEQ ID NO: 529759 - DNA, 25 bp, Homo sapien
tcttgatcctgaccaggtcctcaag

SEQ ID NO: 529760 - DNA, 25 bp, Homo sapien
gctcatcagtcaagtgtcccggcac

SEQ ID NO: 529761 - DNA, 25 bp, Homo sapien
gttcccctgcaaatgctctctcttt

SEQ ID NO: 529762 - DNA, 25 bp, Homo sapien
tccttgttcactttctaccatgatt

SEQ ID NO: 529763 - DNA, 25 bp, Homo sapien
gtgcctggctgatctgatggcttta

SEQ ID NO: 529764 - DNA, 25 bp, Homo sapien
cttgttcactttctaccatgattgt

SEQ ID NO: 529765 - DNA, 25 bp, Homo sapien
gttagcaaacctacaggtcttcaac

SEQ ID NO: 529766 - DNA, 25 bp, Homo sapien
tagcaaacctacaggtcttcaacag

SEQ ID NO: 529767 - DNA, 25 bp, Homo sapien
caaacctacaggtcttcaacagctt

SEQ ID NO: 529768 - DNA, 25 bp, Homo sapien
gcaaacctacaggtcttcaacagct

SEQ ID NO: 529769 - DNA, 25 bp, Homo sapien
ccagctccttggctttcgcatacag

SEQ ID NO: 529770 - DNA, 25 bp, Homo sapien
cttcactctgtccagctccttggct

SEQ ID NO: 529771 - DNA, 25 bp, Homo sapien
cagctccttggctttcgcatacagg

SEQ ID NO: 529772 - DNA, 25 bp, Homo sapien
tgtccagctccttggctttcgcata

SEQ ID NO: 529773 - DNA, 25 bp, Homo sapien
atgggctggtgccatatgctgtcga

SEQ ID NO: 529774 - DNA, 25 bp, Homo sapien
tggtgccatatgctgtcgagcagct

SEQ ID NO: 529775 - DNA, 25 bp, Homo sapien
aaaatgggctggtgccatatgctgt

SEQ ID NO: 529776 - DNA, 25 bp, Homo sapien
ggctggtgccatatgctgtcgagca

SEQ ID NO: 529777 - DNA, 25 bp, Homo sapien
cacgactctgcatatgagtggcagc

SEQ ID NO: 529778 - DNA, 25 bp, Homo sapien
caggattcgggcagggatgcacgac

SEQ ID NO: 529779 - DNA, 25 bp, Homo sapien
gaaatacttccctaggtattcgcag

SEQ ID NO: 529780 - DNA, 25 bp, Homo sapien
cgcagtaccggagccgcttcacaaa

SEQ ID NO: 529781 - DNA, 25 bp, Homo sapien
gcataccggagggtgagtgccacac

SEQ ID NO: 529782 - DNA, 25 bp, Homo sapien
aagcataccggagggtgagtgccac

SEQ ID NO: 529783 - DNA, 25 bp, Homo sapien
ctgccaagcataccggagggtgagt

SEQ ID NO: 529784 - DNA, 25 bp, Homo sapien
ccaagcataccggagggtgagtgcc

SEQ ID NO: 529785 - DNA, 25 bp, Homo sapien
tctcactagcaggaagactgaaggc

SEQ ID NO: 529786 - DNA, 25 bp, Homo sapien
taggctaactattctgagaccacaa

SEQ ID NO: 529787 - DNA, 25 bp, Homo sapien
catactcaacctcatgacagctggg

SEQ ID NO: 529788 - DNA, 25 bp, Homo sapien
caaaatgcaactcagaactggatcg

SEQ ID NO: 529789 - DNA, 25 bp, Homo sapien
tttagaagacccagaactggtgcag

SEQ ID NO: 529790 - DNA, 25 bp, Homo sapien
gagggcacttacgtctagcactgat

SEQ ID NO: 529791 - DNA, 25 bp, Homo sapien
tacagcccataaagtacacggaaga

SEQ ID NO: 529792 - DNA, 25 bp, Homo sapien
catcagacagaagtgctaacaggca

SEQ ID NO: 529793 - DNA, 25 bp, Homo sapien
ccttatttttgggatatactgaact

SEQ ID NO: 529794 - DNA, 25 bp, Homo sapien
gcatagtgcagttctagaataaagc

SEQ ID NO: 529795 - DNA, 25 bp, Homo sapien
gaaatttgattgcaaccttgatgga

SEQ ID NO: 529796 - DNA, 25 bp, Homo sapien
caaaaaggactaggaagtagacaat

SEQ ID NO: 529797 - DNA, 25 bp, Homo sapien
gaagacctcgtgactttggagtgaa

SEQ ID NO: 529798 - DNA, 25 bp, Homo sapien
tcctcggtcctagttgatcacacag

SEQ ID NO: 529799 - DNA, 25 bp, Homo sapien
cagttggcccaggaatgatcctctc

SEQ ID NO: 529800 - DNA, 25 bp, Homo sapien
tctcagagaagtttggctagctcct

SEQ ID NO: 529801 - DNA, 25 bp, Homo sapien
ggctctactggagttccacagccgg

SEQ ID NO: 529802 - DNA, 25 bp, Homo sapien
taggctctactggagttccacagcc

SEQ ID NO: 529803 - DNA, 25 bp, Homo sapien
gagttccacagccggcacagaaaaa

SEQ ID NO: 529804 - DNA, 25 bp, Homo sapien
tctactggagttccacagccggcac

SEQ ID NO: 529805 - DNA, 25 bp, Homo sapien
gccatcgtgatacttttctaactaa

SEQ ID NO: 529806 - DNA, 25 bp, Homo sapien
aattagaaaagaaattgccatcgtg

SEQ ID NO: 529807 - DNA, 25 bp, Homo sapien
attgccatcgtgatacttttctaac

SEQ ID NO: 529808 - DNA, 25 bp, Homo sapien
ttagaaaagaaattgccatcgtgat

SEQ ID NO: 529809 - DNA, 25 bp, Homo sapien
gcctgagggattttctattgaactg

SEQ ID NO: 529810 - DNA, 25 bp, Homo sapien
cggcctgagggattttctattgaac

SEQ ID NO: 529811 - DNA, 25 bp, Homo sapien
tttctattgaactgtttatcccata

SEQ ID NO: 529812 - DNA, 25 bp, Homo sapien
tgaactgtttatcccatagttttac

SEQ ID NO: 529813 - DNA, 25 bp, Homo sapien
cttttgttggttttgagatcgagtc

SEQ ID NO: 529814 - DNA, 25 bp, Homo sapien
catttcttttgttggttttgagatc

SEQ ID NO: 529815 - DNA, 25 bp, Homo sapien
acattttgttacatttcttttgttg

SEQ ID NO: 529816 - DNA, 25 bp, Homo sapien
ttcttttgttggttttgagatcgag

SEQ ID NO: 529817 - DNA, 25 bp, Homo sapien
ttcctgtactacattcatactggat

SEQ ID NO: 529818 - DNA, 25 bp, Homo sapien
ggattcaaagtcttttcggacacac

SEQ ID NO: 529819 - DNA, 25 bp, Homo sapien
aatctaggaggagcccagtcttcag

SEQ ID NO: 529820 - DNA, 25 bp, Homo sapien
cagtccctctgatcctagacttaaa

SEQ ID NO: 529821 - DNA, 25 bp, Homo sapien
tactgacagtatccagcacttctgg

SEQ ID NO: 529822 - DNA, 25 bp, Homo sapien
tggaacacgcggtacagctctttgg

SEQ ID NO: 529823 - DNA, 25 bp, Homo sapien
aattaactactgacagtatccagca

SEQ ID NO: 529824 - DNA, 25 bp, Homo sapien
atcgagccagctgcactcagggaac

SEQ ID NO: 529825 - DNA, 25 bp, Homo sapien
cagaattgaagtctggctcataagt

SEQ ID NO: 529826 - DNA, 25 bp, Homo sapien
gcagaattgaagtctggctcataag

SEQ ID NO: 529827 - DNA, 25 bp, Homo sapien
attgaagtctggctcataagtgaca

SEQ ID NO: 529828 - DNA, 25 bp, Homo sapien
gaattgaagtctggctcataagtga

SEQ ID NO: 529829 - DNA, 25 bp, Homo sapien
gaaatgtaagagatgcaaatactgg

SEQ ID NO: 529830 - DNA, 25 bp, Homo sapien
ctgaaatgtaagagatgcaaatact

SEQ ID NO: 529831 - DNA, 25 bp, Homo sapien
aatgtaagagatgcaaatactggaa

SEQ ID NO: 529832 - DNA, 25 bp, Homo sapien
tgtaagagatgcaaatactggaaaa

SEQ ID NO: 529833 - DNA, 25 bp, Homo sapien
ggtgatactctcctagattcatggg

SEQ ID NO: 529834 - DNA, 25 bp, Homo sapien
cactgcctcagaggtgacagcccaa

SEQ ID NO: 529835 - DNA, 25 bp, Homo sapien
cagaatgtcagaggcctaggtttca

SEQ ID NO: 529836 - DNA, 25 bp, Homo sapien
cactggaactagctaaagtgggccc

SEQ ID NO: 529837 - DNA, 25 bp, Homo sapien
caggtttctgtgatatcattaaaat

SEQ ID NO: 529838 - DNA, 25 bp, Homo sapien
acaggtttctgtgatatcattaaaa

SEQ ID NO: 529839 - DNA, 25 bp, Homo sapien
taagaacactaaaatcactccctgc

SEQ ID NO: 529840 - DNA, 25 bp, Homo sapien
actgagaggccaaagagatatccga

SEQ ID NO: 529841 - DNA, 25 bp, Homo sapien
gcatctccatgcttcaggttctgag

SEQ ID NO: 529842 - DNA, 25 bp, Homo sapien
gacagaacagataatgagaggacag

SEQ ID NO: 529843 - DNA, 25 bp, Homo sapien
tggtaagtacgtgtttcagtcactg

SEQ ID NO: 529844 - DNA, 25 bp, Homo sapien
atctctttcacatcatggtaagtac

SEQ ID NO: 529845 - DNA, 25 bp, Homo sapien
tctttcacatcatggtaagtacgtg

SEQ ID NO: 529846 - DNA, 25 bp, Homo sapien
acatcatggtaagtacgtgtttcag

SEQ ID NO: 529847 - DNA, 25 bp, Homo sapien
gaagttctgaggcaaggttctgcac

SEQ ID NO: 529848 - DNA, 25 bp, Homo sapien
tccagggaaagacgagcatgcagat

SEQ ID NO: 529849 - DNA, 25 bp, Homo sapien
aggttctgcactacacaactccagg

SEQ ID NO: 529850 - DNA, 25 bp, Homo sapien
tgtgtttcattccacatggatggtg

SEQ ID NO: 529851 - DNA, 25 bp, Homo sapien
ccttgagggaaggagcacaccctgc

SEQ ID NO: 529852 - DNA, 25 bp, Homo sapien
tccttgagggaaggagcacaccctg

SEQ ID NO: 529853 - DNA, 25 bp, Homo sapien
gctccagcacgcagactccttgagg

SEQ ID NO: 529854 - DNA, 25 bp, Homo sapien
agggcttcccggtcccatgctccag

SEQ ID NO: 529855 - DNA, 25 bp, Homo sapien
agctttctcatatttgcccaacttg

SEQ ID NO: 529856 - DNA, 25 bp, Homo sapien
gctttctcatatttgcccaacttgc

SEQ ID NO: 529857 - DNA, 25 bp, Homo sapien
tcaaaagtcatttcagagtcaggct

SEQ ID NO: 529858 - DNA, 25 bp, Homo sapien
cttgctttatgttggtatcaaaagt

SEQ ID NO: 529859 - DNA, 25 bp, Homo sapien
catagccactgtatgaagaagtaga

SEQ ID NO: 529860 - DNA, 25 bp, Homo sapien
aggctgatcactcccaagtaaccca

SEQ ID NO: 529861 - DNA, 25 bp, Homo sapien
tttctccattgctgatataatcata

SEQ ID NO: 529862 - DNA, 25 bp, Homo sapien
gatataatcatatctgcaacataaa

SEQ ID NO: 529863 - DNA, 25 bp, Homo sapien
ctctgtctgctgttgactcagaatg

SEQ ID NO: 529864 - DNA, 25 bp, Homo sapien
tgctgttgactcagaatgttacact

SEQ ID NO: 529865 - DNA, 25 bp, Homo sapien
cacaaatacctctggtgagaaggaa

SEQ ID NO: 529866 - DNA, 25 bp, Homo sapien
gttcttctactgacttgaacagcac

SEQ ID NO: 529867 - DNA, 25 bp, Homo sapien
gagaaggaattcgaagaaatggttc

SEQ ID NO: 529868 - DNA, 25 bp, Homo sapien
cttttctacatcaacaggcagcaca

SEQ ID NO: 529869 - DNA, 25 bp, Homo sapien
gcacggattatccaatttttaggaa

SEQ ID NO: 529870 - DNA, 25 bp, Homo sapien
tattgactcttgagtagtacttcgc

SEQ ID NO: 529871 - DNA, 25 bp, Homo sapien
tacattacttcatagcagtgagagc

SEQ ID NO: 529872 - DNA, 25 bp, Homo sapien
tacttcatagcagtgagagcccttg

SEQ ID NO: 529873 - DNA, 25 bp, Homo sapien
agtgacttcaccacctactaggtac

SEQ ID NO: 529874 - DNA, 25 bp, Homo sapien
tactggtgtgaaatgcagaccccgt

SEQ ID NO: 529875 - DNA, 25 bp, Homo sapien
cattttcctgtcagattctatacag

SEQ ID NO: 529876 - DNA, 25 bp, Homo sapien
caggtaaatataacaagtgaagtga

SEQ ID NO: 529877 - DNA, 25 bp, Homo sapien
tttaatgagctctaagttcctgaag

SEQ ID NO: 529878 - DNA, 25 bp, Homo sapien
ctaagttcctgaaggcagacgccag

SEQ ID NO: 529879 - DNA, 25 bp, Homo sapien
agctctaagttcctgaaggcagacg

SEQ ID NO: 529880 - DNA, 25 bp, Homo sapien
taatgagctctaagttcctgaaggc

SEQ ID NO: 529881 - DNA, 25 bp, Homo sapien
atggcactgattatcaactacatta

SEQ ID NO: 529882 - DNA, 25 bp, Homo sapien
gataacaattctctgcagtctaagg

SEQ ID NO: 529883 - DNA, 25 bp, Homo sapien
aagataacaattctctgcagtctaa

SEQ ID NO: 529884 - DNA, 25 bp, Homo sapien
gattatcaactacattaagctaaaa

SEQ ID NO: 529885 - DNA, 25 bp, Homo sapien
gacaatattagatgaggcaatgcat

SEQ ID NO: 529886 - DNA, 25 bp, Homo sapien
gctgacaatattagatgaggcaatg

SEQ ID NO: 529887 - DNA, 25 bp, Homo sapien
tattagatgaggcaatgcattgtcc

SEQ ID NO: 529888 - DNA, 25 bp, Homo sapien
gatgaggcaatgcattgtcccatgg

SEQ ID NO: 529889 - DNA, 25 bp, Homo sapien
ctttagagcaaggcgaagcaagggt

SEQ ID NO: 529890 - DNA, 25 bp, Homo sapien
aggaatgagggaggtcacctactaa

SEQ ID NO: 529891 - DNA, 25 bp, Homo sapien
ggaatgagggaggtcacctactaaa

SEQ ID NO: 529892 - DNA, 25 bp, Homo sapien
gaagcaagggtgtgaacagagagga

SEQ ID NO: 529893 - DNA, 25 bp, Homo sapien
agcactgtcagtctcaggatatggg

SEQ ID NO: 529894 - DNA, 25 bp, Homo sapien
cccgatgagagtatcctgggcggac

SEQ ID NO: 529895 - DNA, 25 bp, Homo sapien
agagacacccgatgagagtatcctg

SEQ ID NO: 529896 - DNA, 25 bp, Homo sapien
gaggtggccaaaatcccagggcttg

SEQ ID NO: 529897 - DNA, 25 bp, Homo sapien
caacggagtctgtggtatcctcaga

SEQ ID NO: 529898 - DNA, 25 bp, Homo sapien
tccccgaggcacgaaggtgaagggc

SEQ ID NO: 529899 - DNA, 25 bp, Homo sapien
caacgttgtctctgccagggagtcc

SEQ ID NO: 529900 - DNA, 25 bp, Homo sapien
ctactcttttcactcgagccatggg

SEQ ID NO: 529901 - DNA, 25 bp, Homo sapien
tggcacctgagattgcaagtcctgc

SEQ ID NO: 529902 - DNA, 25 bp, Homo sapien
cctgatgtctaattggcaaggagga

SEQ ID NO: 529903 - DNA, 25 bp, Homo sapien
gggttaatccagacagctttgtgcc

SEQ ID NO: 529904 - DNA, 25 bp, Homo sapien
gattgcaagtcctgcggctgttgct

SEQ ID NO: 529905 - DNA, 25 bp, Homo sapien
ctgggcgaaccatcaataatgccag

SEQ ID NO: 529906 - DNA, 25 bp, Homo sapien
tcaataatgccagagtgatcgctga

SEQ ID NO: 529907 - DNA, 25 bp, Homo sapien
agaatcctgcctgactgtagattgt

SEQ ID NO: 529908 - DNA, 25 bp, Homo sapien
agtgatcgctgatcccttcccaggg

SEQ ID NO: 529909 - DNA, 25 bp, Homo sapien
tccctgattgctggtactacttgat

SEQ ID NO: 529910 - DNA, 25 bp, Homo sapien
gtactacttgatttgggccctgaac

SEQ ID NO: 529911 - DNA, 25 bp, Homo sapien
aggagttccctgattgctggtacta

SEQ ID NO: 529912 - DNA, 25 bp, Homo sapien
ggccctgaactcaccacatggccag

SEQ ID NO: 529913 - DNA, 25 bp, Homo sapien
ggggtacagcaataccaagttgatg

SEQ ID NO: 529914 - DNA, 25 bp, Homo sapien
gcgccgttcctaggggtacagcaat

SEQ ID NO: 529915 - DNA, 25 bp, Homo sapien
gggtacagcaataccaagttgatgc

SEQ ID NO: 529916 - DNA, 25 bp, Homo sapien
ggtgcgccgttcctaggggtacagc

SEQ ID NO: 529917 - DNA, 25 bp, Homo sapien
gacatgatgctgtccctgtaaacct

SEQ ID NO: 529918 - DNA, 25 bp, Homo sapien
tgacatgatgctgtccctgtaaacc

SEQ ID NO: 529919 - DNA, 25 bp, Homo sapien
tccctgtaaacctctctcacttatc

SEQ ID NO: 529920 - DNA, 25 bp, Homo sapien
ctgacatgatgctgtccctgtaaac

SEQ ID NO: 529921 - DNA, 25 bp, Homo sapien
gagtatgaatttctcgaagaggcag

SEQ ID NO: 529922 - DNA, 25 bp, Homo sapien
ttctcgaagaggcagattgacacag

SEQ ID NO: 529923 - DNA, 25 bp, Homo sapien
caggagtatgaatttctcgaagagg

SEQ ID NO: 529924 - DNA, 25 bp, Homo sapien
gaatttctcgaagaggcagattgac

SEQ ID NO: 529925 - DNA, 25 bp, Homo sapien
tgacaggaggtcaatatccccattt

SEQ ID NO: 529926 - DNA, 25 bp, Homo sapien
agtgacaggaggtcaatatccccat

SEQ ID NO: 529927 - DNA, 25 bp, Homo sapien
tagtgacaggaggtcaatatcccca

SEQ ID NO: 529928 - DNA, 25 bp, Homo sapien
gtagtgacaggaggtcaatatcccc

SEQ ID NO: 529929 - DNA, 25 bp, Homo sapien
gggattaaaaggtaggcacaggcca

SEQ ID NO: 529930 - DNA, 25 bp, Homo sapien
ggattaaaaggtaggcacaggccag

SEQ ID NO: 529931 - DNA, 25 bp, Homo sapien
attactagtgaacatataagctgca

SEQ ID NO: 529932 - DNA, 25 bp, Homo sapien
aacatataagctgcagcaaaggccc

SEQ ID NO: 529933 - DNA, 25 bp, Homo sapien
tttgtagaggaaagacctcactatg

SEQ ID NO: 529934 - DNA, 25 bp, Homo sapien
tgatcctattgtctcagcctttaga

SEQ ID NO: 529935 - DNA, 25 bp, Homo sapien
agaggaaagacctcactatgttgct

SEQ ID NO: 529936 - DNA, 25 bp, Homo sapien
tcctattgtctcagcctttagagca

SEQ ID NO: 529937 - DNA, 25 bp, Homo sapien
tagggtgaagactattaaagctatc

SEQ ID NO: 529938 - DNA, 25 bp, Homo sapien
cagtatatgagccaaacccacaagt

SEQ ID NO: 529939 - DNA, 25 bp, Homo sapien
atgagccaaacccacaagtccaggt

SEQ ID NO: 529940 - DNA, 25 bp, Homo sapien
aagaaacagtcagtatatgagccaa

SEQ ID NO: 529941 - DNA, 25 bp, Homo sapien
gactttcagttcagaataagacagc

SEQ ID NO: 529942 - DNA, 25 bp, Homo sapien
ctaattgggtatcaggaagatacac

SEQ ID NO: 529943 - DNA, 25 bp, Homo sapien
gatacacaatatgactaacaggcac

SEQ ID NO: 529944 - DNA, 25 bp, Homo sapien
tctggaaggctggacatacttatcc

SEQ ID NO: 529945 - DNA, 25 bp, Homo sapien
gtttcatgtggcagtgcagaaactg

SEQ ID NO: 529946 - DNA, 25 bp, Homo sapien
cactctggaccggtaatcacgaaaa

SEQ ID NO: 529947 - DNA, 25 bp, Homo sapien
gatgctgtcttaactcggctccaaa

SEQ ID NO: 529948 - DNA, 25 bp, Homo sapien
aaaccccagcactgccataaagatg

SEQ ID NO: 529949 - DNA, 25 bp, Homo sapien
caaggcgaaataacccctcctctga

SEQ ID NO: 529950 - DNA, 25 bp, Homo sapien
cactcaaggcgaaataacccctcct

SEQ ID NO: 529951 - DNA, 25 bp, Homo sapien
ctcaaggcgaaataacccctcctct

SEQ ID NO: 529952 - DNA, 25 bp, Homo sapien
ttcactcaaggcgaaataacccctc

SEQ ID NO: 529953 - DNA, 25 bp, Homo sapien
tctgtcaccacatatccacgacttt

SEQ ID NO: 529954 - DNA, 25 bp, Homo sapien
ctgtcaccacatatccacgactttg

SEQ ID NO: 529955 - DNA, 25 bp, Homo sapien
tgtcaccacatatccacgactttgg

SEQ ID NO: 529956 - DNA, 25 bp, Homo sapien
gtctctgctgggcacaaacctctct

SEQ ID NO: 529957 - DNA, 25 bp, Homo sapien
acaaacctctctggcgccacttcca

SEQ ID NO: 529958 - DNA, 25 bp, Homo sapien
tgtctctgctgggcacaaacctctc

SEQ ID NO: 529959 - DNA, 25 bp, Homo sapien
acctctctggcgccacttccaccat

SEQ ID NO: 529960 - DNA, 25 bp, Homo sapien
accgcgctcccggtaacagcagaaa

SEQ ID NO: 529961 - DNA, 25 bp, Homo sapien
ctgcgctgggtaaacgccgcgcgtc

SEQ ID NO: 529962 - DNA, 25 bp, Homo sapien
gcgctcccggtaacagcagaaaggg

SEQ ID NO: 529963 - DNA, 25 bp, Homo sapien
agccaaacccgagcggtggaacgct

SEQ ID NO: 529964 - DNA, 25 bp, Homo sapien
gggccaccgtagctctctagaagct

SEQ ID NO: 529965 - DNA, 25 bp, Homo sapien
gaaactctggagatgcgcgctccta

SEQ ID NO: 529966 - DNA, 25 bp, Homo sapien
gagacgtcgcccagatggaagaaac

SEQ ID NO: 529967 - DNA, 25 bp, Homo sapien
tcagggaagcaaagcgccgttcccg

SEQ ID NO: 529968 - DNA, 25 bp, Homo sapien
tcacgggtgtgcagtggttagtcct

SEQ ID NO: 529969 - DNA, 25 bp, Homo sapien
tgcttcacctggagtctgagtccga

SEQ ID NO: 529970 - DNA, 25 bp, Homo sapien
cgaaggtttggaatcccatcacggg

SEQ ID NO: 529971 - DNA, 25 bp, Homo sapien
tcatgtagcacttcactgtccgcgt

SEQ ID NO: 529972 - DNA, 25 bp, Homo sapien
gaatgtcactgatcattacagacgg

SEQ ID NO: 529973 - DNA, 25 bp, Homo sapien
gaaggtgaacttccagatcacagtg

SEQ ID NO: 529974 - DNA, 25 bp, Homo sapien
actaaatgctgaggcgtggactttc

SEQ ID NO: 529975 - DNA, 25 bp, Homo sapien
tacagacggatcaccatgcaggaaa

SEQ ID NO: 529976 - DNA, 25 bp, Homo sapien
gaagatgctcttagctggactagta

SEQ ID NO: 529977 - DNA, 25 bp, Homo sapien
caggctgaccattatccccagggta

SEQ ID NO: 529978 - DNA, 25 bp, Homo sapien
tagtagaactagaagctgcacctgt

SEQ ID NO: 529979 - DNA, 25 bp, Homo sapien
tgtcttcagtacacagttgccactt

SEQ ID NO: 529980 - DNA, 25 bp, Homo sapien
gaataccaacggatactggtctgtg

SEQ ID NO: 529981 - DNA, 25 bp, Homo sapien
tctgtgacctgaacagaggttgcat

SEQ ID NO: 529982 - DNA, 25 bp, Homo sapien
gatgctctgattttatgctcaccaa

SEQ ID NO: 529983 - DNA, 25 bp, Homo sapien
tatcagcagccgcaaaatacaaatg

SEQ ID NO: 529984 - DNA, 25 bp, Homo sapien
gccctttaaatttgcaagtcctgag

SEQ ID NO: 529985 - DNA, 25 bp, Homo sapien
tgtgggccctgcgtctttgctgagc

SEQ ID NO: 529986 - DNA, 25 bp, Homo sapien
gagtggtgcctcaccaagggctctc

SEQ ID NO: 529987 - DNA, 25 bp, Homo sapien
gaatcaagaagtcaagccactgtaa

SEQ ID NO: 529988 - DNA, 25 bp, Homo sapien
ctagtttgagcagtggtcaggcaat

SEQ ID NO: 529989 - DNA, 25 bp, Homo sapien
cagtggtcaggcaatagtcagtttc

SEQ ID NO: 529990 - DNA, 25 bp, Homo sapien
aggcaatagtcagtttctcctggca

SEQ ID NO: 529991 - DNA, 25 bp, Homo sapien
gtcagtttctcctggcagagtcacc

SEQ ID NO: 529992 - DNA, 25 bp, Homo sapien
ctcccccttgtagccaccatcacca

SEQ ID NO: 529993 - DNA, 25 bp, Homo sapien
tccctcccccttgtagccaccatca

SEQ ID NO: 529994 - DNA, 25 bp, Homo sapien
cccccttgtagccaccatcaccacc

SEQ ID NO: 529995 - DNA, 25 bp, Homo sapien
cctcccccttgtagccaccatcacc

SEQ ID NO: 529996 - DNA, 25 bp, Homo sapien
aatgactgtgccataggaacaccct

SEQ ID NO: 529997 - DNA, 25 bp, Homo sapien
gaatgactgtgccataggaacaccc

SEQ ID NO: 529998 - DNA, 25 bp, Homo sapien
ttagcaactatctgcagtagttgtg

SEQ ID NO: 529999 - DNA, 25 bp, Homo sapien
acttagcaactatctgcagtagttg

SEQ ID NO: 530000 - DNA, 25 bp, Homo sapien
tagcaactatctgcagtagttgtgc

SEQ ID NO: 530001 - DNA, 25 bp, Homo sapien
tcacttagcaactatctgcagtagt

SEQ ID NO: 530002 - DNA, 25 bp, Homo sapien
tactgcactaaagggaccatgacct

SEQ ID NO: 530003 - DNA, 25 bp, Homo sapien
cactttgtactgcactaaagggacc

SEQ ID NO: 530004 - DNA, 25 bp, Homo sapien
ctgcaggtccctcactttgtactgc

SEQ ID NO: 530005 - DNA, 25 bp, Homo sapien
ggtccctcactttgtactgcactaa

SEQ ID NO: 530006 - DNA, 25 bp, Homo sapien
ctgtggcaagcttgccacacagcat

SEQ ID NO: 530007 - DNA, 25 bp, Homo sapien
ctccattgtttccacacagctccat

SEQ ID NO: 530008 - DNA, 25 bp, Homo sapien
atatctccattgtttccacacagct

SEQ ID NO: 530009 - DNA, 25 bp, Homo sapien
tatctccattgtttccacacagctc

SEQ ID NO: 530010 - DNA, 25 bp, Homo sapien
atttatatctccattgtttccacac

SEQ ID NO: 530011 - DNA, 25 bp, Homo sapien
tgccgttggtcacttgttgtagagc

SEQ ID NO: 530012 - DNA, 25 bp, Homo sapien
cacttgttgtagagctttgatttga

SEQ ID NO: 530013 - DNA, 25 bp, Homo sapien
gttttgccgttggtcacttgttgta

SEQ ID NO: 530014 - DNA, 25 bp, Homo sapien
tgaatgtgttttgccgttggtcact

SEQ ID NO: 530015 - DNA, 25 bp, Homo sapien
gccgcatctgccgtctcagaaacgg

SEQ ID NO: 530016 - DNA, 25 bp, Homo sapien
tcgacactcccgctgggctgttcag

SEQ ID NO: 530017 - DNA, 25 bp, Homo sapien
agtccaggccgccatttctgggcgc

SEQ ID NO: 530018 - DNA, 25 bp, Homo sapien
tagctaagatatctggtgccacggc

SEQ ID NO: 530019 - DNA, 25 bp, Homo sapien
ggggagacgccggcaagagctccag

SEQ ID NO: 530020 - DNA, 25 bp, Homo sapien
catgttctcacatagaagtgatggt

SEQ ID NO: 530021 - DNA, 25 bp, Homo sapien
atgttctcacatagaagtgatggtt

SEQ ID NO: 530022 - DNA, 25 bp, Homo sapien
gaaatgccggcatgctaaaatcagc

SEQ ID NO: 530023 - DNA, 25 bp, Homo sapien
cagcaatctctatgatgccacaggc

SEQ ID NO: 530024 - DNA, 25 bp, Homo sapien
gaaaatggggaaatgccggcatgct

SEQ ID NO: 530025 - DNA, 25 bp, Homo sapien
aatcagcaatctctatgatgccaca

SEQ ID NO: 530026 - DNA, 25 bp, Homo sapien
ctgaagtttatacacttcagggaaa

SEQ ID NO: 530027 - DNA, 25 bp, Homo sapien
tgtcctgaagtttatacacttcagg

SEQ ID NO: 530028 - DNA, 25 bp, Homo sapien
tgaaagcatttgagcatcctgagtg

SEQ ID NO: 530029 - DNA, 25 bp, Homo sapien
cagagttaacctttaattgtttatg

SEQ ID NO: 530030 - DNA, 25 bp, Homo sapien
ggagctgagggagagtattcaatga

SEQ ID NO: 530031 - DNA, 25 bp, Homo sapien
tgagggagagtattcaatgaagaaa

SEQ ID NO: 530032 - DNA, 25 bp, Homo sapien
gagctgagggagagtattcaatgaa

SEQ ID NO: 530033 - DNA, 25 bp, Homo sapien
gctgagggagagtattcaatgaaga

SEQ ID NO: 530034 - DNA, 25 bp, Homo sapien
ttctccacaagactagagtagttga

SEQ ID NO: 530035 - DNA, 25 bp, Homo sapien
tagagtagttgaaaaaggtgcagtg

SEQ ID NO: 530036 - DNA, 25 bp, Homo sapien
tccacaagactagagtagttgaaaa

SEQ ID NO: 530037 - DNA, 25 bp, Homo sapien
caagactagagtagttgaaaaaggt

SEQ ID NO: 530038 - DNA, 25 bp, Homo sapien
tcaacagcaccgcgtttcactgctt

SEQ ID NO: 530039 - DNA, 25 bp, Homo sapien
caacagcaccgcgtttcactgcttt

SEQ ID NO: 530040 - DNA, 25 bp, Homo sapien
gcataggttccacacagttgaatct

SEQ ID NO: 530041 - DNA, 25 bp, Homo sapien
tcaggtcagagctattcggcaactg

SEQ ID NO: 530042 - DNA, 25 bp, Homo sapien
gtcagagctattcggcaactgctgg

SEQ ID NO: 530043 - DNA, 25 bp, Homo sapien
cggcataggttccacacagttgaat

SEQ ID NO: 530044 - DNA, 25 bp, Homo sapien
taccgtgagaattaatacccacttc

SEQ ID NO: 530045 - DNA, 25 bp, Homo sapien
gtcttcacttataccgtgagaatta

SEQ ID NO: 530046 - DNA, 25 bp, Homo sapien
cacttataccgtgagaattaatacc

SEQ ID NO: 530047 - DNA, 25 bp, Homo sapien
aagctacttaaactctggtgcttaa

SEQ ID NO: 530048 - DNA, 25 bp, Homo sapien
tatatagaccacttagcacgactgg

SEQ ID NO: 530049 - DNA, 25 bp, Homo sapien
cacgactggcacttaaagggctgaa

SEQ ID NO: 530050 - DNA, 25 bp, Homo sapien
caaagaaatgtgaggctagaggtcc

SEQ ID NO: 530051 - DNA, 25 bp, Homo sapien
tagaggtccaagactctgtcaggca

SEQ ID NO: 530052 - DNA, 25 bp, Homo sapien
ccaggatgcggaaattcctagtttc

SEQ ID NO: 530053 - DNA, 25 bp, Homo sapien
gcttccaggatgcggaaattcctag

SEQ ID NO: 530054 - DNA, 25 bp, Homo sapien
ttccaggatgcggaaattcctagtt

SEQ ID NO: 530055 - DNA, 25 bp, Homo sapien
caggatgcggaaattcctagtttct

SEQ ID NO: 530056 - DNA, 25 bp, Homo sapien
ttccccgagaaaggctgcagtggcc

SEQ ID NO: 530057 - DNA, 25 bp, Homo sapien
tgatgtacacggtgatcacctccat

SEQ ID NO: 530058 - DNA, 25 bp, Homo sapien
cgagaaaggctgcagtggcctcagt

SEQ ID NO: 530059 - DNA, 25 bp, Homo sapien
tcagtgatgtacacggtgatcacct

SEQ ID NO: 530060 - DNA, 25 bp, Homo sapien
ccccacgaggcagggactgagagcc

SEQ ID NO: 530061 - DNA, 25 bp, Homo sapien
agccagccccacttcccccctggct

SEQ ID NO: 530062 - DNA, 25 bp, Homo sapien
cccccacgaggcagggactgagagc

SEQ ID NO: 530063 - DNA, 25 bp, Homo sapien
tggctcttagggcccccatcgcagg

SEQ ID NO: 530064 - DNA, 25 bp, Homo sapien
tccatgaaagtcctggcaccatagg

SEQ ID NO: 530065 - DNA, 25 bp, Homo sapien
cctggcaccataggcagcaagggca

SEQ ID NO: 530066 - DNA, 25 bp, Homo sapien
tggtatccctgaaagtccttcatat

SEQ ID NO: 530067 - DNA, 25 bp, Homo sapien
tccctgaaagtccttcatatttagg

SEQ ID NO: 530068 - DNA, 25 bp, Homo sapien
ctctcggtttctcactcttacttct

SEQ ID NO: 530069 - DNA, 25 bp, Homo sapien
ggtttctcactcttacttcttcagc

SEQ ID NO: 530070 - DNA, 25 bp, Homo sapien
ttctcactcttacttcttcagcctt

SEQ ID NO: 530071 - DNA, 25 bp, Homo sapien
tcggtttctcactcttacttcttca

SEQ ID NO: 530072 - DNA, 25 bp, Homo sapien
gcagccgctcacaccagaagcataa

SEQ ID NO: 530073 - DNA, 25 bp, Homo sapien
gctttgccttcccagacaacgattg

SEQ ID NO: 530074 - DNA, 25 bp, Homo sapien
tcccagacaacgattgagtcacttt

SEQ ID NO: 530075 - DNA, 25 bp, Homo sapien
aaagaaacggaaagtcactgtgctt

SEQ ID NO: 530076 - DNA, 25 bp, Homo sapien
cacatgcttagctagtgacaagcgc

SEQ ID NO: 530077 - DNA, 25 bp, Homo sapien
tgacaagcgcctgtttggagattcc

SEQ ID NO: 530078 - DNA, 25 bp, Homo sapien
tcaatgcttgtaggagtcacatgct

SEQ ID NO: 530079 - DNA, 25 bp, Homo sapien
aaattcgaggttgtcctcagtagcc

SEQ ID NO: 530080 - DNA, 25 bp, Homo sapien
aatggtggtctgctgtgtgaataaa

SEQ ID NO: 530081 - DNA, 25 bp, Homo sapien
gaatgcatgagagccctaggattta

SEQ ID NO: 530082 - DNA, 25 bp, Homo sapien
ggcacgcgatgcgtgtatcatcgag

SEQ ID NO: 530083 - DNA, 25 bp, Homo sapien
ctttgatgaactttgatatgtggaa

SEQ ID NO: 530084 - DNA, 25 bp, Homo sapien
cgtgattatgtctaagtaaactaac

SEQ ID NO: 530085 - DNA, 25 bp, Homo sapien
tagttactatctctctttagcctct

SEQ ID NO: 530086 - DNA, 25 bp, Homo sapien
cttaaatcagaacctaatcaagggt

SEQ ID NO: 530087 - DNA, 25 bp, Homo sapien
taaactaacaatagccatctcatat

SEQ ID NO: 530088 - DNA, 25 bp, Homo sapien
ttgtgcgagtcatccagcatgaggg

SEQ ID NO: 530089 - DNA, 25 bp, Homo sapien
tcttgtgcatctcagctgtttgtgc

SEQ ID NO: 530090 - DNA, 25 bp, Homo sapien
ggtctgcatcaggtgcagttcctgg

SEQ ID NO: 530091 - DNA, 25 bp, Homo sapien
cagcggcgtgtttccattgagtgtg

SEQ ID NO: 530092 - DNA, 25 bp, Homo sapien
cagtggtattcgcagtgatgcacat

SEQ ID NO: 530093 - DNA, 25 bp, Homo sapien
cagagattcaagtggcgacgagtac

SEQ ID NO: 530094 - DNA, 25 bp, Homo sapien
gatgcacattagcatgagtgccaga

SEQ ID NO: 530095 - DNA, 25 bp, Homo sapien
gaacagttgtcagtggtattcgcag

SEQ ID NO: 530096 - DNA, 25 bp, Homo sapien
agaaacgctagctttgcacactggg

SEQ ID NO: 530097 - DNA, 25 bp, Homo sapien
tctcgaagcgggctaggcgtatcat

SEQ ID NO: 530098 - DNA, 25 bp, Homo sapien
cacactgggttttctcgaagcgggc

SEQ ID NO: 530099 - DNA, 25 bp, Homo sapien
gaaactggagaaacgctagctttgc

SEQ ID NO: 530100 - DNA, 25 bp, Homo sapien
gagcttcctggaactgtgcatgctg

SEQ ID NO: 530101 - DNA, 25 bp, Homo sapien
aagtgctcaagtcaccatgcctttg

SEQ ID NO: 530102 - DNA, 25 bp, Homo sapien
tctcccagaatgatgaaatgccaaa

SEQ ID NO: 530103 - DNA, 25 bp, Homo sapien
tcccatgcctttcttgctgtgacca

SEQ ID NO: 530104 - DNA, 25 bp, Homo sapien
tacaattgctagagaacaagagctg

SEQ ID NO: 530105 - DNA, 25 bp, Homo sapien
accaccttgtttgtccgtttcagag

SEQ ID NO: 530106 - DNA, 25 bp, Homo sapien
tgtttgtccgtttcagagtttgtct

SEQ ID NO: 530107 - DNA, 25 bp, Homo sapien
ccttgtttgtccgtttcagagtttg

SEQ ID NO: 530108 - DNA, 25 bp, Homo sapien
caccttgtttgtccgtttcagagtt

SEQ ID NO: 530109 - DNA, 25 bp, Homo sapien
atttggaactttgcaggtgtggttt

SEQ ID NO: 530110 - DNA, 25 bp, Homo sapien
gtccctgtgtaccagaaagcaggtt

SEQ ID NO: 530111 - DNA, 25 bp, Homo sapien
tccctgtgtaccagaaagcaggttc

SEQ ID NO: 530112 - DNA, 25 bp, Homo sapien
gtcatttggaactttgcaggtgtgg

SEQ ID NO: 530113 - DNA, 25 bp, Homo sapien
tgccatcaatattccaccttctcaa

SEQ ID NO: 530114 - DNA, 25 bp, Homo sapien
tcaagcccacatgctcctgtttctt

SEQ ID NO: 530115 - DNA, 25 bp, Homo sapien
ctcaagcccacatgctcctgtttct

SEQ ID NO: 530116 - DNA, 25 bp, Homo sapien
gccatcaatattccaccttctcaag

SEQ ID NO: 530117 - DNA, 25 bp, Homo sapien
tcagtgtcatcttcgcagagtgatt

SEQ ID NO: 530118 - DNA, 25 bp, Homo sapien
gtatacgtttatgtctagcccacca

SEQ ID NO: 530119 - DNA, 25 bp, Homo sapien
gggcattctcgtacataaagacact

SEQ ID NO: 530120 - DNA, 25 bp, Homo sapien
gatacacagtgctcatgcattgcaa

SEQ ID NO: 530121 - DNA, 25 bp, Homo sapien
tgcatctccacagggtttctgggtt

SEQ ID NO: 530122 - DNA, 25 bp, Homo sapien
tgtggcagacctgctctgcatctcc

SEQ ID NO: 530123 - DNA, 25 bp, Homo sapien
cgctgatgtggcagacctgctctgc

SEQ ID NO: 530124 - DNA, 25 bp, Homo sapien
tgggttcttttccaggctgtttcca

SEQ ID NO: 530125 - DNA, 25 bp, Homo sapien
tttccactcagtgtgaggaaaggac

SEQ ID NO: 530126 - DNA, 25 bp, Homo sapien
tagtttccactgatggtgccatgtg

SEQ ID NO: 530127 - DNA, 25 bp, Homo sapien
gaccataagacagaattggagtaat

SEQ ID NO: 530128 - DNA, 25 bp, Homo sapien
ctgatggtgccatgtgtcatttggg

SEQ ID NO: 530129 - DNA, 25 bp, Homo sapien
tccattgccaatatgtggatatcag

SEQ ID NO: 530130 - DNA, 25 bp, Homo sapien
tcttcaagcttgtgtaccactcgta

SEQ ID NO: 530131 - DNA, 25 bp, Homo sapien
accactcgtatccactgctgttcag

SEQ ID NO: 530132 - DNA, 25 bp, Homo sapien
tcattcttagggagtgacagttcca

SEQ ID NO: 530133 - DNA, 25 bp, Homo sapien
cctttttgtcatggccggcagttgg

SEQ ID NO: 530134 - DNA, 25 bp, Homo sapien
tgtgacatccaaggtgtccaggaac

SEQ ID NO: 530135 - DNA, 25 bp, Homo sapien
gaatggaatgctcactttctagacc

SEQ ID NO: 530136 - DNA, 25 bp, Homo sapien
taaagcaaactatggcacgtccatg

SEQ ID NO: 530137 - DNA, 25 bp, Homo sapien
tatgctagtgagggtttgtggttct

SEQ ID NO: 530138 - DNA, 25 bp, Homo sapien
tctggttggggtatggaccacttct

SEQ ID NO: 530139 - DNA, 25 bp, Homo sapien
gaatgaacattatttgggcctgagc

SEQ ID NO: 530140 - DNA, 25 bp, Homo sapien
gtggttctcagcttcccgcattgga

SEQ ID NO: 530141 - DNA, 25 bp, Homo sapien
gcaggtcccctgaaggtctcatcct

SEQ ID NO: 530142 - DNA, 25 bp, Homo sapien
gcagttaagtgatctgactcagaca

SEQ ID NO: 530143 - DNA, 25 bp, Homo sapien
tggatgtcgttggtccttgcctaac

SEQ ID NO: 530144 - DNA, 25 bp, Homo sapien
ggcccctgccttgtaaccatgaaca

SEQ ID NO: 530145 - DNA, 25 bp, Homo sapien
gaaagtaaatttccacgataacatg

SEQ ID NO: 530146 - DNA, 25 bp, Homo sapien
aagatgttgcaaacgaggttcccag

SEQ ID NO: 530147 - DNA, 25 bp, Homo sapien
tggctctggtggctgataactcagg

SEQ ID NO: 530148 - DNA, 25 bp, Homo sapien
tgtcggcatggctgctcgatggctc

SEQ ID NO: 530149 - DNA, 25 bp, Homo sapien
cttcccttctaggtgtcttccccat

SEQ ID NO: 530150 - DNA, 25 bp, Homo sapien
tgcccacttctcctacttttaatat

SEQ ID NO: 530151 - DNA, 25 bp, Homo sapien
ttgcccacttctcctacttttaata

SEQ ID NO: 530152 - DNA, 25 bp, Homo sapien
tctttgcccacttctcctactttta

SEQ ID NO: 530153 - DNA, 25 bp, Homo sapien
gcctagccaccactacttcttaata

SEQ ID NO: 530154 - DNA, 25 bp, Homo sapien
gccaccactacttcttaatagctaa

SEQ ID NO: 530155 - DNA, 25 bp, Homo sapien
cttaatagctaaataggatttaaga

SEQ ID NO: 530156 - DNA, 25 bp, Homo sapien
atgcctagccaccactacttcttaa

SEQ ID NO: 530157 - DNA, 25 bp, Homo sapien
ggacagtgacaaagagacaggtttg

SEQ ID NO: 530158 - DNA, 25 bp, Homo sapien
attttcaaacgttctttcagcacag

SEQ ID NO: 530159 - DNA, 25 bp, Homo sapien
gcttgtcggatacaatatggcctta

SEQ ID NO: 530160 - DNA, 25 bp, Homo sapien
ctctggtgatgtagcttgtcggata

SEQ ID NO: 530161 - DNA, 25 bp, Homo sapien
atctctcagccctgggttctaagtg

SEQ ID NO: 530162 - DNA, 25 bp, Homo sapien
tgttctcgccgactgagtctgctgt

SEQ ID NO: 530163 - DNA, 25 bp, Homo sapien
agatctggtctgatgttctcgccga

SEQ ID NO: 530164 - DNA, 25 bp, Homo sapien
tggctgttgggctgccaccaaaggg

SEQ ID NO: 530165 - DNA, 25 bp, Homo sapien
cgggtggctctaagggacaccccat

SEQ ID NO: 530166 - DNA, 25 bp, Homo sapien
tggctgtcgggtggctctaagggac

SEQ ID NO: 530167 - DNA, 25 bp, Homo sapien
agcgttgtctccagcgtcaggacac

SEQ ID NO: 530168 - DNA, 25 bp, Homo sapien
tgtctccagcgtcaggacacactgg

SEQ ID NO: 530169 - DNA, 25 bp, Homo sapien
ggccccagctctaacgagggctgcc

SEQ ID NO: 530170 - DNA, 25 bp, Homo sapien
gggcttgcgcaaggccctctgtgct

SEQ ID NO: 530171 - DNA, 25 bp, Homo sapien
ccagggcttgcgcaaggccctctgt

SEQ ID NO: 530172 - DNA, 25 bp, Homo sapien
aacccagggcttgcgcaaggccctc

SEQ ID NO: 530173 - DNA, 25 bp, Homo sapien
tgtgggatgattggaaacccagggc

SEQ ID NO: 530174 - DNA, 25 bp, Homo sapien
ggttgggcaaaaccaccgaagcagc

SEQ ID NO: 530175 - DNA, 25 bp, Homo sapien
gcccacgtgagggacgtgacttcct

SEQ ID NO: 530176 - DNA, 25 bp, Homo sapien
cacaaggcttcatgcagtggccttg

SEQ ID NO: 530177 - DNA, 25 bp, Homo sapien
tgctggcgacatctctttagggccc

SEQ ID NO: 530178 - DNA, 25 bp, Homo sapien
cacatgagcaggataaggccagtct

SEQ ID NO: 530179 - DNA, 25 bp, Homo sapien
ccacctacaatattggaatcagtca

SEQ ID NO: 530180 - DNA, 25 bp, Homo sapien
tcacatgagcaggataaggccagtc

SEQ ID NO: 530181 - DNA, 25 bp, Homo sapien
aatcagtcatgcgtcttgctttctt

SEQ ID NO: 530182 - DNA, 25 bp, Homo sapien
cccatgtgtgaatcaaaactctcat

SEQ ID NO: 530183 - DNA, 25 bp, Homo sapien
tcaggaattcagcatgtgagacaat

SEQ ID NO: 530184 - DNA, 25 bp, Homo sapien
agtcaacgcagaaaactgagcctct

SEQ ID NO: 530185 - DNA, 25 bp, Homo sapien
gcagttagctgagaaataggtgttc

SEQ ID NO: 530186 - DNA, 25 bp, Homo sapien
caataggctgctgaaagtcaacgca

SEQ ID NO: 530187 - DNA, 25 bp, Homo sapien
acttccatccctgtcatgtcttcag

SEQ ID NO: 530188 - DNA, 25 bp, Homo sapien
ttcagttatctctcgagttttgaag

SEQ ID NO: 530189 - DNA, 25 bp, Homo sapien
gtcatgtcttcagttatctctcgag

SEQ ID NO: 530190 - DNA, 25 bp, Homo sapien
tttgccttgcaaacttccatccctg

SEQ ID NO: 530191 - DNA, 25 bp, Homo sapien
aaagtgtatgcacaccgcatgcttc

SEQ ID NO: 530192 - DNA, 25 bp, Homo sapien
tgaaatacaacgacgacgactgcaa

SEQ ID NO: 530193 - DNA, 25 bp, Homo sapien
aacgacgacgactgcaaagtgtatg

SEQ ID NO: 530194 - DNA, 25 bp, Homo sapien
tccacatagtgccagcagcagtgcc

SEQ ID NO: 530195 - DNA, 25 bp, Homo sapien
caacttgatctatacaaaactttaa

SEQ ID NO: 530196 - DNA, 25 bp, Homo sapien
ccaacttgatctatacaaaacttta

SEQ ID NO: 530197 - DNA, 25 bp, Homo sapien
cgtgtacacgtactcacactgcctt

SEQ ID NO: 530198 - DNA, 25 bp, Homo sapien
ccttgatggccattcgattggattc

SEQ ID NO: 530199 - DNA, 25 bp, Homo sapien
caagttggacgtgtacacgtactca

SEQ ID NO: 530200 - DNA, 25 bp, Homo sapien
gatggccattcgattggattcctcc

SEQ ID NO: 530201 - DNA, 25 bp, Homo sapien
ggcagtgtggccgccaacttccacc

SEQ ID NO: 530202 - DNA, 25 bp, Homo sapien
tggccgccaacttccaccccggcaa

SEQ ID NO: 530203 - DNA, 25 bp, Homo sapien
agtgtggccgccaacttccaccccg

SEQ ID NO: 530204 - DNA, 25 bp, Homo sapien
tgtggccgccaacttccaccccggc

SEQ ID NO: 530205 - DNA, 25 bp, Homo sapien
catatgctaactggatgcctgcgga

SEQ ID NO: 530206 - DNA, 25 bp, Homo sapien
cagcccatatgctaactggatgcct

SEQ ID NO: 530207 - DNA, 25 bp, Homo sapien
cgtgcaccagcccatatgctaactg

SEQ ID NO: 530208 - DNA, 25 bp, Homo sapien
tgcccttgcagcttgactggggata

SEQ ID NO: 530209 - DNA, 25 bp, Homo sapien
tcagggatgtcactgagtggtttat

SEQ ID NO: 530210 - DNA, 25 bp, Homo sapien
gatgtcactgagtggtttattgtgc

SEQ ID NO: 530211 - DNA, 25 bp, Homo sapien
gaagtagtcagggatgtcactgagt

SEQ ID NO: 530212 - DNA, 25 bp, Homo sapien
gtcactgagtggtttattgtgctga

SEQ ID NO: 530213 - DNA, 25 bp, Homo sapien
agatgcagtgtcctgactggtgtga

SEQ ID NO: 530214 - DNA, 25 bp, Homo sapien
tgtgatggcaaatggccctgacccc

SEQ ID NO: 530215 - DNA, 25 bp, Homo sapien
tgggacgcctcctggttggaagcct

SEQ ID NO: 530216 - DNA, 25 bp, Homo sapien
ttctgtgcacacttcaaggatcccc

SEQ ID NO: 530217 - DNA, 25 bp, Homo sapien
tacatccctccaacctcagcaaagt

SEQ ID NO: 530218 - DNA, 25 bp, Homo sapien
ccagaatggccatgcttgtataagg

SEQ ID NO: 530219 - DNA, 25 bp, Homo sapien
caatcctgtgatagaataaccagaa

SEQ ID NO: 530220 - DNA, 25 bp, Homo sapien
tgtgtgagtcttcttacatccctcc

SEQ ID NO: 530221 - DNA, 25 bp, Homo sapien
gtgtcgttcacagagattaggctct

SEQ ID NO: 530222 - DNA, 25 bp, Homo sapien
taggctctatgggaatactcgtgct

SEQ ID NO: 530223 - DNA, 25 bp, Homo sapien
gaatactcgtgctagaattcaggca

SEQ ID NO: 530224 - DNA, 25 bp, Homo sapien
cttgctccatataagctgtgtcgtt

SEQ ID NO: 530225 - DNA, 25 bp, Homo sapien
tcagaagtgagtcgttgtgagcctg

SEQ ID NO: 530226 - DNA, 25 bp, Homo sapien
gctgcaatcacagatgtcccagtaa

SEQ ID NO: 530227 - DNA, 25 bp, Homo sapien
gctctcagagattcacggaacacgg

SEQ ID NO: 530228 - DNA, 25 bp, Homo sapien
cacagtctctggtgtgaaacctcag

SEQ ID NO: 530229 - DNA, 25 bp, Homo sapien
taagacaaatgtagagggggacgca

SEQ ID NO: 530230 - DNA, 25 bp, Homo sapien
acagaccaacatcaaccaaggcaat

SEQ ID NO: 530231 - DNA, 25 bp, Homo sapien
ttgtaagacaaatgtagagggggac

SEQ ID NO: 530232 - DNA, 25 bp, Homo sapien
gaccaacatcaaccaaggcaatggc

SEQ ID NO: 530233 - DNA, 25 bp, Homo sapien
caccttcacgggcattcagaatgcg

SEQ ID NO: 530234 - DNA, 25 bp, Homo sapien
cggaaatttggattggcagctagca

SEQ ID NO: 530235 - DNA, 25 bp, Homo sapien
tcagatgtactgtgcactttaacct

SEQ ID NO: 530236 - DNA, 25 bp, Homo sapien
taagtaggagtttagcctgctgcac

SEQ ID NO: 530237 - DNA, 25 bp, Homo sapien
tcagtggacagaatgtatatagtgc

SEQ ID NO: 530238 - DNA, 25 bp, Homo sapien
cagctgacagtatcgtcagtggaca

SEQ ID NO: 530239 - DNA, 25 bp, Homo sapien
tatgtgcaataaaatgcatggccag

SEQ ID NO: 530240 - DNA, 25 bp, Homo sapien
taaatgcagtccttctatggctaag

SEQ ID NO: 530241 - DNA, 25 bp, Homo sapien
attcaagtgaatatagtaacatcat

SEQ ID NO: 530242 - DNA, 25 bp, Homo sapien
agaaattcaagtgaatatagtaaca

SEQ ID NO: 530243 - DNA, 25 bp, Homo sapien
aattcaagtgaatatagtaacatca

SEQ ID NO: 530244 - DNA, 25 bp, Homo sapien
aaattcaagtgaatatagtaacatc

SEQ ID NO: 530245 - DNA, 25 bp, Homo sapien
atgaagtgctactgagccttcaaga

SEQ ID NO: 530246 - DNA, 25 bp, Homo sapien
cttacggacaatgtctcctttttgg

SEQ ID NO: 530247 - DNA, 25 bp, Homo sapien
tcaagacttacggacaatgtctcct

SEQ ID NO: 530248 - DNA, 25 bp, Homo sapien
ctgagccttcaagacttacggacaa

SEQ ID NO: 530249 - DNA, 25 bp, Homo sapien
ccaaacgacactgaaaaagctatag

SEQ ID NO: 530250 - DNA, 25 bp, Homo sapien
taaatctctgcttgcaactatggga

SEQ ID NO: 530251 - DNA, 25 bp, Homo sapien
tgaacatgacaaagacagtccaatg

SEQ ID NO: 530252 - DNA, 25 bp, Homo sapien
tagacacttgctagacactagagat

SEQ ID NO: 530253 - DNA, 25 bp, Homo sapien
tattcagaggtgattcaactataga

SEQ ID NO: 530254 - DNA, 25 bp, Homo sapien
ttttagcactataaaatccaatgtt

SEQ ID NO: 530255 - DNA, 25 bp, Homo sapien
gcccttttagcactataaaatccaa

SEQ ID NO: 530256 - DNA, 25 bp, Homo sapien
ctttattcagaggtgattcaactat

SEQ ID NO: 530257 - DNA, 25 bp, Homo sapien
gatgtctgatgtggtcagtaataaa

SEQ ID NO: 530258 - DNA, 25 bp, Homo sapien
taaaggttgcaatgaagtagtagct

SEQ ID NO: 530259 - DNA, 25 bp, Homo sapien
cattcaggtatttagcatgatgtct

SEQ ID NO: 530260 - DNA, 25 bp, Homo sapien
gcaatgaagtagtagctatgatcat

SEQ ID NO: 530261 - DNA, 25 bp, Homo sapien
aatatgtaaagagtggaagtaacac

SEQ ID NO: 530262 - DNA, 25 bp, Homo sapien
ttatctaccattcaggaacatcagt

SEQ ID NO: 530263 - DNA, 25 bp, Homo sapien
ggttgtcatccttgtactttaacat

SEQ ID NO: 530264 - DNA, 25 bp, Homo sapien
aaactaaacattctgcctagcttct

SEQ ID NO: 530265 - DNA, 25 bp, Homo sapien
tatcactgacgcttcagagaacaag

SEQ ID NO: 530266 - DNA, 25 bp, Homo sapien
tatttagtctatcaccgatgggtac

SEQ ID NO: 530267 - DNA, 25 bp, Homo sapien
actttctaagggtatcaaacaccag

SEQ ID NO: 530268 - DNA, 25 bp, Homo sapien
tcaagattaaagctgagcctcggaa

SEQ ID NO: 530269 - DNA, 25 bp, Homo sapien
tgtacactagatatcagaattctgc

SEQ ID NO: 530270 - DNA, 25 bp, Homo sapien
cagactaagatttgatctctgtaca

SEQ ID NO: 530271 - DNA, 25 bp, Homo sapien
ttttttgacattcgacagagtataa

SEQ ID NO: 530272 - DNA, 25 bp, Homo sapien
ccaaataaatatccccgatgcacta

SEQ ID NO: 530273 - DNA, 25 bp, Homo sapien
ttttacagcttctatcccacaagga

SEQ ID NO: 530274 - DNA, 25 bp, Homo sapien
ccagggtaatcttgggtcaaagctg

SEQ ID NO: 530275 - DNA, 25 bp, Homo sapien
gataaaactcgcagacccagggtaa

SEQ ID NO: 530276 - DNA, 25 bp, Homo sapien
tacagttatactatacttgtaatca

SEQ ID NO: 530277 - DNA, 25 bp, Homo sapien
tgttgattcaattacaacgaatctc

SEQ ID NO: 530278 - DNA, 25 bp, Homo sapien
gaatctcaacgaaatccgcttcaag

SEQ ID NO: 530279 - DNA, 25 bp, Homo sapien
gtagtccactcttaacccgaccatg

SEQ ID NO: 530280 - DNA, 25 bp, Homo sapien
tccgcttcaagctatgtagtccact

SEQ ID NO: 530281 - DNA, 25 bp, Homo sapien
gaatagaaaattgcacctgagctca

SEQ ID NO: 530282 - DNA, 25 bp, Homo sapien
gcataagttacgtaggcagcaagct

SEQ ID NO: 530283 - DNA, 25 bp, Homo sapien
tatcatgccgtctgaaaatggcttg

SEQ ID NO: 530284 - DNA, 25 bp, Homo sapien
gaggtatccaacatgggtagtgcca

SEQ ID NO: 530285 - DNA, 25 bp, Homo sapien
ggcaggttttcacttcaagtgtctg

SEQ ID NO: 530286 - DNA, 25 bp, Homo sapien
caggttttcacttcaagtgtctgaa

SEQ ID NO: 530287 - DNA, 25 bp, Homo sapien
tttcctatttctatcaaatttagtg

SEQ ID NO: 530288 - DNA, 25 bp, Homo sapien
tatttactggtttgatggaaaacaa

SEQ ID NO: 530289 - DNA, 25 bp, Homo sapien
tttcatagttacattatctagatca

SEQ ID NO: 530290 - DNA, 25 bp, Homo sapien
tcatagttacattatctagatcaag

SEQ ID NO: 530291 - DNA, 25 bp, Homo sapien
aaatatcacagaatcctaatttttc

SEQ ID NO: 530292 - DNA, 25 bp, Homo sapien
aaaatatcacagaatcctaattttt

SEQ ID NO: 530293 - DNA, 25 bp, Homo sapien
caattagtatgtccagctgagatcc

SEQ ID NO: 530294 - DNA, 25 bp, Homo sapien
tcacaaggtgggtagcatcataagc

SEQ ID NO: 530295 - DNA, 25 bp, Homo sapien
taactgtccatctaaaagaaactgg

SEQ ID NO: 530296 - DNA, 25 bp, Homo sapien
tcttttctgtacaggcagctatgaa

SEQ ID NO: 530297 - DNA, 25 bp, Homo sapien
agggacagagtacagggttgcaaat

SEQ ID NO: 530298 - DNA, 25 bp, Homo sapien
tccatttactttgatctgttcccaa

SEQ ID NO: 530299 - DNA, 25 bp, Homo sapien
acagagtacagggttgcaaattgga

SEQ ID NO: 530300 - DNA, 25 bp, Homo sapien
tgttcccaaatatccactaaaggct

SEQ ID NO: 530301 - DNA, 25 bp, Homo sapien
tagacatcctttggggatccactgg

SEQ ID NO: 530302 - DNA, 25 bp, Homo sapien
catggagtggccaaaaatagacatc

SEQ ID NO: 530303 - DNA, 25 bp, Homo sapien
gcacagatcagagctccatgacctc

SEQ ID NO: 530304 - DNA, 25 bp, Homo sapien
ggatccactggaaaattggcattta

SEQ ID NO: 530305 - DNA, 25 bp, Homo sapien
gtagttggttttccaaggatcttca

SEQ ID NO: 530306 - DNA, 25 bp, Homo sapien
ggatcttcagtggcatcaacataaa

SEQ ID NO: 530307 - DNA, 25 bp, Homo sapien
ctctgtgacataagagtacattctg

SEQ ID NO: 530308 - DNA, 25 bp, Homo sapien
gtgccaaagtcccagctctcatctt

SEQ ID NO: 530309 - DNA, 25 bp, Homo sapien
tctgaagcagactgatgataaccag

SEQ ID NO: 530310 - DNA, 25 bp, Homo sapien
accagattttgatataaaattttgc

SEQ ID NO: 530311 - DNA, 25 bp, Homo sapien
aaccagattttgatataaaattttg

SEQ ID NO: 530312 - DNA, 25 bp, Homo sapien
aagcagactgatgataaccagattt

SEQ ID NO: 530313 - DNA, 25 bp, Homo sapien
tcagcatctcactaaggaaactgtc

SEQ ID NO: 530314 - DNA, 25 bp, Homo sapien
ttcagcatctcactaaggaaactgt

SEQ ID NO: 530315 - DNA, 25 bp, Homo sapien
cttcagcatctcactaaggaaactg

SEQ ID NO: 530316 - DNA, 25 bp, Homo sapien
ttggtggtaagtagacagcaaattt

SEQ ID NO: 530317 - DNA, 25 bp, Homo sapien
ggtggtaagtagacagcaaatttca

SEQ ID NO: 530318 - DNA, 25 bp, Homo sapien
tggtggtaagtagacagcaaatttc

SEQ ID NO: 530319 - DNA, 25 bp, Homo sapien
ctttggtggtaagtagacagcaaat

SEQ ID NO: 530320 - DNA, 25 bp, Homo sapien
tgtggtcaatttagcatactgatct

SEQ ID NO: 530321 - DNA, 25 bp, Homo sapien
tactgatctaaaccaacctgagcct

SEQ ID NO: 530322 - DNA, 25 bp, Homo sapien
gcctatactttgcatggcactgtca

SEQ ID NO: 530323 - DNA, 25 bp, Homo sapien
taatgttcaaaataagtggttccac

SEQ ID NO: 530324 - DNA, 25 bp, Homo sapien
ggcagtccataaagctgggacactc

SEQ ID NO: 530325 - DNA, 25 bp, Homo sapien
gaggcagtccataaagctgggacac

SEQ ID NO: 530326 - DNA, 25 bp, Homo sapien
agaggcagtccataaagctgggaca

SEQ ID NO: 530327 - DNA, 25 bp, Homo sapien
cagtccataaagctgggacactctc

SEQ ID NO: 530328 - DNA, 25 bp, Homo sapien
aactttctgcaatcccccaaagcac

SEQ ID NO: 530329 - DNA, 25 bp, Homo sapien
aaactttctgcaatcccccaaagca

SEQ ID NO: 530330 - DNA, 25 bp, Homo sapien
tcaaaaactttctgcaatcccccaa

SEQ ID NO: 530331 - DNA, 25 bp, Homo sapien
tgctgattgctttttgcttgcacca

SEQ ID NO: 530332 - DNA, 25 bp, Homo sapien
tgcttgcaccaaatggtaggcgatt

SEQ ID NO: 530333 - DNA, 25 bp, Homo sapien
tttttgcttgcaccaaatggtaggc

SEQ ID NO: 530334 - DNA, 25 bp, Homo sapien
tttgcttgcaccaaatggtaggcga

SEQ ID NO: 530335 - DNA, 25 bp, Homo sapien
caggatgtcctattccactggctct

SEQ ID NO: 530336 - DNA, 25 bp, Homo sapien
aagttaaatgtcatccacctccaga

SEQ ID NO: 530337 - DNA, 25 bp, Homo sapien
tggctcttaacaacctagacaggtg

SEQ ID NO: 530338 - DNA, 25 bp, Homo sapien
tgctgttgaccaccactgtgttgtt

SEQ ID NO: 530339 - DNA, 25 bp, Homo sapien
caagacatgtcaccagctattaaaa

SEQ ID NO: 530340 - DNA, 25 bp, Homo sapien
tgtcttgcctaatctacatttgaga

SEQ ID NO: 530341 - DNA, 25 bp, Homo sapien
gctggactcttctaccaagacatgt

SEQ ID NO: 530342 - DNA, 25 bp, Homo sapien
aatctttctcaagcattagtaccca

SEQ ID NO: 530343 - DNA, 25 bp, Homo sapien
tctttttgaattcccactgccatca

SEQ ID NO: 530344 - DNA, 25 bp, Homo sapien
cttctttttgaattcccactgccat

SEQ ID NO: 530345 - DNA, 25 bp, Homo sapien
tttttgaattcccactgccatcatc

SEQ ID NO: 530346 - DNA, 25 bp, Homo sapien
ttctttttgaattcccactgccatc

SEQ ID NO: 530347 - DNA, 25 bp, Homo sapien
gtctctgcgctcgtgcctgcggata

SEQ ID NO: 530348 - DNA, 25 bp, Homo sapien
tcctgtcatggatggtggcgcccaa

SEQ ID NO: 530349 - DNA, 25 bp, Homo sapien
tgtacaaatgtagcgggcagtaggt

SEQ ID NO: 530350 - DNA, 25 bp, Homo sapien
cgggttacactaggttggaggctca

SEQ ID NO: 530351 - DNA, 25 bp, Homo sapien
cagccccgcccatatgatgccccgc

SEQ ID NO: 530352 - DNA, 25 bp, Homo sapien
cgaagtaaaaggcggggctcaagat

SEQ ID NO: 530353 - DNA, 25 bp, Homo sapien
tgaccagaagaagcgggccgaagta

SEQ ID NO: 530354 - DNA, 25 bp, Homo sapien
ctacggtggcggagtgaccagaaga

SEQ ID NO: 530355 - DNA, 25 bp, Homo sapien
tccagtggccgacacgcagtgggaa

SEQ ID NO: 530356 - DNA, 25 bp, Homo sapien
ccagtggccgacacgcagtgggaac

SEQ ID NO: 530357 - DNA, 25 bp, Homo sapien
gtggccgacacgcagtgggaactcc

SEQ ID NO: 530358 - DNA, 25 bp, Homo sapien
cagtggccgacacgcagtgggaact

SEQ ID NO: 530359 - DNA, 25 bp, Homo sapien
ttaaagtcccaatatcgtagtatcg

SEQ ID NO: 530360 - DNA, 25 bp, Homo sapien
tcagtctagttcactgttggtcatg

SEQ ID NO: 530361 - DNA, 25 bp, Homo sapien
ttaacggttcacatttccataacaa

SEQ ID NO: 530362 - DNA, 25 bp, Homo sapien
tccatcagatgactcataataattt

SEQ ID NO: 530363 - DNA, 25 bp, Homo sapien
caggcaacatactgttgcttattac

SEQ ID NO: 530364 - DNA, 25 bp, Homo sapien
catgggacttcaagtttgtaagttg

SEQ ID NO: 530365 - DNA, 25 bp, Homo sapien
ctctgcttctactaacgtccttgaa

SEQ ID NO: 530366 - DNA, 25 bp, Homo sapien
tgcttattacatccataggctctgc

SEQ ID NO: 530367 - DNA, 25 bp, Homo sapien
gtgctttctcacttgtcaaagttcc

SEQ ID NO: 530368 - DNA, 25 bp, Homo sapien
tttctgttctctgccgttcactgac

SEQ ID NO: 530369 - DNA, 25 bp, Homo sapien
tgctttctcacttgtcaaagttcct

SEQ ID NO: 530370 - DNA, 25 bp, Homo sapien
tctgttctctgccgttcactgacag

SEQ ID NO: 530371 - DNA, 25 bp, Homo sapien
aatcaagaatttcctttagagaatt

SEQ ID NO: 530372 - DNA, 25 bp, Homo sapien
tcaagaatttcctttagagaattaa

SEQ ID NO: 530373 - DNA, 25 bp, Homo sapien
aaatcaagaatttcctttagagaat

SEQ ID NO: 530374 - DNA, 25 bp, Homo sapien
caaatcaagaatttcctttagagaa

SEQ ID NO: 530375 - DNA, 25 bp, Homo sapien
caatatctgaaataagtgtaggaca

SEQ ID NO: 530376 - DNA, 25 bp, Homo sapien
ttcaatatctgaaataagtgtagga

SEQ ID NO: 530377 - DNA, 25 bp, Homo sapien
ggacaggaagtacaaattgtgctgt

SEQ ID NO: 530378 - DNA, 25 bp, Homo sapien
tatctgaaataagtgtaggacagga

SEQ ID NO: 530379 - DNA, 25 bp, Homo sapien
ttcttaggcttcgtggaaccagaca

SEQ ID NO: 530380 - DNA, 25 bp, Homo sapien
tagggcactgaagttgttctctatg

SEQ ID NO: 530381 - DNA, 25 bp, Homo sapien
tcttaggcttcgtggaaccagacat

SEQ ID NO: 530382 - DNA, 25 bp, Homo sapien
tgtgcacatctcttagggcactgaa

SEQ ID NO: 530383 - DNA, 25 bp, Homo sapien
ggatgatacctggagttctgagtct

SEQ ID NO: 530384 - DNA, 25 bp, Homo sapien
ggctgacttccagaagcacaggctt

SEQ ID NO: 530385 - DNA, 25 bp, Homo sapien
gcttttttgctctcgaatatcagga

SEQ ID NO: 530386 - DNA, 25 bp, Homo sapien
catggcgataaagctaatccaactg

SEQ ID NO: 530387 - DNA, 25 bp, Homo sapien
ttgaaaacttttagcatcgccttga

SEQ ID NO: 530388 - DNA, 25 bp, Homo sapien
gcgctgtggccaagtaaatgcagta

SEQ ID NO: 530389 - DNA, 25 bp, Homo sapien
ggagcaccctttgctgaaagcagta

SEQ ID NO: 530390 - DNA, 25 bp, Homo sapien
tgatgcacaaatgggaggagcaccc

SEQ ID NO: 530391 - DNA, 25 bp, Homo sapien
caaatgcagccttggtactagcagc

SEQ ID NO: 530392 - DNA, 25 bp, Homo sapien
taccactgtcagtagccggaaacct

SEQ ID NO: 530393 - DNA, 25 bp, Homo sapien
tgagtgtcataggaaagtcacctgc

SEQ ID NO: 530394 - DNA, 25 bp, Homo sapien
taggtgaaaacttgctcagtgtgcc

SEQ ID NO: 530395 - DNA, 25 bp, Homo sapien
cctatggatcgaccgctggaagagc

SEQ ID NO: 530396 - DNA, 25 bp, Homo sapien
gacttgtaggccaaagccggtattg

SEQ ID NO: 530397 - DNA, 25 bp, Homo sapien
ttcctagagcaaccattgagcagtc

SEQ ID NO: 530398 - DNA, 25 bp, Homo sapien
tgaatataccgtgaaaaggctgacc

SEQ ID NO: 530399 - DNA, 25 bp, Homo sapien
aagctgaaagaagctaatttggccc

SEQ ID NO: 530400 - DNA, 25 bp, Homo sapien
aagaagctaatttggcccgtgtgcc

SEQ ID NO: 530401 - DNA, 25 bp, Homo sapien
gctgaaagaagctaatttggcccgt

SEQ ID NO: 530402 - DNA, 25 bp, Homo sapien
tgaaagaagctaatttggcccgtgt

SEQ ID NO: 530403 - DNA, 25 bp, Homo sapien
tatcatcggcgagtaagcaactccc

SEQ ID NO: 530404 - DNA, 25 bp, Homo sapien
taaagaccttcgaatcgtcctgtag

SEQ ID NO: 530405 - DNA, 25 bp, Homo sapien
tagttagaaagtaggtgatcaccat

SEQ ID NO: 530406 - DNA, 25 bp, Homo sapien
cgtcctgtagcccaaagactggtat

SEQ ID NO: 530407 - DNA, 25 bp, Homo sapien
tggtcacagccatctctagggcatt

SEQ ID NO: 530408 - DNA, 25 bp, Homo sapien
gggcattaattatctggctgctttg

SEQ ID NO: 530409 - DNA, 25 bp, Homo sapien
gaagacatgggctgatatccaatat

SEQ ID NO: 530410 - DNA, 25 bp, Homo sapien
ttgaaatttctgcatataaagcatt

SEQ ID NO: 530411 - DNA, 25 bp, Homo sapien
cctgaaatgctacaccaatgagtag

SEQ ID NO: 530412 - DNA, 25 bp, Homo sapien
tgaaatgctacaccaatgagtaggg

SEQ ID NO: 530413 - DNA, 25 bp, Homo sapien
ttttgccctggaccaattttgatga

SEQ ID NO: 530414 - DNA, 25 bp, Homo sapien
gccctggaccaattttgatgacttt

SEQ ID NO: 530415 - DNA, 25 bp, Homo sapien
ctatgatagcaatcagttttgttcc

SEQ ID NO: 530416 - DNA, 25 bp, Homo sapien
gaagcattgagcaggtcctctatct

SEQ ID NO: 530417 - DNA, 25 bp, Homo sapien
gcaggtcctctatctatgatagcaa

SEQ ID NO: 530418 - DNA, 25 bp, Homo sapien
tagcaatcagttttgttccttcatc

SEQ ID NO: 530419 - DNA, 25 bp, Homo sapien
tcaagaagtttatctggttgttttc

SEQ ID NO: 530420 - DNA, 25 bp, Homo sapien
caagaagtttatctggttgttttca

SEQ ID NO: 530421 - DNA, 25 bp, Homo sapien
agaagtttatctggttgttttcaag

SEQ ID NO: 530422 - DNA, 25 bp, Homo sapien
gcaggggctatacgtttctcattta

SEQ ID NO: 530423 - DNA, 25 bp, Homo sapien
gggctatacgtttctcatttagagc

SEQ ID NO: 530424 - DNA, 25 bp, Homo sapien
gttgcaggggctatacgtttctcat

SEQ ID NO: 530425 - DNA, 25 bp, Homo sapien
gtgttgcaggggctatacgtttctc

SEQ ID NO: 530426 - DNA, 25 bp, Homo sapien
ttctctgactcccaatcccctaacc

SEQ ID NO: 530427 - DNA, 25 bp, Homo sapien
atcttgctggacacctccatactca

SEQ ID NO: 530428 - DNA, 25 bp, Homo sapien
gacacctccatactcatctgcctgg

SEQ ID NO: 530429 - DNA, 25 bp, Homo sapien
tgctggacacctccatactcatctg

SEQ ID NO: 530430 - DNA, 25 bp, Homo sapien
ctgcttcatccctggttatatgttg

SEQ ID NO: 530431 - DNA, 25 bp, Homo sapien
cctgcttcatccctggttatatgtt

SEQ ID NO: 530432 - DNA, 25 bp, Homo sapien
tgcttcatccctggttatatgttga

SEQ ID NO: 530433 - DNA, 25 bp, Homo sapien
gcttcatccctggttatatgttgat

SEQ ID NO: 530434 - DNA, 25 bp, Homo sapien
gctctcagggcaagggattccagga

SEQ ID NO: 530435 - DNA, 25 bp, Homo sapien
ggattccaggaaggagtactgagct

SEQ ID NO: 530436 - DNA, 25 bp, Homo sapien
attccaggaaggagtactgagctgc

SEQ ID NO: 530437 - DNA, 25 bp, Homo sapien
cagctctcagggcaagggattccag

SEQ ID NO: 530438 - DNA, 25 bp, Homo sapien
gccatgaggaattgcaggtagtaca

SEQ ID NO: 530439 - DNA, 25 bp, Homo sapien
aggcagggaataattcttgatgggt

SEQ ID NO: 530440 - DNA, 25 bp, Homo sapien
atggaaggcagggaataattcttga

SEQ ID NO: 530441 - DNA, 25 bp, Homo sapien
atgccatgaggaattgcaggtagta

SEQ ID NO: 530442 - DNA, 25 bp, Homo sapien
cttcagacatgacccagctacaaga

SEQ ID NO: 530443 - DNA, 25 bp, Homo sapien
gacatgacccagctacaagaaacac

SEQ ID NO: 530444 - DNA, 25 bp, Homo sapien
tcagacatgacccagctacaagaaa

SEQ ID NO: 530445 - DNA, 25 bp, Homo sapien
cagacatgacccagctacaagaaac

SEQ ID NO: 530446 - DNA, 25 bp, Homo sapien
cttgagacgaggtaagcttttctgg

SEQ ID NO: 530447 - DNA, 25 bp, Homo sapien
aagtggtcctagatgttgttggcag

SEQ ID NO: 530448 - DNA, 25 bp, Homo sapien
tgcttgagacgaggtaagcttttct

SEQ ID NO: 530449 - DNA, 25 bp, Homo sapien
ctagagttgaagtggtcctagatgt

SEQ ID NO: 530450 - DNA, 25 bp, Homo sapien
atttaaaggctgacgctgactgatt

SEQ ID NO: 530451 - DNA, 25 bp, Homo sapien
aggctgacgctgactgatttccttc

SEQ ID NO: 530452 - DNA, 25 bp, Homo sapien
aaaggctgacgctgactgatttcct

SEQ ID NO: 530453 - DNA, 25 bp, Homo sapien
taaaggctgacgctgactgatttcc

SEQ ID NO: 530454 - DNA, 25 bp, Homo sapien
tgaatctgtcttgttccactgttta

SEQ ID NO: 530455 - DNA, 25 bp, Homo sapien
tttcaatttgaatctgtcttgttcc

SEQ ID NO: 530456 - DNA, 25 bp, Homo sapien
acttgacaagttaaaagcatctcag

SEQ ID NO: 530457 - DNA, 25 bp, Homo sapien
aaggttatccaaataacttgacaag

SEQ ID NO: 530458 - DNA, 25 bp, Homo sapien
aggccttcataattacaacacagtg

SEQ ID NO: 530459 - DNA, 25 bp, Homo sapien
tatatggggaaagcaatctaaaact

SEQ ID NO: 530460 - DNA, 25 bp, Homo sapien
cacagtgatattaagtagacaaaca

SEQ ID NO: 530461 - DNA, 25 bp, Homo sapien
actaggccttcataattacaacaca

SEQ ID NO: 530462 - DNA, 25 bp, Homo sapien
ttccttgcactctgaaaatttgtga

SEQ ID NO: 530463 - DNA, 25 bp, Homo sapien
acatagtttgtactcaagatgaagt

SEQ ID NO: 530464 - DNA, 25 bp, Homo sapien
ctcaagatgaagtacattttctgct

SEQ ID NO: 530465 - DNA, 25 bp, Homo sapien
gcattttctattacatagtttgtac

SEQ ID NO: 530466 - DNA, 25 bp, Homo sapien
gagggatgaaggataacttcacttt

SEQ ID NO: 530467 - DNA, 25 bp, Homo sapien
gtattctctatagtcctgagctgtt

SEQ ID NO: 530468 - DNA, 25 bp, Homo sapien
cagcacagttcaaggttaacacaag

SEQ ID NO: 530469 - DNA, 25 bp, Homo sapien
tgtggctgctgatccagagaggcag

SEQ ID NO: 530470 - DNA, 25 bp, Homo sapien
tggatgccaagccactcagctgcag

SEQ ID NO: 530471 - DNA, 25 bp, Homo sapien
tgccaagccactcagctgcaggctg

SEQ ID NO: 530472 - DNA, 25 bp, Homo sapien
gatgccaagccactcagctgcaggc

SEQ ID NO: 530473 - DNA, 25 bp, Homo sapien
cctggatgccaagccactcagctgc

SEQ ID NO: 530474 - DNA, 25 bp, Homo sapien
cctggttgcctgaatagtctctgac

SEQ ID NO: 530475 - DNA, 25 bp, Homo sapien
ttctgtcctggttgcctgaatagtc

SEQ ID NO: 530476 - DNA, 25 bp, Homo sapien
ctaatagccgtataaaggagttggg

SEQ ID NO: 530477 - DNA, 25 bp, Homo sapien
tacttcttaggctgactaatagccg

SEQ ID NO: 530478 - DNA, 25 bp, Homo sapien
tgtcctccagtgtaaaggctgacag

SEQ ID NO: 530479 - DNA, 25 bp, Homo sapien
gagacaatctcaagtggattcctca

SEQ ID NO: 530480 - DNA, 25 bp, Homo sapien
ggtcccaggagagacaatctcaagt

SEQ ID NO: 530481 - DNA, 25 bp, Homo sapien
ggattcctcagatagtttgtttcag

SEQ ID NO: 530482 - DNA, 25 bp, Homo sapien
tttaactgctgttaatgctaaaaga

SEQ ID NO: 530483 - DNA, 25 bp, Homo sapien
taactgctgttaatgctaaaagact

SEQ ID NO: 530484 - DNA, 25 bp, Homo sapien
ttaactgctgttaatgctaaaagac

SEQ ID NO: 530485 - DNA, 25 bp, Homo sapien
agtggtctgcatccttacgttgatc

SEQ ID NO: 530486 - DNA, 25 bp, Homo sapien
ttctctagagcccagaggctttatg

SEQ ID NO: 530487 - DNA, 25 bp, Homo sapien
cttacgttgatcataagttcagtga

SEQ ID NO: 530488 - DNA, 25 bp, Homo sapien
aggctttatgttctctagcaaagtg

SEQ ID NO: 530489 - DNA, 25 bp, Homo sapien
tgatatggtccaaacagcaatgatt

SEQ ID NO: 530490 - DNA, 25 bp, Homo sapien
gaggccgtggagaagagcacgtcca

SEQ ID NO: 530491 - DNA, 25 bp, Homo sapien
caggtaaatccagactgcacaaagc

SEQ ID NO: 530492 - DNA, 25 bp, Homo sapien
gacgtagcggtccagcgagatggcg

SEQ ID NO: 530493 - DNA, 25 bp, Homo sapien
tattaccagtgcgaatatagctggg

SEQ ID NO: 530494 - DNA, 25 bp, Homo sapien
tagtaggctctagtctataaacaaa

SEQ ID NO: 530495 - DNA, 25 bp, Homo sapien
atgcacatgctctttattaccagtg

SEQ ID NO: 530496 - DNA, 25 bp, Homo sapien
tatagctgggaaactaatgccactc

SEQ ID NO: 530497 - DNA, 25 bp, Homo sapien
catgatgacgagtatgtttccagca

SEQ ID NO: 530498 - DNA, 25 bp, Homo sapien
catacaggatggttaacatggacac

SEQ ID NO: 530499 - DNA, 25 bp, Homo sapien
gacacgggcatgacaaggaaaccca

SEQ ID NO: 530500 - DNA, 25 bp, Homo sapien
gaaacccagcagcatatcagctatg

SEQ ID NO: 530501 - DNA, 25 bp, Homo sapien
ttgtagcagatgaggtgtagaagga

SEQ ID NO: 530502 - DNA, 25 bp, Homo sapien
cttgtagcagatgaggtgtagaagg

SEQ ID NO: 530503 - DNA, 25 bp, Homo sapien
cacaattttaggagagtccactgtt

SEQ ID NO: 530504 - DNA, 25 bp, Homo sapien
cactgaggctggtgtacatgctgtt

SEQ ID NO: 530505 - DNA, 25 bp, Homo sapien
aacaggttatagtttctgctcacca

SEQ ID NO: 530506 - DNA, 25 bp, Homo sapien
tattttctcaccaaaccgaggacaa

SEQ ID NO: 530507 - DNA, 25 bp, Homo sapien
ccattcttaagctgaattgccacag

SEQ ID NO: 530508 - DNA, 25 bp, Homo sapien
gattagcagacaactttcctccctg

SEQ ID NO: 530509 - DNA, 25 bp, Homo sapien
ttgagcgctcgggaagataaatgtc

SEQ ID NO: 530510 - DNA, 25 bp, Homo sapien
gccgatggtactagtttagcaacag

SEQ ID NO: 530511 - DNA, 25 bp, Homo sapien
cacgggaatggagtagctctctgac

SEQ ID NO: 530512 - DNA, 25 bp, Homo sapien
tagaaatcattcacgagcccctcaa

SEQ ID NO: 530513 - DNA, 25 bp, Homo sapien
caaaaactgcatgcaagagctgagc

SEQ ID NO: 530514 - DNA, 25 bp, Homo sapien
tcagggtccacacatgagatacatt

SEQ ID NO: 530515 - DNA, 25 bp, Homo sapien
gactcttccttcattctcgctgcca

SEQ ID NO: 530516 - DNA, 25 bp, Homo sapien
gctacctctgtatgcgtgtttctca

SEQ ID NO: 530517 - DNA, 25 bp, Homo sapien
agatcccacttcgtctccggtgcta

SEQ ID NO: 530518 - DNA, 25 bp, Homo sapien
tcagacagctgctgttatccgcgac

SEQ ID NO: 530519 - DNA, 25 bp, Homo sapien
agcccatgccagttcccacttcatg

SEQ ID NO: 530520 - DNA, 25 bp, Homo sapien
ggagagactgatggttcaggtactt

SEQ ID NO: 530521 - DNA, 25 bp, Homo sapien
cttcccactggaaagaggagccttt

SEQ ID NO: 530522 - DNA, 25 bp, Homo sapien
tcagggcctggctagcagcctgtta

SEQ ID NO: 530523 - DNA, 25 bp, Homo sapien
ttggaatttctagtaggggagtaca

SEQ ID NO: 530524 - DNA, 25 bp, Homo sapien
aatttctagtaggggagtacagcta

SEQ ID NO: 530525 - DNA, 25 bp, Homo sapien
ctcatatacccttgagcaaagaatg

SEQ ID NO: 530526 - DNA, 25 bp, Homo sapien
ggaatttctagtaggggagtacagc

SEQ ID NO: 530527 - DNA, 25 bp, Homo sapien
caactctggccataaatggggtgat

SEQ ID NO: 530528 - DNA, 25 bp, Homo sapien
ctctggccataaatggggtgataga

SEQ ID NO: 530529 - DNA, 25 bp, Homo sapien
actctggccataaatggggtgatag

SEQ ID NO: 530530 - DNA, 25 bp, Homo sapien
aactctggccataaatggggtgata

SEQ ID NO: 530531 - DNA, 25 bp, Homo sapien
tggacgatgcaaaacccacacggtt

SEQ ID NO: 530532 - DNA, 25 bp, Homo sapien
tcttagggccgtaggatgcctcctt

SEQ ID NO: 530533 - DNA, 25 bp, Homo sapien
tatagctagtgaaggtttgtccacg

SEQ ID NO: 530534 - DNA, 25 bp, Homo sapien
catgcggtgcctgtcttatagctag

SEQ ID NO: 530535 - DNA, 25 bp, Homo sapien
tgttagaatcaccatagcctttata

SEQ ID NO: 530536 - DNA, 25 bp, Homo sapien
tgtcatctgttagaatcaccatagc

SEQ ID NO: 530537 - DNA, 25 bp, Homo sapien
tcatctgttagaatcaccatagcct

SEQ ID NO: 530538 - DNA, 25 bp, Homo sapien
atcaccatagcctttataatcacac

SEQ ID NO: 530539 - DNA, 25 bp, Homo sapien
gacaatgtgcatgatctctgactca

SEQ ID NO: 530540 - DNA, 25 bp, Homo sapien
tctgactcatgcagaagctgatcca

SEQ ID NO: 530541 - DNA, 25 bp, Homo sapien
gatggttgaaaagtgtgatcccgga

SEQ ID NO: 530542 - DNA, 25 bp, Homo sapien
tgatcccggatgatgacaatgtgca

SEQ ID NO: 530543 - DNA, 25 bp, Homo sapien
tgactgtacatcgattttggctttg

SEQ ID NO: 530544 - DNA, 25 bp, Homo sapien
ttggctttgtatatgtggccactga

SEQ ID NO: 530545 - DNA, 25 bp, Homo sapien
tgaacttctcaggtctgtcccagac

SEQ ID NO: 530546 - DNA, 25 bp, Homo sapien
aaatgcaggaagccctttctttgtt

SEQ ID NO: 530547 - DNA, 25 bp, Homo sapien
tctattaacagcttcagcctcagtg

SEQ ID NO: 530548 - DNA, 25 bp, Homo sapien
ggctcagtgttgcaccactgaaaga

SEQ ID NO: 530549 - DNA, 25 bp, Homo sapien
atttacagagccctcatcggaggtg

SEQ ID NO: 530550 - DNA, 25 bp, Homo sapien
agttgcagttgggagctagatttac

SEQ ID NO: 530551 - DNA, 25 bp, Homo sapien
ggatgtgtccatgttttccagttgt

SEQ ID NO: 530552 - DNA, 25 bp, Homo sapien
caactgagagtactctccaatcttc

SEQ ID NO: 530553 - DNA, 25 bp, Homo sapien
ttccagttgtctgccagttgccggt

SEQ ID NO: 530554 - DNA, 25 bp, Homo sapien
gacctgtgaatagaagctcaactga

SEQ ID NO: 530555 - DNA, 25 bp, Homo sapien
tcctaccaagggcaagtccaaagct

SEQ ID NO: 530556 - DNA, 25 bp, Homo sapien
ggtgaacaggcacttcctaccaagg

SEQ ID NO: 530557 - DNA, 25 bp, Homo sapien
tgaacaggcacttcctaccaagggc

SEQ ID NO: 530558 - DNA, 25 bp, Homo sapien
gaacaggcacttcctaccaagggca

SEQ ID NO: 530559 - DNA, 25 bp, Homo sapien
ttatggcgcttcttttggactgtca

SEQ ID NO: 530560 - DNA, 25 bp, Homo sapien
cagaatttggcactgttatggcgct

SEQ ID NO: 530561 - DNA, 25 bp, Homo sapien
tggcactgttatggcgcttcttttg

SEQ ID NO: 530562 - DNA, 25 bp, Homo sapien
cttgtacaaagcagaatttggcact

SEQ ID NO: 530563 - DNA, 25 bp, Homo sapien
tcagtgctgattggccccttggtga

SEQ ID NO: 530564 - DNA, 25 bp, Homo sapien
cagggtcagtgctgattggcccctt

SEQ ID NO: 530565 - DNA, 25 bp, Homo sapien
tctgctatcccagggtcagtgctga

SEQ ID NO: 530566 - DNA, 25 bp, Homo sapien
tatcccagggtcagtgctgattggc

SEQ ID NO: 530567 - DNA, 25 bp, Homo sapien
ttcagtgcaaaagttgaagagcatc

SEQ ID NO: 530568 - DNA, 25 bp, Homo sapien
tttcagtgcaaaagttgaagagcat

SEQ ID NO: 530569 - DNA, 25 bp, Homo sapien
tcacactagtattcagctttcaggc

SEQ ID NO: 530570 - DNA, 25 bp, Homo sapien
tgagtctacaaaccatgccagatcc

SEQ ID NO: 530571 - DNA, 25 bp, Homo sapien
tgcttcatcgctagtatattcccaa

SEQ ID NO: 530572 - DNA, 25 bp, Homo sapien
gatttatgccttgacaacctggaca

SEQ ID NO: 530573 - DNA, 25 bp, Homo sapien
tatagtggtgctggtactgatgaag

SEQ ID NO: 530574 - DNA, 25 bp, Homo sapien
gatgcttctgtcctagagtggttat

SEQ ID NO: 530575 - DNA, 25 bp, Homo sapien
tggttatagtggtgctggtactgat

SEQ ID NO: 530576 - DNA, 25 bp, Homo sapien
aattgatgcttctgtcctagagtgg

SEQ ID NO: 530577 - DNA, 25 bp, Homo sapien
caaagaggagcttttctcagctccc

SEQ ID NO: 530578 - DNA, 25 bp, Homo sapien
ttttgtccagataatgacttgctcc

SEQ ID NO: 530579 - DNA, 25 bp, Homo sapien
ctctctggaatgaacaaaccttgga

SEQ ID NO: 530580 - DNA, 25 bp, Homo sapien
cactttctttgtacacctgctttct

SEQ ID NO: 530581 - DNA, 25 bp, Homo sapien
ttaatggcagaatcgtcacagcacc

SEQ ID NO: 530582 - DNA, 25 bp, Homo sapien
gactgaacatgccagcttatgtttg

SEQ ID NO: 530583 - DNA, 25 bp, Homo sapien
ccttgtgtcctgaaatcggatttta

SEQ ID NO: 530584 - DNA, 25 bp, Homo sapien
tcacagcaccggctcatgaaattat

SEQ ID NO: 530585 - DNA, 25 bp, Homo sapien
ctctccccatctgagttctgaatca

SEQ ID NO: 530586 - DNA, 25 bp, Homo sapien
ttccacccaccctgagtgtgggtgg

SEQ ID NO: 530587 - DNA, 25 bp, Homo sapien
actgcagacacttccacccaccctg

SEQ ID NO: 530588 - DNA, 25 bp, Homo sapien
ctccaggcactgcagacacttccac

SEQ ID NO: 530589 - DNA, 25 bp, Homo sapien
tgcagacacttccacccaccctgag

SEQ ID NO: 530590 - DNA, 25 bp, Homo sapien
agtggatcccccaagccctgtccca

SEQ ID NO: 530591 - DNA, 25 bp, Homo sapien
cagagtggatcccccaagccctgtc

SEQ ID NO: 530592 - DNA, 25 bp, Homo sapien
gagtggatcccccaagccctgtccc

SEQ ID NO: 530593 - DNA, 25 bp, Homo sapien
gtggatcccccaagccctgtcccac

SEQ ID NO: 530594 - DNA, 25 bp, Homo sapien
tcctgttttgttcccaatgacgtag

SEQ ID NO: 530595 - DNA, 25 bp, Homo sapien
ctttgctcgttctgtatggctgaga

SEQ ID NO: 530596 - DNA, 25 bp, Homo sapien
cttgggtttggtcccttatgcttca

SEQ ID NO: 530597 - DNA, 25 bp, Homo sapien
cccaatgacgtagaacagaagtgaa

SEQ ID NO: 530598 - DNA, 25 bp, Homo sapien
aacatcagcagtatttctccaatag

SEQ ID NO: 530599 - DNA, 25 bp, Homo sapien
aaagcttccttttcggagaacatca

SEQ ID NO: 530600 - DNA, 25 bp, Homo sapien
gaacatcagcagtatttctccaata

SEQ ID NO: 530601 - DNA, 25 bp, Homo sapien
ttccttttcggagaacatcagcagt

SEQ ID NO: 530602 - DNA, 25 bp, Homo sapien
gattctctctgagatcgcttctctt

SEQ ID NO: 530603 - DNA, 25 bp, Homo sapien
cttcctgggattctctctgagatcg

SEQ ID NO: 530604 - DNA, 25 bp, Homo sapien
cctgggattctctctgagatcgctt

SEQ ID NO: 530605 - DNA, 25 bp, Homo sapien
gggattctctctgagatcgcttctc

SEQ ID NO: 530606 - DNA, 25 bp, Homo sapien
gcagtaacatttgaggcaaactcca

SEQ ID NO: 530607 - DNA, 25 bp, Homo sapien
gaagcagtaacatttgaggcaaact

SEQ ID NO: 530608 - DNA, 25 bp, Homo sapien
agtaacatttgaggcaaactccaag

SEQ ID NO: 530609 - DNA, 25 bp, Homo sapien
acatttgaggcaaactccaagagcc

SEQ ID NO: 530610 - DNA, 25 bp, Homo sapien
tgggtgatggcggaggcagcaattg

SEQ ID NO: 530611 - DNA, 25 bp, Homo sapien
tcttgtgggtgatggcggaggcagc

SEQ ID NO: 530612 - DNA, 25 bp, Homo sapien
agctgttttcttgtgggtgatggcg

SEQ ID NO: 530613 - DNA, 25 bp, Homo sapien
cggaggcagcaattgggaggtagct

SEQ ID NO: 530614 - DNA, 25 bp, Homo sapien
ttcatctgtgcaacatcaacttttg

SEQ ID NO: 530615 - DNA, 25 bp, Homo sapien
ctttcatctgtgcaacatcaacttt

SEQ ID NO: 530616 - DNA, 25 bp, Homo sapien
tcatctgtgcaacatcaacttttgt

SEQ ID NO: 530617 - DNA, 25 bp, Homo sapien
atctgtgcaacatcaacttttgttt

SEQ ID NO: 530618 - DNA, 25 bp, Homo sapien
ctctttcccaggttgaaagaatctc

SEQ ID NO: 530619 - DNA, 25 bp, Homo sapien
ctctctttcccaggttgaaagaatc

SEQ ID NO: 530620 - DNA, 25 bp, Homo sapien
tctctttcccaggttgaaagaatct

SEQ ID NO: 530621 - DNA, 25 bp, Homo sapien
tgcatattaagaggctgttctggct

SEQ ID NO: 530622 - DNA, 25 bp, Homo sapien
tctgcatattaagaggctgttctgg

SEQ ID NO: 530623 - DNA, 25 bp, Homo sapien
taatagaagcctatagccttttcca

SEQ ID NO: 530624 - DNA, 25 bp, Homo sapien
ttaatagaagcctatagccttttcc

SEQ ID NO: 530625 - DNA, 25 bp, Homo sapien
cactgttcccacttttactcatttt

SEQ ID NO: 530626 - DNA, 25 bp, Homo sapien
tcctttgagacttaggcaccgtctc

SEQ ID NO: 530627 - DNA, 25 bp, Homo sapien
tgagacttaggcaccgtctctccca

SEQ ID NO: 530628 - DNA, 25 bp, Homo sapien
tcctcctttgagacttaggcaccgt

SEQ ID NO: 530629 - DNA, 25 bp, Homo sapien
tcacaatcccgtgatgagtgagttg

SEQ ID NO: 530630 - DNA, 25 bp, Homo sapien
acaatcccgtgatgagtgagttgtg

SEQ ID NO: 530631 - DNA, 25 bp, Homo sapien
cacaatcccgtgatgagtgagttgt

SEQ ID NO: 530632 - DNA, 25 bp, Homo sapien
tcaggatccgaagaatacagacacc

SEQ ID NO: 530633 - DNA, 25 bp, Homo sapien
tgaagatttacccatcaggatccga

SEQ ID NO: 530634 - DNA, 25 bp, Homo sapien
gacacccaaatcaaaggaccagctt

SEQ ID NO: 530635 - DNA, 25 bp, Homo sapien
gccctgaaagactttacacatttaa

SEQ ID NO: 530636 - DNA, 25 bp, Homo sapien
tcattcaggctgcagtgcagcggca

SEQ ID NO: 530637 - DNA, 25 bp, Homo sapien
attcaggctgcagtgcagcggcaca

SEQ ID NO: 530638 - DNA, 25 bp, Homo sapien
agtctctctctgtcattcaggctgc

SEQ ID NO: 530639 - DNA, 25 bp, Homo sapien
cttccttccttacttctttctctct

SEQ ID NO: 530640 - DNA, 25 bp, Homo sapien
tatctgcagctttgaatgtaggcat

SEQ ID NO: 530641 - DNA, 25 bp, Homo sapien
tttatctgcagctttgaatgtaggc

SEQ ID NO: 530642 - DNA, 25 bp, Homo sapien
ttatctgcagctttgaatgtaggca

SEQ ID NO: 530643 - DNA, 25 bp, Homo sapien
tagctaaaggccaccagtttgaccc

SEQ ID NO: 530644 - DNA, 25 bp, Homo sapien
tgagaagggcaagcatacggagaac

SEQ ID NO: 530645 - DNA, 25 bp, Homo sapien
cattgtttcgctgaagcagtgagaa

SEQ ID NO: 530646 - DNA, 25 bp, Homo sapien
gaccacgtggataccaaaagtgacc

SEQ ID NO: 530647 - DNA, 25 bp, Homo sapien
aaatttgtttgggtactcaatgtga

SEQ ID NO: 530648 - DNA, 25 bp, Homo sapien
caggcaaagaaatcacagtaactgc

SEQ ID NO: 530649 - DNA, 25 bp, Homo sapien
gtactcaatgtgatttaaatttcca

SEQ ID NO: 530650 - DNA, 25 bp, Homo sapien
gtttgggtactcaatgtgatttaaa

SEQ ID NO: 530651 - DNA, 25 bp, Homo sapien
ctttggaatggatcttttggtaact

SEQ ID NO: 530652 - DNA, 25 bp, Homo sapien
gaacttcccgttctagattgaccca

SEQ ID NO: 530653 - DNA, 25 bp, Homo sapien
ctgtcccattgtgggctctggtgga

SEQ ID NO: 530654 - DNA, 25 bp, Homo sapien
gattgacccaatagccaaaggcttt

SEQ ID NO: 530655 - DNA, 25 bp, Homo sapien
tatagtctctgccttgtgcccaagg

SEQ ID NO: 530656 - DNA, 25 bp, Homo sapien
tgcagcccaaggatcatatagtctc

SEQ ID NO: 530657 - DNA, 25 bp, Homo sapien
aaaggtcttgtccaagacactggga

SEQ ID NO: 530658 - DNA, 25 bp, Homo sapien
tcctcatcagcaaagatgcggtatt

SEQ ID NO: 530659 - DNA, 25 bp, Homo sapien
catctgtgatcatggggaatgaaga

SEQ ID NO: 530660 - DNA, 25 bp, Homo sapien
tctgtgatcatggggaatgaagaga

SEQ ID NO: 530661 - DNA, 25 bp, Homo sapien
tcatctgtgatcatggggaatgaag

SEQ ID NO: 530662 - DNA, 25 bp, Homo sapien
ggtcatctgtgatcatggggaatga

SEQ ID NO: 530663 - DNA, 25 bp, Homo sapien
tgagtgcagtttgccacgtcacgat

SEQ ID NO: 530664 - DNA, 25 bp, Homo sapien
aactcggagatctcattttgccaca

SEQ ID NO: 530665 - DNA, 25 bp, Homo sapien
gaacggtagccaattgtgagcgaaa

SEQ ID NO: 530666 - DNA, 25 bp, Homo sapien
taaaaagttattgagtcgtgagtgc

SEQ ID NO: 530667 - DNA, 25 bp, Homo sapien
ggatttccagattgcccatatgagt

SEQ ID NO: 530668 - DNA, 25 bp, Homo sapien
cacaagggctctgaatttgtttcca

SEQ ID NO: 530669 - DNA, 25 bp, Homo sapien
cccatatgagtttgaagtggttctc

SEQ ID NO: 530670 - DNA, 25 bp, Homo sapien
tctcaaacacaagggctctgaattt

SEQ ID NO: 530671 - DNA, 25 bp, Homo sapien
gaaattggtttgtgtgctggcaaac

SEQ ID NO: 530672 - DNA, 25 bp, Homo sapien
gcctgctggcagaacaccttttacc

SEQ ID NO: 530673 - DNA, 25 bp, Homo sapien
gatgatggttgtggctatcttctca

SEQ ID NO: 530674 - DNA, 25 bp, Homo sapien
ttttaccacactatgcttgctgagg

SEQ ID NO: 530675 - DNA, 25 bp, Homo sapien
aatgtgcttggttactctgcttgtt

SEQ ID NO: 530676 - DNA, 25 bp, Homo sapien
gagttccctgcatctcttattgtca

SEQ ID NO: 530677 - DNA, 25 bp, Homo sapien
ggaacctgagctctcctcatgacct

SEQ ID NO: 530678 - DNA, 25 bp, Homo sapien
caaaggctttgaacgaagcttggtg

SEQ ID NO: 530679 - DNA, 25 bp, Homo sapien
ggttctaaccggctcctcagcttgc

SEQ ID NO: 530680 - DNA, 25 bp, Homo sapien
catattctgctatagtcaggctgtt

SEQ ID NO: 530681 - DNA, 25 bp, Homo sapien
ttcagctctccaaatgtatccacta

SEQ ID NO: 530682 - DNA, 25 bp, Homo sapien
taattccagagttagttcctatggc

SEQ ID NO: 530683 - DNA, 25 bp, Homo sapien
gtatccactacttgccctatattca

SEQ ID NO: 530684 - DNA, 25 bp, Homo sapien
accactttcacacacagtgatcatg

SEQ ID NO: 530685 - DNA, 25 bp, Homo sapien
tctttgtccacgatgctcattatcc

SEQ ID NO: 530686 - DNA, 25 bp, Homo sapien
tcttgatcatactcgccacagaagc

SEQ ID NO: 530687 - DNA, 25 bp, Homo sapien
tgtacctatcggcactgtttatctg

SEQ ID NO: 530688 - DNA, 25 bp, Homo sapien
ttgcccattggccaaaaatacaaat

SEQ ID NO: 530689 - DNA, 25 bp, Homo sapien
ggtatttgtctctttcctgatatgc

SEQ ID NO: 530690 - DNA, 25 bp, Homo sapien
ccattggccaaaaatacaaatccct

SEQ ID NO: 530691 - DNA, 25 bp, Homo sapien
acaaatcccttttcattggtatttg

SEQ ID NO: 530692 - DNA, 25 bp, Homo sapien
gctccatgattcttggttgctcagc

SEQ ID NO: 530693 - DNA, 25 bp, Homo sapien
tgacagatagcaggacactaaagtg

SEQ ID NO: 530694 - DNA, 25 bp, Homo sapien
tgcctgaagaaatgtccccaagaac

SEQ ID NO: 530695 - DNA, 25 bp, Homo sapien
tgattcccccactccacaagaagat

SEQ ID NO: 530696 - DNA, 25 bp, Homo sapien
ccctgcccaagcgtggatcttggag

SEQ ID NO: 530697 - DNA, 25 bp, Homo sapien
ttccctgcccaagcgtggatcttgg

SEQ ID NO: 530698 - DNA, 25 bp, Homo sapien
ctgcccaagcgtggatcttggagaa

SEQ ID NO: 530699 - DNA, 25 bp, Homo sapien
ttattccctgcccaagcgtggatct

SEQ ID NO: 530700 - DNA, 25 bp, Homo sapien
tagtgtgagcgagtctgctagtgcc

SEQ ID NO: 530701 - DNA, 25 bp, Homo sapien
ccagggctccatcctagtgtgagcg

SEQ ID NO: 530702 - DNA, 25 bp, Homo sapien
tcttggcaaacatcctacccaagtc

SEQ ID NO: 530703 - DNA, 25 bp, Homo sapien
ctagtgccccttctaggatatgctc

SEQ ID NO: 530704 - DNA, 25 bp, Homo sapien
ttaccagctttaatcacttgcactg

SEQ ID NO: 530705 - DNA, 25 bp, Homo sapien
taaaagaccacatgcatctgtcagg

SEQ ID NO: 530706 - DNA, 25 bp, Homo sapien
tataagagaacagttgccaacttgc

SEQ ID NO: 530707 - DNA, 25 bp, Homo sapien
gccaacttgcaaatgctaacaaaat

SEQ ID NO: 530708 - DNA, 25 bp, Homo sapien
tcttctggtgcctgttaggtatatt

SEQ ID NO: 530709 - DNA, 25 bp, Homo sapien
ggcagttgtgtagtcctttgacaga

SEQ ID NO: 530710 - DNA, 25 bp, Homo sapien
ttattttataaacagactgtccctc

SEQ ID NO: 530711 - DNA, 25 bp, Homo sapien
tctctgtatgggtggttattttata

SEQ ID NO: 530712 - DNA, 25 bp, Homo sapien
gtttaggtgcctgtattttttcagc

SEQ ID NO: 530713 - DNA, 25 bp, Homo sapien
gtgcctgtattttttcagctattgc

SEQ ID NO: 530714 - DNA, 25 bp, Homo sapien
tatcagccatggaagaacctgaaaa

SEQ ID NO: 530715 - DNA, 25 bp, Homo sapien
gaatatgccacaaatcggcattcat

SEQ ID NO: 530716 - DNA, 25 bp, Homo sapien
tgaagaatatgccacaaatcggcat

SEQ ID NO: 530717 - DNA, 25 bp, Homo sapien
ttatcagccatggaagaacctgaaa

SEQ ID NO: 530718 - DNA, 25 bp, Homo sapien
tgtgatgctcttaggcatgggaagt

SEQ ID NO: 530719 - DNA, 25 bp, Homo sapien
gtgatgctcttaggcatgggaagtc

SEQ ID NO: 530720 - DNA, 25 bp, Homo sapien
tgatgctcttaggcatgggaagtca

SEQ ID NO: 530721 - DNA, 25 bp, Homo sapien
ctggtggtccttcgctcatcatatt

SEQ ID NO: 530722 - DNA, 25 bp, Homo sapien
ggtggtccttcgctcatcatattga

SEQ ID NO: 530723 - DNA, 25 bp, Homo sapien
ggtccttcgctcatcatattgatac

SEQ ID NO: 530724 - DNA, 25 bp, Homo sapien
atctggtggtccttcgctcatcata

SEQ ID NO: 530725 - DNA, 25 bp, Homo sapien
tcttccactaataattccttccagt

SEQ ID NO: 530726 - DNA, 25 bp, Homo sapien
cattctggatctagatcttgggtga

SEQ ID NO: 530727 - DNA, 25 bp, Homo sapien
cacgatactgtccagtggagatgaa

SEQ ID NO: 530728 - DNA, 25 bp, Homo sapien
cttgggtgagtttatacttctcttc

SEQ ID NO: 530729 - DNA, 25 bp, Homo sapien
tccttgtagcttgatgccctcttgc

SEQ ID NO: 530730 - DNA, 25 bp, Homo sapien
attttccttgtagcttgatgccctc

SEQ ID NO: 530731 - DNA, 25 bp, Homo sapien
ttatcaaaacagctcccagaaacag

SEQ ID NO: 530732 - DNA, 25 bp, Homo sapien
tccttatcaaaacagctcccagaaa

SEQ ID NO: 530733 - DNA, 25 bp, Homo sapien
tggagagtgtttgatggaccccaga

SEQ ID NO: 530734 - DNA, 25 bp, Homo sapien
tctcagaattggagagtgtttgatg

SEQ ID NO: 530735 - DNA, 25 bp, Homo sapien
taaacccaaattggctgcctctcag

SEQ ID NO: 530736 - DNA, 25 bp, Homo sapien
aaaaagcatcctggagaggagcgct

SEQ ID NO: 530737 - DNA, 25 bp, Homo sapien
gtagaccaccaggagctttttgtat

SEQ ID NO: 530738 - DNA, 25 bp, Homo sapien
cagcaggtagaccaccaggagcttt

SEQ ID NO: 530739 - DNA, 25 bp, Homo sapien
aggtagaccaccaggagctttttgt

SEQ ID NO: 530740 - DNA, 25 bp, Homo sapien
tcaagccagcaggtagaccaccagg

SEQ ID NO: 530741 - DNA, 25 bp, Homo sapien
tttgcaccttctaaccttttgctgt

SEQ ID NO: 530742 - DNA, 25 bp, Homo sapien
agcccaaccacagaatattccacca

SEQ ID NO: 530743 - DNA, 25 bp, Homo sapien
gcccaaccacagaatattccaccat

SEQ ID NO: 530744 - DNA, 25 bp, Homo sapien
tgcaccttctaaccttttgctgtcc

SEQ ID NO: 530745 - DNA, 25 bp, Homo sapien
ggcagtgtagggtctctgggctgag

SEQ ID NO: 530746 - DNA, 25 bp, Homo sapien
gggctcaaggctatatgcaggcatg

SEQ ID NO: 530747 - DNA, 25 bp, Homo sapien
caggcacaagtacgcatgtggaagt

SEQ ID NO: 530748 - DNA, 25 bp, Homo sapien
gggctagggctcaaggctatatgca

SEQ ID NO: 530749 - DNA, 25 bp, Homo sapien
gagacagagagagatggtgactcag

SEQ ID NO: 530750 - DNA, 25 bp, Homo sapien
ggagacagagagagatggtgactca

SEQ ID NO: 530751 - DNA, 25 bp, Homo sapien
gacagagagagatggtgactcaggt

SEQ ID NO: 530752 - DNA, 25 bp, Homo sapien
cagagagagatggtgactcaggtac

SEQ ID NO: 530753 - DNA, 25 bp, Homo sapien
aaggtgaaaagctgcgtggccctcc

SEQ ID NO: 530754 - DNA, 25 bp, Homo sapien
gggtctgctaaagagcacattgcag

SEQ ID NO: 530755 - DNA, 25 bp, Homo sapien
ccgtacgggctgttgaggtgccttg

SEQ ID NO: 530756 - DNA, 25 bp, Homo sapien
cattgcagggttcttggcggtgaaa

SEQ ID NO: 530757 - DNA, 25 bp, Homo sapien
gattcaaagtgtgtaactaaatcca

SEQ ID NO: 530758 - DNA, 25 bp, Homo sapien
atgtagatgtactcagcaacttgaa

SEQ ID NO: 530759 - DNA, 25 bp, Homo sapien
attcaaagtgtgtaactaaatccat

SEQ ID NO: 530760 - DNA, 25 bp, Homo sapien
tcatgtagatgtactcagcaacttg

SEQ ID NO: 530761 - DNA, 25 bp, Homo sapien
catgttttgctatatttgctatcat

SEQ ID NO: 530762 - DNA, 25 bp, Homo sapien
ccatgttttgctatatttgctatca

SEQ ID NO: 530763 - DNA, 25 bp, Homo sapien
tccatgttttgctatatttgctatc

SEQ ID NO: 530764 - DNA, 25 bp, Homo sapien
atcttggagaagttattttcatcct

SEQ ID NO: 530765 - DNA, 25 bp, Homo sapien
cttggagaagttattttcatcctgt

SEQ ID NO: 530766 - DNA, 25 bp, Homo sapien
tttcatcctgttgtgctatctcaca

SEQ ID NO: 530767 - DNA, 25 bp, Homo sapien
tcatcctgttgtgctatctcacaca

SEQ ID NO: 530768 - DNA, 25 bp, Homo sapien
tgtggctccaactgcaagatctgtt

SEQ ID NO: 530769 - DNA, 25 bp, Homo sapien
gcagaaagtaatcaaacaatggccc

SEQ ID NO: 530770 - DNA, 25 bp, Homo sapien
gctcctcaccaagcaacagcagaaa

SEQ ID NO: 530771 - DNA, 25 bp, Homo sapien
ttagtcgggacagcagacaagagct

SEQ ID NO: 530772 - DNA, 25 bp, Homo sapien
tgatagtgaacggacaagtacagca

SEQ ID NO: 530773 - DNA, 25 bp, Homo sapien
gtacagcaaccatgaccagaggcag

SEQ ID NO: 530774 - DNA, 25 bp, Homo sapien
ccttgcccagcattgatagtgaacg

SEQ ID NO: 530775 - DNA, 25 bp, Homo sapien
ggacaagtacagcaaccatgaccag

SEQ ID NO: 530776 - DNA, 25 bp, Homo sapien
tgcatcttggttaactacttttcga

SEQ ID NO: 530777 - DNA, 25 bp, Homo sapien
ttctgggtaacacttgcatcttggt

SEQ ID NO: 530778 - DNA, 25 bp, Homo sapien
ctttcacaagattctgggtaacact

SEQ ID NO: 530779 - DNA, 25 bp, Homo sapien
aactacttttcgattatcttgcctc

SEQ ID NO: 530780 - DNA, 25 bp, Homo sapien
taacttgtccatttggtatcatcag

SEQ ID NO: 530781 - DNA, 25 bp, Homo sapien
aacttgtccatttggtatcatcaga

SEQ ID NO: 530782 - DNA, 25 bp, Homo sapien
cttgtccatttggtatcatcagatg

SEQ ID NO: 530783 - DNA, 25 bp, Homo sapien
tgtccatttggtatcatcagatgtg

SEQ ID NO: 530784 - DNA, 25 bp, Homo sapien
aatctccatgtacattaagcctaca

SEQ ID NO: 530785 - DNA, 25 bp, Homo sapien
aaatctccatgtacattaagcctac

SEQ ID NO: 530786 - DNA, 25 bp, Homo sapien
ctaaaacttggcttgaccatcctca

SEQ ID NO: 530787 - DNA, 25 bp, Homo sapien
aaacttggcttgaccatcctcatca

SEQ ID NO: 530788 - DNA, 25 bp, Homo sapien
caccttttcatctaatctctcatca

SEQ ID NO: 530789 - DNA, 25 bp, Homo sapien
ttccttgaaccttccatccacttct

SEQ ID NO: 530790 - DNA, 25 bp, Homo sapien
ggaaccatgctatttgttctctcca

SEQ ID NO: 530791 - DNA, 25 bp, Homo sapien
cttcaccttttcatctaatctctca

SEQ ID NO: 530792 - DNA, 25 bp, Homo sapien
ggccaacctgagcaatcccaaataa

SEQ ID NO: 530793 - DNA, 25 bp, Homo sapien
aaggctgaaatcatggcatcggtgg

SEQ ID NO: 530794 - DNA, 25 bp, Homo sapien
gaccacacgtgggtatatgtgaaag

SEQ ID NO: 530795 - DNA, 25 bp, Homo sapien
catcattcgaattagggccaacctg

SEQ ID NO: 530796 - DNA, 25 bp, Homo sapien
ttaactaacacaacttgaatcgaaa

SEQ ID NO: 530797 - DNA, 25 bp, Homo sapien
aatccaggtctttctaaccacaaag

SEQ ID NO: 530798 - DNA, 25 bp, Homo sapien
caacttgaatcgaaatccaggtctt

SEQ ID NO: 530799 - DNA, 25 bp, Homo sapien
gaagtcttgcagctattaactaaca

SEQ ID NO: 530800 - DNA, 25 bp, Homo sapien
cagagggagttcagaagtgactgaa

SEQ ID NO: 530801 - DNA, 25 bp, Homo sapien
gaatgctctctttgcaggccaagga

SEQ ID NO: 530802 - DNA, 25 bp, Homo sapien
aatgaagaacaccagaggtagccag

SEQ ID NO: 530803 - DNA, 25 bp, Homo sapien
aacatggtggtaaggagagcttccc

SEQ ID NO: 530804 - DNA, 25 bp, Homo sapien
aggcagcaggtttactattctaaaa

SEQ ID NO: 530805 - DNA, 25 bp, Homo sapien
ggaggcagcaggtttactattctaa

SEQ ID NO: 530806 - DNA, 25 bp, Homo sapien
ttggaggcagcaggtttactattct

SEQ ID NO: 530807 - DNA, 25 bp, Homo sapien
gaggcagcaggtttactattctaaa

SEQ ID NO: 530808 - DNA, 25 bp, Homo sapien
gatcaacagcactgtgaggaccctg

SEQ ID NO: 530809 - DNA, 25 bp, Homo sapien
gggatcaacagcactgtgaggaccc

SEQ ID NO: 530810 - DNA, 25 bp, Homo sapien
ggaacctggcgttgcttccactctg

SEQ ID NO: 530811 - DNA, 25 bp, Homo sapien
gatgatgctcaaggtggaacctggc

SEQ ID NO: 530812 - DNA, 25 bp, Homo sapien
ccacattcggcaatcggttccaaaa

SEQ ID NO: 530813 - DNA, 25 bp, Homo sapien
tgtagaggacaataaaccagcactg

SEQ ID NO: 530814 - DNA, 25 bp, Homo sapien
cagcactggaacctcttgtatctag

SEQ ID NO: 530815 - DNA, 25 bp, Homo sapien
ggggctcagttccacattcggcaat

SEQ ID NO: 530816 - DNA, 25 bp, Homo sapien
gtgtttctaacacctggactaggga

SEQ ID NO: 530817 - DNA, 25 bp, Homo sapien
tgtttctaacacctggactagggaa

SEQ ID NO: 530818 - DNA, 25 bp, Homo sapien
caaaggaagtacttggtccagttag

SEQ ID NO: 530819 - DNA, 25 bp, Homo sapien
tatggcatcccagttcaaggcttta

SEQ ID NO: 530820 - DNA, 25 bp, Homo sapien
tcattactctgagaatgcagattca

SEQ ID NO: 530821 - DNA, 25 bp, Homo sapien
cattgtgctcgaatactactgcaac

SEQ ID NO: 530822 - DNA, 25 bp, Homo sapien
gacaggagagggacaaccaacatct

SEQ ID NO: 530823 - DNA, 25 bp, Homo sapien
tttgcaattccaaatctcttacttc

SEQ ID NO: 530824 - DNA, 25 bp, Homo sapien
gatttgcaattccaaatctcttact

SEQ ID NO: 530825 - DNA, 25 bp, Homo sapien
tgcaggacactgcccatgctgtagc

SEQ ID NO: 530826 - DNA, 25 bp, Homo sapien
atttgcaattccaaatctcttactt

SEQ ID NO: 530827 - DNA, 25 bp, Homo sapien
tgtatgaaggcccaatgtttggctt

SEQ ID NO: 530828 - DNA, 25 bp, Homo sapien
agtaaatcataggtttcaaaatccg

SEQ ID NO: 530829 - DNA, 25 bp, Homo sapien
tttcaaaatccggttgctggcttcc

SEQ ID NO: 530830 - DNA, 25 bp, Homo sapien
ctgcatggaatgcaactggtgtatg

SEQ ID NO: 530831 - DNA, 25 bp, Homo sapien
tttgctgaaatgtactctgaactgg

SEQ ID NO: 530832 - DNA, 25 bp, Homo sapien
aatgtattgttctggaaatgtcatc

SEQ ID NO: 530833 - DNA, 25 bp, Homo sapien
tgtccctggcttataacttggataa

SEQ ID NO: 530834 - DNA, 25 bp, Homo sapien
ttaacatttgagttctttgctgaaa

SEQ ID NO: 530835 - DNA, 25 bp, Homo sapien
tacttgggtcgagccctcttgaaga

SEQ ID NO: 530836 - DNA, 25 bp, Homo sapien
gaaggttaaggtggacatcatggct

SEQ ID NO: 530837 - DNA, 25 bp, Homo sapien
tccagtctgtgatggttctgcctca

SEQ ID NO: 530838 - DNA, 25 bp, Homo sapien
gaagccagtgcaaggaaagccctga

SEQ ID NO: 530839 - DNA, 25 bp, Homo sapien
caggttggctcactcacacgcctgg

SEQ ID NO: 530840 - DNA, 25 bp, Homo sapien
cactttcggaatttaaaagcagctt

SEQ ID NO: 530841 - DNA, 25 bp, Homo sapien
tacgtgagcctctcctcatgcagct

SEQ ID NO: 530842 - DNA, 25 bp, Homo sapien
ctggcttagggcatctcatgagttg

SEQ ID NO: 530843 - DNA, 25 bp, Homo sapien
gatgcttgccaccagtattactcct

SEQ ID NO: 530844 - DNA, 25 bp, Homo sapien
ccaaccaacagcatagcctggagga

SEQ ID NO: 530845 - DNA, 25 bp, Homo sapien
agtccacaatttatcagggttggca

SEQ ID NO: 530846 - DNA, 25 bp, Homo sapien
tggctgtggcttacatggcccagaa

SEQ ID NO: 530847 - DNA, 25 bp, Homo sapien
ttctttctcagtcatacaggcagta

SEQ ID NO: 530848 - DNA, 25 bp, Homo sapien
tatgggacaaggtcatccttctttc

SEQ ID NO: 530849 - DNA, 25 bp, Homo sapien
gccaaccagacgtcttccttataga

SEQ ID NO: 530850 - DNA, 25 bp, Homo sapien
tcaggtcctttagcatatgggacaa

SEQ ID NO: 530851 - DNA, 25 bp, Homo sapien
gagtagtgcagctcctagaatcaaa

SEQ ID NO: 530852 - DNA, 25 bp, Homo sapien
gaaagtctgataacatcctgccaac

SEQ ID NO: 530853 - DNA, 25 bp, Homo sapien
gaggtgagtggacatttatcagcag

SEQ ID NO: 530854 - DNA, 25 bp, Homo sapien
tcagcagactagtactaatgaccat

SEQ ID NO: 530855 - DNA, 25 bp, Homo sapien
taatcacagcagatggggaagcaaa

SEQ ID NO: 530856 - DNA, 25 bp, Homo sapien
cagaaaacttataatcacagcagat

SEQ ID NO: 530857 - DNA, 25 bp, Homo sapien
tataatcacagcagatggggaagca

SEQ ID NO: 530858 - DNA, 25 bp, Homo sapien
aaaacttataatcacagcagatggg

SEQ ID NO: 530859 - DNA, 25 bp, Homo sapien
ctgttgcttgtggaagatcttttat

SEQ ID NO: 530860 - DNA, 25 bp, Homo sapien
gtggaagatcttttatcctctttaa

SEQ ID NO: 530861 - DNA, 25 bp, Homo sapien
gacattttcacttgttacaagactc

SEQ ID NO: 530862 - DNA, 25 bp, Homo sapien
cacttgttacaagactctggacatt

SEQ ID NO: 530863 - DNA, 25 bp, Homo sapien
cacacctaagtaacagaaggactgg

SEQ ID NO: 530864 - DNA, 25 bp, Homo sapien
acacctaagtaacagaaggactgga

SEQ ID NO: 530865 - DNA, 25 bp, Homo sapien
cacctaagtaacagaaggactggag

SEQ ID NO: 530866 - DNA, 25 bp, Homo sapien
tggctccccggattattttgcaatc

SEQ ID NO: 530867 - DNA, 25 bp, Homo sapien
gcaatctgctgctcacacctcttag

SEQ ID NO: 530868 - DNA, 25 bp, Homo sapien
caagttggcggtgtccttggctccc

SEQ ID NO: 530869 - DNA, 25 bp, Homo sapien
ttctatgacacttctttggctggcc

SEQ ID NO: 530870 - DNA, 25 bp, Homo sapien
ttcaaagtcttcacccagtagggca

SEQ ID NO: 530871 - DNA, 25 bp, Homo sapien
ggtgcaaggttgatgcagctcctgc

SEQ ID NO: 530872 - DNA, 25 bp, Homo sapien
catgcaccacggacaccatggagag

SEQ ID NO: 530873 - DNA, 25 bp, Homo sapien
tgcctgtagcgcagaagtggagtaa

SEQ ID NO: 530874 - DNA, 25 bp, Homo sapien
gggggacagggcgagcaatgagaat

SEQ ID NO: 530875 - DNA, 25 bp, Homo sapien
tcacttgtcaccagtaacttcaaac

SEQ ID NO: 530876 - DNA, 25 bp, Homo sapien
taagcactgtgtgcaaggacggctc

SEQ ID NO: 530877 - DNA, 25 bp, Homo sapien
ggagaagttggtaagtcataagcac

SEQ ID NO: 530878 - DNA, 25 bp, Homo sapien
cagccagggataccatggagaagtt

SEQ ID NO: 530879 - DNA, 25 bp, Homo sapien
ggtggcatctcccaatgggaagtgt

SEQ ID NO: 530880 - DNA, 25 bp, Homo sapien
ggcacagttggcaagaacatgcaag

SEQ ID NO: 530881 - DNA, 25 bp, Homo sapien
caggaaatggacgagccttgtggtc

SEQ ID NO: 530882 - DNA, 25 bp, Homo sapien
cactgccttgatcgttcagtatcag

SEQ ID NO: 530883 - DNA, 25 bp, Homo sapien
tctccatagtctcttgacacagggc

SEQ ID NO: 530884 - DNA, 25 bp, Homo sapien
ggttcaactgatggagatacaattt

SEQ ID NO: 530885 - DNA, 25 bp, Homo sapien
cagggtttggttcaactgatggaga

SEQ ID NO: 530886 - DNA, 25 bp, Homo sapien
tgctgaattgagtgacacggtcgtg

SEQ ID NO: 530887 - DNA, 25 bp, Homo sapien
gttacttatatactgcattggacaa

SEQ ID NO: 530888 - DNA, 25 bp, Homo sapien
ctagtataggaagggtgtctttcac

SEQ ID NO: 530889 - DNA, 25 bp, Homo sapien
gacccaaaaaaccagctacagtcag

SEQ ID NO: 530890 - DNA, 25 bp, Homo sapien
tggcttctcgtccttaaggatacag

SEQ ID NO: 530891 - DNA, 25 bp, Homo sapien
ttatgacagcaaagccgggagttgt

SEQ ID NO: 530892 - DNA, 25 bp, Homo sapien
tattaaatcgtgtattcatgacaga

SEQ ID NO: 530893 - DNA, 25 bp, Homo sapien
gtttctgctcatcccagcaaattat

SEQ ID NO: 530894 - DNA, 25 bp, Homo sapien
aaattcaaggtgcatgtttctgctc

SEQ ID NO: 530895 - DNA, 25 bp, Homo sapien
tatcagaggttctgcgcagatggag

SEQ ID NO: 530896 - DNA, 25 bp, Homo sapien
gcaagtggactcctgttagacgcca

SEQ ID NO: 530897 - DNA, 25 bp, Homo sapien
acatttcccggagattggcaagtgg

SEQ ID NO: 530898 - DNA, 25 bp, Homo sapien
gatgatgcctgtctgcttgcaactt

SEQ ID NO: 530899 - DNA, 25 bp, Homo sapien
tccaaaggagaatgatgtcaatagc

SEQ ID NO: 530900 - DNA, 25 bp, Homo sapien
gagaactagaatagaaacactctgt

SEQ ID NO: 530901 - DNA, 25 bp, Homo sapien
tgtcaccctcagaatcaaagcatca

SEQ ID NO: 530902 - DNA, 25 bp, Homo sapien
tcaagttaggcagagatgtcaccct

SEQ ID NO: 530903 - DNA, 25 bp, Homo sapien
tacaatgggcaaacaaactgtggca

SEQ ID NO: 530904 - DNA, 25 bp, Homo sapien
caaatgagactcagggaaactatct

SEQ ID NO: 530905 - DNA, 25 bp, Homo sapien
gctagacaccaaaagtacctactgt

SEQ ID NO: 530906 - DNA, 25 bp, Homo sapien
ggttgctcctgaaattcctgcaagg

SEQ ID NO: 530907 - DNA, 25 bp, Homo sapien
aatttatgaggtgtccttgccatca

SEQ ID NO: 530908 - DNA, 25 bp, Homo sapien
cgatcggtacttagtatgtctcaga

SEQ ID NO: 530909 - DNA, 25 bp, Homo sapien
taatttatgaggtgtccttgccatc

SEQ ID NO: 530910 - DNA, 25 bp, Homo sapien
ctttcactttctaccgatcggtact

SEQ ID NO: 530911 - DNA, 25 bp, Homo sapien
aaggcgagggacagctcaaccacct

SEQ ID NO: 530912 - DNA, 25 bp, Homo sapien
ggcgagggacagctcaaccacctgc

SEQ ID NO: 530913 - DNA, 25 bp, Homo sapien
tcaaaggcgagggacagctcaacca

SEQ ID NO: 530914 - DNA, 25 bp, Homo sapien
gattcaaaggcgagggacagctcaa

SEQ ID NO: 530915 - DNA, 25 bp, Homo sapien
agacagcaagattcttacagacaga

SEQ ID NO: 530916 - DNA, 25 bp, Homo sapien
cagacagacagcttctaacactgag

SEQ ID NO: 530917 - DNA, 25 bp, Homo sapien
tgtgatgtatgccattagtaactgg

SEQ ID NO: 530918 - DNA, 25 bp, Homo sapien
tctcatcactgcaattgttttcatg

SEQ ID NO: 530919 - DNA, 25 bp, Homo sapien
aggatcatttgagcctgggaagcag

SEQ ID NO: 530920 - DNA, 25 bp, Homo sapien
gatcatttgagcctgggaagcagag

SEQ ID NO: 530921 - DNA, 25 bp, Homo sapien
gctgcggtgagctgagattacacca

SEQ ID NO: 530922 - DNA, 25 bp, Homo sapien
cctgggtgatggagtgagactttgt

SEQ ID NO: 530923 - DNA, 25 bp, Homo sapien
agttgaaaggaatgaccgactgtca

SEQ ID NO: 530924 - DNA, 25 bp, Homo sapien
ttagtcagactagcaggtaaaagct

SEQ ID NO: 530925 - DNA, 25 bp, Homo sapien
agtgcctagcatgtggaagactccc

SEQ ID NO: 530926 - DNA, 25 bp, Homo sapien
tcaaatatttgaagggttcccagaa

SEQ ID NO: 530927 - DNA, 25 bp, Homo sapien
ttttctctgagtcaaattcacaaac

SEQ ID NO: 530928 - DNA, 25 bp, Homo sapien
gagtcaaattcacaaacacaagagt

SEQ ID NO: 530929 - DNA, 25 bp, Homo sapien
tcagctgggcatctcaaaggtcaaa

SEQ ID NO: 530930 - DNA, 25 bp, Homo sapien
gctgggcatctcaaaggtcaaatca

SEQ ID NO: 530931 - DNA, 25 bp, Homo sapien
cctacctcactgttacacactaaga

SEQ ID NO: 530932 - DNA, 25 bp, Homo sapien
acaggtaccagaaagccctacctca

SEQ ID NO: 530933 - DNA, 25 bp, Homo sapien
aagagtgtggaatgaacagcaggtg

SEQ ID NO: 530934 - DNA, 25 bp, Homo sapien
tgcagacaaacaggtaccagaaagc

SEQ ID NO: 530935 - DNA, 25 bp, Homo sapien
aaagagcttcagagactggcgcttt

SEQ ID NO: 530936 - DNA, 25 bp, Homo sapien
tgagcagcattctgctaagccataa

SEQ ID NO: 530937 - DNA, 25 bp, Homo sapien
cagagactggcgctttgagcagcat

SEQ ID NO: 530938 - DNA, 25 bp, Homo sapien
gccataaaaagatatctcctcctgc

SEQ ID NO: 530939 - DNA, 25 bp, Homo sapien
ttcaagagagtcatggcacaccaga

SEQ ID NO: 530940 - DNA, 25 bp, Homo sapien
gatatggctccaagtctgttcagtg

SEQ ID NO: 530941 - DNA, 25 bp, Homo sapien
cactgaacatcaggaatgctggcag

SEQ ID NO: 530942 - DNA, 25 bp, Homo sapien
aaaggccaaaggtttcatgctgacg

SEQ ID NO: 530943 - DNA, 25 bp, Homo sapien
ctgctttaagaacaaatcataggaa

SEQ ID NO: 530944 - DNA, 25 bp, Homo sapien
aaacgatgctggtttcatcaaacaa

SEQ ID NO: 530945 - DNA, 25 bp, Homo sapien
ggaataatcataaagtagttgaggc

SEQ ID NO: 530946 - DNA, 25 bp, Homo sapien
cataaagtagttgaggcttttctcc

SEQ ID NO: 530947 - DNA, 25 bp, Homo sapien
tgcaggctctcaactggtggtcaat

SEQ ID NO: 530948 - DNA, 25 bp, Homo sapien
gcaggctctcaactggtggtcaatc

SEQ ID NO: 530949 - DNA, 25 bp, Homo sapien
actgcaggctctcaactggtggtca

SEQ ID NO: 530950 - DNA, 25 bp, Homo sapien
gaactgcaggctctcaactggtggt

SEQ ID NO: 530951 - DNA, 25 bp, Homo sapien
ttacagctcgtgagccactggtttt

SEQ ID NO: 530952 - DNA, 25 bp, Homo sapien
tagggcacccaacagtcatgacttc

SEQ ID NO: 530953 - DNA, 25 bp, Homo sapien
gtttcgcagatttacatagctatga

SEQ ID NO: 530954 - DNA, 25 bp, Homo sapien
tagttaatggcaattgtttcgcaga

SEQ ID NO: 530955 - DNA, 25 bp, Homo sapien
gtgcccggccttgcaacttctctaa

SEQ ID NO: 530956 - DNA, 25 bp, Homo sapien
tatactgcaaacctctaaatctgtt

SEQ ID NO: 530957 - DNA, 25 bp, Homo sapien
atctcccctattttatgccaccatg

SEQ ID NO: 530958 - DNA, 25 bp, Homo sapien
gactaactacagacctctacccttg

SEQ ID NO: 530959 - DNA, 25 bp, Homo sapien
ctggagttttgagagttggtttctg

SEQ ID NO: 530960 - DNA, 25 bp, Homo sapien
agcttcattgccttctgctggagtt

SEQ ID NO: 530961 - DNA, 25 bp, Homo sapien
aaaatattaacagcttcattgcctt

SEQ ID NO: 530962 - DNA, 25 bp, Homo sapien
ttcattgccttctgctggagttttg

SEQ ID NO: 530963 - DNA, 25 bp, Homo sapien
aatgccaatcttagttaatcactgg

SEQ ID NO: 530964 - DNA, 25 bp, Homo sapien
tgatcccaaacctacagatatgaga

SEQ ID NO: 530965 - DNA, 25 bp, Homo sapien
taactgcagcacaagaactaatccc

SEQ ID NO: 530966 - DNA, 25 bp, Homo sapien
aatcactggctggtattctttggaa

SEQ ID NO: 530967 - DNA, 25 bp, Homo sapien
tattaacttaaattgacattcttaa

SEQ ID NO: 530968 - DNA, 25 bp, Homo sapien
gcagttaatcagtgtttcctaatga

SEQ ID NO: 530969 - DNA, 25 bp, Homo sapien
gactggctgcgacaaaagaaagaag

SEQ ID NO: 530970 - DNA, 25 bp, Homo sapien
tttgaagcaaacctacaggtgtttc

SEQ ID NO: 530971 - DNA, 25 bp, Homo sapien
tataggactcttatcaatgaagaac

SEQ ID NO: 530972 - DNA, 25 bp, Homo sapien
ctagatggcaattacaatctccaca

SEQ ID NO: 530973 - DNA, 25 bp, Homo sapien
tagatggcaattacaatctccacac

SEQ ID NO: 530974 - DNA, 25 bp, Homo sapien
agatggcaattacaatctccacaca

SEQ ID NO: 530975 - DNA, 25 bp, Homo sapien
agaacaataacacagaacacagtat

SEQ ID NO: 530976 - DNA, 25 bp, Homo sapien
ttcagccatccactgggttttcaga

SEQ ID NO: 530977 - DNA, 25 bp, Homo sapien
cttcagccatccactgggttttcag

SEQ ID NO: 530978 - DNA, 25 bp, Homo sapien
gcttgcttcgctaaggtcactattt

SEQ ID NO: 530979 - DNA, 25 bp, Homo sapien
ttcgctaaggtcactatttcagaga

SEQ ID NO: 530980 - DNA, 25 bp, Homo sapien
cacatgtgcttgcttcgctaaggtc

SEQ ID NO: 530981 - DNA, 25 bp, Homo sapien
catgtgcttgcttcgctaaggtcac

SEQ ID NO: 530982 - DNA, 25 bp, Homo sapien
tgctccaagtggaatgtgaaccatc

SEQ ID NO: 530983 - DNA, 25 bp, Homo sapien
gcgtatccacgctgtataaactact

SEQ ID NO: 530984 - DNA, 25 bp, Homo sapien
tgaaccatctctttgcccagcgtat

SEQ ID NO: 530985 - DNA, 25 bp, Homo sapien
taaactactcttccattagtcatca

SEQ ID NO: 530986 - DNA, 25 bp, Homo sapien
gaccgttgtttaagatgatcacaga

SEQ ID NO: 530987 - DNA, 25 bp, Homo sapien
gagacttattctgacccttacaaag

SEQ ID NO: 530988 - DNA, 25 bp, Homo sapien
gaactctcttctcaacttggcccta

SEQ ID NO: 530989 - DNA, 25 bp, Homo sapien
caacaaacaagattgggcaggagct

SEQ ID NO: 530990 - DNA, 25 bp, Homo sapien
aaatcctccttagatgaacatggcc

SEQ ID NO: 530991 - DNA, 25 bp, Homo sapien
aatcctccttagatgaacatggcca

SEQ ID NO: 530992 - DNA, 25 bp, Homo sapien
tccactgtccgctatcagtgcctta

SEQ ID NO: 530993 - DNA, 25 bp, Homo sapien
tttaagtccactgtccgctatcagt

SEQ ID NO: 530994 - DNA, 25 bp, Homo sapien
agtccactgtccgctatcagtgcct

SEQ ID NO: 530995 - DNA, 25 bp, Homo sapien
taagtccactgtccgctatcagtgc

SEQ ID NO: 530996 - DNA, 25 bp, Homo sapien
ctgtgcaataacatcacagcgcatg

SEQ ID NO: 530997 - DNA, 25 bp, Homo sapien
taccctgtgcaataacatcacagcg

SEQ ID NO: 530998 - DNA, 25 bp, Homo sapien
catgactataccctgtgcaataaca

SEQ ID NO: 530999 - DNA, 25 bp, Homo sapien
gactataccctgtgcaataacatca

SEQ ID NO: 531000 - DNA, 25 bp, Homo sapien
gcttaaatgcttctgttacttgatg

SEQ ID NO: 531001 - DNA, 25 bp, Homo sapien
gaaaatgatttgtataagcaacaaa

SEQ ID NO: 531002 - DNA, 25 bp, Homo sapien
aatgatttgtataagcaacaaacac

SEQ ID NO: 531003 - DNA, 25 bp, Homo sapien
gatttgtataagcaacaaacacaga

SEQ ID NO: 531004 - DNA, 25 bp, Homo sapien
tgatttgtataagcaacaaacacag

SEQ ID NO: 531005 - DNA, 25 bp, Homo sapien
tttcttttggcgataggctgaatta

SEQ ID NO: 531006 - DNA, 25 bp, Homo sapien
attttcttttggcgataggctgaat

SEQ ID NO: 531007 - DNA, 25 bp, Homo sapien
cttttggcgataggctgaattagag

SEQ ID NO: 531008 - DNA, 25 bp, Homo sapien
ttcttttggcgataggctgaattag

SEQ ID NO: 531009 - DNA, 25 bp, Homo sapien
tcaatagtgccaatgttggtaaatc

SEQ ID NO: 531010 - DNA, 25 bp, Homo sapien
tagtgccaatgttggtaaatcttca

SEQ ID NO: 531011 - DNA, 25 bp, Homo sapien
caatagtgccaatgttggtaaatct

SEQ ID NO: 531012 - DNA, 25 bp, Homo sapien
tgtcaatagtgccaatgttggtaaa

SEQ ID NO: 531013 - DNA, 25 bp, Homo sapien
caaggtaaacactactggattttca

SEQ ID NO: 531014 - DNA, 25 bp, Homo sapien
gctttcagtgaattacctattggag

SEQ ID NO: 531015 - DNA, 25 bp, Homo sapien
cagggtttggcatagaaggttataa

SEQ ID NO: 531016 - DNA, 25 bp, Homo sapien
tgaaaatagcaacgtcctcagaatt

SEQ ID NO: 531017 - DNA, 25 bp, Homo sapien
gcccctggattagagagacctttca

SEQ ID NO: 531018 - DNA, 25 bp, Homo sapien
tcacctatggtatggagctgcctat

SEQ ID NO: 531019 - DNA, 25 bp, Homo sapien
ctaacccaatatgaagcagagcagg

SEQ ID NO: 531020 - DNA, 25 bp, Homo sapien
gaaactttgattcctgggtggctac

SEQ ID NO: 531021 - DNA, 25 bp, Homo sapien
tatttctatcatggttgcatcgtat

SEQ ID NO: 531022 - DNA, 25 bp, Homo sapien
tttctatcatggttgcatcgtattt

SEQ ID NO: 531023 - DNA, 25 bp, Homo sapien
tctatcatggttgcatcgtatttca

SEQ ID NO: 531024 - DNA, 25 bp, Homo sapien
ttctatcatggttgcatcgtatttc

SEQ ID NO: 531025 - DNA, 25 bp, Homo sapien
atgatcaagctaaacaatgtaggct

SEQ ID NO: 531026 - DNA, 25 bp, Homo sapien
taaagtgaatgatcaagctaaacaa

SEQ ID NO: 531027 - DNA, 25 bp, Homo sapien
taagtaaagtgaatgatcaagctaa

SEQ ID NO: 531028 - DNA, 25 bp, Homo sapien
aataagtaaagtgaatgatcaagct

SEQ ID NO: 531029 - DNA, 25 bp, Homo sapien
gaaatttttcaggaatacaacatac

SEQ ID NO: 531030 - DNA, 25 bp, Homo sapien
tgccttcttcaatatcaataggttc

SEQ ID NO: 531031 - DNA, 25 bp, Homo sapien
taggttctttaattattgcttcagg

SEQ ID NO: 531032 - DNA, 25 bp, Homo sapien
attattgcttcaggagactcagcag

SEQ ID NO: 531033 - DNA, 25 bp, Homo sapien
ctttaattattgcttcaggagactc

SEQ ID NO: 531034 - DNA, 25 bp, Homo sapien
ctaataccctcgaaaaacagataat

SEQ ID NO: 531035 - DNA, 25 bp, Homo sapien
tgattatcaatgctctcttccaaac

SEQ ID NO: 531036 - DNA, 25 bp, Homo sapien
acacacagattcagcttgtaaaacc

SEQ ID NO: 531037 - DNA, 25 bp, Homo sapien
caccaggtctataaagggattttct

SEQ ID NO: 531038 - DNA, 25 bp, Homo sapien
attttacggcattaaagaagctgtt

SEQ ID NO: 531039 - DNA, 25 bp, Homo sapien
gcttttagtgaattaacaatttgag

SEQ ID NO: 531040 - DNA, 25 bp, Homo sapien
tgacatacaaacagattataatttg

SEQ ID NO: 531041 - DNA, 25 bp, Homo sapien
aaacaataatggacttttgaaattg

SEQ ID NO: 531042 - DNA, 25 bp, Homo sapien
aaatttatcccgtatgtatcatgtc

SEQ ID NO: 531043 - DNA, 25 bp, Homo sapien
tcataaatttatcccgtatgtatca

SEQ ID NO: 531044 - DNA, 25 bp, Homo sapien
tatcccgtatgtatcatgtctacaa

SEQ ID NO: 531045 - DNA, 25 bp, Homo sapien
cgtatgtatcatgtctacaattact

SEQ ID NO: 531046 - DNA, 25 bp, Homo sapien
cacagaccaatacttgattgcatat

SEQ ID NO: 531047 - DNA, 25 bp, Homo sapien
gatattttcgctcacagaccaatac

SEQ ID NO: 531048 - DNA, 25 bp, Homo sapien
cctgggatattttcgctcacagacc

SEQ ID NO: 531049 - DNA, 25 bp, Homo sapien
cagaccaatacttgattgcatattc

SEQ ID NO: 531050 - DNA, 25 bp, Homo sapien
taccaccagctaaaacctgtgcctt

SEQ ID NO: 531051 - DNA, 25 bp, Homo sapien
tatttgtttatatccgaagaagaga

SEQ ID NO: 531052 - DNA, 25 bp, Homo sapien
atttgtttatatccgaagaagagaa

SEQ ID NO: 531053 - DNA, 25 bp, Homo sapien
atatttgtttatatccgaagaagag

SEQ ID NO: 531054 - DNA, 25 bp, Homo sapien
aatatttgtttatatccgaagaaga

SEQ ID NO: 531055 - DNA, 25 bp, Homo sapien
ttctggtcccagagaacttgccaga

SEQ ID NO: 531056 - DNA, 25 bp, Homo sapien
ttcttattacttgtgagttctggtc

SEQ ID NO: 531057 - DNA, 25 bp, Homo sapien
tacagtttatcctgcacatattatt

SEQ ID NO: 531058 - DNA, 25 bp, Homo sapien
ctgcttcttattacttgtgagttct

SEQ ID NO: 531059 - DNA, 25 bp, Homo sapien
tggcaattgcataagcttcatctgg

SEQ ID NO: 531060 - DNA, 25 bp, Homo sapien
ttggcaattgcataagcttcatctg

SEQ ID NO: 531061 - DNA, 25 bp, Homo sapien
tttggcaattgcataagcttcatct

SEQ ID NO: 531062 - DNA, 25 bp, Homo sapien
catgtattcatgtagtgagagattc

SEQ ID NO: 531063 - DNA, 25 bp, Homo sapien
gtattcatgtagtgagagattcctt

SEQ ID NO: 531064 - DNA, 25 bp, Homo sapien
tcatgtagtgagagattcctttgct

SEQ ID NO: 531065 - DNA, 25 bp, Homo sapien
actcatgtattcatgtagtgagaga

SEQ ID NO: 531066 - DNA, 25 bp, Homo sapien
taaacaatccagaacttcccagaac

SEQ ID NO: 531067 - DNA, 25 bp, Homo sapien
catggttattaaacaatccagaact

SEQ ID NO: 531068 - DNA, 25 bp, Homo sapien
tggagtccatggttattaaacaatc

SEQ ID NO: 531069 - DNA, 25 bp, Homo sapien
ctgtacttggagtccatggttatta

SEQ ID NO: 531070 - DNA, 25 bp, Homo sapien
cgcaaacatgggctcgctcgtagtc

SEQ ID NO: 531071 - DNA, 25 bp, Homo sapien
aaaaatgtcactgccggcgaagtga

SEQ ID NO: 531072 - DNA, 25 bp, Homo sapien
cagacgccggaatggcagcagaaaa

SEQ ID NO: 531073 - DNA, 25 bp, Homo sapien
tcctcgcggactaagggctgggtca

SEQ ID NO: 531074 - DNA, 25 bp, Homo sapien
cctcgagacgacagcggactggaag

SEQ ID NO: 531075 - DNA, 25 bp, Homo sapien
tgccgaccctcgagacgacagcgga

SEQ ID NO: 531076 - DNA, 25 bp, Homo sapien
ctcctgccgaccctcgagacgacag

SEQ ID NO: 531077 - DNA, 25 bp, Homo sapien
cgaccctcgagacgacagcggactg

SEQ ID NO: 531078 - DNA, 25 bp, Homo sapien
cggccactagcctgccgtagaacat

SEQ ID NO: 531079 - DNA, 25 bp, Homo sapien
ccccgtcccctcggcgccgcgcgca

SEQ ID NO: 531080 - DNA, 25 bp, Homo sapien
aggcctgacagtcggccactagtta

SEQ ID NO: 531081 - DNA, 25 bp, Homo sapien
ctgacagtcggccactagttaccaa

SEQ ID NO: 531082 - DNA, 25 bp, Homo sapien
tcggccactagttaccaaagctggt

SEQ ID NO: 531083 - DNA, 25 bp, Homo sapien
cactagttaccaaagctggtggcag

SEQ ID NO: 531084 - DNA, 25 bp, Homo sapien
tgtgtgtcaccaggcttggttgatt

SEQ ID NO: 531085 - DNA, 25 bp, Homo sapien
atttttttagggacagaatctctct

SEQ ID NO: 531086 - DNA, 25 bp, Homo sapien
tgaatacgtgcagacttgggctcag

SEQ ID NO: 531087 - DNA, 25 bp, Homo sapien
ccatctggatgaatacgtgcagact

SEQ ID NO: 531088 - DNA, 25 bp, Homo sapien
gaatttcacaaggttaatcgctcag

SEQ ID NO: 531089 - DNA, 25 bp, Homo sapien
ggaatttcacaaggttaatcgctca

SEQ ID NO: 531090 - DNA, 25 bp, Homo sapien
tgcaaaccacatccaacaaagctaa

SEQ ID NO: 531091 - DNA, 25 bp, Homo sapien
aaagctttggctttgcaaaaggcca

SEQ ID NO: 531092 - DNA, 25 bp, Homo sapien
taaaaagtcaagctacacacagagg

SEQ ID NO: 531093 - DNA, 25 bp, Homo sapien
cccaaggaggacatataaacagcaa

SEQ ID NO: 531094 - DNA, 25 bp, Homo sapien
ctgcagtgagccgtgcttgtaccac

SEQ ID NO: 531095 - DNA, 25 bp, Homo sapien
ccagcctaggcaacagagcaagacc

SEQ ID NO: 531096 - DNA, 25 bp, Homo sapien
gcagtgagccgtgcttgtaccactg

SEQ ID NO: 531097 - DNA, 25 bp, Homo sapien
cactccagcctaggcaacagagcaa

SEQ ID NO: 531098 - DNA, 25 bp, Homo sapien
agccaccgtgtccagactaaatatt

SEQ ID NO: 531099 - DNA, 25 bp, Homo sapien
cagtttccaactccctggaggtcat

SEQ ID NO: 531100 - DNA, 25 bp, Homo sapien
gaggccgaggcgctctcgctttgat

SEQ ID NO: 531101 - DNA, 25 bp, Homo sapien
tcggagtcggagtcgtggtgaccag

SEQ ID NO: 531102 - DNA, 25 bp, Homo sapien
cagctgcaagcatccgcgttgcgtc

SEQ ID NO: 531103 - DNA, 25 bp, Homo sapien
gggaagaagcagctcttcacctgaa

SEQ ID NO: 531104 - DNA, 25 bp, Homo sapien
agcaggaaccaattacagttctttt

SEQ ID NO: 531105 - DNA, 25 bp, Homo sapien
gaagaagcagctcttcacctgaaaa

SEQ ID NO: 531106 - DNA, 25 bp, Homo sapien
ggaagaagcagctcttcacctgaaa

SEQ ID NO: 531107 - DNA, 25 bp, Homo sapien
gaaaaagccagtaccctgagacagt

SEQ ID NO: 531108 - DNA, 25 bp, Homo sapien
tgtttcacagcagttgggttcttct

SEQ ID NO: 531109 - DNA, 25 bp, Homo sapien
cacctgcgcaggagagttaatacca

SEQ ID NO: 531110 - DNA, 25 bp, Homo sapien
taaatcctacccatagagaattcag

SEQ ID NO: 531111 - DNA, 25 bp, Homo sapien
cagttgctttctaagtatcttccct

SEQ ID NO: 531112 - DNA, 25 bp, Homo sapien
tgtctagcctctgtagggatttgag

SEQ ID NO: 531113 - DNA, 25 bp, Homo sapien
gaaaacaccaaggtcactgactgtc

SEQ ID NO: 531114 - DNA, 25 bp, Homo sapien
tatcttcccttaatgttcagaaggc

SEQ ID NO: 531115 - DNA, 25 bp, Homo sapien
caatcttctgtgctaagtaaagaag

SEQ ID NO: 531116 - DNA, 25 bp, Homo sapien
tcttctgtgctaagtaaagaaggct

SEQ ID NO: 531117 - DNA, 25 bp, Homo sapien
aagcaatcttctgtgctaagtaaag

SEQ ID NO: 531118 - DNA, 25 bp, Homo sapien
tataaccaagaagtatttattaagc

SEQ ID NO: 531119 - DNA, 25 bp, Homo sapien
cacctagatcaagaactgttttacc

SEQ ID NO: 531120 - DNA, 25 bp, Homo sapien
caaaagtgtcaccttgcgaagataa

SEQ ID NO: 531121 - DNA, 25 bp, Homo sapien
tataaacctaggagtgaaaaggctg

SEQ ID NO: 531122 - DNA, 25 bp, Homo sapien
acttgcgttgtttctaattcagggc

SEQ ID NO: 531123 - DNA, 25 bp, Homo sapien
ggattttagtaaagagcactcaggt

SEQ ID NO: 531124 - DNA, 25 bp, Homo sapien
gcccattttacaatggcagctgggt

SEQ ID NO: 531125 - DNA, 25 bp, Homo sapien
catccttgagagcatgacctgtaac

SEQ ID NO: 531126 - DNA, 25 bp, Homo sapien
aatatggccgcttggtatgtctaaa

SEQ ID NO: 531127 - DNA, 25 bp, Homo sapien
ttccaaatagtcatgcaaagcagcc

SEQ ID NO: 531128 - DNA, 25 bp, Homo sapien
aagggtcccttgagaatgttcgcct

SEQ ID NO: 531129 - DNA, 25 bp, Homo sapien
gagccccagggaatttgtgtctcac

SEQ ID NO: 531130 - DNA, 25 bp, Homo sapien
tttttgcacatgagggaacctgtcc

SEQ ID NO: 531131 - DNA, 25 bp, Homo sapien
tcacatgtcacaagtatggcagaag

SEQ ID NO: 531132 - DNA, 25 bp, Homo sapien
gataagattagtggaagagagaccc

SEQ ID NO: 531133 - DNA, 25 bp, Homo sapien
tttcttctacagatgggatttcgcc

SEQ ID NO: 531134 - DNA, 25 bp, Homo sapien
cccgcaagggtctagcgctagttaa

SEQ ID NO: 531135 - DNA, 25 bp, Homo sapien
ctagtatacggacaaggcaaggtta

SEQ ID NO: 531136 - DNA, 25 bp, Homo sapien
gttacattatggcacataccacaat

SEQ ID NO: 531137 - DNA, 25 bp, Homo sapien
ttgtatgtccttaattctagatggt

SEQ ID NO: 531138 - DNA, 25 bp, Homo sapien
tgtgttagtccattcctaaaaataa

SEQ ID NO: 531139 - DNA, 25 bp, Homo sapien
tcttctaataggaataggcctttga

SEQ ID NO: 531140 - DNA, 25 bp, Homo sapien
taggtttcaattcagttagtcactc

SEQ ID NO: 531141 - DNA, 25 bp, Homo sapien
taagcatattacctaaacacagagg

SEQ ID NO: 531142 - DNA, 25 bp, Homo sapien
tctattcttaaaatcagacaaggct

SEQ ID NO: 531143 - DNA, 25 bp, Homo sapien
agacaatttcccatgcctccaacag

SEQ ID NO: 531144 - DNA, 25 bp, Homo sapien
taatgactgcacaattctaccaaag

SEQ ID NO: 531145 - DNA, 25 bp, Homo sapien
gcctattcagtcatccactgccagt

SEQ ID NO: 531146 - DNA, 25 bp, Homo sapien
tctaccaaagccagtgtttacctgg

SEQ ID NO: 531147 - DNA, 25 bp, Homo sapien
tactactgcttgaggagtccgttga

SEQ ID NO: 531148 - DNA, 25 bp, Homo sapien
ccatggatactgtggagcaaggaca

SEQ ID NO: 531149 - DNA, 25 bp, Homo sapien
catgtcatttgactgccatggatac

SEQ ID NO: 531150 - DNA, 25 bp, Homo sapien
ggtggtaacatattcatcgacatgt

SEQ ID NO: 531151 - DNA, 25 bp, Homo sapien
caagtaataggtactttagtattat

SEQ ID NO: 531152 - DNA, 25 bp, Homo sapien
tgcagtggcacgaatacatcactga

SEQ ID NO: 531153 - DNA, 25 bp, Homo sapien
acttatgtatactaggttatgtaga

SEQ ID NO: 531154 - DNA, 25 bp, Homo sapien
taagaaactatttagtcagttgaca

SEQ ID NO: 531155 - DNA, 25 bp, Homo sapien
accccagtgggtaatttcctgcttg

SEQ ID NO: 531156 - DNA, 25 bp, Homo sapien
gcctctgatgcctcatctaacttct

SEQ ID NO: 531157 - DNA, 25 bp, Homo sapien
gagtgggccacattacactgcaccc

SEQ ID NO: 531158 - DNA, 25 bp, Homo sapien
caatgacagcaccatgatatgagag

SEQ ID NO: 531159 - DNA, 25 bp, Homo sapien
gaataaaccggcaaagaatctagct

SEQ ID NO: 531160 - DNA, 25 bp, Homo sapien
gagtgtgttcactttattccgtaaa

SEQ ID NO: 531161 - DNA, 25 bp, Homo sapien
ttacaatgaactgggtctgagaggc

SEQ ID NO: 531162 - DNA, 25 bp, Homo sapien
tgggtctcacagaaatactatttta

SEQ ID NO: 531163 - DNA, 25 bp, Homo sapien
tcatctctaaatcagttgggtaggg

SEQ ID NO: 531164 - DNA, 25 bp, Homo sapien
tagtggaaggattgttcatctgacc

SEQ ID NO: 531165 - DNA, 25 bp, Homo sapien
tgcaagtgcatctcctggtaaatgg

SEQ ID NO: 531166 - DNA, 25 bp, Homo sapien
gccattcacgccattagtggaagga

SEQ ID NO: 531167 - DNA, 25 bp, Homo sapien
ccagcatggtgaaaccccgtctcta

SEQ ID NO: 531168 - DNA, 25 bp, Homo sapien
gttcaagaccagcctggccagcatg

SEQ ID NO: 531169 - DNA, 25 bp, Homo sapien
gtgggtggatcacctcaagtcagaa

SEQ ID NO: 531170 - DNA, 25 bp, Homo sapien
tggccagcatggtgaaaccccgtct

SEQ ID NO: 531171 - DNA, 25 bp, Homo sapien
caggctggaacctttgtggaaatcc

SEQ ID NO: 531172 - DNA, 25 bp, Homo sapien
cagaaactaattcgtgtaagtggca

SEQ ID NO: 531173 - DNA, 25 bp, Homo sapien
caggagcaggtaatgtccatcccaa

SEQ ID NO: 531174 - DNA, 25 bp, Homo sapien
tttgggcacatctcaccaactgcag

SEQ ID NO: 531175 - DNA, 25 bp, Homo sapien
tacttgcactgatcctatgtgcata

SEQ ID NO: 531176 - DNA, 25 bp, Homo sapien
acatacagcattacttgcactgatc

SEQ ID NO: 531177 - DNA, 25 bp, Homo sapien
gcattacttgcactgatcctatgtg

SEQ ID NO: 531178 - DNA, 25 bp, Homo sapien
gcactgatcctatgtgcatacttaa

SEQ ID NO: 531179 - DNA, 25 bp, Homo sapien
ttttaagaggacagtataacctgta

SEQ ID NO: 531180 - DNA, 25 bp, Homo sapien
agttttaagaggacagtataacctg

SEQ ID NO: 531181 - DNA, 25 bp, Homo sapien
ctccttcgcttggtaaacagctgtt

SEQ ID NO: 531182 - DNA, 25 bp, Homo sapien
gtttctccttcgcttggtaaacagc

SEQ ID NO: 531183 - DNA, 25 bp, Homo sapien
ttctccttcgcttggtaaacagctg

SEQ ID NO: 531184 - DNA, 25 bp, Homo sapien
tctccttcgcttggtaaacagctgt

SEQ ID NO: 531185 - DNA, 25 bp, Homo sapien
ttttgtagctgctgaatatcactgt

SEQ ID NO: 531186 - DNA, 25 bp, Homo sapien
ttcctttagctgtttttgtagctgc

SEQ ID NO: 531187 - DNA, 25 bp, Homo sapien
cagtatttgttctgcttcctttagc

SEQ ID NO: 531188 - DNA, 25 bp, Homo sapien
gtatttgttctgcttcctttagctg

SEQ ID NO: 531189 - DNA, 25 bp, Homo sapien
tcattagttcttgaaattccccatc

SEQ ID NO: 531190 - DNA, 25 bp, Homo sapien
ccccatctcggtgaattaacaactc

SEQ ID NO: 531191 - DNA, 25 bp, Homo sapien
ccctgattaagtgccaatttcatta

SEQ ID NO: 531192 - DNA, 25 bp, Homo sapien
ttttccctgattaagtgccaatttc

SEQ ID NO: 531193 - DNA, 25 bp, Homo sapien
tctccagcctgtaacaacttttggt

SEQ ID NO: 531194 - DNA, 25 bp, Homo sapien
tcctctccagcctgtaacaactttt

SEQ ID NO: 531195 - DNA, 25 bp, Homo sapien
ctctccagcctgtaacaacttttgg

SEQ ID NO: 531196 - DNA, 25 bp, Homo sapien
ctccagcctgtaacaacttttggtt

SEQ ID NO: 531197 - DNA, 25 bp, Homo sapien
gaacacatgagacctttctggaagc

SEQ ID NO: 531198 - DNA, 25 bp, Homo sapien
tggaagccagtcacaccaccagagc

SEQ ID NO: 531199 - DNA, 25 bp, Homo sapien
gtgaacacatgagacctttctggaa

SEQ ID NO: 531200 - DNA, 25 bp, Homo sapien
tgagtgaacacatgagacctttctg

SEQ ID NO: 531201 - DNA, 25 bp, Homo sapien
tctgtgaagaagttccaatgatccg

SEQ ID NO: 531202 - DNA, 25 bp, Homo sapien
tgtgaagaagttccaatgatccgcc

SEQ ID NO: 531203 - DNA, 25 bp, Homo sapien
aagaagttccaatgatccgcccgcc

SEQ ID NO: 531204 - DNA, 25 bp, Homo sapien
tgaagaagttccaatgatccgcccg

SEQ ID NO: 531205 - DNA, 25 bp, Homo sapien
agacagcagccgctctcgtgtgctg

SEQ ID NO: 531206 - DNA, 25 bp, Homo sapien
agccgctctcgtgtgctgttaccac

SEQ ID NO: 531207 - DNA, 25 bp, Homo sapien
tccaagtcctcaagcgcagacagca

SEQ ID NO: 531208 - DNA, 25 bp, Homo sapien
agtcctcaagcgcagacagcagccg

SEQ ID NO: 531209 - DNA, 25 bp, Homo sapien
gacaccggcgccatctgttgggccg

SEQ ID NO: 531210 - DNA, 25 bp, Homo sapien
gctcggaaggcggaagagtcaccca

SEQ ID NO: 531211 - DNA, 25 bp, Homo sapien
aaaaagaggcctggcgagagcgccc

SEQ ID NO: 531212 - DNA, 25 bp, Homo sapien
gcagagcgagctgacgcaggtgcgt

SEQ ID NO: 531213 - DNA, 25 bp, Homo sapien
tgcaaattgtacaaatccaggcgtg

SEQ ID NO: 531214 - DNA, 25 bp, Homo sapien
aactctcacgggtcatattgagcca

SEQ ID NO: 531215 - DNA, 25 bp, Homo sapien
tattgagccatgactctggtaggag

SEQ ID NO: 531216 - DNA, 25 bp, Homo sapien
taaacatgcctctcagtactctagt

SEQ ID NO: 531217 - DNA, 25 bp, Homo sapien
tgttagcctctcacataagtacctg

SEQ ID NO: 531218 - DNA, 25 bp, Homo sapien
cagagattaacatcgaagtggcagg

SEQ ID NO: 531219 - DNA, 25 bp, Homo sapien
gaaagtactacatgaccctgtgtgc

SEQ ID NO: 531220 - DNA, 25 bp, Homo sapien
ggtcgtaccctgtctctgaatgttt

SEQ ID NO: 531221 - DNA, 25 bp, Homo sapien
tattcctgtccatggagtagaaacc

SEQ ID NO: 531222 - DNA, 25 bp, Homo sapien
tgagaaggacagaaggcctgtctac

SEQ ID NO: 531223 - DNA, 25 bp, Homo sapien
taccttattcctgtccatggagtag

SEQ ID NO: 531224 - DNA, 25 bp, Homo sapien
ggcctgtctaccttattcctgtcca

SEQ ID NO: 531225 - DNA, 25 bp, Homo sapien
gaccctagcatcttcacatcaactt

SEQ ID NO: 531226 - DNA, 25 bp, Homo sapien
ttccataccacatagaccaaagatt

SEQ ID NO: 531227 - DNA, 25 bp, Homo sapien
ttaagctttaattagaagtacagct

SEQ ID NO: 531228 - DNA, 25 bp, Homo sapien
ctcttcctttgattagtatccagaa

SEQ ID NO: 531229 - DNA, 25 bp, Homo sapien
aaattgaaagctacacaatgagaaa

SEQ ID NO: 531230 - DNA, 25 bp, Homo sapien
caaatccaagtacaaacgaaaatgt

SEQ ID NO: 531231 - DNA, 25 bp, Homo sapien
gcaaatccaagtacaaacgaaaatg

SEQ ID NO: 531232 - DNA, 25 bp, Homo sapien
gaaacattaatggcaaatccaagta

SEQ ID NO: 531233 - DNA, 25 bp, Homo sapien
ctccacatttgactggatccctgga

SEQ ID NO: 531234 - DNA, 25 bp, Homo sapien
agttatatgccattggctgctgctt

SEQ ID NO: 531235 - DNA, 25 bp, Homo sapien
attctccacatttgactggatccct

SEQ ID NO: 531236 - DNA, 25 bp, Homo sapien
attattctgtaaccacattctccac

SEQ ID NO: 531237 - DNA, 25 bp, Homo sapien
acgtgttcacgtgcccatcacagga

SEQ ID NO: 531238 - DNA, 25 bp, Homo sapien
gaagttagaactggtacctcaggaa

SEQ ID NO: 531239 - DNA, 25 bp, Homo sapien
caggagtccttctagtcacagagcc

SEQ ID NO: 531240 - DNA, 25 bp, Homo sapien
cagttattgggaccagcctacgtgt

SEQ ID NO: 531241 - DNA, 25 bp, Homo sapien
atgacctcgcctcactgcaagctcc

SEQ ID NO: 531242 - DNA, 25 bp, Homo sapien
gagattctcttgcctcagcctccca

SEQ ID NO: 531243 - DNA, 25 bp, Homo sapien
agtagctgagattacaggcacgtgc

SEQ ID NO: 531244 - DNA, 25 bp, Homo sapien
agctccgactccctggttcaagaga

SEQ ID NO: 531245 - DNA, 25 bp, Homo sapien
taaagtaccagatccttattatggc

SEQ ID NO: 531246 - DNA, 25 bp, Homo sapien
ttttaatagacatcaagacctttag

SEQ ID NO: 531247 - DNA, 25 bp, Homo sapien
gaatgcgctgtcacactatgcacac

SEQ ID NO: 531248 - DNA, 25 bp, Homo sapien
tattatggcatccaaggcccttgtg

SEQ ID NO: 531249 - DNA, 25 bp, Homo sapien
tctgtctcttccctctcttgcattg

SEQ ID NO: 531250 - DNA, 25 bp, Homo sapien
tctcttccctctcttgcattgtcat

SEQ ID NO: 531251 - DNA, 25 bp, Homo sapien
acctccggatgtcatctgtctcttc

SEQ ID NO: 531252 - DNA, 25 bp, Homo sapien
tgtctcttccctctcttgcattgtc

SEQ ID NO: 531253 - DNA, 25 bp, Homo sapien
ttcttctcagagaaccaaggttgga

SEQ ID NO: 531254 - DNA, 25 bp, Homo sapien
aagccattggcaaaggatattttcc

SEQ ID NO: 531255 - DNA, 25 bp, Homo sapien
tcaggccactggattaagccactca

SEQ ID NO: 531256 - DNA, 25 bp, Homo sapien
ccagtttgaggaaaagtcagcagag

SEQ ID NO: 531257 - DNA, 25 bp, Homo sapien
ttggctaattgtgccgaattcccgg

SEQ ID NO: 531258 - DNA, 25 bp, Homo sapien
cctggagagggaacgattggctaat

SEQ ID NO: 531259 - DNA, 25 bp, Homo sapien
gaaggtgacgttcaactccgctctg

SEQ ID NO: 531260 - DNA, 25 bp, Homo sapien
gaattcccggtcgtttgtgcagtcc

SEQ ID NO: 531261 - DNA, 25 bp, Homo sapien
ttcaccatatttaaattttgtggtc

SEQ ID NO: 531262 - DNA, 25 bp, Homo sapien
gagttcaccatatttaaattttgtg

SEQ ID NO: 531263 - DNA, 25 bp, Homo sapien
caccatatttaaattttgtggtcat

SEQ ID NO: 531264 - DNA, 25 bp, Homo sapien
agttcaccatatttaaattttgtgg

SEQ ID NO: 531265 - DNA, 25 bp, Homo sapien
tctaaatcagtggttgttaaacatt

SEQ ID NO: 531266 - DNA, 25 bp, Homo sapien
tttaactccctatttctctaaatca

SEQ ID NO: 531267 - DNA, 25 bp, Homo sapien
actagactgcgtgttgtttttcccg

SEQ ID NO: 531268 - DNA, 25 bp, Homo sapien
ccagcaattgtttcgcaattcggca

SEQ ID NO: 531269 - DNA, 25 bp, Homo sapien
tctttcatgtaagtagcaaacaggg

SEQ ID NO: 531270 - DNA, 25 bp, Homo sapien
gttgccctgctacctagtttgttag

SEQ ID NO: 531271 - DNA, 25 bp, Homo sapien
gaatgagatgtccactagggcagag

SEQ ID NO: 531272 - DNA, 25 bp, Homo sapien
ggtggtcatttccatagcccatgtg

SEQ ID NO: 531273 - DNA, 25 bp, Homo sapien
gagtaattggagacaagctttccct

SEQ ID NO: 531274 - DNA, 25 bp, Homo sapien
actgtttcaagttcgaggatgggca

SEQ ID NO: 531275 - DNA, 25 bp, Homo sapien
gattgagactcagatctcttggagt

SEQ ID NO: 531276 - DNA, 25 bp, Homo sapien
tctaagtccaaagagttgtggagtc

SEQ ID NO: 531277 - DNA, 25 bp, Homo sapien
ctttataaaagaggagattgagact

SEQ ID NO: 531278 - DNA, 25 bp, Homo sapien
gagaaaatacagtttgagcacctgc

SEQ ID NO: 531279 - DNA, 25 bp, Homo sapien
tataccccttccatatagtacacag

SEQ ID NO: 531280 - DNA, 25 bp, Homo sapien
ttgtaagcatcacgacacttcacca

SEQ ID NO: 531281 - DNA, 25 bp, Homo sapien
caaggctgttctctacatgaccaca

SEQ ID NO: 531282 - DNA, 25 bp, Homo sapien
acattttgtgtatagataggcagat

SEQ ID NO: 531283 - DNA, 25 bp, Homo sapien
tgcttacactagagtaccacaacaa

SEQ ID NO: 531284 - DNA, 25 bp, Homo sapien
ctcctggaactctgatagtgtctca

SEQ ID NO: 531285 - DNA, 25 bp, Homo sapien
caagattccatcgaggataccccat

SEQ ID NO: 531286 - DNA, 25 bp, Homo sapien
tccctgacagttttgagctcatagg

SEQ ID NO: 531287 - DNA, 25 bp, Homo sapien
ttctttcacaatagattatgtttgc

SEQ ID NO: 531288 - DNA, 25 bp, Homo sapien
cagagcatccactggtccaatttct

SEQ ID NO: 531289 - DNA, 25 bp, Homo sapien
tgcttgccctcaatccccagagcat

SEQ ID NO: 531290 - DNA, 25 bp, Homo sapien
ctttccaagtcaatgcttgccctca

SEQ ID NO: 531291 - DNA, 25 bp, Homo sapien
gtgttggcagaattcacgtccttgt

SEQ ID NO: 531292 - DNA, 25 bp, Homo sapien
ggtcaatgaccctggagttaggcca

SEQ ID NO: 531293 - DNA, 25 bp, Homo sapien
aaactggagtgaagacgaacgggct

SEQ ID NO: 531294 - DNA, 25 bp, Homo sapien
tattaccgaactagctacctcttgg

SEQ ID NO: 531295 - DNA, 25 bp, Homo sapien
catacagttggttgctatggtggca

SEQ ID NO: 531296 - DNA, 25 bp, Homo sapien
cttcacccaaaacattctgatagcc

SEQ ID NO: 531297 - DNA, 25 bp, Homo sapien
cctgtagcccacaagagacaaatct

SEQ ID NO: 531298 - DNA, 25 bp, Homo sapien
agaaacatgtgtggctcatcaagcc

SEQ ID NO: 531299 - DNA, 25 bp, Homo sapien
gagaaatcgacacacttggaaatgg

SEQ ID NO: 531300 - DNA, 25 bp, Homo sapien
gtctggtcaagtagggaaagctctc

SEQ ID NO: 531301 - DNA, 25 bp, Homo sapien
gcctgggccctatctcctgacattt

SEQ ID NO: 531302 - DNA, 25 bp, Homo sapien
caacttgctgggataaactcaggag

SEQ ID NO: 531303 - DNA, 25 bp, Homo sapien
gagctcttgcctaaactaatctggg

SEQ ID NO: 531304 - DNA, 25 bp, Homo sapien
ttcattctttgtagctggacctggg

SEQ ID NO: 531305 - DNA, 25 bp, Homo sapien
gacctgcttgaaggttcttcctgcc

SEQ ID NO: 531306 - DNA, 25 bp, Homo sapien
gggatttacatcacagcacaactgt

SEQ ID NO: 531307 - DNA, 25 bp, Homo sapien
gacgagttcagatgggcaataacag

SEQ ID NO: 531308 - DNA, 25 bp, Homo sapien
tcctgccttagaccttgctcagctg

SEQ ID NO: 531309 - DNA, 25 bp, Homo sapien
tatcagcgctccaagtttgtttttg

SEQ ID NO: 531310 - DNA, 25 bp, Homo sapien
gccgagggtgcactagccagatatt

SEQ ID NO: 531311 - DNA, 25 bp, Homo sapien
agagtcttccctatcagaccccggg

SEQ ID NO: 531312 - DNA, 25 bp, Homo sapien
ctttgcaaaacggattgggcgggat

SEQ ID NO: 531313 - DNA, 25 bp, Homo sapien
aattcctcatgacttagcgtcccag

SEQ ID NO: 531314 - DNA, 25 bp, Homo sapien
tgtatagccccgttaagtgcacccc

SEQ ID NO: 531315 - DNA, 25 bp, Homo sapien
aaggcgcctggacccacgccaggtt

SEQ ID NO: 531316 - DNA, 25 bp, Homo sapien
ttctgggtagaagcacgtccgggcc

SEQ ID NO: 531317 - DNA, 25 bp, Homo sapien
ccggtggtcgtctgactttctgttt

SEQ ID NO: 531318 - DNA, 25 bp, Homo sapien
tactccggtggtcgtctgactttct

SEQ ID NO: 531319 - DNA, 25 bp, Homo sapien
agaattggagtactccggtggtcgt

SEQ ID NO: 531320 - DNA, 25 bp, Homo sapien
tggagtactccggtggtcgtctgac

SEQ ID NO: 531321 - DNA, 25 bp, Homo sapien
cactgcatctgaagtccatttgtgg

SEQ ID NO: 531322 - DNA, 25 bp, Homo sapien
tcacgcgatgcaacagttgggaagt

SEQ ID NO: 531323 - DNA, 25 bp, Homo sapien
gaagtattttcttccgggcgtgcac

SEQ ID NO: 531324 - DNA, 25 bp, Homo sapien
catttgtgggagaggccgaccagaa

SEQ ID NO: 531325 - DNA, 25 bp, Homo sapien
cggctcaggagctttgcggcgtttc

SEQ ID NO: 531326 - DNA, 25 bp, Homo sapien
gcggcgtttccttagaacaataatg

SEQ ID NO: 531327 - DNA, 25 bp, Homo sapien
gaagcgcagggtcctgagtgtccat

SEQ ID NO: 531328 - DNA, 25 bp, Homo sapien
tgtccattgcccacaggatactcgg

SEQ ID NO: 531329 - DNA, 25 bp, Homo sapien
gattgatggagcgtaactctttaga

SEQ ID NO: 531330 - DNA, 25 bp, Homo sapien
ctgtagtgattgatggagcgtaact

SEQ ID NO: 531331 - DNA, 25 bp, Homo sapien
tagtgattgatggagcgtaactctt

SEQ ID NO: 531332 - DNA, 25 bp, Homo sapien
gatggagcgtaactctttagaggaa

SEQ ID NO: 531333 - DNA, 25 bp, Homo sapien
acagtctgttcttgattatccatac

SEQ ID NO: 531334 - DNA, 25 bp, Homo sapien
gatacagtctgttcttgattatcca

SEQ ID NO: 531335 - DNA, 25 bp, Homo sapien
aagatacagtctgttcttgattatc

SEQ ID NO: 531336 - DNA, 25 bp, Homo sapien
tacagtctgttcttgattatccata

SEQ ID NO: 531337 - DNA, 25 bp, Homo sapien
tgagcatcttgcctggagatggaat

SEQ ID NO: 531338 - DNA, 25 bp, Homo sapien
caaagggtttcattaacatagacag

SEQ ID NO: 531339 - DNA, 25 bp, Homo sapien
gctgccgtgcagtctgatactgagc

SEQ ID NO: 531340 - DNA, 25 bp, Homo sapien
attaaccagcaagggtagaaccgct

SEQ ID NO: 531341 - DNA, 25 bp, Homo sapien
ccactgtcctccgtgcgcggagtgt

SEQ ID NO: 531342 - DNA, 25 bp, Homo sapien
aaccaaggcgtgcccgcccaaggtg

SEQ ID NO: 531343 - DNA, 25 bp, Homo sapien
ctggcgtcactaaccaaggcgtgcc

SEQ ID NO: 531344 - DNA, 25 bp, Homo sapien
cctccgtgcgcggagtgtcgctgaa

SEQ ID NO: 531345 - DNA, 25 bp, Homo sapien
gtcgggcaaactccgccctgtctgt

SEQ ID NO: 531346 - DNA, 25 bp, Homo sapien
agttcctcctgtcgggcaaactccg

SEQ ID NO: 531347 - DNA, 25 bp, Homo sapien
tgtcgggcaaactccgccctgtctg

SEQ ID NO: 531348 - DNA, 25 bp, Homo sapien
gagcccgagttcctcctgtcgggca

SEQ ID NO: 531349 - DNA, 25 bp, Homo sapien
gcttccaaagacagggctgggcccg

SEQ ID NO: 531350 - DNA, 25 bp, Homo sapien
tcttcgccagcaagtgtgggcttcc

SEQ ID NO: 531351 - DNA, 25 bp, Homo sapien
gtgggcttccaaagacagggctggg

SEQ ID NO: 531352 - DNA, 25 bp, Homo sapien
agggcccgccgtccttcttcgccag

SEQ ID NO: 531353 - DNA, 25 bp, Homo sapien
gtggaggcagccccatgtcgggctg

SEQ ID NO: 531354 - DNA, 25 bp, Homo sapien
ggcagccccatgtcgggctgaagag

SEQ ID NO: 531355 - DNA, 25 bp, Homo sapien
tggaggcagccccatgtcgggctga

SEQ ID NO: 531356 - DNA, 25 bp, Homo sapien
aggcagccccatgtcgggctgaaga

SEQ ID NO: 531357 - DNA, 25 bp, Homo sapien
actccgcatctctactttccgagcg

SEQ ID NO: 531358 - DNA, 25 bp, Homo sapien
gcatctctactttccgagcgcagcg

SEQ ID NO: 531359 - DNA, 25 bp, Homo sapien
cagcgcgcacgggttccggtgggtg

SEQ ID NO: 531360 - DNA, 25 bp, Homo sapien
tgaagtcgctcgagggcagggtgtg

SEQ ID NO: 531361 - DNA, 25 bp, Homo sapien
tggcagcatgctcggcccctcgtga

SEQ ID NO: 531362 - DNA, 25 bp, Homo sapien
gaatgagccccatttcccgagagca

SEQ ID NO: 531363 - DNA, 25 bp, Homo sapien
tggctgaacaggtcggctgtgccct

SEQ ID NO: 531364 - DNA, 25 bp, Homo sapien
tgagcgctggtctttctgaatgtaa

SEQ ID NO: 531365 - DNA, 25 bp, Homo sapien
tggacttggagagtcagctattaag

SEQ ID NO: 531366 - DNA, 25 bp, Homo sapien
gacactgggaggtttgttccctgga

SEQ ID NO: 531367 - DNA, 25 bp, Homo sapien
gaggcgcatcccctcactcggaagg

SEQ ID NO: 531368 - DNA, 25 bp, Homo sapien
tcagctattaagcaccggcgggctt

SEQ ID NO: 531369 - DNA, 25 bp, Homo sapien
tcctgcacgcagccctgggttccct

SEQ ID NO: 531370 - DNA, 25 bp, Homo sapien
ctgcacgcagccctgggttccctgc

SEQ ID NO: 531371 - DNA, 25 bp, Homo sapien
cttcctgcacgcagccctgggttcc

SEQ ID NO: 531372 - DNA, 25 bp, Homo sapien
gcacgcagccctgggttccctgcac

SEQ ID NO: 531373 - DNA, 25 bp, Homo sapien
ctttcgcttggaccttaagtccttg

SEQ ID NO: 531374 - DNA, 25 bp, Homo sapien
accttaagtccttgatggccgtgtc

SEQ ID NO: 531375 - DNA, 25 bp, Homo sapien
cttgagctttcgcttggaccttaag

SEQ ID NO: 531376 - DNA, 25 bp, Homo sapien
cttaagtccttgatggccgtgtcca

SEQ ID NO: 531377 - DNA, 25 bp, Homo sapien
ttcggagctctccttctcgtccagg

SEQ ID NO: 531378 - DNA, 25 bp, Homo sapien
aggtgcctcacctcgtctgtcttac

SEQ ID NO: 531379 - DNA, 25 bp, Homo sapien
cttgtcttcggagctctccttctcg

SEQ ID NO: 531380 - DNA, 25 bp, Homo sapien
cgtccaggtgcctcacctcgtctgt

SEQ ID NO: 531381 - DNA, 25 bp, Homo sapien
ctgcgtcatgcgagtgtcgccgggc

SEQ ID NO: 531382 - DNA, 25 bp, Homo sapien
tgcgtcatgcgagtgtcgccgggcc

SEQ ID NO: 531383 - DNA, 25 bp, Homo sapien
gccttgagggtcaaaacgtctggat

SEQ ID NO: 531384 - DNA, 25 bp, Homo sapien
gctcagcagcgggtccggtgtttta

SEQ ID NO: 531385 - DNA, 25 bp, Homo sapien
aaactccccgactatgccttgaggg

SEQ ID NO: 531386 - DNA, 25 bp, Homo sapien
tggatttcctgatcgatgctgtcgt

SEQ ID NO: 531387 - DNA, 25 bp, Homo sapien
gcttccgcgcgcgtcagttcagcgg

SEQ ID NO: 531388 - DNA, 25 bp, Homo sapien
ccggcagggtagtcttggaaatgcc

SEQ ID NO: 531389 - DNA, 25 bp, Homo sapien
cgcgtcagttcagcggacgtgtctg

SEQ ID NO: 531390 - DNA, 25 bp, Homo sapien
aaatgcccaagattgcttccgcgcg

SEQ ID NO: 531391 - DNA, 25 bp, Homo sapien
ccttgcgtgtttgccgcagctagta

SEQ ID NO: 531392 - DNA, 25 bp, Homo sapien
ggaatggtcagcgtctaggcacccc

SEQ ID NO: 531393 - DNA, 25 bp, Homo sapien
ggtctcgcgcaaggcacttttttgt

SEQ ID NO: 531394 - DNA, 25 bp, Homo sapien
tctacaaactcgttcctggaagccg

SEQ ID NO: 531395 - DNA, 25 bp, Homo sapien
gcctgcgccgcacttgtgacttgct

SEQ ID NO: 531396 - DNA, 25 bp, Homo sapien
ttggtcgtgaccctggacttgaggc

SEQ ID NO: 531397 - DNA, 25 bp, Homo sapien
cgatgcgccacctttgcggctagct

SEQ ID NO: 531398 - DNA, 25 bp, Homo sapien
gcggctagctcttcgtgggatttca

SEQ ID NO: 531399 - DNA, 25 bp, Homo sapien
cttaatgctctgctcgaaggagtcg

SEQ ID NO: 531400 - DNA, 25 bp, Homo sapien
ctcgaaggagtcgttgctgctcgct

SEQ ID NO: 531401 - DNA, 25 bp, Homo sapien
agctgttctatttccgccttaatgc

SEQ ID NO: 531402 - DNA, 25 bp, Homo sapien
ttcagaagctgttctatttccgcct

SEQ ID NO: 531403 - DNA, 25 bp, Homo sapien
aaggcagaaccctagtcctcactgg

SEQ ID NO: 531404 - DNA, 25 bp, Homo sapien
gaaggcagaaccctagtcctcactg

SEQ ID NO: 531405 - DNA, 25 bp, Homo sapien
ggaaggcagaaccctagtcctcact

SEQ ID NO: 531406 - DNA, 25 bp, Homo sapien
gggcactgccgtgagatagttctgg

SEQ ID NO: 531407 - DNA, 25 bp, Homo sapien
ctgccgtgagatagttctggcttac

SEQ ID NO: 531408 - DNA, 25 bp, Homo sapien
gcactgccgtgagatagttctggct

SEQ ID NO: 531409 - DNA, 25 bp, Homo sapien
cactgccgtgagatagttctggctt

SEQ ID NO: 531410 - DNA, 25 bp, Homo sapien
cgggctgtgcggctccactctttgc

SEQ ID NO: 531411 - DNA, 25 bp, Homo sapien
ggaaggctgggctgcgcctggctgg

SEQ ID NO: 531412 - DNA, 25 bp, Homo sapien
tgccagccccgggctgtgcggctcc

SEQ ID NO: 531413 - DNA, 25 bp, Homo sapien
ctgggctgcgcctggctggcccctg

SEQ ID NO: 531414 - DNA, 25 bp, Homo sapien
ggtactcccggatggcttccgcaat

SEQ ID NO: 531415 - DNA, 25 bp, Homo sapien
actcccggatggcttccgcaatgtc

SEQ ID NO: 531416 - DNA, 25 bp, Homo sapien
cggatggcttccgcaatgtcccggt

SEQ ID NO: 531417 - DNA, 25 bp, Homo sapien
taggtactcccggatggcttccgca

SEQ ID NO: 531418 - DNA, 25 bp, Homo sapien
cctcatggggtcaaagtcagcaaca

SEQ ID NO: 531419 - DNA, 25 bp, Homo sapien
catggggtcaaagtcagcaacaaga

SEQ ID NO: 531420 - DNA, 25 bp, Homo sapien
gggccaaagtctgcagtttcctcct

SEQ ID NO: 531421 - DNA, 25 bp, Homo sapien
tccctcatggggtcaaagtcagcaa

SEQ ID NO: 531422 - DNA, 25 bp, Homo sapien
actggggagcaacccctggagtagc

SEQ ID NO: 531423 - DNA, 25 bp, Homo sapien
tggagtagcgttcctgagaaacatt

SEQ ID NO: 531424 - DNA, 25 bp, Homo sapien
cacaggcaggcaatgcgggctgctc

SEQ ID NO: 531425 - DNA, 25 bp, Homo sapien
cagctggcttggcgtctgccctgtg

SEQ ID NO: 531426 - DNA, 25 bp, Homo sapien
caaggataaggcctttatcactccg

SEQ ID NO: 531427 - DNA, 25 bp, Homo sapien
caactaggtcgactgtgaaactgca

SEQ ID NO: 531428 - DNA, 25 bp, Homo sapien
cagtgtccccaaacgccccaaggat

SEQ ID NO: 531429 - DNA, 25 bp, Homo sapien
taaggcctttatcactccgacgcat

SEQ ID NO: 531430 - DNA, 25 bp, Homo sapien
taaagagcggatctctgttgctctc

SEQ ID NO: 531431 - DNA, 25 bp, Homo sapien
caaatcatggtagttggagtatcca

SEQ ID NO: 531432 - DNA, 25 bp, Homo sapien
tgtattgtgactatatagtgtttcc

SEQ ID NO: 531433 - DNA, 25 bp, Homo sapien
tccatagaacactagatcttgttcc

SEQ ID NO: 531434 - DNA, 25 bp, Homo sapien
tcttatgattcgcttcaagttctgg

SEQ ID NO: 531435 - DNA, 25 bp, Homo sapien
gttttcttatgattcgcttcaagtt

SEQ ID NO: 531436 - DNA, 25 bp, Homo sapien
caaattcacaaagtatgtgtggtga

SEQ ID NO: 531437 - DNA, 25 bp, Homo sapien
aattcacaaagtatgtgtggtgaga

SEQ ID NO: 531438 - DNA, 25 bp, Homo sapien
actgaaagagtttttggagcaagag

SEQ ID NO: 531439 - DNA, 25 bp, Homo sapien
gaaagagtttttggagcaagagttg

SEQ ID NO: 531440 - DNA, 25 bp, Homo sapien
ctgaaagagtttttggagcaagagt

SEQ ID NO: 531441 - DNA, 25 bp, Homo sapien
tgaaagagtttttggagcaagagtt

SEQ ID NO: 531442 - DNA, 25 bp, Homo sapien
cagctgatcgcttctcagcgctgcg

SEQ ID NO: 531443 - DNA, 25 bp, Homo sapien
gctcattgcgacttttccggcttct

SEQ ID NO: 531444 - DNA, 25 bp, Homo sapien
attgcgacttttccggcttctcctc

SEQ ID NO: 531445 - DNA, 25 bp, Homo sapien
gctccagctcattgcgacttttccg

SEQ ID NO: 531446 - DNA, 25 bp, Homo sapien
ccagctcattgcgacttttccggct

SEQ ID NO: 531447 - DNA, 25 bp, Homo sapien
ctgttccgcaggcaactacagatct

SEQ ID NO: 531448 - DNA, 25 bp, Homo sapien
tattcaatgcatccttttgagtctg

SEQ ID NO: 531449 - DNA, 25 bp, Homo sapien
tgcacagttcaatacgttttaacag

SEQ ID NO: 531450 - DNA, 25 bp, Homo sapien
cattgtagggatataccccaattta

SEQ ID NO: 531451 - DNA, 25 bp, Homo sapien
tgggtattgtttcacattgagtaga

SEQ ID NO: 531452 - DNA, 25 bp, Homo sapien
tatgaatcgaccaaaatgtcaacag

SEQ ID NO: 531453 - DNA, 25 bp, Homo sapien
ctttgggtattgtttcacattgagt

SEQ ID NO: 531454 - DNA, 25 bp, Homo sapien
taaaatatgaatcgaccaaaatgtc

SEQ ID NO: 531455 - DNA, 25 bp, Homo sapien
aaacaactgatattcacagctgaag

SEQ ID NO: 531456 - DNA, 25 bp, Homo sapien
taatggcaatattggcaagtgcttc

SEQ ID NO: 531457 - DNA, 25 bp, Homo sapien
ggatatactctgattatgactgtgt

SEQ ID NO: 531458 - DNA, 25 bp, Homo sapien
tggtacaatattatttaggcccctg

SEQ ID NO: 531459 - DNA, 25 bp, Homo sapien
cactcacaggtctggcatcttaccg

SEQ ID NO: 531460 - DNA, 25 bp, Homo sapien
tctccgactatgtgtcagcaggtgc

SEQ ID NO: 531461 - DNA, 25 bp, Homo sapien
ggagctatagggtccacttccaaga

SEQ ID NO: 531462 - DNA, 25 bp, Homo sapien
tcctccctccctagagtggttagaa

SEQ ID NO: 531463 - DNA, 25 bp, Homo sapien
ttccagtactcttcattccttgtgt

SEQ ID NO: 531464 - DNA, 25 bp, Homo sapien
tccagtactcttcattccttgtgta

SEQ ID NO: 531465 - DNA, 25 bp, Homo sapien
gatcctaattagtgtggcttctgaa

SEQ ID NO: 531466 - DNA, 25 bp, Homo sapien
gagaaataggagaaatcgatcctaa

SEQ ID NO: 531467 - DNA, 25 bp, Homo sapien
tcaaatcttaactggaattgtgagg

SEQ ID NO: 531468 - DNA, 25 bp, Homo sapien
tgaggaagggctctagaattctgga

SEQ ID NO: 531469 - DNA, 25 bp, Homo sapien
cacatattttaacggggtcttctga

SEQ ID NO: 531470 - DNA, 25 bp, Homo sapien
gaaaataaacgtttgcacatttcag

SEQ ID NO: 531471 - DNA, 25 bp, Homo sapien
cacttttagattggcatctgattta

SEQ ID NO: 531472 - DNA, 25 bp, Homo sapien
tcagacacctttaatagtgtacact

SEQ ID NO: 531473 - DNA, 25 bp, Homo sapien
tgaagtaaaccgagacttctgtaac

SEQ ID NO: 531474 - DNA, 25 bp, Homo sapien
aaattgaagtaaaccgagacttctg

SEQ ID NO: 531475 - DNA, 25 bp, Homo sapien
gtaaaccgagacttctgtaacagac

SEQ ID NO: 531476 - DNA, 25 bp, Homo sapien
aagtaaaccgagacttctgtaacag

SEQ ID NO: 531477 - DNA, 25 bp, Homo sapien
cttgaaattcttgaggactttccac

SEQ ID NO: 531478 - DNA, 25 bp, Homo sapien
gaaattcttgaggactttccacagc

SEQ ID NO: 531479 - DNA, 25 bp, Homo sapien
aattcttgaggactttccacagctt

SEQ ID NO: 531480 - DNA, 25 bp, Homo sapien
tgaaattcttgaggactttccacag

SEQ ID NO: 531481 - DNA, 25 bp, Homo sapien
tgcttgccttgccaccattaagtaa

SEQ ID NO: 531482 - DNA, 25 bp, Homo sapien
tgttagccctatttctccagccact

SEQ ID NO: 531483 - DNA, 25 bp, Homo sapien
cagggcctttgcctgtggtgcttgc

SEQ ID NO: 531484 - DNA, 25 bp, Homo sapien
catggcatataagtacgtgtaagat

SEQ ID NO: 531485 - DNA, 25 bp, Homo sapien
tctgttatgtattgctttatgaaga

SEQ ID NO: 531486 - DNA, 25 bp, Homo sapien
ccatgtttgttatctgttatgtatt

SEQ ID NO: 531487 - DNA, 25 bp, Homo sapien
cacaaagtacaacactagcaaagga

SEQ ID NO: 531488 - DNA, 25 bp, Homo sapien
tgttctggtacactttttttccata

SEQ ID NO: 531489 - DNA, 25 bp, Homo sapien
gaaattgggtgcattatatacagaa

SEQ ID NO: 531490 - DNA, 25 bp, Homo sapien
aagcataccatatagatagcatctg

SEQ ID NO: 531491 - DNA, 25 bp, Homo sapien
tcttgactgtgatgtaagtgcacct

SEQ ID NO: 531492 - DNA, 25 bp, Homo sapien
gctttctacaaattgcctacacaga

SEQ ID NO: 531493 - DNA, 25 bp, Homo sapien
ctcatttgttaatcatagtttaaga

SEQ ID NO: 531494 - DNA, 25 bp, Homo sapien
ttctcatttgttaatcatagtttaa

SEQ ID NO: 531495 - DNA, 25 bp, Homo sapien
gaaatatgattagtagttttaattc

SEQ ID NO: 531496 - DNA, 25 bp, Homo sapien
tagtttaagaaatatgattagtagt

SEQ ID NO: 531497 - DNA, 25 bp, Homo sapien
tacagattggcaccacataatttaa

SEQ ID NO: 531498 - DNA, 25 bp, Homo sapien
gacattacagattggcaccacataa

SEQ ID NO: 531499 - DNA, 25 bp, Homo sapien
aggaattcaaagacattacagattg

SEQ ID NO: 531500 - DNA, 25 bp, Homo sapien
gattggcaccacataatttaagtca

SEQ ID NO: 531501 - DNA, 25 bp, Homo sapien
aatcagatggagtggatacacaaat

SEQ ID NO: 531502 - DNA, 25 bp, Homo sapien
tggagtggatacacaaataaaatac

SEQ ID NO: 531503 - DNA, 25 bp, Homo sapien
tggaggtggaaaaatagtttgtcca

SEQ ID NO: 531504 - DNA, 25 bp, Homo sapien
tcagatggagtggatacacaaataa

SEQ ID NO: 531505 - DNA, 25 bp, Homo sapien
ttgaaagttctgtcccagtgagtcc

SEQ ID NO: 531506 - DNA, 25 bp, Homo sapien
tgaaggaacttgaaagttctgtccc

SEQ ID NO: 531507 - DNA, 25 bp, Homo sapien
acacttttcacagttgaaggaactt

SEQ ID NO: 531508 - DNA, 25 bp, Homo sapien
cccagtgagtcctaatggttttatt

SEQ ID NO: 531509 - DNA, 25 bp, Homo sapien
taaggtctgtaggttatgctgaata

SEQ ID NO: 531510 - DNA, 25 bp, Homo sapien
tcaggcagcagattcattgtcaaat

SEQ ID NO: 531511 - DNA, 25 bp, Homo sapien
atatcttactttttaaggtctgtag

SEQ ID NO: 531512 - DNA, 25 bp, Homo sapien
gctgaataaaattctctgcaccatg

SEQ ID NO: 531513 - DNA, 25 bp, Homo sapien
attgggtacattgtccttactgctg

SEQ ID NO: 531514 - DNA, 25 bp, Homo sapien
gattgatattgtaaggaacaaaaca

SEQ ID NO: 531515 - DNA, 25 bp, Homo sapien
aaacagcaatacagagagtgattgg

SEQ ID NO: 531516 - DNA, 25 bp, Homo sapien
gaattctgaattgtgtccgatgtaa

SEQ ID NO: 531517 - DNA, 25 bp, Homo sapien
taaaaaatcccactatttcgatgaa

SEQ ID NO: 531518 - DNA, 25 bp, Homo sapien
gaaaattacaatccttgagagatat

SEQ ID NO: 531519 - DNA, 25 bp, Homo sapien
ttttgcttctacttaatgtaacagg

SEQ ID NO: 531520 - DNA, 25 bp, Homo sapien
tagcaccatactagaacaagttaca

SEQ ID NO: 531521 - DNA, 25 bp, Homo sapien
gatcacagttaaccacacgccagtg

SEQ ID NO: 531522 - DNA, 25 bp, Homo sapien
taagaacagaatgcttccgtacatg

SEQ ID NO: 531523 - DNA, 25 bp, Homo sapien
tagactgaacaaaaacggcgggtgc

SEQ ID NO: 531524 - DNA, 25 bp, Homo sapien
gggtagacaattgccagaaatcgat

SEQ ID NO: 531525 - DNA, 25 bp, Homo sapien
caaagtaaatctccaaatggccaat

SEQ ID NO: 531526 - DNA, 25 bp, Homo sapien
gaaatcttacaaagtaaatctccaa

SEQ ID NO: 531527 - DNA, 25 bp, Homo sapien
tcttacaaagtaaatctccaaatgg

SEQ ID NO: 531528 - DNA, 25 bp, Homo sapien
cagaaatcttacaaagtaaatctcc

SEQ ID NO: 531529 - DNA, 25 bp, Homo sapien
ggcaacacaattggatattaaccca

SEQ ID NO: 531530 - DNA, 25 bp, Homo sapien
gtctgacattgccaagttaatcatg

SEQ ID NO: 531531 - DNA, 25 bp, Homo sapien
gttaatcatgtaagttgtagtttca

SEQ ID NO: 531532 - DNA, 25 bp, Homo sapien
ttcatttcggactttgaggacgcag

SEQ ID NO: 531533 - DNA, 25 bp, Homo sapien
gaacatgcacccatacaaagtgtac

SEQ ID NO: 531534 - DNA, 25 bp, Homo sapien
gctgaacatgcacccatacaaagtg

SEQ ID NO: 531535 - DNA, 25 bp, Homo sapien
cttaaaggagtcattatagaagcag

SEQ ID NO: 531536 - DNA, 25 bp, Homo sapien
caaagtgtacttaaaggagtcatta

SEQ ID NO: 531537 - DNA, 25 bp, Homo sapien
tgccagttgtatcttgaggtcgctt

SEQ ID NO: 531538 - DNA, 25 bp, Homo sapien
acagtcaacgagtccaacccatagg

SEQ ID NO: 531539 - DNA, 25 bp, Homo sapien
tgttttcctgcagtggatcccagat

SEQ ID NO: 531540 - DNA, 25 bp, Homo sapien
aatttccgctgggttcttcaacagg

SEQ ID NO: 531541 - DNA, 25 bp, Homo sapien
aaaggcttcctagatttgtaatatg

SEQ ID NO: 531542 - DNA, 25 bp, Homo sapien
gaagaggctgggtttggacaaagaa

SEQ ID NO: 531543 - DNA, 25 bp, Homo sapien
ggcttcctagatttgtaatatgaca

SEQ ID NO: 531544 - DNA, 25 bp, Homo sapien
agaaactttcagcccagtttgtttg

SEQ ID NO: 531545 - DNA, 25 bp, Homo sapien
ttgccagttgtttctactgaggaag

SEQ ID NO: 531546 - DNA, 25 bp, Homo sapien
attttgttgccagttgtttctactg

SEQ ID NO: 531547 - DNA, 25 bp, Homo sapien
gccagttgtttctactgaggaagag

SEQ ID NO: 531548 - DNA, 25 bp, Homo sapien
tgttgccagttgtttctactgagga

SEQ ID NO: 531549 - DNA, 25 bp, Homo sapien
aggaagaagataattgaatactgca

SEQ ID NO: 531550 - DNA, 25 bp, Homo sapien
aggaacgatgcattccggcccagac

SEQ ID NO: 531551 - DNA, 25 bp, Homo sapien
cccagactctatgccttttccgtga

SEQ ID NO: 531552 - DNA, 25 bp, Homo sapien
ggaatgtgccacgaggaacgatgca

SEQ ID NO: 531553 - DNA, 25 bp, Homo sapien
gtgatcttcacaacccttagaccag

SEQ ID NO: 531554 - DNA, 25 bp, Homo sapien
gcaacctctgctggtgatatccaga

SEQ ID NO: 531555 - DNA, 25 bp, Homo sapien
ccagctgccgtctggtgggtgcccc

SEQ ID NO: 531556 - DNA, 25 bp, Homo sapien
ggagagctccagctgccgtctggtg

SEQ ID NO: 531557 - DNA, 25 bp, Homo sapien
aacctctgctggtgatatccagaca

SEQ ID NO: 531558 - DNA, 25 bp, Homo sapien
agcctggtgacagatcaagaccttg

SEQ ID NO: 531559 - DNA, 25 bp, Homo sapien
tcagcctggtgacagatcaagacct

SEQ ID NO: 531560 - DNA, 25 bp, Homo sapien
ctgggtgtggtgatgtcaacctgtg

SEQ ID NO: 531561 - DNA, 25 bp, Homo sapien
gtgtggtgatgtcaacctgtggtcc

SEQ ID NO: 531562 - DNA, 25 bp, Homo sapien
ttcagtcattttgcatgcagcaaat

SEQ ID NO: 531563 - DNA, 25 bp, Homo sapien
tttgccatggtgaaatgtgacttcc

SEQ ID NO: 531564 - DNA, 25 bp, Homo sapien
taatttacacttatgcaaaaagcag

SEQ ID NO: 531565 - DNA, 25 bp, Homo sapien
ccatctcttaatttacacttatgca

SEQ ID NO: 531566 - DNA, 25 bp, Homo sapien
gacttctagtcaaatgttctcgtag

SEQ ID NO: 531567 - DNA, 25 bp, Homo sapien
gtatatagtttagctctccttccag

SEQ ID NO: 531568 - DNA, 25 bp, Homo sapien
tccagtcactcaagtacaacttagg

SEQ ID NO: 531569 - DNA, 25 bp, Homo sapien
gttctcgtagtaacaggtagctttc

SEQ ID NO: 531570 - DNA, 25 bp, Homo sapien
gtcacgtggtgacaataggagcaag

SEQ ID NO: 531571 - DNA, 25 bp, Homo sapien
gatctcttgtgaactaactgagcga

SEQ ID NO: 531572 - DNA, 25 bp, Homo sapien
tgagcgagagctcggttatcaccaa

SEQ ID NO: 531573 - DNA, 25 bp, Homo sapien
tatattaatggcagaagtcggaggg

SEQ ID NO: 531574 - DNA, 25 bp, Homo sapien
gcacacttcaacacgagtcatcttc

SEQ ID NO: 531575 - DNA, 25 bp, Homo sapien
gggagcacacttcaacacgagtcat

SEQ ID NO: 531576 - DNA, 25 bp, Homo sapien
agcacacttcaacacgagtcatctt

SEQ ID NO: 531577 - DNA, 25 bp, Homo sapien
cacacttcaacacgagtcatcttct

SEQ ID NO: 531578 - DNA, 25 bp, Homo sapien
gaattcttttgctcccagtagtgaa

SEQ ID NO: 531579 - DNA, 25 bp, Homo sapien
taggaaacttggtccatagcttagg

SEQ ID NO: 531580 - DNA, 25 bp, Homo sapien
caagttcggtgctttgaaatgactc

SEQ ID NO: 531581 - DNA, 25 bp, Homo sapien
cctggaagctgcatgcttgtggcta

SEQ ID NO: 531582 - DNA, 25 bp, Homo sapien
catttgatagacctcaaatttgcct

SEQ ID NO: 531583 - DNA, 25 bp, Homo sapien
gtcttctgtcagctattgaatgtgt

SEQ ID NO: 531584 - DNA, 25 bp, Homo sapien
cgtatcatcactttagcccaaatgc

SEQ ID NO: 531585 - DNA, 25 bp, Homo sapien
gcctgagtttttagtgttccagaaa

SEQ ID NO: 531586 - DNA, 25 bp, Homo sapien
tctgggggccacaccctccagaaac

SEQ ID NO: 531587 - DNA, 25 bp, Homo sapien
tcctgaataattgagccttggtgat

SEQ ID NO: 531588 - DNA, 25 bp, Homo sapien
cattgtcagcaacacataagactct

SEQ ID NO: 531589 - DNA, 25 bp, Homo sapien
tacatgctcttccagtcaccatagc

SEQ ID NO: 531590 - DNA, 25 bp, Homo sapien
tcatgtagactttcaaactgagctc

SEQ ID NO: 531591 - DNA, 25 bp, Homo sapien
taacacagtatatcccaagtgcact

SEQ ID NO: 531592 - DNA, 25 bp, Homo sapien
tgtgtcctatctatcttccaaatgc

SEQ ID NO: 531593 - DNA, 25 bp, Homo sapien
caatttgattgactgcccattcacc

SEQ ID NO: 531594 - DNA, 25 bp, Homo sapien
ccagatcttaggtatagaggaccct

SEQ ID NO: 531595 - DNA, 25 bp, Homo sapien
aaattgctatgttactattttctac

SEQ ID NO: 531596 - DNA, 25 bp, Homo sapien
tgctttattgcttttttgtattggt

SEQ ID NO: 531597 - DNA, 25 bp, Homo sapien
taaataatgcttcagatattattgc

SEQ ID NO: 531598 - DNA, 25 bp, Homo sapien
tttctacaattaatagtttgtctat

SEQ ID NO: 531599 - DNA, 25 bp, Homo sapien
gactttatccgagtaactgcttgat

SEQ ID NO: 531600 - DNA, 25 bp, Homo sapien
cttgataagagcataatatatccaa

SEQ ID NO: 531601 - DNA, 25 bp, Homo sapien
tacatctaagagacatgaggttgac

SEQ ID NO: 531602 - DNA, 25 bp, Homo sapien
tatttgtggtctagggtgggctttc

SEQ ID NO: 531603 - DNA, 25 bp, Homo sapien
tatactggtgccaggttaagagacc

SEQ ID NO: 531604 - DNA, 25 bp, Homo sapien
ccttgggccttgacaatttaattgc

SEQ ID NO: 531605 - DNA, 25 bp, Homo sapien
gattatgtaaggcagatcagcccag

SEQ ID NO: 531606 - DNA, 25 bp, Homo sapien
tataccagaagaatatgaacctcaa

SEQ ID NO: 531607 - DNA, 25 bp, Homo sapien
caagctatctatgtggtatcagcca

SEQ ID NO: 531608 - DNA, 25 bp, Homo sapien
tttaggcagacaaagaccactcacc

SEQ ID NO: 531609 - DNA, 25 bp, Homo sapien
tgagaccagggtaccaaaggtgtcc

SEQ ID NO: 531610 - DNA, 25 bp, Homo sapien
aatgtggtaaggacagacagcactc

SEQ ID NO: 531611 - DNA, 25 bp, Homo sapien
cagatggtttatgcaaaacctgaag

SEQ ID NO: 531612 - DNA, 25 bp, Homo sapien
tactacagtcagatggtttatgcaa

SEQ ID NO: 531613 - DNA, 25 bp, Homo sapien
aggctccaactctgcttgctttgct

SEQ ID NO: 531614 - DNA, 25 bp, Homo sapien
cagtcagatggtttatgcaaaacct

SEQ ID NO: 531615 - DNA, 25 bp, Homo sapien
caagtatgaatcatctatgcttgta

SEQ ID NO: 531616 - DNA, 25 bp, Homo sapien
tgaaaatcgctaaaacaagttaggc

SEQ ID NO: 531617 - DNA, 25 bp, Homo sapien
catggtaatacctaaagaatagtca

SEQ ID NO: 531618 - DNA, 25 bp, Homo sapien
caatgcaacatagcatgaaaatcgc

SEQ ID NO: 531619 - DNA, 25 bp, Homo sapien
tacctttgtctagtgacagtatttg

SEQ ID NO: 531620 - DNA, 25 bp, Homo sapien
tgagtgtgtgaattccttggtacct

SEQ ID NO: 531621 - DNA, 25 bp, Homo sapien
ttcccagagataggcatgtgagtgt

SEQ ID NO: 531622 - DNA, 25 bp, Homo sapien
tcttcccagagataggcatgtgagt

SEQ ID NO: 531623 - DNA, 25 bp, Homo sapien
tgtaatgcactctgggccaaagaat

SEQ ID NO: 531624 - DNA, 25 bp, Homo sapien
ctgggccaaagaataatgctgtaat

SEQ ID NO: 531625 - DNA, 25 bp, Homo sapien
tctcttgattagaactataacttga

SEQ ID NO: 531626 - DNA, 25 bp, Homo sapien
ctataacttgaaaatcagaatgagg

SEQ ID NO: 531627 - DNA, 25 bp, Homo sapien
cacacacattagagtgtgtctggag

SEQ ID NO: 531628 - DNA, 25 bp, Homo sapien
tggctgggcagtttgatgcctcaca

SEQ ID NO: 531629 - DNA, 25 bp, Homo sapien
tgtctggagttaggtggctgggcag

SEQ ID NO: 531630 - DNA, 25 bp, Homo sapien
ctacaccacacacattagagtgtgt

SEQ ID NO: 531631 - DNA, 25 bp, Homo sapien
caaatgccccaaagctcttcctttt

SEQ ID NO: 531632 - DNA, 25 bp, Homo sapien
tcaaatgccccaaagctcttccttt

SEQ ID NO: 531633 - DNA, 25 bp, Homo sapien
ctcaaatgccccaaagctcttcctt

SEQ ID NO: 531634 - DNA, 25 bp, Homo sapien
tgcgctaaaactgcttgccaaggcc

SEQ ID NO: 531635 - DNA, 25 bp, Homo sapien
tcttcaaacctgtctcacgtcactg

SEQ ID NO: 531636 - DNA, 25 bp, Homo sapien
cagcatctggtgtggttcggacttc

SEQ ID NO: 531637 - DNA, 25 bp, Homo sapien
ttctcagtcctcgtgcagacgtgcc

SEQ ID NO: 531638 - DNA, 25 bp, Homo sapien
gatgccttgcttgatagtttgttgg

SEQ ID NO: 531639 - DNA, 25 bp, Homo sapien
attctcctcgcagatgccttgcttg

SEQ ID NO: 531640 - DNA, 25 bp, Homo sapien
tgtgcatcatacttcaccgcagccg

SEQ ID NO: 531641 - DNA, 25 bp, Homo sapien
gccgagagcagagcgatggcattct

SEQ ID NO: 531642 - DNA, 25 bp, Homo sapien
ccacggtggtgatgatttgattctt

SEQ ID NO: 531643 - DNA, 25 bp, Homo sapien
tgctccacggtggtgatgatttgat

SEQ ID NO: 531644 - DNA, 25 bp, Homo sapien
agacacggggatctgctgcatggcc

SEQ ID NO: 531645 - DNA, 25 bp, Homo sapien
tgcctgcaatgctccacggtggtga

SEQ ID NO: 531646 - DNA, 25 bp, Homo sapien
tcctcaacattttgccaagtttttg

SEQ ID NO: 531647 - DNA, 25 bp, Homo sapien
cctcaacattttgccaagtttttgg

SEQ ID NO: 531648 - DNA, 25 bp, Homo sapien
tcaacattttgccaagtttttggaa

SEQ ID NO: 531649 - DNA, 25 bp, Homo sapien
ctcaacattttgccaagtttttgga

SEQ ID NO: 531650 - DNA, 25 bp, Homo sapien
tccaatgacgaacgaaaatgctcac

SEQ ID NO: 531651 - DNA, 25 bp, Homo sapien
gaaggcccggtaaacaggatatgaa

SEQ ID NO: 531652 - DNA, 25 bp, Homo sapien
tgtctgtgtataggtattccaggaa

SEQ ID NO: 531653 - DNA, 25 bp, Homo sapien
cctcgttatcttccaatgacgaacg

SEQ ID NO: 531654 - DNA, 25 bp, Homo sapien
cagtgtccgggttgtcaaattccct

SEQ ID NO: 531655 - DNA, 25 bp, Homo sapien
ctgcagtgtccgggttgtcaaattc

SEQ ID NO: 531656 - DNA, 25 bp, Homo sapien
aggtctgcagtgtccgggttgtcaa

SEQ ID NO: 531657 - DNA, 25 bp, Homo sapien
ggtctgcagtgtccgggttgtcaaa

SEQ ID NO: 531658 - DNA, 25 bp, Homo sapien
gagaataatgcaaatgcttccagag

SEQ ID NO: 531659 - DNA, 25 bp, Homo sapien
ggagaataatgcaaatgcttccaga

SEQ ID NO: 531660 - DNA, 25 bp, Homo sapien
ggtgaggtgcgggaggatcacggac

SEQ ID NO: 531661 - DNA, 25 bp, Homo sapien
gaggtgcgggaggatcacggactga

SEQ ID NO: 531662 - DNA, 25 bp, Homo sapien
gatcacggactgaccccggcactgg

SEQ ID NO: 531663 - DNA, 25 bp, Homo sapien
ggatcacggactgaccccggcactg

SEQ ID NO: 531664 - DNA, 25 bp, Homo sapien
gcgtcttggccgcagacgtgtgtgt

SEQ ID NO: 531665 - DNA, 25 bp, Homo sapien
ggagtgacaggctgcaatctcgata

SEQ ID NO: 531666 - DNA, 25 bp, Homo sapien
gagtgacaggctgcaatctcgataa

SEQ ID NO: 531667 - DNA, 25 bp, Homo sapien
gtgacaggctgcaatctcgataatc

SEQ ID NO: 531668 - DNA, 25 bp, Homo sapien
agtgacaggctgcaatctcgataat

SEQ ID NO: 531669 - DNA, 25 bp, Homo sapien
taggctgcgtgactagcactaggct

SEQ ID NO: 531670 - DNA, 25 bp, Homo sapien
tgtcacttagcacctaggagccttg

SEQ ID NO: 531671 - DNA, 25 bp, Homo sapien
tgtgcaaaagaaccgtgccagacgg

SEQ ID NO: 531672 - DNA, 25 bp, Homo sapien
gaatcctcgctctaccactaggctg

SEQ ID NO: 531673 - DNA, 25 bp, Homo sapien
gtatcgattttactggcaagcctcc

SEQ ID NO: 531674 - DNA, 25 bp, Homo sapien
tacaagcaaatgtgaggatagcgac

SEQ ID NO: 531675 - DNA, 25 bp, Homo sapien
catggtctgtcttcgtggcctggtg

SEQ ID NO: 531676 - DNA, 25 bp, Homo sapien
tattcaaagagaagtacgtccactg

SEQ ID NO: 531677 - DNA, 25 bp, Homo sapien
gagctgagaaccgaaaaaggcttcc

SEQ ID NO: 531678 - DNA, 25 bp, Homo sapien
gatacaggcagcaatcctctcacgg

SEQ ID NO: 531679 - DNA, 25 bp, Homo sapien
gaaataagttccttggcagagctga

SEQ ID NO: 531680 - DNA, 25 bp, Homo sapien
aactgtgggcccgtgatttagctga

SEQ ID NO: 531681 - DNA, 25 bp, Homo sapien
cctcagggaatatttcaagtaaaag

SEQ ID NO: 531682 - DNA, 25 bp, Homo sapien
tgggggctcctcagggaatatttca

SEQ ID NO: 531683 - DNA, 25 bp, Homo sapien
ggctcctcagggaatatttcaagta

SEQ ID NO: 531684 - DNA, 25 bp, Homo sapien
gggctcctcagggaatatttcaagt

SEQ ID NO: 531685 - DNA, 25 bp, Homo sapien
tgtatgctttggactggccagagcc

SEQ ID NO: 531686 - DNA, 25 bp, Homo sapien
taactgggccatgtatgctttggac

SEQ ID NO: 531687 - DNA, 25 bp, Homo sapien
ctaactgggccatgtatgctttgga

SEQ ID NO: 531688 - DNA, 25 bp, Homo sapien
caatgcaggaccaacatgcaggcag

SEQ ID NO: 531689 - DNA, 25 bp, Homo sapien
gagagcaatgcaggaccaacatgca

SEQ ID NO: 531690 - DNA, 25 bp, Homo sapien
gagcaatgcaggaccaacatgcagg

SEQ ID NO: 531691 - DNA, 25 bp, Homo sapien
aggtggagagcaatgcaggaccaac

SEQ ID NO: 531692 - DNA, 25 bp, Homo sapien
aaactgctttgtaaacagggccatg

SEQ ID NO: 531693 - DNA, 25 bp, Homo sapien
ggaacagtggcgtcggcttcaatcc

SEQ ID NO: 531694 - DNA, 25 bp, Homo sapien
gagagcagcatcgtacaagacctga

SEQ ID NO: 531695 - DNA, 25 bp, Homo sapien
gcttcaatccagagccgaagagttc

SEQ ID NO: 531696 - DNA, 25 bp, Homo sapien
ctggccacagtggtgtgcaagacag

SEQ ID NO: 531697 - DNA, 25 bp, Homo sapien
tggccacagtggtgtgcaagacagg

SEQ ID NO: 531698 - DNA, 25 bp, Homo sapien
agaagccgcgctggtcaggtggcag

SEQ ID NO: 531699 - DNA, 25 bp, Homo sapien
tgtgtttgaaccacctcaattgtaa

SEQ ID NO: 531700 - DNA, 25 bp, Homo sapien
gaggccaacccaagctaggttgcca

SEQ ID NO: 531701 - DNA, 25 bp, Homo sapien
gggccaatgtacacatagctgagca

SEQ ID NO: 531702 - DNA, 25 bp, Homo sapien
tagggcagcccaatgaacaatgtga

SEQ ID NO: 531703 - DNA, 25 bp, Homo sapien
tgcagtgacctactaggcaaagact

SEQ ID NO: 531704 - DNA, 25 bp, Homo sapien
aaatgtcagtgactggagcacaaca

SEQ ID NO: 531705 - DNA, 25 bp, Homo sapien
cagattttagcactttgcagtgacc

SEQ ID NO: 531706 - DNA, 25 bp, Homo sapien
atccatctgccccagtgagaacctg

SEQ ID NO: 531707 - DNA, 25 bp, Homo sapien
ttctcccaccttgacgccccacaat

SEQ ID NO: 531708 - DNA, 25 bp, Homo sapien
tctgccccagtgagaacctgaatca

SEQ ID NO: 531709 - DNA, 25 bp, Homo sapien
cacaatccatctgccccagtgagaa

SEQ ID NO: 531710 - DNA, 25 bp, Homo sapien
ggactggttgcttttattgccagtg

SEQ ID NO: 531711 - DNA, 25 bp, Homo sapien
caactgcccataagaattggcgccc

SEQ ID NO: 531712 - DNA, 25 bp, Homo sapien
catctgttaatactaatgtgtgtgc

SEQ ID NO: 531713 - DNA, 25 bp, Homo sapien
acagtgacaggagtaggataggact

SEQ ID NO: 531714 - DNA, 25 bp, Homo sapien
ctggaaggaaaaaaatccactcagg

SEQ ID NO: 531715 - DNA, 25 bp, Homo sapien
tggaaggaaaaaaatccactcagga

SEQ ID NO: 531716 - DNA, 25 bp, Homo sapien
aattccctaggagtagaactacagg

SEQ ID NO: 531717 - DNA, 25 bp, Homo sapien
tcctcaggaaagcttgtaacaattt

SEQ ID NO: 531718 - DNA, 25 bp, Homo sapien
catcatctccagcatatatacttgg

SEQ ID NO: 531719 - DNA, 25 bp, Homo sapien
tgaccatgttgtataagcagttctg

SEQ ID NO: 531720 - DNA, 25 bp, Homo sapien
ggttgccactgttgccgagtccaag

SEQ ID NO: 531721 - DNA, 25 bp, Homo sapien
gacacggatgccttgcaaagctgcc

SEQ ID NO: 531722 - DNA, 25 bp, Homo sapien
ttggctggttgccactgttgccgag

SEQ ID NO: 531723 - DNA, 25 bp, Homo sapien
cgagtccaagctgcccgtttccgtt

SEQ ID NO: 531724 - DNA, 25 bp, Homo sapien
ctcccccgtgtctactactgccatg

SEQ ID NO: 531725 - DNA, 25 bp, Homo sapien
gtgtctactactgccatgcagcaca

SEQ ID NO: 531726 - DNA, 25 bp, Homo sapien
ccgtgtctactactgccatgcagca

SEQ ID NO: 531727 - DNA, 25 bp, Homo sapien
tctactactgccatgcagcacatct

SEQ ID NO: 531728 - DNA, 25 bp, Homo sapien
cgagggattggctgattaactgttg

SEQ ID NO: 531729 - DNA, 25 bp, Homo sapien
tacctgcccagagttattataaccc

SEQ ID NO: 531730 - DNA, 25 bp, Homo sapien
taactgttgatccagatcctacctg

SEQ ID NO: 531731 - DNA, 25 bp, Homo sapien
tattttgtaggcagccagtgactct

SEQ ID NO: 531732 - DNA, 25 bp, Homo sapien
caaagaatggtaagacccacaggca

SEQ ID NO: 531733 - DNA, 25 bp, Homo sapien
tatgacagggcactaaaccatgatt

SEQ ID NO: 531734 - DNA, 25 bp, Homo sapien
tatgaccccaggtaaagacttctcc

SEQ ID NO: 531735 - DNA, 25 bp, Homo sapien
gcccagctggctataagcattatga

SEQ ID NO: 531736 - DNA, 25 bp, Homo sapien
tcccatagctgaggcaggctatttt

SEQ ID NO: 531737 - DNA, 25 bp, Homo sapien
tggtgctctggacgtcacctaaccc

SEQ ID NO: 531738 - DNA, 25 bp, Homo sapien
tccagtctccgaggttcaatggtgc

SEQ ID NO: 531739 - DNA, 25 bp, Homo sapien
acaatatgtggaccactcccatagc

SEQ ID NO: 531740 - DNA, 25 bp, Homo sapien
aagacacaagcctgacgaattaact

SEQ ID NO: 531741 - DNA, 25 bp, Homo sapien
caagcctgacgaattaactgtagtt

SEQ ID NO: 531742 - DNA, 25 bp, Homo sapien
aaaattggccactttcccacatcta

SEQ ID NO: 531743 - DNA, 25 bp, Homo sapien
gacgaattaactgtagttcttcttc

SEQ ID NO: 531744 - DNA, 25 bp, Homo sapien
aggacagagaccgagtctttcacca

SEQ ID NO: 531745 - DNA, 25 bp, Homo sapien
ggaggacagagaccgagtctttcac

SEQ ID NO: 531746 - DNA, 25 bp, Homo sapien
aggaggacagagaccgagtctttca

SEQ ID NO: 531747 - DNA, 25 bp, Homo sapien
ggacagagaccgagtctttcaccac

SEQ ID NO: 531748 - DNA, 25 bp, Homo sapien
gagatatcaagggagcattgccctg

SEQ ID NO: 531749 - DNA, 25 bp, Homo sapien
cttaaaagaagacgagagggcacac

SEQ ID NO: 531750 - DNA, 25 bp, Homo sapien
gagtggaccctacgtccaatgacta

SEQ ID NO: 531751 - DNA, 25 bp, Homo sapien
caaatccacctagaacctcagaagg

SEQ ID NO: 531752 - DNA, 25 bp, Homo sapien
ccactgtctccagagaaaagaggaa

SEQ ID NO: 531753 - DNA, 25 bp, Homo sapien
cttgccactgtctccagagaaaaga

SEQ ID NO: 531754 - DNA, 25 bp, Homo sapien
tgccactgtctccagagaaaagagg

SEQ ID NO: 531755 - DNA, 25 bp, Homo sapien
agaaaagaggaagttcttcttccat

SEQ ID NO: 531756 - DNA, 25 bp, Homo sapien
tgggattggaaagttccaaatcacg

SEQ ID NO: 531757 - DNA, 25 bp, Homo sapien
tctcagctccacagaagaatatatg

SEQ ID NO: 531758 - DNA, 25 bp, Homo sapien
gaagagcggacatcaattctcagct

SEQ ID NO: 531759 - DNA, 25 bp, Homo sapien
ccaaatcacggggaagagcggacat

SEQ ID NO: 531760 - DNA, 25 bp, Homo sapien
gttgtcttctagagcaaagttaatg

SEQ ID NO: 531761 - DNA, 25 bp, Homo sapien
cttgtaaagttgtcttctagagcaa

SEQ ID NO: 531762 - DNA, 25 bp, Homo sapien
ttctggaacccagtattcagtcatc

SEQ ID NO: 531763 - DNA, 25 bp, Homo sapien
ggaacccagtattcagtcatcttta

SEQ ID NO: 531764 - DNA, 25 bp, Homo sapien
ctgctgcttaataacacgcatgtac

SEQ ID NO: 531765 - DNA, 25 bp, Homo sapien
tgctgcttaataacacgcatgtact

SEQ ID NO: 531766 - DNA, 25 bp, Homo sapien
ctgcttaataacacgcatgtactgt

SEQ ID NO: 531767 - DNA, 25 bp, Homo sapien
gctgcttaataacacgcatgtactg

SEQ ID NO: 531768 - DNA, 25 bp, Homo sapien
tctgacaaggtaagtcgccaagcgc

SEQ ID NO: 531769 - DNA, 25 bp, Homo sapien
tactagatttatgggacgggagcct

SEQ ID NO: 531770 - DNA, 25 bp, Homo sapien
tatgttgcggcttaagacgctcggc

SEQ ID NO: 531771 - DNA, 25 bp, Homo sapien
tacaaagtagctccatgaaatgcgt

SEQ ID NO: 531772 - DNA, 25 bp, Homo sapien
agacggaaacgaagggagcgcagac

SEQ ID NO: 531773 - DNA, 25 bp, Homo sapien
gcgccgcgatgagttggcgcctccc

SEQ ID NO: 531774 - DNA, 25 bp, Homo sapien
tcctgggtagcggttactgcacggt

SEQ ID NO: 531775 - DNA, 25 bp, Homo sapien
ctcgcaggccggagccttgtccgct

SEQ ID NO: 531776 - DNA, 25 bp, Homo sapien
actactcttgtgaaactaggagccc

SEQ ID NO: 531777 - DNA, 25 bp, Homo sapien
tggttcgtccatctcactggcagct

SEQ ID NO: 531778 - DNA, 25 bp, Homo sapien
caggtggcccctgtctcttggttcg

SEQ ID NO: 531779 - DNA, 25 bp, Homo sapien
cagccattggcatacccagagtttg

SEQ ID NO: 531780 - DNA, 25 bp, Homo sapien
ggtcagagctctaaaggaggaacag

SEQ ID NO: 531781 - DNA, 25 bp, Homo sapien
ctttggtcatttctcgcttgttttc

SEQ ID NO: 531782 - DNA, 25 bp, Homo sapien
caagatttttctgtccatccttggg

SEQ ID NO: 531783 - DNA, 25 bp, Homo sapien
ggagtcttcagaagggttaaactga

SEQ ID NO: 531784 - DNA, 25 bp, Homo sapien
cagataaagatgtgatcctgacccc

SEQ ID NO: 531785 - DNA, 25 bp, Homo sapien
aaacagtaggccatcaatcccaggg

SEQ ID NO: 531786 - DNA, 25 bp, Homo sapien
tgactgacagtaggaatcacctccc

SEQ ID NO: 531787 - DNA, 25 bp, Homo sapien
cagcatggaactcgtaaaactaagc

SEQ ID NO: 531788 - DNA, 25 bp, Homo sapien
tcagaggatacaggcctatggatca

SEQ ID NO: 531789 - DNA, 25 bp, Homo sapien
ccaaagagataatcctcagggaacc

SEQ ID NO: 531790 - DNA, 25 bp, Homo sapien
gaggattattctgatgctttctagg

SEQ ID NO: 531791 - DNA, 25 bp, Homo sapien
atcagatacgtcttccacatcttcc

SEQ ID NO: 531792 - DNA, 25 bp, Homo sapien
tcatatttgaaccagggagattcag

SEQ ID NO: 531793 - DNA, 25 bp, Homo sapien
tggcttcatatttgaaccagggaga

SEQ ID NO: 531794 - DNA, 25 bp, Homo sapien
tcaggtgtgggtttctgttctgcca

SEQ ID NO: 531795 - DNA, 25 bp, Homo sapien
tttgaaccagggagattcaggtgtg

SEQ ID NO: 531796 - DNA, 25 bp, Homo sapien
tatttgccatggtcccttattatca

SEQ ID NO: 531797 - DNA, 25 bp, Homo sapien
gcactactggtgctactggtgtaaa

SEQ ID NO: 531798 - DNA, 25 bp, Homo sapien
aagagatacatataatgtctagcac

SEQ ID NO: 531799 - DNA, 25 bp, Homo sapien
catggtcccttattatcatcatggc

SEQ ID NO: 531800 - DNA, 25 bp, Homo sapien
gatgactgcctcgtgatcttgtaca

SEQ ID NO: 531801 - DNA, 25 bp, Homo sapien
tgaggacaacccaacctatacagct

SEQ ID NO: 531802 - DNA, 25 bp, Homo sapien
caatacacagctagcactgaggagg

SEQ ID NO: 531803 - DNA, 25 bp, Homo sapien
ttgaggcccaacacacggtgcagaa

SEQ ID NO: 531804 - DNA, 25 bp, Homo sapien
gaatgtagggtcactagaagaggct

SEQ ID NO: 531805 - DNA, 25 bp, Homo sapien
gagacacaggcaccgacggccatgc

SEQ ID NO: 531806 - DNA, 25 bp, Homo sapien
agctcacaagtgaggtctggcctct

SEQ ID NO: 531807 - DNA, 25 bp, Homo sapien
tctggagcggctgtagaagcagctt

SEQ ID NO: 531808 - DNA, 25 bp, Homo sapien
gaaatatgttgatcagttgcctggc

SEQ ID NO: 531809 - DNA, 25 bp, Homo sapien
cactgaggtgcctataaagtccaag

SEQ ID NO: 531810 - DNA, 25 bp, Homo sapien
tcccaggtgcgcagtgtgacagttc

SEQ ID NO: 531811 - DNA, 25 bp, Homo sapien
cacctcaaagggtagtggtaattct

SEQ ID NO: 531812 - DNA, 25 bp, Homo sapien
cttctaatacagctcttttatattc

SEQ ID NO: 531813 - DNA, 25 bp, Homo sapien
ttgaagtatggttgaaaggtctagg

SEQ ID NO: 531814 - DNA, 25 bp, Homo sapien
ttctggatttgaagtatggttgaaa

SEQ ID NO: 531815 - DNA, 25 bp, Homo sapien
ctggatttgaagtatggttgaaagg

SEQ ID NO: 531816 - DNA, 25 bp, Homo sapien
tatgggaagaaagggctattgcatt

SEQ ID NO: 531817 - DNA, 25 bp, Homo sapien
aattcctttattccccaccaggctg

SEQ ID NO: 531818 - DNA, 25 bp, Homo sapien
catttcctttgcctagaaaagtgct

SEQ ID NO: 531819 - DNA, 25 bp, Homo sapien
gaagctatgggaagaaagggctatt

SEQ ID NO: 531820 - DNA, 25 bp, Homo sapien
aaatggtgccacctctactacacaa

SEQ ID NO: 531821 - DNA, 25 bp, Homo sapien
taactgctttcatgtgtcctcgaac

SEQ ID NO: 531822 - DNA, 25 bp, Homo sapien
agtacagaataaaccagttccccag

SEQ ID NO: 531823 - DNA, 25 bp, Homo sapien
gcagggaggacacatagtaaaatgg

SEQ ID NO: 531824 - DNA, 25 bp, Homo sapien
ggtgtggatgttcgctcaatttcca

SEQ ID NO: 531825 - DNA, 25 bp, Homo sapien
tctcatgggcattggtggaaaggaa

SEQ ID NO: 531826 - DNA, 25 bp, Homo sapien
tcaaggccatgccaacagaggtcac

SEQ ID NO: 531827 - DNA, 25 bp, Homo sapien
gccccaacctgcttgtttgagtgta

SEQ ID NO: 531828 - DNA, 25 bp, Homo sapien
tggccagtgatcaaattttcagggt

SEQ ID NO: 531829 - DNA, 25 bp, Homo sapien
aatgaggcaggtcacatctccgaat

SEQ ID NO: 531830 - DNA, 25 bp, Homo sapien
cagaagacaggatggctcctcagcg

SEQ ID NO: 531831 - DNA, 25 bp, Homo sapien
tccacaggtgtggatgagaagcatc

SEQ ID NO: 531832 - DNA, 25 bp, Homo sapien
ttcttagtgggagaagagagccgtg

SEQ ID NO: 531833 - DNA, 25 bp, Homo sapien
cagttgttcttagtgggagaagaga

SEQ ID NO: 531834 - DNA, 25 bp, Homo sapien
accagttgttcttagtgggagaaga

SEQ ID NO: 531835 - DNA, 25 bp, Homo sapien
ctggtgggaataacacatcttcttc

SEQ ID NO: 531836 - DNA, 25 bp, Homo sapien
ttcaaagctcttcatgggagttaac

SEQ ID NO: 531837 - DNA, 25 bp, Homo sapien
tcttcatgggagttaacctaaagga

SEQ ID NO: 531838 - DNA, 25 bp, Homo sapien
gtttgatgaaaagactttgaaattc

SEQ ID NO: 531839 - DNA, 25 bp, Homo sapien
gagcaatgggacgtcttacatggca

SEQ ID NO: 531840 - DNA, 25 bp, Homo sapien
gaaacccctataaaagcatcaaatg

SEQ ID NO: 531841 - DNA, 25 bp, Homo sapien
agactttgaaattcattgttgaaaa

SEQ ID NO: 531842 - DNA, 25 bp, Homo sapien
ggcacttgaaaaagcctctgggtat

SEQ ID NO: 531843 - DNA, 25 bp, Homo sapien
cacttgaaaaagcctctgggtattt

SEQ ID NO: 531844 - DNA, 25 bp, Homo sapien
ctggcacttgaaaaagcctctgggt

SEQ ID NO: 531845 - DNA, 25 bp, Homo sapien
gcacttgaaaaagcctctgggtatt

SEQ ID NO: 531846 - DNA, 25 bp, Homo sapien
tggttatatgggttagggaatccca

SEQ ID NO: 531847 - DNA, 25 bp, Homo sapien
gcacagcagcaacaacggaagcctt

SEQ ID NO: 531848 - DNA, 25 bp, Homo sapien
tgtacctactctttcagttactaag

SEQ ID NO: 531849 - DNA, 25 bp, Homo sapien
tcagcacttgcctcactttcttaaa

SEQ ID NO: 531850 - DNA, 25 bp, Homo sapien
ctgtttaggtgacatgtctgtgagt

SEQ ID NO: 531851 - DNA, 25 bp, Homo sapien
ctgtgagtctgatggctttgtcctg

SEQ ID NO: 531852 - DNA, 25 bp, Homo sapien
taggtgacatgtctgtgagtctgat

SEQ ID NO: 531853 - DNA, 25 bp, Homo sapien
catgtctgtgagtctgatggctttg

SEQ ID NO: 531854 - DNA, 25 bp, Homo sapien
ttatttcaaacaaggtgcagcaggg

SEQ ID NO: 531855 - DNA, 25 bp, Homo sapien
gggcctgttgtgagattttgccgca

SEQ ID NO: 531856 - DNA, 25 bp, Homo sapien
tgccgcagcctgaatcattatttca

SEQ ID NO: 531857 - DNA, 25 bp, Homo sapien
gtcgggataagtgaatgaagtcctc

SEQ ID NO: 531858 - DNA, 25 bp, Homo sapien
agtggttacacattcctgggctgcc

SEQ ID NO: 531859 - DNA, 25 bp, Homo sapien
gagccagactgagtggttacacatt

SEQ ID NO: 531860 - DNA, 25 bp, Homo sapien
tggttacacattcctgggctgccat

SEQ ID NO: 531861 - DNA, 25 bp, Homo sapien
gaagagccagactgagtggttacac

SEQ ID NO: 531862 - DNA, 25 bp, Homo sapien
ttggcagcatgggttgctgcttgct

SEQ ID NO: 531863 - DNA, 25 bp, Homo sapien
tgagttggcagcatgggttgctgct

SEQ ID NO: 531864 - DNA, 25 bp, Homo sapien
tggcagcatgggttgctgcttgctg

SEQ ID NO: 531865 - DNA, 25 bp, Homo sapien
agttggcagcatgggttgctgcttg

SEQ ID NO: 531866 - DNA, 25 bp, Homo sapien
gatccccagccataaattcattatg

SEQ ID NO: 531867 - DNA, 25 bp, Homo sapien
ggaataaattccagtgctgctggca

SEQ ID NO: 531868 - DNA, 25 bp, Homo sapien
cagatccccagccataaattcatta

SEQ ID NO: 531869 - DNA, 25 bp, Homo sapien
ttatgtagaaagtaggaataaattc

SEQ ID NO: 531870 - DNA, 25 bp, Homo sapien
tgaccaaaaaacgacaccagagtcc

SEQ ID NO: 531871 - DNA, 25 bp, Homo sapien
taatgaccaaaaaacgacaccagag

SEQ ID NO: 531872 - DNA, 25 bp, Homo sapien
caaaaaacgacaccagagtcctctg

SEQ ID NO: 531873 - DNA, 25 bp, Homo sapien
agataatgaccaaaaaacgacacca

SEQ ID NO: 531874 - DNA, 25 bp, Homo sapien
gcctggtagtaagtgccttgcttct

SEQ ID NO: 531875 - DNA, 25 bp, Homo sapien
gttgcttaagaggtccttattgctg

SEQ ID NO: 531876 - DNA, 25 bp, Homo sapien
tacagatggacttccccaatgaggt

SEQ ID NO: 531877 - DNA, 25 bp, Homo sapien
cttcctccccagttgcttaagaggt

SEQ ID NO: 531878 - DNA, 25 bp, Homo sapien
cgggccttggtgcatgagcgagatg

SEQ ID NO: 531879 - DNA, 25 bp, Homo sapien
ccttggtgcatgagcgagatgaggc

SEQ ID NO: 531880 - DNA, 25 bp, Homo sapien
catgagcgagatgaggcagcctatg

SEQ ID NO: 531881 - DNA, 25 bp, Homo sapien
gcagcctatggggagctcagggcca

SEQ ID NO: 531882 - DNA, 25 bp, Homo sapien
aattctgatgttctgcgtagagagg

SEQ ID NO: 531883 - DNA, 25 bp, Homo sapien
gactttacctcttatgcaagcctga

SEQ ID NO: 531884 - DNA, 25 bp, Homo sapien
tcctggctattttgattggacagtc

SEQ ID NO: 531885 - DNA, 25 bp, Homo sapien
gcactaaggtcttttctgagggaag

SEQ ID NO: 531886 - DNA, 25 bp, Homo sapien
cacagagcctcaggataactgagtt

SEQ ID NO: 531887 - DNA, 25 bp, Homo sapien
tcaggagaataggactcagtgccct

SEQ ID NO: 531888 - DNA, 25 bp, Homo sapien
gaatctgctgcctgcaatggggcct

SEQ ID NO: 531889 - DNA, 25 bp, Homo sapien
ctgggcactgcacctctccatggag

SEQ ID NO: 531890 - DNA, 25 bp, Homo sapien
atgaaacatggtccctggtgtgggc

SEQ ID NO: 531891 - DNA, 25 bp, Homo sapien
tttaggaggatgaaacatggtccct

SEQ ID NO: 531892 - DNA, 25 bp, Homo sapien
gaggatgaaacatggtccctggtgt

SEQ ID NO: 531893 - DNA, 25 bp, Homo sapien
taggaggatgaaacatggtccctgg

SEQ ID NO: 531894 - DNA, 25 bp, Homo sapien
cttttgtggtcccttctgtccattt

SEQ ID NO: 531895 - DNA, 25 bp, Homo sapien
ggagaacttgccaatctccagcctt

SEQ ID NO: 531896 - DNA, 25 bp, Homo sapien
catttctttccccatagaaagaaat

SEQ ID NO: 531897 - DNA, 25 bp, Homo sapien
agaaatggagaacttgccaatctcc

SEQ ID NO: 531898 - DNA, 25 bp, Homo sapien
tttagcactgcatcagcataatatt

SEQ ID NO: 531899 - DNA, 25 bp, Homo sapien
tatagcaaggaagtggactttagtc

SEQ ID NO: 531900 - DNA, 25 bp, Homo sapien
tagcaaggaagtggactttagtcat

SEQ ID NO: 531901 - DNA, 25 bp, Homo sapien
tagcactgcatcagcataatatttt

SEQ ID NO: 531902 - DNA, 25 bp, Homo sapien
tactaagtcattgctgttactggat

SEQ ID NO: 531903 - DNA, 25 bp, Homo sapien
ttggtccaaagtcctctgagtaatg

SEQ ID NO: 531904 - DNA, 25 bp, Homo sapien
ggctactaagtcattgctgttactg

SEQ ID NO: 531905 - DNA, 25 bp, Homo sapien
cagccaatattgcatcaaactttgg

SEQ ID NO: 531906 - DNA, 25 bp, Homo sapien
cttcactgaggttactcttcacagt

SEQ ID NO: 531907 - DNA, 25 bp, Homo sapien
cctgctgtggcaaacaaagccacat

SEQ ID NO: 531908 - DNA, 25 bp, Homo sapien
tgaggttactcttcacagtgcctgc

SEQ ID NO: 531909 - DNA, 25 bp, Homo sapien
actgaggttactcttcacagtgcct

SEQ ID NO: 531910 - DNA, 25 bp, Homo sapien
caactcattcgctgagaagcagaag

SEQ ID NO: 531911 - DNA, 25 bp, Homo sapien
taatgaactgcagcctaactaagtg

SEQ ID NO: 531912 - DNA, 25 bp, Homo sapien
caggcattggactaaatatggttcc

SEQ ID NO: 531913 - DNA, 25 bp, Homo sapien
taaactacatttggcatgaggatgc

SEQ ID NO: 531914 - DNA, 25 bp, Homo sapien
gggcattgtcttcctctacgcagct

SEQ ID NO: 531915 - DNA, 25 bp, Homo sapien
ggaagtccattcttaagccaggcag

SEQ ID NO: 531916 - DNA, 25 bp, Homo sapien
gccaggcagttatgtgcacaagaaa

SEQ ID NO: 531917 - DNA, 25 bp, Homo sapien
tcacttcacagtaaaagggagtccc

SEQ ID NO: 531918 - DNA, 25 bp, Homo sapien
gacttcctagcctgcgggactgtga

SEQ ID NO: 531919 - DNA, 25 bp, Homo sapien
tgtgaacagactagggcagtaagca

SEQ ID NO: 531920 - DNA, 25 bp, Homo sapien
tagtgcctttacaaaagagagccca

SEQ ID NO: 531921 - DNA, 25 bp, Homo sapien
cgtttgttggcacgagatagcccag

SEQ ID NO: 531922 - DNA, 25 bp, Homo sapien
tttactgaaccctttctcaagtgtc

SEQ ID NO: 531923 - DNA, 25 bp, Homo sapien
ctttctcaagtgtctgtgcgaagag

SEQ ID NO: 531924 - DNA, 25 bp, Homo sapien
aaccctttctcaagtgtctgtgcga

SEQ ID NO: 531925 - DNA, 25 bp, Homo sapien
ccctttctcaagtgtctgtgcgaag

SEQ ID NO: 531926 - DNA, 25 bp, Homo sapien
ctctgacttcacagctgtaaaggca

SEQ ID NO: 531927 - DNA, 25 bp, Homo sapien
tctctgacttcacagctgtaaaggc

SEQ ID NO: 531928 - DNA, 25 bp, Homo sapien
tctgacttcacagctgtaaaggcac

SEQ ID NO: 531929 - DNA, 25 bp, Homo sapien
cagctagggactctatttctgccag

SEQ ID NO: 531930 - DNA, 25 bp, Homo sapien
gcagcttgatgcagtcttgcaatta

SEQ ID NO: 531931 - DNA, 25 bp, Homo sapien
catacagggtagagttgctgctaaa

SEQ ID NO: 531932 - DNA, 25 bp, Homo sapien
ctgctaaaaagtgggtgagcagcta

SEQ ID NO: 531933 - DNA, 25 bp, Homo sapien
aagcatagcacctttgtcctgacat

SEQ ID NO: 531934 - DNA, 25 bp, Homo sapien
atagcacctttgtcctgacatctgg

SEQ ID NO: 531935 - DNA, 25 bp, Homo sapien
tacaagcgtagcctctctaaattct

SEQ ID NO: 531936 - DNA, 25 bp, Homo sapien
cacttccctacatcgatgacctgta

SEQ ID NO: 531937 - DNA, 25 bp, Homo sapien
ggaagaagaggtgataggggtgttc

SEQ ID NO: 531938 - DNA, 25 bp, Homo sapien
gaagaagaggtgataggggtgttcc

SEQ ID NO: 531939 - DNA, 25 bp, Homo sapien
gcctcggcttcatataaggtgaacg

SEQ ID NO: 531940 - DNA, 25 bp, Homo sapien
gcttcatataaggtgaacgagggcc

SEQ ID NO: 531941 - DNA, 25 bp, Homo sapien
tcccgtacagcctcggcttcatata

SEQ ID NO: 531942 - DNA, 25 bp, Homo sapien
tataaggtgaacgagggcctctcca

SEQ ID NO: 531943 - DNA, 25 bp, Homo sapien
atgctccacccctacttcccactct

SEQ ID NO: 531944 - DNA, 25 bp, Homo sapien
cctgaattctgggaatgctccaccc

SEQ ID NO: 531945 - DNA, 25 bp, Homo sapien
tcccactctcagcaggtaaaatgcc

SEQ ID NO: 531946 - DNA, 25 bp, Homo sapien
actctcagcaggtaaaatgccctga

SEQ ID NO: 531947 - DNA, 25 bp, Homo sapien
attctaagtccttggccacagttga

SEQ ID NO: 531948 - DNA, 25 bp, Homo sapien
cagatgtttccatggatagtgaatc

SEQ ID NO: 531949 - DNA, 25 bp, Homo sapien
tctttgcaatgttgacttcctcata

SEQ ID NO: 531950 - DNA, 25 bp, Homo sapien
tgaatccagaggaacctcaacactc

SEQ ID NO: 531951 - DNA, 25 bp, Homo sapien
gaggaacctcaacactctttgcaat

SEQ ID NO: 531952 - DNA, 25 bp, Homo sapien
tcctccttgtgattatcctctttga

SEQ ID NO: 531953 - DNA, 25 bp, Homo sapien
ttcctccttgtgattatcctctttg

SEQ ID NO: 531954 - DNA, 25 bp, Homo sapien
tacaaagatgtcactaacttgccac

SEQ ID NO: 531955 - DNA, 25 bp, Homo sapien
gatgtcactaacttgccacttcctc

SEQ ID NO: 531956 - DNA, 25 bp, Homo sapien
ccagtaatggtgacacttcatgcat

SEQ ID NO: 531957 - DNA, 25 bp, Homo sapien
agaaaatttgctatccagtaatggt

SEQ ID NO: 531958 - DNA, 25 bp, Homo sapien
gctatccagtaatggtgacacttca

SEQ ID NO: 531959 - DNA, 25 bp, Homo sapien
aaatttgctatccagtaatggtgac

SEQ ID NO: 531960 - DNA, 25 bp, Homo sapien
ggaatgtaccgagactttgtccaag

SEQ ID NO: 531961 - DNA, 25 bp, Homo sapien
catctttgttctcggtgacagggca

SEQ ID NO: 531962 - DNA, 25 bp, Homo sapien
taggagcctggttatttcatccgga

SEQ ID NO: 531963 - DNA, 25 bp, Homo sapien
tttacagccatttaggcctctagac

SEQ ID NO: 531964 - DNA, 25 bp, Homo sapien
tgtcgctttcaagctgagacctgaa

SEQ ID NO: 531965 - DNA, 25 bp, Homo sapien
caagctgtggtaagtcataagaggg

SEQ ID NO: 531966 - DNA, 25 bp, Homo sapien
caggtaaggccagacctcgtatggt

SEQ ID NO: 531967 - DNA, 25 bp, Homo sapien
gagagaatggcatgtacatagagcc

SEQ ID NO: 531968 - DNA, 25 bp, Homo sapien
aaagatcgcacaattaatacactga

SEQ ID NO: 531969 - DNA, 25 bp, Homo sapien
gaggctggactcaccggcccaagta

SEQ ID NO: 531970 - DNA, 25 bp, Homo sapien
acactgaaataaagcccagacatgc

SEQ ID NO: 531971 - DNA, 25 bp, Homo sapien
ggtctccggcggcaactgtaagtca

SEQ ID NO: 531972 - DNA, 25 bp, Homo sapien
attgcagcgtcccacattgtttgag

SEQ ID NO: 531973 - DNA, 25 bp, Homo sapien
ggttttccacgcgatttggctggcg

SEQ ID NO: 531974 - DNA, 25 bp, Homo sapien
ttggctggcgaagagaccacgaagc

SEQ ID NO: 531975 - DNA, 25 bp, Homo sapien
gaagtcgctgctacgctcacttgta

SEQ ID NO: 531976 - DNA, 25 bp, Homo sapien
ttcctgagtgtagctccgagcctgg

SEQ ID NO: 531977 - DNA, 25 bp, Homo sapien
aaagcacctgccagccttaagttcg

SEQ ID NO: 531978 - DNA, 25 bp, Homo sapien
cagaggcttcctagtccttgggagg

SEQ ID NO: 531979 - DNA, 25 bp, Homo sapien
tggtccctcgggtgaaacagaaagc

SEQ ID NO: 531980 - DNA, 25 bp, Homo sapien
gctcatcttggggttaaaacctcga

SEQ ID NO: 531981 - DNA, 25 bp, Homo sapien
gaacttgaacgcttttctgaagaga

SEQ ID NO: 531982 - DNA, 25 bp, Homo sapien
gaagagagttttccccgctcatctt

SEQ ID NO: 531983 - DNA, 25 bp, Homo sapien
tcgaaaacccgccctctgtttgatc

SEQ ID NO: 531984 - DNA, 25 bp, Homo sapien
gcagttcctctccccgggcgagtta

SEQ ID NO: 531985 - DNA, 25 bp, Homo sapien
tggcagttcctctccccgggcgagt

SEQ ID NO: 531986 - DNA, 25 bp, Homo sapien
ttcagtcgggaggtggactcgaggc

SEQ ID NO: 531987 - DNA, 25 bp, Homo sapien
ctgttcagtcgggaggtggactcga

SEQ ID NO: 531988 - DNA, 25 bp, Homo sapien
cagtcgggaggtggactcgaggctg

SEQ ID NO: 531989 - DNA, 25 bp, Homo sapien
tgttcagtcgggaggtggactcgag

SEQ ID NO: 531990 - DNA, 25 bp, Homo sapien
gtttctttagtaactattaggatca

SEQ ID NO: 531991 - DNA, 25 bp, Homo sapien
agtaactattaggatcagcttttcc

SEQ ID NO: 531992 - DNA, 25 bp, Homo sapien
cagattggtattcctgaaatagtat

SEQ ID NO: 531993 - DNA, 25 bp, Homo sapien
tcctgatgcttcagattggtattcc

SEQ ID NO: 531994 - DNA, 25 bp, Homo sapien
gtttccttacttgagggccctcatc

SEQ ID NO: 531995 - DNA, 25 bp, Homo sapien
gttgatacatgttaagctttcatgc

SEQ ID NO: 531996 - DNA, 25 bp, Homo sapien
taagctttcatgcatagcaggcctt

SEQ ID NO: 531997 - DNA, 25 bp, Homo sapien
gacccttcatcgagaattgtctcaa

SEQ ID NO: 531998 - DNA, 25 bp, Homo sapien
ccatatctcatcattctcatagtct

SEQ ID NO: 531999 - DNA, 25 bp, Homo sapien
atatctcatcattctcatagtcttc

SEQ ID NO: 532000 - DNA, 25 bp, Homo sapien
catatctcatcattctcatagtctt

SEQ ID NO: 532001 - DNA, 25 bp, Homo sapien
tcatcattctcatagtcttctgttg

SEQ ID NO: 532002 - DNA, 25 bp, Homo sapien
tggcaggtaattcattctcactatt

SEQ ID NO: 532003 - DNA, 25 bp, Homo sapien
ttggcaggtaattcattctcactat

SEQ ID NO: 532004 - DNA, 25 bp, Homo sapien
cctctacaagctgtcctccattaag

SEQ ID NO: 532005 - DNA, 25 bp, Homo sapien
gagttcacccagagcttcctctaca

SEQ ID NO: 532006 - DNA, 25 bp, Homo sapien
tctgctgtcagagtctattattcca

SEQ ID NO: 532007 - DNA, 25 bp, Homo sapien
gctccccataaggtagggcttccat

SEQ ID NO: 532008 - DNA, 25 bp, Homo sapien
agctgtagatgtactaccctgagta

SEQ ID NO: 532009 - DNA, 25 bp, Homo sapien
tcatttgaatggttaacagaacaag

SEQ ID NO: 532010 - DNA, 25 bp, Homo sapien
tgtgcaaggttcaaaaacttgattg

SEQ ID NO: 532011 - DNA, 25 bp, Homo sapien
tgtatcacatctttcatagctgtag

SEQ ID NO: 532012 - DNA, 25 bp, Homo sapien
cataatgagtctacccagtcttccg

SEQ ID NO: 532013 - DNA, 25 bp, Homo sapien
ggcaacaaaggtgagtctagttctg

SEQ ID NO: 532014 - DNA, 25 bp, Homo sapien
catgagtgattcacacctaatggtg

SEQ ID NO: 532015 - DNA, 25 bp, Homo sapien
tgtagcttgcgatgctttgttgccc

SEQ ID NO: 532016 - DNA, 25 bp, Homo sapien
ctcatctccagatgggatgggcagt

SEQ ID NO: 532017 - DNA, 25 bp, Homo sapien
ctttctcatctccagatgggatggg

SEQ ID NO: 532018 - DNA, 25 bp, Homo sapien
ttctcatctccagatgggatgggca

SEQ ID NO: 532019 - DNA, 25 bp, Homo sapien
tctcatctccagatgggatgggcag

SEQ ID NO: 532020 - DNA, 25 bp, Homo sapien
aagaacagtaagagcccaggaagac

SEQ ID NO: 532021 - DNA, 25 bp, Homo sapien
ggaaggaagaacagtaagagcccag

SEQ ID NO: 532022 - DNA, 25 bp, Homo sapien
ggaagaacagtaagagcccaggaag

SEQ ID NO: 532023 - DNA, 25 bp, Homo sapien
ctggaaggaagaacagtaagagccc

SEQ ID NO: 532024 - DNA, 25 bp, Homo sapien
gggatgatttttaggatatccaata

SEQ ID NO: 532025 - DNA, 25 bp, Homo sapien
gatgatttttaggatatccaatatt

SEQ ID NO: 532026 - DNA, 25 bp, Homo sapien
tgtggggatgatttttaggatatcc

SEQ ID NO: 532027 - DNA, 25 bp, Homo sapien
gatttttaggatatccaatattcat

SEQ ID NO: 532028 - DNA, 25 bp, Homo sapien
caataaacatgggaatacaaatatc

SEQ ID NO: 532029 - DNA, 25 bp, Homo sapien
caccgttccccagccaggattttgt

SEQ ID NO: 532030 - DNA, 25 bp, Homo sapien
tttggacatatactcagcagtagga

SEQ ID NO: 532031 - DNA, 25 bp, Homo sapien
tactgttttccctaatggctataat

SEQ ID NO: 532032 - DNA, 25 bp, Homo sapien
caactgatgtaaagcaagactgtct

SEQ ID NO: 532033 - DNA, 25 bp, Homo sapien
ggctgtccaatctgtttaatcaaag

SEQ ID NO: 532034 - DNA, 25 bp, Homo sapien
actggaatacagtgaaagaactcta

SEQ ID NO: 532035 - DNA, 25 bp, Homo sapien
tgaggtgtctgtatactttgtcatc

SEQ ID NO: 532036 - DNA, 25 bp, Homo sapien
tgagatatgcaggttgattaaggcc

SEQ ID NO: 532037 - DNA, 25 bp, Homo sapien
gcctctgaacgggataagaggtaaa

SEQ ID NO: 532038 - DNA, 25 bp, Homo sapien
attaaggcctctgaacgggataaga

SEQ ID NO: 532039 - DNA, 25 bp, Homo sapien
tcagcgactatctggtgagatatgc

SEQ ID NO: 532040 - DNA, 25 bp, Homo sapien
cgtgactcggtcaaaggatcttttc

SEQ ID NO: 532041 - DNA, 25 bp, Homo sapien
taaatgaaaattagcggcaggctgc

SEQ ID NO: 532042 - DNA, 25 bp, Homo sapien
tcagaaatgctgcaagcgggaacgt

SEQ ID NO: 532043 - DNA, 25 bp, Homo sapien
aaagatggtcaaattcagggcagca

SEQ ID NO: 532044 - DNA, 25 bp, Homo sapien
tacatttacagcattgcactaccag

SEQ ID NO: 532045 - DNA, 25 bp, Homo sapien
tctgaagccaagttgcccaagtgca

SEQ ID NO: 532046 - DNA, 25 bp, Homo sapien
gacctatggcttctatgcccacaaa

SEQ ID NO: 532047 - DNA, 25 bp, Homo sapien
aaaaagacactagaagacctatggc

SEQ ID NO: 532048 - DNA, 25 bp, Homo sapien
agtatatgccacagtatcagtcttc

SEQ ID NO: 532049 - DNA, 25 bp, Homo sapien
tggagacatgacaacacagtatatg

SEQ ID NO: 532050 - DNA, 25 bp, Homo sapien
gacaacacagtatatgccacagtat

SEQ ID NO: 532051 - DNA, 25 bp, Homo sapien
ctggagctggagacatgacaacaca

SEQ ID NO: 532052 - DNA, 25 bp, Homo sapien
ggtctaccctaaagaatgtttcatg

SEQ ID NO: 532053 - DNA, 25 bp, Homo sapien
tccatttggtctaatgtgccattta

SEQ ID NO: 532054 - DNA, 25 bp, Homo sapien
atggattatcgttttccatcccttt

SEQ ID NO: 532055 - DNA, 25 bp, Homo sapien
gttttatctgagtgtagctactcct

SEQ ID NO: 532056 - DNA, 25 bp, Homo sapien
tctttcccagattgcacagttattg

SEQ ID NO: 532057 - DNA, 25 bp, Homo sapien
taattcataaacgtttggtcctagc

SEQ ID NO: 532058 - DNA, 25 bp, Homo sapien
gatacaatgaagtggacagatacca

SEQ ID NO: 532059 - DNA, 25 bp, Homo sapien
tggtcctagctacacaagaagatac

SEQ ID NO: 532060 - DNA, 25 bp, Homo sapien
ttcatatctgttaatggatgaactg

SEQ ID NO: 532061 - DNA, 25 bp, Homo sapien
caaacacatcttagctagtaacgac

SEQ ID NO: 532062 - DNA, 25 bp, Homo sapien
cagatccaaagtacaaacacatctt

SEQ ID NO: 532063 - DNA, 25 bp, Homo sapien
gctagtaacgaccacttgttttcca

SEQ ID NO: 532064 - DNA, 25 bp, Homo sapien
tcttagctagtaacgaccacttgtt

SEQ ID NO: 532065 - DNA, 25 bp, Homo sapien
cacagaaaccgaggacggatgaaat

SEQ ID NO: 532066 - DNA, 25 bp, Homo sapien
aaggcacagaaaccgaggacggatg

SEQ ID NO: 532067 - DNA, 25 bp, Homo sapien
gaaaggcacagaaaccgaggacgga

SEQ ID NO: 532068 - DNA, 25 bp, Homo sapien
ggcacagaaaccgaggacggatgaa

SEQ ID NO: 532069 - DNA, 25 bp, Homo sapien
gatagaggtaagctacaaaccttag

SEQ ID NO: 532070 - DNA, 25 bp, Homo sapien
caaaccttagtttgtcagactccag

SEQ ID NO: 532071 - DNA, 25 bp, Homo sapien
tgacagttctctcctacccattatt

SEQ ID NO: 532072 - DNA, 25 bp, Homo sapien
gcaataaagcaggttccctaaggac

SEQ ID NO: 532073 - DNA, 25 bp, Homo sapien
acatacatacactcactctgtctgg

SEQ ID NO: 532074 - DNA, 25 bp, Homo sapien
cacataacaagtgtagaagtatata

SEQ ID NO: 532075 - DNA, 25 bp, Homo sapien
tatatggcatataacaagtgtacac

SEQ ID NO: 532076 - DNA, 25 bp, Homo sapien
tgtgaacctttgaactatatgtatg

SEQ ID NO: 532077 - DNA, 25 bp, Homo sapien
tctaagtggtaagaatgacctgtca

SEQ ID NO: 532078 - DNA, 25 bp, Homo sapien
tatgtatagggtgataaccttcccc

SEQ ID NO: 532079 - DNA, 25 bp, Homo sapien
gcctagatgtcgatgactgcaagta

SEQ ID NO: 532080 - DNA, 25 bp, Homo sapien
ttgcaccagtaaacttcaagctgct

SEQ ID NO: 532081 - DNA, 25 bp, Homo sapien
tcctcagttctatcagcagcagagg

SEQ ID NO: 532082 - DNA, 25 bp, Homo sapien
cctttggcatgtgggaacacctgat

SEQ ID NO: 532083 - DNA, 25 bp, Homo sapien
tgtggtgaccagtcttccaacgcct

SEQ ID NO: 532084 - DNA, 25 bp, Homo sapien
gccttgccatggtcacgaattaaaa

SEQ ID NO: 532085 - DNA, 25 bp, Homo sapien
ggagagcagcaagaatagtgcctca

SEQ ID NO: 532086 - DNA, 25 bp, Homo sapien
agagcagcaagaatagtgcctcaga

SEQ ID NO: 532087 - DNA, 25 bp, Homo sapien
tcaggaagcttactctcctcagctt

SEQ ID NO: 532088 - DNA, 25 bp, Homo sapien
aaataacttcatgcactccttcaat

SEQ ID NO: 532089 - DNA, 25 bp, Homo sapien
caggataaaggcgatccagcgccct

SEQ ID NO: 532090 - DNA, 25 bp, Homo sapien
gacgacaatctgcttcggttgaaag

SEQ ID NO: 532091 - DNA, 25 bp, Homo sapien
ttagcacaggacacatcgatggttg

SEQ ID NO: 532092 - DNA, 25 bp, Homo sapien
gacttcagacaggactttggacacc

SEQ ID NO: 532093 - DNA, 25 bp, Homo sapien
taagttcataagttccttctgaagc

SEQ ID NO: 532094 - DNA, 25 bp, Homo sapien
aatctaagttcataagttccttctg

SEQ ID NO: 532095 - DNA, 25 bp, Homo sapien
taaatcattatacttgtcatggaaa

SEQ ID NO: 532096 - DNA, 25 bp, Homo sapien
tatacttgtcatggaaatctaagtt

SEQ ID NO: 532097 - DNA, 25 bp, Homo sapien
gtttcctccatgacggcatctgaaa

SEQ ID NO: 532098 - DNA, 25 bp, Homo sapien
ggccgggctccactggccgtttcat

SEQ ID NO: 532099 - DNA, 25 bp, Homo sapien
gcatctgaaaattccgccatcacct

SEQ ID NO: 532100 - DNA, 25 bp, Homo sapien
catgtccctgacaatggcttcgtag

SEQ ID NO: 532101 - DNA, 25 bp, Homo sapien
ggtttcaaaactgaacagattttga

SEQ ID NO: 532102 - DNA, 25 bp, Homo sapien
tcaaaactgaacagattttgaagcc

SEQ ID NO: 532103 - DNA, 25 bp, Homo sapien
aaaactgaacagattttgaagccac

SEQ ID NO: 532104 - DNA, 25 bp, Homo sapien
aactgaacagattttgaagccacat

SEQ ID NO: 532105 - DNA, 25 bp, Homo sapien
ctctccctctagctttaagccactg

SEQ ID NO: 532106 - DNA, 25 bp, Homo sapien
cctgggccaccttgaggaaaggcat

SEQ ID NO: 532107 - DNA, 25 bp, Homo sapien
ctctccccgtacacctgggccacct

SEQ ID NO: 532108 - DNA, 25 bp, Homo sapien
cacctgggccaccttgaggaaaggc

SEQ ID NO: 532109 - DNA, 25 bp, Homo sapien
gtacacctgggccaccttgaggaaa

SEQ ID NO: 532110 - DNA, 25 bp, Homo sapien
ctcttgagaagacgagggagatttc

SEQ ID NO: 532111 - DNA, 25 bp, Homo sapien
tccgcgtcctgcgtaagtggagccg

SEQ ID NO: 532112 - DNA, 25 bp, Homo sapien
tggagccgccgtggttccaaagacg

SEQ ID NO: 532113 - DNA, 25 bp, Homo sapien
tccgattcagtaaccagcagtgctt

SEQ ID NO: 532114 - DNA, 25 bp, Homo sapien
gcactattaaaactattccataagg

SEQ ID NO: 532115 - DNA, 25 bp, Homo sapien
gcttccaactcaaatacattgtgtt

SEQ ID NO: 532116 - DNA, 25 bp, Homo sapien
tgtgctcacctgaacaggatttcag

SEQ ID NO: 532117 - DNA, 25 bp, Homo sapien
ttaccagaaagtgatagaaactgtg

SEQ ID NO: 532118 - DNA, 25 bp, Homo sapien
gtgaggaaaagctatttgtatagtt

SEQ ID NO: 532119 - DNA, 25 bp, Homo sapien
gagtaactgtgtgattgcctgatgg

SEQ ID NO: 532120 - DNA, 25 bp, Homo sapien
ttgcctgatgggttgtcctgcctgc

SEQ ID NO: 532121 - DNA, 25 bp, Homo sapien
caaaaccaattcactgggaacacgg

SEQ ID NO: 532122 - DNA, 25 bp, Homo sapien
catgcattgagtcggcctctgggtg

SEQ ID NO: 532123 - DNA, 25 bp, Homo sapien
gaaaacagtcttcatgcattgagtc

SEQ ID NO: 532124 - DNA, 25 bp, Homo sapien
taggatcagttggttaccagaatgc

SEQ ID NO: 532125 - DNA, 25 bp, Homo sapien
gctgagttatgcatcatgggtccgg

SEQ ID NO: 532126 - DNA, 25 bp, Homo sapien
gggcacccctattgcgagtcctgca

SEQ ID NO: 532127 - DNA, 25 bp, Homo sapien
cagtgagtccgaatgagtggagttc

SEQ ID NO: 532128 - DNA, 25 bp, Homo sapien
cgctccctcccgcaaggagttgaga

SEQ ID NO: 532129 - DNA, 25 bp, Homo sapien
tgacgaagtggccagctgattccag

SEQ ID NO: 532130 - DNA, 25 bp, Homo sapien
tacagctcggtgcttaactcggtca

SEQ ID NO: 532131 - DNA, 25 bp, Homo sapien
cagactggcagcatgaccggtgagt

SEQ ID NO: 532132 - DNA, 25 bp, Homo sapien
tctatgacgtcacacgaggagccct

SEQ ID NO: 532133 - DNA, 25 bp, Homo sapien
gcgctagggccgagatcatgtctga

SEQ ID NO: 532134 - DNA, 25 bp, Homo sapien
gttgtgggagtgattaactgagcca

SEQ ID NO: 532135 - DNA, 25 bp, Homo sapien
taaacaatgtataagtgatggaatc

SEQ ID NO: 532136 - DNA, 25 bp, Homo sapien
gtataagtgatggaatcattctaac

SEQ ID NO: 532137 - DNA, 25 bp, Homo sapien
caagagcgaagacctgttaaagttc

SEQ ID NO: 532138 - DNA, 25 bp, Homo sapien
ggagccaaatgtaaaggaattcaga

SEQ ID NO: 532139 - DNA, 25 bp, Homo sapien
agcttgtactacaggtgaaccacca

SEQ ID NO: 532140 - DNA, 25 bp, Homo sapien
cacaatgtgcgttgaatggataaaa

SEQ ID NO: 532141 - DNA, 25 bp, Homo sapien
tccacaatcccttatgcaaaacttt

SEQ ID NO: 532142 - DNA, 25 bp, Homo sapien
tgttcattcagaaaataaggatgga

SEQ ID NO: 532143 - DNA, 25 bp, Homo sapien
taatttatttctaggatacaaatgg

SEQ ID NO: 532144 - DNA, 25 bp, Homo sapien
tacacgaaatgagggagcaataact

SEQ ID NO: 532145 - DNA, 25 bp, Homo sapien
tagtagtgtgttattttattacacg

SEQ ID NO: 532146 - DNA, 25 bp, Homo sapien
catacaagtgggaaaaactgtgatt

SEQ ID NO: 532147 - DNA, 25 bp, Homo sapien
tgtacacttagaggtaactaaggct

SEQ ID NO: 532148 - DNA, 25 bp, Homo sapien
caggagaggaggtgatgtacactta

SEQ ID NO: 532149 - DNA, 25 bp, Homo sapien
tttccacagtactattaagagaggc

SEQ ID NO: 532150 - DNA, 25 bp, Homo sapien
ctgagaattccttttaagaagacac

SEQ ID NO: 532151 - DNA, 25 bp, Homo sapien
catcagggaccctgcaggcaattct

SEQ ID NO: 532152 - DNA, 25 bp, Homo sapien
caggaagggtgaaccgctttctagc

SEQ ID NO: 532153 - DNA, 25 bp, Homo sapien
gaattccttttaagaagacacctgc

SEQ ID NO: 532154 - DNA, 25 bp, Homo sapien
tccaggcgagaagcgatgcggccca

SEQ ID NO: 532155 - DNA, 25 bp, Homo sapien
gattcacagcaatgatcaccagcac

SEQ ID NO: 532156 - DNA, 25 bp, Homo sapien
gacctcgaggaccaccaaagtgctg

SEQ ID NO: 532157 - DNA, 25 bp, Homo sapien
caacagggcattagggtcaccagaa

SEQ ID NO: 532158 - DNA, 25 bp, Homo sapien
tccatcaggtggagactcgagtgag

SEQ ID NO: 532159 - DNA, 25 bp, Homo sapien
ctgatctggagggagttactcaccc

SEQ ID NO: 532160 - DNA, 25 bp, Homo sapien
gctgagttatcctttagcgctggta

SEQ ID NO: 532161 - DNA, 25 bp, Homo sapien
aagtctagcttttcagggtatccca

SEQ ID NO: 532162 - DNA, 25 bp, Homo sapien
taaagagtacgggtcatcaggctgc

SEQ ID NO: 532163 - DNA, 25 bp, Homo sapien
tcctgtggaaggcaacgattcatga

SEQ ID NO: 532164 - DNA, 25 bp, Homo sapien
gctaggaaagagctaatgcaagccc

SEQ ID NO: 532165 - DNA, 25 bp, Homo sapien
tgatgtctgaaacgaaaccacggcc

SEQ ID NO: 532166 - DNA, 25 bp, Homo sapien
caccctctggaagctaatatggagc

SEQ ID NO: 532167 - DNA, 25 bp, Homo sapien
aaagcatttttgcaccctggcccca

SEQ ID NO: 532168 - DNA, 25 bp, Homo sapien
cacagttctctagcaagcaggtcac

SEQ ID NO: 532169 - DNA, 25 bp, Homo sapien
tactgatagaagttccccgctgaga

SEQ ID NO: 532170 - DNA, 25 bp, Homo sapien
tttaacaggatctccacaataggct

SEQ ID NO: 532171 - DNA, 25 bp, Homo sapien
ggccgttttcttcaagtctcggatc

SEQ ID NO: 532172 - DNA, 25 bp, Homo sapien
tggaagctgctcagaaactcaatga

SEQ ID NO: 532173 - DNA, 25 bp, Homo sapien
tcaagtagttcttctcgtcagcgaa

SEQ ID NO: 532174 - DNA, 25 bp, Homo sapien
tgagcccaccgctcagccaggccag

SEQ ID NO: 532175 - DNA, 25 bp, Homo sapien
accgctcagccaggccaggggaccc

SEQ ID NO: 532176 - DNA, 25 bp, Homo sapien
cgctcagccaggccaggggacccat

SEQ ID NO: 532177 - DNA, 25 bp, Homo sapien
agtgagcccaccgctcagccaggcc

SEQ ID NO: 532178 - DNA, 25 bp, Homo sapien
ttgtgacggtccaggatcagctccc

SEQ ID NO: 532179 - DNA, 25 bp, Homo sapien
actggatgttgggacttttatcccg

SEQ ID NO: 532180 - DNA, 25 bp, Homo sapien
tcccgaaggaggttcatcatgagtt

SEQ ID NO: 532181 - DNA, 25 bp, Homo sapien
ttgtcatgatggcaaagttgtgacg

SEQ ID NO: 532182 - DNA, 25 bp, Homo sapien
gattctgagagggatctgaaggaca

SEQ ID NO: 532183 - DNA, 25 bp, Homo sapien
caagctggaccatcatatgagttgc

SEQ ID NO: 532184 - DNA, 25 bp, Homo sapien
tgtgtgacactatatcccaaaccta

SEQ ID NO: 532185 - DNA, 25 bp, Homo sapien
caagtgtgatgtttagcaagctgga

SEQ ID NO: 532186 - DNA, 25 bp, Homo sapien
ttccaaaagcaggacaggacactta

SEQ ID NO: 532187 - DNA, 25 bp, Homo sapien
caaaagcaggacaggacacttacat

SEQ ID NO: 532188 - DNA, 25 bp, Homo sapien
tactcatatactaatagacccgtca

SEQ ID NO: 532189 - DNA, 25 bp, Homo sapien
tgctaatgagatataaacttacggg

SEQ ID NO: 532190 - DNA, 25 bp, Homo sapien
gtaacataattctcagactgaagca

SEQ ID NO: 532191 - DNA, 25 bp, Homo sapien
gtctcttagtaacataattctcaga

SEQ ID NO: 532192 - DNA, 25 bp, Homo sapien
ttctcagactgaagcaatttctcat

SEQ ID NO: 532193 - DNA, 25 bp, Homo sapien
tcagactgaagcaatttctcatagt

SEQ ID NO: 532194 - DNA, 25 bp, Homo sapien
agtggattctccgtattaggctggc

SEQ ID NO: 532195 - DNA, 25 bp, Homo sapien
gacggcccaactagtctctctggag

SEQ ID NO: 532196 - DNA, 25 bp, Homo sapien
taaacagataaagaacgaggcaacc

SEQ ID NO: 532197 - DNA, 25 bp, Homo sapien
tacacttaaggcttcacttggcaag

SEQ ID NO: 532198 - DNA, 25 bp, Homo sapien
gggacactggtgcacgaagtcttct

SEQ ID NO: 532199 - DNA, 25 bp, Homo sapien
ctggggacactggtgcacgaagtct

SEQ ID NO: 532200 - DNA, 25 bp, Homo sapien
acactggtgcacgaagtcttctttc

SEQ ID NO: 532201 - DNA, 25 bp, Homo sapien
gtgcacgaagtcttctttcctaaca

SEQ ID NO: 532202 - DNA, 25 bp, Homo sapien
ctagccctcggagagtcaagtgcga

SEQ ID NO: 532203 - DNA, 25 bp, Homo sapien
gaagagggtgacaaactcctagccc

SEQ ID NO: 532204 - DNA, 25 bp, Homo sapien
gaggttcagcattcacttccatcag

SEQ ID NO: 532205 - DNA, 25 bp, Homo sapien
gtatgtggtatgacctactcccgag

SEQ ID NO: 532206 - DNA, 25 bp, Homo sapien
ccaacactttatgtctggttagtaa

SEQ ID NO: 532207 - DNA, 25 bp, Homo sapien
tctaagaagtctgctaccaacactt

SEQ ID NO: 532208 - DNA, 25 bp, Homo sapien
acactttatgtctggttagtaaatc

SEQ ID NO: 532209 - DNA, 25 bp, Homo sapien
gtctgctaccaacactttatgtctg

SEQ ID NO: 532210 - DNA, 25 bp, Homo sapien
gaatacattctctcagcataatccc

SEQ ID NO: 532211 - DNA, 25 bp, Homo sapien
caagtggttcatgtcgaatacattc

SEQ ID NO: 532212 - DNA, 25 bp, Homo sapien
taatcccacaacgtaaggcaatctg

SEQ ID NO: 532213 - DNA, 25 bp, Homo sapien
tgttgacaactccacgtacttaaag

SEQ ID NO: 532214 - DNA, 25 bp, Homo sapien
aaactaggctctgtcatgtattagc

SEQ ID NO: 532215 - DNA, 25 bp, Homo sapien
gtcagatctgcatggaaaactaggc

SEQ ID NO: 532216 - DNA, 25 bp, Homo sapien
aactgattatggtacaactgttcca

SEQ ID NO: 532217 - DNA, 25 bp, Homo sapien
gaacagtcctcgaatcttcttaaag

SEQ ID NO: 532218 - DNA, 25 bp, Homo sapien
cgagtgcctatctgtcttctcaaga

SEQ ID NO: 532219 - DNA, 25 bp, Homo sapien
tatgaggatgagcactaatatactc

SEQ ID NO: 532220 - DNA, 25 bp, Homo sapien
taatatactccacagtaggactccg

SEQ ID NO: 532221 - DNA, 25 bp, Homo sapien
cctttgaggagcataaacaggatat

SEQ ID NO: 532222 - DNA, 25 bp, Homo sapien
tcacaaattaacatgccactaggtg

SEQ ID NO: 532223 - DNA, 25 bp, Homo sapien
cactaggtgtggcaaacacagtcct

SEQ ID NO: 532224 - DNA, 25 bp, Homo sapien
cctcgtactcaaggtaacacagaag

SEQ ID NO: 532225 - DNA, 25 bp, Homo sapien
gtaacacagaagtggctgtcccagt

SEQ ID NO: 532226 - DNA, 25 bp, Homo sapien
gttctttctcgtttgtaccacacag

SEQ ID NO: 532227 - DNA, 25 bp, Homo sapien
gtagagttcttgtgctagctgagcc

SEQ ID NO: 532228 - DNA, 25 bp, Homo sapien
tcaaagtctatcagctgcaggtcag

SEQ ID NO: 532229 - DNA, 25 bp, Homo sapien
tatcagtgtcactagcaggccactg

SEQ ID NO: 532230 - DNA, 25 bp, Homo sapien
tgcttgcagtgatttagacacttct

SEQ ID NO: 532231 - DNA, 25 bp, Homo sapien
gcttgcagtgatttagacacttctt

SEQ ID NO: 532232 - DNA, 25 bp, Homo sapien
cggccagctgccccgtccgagaggg

SEQ ID NO: 532233 - DNA, 25 bp, Homo sapien
ccagctgccccgtccgagagggagg

SEQ ID NO: 532234 - DNA, 25 bp, Homo sapien
gctgccccgtccgagagggaggtgg

SEQ ID NO: 532235 - DNA, 25 bp, Homo sapien
cgggccaggatgacaatggcggctt

SEQ ID NO: 532236 - DNA, 25 bp, Homo sapien
tctctagagagtgaacctaaagttc

SEQ ID NO: 532237 - DNA, 25 bp, Homo sapien
taagctgtgtagtctagagggatcc

SEQ ID NO: 532238 - DNA, 25 bp, Homo sapien
tttacattggtttttggcattgcga

SEQ ID NO: 532239 - DNA, 25 bp, Homo sapien
tatagagggtctatgtgcacatcac

SEQ ID NO: 532240 - DNA, 25 bp, Homo sapien
cttttccaaaatggccaaattgtct

SEQ ID NO: 532241 - DNA, 25 bp, Homo sapien
tctttcaggattttcacaatttctg

SEQ ID NO: 532242 - DNA, 25 bp, Homo sapien
tgcttttccaaaatggccaaattgt

SEQ ID NO: 532243 - DNA, 25 bp, Homo sapien
caaattgtctttcaggattttcaca

SEQ ID NO: 532244 - DNA, 25 bp, Homo sapien
tgtgtgatttactaaacaaaggcat

SEQ ID NO: 532245 - DNA, 25 bp, Homo sapien
gtgtagaaatctcttcttccaatat

SEQ ID NO: 532246 - DNA, 25 bp, Homo sapien
agaaatctcttcttccaatatggaa

SEQ ID NO: 532247 - DNA, 25 bp, Homo sapien
aaatctcttcttccaatatggaatg

SEQ ID NO: 532248 - DNA, 25 bp, Homo sapien
tagaaatctcttcttccaatatgga

SEQ ID NO: 532249 - DNA, 25 bp, Homo sapien
ggcactcaccaccacgttcggctat

SEQ ID NO: 532250 - DNA, 25 bp, Homo sapien
ggcatgagccaccacgcctggcctg

SEQ ID NO: 532251 - DNA, 25 bp, Homo sapien
actcaccaccacgttcggctatttt

SEQ ID NO: 532252 - DNA, 25 bp, Homo sapien
gcatgagccaccacgcctggcctgt

SEQ ID NO: 532253 - DNA, 25 bp, Homo sapien
atcagaagaaaaactcttttataag

SEQ ID NO: 532254 - DNA, 25 bp, Homo sapien
cagaagaaaaactcttttataagag

SEQ ID NO: 532255 - DNA, 25 bp, Homo sapien
tcagaagaaaaactcttttataaga

SEQ ID NO: 532256 - DNA, 25 bp, Homo sapien
aaactcttttataagagaaactcat

SEQ ID NO: 532257 - DNA, 25 bp, Homo sapien
caaatgttacagaaatgcctaggct

SEQ ID NO: 532258 - DNA, 25 bp, Homo sapien
gacagctctttcttgagctcaaagc

SEQ ID NO: 532259 - DNA, 25 bp, Homo sapien
tcaaagcactttagatgaagtagcc

SEQ ID NO: 532260 - DNA, 25 bp, Homo sapien
tcgtccatttaatagaggttgcctc

SEQ ID NO: 532261 - DNA, 25 bp, Homo sapien
tattaccaagcgtggcagagaaaag

SEQ ID NO: 532262 - DNA, 25 bp, Homo sapien
cactggaaaacgttaccagaaaatg

SEQ ID NO: 532263 - DNA, 25 bp, Homo sapien
gaagagtaacagttaccactggaaa

SEQ ID NO: 532264 - DNA, 25 bp, Homo sapien
agagtttccacaattaggtcttgac

SEQ ID NO: 532265 - DNA, 25 bp, Homo sapien
taatctgtcacaggcagttctgttt

SEQ ID NO: 532266 - DNA, 25 bp, Homo sapien
gctctcagattccaagccttgcttg

SEQ ID NO: 532267 - DNA, 25 bp, Homo sapien
gccttgcttgtctcttaatctgtca

SEQ ID NO: 532268 - DNA, 25 bp, Homo sapien
tgtttctggtcaaaccagcttgctt

SEQ ID NO: 532269 - DNA, 25 bp, Homo sapien
gaaatccagatacaccaagtatttc

SEQ ID NO: 532270 - DNA, 25 bp, Homo sapien
ttttaactggcttctacaagaaatc

SEQ ID NO: 532271 - DNA, 25 bp, Homo sapien
ttaactggcttctacaagaaatcca

SEQ ID NO: 532272 - DNA, 25 bp, Homo sapien
aatccagatacaccaagtatttcct

SEQ ID NO: 532273 - DNA, 25 bp, Homo sapien
tagcaaaatgcatagctctggtagc

SEQ ID NO: 532274 - DNA, 25 bp, Homo sapien
cagttgtgcattgccaagggaataa

SEQ ID NO: 532275 - DNA, 25 bp, Homo sapien
gaaatcattacaaagcttgctaccc

SEQ ID NO: 532276 - DNA, 25 bp, Homo sapien
ggaaattcgttaagactcagtccta

SEQ ID NO: 532277 - DNA, 25 bp, Homo sapien
gcttccattgcaatacagcacttat

SEQ ID NO: 532278 - DNA, 25 bp, Homo sapien
tttcacatagcgtaattgttctggg

SEQ ID NO: 532279 - DNA, 25 bp, Homo sapien
atccactttgttacaaatattgctg

SEQ ID NO: 532280 - DNA, 25 bp, Homo sapien
ctcctctgcatttgatatgcttcca

SEQ ID NO: 532281 - DNA, 25 bp, Homo sapien
ttagaagttgtatatcatttgcaaa

SEQ ID NO: 532282 - DNA, 25 bp, Homo sapien
tgtttgaaccttcttagctttcacc

SEQ ID NO: 532283 - DNA, 25 bp, Homo sapien
tgaaccttcttagctttcaccaaag

SEQ ID NO: 532284 - DNA, 25 bp, Homo sapien
gtttgaaccttcttagctttcacca

SEQ ID NO: 532285 - DNA, 25 bp, Homo sapien
ctctcctttagtgcattgctcttgc

SEQ ID NO: 532286 - DNA, 25 bp, Homo sapien
ctttacgttctgaacagcaacttag

SEQ ID NO: 532287 - DNA, 25 bp, Homo sapien
tacgttctgaacagcaacttagaac

SEQ ID NO: 532288 - DNA, 25 bp, Homo sapien
tctgaacagcaacttagaacacttt

SEQ ID NO: 532289 - DNA, 25 bp, Homo sapien
acagcaacttagaacactttgctcc

SEQ ID NO: 532290 - DNA, 25 bp, Homo sapien
ctatagttggatgtttcgggaagac

SEQ ID NO: 532291 - DNA, 25 bp, Homo sapien
taactttatatggatgttgcctgcc

SEQ ID NO: 532292 - DNA, 25 bp, Homo sapien
aattctggtaggagtactgtgctgt

SEQ ID NO: 532293 - DNA, 25 bp, Homo sapien
tagttgtgtataggcagaagcaagg

SEQ ID NO: 532294 - DNA, 25 bp, Homo sapien
gatttgctcaccacctgaccttatg

SEQ ID NO: 532295 - DNA, 25 bp, Homo sapien
tctcccagctaatgcctaaaaggca

SEQ ID NO: 532296 - DNA, 25 bp, Homo sapien
tatacgcttcagaaggattcatggg

SEQ ID NO: 532297 - DNA, 25 bp, Homo sapien
ccccatcaatgcaagaagggtttat

SEQ ID NO: 532298 - DNA, 25 bp, Homo sapien
cctattctgcaggttatctgtttgc

SEQ ID NO: 532299 - DNA, 25 bp, Homo sapien
gtttgctctgttaatagtttctctt

SEQ ID NO: 532300 - DNA, 25 bp, Homo sapien
attaggtcctacttgtcaacttttg

SEQ ID NO: 532301 - DNA, 25 bp, Homo sapien
ttgctctgttaatagtttctcttac

SEQ ID NO: 532302 - DNA, 25 bp, Homo sapien
ttcacgccccgtttctgcaagacca

SEQ ID NO: 532303 - DNA, 25 bp, Homo sapien
caagcatgtcatggcagacccagag

SEQ ID NO: 532304 - DNA, 25 bp, Homo sapien
tttccctaacaaagcctcctcctgc

SEQ ID NO: 532305 - DNA, 25 bp, Homo sapien
caacatatcgttatcggggaaatca

SEQ ID NO: 532306 - DNA, 25 bp, Homo sapien
gatgccggcctctcgactacgagta

SEQ ID NO: 532307 - DNA, 25 bp, Homo sapien
ggctcagctacagtgcgcgagacaa

SEQ ID NO: 532308 - DNA, 25 bp, Homo sapien
cgagagcgctagcagtcaatcggga

SEQ ID NO: 532309 - DNA, 25 bp, Homo sapien
tacgagtaactccattggctcagct

SEQ ID NO: 532310 - DNA, 25 bp, Homo sapien
gcttggctcagctatcagattttaa

SEQ ID NO: 532311 - DNA, 25 bp, Homo sapien
acagggatgaaccttgtgcttggct

SEQ ID NO: 532312 - DNA, 25 bp, Homo sapien
ttcagttagccaaggagcaaccttg

SEQ ID NO: 532313 - DNA, 25 bp, Homo sapien
tggaaaattaaagacagatatttgt

SEQ ID NO: 532314 - DNA, 25 bp, Homo sapien
cagaagattgttgatacgtggccca

SEQ ID NO: 532315 - DNA, 25 bp, Homo sapien
tattcaggctccaggttcagaagag

SEQ ID NO: 532316 - DNA, 25 bp, Homo sapien
gagagactttccaagcaggagacaa

SEQ ID NO: 532317 - DNA, 25 bp, Homo sapien
catcacccgtagagcacaaactgga

SEQ ID NO: 532318 - DNA, 25 bp, Homo sapien
cacatttactggctttagcaatgaa

SEQ ID NO: 532319 - DNA, 25 bp, Homo sapien
tcagttcttaaaggctccacattta

SEQ ID NO: 532320 - DNA, 25 bp, Homo sapien
caatgaattcctttagcagagggcc

SEQ ID NO: 532321 - DNA, 25 bp, Homo sapien
tgattgatgcaaaacttaaagcaga

SEQ ID NO: 532322 - DNA, 25 bp, Homo sapien
aaggaagccctgaacgcatgtggtg

SEQ ID NO: 532323 - DNA, 25 bp, Homo sapien
gaaccacttagcaaccagtgcccag

SEQ ID NO: 532324 - DNA, 25 bp, Homo sapien
aatttgcaagttcaccagagagtcg

SEQ ID NO: 532325 - DNA, 25 bp, Homo sapien
aactactgaggtatctgggtatgca

SEQ ID NO: 532326 - DNA, 25 bp, Homo sapien
agtcatctagcatccccaagttgag

SEQ ID NO: 532327 - DNA, 25 bp, Homo sapien
gtgtgtacatttgcttcaaagctat

SEQ ID NO: 532328 - DNA, 25 bp, Homo sapien
ttttggcccacagcacgaaggcaaa

SEQ ID NO: 532329 - DNA, 25 bp, Homo sapien
ttttgaaactccctgtaactactga

SEQ ID NO: 532330 - DNA, 25 bp, Homo sapien
tcctaggacagatcttagctaaaag

SEQ ID NO: 532331 - DNA, 25 bp, Homo sapien
ttccagcaacttgagccgagacatc

SEQ ID NO: 532332 - DNA, 25 bp, Homo sapien
tagctaaaagtgaggaagaagtttc

SEQ ID NO: 532333 - DNA, 25 bp, Homo sapien
tctgtaaacttcctaggacagatct

SEQ ID NO: 532334 - DNA, 25 bp, Homo sapien
tgcagcagagaatagcgaaaaggca

SEQ ID NO: 532335 - DNA, 25 bp, Homo sapien
agtaattcctctcttgataatgtgc

SEQ ID NO: 532336 - DNA, 25 bp, Homo sapien
gcgaaaaggcattctccacagtaat

SEQ ID NO: 532337 - DNA, 25 bp, Homo sapien
cacagtaagatgtcgccaaatccag

SEQ ID NO: 532338 - DNA, 25 bp, Homo sapien
atgcggctcgtccatcccaatgcta

SEQ ID NO: 532339 - DNA, 25 bp, Homo sapien
gcctatggtcataaactaggtccaa

SEQ ID NO: 532340 - DNA, 25 bp, Homo sapien
tcagtaacattagaacaaaaaagcc

SEQ ID NO: 532341 - DNA, 25 bp, Homo sapien
tcttcaatagtgcaaagaaagagca

SEQ ID NO: 532342 - DNA, 25 bp, Homo sapien
tatagcatcttctggcggcaggtcg

SEQ ID NO: 532343 - DNA, 25 bp, Homo sapien
gaacatggatcgaaaatgctcacac

SEQ ID NO: 532344 - DNA, 25 bp, Homo sapien
tccaatacgactggaacatggatcg

SEQ ID NO: 532345 - DNA, 25 bp, Homo sapien
gtactggagaaaggcacgatacact

SEQ ID NO: 532346 - DNA, 25 bp, Homo sapien
ccatcaattcgaaacttcagatcag

SEQ ID NO: 532347 - DNA, 25 bp, Homo sapien
cagtgactctgcaactgttaaaaag

SEQ ID NO: 532348 - DNA, 25 bp, Homo sapien
tgactctgcaactgttaaaaagtct

SEQ ID NO: 532349 - DNA, 25 bp, Homo sapien
tattttccatcaattcgaaacttca

SEQ ID NO: 532350 - DNA, 25 bp, Homo sapien
ggcacttgtacaaattcccggaatg

SEQ ID NO: 532351 - DNA, 25 bp, Homo sapien
taagcggtcatgttctcaagcagag

SEQ ID NO: 532352 - DNA, 25 bp, Homo sapien
cttaaatggtaatgctaagcggtca

SEQ ID NO: 532353 - DNA, 25 bp, Homo sapien
ggtcagcatacccaactcaaggagg

SEQ ID NO: 532354 - DNA, 25 bp, Homo sapien
gcttccaagcctgggatgaaccatt

SEQ ID NO: 532355 - DNA, 25 bp, Homo sapien
ttaccagagcaactcctagaggagg

SEQ ID NO: 532356 - DNA, 25 bp, Homo sapien
taatcaaagacctcggcttccaagc

SEQ ID NO: 532357 - DNA, 25 bp, Homo sapien
ctatggatacacgaagcaggtttca

SEQ ID NO: 532358 - DNA, 25 bp, Homo sapien
gaccttgcaacctggatcactggtg

SEQ ID NO: 532359 - DNA, 25 bp, Homo sapien
tgccgtgcaacccagttaataacag

SEQ ID NO: 532360 - DNA, 25 bp, Homo sapien
aagaagttatctaggacagcagtcc

SEQ ID NO: 532361 - DNA, 25 bp, Homo sapien
gagtccaggagtctagattgctacc

SEQ ID NO: 532362 - DNA, 25 bp, Homo sapien
acattctgagagatcccaaaaccag

SEQ ID NO: 532363 - DNA, 25 bp, Homo sapien
gaatgttctaaacgcaactaaactg

SEQ ID NO: 532364 - DNA, 25 bp, Homo sapien
tatgcacatctattttgacggaacg

SEQ ID NO: 532365 - DNA, 25 bp, Homo sapien
tgacggaacgtatgaaagctaatag

SEQ ID NO: 532366 - DNA, 25 bp, Homo sapien
cattcttcctgggtggaggtggccc

SEQ ID NO: 532367 - DNA, 25 bp, Homo sapien
ttcctgggtggaggtggccctgcac

SEQ ID NO: 532368 - DNA, 25 bp, Homo sapien
cctgggtggaggtggccctgcactt

SEQ ID NO: 532369 - DNA, 25 bp, Homo sapien
ttcttcctgggtggaggtggccctg

SEQ ID NO: 532370 - DNA, 25 bp, Homo sapien
cggcactggccccacatgtacacgt

SEQ ID NO: 532371 - DNA, 25 bp, Homo sapien
gaggtgcgggaggatcacggactga

SEQ ID NO: 532372 - DNA, 25 bp, Homo sapien
gatcacggactgaccccggcactgg

SEQ ID NO: 532373 - DNA, 25 bp, Homo sapien
ggtgaggtgcgggaggatcacggac

SEQ ID NO: 532374 - DNA, 25 bp, Homo sapien
ctgcagacgtgtgggcagagtgaca

SEQ ID NO: 532375 - DNA, 25 bp, Homo sapien
tgcagacgtgtgggcagagtgacag

SEQ ID NO: 532376 - DNA, 25 bp, Homo sapien
tccagggacactagctgccaagtca

SEQ ID NO: 532377 - DNA, 25 bp, Homo sapien
ttaggatagatcacacagaccgccg

SEQ ID NO: 532378 - DNA, 25 bp, Homo sapien
aagttcatgcttgcaatacctcaga

SEQ ID NO: 532379 - DNA, 25 bp, Homo sapien
gaaaacagtccaagttccagggaca

SEQ ID NO: 532380 - DNA, 25 bp, Homo sapien
ccaggacataggaggtaagacctta

SEQ ID NO: 532381 - DNA, 25 bp, Homo sapien
agcactccaggacataggaggtaag

SEQ ID NO: 532382 - DNA, 25 bp, Homo sapien
tctcagtagtatgcttcttgggtaa

SEQ ID NO: 532383 - DNA, 25 bp, Homo sapien
ctcataatcagaagtcagcactcca

SEQ ID NO: 532384 - DNA, 25 bp, Homo sapien
agatcgtgccattgcactccagtct

SEQ ID NO: 532385 - DNA, 25 bp, Homo sapien
acttgaacccacgaagtgaaggttg

SEQ ID NO: 532386 - DNA, 25 bp, Homo sapien
aatcacttgaacccacgaagtgaag

SEQ ID NO: 532387 - DNA, 25 bp, Homo sapien
cagtgagccgagatcgtgccattgc

SEQ ID NO: 532388 - DNA, 25 bp, Homo sapien
ccaaggccacatcgcacacacagtc

SEQ ID NO: 532389 - DNA, 25 bp, Homo sapien
gtcccaagacgtggcacagccaagt

SEQ ID NO: 532390 - DNA, 25 bp, Homo sapien
aaggttatctcttttgtccaaaatg

SEQ ID NO: 532391 - DNA, 25 bp, Homo sapien
acacacagtcccaagacgtggcaca

SEQ ID NO: 532392 - DNA, 25 bp, Homo sapien
tatgtgttagctccccaggcataca

SEQ ID NO: 532393 - DNA, 25 bp, Homo sapien
tagagtatgtgcgtaaccgcagaca

SEQ ID NO: 532394 - DNA, 25 bp, Homo sapien
aagccctcatctgttagtgctagag

SEQ ID NO: 532395 - DNA, 25 bp, Homo sapien
ccatgatgtgtgctgggcttagcag

SEQ ID NO: 532396 - DNA, 25 bp, Homo sapien
cagctgaccgttgccattgtaaccc

SEQ ID NO: 532397 - DNA, 25 bp, Homo sapien
agctgaccgttgccattgtaacccc

SEQ ID NO: 532398 - DNA, 25 bp, Homo sapien
ccagctgaccgttgccattgtaacc

SEQ ID NO: 532399 - DNA, 25 bp, Homo sapien
caagatttgtggtggcatcgagccc

SEQ ID NO: 532400 - DNA, 25 bp, Homo sapien
gaggaggcccatctgctgaaagtaa

SEQ ID NO: 532401 - DNA, 25 bp, Homo sapien
tactgaccaggaacaaataaaggcc

SEQ ID NO: 532402 - DNA, 25 bp, Homo sapien
cacagcaatgtagggcggcagacat

SEQ ID NO: 532403 - DNA, 25 bp, Homo sapien
aatggagctaccaaaacaaagcact

SEQ ID NO: 532404 - DNA, 25 bp, Homo sapien
taactttcaatggagctaccaaaac

SEQ ID NO: 532405 - DNA, 25 bp, Homo sapien
agctcctcagtcagtaatcagttaa

SEQ ID NO: 532406 - DNA, 25 bp, Homo sapien
cagtcagtaatcagttaactttcaa

SEQ ID NO: 532407 - DNA, 25 bp, Homo sapien
ccacttggccacagttgttataacc

SEQ ID NO: 532408 - DNA, 25 bp, Homo sapien
ccatggatgaagtctgaccacaggc

SEQ ID NO: 532409 - DNA, 25 bp, Homo sapien
tccagaacagccatggatgaagtct

SEQ ID NO: 532410 - DNA, 25 bp, Homo sapien
cttttcgaggagttggttgatttgc

SEQ ID NO: 532411 - DNA, 25 bp, Homo sapien
gcaatgccttggttggtcgtcccat

SEQ ID NO: 532412 - DNA, 25 bp, Homo sapien
attggtacagacctggacgggagca

SEQ ID NO: 532413 - DNA, 25 bp, Homo sapien
tgaatgatgtgagccacaagctact

SEQ ID NO: 532414 - DNA, 25 bp, Homo sapien
tccaccacttgcttgatcaagagat

SEQ ID NO: 532415 - DNA, 25 bp, Homo sapien
gaagaacatgtggtccactcccgta

SEQ ID NO: 532416 - DNA, 25 bp, Homo sapien
tccagttcctagacagttactatag

SEQ ID NO: 532417 - DNA, 25 bp, Homo sapien
agccttctagctttttgggtacaag

SEQ ID NO: 532418 - DNA, 25 bp, Homo sapien
gtacaagtgtactctggttatctcc

SEQ ID NO: 532419 - DNA, 25 bp, Homo sapien
gaagatgggccactttccgacatcc

SEQ ID NO: 532420 - DNA, 25 bp, Homo sapien
aagacacacgccttccgaatagacg

SEQ ID NO: 532421 - DNA, 25 bp, Homo sapien
actggctgaggtgccgaagacacac

SEQ ID NO: 532422 - DNA, 25 bp, Homo sapien
cattgtcagtaacgtacagtgcttc

SEQ ID NO: 532423 - DNA, 25 bp, Homo sapien
aattcctataaataagccgacatct

SEQ ID NO: 532424 - DNA, 25 bp, Homo sapien
tagtcactgagctaactttcaaaaa

SEQ ID NO: 532425 - DNA, 25 bp, Homo sapien
cactgagctaactttcaaaaaaaag

SEQ ID NO: 532426 - DNA, 25 bp, Homo sapien
gtcactgagctaactttcaaaaaaa

SEQ ID NO: 532427 - DNA, 25 bp, Homo sapien
agtcactgagctaactttcaaaaaa

SEQ ID NO: 532428 - DNA, 25 bp, Homo sapien
gtcaggacaaacacaggccttccaa

SEQ ID NO: 532429 - DNA, 25 bp, Homo sapien
tatcctagctattggcactgtccct

SEQ ID NO: 532430 - DNA, 25 bp, Homo sapien
gaggaacgcaaaaatgcaagcagag

SEQ ID NO: 532431 - DNA, 25 bp, Homo sapien
tatcctacgtccattagtcctacag

SEQ ID NO: 532432 - DNA, 25 bp, Homo sapien
tgtttgggctagtttaaattgctgt

SEQ ID NO: 532433 - DNA, 25 bp, Homo sapien
aattgctgttatgtactggctttta

SEQ ID NO: 532434 - DNA, 25 bp, Homo sapien
aaatgccaccaatagggtattctac

SEQ ID NO: 532435 - DNA, 25 bp, Homo sapien
ctcaactaaccagaatgtatttgtt

SEQ ID NO: 532436 - DNA, 25 bp, Homo sapien
taattatgtgcaaactagtgacaac

SEQ ID NO: 532437 - DNA, 25 bp, Homo sapien
ccagataccaacaatgccagggaca

SEQ ID NO: 532438 - DNA, 25 bp, Homo sapien
ggaaagtcagatcctaagtaagtgg

SEQ ID NO: 532439 - DNA, 25 bp, Homo sapien
gaactgaaggtctaatggaaagtca

SEQ ID NO: 532440 - DNA, 25 bp, Homo sapien
gtattccagtctgggcaagagagca

SEQ ID NO: 532441 - DNA, 25 bp, Homo sapien
actgtattccagtctgggcaagaga

SEQ ID NO: 532442 - DNA, 25 bp, Homo sapien
tgagccgtgttcacaccactgtatt

SEQ ID NO: 532443 - DNA, 25 bp, Homo sapien
gtgagccgtgttcacaccactgtat

SEQ ID NO: 532444 - DNA, 25 bp, Homo sapien
gcaggtaggtactttatcagaggca

SEQ ID NO: 532445 - DNA, 25 bp, Homo sapien
tagtcatcttaaaccgagcaggtag

SEQ ID NO: 532446 - DNA, 25 bp, Homo sapien
taaagaatacggtttgtgacagcac

SEQ ID NO: 532447 - DNA, 25 bp, Homo sapien
ttatttagagttcaccgcacgcctg

SEQ ID NO: 532448 - DNA, 25 bp, Homo sapien
ctccaatgggcgcagaagtgcgagc

SEQ ID NO: 532449 - DNA, 25 bp, Homo sapien
ggtgcccaccggcagcgaagaggag

SEQ ID NO: 532450 - DNA, 25 bp, Homo sapien
tctccgaagctccaatgggcgcaga

SEQ ID NO: 532451 - DNA, 25 bp, Homo sapien
cgggaccgcagggatctccgaagct

SEQ ID NO: 532452 - DNA, 25 bp, Homo sapien
tgccgggacttagaggcttttgtgt

SEQ ID NO: 532453 - DNA, 25 bp, Homo sapien
ccatgaaatccggtggctgctgccg

SEQ ID NO: 532454 - DNA, 25 bp, Homo sapien
ctgctgccgggacttagaggctttt

SEQ ID NO: 532455 - DNA, 25 bp, Homo sapien
tgtccccatgaaatccggtggctgc

SEQ ID NO: 532456 - DNA, 25 bp, Homo sapien
ctgaggaaccaggaacgcgcgaggc

SEQ ID NO: 532457 - DNA, 25 bp, Homo sapien
aggaacgcgcgaggcacgggctcct

SEQ ID NO: 532458 - DNA, 25 bp, Homo sapien
gagggtcggcctaccaccccagaga

SEQ ID NO: 532459 - DNA, 25 bp, Homo sapien
tgctccccgagatggcttggctgtg

SEQ ID NO: 532460 - DNA, 25 bp, Homo sapien
cagctctcggagaactcccagttgg

SEQ ID NO: 532461 - DNA, 25 bp, Homo sapien
agaactcccagttggcgctgcagga

SEQ ID NO: 532462 - DNA, 25 bp, Homo sapien
atacagctctcggagaactcccagt

SEQ ID NO: 532463 - DNA, 25 bp, Homo sapien
tcggagaactcccagttggcgctgc

SEQ ID NO: 532464 - DNA, 25 bp, Homo sapien
caggaaagtgttactactctcagga

SEQ ID NO: 532465 - DNA, 25 bp, Homo sapien
ccatagcaactgaatcatagtgggc

SEQ ID NO: 532466 - DNA, 25 bp, Homo sapien
tggattcaacagacaaagacttcag

SEQ ID NO: 532467 - DNA, 25 bp, Homo sapien
catagtgggctcaaatgttggattc

SEQ ID NO: 532468 - DNA, 25 bp, Homo sapien
tttttaggagaaagtatctggccac

SEQ ID NO: 532469 - DNA, 25 bp, Homo sapien
gagctcatcacccagattagtcttg

SEQ ID NO: 532470 - DNA, 25 bp, Homo sapien
ggatctttctcacgctgttcggaaa

SEQ ID NO: 532471 - DNA, 25 bp, Homo sapien
gaagcggcttcagtgcaaaactaac

SEQ ID NO: 532472 - DNA, 25 bp, Homo sapien
gatgcaaaggatccccactgtggct

SEQ ID NO: 532473 - DNA, 25 bp, Homo sapien
ccggcgccaacagtgaggagacgaa

SEQ ID NO: 532474 - DNA, 25 bp, Homo sapien
tcatcgtgtggcacgcaggtgcgtt

SEQ ID NO: 532475 - DNA, 25 bp, Homo sapien
cctggaagacatcccgctgtccaga

SEQ ID NO: 532476 - DNA, 25 bp, Homo sapien
ttctgttctagggagttctgtggag

SEQ ID NO: 532477 - DNA, 25 bp, Homo sapien
gtggagggttacagatcagcaatat

SEQ ID NO: 532478 - DNA, 25 bp, Homo sapien
agatttctgttctagggagttctgt

SEQ ID NO: 532479 - DNA, 25 bp, Homo sapien
gcaatattccactgaaaccaaatac

SEQ ID NO: 532480 - DNA, 25 bp, Homo sapien
ggctgtcaccatggatgactgctga

SEQ ID NO: 532481 - DNA, 25 bp, Homo sapien
gactgctgatttaaggtctttcttg

SEQ ID NO: 532482 - DNA, 25 bp, Homo sapien
agaggcaagatgctggcccctctgg

SEQ ID NO: 532483 - DNA, 25 bp, Homo sapien
attcagaggcaagatgctggcccct

SEQ ID NO: 532484 - DNA, 25 bp, Homo sapien
tatatgtgcgtagaatatctctgga

SEQ ID NO: 532485 - DNA, 25 bp, Homo sapien
aaatgtctaagaaaccaatggtgtg

SEQ ID NO: 532486 - DNA, 25 bp, Homo sapien
gcttatatgtgcgtagaatatctct

SEQ ID NO: 532487 - DNA, 25 bp, Homo sapien
aatggtgtgagctgtttcccaggga

SEQ ID NO: 532488 - DNA, 25 bp, Homo sapien
tgttttgatatgtgaccctgagcct

SEQ ID NO: 532489 - DNA, 25 bp, Homo sapien
ggtgacatgattagatctgttctta

SEQ ID NO: 532490 - DNA, 25 bp, Homo sapien
ttaggaagatatcaggggcagcagc

SEQ ID NO: 532491 - DNA, 25 bp, Homo sapien
ttgttttgatatgtgaccctgagcc

SEQ ID NO: 532492 - DNA, 25 bp, Homo sapien
tgaaacaaaagtacgcgacacagag

SEQ ID NO: 532493 - DNA, 25 bp, Homo sapien
gtacgcgacacagagtgggaggggg

SEQ ID NO: 532494 - DNA, 25 bp, Homo sapien
aagtacgcgacacagagtgggaggg

SEQ ID NO: 532495 - DNA, 25 bp, Homo sapien
ttgaaacaaaagtacgcgacacaga

SEQ ID NO: 532496 - DNA, 25 bp, Homo sapien
caattctctctgcacgaaagatggg

SEQ ID NO: 532497 - DNA, 25 bp, Homo sapien
aattcggcgcgaatcagccttaggt

SEQ ID NO: 532498 - DNA, 25 bp, Homo sapien
tgaccatagcagtggcaacagttct

SEQ ID NO: 532499 - DNA, 25 bp, Homo sapien
gctcccatgccagatgcagtgcttg

SEQ ID NO: 532500 - DNA, 25 bp, Homo sapien
tcaatttcatgtggtgttaagtgct

SEQ ID NO: 532501 - DNA, 25 bp, Homo sapien
ttcatgtggtgttaagtgctggctt

SEQ ID NO: 532502 - DNA, 25 bp, Homo sapien
atttcatgtggtgttaagtgctggc

SEQ ID NO: 532503 - DNA, 25 bp, Homo sapien
catgtggtgttaagtgctggcttaa

SEQ ID NO: 532504 - DNA, 25 bp, Homo sapien
tggagagaaatcatgcttgcagtac

SEQ ID NO: 532505 - DNA, 25 bp, Homo sapien
ggattgagccagatcagcagagagc

SEQ ID NO: 532506 - DNA, 25 bp, Homo sapien
cagtactgccggcaggattggcagc

SEQ ID NO: 532507 - DNA, 25 bp, Homo sapien
gaaccacgctgggtaatccctcatg

SEQ ID NO: 532508 - DNA, 25 bp, Homo sapien
tctgaaaggtaaaaccaatttggca

SEQ ID NO: 532509 - DNA, 25 bp, Homo sapien
ctgaaaggtaaaaccaatttggcat

SEQ ID NO: 532510 - DNA, 25 bp, Homo sapien
aatgtggaacaattaatgccagcca

SEQ ID NO: 532511 - DNA, 25 bp, Homo sapien
tcatgaagttagataatggtgttta

SEQ ID NO: 532512 - DNA, 25 bp, Homo sapien
acaaaaacaaagtgtagactggaat

SEQ ID NO: 532513 - DNA, 25 bp, Homo sapien
aatttgaaacaggttgttcaggagc

SEQ ID NO: 532514 - DNA, 25 bp, Homo sapien
caaagtgtagactggaatgtattac

SEQ ID NO: 532515 - DNA, 25 bp, Homo sapien
tcactgaactggtttctttctgatg

SEQ ID NO: 532516 - DNA, 25 bp, Homo sapien
tcactgaaacttcttcactgaactg

SEQ ID NO: 532517 - DNA, 25 bp, Homo sapien
aactggtttctttctgatgcatttt

SEQ ID NO: 532518 - DNA, 25 bp, Homo sapien
tctgatgcattttcttgagttctag

SEQ ID NO: 532519 - DNA, 25 bp, Homo sapien
catgactgccacagtagcagtcctg

SEQ ID NO: 532520 - DNA, 25 bp, Homo sapien
ccatgactgccacagtagcagtcct

SEQ ID NO: 532521 - DNA, 25 bp, Homo sapien
aacaggtaaagccaacagtacagcc

SEQ ID NO: 532522 - DNA, 25 bp, Homo sapien
acaggtaaagccaacagtacagcca

SEQ ID NO: 532523 - DNA, 25 bp, Homo sapien
agcagccatacagctcgcacacgca

SEQ ID NO: 532524 - DNA, 25 bp, Homo sapien
agctcgcacacgcacagggtgatct

SEQ ID NO: 532525 - DNA, 25 bp, Homo sapien
catacagctcgcacacgcacagggt

SEQ ID NO: 532526 - DNA, 25 bp, Homo sapien
acagctcgcacacgcacagggtgat

SEQ ID NO: 532527 - DNA, 25 bp, Homo sapien
aattgttttagggattcatctcagg

SEQ ID NO: 532528 - DNA, 25 bp, Homo sapien
aaattgttttagggattcatctcag

SEQ ID NO: 532529 - DNA, 25 bp, Homo sapien
ctattcaccccaggccactctgtcc

SEQ ID NO: 532530 - DNA, 25 bp, Homo sapien
cagagacccatccagggcgacggtc

SEQ ID NO: 532531 - DNA, 25 bp, Homo sapien
agagacccatccagggcgacggtca

SEQ ID NO: 532532 - DNA, 25 bp, Homo sapien
ccagagacccatccagggcgacggt

SEQ ID NO: 532533 - DNA, 25 bp, Homo sapien
atccagacccattatcagagtggtt

SEQ ID NO: 532534 - DNA, 25 bp, Homo sapien
catccagacccattatcagagtggt

SEQ ID NO: 532535 - DNA, 25 bp, Homo sapien
tgtgccctccaataactaactggaa

SEQ ID NO: 532536 - DNA, 25 bp, Homo sapien
caatgtcatattgaaacgtttctcc

SEQ ID NO: 532537 - DNA, 25 bp, Homo sapien
gcctgtccttagctgactgtctgca

SEQ ID NO: 532538 - DNA, 25 bp, Homo sapien
gaaatgtaccagttagtgcacctaa

SEQ ID NO: 532539 - DNA, 25 bp, Homo sapien
ggataattccacaggcagactggtg

SEQ ID NO: 532540 - DNA, 25 bp, Homo sapien
tatggtaggccctgataatgcagct

SEQ ID NO: 532541 - DNA, 25 bp, Homo sapien
ttagtggcccacatcctagtgaggc

SEQ ID NO: 532542 - DNA, 25 bp, Homo sapien
aaaggaggacatctcgccatgcagg

SEQ ID NO: 532543 - DNA, 25 bp, Homo sapien
atgattttagagtcacaaagaaatg

SEQ ID NO: 532544 - DNA, 25 bp, Homo sapien
ctaacactagtggtaaacaggagtc

SEQ ID NO: 532545 - DNA, 25 bp, Homo sapien
agatcctagctggagatgattttag

SEQ ID NO: 532546 - DNA, 25 bp, Homo sapien
gggaagtactaatgagcctactcaa

SEQ ID NO: 532547 - DNA, 25 bp, Homo sapien
tcaagccatcggaatttgcaacgtt

SEQ ID NO: 532548 - DNA, 25 bp, Homo sapien
atcaagccatcggaatttgcaacgt

SEQ ID NO: 532549 - DNA, 25 bp, Homo sapien
caatcaagccatcggaatttgcaac

SEQ ID NO: 532550 - DNA, 25 bp, Homo sapien
aagcaatcaagccatcggaatttgc

SEQ ID NO: 532551 - DNA, 25 bp, Homo sapien
taacaatgtgtgcaaccatcgccac

SEQ ID NO: 532552 - DNA, 25 bp, Homo sapien
gagaccagtcatgctaagcctcaca

SEQ ID NO: 532553 - DNA, 25 bp, Homo sapien
taggtacctcgtgtaagtgaaatga

SEQ ID NO: 532554 - DNA, 25 bp, Homo sapien
aaatttagaataggccaggctctgg

SEQ ID NO: 532555 - DNA, 25 bp, Homo sapien
ctgcagcctctcagactcctgggtt

SEQ ID NO: 532556 - DNA, 25 bp, Homo sapien
tcctgggttcaagcaatcctcctgt

SEQ ID NO: 532557 - DNA, 25 bp, Homo sapien
ctgggttcaagcaatcctcctgtct

SEQ ID NO: 532558 - DNA, 25 bp, Homo sapien
ctcactgcagcctctcagactcctg

SEQ ID NO: 532559 - DNA, 25 bp, Homo sapien
gctactttcacctctccgggcttaa

SEQ ID NO: 532560 - DNA, 25 bp, Homo sapien
cctggccgagattgtatttctgaca

SEQ ID NO: 532561 - DNA, 25 bp, Homo sapien
tatgtggttgaggttggtctagaac

SEQ ID NO: 532562 - DNA, 25 bp, Homo sapien
tagtcaatatatgtctagtgaatga

SEQ ID NO: 532563 - DNA, 25 bp, Homo sapien
cacacactaaaaatagctgagcacg

SEQ ID NO: 532564 - DNA, 25 bp, Homo sapien
catctctactagaaacacacactaa

SEQ ID NO: 532565 - DNA, 25 bp, Homo sapien
aaatagctgagcacggtggcacgtg

SEQ ID NO: 532566 - DNA, 25 bp, Homo sapien
cacactaaaaatagctgagcacggt

SEQ ID NO: 532567 - DNA, 25 bp, Homo sapien
tgtgaactggagaagggtaatgccc

SEQ ID NO: 532568 - DNA, 25 bp, Homo sapien
cattcacaggtgttaggtgggatgc

SEQ ID NO: 532569 - DNA, 25 bp, Homo sapien
cactgggcctcaagatttctcaacg

SEQ ID NO: 532570 - DNA, 25 bp, Homo sapien
taatgcccagcttcagagagggcgt

SEQ ID NO: 532571 - DNA, 25 bp, Homo sapien
ttttttaatggtgctacagcaattt

SEQ ID NO: 532572 - DNA, 25 bp, Homo sapien
ggtgctacagcaatttatcagtgtt

SEQ ID NO: 532573 - DNA, 25 bp, Homo sapien
gctacagcaatttatcagtgttctt

SEQ ID NO: 532574 - DNA, 25 bp, Homo sapien
taatggtgctacagcaatttatcag

SEQ ID NO: 532575 - DNA, 25 bp, Homo sapien
agagccagatgagcgccccgcggtc

SEQ ID NO: 532576 - DNA, 25 bp, Homo sapien
ccagcgcgtcgtagcagagccagat

SEQ ID NO: 532577 - DNA, 25 bp, Homo sapien
cagcgcgaagtgcaccagcgcgtcg

SEQ ID NO: 532578 - DNA, 25 bp, Homo sapien
acagcagcagcgaaccgccagcctc

SEQ ID NO: 532579 - DNA, 25 bp, Homo sapien
ggaaggggcggagccggatggccaa

SEQ ID NO: 532580 - DNA, 25 bp, Homo sapien
ggcttccgacgccaacggcccagga

SEQ ID NO: 532581 - DNA, 25 bp, Homo sapien
aagcagggagagaaacgacggggcg

SEQ ID NO: 532582 - DNA, 25 bp, Homo sapien
aggaccatgcggcagaggaaagcag

SEQ ID NO: 532583 - DNA, 25 bp, Homo sapien
gtgctcaccaacttgcgcaaccgcc

SEQ ID NO: 532584 - DNA, 25 bp, Homo sapien
cagcctgctgagtccggtggttttg

SEQ ID NO: 532585 - DNA, 25 bp, Homo sapien
catggaggttccgtagaaggaacgt

SEQ ID NO: 532586 - DNA, 25 bp, Homo sapien
gtgccgcccatggaggttccgtaga

SEQ ID NO: 532587 - DNA, 25 bp, Homo sapien
tatttaaacctgagacacataggga

SEQ ID NO: 532588 - DNA, 25 bp, Homo sapien
ttctatactcaaaagtttggctgct

SEQ ID NO: 532589 - DNA, 25 bp, Homo sapien
ggcaaggaaggatcatccccatcga

SEQ ID NO: 532590 - DNA, 25 bp, Homo sapien
ttgtttcatcagtcacaatcatacc

SEQ ID NO: 532591 - DNA, 25 bp, Homo sapien
ttcaagacagcccacctttctaggc

SEQ ID NO: 532592 - DNA, 25 bp, Homo sapien
ttctaggccaaaccattgtgtactg

SEQ ID NO: 532593 - DNA, 25 bp, Homo sapien
gcctataggaagtcacgcccatggg

SEQ ID NO: 532594 - DNA, 25 bp, Homo sapien
tgaggactgagctctgactgccatt

SEQ ID NO: 532595 - DNA, 25 bp, Homo sapien
gatagcagctttttttattggttac

SEQ ID NO: 532596 - DNA, 25 bp, Homo sapien
atagcagctttttttattggttaca

SEQ ID NO: 532597 - DNA, 25 bp, Homo sapien
tttagactatagtgtccgaacagga

SEQ ID NO: 532598 - DNA, 25 bp, Homo sapien
cctacttttagcgaacaccacacag

SEQ ID NO: 532599 - DNA, 25 bp, Homo sapien
caagtccataacaggttgcagctca

SEQ ID NO: 532600 - DNA, 25 bp, Homo sapien
tatttgtaatgaatgcacacctgct

SEQ ID NO: 532601 - DNA, 25 bp, Homo sapien
tatgcatcataccaaagtgtcttga

SEQ ID NO: 532602 - DNA, 25 bp, Homo sapien
agtgtcttgatccacagcgcaccat

SEQ ID NO: 532603 - DNA, 25 bp, Homo sapien
gatggaggctcagatcacactgcac

SEQ ID NO: 532604 - DNA, 25 bp, Homo sapien
tttgtgtcagttccaccaatgaaaa

SEQ ID NO: 532605 - DNA, 25 bp, Homo sapien
ggaatatttattctaaactggagac

SEQ ID NO: 532606 - DNA, 25 bp, Homo sapien
tggaatatttattctaaactggaga

SEQ ID NO: 532607 - DNA, 25 bp, Homo sapien
tatttattctaaactggagactgca

SEQ ID NO: 532608 - DNA, 25 bp, Homo sapien
ttattctaaactggagactgcagtt

SEQ ID NO: 532609 - DNA, 25 bp, Homo sapien
gaatgtgggaaagatgctgcactca

SEQ ID NO: 532610 - DNA, 25 bp, Homo sapien
tgatagtgacttttggcaactgcaa

SEQ ID NO: 532611 - DNA, 25 bp, Homo sapien
catttacagtccatgtgatagtgac

SEQ ID NO: 532612 - DNA, 25 bp, Homo sapien
tatcatttggtagccatctggtggt

SEQ ID NO: 532613 - DNA, 25 bp, Homo sapien
gctgttggatcaaaattgtaggtac

SEQ ID NO: 532614 - DNA, 25 bp, Homo sapien
gttggctgttggatcaaaattgtag

SEQ ID NO: 532615 - DNA, 25 bp, Homo sapien
tttgtttgaaggttggctgttggat

SEQ ID NO: 532616 - DNA, 25 bp, Homo sapien
ggctgttggatcaaaattgtaggta

SEQ ID NO: 532617 - DNA, 25 bp, Homo sapien
gaatgaggcagggatcttcatcaat

SEQ ID NO: 532618 - DNA, 25 bp, Homo sapien
ctccttgtgttgcttcaggaatgag

SEQ ID NO: 532619 - DNA, 25 bp, Homo sapien
gcttcaggaatgaggcagggatctt

SEQ ID NO: 532620 - DNA, 25 bp, Homo sapien
aggaatgaggcagggatcttcatca

SEQ ID NO: 532621 - DNA, 25 bp, Homo sapien
tcatttacatgaagatacacgctat

SEQ ID NO: 532622 - DNA, 25 bp, Homo sapien
cacgtttcgaaactgcattgttaag

SEQ ID NO: 532623 - DNA, 25 bp, Homo sapien
taagtttctgtatctgggacctaga

SEQ ID NO: 532624 - DNA, 25 bp, Homo sapien
cattatgatgtaagtggaattgact

SEQ ID NO: 532625 - DNA, 25 bp, Homo sapien
tttcaaatgctaatttatatatgtc

SEQ ID NO: 532626 - DNA, 25 bp, Homo sapien
atactgatctatgatttcaaatgct

SEQ ID NO: 532627 - DNA, 25 bp, Homo sapien
tcaaatgctaatttatatatgtctt

SEQ ID NO: 532628 - DNA, 25 bp, Homo sapien
aatactgatctatgatttcaaatgc

SEQ ID NO: 532629 - DNA, 25 bp, Homo sapien
attgtgcttgcttcatcaccggcca

SEQ ID NO: 532630 - DNA, 25 bp, Homo sapien
tgaaccacttgagaatctttcactg

SEQ ID NO: 532631 - DNA, 25 bp, Homo sapien
catcaccggccattatcagaatgtt

SEQ ID NO: 532632 - DNA, 25 bp, Homo sapien
tcagaatgttttttagaccatctag

SEQ ID NO: 532633 - DNA, 25 bp, Homo sapien
tacattctgctgtacaaggtactca

SEQ ID NO: 532634 - DNA, 25 bp, Homo sapien
attacattctgctgtacaaggtact

SEQ ID NO: 532635 - DNA, 25 bp, Homo sapien
cattctgctgtacaaggtactcaac

SEQ ID NO: 532636 - DNA, 25 bp, Homo sapien
tggtattacattctgctgtacaagg

SEQ ID NO: 532637 - DNA, 25 bp, Homo sapien
cacttattgttaagttgctgattgc

SEQ ID NO: 532638 - DNA, 25 bp, Homo sapien
tctgccacttattgttaagttgctg

SEQ ID NO: 532639 - DNA, 25 bp, Homo sapien
tattgttaagttgctgattgcccaa

SEQ ID NO: 532640 - DNA, 25 bp, Homo sapien
tgttaagttgctgattgcccaagca

SEQ ID NO: 532641 - DNA, 25 bp, Homo sapien
aatccagcatctattacagcttgaa

SEQ ID NO: 532642 - DNA, 25 bp, Homo sapien
gaacttgttgctggttgcctgctgt

SEQ ID NO: 532643 - DNA, 25 bp, Homo sapien
ctgttatgttggaaaggaaccacac

SEQ ID NO: 532644 - DNA, 25 bp, Homo sapien
agcttgaacttgttgctggttgcct

SEQ ID NO: 532645 - DNA, 25 bp, Homo sapien
tgggtctgctcgtcggtgccagtca

SEQ ID NO: 532646 - DNA, 25 bp, Homo sapien
agatttgggaagtgtgacaggacat

SEQ ID NO: 532647 - DNA, 25 bp, Homo sapien
gacaggacatcacaattgagaacaa

SEQ ID NO: 532648 - DNA, 25 bp, Homo sapien
tctgctcgtcggtgccagtcactat

SEQ ID NO: 532649 - DNA, 25 bp, Homo sapien
gccatgctgttcactgaaggtagac

SEQ ID NO: 532650 - DNA, 25 bp, Homo sapien
gctcagggactagcagaagaaatgt

SEQ ID NO: 532651 - DNA, 25 bp, Homo sapien
tcaaaatttctagcttaggccatgc

SEQ ID NO: 532652 - DNA, 25 bp, Homo sapien
tatacaagtgtggaactcagcaaag

SEQ ID NO: 532653 - DNA, 25 bp, Homo sapien
caagtatgacagagcccaaacagtg

SEQ ID NO: 532654 - DNA, 25 bp, Homo sapien
aaagggcacaactcctgaatcaata

SEQ ID NO: 532655 - DNA, 25 bp, Homo sapien
tgttcattacctccatctgtcaagt

SEQ ID NO: 532656 - DNA, 25 bp, Homo sapien
tgtatctgttcattacctccatctg

SEQ ID NO: 532657 - DNA, 25 bp, Homo sapien
tatctgtatggtatatgaggacaca

SEQ ID NO: 532658 - DNA, 25 bp, Homo sapien
tatatctgtatggtatatgaggaca

SEQ ID NO: 532659 - DNA, 25 bp, Homo sapien
atatgaggacacataaagctggcaa

SEQ ID NO: 532660 - DNA, 25 bp, Homo sapien
gtttatatctgtatggtatatgagg

SEQ ID NO: 532661 - DNA, 25 bp, Homo sapien
gacccatgtgacgttccgaaggaag

SEQ ID NO: 532662 - DNA, 25 bp, Homo sapien
gggatccttattcctgcagagattg

SEQ ID NO: 532663 - DNA, 25 bp, Homo sapien
ctgaactgtctccataggcggcggg

SEQ ID NO: 532664 - DNA, 25 bp, Homo sapien
gaggtttgacaactcccagtgatat

SEQ ID NO: 532665 - DNA, 25 bp, Homo sapien
ccaaagcccatactgcttgttcaca

SEQ ID NO: 532666 - DNA, 25 bp, Homo sapien
agcccatactgcttgttcacaaaca

SEQ ID NO: 532667 - DNA, 25 bp, Homo sapien
tggtgaacgaagaagtctcagaaaa

SEQ ID NO: 532668 - DNA, 25 bp, Homo sapien
ttctgatgtggtgaacgaagaagtc

SEQ ID NO: 532669 - DNA, 25 bp, Homo sapien
cagcttgagtctgtgcagaagttcc

SEQ ID NO: 532670 - DNA, 25 bp, Homo sapien
tcctgatgctatgttagttaatgcc

SEQ ID NO: 532671 - DNA, 25 bp, Homo sapien
cttgagtctgtgcagaagttcctga

SEQ ID NO: 532672 - DNA, 25 bp, Homo sapien
tatgttagttaatgcccaagcagct

SEQ ID NO: 532673 - DNA, 25 bp, Homo sapien
tgttgaagatgaaatccacagcggc

SEQ ID NO: 532674 - DNA, 25 bp, Homo sapien
taatcttggtcgtgccctaacagaa

SEQ ID NO: 532675 - DNA, 25 bp, Homo sapien
ccacagcggcaaacaatcaacaaca

SEQ ID NO: 532676 - DNA, 25 bp, Homo sapien
tcaacaacaatatctgaggaaaaga

SEQ ID NO: 532677 - DNA, 25 bp, Homo sapien
atatcccaagtttcagtctagatgc

SEQ ID NO: 532678 - DNA, 25 bp, Homo sapien
gaaaattccttggacaacatttagc

SEQ ID NO: 532679 - DNA, 25 bp, Homo sapien
gaggttgtggcacacaacgaaagca

SEQ ID NO: 532680 - DNA, 25 bp, Homo sapien
cttatctagccaactgaaaattcct

SEQ ID NO: 532681 - DNA, 25 bp, Homo sapien
tcagtaatcagctggaagattccca

SEQ ID NO: 532682 - DNA, 25 bp, Homo sapien
taggctcataagcaaagagtgactc

SEQ ID NO: 532683 - DNA, 25 bp, Homo sapien
gattcccagggtaagaaagagccac

SEQ ID NO: 532684 - DNA, 25 bp, Homo sapien
tagttctggaaaccatccatgttga

SEQ ID NO: 532685 - DNA, 25 bp, Homo sapien
tgaactcactggttaagtaataatc

SEQ ID NO: 532686 - DNA, 25 bp, Homo sapien
gaatagggagtaaaatccatactta

SEQ ID NO: 532687 - DNA, 25 bp, Homo sapien
aaactgaatagggagtaaaatccat

SEQ ID NO: 532688 - DNA, 25 bp, Homo sapien
aatatatgacgattgaaaaacatca

SEQ ID NO: 532689 - DNA, 25 bp, Homo sapien
gactagaattggtaaaatcccagat

SEQ ID NO: 532690 - DNA, 25 bp, Homo sapien
tagacatttgactagaattggtaaa

SEQ ID NO: 532691 - DNA, 25 bp, Homo sapien
tttctagacatttgactagaattgg

SEQ ID NO: 532692 - DNA, 25 bp, Homo sapien
catttgactagaattggtaaaatcc

SEQ ID NO: 532693 - DNA, 25 bp, Homo sapien
caacatattaacttctagactacca

SEQ ID NO: 532694 - DNA, 25 bp, Homo sapien
gactaccaggtaacacaactgagga

SEQ ID NO: 532695 - DNA, 25 bp, Homo sapien
tctagactaccaggtaacacaactg

SEQ ID NO: 532696 - DNA, 25 bp, Homo sapien
taacttctagactaccaggtaacac

SEQ ID NO: 532697 - DNA, 25 bp, Homo sapien
tgcctggacagcactcaattggacc

SEQ ID NO: 532698 - DNA, 25 bp, Homo sapien
tgcaatatagcttctagggttacat

SEQ ID NO: 532699 - DNA, 25 bp, Homo sapien
atatagcttctagggttacattttg

SEQ ID NO: 532700 - DNA, 25 bp, Homo sapien
caatatagcttctagggttacattt

SEQ ID NO: 532701 - DNA, 25 bp, Homo sapien
ctgcaatatagcttctagggttaca

SEQ ID NO: 532702 - DNA, 25 bp, Homo sapien
agcatcaacatctgaatcttctaga

SEQ ID NO: 532703 - DNA, 25 bp, Homo sapien
tcaataagtgttcatctcttttgtt

SEQ ID NO: 532704 - DNA, 25 bp, Homo sapien
tctagactttcttcttggggaacat

SEQ ID NO: 532705 - DNA, 25 bp, Homo sapien
ctttcttcttggggaacatttctct

SEQ ID NO: 532706 - DNA, 25 bp, Homo sapien
gagatcccttgtatgctttgcccag

SEQ ID NO: 532707 - DNA, 25 bp, Homo sapien
gactacatggatattcacccacaag

SEQ ID NO: 532708 - DNA, 25 bp, Homo sapien
cccctcaatattaacatttatgaaa

SEQ ID NO: 532709 - DNA, 25 bp, Homo sapien
tgaaatgatattactgctgggtgac

SEQ ID NO: 532710 - DNA, 25 bp, Homo sapien
aggagctttctgatagattccttgg

SEQ ID NO: 532711 - DNA, 25 bp, Homo sapien
gagctttctgatagattccttggga

SEQ ID NO: 532712 - DNA, 25 bp, Homo sapien
ccttgggatgttctacatagataat

SEQ ID NO: 532713 - DNA, 25 bp, Homo sapien
attccttgggatgttctacatagat

SEQ ID NO: 532714 - DNA, 25 bp, Homo sapien
ctgctacaagataaggagcttttac

SEQ ID NO: 532715 - DNA, 25 bp, Homo sapien
cagttctgctacaagataaggagct

SEQ ID NO: 532716 - DNA, 25 bp, Homo sapien
gttctgctacaagataaggagcttt

SEQ ID NO: 532717 - DNA, 25 bp, Homo sapien
tctgctacaagataaggagctttta

SEQ ID NO: 532718 - DNA, 25 bp, Homo sapien
tgtgccagaatgtaaaccaactgtg

SEQ ID NO: 532719 - DNA, 25 bp, Homo sapien
ttagttcagctctttatttagacag

SEQ ID NO: 532720 - DNA, 25 bp, Homo sapien
ccaactgtgaaactaagcacactgt

SEQ ID NO: 532721 - DNA, 25 bp, Homo sapien
gacagaaagacctgctttaaacata

SEQ ID NO: 532722 - DNA, 25 bp, Homo sapien
cttccgcagttccactgtcacttca

SEQ ID NO: 532723 - DNA, 25 bp, Homo sapien
tcacttcatttctatgtcttcgcat

SEQ ID NO: 532724 - DNA, 25 bp, Homo sapien
cgcagttccactgtcacttcatttc

SEQ ID NO: 532725 - DNA, 25 bp, Homo sapien
tccgcagttccactgtcacttcatt

SEQ ID NO: 532726 - DNA, 25 bp, Homo sapien
tatataaagatctcagctgggtgca

SEQ ID NO: 532727 - DNA, 25 bp, Homo sapien
gatgtatcaaaatacggacactgct

SEQ ID NO: 532728 - DNA, 25 bp, Homo sapien
actgctagtatataaagatctcagc

SEQ ID NO: 532729 - DNA, 25 bp, Homo sapien
tacggacactgctagtatataaaga

SEQ ID NO: 532730 - DNA, 25 bp, Homo sapien
taatcaatacagcaatgtggaacca

SEQ ID NO: 532731 - DNA, 25 bp, Homo sapien
tttgtatctggcatctaaaacgtac

SEQ ID NO: 532732 - DNA, 25 bp, Homo sapien
tcacttaccaacaattcacctaaag

SEQ ID NO: 532733 - DNA, 25 bp, Homo sapien
tttgctcacctgtatatattctagg

SEQ ID NO: 532734 - DNA, 25 bp, Homo sapien
taatatcaattaggcctgtgcagtg

SEQ ID NO: 532735 - DNA, 25 bp, Homo sapien
taaagccacaagagctacacaatgg

SEQ ID NO: 532736 - DNA, 25 bp, Homo sapien
tatctctgggacagtacagtgaaag

SEQ ID NO: 532737 - DNA, 25 bp, Homo sapien
cagagtccccacttaggaaacgagg

SEQ ID NO: 532738 - DNA, 25 bp, Homo sapien
tgtcaagaacccaacttgtgtgcca

SEQ ID NO: 532739 - DNA, 25 bp, Homo sapien
gagttaatgttctacctactaaatg

SEQ ID NO: 532740 - DNA, 25 bp, Homo sapien
cactagggatcacaactgtgacttt

SEQ ID NO: 532741 - DNA, 25 bp, Homo sapien
ttgagatttctcactagggatcaca

SEQ ID NO: 532742 - DNA, 25 bp, Homo sapien
tatgataatgctataacaagcattc

SEQ ID NO: 532743 - DNA, 25 bp, Homo sapien
cccattttatctacctattcttcca

SEQ ID NO: 532744 - DNA, 25 bp, Homo sapien
gctaggtgatatgggaactctatga

SEQ ID NO: 532745 - DNA, 25 bp, Homo sapien
ataaaattgctaggtgatatgggaa

SEQ ID NO: 532746 - DNA, 25 bp, Homo sapien
aattctggatgttaagtagtacctt

SEQ ID NO: 532747 - DNA, 25 bp, Homo sapien
ctttaatggatgtatgatgtgcaat

SEQ ID NO: 532748 - DNA, 25 bp, Homo sapien
gatgcccaggtaggcatgattacca

SEQ ID NO: 532749 - DNA, 25 bp, Homo sapien
tagactgtctttgtattgttcagct

SEQ ID NO: 532750 - DNA, 25 bp, Homo sapien
tttagattgcccattgctggtatac

SEQ ID NO: 532751 - DNA, 25 bp, Homo sapien
gaagtataggcatgtataggccacc

SEQ ID NO: 532752 - DNA, 25 bp, Homo sapien
cccattgctggtatactaaaataca

SEQ ID NO: 532753 - DNA, 25 bp, Homo sapien
gaattttctatccagaagatcatat

SEQ ID NO: 532754 - DNA, 25 bp, Homo sapien
gacttgtactgatccaaaagacata

SEQ ID NO: 532755 - DNA, 25 bp, Homo sapien
tcctaggtattgatacaacagagaa

SEQ ID NO: 532756 - DNA, 25 bp, Homo sapien
gacatacacatagctttataaacaa

SEQ ID NO: 532757 - DNA, 25 bp, Homo sapien
acttatatgacccagccactctgtt

SEQ ID NO: 532758 - DNA, 25 bp, Homo sapien
caaaaggagtatgtattgtcatcac

SEQ ID NO: 532759 - DNA, 25 bp, Homo sapien
gaagaatgaactttaggtacacaaa

SEQ ID NO: 532760 - DNA, 25 bp, Homo sapien
ttgattgcaatggtggttacaagga

SEQ ID NO: 532761 - DNA, 25 bp, Homo sapien
ggcaagctgatcaatgaaagaaagc

SEQ ID NO: 532762 - DNA, 25 bp, Homo sapien
taaaccttcaagagtgttataaata

SEQ ID NO: 532763 - DNA, 25 bp, Homo sapien
attaggactaagtggtgagcagttc

SEQ ID NO: 532764 - DNA, 25 bp, Homo sapien
gagcagttcatgtaaaaatgacttt

SEQ ID NO: 532765 - DNA, 25 bp, Homo sapien
aacatttacatgacacctattttaa

SEQ ID NO: 532766 - DNA, 25 bp, Homo sapien
actgctgaagtctactaggcagaag

SEQ ID NO: 532767 - DNA, 25 bp, Homo sapien
ctgctgaagtctactaggcagaaga

SEQ ID NO: 532768 - DNA, 25 bp, Homo sapien
tgctgaagtctactaggcagaagaa

SEQ ID NO: 532769 - DNA, 25 bp, Homo sapien
ctataacacctaggcctggatgtcc

SEQ ID NO: 532770 - DNA, 25 bp, Homo sapien
ttataccccgaattcaacacctggc

SEQ ID NO: 532771 - DNA, 25 bp, Homo sapien
cattatgaaaatattcggccaggca

SEQ ID NO: 532772 - DNA, 25 bp, Homo sapien
cgttatcagaagactcctgcactgg

SEQ ID NO: 532773 - DNA, 25 bp, Homo sapien
cccttgaatagaaggatcttgtttc

SEQ ID NO: 532774 - DNA, 25 bp, Homo sapien
gtcccttgaatagaaggatcttgtt

SEQ ID NO: 532775 - DNA, 25 bp, Homo sapien
aatagaaggatcttgtttcattcat

SEQ ID NO: 532776 - DNA, 25 bp, Homo sapien
taaatatgtcccttgaatagaagga

SEQ ID NO: 532777 - DNA, 25 bp, Homo sapien
gcaaaaacaaggtttccagaactca

SEQ ID NO: 532778 - DNA, 25 bp, Homo sapien
gctgtacccctacagaactttaaca

SEQ ID NO: 532779 - DNA, 25 bp, Homo sapien
ctttaacatccaagtatcaattctt

SEQ ID NO: 532780 - DNA, 25 bp, Homo sapien
ctgaaaaccacactgttgttaccag

SEQ ID NO: 532781 - DNA, 25 bp, Homo sapien
gagttggatctgtaccccttttgtg

SEQ ID NO: 532782 - DNA, 25 bp, Homo sapien
agatatgctgaagagttggatctgt

SEQ ID NO: 532783 - DNA, 25 bp, Homo sapien
agagttggatctgtaccccttttgt

SEQ ID NO: 532784 - DNA, 25 bp, Homo sapien
cacaaagatatgctgaagagttgga

SEQ ID NO: 532785 - DNA, 25 bp, Homo sapien
tagtacagtacttacctcagctggg

SEQ ID NO: 532786 - DNA, 25 bp, Homo sapien
gcttttgcgctcaagacacaggtga

SEQ ID NO: 532787 - DNA, 25 bp, Homo sapien
ggaggctgccctattcacgaatcat

SEQ ID NO: 532788 - DNA, 25 bp, Homo sapien
ttcaccactggatacgctagcctag

SEQ ID NO: 532789 - DNA, 25 bp, Homo sapien
tccatcccctatggtataaccaaag

SEQ ID NO: 532790 - DNA, 25 bp, Homo sapien
aatccatcccctatggtataaccaa

SEQ ID NO: 532791 - DNA, 25 bp, Homo sapien
catcccctatggtataaccaaagca

SEQ ID NO: 532792 - DNA, 25 bp, Homo sapien
ccctatggtataaccaaagcaatgc

SEQ ID NO: 532793 - DNA, 25 bp, Homo sapien
aagttggaaatctgggactcagtgc

SEQ ID NO: 532794 - DNA, 25 bp, Homo sapien
caggaaccctgaggtagagtaggaa

SEQ ID NO: 532795 - DNA, 25 bp, Homo sapien
tagtctatacattccttgagcagga

SEQ ID NO: 532796 - DNA, 25 bp, Homo sapien
cttcagtgacttacccaggccaact

SEQ ID NO: 532797 - DNA, 25 bp, Homo sapien
cactaactttcaggcgtggtttgta

SEQ ID NO: 532798 - DNA, 25 bp, Homo sapien
tacagcacagtaagcaagagttcta

SEQ ID NO: 532799 - DNA, 25 bp, Homo sapien
ggtttgtacatgtcaagtcttagac

SEQ ID NO: 532800 - DNA, 25 bp, Homo sapien
tcttagactcccttcggtggagtac

SEQ ID NO: 532801 - DNA, 25 bp, Homo sapien
tgtccaccttcagctcgctccaaat

SEQ ID NO: 532802 - DNA, 25 bp, Homo sapien
aatagatggcaaactattgtccacc

SEQ ID NO: 532803 - DNA, 25 bp, Homo sapien
gaggtcggagcaacctcttttccga

SEQ ID NO: 532804 - DNA, 25 bp, Homo sapien
tccgaagcctgaacacaatagatgg

SEQ ID NO: 532805 - DNA, 25 bp, Homo sapien
ccacatcgcggcccttgttcttgaa

SEQ ID NO: 532806 - DNA, 25 bp, Homo sapien
tccacatcgcggcccttgttcttga

SEQ ID NO: 532807 - DNA, 25 bp, Homo sapien
ttccacatcgcggcccttgttcttg

SEQ ID NO: 532808 - DNA, 25 bp, Homo sapien
tttgtgccagaaatggagccggacc

SEQ ID NO: 532809 - DNA, 25 bp, Homo sapien
ggagtaattctccacgcctagtgag

SEQ ID NO: 532810 - DNA, 25 bp, Homo sapien
aagagcacgttctgtgacgcctccg

SEQ ID NO: 532811 - DNA, 25 bp, Homo sapien
cctagtgagaacgaggagaatgccg

SEQ ID NO: 532812 - DNA, 25 bp, Homo sapien
ttattggtcccatcgcctgttagca

SEQ ID NO: 532813 - DNA, 25 bp, Homo sapien
tctgtggccttgtcttcttggtagc

SEQ ID NO: 532814 - DNA, 25 bp, Homo sapien
ggtatgtggcattccaagctggccc

SEQ ID NO: 532815 - DNA, 25 bp, Homo sapien
tagcctggtgtttcttcctggtatg

SEQ ID NO: 532816 - DNA, 25 bp, Homo sapien
tctagtggtcggcttcaaaagttgc

SEQ ID NO: 532817 - DNA, 25 bp, Homo sapien
gccctaagccgatgcactgcatgga

SEQ ID NO: 532818 - DNA, 25 bp, Homo sapien
gttgtggagactgtccgccctctag

SEQ ID NO: 532819 - DNA, 25 bp, Homo sapien
ttactgtctggaaacggcttgcggg

SEQ ID NO: 532820 - DNA, 25 bp, Homo sapien
tactagagcggacaaaggctgttcc

SEQ ID NO: 532821 - DNA, 25 bp, Homo sapien
tccctttactagagcggacaaaggc

SEQ ID NO: 532822 - DNA, 25 bp, Homo sapien
tagagcggacaaaggctgttccatc

SEQ ID NO: 532823 - DNA, 25 bp, Homo sapien
tttactagagcggacaaaggctgtt

SEQ ID NO: 532824 - DNA, 25 bp, Homo sapien
gctggcacatgacagtccaacaagg

SEQ ID NO: 532825 - DNA, 25 bp, Homo sapien
tggaaggcagagtgaagctctgacc

SEQ ID NO: 532826 - DNA, 25 bp, Homo sapien
aggcagagtgaagctctgaccccat

SEQ ID NO: 532827 - DNA, 25 bp, Homo sapien
ctggcacatgacagtccaacaaggt

SEQ ID NO: 532828 - DNA, 25 bp, Homo sapien
taaaccatttaaatttagcagtgga

SEQ ID NO: 532829 - DNA, 25 bp, Homo sapien
ctttagtgacactaaatgttagtaa

SEQ ID NO: 532830 - DNA, 25 bp, Homo sapien
agtgacactaaatgttagtaagttc

SEQ ID NO: 532831 - DNA, 25 bp, Homo sapien
agcagtggagggttttataccaact

SEQ ID NO: 532832 - DNA, 25 bp, Homo sapien
acacggatggtccagtgatgatctg

SEQ ID NO: 532833 - DNA, 25 bp, Homo sapien
tcacacggatggtccagtgatgatc

SEQ ID NO: 532834 - DNA, 25 bp, Homo sapien
tgatgatctggttcccatccatcca

SEQ ID NO: 532835 - DNA, 25 bp, Homo sapien
cagtgatgatctggttcccatccat

SEQ ID NO: 532836 - DNA, 25 bp, Homo sapien
taagccattcaaatttagcagtggg

SEQ ID NO: 532837 - DNA, 25 bp, Homo sapien
agcagtggggggttgtatacgaact

SEQ ID NO: 532838 - DNA, 25 bp, Homo sapien
ctttagtgacactaaatgttaataa

SEQ ID NO: 532839 - DNA, 25 bp, Homo sapien
tacgaactttagtgacactaaatgt

SEQ ID NO: 532840 - DNA, 25 bp, Homo sapien
tacacttgtcatgtcctcttaagct

SEQ ID NO: 532841 - DNA, 25 bp, Homo sapien
ttggtgaccctgaaagttttgagta

SEQ ID NO: 532842 - DNA, 25 bp, Homo sapien
gacagcattgagttcccatatataa

SEQ ID NO: 532843 - DNA, 25 bp, Homo sapien
cctgggtgtggcagtttccctgact

SEQ ID NO: 532844 - DNA, 25 bp, Homo sapien
tgcaggattctctgagcctatgggt

SEQ ID NO: 532845 - DNA, 25 bp, Homo sapien
gatgctgatgttgccggtctgagaa

SEQ ID NO: 532846 - DNA, 25 bp, Homo sapien
ttaatttgctttcccaagtaagcac

SEQ ID NO: 532847 - DNA, 25 bp, Homo sapien
aaattatgatagaaagccagacaaa

SEQ ID NO: 532848 - DNA, 25 bp, Homo sapien
tttccctgatactttaccatccagg

SEQ ID NO: 532849 - DNA, 25 bp, Homo sapien
taccatccaggaaactacacttact

SEQ ID NO: 532850 - DNA, 25 bp, Homo sapien
cacttactaagtgcctatgattttt

SEQ ID NO: 532851 - DNA, 25 bp, Homo sapien
gaaactacacttactaagtgcctat

SEQ ID NO: 532852 - DNA, 25 bp, Homo sapien
ctcagggtcatgaagaggattcact

SEQ ID NO: 532853 - DNA, 25 bp, Homo sapien
ggacagtgattcttaagaaccaggc

SEQ ID NO: 532854 - DNA, 25 bp, Homo sapien
cgcctggcgcaagtgcctatgatta

SEQ ID NO: 532855 - DNA, 25 bp, Homo sapien
ggttcaggtcacagggcgttaacta

SEQ ID NO: 532856 - DNA, 25 bp, Homo sapien
gaatgtgtttaatatagtatggtat

SEQ ID NO: 532857 - DNA, 25 bp, Homo sapien
taggaagaatgtgtttaatatagta

SEQ ID NO: 532858 - DNA, 25 bp, Homo sapien
ggaagaatgtgtttaatatagtatg

SEQ ID NO: 532859 - DNA, 25 bp, Homo sapien
aagaatgtgtttaatatagtatggt

SEQ ID NO: 532860 - DNA, 25 bp, Homo sapien
tagactgccaaaaatgaaattgcca

SEQ ID NO: 532861 - DNA, 25 bp, Homo sapien
tagatgtctgccagtgtatactaca

SEQ ID NO: 532862 - DNA, 25 bp, Homo sapien
cagcctgaggcaacaaaatgctctg

SEQ ID NO: 532863 - DNA, 25 bp, Homo sapien
gaaattgaggtaacacagcctgagg

SEQ ID NO: 532864 - DNA, 25 bp, Homo sapien
gaatacattggttccttagacagca

SEQ ID NO: 532865 - DNA, 25 bp, Homo sapien
acccaactctacatctctatcaaaa

SEQ ID NO: 532866 - DNA, 25 bp, Homo sapien
cacaacttcagggtggtatactgaa

SEQ ID NO: 532867 - DNA, 25 bp, Homo sapien
aatgaggtctaaacttcagagtgac

SEQ ID NO: 532868 - DNA, 25 bp, Homo sapien
ccaggtaaagttttattaaatgatg

SEQ ID NO: 532869 - DNA, 25 bp, Homo sapien
gaacattttttaacagtgcagaaat

SEQ ID NO: 532870 - DNA, 25 bp, Homo sapien
atgaacattttttaacagtgcagaa

SEQ ID NO: 532871 - DNA, 25 bp, Homo sapien
cattttttaacagtgcagaaataca

SEQ ID NO: 532872 - DNA, 25 bp, Homo sapien
ggtggaggcgtatgataaaactcac

SEQ ID NO: 532873 - DNA, 25 bp, Homo sapien
ccaggtggaggcgtatgataaaact

SEQ ID NO: 532874 - DNA, 25 bp, Homo sapien
caaaaccaggtggaggcgtatgata

SEQ ID NO: 532875 - DNA, 25 bp, Homo sapien
cagaagatttgctgttcaaataata

SEQ ID NO: 532876 - DNA, 25 bp, Homo sapien
tgaactggcaatccaaaattgcact

SEQ ID NO: 532877 - DNA, 25 bp, Homo sapien
caatccaaaattgcactgtcatcaa

SEQ ID NO: 532878 - DNA, 25 bp, Homo sapien
ctggcaatccaaaattgcactgtca

SEQ ID NO: 532879 - DNA, 25 bp, Homo sapien
aactggcaatccaaaattgcactgt

SEQ ID NO: 532880 - DNA, 25 bp, Homo sapien
ttagaagcaaatactttaatttcaa

SEQ ID NO: 532881 - DNA, 25 bp, Homo sapien
gaagcaaatactttaatttcaatga

SEQ ID NO: 532882 - DNA, 25 bp, Homo sapien
gcaaatactttaatttcaatgaata

SEQ ID NO: 532883 - DNA, 25 bp, Homo sapien
caaatactttaatttcaatgaatac

SEQ ID NO: 532884 - DNA, 25 bp, Homo sapien
tctacaggctgagtgtaagaagaga

SEQ ID NO: 532885 - DNA, 25 bp, Homo sapien
ccagccaggaagtcgtaactttgta

SEQ ID NO: 532886 - DNA, 25 bp, Homo sapien
caaggattagggatggaagacaaaa

SEQ ID NO: 532887 - DNA, 25 bp, Homo sapien
cttcttcagtgttatgcagtctttt

SEQ ID NO: 532888 - DNA, 25 bp, Homo sapien
tcacaggagacttgacctccccggc

SEQ ID NO: 532889 - DNA, 25 bp, Homo sapien
cacgatgatcactgctcacaggaga

SEQ ID NO: 532890 - DNA, 25 bp, Homo sapien
gtgcagcggcacgatgatcactgct

SEQ ID NO: 532891 - DNA, 25 bp, Homo sapien
gatgatcactgctcacaggagactt

SEQ ID NO: 532892 - DNA, 25 bp, Homo sapien
tatacctgatgctggacaatgcatg

SEQ ID NO: 532893 - DNA, 25 bp, Homo sapien
taaacaactggatacactgtccctc

SEQ ID NO: 532894 - DNA, 25 bp, Homo sapien
gtatacatttaattcgacatggtca

SEQ ID NO: 532895 - DNA, 25 bp, Homo sapien
attcgacatggtcataagtaatacc

SEQ ID NO: 532896 - DNA, 25 bp, Homo sapien
attgttgtggtaaagggctccatca

SEQ ID NO: 532897 - DNA, 25 bp, Homo sapien
actgtgcatatctcggccaagagga

SEQ ID NO: 532898 - DNA, 25 bp, Homo sapien
ttcctgcggaagactgtttgctggc

SEQ ID NO: 532899 - DNA, 25 bp, Homo sapien
gagttgcaacaccaataccccagat

SEQ ID NO: 532900 - DNA, 25 bp, Homo sapien
aacctcctgttccacatattcttct

SEQ ID NO: 532901 - DNA, 25 bp, Homo sapien
tgttttgatgtaaaggtgcgctggc

SEQ ID NO: 532902 - DNA, 25 bp, Homo sapien
gtgcgctggctaaacaacctcctgt

SEQ ID NO: 532903 - DNA, 25 bp, Homo sapien
cattctttacaataacaacatctgt

SEQ ID NO: 532904 - DNA, 25 bp, Homo sapien
ggcgtgaagcaccgcgcctggccaa

SEQ ID NO: 532905 - DNA, 25 bp, Homo sapien
cgtgaagcaccgcgcctggccaagt

SEQ ID NO: 532906 - DNA, 25 bp, Homo sapien
gtgaagcaccgcgcctggccaagtt

SEQ ID NO: 532907 - DNA, 25 bp, Homo sapien
caggcgtgaagcaccgcgcctggcc

SEQ ID NO: 532908 - DNA, 25 bp, Homo sapien
ctgaggtgcgacttcagacttctgc

SEQ ID NO: 532909 - DNA, 25 bp, Homo sapien
tcaagagacaggaccgacagtcagg

SEQ ID NO: 532910 - DNA, 25 bp, Homo sapien
tgccttgtttcgactttaggaggtg

SEQ ID NO: 532911 - DNA, 25 bp, Homo sapien
taggattcaacctataaatgatggg

SEQ ID NO: 532912 - DNA, 25 bp, Homo sapien
tgcacggccggcatctccttcagag

SEQ ID NO: 532913 - DNA, 25 bp, Homo sapien
gtgtccagctgcacggccggcatct

SEQ ID NO: 532914 - DNA, 25 bp, Homo sapien
tgcgtgtccagctgcacggccggca

SEQ ID NO: 532915 - DNA, 25 bp, Homo sapien
cacggccggcatctccttcagaggg

SEQ ID NO: 532916 - DNA, 25 bp, Homo sapien
cagggaccaccgactccgccgccgt

SEQ ID NO: 532917 - DNA, 25 bp, Homo sapien
cgcgcagggaccaccgactccgccg

SEQ ID NO: 532918 - DNA, 25 bp, Homo sapien
gcagggaccaccgactccgccgccg

SEQ ID NO: 532919 - DNA, 25 bp, Homo sapien
gcgcagggaccaccgactccgccgc

SEQ ID NO: 532920 - DNA, 25 bp, Homo sapien
cgaggcgacactgccccccgccgct

SEQ ID NO: 532921 - DNA, 25 bp, Homo sapien
ctagaccgaggcgacactgcccccc

SEQ ID NO: 532922 - DNA, 25 bp, Homo sapien
accgaggcgacactgccccccgccg

SEQ ID NO: 532923 - DNA, 25 bp, Homo sapien
agaccgaggcgacactgccccccgc

SEQ ID NO: 532924 - DNA, 25 bp, Homo sapien
cttgtctatgtggagctcggaggcc

SEQ ID NO: 532925 - DNA, 25 bp, Homo sapien
tacagcgacaccctaggccgggagg

SEQ ID NO: 532926 - DNA, 25 bp, Homo sapien
aatgcaggctgagcttaggctggcc

SEQ ID NO: 532927 - DNA, 25 bp, Homo sapien
cctgcgaggaagacgcggagaatca

SEQ ID NO: 532928 - DNA, 25 bp, Homo sapien
ggtggtactctctcatgagaaggtc

SEQ ID NO: 532929 - DNA, 25 bp, Homo sapien
gaaacctccagctatccagaaactc

SEQ ID NO: 532930 - DNA, 25 bp, Homo sapien
cacatgaagagataggtagggcaag

SEQ ID NO: 532931 - DNA, 25 bp, Homo sapien
tgcggagcttctatggatgcacctc

SEQ ID NO: 532932 - DNA, 25 bp, Homo sapien
accaccgcatcaggtaggggagaga

SEQ ID NO: 532933 - DNA, 25 bp, Homo sapien
accgcatcaggtaggggagagaaaa

SEQ ID NO: 532934 - DNA, 25 bp, Homo sapien
cttgggaccaccgcatcaggtaggg

SEQ ID NO: 532935 - DNA, 25 bp, Homo sapien
tcttgggaccaccgcatcaggtagg

SEQ ID NO: 532936 - DNA, 25 bp, Homo sapien
aaatctttcccatagccagtttctg

SEQ ID NO: 532937 - DNA, 25 bp, Homo sapien
agtcagtgtctattcctatcaagaa

SEQ ID NO: 532938 - DNA, 25 bp, Homo sapien
ttttatggcactctgaacactttca

SEQ ID NO: 532939 - DNA, 25 bp, Homo sapien
caaagcctgcactagagtcagtgtc

SEQ ID NO: 532940 - DNA, 25 bp, Homo sapien
tgccataagctccaggaaatgctcc

SEQ ID NO: 532941 - DNA, 25 bp, Homo sapien
tgcttgaagggacgatttacatgcc

SEQ ID NO: 532942 - DNA, 25 bp, Homo sapien
cattgtgtcatggaactcttctggg

SEQ ID NO: 532943 - DNA, 25 bp, Homo sapien
tagtctgctcgactattgccccagg

SEQ ID NO: 532944 - DNA, 25 bp, Homo sapien
gactctctcacaggttatggtactg

SEQ ID NO: 532945 - DNA, 25 bp, Homo sapien
ccactgtgagaaacaagtagcattc

SEQ ID NO: 532946 - DNA, 25 bp, Homo sapien
ggtactgcgatcatgaccacaaaca

SEQ ID NO: 532947 - DNA, 25 bp, Homo sapien
cagggtttacccagattatgcagga

SEQ ID NO: 532948 - DNA, 25 bp, Homo sapien
gcatccatatgctgaaacctacaaa

SEQ ID NO: 532949 - DNA, 25 bp, Homo sapien
aatttaaggcatatgtacagcatcc

SEQ ID NO: 532950 - DNA, 25 bp, Homo sapien
caaacagcacaatctcaaggaaatc

SEQ ID NO: 532951 - DNA, 25 bp, Homo sapien
tgtctatatggcttggaaggctcaa

SEQ ID NO: 532952 - DNA, 25 bp, Homo sapien
aagagaccttgagtttgactatgag

SEQ ID NO: 532953 - DNA, 25 bp, Homo sapien
tatttcaaagtggtttatagaccta

SEQ ID NO: 532954 - DNA, 25 bp, Homo sapien
ctataaaacgtctaggagaaagtgt

SEQ ID NO: 532955 - DNA, 25 bp, Homo sapien
tgcaaaaaaggaacctcaacacata

SEQ ID NO: 532956 - DNA, 25 bp, Homo sapien
actgaatacaaaatattggccttga

SEQ ID NO: 532957 - DNA, 25 bp, Homo sapien
aatattggccttgatgtggagtaac

SEQ ID NO: 532958 - DNA, 25 bp, Homo sapien
gagtaacagagtcattcattgctgg

SEQ ID NO: 532959 - DNA, 25 bp, Homo sapien
taagcatatacttatgtgacccagc

SEQ ID NO: 532960 - DNA, 25 bp, Homo sapien
gacgaatgcttagagaaaggtacag

SEQ ID NO: 532961 - DNA, 25 bp, Homo sapien
gacatgtgataagccaactatagtg

SEQ ID NO: 532962 - DNA, 25 bp, Homo sapien
catggtaggtatatgctgttcacta

SEQ ID NO: 532963 - DNA, 25 bp, Homo sapien
tgttagtggtagtctacatggtagg

SEQ ID NO: 532964 - DNA, 25 bp, Homo sapien
cctactaggaaccaggccctgtgta

SEQ ID NO: 532965 - DNA, 25 bp, Homo sapien
catctttgaggctacgacagagagg

SEQ ID NO: 532966 - DNA, 25 bp, Homo sapien
agagagggccagtttatccattgaa

SEQ ID NO: 532967 - DNA, 25 bp, Homo sapien
tggcttattcccagtaaccagcacc

SEQ ID NO: 532968 - DNA, 25 bp, Homo sapien
gctgtatgggaataagacactccaa

SEQ ID NO: 532969 - DNA, 25 bp, Homo sapien
cataggactgccagcatttcgggcc

SEQ ID NO: 532970 - DNA, 25 bp, Homo sapien
gatggatgcctaagctatcatagcc

SEQ ID NO: 532971 - DNA, 25 bp, Homo sapien
gacactccaatagtcagatggatgc

SEQ ID NO: 532972 - DNA, 25 bp, Homo sapien
gaatactaagccatgacatctcaga

SEQ ID NO: 532973 - DNA, 25 bp, Homo sapien
tggaaggctccttatactcacttga

SEQ ID NO: 532974 - DNA, 25 bp, Homo sapien
gatgagccagttcatctaatccaac

SEQ ID NO: 532975 - DNA, 25 bp, Homo sapien
gaaaaattatactctcaattcaggc

SEQ ID NO: 532976 - DNA, 25 bp, Homo sapien
cacttccatcggttttagaggccct

SEQ ID NO: 532977 - DNA, 25 bp, Homo sapien
gaccctggccagctctaagggctaa

SEQ ID NO: 532978 - DNA, 25 bp, Homo sapien
gcagctctgaggtgtagcacttcac

SEQ ID NO: 532979 - DNA, 25 bp, Homo sapien
cagctctaagggctaaagcagctct

SEQ ID NO: 532980 - DNA, 25 bp, Homo sapien
tgctgaattccccatgagcagcttt

SEQ ID NO: 532981 - DNA, 25 bp, Homo sapien
ataatcagggcgatctggtgaggca

SEQ ID NO: 532982 - DNA, 25 bp, Homo sapien
ctgaattccccatgagcagcttttc

SEQ ID NO: 532983 - DNA, 25 bp, Homo sapien
ctaataatcagggcgatctggtgag

SEQ ID NO: 532984 - DNA, 25 bp, Homo sapien
gtattgatcaattgccacttaggcc

SEQ ID NO: 532985 - DNA, 25 bp, Homo sapien
ttaggccacacataatcactaccac

SEQ ID NO: 532986 - DNA, 25 bp, Homo sapien
ccctcaagagaatgtattaaaagga

SEQ ID NO: 532987 - DNA, 25 bp, Homo sapien
tcaaccagtaacaatgtacaggctt

SEQ ID NO: 532988 - DNA, 25 bp, Homo sapien
gctgctatgcttgtcatgcaaaata

SEQ ID NO: 532989 - DNA, 25 bp, Homo sapien
actgtgcctttgtagacttggttgc

SEQ ID NO: 532990 - DNA, 25 bp, Homo sapien
ggtgatgaacacaaaggctatgact

SEQ ID NO: 532991 - DNA, 25 bp, Homo sapien
gatccatttgagtcaaactgtgcct

SEQ ID NO: 532992 - DNA, 25 bp, Homo sapien
gtgatactagaacttgcagaaattt

SEQ ID NO: 532993 - DNA, 25 bp, Homo sapien
tacatgccaggctttatgctactgt

SEQ ID NO: 532994 - DNA, 25 bp, Homo sapien
tctctttgttacttgccagcacagt

SEQ ID NO: 532995 - DNA, 25 bp, Homo sapien
cagcacagtgatactagaacttgca

SEQ ID NO: 532996 - DNA, 25 bp, Homo sapien
tttcagtgtcaacctcagaggagct

SEQ ID NO: 532997 - DNA, 25 bp, Homo sapien
gaaatgacccaaggaggcttcgatg

SEQ ID NO: 532998 - DNA, 25 bp, Homo sapien
gcctgtacctcagatatgaaggaag

SEQ ID NO: 532999 - DNA, 25 bp, Homo sapien
gagcagtttctatgacctcaaaagg

SEQ ID NO: 533000 - DNA, 25 bp, Homo sapien
ccagtgtcacatgggcagtcattta

SEQ ID NO: 533001 - DNA, 25 bp, Homo sapien
catttttcagggctcaatttacttt

SEQ ID NO: 533002 - DNA, 25 bp, Homo sapien
catttaagactatactcaattcttg

SEQ ID NO: 533003 - DNA, 25 bp, Homo sapien
gcctagtatcagaggcactccctgc

SEQ ID NO: 533004 - DNA, 25 bp, Homo sapien
ttcagctggtctcaacagcaaattt

SEQ ID NO: 533005 - DNA, 25 bp, Homo sapien
tcagctggtctcaacagcaaatttt

SEQ ID NO: 533006 - DNA, 25 bp, Homo sapien
cggccttttacagaatacagttaca

SEQ ID NO: 533007 - DNA, 25 bp, Homo sapien
ggctctagtgaagcatactctaaaa

SEQ ID NO: 533008 - DNA, 25 bp, Homo sapien
gcaatctattaacaccggcctttta

SEQ ID NO: 533009 - DNA, 25 bp, Homo sapien
tactctaaaatgtagctaagcaatc

SEQ ID NO: 533010 - DNA, 25 bp, Homo sapien
taagactgaaccatatatgatgtac

SEQ ID NO: 533011 - DNA, 25 bp, Homo sapien
tcagtaagactgaaccatatatgat

SEQ ID NO: 533012 - DNA, 25 bp, Homo sapien
gactgaaccatatatgatgtacttt

SEQ ID NO: 533013 - DNA, 25 bp, Homo sapien
tgatgtacttttatatgttattgca

SEQ ID NO: 533014 - DNA, 25 bp, Homo sapien
aaactgatcttgctgttgtctccat

SEQ ID NO: 533015 - DNA, 25 bp, Homo sapien
agaaactgatcttgctgttgtctcc

SEQ ID NO: 533016 - DNA, 25 bp, Homo sapien
gaaactgatcttgctgttgtctcca

SEQ ID NO: 533017 - DNA, 25 bp, Homo sapien
aagaaactgatcttgctgttgtctc

SEQ ID NO: 533018 - DNA, 25 bp, Homo sapien
gggcaatacatttatcacacaatat

SEQ ID NO: 533019 - DNA, 25 bp, Homo sapien
aatatatttctcaaggggccggcat

SEQ ID NO: 533020 - DNA, 25 bp, Homo sapien
gcggggggggcaatacatttatcac

SEQ ID NO: 533021 - DNA, 25 bp, Homo sapien
aaatatatttctcaaggggccggca

SEQ ID NO: 533022 - DNA, 25 bp, Homo sapien
tcagtgtgacaagaatgttgacaat

SEQ ID NO: 533023 - DNA, 25 bp, Homo sapien
gcaggttttagttggacagtcatct

SEQ ID NO: 533024 - DNA, 25 bp, Homo sapien
gaatgttgacaatccctgtgctatc

SEQ ID NO: 533025 - DNA, 25 bp, Homo sapien
ctgtactaggatctagttccactgt

SEQ ID NO: 533026 - DNA, 25 bp, Homo sapien
tttgtgtaatagtctagagattgct

SEQ ID NO: 533027 - DNA, 25 bp, Homo sapien
gagattgctatacagatttaatgtg

SEQ ID NO: 533028 - DNA, 25 bp, Homo sapien
cacttagttgggcaaaagtgtatta

SEQ ID NO: 533029 - DNA, 25 bp, Homo sapien
aagtgtattagtatctaccaccaac

SEQ ID NO: 533030 - DNA, 25 bp, Homo sapien
tttagggagataagaggcaaatcac

SEQ ID NO: 533031 - DNA, 25 bp, Homo sapien
cacggttgaggatgcgtgcccatga

SEQ ID NO: 533032 - DNA, 25 bp, Homo sapien
gcttcaggaggtcagaacccgaggt

SEQ ID NO: 533033 - DNA, 25 bp, Homo sapien
gacgacttgaagcaaaggtgggaca

SEQ ID NO: 533034 - DNA, 25 bp, Homo sapien
gaggtcggagataagtacccgccgc

SEQ ID NO: 533035 - DNA, 25 bp, Homo sapien
cctgtagttggaggacgggcggtcg

SEQ ID NO: 533036 - DNA, 25 bp, Homo sapien
gctggcgaaggccgtctgagctcca

SEQ ID NO: 533037 - DNA, 25 bp, Homo sapien
gggtggtcctcgaaccttcagcgag

SEQ ID NO: 533038 - DNA, 25 bp, Homo sapien
gtccagaaaacctgctccgtccgga

SEQ ID NO: 533039 - DNA, 25 bp, Homo sapien
tgtggtccagaaaacctgctccgtc

SEQ ID NO: 533040 - DNA, 25 bp, Homo sapien
agaaaacctgctccgtccggagcct

SEQ ID NO: 533041 - DNA, 25 bp, Homo sapien
ggccccgctaccagcgtctccacat

SEQ ID NO: 533042 - DNA, 25 bp, Homo sapien
agcgcgccgccagcgtttggttgca

SEQ ID NO: 533043 - DNA, 25 bp, Homo sapien
caccaggtctaaacagccgggcttt

SEQ ID NO: 533044 - DNA, 25 bp, Homo sapien
tgtgggccttaggttacagcgcgcc

SEQ ID NO: 533045 - DNA, 25 bp, Homo sapien
gcgccctaaccgagaagctgcttaa

SEQ ID NO: 533046 - DNA, 25 bp, Homo sapien
ggagacagaggtaaactacaataat

SEQ ID NO: 533047 - DNA, 25 bp, Homo sapien
aacacccaatttcaataggccctag

SEQ ID NO: 533048 - DNA, 25 bp, Homo sapien
tagtaaccctgccaaatacatcagc

SEQ ID NO: 533049 - DNA, 25 bp, Homo sapien
ccctgccaaatacatcagcttgtag

SEQ ID NO: 533050 - DNA, 25 bp, Homo sapien
tagaatacgtatgttcccatccact

SEQ ID NO: 533051 - DNA, 25 bp, Homo sapien
gaactgtgtgtagaatacgtatgtt

SEQ ID NO: 533052 - DNA, 25 bp, Homo sapien
tgtgtgtagaatacgtatgttccca

SEQ ID NO: 533053 - DNA, 25 bp, Homo sapien
tgtagaatacgtatgttcccatcca

SEQ ID NO: 533054 - DNA, 25 bp, Homo sapien
tggagctgttaaccggctatacttc

SEQ ID NO: 533055 - DNA, 25 bp, Homo sapien
ctagggcttgtagaacagggcttga

SEQ ID NO: 533056 - DNA, 25 bp, Homo sapien
cataggcactccttctagtagaact

SEQ ID NO: 533057 - DNA, 25 bp, Homo sapien
ttcttgcacaatgggagcgtcccta

SEQ ID NO: 533058 - DNA, 25 bp, Homo sapien
tgcctcaaaacaggatggaaatttg

SEQ ID NO: 533059 - DNA, 25 bp, Homo sapien
caatgtttgctgtctagccacctga

SEQ ID NO: 533060 - DNA, 25 bp, Homo sapien
ggctgtctcagttcagtaaagctta

SEQ ID NO: 533061 - DNA, 25 bp, Homo sapien
caaagtaacatttgtggctgtctca

SEQ ID NO: 533062 - DNA, 25 bp, Homo sapien
cacttcagtctgggtgacagcccga

SEQ ID NO: 533063 - DNA, 25 bp, Homo sapien
cagtctgggtgacagcccgagaccc

SEQ ID NO: 533064 - DNA, 25 bp, Homo sapien
acttcagtctgggtgacagcccgag

SEQ ID NO: 533065 - DNA, 25 bp, Homo sapien
ttcagtctgggtgacagcccgagac

SEQ ID NO: 533066 - DNA, 25 bp, Homo sapien
aatgaaattagaggatctattgtaa

SEQ ID NO: 533067 - DNA, 25 bp, Homo sapien
aaatgaaattagaggatctattgta

SEQ ID NO: 533068 - DNA, 25 bp, Homo sapien
gaggatctattgtaattttgatgca

SEQ ID NO: 533069 - DNA, 25 bp, Homo sapien
ttagaggatctattgtaattttgat

SEQ ID NO: 533070 - DNA, 25 bp, Homo sapien
gcctgatttgtaacatgcattagtg

SEQ ID NO: 533071 - DNA, 25 bp, Homo sapien
tactatacaaaaactcagcaagtgc

SEQ ID NO: 533072 - DNA, 25 bp, Homo sapien
tgaggtcaagcggtccactctctgc

SEQ ID NO: 533073 - DNA, 25 bp, Homo sapien
acctgttggtctttcgtgaacttca

SEQ ID NO: 533074 - DNA, 25 bp, Homo sapien
cagatgccctgaaagagggacatcc

SEQ ID NO: 533075 - DNA, 25 bp, Homo sapien
agatgccctgaaagagggacatcca

SEQ ID NO: 533076 - DNA, 25 bp, Homo sapien
cattcattagcaagattccctggag

SEQ ID NO: 533077 - DNA, 25 bp, Homo sapien
tgcctatgctcaggaaagggatgcc

SEQ ID NO: 533078 - DNA, 25 bp, Homo sapien
tatgcaagcatatgacccagagatc

SEQ ID NO: 533079 - DNA, 25 bp, Homo sapien
tcttgcaggagcaacggatggcctt

SEQ ID NO: 533080 - DNA, 25 bp, Homo sapien
ttcgaaagatggcaagtgtacaacc

SEQ ID NO: 533081 - DNA, 25 bp, Homo sapien
taatctcagcattctaggacagtga

SEQ ID NO: 533082 - DNA, 25 bp, Homo sapien
taggagttccagttcgaaaccagct

SEQ ID NO: 533083 - DNA, 25 bp, Homo sapien
tatatatagaacacatggcaagagc

SEQ ID NO: 533084 - DNA, 25 bp, Homo sapien
gccaggctgtctcattcctaacatg

SEQ ID NO: 533085 - DNA, 25 bp, Homo sapien
tctagctatgagaatagtcaaattg

SEQ ID NO: 533086 - DNA, 25 bp, Homo sapien
aaaacgtttaagtctagcctctgcg

SEQ ID NO: 533087 - DNA, 25 bp, Homo sapien
agtcaaattgagcttgccaggctgt

SEQ ID NO: 533088 - DNA, 25 bp, Homo sapien
tcttgcttaccaactggaggacact

SEQ ID NO: 533089 - DNA, 25 bp, Homo sapien
tctctcttagcgacacactccttgg

SEQ ID NO: 533090 - DNA, 25 bp, Homo sapien
ttaacttgagcagtagccaacagga

SEQ ID NO: 533091 - DNA, 25 bp, Homo sapien
caacaggaaggataccagtgtctct

SEQ ID NO: 533092 - DNA, 25 bp, Homo sapien
tttgatggcagataaggacggagtc

SEQ ID NO: 533093 - DNA, 25 bp, Homo sapien
gagtcataaagctgtatccatgcag

SEQ ID NO: 533094 - DNA, 25 bp, Homo sapien
tcataaactaatggtgggaggacac

SEQ ID NO: 533095 - DNA, 25 bp, Homo sapien
tccatgcagatgtgttatgctgaca

SEQ ID NO: 533096 - DNA, 25 bp, Homo sapien
cattattaaagccaacagatagcta

SEQ ID NO: 533097 - DNA, 25 bp, Homo sapien
tgctgacattattaaagccaacaga

SEQ ID NO: 533098 - DNA, 25 bp, Homo sapien
gcctatgctgacattattaaagcca

SEQ ID NO: 533099 - DNA, 25 bp, Homo sapien
tacgcccagcctatgctgacattat

SEQ ID NO: 533100 - DNA, 25 bp, Homo sapien
caccttctatgcatgcaacaaaatg

SEQ ID NO: 533101 - DNA, 25 bp, Homo sapien
gctgctctctagacaactccatgta

SEQ ID NO: 533102 - DNA, 25 bp, Homo sapien
tcttcatgaatgcttatgagccgag

SEQ ID NO: 533103 - DNA, 25 bp, Homo sapien
caaaatgccacgtgtaccccataaa

SEQ ID NO: 533104 - DNA, 25 bp, Homo sapien
aaatgtatttgaaatcaggagcctg

SEQ ID NO: 533105 - DNA, 25 bp, Homo sapien
catttacaagtgacaaacttcagct

SEQ ID NO: 533106 - DNA, 25 bp, Homo sapien
cctgaagtagtataaaatggtcaca

SEQ ID NO: 533107 - DNA, 25 bp, Homo sapien
attacaccactagagactatgctgg

SEQ ID NO: 533108 - DNA, 25 bp, Homo sapien
taataagagacctccaaggaaatct

SEQ ID NO: 533109 - DNA, 25 bp, Homo sapien
atccagagcccaagctatcctctag

SEQ ID NO: 533110 - DNA, 25 bp, Homo sapien
gccactgcacatggtctacgctttc

SEQ ID NO: 533111 - DNA, 25 bp, Homo sapien
tcatgagtatgaggccaaataggag

SEQ ID NO: 533112 - DNA, 25 bp, Homo sapien
ttgaaatgccacagttgcactcttg

SEQ ID NO: 533113 - DNA, 25 bp, Homo sapien
tacagctcttcagctagaatgccag

SEQ ID NO: 533114 - DNA, 25 bp, Homo sapien
ttcagaccttagacagaaccttcat

SEQ ID NO: 533115 - DNA, 25 bp, Homo sapien
aatctcctttgaaatgccacagttg

SEQ ID NO: 533116 - DNA, 25 bp, Homo sapien
tttaatttacaagcatgcaggccac

SEQ ID NO: 533117 - DNA, 25 bp, Homo sapien
tatggcacagatcccaggttacttc

SEQ ID NO: 533118 - DNA, 25 bp, Homo sapien
gttcaattctcctgtaagtccccag

SEQ ID NO: 533119 - DNA, 25 bp, Homo sapien
taattggttttctaggcaaaggctc

SEQ ID NO: 533120 - DNA, 25 bp, Homo sapien
aaggcggcaatggtggtatcaaaat

SEQ ID NO: 533121 - DNA, 25 bp, Homo sapien
gggaaggcggcaatggtggtatcaa

SEQ ID NO: 533122 - DNA, 25 bp, Homo sapien
ggcaatggtggtatcaaaatttaca

SEQ ID NO: 533123 - DNA, 25 bp, Homo sapien
gcggcaatggtggtatcaaaattta

SEQ ID NO: 533124 - DNA, 25 bp, Homo sapien
aaaacaggtcataaagaaaatcaat

SEQ ID NO: 533125 - DNA, 25 bp, Homo sapien
aaacaggtcataaagaaaatcaata

SEQ ID NO: 533126 - DNA, 25 bp, Homo sapien
aaaatcaatatagaagggaaagtgc

SEQ ID NO: 533127 - DNA, 25 bp, Homo sapien
tccagtaagtttaggcattcaaaaa

SEQ ID NO: 533128 - DNA, 25 bp, Homo sapien
tatatcactcaataaggtggctcca

SEQ ID NO: 533129 - DNA, 25 bp, Homo sapien
aagtttatgagaaagcctatatcac

SEQ ID NO: 533130 - DNA, 25 bp, Homo sapien
tggtctcctataaaattgtccaaga

SEQ ID NO: 533131 - DNA, 25 bp, Homo sapien
aaactttatagaatttcacacttca

SEQ ID NO: 533132 - DNA, 25 bp, Homo sapien
tcacacttcattggaaaggttagaa

SEQ ID NO: 533133 - DNA, 25 bp, Homo sapien
agataacaaaatttcacaggcctga

SEQ ID NO: 533134 - DNA, 25 bp, Homo sapien
gatcatttagatcactaatgacccc

SEQ ID NO: 533135 - DNA, 25 bp, Homo sapien
tctgatcagtgaagtagtaaaaggt

SEQ ID NO: 533136 - DNA, 25 bp, Homo sapien
acagaatgagaagagctctgatcag

SEQ ID NO: 533137 - DNA, 25 bp, Homo sapien
gtatttatctagcaggtatgcagcc

SEQ ID NO: 533138 - DNA, 25 bp, Homo sapien
aggtagagggcactcctaaattatc

SEQ ID NO: 533139 - DNA, 25 bp, Homo sapien
gggctgcaggcaatctgaataccct

SEQ ID NO: 533140 - DNA, 25 bp, Homo sapien
tgattatactcatttccctaccaat

SEQ ID NO: 533141 - DNA, 25 bp, Homo sapien
tctgcactcgcaagttatcattcct

SEQ ID NO: 533142 - DNA, 25 bp, Homo sapien
cctagtatctactctttgccttcat

SEQ ID NO: 533143 - DNA, 25 bp, Homo sapien
ttaagttagcaagccagagtttaca

SEQ ID NO: 533144 - DNA, 25 bp, Homo sapien
caagcttctaccacacttaagttag

SEQ ID NO: 533145 - DNA, 25 bp, Homo sapien
ttctcatacaggttacagttctttg

SEQ ID NO: 533146 - DNA, 25 bp, Homo sapien
tgaagtaccgcacctagagtaggcc

SEQ ID NO: 533147 - DNA, 25 bp, Homo sapien
tttttgttaatcacgtctcacacag

SEQ ID NO: 533148 - DNA, 25 bp, Homo sapien
gacagagccaagttcaatatcttat

SEQ ID NO: 533149 - DNA, 25 bp, Homo sapien
tgaatatattgaaggctgactctct

SEQ ID NO: 533150 - DNA, 25 bp, Homo sapien
cacagtcaaggtgtcgatctgacaa

SEQ ID NO: 533151 - DNA, 25 bp, Homo sapien
gaatcatcaaattaatctaatgaac

SEQ ID NO: 533152 - DNA, 25 bp, Homo sapien
cattcctatggttaaagcattttcc

SEQ ID NO: 533153 - DNA, 25 bp, Homo sapien
tatttctttagacattcctatggtt

SEQ ID NO: 533154 - DNA, 25 bp, Homo sapien
aaataacttatagattctcaacata

SEQ ID NO: 533155 - DNA, 25 bp, Homo sapien
tatgtgcctggtagtgggaaacaca

SEQ ID NO: 533156 - DNA, 25 bp, Homo sapien
taggttcaaaagactggcaaagaca

SEQ ID NO: 533157 - DNA, 25 bp, Homo sapien
tatgatgccagaatcaactgaccca

SEQ ID NO: 533158 - DNA, 25 bp, Homo sapien
aatttactggcctatgttccagagg

SEQ ID NO: 533159 - DNA, 25 bp, Homo sapien
gactgccaattaacaatggtctggg

SEQ ID NO: 533160 - DNA, 25 bp, Homo sapien
tgagtatacagacaccaagaccatc

SEQ ID NO: 533161 - DNA, 25 bp, Homo sapien
tacatgtggcctgatatgagctaca

SEQ ID NO: 533162 - DNA, 25 bp, Homo sapien
tgagctacataccaagactgccaat

SEQ ID NO: 533163 - DNA, 25 bp, Homo sapien
tttgcttacatcataaatgggtcaa

SEQ ID NO: 533164 - DNA, 25 bp, Homo sapien
cacgcgcctgccacgtttgtatttt

SEQ ID NO: 533165 - DNA, 25 bp, Homo sapien
taaaattagtgtgtgagacaaatgg

SEQ ID NO: 533166 - DNA, 25 bp, Homo sapien
aatgaaactactattgctcttttaa

SEQ ID NO: 533167 - DNA, 25 bp, Homo sapien
gaattccacaattttacaacagctc

SEQ ID NO: 533168 - DNA, 25 bp, Homo sapien
gaaatatccataactattggttgtc

SEQ ID NO: 533169 - DNA, 25 bp, Homo sapien
taactattgaggtacaaaagaagaa

SEQ ID NO: 533170 - DNA, 25 bp, Homo sapien
cagctcagctttttgataaatgtaa

SEQ ID NO: 533171 - DNA, 25 bp, Homo sapien
gaatacttcatgacctcccttgcct

SEQ ID NO: 533172 - DNA, 25 bp, Homo sapien
tgagccagaagcatagcactaaacc

SEQ ID NO: 533173 - DNA, 25 bp, Homo sapien
ccctggcacagtaacgaattggatt

SEQ ID NO: 533174 - DNA, 25 bp, Homo sapien
aatataatctttctagtccctggca

SEQ ID NO: 533175 - DNA, 25 bp, Homo sapien
tccttttcaatattactttgagaac

SEQ ID NO: 533176 - DNA, 25 bp, Homo sapien
gaaatctctcaaccacgaactcaag

SEQ ID NO: 533177 - DNA, 25 bp, Homo sapien
cgaactcaagaagtaattcttgaat

SEQ ID NO: 533178 - DNA, 25 bp, Homo sapien
cctctgaagctgattttaaacttat

SEQ ID NO: 533179 - DNA, 25 bp, Homo sapien
caaagtttgcccatcacagaaatca

SEQ ID NO: 533180 - DNA, 25 bp, Homo sapien
tatttataatcaagaagattcctcc

SEQ ID NO: 533181 - DNA, 25 bp, Homo sapien
gtctaaagttcctcaacacagtagg

SEQ ID NO: 533182 - DNA, 25 bp, Homo sapien
taagatttatctctcacccagagta

SEQ ID NO: 533183 - DNA, 25 bp, Homo sapien
taaggatatattgtaactggttcat

SEQ ID NO: 533184 - DNA, 25 bp, Homo sapien
aaggatatattgtaactggttcata

SEQ ID NO: 533185 - DNA, 25 bp, Homo sapien
ttaaggatatattgtaactggttca

SEQ ID NO: 533186 - DNA, 25 bp, Homo sapien
taccaaatatagtacctaccagctt

SEQ ID NO: 533187 - DNA, 25 bp, Homo sapien
caaatatagtacctaccagcttttt

SEQ ID NO: 533188 - DNA, 25 bp, Homo sapien
agtacctaccagcttttttgtccat

SEQ ID NO: 533189 - DNA, 25 bp, Homo sapien
tatagtacctaccagcttttttgtc

SEQ ID NO: 533190 - DNA, 25 bp, Homo sapien
ttttttattaagtgataatcttcag

SEQ ID NO: 533191 - DNA, 25 bp, Homo sapien
tcttcagtacctaaacagtaaataa

SEQ ID NO: 533192 - DNA, 25 bp, Homo sapien
taatcttcagtacctaaacagtaaa

SEQ ID NO: 533193 - DNA, 25 bp, Homo sapien
gtgataatcttcagtacctaaacag

SEQ ID NO: 533194 - DNA, 25 bp, Homo sapien
gtgttactataagaagctgtatctc

SEQ ID NO: 533195 - DNA, 25 bp, Homo sapien
agttttagtgttactataagaagct

SEQ ID NO: 533196 - DNA, 25 bp, Homo sapien
tagtgttactataagaagctgtatc

SEQ ID NO: 533197 - DNA, 25 bp, Homo sapien
tttagtgttactataagaagctgta

SEQ ID NO: 533198 - DNA, 25 bp, Homo sapien
gaatcattcgtgctaagtggataaa

SEQ ID NO: 533199 - DNA, 25 bp, Homo sapien
aaaaagacatccgaaatacctgaga

SEQ ID NO: 533200 - DNA, 25 bp, Homo sapien
tcagtataacgtagacaaaaacagc

SEQ ID NO: 533201 - DNA, 25 bp, Homo sapien
tctggtggaggagttaggtcttcat

SEQ ID NO: 533202 - DNA, 25 bp, Homo sapien
tttcttctcccagatatgcaagtga

SEQ ID NO: 533203 - DNA, 25 bp, Homo sapien
aagtaatcccttgacatgtgtaaaa

SEQ ID NO: 533204 - DNA, 25 bp, Homo sapien
ggaatgtactgatgatagtctctta

SEQ ID NO: 533205 - DNA, 25 bp, Homo sapien
tttttagtagatgggaatgtactga

SEQ ID NO: 533206 - DNA, 25 bp, Homo sapien
ttttcctttttgatagtattcaatg

SEQ ID NO: 533207 - DNA, 25 bp, Homo sapien
tgaggaaggtacagtaattatccac

SEQ ID NO: 533208 - DNA, 25 bp, Homo sapien
aactttttccatgaggaaggtacag

SEQ ID NO: 533209 - DNA, 25 bp, Homo sapien
cctttttgatagtattcaatgagaa

SEQ ID NO: 533210 - DNA, 25 bp, Homo sapien
aaagatacataactgactgaagaaa

SEQ ID NO: 533211 - DNA, 25 bp, Homo sapien
tgctaatccaagtagggctaactga

SEQ ID NO: 533212 - DNA, 25 bp, Homo sapien
tacggaatttagtctacagctaggc

SEQ ID NO: 533213 - DNA, 25 bp, Homo sapien
tgtaacagtaatgacacttagtggc

SEQ ID NO: 533214 - DNA, 25 bp, Homo sapien
actctcctgtagtcctctgagtaag

SEQ ID NO: 533215 - DNA, 25 bp, Homo sapien
tctcctgtagtcctctgagtaagct

SEQ ID NO: 533216 - DNA, 25 bp, Homo sapien
ggatactctcctgtagtcctctgag

SEQ ID NO: 533217 - DNA, 25 bp, Homo sapien
tcctggatactctcctgtagtcctc

SEQ ID NO: 533218 - DNA, 25 bp, Homo sapien
gtataccattataaagttagaagac

SEQ ID NO: 533219 - DNA, 25 bp, Homo sapien
taaaactacaatgataatttggtct

SEQ ID NO: 533220 - DNA, 25 bp, Homo sapien
tgataatttggtcttactctgagtt

SEQ ID NO: 533221 - DNA, 25 bp, Homo sapien
aaatagtataccattataaagttag

SEQ ID NO: 533222 - DNA, 25 bp, Homo sapien
taaaataaattcctctaatgctgca

SEQ ID NO: 533223 - DNA, 25 bp, Homo sapien
tctgaattaatgtctatgttgaata

SEQ ID NO: 533224 - DNA, 25 bp, Homo sapien
taaattcctctaatgctgcataagc

SEQ ID NO: 533225 - DNA, 25 bp, Homo sapien
gtattttaagagatgatacatctga

SEQ ID NO: 533226 - DNA, 25 bp, Homo sapien
attttagaatcttaacgccaatatt

SEQ ID NO: 533227 - DNA, 25 bp, Homo sapien
atttacgtgctgctaaggcactgct

SEQ ID NO: 533228 - DNA, 25 bp, Homo sapien
ttagaatcttaacgccaatatttac

SEQ ID NO: 533229 - DNA, 25 bp, Homo sapien
tacgtgctgctaaggcactgctgac

SEQ ID NO: 533230 - DNA, 25 bp, Homo sapien
tatttttgaggcagcacaatatggc

SEQ ID NO: 533231 - DNA, 25 bp, Homo sapien
tgaggcagcacaatatggcctgcac

SEQ ID NO: 533232 - DNA, 25 bp, Homo sapien
caatatggcctgcaccttttcaaaa

SEQ ID NO: 533233 - DNA, 25 bp, Homo sapien
ccttgtatttttgaggcagcacaat

SEQ ID NO: 533234 - DNA, 25 bp, Homo sapien
ttaaacacacattcgcgcctaaaga

SEQ ID NO: 533235 - DNA, 25 bp, Homo sapien
ttaacagggcaatacaactaaatgc

SEQ ID NO: 533236 - DNA, 25 bp, Homo sapien
tatttgctatgccaacttaacaggg

SEQ ID NO: 533237 - DNA, 25 bp, Homo sapien
cccagcacagtgctataggttagga

SEQ ID NO: 533238 - DNA, 25 bp, Homo sapien
aacattttgttccttgcagtacacc

SEQ ID NO: 533239 - DNA, 25 bp, Homo sapien
cttgcagtacacctttcaaaagaca

SEQ ID NO: 533240 - DNA, 25 bp, Homo sapien
tgttccttgcagtacacctttcaaa

SEQ ID NO: 533241 - DNA, 25 bp, Homo sapien
gcagtacacctttcaaaagacatct

SEQ ID NO: 533242 - DNA, 25 bp, Homo sapien
cacatcaagggaaaaacatgaaatg

SEQ ID NO: 533243 - DNA, 25 bp, Homo sapien
tcacatcaagggaaaaacatgaaat

SEQ ID NO: 533244 - DNA, 25 bp, Homo sapien
acatcaagggaaaaacatgaaatga

SEQ ID NO: 533245 - DNA, 25 bp, Homo sapien
cttcacatcaagggaaaaacatgaa

SEQ ID NO: 533246 - DNA, 25 bp, Homo sapien
taggaagatcaagagctacaggatt

SEQ ID NO: 533247 - DNA, 25 bp, Homo sapien
ataggaagatcaagagctacaggat

SEQ ID NO: 533248 - DNA, 25 bp, Homo sapien
aataggaagatcaagagctacagga

SEQ ID NO: 533249 - DNA, 25 bp, Homo sapien
caggaagagataggcaaactctact

SEQ ID NO: 533250 - DNA, 25 bp, Homo sapien
tgataaatatgccctattctggaag

SEQ ID NO: 533251 - DNA, 25 bp, Homo sapien
ccagcccaggatgggtttttaatgc

SEQ ID NO: 533252 - DNA, 25 bp, Homo sapien
tatgccctattctggaagaaaatgc

SEQ ID NO: 533253 - DNA, 25 bp, Homo sapien
gaaactgccatactgtgttctacag

SEQ ID NO: 533254 - DNA, 25 bp, Homo sapien
acttggtgattcacatgcctcggcc

SEQ ID NO: 533255 - DNA, 25 bp, Homo sapien
aacttctcccatcgttgccaacatg

SEQ ID NO: 533256 - DNA, 25 bp, Homo sapien
gagcatcttgtgtttgctggccaat

SEQ ID NO: 533257 - DNA, 25 bp, Homo sapien
tgaacagacacacgattgatttttg

SEQ ID NO: 533258 - DNA, 25 bp, Homo sapien
gaacaattccaagcacatagagagg

SEQ ID NO: 533259 - DNA, 25 bp, Homo sapien
caaatctaacatgtatctgtgtgca

SEQ ID NO: 533260 - DNA, 25 bp, Homo sapien
taataataatctcctcccagtgtgg

SEQ ID NO: 533261 - DNA, 25 bp, Homo sapien
catgcctggcgaaacatggtaattt

SEQ ID NO: 533262 - DNA, 25 bp, Homo sapien
ccctactatgaagtcttataaagtg

SEQ ID NO: 533263 - DNA, 25 bp, Homo sapien
caaaaaggctctattaactagagaa

SEQ ID NO: 533264 - DNA, 25 bp, Homo sapien
cctagttgttgagtttaggcaaata

SEQ ID NO: 533265 - DNA, 25 bp, Homo sapien
caattgcattttagctggacctcct

SEQ ID NO: 533266 - DNA, 25 bp, Homo sapien
tcatcccttgtattcagctagtcaa

SEQ ID NO: 533267 - DNA, 25 bp, Homo sapien
taagtaccttataaatccaattgca

SEQ ID NO: 533268 - DNA, 25 bp, Homo sapien
gtatctaggctggacgaggtagctc

SEQ ID NO: 533269 - DNA, 25 bp, Homo sapien
tgttcaggttgaggaaacaagccca

SEQ ID NO: 533270 - DNA, 25 bp, Homo sapien
gaaaacacagccatcgcttaagcat

SEQ ID NO: 533271 - DNA, 25 bp, Homo sapien
tctatttaaatcaggccccatgctg

SEQ ID NO: 533272 - DNA, 25 bp, Homo sapien
acttgaaatccccatgacagcagag

SEQ ID NO: 533273 - DNA, 25 bp, Homo sapien
atatcaattacttactgctccactg

SEQ ID NO: 533274 - DNA, 25 bp, Homo sapien
catcagtgacacaggtatacagcaa

SEQ ID NO: 533275 - DNA, 25 bp, Homo sapien
cagtattttcagtcagtcctacgtt

SEQ ID NO: 533276 - DNA, 25 bp, Homo sapien
accattgcttttattgctaacctga

SEQ ID NO: 533277 - DNA, 25 bp, Homo sapien
ggaatccaagcctgtactatatagg

SEQ ID NO: 533278 - DNA, 25 bp, Homo sapien
ttcttgttgaaaagtggactgccct

SEQ ID NO: 533279 - DNA, 25 bp, Homo sapien
aaagtgacctgtggcatttgactac

SEQ ID NO: 533280 - DNA, 25 bp, Homo sapien
gagttcaatggctgatcgtctatga

SEQ ID NO: 533281 - DNA, 25 bp, Homo sapien
aaagaagtctcaagtgtaacctaat

SEQ ID NO: 533282 - DNA, 25 bp, Homo sapien
tctcaagtgtaacctaatgaaatta

SEQ ID NO: 533283 - DNA, 25 bp, Homo sapien
gttttaacagctaaatgttaagctc

SEQ ID NO: 533284 - DNA, 25 bp, Homo sapien
ataaacctgaataatgagtactaaa

SEQ ID NO: 533285 - DNA, 25 bp, Homo sapien
gaggtctcttttattgtggtcttca

SEQ ID NO: 533286 - DNA, 25 bp, Homo sapien
tttattgtggtcttcattctatcat

SEQ ID NO: 533287 - DNA, 25 bp, Homo sapien
aaggtaagaattgctgagctaagta

SEQ ID NO: 533288 - DNA, 25 bp, Homo sapien
ttgctgagctaagtagaggtctctt

SEQ ID NO: 533289 - DNA, 25 bp, Homo sapien
taacagagcactgcaagtatacgct

SEQ ID NO: 533290 - DNA, 25 bp, Homo sapien
tctgagttggttagcatgtttggct

SEQ ID NO: 533291 - DNA, 25 bp, Homo sapien
tctgtgggtcatgattctaagttgt

SEQ ID NO: 533292 - DNA, 25 bp, Homo sapien
ttgcacaattccaagtacacaaagg

SEQ ID NO: 533293 - DNA, 25 bp, Homo sapien
caatttatggctgaatatgcttgac

SEQ ID NO: 533294 - DNA, 25 bp, Homo sapien
aaaacctctagcattagtcaacaac

SEQ ID NO: 533295 - DNA, 25 bp, Homo sapien
gtggtttgcaggcaactaagcagta

SEQ ID NO: 533296 - DNA, 25 bp, Homo sapien
aaatgaggtgctttcaatagagagg

SEQ ID NO: 533297 - DNA, 25 bp, Homo sapien
taaatagaatgctattgcaaatgtc

SEQ ID NO: 533298 - DNA, 25 bp, Homo sapien
atagaatgctattgcaaatgtcaaa

SEQ ID NO: 533299 - DNA, 25 bp, Homo sapien
aatagaatgctattgcaaatgtcaa

SEQ ID NO: 533300 - DNA, 25 bp, Homo sapien
tagaatgctattgcaaatgtcaaac

SEQ ID NO: 533301 - DNA, 25 bp, Homo sapien
gtcatgttccaatgcattatgtaag

SEQ ID NO: 533302 - DNA, 25 bp, Homo sapien
tcatgttccaatgcattatgtaagt

SEQ ID NO: 533303 - DNA, 25 bp, Homo sapien
tatgtgccaaaattagttgcctggc

SEQ ID NO: 533304 - DNA, 25 bp, Homo sapien
tacataaagcatgatgaaaccagga

SEQ ID NO: 533305 - DNA, 25 bp, Homo sapien
tgttacatacaaacacccgaggcta

SEQ ID NO: 533306 - DNA, 25 bp, Homo sapien
caggaatctagactatgaaagctac

SEQ ID NO: 533307 - DNA, 25 bp, Homo sapien
ggaaatcgttagctcgaagccccat

SEQ ID NO: 533308 - DNA, 25 bp, Homo sapien
tacctaaagttaatgccgtcactgg

SEQ ID NO: 533309 - DNA, 25 bp, Homo sapien
tcttctaagaaagtgcgactcggag

SEQ ID NO: 533310 - DNA, 25 bp, Homo sapien
tcctcctcagcgtcaagaaaaggtg

SEQ ID NO: 533311 - DNA, 25 bp, Homo sapien
atgacggccatcaccgggtcgagaa

SEQ ID NO: 533312 - DNA, 25 bp, Homo sapien
caatatagatagatgggtgccgggc

SEQ ID NO: 533313 - DNA, 25 bp, Homo sapien
ccatgactccgggtcctgaattttc

SEQ ID NO: 533314 - DNA, 25 bp, Homo sapien
gtttcttgtcacgagatgacggcca

SEQ ID NO: 533315 - DNA, 25 bp, Homo sapien
gactgcgccagccttggcgaagctc

SEQ ID NO: 533316 - DNA, 25 bp, Homo sapien
cggagtcatagtggcgctatactct

SEQ ID NO: 533317 - DNA, 25 bp, Homo sapien
agtaatttttccggcggagtcatag

SEQ ID NO: 533318 - DNA, 25 bp, Homo sapien
tttttccggcggagtcatagtggcg

SEQ ID NO: 533319 - DNA, 25 bp, Homo sapien
gagatcaggcatcactcgaaaatgg

SEQ ID NO: 533320 - DNA, 25 bp, Homo sapien
tcccgctagattgatgagatcaggc

SEQ ID NO: 533321 - DNA, 25 bp, Homo sapien
aaaatggcgccgaaagcgctgaggc

SEQ ID NO: 533322 - DNA, 25 bp, Homo sapien
gaggctcctcattcaaattcgttag

SEQ ID NO: 533323 - DNA, 25 bp, Homo sapien
gccctggagttctctaccacgctgt

SEQ ID NO: 533324 - DNA, 25 bp, Homo sapien
tgtacgattcaacctgagcccacac

SEQ ID NO: 533325 - DNA, 25 bp, Homo sapien
cctaagctgcctgttgcgaaggcgc

SEQ ID NO: 533326 - DNA, 25 bp, Homo sapien
cgcgcgcctgcctagagttaatgat

SEQ ID NO: 533327 - DNA, 25 bp, Homo sapien
aaaattttgcagtgttgacactgcc

SEQ ID NO: 533328 - DNA, 25 bp, Homo sapien
tatcatttgcttgctcttgtacatg

SEQ ID NO: 533329 - DNA, 25 bp, Homo sapien
gtgatcgtccattcagccttacaag

SEQ ID NO: 533330 - DNA, 25 bp, Homo sapien
ggtgttctatcagctagtccagtga

SEQ ID NO: 533331 - DNA, 25 bp, Homo sapien
gacatctctattttagcccgctaag

SEQ ID NO: 533332 - DNA, 25 bp, Homo sapien
tttaaaggtctgtgaagtgtcagac

SEQ ID NO: 533333 - DNA, 25 bp, Homo sapien
tcttggtaagaatgtgatgagcttt

SEQ ID NO: 533334 - DNA, 25 bp, Homo sapien
tcagacctcaagatggacaactatt

SEQ ID NO: 533335 - DNA, 25 bp, Homo sapien
gggaaaatttatacacacatcagga

SEQ ID NO: 533336 - DNA, 25 bp, Homo sapien
tgcttacagtatccttgaccacaaa

SEQ ID NO: 533337 - DNA, 25 bp, Homo sapien
tgaccacaaatcatggaactaaact

SEQ ID NO: 533338 - DNA, 25 bp, Homo sapien
catggtttagagctccaatttctag

SEQ ID NO: 533339 - DNA, 25 bp, Homo sapien
accaaagaaggctccgtgtttgtct

SEQ ID NO: 533340 - DNA, 25 bp, Homo sapien
tttgcccttcaaactagacctgtgg

SEQ ID NO: 533341 - DNA, 25 bp, Homo sapien
gacctgtggacttgcttttgaacat

SEQ ID NO: 533342 - DNA, 25 bp, Homo sapien
tctgaaggcctcttaacaatatacc

SEQ ID NO: 533343 - DNA, 25 bp, Homo sapien
caatatattggactcttaaggctgt

SEQ ID NO: 533344 - DNA, 25 bp, Homo sapien
aaaatatatgctctaggtaatggga

SEQ ID NO: 533345 - DNA, 25 bp, Homo sapien
gacacaaagcatgtgggagattgta

SEQ ID NO: 533346 - DNA, 25 bp, Homo sapien
tgatgtacctgagaacctaggctgg

SEQ ID NO: 533347 - DNA, 25 bp, Homo sapien
tagattttctaggaggggcttcata

SEQ ID NO: 533348 - DNA, 25 bp, Homo sapien
cataatagctaaatttttgccttac

SEQ ID NO: 533349 - DNA, 25 bp, Homo sapien
agtagattttctaggaggggcttca

SEQ ID NO: 533350 - DNA, 25 bp, Homo sapien
agcataatagctaaatttttgcctt

SEQ ID NO: 533351 - DNA, 25 bp, Homo sapien
taacaggcttgtttatgtgcattcc

SEQ ID NO: 533352 - DNA, 25 bp, Homo sapien
gcaggtattgactgatgcaggcatg

SEQ ID NO: 533353 - DNA, 25 bp, Homo sapien
atcctggacaatggacagtgttgca

SEQ ID NO: 533354 - DNA, 25 bp, Homo sapien
gattggaatcctggacaatggacag

SEQ ID NO: 533355 - DNA, 25 bp, Homo sapien
caggatatagtagtcaattcagaaa

SEQ ID NO: 533356 - DNA, 25 bp, Homo sapien
tgagaactgttagtcacaggtcctt

SEQ ID NO: 533357 - DNA, 25 bp, Homo sapien
aatcaagtatagttttcatgagcac

SEQ ID NO: 533358 - DNA, 25 bp, Homo sapien
gatgattcatgagctgaatacagga

SEQ ID NO: 533359 - DNA, 25 bp, Homo sapien
gatgttcaccctcttcaaatgtgag

SEQ ID NO: 533360 - DNA, 25 bp, Homo sapien
catgtgctggctagggccatagccc

SEQ ID NO: 533361 - DNA, 25 bp, Homo sapien
tagtagtgtatgtcaaggagtagac

SEQ ID NO: 533362 - DNA, 25 bp, Homo sapien
catagccccacctttccaaagagta

SEQ ID NO: 533363 - DNA, 25 bp, Homo sapien
tttaagccatcctaagaacggtctc

SEQ ID NO: 533364 - DNA, 25 bp, Homo sapien
tgaaggacagtagcaaaattggaac

SEQ ID NO: 533365 - DNA, 25 bp, Homo sapien
tagttgagggtctttccaattacac

SEQ ID NO: 533366 - DNA, 25 bp, Homo sapien
tggcccggcccagctgtaataattt

SEQ ID NO: 533367 - DNA, 25 bp, Homo sapien
agtaagtcttttgcagtcttttaag

SEQ ID NO: 533368 - DNA, 25 bp, Homo sapien
gagctatagactgagcactccttga

SEQ ID NO: 533369 - DNA, 25 bp, Homo sapien
tgtaaacttaaagattgccttgaag

SEQ ID NO: 533370 - DNA, 25 bp, Homo sapien
tccttgacaaatcacaagaataaga

SEQ ID NO: 533371 - DNA, 25 bp, Homo sapien
caggaggcaccatcacggaagttga

SEQ ID NO: 533372 - DNA, 25 bp, Homo sapien
tgaagatgtatactgccctagggca

SEQ ID NO: 533373 - DNA, 25 bp, Homo sapien
gactgcttttggacctggatgaaca

SEQ ID NO: 533374 - DNA, 25 bp, Homo sapien
tgactcctgccacaacaatgactga

SEQ ID NO: 533375 - DNA, 25 bp, Homo sapien
cttcaaccaagttgtggtgaagagg

SEQ ID NO: 533376 - DNA, 25 bp, Homo sapien
gaggttatttatgagttgcaccaaa

SEQ ID NO: 533377 - DNA, 25 bp, Homo sapien
gagttgcaccaaatggccatctctg

SEQ ID NO: 533378 - DNA, 25 bp, Homo sapien
caaccaagttgtggtgaagaggtta

SEQ ID NO: 533379 - DNA, 25 bp, Homo sapien
caaagctaatacagaatgtgatagt

SEQ ID NO: 533380 - DNA, 25 bp, Homo sapien
tctatactttactccatgagtggag

SEQ ID NO: 533381 - DNA, 25 bp, Homo sapien
cacagtgcccggctagttagagtaa

SEQ ID NO: 533382 - DNA, 25 bp, Homo sapien
tgagtagtaaggactacatgtgtgt

SEQ ID NO: 533383 - DNA, 25 bp, Homo sapien
tcatcaccgtggaggtacagctact

SEQ ID NO: 533384 - DNA, 25 bp, Homo sapien
tgtaataatcaagtgttacgtcgcc

SEQ ID NO: 533385 - DNA, 25 bp, Homo sapien
tacgtcgccttcataggaaacatgc

SEQ ID NO: 533386 - DNA, 25 bp, Homo sapien
gattgccagcgatcctatgaggtcc

SEQ ID NO: 533387 - DNA, 25 bp, Homo sapien
agtcaagggtggtgacgtcacccct

SEQ ID NO: 533388 - DNA, 25 bp, Homo sapien
gtctgtacatcacatgacccggccc

SEQ ID NO: 533389 - DNA, 25 bp, Homo sapien
gtagcgggggtgtctgtacatcaca

SEQ ID NO: 533390 - DNA, 25 bp, Homo sapien
cactcaaactgcgaaagggctccag

SEQ ID NO: 533391 - DNA, 25 bp, Homo sapien
cagtcctccgtctttggctgcggcg

SEQ ID NO: 533392 - DNA, 25 bp, Homo sapien
gctgttgctgcagcgcctcgttcta

SEQ ID NO: 533393 - DNA, 25 bp, Homo sapien
tctcagttcccttctaaaagtggag

SEQ ID NO: 533394 - DNA, 25 bp, Homo sapien
cccacagcagttagaggacgaagct

SEQ ID NO: 533395 - DNA, 25 bp, Homo sapien
cacagtgttgaaaggggcggtacgg

SEQ ID NO: 533396 - DNA, 25 bp, Homo sapien
ccacagtgttgaaaggggcggtacg

SEQ ID NO: 533397 - DNA, 25 bp, Homo sapien
tgttgaaaggggcggtacggactga

SEQ ID NO: 533398 - DNA, 25 bp, Homo sapien
gcccacagtgttgaaaggggcggta

SEQ ID NO: 533399 - DNA, 25 bp, Homo sapien
agcacacgacctaagtacacagcgc

SEQ ID NO: 533400 - DNA, 25 bp, Homo sapien
caaagctccgaggaagttggtcctt

SEQ ID NO: 533401 - DNA, 25 bp, Homo sapien
tttttgtgcagtttcagcaaagctc

SEQ ID NO: 533402 - DNA, 25 bp, Homo sapien
tcaacattgcgaaaaggagaaggcg

SEQ ID NO: 533403 - DNA, 25 bp, Homo sapien
aggatctcgggctccgcgacctgtg

SEQ ID NO: 533404 - DNA, 25 bp, Homo sapien
gtgtgcgcgcattcgggcctcgcct

SEQ ID NO: 533405 - DNA, 25 bp, Homo sapien
tcttccaggcattgcggtgctagcc

SEQ ID NO: 533406 - DNA, 25 bp, Homo sapien
cgctcgccgagtgtgcgcgcattcg

SEQ ID NO: 533407 - DNA, 25 bp, Homo sapien
aatgggaccgtgctgaaagttcgac

SEQ ID NO: 533408 - DNA, 25 bp, Homo sapien
tgttaatataccaactccgcaggga

SEQ ID NO: 533409 - DNA, 25 bp, Homo sapien
cttttggcccgggtcttgagctgaa

SEQ ID NO: 533410 - DNA, 25 bp, Homo sapien
gaagttggataagcactccgcctcc

SEQ ID NO: 533411 - DNA, 25 bp, Homo sapien
ggctctttgcaattggtgccaagaa

SEQ ID NO: 533412 - DNA, 25 bp, Homo sapien
tttgcaattggtgccaagaaactcg

SEQ ID NO: 533413 - DNA, 25 bp, Homo sapien
ggagaggctctttgcaattggtgcc

SEQ ID NO: 533414 - DNA, 25 bp, Homo sapien
caattggtgccaagaaactcgaaca

SEQ ID NO: 533415 - DNA, 25 bp, Homo sapien
taacaaggaactctgctgaacgagg

SEQ ID NO: 533416 - DNA, 25 bp, Homo sapien
tggataagatactccctcgccggct

SEQ ID NO: 533417 - DNA, 25 bp, Homo sapien
gcggccggtgcgttacatcaggaaa

SEQ ID NO: 533418 - DNA, 25 bp, Homo sapien
gaaactcagtttagaacgtcccaga

SEQ ID NO: 533419 - DNA, 25 bp, Homo sapien
ggtgctctcctcacaagttacaagt

SEQ ID NO: 533420 - DNA, 25 bp, Homo sapien
tctgcagcgacggaaaagttttgct

SEQ ID NO: 533421 - DNA, 25 bp, Homo sapien
catcgagtttagtgacggtgctctc

SEQ ID NO: 533422 - DNA, 25 bp, Homo sapien
tgggtcatgttttcggttcctttga

SEQ ID NO: 533423 - DNA, 25 bp, Homo sapien
cttttgtcccggtgcggagtcgctg

SEQ ID NO: 533424 - DNA, 25 bp, Homo sapien
agccgcttcgcggatcccactgggt

SEQ ID NO: 533425 - DNA, 25 bp, Homo sapien
atcccactgggtcacctggtcctgg

SEQ ID NO: 533426 - DNA, 25 bp, Homo sapien
atctgcctgatccttttgtcccggt

SEQ ID NO: 533427 - DNA, 25 bp, Homo sapien
taaatagacagtagcgagtttcctg

SEQ ID NO: 533428 - DNA, 25 bp, Homo sapien
gggagtaaatagacagtagcgagtt

SEQ ID NO: 533429 - DNA, 25 bp, Homo sapien
gacagtagcgagtttcctggcaact

SEQ ID NO: 533430 - DNA, 25 bp, Homo sapien
gagtttcctggcaactttgcactac

SEQ ID NO: 533431 - DNA, 25 bp, Homo sapien
tggtgtgtgccgcagggttcaggct

SEQ ID NO: 533432 - DNA, 25 bp, Homo sapien
tgagagagcgggaggatagtcgcac

SEQ ID NO: 533433 - DNA, 25 bp, Homo sapien
cttggtgtgtgccgcagggttcagg

SEQ ID NO: 533434 - DNA, 25 bp, Homo sapien
ctgagagagcgggaggatagtcgca

SEQ ID NO: 533435 - DNA, 25 bp, Homo sapien
tgagtgcgtgggcactgtgcgtgca

SEQ ID NO: 533436 - DNA, 25 bp, Homo sapien
ctaattagtacgcggctccggcgga

SEQ ID NO: 533437 - DNA, 25 bp, Homo sapien
ccggcggagatgagtgcgtgggcac

SEQ ID NO: 533438 - DNA, 25 bp, Homo sapien
cggctccggcggagatgagtgcgtg

SEQ ID NO: 533439 - DNA, 25 bp, Homo sapien
agttcaaagcgccctgcttatgaaa

SEQ ID NO: 533440 - DNA, 25 bp, Homo sapien
gacacccaagttcaaagcgccctgc

SEQ ID NO: 533441 - DNA, 25 bp, Homo sapien
gttcaaagcgccctgcttatgaaaa

SEQ ID NO: 533442 - DNA, 25 bp, Homo sapien
cccaagttcaaagcgccctgcttat

SEQ ID NO: 533443 - DNA, 25 bp, Homo sapien
gttcccgcccgtgcagagccaagaa

SEQ ID NO: 533444 - DNA, 25 bp, Homo sapien
tattcctgagtcctgagcgggttcc

SEQ ID NO: 533445 - DNA, 25 bp, Homo sapien
agtggtctgcaagcccctggtgcta

SEQ ID NO: 533446 - DNA, 25 bp, Homo sapien
tgctagtgtgaatattcctgagtcc

SEQ ID NO: 533447 - DNA, 25 bp, Homo sapien
gggctctcccctttggatgtctagg

SEQ ID NO: 533448 - DNA, 25 bp, Homo sapien
tggaaaccgagtcttgaagtggacc

SEQ ID NO: 533449 - DNA, 25 bp, Homo sapien
tggatcctctggtgtcccggcaccg

SEQ ID NO: 533450 - DNA, 25 bp, Homo sapien
cctgcggccagggaataattctaag

SEQ ID NO: 533451 - DNA, 25 bp, Homo sapien
cttgaaacttagagggcagaggacc

SEQ ID NO: 533452 - DNA, 25 bp, Homo sapien
cagagagacagcttgaggagaggag

SEQ ID NO: 533453 - DNA, 25 bp, Homo sapien
gcagagagacagcttgaggagagga

SEQ ID NO: 533454 - DNA, 25 bp, Homo sapien
gagcttcacttttcatctgcaacgg

SEQ ID NO: 533455 - DNA, 25 bp, Homo sapien
cttcacttttcatctgcaacggcat

SEQ ID NO: 533456 - DNA, 25 bp, Homo sapien
cagagcttcacttttcatctgcaac

SEQ ID NO: 533457 - DNA, 25 bp, Homo sapien
gcttcacttttcatctgcaacggca

SEQ ID NO: 533458 - DNA, 25 bp, Homo sapien
tgcctgagacacagcgggaatccga

SEQ ID NO: 533459 - DNA, 25 bp, Homo sapien
gaatccgacgactctgagaacggac

SEQ ID NO: 533460 - DNA, 25 bp, Homo sapien
cgactctgagaacggactttccctt

SEQ ID NO: 533461 - DNA, 25 bp, Homo sapien
agacacagcgggaatccgacgactc

SEQ ID NO: 533462 - DNA, 25 bp, Homo sapien
caagggagatacatttccacctcat

SEQ ID NO: 533463 - DNA, 25 bp, Homo sapien
tccaagggagatacatttccacctc

SEQ ID NO: 533464 - DNA, 25 bp, Homo sapien
ttttccaagggagatacatttccac

SEQ ID NO: 533465 - DNA, 25 bp, Homo sapien
tttccaagggagatacatttccacc

SEQ ID NO: 533466 - DNA, 25 bp, Homo sapien
tatctcaatttgagtccaggacatt

SEQ ID NO: 533467 - DNA, 25 bp, Homo sapien
aaaggtcatccagattctctggtgc

SEQ ID NO: 533468 - DNA, 25 bp, Homo sapien
ttttatctcaatttgagtccaggac

SEQ ID NO: 533469 - DNA, 25 bp, Homo sapien
gtcatccagattctctggtgccttg

SEQ ID NO: 533470 - DNA, 25 bp, Homo sapien
tgtttttgataagcaactcagtgcc

SEQ ID NO: 533471 - DNA, 25 bp, Homo sapien
cacaatgggatggttaattaaagac

SEQ ID NO: 533472 - DNA, 25 bp, Homo sapien
gaccaactcgttgaacacaatggga

SEQ ID NO: 533473 - DNA, 25 bp, Homo sapien
tcaatcagtggctaagaccaactcg

SEQ ID NO: 533474 - DNA, 25 bp, Homo sapien
tcttctaaaactgtccctccaggga

SEQ ID NO: 533475 - DNA, 25 bp, Homo sapien
cttctaaaactgtccctccagggat

SEQ ID NO: 533476 - DNA, 25 bp, Homo sapien
ctcagatttctcttctaaaactgtc

SEQ ID NO: 533477 - DNA, 25 bp, Homo sapien
ttctcttctaaaactgtccctccag

SEQ ID NO: 533478 - DNA, 25 bp, Homo sapien
tgctgctcagagtgtgacgttttca

SEQ ID NO: 533479 - DNA, 25 bp, Homo sapien
gtgctgctcagagtgtgacgttttc

SEQ ID NO: 533480 - DNA, 25 bp, Homo sapien
cctctgcttcatctaactcgtaggg

SEQ ID NO: 533481 - DNA, 25 bp, Homo sapien
atatactttatattgctgtgcttgg

SEQ ID NO: 533482 - DNA, 25 bp, Homo sapien
actttatattgctgtgcttggcatc

SEQ ID NO: 533483 - DNA, 25 bp, Homo sapien
tatactttatattgctgtgcttggc

SEQ ID NO: 533484 - DNA, 25 bp, Homo sapien
caagttataggttcgtccagttggt

SEQ ID NO: 533485 - DNA, 25 bp, Homo sapien
ccacagcacagggacatatcttttg

SEQ ID NO: 533486 - DNA, 25 bp, Homo sapien
ttgcaggtggcttatccaagagggc

SEQ ID NO: 533487 - DNA, 25 bp, Homo sapien
taatccagttaaccgggatgctaac

SEQ ID NO: 533488 - DNA, 25 bp, Homo sapien
gagtccaggaaacggcaaaccagat

SEQ ID NO: 533489 - DNA, 25 bp, Homo sapien
taactggcaagagtccaggaaacgg

SEQ ID NO: 533490 - DNA, 25 bp, Homo sapien
aacggcaaaccagatattaaggctc

SEQ ID NO: 533491 - DNA, 25 bp, Homo sapien
accagatattaaggctctcaggcac

SEQ ID NO: 533492 - DNA, 25 bp, Homo sapien
gctgctgtatcccttcttatgtctt

SEQ ID NO: 533493 - DNA, 25 bp, Homo sapien
tcttgggaaggactgtccccatcct

SEQ ID NO: 533494 - DNA, 25 bp, Homo sapien
tatgtcttgcacacttgagctcatc

SEQ ID NO: 533495 - DNA, 25 bp, Homo sapien
ctgggtgggcttgcttgagctggac

SEQ ID NO: 533496 - DNA, 25 bp, Homo sapien
ggcagctctcatgtcgtctctgaaa

SEQ ID NO: 533497 - DNA, 25 bp, Homo sapien
actggcggcagctctcatgtcgtct

SEQ ID NO: 533498 - DNA, 25 bp, Homo sapien
gagcactggcggcagctctcatgtc

SEQ ID NO: 533499 - DNA, 25 bp, Homo sapien
ctctcatgtcgtctctgaaaggctg

SEQ ID NO: 533500 - DNA, 25 bp, Homo sapien
tttcttgtatcaggcctgttaaatc

SEQ ID NO: 533501 - DNA, 25 bp, Homo sapien
aacttctgatgtctgctttgggcat

SEQ ID NO: 533502 - DNA, 25 bp, Homo sapien
gctagctggtcagaacttctgatgt

SEQ ID NO: 533503 - DNA, 25 bp, Homo sapien
gctttgggcatcaagtgggaacatt

SEQ ID NO: 533504 - DNA, 25 bp, Homo sapien
ctgggatccgatggtgggactgctg

SEQ ID NO: 533505 - DNA, 25 bp, Homo sapien
cttttcgtcctcctggaaagagctc

SEQ ID NO: 533506 - DNA, 25 bp, Homo sapien
tcctcctggaaagagctcccgtttg

SEQ ID NO: 533507 - DNA, 25 bp, Homo sapien
caacctggggtagtgacacttttcg

SEQ ID NO: 533508 - DNA, 25 bp, Homo sapien
ttttggatgtgctgtcttgtgaccc

SEQ ID NO: 533509 - DNA, 25 bp, Homo sapien
tctgaaaatctagcaacgatcccat

SEQ ID NO: 533510 - DNA, 25 bp, Homo sapien
tcctcgggcattatatacacttttg

SEQ ID NO: 533511 - DNA, 25 bp, Homo sapien
gcagagggtgcattttgtttggaac

SEQ ID NO: 533512 - DNA, 25 bp, Homo sapien
tgtttggaacatgtggttctctggg

SEQ ID NO: 533513 - DNA, 25 bp, Homo sapien
ttgaagcatatggatcagctcagag

SEQ ID NO: 533514 - DNA, 25 bp, Homo sapien
gaagcatatggatcagctcagagca

SEQ ID NO: 533515 - DNA, 25 bp, Homo sapien
ttttgaagcatatggatcagctcag

SEQ ID NO: 533516 - DNA, 25 bp, Homo sapien
gcatatggatcagctcagagcacca

SEQ ID NO: 533517 - DNA, 25 bp, Homo sapien
taagcttggtgatcagtgtatgtat

SEQ ID NO: 533518 - DNA, 25 bp, Homo sapien
ccataagcttggtgatcagtgtatg

SEQ ID NO: 533519 - DNA, 25 bp, Homo sapien
cttggtgatcagtgtatgtatttct

SEQ ID NO: 533520 - DNA, 25 bp, Homo sapien
gcttggtgatcagtgtatgtatttc

SEQ ID NO: 533521 - DNA, 25 bp, Homo sapien
gcttctcagccagacttgggtaatt

SEQ ID NO: 533522 - DNA, 25 bp, Homo sapien
tttgtactgtaagttccaccggtca

SEQ ID NO: 533523 - DNA, 25 bp, Homo sapien
gtaatttatgtccagggtgacagga

SEQ ID NO: 533524 - DNA, 25 bp, Homo sapien
taagttccaccggtcagcttctcag

SEQ ID NO: 533525 - DNA, 25 bp, Homo sapien
ctgagttggcaattggggaaggttt

SEQ ID NO: 533526 - DNA, 25 bp, Homo sapien
agaggaaggacctgtaggagaacct

SEQ ID NO: 533527 - DNA, 25 bp, Homo sapien
tgagttggcaattggggaaggtttc

SEQ ID NO: 533528 - DNA, 25 bp, Homo sapien
ggcttttccagcagggggaatggca

SEQ ID NO: 533529 - DNA, 25 bp, Homo sapien
ctgcctggctgcgtgacaaaggtgt

SEQ ID NO: 533530 - DNA, 25 bp, Homo sapien
agccacagcgtctacaatacacaca

SEQ ID NO: 533531 - DNA, 25 bp, Homo sapien
gtctacaatacacacagctgctgcc

SEQ ID NO: 533532 - DNA, 25 bp, Homo sapien
cctggctgcgtgacaaaggtgtctt

SEQ ID NO: 533533 - DNA, 25 bp, Homo sapien
atttggaacttttctagatgacagt

SEQ ID NO: 533534 - DNA, 25 bp, Homo sapien
ggaacttttctagatgacagttgtt

SEQ ID NO: 533535 - DNA, 25 bp, Homo sapien
tctccatgttgtatttctcgggatt

SEQ ID NO: 533536 - DNA, 25 bp, Homo sapien
catgttgtatttctcgggatttgga

SEQ ID NO: 533537 - DNA, 25 bp, Homo sapien
atattaattgacttgctaaatcctc

SEQ ID NO: 533538 - DNA, 25 bp, Homo sapien
tagtattctagggttttagcctggc

SEQ ID NO: 533539 - DNA, 25 bp, Homo sapien
ttagcctggcaattcttaaaatatt

SEQ ID NO: 533540 - DNA, 25 bp, Homo sapien
taataagagacgttagggtctccaa

SEQ ID NO: 533541 - DNA, 25 bp, Homo sapien
ccaagctcattcattaccaggccaa

SEQ ID NO: 533542 - DNA, 25 bp, Homo sapien
gattctgtcactaaaatgtgctggt

SEQ ID NO: 533543 - DNA, 25 bp, Homo sapien
atgtggcatcccagcctgcaactgt

SEQ ID NO: 533544 - DNA, 25 bp, Homo sapien
tgtccatctgatcggctaaagccct

SEQ ID NO: 533545 - DNA, 25 bp, Homo sapien
taacgaagaaagcagtttgtggaga

SEQ ID NO: 533546 - DNA, 25 bp, Homo sapien
caggctgtttcaggataacgaagaa

SEQ ID NO: 533547 - DNA, 25 bp, Homo sapien
cataaggtggtcttgttactgagag

SEQ ID NO: 533548 - DNA, 25 bp, Homo sapien
tcagaaatctccaacgtttggatca

SEQ ID NO: 533549 - DNA, 25 bp, Homo sapien
agctttcccttcttctgtgacacat

SEQ ID NO: 533550 - DNA, 25 bp, Homo sapien
cattctagtttgatggcagctttcc

SEQ ID NO: 533551 - DNA, 25 bp, Homo sapien
tttcattcctcggtgaccattgcat

SEQ ID NO: 533552 - DNA, 25 bp, Homo sapien
tgtgacacatcttcttgctattgga

SEQ ID NO: 533553 - DNA, 25 bp, Homo sapien
actatatctggggactccgtctgca

SEQ ID NO: 533554 - DNA, 25 bp, Homo sapien
gcactatatctggggactccgtctg

SEQ ID NO: 533555 - DNA, 25 bp, Homo sapien
gtgcactatatctggggactccgtc

SEQ ID NO: 533556 - DNA, 25 bp, Homo sapien
ctatatctggggactccgtctgcat

SEQ ID NO: 533557 - DNA, 25 bp, Homo sapien
cattttaccccagtgctcctcctct

SEQ ID NO: 533558 - DNA, 25 bp, Homo sapien
agtgctcctcctctgacttcaccat

SEQ ID NO: 533559 - DNA, 25 bp, Homo sapien
ccagtgctcctcctctgacttcacc

SEQ ID NO: 533560 - DNA, 25 bp, Homo sapien
tttaccccagtgctcctcctctgac

SEQ ID NO: 533561 - DNA, 25 bp, Homo sapien
cagtcggtgccagcacatgatctca

SEQ ID NO: 533562 - DNA, 25 bp, Homo sapien
taaatagctcggatcttgggttcca

SEQ ID NO: 533563 - DNA, 25 bp, Homo sapien
tggtcagcagttcagggagaaactc

SEQ ID NO: 533564 - DNA, 25 bp, Homo sapien
aaatcataggtgtaggcttggcacc

SEQ ID NO: 533565 - DNA, 25 bp, Homo sapien
cataggtcttgttaccgttcaaggg

SEQ ID NO: 533566 - DNA, 25 bp, Homo sapien
tggcccagttgaaaagctgagttac

SEQ ID NO: 533567 - DNA, 25 bp, Homo sapien
tgagttacatgagaaggtgacagcc

SEQ ID NO: 533568 - DNA, 25 bp, Homo sapien
cgttcaagggcctgctcctatgggc

SEQ ID NO: 533569 - DNA, 25 bp, Homo sapien
aggcactggatatcttgagacttgc

SEQ ID NO: 533570 - DNA, 25 bp, Homo sapien
ctggatatcttgagacttgctcacc

SEQ ID NO: 533571 - DNA, 25 bp, Homo sapien
cactggatatcttgagacttgctca

SEQ ID NO: 533572 - DNA, 25 bp, Homo sapien
tgttgatacagaggcactggatatc

SEQ ID NO: 533573 - DNA, 25 bp, Homo sapien
aaggagctttctcaaaagcaataga

SEQ ID NO: 533574 - DNA, 25 bp, Homo sapien
tgaccaaatgacacacttgatggct

SEQ ID NO: 533575 - DNA, 25 bp, Homo sapien
cagcagtttgaagctgtgagcccag

SEQ ID NO: 533576 - DNA, 25 bp, Homo sapien
gggtcctagagcctgtgaccaaatg

SEQ ID NO: 533577 - DNA, 25 bp, Homo sapien
ggctttgttgtcgtctgttagaaac

SEQ ID NO: 533578 - DNA, 25 bp, Homo sapien
ctaggagtgtgggagtcatatcggc

SEQ ID NO: 533579 - DNA, 25 bp, Homo sapien
ctctttcatcaagtaacaccagctg

SEQ ID NO: 533580 - DNA, 25 bp, Homo sapien
taacaccagctgatgcctaggagtg

SEQ ID NO: 533581 - DNA, 25 bp, Homo sapien
gaggctggcgccattaccattcaca

SEQ ID NO: 533582 - DNA, 25 bp, Homo sapien
tcatagccacagacactcagttttg

SEQ ID NO: 533583 - DNA, 25 bp, Homo sapien
tggccgggtacacactgaggtttaa

SEQ ID NO: 533584 - DNA, 25 bp, Homo sapien
ccttacaagtgtagcagcccagtta

SEQ ID NO: 533585 - DNA, 25 bp, Homo sapien
tcttgtttgactgggaagactggaa

SEQ ID NO: 533586 - DNA, 25 bp, Homo sapien
gagctctacctttctagcagagaaa

SEQ ID NO: 533587 - DNA, 25 bp, Homo sapien
gactggaagagctctacctttctag

SEQ ID NO: 533588 - DNA, 25 bp, Homo sapien
tctccttactccagaggaattggaa

SEQ ID NO: 533589 - DNA, 25 bp, Homo sapien
caaggtgtttctcgtttgtcctgag

SEQ ID NO: 533590 - DNA, 25 bp, Homo sapien
aaagagttcctgttggggccatcga

SEQ ID NO: 533591 - DNA, 25 bp, Homo sapien
acacaaggtgtttctcgtttgtcct

SEQ ID NO: 533592 - DNA, 25 bp, Homo sapien
tgtttctcgtttgtcctgagactct

SEQ ID NO: 533593 - DNA, 25 bp, Homo sapien
aacgattttctcttcgtcgataagg

SEQ ID NO: 533594 - DNA, 25 bp, Homo sapien
cgattttctcttcgtcgataaggaa

SEQ ID NO: 533595 - DNA, 25 bp, Homo sapien
tttctcttcgtcgataaggaaagca

SEQ ID NO: 533596 - DNA, 25 bp, Homo sapien
tcacaacgattttctcttcgtcgat

SEQ ID NO: 533597 - DNA, 25 bp, Homo sapien
tattaccaggggttccagacagctt

SEQ ID NO: 533598 - DNA, 25 bp, Homo sapien
agcctatgttggtgtgtcaaacgca

SEQ ID NO: 533599 - DNA, 25 bp, Homo sapien
ccaggggttccagacagcttagttt

SEQ ID NO: 533600 - DNA, 25 bp, Homo sapien
tgttggtgtgtcaaacgcaggacca

SEQ ID NO: 533601 - DNA, 25 bp, Homo sapien
caggaggaaagttgaatagacaaac

SEQ ID NO: 533602 - DNA, 25 bp, Homo sapien
gagccagaataggtttggtgtcacc

SEQ ID NO: 533603 - DNA, 25 bp, Homo sapien
tttccccttacagttacatttatga

SEQ ID NO: 533604 - DNA, 25 bp, Homo sapien
ggtttggtgtcaccttgtgctggct

SEQ ID NO: 533605 - DNA, 25 bp, Homo sapien
gaacttttgggaagccgtgtgactg

SEQ ID NO: 533606 - DNA, 25 bp, Homo sapien
tacgcggactgttgaaactttaagc

SEQ ID NO: 533607 - DNA, 25 bp, Homo sapien
tagagctcgggttctatttgcaacc

SEQ ID NO: 533608 - DNA, 25 bp, Homo sapien
tctagtcaatggattcctacgcgga

SEQ ID NO: 533609 - DNA, 25 bp, Homo sapien
gcctgggagagaccgccttggattt

SEQ ID NO: 533610 - DNA, 25 bp, Homo sapien
cacattttgggcagcaagttccctt

SEQ ID NO: 533611 - DNA, 25 bp, Homo sapien
agttcccttgttccctcggcagctg

SEQ ID NO: 533612 - DNA, 25 bp, Homo sapien
tgtgtccttttcttggactcgcagc

SEQ ID NO: 533613 - DNA, 25 bp, Homo sapien
ggcagggctccatgatcctggcctt

SEQ ID NO: 533614 - DNA, 25 bp, Homo sapien
ccagctccacggaatgatgtcccca

SEQ ID NO: 533615 - DNA, 25 bp, Homo sapien
tccatgggtcaatcttagagggcag

SEQ ID NO: 533616 - DNA, 25 bp, Homo sapien
gatgtctgaggagtacgcttccctg

SEQ ID NO: 533617 - DNA, 25 bp, Homo sapien
gaaggatagattggaggtttttcca

SEQ ID NO: 533618 - DNA, 25 bp, Homo sapien
tgaaagcctttacaagggagaactc

SEQ ID NO: 533619 - DNA, 25 bp, Homo sapien
tttacaagggagaactctggtctcc

SEQ ID NO: 533620 - DNA, 25 bp, Homo sapien
aagcctttacaagggagaactctgg

SEQ ID NO: 533621 - DNA, 25 bp, Homo sapien
cctttacaagggagaactctggtct

SEQ ID NO: 533622 - DNA, 25 bp, Homo sapien
tgaacgatgaccaaatatggtaaaa

SEQ ID NO: 533623 - DNA, 25 bp, Homo sapien
tgaccaaatatggtaaaaatgttcc

SEQ ID NO: 533624 - DNA, 25 bp, Homo sapien
acgatgaccaaatatggtaaaaatg

SEQ ID NO: 533625 - DNA, 25 bp, Homo sapien
ccaaatatggtaaaaatgttcccat

SEQ ID NO: 533626 - DNA, 25 bp, Homo sapien
cgtgcaagagtgaactgcacagccc

SEQ ID NO: 533627 - DNA, 25 bp, Homo sapien
aacatgccgcttgtagcccactggg

SEQ ID NO: 533628 - DNA, 25 bp, Homo sapien
gcaaagtcagaaccacgtgcaagag

SEQ ID NO: 533629 - DNA, 25 bp, Homo sapien
actgcacagcccttgcttagcaaca

SEQ ID NO: 533630 - DNA, 25 bp, Homo sapien
tcacagcagaccctttgcttgaaca

SEQ ID NO: 533631 - DNA, 25 bp, Homo sapien
cagcagaccctttgcttgaacagct

SEQ ID NO: 533632 - DNA, 25 bp, Homo sapien
gcagaccctttgcttgaacagctta

SEQ ID NO: 533633 - DNA, 25 bp, Homo sapien
ccctttgcttgaacagcttatctgt

SEQ ID NO: 533634 - DNA, 25 bp, Homo sapien
gtcgaaactttatcatttacctgag

SEQ ID NO: 533635 - DNA, 25 bp, Homo sapien
catcttgatagtcgaaactttatca

SEQ ID NO: 533636 - DNA, 25 bp, Homo sapien
gatagtcgaaactttatcatttacc

SEQ ID NO: 533637 - DNA, 25 bp, Homo sapien
cgaaactttatcatttacctgagtt

SEQ ID NO: 533638 - DNA, 25 bp, Homo sapien
gcattgatgcctttgctatgacagt

SEQ ID NO: 533639 - DNA, 25 bp, Homo sapien
gctgctcctcggtacacttcactgt

SEQ ID NO: 533640 - DNA, 25 bp, Homo sapien
gctaaggaagcactgtgttctttga

SEQ ID NO: 533641 - DNA, 25 bp, Homo sapien
tgagtctagcttgagggccacttcc

SEQ ID NO: 533642 - DNA, 25 bp, Homo sapien
gctctgcgaggaacattctactttg

SEQ ID NO: 533643 - DNA, 25 bp, Homo sapien
tttcagctgctgctaggcgttctcc

SEQ ID NO: 533644 - DNA, 25 bp, Homo sapien
tcaaacatttggagagctctgcgag

SEQ ID NO: 533645 - DNA, 25 bp, Homo sapien
tgtccctgtattggcccaggacagc

SEQ ID NO: 533646 - DNA, 25 bp, Homo sapien
ctctgacttctcttctggatgggaa

SEQ ID NO: 533647 - DNA, 25 bp, Homo sapien
tcttctggatgggaacttaggtacg

SEQ ID NO: 533648 - DNA, 25 bp, Homo sapien
gacttctcttctggatgggaactta

SEQ ID NO: 533649 - DNA, 25 bp, Homo sapien
ctgaagttctctggtttcctctgac

SEQ ID NO: 533650 - DNA, 25 bp, Homo sapien
catcagctcttgttggttgaaagat

SEQ ID NO: 533651 - DNA, 25 bp, Homo sapien
caactggccatttcctgaggttctc

SEQ ID NO: 533652 - DNA, 25 bp, Homo sapien
gatctgaaaactttcaactggccat

SEQ ID NO: 533653 - DNA, 25 bp, Homo sapien
tcagctcttgttggttgaaagatct

SEQ ID NO: 533654 - DNA, 25 bp, Homo sapien
taggcatcacgtcaccaaaacaata

SEQ ID NO: 533655 - DNA, 25 bp, Homo sapien
ccatcacagtcaccatgatgatgag

SEQ ID NO: 533656 - DNA, 25 bp, Homo sapien
gcttctttaggcatcacgtcaccaa

SEQ ID NO: 533657 - DNA, 25 bp, Homo sapien
tgagcagtgcttctttaggcatcac

SEQ ID NO: 533658 - DNA, 25 bp, Homo sapien
tcaggaataggactggacagtggct

SEQ ID NO: 533659 - DNA, 25 bp, Homo sapien
tctaatgtcaatcaccagaatgcct

SEQ ID NO: 533660 - DNA, 25 bp, Homo sapien
gtgtgtccaaagtcctccgagaccg

SEQ ID NO: 533661 - DNA, 25 bp, Homo sapien
cagccaatcttaacatggtggtcca

SEQ ID NO: 533662 - DNA, 25 bp, Homo sapien
ctttggtctgaagattgggcttagc

SEQ ID NO: 533663 - DNA, 25 bp, Homo sapien
ttggtctgaagattgggcttagctg

SEQ ID NO: 533664 - DNA, 25 bp, Homo sapien
ggtctgaagattgggcttagctgat

SEQ ID NO: 533665 - DNA, 25 bp, Homo sapien
tgaagattgggcttagctgattggt

SEQ ID NO: 533666 - DNA, 25 bp, Homo sapien
tgtatgtcttagagagttctgacat

SEQ ID NO: 533667 - DNA, 25 bp, Homo sapien
cgtgtatgtcttagagagttctgac

SEQ ID NO: 533668 - DNA, 25 bp, Homo sapien
gtgtatgtcttagagagttctgaca

SEQ ID NO: 533669 - DNA, 25 bp, Homo sapien
tctgcgctgggctaaagaatgagac

SEQ ID NO: 533670 - DNA, 25 bp, Homo sapien
taaatcttgttggacagcaggagag

SEQ ID NO: 533671 - DNA, 25 bp, Homo sapien
cagatagttggaagcaaagcgggac

SEQ ID NO: 533672 - DNA, 25 bp, Homo sapien
gacggccttggacaacgtctgctgg

SEQ ID NO: 533673 - DNA, 25 bp, Homo sapien
cttggcagtagccaaggatgagggg

SEQ ID NO: 533674 - DNA, 25 bp, Homo sapien
tggcagtagccaaggatgaggggcc

SEQ ID NO: 533675 - DNA, 25 bp, Homo sapien
ttggcagtagccaaggatgaggggc

SEQ ID NO: 533676 - DNA, 25 bp, Homo sapien
ctgcatatcccttcttgagtgtctt

SEQ ID NO: 533677 - DNA, 25 bp, Homo sapien
tgaactgcatatcccttcttgagtg

SEQ ID NO: 533678 - DNA, 25 bp, Homo sapien
tggtcttgaactgcatatcccttct

SEQ ID NO: 533679 - DNA, 25 bp, Homo sapien
ccttctccaagtgctggtcttgaac

SEQ ID NO: 533680 - DNA, 25 bp, Homo sapien
gagtactttagcttgggctccggag

SEQ ID NO: 533681 - DNA, 25 bp, Homo sapien
catcactgagtactttagcttgggc

SEQ ID NO: 533682 - DNA, 25 bp, Homo sapien
agcccatcaaagtcgtccatcactg

SEQ ID NO: 533683 - DNA, 25 bp, Homo sapien
agaacaggttatagcattgaaatgg

SEQ ID NO: 533684 - DNA, 25 bp, Homo sapien
ccacgcccagccaaattctattttt

SEQ ID NO: 533685 - DNA, 25 bp, Homo sapien
aaaatctttacacggattcctctgc

SEQ ID NO: 533686 - DNA, 25 bp, Homo sapien
gtgacttagcttgcgactcttaggg

SEQ ID NO: 533687 - DNA, 25 bp, Homo sapien
aactgccagacaagccaagctgtga

SEQ ID NO: 533688 - DNA, 25 bp, Homo sapien
caagctgtgacaatagtgacttagc

SEQ ID NO: 533689 - DNA, 25 bp, Homo sapien
caaaccagcgtgttaacaaatggct

SEQ ID NO: 533690 - DNA, 25 bp, Homo sapien
aaatggcttagcgaatgaatcggag

SEQ ID NO: 533691 - DNA, 25 bp, Homo sapien
tgctccacggagaaaccacagttga

SEQ ID NO: 533692 - DNA, 25 bp, Homo sapien
tctccacaatctgggtgcggtgtga

SEQ ID NO: 533693 - DNA, 25 bp, Homo sapien
ttgggggagcctcgcaaactgggca

SEQ ID NO: 533694 - DNA, 25 bp, Homo sapien
cctttgggggagcctcgcaaactgg

SEQ ID NO: 533695 - DNA, 25 bp, Homo sapien
ggaactggtgtaaacggcttattgc

SEQ ID NO: 533696 - DNA, 25 bp, Homo sapien
aactggtgtaaacggcttattgcag

SEQ ID NO: 533697 - DNA, 25 bp, Homo sapien
aagtgcagcaatgaacgtatgtgtg

SEQ ID NO: 533698 - DNA, 25 bp, Homo sapien
tccccaaccacatctgccaacaggc

SEQ ID NO: 533699 - DNA, 25 bp, Homo sapien
aaaagtgcagcaatgaacgtatgtg

SEQ ID NO: 533700 - DNA, 25 bp, Homo sapien
gtgaaaagtgcagcaatgaacgtat

SEQ ID NO: 533701 - DNA, 25 bp, Homo sapien
gagttgagccttaaagtccttgtct

SEQ ID NO: 533702 - DNA, 25 bp, Homo sapien
tgtgcagccctgtgttttgagcact

SEQ ID NO: 533703 - DNA, 25 bp, Homo sapien
cataatttgtgtagcaaaacagctg

SEQ ID NO: 533704 - DNA, 25 bp, Homo sapien
gcattttggagccttgatagtagta

SEQ ID NO: 533705 - DNA, 25 bp, Homo sapien
gagttaatggcacataattcagccc

SEQ ID NO: 533706 - DNA, 25 bp, Homo sapien
tcttgagttaatggcacataattca

SEQ ID NO: 533707 - DNA, 25 bp, Homo sapien
ttaatggcacataattcagcccctc

SEQ ID NO: 533708 - DNA, 25 bp, Homo sapien
gctgtatcttgagttaatggcacat

SEQ ID NO: 533709 - DNA, 25 bp, Homo sapien
taaccatggactgtatgtgcactca

SEQ ID NO: 533710 - DNA, 25 bp, Homo sapien
aaaatgcctgttctggtgtttgttc

SEQ ID NO: 533711 - DNA, 25 bp, Homo sapien
actcagtcctggaactccctgtctg

SEQ ID NO: 533712 - DNA, 25 bp, Homo sapien
cagtagttgcatgagcctctgtcct

SEQ ID NO: 533713 - DNA, 25 bp, Homo sapien
ctgcttctcttcaagtgccatctgt

SEQ ID NO: 533714 - DNA, 25 bp, Homo sapien
gagactcagggggatcctccgacat

SEQ ID NO: 533715 - DNA, 25 bp, Homo sapien
caagtgccatctgtgagactcaggg

SEQ ID NO: 533716 - DNA, 25 bp, Homo sapien
tcttcaagtgccatctgtgagactc

SEQ ID NO: 533717 - DNA, 25 bp, Homo sapien
tatgatggccttagagaagttctcc

SEQ ID NO: 533718 - DNA, 25 bp, Homo sapien
gaatagcaagttgagccctggctga

SEQ ID NO: 533719 - DNA, 25 bp, Homo sapien
cattatgaaaggagcaacagaaccc

SEQ ID NO: 533720 - DNA, 25 bp, Homo sapien
tcaaggtcaagtcttgcaggcaagg

SEQ ID NO: 533721 - DNA, 25 bp, Homo sapien
tatttatttacatttgaggtggtgg

SEQ ID NO: 533722 - DNA, 25 bp, Homo sapien
ctatttatttacatttgaggtggtg

SEQ ID NO: 533723 - DNA, 25 bp, Homo sapien
gacagtactctgtgaagaggagaag

SEQ ID NO: 533724 - DNA, 25 bp, Homo sapien
gtgggcttctgttaaactgtgtagg

SEQ ID NO: 533725 - DNA, 25 bp, Homo sapien
ctgtgtaggtccatagcacagatag

SEQ ID NO: 533726 - DNA, 25 bp, Homo sapien
gggagcaatgacagtactctgtgaa

SEQ ID NO: 533727 - DNA, 25 bp, Homo sapien
ccacctcttcccgatggagagaagt

SEQ ID NO: 533728 - DNA, 25 bp, Homo sapien
tcttcccgatggagagaagtgttgc

SEQ ID NO: 533729 - DNA, 25 bp, Homo sapien
tcccgatggagagaagtgttgcttt

SEQ ID NO: 533730 - DNA, 25 bp, Homo sapien
ggccttggcgtccacctcttcccga

SEQ ID NO: 533731 - DNA, 25 bp, Homo sapien
cctctcttggtggtttgggcatgca

SEQ ID NO: 533732 - DNA, 25 bp, Homo sapien
tctcttggtggtttgggcatgcact

SEQ ID NO: 533733 - DNA, 25 bp, Homo sapien
ctctcttggtggtttgggcatgcac

SEQ ID NO: 533734 - DNA, 25 bp, Homo sapien
ctcttggtggtttgggcatgcactt

SEQ ID NO: 533735 - DNA, 25 bp, Homo sapien
ccagcaccaggtggttgctgccatc

SEQ ID NO: 533736 - DNA, 25 bp, Homo sapien
tgatgtgttccctcctcagtcgtgg

SEQ ID NO: 533737 - DNA, 25 bp, Homo sapien
atgtgttccctcctcagtcgtggcc

SEQ ID NO: 533738 - DNA, 25 bp, Homo sapien
gtgttccctcctcagtcgtggccag

SEQ ID NO: 533739 - DNA, 25 bp, Homo sapien
tgaaaagtggagtcagctgagccat

SEQ ID NO: 533740 - DNA, 25 bp, Homo sapien
atgaaaagtggagtcagctgagcca

SEQ ID NO: 533741 - DNA, 25 bp, Homo sapien
gatgaaaagtggagtcagctgagcc

SEQ ID NO: 533742 - DNA, 25 bp, Homo sapien
ctattgtgggtagagagacaaccct

SEQ ID NO: 533743 - DNA, 25 bp, Homo sapien
ttgtgggtagagagacaaccctcat

SEQ ID NO: 533744 - DNA, 25 bp, Homo sapien
caccagcatgggatctattgtgggt

SEQ ID NO: 533745 - DNA, 25 bp, Homo sapien
cagcatgggatctattgtgggtaga

SEQ ID NO: 533746 - DNA, 25 bp, Homo sapien
tatttattcccagttctctatttgc

SEQ ID NO: 533747 - DNA, 25 bp, Homo sapien
ttcccagttctctatttgcattttc

SEQ ID NO: 533748 - DNA, 25 bp, Homo sapien
ttattcccagttctctatttgcatt

SEQ ID NO: 533749 - DNA, 25 bp, Homo sapien
ctaattcctatttattcccagttct

SEQ ID NO: 533750 - DNA, 25 bp, Homo sapien
agagatttatttgctcctccattgg

SEQ ID NO: 533751 - DNA, 25 bp, Homo sapien
tccagtagcaggaagacttggtttt

SEQ ID NO: 533752 - DNA, 25 bp, Homo sapien
taaatcaagattggggcggtggttc

SEQ ID NO: 533753 - DNA, 25 bp, Homo sapien
ctcctccattggctgcataactggg

SEQ ID NO: 533754 - DNA, 25 bp, Homo sapien
gtcaaagatcttgcaccgctggatg

SEQ ID NO: 533755 - DNA, 25 bp, Homo sapien
actgtttagaaactatgatggagcc

SEQ ID NO: 533756 - DNA, 25 bp, Homo sapien
gcaccgctggatgtgcgcacagcct

SEQ ID NO: 533757 - DNA, 25 bp, Homo sapien
gagcctttgttgaaggtcaaagatc

SEQ ID NO: 533758 - DNA, 25 bp, Homo sapien
gtgagcaatggagatcttgacaatg

SEQ ID NO: 533759 - DNA, 25 bp, Homo sapien
tgaataaacagctggagcatcttgg

SEQ ID NO: 533760 - DNA, 25 bp, Homo sapien
tagctcaccattgggtggagtccac

SEQ ID NO: 533761 - DNA, 25 bp, Homo sapien
ttggagaggcgccactgaaagccag

SEQ ID NO: 533762 - DNA, 25 bp, Homo sapien
ttgaccactggtgcattattgagag

SEQ ID NO: 533763 - DNA, 25 bp, Homo sapien
atttcctctgggtattgtcatcttc

SEQ ID NO: 533764 - DNA, 25 bp, Homo sapien
agatttcctctgggtattgtcatct

SEQ ID NO: 533765 - DNA, 25 bp, Homo sapien
gatttcctctgggtattgtcatctt

SEQ ID NO: 533766 - DNA, 25 bp, Homo sapien
tcagatttcctctgggtattgtcat

SEQ ID NO: 533767 - DNA, 25 bp, Homo sapien
gatgagggtaactgggctgtgcttg

SEQ ID NO: 533768 - DNA, 25 bp, Homo sapien
ctgtgcggggatgagggtaactggg

SEQ ID NO: 533769 - DNA, 25 bp, Homo sapien
cggggatgagggtaactgggctgtg

SEQ ID NO: 533770 - DNA, 25 bp, Homo sapien
tgtgcggggatgagggtaactgggc

SEQ ID NO: 533771 - DNA, 25 bp, Homo sapien
ttgggggtctgcagactttctggct

SEQ ID NO: 533772 - DNA, 25 bp, Homo sapien
tctgcagactttctggcttccacgc

SEQ ID NO: 533773 - DNA, 25 bp, Homo sapien
gcagactttctggcttccacgcttg

SEQ ID NO: 533774 - DNA, 25 bp, Homo sapien
tgggggtctgcagactttctggctt

SEQ ID NO: 533775 - DNA, 25 bp, Homo sapien
tgggaaaggcaggggatatctccag

SEQ ID NO: 533776 - DNA, 25 bp, Homo sapien
ggaaaggcaggggatatctccagag

SEQ ID NO: 533777 - DNA, 25 bp, Homo sapien
gaaaggcaggggatatctccagaga

SEQ ID NO: 533778 - DNA, 25 bp, Homo sapien
ccagagataaattttgatccaccat

SEQ ID NO: 533779 - DNA, 25 bp, Homo sapien
ctcccctctccatttgagggggtca

SEQ ID NO: 533780 - DNA, 25 bp, Homo sapien
attttcagcagtggagacttccttt

SEQ ID NO: 533781 - DNA, 25 bp, Homo sapien
ttcagcagtggagacttcctttgca

SEQ ID NO: 533782 - DNA, 25 bp, Homo sapien
cctctccatttgagggggtcactgt

SEQ ID NO: 533783 - DNA, 25 bp, Homo sapien
gcctctttatgtttcaggatatcaa

SEQ ID NO: 533784 - DNA, 25 bp, Homo sapien
actgatagaagtgacatgtgggcta

SEQ ID NO: 533785 - DNA, 25 bp, Homo sapien
tatgtggctgagtgatgcatgctgc

SEQ ID NO: 533786 - DNA, 25 bp, Homo sapien
caagcagtgtcttgtcccctccaaa

SEQ ID NO: 533787 - DNA, 25 bp, Homo sapien
aaaggctgggacatcataagatagg

SEQ ID NO: 533788 - DNA, 25 bp, Homo sapien
acatcataagatagggacccagggc

SEQ ID NO: 533789 - DNA, 25 bp, Homo sapien
tcttccttcaccaatgcacagagga

SEQ ID NO: 533790 - DNA, 25 bp, Homo sapien
ttcaccaatgcacagaggaacacag

SEQ ID NO: 533791 - DNA, 25 bp, Homo sapien
tgcccacaggtcaaaacattctgag

SEQ ID NO: 533792 - DNA, 25 bp, Homo sapien
gctactttagtagttatcctccctg

SEQ ID NO: 533793 - DNA, 25 bp, Homo sapien
tagagattaaatagggtcttgggtc

SEQ ID NO: 533794 - DNA, 25 bp, Homo sapien
agagccaatttagaggctaatttag

SEQ ID NO: 533795 - DNA, 25 bp, Homo sapien
tcacagctgtccccttcttacaagt

SEQ ID NO: 533796 - DNA, 25 bp, Homo sapien
agctgtccccttcttacaagtccca

SEQ ID NO: 533797 - DNA, 25 bp, Homo sapien
tgtccccttcttacaagtcccactg

SEQ ID NO: 533798 - DNA, 25 bp, Homo sapien
ccttcacagctgtccccttcttaca

SEQ ID NO: 533799 - DNA, 25 bp, Homo sapien
tccccttctcagaaactttcaattg

SEQ ID NO: 533800 - DNA, 25 bp, Homo sapien
accattctcaatgtgggctttgact

SEQ ID NO: 533801 - DNA, 25 bp, Homo sapien
ggctttgactgggtcattccccttc

SEQ ID NO: 533802 - DNA, 25 bp, Homo sapien
cattccccttctcagaaactttcaa

SEQ ID NO: 533803 - DNA, 25 bp, Homo sapien
tggtagaaaggatgtccctccaaat

SEQ ID NO: 533804 - DNA, 25 bp, Homo sapien
tctacgatggaccaaagagctttgt

SEQ ID NO: 533805 - DNA, 25 bp, Homo sapien
tccttggtgcttatggttagggtcc

SEQ ID NO: 533806 - DNA, 25 bp, Homo sapien
gtcagctgggtctatatctacgatg

SEQ ID NO: 533807 - DNA, 25 bp, Homo sapien
tatggtagagttaaggttgccagca

SEQ ID NO: 533808 - DNA, 25 bp, Homo sapien
gtcactggggctagttgggccccat

SEQ ID NO: 533809 - DNA, 25 bp, Homo sapien
tgctgtttagcatggtcactggggc

SEQ ID NO: 533810 - DNA, 25 bp, Homo sapien
gttgggccccatcctatggtagagt

SEQ ID NO: 533811 - DNA, 25 bp, Homo sapien
tggtgagttaactcccagccgacag

SEQ ID NO: 533812 - DNA, 25 bp, Homo sapien
gaactcacatccaacttgaataatt

SEQ ID NO: 533813 - DNA, 25 bp, Homo sapien
agccgacagcggagctttgccagca

SEQ ID NO: 533814 - DNA, 25 bp, Homo sapien
gcccgccttattcctcattgctaaa

SEQ ID NO: 533815 - DNA, 25 bp, Homo sapien
ggtatcattgatgttgtgccatcaa

SEQ ID NO: 533816 - DNA, 25 bp, Homo sapien
ccttgaaggggtagggtatcattga

SEQ ID NO: 533817 - DNA, 25 bp, Homo sapien
cagatcccttgaaggggtagggtat

SEQ ID NO: 533818 - DNA, 25 bp, Homo sapien
ggtagggtatcattgatgttgtgcc

SEQ ID NO: 533819 - DNA, 25 bp, Homo sapien
aatattgttgatgacttcatggtct

SEQ ID NO: 533820 - DNA, 25 bp, Homo sapien
atattgttgatgacttcatggtctc

SEQ ID NO: 533821 - DNA, 25 bp, Homo sapien
gaatattgttgatgacttcatggtc

SEQ ID NO: 533822 - DNA, 25 bp, Homo sapien
ttggccatggccactggtgttgcag

SEQ ID NO: 533823 - DNA, 25 bp, Homo sapien
gccactggtgttgcagactcagccc

SEQ ID NO: 533824 - DNA, 25 bp, Homo sapien
catggccactggtgttgcagactca

SEQ ID NO: 533825 - DNA, 25 bp, Homo sapien
ctggtgttgcagactcagcccttcc

SEQ ID NO: 533826 - DNA, 25 bp, Homo sapien
tgagagcctctctgtgatgttagag

SEQ ID NO: 533827 - DNA, 25 bp, Homo sapien
aactgagagcctctctgtgatgtta

SEQ ID NO: 533828 - DNA, 25 bp, Homo sapien
gagcctctctgtgatgttagagatg

SEQ ID NO: 533829 - DNA, 25 bp, Homo sapien
gagagcctctctgtgatgttagaga

SEQ ID NO: 533830 - DNA, 25 bp, Homo sapien
gatctgctggtgcaacctgttattg

SEQ ID NO: 533831 - DNA, 25 bp, Homo sapien
cctgttattgtaagagtatgggatg

SEQ ID NO: 533832 - DNA, 25 bp, Homo sapien
gctggtgcaacctgttattgtaaga

SEQ ID NO: 533833 - DNA, 25 bp, Homo sapien
caacctgttattgtaagagtatggg

SEQ ID NO: 533834 - DNA, 25 bp, Homo sapien
cagcagtgatggagcccgtagcagt

SEQ ID NO: 533835 - DNA, 25 bp, Homo sapien
tgggtgatgacactgcccatcagca

SEQ ID NO: 533836 - DNA, 25 bp, Homo sapien
ctgctgaagtgtgtgaggtccctgg

SEQ ID NO: 533837 - DNA, 25 bp, Homo sapien
ctgggtgttaacctgcctgggtgat

SEQ ID NO: 533838 - DNA, 25 bp, Homo sapien
ttggagatgaagtagggaaaaatcg

SEQ ID NO: 533839 - DNA, 25 bp, Homo sapien
aaattgaaggaagcattgaaattgg

SEQ ID NO: 533840 - DNA, 25 bp, Homo sapien
aactcttgccatttggcaggtattt

SEQ ID NO: 533841 - DNA, 25 bp, Homo sapien
aaatcggtttgcttggaaactcttg

SEQ ID NO: 533842 - DNA, 25 bp, Homo sapien
cagttattgctctgttgaggattcc

SEQ ID NO: 533843 - DNA, 25 bp, Homo sapien
tgaagtatccgtatttccagggttc

SEQ ID NO: 533844 - DNA, 25 bp, Homo sapien
tattgctctgttgaggattcccaga

SEQ ID NO: 533845 - DNA, 25 bp, Homo sapien
gggttctatccttgcttcatctttc

SEQ ID NO: 533846 - DNA, 25 bp, Homo sapien
gtgactgtagacctgcacctcccag

SEQ ID NO: 533847 - DNA, 25 bp, Homo sapien
acccttctatactatcaaacatgag

SEQ ID NO: 533848 - DNA, 25 bp, Homo sapien
gacttggcccacttatggtgtgact

SEQ ID NO: 533849 - DNA, 25 bp, Homo sapien
tagtacccactaaccaatatctcat

SEQ ID NO: 533850 - DNA, 25 bp, Homo sapien
gtagagttgtaaaagtgctcccaag

SEQ ID NO: 533851 - DNA, 25 bp, Homo sapien
cagtatagttacttgctcagcaggc

SEQ ID NO: 533852 - DNA, 25 bp, Homo sapien
gatagtctcagtaaagccagtatag

SEQ ID NO: 533853 - DNA, 25 bp, Homo sapien
cagatttctgatatctccgatggaa

SEQ ID NO: 533854 - DNA, 25 bp, Homo sapien
gtgtgatttcaaacaatgcccatac

SEQ ID NO: 533855 - DNA, 25 bp, Homo sapien
gtggcgagtcgcagaaacatgaata

SEQ ID NO: 533856 - DNA, 25 bp, Homo sapien
taatatgattgagggctggatagga

SEQ ID NO: 533857 - DNA, 25 bp, Homo sapien
tggctgggcagctaatatgattgag

SEQ ID NO: 533858 - DNA, 25 bp, Homo sapien
caagtagtggatggatgtacatctc

SEQ ID NO: 533859 - DNA, 25 bp, Homo sapien
gatggatgtacatctccaggtaata

SEQ ID NO: 533860 - DNA, 25 bp, Homo sapien
ctgagagaccacaggatgaaagctt

SEQ ID NO: 533861 - DNA, 25 bp, Homo sapien
cctgagagaccacaggatgaaagct

SEQ ID NO: 533862 - DNA, 25 bp, Homo sapien
cactgctacccctgcgattgttagt

SEQ ID NO: 533863 - DNA, 25 bp, Homo sapien
tgctacccctgcgattgttagttgc

SEQ ID NO: 533864 - DNA, 25 bp, Homo sapien
tgtcactgctacccctgcgattgtt

SEQ ID NO: 533865 - DNA, 25 bp, Homo sapien
tacccctgcgattgttagttgcctc

SEQ ID NO: 533866 - DNA, 25 bp, Homo sapien
ctcatgccaatgtggggcacttggg

SEQ ID NO: 533867 - DNA, 25 bp, Homo sapien
tttaagagggtcctcatgccaatgt

SEQ ID NO: 533868 - DNA, 25 bp, Homo sapien
cttttaagagggtcctcatgccaat

SEQ ID NO: 533869 - DNA, 25 bp, Homo sapien
gcacttggggctcacatttggccat

SEQ ID NO: 533870 - DNA, 25 bp, Homo sapien
tgatattctccttggatgaatgcac

SEQ ID NO: 533871 - DNA, 25 bp, Homo sapien
tcctggagggctagtctgagcatag

SEQ ID NO: 533872 - DNA, 25 bp, Homo sapien
gatgaatgcactgggaagtctagtg

SEQ ID NO: 533873 - DNA, 25 bp, Homo sapien
gaatgatctgccagacgtcgtttcc

SEQ ID NO: 533874 - DNA, 25 bp, Homo sapien
tcagcaacgttcatctcgttaaagc

SEQ ID NO: 533875 - DNA, 25 bp, Homo sapien
ctgggtcagcaacgttcatctcgtt

SEQ ID NO: 533876 - DNA, 25 bp, Homo sapien
gggtcagcaacgttcatctcgttaa

SEQ ID NO: 533877 - DNA, 25 bp, Homo sapien
ttataatgattctggctcttgtaaa

SEQ ID NO: 533878 - DNA, 25 bp, Homo sapien
agtctgcacattatctccttgctga

SEQ ID NO: 533879 - DNA, 25 bp, Homo sapien
gctgagacactacaaggtaatgagg

SEQ ID NO: 533880 - DNA, 25 bp, Homo sapien
agtctggtgattgccagtctgcaca

SEQ ID NO: 533881 - DNA, 25 bp, Homo sapien
tcagagtctggtgattgccagtctg

SEQ ID NO: 533882 - DNA, 25 bp, Homo sapien
gaggcccctcttcgaggaggtattg

SEQ ID NO: 533883 - DNA, 25 bp, Homo sapien
cagaggcccctcttcgaggaggtat

SEQ ID NO: 533884 - DNA, 25 bp, Homo sapien
gcccctcttcgaggaggtattgccc

SEQ ID NO: 533885 - DNA, 25 bp, Homo sapien
aggcccctcttcgaggaggtattgc

SEQ ID NO: 533886 - DNA, 25 bp, Homo sapien
tggattggggatctctcttctcttc

SEQ ID NO: 533887 - DNA, 25 bp, Homo sapien
cttctcttcggctctaataggagac

SEQ ID NO: 533888 - DNA, 25 bp, Homo sapien
ttctcttcggctctaataggagacc

SEQ ID NO: 533889 - DNA, 25 bp, Homo sapien
tggggatctctcttctcttcggctc

SEQ ID NO: 533890 - DNA, 25 bp, Homo sapien
tcccaaactttcagtcctattggaa

SEQ ID NO: 533891 - DNA, 25 bp, Homo sapien
cccaaactttcagtcctattggaag

SEQ ID NO: 533892 - DNA, 25 bp, Homo sapien
ccaaactttcagtcctattggaagg

SEQ ID NO: 533893 - DNA, 25 bp, Homo sapien
gaatcaaatcagagcctgggactca

SEQ ID NO: 533894 - DNA, 25 bp, Homo sapien
tctttggtaaccctgatgagagctc

SEQ ID NO: 533895 - DNA, 25 bp, Homo sapien
ttagccatgaagataagccctagcc

SEQ ID NO: 533896 - DNA, 25 bp, Homo sapien
tggcctggagccttatcacgctaga

SEQ ID NO: 533897 - DNA, 25 bp, Homo sapien
caggatgatttgtggcgcgttccaa

SEQ ID NO: 533898 - DNA, 25 bp, Homo sapien
cacagagaccatgcaattggagacc

SEQ ID NO: 533899 - DNA, 25 bp, Homo sapien
caatacgaaggcaatggaggccaac

SEQ ID NO: 533900 - DNA, 25 bp, Homo sapien
ggtaataagaagtcagagatccaca

SEQ ID NO: 533901 - DNA, 25 bp, Homo sapien
acagagcagccggtggcagctaaag

SEQ ID NO: 533902 - DNA, 25 bp, Homo sapien
gctagacagagcagccggtggcagc

SEQ ID NO: 533903 - DNA, 25 bp, Homo sapien
agcagccggtggcagctaaaggaga

SEQ ID NO: 533904 - DNA, 25 bp, Homo sapien
cagccggtggcagctaaaggagaaa

SEQ ID NO: 533905 - DNA, 25 bp, Homo sapien
caataagtatgaccaataccttcaa

SEQ ID NO: 533906 - DNA, 25 bp, Homo sapien
caacgtaacatccaataagtatgac

SEQ ID NO: 533907 - DNA, 25 bp, Homo sapien
catccaataagtatgaccaatacct

SEQ ID NO: 533908 - DNA, 25 bp, Homo sapien
acaacaggaacaacgtaacatccaa

SEQ ID NO: 533909 - DNA, 25 bp, Homo sapien
gggttgatggaagcacacaatatca

SEQ ID NO: 533910 - DNA, 25 bp, Homo sapien
gagggttgatggaagcacacaatat

SEQ ID NO: 533911 - DNA, 25 bp, Homo sapien
tgggagggttgatggaagcacacaa

SEQ ID NO: 533912 - DNA, 25 bp, Homo sapien
ggttgatggaagcacacaatatcac

SEQ ID NO: 533913 - DNA, 25 bp, Homo sapien
gaagtgtctgcaaaagaaagcccac

SEQ ID NO: 533914 - DNA, 25 bp, Homo sapien
gaagggaatccaggtcccaatcttc

SEQ ID NO: 533915 - DNA, 25 bp, Homo sapien
agcccactgacccaaagagaaggga

SEQ ID NO: 533916 - DNA, 25 bp, Homo sapien
tccactggccacaagtatgaagtgt

SEQ ID NO: 533917 - DNA, 25 bp, Homo sapien
agactgatgcaagggatctatctcc

SEQ ID NO: 533918 - DNA, 25 bp, Homo sapien
cagagactgatgcaagggatctatc

SEQ ID NO: 533919 - DNA, 25 bp, Homo sapien
actgatgcaagggatctatctcccc

SEQ ID NO: 533920 - DNA, 25 bp, Homo sapien
gatgcaagggatctatctccccacc

SEQ ID NO: 533921 - DNA, 25 bp, Homo sapien
tagattaccaaagaggaatgatctc

SEQ ID NO: 533922 - DNA, 25 bp, Homo sapien
aagatgtatttaaattcgtgaaatg

SEQ ID NO: 533923 - DNA, 25 bp, Homo sapien
tgtagcaaaagcaatccctagagaa

SEQ ID NO: 533924 - DNA, 25 bp, Homo sapien
tatttaaattcgtgaaatgtagcaa

SEQ ID NO: 533925 - DNA, 25 bp, Homo sapien
tgaaaagccttctgtacgccacact

SEQ ID NO: 533926 - DNA, 25 bp, Homo sapien
tcctgaactcatagaaacacttgga

SEQ ID NO: 533927 - DNA, 25 bp, Homo sapien
tccattatcctccttacatcctcaa

SEQ ID NO: 533928 - DNA, 25 bp, Homo sapien
tcctcaattcttcctgaactcatag

SEQ ID NO: 533929 - DNA, 25 bp, Homo sapien
taagtgtgatatctcgccttcctgt

SEQ ID NO: 533930 - DNA, 25 bp, Homo sapien
ccctgttctgccagataggtttcca

SEQ ID NO: 533931 - DNA, 25 bp, Homo sapien
caggctacatagttgctgaagtgaa

SEQ ID NO: 533932 - DNA, 25 bp, Homo sapien
gttcccacagaaacgaggtacggca

SEQ ID NO: 533933 - DNA, 25 bp, Homo sapien
cctgacaggaggtgaccatgtgagg

SEQ ID NO: 533934 - DNA, 25 bp, Homo sapien
ccatgtgaggttcagggatgtgggt

SEQ ID NO: 533935 - DNA, 25 bp, Homo sapien
gtggtgagacttgggccttcagcag

SEQ ID NO: 533936 - DNA, 25 bp, Homo sapien
ggtgagacttgggccttcagcagct

SEQ ID NO: 533937 - DNA, 25 bp, Homo sapien
tattccaggtgaccattctttagca

SEQ ID NO: 533938 - DNA, 25 bp, Homo sapien
cagcacggagctgttgttcatactt

SEQ ID NO: 533939 - DNA, 25 bp, Homo sapien
tgttcatacttcgaagtgtcatcag

SEQ ID NO: 533940 - DNA, 25 bp, Homo sapien
cgaagtgtcatcagccccacatttt

SEQ ID NO: 533941 - DNA, 25 bp, Homo sapien
gggccataacattatcaatcaatat

SEQ ID NO: 533942 - DNA, 25 bp, Homo sapien
tcaatcaatatcaagtctggcatat

SEQ ID NO: 533943 - DNA, 25 bp, Homo sapien
gctatcactatccagtgagtatctg

SEQ ID NO: 533944 - DNA, 25 bp, Homo sapien
tcaagtctggcatatcattggctat

SEQ ID NO: 533945 - DNA, 25 bp, Homo sapien
agaaaatggacccatcaaatgggtt

SEQ ID NO: 533946 - DNA, 25 bp, Homo sapien
gtttagcattgaggctcccttccta

SEQ ID NO: 533947 - DNA, 25 bp, Homo sapien
acatggcctgcggatgctaagtagg

SEQ ID NO: 533948 - DNA, 25 bp, Homo sapien
aagtaggaaagcctagctgccccaa

SEQ ID NO: 533949 - DNA, 25 bp, Homo sapien
tcgggtttgactgacattcttccag

SEQ ID NO: 533950 - DNA, 25 bp, Homo sapien
tcagggctagtgctacagaaatccc

SEQ ID NO: 533951 - DNA, 25 bp, Homo sapien
cagaaatcccacttgggtgtgcaca

SEQ ID NO: 533952 - DNA, 25 bp, Homo sapien
gacctccggcgaagatgcatttcgg

SEQ ID NO: 533953 - DNA, 25 bp, Homo sapien
gatcccttattcagatactaaccag

SEQ ID NO: 533954 - DNA, 25 bp, Homo sapien
gaaccagacacgttcaaggtggtat

SEQ ID NO: 533955 - DNA, 25 bp, Homo sapien
tcagatggaaccagacacgttcaag

SEQ ID NO: 533956 - DNA, 25 bp, Homo sapien
ccgttattcccacgtgatcccttat

SEQ ID NO: 533957 - DNA, 25 bp, Homo sapien
tctgaaatttctcacttctttgaat

SEQ ID NO: 533958 - DNA, 25 bp, Homo sapien
gaaatttctcacttctttgaataac

SEQ ID NO: 533959 - DNA, 25 bp, Homo sapien
atttctcacttctttgaataaccat

SEQ ID NO: 533960 - DNA, 25 bp, Homo sapien
ttgcacgtcattctgaaatttctca

SEQ ID NO: 533961 - DNA, 25 bp, Homo sapien
cagatagatttactgcatgaggatc

SEQ ID NO: 533962 - DNA, 25 bp, Homo sapien
gatttgtactcctctcagatagatt

SEQ ID NO: 533963 - DNA, 25 bp, Homo sapien
gatttggttcttgcagtcctatgtt

SEQ ID NO: 533964 - DNA, 25 bp, Homo sapien
gagccaactgttggagggagtttta

SEQ ID NO: 533965 - DNA, 25 bp, Homo sapien
gatcgttcttataaaaggaagtgtc

SEQ ID NO: 533966 - DNA, 25 bp, Homo sapien
aagcacaaggtttagaagcaactct

SEQ ID NO: 533967 - DNA, 25 bp, Homo sapien
tacatgattggtacttcatagctca

SEQ ID NO: 533968 - DNA, 25 bp, Homo sapien
ggaagtgtccagtaagtattaatag

SEQ ID NO: 533969 - DNA, 25 bp, Homo sapien
gctataatcccgaaggctacagatg

SEQ ID NO: 533970 - DNA, 25 bp, Homo sapien
tctgctgactcaattaggaaggtaa

SEQ ID NO: 533971 - DNA, 25 bp, Homo sapien
tacagatgccactggtcagactgct

SEQ ID NO: 533972 - DNA, 25 bp, Homo sapien
tctggttctcttaacagtgctggct

SEQ ID NO: 533973 - DNA, 25 bp, Homo sapien
ctgtaagatctgtctcaaggaagca

SEQ ID NO: 533974 - DNA, 25 bp, Homo sapien
tgtaagatctgtctcaaggaagcac

SEQ ID NO: 533975 - DNA, 25 bp, Homo sapien
gtaagatctgtctcaaggaagcaca

SEQ ID NO: 533976 - DNA, 25 bp, Homo sapien
tgactgcagatgtttctaaactcaa

SEQ ID NO: 533977 - DNA, 25 bp, Homo sapien
atgactgcagatgtttctaaactca

SEQ ID NO: 533978 - DNA, 25 bp, Homo sapien
actgcagatgtttctaaactcaaca

SEQ ID NO: 533979 - DNA, 25 bp, Homo sapien
cagccatgtagtgtgggagacaaga

SEQ ID NO: 533980 - DNA, 25 bp, Homo sapien
gcaggaattatagagctgtagctgc

SEQ ID NO: 533981 - DNA, 25 bp, Homo sapien
aagctcagccatgtagtgtgggaga

SEQ ID NO: 533982 - DNA, 25 bp, Homo sapien
gaattatagagctgtagctgctccg

SEQ ID NO: 533983 - DNA, 25 bp, Homo sapien
aaccgccacactgtgtacttttctg

SEQ ID NO: 533984 - DNA, 25 bp, Homo sapien
tgtgagggatgtctctcggaaaaac

SEQ ID NO: 533985 - DNA, 25 bp, Homo sapien
gagggatgtctctcggaaaaaccgc

SEQ ID NO: 533986 - DNA, 25 bp, Homo sapien
gatgtctctcggaaaaaccgccaca

SEQ ID NO: 533987 - DNA, 25 bp, Homo sapien
acatctggaattcttgaacaactga

SEQ ID NO: 533988 - DNA, 25 bp, Homo sapien
aacaactgaaaatgcacctgcaaaa

SEQ ID NO: 533989 - DNA, 25 bp, Homo sapien
acacatctggaattcttgaacaact

SEQ ID NO: 533990 - DNA, 25 bp, Homo sapien
acaactgaaaatgcacctgcaaaat

SEQ ID NO: 533991 - DNA, 25 bp, Homo sapien
cagcaaggactatcaaacatgaggg

SEQ ID NO: 533992 - DNA, 25 bp, Homo sapien
tcattgaaacgggtgagctcacagg

SEQ ID NO: 533993 - DNA, 25 bp, Homo sapien
aattggtaccagaatgcgctcattg

SEQ ID NO: 533994 - DNA, 25 bp, Homo sapien
gctgctcttgcaccacagaatgaga

SEQ ID NO: 533995 - DNA, 25 bp, Homo sapien
caccaaagagatctgatgttgggga

SEQ ID NO: 533996 - DNA, 25 bp, Homo sapien
cgtggtaagtaacaccaccaaagag

SEQ ID NO: 533997 - DNA, 25 bp, Homo sapien
gtaagtaacaccaccaaagagatct

SEQ ID NO: 533998 - DNA, 25 bp, Homo sapien
tggtaagtaacaccaccaaagagat

SEQ ID NO: 533999 - DNA, 25 bp, Homo sapien
tgtgaatggctaccacactgcagcc

SEQ ID NO: 534000 - DNA, 25 bp, Homo sapien
gctgtagtgttatgatcgcacctgt

SEQ ID NO: 534001 - DNA, 25 bp, Homo sapien
aggctgtagtgttatgatcgcacct

SEQ ID NO: 534002 - DNA, 25 bp, Homo sapien
ggtacaggtttgtagttgcagctac

SEQ ID NO: 534003 - DNA, 25 bp, Homo sapien
gggccagcgcgctgcgcatcgccat

SEQ ID NO: 534004 - DNA, 25 bp, Homo sapien
aatgggaaaggaccgctcctgctgg

SEQ ID NO: 534005 - DNA, 25 bp, Homo sapien
cccagcagcgtctgctccacgctga

SEQ ID NO: 534006 - DNA, 25 bp, Homo sapien
acgctgaccagctccgaagtcgagt

SEQ ID NO: 534007 - DNA, 25 bp, Homo sapien
gggggaagggcagcaactcggcgcc

SEQ ID NO: 534008 - DNA, 25 bp, Homo sapien
gggaagggcagcaactcggcgcccc

SEQ ID NO: 534009 - DNA, 25 bp, Homo sapien
ccgggggaagggcagcaactcggcg

SEQ ID NO: 534010 - DNA, 25 bp, Homo sapien
ggccagggtgcagggcccgcggtcc

SEQ ID NO: 534011 - DNA, 25 bp, Homo sapien
tcagcgcctcgcactacctcctcct

SEQ ID NO: 534012 - DNA, 25 bp, Homo sapien
ctcagcgcctcgcactacctcctcc

SEQ ID NO: 534013 - DNA, 25 bp, Homo sapien
ctggggagttcgcccgcgccgcggt

SEQ ID NO: 534014 - DNA, 25 bp, Homo sapien
tggggagttcgcccgcgccgcggtc

SEQ ID NO: 534015 - DNA, 25 bp, Homo sapien
gccgggcccgcggcgggcctgagcg

SEQ ID NO: 534016 - DNA, 25 bp, Homo sapien
cgggcccgcggcgggcctgagcgac

SEQ ID NO: 534017 - DNA, 25 bp, Homo sapien
cggccgggcccgcggcgggcctgag

SEQ ID NO: 534018 - DNA, 25 bp, Homo sapien
ccacgcccccgccccgctcctcgcg

SEQ ID NO: 534019 - DNA, 25 bp, Homo sapien
atggaggccactaagggcgcagggc

SEQ ID NO: 534020 - DNA, 25 bp, Homo sapien
ggaggccactaagggcgcagggctg

SEQ ID NO: 534021 - DNA, 25 bp, Homo sapien
ctgatggaggccactaagggcgcag

SEQ ID NO: 534022 - DNA, 25 bp, Homo sapien
ccactaagggcgcagggctggccat

SEQ ID NO: 534023 - DNA, 25 bp, Homo sapien
ctgaatcggtgacccgtgctggcct

SEQ ID NO: 534024 - DNA, 25 bp, Homo sapien
caaggtcacattttctaacccgcgg

SEQ ID NO: 534025 - DNA, 25 bp, Homo sapien
tctcacagcgtgtgtggtcggcccc

SEQ ID NO: 534026 - DNA, 25 bp, Homo sapien
ggcgcgctccgcgtgcaggtggagc

SEQ ID NO: 534027 - DNA, 25 bp, Homo sapien
gcgaaatgctgagcgttgcttcttc

SEQ ID NO: 534028 - DNA, 25 bp, Homo sapien
gcgctgctcggtgtgcacttgaaaa

SEQ ID NO: 534029 - DNA, 25 bp, Homo sapien
acccaaagctgcctgaagcgctgct

SEQ ID NO: 534030 - DNA, 25 bp, Homo sapien
tgaagtccgaatcaggcgtgttctg

SEQ ID NO: 534031 - DNA, 25 bp, Homo sapien
agctctttgggtaactctgatggga

SEQ ID NO: 534032 - DNA, 25 bp, Homo sapien
cagtctcaacaattgtgggaaaagc

SEQ ID NO: 534033 - DNA, 25 bp, Homo sapien
ctctttgggtaactctgatgggagc

SEQ ID NO: 534034 - DNA, 25 bp, Homo sapien
tctacagtctcaacaattgtgggaa

SEQ ID NO: 534035 - DNA, 25 bp, Homo sapien
gtgaagctggtgaagtttaatgaag

SEQ ID NO: 534036 - DNA, 25 bp, Homo sapien
cttcccagaccttgtgaagctggtg

SEQ ID NO: 534037 - DNA, 25 bp, Homo sapien
ccttgtgaagctggtgaagtttaat

SEQ ID NO: 534038 - DNA, 25 bp, Homo sapien
ccagaccttgtgaagctggtgaagt

SEQ ID NO: 534039 - DNA, 25 bp, Homo sapien
tgatgtacatttgcgcctttgcaat

SEQ ID NO: 534040 - DNA, 25 bp, Homo sapien
tctgatgtacatttgcgcctttgca

SEQ ID NO: 534041 - DNA, 25 bp, Homo sapien
tacatttgcgcctttgcaatttgtc

SEQ ID NO: 534042 - DNA, 25 bp, Homo sapien
tgtacatttgcgcctttgcaatttg

SEQ ID NO: 534043 - DNA, 25 bp, Homo sapien
tgaggatgggaccacttgctaaacc

SEQ ID NO: 534044 - DNA, 25 bp, Homo sapien
caacagagtcttgcagtgagacaga

SEQ ID NO: 534045 - DNA, 25 bp, Homo sapien
tgatcagacatcacccagggtggtt

SEQ ID NO: 534046 - DNA, 25 bp, Homo sapien
tgtacagaagtgatcgtccaaacca

SEQ ID NO: 534047 - DNA, 25 bp, Homo sapien
tcagtgaggatctagtcaatttccc

SEQ ID NO: 534048 - DNA, 25 bp, Homo sapien
tatgacccagttaagagattggctg

SEQ ID NO: 534049 - DNA, 25 bp, Homo sapien
gattggctgttacatataatagtca

SEQ ID NO: 534050 - DNA, 25 bp, Homo sapien
gccaaattccatgctcaccattact

SEQ ID NO: 534051 - DNA, 25 bp, Homo sapien
gctagacatatagtgaaacttcaga

SEQ ID NO: 534052 - DNA, 25 bp, Homo sapien
catgtggtatatgacagaagcagca

SEQ ID NO: 534053 - DNA, 25 bp, Homo sapien
caccaaagacaagtctagaaactta

SEQ ID NO: 534054 - DNA, 25 bp, Homo sapien
aaattagtagtcttagccaagtgtg

SEQ ID NO: 534055 - DNA, 25 bp, Homo sapien
ggccaatatagggaaatcttgtctc

SEQ ID NO: 534056 - DNA, 25 bp, Homo sapien
gcctggccaatatagggaaatcttg

SEQ ID NO: 534057 - DNA, 25 bp, Homo sapien
ctggccaatatagggaaatcttgtc

SEQ ID NO: 534058 - DNA, 25 bp, Homo sapien
gccaatatagggaaatcttgtctct

SEQ ID NO: 534059 - DNA, 25 bp, Homo sapien
ttctcagtgactctcttcaacacag

SEQ ID NO: 534060 - DNA, 25 bp, Homo sapien
ttcaacacagcgtcacataacatga

SEQ ID NO: 534061 - DNA, 25 bp, Homo sapien
aacacagcgtcacataacatgatca

SEQ ID NO: 534062 - DNA, 25 bp, Homo sapien
gactctcttcaacacagcgtcacat

SEQ ID NO: 534063 - DNA, 25 bp, Homo sapien
gtgttcctcatgactccagtgagtt

SEQ ID NO: 534064 - DNA, 25 bp, Homo sapien
tgagccaataagtgttcctcatgac

SEQ ID NO: 534065 - DNA, 25 bp, Homo sapien
gtcacttgcaatcaatattaccctg

SEQ ID NO: 534066 - DNA, 25 bp, Homo sapien
gcaatcaatattaccctgcctaata

SEQ ID NO: 534067 - DNA, 25 bp, Homo sapien
agcattcatggcatcgagaattttc

SEQ ID NO: 534068 - DNA, 25 bp, Homo sapien
tccaaagagtgatgactattcaggg

SEQ ID NO: 534069 - DNA, 25 bp, Homo sapien
tcacttatgcatctacagtaatgtg

SEQ ID NO: 534070 - DNA, 25 bp, Homo sapien
tgtgtgattaccacagagtgtactt

SEQ ID NO: 534071 - DNA, 25 bp, Homo sapien
cacccaaatagtgtagcctactaca

SEQ ID NO: 534072 - DNA, 25 bp, Homo sapien
taacacggactagctccaggtgagt

SEQ ID NO: 534073 - DNA, 25 bp, Homo sapien
tcttttagtgatgaggacggagtcc

SEQ ID NO: 534074 - DNA, 25 bp, Homo sapien
gctaagagttgcattcggattccga

SEQ ID NO: 534075 - DNA, 25 bp, Homo sapien
tattctgagcccaaaactgtgcacc

SEQ ID NO: 534076 - DNA, 25 bp, Homo sapien
tgtgatcctactgggttggaaccag

SEQ ID NO: 534077 - DNA, 25 bp, Homo sapien
gaaccagggatccagtaggctcgaa

SEQ ID NO: 534078 - DNA, 25 bp, Homo sapien
gacggtgcgcagttttaagaaagca

SEQ ID NO: 534079 - DNA, 25 bp, Homo sapien
taggctcgaagtggcctcagacggt

SEQ ID NO: 534080 - DNA, 25 bp, Homo sapien
ggagggaagcgggatgggagtcgcg

SEQ ID NO: 534081 - DNA, 25 bp, Homo sapien
tcgcggttaggccaagggtagttca

SEQ ID NO: 534082 - DNA, 25 bp, Homo sapien
tcaaagcgattcagcaggatgatga

SEQ ID NO: 534083 - DNA, 25 bp, Homo sapien
aggatgatgaccacaggagtgctgg

SEQ ID NO: 534084 - DNA, 25 bp, Homo sapien
tcttgtacaccgaactcctgaccat

SEQ ID NO: 534085 - DNA, 25 bp, Homo sapien
tcttcccttaataagctgcagcctg

SEQ ID NO: 534086 - DNA, 25 bp, Homo sapien
tcaatattgcctaacttttggaagt

SEQ ID NO: 534087 - DNA, 25 bp, Homo sapien
tattcaatctctagaggtttggcag

SEQ ID NO: 534088 - DNA, 25 bp, Homo sapien
gagatcaggcacaatgactcatgcc

SEQ ID NO: 534089 - DNA, 25 bp, Homo sapien
aaagacttactataatcaagaaaat

SEQ ID NO: 534090 - DNA, 25 bp, Homo sapien
aaaatgtggagatcaggcacaatga

SEQ ID NO: 534091 - DNA, 25 bp, Homo sapien
gtggagatcaggcacaatgactcat

SEQ ID NO: 534092 - DNA, 25 bp, Homo sapien
gaaactctaaaaagcagagcgcctc

SEQ ID NO: 534093 - DNA, 25 bp, Homo sapien
cagaagcctcaggagccgatgcaat

SEQ ID NO: 534094 - DNA, 25 bp, Homo sapien
aaccaaggctcgagaactacgtgaa

SEQ ID NO: 534095 - DNA, 25 bp, Homo sapien
tcgagaactacgtgaagaatgcaga

SEQ ID NO: 534096 - DNA, 25 bp, Homo sapien
gccacacggccagtggtgtaaaacc

SEQ ID NO: 534097 - DNA, 25 bp, Homo sapien
cggccagtggtgtaaaacctctgca

SEQ ID NO: 534098 - DNA, 25 bp, Homo sapien
ctgggagccctggtcgcctttgtcc

SEQ ID NO: 534099 - DNA, 25 bp, Homo sapien
tctccatgtggagcgtaattgcctg

SEQ ID NO: 534100 - DNA, 25 bp, Homo sapien
taagaagttttgagctgagaaatga

SEQ ID NO: 534101 - DNA, 25 bp, Homo sapien
gatgatgaggaagagacacggctta

SEQ ID NO: 534102 - DNA, 25 bp, Homo sapien
gagacacggcttaagaagttttgag

SEQ ID NO: 534103 - DNA, 25 bp, Homo sapien
tttgctgccacagaactaagtaggg

SEQ ID NO: 534104 - DNA, 25 bp, Homo sapien
gtcggctgtctccatggagtcccca

SEQ ID NO: 534105 - DNA, 25 bp, Homo sapien
gaaaccagacggcaaagtgtcattt

SEQ ID NO: 534106 - DNA, 25 bp, Homo sapien
tccccacagggatgatttcatcagg

SEQ ID NO: 534107 - DNA, 25 bp, Homo sapien
tttgtcggagctgaaggctgtcgcc

SEQ ID NO: 534108 - DNA, 25 bp, Homo sapien
acatttttctctcttctagcctgac

SEQ ID NO: 534109 - DNA, 25 bp, Homo sapien
agcacatttttctctcttctagcct

SEQ ID NO: 534110 - DNA, 25 bp, Homo sapien
catagcacatttttctctcttctag

SEQ ID NO: 534111 - DNA, 25 bp, Homo sapien
tcatagcacatttttctctcttcta

SEQ ID NO: 534112 - DNA, 25 bp, Homo sapien
cacttgtatcttaactggatcttcc

SEQ ID NO: 534113 - DNA, 25 bp, Homo sapien
tctactcctatttcctttaaattca

SEQ ID NO: 534114 - DNA, 25 bp, Homo sapien
tcttaactggatcttccatctcctc

SEQ ID NO: 534115 - DNA, 25 bp, Homo sapien
tccacttctactcctatttccttta

SEQ ID NO: 534116 - DNA, 25 bp, Homo sapien
ctgtaccgctcccacttgcttccat

SEQ ID NO: 534117 - DNA, 25 bp, Homo sapien
ggactggcctttgctctgtgtggtc

SEQ ID NO: 534118 - DNA, 25 bp, Homo sapien
agttttcccagcgttcaccctcatc

SEQ ID NO: 534119 - DNA, 25 bp, Homo sapien
gtgtggtctccacttgtgcagagcc

SEQ ID NO: 534120 - DNA, 25 bp, Homo sapien
gaaaaacacattaacagcggcctga

SEQ ID NO: 534121 - DNA, 25 bp, Homo sapien
caacaggaggatcagttaggagaca

SEQ ID NO: 534122 - DNA, 25 bp, Homo sapien
tccagaggaacaattaggagttgct

SEQ ID NO: 534123 - DNA, 25 bp, Homo sapien
ttaacctgccatgaacccagcaagc

SEQ ID NO: 534124 - DNA, 25 bp, Homo sapien
tcctgacaggtcatggctactgatg

SEQ ID NO: 534125 - DNA, 25 bp, Homo sapien
aagcaggttggtctctgaggagtcc

SEQ ID NO: 534126 - DNA, 25 bp, Homo sapien
caagtcagatggaatggtgtgccac

SEQ ID NO: 534127 - DNA, 25 bp, Homo sapien
aagcaagtcttgaacgtccacccag

SEQ ID NO: 534128 - DNA, 25 bp, Homo sapien
catgatataggagacctagctagac

SEQ ID NO: 534129 - DNA, 25 bp, Homo sapien
agcatgatataggagacctagctag

SEQ ID NO: 534130 - DNA, 25 bp, Homo sapien
taagcatgatataggagacctagct

SEQ ID NO: 534131 - DNA, 25 bp, Homo sapien
ctaagcatgatataggagacctagc

SEQ ID NO: 534132 - DNA, 25 bp, Homo sapien
gggatcagctgctgactgtcggcat

SEQ ID NO: 534133 - DNA, 25 bp, Homo sapien
tgactgtcggcatagctcatgacgg

SEQ ID NO: 534134 - DNA, 25 bp, Homo sapien
catagctcatgacggcagcagttct

SEQ ID NO: 534135 - DNA, 25 bp, Homo sapien
gcatctgctgcgtttctgtcgggga

SEQ ID NO: 534136 - DNA, 25 bp, Homo sapien
aggacggttgcatgagtgggcttca

SEQ ID NO: 534137 - DNA, 25 bp, Homo sapien
ctgcaaaaaaccgtgagaggaagga

SEQ ID NO: 534138 - DNA, 25 bp, Homo sapien
tcatggctgccgaagtgggagactt

SEQ ID NO: 534139 - DNA, 25 bp, Homo sapien
ggatgcctctgaacatcggctgccc

SEQ ID NO: 534140 - DNA, 25 bp, Homo sapien
ggctgaaggacatttaacgtgtttc

SEQ ID NO: 534141 - DNA, 25 bp, Homo sapien
tgcccatcatgtgaaggactggatg

SEQ ID NO: 534142 - DNA, 25 bp, Homo sapien
ggcaggtttcccacaggtgcccatc

SEQ ID NO: 534143 - DNA, 25 bp, Homo sapien
ttccagctgttggatgtcgtggtag

SEQ ID NO: 534144 - DNA, 25 bp, Homo sapien
gaggctcatttgaggaagagctctc

SEQ ID NO: 534145 - DNA, 25 bp, Homo sapien
actgtcttgagaacgaagtggagga

SEQ ID NO: 534146 - DNA, 25 bp, Homo sapien
ctagaacgaggaaatgcactgtctt

SEQ ID NO: 534147 - DNA, 25 bp, Homo sapien
gagctctcctggacactatcctttc

SEQ ID NO: 534148 - DNA, 25 bp, Homo sapien
aatcactgaagtgccctcgctgctg

SEQ ID NO: 534149 - DNA, 25 bp, Homo sapien
caagaaagaccctgcagggcccttt

SEQ ID NO: 534150 - DNA, 25 bp, Homo sapien
tggagtggggcacaagaaagaccct

SEQ ID NO: 534151 - DNA, 25 bp, Homo sapien
catagttcttaatgctgactgcaca

SEQ ID NO: 534152 - DNA, 25 bp, Homo sapien
gaaccctcagtgaacgagtgggaga

SEQ ID NO: 534153 - DNA, 25 bp, Homo sapien
ctctaagaagtgtgggaaccctcag

SEQ ID NO: 534154 - DNA, 25 bp, Homo sapien
cagtgtggggttacagccaggcaca

SEQ ID NO: 534155 - DNA, 25 bp, Homo sapien
ccctctccaatgatcacgtgatatg

SEQ ID NO: 534156 - DNA, 25 bp, Homo sapien
gaaacgcccagagaagaaccttgaa

SEQ ID NO: 534157 - DNA, 25 bp, Homo sapien
atctatcggcccagctcaaagaacg

SEQ ID NO: 534158 - DNA, 25 bp, Homo sapien
gaaccttgaagactaatgtatgtag

SEQ ID NO: 534159 - DNA, 25 bp, Homo sapien
taatgtatgtagaactcttcagctg

SEQ ID NO: 534160 - DNA, 25 bp, Homo sapien
ataataaccaggatgcaagagaaga

SEQ ID NO: 534161 - DNA, 25 bp, Homo sapien
ccaggatgcaagagaagagtgttca

SEQ ID NO: 534162 - DNA, 25 bp, Homo sapien
gcttggtggtgggcaaggatgcttt

SEQ ID NO: 534163 - DNA, 25 bp, Homo sapien
taaccaggatgcaagagaagagtgt

SEQ ID NO: 534164 - DNA, 25 bp, Homo sapien
tggggttttagatctccccatgatc

SEQ ID NO: 534165 - DNA, 25 bp, Homo sapien
gatcaactggggttttagatctccc

SEQ ID NO: 534166 - DNA, 25 bp, Homo sapien
tcacttcaatttcacccctctcaat

SEQ ID NO: 534167 - DNA, 25 bp, Homo sapien
ccttgtgatcaactggggttttaga

SEQ ID NO: 534168 - DNA, 25 bp, Homo sapien
aagtgcaccatataccccatgcttg

SEQ ID NO: 534169 - DNA, 25 bp, Homo sapien
tgctcatcctaactacccaagcttt

SEQ ID NO: 534170 - DNA, 25 bp, Homo sapien
tttctgccacgtaagactcttgggt

SEQ ID NO: 534171 - DNA, 25 bp, Homo sapien
gactcttgggtatcaacactcttct

SEQ ID NO: 534172 - DNA, 25 bp, Homo sapien
ctccatcgagccttcccttgccctt

SEQ ID NO: 534173 - DNA, 25 bp, Homo sapien
gccaggttggtagagagttcagacc

SEQ ID NO: 534174 - DNA, 25 bp, Homo sapien
ctcggcactccatcgagccttccct

SEQ ID NO: 534175 - DNA, 25 bp, Homo sapien
ttggccaggttggtagagagttcag

SEQ ID NO: 534176 - DNA, 25 bp, Homo sapien
ccacctctgggccttgctccattgg

SEQ ID NO: 534177 - DNA, 25 bp, Homo sapien
gctccattggccaccccacgcttat

SEQ ID NO: 534178 - DNA, 25 bp, Homo sapien
cacctctgggccttgctccattggc

SEQ ID NO: 534179 - DNA, 25 bp, Homo sapien
ggccaccccacgcttatcttcatct

SEQ ID NO: 534180 - DNA, 25 bp, Homo sapien
tgttccctgaactaaactatatgct

SEQ ID NO: 534181 - DNA, 25 bp, Homo sapien
tatgctacagttagaagctcaacta

SEQ ID NO: 534182 - DNA, 25 bp, Homo sapien
gcctttgtagcatgacatcagccat

SEQ ID NO: 534183 - DNA, 25 bp, Homo sapien
tatatgctccttgacagtaaaaact

SEQ ID NO: 534184 - DNA, 25 bp, Homo sapien
tgaggtgcactttgttgggaagccc

SEQ ID NO: 534185 - DNA, 25 bp, Homo sapien
taagactggtccagtatggatcccc

SEQ ID NO: 534186 - DNA, 25 bp, Homo sapien
catgactttccatcctagaagctgt

SEQ ID NO: 534187 - DNA, 25 bp, Homo sapien
caaacaagcagtaccgtggcatctt

SEQ ID NO: 534188 - DNA, 25 bp, Homo sapien
ggaagcttgcagtcaatcgtaggaa

SEQ ID NO: 534189 - DNA, 25 bp, Homo sapien
cgtaggaaaaccttgagcaccgcag

SEQ ID NO: 534190 - DNA, 25 bp, Homo sapien
gagcagatgtctcgctagtggccac

SEQ ID NO: 534191 - DNA, 25 bp, Homo sapien
tatcttacggcatcacggtgcctgg

SEQ ID NO: 534192 - DNA, 25 bp, Homo sapien
tggtacacctcctaccaccatataa

SEQ ID NO: 534193 - DNA, 25 bp, Homo sapien
ctttgagcatggtttccaataggca

SEQ ID NO: 534194 - DNA, 25 bp, Homo sapien
aacaggattcgtcacttcctttgca

SEQ ID NO: 534195 - DNA, 25 bp, Homo sapien
gatgggttctccagtaacaggattc

SEQ ID NO: 534196 - DNA, 25 bp, Homo sapien
gactgcgtgcacactggttaatctg

SEQ ID NO: 534197 - DNA, 25 bp, Homo sapien
tgtataggttcacaggcagtacaga

SEQ ID NO: 534198 - DNA, 25 bp, Homo sapien
cttggagtacatggaattcagcacg

SEQ ID NO: 534199 - DNA, 25 bp, Homo sapien
tacatcgctgaaaagaatcgtgcag

SEQ ID NO: 534200 - DNA, 25 bp, Homo sapien
gcttcggagagcacaggtacaccat

SEQ ID NO: 534201 - DNA, 25 bp, Homo sapien
gctggttcaggaggatgagatccct

SEQ ID NO: 534202 - DNA, 25 bp, Homo sapien
ggttggacagctctatctcagccag

SEQ ID NO: 534203 - DNA, 25 bp, Homo sapien
tccctcagctggttggccacgtgtt

SEQ ID NO: 534204 - DNA, 25 bp, Homo sapien
gactgttgataaatctgcggatgct

SEQ ID NO: 534205 - DNA, 25 bp, Homo sapien
tgagtgtagtccgactttgccatgc

SEQ ID NO: 534206 - DNA, 25 bp, Homo sapien
tggagtcctggtacgtacttctgaa

SEQ ID NO: 534207 - DNA, 25 bp, Homo sapien
gctacaggcatcatttctcttcgtg

SEQ ID NO: 534208 - DNA, 25 bp, Homo sapien
tccagagtctctcaggataaattgg

SEQ ID NO: 534209 - DNA, 25 bp, Homo sapien
ggctcaaaggtgttcatgagatgcc

SEQ ID NO: 534210 - DNA, 25 bp, Homo sapien
gaaaggaaaagcgttgcagaatgtc

SEQ ID NO: 534211 - DNA, 25 bp, Homo sapien
tgtggaaaggaaaagcgttgcagaa

SEQ ID NO: 534212 - DNA, 25 bp, Homo sapien
tgactatgcttctcacaacatccca

SEQ ID NO: 534213 - DNA, 25 bp, Homo sapien
ttttcacaggacaagcagagacatt

SEQ ID NO: 534214 - DNA, 25 bp, Homo sapien
tccttcatcttgaggaaagctgcct

SEQ ID NO: 534215 - DNA, 25 bp, Homo sapien
tttccaaacatgactatgcttctca

SEQ ID NO: 534216 - DNA, 25 bp, Homo sapien
ttaacttccgagatcagtcacgttc

SEQ ID NO: 534217 - DNA, 25 bp, Homo sapien
cttccgagatcagtcacgttcaggg

SEQ ID NO: 534218 - DNA, 25 bp, Homo sapien
acttccgagatcagtcacgttcagg

SEQ ID NO: 534219 - DNA, 25 bp, Homo sapien
tgcttaacttccgagatcagtcacg

SEQ ID NO: 534220 - DNA, 25 bp, Homo sapien
tgccctgactgtcttgtaacctttt

SEQ ID NO: 534221 - DNA, 25 bp, Homo sapien
ttctcatcttcctgtgagccttctg

SEQ ID NO: 534222 - DNA, 25 bp, Homo sapien
tctctccatgccctgactgtcttgt

SEQ ID NO: 534223 - DNA, 25 bp, Homo sapien
ctttctcatcttcctgtgagccttc

SEQ ID NO: 534224 - DNA, 25 bp, Homo sapien
tgtcaagaatgtccatgattacatc

SEQ ID NO: 534225 - DNA, 25 bp, Homo sapien
gtcaagaatgtccatgattacatca

SEQ ID NO: 534226 - DNA, 25 bp, Homo sapien
catgtcaagaatgtccatgattaca

SEQ ID NO: 534227 - DNA, 25 bp, Homo sapien
tcatgtcaagaatgtccatgattac

SEQ ID NO: 534228 - DNA, 25 bp, Homo sapien
acagaccacttctatccgagtagta

SEQ ID NO: 534229 - DNA, 25 bp, Homo sapien
gaccacttctatccgagtagtaatg

SEQ ID NO: 534230 - DNA, 25 bp, Homo sapien
tcctctctccacacgaaacgatggt

SEQ ID NO: 534231 - DNA, 25 bp, Homo sapien
cacgaaacgatggtgcattcatctc

SEQ ID NO: 534232 - DNA, 25 bp, Homo sapien
ctccatgagatttcctcccagtgtc

SEQ ID NO: 534233 - DNA, 25 bp, Homo sapien
gtagcatcctgtcatagccagacat

SEQ ID NO: 534234 - DNA, 25 bp, Homo sapien
tcccagtgtccgtagcatcctgtca

SEQ ID NO: 534235 - DNA, 25 bp, Homo sapien
taagagagtgccaggtaactgtgga

SEQ ID NO: 534236 - DNA, 25 bp, Homo sapien
caaagagtttcaggatggcttccat

SEQ ID NO: 534237 - DNA, 25 bp, Homo sapien
aactttctgacttaacaagcatggg

SEQ ID NO: 534238 - DNA, 25 bp, Homo sapien
ctggaaagagtagagttgggctgtc

SEQ ID NO: 534239 - DNA, 25 bp, Homo sapien
ctgacttaacaagcatgggtcttct

SEQ ID NO: 534240 - DNA, 25 bp, Homo sapien
tgggtttcagctcaaggtactggaa

SEQ ID NO: 534241 - DNA, 25 bp, Homo sapien
cttgttgtgtacccactcggtgtca

SEQ ID NO: 534242 - DNA, 25 bp, Homo sapien
ttgttgtgtacccactcggtgtcag

SEQ ID NO: 534243 - DNA, 25 bp, Homo sapien
atttcttctgtaggacagatgaaac

SEQ ID NO: 534244 - DNA, 25 bp, Homo sapien
gatttcttctgtaggacagatgaaa

SEQ ID NO: 534245 - DNA, 25 bp, Homo sapien
tgccaggcctcgttggcaactctgg

SEQ ID NO: 534246 - DNA, 25 bp, Homo sapien
ctctgtggctccaagagagcaacat

SEQ ID NO: 534247 - DNA, 25 bp, Homo sapien
ctgccaggcctcgttggcaactctg

SEQ ID NO: 534248 - DNA, 25 bp, Homo sapien
gccaggcctcgttggcaactctggc

SEQ ID NO: 534249 - DNA, 25 bp, Homo sapien
ccagaatgttgcaggcctcttggat

SEQ ID NO: 534250 - DNA, 25 bp, Homo sapien
gatgacgtcatcatacattgtgtag

SEQ ID NO: 534251 - DNA, 25 bp, Homo sapien
tgagcttaatggtgatgacgtcatc

SEQ ID NO: 534252 - DNA, 25 bp, Homo sapien
tgtgtaggtcatgaaggcatcttgt

SEQ ID NO: 534253 - DNA, 25 bp, Homo sapien
ggataaatcgaggtgcagtgaatgc

SEQ ID NO: 534254 - DNA, 25 bp, Homo sapien
gataaatcgaggtgcagtgaatgct

SEQ ID NO: 534255 - DNA, 25 bp, Homo sapien
ctggaggataaatcgaggtgcagtg

SEQ ID NO: 534256 - DNA, 25 bp, Homo sapien
gaggataaatcgaggtgcagtgaat

SEQ ID NO: 534257 - DNA, 25 bp, Homo sapien
tctaggactctagcttctaggacta

SEQ ID NO: 534258 - DNA, 25 bp, Homo sapien
gactagaagctgcttgaattctcct

SEQ ID NO: 534259 - DNA, 25 bp, Homo sapien
tgtgcacgcagttgaggatctagga

SEQ ID NO: 534260 - DNA, 25 bp, Homo sapien
gccccagaaacgcttgtgcacgcag

SEQ ID NO: 534261 - DNA, 25 bp, Homo sapien
tctggacattctcagccacttgcag

SEQ ID NO: 534262 - DNA, 25 bp, Homo sapien
taactgcgagtggaattgatttgcc

SEQ ID NO: 534263 - DNA, 25 bp, Homo sapien
cacctgtcttcgtgctaactgcgag

SEQ ID NO: 534264 - DNA, 25 bp, Homo sapien
tcccaactcagtgtcagaatcccga

SEQ ID NO: 534265 - DNA, 25 bp, Homo sapien
caagagattgcagacaggtgttgat

SEQ ID NO: 534266 - DNA, 25 bp, Homo sapien
cacaagagattgcagacaggtgttg

SEQ ID NO: 534267 - DNA, 25 bp, Homo sapien
acaagagattgcagacaggtgttga

SEQ ID NO: 534268 - DNA, 25 bp, Homo sapien
tcacaagagattgcagacaggtgtt

SEQ ID NO: 534269 - DNA, 25 bp, Homo sapien
ggattgagatgcagcaccaagcgcc

SEQ ID NO: 534270 - DNA, 25 bp, Homo sapien
tcttgtagaaatctgggcagtccac

SEQ ID NO: 534271 - DNA, 25 bp, Homo sapien
cagtccacagtgaaattaggagctc

SEQ ID NO: 534272 - DNA, 25 bp, Homo sapien
tcaggagagaatccacagcgtctcc

SEQ ID NO: 534273 - DNA, 25 bp, Homo sapien
tgtaaacacagtctcgcttgatgcg

SEQ ID NO: 534274 - DNA, 25 bp, Homo sapien
tgaacttcacgtgaatacagtctgt

SEQ ID NO: 534275 - DNA, 25 bp, Homo sapien
cagtctgttctctgttgtgcctggc

SEQ ID NO: 534276 - DNA, 25 bp, Homo sapien
gatgcgtgtcctgtgataagtgatg

SEQ ID NO: 534277 - DNA, 25 bp, Homo sapien
gatggtgatatacagatggtttttt

SEQ ID NO: 534278 - DNA, 25 bp, Homo sapien
tgatatacagatggttttttggtgt

SEQ ID NO: 534279 - DNA, 25 bp, Homo sapien
ggtgatatacagatggttttttggt

SEQ ID NO: 534280 - DNA, 25 bp, Homo sapien
tggtgatatacagatggttttttgg

SEQ ID NO: 534281 - DNA, 25 bp, Homo sapien
caggctgtgtatagtctcatgaaag

SEQ ID NO: 534282 - DNA, 25 bp, Homo sapien
caaacattgacattggcactcgaaa

SEQ ID NO: 534283 - DNA, 25 bp, Homo sapien
tatagctgggttagtacaagcaaca

SEQ ID NO: 534284 - DNA, 25 bp, Homo sapien
tatcctgagtttatccccaacaatg

SEQ ID NO: 534285 - DNA, 25 bp, Homo sapien
ccttagcctagaacatccttggctt

SEQ ID NO: 534286 - DNA, 25 bp, Homo sapien
ctctgttcagttcttagcctgacct

SEQ ID NO: 534287 - DNA, 25 bp, Homo sapien
ggaacaataagaatatcatcccaca

SEQ ID NO: 534288 - DNA, 25 bp, Homo sapien
tcatatgatcaggttcacataaaca

SEQ ID NO: 534289 - DNA, 25 bp, Homo sapien
aatacctcatgctgcgctgaaagcg

SEQ ID NO: 534290 - DNA, 25 bp, Homo sapien
gaagccacaggtctgtttggcactg

SEQ ID NO: 534291 - DNA, 25 bp, Homo sapien
gaaactcaagctctgagagtgtcct

SEQ ID NO: 534292 - DNA, 25 bp, Homo sapien
atcagcccacgcagagaaactcaag

SEQ ID NO: 534293 - DNA, 25 bp, Homo sapien
gagacacgtcaaggaatccagatgg

SEQ ID NO: 534294 - DNA, 25 bp, Homo sapien
gacacgtcaaggaatccagatggag

SEQ ID NO: 534295 - DNA, 25 bp, Homo sapien
tgagacacgtcaaggaatccagatg

SEQ ID NO: 534296 - DNA, 25 bp, Homo sapien
ctgagacacgtcaaggaatccagat

SEQ ID NO: 534297 - DNA, 25 bp, Homo sapien
ggctccaacgcaaagagctctgcat

SEQ ID NO: 534298 - DNA, 25 bp, Homo sapien
gtccgctcccaaagtctttctcgaa

SEQ ID NO: 534299 - DNA, 25 bp, Homo sapien
agtctttctcgaagcagccactgtc

SEQ ID NO: 534300 - DNA, 25 bp, Homo sapien
tgtctcatagtagtcctccccagga

SEQ ID NO: 534301 - DNA, 25 bp, Homo sapien
gatatcctcggagtgtctgcgcggt

SEQ ID NO: 534302 - DNA, 25 bp, Homo sapien
cgtctacagtatgcacagtgtgggc

SEQ ID NO: 534303 - DNA, 25 bp, Homo sapien
ggtgcccgcaggatccagttagaat

SEQ ID NO: 534304 - DNA, 25 bp, Homo sapien
ggtgctccttcgaaactggccgtct

SEQ ID NO: 534305 - DNA, 25 bp, Homo sapien
agtccacatcttcatttggcaggct

SEQ ID NO: 534306 - DNA, 25 bp, Homo sapien
gctctgcaatgatggagtcaaagaa

SEQ ID NO: 534307 - DNA, 25 bp, Homo sapien
tctctctgtatccagctctgcaatg

SEQ ID NO: 534308 - DNA, 25 bp, Homo sapien
cacatcagcactgaactgcgagtat

SEQ ID NO: 534309 - DNA, 25 bp, Homo sapien
catttctgcaaagctcagcagcaat

SEQ ID NO: 534310 - DNA, 25 bp, Homo sapien
cttgccatttctgcaaagctcagca

SEQ ID NO: 534311 - DNA, 25 bp, Homo sapien
ctgcaaagctcagcagcaattacca

SEQ ID NO: 534312 - DNA, 25 bp, Homo sapien
tttctgcaaagctcagcagcaatta

SEQ ID NO: 534313 - DNA, 25 bp, Homo sapien
tggtcattataaaactcgttataaa

SEQ ID NO: 534314 - DNA, 25 bp, Homo sapien
gctggcccagtcaatacatggtcat

SEQ ID NO: 534315 - DNA, 25 bp, Homo sapien
aaagatcgaaagatcttttggatcc

SEQ ID NO: 534316 - DNA, 25 bp, Homo sapien
ctgctggcccagtcaatacatggtc

SEQ ID NO: 534317 - DNA, 25 bp, Homo sapien
caaagcatggggtaacggcattcca

SEQ ID NO: 534318 - DNA, 25 bp, Homo sapien
gcattccagggcaaaggattccttc

SEQ ID NO: 534319 - DNA, 25 bp, Homo sapien
cagccatgaagcctgaacccatcat

SEQ ID NO: 534320 - DNA, 25 bp, Homo sapien
agcagagctttctcccaaagcatgg

SEQ ID NO: 534321 - DNA, 25 bp, Homo sapien
tatttctttgggagtagaccggaca

SEQ ID NO: 534322 - DNA, 25 bp, Homo sapien
tttgggagtagaccggacaggagtc

SEQ ID NO: 534323 - DNA, 25 bp, Homo sapien
atttctttgggagtagaccggacag

SEQ ID NO: 534324 - DNA, 25 bp, Homo sapien
ttctttgggagtagaccggacagga

SEQ ID NO: 534325 - DNA, 25 bp, Homo sapien
gagatattttttgcgcaaggccagc

SEQ ID NO: 534326 - DNA, 25 bp, Homo sapien
tggtccccgaccacatacatggaac

SEQ ID NO: 534327 - DNA, 25 bp, Homo sapien
ggcagtcctgggtgcgcgaatacat

SEQ ID NO: 534328 - DNA, 25 bp, Homo sapien
tgcttcgaatcagcttcactgcggg

SEQ ID NO: 534329 - DNA, 25 bp, Homo sapien
gatttctttctgtgggtaccttcca

SEQ ID NO: 534330 - DNA, 25 bp, Homo sapien
ttctgtgggtaccttccagctgcct

SEQ ID NO: 534331 - DNA, 25 bp, Homo sapien
agctgcctgtgctgccgccacttga

SEQ ID NO: 534332 - DNA, 25 bp, Homo sapien
tctttctgtgggtaccttccagctg

SEQ ID NO: 534333 - DNA, 25 bp, Homo sapien
caccggcttgatcaggtgggtaacc

SEQ ID NO: 534334 - DNA, 25 bp, Homo sapien
tctctaggatcccagggagcaccgg

SEQ ID NO: 534335 - DNA, 25 bp, Homo sapien
atcccagggagcaccggcttgatca

SEQ ID NO: 534336 - DNA, 25 bp, Homo sapien
ggcctctgatctctaggatcccagg

SEQ ID NO: 534337 - DNA, 25 bp, Homo sapien
gggctgagctgactccggttctgaa

SEQ ID NO: 534338 - DNA, 25 bp, Homo sapien
tgggctgagctgactccggttctga

SEQ ID NO: 534339 - DNA, 25 bp, Homo sapien
tgagctgactccggttctgaattct

SEQ ID NO: 534340 - DNA, 25 bp, Homo sapien
gctgagctgactccggttctgaatt

SEQ ID NO: 534341 - DNA, 25 bp, Homo sapien
cagccgttaccggatagcagcccat

SEQ ID NO: 534342 - DNA, 25 bp, Homo sapien
cagggcgttgacaggagctcgcaga

SEQ ID NO: 534343 - DNA, 25 bp, Homo sapien
ctgagcgtcctggaagagcctcgcc

SEQ ID NO: 534344 - DNA, 25 bp, Homo sapien
tgcggtaatggacctcacagccgtt

SEQ ID NO: 534345 - DNA, 25 bp, Homo sapien
ggaggattcagatatccggaccacg

SEQ ID NO: 534346 - DNA, 25 bp, Homo sapien
gaggaggattcagatatccggacca

SEQ ID NO: 534347 - DNA, 25 bp, Homo sapien
caggaggaggattcagatatccgga

SEQ ID NO: 534348 - DNA, 25 bp, Homo sapien
gaggattcagatatccggaccacga

SEQ ID NO: 534349 - DNA, 25 bp, Homo sapien
ctttttgcacagaagcatcagtgag

SEQ ID NO: 534350 - DNA, 25 bp, Homo sapien
tctgcataaagtgacttgtgtaaca

SEQ ID NO: 534351 - DNA, 25 bp, Homo sapien
agaggatttgccatgtagcagtgct

SEQ ID NO: 534352 - DNA, 25 bp, Homo sapien
cataaagtgacttgtgtaacaaaac

SEQ ID NO: 534353 - DNA, 25 bp, Homo sapien
gtaaagtgcagaaccccagagtgat

SEQ ID NO: 534354 - DNA, 25 bp, Homo sapien
caggtgtacggcatgcccaagagta

SEQ ID NO: 534355 - DNA, 25 bp, Homo sapien
tagtatgcccaggaatacagcatgc

SEQ ID NO: 534356 - DNA, 25 bp, Homo sapien
agtatccccaggtgtatggcacgcc

SEQ ID NO: 534357 - DNA, 25 bp, Homo sapien
tatgcccaggtctacagtgtgctca

SEQ ID NO: 534358 - DNA, 25 bp, Homo sapien
tcaccgtcatctaaagtcaaaccaa

SEQ ID NO: 534359 - DNA, 25 bp, Homo sapien
accgtcatctaaagtcaaaccaaga

SEQ ID NO: 534360 - DNA, 25 bp, Homo sapien
cttcaccgtcatctaaagtcaaacc

SEQ ID NO: 534361 - DNA, 25 bp, Homo sapien
atcacttcaccgtcatctaaagtca

SEQ ID NO: 534362 - DNA, 25 bp, Homo sapien
gggcagcacgtctgcaggatcagcc

SEQ ID NO: 534363 - DNA, 25 bp, Homo sapien
tgctccgtgtgaatagcaaagcaag

SEQ ID NO: 534364 - DNA, 25 bp, Homo sapien
gcaaagcaaggacaatccacgccat

SEQ ID NO: 534365 - DNA, 25 bp, Homo sapien
cagcacgtctgcaggatcagccctg

SEQ ID NO: 534366 - DNA, 25 bp, Homo sapien
tcaggcaaaactctatctttaatga

SEQ ID NO: 534367 - DNA, 25 bp, Homo sapien
ttcaggcaaaactctatctttaatg

SEQ ID NO: 534368 - DNA, 25 bp, Homo sapien
caggcaaaactctatctttaatgag

SEQ ID NO: 534369 - DNA, 25 bp, Homo sapien
attcaggcaaaactctatctttaat

SEQ ID NO: 534370 - DNA, 25 bp, Homo sapien
tgagagtgctgcctgcgttgtcctg

SEQ ID NO: 534371 - DNA, 25 bp, Homo sapien
cagggacgatgggagtgaattacca

SEQ ID NO: 534372 - DNA, 25 bp, Homo sapien
atggaccaaggccaatgccacacct

SEQ ID NO: 534373 - DNA, 25 bp, Homo sapien
taccaggggaggttcttgcccaaga

SEQ ID NO: 534374 - DNA, 25 bp, Homo sapien
tgctggaagcagtaaaacagctgca

SEQ ID NO: 534375 - DNA, 25 bp, Homo sapien
ttgctggaagcagtaaaacagctgc

SEQ ID NO: 534376 - DNA, 25 bp, Homo sapien
cttgctggaagcagtaaaacagctg

SEQ ID NO: 534377 - DNA, 25 bp, Homo sapien
ccagctgggcccgtattgaccgttt

SEQ ID NO: 534378 - DNA, 25 bp, Homo sapien
agctgggcccgtattgaccgtttgg

SEQ ID NO: 534379 - DNA, 25 bp, Homo sapien
ccgtattgaccgtttgggcttgctg

SEQ ID NO: 534380 - DNA, 25 bp, Homo sapien
gcccacctcaaaggctcccaggact

SEQ ID NO: 534381 - DNA, 25 bp, Homo sapien
tcagaacattcctactgctatgtga

SEQ ID NO: 534382 - DNA, 25 bp, Homo sapien
catacaccatcaggctgtacgtctc

SEQ ID NO: 534383 - DNA, 25 bp, Homo sapien
actccagctctgtgtcgtttctcag

SEQ ID NO: 534384 - DNA, 25 bp, Homo sapien
accatgcttagaacggtgcactcca

SEQ ID NO: 534385 - DNA, 25 bp, Homo sapien
tggatctgaacgactcgcagtaacc

SEQ ID NO: 534386 - DNA, 25 bp, Homo sapien
attcagtgaaacaactactattgat

SEQ ID NO: 534387 - DNA, 25 bp, Homo sapien
tcgcagtaacccatcaattcagtga

SEQ ID NO: 534388 - DNA, 25 bp, Homo sapien
ccagccagttcttttagtgtgatag

SEQ ID NO: 534389 - DNA, 25 bp, Homo sapien
gttgcagaatctgcaacattctgac

SEQ ID NO: 534390 - DNA, 25 bp, Homo sapien
agcattaagctccttgatttcagaa

SEQ ID NO: 534391 - DNA, 25 bp, Homo sapien
gcattaagctccttgatttcagaac

SEQ ID NO: 534392 - DNA, 25 bp, Homo sapien
cattaagctccttgatttcagaacc

SEQ ID NO: 534393 - DNA, 25 bp, Homo sapien
ctgcatccaaacagcaggtaaaggc

SEQ ID NO: 534394 - DNA, 25 bp, Homo sapien
caaacagcaggtaaaggcacctggc

SEQ ID NO: 534395 - DNA, 25 bp, Homo sapien
gcatccaaacagcaggtaaaggcac

SEQ ID NO: 534396 - DNA, 25 bp, Homo sapien
tccaaacagcaggtaaaggcacctg

SEQ ID NO: 534397 - DNA, 25 bp, Homo sapien
tgcataagctgcacagactatcatg

SEQ ID NO: 534398 - DNA, 25 bp, Homo sapien
atggtatctgtatttatcacacaaa

SEQ ID NO: 534399 - DNA, 25 bp, Homo sapien
gcttcccacgttgtattcatctctg

SEQ ID NO: 534400 - DNA, 25 bp, Homo sapien
tatcatgtcccattctatatgggca

SEQ ID NO: 534401 - DNA, 25 bp, Homo sapien
gaggcggctctcgtgtgcacactta

SEQ ID NO: 534402 - DNA, 25 bp, Homo sapien
cacccaggtgttcgaattggtccca

SEQ ID NO: 534403 - DNA, 25 bp, Homo sapien
acagtcgcgtgcaaccaggagtgca

SEQ ID NO: 534404 - DNA, 25 bp, Homo sapien
tgggatgccgctcagacgtgtactg

SEQ ID NO: 534405 - DNA, 25 bp, Homo sapien
tctcttcccttgcatgtctgcatct

SEQ ID NO: 534406 - DNA, 25 bp, Homo sapien
tcagagcacaattcctggatccctg

SEQ ID NO: 534407 - DNA, 25 bp, Homo sapien
tccctctccaatggagggaacatct

SEQ ID NO: 534408 - DNA, 25 bp, Homo sapien
cagagcacaattcctggatccctgc

SEQ ID NO: 534409 - DNA, 25 bp, Homo sapien
gaagtgtgttaacagttggaacagt

SEQ ID NO: 534410 - DNA, 25 bp, Homo sapien
tgcgaagtgtgttaacagttggaac

SEQ ID NO: 534411 - DNA, 25 bp, Homo sapien
ctgcgaagtgtgttaacagttggaa

SEQ ID NO: 534412 - DNA, 25 bp, Homo sapien
cgaagtgtgttaacagttggaacag

SEQ ID NO: 534413 - DNA, 25 bp, Homo sapien
tctttttgacccagcataaaaatct

SEQ ID NO: 534414 - DNA, 25 bp, Homo sapien
cctctctcgtggcctgtaatgtaaa

SEQ ID NO: 534415 - DNA, 25 bp, Homo sapien
tctctcgtggcctgtaatgtaaatt

SEQ ID NO: 534416 - DNA, 25 bp, Homo sapien
ctctttttgacccagcataaaaatc

SEQ ID NO: 534417 - DNA, 25 bp, Homo sapien
ctataggtcggtcacagtagagaga

SEQ ID NO: 534418 - DNA, 25 bp, Homo sapien
aatcaacccgagcttctctgaaccg

SEQ ID NO: 534419 - DNA, 25 bp, Homo sapien
ctgaagcaagggccggccagaatca

SEQ ID NO: 534420 - DNA, 25 bp, Homo sapien
tctctgaaccgtgagctgcctatag

SEQ ID NO: 534421 - DNA, 25 bp, Homo sapien
agcagctcctttttgtgcccctccc

SEQ ID NO: 534422 - DNA, 25 bp, Homo sapien
tcctctgtccccgtccagatccggg

SEQ ID NO: 534423 - DNA, 25 bp, Homo sapien
tgcacttcgctgacttgtcctctgt

SEQ ID NO: 534424 - DNA, 25 bp, Homo sapien
tcatggaactgcacttcgctgactt

SEQ ID NO: 534425 - DNA, 25 bp, Homo sapien
tggaactgcacttcgctgacttgtc

SEQ ID NO: 534426 - DNA, 25 bp, Homo sapien
gtcctggcacaacagtcatgtttat

SEQ ID NO: 534427 - DNA, 25 bp, Homo sapien
gcagccctggatcgggttctccata

SEQ ID NO: 534428 - DNA, 25 bp, Homo sapien
tacatttaagaccatgtcctggcac

SEQ ID NO: 534429 - DNA, 25 bp, Homo sapien
gtacttgagcatgcaacttccagcc

SEQ ID NO: 534430 - DNA, 25 bp, Homo sapien
cagtgagacagttctgggggccagt

SEQ ID NO: 534431 - DNA, 25 bp, Homo sapien
tgagacagttctgggggccagttct

SEQ ID NO: 534432 - DNA, 25 bp, Homo sapien
tcagtgagacagttctgggggccag

SEQ ID NO: 534433 - DNA, 25 bp, Homo sapien
gacagttctgggggccagttctcac

SEQ ID NO: 534434 - DNA, 25 bp, Homo sapien
cggacatggggttctggcctgtctc

SEQ ID NO: 534435 - DNA, 25 bp, Homo sapien
tctgaaggccctttgcaactccagg

SEQ ID NO: 534436 - DNA, 25 bp, Homo sapien
gggttcttccagatcctgcggacat

SEQ ID NO: 534437 - DNA, 25 bp, Homo sapien
aaggccctttgcaactccagggtgg

SEQ ID NO: 534438 - DNA, 25 bp, Homo sapien
ccgcactgattgtctcttgtcttta

SEQ ID NO: 534439 - DNA, 25 bp, Homo sapien
tcctgcccgcactgattgtctcttg

SEQ ID NO: 534440 - DNA, 25 bp, Homo sapien
aaatcaagagtccccaaaccacact

SEQ ID NO: 534441 - DNA, 25 bp, Homo sapien
tgcccgcactgattgtctcttgtct

SEQ ID NO: 534442 - DNA, 25 bp, Homo sapien
ggaattggtatgttgctataactga

SEQ ID NO: 534443 - DNA, 25 bp, Homo sapien
ggtatgttgctataactgatgattt

SEQ ID NO: 534444 - DNA, 25 bp, Homo sapien
gcagagaatggaattggtatgttgc

SEQ ID NO: 534445 - DNA, 25 bp, Homo sapien
aatggaattggtatgttgctataac

SEQ ID NO: 534446 - DNA, 25 bp, Homo sapien
aagcatttgctcaaccgccatcctg

SEQ ID NO: 534447 - DNA, 25 bp, Homo sapien
ccataatagcgacaggaagagaagg

SEQ ID NO: 534448 - DNA, 25 bp, Homo sapien
tccattcttagggtgaactttgccc

SEQ ID NO: 534449 - DNA, 25 bp, Homo sapien
aacgtgtacgggctttgtccattct

SEQ ID NO: 534450 - DNA, 25 bp, Homo sapien
gattcagtcaatagctgatgaggaa

SEQ ID NO: 534451 - DNA, 25 bp, Homo sapien
cagtcaatagctgatgaggaaaagc

SEQ ID NO: 534452 - DNA, 25 bp, Homo sapien
gcccagaaatgtgattcagtcaata

SEQ ID NO: 534453 - DNA, 25 bp, Homo sapien
gaaatgtgattcagtcaatagctga

SEQ ID NO: 534454 - DNA, 25 bp, Homo sapien
gtgctcatcatttgtagggttctgc

SEQ ID NO: 534455 - DNA, 25 bp, Homo sapien
agtaggaatagctgaatagtcaccc

SEQ ID NO: 534456 - DNA, 25 bp, Homo sapien
cctcagaccggtatcagtgaccagt

SEQ ID NO: 534457 - DNA, 25 bp, Homo sapien
ctgggtatgaatttcaggagagaag

SEQ ID NO: 534458 - DNA, 25 bp, Homo sapien
aaaatgtaactgctacagcagtttc

SEQ ID NO: 534459 - DNA, 25 bp, Homo sapien
tgtaactgctacagcagtttcctgg

SEQ ID NO: 534460 - DNA, 25 bp, Homo sapien
gtaactgctacagcagtttcctgga

SEQ ID NO: 534461 - DNA, 25 bp, Homo sapien
aatgtaactgctacagcagtttcct

SEQ ID NO: 534462 - DNA, 25 bp, Homo sapien
ttggaccaagtcttgggctttcttg

SEQ ID NO: 534463 - DNA, 25 bp, Homo sapien
tccggccgcactgtgcagcaaggtg

SEQ ID NO: 534464 - DNA, 25 bp, Homo sapien
cagaaagcctagagggctgggcttc

SEQ ID NO: 534465 - DNA, 25 bp, Homo sapien
aggagacagcgcacccacagcttgt

SEQ ID NO: 534466 - DNA, 25 bp, Homo sapien
ggtgaggctccctagacatccttct

SEQ ID NO: 534467 - DNA, 25 bp, Homo sapien
aacagaagggccgataataaggttg

SEQ ID NO: 534468 - DNA, 25 bp, Homo sapien
aaggttgcttccctttctgaagcta

SEQ ID NO: 534469 - DNA, 25 bp, Homo sapien
taataaggttgcttccctttctgaa

SEQ ID NO: 534470 - DNA, 25 bp, Homo sapien
cagaagggccgataataaggttgct

SEQ ID NO: 534471 - DNA, 25 bp, Homo sapien
gcttcctgcaatatacccatgactt

SEQ ID NO: 534472 - DNA, 25 bp, Homo sapien
cctgaattttcagcttcctgcaata

SEQ ID NO: 534473 - DNA, 25 bp, Homo sapien
ccacactttcctgggtgctagacct

SEQ ID NO: 534474 - DNA, 25 bp, Homo sapien
aattcagtacacactggagctttcc

SEQ ID NO: 534475 - DNA, 25 bp, Homo sapien
gagaaggcctcatagctgtctgtcc

SEQ ID NO: 534476 - DNA, 25 bp, Homo sapien
gaaggcctcatagctgtctgtccct

SEQ ID NO: 534477 - DNA, 25 bp, Homo sapien
agagaaggcctcatagctgtctgtc

SEQ ID NO: 534478 - DNA, 25 bp, Homo sapien
aggcctcatagctgtctgtccctct

SEQ ID NO: 534479 - DNA, 25 bp, Homo sapien
gaagtgtccttgtcacacttgtggt

SEQ ID NO: 534480 - DNA, 25 bp, Homo sapien
cttgtcacacttgtggtttgacagg

SEQ ID NO: 534481 - DNA, 25 bp, Homo sapien
attggaagtgtccttgtcacacttg

SEQ ID NO: 534482 - DNA, 25 bp, Homo sapien
accagcttattccctctgcatccag

SEQ ID NO: 534483 - DNA, 25 bp, Homo sapien
tctttagcatcactaaagcactcca

SEQ ID NO: 534484 - DNA, 25 bp, Homo sapien
ggtcttgactcccatgcatttctga

SEQ ID NO: 534485 - DNA, 25 bp, Homo sapien
gttcccccgcatttctgagaggtct

SEQ ID NO: 534486 - DNA, 25 bp, Homo sapien
gtcttcaatggtgtctttagcatca

SEQ ID NO: 534487 - DNA, 25 bp, Homo sapien
cggagtggtgtttctgtagggatca

SEQ ID NO: 534488 - DNA, 25 bp, Homo sapien
cacggagtggtgtttctgtagggat

SEQ ID NO: 534489 - DNA, 25 bp, Homo sapien
gagtggtgtttctgtagggatcagc

SEQ ID NO: 534490 - DNA, 25 bp, Homo sapien
ggtgtttctgtagggatcagcgagg

SEQ ID NO: 534491 - DNA, 25 bp, Homo sapien
ctacagccatggagagcctccagag

SEQ ID NO: 534492 - DNA, 25 bp, Homo sapien
aattggacctggaggaaaactgatc

SEQ ID NO: 534493 - DNA, 25 bp, Homo sapien
cttctgggtaattggacctggagga

SEQ ID NO: 534494 - DNA, 25 bp, Homo sapien
cagccatggagagcctccagagtcc

SEQ ID NO: 534495 - DNA, 25 bp, Homo sapien
taatgaagtggaactgtccctaccg

SEQ ID NO: 534496 - DNA, 25 bp, Homo sapien
gcaagaaaggcccaagtatgacaca

SEQ ID NO: 534497 - DNA, 25 bp, Homo sapien
tgcctggcctccaattggaactttt

SEQ ID NO: 534498 - DNA, 25 bp, Homo sapien
ggattaactgggtggtcatctgaaa

SEQ ID NO: 534499 - DNA, 25 bp, Homo sapien
tgtggtggagtctgtctttccactg

SEQ ID NO: 534500 - DNA, 25 bp, Homo sapien
cactgtagcgtcaaatctgacagca

SEQ ID NO: 534501 - DNA, 25 bp, Homo sapien
actgagcctgaatctatgtggtgga

SEQ ID NO: 534502 - DNA, 25 bp, Homo sapien
ggagtctgtctttccactgtagcgt

SEQ ID NO: 534503 - DNA, 25 bp, Homo sapien
gaacttgtctattatataataagac

SEQ ID NO: 534504 - DNA, 25 bp, Homo sapien
tggaaagacattccacagtcttgga

SEQ ID NO: 534505 - DNA, 25 bp, Homo sapien
agaatagtaaagagcagaacttgtc

SEQ ID NO: 534506 - DNA, 25 bp, Homo sapien
gattaagtgtcatgataatcccatt

SEQ ID NO: 534507 - DNA, 25 bp, Homo sapien
tttccaagaactttataggcttagc

SEQ ID NO: 534508 - DNA, 25 bp, Homo sapien
caccactgtctagttagggtcacaa

SEQ ID NO: 534509 - DNA, 25 bp, Homo sapien
tgtttcttgcgctttcgatgccata

SEQ ID NO: 534510 - DNA, 25 bp, Homo sapien
tatttgtatatttgccagtaccaca

SEQ ID NO: 534511 - DNA, 25 bp, Homo sapien
caatggtaacaataagtgcatgggc

SEQ ID NO: 534512 - DNA, 25 bp, Homo sapien
tcaaactcaggcattggattcccaa

SEQ ID NO: 534513 - DNA, 25 bp, Homo sapien
caagcactttacaaggattcattca

SEQ ID NO: 534514 - DNA, 25 bp, Homo sapien
tagtttgcaggtagttacttgatcc

SEQ ID NO: 534515 - DNA, 25 bp, Homo sapien
gatttgaatcgaggtccatcacata

SEQ ID NO: 534516 - DNA, 25 bp, Homo sapien
taggtgactagagcatgggctctgc

SEQ ID NO: 534517 - DNA, 25 bp, Homo sapien
tactcattatgtcatcttgggcaag

SEQ ID NO: 534518 - DNA, 25 bp, Homo sapien
tgccacacgagatgggaggtagcaa

SEQ ID NO: 534519 - DNA, 25 bp, Homo sapien
ggcctaccacctgcttttgtgaagt

SEQ ID NO: 534520 - DNA, 25 bp, Homo sapien
ccagcagaaaggtaggcaggcagat

SEQ ID NO: 534521 - DNA, 25 bp, Homo sapien
caccatatggcttgcagtggctaaa

SEQ ID NO: 534522 - DNA, 25 bp, Homo sapien
gcaggcagatctggcttatttaata

SEQ ID NO: 534523 - DNA, 25 bp, Homo sapien
tgcagatgacccattctatgccacg

SEQ ID NO: 534524 - DNA, 25 bp, Homo sapien
cattaaggccattcgtatagtggta

SEQ ID NO: 534525 - DNA, 25 bp, Homo sapien
caatcatttggctgagacttgcaga

SEQ ID NO: 534526 - DNA, 25 bp, Homo sapien
ggtgtccaccaacaaagcactgaaa

SEQ ID NO: 534527 - DNA, 25 bp, Homo sapien
ggaccttggtttatggctgtgcaaa

SEQ ID NO: 534528 - DNA, 25 bp, Homo sapien
tggaccactcctatagtctgatgga

SEQ ID NO: 534529 - DNA, 25 bp, Homo sapien
gtctcggagattagtaaaagcctct

SEQ ID NO: 534530 - DNA, 25 bp, Homo sapien
cctatatagtcatgaagtctcggag

SEQ ID NO: 534531 - DNA, 25 bp, Homo sapien
tgttattgaaaaggtctcggattcc

SEQ ID NO: 534532 - DNA, 25 bp, Homo sapien
tgctatcttctatcctaagaaaggg

SEQ ID NO: 534533 - DNA, 25 bp, Homo sapien
cagtaaacaatcaaatgccattagg

SEQ ID NO: 534534 - DNA, 25 bp, Homo sapien
caacaagggctcatttgtccactat

SEQ ID NO: 534535 - DNA, 25 bp, Homo sapien
cggcaaagcctcagtacatcagaag

SEQ ID NO: 534536 - DNA, 25 bp, Homo sapien
tcttaggcttcgacaatattgaaca

SEQ ID NO: 534537 - DNA, 25 bp, Homo sapien
aagatggtgtggtaccggcaaagcc

SEQ ID NO: 534538 - DNA, 25 bp, Homo sapien
cactcacaattacttagcctaggaa

SEQ ID NO: 534539 - DNA, 25 bp, Homo sapien
catcctgctgtaccttgtgctagaa

SEQ ID NO: 534540 - DNA, 25 bp, Homo sapien
tagcctacatcacacaacacagtgg

SEQ ID NO: 534541 - DNA, 25 bp, Homo sapien
tggcatggccaacaaaaactacgaa

SEQ ID NO: 534542 - DNA, 25 bp, Homo sapien
tgagtcaggccataagattgcttcc

SEQ ID NO: 534543 - DNA, 25 bp, Homo sapien
tgaatgcaagatcacaacagtcttg

SEQ ID NO: 534544 - DNA, 25 bp, Homo sapien
tggcaaagttcaaccttaacagagg

SEQ ID NO: 534545 - DNA, 25 bp, Homo sapien
tagaacctgagggaaattgacacgc

SEQ ID NO: 534546 - DNA, 25 bp, Homo sapien
tgacacgcaagagtcaatgacaagc

SEQ ID NO: 534547 - DNA, 25 bp, Homo sapien
gaagatagtgaaataagtggccaca

SEQ ID NO: 534548 - DNA, 25 bp, Homo sapien
agaagatagtgaaataagtggccac

SEQ ID NO: 534549 - DNA, 25 bp, Homo sapien
aagaagatagtgaaataagtggcca

SEQ ID NO: 534550 - DNA, 25 bp, Homo sapien
aagatagtgaaataagtggccacat

SEQ ID NO: 534551 - DNA, 25 bp, Homo sapien
atctgattggctcttcgatgaattt

SEQ ID NO: 534552 - DNA, 25 bp, Homo sapien
ggctcttcgatgaatttcatccaag

SEQ ID NO: 534553 - DNA, 25 bp, Homo sapien
ccagttgttctattagcattcgttt

SEQ ID NO: 534554 - DNA, 25 bp, Homo sapien
atccaagaagttctccagttgttct

SEQ ID NO: 534555 - DNA, 25 bp, Homo sapien
gaatagtatatatcagtataatttt

SEQ ID NO: 534556 - DNA, 25 bp, Homo sapien
ctttttaatgaatagtatatatcag

SEQ ID NO: 534557 - DNA, 25 bp, Homo sapien
gtactctcaattactttttaatgaa

SEQ ID NO: 534558 - DNA, 25 bp, Homo sapien
aaataaatagtactctcaattactt

SEQ ID NO: 534559 - DNA, 25 bp, Homo sapien
ccaagtatccagtaatttgtaggga

SEQ ID NO: 534560 - DNA, 25 bp, Homo sapien
cagagggccaatgtactaatgatcc

SEQ ID NO: 534561 - DNA, 25 bp, Homo sapien
ggatttattctaggcctccctatga

SEQ ID NO: 534562 - DNA, 25 bp, Homo sapien
acagtgatccctcggtatggatggg

SEQ ID NO: 534563 - DNA, 25 bp, Homo sapien
ttgtaaactgccttgcacatgcttc

SEQ ID NO: 534564 - DNA, 25 bp, Homo sapien
gcacatgcttcagtaaagtgaagat

SEQ ID NO: 534565 - DNA, 25 bp, Homo sapien
taaactgccttgcacatgcttcagt

SEQ ID NO: 534566 - DNA, 25 bp, Homo sapien
gccttgcacatgcttcagtaaagtg

SEQ ID NO: 534567 - DNA, 25 bp, Homo sapien
tgaggttcgtctcttattatacata

SEQ ID NO: 534568 - DNA, 25 bp, Homo sapien
gaggttcgtctcttattatacatac

SEQ ID NO: 534569 - DNA, 25 bp, Homo sapien
tggttcctaaatggtcatgaccaag

SEQ ID NO: 534570 - DNA, 25 bp, Homo sapien
tgcttttagttcagtattgacctct

SEQ ID NO: 534571 - DNA, 25 bp, Homo sapien
cctggctttcggatctctttcatta

SEQ ID NO: 534572 - DNA, 25 bp, Homo sapien
cattatttgtgcttttagttcagta

SEQ ID NO: 534573 - DNA, 25 bp, Homo sapien
ggagaagcaccttacatacagtcca

SEQ ID NO: 534574 - DNA, 25 bp, Homo sapien
tacatacagtccaatggtggtgggc

SEQ ID NO: 534575 - DNA, 25 bp, Homo sapien
ggacaggataactgcacggcccagt

SEQ ID NO: 534576 - DNA, 25 bp, Homo sapien
gcaactgcttgcaaaaagtatacag

SEQ ID NO: 534577 - DNA, 25 bp, Homo sapien
cacttgatgacctaatatgcacttc

SEQ ID NO: 534578 - DNA, 25 bp, Homo sapien
tctcaagacatacgtctgactcctc

SEQ ID NO: 534579 - DNA, 25 bp, Homo sapien
taggcagtaacctgcctctcatact

SEQ ID NO: 534580 - DNA, 25 bp, Homo sapien
tatttgggacaactacccactcaat

SEQ ID NO: 534581 - DNA, 25 bp, Homo sapien
cttcagtggtatgtccaggtatttc

SEQ ID NO: 534582 - DNA, 25 bp, Homo sapien
ttcttcttgaaaccccactgtcagg

SEQ ID NO: 534583 - DNA, 25 bp, Homo sapien
tacatattcttcttgaaaccccact

SEQ ID NO: 534584 - DNA, 25 bp, Homo sapien
aagtccttcagtggtatgtccaggt

SEQ ID NO: 534585 - DNA, 25 bp, Homo sapien
tattgctccagcataagcaaacggc

SEQ ID NO: 534586 - DNA, 25 bp, Homo sapien
caacttcaaaggcagtattggatac

SEQ ID NO: 534587 - DNA, 25 bp, Homo sapien
gggcagagatcactcctgtcttcag

SEQ ID NO: 534588 - DNA, 25 bp, Homo sapien
taacatgctgtaagtatgaccacta

SEQ ID NO: 534589 - DNA, 25 bp, Homo sapien
tttccttctataatctataacaaaa

SEQ ID NO: 534590 - DNA, 25 bp, Homo sapien
actcattgtactactaatcaatttc

SEQ ID NO: 534591 - DNA, 25 bp, Homo sapien
atttccttctataatctataacaaa

SEQ ID NO: 534592 - DNA, 25 bp, Homo sapien
tcattgtactactaatcaatttcct

SEQ ID NO: 534593 - DNA, 25 bp, Homo sapien
tgtaggtgcaggtggtccttttccc

SEQ ID NO: 534594 - DNA, 25 bp, Homo sapien
ctggctgtgcttgagttgtaggtgc

SEQ ID NO: 534595 - DNA, 25 bp, Homo sapien
tgtgcttgagttgtaggtgcaggtg

SEQ ID NO: 534596 - DNA, 25 bp, Homo sapien
gctgtgcttgagttgtaggtgcagg

SEQ ID NO: 534597 - DNA, 25 bp, Homo sapien
atcccttgcatatttggttctccgg

SEQ ID NO: 534598 - DNA, 25 bp, Homo sapien
tgcatatttggttctccgggtcgtt

SEQ ID NO: 534599 - DNA, 25 bp, Homo sapien
agggatcccttgcatatttggttct

SEQ ID NO: 534600 - DNA, 25 bp, Homo sapien
ccttgcatatttggttctccgggtc

SEQ ID NO: 534601 - DNA, 25 bp, Homo sapien
aatagcttcagcttacttcagttaa

SEQ ID NO: 534602 - DNA, 25 bp, Homo sapien
cagtgtcaattccaatgaaggtaac

SEQ ID NO: 534603 - DNA, 25 bp, Homo sapien
gacagtgcctaccataaacaaatta

SEQ ID NO: 534604 - DNA, 25 bp, Homo sapien
tttaaatggcacaaccagtgtcaat

SEQ ID NO: 534605 - DNA, 25 bp, Homo sapien
cttatccagcttaaaggggttgcca

SEQ ID NO: 534606 - DNA, 25 bp, Homo sapien
aatgtatgcaaccttcgtggctgat

SEQ ID NO: 534607 - DNA, 25 bp, Homo sapien
caagttctcttagtggagaaggtac

SEQ ID NO: 534608 - DNA, 25 bp, Homo sapien
aaccttcgtggctgatcaggatcaa

SEQ ID NO: 534609 - DNA, 25 bp, Homo sapien
cagaaatctgcgagtgctcttcaaa

SEQ ID NO: 534610 - DNA, 25 bp, Homo sapien
tttcagaaatctgcgagtgctcttc

SEQ ID NO: 534611 - DNA, 25 bp, Homo sapien
cctttcagaaatctgcgagtgctct

SEQ ID NO: 534612 - DNA, 25 bp, Homo sapien
tcagaaatctgcgagtgctcttcaa

SEQ ID NO: 534613 - DNA, 25 bp, Homo sapien
tcggctccggacttttattccagtc

SEQ ID NO: 534614 - DNA, 25 bp, Homo sapien
ggctccggacttttattccagtctc

SEQ ID NO: 534615 - DNA, 25 bp, Homo sapien
gatcggctccggacttttattccag

SEQ ID NO: 534616 - DNA, 25 bp, Homo sapien
tgtgatcggctccggacttttattc

SEQ ID NO: 534617 - DNA, 25 bp, Homo sapien
tgttcacatatagcaagtctaggac

SEQ ID NO: 534618 - DNA, 25 bp, Homo sapien
taacctgtttaaccatcctagccaa

SEQ ID NO: 534619 - DNA, 25 bp, Homo sapien
gtttcaaaacatagcacaccatgga

SEQ ID NO: 534620 - DNA, 25 bp, Homo sapien
caccatggatgtgagacagaattat

SEQ ID NO: 534621 - DNA, 25 bp, Homo sapien
gtccatattccatactgtctgctat

SEQ ID NO: 534622 - DNA, 25 bp, Homo sapien
tactgtctgctattaggttaggtgc

SEQ ID NO: 534623 - DNA, 25 bp, Homo sapien
tctgctattaggttaggtgctccca

SEQ ID NO: 534624 - DNA, 25 bp, Homo sapien
gctattaggttaggtgctcccatca

SEQ ID NO: 534625 - DNA, 25 bp, Homo sapien
ctgcgcccggccaacaagttctttt

SEQ ID NO: 534626 - DNA, 25 bp, Homo sapien
actgcgcccggccaacaagttcttt

SEQ ID NO: 534627 - DNA, 25 bp, Homo sapien
tgcgcccggccaacaagttctttta

SEQ ID NO: 534628 - DNA, 25 bp, Homo sapien
ggcattgtcttcaaataactttcaa

SEQ ID NO: 534629 - DNA, 25 bp, Homo sapien
cccaagatagtagggaggcattgtc

SEQ ID NO: 534630 - DNA, 25 bp, Homo sapien
tcaaatgactgtctccacttcaatg

SEQ ID NO: 534631 - DNA, 25 bp, Homo sapien
tgctttatgcactttaaacaagtca

SEQ ID NO: 534632 - DNA, 25 bp, Homo sapien
tataatgtgaacaaactatcactac

SEQ ID NO: 534633 - DNA, 25 bp, Homo sapien
tgtgaacaaactatcactactcatt

SEQ ID NO: 534634 - DNA, 25 bp, Homo sapien
ctagaaacgtataatgtgaacaaac

SEQ ID NO: 534635 - DNA, 25 bp, Homo sapien
tagaaacgtataatgtgaacaaact

SEQ ID NO: 534636 - DNA, 25 bp, Homo sapien
tcaagtaaccaaaaggatgaccaag

SEQ ID NO: 534637 - DNA, 25 bp, Homo sapien
caaaaggatgaccaagttcactgta

SEQ ID NO: 534638 - DNA, 25 bp, Homo sapien
gatgaccaagttcactgtattttgc

SEQ ID NO: 534639 - DNA, 25 bp, Homo sapien
tggctttcaagtaaccaaaaggatg

SEQ ID NO: 534640 - DNA, 25 bp, Homo sapien
ctgccaacatgtttgaggagatttc

SEQ ID NO: 534641 - DNA, 25 bp, Homo sapien
caacatgtttgaggagatttccttt

SEQ ID NO: 534642 - DNA, 25 bp, Homo sapien
gccaacatgtttgaggagatttcct

SEQ ID NO: 534643 - DNA, 25 bp, Homo sapien
tgccaacatgtttgaggagatttcc

SEQ ID NO: 534644 - DNA, 25 bp, Homo sapien
ctacaggatgagatgtacgaggtgg

SEQ ID NO: 534645 - DNA, 25 bp, Homo sapien
tcagttcctccgtcttgctagtaag

SEQ ID NO: 534646 - DNA, 25 bp, Homo sapien
tacttatagagagtagcgacttcca

SEQ ID NO: 534647 - DNA, 25 bp, Homo sapien
taatgtttccttccctattccagca

SEQ ID NO: 534648 - DNA, 25 bp, Homo sapien
ggtaaactctataggatacacaccc

SEQ ID NO: 534649 - DNA, 25 bp, Homo sapien
tataaaggactctattggcctcagt

SEQ ID NO: 534650 - DNA, 25 bp, Homo sapien
tgaatcttccacaggttcctcagac

SEQ ID NO: 534651 - DNA, 25 bp, Homo sapien
tcagttactgcttataccctggtgg

SEQ ID NO: 534652 - DNA, 25 bp, Homo sapien
taactacccactagacataacctga

SEQ ID NO: 534653 - DNA, 25 bp, Homo sapien
cacctaaaaatagggtctagacact

SEQ ID NO: 534654 - DNA, 25 bp, Homo sapien
gcatgtaacaacctctaaaagacct

SEQ ID NO: 534655 - DNA, 25 bp, Homo sapien
taggtagtcattactagttgctgcc

SEQ ID NO: 534656 - DNA, 25 bp, Homo sapien
gactccatacttcagccatgccaag

SEQ ID NO: 534657 - DNA, 25 bp, Homo sapien
ggctgagatccaaaaggccttgata

SEQ ID NO: 534658 - DNA, 25 bp, Homo sapien
caaaaggccttgatatatctggctg

SEQ ID NO: 534659 - DNA, 25 bp, Homo sapien
gtgttggcgaattttgatctggcca

SEQ ID NO: 534660 - DNA, 25 bp, Homo sapien
ggaacaggccaatgacctataggaa

SEQ ID NO: 534661 - DNA, 25 bp, Homo sapien
catacaatgcagagggtctcaacta

SEQ ID NO: 534662 - DNA, 25 bp, Homo sapien
ccgtgcccagcaatgactcttaaat

SEQ ID NO: 534663 - DNA, 25 bp, Homo sapien
gaaaaagccaggtgggactcagcta

SEQ ID NO: 534664 - DNA, 25 bp, Homo sapien
tagttcatgattacagaagccaaga

SEQ ID NO: 534665 - DNA, 25 bp, Homo sapien
gtagctaaggagttaaacatctagg

SEQ ID NO: 534666 - DNA, 25 bp, Homo sapien
caaaaaggtgatgctactagactac

SEQ ID NO: 534667 - DNA, 25 bp, Homo sapien
ttgagaggcaattgtataatactac

SEQ ID NO: 534668 - DNA, 25 bp, Homo sapien
tctgtcttaataatttggccttgcc

SEQ ID NO: 534669 - DNA, 25 bp, Homo sapien
tgattaagcattcttggagaacaca

SEQ ID NO: 534670 - DNA, 25 bp, Homo sapien
tactgagtatctacgtgcctggcac

SEQ ID NO: 534671 - DNA, 25 bp, Homo sapien
aattcaaacccttacagtgtatcag

SEQ ID NO: 534672 - DNA, 25 bp, Homo sapien
aaggctaaccatctttacatgcaaa

SEQ ID NO: 534673 - DNA, 25 bp, Homo sapien
tatagacaatggtgattcaaatcct

SEQ ID NO: 534674 - DNA, 25 bp, Homo sapien
actatcacatcaggaaggattcaga

SEQ ID NO: 534675 - DNA, 25 bp, Homo sapien
ttctgcatcattgaaagatatcacc

SEQ ID NO: 534676 - DNA, 25 bp, Homo sapien
gagtgacatttgagcggcttactct

SEQ ID NO: 534677 - DNA, 25 bp, Homo sapien
tatttggatagtgcaataccagtgg

SEQ ID NO: 534678 - DNA, 25 bp, Homo sapien
tgtactgactactgaatgccaaaag

SEQ ID NO: 534679 - DNA, 25 bp, Homo sapien
gacgaatctcattagcgcaccaact

SEQ ID NO: 534680 - DNA, 25 bp, Homo sapien
tgtctgcagattatgtcacaggccc

SEQ ID NO: 534681 - DNA, 25 bp, Homo sapien
ccaaaaatgccgtgtctgtactgac

SEQ ID NO: 534682 - DNA, 25 bp, Homo sapien
tcacacattggtgtgattgcagagt

SEQ ID NO: 534683 - DNA, 25 bp, Homo sapien
cacttcacacattggtgtgattgca

SEQ ID NO: 534684 - DNA, 25 bp, Homo sapien
cacacattggtgtgattgcagagtc

SEQ ID NO: 534685 - DNA, 25 bp, Homo sapien
cttcacacattggtgtgattgcaga

SEQ ID NO: 534686 - DNA, 25 bp, Homo sapien
cgtcatcatcttcgtagccaacaga

SEQ ID NO: 534687 - DNA, 25 bp, Homo sapien
taattttagtaatatcgccaaccca

SEQ ID NO: 534688 - DNA, 25 bp, Homo sapien
gcttgaatacaagtgaggttttcca

SEQ ID NO: 534689 - DNA, 25 bp, Homo sapien
tggagactttactgccccttcacct

SEQ ID NO: 534690 - DNA, 25 bp, Homo sapien
ggagcacctaccataaacacagcac

SEQ ID NO: 534691 - DNA, 25 bp, Homo sapien
gagatcaccttttagctagctcatt

SEQ ID NO: 534692 - DNA, 25 bp, Homo sapien
caaatggcagattaggcaggtgaca

SEQ ID NO: 534693 - DNA, 25 bp, Homo sapien
gacagttatcaccaggtatgctcaa

SEQ ID NO: 534694 - DNA, 25 bp, Homo sapien
gaccatcttgtacgttccagtcctg

SEQ ID NO: 534695 - DNA, 25 bp, Homo sapien
ttgggatgacttgttacacagcagc

SEQ ID NO: 534696 - DNA, 25 bp, Homo sapien
tagatggcacagtactccgaagcac

SEQ ID NO: 534697 - DNA, 25 bp, Homo sapien
gtctaagtcttactaggcctagcag

SEQ ID NO: 534698 - DNA, 25 bp, Homo sapien
tggacacccctgtgtctaagccaca

SEQ ID NO: 534699 - DNA, 25 bp, Homo sapien
ccctgtgtctaagccacagtagcct

SEQ ID NO: 534700 - DNA, 25 bp, Homo sapien
taagccacagtagccttctttcagt

SEQ ID NO: 534701 - DNA, 25 bp, Homo sapien
tgtctaagccacagtagccttcttt

SEQ ID NO: 534702 - DNA, 25 bp, Homo sapien
cagggactgataccaaatacagagg

SEQ ID NO: 534703 - DNA, 25 bp, Homo sapien
aagagtgtttctgtacggtatggcc

SEQ ID NO: 534704 - DNA, 25 bp, Homo sapien
cacagcaaaagctcgtctgtactaa

SEQ ID NO: 534705 - DNA, 25 bp, Homo sapien
gacgcatacatacaccataagagtg

SEQ ID NO: 534706 - DNA, 25 bp, Homo sapien
tgccagctatcaatactgaggtaca

SEQ ID NO: 534707 - DNA, 25 bp, Homo sapien
cagagaatataggacgtgccatgcc

SEQ ID NO: 534708 - DNA, 25 bp, Homo sapien
gaggtacatacagttctcccaaact

SEQ ID NO: 534709 - DNA, 25 bp, Homo sapien
tgtaagacaaagtcgaaactccttg

SEQ ID NO: 534710 - DNA, 25 bp, Homo sapien
ttaagtcttaggacaagctttagca

SEQ ID NO: 534711 - DNA, 25 bp, Homo sapien
ctgtgagtgcttcaaatcacagaga

SEQ ID NO: 534712 - DNA, 25 bp, Homo sapien
taatcaacgttattagcaatcaatg

SEQ ID NO: 534713 - DNA, 25 bp, Homo sapien
caaaatactcaaaacatctctggag

SEQ ID NO: 534714 - DNA, 25 bp, Homo sapien
gatgactagcatcagacttttgagg

SEQ ID NO: 534715 - DNA, 25 bp, Homo sapien
ctgaggccttccgagatgactagca

SEQ ID NO: 534716 - DNA, 25 bp, Homo sapien
aggaaggctagccattagacaaggc

SEQ ID NO: 534717 - DNA, 25 bp, Homo sapien
gctagccattagacaaggcttttcc

SEQ ID NO: 534718 - DNA, 25 bp, Homo sapien
tgcttgaagtgacatccaggatcag

SEQ ID NO: 534719 - DNA, 25 bp, Homo sapien
gagacagtcagtgcactttagcact

SEQ ID NO: 534720 - DNA, 25 bp, Homo sapien
ctgaggcaccagtcatcatgagaca

SEQ ID NO: 534721 - DNA, 25 bp, Homo sapien
gatcaggtcgatcctgtatccagga

SEQ ID NO: 534722 - DNA, 25 bp, Homo sapien
tgaaaagacagagcgtggggaaaaa

SEQ ID NO: 534723 - DNA, 25 bp, Homo sapien
tctgaaaagacagagcgtggggaaa

SEQ ID NO: 534724 - DNA, 25 bp, Homo sapien
ggaaaaatcagtaattcaatctgaa

SEQ ID NO: 534725 - DNA, 25 bp, Homo sapien
aagacagagcgtggggaaaaatata

SEQ ID NO: 534726 - DNA, 25 bp, Homo sapien
ctcctttattttttatcacccacat

SEQ ID NO: 534727 - DNA, 25 bp, Homo sapien
gtattacaaatgtttatttacttgc

SEQ ID NO: 534728 - DNA, 25 bp, Homo sapien
tgtattacaaatgtttatttacttg

SEQ ID NO: 534729 - DNA, 25 bp, Homo sapien
ctagccttgcttaattccatctgtg

SEQ ID NO: 534730 - DNA, 25 bp, Homo sapien
ttctagccttgcttaattccatctg

SEQ ID NO: 534731 - DNA, 25 bp, Homo sapien
tctagccttgcttaattccatctgt

SEQ ID NO: 534732 - DNA, 25 bp, Homo sapien
gctttttatataatccacgtctacc

SEQ ID NO: 534733 - DNA, 25 bp, Homo sapien
taatccacgtctacctgtttctgaa

SEQ ID NO: 534734 - DNA, 25 bp, Homo sapien
tttttatataatccacgtctacctg

SEQ ID NO: 534735 - DNA, 25 bp, Homo sapien
tatataatccacgtctacctgtttc

SEQ ID NO: 534736 - DNA, 25 bp, Homo sapien
tcgctggactgccaacgacaatcca

SEQ ID NO: 534737 - DNA, 25 bp, Homo sapien
tactctagccaaggagtttccacag

SEQ ID NO: 534738 - DNA, 25 bp, Homo sapien
cttcttggctttgctatactctagc

SEQ ID NO: 534739 - DNA, 25 bp, Homo sapien
aggagtttccacagtcgctggactg

SEQ ID NO: 534740 - DNA, 25 bp, Homo sapien
cactggtggtagtcaacttgctccc

SEQ ID NO: 534741 - DNA, 25 bp, Homo sapien
tggactccactggtggtagtcaact

SEQ ID NO: 534742 - DNA, 25 bp, Homo sapien
gataattattgctggctccaagaaa

SEQ ID NO: 534743 - DNA, 25 bp, Homo sapien
tgtgataattattgctggctccaag

SEQ ID NO: 534744 - DNA, 25 bp, Homo sapien
aaacgggtcataaaatcttctgatg

SEQ ID NO: 534745 - DNA, 25 bp, Homo sapien
ttaaacgggtcataaaatcttctga

SEQ ID NO: 534746 - DNA, 25 bp, Homo sapien
taaacgggtcataaaatcttctgat

SEQ ID NO: 534747 - DNA, 25 bp, Homo sapien
cttaaacgggtcataaaatcttctg

SEQ ID NO: 534748 - DNA, 25 bp, Homo sapien
aacccctggaccccatcaggaatgg

SEQ ID NO: 534749 - DNA, 25 bp, Homo sapien
tgaaccatcgcatctggccattgat

SEQ ID NO: 534750 - DNA, 25 bp, Homo sapien
ctttcctggtttatcccctagatcg

SEQ ID NO: 534751 - DNA, 25 bp, Homo sapien
cagatgctactacctctaagaagtc

SEQ ID NO: 534752 - DNA, 25 bp, Homo sapien
tagaaatctatgacatgaacatgac

SEQ ID NO: 534753 - DNA, 25 bp, Homo sapien
cacaaataagtccaatgatgtcaaa

SEQ ID NO: 534754 - DNA, 25 bp, Homo sapien
tcctatatcgaaagaaagtaaaatg

SEQ ID NO: 534755 - DNA, 25 bp, Homo sapien
gaacatgactaaataaacaatcctt

SEQ ID NO: 534756 - DNA, 25 bp, Homo sapien
taacatccttaggatagtgtttttc

SEQ ID NO: 534757 - DNA, 25 bp, Homo sapien
catccttaggatagtgtttttcatt

SEQ ID NO: 534758 - DNA, 25 bp, Homo sapien
ataacatccttaggatagtgttttt

SEQ ID NO: 534759 - DNA, 25 bp, Homo sapien
gagctccctatttgaaagaatccta

SEQ ID NO: 534760 - DNA, 25 bp, Homo sapien
ttttctgggatacaatacaaagccc

SEQ ID NO: 534761 - DNA, 25 bp, Homo sapien
aaatctcatctaaaacgcactaggg

SEQ ID NO: 534762 - DNA, 25 bp, Homo sapien
ggttccctgcaaatcaaacttgtgt

SEQ ID NO: 534763 - DNA, 25 bp, Homo sapien
tttcagcaggtctcaaaggatcagc

SEQ ID NO: 534764 - DNA, 25 bp, Homo sapien
tagatattaaggctgcttcagactt

SEQ ID NO: 534765 - DNA, 25 bp, Homo sapien
tatttgaaactctgttgaacacacg

SEQ ID NO: 534766 - DNA, 25 bp, Homo sapien
taaaactttaatcagacctctcaca

SEQ ID NO: 534767 - DNA, 25 bp, Homo sapien
cgcaaacttttggtaagccttatag

SEQ ID NO: 534768 - DNA, 25 bp, Homo sapien
gcaaaaacatcccaatctccaggtt

SEQ ID NO: 534769 - DNA, 25 bp, Homo sapien
tgacaagcagtttttcgaaggaagc

SEQ ID NO: 534770 - DNA, 25 bp, Homo sapien
cttctcttggtcaaagtggtaacag

SEQ ID NO: 534771 - DNA, 25 bp, Homo sapien
gcactgaagttatccctaagaagct

SEQ ID NO: 534772 - DNA, 25 bp, Homo sapien
aaatgccttgaccacttatgaaatg

SEQ ID NO: 534773 - DNA, 25 bp, Homo sapien
caaaactagggactgtgggacttgg

SEQ ID NO: 534774 - DNA, 25 bp, Homo sapien
tccaaagacacttaagcactgaagt

SEQ ID NO: 534775 - DNA, 25 bp, Homo sapien
cagtgactgtactccagtgaaaaac

SEQ ID NO: 534776 - DNA, 25 bp, Homo sapien
tagttgcacatacaacatgagtgtg

SEQ ID NO: 534777 - DNA, 25 bp, Homo sapien
tagaaacgaagaacacgaactagtg

SEQ ID NO: 534778 - DNA, 25 bp, Homo sapien
gagttttgcctttgaacaatgtgca

SEQ ID NO: 534779 - DNA, 25 bp, Homo sapien
gctgtccttagggattggccaagag

SEQ ID NO: 534780 - DNA, 25 bp, Homo sapien
ctgcccatagttgtctatgccagtt

SEQ ID NO: 534781 - DNA, 25 bp, Homo sapien
ttcattcataaacgttgcatggttt

SEQ ID NO: 534782 - DNA, 25 bp, Homo sapien
caaaagctgtccttagggattggcc

SEQ ID NO: 534783 - DNA, 25 bp, Homo sapien
catagggcggctcttcgaaagtgac

SEQ ID NO: 534784 - DNA, 25 bp, Homo sapien
tcttcgaaagtgaccagcatatacc

SEQ ID NO: 534785 - DNA, 25 bp, Homo sapien
cttgatagcatagggcggctcttcg

SEQ ID NO: 534786 - DNA, 25 bp, Homo sapien
gaccagcatatacctgtctcctctg

SEQ ID NO: 534787 - DNA, 25 bp, Homo sapien
acacacagatcgctccccacacacc

SEQ ID NO: 534788 - DNA, 25 bp, Homo sapien
cccacagtaccgcacacgcagcggc

SEQ ID NO: 534789 - DNA, 25 bp, Homo sapien
agcacagaggcgaggttacgaggcg

SEQ ID NO: 534790 - DNA, 25 bp, Homo sapien
acgcagcggccacccctccacgccg

SEQ ID NO: 534791 - DNA, 25 bp, Homo sapien
gccgcccgggctcggtcagtcggta

SEQ ID NO: 534792 - DNA, 25 bp, Homo sapien
ggtcgccgcccgggctcggtcagtc

SEQ ID NO: 534793 - DNA, 25 bp, Homo sapien
tcgccgcccgggctcggtcagtcgg

SEQ ID NO: 534794 - DNA, 25 bp, Homo sapien
ccaccctgccgcccgcgggccgccg

SEQ ID NO: 534795 - DNA, 25 bp, Homo sapien
catgaaggtctctaccgcgcctttg

SEQ ID NO: 534796 - DNA, 25 bp, Homo sapien
cttcatgaaggtctctaccgcgcct

SEQ ID NO: 534797 - DNA, 25 bp, Homo sapien
ttcatgaaggtctctaccgcgcctt

SEQ ID NO: 534798 - DNA, 25 bp, Homo sapien
tgaaggtctctaccgcgcctttggc

SEQ ID NO: 534799 - DNA, 25 bp, Homo sapien
ctatcaggaacagtaagatgggcat

SEQ ID NO: 534800 - DNA, 25 bp, Homo sapien
agaaagaggagatggtagaggtgga

SEQ ID NO: 534801 - DNA, 25 bp, Homo sapien
ggtagaggtggaggcgccggtggcg

SEQ ID NO: 534802 - DNA, 25 bp, Homo sapien
ggcccgaggtggtggagaaagagga

SEQ ID NO: 534803 - DNA, 25 bp, Homo sapien
gagatggtagaggtggaggcgccgg

SEQ ID NO: 534804 - DNA, 25 bp, Homo sapien
tgttgggagaagtttcagggactcc

SEQ ID NO: 534805 - DNA, 25 bp, Homo sapien
gaggaaactccccagacccagtgct

SEQ ID NO: 534806 - DNA, 25 bp, Homo sapien
agtttctcccccgatagttgagagg

SEQ ID NO: 534807 - DNA, 25 bp, Homo sapien
cagccgtctgtctgtcggttcgtcc

SEQ ID NO: 534808 - DNA, 25 bp, Homo sapien
ggtcaggccctatcctttcattagc

SEQ ID NO: 534809 - DNA, 25 bp, Homo sapien
cacactccggttttaactcgggcag

SEQ ID NO: 534810 - DNA, 25 bp, Homo sapien
gctactgaagcgcttttctctctca

SEQ ID NO: 534811 - DNA, 25 bp, Homo sapien
tgacacgtccccgagccacgtgata

SEQ ID NO: 534812 - DNA, 25 bp, Homo sapien
tttccaaggtttcagctttgcctta

SEQ ID NO: 534813 - DNA, 25 bp, Homo sapien
ccttagtgtttcttaaacggatcat

SEQ ID NO: 534814 - DNA, 25 bp, Homo sapien
tgccttagtgtttcttaaacggatc

SEQ ID NO: 534815 - DNA, 25 bp, Homo sapien
tccaaggtttcagctttgccttagt

SEQ ID NO: 534816 - DNA, 25 bp, Homo sapien
tgacaccatttccttatatcaccac

SEQ ID NO: 534817 - DNA, 25 bp, Homo sapien
tctaacaagatgacaccatttcctt

SEQ ID NO: 534818 - DNA, 25 bp, Homo sapien
caagatgacaccatttccttatatc

SEQ ID NO: 534819 - DNA, 25 bp, Homo sapien
ccaagatttctaacaagatgacacc

SEQ ID NO: 534820 - DNA, 25 bp, Homo sapien
tcagtgataacgtcttgcccataaa

SEQ ID NO: 534821 - DNA, 25 bp, Homo sapien
aacatggaaaggtaagctttgctca

SEQ ID NO: 534822 - DNA, 25 bp, Homo sapien
attcattaagggatcgaatccccta

SEQ ID NO: 534823 - DNA, 25 bp, Homo sapien
aacgtcttgcccataaataatttca

SEQ ID NO: 534824 - DNA, 25 bp, Homo sapien
cagttaccagttgcagcagttcaga

SEQ ID NO: 534825 - DNA, 25 bp, Homo sapien
tttccactgatcactgtagctagag

SEQ ID NO: 534826 - DNA, 25 bp, Homo sapien
gaatgtcagcaacagatttccactg

SEQ ID NO: 534827 - DNA, 25 bp, Homo sapien
ttcagacttggacaaggatgccagc

SEQ ID NO: 534828 - DNA, 25 bp, Homo sapien
tcaacaatctgggacacgaccttgc

SEQ ID NO: 534829 - DNA, 25 bp, Homo sapien
ccaaggagcagcaaacgtcctcaac

SEQ ID NO: 534830 - DNA, 25 bp, Homo sapien
tgggacacgaccttgctccaaggtc

SEQ ID NO: 534831 - DNA, 25 bp, Homo sapien
cagcaaacgtcctcaacaatctggg

SEQ ID NO: 534832 - DNA, 25 bp, Homo sapien
tctttacaatgtggcatgggtttgc

SEQ ID NO: 534833 - DNA, 25 bp, Homo sapien
tggtctttacaatgtggcatgggtt

SEQ ID NO: 534834 - DNA, 25 bp, Homo sapien
gatggtctttacaatgtggcatggg

SEQ ID NO: 534835 - DNA, 25 bp, Homo sapien
ggtctttacaatgtggcatgggttt

SEQ ID NO: 534836 - DNA, 25 bp, Homo sapien
ggacgattggcagtgacttcatcca

SEQ ID NO: 534837 - DNA, 25 bp, Homo sapien
agggacgattggcagtgacttcatc

SEQ ID NO: 534838 - DNA, 25 bp, Homo sapien
ccagccatcctgaacgggtgacaca

SEQ ID NO: 534839 - DNA, 25 bp, Homo sapien
cctgaacgggtgacacacagctgag

SEQ ID NO: 534840 - DNA, 25 bp, Homo sapien
gacagccatgctcccctaatggcat

SEQ ID NO: 534841 - DNA, 25 bp, Homo sapien
gtctctggagagaagatcaccaagg

SEQ ID NO: 534842 - DNA, 25 bp, Homo sapien
agtctctggagagaagatcaccaag

SEQ ID NO: 534843 - DNA, 25 bp, Homo sapien
atcaccaaggacagcatgggttact

SEQ ID NO: 534844 - DNA, 25 bp, Homo sapien
gggcagtctcaatggtgacgccaaa

SEQ ID NO: 534845 - DNA, 25 bp, Homo sapien
cagagggcagtctcaatggtgacgc

SEQ ID NO: 534846 - DNA, 25 bp, Homo sapien
gagggcagtctcaatggtgacgcca

SEQ ID NO: 534847 - DNA, 25 bp, Homo sapien
gcagtctcaatggtgacgccaaagg

SEQ ID NO: 534848 - DNA, 25 bp, Homo sapien
ttaggcccatgactgaaacatgatg

SEQ ID NO: 534849 - DNA, 25 bp, Homo sapien
catgactgaaacatgatgtcctaca

SEQ ID NO: 534850 - DNA, 25 bp, Homo sapien
aggccactcctttaggcccatgact

SEQ ID NO: 534851 - DNA, 25 bp, Homo sapien
tcctttaggcccatgactgaaacat

SEQ ID NO: 534852 - DNA, 25 bp, Homo sapien
tctgaccctaggagtggtgacgtcc

SEQ ID NO: 534853 - DNA, 25 bp, Homo sapien
ttaagaccgctaggccaggtagccc

SEQ ID NO: 534854 - DNA, 25 bp, Homo sapien
cagaaagtgggcgataggtcattcc

SEQ ID NO: 534855 - DNA, 25 bp, Homo sapien
tctttccggtcttgctgaggcgctc

SEQ ID NO: 534856 - DNA, 25 bp, Homo sapien
aacaattgagataataaaactacct

SEQ ID NO: 534857 - DNA, 25 bp, Homo sapien
tctcaccacgttgttctggctgcag

SEQ ID NO: 534858 - DNA, 25 bp, Homo sapien
ggtctcaccacgttgttctggctgc

SEQ ID NO: 534859 - DNA, 25 bp, Homo sapien
ctatattggtgtctaacttagtgtg

SEQ ID NO: 534860 - DNA, 25 bp, Homo sapien
tcacatgaggtcactatattggtgt

SEQ ID NO: 534861 - DNA, 25 bp, Homo sapien
cattgtgaggtagtaatgcctggta

SEQ ID NO: 534862 - DNA, 25 bp, Homo sapien
tagacaccacatattgaactgctgg

SEQ ID NO: 534863 - DNA, 25 bp, Homo sapien
ggaattcgtaagagcccaaccactg

SEQ ID NO: 534864 - DNA, 25 bp, Homo sapien
actgcatgtttcctactaacgtttt

SEQ ID NO: 534865 - DNA, 25 bp, Homo sapien
tggtctcaagtacagcatcaggcat

SEQ ID NO: 534866 - DNA, 25 bp, Homo sapien
tgatagctgaaaggtggccttcctc

SEQ ID NO: 534867 - DNA, 25 bp, Homo sapien
aaatgatagctgaaaggtggccttc

SEQ ID NO: 534868 - DNA, 25 bp, Homo sapien
gatagctgaaaggtggccttcctct

SEQ ID NO: 534869 - DNA, 25 bp, Homo sapien
aatgatagctgaaaggtggccttcc

SEQ ID NO: 534870 - DNA, 25 bp, Homo sapien
aaatgagcagatttttcaggccttc

SEQ ID NO: 534871 - DNA, 25 bp, Homo sapien
aatgagcagatttttcaggccttca

SEQ ID NO: 534872 - DNA, 25 bp, Homo sapien
tttgctttaggctcacagatggcct

SEQ ID NO: 534873 - DNA, 25 bp, Homo sapien
gaagtttgctttaggctcacagatg

SEQ ID NO: 534874 - DNA, 25 bp, Homo sapien
tagaagtttgctttaggctcacaga

SEQ ID NO: 534875 - DNA, 25 bp, Homo sapien
tgttagaagtttgctttaggctcac

SEQ ID NO: 534876 - DNA, 25 bp, Homo sapien
tgtgcagaacaagtatattaatagc

SEQ ID NO: 534877 - DNA, 25 bp, Homo sapien
taaagcctgaggtaaactttctgtc

SEQ ID NO: 534878 - DNA, 25 bp, Homo sapien
tcctgtcagaatagtactgcctgcc

SEQ ID NO: 534879 - DNA, 25 bp, Homo sapien
cctgcatttctgctgtagtacaagc

SEQ ID NO: 534880 - DNA, 25 bp, Homo sapien
caccgtgcatggccttaactgtaca

SEQ ID NO: 534881 - DNA, 25 bp, Homo sapien
accgtgcatggccttaactgtacac

SEQ ID NO: 534882 - DNA, 25 bp, Homo sapien
ccgtgcatggccttaactgtacact

SEQ ID NO: 534883 - DNA, 25 bp, Homo sapien
gtatctatggagttctcctaagcca

SEQ ID NO: 534884 - DNA, 25 bp, Homo sapien
tcaagcatgctttcaacttacaatg

SEQ ID NO: 534885 - DNA, 25 bp, Homo sapien
cctaagccatgtgatcacttcagca

SEQ ID NO: 534886 - DNA, 25 bp, Homo sapien
caggaatttcagtcagcagtgagcc

SEQ ID NO: 534887 - DNA, 25 bp, Homo sapien
acccagcttgagtctctgagtcttg

SEQ ID NO: 534888 - DNA, 25 bp, Homo sapien
tcattaatgtgagaactgagctcct

SEQ ID NO: 534889 - DNA, 25 bp, Homo sapien
cttgaaaccgctggccacctcaatt

SEQ ID NO: 534890 - DNA, 25 bp, Homo sapien
agcatctgtctatcatggagaaacc

SEQ ID NO: 534891 - DNA, 25 bp, Homo sapien
tgagcttcctgacaacagaggtggc

SEQ ID NO: 534892 - DNA, 25 bp, Homo sapien
cctgacaacagaggtggcacttgtt

SEQ ID NO: 534893 - DNA, 25 bp, Homo sapien
tgtgagcttcctgacaacagaggtg

SEQ ID NO: 534894 - DNA, 25 bp, Homo sapien
ttcctgacaacagaggtggcacttg

SEQ ID NO: 534895 - DNA, 25 bp, Homo sapien
catgacgctgcaaaagggagaggct

SEQ ID NO: 534896 - DNA, 25 bp, Homo sapien
taagatgagcgttaatagggacctc

SEQ ID NO: 534897 - DNA, 25 bp, Homo sapien
gagatcaataggtcccatgacgctg

SEQ ID NO: 534898 - DNA, 25 bp, Homo sapien
ggcacaggatcctaattgctaactc

SEQ ID NO: 534899 - DNA, 25 bp, Homo sapien
cttttagatggtcaagtgggcagct

SEQ ID NO: 534900 - DNA, 25 bp, Homo sapien
gaagatttaagagtagcctatgcag

SEQ ID NO: 534901 - DNA, 25 bp, Homo sapien
gccccttgaggctgcaatcgagttt

SEQ ID NO: 534902 - DNA, 25 bp, Homo sapien
taaccggatatggactttggaggaa

SEQ ID NO: 534903 - DNA, 25 bp, Homo sapien
actgtttagtaagcacttgttgacc

SEQ ID NO: 534904 - DNA, 25 bp, Homo sapien
catacttaatttgcttaggctcggg

SEQ ID NO: 534905 - DNA, 25 bp, Homo sapien
agctgactgtttagtaagcacttgt

SEQ ID NO: 534906 - DNA, 25 bp, Homo sapien
ctcgggtgtactcaggccgtcagtc

SEQ ID NO: 534907 - DNA, 25 bp, Homo sapien
ccaagccctatgatgagttggttct

SEQ ID NO: 534908 - DNA, 25 bp, Homo sapien
tagattgagacaaatcctcctctgt

SEQ ID NO: 534909 - DNA, 25 bp, Homo sapien
ttttttagattgagacaaatcctcc

SEQ ID NO: 534910 - DNA, 25 bp, Homo sapien
ttctttcctacaatgccaagcccta

SEQ ID NO: 534911 - DNA, 25 bp, Homo sapien
tagctgattgtagtaagcacttgct

SEQ ID NO: 534912 - DNA, 25 bp, Homo sapien
tctcatgtattctagccaactaaca

SEQ ID NO: 534913 - DNA, 25 bp, Homo sapien
ttgagagaagttagtcagattgtgc

SEQ ID NO: 534914 - DNA, 25 bp, Homo sapien
actgctattcatgctgaagtggaac

SEQ ID NO: 534915 - DNA, 25 bp, Homo sapien
tgccataacagtaccaaacagcagt

SEQ ID NO: 534916 - DNA, 25 bp, Homo sapien
gaaagctgtagaacattcctccttg

SEQ ID NO: 534917 - DNA, 25 bp, Homo sapien
atgcttggctcatttcacggatgtt

SEQ ID NO: 534918 - DNA, 25 bp, Homo sapien
gttgcccacgccaaagagcagtggt

SEQ ID NO: 534919 - DNA, 25 bp, Homo sapien
agttatgctgagattgattggcagt

SEQ ID NO: 534920 - DNA, 25 bp, Homo sapien
gattgtcgccctttcagttatgctg

SEQ ID NO: 534921 - DNA, 25 bp, Homo sapien
tagagcttcccattataaggcacat

SEQ ID NO: 534922 - DNA, 25 bp, Homo sapien
taaggcacatggcattggattgtcg

SEQ ID NO: 534923 - DNA, 25 bp, Homo sapien
taagtagggtaagacaggagcacag

SEQ ID NO: 534924 - DNA, 25 bp, Homo sapien
tcttttcacacgtgagtactccttg

SEQ ID NO: 534925 - DNA, 25 bp, Homo sapien
gacacagaatgtctgctagctaggc

SEQ ID NO: 534926 - DNA, 25 bp, Homo sapien
gaagcaatgtctggttatataatca

SEQ ID NO: 534927 - DNA, 25 bp, Homo sapien
tatgagttcacttgaccagctatcc

SEQ ID NO: 534928 - DNA, 25 bp, Homo sapien
gattagctcaggttaacattagtcc

SEQ ID NO: 534929 - DNA, 25 bp, Homo sapien
tttagcagactagcaaaactcatga

SEQ ID NO: 534930 - DNA, 25 bp, Homo sapien
tgacacaactcaaaggtatagcctc

SEQ ID NO: 534931 - DNA, 25 bp, Homo sapien
ccttgggaggtctgcgacatatatt

SEQ ID NO: 534932 - DNA, 25 bp, Homo sapien
tgtccagagatgaaaccaagtggtt

SEQ ID NO: 534933 - DNA, 25 bp, Homo sapien
tgatgggcagttctttgagcaacct

SEQ ID NO: 534934 - DNA, 25 bp, Homo sapien
gagcaaccttgtttatgagcctatt

SEQ ID NO: 534935 - DNA, 25 bp, Homo sapien
aattactcatactaccaccatccag

SEQ ID NO: 534936 - DNA, 25 bp, Homo sapien
cacataacacgtgtgtaagactttt

SEQ ID NO: 534937 - DNA, 25 bp, Homo sapien
tattggtctttagctcccaaatgcc

SEQ ID NO: 534938 - DNA, 25 bp, Homo sapien
tgtgtgtcctgaacacgcatgcttc

SEQ ID NO: 534939 - DNA, 25 bp, Homo sapien
gattatcacagacaccattggagca

SEQ ID NO: 534940 - DNA, 25 bp, Homo sapien
tagccacgaggccaaaatttagagc

SEQ ID NO: 534941 - DNA, 25 bp, Homo sapien
gaggagcattcctgtcagtgaagca

SEQ ID NO: 534942 - DNA, 25 bp, Homo sapien
taaaagctcgggtggagattatcac

SEQ ID NO: 534943 - DNA, 25 bp, Homo sapien
gtcaaccgtgttgagcgctcaccag

SEQ ID NO: 534944 - DNA, 25 bp, Homo sapien
gaatttttcctggtacgaagacaga

SEQ ID NO: 534945 - DNA, 25 bp, Homo sapien
tgagttatctagatgatccctgaga

SEQ ID NO: 534946 - DNA, 25 bp, Homo sapien
ccaggctttaggcactggcagtgca

SEQ ID NO: 534947 - DNA, 25 bp, Homo sapien
ggatggcagccttacgtcagtagta

SEQ ID NO: 534948 - DNA, 25 bp, Homo sapien
tgaagtatggccaaaaccctagcgt

SEQ ID NO: 534949 - DNA, 25 bp, Homo sapien
tacttctaaccagggacacggatct

SEQ ID NO: 534950 - DNA, 25 bp, Homo sapien
acctggctgcagtgggcatattacc

SEQ ID NO: 534951 - DNA, 25 bp, Homo sapien
aaggtgagcctgatcacagcctcgg

SEQ ID NO: 534952 - DNA, 25 bp, Homo sapien
aaggcaattctggtaccgcactgtg

SEQ ID NO: 534953 - DNA, 25 bp, Homo sapien
gagtttctcctcttcggccggtgag

SEQ ID NO: 534954 - DNA, 25 bp, Homo sapien
gctgtgaggcacaacgtcttcgagg

SEQ ID NO: 534955 - DNA, 25 bp, Homo sapien
gctgggtccatgtccctgtgctgct

SEQ ID NO: 534956 - DNA, 25 bp, Homo sapien
gaaccgcagagaggtgtgagctgct

SEQ ID NO: 534957 - DNA, 25 bp, Homo sapien
tgctcaggccttgaaccgacgcctg

SEQ ID NO: 534958 - DNA, 25 bp, Homo sapien
agtgagagggaaccgcagagaggtg

SEQ ID NO: 534959 - DNA, 25 bp, Homo sapien
caagtgctgtcttcggatggcgtcc

SEQ ID NO: 534960 - DNA, 25 bp, Homo sapien
gaccacgtttgggtgatcagcagga

SEQ ID NO: 534961 - DNA, 25 bp, Homo sapien
aaaggtcccacagggatcaggcagc

SEQ ID NO: 534962 - DNA, 25 bp, Homo sapien
gcttccacccgaggtcaagtgctgt

SEQ ID NO: 534963 - DNA, 25 bp, Homo sapien
gcagagtccgttactccctttgcag

SEQ ID NO: 534964 - DNA, 25 bp, Homo sapien
ttcccaaaactaacctcagcaggca

SEQ ID NO: 534965 - DNA, 25 bp, Homo sapien
cagtgcagctttgaatagcgcccct

SEQ ID NO: 534966 - DNA, 25 bp, Homo sapien
gaagctaccaacctggagtgaagcg

SEQ ID NO: 534967 - DNA, 25 bp, Homo sapien
cagctgccttcacagccagggagga

SEQ ID NO: 534968 - DNA, 25 bp, Homo sapien
ccttcacagccagggaggaagtcac

SEQ ID NO: 534969 - DNA, 25 bp, Homo sapien
ctgccttcacagccagggaggaagt

SEQ ID NO: 534970 - DNA, 25 bp, Homo sapien
tcagctgccttcacagccagggagg

SEQ ID NO: 534971 - DNA, 25 bp, Homo sapien
agcatggtgtccgcgccctgggcct

SEQ ID NO: 534972 - DNA, 25 bp, Homo sapien
agccacagcatggtgtccgcgccct

SEQ ID NO: 534973 - DNA, 25 bp, Homo sapien
tggaaccccggcatcgcctgcctca

SEQ ID NO: 534974 - DNA, 25 bp, Homo sapien
caggcggtccccgaacctggcgtgg

SEQ ID NO: 534975 - DNA, 25 bp, Homo sapien
caggcggattaggacagcattctcc

SEQ ID NO: 534976 - DNA, 25 bp, Homo sapien
gaaggaagggtcaggcggattagga

SEQ ID NO: 534977 - DNA, 25 bp, Homo sapien
gggtcaggcggattaggacagcatt

SEQ ID NO: 534978 - DNA, 25 bp, Homo sapien
tcaggcggattaggacagcattctc

SEQ ID NO: 534979 - DNA, 25 bp, Homo sapien
ccacagaggcttgaggacaaatgcg

SEQ ID NO: 534980 - DNA, 25 bp, Homo sapien
gcagacagcgctgagaccagttctt

SEQ ID NO: 534981 - DNA, 25 bp, Homo sapien
caaatgcgttaatccgcagacagcg

SEQ ID NO: 534982 - DNA, 25 bp, Homo sapien
gataatagacagtagtggccactcc

SEQ ID NO: 534983 - DNA, 25 bp, Homo sapien
ttggtgaggccaatccggaagagaa

SEQ ID NO: 534984 - DNA, 25 bp, Homo sapien
ggaagagaattctgctcccctccac

SEQ ID NO: 534985 - DNA, 25 bp, Homo sapien
ttcgagctgtgtccttgtggctggc

SEQ ID NO: 534986 - DNA, 25 bp, Homo sapien
ccaacacgcttccagatcattcgag

SEQ ID NO: 534987 - DNA, 25 bp, Homo sapien
caaaaacctggggagtggtgaggca

SEQ ID NO: 534988 - DNA, 25 bp, Homo sapien
tggtgaggcagtctgggcctctccc

SEQ ID NO: 534989 - DNA, 25 bp, Homo sapien
ttcatgcatcattatttccaaaaac

SEQ ID NO: 534990 - DNA, 25 bp, Homo sapien
ctctcccactaccttcctcagctcc

SEQ ID NO: 534991 - DNA, 25 bp, Homo sapien
caggatgcatggaagaaaaatggat

SEQ ID NO: 534992 - DNA, 25 bp, Homo sapien
atggatggccgggtgcccttgggcc

SEQ ID NO: 534993 - DNA, 25 bp, Homo sapien
ttgggcccaccgctccgtcagaacc

SEQ ID NO: 534994 - DNA, 25 bp, Homo sapien
gctccgtcagaaccacttgctgcct

SEQ ID NO: 534995 - DNA, 25 bp, Homo sapien
gatttggagtcatgagatgtaattc

SEQ ID NO: 534996 - DNA, 25 bp, Homo sapien
cacccagggcatataaacagaagaa

SEQ ID NO: 534997 - DNA, 25 bp, Homo sapien
caaatgtcaggatttggagtcatga

SEQ ID NO: 534998 - DNA, 25 bp, Homo sapien
gaagtgcaggtctttcaaatgtcag

SEQ ID NO: 534999 - DNA, 25 bp, Homo sapien
acacagcagcgacaaggaaggcgga

SEQ ID NO: 535000 - DNA, 25 bp, Homo sapien
tgctggcagccttacagacaatgtg

SEQ ID NO: 535001 - DNA, 25 bp, Homo sapien
gtgctggcagccttacagacaatgt

SEQ ID NO: 535002 - DNA, 25 bp, Homo sapien
aaggcacacagcagcgacaaggaag

SEQ ID NO: 535003 - DNA, 25 bp, Homo sapien
tgttttgtgcatagaccatagttcc

SEQ ID NO: 535004 - DNA, 25 bp, Homo sapien
ccatagttccatcaaatggtgttct

SEQ ID NO: 535005 - DNA, 25 bp, Homo sapien
ttcggactggagatcattggtgttc

SEQ ID NO: 535006 - DNA, 25 bp, Homo sapien
tcagtttctgaaccaacattcctcc

SEQ ID NO: 535007 - DNA, 25 bp, Homo sapien
gcaataaaggtaacagagatttaca

SEQ ID NO: 535008 - DNA, 25 bp, Homo sapien
actaaagcctgtgaccccttccact

SEQ ID NO: 535009 - DNA, 25 bp, Homo sapien
gctgttgtgaccaatgaccacaaaa

SEQ ID NO: 535010 - DNA, 25 bp, Homo sapien
caccccctgtagagcagtgcttctt

SEQ ID NO: 535011 - DNA, 25 bp, Homo sapien
tgtattctcctatggttctggagcc

SEQ ID NO: 535012 - DNA, 25 bp, Homo sapien
atgtattctcctatggttctggagc

SEQ ID NO: 535013 - DNA, 25 bp, Homo sapien
ctggatactccaggacacgcttctc

SEQ ID NO: 535014 - DNA, 25 bp, Homo sapien
gatactccaggacacgcttctcatc

SEQ ID NO: 535015 - DNA, 25 bp, Homo sapien
tgaactgaactgcagctgccaagtc

SEQ ID NO: 535016 - DNA, 25 bp, Homo sapien
gaactgaactgcagctgccaagtcc

SEQ ID NO: 535017 - DNA, 25 bp, Homo sapien
gatcaggccggtcgtgagaatgtac

SEQ ID NO: 535018 - DNA, 25 bp, Homo sapien
agcacagggatcaggccggtcgtga

SEQ ID NO: 535019 - DNA, 25 bp, Homo sapien
caggccggtcgtgagaatgtacaca

SEQ ID NO: 535020 - DNA, 25 bp, Homo sapien
ctcgggggtcgtgttctttctccag

SEQ ID NO: 535021 - DNA, 25 bp, Homo sapien
gtggggactgtctgcccgcacccgc

SEQ ID NO: 535022 - DNA, 25 bp, Homo sapien
gccccccacaagagggcaagtggcc

SEQ ID NO: 535023 - DNA, 25 bp, Homo sapien
cccccacaagagggcaagtggccac

SEQ ID NO: 535024 - DNA, 25 bp, Homo sapien
tggggactgtctgcccgcacccgcc

SEQ ID NO: 535025 - DNA, 25 bp, Homo sapien
atgccttagagcctcatgtaccgac

SEQ ID NO: 535026 - DNA, 25 bp, Homo sapien
cactacaggaatacaggaagggaaa

SEQ ID NO: 535027 - DNA, 25 bp, Homo sapien
aaaagatgtccacactacaggaata

SEQ ID NO: 535028 - DNA, 25 bp, Homo sapien
ctcatgtaccgacaggaaaagatgt

SEQ ID NO: 535029 - DNA, 25 bp, Homo sapien
cagcattcttagttgttcacagccc

SEQ ID NO: 535030 - DNA, 25 bp, Homo sapien
gacttctgccaaaagcgatctgccg

SEQ ID NO: 535031 - DNA, 25 bp, Homo sapien
ctttctttgtattcaccgccggtgg

SEQ ID NO: 535032 - DNA, 25 bp, Homo sapien
tgaaccctgggtcgctaacagctgt

SEQ ID NO: 535033 - DNA, 25 bp, Homo sapien
catgggtacatgacttgaagcaaat

SEQ ID NO: 535034 - DNA, 25 bp, Homo sapien
caaatctctctatcaactaattgag

SEQ ID NO: 535035 - DNA, 25 bp, Homo sapien
tcttagagcactgcgaaacccatgt

SEQ ID NO: 535036 - DNA, 25 bp, Homo sapien
ggaaaactgattggcatttctatta

SEQ ID NO: 535037 - DNA, 25 bp, Homo sapien
atttggggccggtgctcctaggcca

SEQ ID NO: 535038 - DNA, 25 bp, Homo sapien
attaggtaaggtcctggcccacagg

SEQ ID NO: 535039 - DNA, 25 bp, Homo sapien
cagccaggtaattaggtaaggtcct

SEQ ID NO: 535040 - DNA, 25 bp, Homo sapien
caaatcccagccaggtaattaggta

SEQ ID NO: 535041 - DNA, 25 bp, Homo sapien
gacagatgcagtcatgtaactacgc

SEQ ID NO: 535042 - DNA, 25 bp, Homo sapien
gactgtggtgtgattcggaagaact

SEQ ID NO: 535043 - DNA, 25 bp, Homo sapien
tcactttggctggtgcatctaagag

SEQ ID NO: 535044 - DNA, 25 bp, Homo sapien
ggaagaactctatcaccccagatgt

SEQ ID NO: 535045 - DNA, 25 bp, Homo sapien
attaattggtgacgcagctgtcctg

SEQ ID NO: 535046 - DNA, 25 bp, Homo sapien
taaggcaccactgcctgtttatcac

SEQ ID NO: 535047 - DNA, 25 bp, Homo sapien
ctgtcctggtggagatagaatcagt

SEQ ID NO: 535048 - DNA, 25 bp, Homo sapien
gtttatcacagtcaattaattggtg

SEQ ID NO: 535049 - DNA, 25 bp, Homo sapien
agagtgttggattcactgcatctca

SEQ ID NO: 535050 - DNA, 25 bp, Homo sapien
tctcaaagttgaaaggccccttgga

SEQ ID NO: 535051 - DNA, 25 bp, Homo sapien
taaaagcatagtacattagctctca

SEQ ID NO: 535052 - DNA, 25 bp, Homo sapien
catccagaaggcctgtcaaactgga

SEQ ID NO: 535053 - DNA, 25 bp, Homo sapien
cccaggtatctgtgctctagccaat

SEQ ID NO: 535054 - DNA, 25 bp, Homo sapien
tgtctataaacagcctagcgcttcc

SEQ ID NO: 535055 - DNA, 25 bp, Homo sapien
tactaagtatttctggcaccaacac

SEQ ID NO: 535056 - DNA, 25 bp, Homo sapien
gacttgcactcaacacttaagctga

SEQ ID NO: 535057 - DNA, 25 bp, Homo sapien
tcaagtccatcttctgtgagctctc

SEQ ID NO: 535058 - DNA, 25 bp, Homo sapien
ttctgtgagctctcttttattgacc

SEQ ID NO: 535059 - DNA, 25 bp, Homo sapien
ccagagtattggcagcaaagttttt

SEQ ID NO: 535060 - DNA, 25 bp, Homo sapien
ttttcaagtccatcttctgtgagct

SEQ ID NO: 535061 - DNA, 25 bp, Homo sapien
caaatttccagatttgcttgggatc

SEQ ID NO: 535062 - DNA, 25 bp, Homo sapien
gatcagacaagtccacaatgtgcag

SEQ ID NO: 535063 - DNA, 25 bp, Homo sapien
cagaacatggagtttatgttcctgc

SEQ ID NO: 535064 - DNA, 25 bp, Homo sapien
atggagtttatgttcctgcttgaaa

SEQ ID NO: 535065 - DNA, 25 bp, Homo sapien
taagggaccctgtctaatgtgccgt

SEQ ID NO: 535066 - DNA, 25 bp, Homo sapien
tctgagcatcagtggacatacgtga

SEQ ID NO: 535067 - DNA, 25 bp, Homo sapien
taagtattgaacctacagacgagga

SEQ ID NO: 535068 - DNA, 25 bp, Homo sapien
tgaatgcaacggcatcctctctgag

SEQ ID NO: 535069 - DNA, 25 bp, Homo sapien
caagccagcgtgtacaagcagctga

SEQ ID NO: 535070 - DNA, 25 bp, Homo sapien
gctagacgaaagtctggagccaggt

SEQ ID NO: 535071 - DNA, 25 bp, Homo sapien
gaccttgagccttacctggtgcctg

SEQ ID NO: 535072 - DNA, 25 bp, Homo sapien
cccatggagataactgctagacgaa

SEQ ID NO: 535073 - DNA, 25 bp, Homo sapien
aagggaaaggaacagacacttggtg

SEQ ID NO: 535074 - DNA, 25 bp, Homo sapien
ctcctacaggccctccaattgtggg

SEQ ID NO: 535075 - DNA, 25 bp, Homo sapien
agcgagcagccatgactgagggtcc

SEQ ID NO: 535076 - DNA, 25 bp, Homo sapien
taagcctctgtaaggcacctgatgg

SEQ ID NO: 535077 - DNA, 25 bp, Homo sapien
tcaagacccaaatgctgccggtgtt

SEQ ID NO: 535078 - DNA, 25 bp, Homo sapien
tctttattagagcacatcgggtcaa

SEQ ID NO: 535079 - DNA, 25 bp, Homo sapien
tgaaggctcgtgtcagaaagtagct

SEQ ID NO: 535080 - DNA, 25 bp, Homo sapien
cgggtgacccttgctgtgtgttgct

SEQ ID NO: 535081 - DNA, 25 bp, Homo sapien
gaaagcgggtaggagtccagcctcc

SEQ ID NO: 535082 - DNA, 25 bp, Homo sapien
ctagccattcaaaagcagggcccag

SEQ ID NO: 535083 - DNA, 25 bp, Homo sapien
tatccccttgtcaaacctagccatt

SEQ ID NO: 535084 - DNA, 25 bp, Homo sapien
cagctgaccatggaggcaaggaaac

SEQ ID NO: 535085 - DNA, 25 bp, Homo sapien
tggttaccgctctcccggatgatct

SEQ ID NO: 535086 - DNA, 25 bp, Homo sapien
gggcttgatctcgacaaaccaggtg

SEQ ID NO: 535087 - DNA, 25 bp, Homo sapien
cggatgatctcacccctggcatctt

SEQ ID NO: 535088 - DNA, 25 bp, Homo sapien
cgacaaaccaggtgaactgtgccac

SEQ ID NO: 535089 - DNA, 25 bp, Homo sapien
aataacatcctgattttttgagggc

SEQ ID NO: 535090 - DNA, 25 bp, Homo sapien
acagtgcgtctggaataacatcctg

SEQ ID NO: 535091 - DNA, 25 bp, Homo sapien
ggaataacatcctgattttttgagg

SEQ ID NO: 535092 - DNA, 25 bp, Homo sapien
ctgacagtgcgtctggaataacatc

SEQ ID NO: 535093 - DNA, 25 bp, Homo sapien
caggatcgttgagctcatgcaggaa

SEQ ID NO: 535094 - DNA, 25 bp, Homo sapien
gagccatttggtgacccaggatcgt

SEQ ID NO: 535095 - DNA, 25 bp, Homo sapien
gaggaagacttctgctgactgaaga

SEQ ID NO: 535096 - DNA, 25 bp, Homo sapien
gactgaagactttacagtgcacctg

SEQ ID NO: 535097 - DNA, 25 bp, Homo sapien
tgctttgccaatgccgctgtttcct

SEQ ID NO: 535098 - DNA, 25 bp, Homo sapien
tcgcttggcgatttcaagggcagtt

SEQ ID NO: 535099 - DNA, 25 bp, Homo sapien
tccaagtcatgagggacaaagtctt

SEQ ID NO: 535100 - DNA, 25 bp, Homo sapien
tgccgctgtttcctccagtgaccaa

SEQ ID NO: 535101 - DNA, 25 bp, Homo sapien
gacccacaggaagaccagctgtaag

SEQ ID NO: 535102 - DNA, 25 bp, Homo sapien
aaagaggagacccacaggaagacca

SEQ ID NO: 535103 - DNA, 25 bp, Homo sapien
acaggaagaccagctgtaaggagtg

SEQ ID NO: 535104 - DNA, 25 bp, Homo sapien
accagctgtaaggagtggggaacac

SEQ ID NO: 535105 - DNA, 25 bp, Homo sapien
tgaaaatattggagattccaacatt

SEQ ID NO: 535106 - DNA, 25 bp, Homo sapien
ctgcatttcctggaccatgatcttt

SEQ ID NO: 535107 - DNA, 25 bp, Homo sapien
ttcctggaccatgatctttccaaac

SEQ ID NO: 535108 - DNA, 25 bp, Homo sapien
ttttgaaaatattggagattccaac

SEQ ID NO: 535109 - DNA, 25 bp, Homo sapien
ggaaacacacccaaaggcactagga

SEQ ID NO: 535110 - DNA, 25 bp, Homo sapien
taggacagagccttagctagcgatt

SEQ ID NO: 535111 - DNA, 25 bp, Homo sapien
agccaaaggtcgcagtccaggtgct

SEQ ID NO: 535112 - DNA, 25 bp, Homo sapien
cacactggctggaaagttccagctg

SEQ ID NO: 535113 - DNA, 25 bp, Homo sapien
ggtgtactcgcgcagccccttggcg

SEQ ID NO: 535114 - DNA, 25 bp, Homo sapien
ttggcgaaccacacgacgctgcggt

SEQ ID NO: 535115 - DNA, 25 bp, Homo sapien
gtacagggacatgccgggagcgccc

SEQ ID NO: 535116 - DNA, 25 bp, Homo sapien
tgtactcgcgcagccccttggcgaa

SEQ ID NO: 535117 - DNA, 25 bp, Homo sapien
tgagtcgtcgcgtccaggtgagtct

SEQ ID NO: 535118 - DNA, 25 bp, Homo sapien
taggtacacgacaggaggaatggca

SEQ ID NO: 535119 - DNA, 25 bp, Homo sapien
cagagctctgcgctggtaatggaaa

SEQ ID NO: 535120 - DNA, 25 bp, Homo sapien
gaacatagagaatagcatccaccct

SEQ ID NO: 535121 - DNA, 25 bp, Homo sapien
gatactcatgcctaccagaaactgg

SEQ ID NO: 535122 - DNA, 25 bp, Homo sapien
tcagtgtggactgcctacttcaggc

SEQ ID NO: 535123 - DNA, 25 bp, Homo sapien
tgatcacttaaagggcacgcagctc

SEQ ID NO: 535124 - DNA, 25 bp, Homo sapien
agtccaggctgtatgtgtggcccga

SEQ ID NO: 535125 - DNA, 25 bp, Homo sapien
gaggagcccatggaactcctgtcca

SEQ ID NO: 535126 - DNA, 25 bp, Homo sapien
cacagagagggcaacgtgggacaca

SEQ ID NO: 535127 - DNA, 25 bp, Homo sapien
gagcctcttggtttgagctgacact

SEQ ID NO: 535128 - DNA, 25 bp, Homo sapien
ttaaagctacggagaagaatgagcc

SEQ ID NO: 535129 - DNA, 25 bp, Homo sapien
gggcactgccctagaaacactcatg

SEQ ID NO: 535130 - DNA, 25 bp, Homo sapien
catacatggtatgctggacaaggca

SEQ ID NO: 535131 - DNA, 25 bp, Homo sapien
ggacttcatctctcaacagcggcag

SEQ ID NO: 535132 - DNA, 25 bp, Homo sapien
gccagccgcagatcatagagaggta

SEQ ID NO: 535133 - DNA, 25 bp, Homo sapien
ggtaattactgctgaaaacgctgcc

SEQ ID NO: 535134 - DNA, 25 bp, Homo sapien
cagcttgacgatgagtgagaacagg

SEQ ID NO: 535135 - DNA, 25 bp, Homo sapien
tctctaaaggaaagttctgctgggc

SEQ ID NO: 535136 - DNA, 25 bp, Homo sapien
tctatggcactcaaaccgttagagc

SEQ ID NO: 535137 - DNA, 25 bp, Homo sapien
gaaggaagctcttgcaaatatgcac

SEQ ID NO: 535138 - DNA, 25 bp, Homo sapien
gcacattgaactcaacagcaggaag

SEQ ID NO: 535139 - DNA, 25 bp, Homo sapien
acagccctgggtaaatgccctgcat

SEQ ID NO: 535140 - DNA, 25 bp, Homo sapien
tataactggcagtcagggactcctc

SEQ ID NO: 535141 - DNA, 25 bp, Homo sapien
tttaaggtaccgacgatgccaccca

SEQ ID NO: 535142 - DNA, 25 bp, Homo sapien
gatgccacccactagcaaatataaa

SEQ ID NO: 535143 - DNA, 25 bp, Homo sapien
tgtatagggcagtcctccaaaaatt

SEQ ID NO: 535144 - DNA, 25 bp, Homo sapien
ggctgtatagggcagtcctccaaaa

SEQ ID NO: 535145 - DNA, 25 bp, Homo sapien
tgtggcgtccagcagctcggaaggc

SEQ ID NO: 535146 - DNA, 25 bp, Homo sapien
ctgtggcgtccagcagctcggaagg

SEQ ID NO: 535147 - DNA, 25 bp, Homo sapien
gcgtccagcagctcggaaggcagct

SEQ ID NO: 535148 - DNA, 25 bp, Homo sapien
tccagcagctcggaaggcagcttac

SEQ ID NO: 535149 - DNA, 25 bp, Homo sapien
tatgaaggtcatggacagcggcaga

SEQ ID NO: 535150 - DNA, 25 bp, Homo sapien
tgaaggtcatggacagcggcagagc

SEQ ID NO: 535151 - DNA, 25 bp, Homo sapien
aaggtcatggacagcggcagagcca

SEQ ID NO: 535152 - DNA, 25 bp, Homo sapien
ctatgaaggtcatggacagcggcag

SEQ ID NO: 535153 - DNA, 25 bp, Homo sapien
cgtgatcactttgccgatgccaagg

SEQ ID NO: 535154 - DNA, 25 bp, Homo sapien
ggacctctccaagtctgacagctta

SEQ ID NO: 535155 - DNA, 25 bp, Homo sapien
cacacagtggatgcaagccaagact

SEQ ID NO: 535156 - DNA, 25 bp, Homo sapien
tactcagggcagatggttcttctct

SEQ ID NO: 535157 - DNA, 25 bp, Homo sapien
ttcacttggttatatattccacagc

SEQ ID NO: 535158 - DNA, 25 bp, Homo sapien
tcacttggttatatattccacagcc

SEQ ID NO: 535159 - DNA, 25 bp, Homo sapien
cacttggttatatattccacagccc

SEQ ID NO: 535160 - DNA, 25 bp, Homo sapien
ttaccagcacgaggccttctttacc

SEQ ID NO: 535161 - DNA, 25 bp, Homo sapien
gttgggctaggttgtaggatccact

SEQ ID NO: 535162 - DNA, 25 bp, Homo sapien
gaaatcatcagcagttaccagcacg

SEQ ID NO: 535163 - DNA, 25 bp, Homo sapien
gctaggttgtaggatccactgggat

SEQ ID NO: 535164 - DNA, 25 bp, Homo sapien
ggctcgtaaagaccccgacatctca

SEQ ID NO: 535165 - DNA, 25 bp, Homo sapien
caggctcgtaaagaccccgacatct

SEQ ID NO: 535166 - DNA, 25 bp, Homo sapien
agaccccgacatctcaagcttgaca

SEQ ID NO: 535167 - DNA, 25 bp, Homo sapien
cgtaaagaccccgacatctcaagct

SEQ ID NO: 535168 - DNA, 25 bp, Homo sapien
cattgctggcgattttagaaatgca

SEQ ID NO: 535169 - DNA, 25 bp, Homo sapien
gcattgttcttgctcgctgacaaag

SEQ ID NO: 535170 - DNA, 25 bp, Homo sapien
aatgcactgatgacacgttttctcc

SEQ ID NO: 535171 - DNA, 25 bp, Homo sapien
gacacgttttctccagacctcctgg

SEQ ID NO: 535172 - DNA, 25 bp, Homo sapien
gaaccatggacttgaccagagcagc

SEQ ID NO: 535173 - DNA, 25 bp, Homo sapien
tgaggtagccccgtaaagacactag

SEQ ID NO: 535174 - DNA, 25 bp, Homo sapien
caccacgtcattgcttgggagtaag

SEQ ID NO: 535175 - DNA, 25 bp, Homo sapien
cagctcatcaagacggcaaattttc

SEQ ID NO: 535176 - DNA, 25 bp, Homo sapien
cctgtcgcacgctttctttctccct

SEQ ID NO: 535177 - DNA, 25 bp, Homo sapien
aagcagagtgggatccagaatcggg

SEQ ID NO: 535178 - DNA, 25 bp, Homo sapien
ggctcccactccctgtcgcacgctt

SEQ ID NO: 535179 - DNA, 25 bp, Homo sapien
gggatccagaatcgggcagcactca

SEQ ID NO: 535180 - DNA, 25 bp, Homo sapien
gggcagcagagcgaccctgggagct

SEQ ID NO: 535181 - DNA, 25 bp, Homo sapien
caactcgtggcttttcctctaaggg

SEQ ID NO: 535182 - DNA, 25 bp, Homo sapien
agctgtggaaacatggccgacccct

SEQ ID NO: 535183 - DNA, 25 bp, Homo sapien
tcatacccctgcagtgttccccagg

SEQ ID NO: 535184 - DNA, 25 bp, Homo sapien
taccagcactgtatagcagggccta

SEQ ID NO: 535185 - DNA, 25 bp, Homo sapien
gctctttataaaacgggcactgtgg

SEQ ID NO: 535186 - DNA, 25 bp, Homo sapien
tactccgatgaataacctacacaag

SEQ ID NO: 535187 - DNA, 25 bp, Homo sapien
gtttctgacaaatccccatacatgg

SEQ ID NO: 535188 - DNA, 25 bp, Homo sapien
cagaagtgcttacccaaattaccca

SEQ ID NO: 535189 - DNA, 25 bp, Homo sapien
agatactagaagattcagaggcgcc

SEQ ID NO: 535190 - DNA, 25 bp, Homo sapien
acagcatctattgtcataactgttg

SEQ ID NO: 535191 - DNA, 25 bp, Homo sapien
tagaagattcagaggcgccagaaac

SEQ ID NO: 535192 - DNA, 25 bp, Homo sapien
cacagatgacctggttttgatgcca

SEQ ID NO: 535193 - DNA, 25 bp, Homo sapien
gagggtcaaccagactctgacttgg

SEQ ID NO: 535194 - DNA, 25 bp, Homo sapien
tgcaaatgctcacatccacagatga

SEQ ID NO: 535195 - DNA, 25 bp, Homo sapien
ttgcagccgtgcaatgggcacagaa

SEQ ID NO: 535196 - DNA, 25 bp, Homo sapien
cagggtaaattgtcattcaccaggg

SEQ ID NO: 535197 - DNA, 25 bp, Homo sapien
caccagggatagttctaatattaac

SEQ ID NO: 535198 - DNA, 25 bp, Homo sapien
ggctgtaggaacagggtaaattgtc

SEQ ID NO: 535199 - DNA, 25 bp, Homo sapien
tgtcattcaccagggatagttctaa

SEQ ID NO: 535200 - DNA, 25 bp, Homo sapien
ttatgaggttccttcattccctttc

SEQ ID NO: 535201 - DNA, 25 bp, Homo sapien
ttctcttcaatcttcttggaaattt

SEQ ID NO: 535202 - DNA, 25 bp, Homo sapien
ttcactttccctgctttgtgcatta

SEQ ID NO: 535203 - DNA, 25 bp, Homo sapien
tcctcagtgacatgacatctgcacg

SEQ ID NO: 535204 - DNA, 25 bp, Homo sapien
catctgcacgaaggattccgcaggg

SEQ ID NO: 535205 - DNA, 25 bp, Homo sapien
ttgcaggagagggacaactactgtt

SEQ ID NO: 535206 - DNA, 25 bp, Homo sapien
ttttaagtgaaggaactatgtgagc

SEQ ID NO: 535207 - DNA, 25 bp, Homo sapien
gaagttttcttatcatttcagagac

SEQ ID NO: 535208 - DNA, 25 bp, Homo sapien
gttttcttatcatttcagagacttg

SEQ ID NO: 535209 - DNA, 25 bp, Homo sapien
cttggttttaagtgaaggaactatg

SEQ ID NO: 535210 - DNA, 25 bp, Homo sapien
cagcggtcttcttacagtgtctcca

SEQ ID NO: 535211 - DNA, 25 bp, Homo sapien
ttcaagttgtcggtgcacatgcccc

SEQ ID NO: 535212 - DNA, 25 bp, Homo sapien
accccacaggtgatttagatgagca

SEQ ID NO: 535213 - DNA, 25 bp, Homo sapien
gaacccggctgagtacttccaactg

SEQ ID NO: 535214 - DNA, 25 bp, Homo sapien
gaaatgcaaattgtaatcaagggcc

SEQ ID NO: 535215 - DNA, 25 bp, Homo sapien
tgctttctagcatgccaggtccctc

SEQ ID NO: 535216 - DNA, 25 bp, Homo sapien
tggtagaataagtgctaggaaatgc

SEQ ID NO: 535217 - DNA, 25 bp, Homo sapien
gggccatgcgacacttaaaaaacta

SEQ ID NO: 535218 - DNA, 25 bp, Homo sapien
aaatgactcaccaggatgaagctcc

SEQ ID NO: 535219 - DNA, 25 bp, Homo sapien
ttcaatcggattgagaatgaaggct

SEQ ID NO: 535220 - DNA, 25 bp, Homo sapien
gtctcactgagacacctagacgcag

SEQ ID NO: 535221 - DNA, 25 bp, Homo sapien
aactcagctgtgatgccgccttctc

SEQ ID NO: 535222 - DNA, 25 bp, Homo sapien
taaaatagttaacactatctagaat

SEQ ID NO: 535223 - DNA, 25 bp, Homo sapien
aatagttaacactatctagaataaa

SEQ ID NO: 535224 - DNA, 25 bp, Homo sapien
tggaataaggacaaagactttagaa

SEQ ID NO: 535225 - DNA, 25 bp, Homo sapien
cagttcttggaataaggacaaagac

SEQ ID NO: 535226 - DNA, 25 bp, Homo sapien
attgcaaatggagcacgtggtggac

SEQ ID NO: 535227 - DNA, 25 bp, Homo sapien
aacccctcggtggacagacatttct

SEQ ID NO: 535228 - DNA, 25 bp, Homo sapien
ctctatcttcagaatgtgggggtgg

SEQ ID NO: 535229 - DNA, 25 bp, Homo sapien
tcactctatcttcagaatgtggggg

SEQ ID NO: 535230 - DNA, 25 bp, Homo sapien
caatggacctctgattgaagcaaga

SEQ ID NO: 535231 - DNA, 25 bp, Homo sapien
gaggaacaaagccagggccactcac

SEQ ID NO: 535232 - DNA, 25 bp, Homo sapien
atgaacgggcccctcgtatccactg

SEQ ID NO: 535233 - DNA, 25 bp, Homo sapien
ggaaacaatggacctctgattgaag

SEQ ID NO: 535234 - DNA, 25 bp, Homo sapien
tagtccagagcgtctagcagaatta

SEQ ID NO: 535235 - DNA, 25 bp, Homo sapien
aaaaagaatagttctctcaagttct

SEQ ID NO: 535236 - DNA, 25 bp, Homo sapien
accctccaacaaagtcggaagatag

SEQ ID NO: 535237 - DNA, 25 bp, Homo sapien
taactcagtcattaactttctgttg

SEQ ID NO: 535238 - DNA, 25 bp, Homo sapien
cttcagttagtagtgatttgaggga

SEQ ID NO: 535239 - DNA, 25 bp, Homo sapien
gacaattttcactcgaagcatcttg

SEQ ID NO: 535240 - DNA, 25 bp, Homo sapien
cataaggattcgaatttggtctcac

SEQ ID NO: 535241 - DNA, 25 bp, Homo sapien
taaccctgggtagcaactgcaggac

SEQ ID NO: 535242 - DNA, 25 bp, Homo sapien
ctgctctggcagtggccaaagtaac

SEQ ID NO: 535243 - DNA, 25 bp, Homo sapien
tctggcagtggccaaagtaaccatg

SEQ ID NO: 535244 - DNA, 25 bp, Homo sapien
tggcagtggccaaagtaaccatggc

SEQ ID NO: 535245 - DNA, 25 bp, Homo sapien
caaggctgctctggcagtggccaaa

SEQ ID NO: 535246 - DNA, 25 bp, Homo sapien
aaacagccttctccgtatcacgtgg

SEQ ID NO: 535247 - DNA, 25 bp, Homo sapien
caggagcaccgagccatgcctggca

SEQ ID NO: 535248 - DNA, 25 bp, Homo sapien
cagcccacagtacattctcgggaaa

SEQ ID NO: 535249 - DNA, 25 bp, Homo sapien
tgctaccagtggctgttctgcaaac

SEQ ID NO: 535250 - DNA, 25 bp, Homo sapien
tattaagcctgagtaaaagactggg

SEQ ID NO: 535251 - DNA, 25 bp, Homo sapien
atggagctccacagggcaaccgttc

SEQ ID NO: 535252 - DNA, 25 bp, Homo sapien
actgcacctgcaaacatcaccatgg

SEQ ID NO: 535253 - DNA, 25 bp, Homo sapien
taagtgacttgccagtggaccagcg

SEQ ID NO: 535254 - DNA, 25 bp, Homo sapien
tagaagggctctgcgctaaaagcaa

SEQ ID NO: 535255 - DNA, 25 bp, Homo sapien
ggacaggcacccctaggttcctgaa

SEQ ID NO: 535256 - DNA, 25 bp, Homo sapien
tctgggagatgctagggaaacccac

SEQ ID NO: 535257 - DNA, 25 bp, Homo sapien
cagtgttcctcagggctgtgtagaa

SEQ ID NO: 535258 - DNA, 25 bp, Homo sapien
acctgagcttccaaatatcgatctc

SEQ ID NO: 535259 - DNA, 25 bp, Homo sapien
tgagcttccaaatatcgatctctct

SEQ ID NO: 535260 - DNA, 25 bp, Homo sapien
cctgagcttccaaatatcgatctct

SEQ ID NO: 535261 - DNA, 25 bp, Homo sapien
gcttccaaatatcgatctctctcca

SEQ ID NO: 535262 - DNA, 25 bp, Homo sapien
gcaagcgttttacctctcagcagaa

SEQ ID NO: 535263 - DNA, 25 bp, Homo sapien
taggaaaccaccgatctgaacttgg

SEQ ID NO: 535264 - DNA, 25 bp, Homo sapien
taagcagacgtctcggctgtgtccc

SEQ ID NO: 535265 - DNA, 25 bp, Homo sapien
tacaaatatagctgaaggccccgac

SEQ ID NO: 535266 - DNA, 25 bp, Homo sapien
catcgcctgtgatgggacctctccg

SEQ ID NO: 535267 - DNA, 25 bp, Homo sapien
tgggctgcgactcagtcctctctgc

SEQ ID NO: 535268 - DNA, 25 bp, Homo sapien
ctagacactgagatctgggctgcga

SEQ ID NO: 535269 - DNA, 25 bp, Homo sapien
tctccggagacagaatgcgatgggc

SEQ ID NO: 535270 - DNA, 25 bp, Homo sapien
gcattcccagaagatctcttctctg

SEQ ID NO: 535271 - DNA, 25 bp, Homo sapien
tctgtggtcccaccagtatgtttgg

SEQ ID NO: 535272 - DNA, 25 bp, Homo sapien
tgtttgggaaatgcggattttacgc

SEQ ID NO: 535273 - DNA, 25 bp, Homo sapien
ggacttctcagaacctttgacataa

SEQ ID NO: 535274 - DNA, 25 bp, Homo sapien
aagccttcctggcattactagacat

SEQ ID NO: 535275 - DNA, 25 bp, Homo sapien
gagccagcacacgtaagcacctcag

SEQ ID NO: 535276 - DNA, 25 bp, Homo sapien
acgtaagcacctcaggcccttgaca

SEQ ID NO: 535277 - DNA, 25 bp, Homo sapien
aaggggcgagccagcacacgtaagc

SEQ ID NO: 535278 - DNA, 25 bp, Homo sapien
ccagcatcattcaggcggtcaataa

SEQ ID NO: 535279 - DNA, 25 bp, Homo sapien
tcattcaggcggtcaataaatattt

SEQ ID NO: 535280 - DNA, 25 bp, Homo sapien
atccccaatgtgcaccagcatcatt

SEQ ID NO: 535281 - DNA, 25 bp, Homo sapien
caatccccaatgtgcaccagcatca

SEQ ID NO: 535282 - DNA, 25 bp, Homo sapien
gagaacagttaatagccgtctccat

SEQ ID NO: 535283 - DNA, 25 bp, Homo sapien
taaattgagaacagttaatagccgt

SEQ ID NO: 535284 - DNA, 25 bp, Homo sapien
aattgagaacagttaatagccgtct

SEQ ID NO: 535285 - DNA, 25 bp, Homo sapien
tgtttaaattgagaacagttaatag

SEQ ID NO: 535286 - DNA, 25 bp, Homo sapien
gcagtttgattcctcctagctccac

SEQ ID NO: 535287 - DNA, 25 bp, Homo sapien
gacaatggtgtttacgtgcctgccc

SEQ ID NO: 535288 - DNA, 25 bp, Homo sapien
gcaaagtagacatctccctctggaa

SEQ ID NO: 535289 - DNA, 25 bp, Homo sapien
ccctctggaatgaaagcctggacaa

SEQ ID NO: 535290 - DNA, 25 bp, Homo sapien
gatgcggtaatttaagcctgtgtcc

SEQ ID NO: 535291 - DNA, 25 bp, Homo sapien
ttaagcctgtgtccgatccagcggg

SEQ ID NO: 535292 - DNA, 25 bp, Homo sapien
gggtgcaaacgatgcggtaatttaa

SEQ ID NO: 535293 - DNA, 25 bp, Homo sapien
tagaacagaggggtgcaaacgatgc

SEQ ID NO: 535294 - DNA, 25 bp, Homo sapien
gagaggacacaattactgacggaca

SEQ ID NO: 535295 - DNA, 25 bp, Homo sapien
tatatgaacacaacgtttatggtcc

SEQ ID NO: 535296 - DNA, 25 bp, Homo sapien
gatcagcctagtcagaaaacaacat

SEQ ID NO: 535297 - DNA, 25 bp, Homo sapien
ggaaaacacaatcaacagcgcgctt

SEQ ID NO: 535298 - DNA, 25 bp, Homo sapien
cattggctatgtcatcctgggcaaa

SEQ ID NO: 535299 - DNA, 25 bp, Homo sapien
gacctcctgaatcaagtgcattctg

SEQ ID NO: 535300 - DNA, 25 bp, Homo sapien
gaatagatcacctggtagatttgtt

SEQ ID NO: 535301 - DNA, 25 bp, Homo sapien
ccttttcctcgtttattcttatcag

SEQ ID NO: 535302 - DNA, 25 bp, Homo sapien
gggcaaacgtttcaagcaccacagg

SEQ ID NO: 535303 - DNA, 25 bp, Homo sapien
tcagaagactgaaaacgaagcccct

SEQ ID NO: 535304 - DNA, 25 bp, Homo sapien
gaaggacgtcctgaatcgcgagaac

SEQ ID NO: 535305 - DNA, 25 bp, Homo sapien
tgcccctggcaagtaatggacaatg

SEQ ID NO: 535306 - DNA, 25 bp, Homo sapien
tggacatatccagggagcggaagtc

SEQ ID NO: 535307 - DNA, 25 bp, Homo sapien
tcctaaatactccaagcagaggtct

SEQ ID NO: 535308 - DNA, 25 bp, Homo sapien
tgcacacagacaggcgtcatcagaa

SEQ ID NO: 535309 - DNA, 25 bp, Homo sapien
gtctgcagttctctggaaaggccca

SEQ ID NO: 535310 - DNA, 25 bp, Homo sapien
tgccgagatggcttgtcggacgtca

SEQ ID NO: 535311 - DNA, 25 bp, Homo sapien
acctggtcccatggtgtggccctgg

SEQ ID NO: 535312 - DNA, 25 bp, Homo sapien
aggagcagagaccacttgtccccat

SEQ ID NO: 535313 - DNA, 25 bp, Homo sapien
gacgtcagggaggacagcgacacct

SEQ ID NO: 535314 - DNA, 25 bp, Homo sapien
aaagcaggaacgcaacagcatctga

SEQ ID NO: 535315 - DNA, 25 bp, Homo sapien
gaaagcaggaacgcaacagcatctg

SEQ ID NO: 535316 - DNA, 25 bp, Homo sapien
aagcaggaacgcaacagcatctgag

SEQ ID NO: 535317 - DNA, 25 bp, Homo sapien
gggatgagagcaccacagacacaga

SEQ ID NO: 535318 - DNA, 25 bp, Homo sapien
tgcagggatgagagcaccacagaca

SEQ ID NO: 535319 - DNA, 25 bp, Homo sapien
cacaatgccgatgggcatgaagaca

SEQ ID NO: 535320 - DNA, 25 bp, Homo sapien
tgcagcacaatgccgatgggcatga

SEQ ID NO: 535321 - DNA, 25 bp, Homo sapien
tgctgcaatgggtatcccaaccagg

SEQ ID NO: 535322 - DNA, 25 bp, Homo sapien
tccttcggacagtcctcttggaaag

SEQ ID NO: 535323 - DNA, 25 bp, Homo sapien
agtgccaggaccaggttgatgcgta

SEQ ID NO: 535324 - DNA, 25 bp, Homo sapien
gtatcccaaccaggttataaatcag

SEQ ID NO: 535325 - DNA, 25 bp, Homo sapien
gtgccaatggccacacccatgtctg

SEQ ID NO: 535326 - DNA, 25 bp, Homo sapien
acgacgtcggctgcctcgatggcca

SEQ ID NO: 535327 - DNA, 25 bp, Homo sapien
caaggccggggagtcattgacccca

SEQ ID NO: 535328 - DNA, 25 bp, Homo sapien
ggccacatccgtgccggtgccaatg

SEQ ID NO: 535329 - DNA, 25 bp, Homo sapien
agcctcctgcttgacagcgtctgcg

SEQ ID NO: 535330 - DNA, 25 bp, Homo sapien
ggtggcaatagctctggctgtcttc

SEQ ID NO: 535331 - DNA, 25 bp, Homo sapien
gattgcgatcatcccacagagcaca

SEQ ID NO: 535332 - DNA, 25 bp, Homo sapien
gtgatcagaaccacgtccacaccca

SEQ ID NO: 535333 - DNA, 25 bp, Homo sapien
aatggttaaaccgttgcgcctcagc

SEQ ID NO: 535334 - DNA, 25 bp, Homo sapien
catctcgtggtctgtcatagcgtca

SEQ ID NO: 535335 - DNA, 25 bp, Homo sapien
ggtttccaatcagcacagagaaggt

SEQ ID NO: 535336 - DNA, 25 bp, Homo sapien
agcgtcactgacatcgctagaaatg

SEQ ID NO: 535337 - DNA, 25 bp, Homo sapien
ctggccggtgcactcaaagggcgct

SEQ ID NO: 535338 - DNA, 25 bp, Homo sapien
attcaggtgactggccggtgcactc

SEQ ID NO: 535339 - DNA, 25 bp, Homo sapien
agcctcattcaggtgactggccggt

SEQ ID NO: 535340 - DNA, 25 bp, Homo sapien
tgactggccggtgcactcaaagggc

SEQ ID NO: 535341 - DNA, 25 bp, Homo sapien
gcctggaagtccgtgcagtatccca

SEQ ID NO: 535342 - DNA, 25 bp, Homo sapien
gaagtccgtgcagtatcccaaggtc

SEQ ID NO: 535343 - DNA, 25 bp, Homo sapien
cactgcctggaagtccgtgcagtat

SEQ ID NO: 535344 - DNA, 25 bp, Homo sapien
tccgtgcagtatcccaaggtctctg

SEQ ID NO: 535345 - DNA, 25 bp, Homo sapien
ctgggaaggtggaaagagaggaaga

SEQ ID NO: 535346 - DNA, 25 bp, Homo sapien
tgggaaggtggaaagagaggaagag

SEQ ID NO: 535347 - DNA, 25 bp, Homo sapien
ggaaggtggaaagagaggaagagga

SEQ ID NO: 535348 - DNA, 25 bp, Homo sapien
gaaggtggaaagagaggaagaggaa

SEQ ID NO: 535349 - DNA, 25 bp, Homo sapien
aaggtggcaagagagcagcggaaag

SEQ ID NO: 535350 - DNA, 25 bp, Homo sapien
gtggcaagagagcagcggaaagcgg

SEQ ID NO: 535351 - DNA, 25 bp, Homo sapien
ggcaagagagcagcggaaagcggga

SEQ ID NO: 535352 - DNA, 25 bp, Homo sapien
aggtggcaagagagcagcggaaagc

SEQ ID NO: 535353 - DNA, 25 bp, Homo sapien
gtcttgtcaaacatcacagtcttta

SEQ ID NO: 535354 - DNA, 25 bp, Homo sapien
gacgccatgggtaatggtgccagtc

SEQ ID NO: 535355 - DNA, 25 bp, Homo sapien
aggagcacccgcatgaccctgggga

SEQ ID NO: 535356 - DNA, 25 bp, Homo sapien
ggggtgttcactgctggcctccgca

SEQ ID NO: 535357 - DNA, 25 bp, Homo sapien
gcaggcaatgcacagcaccgtgatg

SEQ ID NO: 535358 - DNA, 25 bp, Homo sapien
ccttgatgaggatgccgttctgcgc

SEQ ID NO: 535359 - DNA, 25 bp, Homo sapien
caccgtgatggacgtctggaaagca

SEQ ID NO: 535360 - DNA, 25 bp, Homo sapien
cccaccatgacagccgtgggcgtgg

SEQ ID NO: 535361 - DNA, 25 bp, Homo sapien
tcaaagaggcattacaggagcagag

SEQ ID NO: 535362 - DNA, 25 bp, Homo sapien
gcactggacacaacgtgacgaactt

SEQ ID NO: 535363 - DNA, 25 bp, Homo sapien
tgccatcatagagaacacgttactg

SEQ ID NO: 535364 - DNA, 25 bp, Homo sapien
gagagttcaataaggaagctcccag

SEQ ID NO: 535365 - DNA, 25 bp, Homo sapien
gataaaaccgattacaatccatacc

SEQ ID NO: 535366 - DNA, 25 bp, Homo sapien
aatatccactaaaccggtcagccag

SEQ ID NO: 535367 - DNA, 25 bp, Homo sapien
ggaaagtatctctgaacaacaccaa

SEQ ID NO: 535368 - DNA, 25 bp, Homo sapien
caacgtcaaagttgacatgatgatg

SEQ ID NO: 535369 - DNA, 25 bp, Homo sapien
agccatgtgcatttatagaccccgc

SEQ ID NO: 535370 - DNA, 25 bp, Homo sapien
cagtgcttccgggtttcttagtgac

SEQ ID NO: 535371 - DNA, 25 bp, Homo sapien
tgcccacgtgggtagctttaatgag

SEQ ID NO: 535372 - DNA, 25 bp, Homo sapien
caaagtggtgtcattgcccacgtgg

SEQ ID NO: 535373 - DNA, 25 bp, Homo sapien
cccagggaccaccttgacgatatcg

SEQ ID NO: 535374 - DNA, 25 bp, Homo sapien
agggaccaccttgacgatatcgccc

SEQ ID NO: 535375 - DNA, 25 bp, Homo sapien
gatgagggactcatcagccatggta

SEQ ID NO: 535376 - DNA, 25 bp, Homo sapien
tcatcagccatggtattgccttcca

SEQ ID NO: 535377 - DNA, 25 bp, Homo sapien
agcatggtgccagtggatgacgccc

SEQ ID NO: 535378 - DNA, 25 bp, Homo sapien
tactggattgataaatggctgcaag

SEQ ID NO: 535379 - DNA, 25 bp, Homo sapien
aatggctgcaagcagtatgaagaga

SEQ ID NO: 535380 - DNA, 25 bp, Homo sapien
caggaagatcactggtttgaatgtg

SEQ ID NO: 535381 - DNA, 25 bp, Homo sapien
tctagacgtaggtttgagaatgagc

SEQ ID NO: 535382 - DNA, 25 bp, Homo sapien
tctctgggatctagacgtaggtttg

SEQ ID NO: 535383 - DNA, 25 bp, Homo sapien
caggtagtctctgggatctagacgt

SEQ ID NO: 535384 - DNA, 25 bp, Homo sapien
taggtttgagaatgagcttctcacg

SEQ ID NO: 535385 - DNA, 25 bp, Homo sapien
ttcagatccctggaatagttccaag

SEQ ID NO: 535386 - DNA, 25 bp, Homo sapien
cagtcagtgccatcagaggcgcctc

SEQ ID NO: 535387 - DNA, 25 bp, Homo sapien
gaggcgcctcaaactgtaccgaaga

SEQ ID NO: 535388 - DNA, 25 bp, Homo sapien
cccgtgggcacttcggccggcagat

SEQ ID NO: 535389 - DNA, 25 bp, Homo sapien
cgtgcccagggccagctgcaccagc

SEQ ID NO: 535390 - DNA, 25 bp, Homo sapien
gggcgtgcccagggccagctgcacc

SEQ ID NO: 535391 - DNA, 25 bp, Homo sapien
gtgcccagggccagctgcaccagcc

SEQ ID NO: 535392 - DNA, 25 bp, Homo sapien
ctggggcgtgcccagggccagctgc

SEQ ID NO: 535393 - DNA, 25 bp, Homo sapien
tagccagggcttctgaggttttgct

SEQ ID NO: 535394 - DNA, 25 bp, Homo sapien
ctgtggcttggagagacatgagttt

SEQ ID NO: 535395 - DNA, 25 bp, Homo sapien
gatgattaaattgtcctcaccaagg

SEQ ID NO: 535396 - DNA, 25 bp, Homo sapien
caagggtcacaacggtggcttctgt

SEQ ID NO: 535397 - DNA, 25 bp, Homo sapien
gatttgtaggcctgaacgtagaagt

SEQ ID NO: 535398 - DNA, 25 bp, Homo sapien
aaacataagcaatgcttgtggccag

SEQ ID NO: 535399 - DNA, 25 bp, Homo sapien
catgttggctgacctgtgtctcaga

SEQ ID NO: 535400 - DNA, 25 bp, Homo sapien
ggcccagggcaatgaacacaaagag

SEQ ID NO: 535401 - DNA, 25 bp, Homo sapien
agttcaatgagcgacacagggccaa

SEQ ID NO: 535402 - DNA, 25 bp, Homo sapien
ttcaatgagcgacacagggccaagg

SEQ ID NO: 535403 - DNA, 25 bp, Homo sapien
agagttcaatgagcgacacagggcc

SEQ ID NO: 535404 - DNA, 25 bp, Homo sapien
ggagagttcaatgagcgacacaggg

SEQ ID NO: 535405 - DNA, 25 bp, Homo sapien
tctagctttgtgcacagtcgtgaca

SEQ ID NO: 535406 - DNA, 25 bp, Homo sapien
ggatggcaaagcctctagctttgtg

SEQ ID NO: 535407 - DNA, 25 bp, Homo sapien
cacagtcgtgacagtacttcttcct

SEQ ID NO: 535408 - DNA, 25 bp, Homo sapien
aagcctctagctttgtgcacagtcg

SEQ ID NO: 535409 - DNA, 25 bp, Homo sapien
taatatcaccaccaaagcagacgtt

SEQ ID NO: 535410 - DNA, 25 bp, Homo sapien
tgtgatcagtgaaagggcatcttcc

SEQ ID NO: 535411 - DNA, 25 bp, Homo sapien
gatgaccaagagcatgtgagacctt

SEQ ID NO: 535412 - DNA, 25 bp, Homo sapien
gagttcaccacaccttgcagcaagg

SEQ ID NO: 535413 - DNA, 25 bp, Homo sapien
catatagatcattaaggccatgaca

SEQ ID NO: 535414 - DNA, 25 bp, Homo sapien
gctgggtatcagcatatagatcatt

SEQ ID NO: 535415 - DNA, 25 bp, Homo sapien
tgagatttagaatggacagtcctgg

SEQ ID NO: 535416 - DNA, 25 bp, Homo sapien
gggctcgttgctgggtatcagcata

SEQ ID NO: 535417 - DNA, 25 bp, Homo sapien
tccatcttgtggtccaagtgatgag

SEQ ID NO: 535418 - DNA, 25 bp, Homo sapien
catcttgtggtccaagtgatgagcg

SEQ ID NO: 535419 - DNA, 25 bp, Homo sapien
cttgtggtccaagtgatgagcgttg

SEQ ID NO: 535420 - DNA, 25 bp, Homo sapien
caagtgatgagcgttggggtttctc

SEQ ID NO: 535421 - DNA, 25 bp, Homo sapien
ttcactgattatatattactgtttt

SEQ ID NO: 535422 - DNA, 25 bp, Homo sapien
tcttcactgattatatattactgtt

SEQ ID NO: 535423 - DNA, 25 bp, Homo sapien
ttcttcactgattatatattactgt

SEQ ID NO: 535424 - DNA, 25 bp, Homo sapien
cttcactgattatatattactgttt

SEQ ID NO: 535425 - DNA, 25 bp, Homo sapien
ttttgataatatcccgtggaccgat

SEQ ID NO: 535426 - DNA, 25 bp, Homo sapien
tatgttgtggacacaggacgcgcag

SEQ ID NO: 535427 - DNA, 25 bp, Homo sapien
taacaagggctttgctggtggcaag

SEQ ID NO: 535428 - DNA, 25 bp, Homo sapien
caagggcaacggaggcataagtgat

SEQ ID NO: 535429 - DNA, 25 bp, Homo sapien
ccaaggcttgacttccggctctgat

SEQ ID NO: 535430 - DNA, 25 bp, Homo sapien
cagaccaaggcttgacttccggctc

SEQ ID NO: 535431 - DNA, 25 bp, Homo sapien
aacagaccaaggcttgacttccggc

SEQ ID NO: 535432 - DNA, 25 bp, Homo sapien
gaccaaggcttgacttccggctctg

SEQ ID NO: 535433 - DNA, 25 bp, Homo sapien
caaagccgggatactaatgcctgta

SEQ ID NO: 535434 - DNA, 25 bp, Homo sapien
gatgtaatcaaaggtggtcccaagg

SEQ ID NO: 535435 - DNA, 25 bp, Homo sapien
taatcctgagtgttgctggcatgcg

SEQ ID NO: 535436 - DNA, 25 bp, Homo sapien
tctgttacctcactggcaaagccgg

SEQ ID NO: 535437 - DNA, 25 bp, Homo sapien
tgaatactctcagtgggatcctccc

SEQ ID NO: 535438 - DNA, 25 bp, Homo sapien
ccctgaatactctcagtgggatcct

SEQ ID NO: 535439 - DNA, 25 bp, Homo sapien
tcctaacaccctgaatactctcagt

SEQ ID NO: 535440 - DNA, 25 bp, Homo sapien
taacaccctgaatactctcagtggg

SEQ ID NO: 535441 - DNA, 25 bp, Homo sapien
tggatgaactgagctatctcgaggg

SEQ ID NO: 535442 - DNA, 25 bp, Homo sapien
tgactgctgcctcaaaacccaggtc

SEQ ID NO: 535443 - DNA, 25 bp, Homo sapien
tgtcagctcaatgttgccatcggag

SEQ ID NO: 535444 - DNA, 25 bp, Homo sapien
gagcctgcgtagtcctccatgactg

SEQ ID NO: 535445 - DNA, 25 bp, Homo sapien
aaggcaaccaacacggagagaacac

SEQ ID NO: 535446 - DNA, 25 bp, Homo sapien
caaggcaaccaacacggagagaaca

SEQ ID NO: 535447 - DNA, 25 bp, Homo sapien
catcaaggcaaccaacacggagaga

SEQ ID NO: 535448 - DNA, 25 bp, Homo sapien
tcaaggcaaccaacacggagagaac

SEQ ID NO: 535449 - DNA, 25 bp, Homo sapien
tggaaccatcaggtcatggctgtaa

SEQ ID NO: 535450 - DNA, 25 bp, Homo sapien
accatcaggtcatggctgtaacact

SEQ ID NO: 535451 - DNA, 25 bp, Homo sapien
gaaccatcaggtcatggctgtaaca

SEQ ID NO: 535452 - DNA, 25 bp, Homo sapien
ggaaccatcaggtcatggctgtaac

SEQ ID NO: 535453 - DNA, 25 bp, Homo sapien
tactagtacaacctaactgagaagt

SEQ ID NO: 535454 - DNA, 25 bp, Homo sapien
caaaatatggaataatactagtaca

SEQ ID NO: 535455 - DNA, 25 bp, Homo sapien
acactctctggtttacaggaacaac

SEQ ID NO: 535456 - DNA, 25 bp, Homo sapien
ttctgtcctgttgttcctacaaaca

SEQ ID NO: 535457 - DNA, 25 bp, Homo sapien
ggtcatgcctttgatctgtaagaag

SEQ ID NO: 535458 - DNA, 25 bp, Homo sapien
atgcacaggtcatgcctttgatctg

SEQ ID NO: 535459 - DNA, 25 bp, Homo sapien
caggtcatgcctttgatctgtaaga

SEQ ID NO: 535460 - DNA, 25 bp, Homo sapien
cacaggtcatgcctttgatctgtaa

SEQ ID NO: 535461 - DNA, 25 bp, Homo sapien
taggtgtaccatctgtagtttgcac

SEQ ID NO: 535462 - DNA, 25 bp, Homo sapien
gccacttcctgcacagatgtaggtg

SEQ ID NO: 535463 - DNA, 25 bp, Homo sapien
gaattcccagcactgtggtttccaa

SEQ ID NO: 535464 - DNA, 25 bp, Homo sapien
tagtttgcaccatggaattcccagc

SEQ ID NO: 535465 - DNA, 25 bp, Homo sapien
aaagacaccgatatttgctgcaccc

SEQ ID NO: 535466 - DNA, 25 bp, Homo sapien
gctgcaccccttccagttgggagat

SEQ ID NO: 535467 - DNA, 25 bp, Homo sapien
gttgcagtcccttcggccaaagaca

SEQ ID NO: 535468 - DNA, 25 bp, Homo sapien
ccatgtcttctatagcagctctgag

SEQ ID NO: 535469 - DNA, 25 bp, Homo sapien
tgaatactttgaacccctaggagct

SEQ ID NO: 535470 - DNA, 25 bp, Homo sapien
gtggaagtgcctcgatagccctctg

SEQ ID NO: 535471 - DNA, 25 bp, Homo sapien
cttcaatggaatggacacaggatgc

SEQ ID NO: 535472 - DNA, 25 bp, Homo sapien
acaggatgcacaggtcatgccggca

SEQ ID NO: 535473 - DNA, 25 bp, Homo sapien
tcttcgggctgaatgagataaggct

SEQ ID NO: 535474 - DNA, 25 bp, Homo sapien
aatggagctgacacaggactggcag

SEQ ID NO: 535475 - DNA, 25 bp, Homo sapien
gctgataagtgatgacggcctcttg

SEQ ID NO: 535476 - DNA, 25 bp, Homo sapien
tgttgcaggcacacaaccgatggca

SEQ ID NO: 535477 - DNA, 25 bp, Homo sapien
tggttcccaggcacgggtaggcaaa

SEQ ID NO: 535478 - DNA, 25 bp, Homo sapien
tcccaggcacgggtaggcaaagaaa

SEQ ID NO: 535479 - DNA, 25 bp, Homo sapien
ttcccaggcacgggtaggcaaagaa

SEQ ID NO: 535480 - DNA, 25 bp, Homo sapien
ccaggcacgggtaggcaaagaaagc

SEQ ID NO: 535481 - DNA, 25 bp, Homo sapien
ttttcaattcggacagggcttggca

SEQ ID NO: 535482 - DNA, 25 bp, Homo sapien
gaaagcttgtctcttctccacatag

SEQ ID NO: 535483 - DNA, 25 bp, Homo sapien
catggctgccaagtggatgcttgct

SEQ ID NO: 535484 - DNA, 25 bp, Homo sapien
tccacatagcaccactgggggtggc

SEQ ID NO: 535485 - DNA, 25 bp, Homo sapien
tttagatacaagaaagctccggctg

SEQ ID NO: 535486 - DNA, 25 bp, Homo sapien
tggatagttttaagtgtagacacag

SEQ ID NO: 535487 - DNA, 25 bp, Homo sapien
cacagggcacatgtatgcttttaat

SEQ ID NO: 535488 - DNA, 25 bp, Homo sapien
tatgaattccagcattatctgagca

SEQ ID NO: 535489 - DNA, 25 bp, Homo sapien
ttcagcagtctcaaaggtccctgcc

SEQ ID NO: 535490 - DNA, 25 bp, Homo sapien
aagataccccatacaagagagtctg

SEQ ID NO: 535491 - DNA, 25 bp, Homo sapien
tcagggacaatgcttccaggaagga

SEQ ID NO: 535492 - DNA, 25 bp, Homo sapien
atagatgaagccatctccctgggac

SEQ ID NO: 535493 - DNA, 25 bp, Homo sapien
aaaccgaacccaccctggcacaatg

SEQ ID NO: 535494 - DNA, 25 bp, Homo sapien
tggaacaactttctagtaacctcca

SEQ ID NO: 535495 - DNA, 25 bp, Homo sapien
ttctgtatacagctggaacaacttt

SEQ ID NO: 535496 - DNA, 25 bp, Homo sapien
tctagtaacctccaaccatttccca

SEQ ID NO: 535497 - DNA, 25 bp, Homo sapien
caactttctagtaacctccaaccat

SEQ ID NO: 535498 - DNA, 25 bp, Homo sapien
cagcagggtcacatgttggtcactc

SEQ ID NO: 535499 - DNA, 25 bp, Homo sapien
aaggaccactgcttgtggacagaca

SEQ ID NO: 535500 - DNA, 25 bp, Homo sapien
tttctctatcgctgagttcacggcc

SEQ ID NO: 535501 - DNA, 25 bp, Homo sapien
cctctgacggtggagtgccttcctc

SEQ ID NO: 535502 - DNA, 25 bp, Homo sapien
cacacgacactgtggtaattccagc

SEQ ID NO: 535503 - DNA, 25 bp, Homo sapien
gagacacacgacactgtggtaattc

SEQ ID NO: 535504 - DNA, 25 bp, Homo sapien
ggaggagacacacgacactgtggta

SEQ ID NO: 535505 - DNA, 25 bp, Homo sapien
gctgttccacatggggattaatagg

SEQ ID NO: 535506 - DNA, 25 bp, Homo sapien
taacactgctggaggacaagtcttc

SEQ ID NO: 535507 - DNA, 25 bp, Homo sapien
tctgtggaatcctgctagcagctct

SEQ ID NO: 535508 - DNA, 25 bp, Homo sapien
aggaggcctcccaactcagtgactg

SEQ ID NO: 535509 - DNA, 25 bp, Homo sapien
catttccagtttcgcagattgagca

SEQ ID NO: 535510 - DNA, 25 bp, Homo sapien
tctttggtgtcctaaacaatcttgt

SEQ ID NO: 535511 - DNA, 25 bp, Homo sapien
tttggtgtcctaaacaatcttgttg

SEQ ID NO: 535512 - DNA, 25 bp, Homo sapien
tctctttggtgtcctaaacaatctt

SEQ ID NO: 535513 - DNA, 25 bp, Homo sapien
ggtgtcctaaacaatcttgttgcaa

SEQ ID NO: 535514 - DNA, 25 bp, Homo sapien
ctcagtccagctagaggctcacact

SEQ ID NO: 535515 - DNA, 25 bp, Homo sapien
agggcttcccagacgaaatccccag

SEQ ID NO: 535516 - DNA, 25 bp, Homo sapien
agtccagctagaggctcacactggg

SEQ ID NO: 535517 - DNA, 25 bp, Homo sapien
ctgctcagtccagctagaggctcac

SEQ ID NO: 535518 - DNA, 25 bp, Homo sapien
tggctgtgatctgtctctcctgctc

SEQ ID NO: 535519 - DNA, 25 bp, Homo sapien
cttctctggctgtgatctgtctctc

SEQ ID NO: 535520 - DNA, 25 bp, Homo sapien
ctggctgtgatctgtctctcctgct

SEQ ID NO: 535521 - DNA, 25 bp, Homo sapien
ggccccttctctggctgtgatctgt

SEQ ID NO: 535522 - DNA, 25 bp, Homo sapien
cagagcaaaaggtcacctggtcggt

SEQ ID NO: 535523 - DNA, 25 bp, Homo sapien
gcgcggctcggctctaaagcaaaca

SEQ ID NO: 535524 - DNA, 25 bp, Homo sapien
gcacggacaccgaattcttctctga

SEQ ID NO: 535525 - DNA, 25 bp, Homo sapien
agagtgtgagggcatcggcgcggct

SEQ ID NO: 535526 - DNA, 25 bp, Homo sapien
tactggcatctaagtgggtcaagac

SEQ ID NO: 535527 - DNA, 25 bp, Homo sapien
gtgaaagccccaagccatggtagct

SEQ ID NO: 535528 - DNA, 25 bp, Homo sapien
cagcgtgaaaatgaacttggtacca

SEQ ID NO: 535529 - DNA, 25 bp, Homo sapien
caaaggtactagaggcattttgccc

SEQ ID NO: 535530 - DNA, 25 bp, Homo sapien
ttatcagtgagaagcgcaacatcca

SEQ ID NO: 535531 - DNA, 25 bp, Homo sapien
gacgtggacctgacactacctggct

SEQ ID NO: 535532 - DNA, 25 bp, Homo sapien
cagtgccaagaaaagacgccagttt

SEQ ID NO: 535533 - DNA, 25 bp, Homo sapien
taaaagcagaggatgtgggctacca

SEQ ID NO: 535534 - DNA, 25 bp, Homo sapien
tctgaatgatagcatgaaaagtgtc

SEQ ID NO: 535535 - DNA, 25 bp, Homo sapien
catttttgagtggtccaagcctgct

SEQ ID NO: 535536 - DNA, 25 bp, Homo sapien
tcaaagtggtttgtccgctagcgtc

SEQ ID NO: 535537 - DNA, 25 bp, Homo sapien
caagcctgctgttttgaacccacag

SEQ ID NO: 535538 - DNA, 25 bp, Homo sapien
aaactgcagagcttcgtacacttga

SEQ ID NO: 535539 - DNA, 25 bp, Homo sapien
gagccatgcctcaggaacacgattt

SEQ ID NO: 535540 - DNA, 25 bp, Homo sapien
caatttaacggatgaggccaaggct

SEQ ID NO: 535541 - DNA, 25 bp, Homo sapien
catacatggctagcaagacactgat

SEQ ID NO: 535542 - DNA, 25 bp, Homo sapien
cacacctggcgtgttcatttaccat

SEQ ID NO: 535543 - DNA, 25 bp, Homo sapien
gtgatgtgatcacggattatggctc

SEQ ID NO: 535544 - DNA, 25 bp, Homo sapien
atgtgatcacggattatggctcact

SEQ ID NO: 535545 - DNA, 25 bp, Homo sapien
ggtggatagagatgggtgtttccct

SEQ ID NO: 535546 - DNA, 25 bp, Homo sapien
tataaagaccagatatagtccctgc

SEQ ID NO: 535547 - DNA, 25 bp, Homo sapien
gcacatccggagcactaaaagagtt

SEQ ID NO: 535548 - DNA, 25 bp, Homo sapien
taaacatctgttaagctccaggcca

SEQ ID NO: 535549 - DNA, 25 bp, Homo sapien
aaaaactggatgtacctcaggtgac

SEQ ID NO: 535550 - DNA, 25 bp, Homo sapien
tactataggtaatagacactaactt

SEQ ID NO: 535551 - DNA, 25 bp, Homo sapien
tgagattactagaaaacccttacag

SEQ ID NO: 535552 - DNA, 25 bp, Homo sapien
agtgatgagactgcccggcctaaga

SEQ ID NO: 535553 - DNA, 25 bp, Homo sapien
tctagagtccttagaggtactggag

SEQ ID NO: 535554 - DNA, 25 bp, Homo sapien
atcttggttctagttgttcctcatc

SEQ ID NO: 535555 - DNA, 25 bp, Homo sapien
ctcatctacttcaatgccagagacc

SEQ ID NO: 535556 - DNA, 25 bp, Homo sapien
ggttctagttgttcctcatctactt

SEQ ID NO: 535557 - DNA, 25 bp, Homo sapien
cctcatctacttcaatgccagagac

SEQ ID NO: 535558 - DNA, 25 bp, Homo sapien
agctactcgttagatgtgctgctgc

SEQ ID NO: 535559 - DNA, 25 bp, Homo sapien
gccaaaacactcattaaagttcctg

SEQ ID NO: 535560 - DNA, 25 bp, Homo sapien
catcggcagaaaatgagctactcgt

SEQ ID NO: 535561 - DNA, 25 bp, Homo sapien
gttcctggagcttcatgccgccact

SEQ ID NO: 535562 - DNA, 25 bp, Homo sapien
taataaagaagccgagatatagaaa

SEQ ID NO: 535563 - DNA, 25 bp, Homo sapien
cttcactggcatttgtataagatca

SEQ ID NO: 535564 - DNA, 25 bp, Homo sapien
attaataaagaagccgagatataga

SEQ ID NO: 535565 - DNA, 25 bp, Homo sapien
tattaataaagaagccgagatatag

SEQ ID NO: 535566 - DNA, 25 bp, Homo sapien
gctatgatcctcttctaaggaaagg

SEQ ID NO: 535567 - DNA, 25 bp, Homo sapien
ctcgaaatcttgtagagatagctac

SEQ ID NO: 535568 - DNA, 25 bp, Homo sapien
taaggaaaggctatgtgagaggttc

SEQ ID NO: 535569 - DNA, 25 bp, Homo sapien
aaaaaatgacccgacaacaatgaca

SEQ ID NO: 535570 - DNA, 25 bp, Homo sapien
gcatgtctagagtggtcatttgtcc

SEQ ID NO: 535571 - DNA, 25 bp, Homo sapien
tgtccaggataattagcaggcaagt

SEQ ID NO: 535572 - DNA, 25 bp, Homo sapien
tggaaggtaaatcaagtcagctgtc

SEQ ID NO: 535573 - DNA, 25 bp, Homo sapien
caggcaagtctctttaggcataggg

SEQ ID NO: 535574 - DNA, 25 bp, Homo sapien
cgactgacgctaagcacagactcac

SEQ ID NO: 535575 - DNA, 25 bp, Homo sapien
tgggctgtacgggtccttggtcttc

SEQ ID NO: 535576 - DNA, 25 bp, Homo sapien
cactgggctgtacgggtccttggtc

SEQ ID NO: 535577 - DNA, 25 bp, Homo sapien
ttcccttcctgacgactgacgctaa

SEQ ID NO: 535578 - DNA, 25 bp, Homo sapien
caggtggaggtgatgtcggccactg

SEQ ID NO: 535579 - DNA, 25 bp, Homo sapien
ggtgatgtcggccactgccatcatc

SEQ ID NO: 535580 - DNA, 25 bp, Homo sapien
tgcagcagagtctgaggcgctcctc

SEQ ID NO: 535581 - DNA, 25 bp, Homo sapien
tcctgtttcccacagcagctacagt

SEQ ID NO: 535582 - DNA, 25 bp, Homo sapien
aatcacccataatctcactgtccag

SEQ ID NO: 535583 - DNA, 25 bp, Homo sapien
acttccttgaggcatctatgagaac

SEQ ID NO: 535584 - DNA, 25 bp, Homo sapien
tactcttagtgtttgactgactagc

SEQ ID NO: 535585 - DNA, 25 bp, Homo sapien
caatcagctacagatcatatccagg

SEQ ID NO: 535586 - DNA, 25 bp, Homo sapien
tgtgatattgagaacagggcccaga

SEQ ID NO: 535587 - DNA, 25 bp, Homo sapien
tttgagctccctaccagtgagcagt

SEQ ID NO: 535588 - DNA, 25 bp, Homo sapien
cacagcagaattaggccatgtagtg

SEQ ID NO: 535589 - DNA, 25 bp, Homo sapien
tctttggcacaaaggagatcctcaa

SEQ ID NO: 535590 - DNA, 25 bp, Homo sapien
atgctcctttacacattcatattcc

SEQ ID NO: 535591 - DNA, 25 bp, Homo sapien
catgctcctttacacattcatattc

SEQ ID NO: 535592 - DNA, 25 bp, Homo sapien
cctcaaaggtcaaagtttcatttgg

SEQ ID NO: 535593 - DNA, 25 bp, Homo sapien
aaggtcaaagtttcatttggtatat

SEQ ID NO: 535594 - DNA, 25 bp, Homo sapien
gccatcctcaaaggtcaaagtttca

SEQ ID NO: 535595 - DNA, 25 bp, Homo sapien
gtcaaagtttcatttggtatatcca

SEQ ID NO: 535596 - DNA, 25 bp, Homo sapien
tcctcttggaggatgttttcatcag

SEQ ID NO: 535597 - DNA, 25 bp, Homo sapien
tcagaaatacatttgtctaaattaa

SEQ ID NO: 535598 - DNA, 25 bp, Homo sapien
ttggaggatgttttcatcagaaata

SEQ ID NO: 535599 - DNA, 25 bp, Homo sapien
ctcttcctcttggaggatgttttca

SEQ ID NO: 535600 - DNA, 25 bp, Homo sapien
ttagctttatatttctgttctggat

SEQ ID NO: 535601 - DNA, 25 bp, Homo sapien
gaagcctcatttgtttcaagtcttt

SEQ ID NO: 535602 - DNA, 25 bp, Homo sapien
ctttcctttgtgttctgaagcctca

SEQ ID NO: 535603 - DNA, 25 bp, Homo sapien
tttactttcctttgtgttctgaagc

SEQ ID NO: 535604 - DNA, 25 bp, Homo sapien
tgctgacagaactaaggaacggata

SEQ ID NO: 535605 - DNA, 25 bp, Homo sapien
tcacaaaagtctagcatgccatgct

SEQ ID NO: 535606 - DNA, 25 bp, Homo sapien
cagtcgccattgattgtcgtgtaga

SEQ ID NO: 535607 - DNA, 25 bp, Homo sapien
tatctgctgctggattgctctggag

SEQ ID NO: 535608 - DNA, 25 bp, Homo sapien
taaggcactggatttactctaacca

SEQ ID NO: 535609 - DNA, 25 bp, Homo sapien
acatctgagccgtgtttttatggaa

SEQ ID NO: 535610 - DNA, 25 bp, Homo sapien
gataataataattcgctcaggcggg

SEQ ID NO: 535611 - DNA, 25 bp, Homo sapien
gtgactgtgatcctactggcacctt

SEQ ID NO: 535612 - DNA, 25 bp, Homo sapien
aggttactcttcttcaccaaatagg

SEQ ID NO: 535613 - DNA, 25 bp, Homo sapien
ttctccctcagatgcatcttgatgg

SEQ ID NO: 535614 - DNA, 25 bp, Homo sapien
tgatggacaggcaggttactcttct

SEQ ID NO: 535615 - DNA, 25 bp, Homo sapien
caccaaataggttttatgacttatt

SEQ ID NO: 535616 - DNA, 25 bp, Homo sapien
ggtactgttggcgtatttcctctaa

SEQ ID NO: 535617 - DNA, 25 bp, Homo sapien
ctgttggcgtatttcctctaactgc

SEQ ID NO: 535618 - DNA, 25 bp, Homo sapien
ttgtggtactgttggcgtatttcct

SEQ ID NO: 535619 - DNA, 25 bp, Homo sapien
gtactgttggcgtatttcctctaac

SEQ ID NO: 535620 - DNA, 25 bp, Homo sapien
gctcggcagaagatggacgaagacc

SEQ ID NO: 535621 - DNA, 25 bp, Homo sapien
gttgtaatttggctcggcagaagat

SEQ ID NO: 535622 - DNA, 25 bp, Homo sapien
tctccattacttcttagctcttgtc

SEQ ID NO: 535623 - DNA, 25 bp, Homo sapien
aatttggctcggcagaagatggacg

SEQ ID NO: 535624 - DNA, 25 bp, Homo sapien
acttatattgttgagcttcaaattt

SEQ ID NO: 535625 - DNA, 25 bp, Homo sapien
ttatattgttgagcttcaaattttc

SEQ ID NO: 535626 - DNA, 25 bp, Homo sapien
caacttatattgttgagcttcaaat

SEQ ID NO: 535627 - DNA, 25 bp, Homo sapien
ttcaacttatattgttgagcttcaa

SEQ ID NO: 535628 - DNA, 25 bp, Homo sapien
aatggtttagctgtctctccaaatg

SEQ ID NO: 535629 - DNA, 25 bp, Homo sapien
tacgagtaacttctaaggctccaaa

SEQ ID NO: 535630 - DNA, 25 bp, Homo sapien
aaaaaccgcatttcagaccataagt

SEQ ID NO: 535631 - DNA, 25 bp, Homo sapien
ggttgtcgctcctgatttaacaata

SEQ ID NO: 535632 - DNA, 25 bp, Homo sapien
gagaaggacccttcctactgtttca

SEQ ID NO: 535633 - DNA, 25 bp, Homo sapien
tactgtttcatgtgagagcttggga

SEQ ID NO: 535634 - DNA, 25 bp, Homo sapien
aataattgatagcttgacagctctc

SEQ ID NO: 535635 - DNA, 25 bp, Homo sapien
ggagatataaaatcacatgtggtca

SEQ ID NO: 535636 - DNA, 25 bp, Homo sapien
tgacttggggatggaccatgcctcg

SEQ ID NO: 535637 - DNA, 25 bp, Homo sapien
gggatggaccatgcctcgtttcctg

SEQ ID NO: 535638 - DNA, 25 bp, Homo sapien
ttggggatggaccatgcctcgtttc

SEQ ID NO: 535639 - DNA, 25 bp, Homo sapien
gatggaccatgcctcgtttcctgac

SEQ ID NO: 535640 - DNA, 25 bp, Homo sapien
ttttcttgaggaatagggtgataac

SEQ ID NO: 535641 - DNA, 25 bp, Homo sapien
tcctcctcagcatatcaagttgagc

SEQ ID NO: 535642 - DNA, 25 bp, Homo sapien
taacttggtttgtgggctctcctcc

SEQ ID NO: 535643 - DNA, 25 bp, Homo sapien
tcaagttgagcataataataatcat

SEQ ID NO: 535644 - DNA, 25 bp, Homo sapien
gcattccttttaattggcacagata

SEQ ID NO: 535645 - DNA, 25 bp, Homo sapien
tccctggaatctcactttttgtatt

SEQ ID NO: 535646 - DNA, 25 bp, Homo sapien
gggcactttccctggaatctcactt

SEQ ID NO: 535647 - DNA, 25 bp, Homo sapien
gatatccttgatcttggtgggcact

SEQ ID NO: 535648 - DNA, 25 bp, Homo sapien
gctcctgctctgcatataagcatgt

SEQ ID NO: 535649 - DNA, 25 bp, Homo sapien
catgtcgagaagctggcgctcctgc

SEQ ID NO: 535650 - DNA, 25 bp, Homo sapien
caccttcccagcatgtcgagaagct

SEQ ID NO: 535651 - DNA, 25 bp, Homo sapien
agaagctggcgctcctgctctgcat

SEQ ID NO: 535652 - DNA, 25 bp, Homo sapien
gtgtcaaggacctgcaacccaaaat

SEQ ID NO: 535653 - DNA, 25 bp, Homo sapien
tcaaggacctgcaacccaaaatctc

SEQ ID NO: 535654 - DNA, 25 bp, Homo sapien
aaggacctgcaacccaaaatctctg

SEQ ID NO: 535655 - DNA, 25 bp, Homo sapien
tgtcaaggacctgcaacccaaaatc

SEQ ID NO: 535656 - DNA, 25 bp, Homo sapien
gctcacgagaaaaccccggagatat

SEQ ID NO: 535657 - DNA, 25 bp, Homo sapien
gatacttgaaagagctgagatatca

SEQ ID NO: 535658 - DNA, 25 bp, Homo sapien
gatatcaaggaatggagctcacgag

SEQ ID NO: 535659 - DNA, 25 bp, Homo sapien
gaatttatggatggtcggtctcgag

SEQ ID NO: 535660 - DNA, 25 bp, Homo sapien
aggatgtttaagtgtgcagagctca

SEQ ID NO: 535661 - DNA, 25 bp, Homo sapien
gagctcatataagacacagccaaga

SEQ ID NO: 535662 - DNA, 25 bp, Homo sapien
taagtgtgcagagctcatataagac

SEQ ID NO: 535663 - DNA, 25 bp, Homo sapien
gacacagccaagagaccaaatatcc

SEQ ID NO: 535664 - DNA, 25 bp, Homo sapien
ttactagggcttccacagacccaaa

SEQ ID NO: 535665 - DNA, 25 bp, Homo sapien
ccacagacccaaacttctcttctgt

SEQ ID NO: 535666 - DNA, 25 bp, Homo sapien
tactagggcttccacagacccaaac

SEQ ID NO: 535667 - DNA, 25 bp, Homo sapien
tagtaaggtgttccaatacaagttc

SEQ ID NO: 535668 - DNA, 25 bp, Homo sapien
caggtagtaaggtgttccaatacaa

SEQ ID NO: 535669 - DNA, 25 bp, Homo sapien
gtaaggtgttccaatacaagttcga

SEQ ID NO: 535670 - DNA, 25 bp, Homo sapien
ggacaggtagtaaggtgttccaata

SEQ ID NO: 535671 - DNA, 25 bp, Homo sapien
ttattcaggactcttgctataccaa

SEQ ID NO: 535672 - DNA, 25 bp, Homo sapien
agctttgccaccattccgttcttgc

SEQ ID NO: 535673 - DNA, 25 bp, Homo sapien
caagctttgccaccattccgttctt

SEQ ID NO: 535674 - DNA, 25 bp, Homo sapien
tcttgctataccaaagtccccaagc

SEQ ID NO: 535675 - DNA, 25 bp, Homo sapien
atatcttcctgtcatgaatatgttt

SEQ ID NO: 535676 - DNA, 25 bp, Homo sapien
atatgttttagtcctagagaaatct

SEQ ID NO: 535677 - DNA, 25 bp, Homo sapien
aatatcttcctgtcatgaatatgtt

SEQ ID NO: 535678 - DNA, 25 bp, Homo sapien
tatcttcctgtcatgaatatgtttt

SEQ ID NO: 535679 - DNA, 25 bp, Homo sapien
gatcttcactaaataacacaccccg

SEQ ID NO: 535680 - DNA, 25 bp, Homo sapien
tattgatccttttcatgagatcccc

SEQ ID NO: 535681 - DNA, 25 bp, Homo sapien
cacaccccgttgtctattgatcctt

SEQ ID NO: 535682 - DNA, 25 bp, Homo sapien
tcactaaataacacaccccgttgtc

SEQ ID NO: 535683 - DNA, 25 bp, Homo sapien
ctgtaagaaaaggaatcatttggtg

SEQ ID NO: 535684 - DNA, 25 bp, Homo sapien
ttgaagaaggctacaatgttgggat

SEQ ID NO: 535685 - DNA, 25 bp, Homo sapien
gaagaaggctacaatgttgggatgt

SEQ ID NO: 535686 - DNA, 25 bp, Homo sapien
aattgaagaaggctacaatgttggg

SEQ ID NO: 535687 - DNA, 25 bp, Homo sapien
gaattgaagaaggctacaatgttgg

SEQ ID NO: 535688 - DNA, 25 bp, Homo sapien
tgctattgaatcgtagccaaaaaac

SEQ ID NO: 535689 - DNA, 25 bp, Homo sapien
aatgctattgaatcgtagccaaaaa

SEQ ID NO: 535690 - DNA, 25 bp, Homo sapien
tattgaatcgtagccaaaaaaccaa

SEQ ID NO: 535691 - DNA, 25 bp, Homo sapien
ttaaatgctattgaatcgtagccaa

SEQ ID NO: 535692 - DNA, 25 bp, Homo sapien
taagtatgctttcccgaaggcacct

SEQ ID NO: 535693 - DNA, 25 bp, Homo sapien
gccttaatcacatcgtacttatcca

SEQ ID NO: 535694 - DNA, 25 bp, Homo sapien
tccctttagctaagtatgctttccc

SEQ ID NO: 535695 - DNA, 25 bp, Homo sapien
ttgcccgatggccttaatcacatcg

SEQ ID NO: 535696 - DNA, 25 bp, Homo sapien
ccagccttgccaagacagagacaaa

SEQ ID NO: 535697 - DNA, 25 bp, Homo sapien
caacgaagcgtcccggaaggatccg

SEQ ID NO: 535698 - DNA, 25 bp, Homo sapien
gccaacgaagcgtcccggaaggatc

SEQ ID NO: 535699 - DNA, 25 bp, Homo sapien
ccggctccgcggggccaacgaagcg

SEQ ID NO: 535700 - DNA, 25 bp, Homo sapien
tcagcgtgactcaggaacatttcct

SEQ ID NO: 535701 - DNA, 25 bp, Homo sapien
ggcacgctagcatcccatttctgtt

SEQ ID NO: 535702 - DNA, 25 bp, Homo sapien
tacgggctgctataaaggtctgtgg

SEQ ID NO: 535703 - DNA, 25 bp, Homo sapien
cacacaagtaggtagtggcacgcta

SEQ ID NO: 535704 - DNA, 25 bp, Homo sapien
cagctcgcttcttcagctctgacac

SEQ ID NO: 535705 - DNA, 25 bp, Homo sapien
gctctgacacccagtcggggttgtc

SEQ ID NO: 535706 - DNA, 25 bp, Homo sapien
cttgccatccagctcgcttcttcag

SEQ ID NO: 535707 - DNA, 25 bp, Homo sapien
acccagtcggggttgtcatcttcct

SEQ ID NO: 535708 - DNA, 25 bp, Homo sapien
gtgacctccatcaacactgtccgat

SEQ ID NO: 535709 - DNA, 25 bp, Homo sapien
tccaaaatgacagaatcgtgacctc

SEQ ID NO: 535710 - DNA, 25 bp, Homo sapien
caagtcgctctggatccaaaatgac

SEQ ID NO: 535711 - DNA, 25 bp, Homo sapien
gcccaggctcaagtcgctctggatc

SEQ ID NO: 535712 - DNA, 25 bp, Homo sapien
aaaccctcccaatataagaatgtat

SEQ ID NO: 535713 - DNA, 25 bp, Homo sapien
accctcccaatataagaatgtatat

SEQ ID NO: 535714 - DNA, 25 bp, Homo sapien
aaccctcccaatataagaatgtata

SEQ ID NO: 535715 - DNA, 25 bp, Homo sapien
tctttgagccactgcttacgagtag

SEQ ID NO: 535716 - DNA, 25 bp, Homo sapien
ttgctgtactttattacagaaccac

SEQ ID NO: 535717 - DNA, 25 bp, Homo sapien
tgttcaacaaagtgtcaggggtctc

SEQ ID NO: 535718 - DNA, 25 bp, Homo sapien
cactgcttacgagtagtatttttgc

SEQ ID NO: 535719 - DNA, 25 bp, Homo sapien
taaactggaggtgagtatggatgca

SEQ ID NO: 535720 - DNA, 25 bp, Homo sapien
cctctgctgttaaactggaggtgag

SEQ ID NO: 535721 - DNA, 25 bp, Homo sapien
ctctatcgtcctctgctgttaaact

SEQ ID NO: 535722 - DNA, 25 bp, Homo sapien
gaggtgagtatggatgcattttcca

SEQ ID NO: 535723 - DNA, 25 bp, Homo sapien
ttttctcccactgtcgtctatgaag

SEQ ID NO: 535724 - DNA, 25 bp, Homo sapien
cccactgtcgtctatgaagatttgg

SEQ ID NO: 535725 - DNA, 25 bp, Homo sapien
tctcccactgtcgtctatgaagatt

SEQ ID NO: 535726 - DNA, 25 bp, Homo sapien
ctgtaagagctgtattgggtacatt

SEQ ID NO: 535727 - DNA, 25 bp, Homo sapien
gaaattatgtatccatctctgtcca

SEQ ID NO: 535728 - DNA, 25 bp, Homo sapien
ccctgggaggacttacatacacaca

SEQ ID NO: 535729 - DNA, 25 bp, Homo sapien
tctatattatacaagaatgaagccc

SEQ ID NO: 535730 - DNA, 25 bp, Homo sapien
aaaacgaaccattacagtgactgag

SEQ ID NO: 535731 - DNA, 25 bp, Homo sapien
aattttcattaatgctttccaaatc

SEQ ID NO: 535732 - DNA, 25 bp, Homo sapien
tccaaatcagtatggctaccctttc

SEQ ID NO: 535733 - DNA, 25 bp, Homo sapien
tcttctcaatgcactttcaactaaa

SEQ ID NO: 535734 - DNA, 25 bp, Homo sapien
tatggctaccctttctatcttgttc

SEQ ID NO: 535735 - DNA, 25 bp, Homo sapien
cactgtgcttgcttcatttcccaaa

SEQ ID NO: 535736 - DNA, 25 bp, Homo sapien
ttcatttcccaaagctatcctgatt

SEQ ID NO: 535737 - DNA, 25 bp, Homo sapien
ttgcttcatttcccaaagctatcct

SEQ ID NO: 535738 - DNA, 25 bp, Homo sapien
gcttcatttcccaaagctatcctga

SEQ ID NO: 535739 - DNA, 25 bp, Homo sapien
cttggtgtgttatgcttcgaatttt

SEQ ID NO: 535740 - DNA, 25 bp, Homo sapien
gtgtgttatgcttcgaattttttat

SEQ ID NO: 535741 - DNA, 25 bp, Homo sapien
tggtgtgttatgcttcgaatttttt

SEQ ID NO: 535742 - DNA, 25 bp, Homo sapien
tcttggtgtgttatgcttcgaattt

SEQ ID NO: 535743 - DNA, 25 bp, Homo sapien
gatgcacccttgacatactttgagg

SEQ ID NO: 535744 - DNA, 25 bp, Homo sapien
tgagacggcagtggactgatgcacc

SEQ ID NO: 535745 - DNA, 25 bp, Homo sapien
cctcgagagagaagcgttgtagccg

SEQ ID NO: 535746 - DNA, 25 bp, Homo sapien
tctggacaagccgagctacgatgcc

SEQ ID NO: 535747 - DNA, 25 bp, Homo sapien
gaactaataggaattggccctgcag

SEQ ID NO: 535748 - DNA, 25 bp, Homo sapien
taacaccgtgggatatacaatgaca

SEQ ID NO: 535749 - DNA, 25 bp, Homo sapien
tacaaagagatagtagtggccgggc

SEQ ID NO: 535750 - DNA, 25 bp, Homo sapien
gacgcggccactcttgcaaagtttg

SEQ ID NO: 535751 - DNA, 25 bp, Homo sapien
tggatgcttaagggtacagagttca

SEQ ID NO: 535752 - DNA, 25 bp, Homo sapien
gatgcttaagggtacagagttcata

SEQ ID NO: 535753 - DNA, 25 bp, Homo sapien
tgcttaagggtacagagttcataca

SEQ ID NO: 535754 - DNA, 25 bp, Homo sapien
gcttaagggtacagagttcatacag

SEQ ID NO: 535755 - DNA, 25 bp, Homo sapien
acataataaggagttcccacatagg

SEQ ID NO: 535756 - DNA, 25 bp, Homo sapien
agttcccacataggtacaagcaaat

SEQ ID NO: 535757 - DNA, 25 bp, Homo sapien
atttctggaggcacataataaggag

SEQ ID NO: 535758 - DNA, 25 bp, Homo sapien
gaggcacataataaggagttcccac

SEQ ID NO: 535759 - DNA, 25 bp, Homo sapien
gaagacgggcagatccaaagtctcc

SEQ ID NO: 535760 - DNA, 25 bp, Homo sapien
gagaagacgggcagatccaaagtct

SEQ ID NO: 535761 - DNA, 25 bp, Homo sapien
gcagatccaaagtctcccaatttca

SEQ ID NO: 535762 - DNA, 25 bp, Homo sapien
gacgggcagatccaaagtctcccaa

SEQ ID NO: 535763 - DNA, 25 bp, Homo sapien
ttcttgtgaatgtgatttactccaa

SEQ ID NO: 535764 - DNA, 25 bp, Homo sapien
gaatgtgatttactccaaggcacat

SEQ ID NO: 535765 - DNA, 25 bp, Homo sapien
ttgtgaatgtgatttactccaaggc

SEQ ID NO: 535766 - DNA, 25 bp, Homo sapien
tgtgaatgtgatttactccaaggca

SEQ ID NO: 535767 - DNA, 25 bp, Homo sapien
atgtcttcaggaaataactttcctt

SEQ ID NO: 535768 - DNA, 25 bp, Homo sapien
atcacaatatacaagtgtccttcag

SEQ ID NO: 535769 - DNA, 25 bp, Homo sapien
gcattagatcccctccatcacagta

SEQ ID NO: 535770 - DNA, 25 bp, Homo sapien
tattccatcacaatatacaagtgtc

SEQ ID NO: 535771 - DNA, 25 bp, Homo sapien
gtagtggctataaatcaaattcaga

SEQ ID NO: 535772 - DNA, 25 bp, Homo sapien
tataaatcaaattcagaaatgcaca

SEQ ID NO: 535773 - DNA, 25 bp, Homo sapien
aatgcacatatctgggggaattcgt

SEQ ID NO: 535774 - DNA, 25 bp, Homo sapien
ttagaaaagctgtagtggctataaa

SEQ ID NO: 535775 - DNA, 25 bp, Homo sapien
aaggcaacaatattagggtgtttca

SEQ ID NO: 535776 - DNA, 25 bp, Homo sapien
ttctttgaaggcaacaatattaggg

SEQ ID NO: 535777 - DNA, 25 bp, Homo sapien
gaaggcaacaatattagggtgtttc

SEQ ID NO: 535778 - DNA, 25 bp, Homo sapien
tttgaaggcaacaatattagggtgt

SEQ ID NO: 535779 - DNA, 25 bp, Homo sapien
tttggctaaaagaacagcctccttc

SEQ ID NO: 535780 - DNA, 25 bp, Homo sapien
ggagccctccccaatcattctcagg

SEQ ID NO: 535781 - DNA, 25 bp, Homo sapien
tgctttcatgctgaaccaaaagagc

SEQ ID NO: 535782 - DNA, 25 bp, Homo sapien
ttcatggcaaacatctgattactgc

SEQ ID NO: 535783 - DNA, 25 bp, Homo sapien
gaaccaaaagagctctgccgaagga

SEQ ID NO: 535784 - DNA, 25 bp, Homo sapien
gggctccactcacgcagtcaccatg

SEQ ID NO: 535785 - DNA, 25 bp, Homo sapien
gacatggcaaaagtatatcggcccc

SEQ ID NO: 535786 - DNA, 25 bp, Homo sapien
cgcatgcctgcaacaatacttttaa

SEQ ID NO: 535787 - DNA, 25 bp, Homo sapien
caatattacacccatatgatcatta

SEQ ID NO: 535788 - DNA, 25 bp, Homo sapien
cctgaatacactctggacatggcaa

SEQ ID NO: 535789 - DNA, 25 bp, Homo sapien
gttctttccgggcagcgagcgagaa

SEQ ID NO: 535790 - DNA, 25 bp, Homo sapien
ttccgggcagcgagcgagaagaatc

SEQ ID NO: 535791 - DNA, 25 bp, Homo sapien
agcgagaagaatccgttgagccggg

SEQ ID NO: 535792 - DNA, 25 bp, Homo sapien
tctcctggaaaagccgctccgccct

SEQ ID NO: 535793 - DNA, 25 bp, Homo sapien
cgccgccctcctcgttctagaggca

SEQ ID NO: 535794 - DNA, 25 bp, Homo sapien
tcctcgttctagaggcagcccgcca

SEQ ID NO: 535795 - DNA, 25 bp, Homo sapien
ccctcctcgttctagaggcagcccg

SEQ ID NO: 535796 - DNA, 25 bp, Homo sapien
cgttctagaggcagcccgccagggc

SEQ ID NO: 535797 - DNA, 25 bp, Homo sapien
cattgagggaaattgtccccgacta

SEQ ID NO: 535798 - DNA, 25 bp, Homo sapien
agccgggcctacgaagagcacgttt

SEQ ID NO: 535799 - DNA, 25 bp, Homo sapien
cacgttgcggtggaacagtgctgtt

SEQ ID NO: 535800 - DNA, 25 bp, Homo sapien
gactaactgagttctgtctgcaggt

SEQ ID NO: 535801 - DNA, 25 bp, Homo sapien
ccagaaaagtgggctaggtagatag

SEQ ID NO: 535802 - DNA, 25 bp, Homo sapien
gcgcccagcccagagattttattct

SEQ ID NO: 535803 - DNA, 25 bp, Homo sapien
tcttagagctccagaaaagtgggct

SEQ ID NO: 535804 - DNA, 25 bp, Homo sapien
gattttattcttagagctccagaaa

SEQ ID NO: 535805 - DNA, 25 bp, Homo sapien
agtagcagaccccagctgtgttaag

SEQ ID NO: 535806 - DNA, 25 bp, Homo sapien
gcgagtagcagaccccagctgtgtt

SEQ ID NO: 535807 - DNA, 25 bp, Homo sapien
gcagaccccagctgtgttaagctca

SEQ ID NO: 535808 - DNA, 25 bp, Homo sapien
tagcagaccccagctgtgttaagct

SEQ ID NO: 535809 - DNA, 25 bp, Homo sapien
agcttctccacgctaagtgtacttg

SEQ ID NO: 535810 - DNA, 25 bp, Homo sapien
catttgacccaaaatatcctgggag

SEQ ID NO: 535811 - DNA, 25 bp, Homo sapien
cctcagtgaggccaaacgacgtatt

SEQ ID NO: 535812 - DNA, 25 bp, Homo sapien
gtggggaagctttgacacttgtctt

SEQ ID NO: 535813 - DNA, 25 bp, Homo sapien
tgggagaagactacttccttgagat

SEQ ID NO: 535814 - DNA, 25 bp, Homo sapien
tgtgggagaagactacttccttgag

SEQ ID NO: 535815 - DNA, 25 bp, Homo sapien
gatgtgggagaagactacttccttg

SEQ ID NO: 535816 - DNA, 25 bp, Homo sapien
ggatgtgggagaagactacttcctt

SEQ ID NO: 535817 - DNA, 25 bp, Homo sapien
gggctctgttctctcaattcctgcc

SEQ ID NO: 535818 - DNA, 25 bp, Homo sapien
ctggcgatccccaaggtctggtttc

SEQ ID NO: 535819 - DNA, 25 bp, Homo sapien
gacggtccccgaggagctctgtggg

SEQ ID NO: 535820 - DNA, 25 bp, Homo sapien
aattcctgccactaatcctgcctgg

SEQ ID NO: 535821 - DNA, 25 bp, Homo sapien
ggaaagggtaatattctgagttata

SEQ ID NO: 535822 - DNA, 25 bp, Homo sapien
accaagcaatccatcacacaaagag

SEQ ID NO: 535823 - DNA, 25 bp, Homo sapien
ttattcaagaaaagaacttaggagc

SEQ ID NO: 535824 - DNA, 25 bp, Homo sapien
agaactattgtatcaaaatcctaga

SEQ ID NO: 535825 - DNA, 25 bp, Homo sapien
cggcaacagcaactacgtagaaaca

SEQ ID NO: 535826 - DNA, 25 bp, Homo sapien
gtttttcgtcagttatttacagatc

SEQ ID NO: 535827 - DNA, 25 bp, Homo sapien
ggcaacagcaactacgtagaaacag

SEQ ID NO: 535828 - DNA, 25 bp, Homo sapien
aagctctttgacaataatattgtgc

SEQ ID NO: 535829 - DNA, 25 bp, Homo sapien
catagtaactcccaagaagaatgtg

SEQ ID NO: 535830 - DNA, 25 bp, Homo sapien
acaataatattgtgcatcatctggt

SEQ ID NO: 535831 - DNA, 25 bp, Homo sapien
ttgacaataatattgtgcatcatct

SEQ ID NO: 535832 - DNA, 25 bp, Homo sapien
ttactgacatcgtggaaaatattgg

SEQ ID NO: 535833 - DNA, 25 bp, Homo sapien
agctctaaaccacaagcatattcca

SEQ ID NO: 535834 - DNA, 25 bp, Homo sapien
ctccctctgccaccgtcgcttgtat

SEQ ID NO: 535835 - DNA, 25 bp, Homo sapien
tcctcctagtatgagttacttcctc

SEQ ID NO: 535836 - DNA, 25 bp, Homo sapien
tcaaagctacctgcaaaaaagggac

SEQ ID NO: 535837 - DNA, 25 bp, Homo sapien
gattacctcagcaagttttagagca

SEQ ID NO: 535838 - DNA, 25 bp, Homo sapien
aaaaagggacaatgacctcactggc

SEQ ID NO: 535839 - DNA, 25 bp, Homo sapien
tgttttaacaacatggtctcagctg

SEQ ID NO: 535840 - DNA, 25 bp, Homo sapien
tgtggcttatttagcaaattccaca

SEQ ID NO: 535841 - DNA, 25 bp, Homo sapien
cctttctgatgcacacttaacggat

SEQ ID NO: 535842 - DNA, 25 bp, Homo sapien
cttaacggataccatttgagcaggg

SEQ ID NO: 535843 - DNA, 25 bp, Homo sapien
gcagctgccctgacaaaaaattcct

SEQ ID NO: 535844 - DNA, 25 bp, Homo sapien
caagtatctcttttggctggacaac

SEQ ID NO: 535845 - DNA, 25 bp, Homo sapien
gtcacgtcaaaactattacatctct

SEQ ID NO: 535846 - DNA, 25 bp, Homo sapien
ttagtaactgtcgtcacgtcaaaac

SEQ ID NO: 535847 - DNA, 25 bp, Homo sapien
actgtcgtcacgtcaaaactattac

SEQ ID NO: 535848 - DNA, 25 bp, Homo sapien
cttctttagtaactgtcgtcacgtc

SEQ ID NO: 535849 - DNA, 25 bp, Homo sapien
cctcaagaaagccatttaagctagg

SEQ ID NO: 535850 - DNA, 25 bp, Homo sapien
catttaagctaggtttcactttcag

SEQ ID NO: 535851 - DNA, 25 bp, Homo sapien
tctccctcaaccgaacatccggtga

SEQ ID NO: 535852 - DNA, 25 bp, Homo sapien
gaaagccatttaagctaggtttcac

SEQ ID NO: 535853 - DNA, 25 bp, Homo sapien
ggcccgttttgatttgaagtataga

SEQ ID NO: 535854 - DNA, 25 bp, Homo sapien
cttaatcaaagtacccctattcatc

SEQ ID NO: 535855 - DNA, 25 bp, Homo sapien
ttcttaatcaaagtacccctattca

SEQ ID NO: 535856 - DNA, 25 bp, Homo sapien
gcccgttttgatttgaagtatagaa

SEQ ID NO: 535857 - DNA, 25 bp, Homo sapien
ttggcaattttcgtatctcatattt

SEQ ID NO: 535858 - DNA, 25 bp, Homo sapien
gcacatttggcaattttcgtatctc

SEQ ID NO: 535859 - DNA, 25 bp, Homo sapien
ctaagatcagcggtcttctcctagc

SEQ ID NO: 535860 - DNA, 25 bp, Homo sapien
catttggcaattttcgtatctcata

SEQ ID NO: 535861 - DNA, 25 bp, Homo sapien
gccatcacacatgaccatttctttc

SEQ ID NO: 535862 - DNA, 25 bp, Homo sapien
ccatcacacatgaccatttctttca

SEQ ID NO: 535863 - DNA, 25 bp, Homo sapien
catcacacatgaccatttctttcaa

SEQ ID NO: 535864 - DNA, 25 bp, Homo sapien
tcacacatgaccatttctttcaact

SEQ ID NO: 535865 - DNA, 25 bp, Homo sapien
acggagctgcctgagcagttctggc

SEQ ID NO: 535866 - DNA, 25 bp, Homo sapien
ttcctcatgctacggagctgcctga

SEQ ID NO: 535867 - DNA, 25 bp, Homo sapien
tgctacggagctgcctgagcagttc

SEQ ID NO: 535868 - DNA, 25 bp, Homo sapien
ctcatgctacggagctgcctgagca

SEQ ID NO: 535869 - DNA, 25 bp, Homo sapien
gatgcagctgccaccaactcaggac

SEQ ID NO: 535870 - DNA, 25 bp, Homo sapien
tctgtagctctttgaggcgggccag

SEQ ID NO: 535871 - DNA, 25 bp, Homo sapien
tacatgcctcaccttgtgcaatatg

SEQ ID NO: 535872 - DNA, 25 bp, Homo sapien
tcactaaggcctaagacacactggg

SEQ ID NO: 535873 - DNA, 25 bp, Homo sapien
cacattaactccctaaggtctccat

SEQ ID NO: 535874 - DNA, 25 bp, Homo sapien
taaggtcatgcacctcacagctcac

SEQ ID NO: 535875 - DNA, 25 bp, Homo sapien
tattagactcatgcaaaagatgtcc

SEQ ID NO: 535876 - DNA, 25 bp, Homo sapien
ccataaccacctgtaagctaagcta

SEQ ID NO: 535877 - DNA, 25 bp, Homo sapien
gatgtcctaattctaagtaacccaa

SEQ ID NO: 535878 - DNA, 25 bp, Homo sapien
cccaggcgacagtgcaaaattcgtc

SEQ ID NO: 535879 - DNA, 25 bp, Homo sapien
ggtcccaccaaactactctgattca

SEQ ID NO: 535880 - DNA, 25 bp, Homo sapien
gaaagtatctatgctgcttgctaaa

SEQ ID NO: 535881 - DNA, 25 bp, Homo sapien
tctatgctgcttgctaaaatacaga

SEQ ID NO: 535882 - DNA, 25 bp, Homo sapien
aatacagattctttggtcccaccaa

SEQ ID NO: 535883 - DNA, 25 bp, Homo sapien
gcttatgaaaacgtcagaggctatc

SEQ ID NO: 535884 - DNA, 25 bp, Homo sapien
taggcagccgacttaaaacacagat

SEQ ID NO: 535885 - DNA, 25 bp, Homo sapien
tcaagagccgtatccgaccttaggt

SEQ ID NO: 535886 - DNA, 25 bp, Homo sapien
tcatactaagtacacaaggactctc

SEQ ID NO: 535887 - DNA, 25 bp, Homo sapien
ttgtttccactgacagcatcgcatc

SEQ ID NO: 535888 - DNA, 25 bp, Homo sapien
ccttcaaaacgacattcaagacgtc

SEQ ID NO: 535889 - DNA, 25 bp, Homo sapien
gcatcgcatcagtacttcaaatgca

SEQ ID NO: 535890 - DNA, 25 bp, Homo sapien
caagacgtcccctttcagactgact

SEQ ID NO: 535891 - DNA, 25 bp, Homo sapien
taatctgcttcagcactgtacttaa

SEQ ID NO: 535892 - DNA, 25 bp, Homo sapien
atctgcttcagcactgtacttaacc

SEQ ID NO: 535893 - DNA, 25 bp, Homo sapien
tactaatctgcttcagcactgtact

SEQ ID NO: 535894 - DNA, 25 bp, Homo sapien
tgctactaatctgcttcagcactgt

SEQ ID NO: 535895 - DNA, 25 bp, Homo sapien
aacaacttcgcttttggagcttgga

SEQ ID NO: 535896 - DNA, 25 bp, Homo sapien
acgaatgaggcacagcgaccagctt

SEQ ID NO: 535897 - DNA, 25 bp, Homo sapien
taatcggagcactgttttccaggca

SEQ ID NO: 535898 - DNA, 25 bp, Homo sapien
ctgacaggagttgatgacaagacga

SEQ ID NO: 535899 - DNA, 25 bp, Homo sapien
tcggaggataactgaatgtacagca

SEQ ID NO: 535900 - DNA, 25 bp, Homo sapien
ccgggaagtcggaggataactgaat

SEQ ID NO: 535901 - DNA, 25 bp, Homo sapien
gaagtcggaggataactgaatgtac

SEQ ID NO: 535902 - DNA, 25 bp, Homo sapien
aggataactgaatgtacagcacggg

SEQ ID NO: 535903 - DNA, 25 bp, Homo sapien
gggccaagagcgctgaactgcggta

SEQ ID NO: 535904 - DNA, 25 bp, Homo sapien
ggccaagagcgctgaactgcggtac

SEQ ID NO: 535905 - DNA, 25 bp, Homo sapien
gagcagcgagtagcaaaattgcagc

SEQ ID NO: 535906 - DNA, 25 bp, Homo sapien
gccgagcagcgagtagcaaaattgc

SEQ ID NO: 535907 - DNA, 25 bp, Homo sapien
cgagtagcaaaattgcagccgctga

SEQ ID NO: 535908 - DNA, 25 bp, Homo sapien
gcagcgagtagcaaaattgcagccg

SEQ ID NO: 535909 - DNA, 25 bp, Homo sapien
agactctaccaacaccgcggaaaca

SEQ ID NO: 535910 - DNA, 25 bp, Homo sapien
gcaactgtaacagtgcgtccccatg

SEQ ID NO: 535911 - DNA, 25 bp, Homo sapien
ctttgctttccggtgggcaacaggg

SEQ ID NO: 535912 - DNA, 25 bp, Homo sapien
aaagccaaccaggagcgcaactgta

SEQ ID NO: 535913 - DNA, 25 bp, Homo sapien
cgagaccgccgaacgagatagtgga

SEQ ID NO: 535914 - DNA, 25 bp, Homo sapien
ggttcgctggcctaggaggatccta

SEQ ID NO: 535915 - DNA, 25 bp, Homo sapien
ccaccccgcgattctattcctggag

SEQ ID NO: 535916 - DNA, 25 bp, Homo sapien
tcgccagtgttcagcaaggttcgct

SEQ ID NO: 535917 - DNA, 25 bp, Homo sapien
gagggaaagggtctatagcgttcat

SEQ ID NO: 535918 - DNA, 25 bp, Homo sapien
aaatagtcataaagagggccgggcg

SEQ ID NO: 535919 - DNA, 25 bp, Homo sapien
tattctaattttcatcatagtttaa

SEQ ID NO: 535920 - DNA, 25 bp, Homo sapien
catagtttaaaaatagtcataaaga

SEQ ID NO: 535921 - DNA, 25 bp, Homo sapien
tttcatcatagtttaaaaatagtca

SEQ ID NO: 535922 - DNA, 25 bp, Homo sapien
tgccctggcggaatgtacaggtctt

SEQ ID NO: 535923 - DNA, 25 bp, Homo sapien
ttactaccttatcccaagagcctag

SEQ ID NO: 535924 - DNA, 25 bp, Homo sapien
catgcatttgggatagatcaaggta

SEQ ID NO: 535925 - DNA, 25 bp, Homo sapien
caaatgcaacatgttccctgccctg

SEQ ID NO: 535926 - DNA, 25 bp, Homo sapien
gaaggggcaacatcgcaaaccatca

SEQ ID NO: 535927 - DNA, 25 bp, Homo sapien
gagaaggggcaacatcgcaaaccat

SEQ ID NO: 535928 - DNA, 25 bp, Homo sapien
ggggcaacatcgcaaaccatcacat

SEQ ID NO: 535929 - DNA, 25 bp, Homo sapien
gggcaacatcgcaaaccatcacatc

SEQ ID NO: 535930 - DNA, 25 bp, Homo sapien
ggtcctgtgatgtgagtctgcttct

SEQ ID NO: 535931 - DNA, 25 bp, Homo sapien
cctgtgatgtgagtctgcttctctc

SEQ ID NO: 535932 - DNA, 25 bp, Homo sapien
cctggtcctgtgatgtgagtctgct

SEQ ID NO: 535933 - DNA, 25 bp, Homo sapien
gcctggtcctgtgatgtgagtctgc

SEQ ID NO: 535934 - DNA, 25 bp, Homo sapien
catataactatgtggcagggttaga

SEQ ID NO: 535935 - DNA, 25 bp, Homo sapien
gtgcagggaactatacttaatcagc

SEQ ID NO: 535936 - DNA, 25 bp, Homo sapien
tctctactgcatattctggttgata

SEQ ID NO: 535937 - DNA, 25 bp, Homo sapien
caatatagatgtaccagcaaggaag

SEQ ID NO: 535938 - DNA, 25 bp, Homo sapien
taaatcagcacctactgaggacctg

SEQ ID NO: 535939 - DNA, 25 bp, Homo sapien
tggaccttgaggatactgcaactgg

SEQ ID NO: 535940 - DNA, 25 bp, Homo sapien
gaatcaatttgaggagcagcaacaa

SEQ ID NO: 535941 - DNA, 25 bp, Homo sapien
cctgacatgttgaaggtactgagca

SEQ ID NO: 535942 - DNA, 25 bp, Homo sapien
ctatgggttgatattatatccatac

SEQ ID NO: 535943 - DNA, 25 bp, Homo sapien
tattaaagatgtgttaaaccagaag

SEQ ID NO: 535944 - DNA, 25 bp, Homo sapien
catggaactcatgactgcttgcatt

SEQ ID NO: 535945 - DNA, 25 bp, Homo sapien
taaccattcaataggtagcactctg

SEQ ID NO: 535946 - DNA, 25 bp, Homo sapien
ccccgtactctgcatggaccatgtg

SEQ ID NO: 535947 - DNA, 25 bp, Homo sapien
caaccttctgttggtgactacttca

SEQ ID NO: 535948 - DNA, 25 bp, Homo sapien
cagaggccgtttcttgattactcac

SEQ ID NO: 535949 - DNA, 25 bp, Homo sapien
gcagaggccgtttcttgattactca

SEQ ID NO: 535950 - DNA, 25 bp, Homo sapien
gacaagaacaatggcagaggccgtt

SEQ ID NO: 535951 - DNA, 25 bp, Homo sapien
tcagacaagaacaatggcagaggcc

SEQ ID NO: 535952 - DNA, 25 bp, Homo sapien
aagaggaagcttgcactttcacatc

SEQ ID NO: 535953 - DNA, 25 bp, Homo sapien
aacacatcagttattaccctgtctg

SEQ ID NO: 535954 - DNA, 25 bp, Homo sapien
catacagaggtggacagttgaacac

SEQ ID NO: 535955 - DNA, 25 bp, Homo sapien
gaggtggacagttgaacacatcagt

SEQ ID NO: 535956 - DNA, 25 bp, Homo sapien
actatttggacttttagatcatatc

SEQ ID NO: 535957 - DNA, 25 bp, Homo sapien
tttggacttttagatcatatccatc

SEQ ID NO: 535958 - DNA, 25 bp, Homo sapien
gacaattctttaaggaagtacagga

SEQ ID NO: 535959 - DNA, 25 bp, Homo sapien
tcttcattactatttggacttttag

SEQ ID NO: 535960 - DNA, 25 bp, Homo sapien
gaaaaagtgaagaacatctaagggc

SEQ ID NO: 535961 - DNA, 25 bp, Homo sapien
aagtccaccttgggttgtgaccaga

SEQ ID NO: 535962 - DNA, 25 bp, Homo sapien
aagaacatctaagggctggcaatca

SEQ ID NO: 535963 - DNA, 25 bp, Homo sapien
gggatgaagtcctccaaattggtga

SEQ ID NO: 535964 - DNA, 25 bp, Homo sapien
gagattccagttgtagctatgtttc

SEQ ID NO: 535965 - DNA, 25 bp, Homo sapien
aacagtgtttttcttggagggagat

SEQ ID NO: 535966 - DNA, 25 bp, Homo sapien
agttgtagctatgtttcacttgtgc

SEQ ID NO: 535967 - DNA, 25 bp, Homo sapien
catgaatcgaataaataacgaatct

SEQ ID NO: 535968 - DNA, 25 bp, Homo sapien
agcttaagggcagtaaataattaag

SEQ ID NO: 535969 - DNA, 25 bp, Homo sapien
aagggaacatttactggatgtcatt

SEQ ID NO: 535970 - DNA, 25 bp, Homo sapien
cagttacagcattagcagtgtgcag

SEQ ID NO: 535971 - DNA, 25 bp, Homo sapien
aggatggagccaggtcttgttgaca

SEQ ID NO: 535972 - DNA, 25 bp, Homo sapien
tgagctccgtaaacaataaccagta

SEQ ID NO: 535973 - DNA, 25 bp, Homo sapien
tttagataaacttcagggtcctgga

SEQ ID NO: 535974 - DNA, 25 bp, Homo sapien
gaagcatgacccttagcatcaggga

SEQ ID NO: 535975 - DNA, 25 bp, Homo sapien
aaggcctgtcgcagggtgccctaat

SEQ ID NO: 535976 - DNA, 25 bp, Homo sapien
tttctactccctgatatttagtgcc

SEQ ID NO: 535977 - DNA, 25 bp, Homo sapien
ttcgccgttctccaaaatagtacaa

SEQ ID NO: 535978 - DNA, 25 bp, Homo sapien
gccgttctccaaaatagtacaatct

SEQ ID NO: 535979 - DNA, 25 bp, Homo sapien
ttctactccctgatatttagtgcca

SEQ ID NO: 535980 - DNA, 25 bp, Homo sapien
aaaaaaggaaccatggttcatctgc

SEQ ID NO: 535981 - DNA, 25 bp, Homo sapien
ctacaaaaaaggaaccatggttcat

SEQ ID NO: 535982 - DNA, 25 bp, Homo sapien
aggaaccatggttcatctgcactct

SEQ ID NO: 535983 - DNA, 25 bp, Homo sapien
tctatattaggtaccttagtctttc

SEQ ID NO: 535984 - DNA, 25 bp, Homo sapien
tttcactggcaatcaggcaggcaca

SEQ ID NO: 535985 - DNA, 25 bp, Homo sapien
atatttcactggcaatcaggcaggc

SEQ ID NO: 535986 - DNA, 25 bp, Homo sapien
ttcactggcaatcaggcaggcacaa

SEQ ID NO: 535987 - DNA, 25 bp, Homo sapien
tatttcactggcaatcaggcaggca

SEQ ID NO: 535988 - DNA, 25 bp, Homo sapien
tccactccaacacttccttggagaa

SEQ ID NO: 535989 - DNA, 25 bp, Homo sapien
ccactccaacacttccttggagaat

SEQ ID NO: 535990 - DNA, 25 bp, Homo sapien
ttgagccatccactccaacacttcc

SEQ ID NO: 535991 - DNA, 25 bp, Homo sapien
tcatcgatcatgattctactgaccc

SEQ ID NO: 535992 - DNA, 25 bp, Homo sapien
gatcatcgatcatgattctactgac

SEQ ID NO: 535993 - DNA, 25 bp, Homo sapien
tctactgaccctattatggaagtgc

SEQ ID NO: 535994 - DNA, 25 bp, Homo sapien
atcgatcatgattctactgacccta

SEQ ID NO: 535995 - DNA, 25 bp, Homo sapien
aaataaataatatgtatgtcatatc

SEQ ID NO: 535996 - DNA, 25 bp, Homo sapien
ctaaaataaataatatgtatgtcat

SEQ ID NO: 535997 - DNA, 25 bp, Homo sapien
aataaataatatgtatgtcatatct

SEQ ID NO: 535998 - DNA, 25 bp, Homo sapien
taaaataaataatatgtatgtcata

SEQ ID NO: 535999 - DNA, 25 bp, Homo sapien
gatcaaactgcaaggcagcagcaag

SEQ ID NO: 536000 - DNA, 25 bp, Homo sapien
atcaaactgcaaggcagcagcaagg

SEQ ID NO: 536001 - DNA, 25 bp, Homo sapien
ctttgtctagaaactgtatgacttc

SEQ ID NO: 536002 - DNA, 25 bp, Homo sapien
tttctttgtctagaaactgtatgac

SEQ ID NO: 536003 - DNA, 25 bp, Homo sapien
gatagtggtttggatgtttctttgt

SEQ ID NO: 536004 - DNA, 25 bp, Homo sapien
tagtggtttggatgtttctttgtct

SEQ ID NO: 536005 - DNA, 25 bp, Homo sapien
ttggattccgatagaaagactggcc

SEQ ID NO: 536006 - DNA, 25 bp, Homo sapien
gatagaaagactggcctcccgaaga

SEQ ID NO: 536007 - DNA, 25 bp, Homo sapien
aaagactggcctcccgaagatggaa

SEQ ID NO: 536008 - DNA, 25 bp, Homo sapien
ttccgatagaaagactggcctcccg

SEQ ID NO: 536009 - DNA, 25 bp, Homo sapien
taagtgaggtctaggtcaaatccat

SEQ ID NO: 536010 - DNA, 25 bp, Homo sapien
aagtgaggtctaggtcaaatccatc

SEQ ID NO: 536011 - DNA, 25 bp, Homo sapien
ccaagttgtctttttagatgagcca

SEQ ID NO: 536012 - DNA, 25 bp, Homo sapien
gatgagccagatgaaaaactcttat

SEQ ID NO: 536013 - DNA, 25 bp, Homo sapien
gagccagatgaaaaactcttatcag

SEQ ID NO: 536014 - DNA, 25 bp, Homo sapien
tttagatgagccagatgaaaaactc

SEQ ID NO: 536015 - DNA, 25 bp, Homo sapien
ccagcagaataatcacagtaacagc

SEQ ID NO: 536016 - DNA, 25 bp, Homo sapien
gaataatcacagtaacagcagtatc

SEQ ID NO: 536017 - DNA, 25 bp, Homo sapien
catcaaccagcagaataatcacagt

SEQ ID NO: 536018 - DNA, 25 bp, Homo sapien
cacagtaacagcagtatctaaaatg

SEQ ID NO: 536019 - DNA, 25 bp, Homo sapien
aagaacatccatgagaaaaaataaa

SEQ ID NO: 536020 - DNA, 25 bp, Homo sapien
caaatactcgaagaagaacatccat

SEQ ID NO: 536021 - DNA, 25 bp, Homo sapien
tctacaaatactcgaagaagaacat

SEQ ID NO: 536022 - DNA, 25 bp, Homo sapien
tcgaagaagaacatccatgagaaaa

SEQ ID NO: 536023 - DNA, 25 bp, Homo sapien
aggtcagcaaagatcagagccacat

SEQ ID NO: 536024 - DNA, 25 bp, Homo sapien
aattaggtcagcaaagatcagagcc

SEQ ID NO: 536025 - DNA, 25 bp, Homo sapien
ttaggtcagcaaagatcagagccac

SEQ ID NO: 536026 - DNA, 25 bp, Homo sapien
taggtcagcaaagatcagagccaca

SEQ ID NO: 536027 - DNA, 25 bp, Homo sapien
gatgacacaattgaatgaacaattt

SEQ ID NO: 536028 - DNA, 25 bp, Homo sapien
atgaacaattttcttaatcctgctg

SEQ ID NO: 536029 - DNA, 25 bp, Homo sapien
caaaggatgacacaattgaatgaac

SEQ ID NO: 536030 - DNA, 25 bp, Homo sapien
ccaactgcaaaggatgacacaattg

SEQ ID NO: 536031 - DNA, 25 bp, Homo sapien
tggtcttcctgatctcgctctagat

SEQ ID NO: 536032 - DNA, 25 bp, Homo sapien
gatggccatgatgcaaagcaatgaa

SEQ ID NO: 536033 - DNA, 25 bp, Homo sapien
tacggagatggccatgatgcaaagc

SEQ ID NO: 536034 - DNA, 25 bp, Homo sapien
tctggtcttcctgatctcgctctag

SEQ ID NO: 536035 - DNA, 25 bp, Homo sapien
catatgaagcgacatattcagcatt

SEQ ID NO: 536036 - DNA, 25 bp, Homo sapien
caaacctggaaagtcgttctgacac

SEQ ID NO: 536037 - DNA, 25 bp, Homo sapien
tatgaagcgacatattcagcatttt

SEQ ID NO: 536038 - DNA, 25 bp, Homo sapien
aaacctggaaagtcgttctgacaca

SEQ ID NO: 536039 - DNA, 25 bp, Homo sapien
ggtctggacggtgagggacaagtcc

SEQ ID NO: 536040 - DNA, 25 bp, Homo sapien
gaggtctggacggtgagggacaagt

SEQ ID NO: 536041 - DNA, 25 bp, Homo sapien
aggtctggacggtgagggacaagtc

SEQ ID NO: 536042 - DNA, 25 bp, Homo sapien
cagaggtctggacggtgagggacaa

SEQ ID NO: 536043 - DNA, 25 bp, Homo sapien
actctggtaggctctcgaactcagg

SEQ ID NO: 536044 - DNA, 25 bp, Homo sapien
aaataggattctcgcctcccctggg

SEQ ID NO: 536045 - DNA, 25 bp, Homo sapien
gcaaataggattctcgcctcccctg

SEQ ID NO: 536046 - DNA, 25 bp, Homo sapien
taggctctcgaactcaggaactctg

SEQ ID NO: 536047 - DNA, 25 bp, Homo sapien
tcctcctgtcagttcacttgtgtgg

SEQ ID NO: 536048 - DNA, 25 bp, Homo sapien
ggttcctcctgtcagttcacttgtg

SEQ ID NO: 536049 - DNA, 25 bp, Homo sapien
cctcctgtcagttcacttgtgtggg

SEQ ID NO: 536050 - DNA, 25 bp, Homo sapien
ccttggttcctcctgtcagttcact

SEQ ID NO: 536051 - DNA, 25 bp, Homo sapien
acttccaccaggtcaacaggatggg

SEQ ID NO: 536052 - DNA, 25 bp, Homo sapien
atgtcatgggtgtctctatcaatga

SEQ ID NO: 536053 - DNA, 25 bp, Homo sapien
tgacttccaccaggtcaacaggatg

SEQ ID NO: 536054 - DNA, 25 bp, Homo sapien
gggtgtctctatcaatgatgacttc

SEQ ID NO: 536055 - DNA, 25 bp, Homo sapien
gtttgctgttgtcaattcattcgtg

SEQ ID NO: 536056 - DNA, 25 bp, Homo sapien
tttgctgttgtcaattcattcgtgg

SEQ ID NO: 536057 - DNA, 25 bp, Homo sapien
gggtttgctgttgtcaattcattcg

SEQ ID NO: 536058 - DNA, 25 bp, Homo sapien
ggtttgctgttgtcaattcattcgt

SEQ ID NO: 536059 - DNA, 25 bp, Homo sapien
cctggccatgtgtacatcttttata

SEQ ID NO: 536060 - DNA, 25 bp, Homo sapien
ccatgtgtacatcttttataacgta

SEQ ID NO: 536061 - DNA, 25 bp, Homo sapien
gctcctggccatgtgtacatctttt

SEQ ID NO: 536062 - DNA, 25 bp, Homo sapien
ctgctcctggccatgtgtacatctt

SEQ ID NO: 536063 - DNA, 25 bp, Homo sapien
ctgtcatcggtggattgatcaataa

SEQ ID NO: 536064 - DNA, 25 bp, Homo sapien
tgtaggcagtcatccttttaatccc

SEQ ID NO: 536065 - DNA, 25 bp, Homo sapien
cacccatcatgttagtctttcccat

SEQ ID NO: 536066 - DNA, 25 bp, Homo sapien
tctttcccatccatgagacacaggc

SEQ ID NO: 536067 - DNA, 25 bp, Homo sapien
tgagacacaggcaactagctgcggg

SEQ ID NO: 536068 - DNA, 25 bp, Homo sapien
ttctctgctccttgtcggctgccat

SEQ ID NO: 536069 - DNA, 25 bp, Homo sapien
gctccttgtcggctgccatctcctt

SEQ ID NO: 536070 - DNA, 25 bp, Homo sapien
gctcaggagtgtgagggacaagtcc

SEQ ID NO: 536071 - DNA, 25 bp, Homo sapien
cccagggattctctgctccttgtcg

SEQ ID NO: 536072 - DNA, 25 bp, Homo sapien
tcattgatacgtgcctctgggtttg

SEQ ID NO: 536073 - DNA, 25 bp, Homo sapien
ggtttgctgttgtcaattcatttgt

SEQ ID NO: 536074 - DNA, 25 bp, Homo sapien
tgggtttgctgttgtcaattcattt

SEQ ID NO: 536075 - DNA, 25 bp, Homo sapien
tgctgttgtcaattcatttgtgggt

SEQ ID NO: 536076 - DNA, 25 bp, Homo sapien
cactccagtatgtctcagacacaga

SEQ ID NO: 536077 - DNA, 25 bp, Homo sapien
ggagtctctattcccgtggcccact

SEQ ID NO: 536078 - DNA, 25 bp, Homo sapien
agtctctattcccgtggcccactcc

SEQ ID NO: 536079 - DNA, 25 bp, Homo sapien
ctccagtatgtctcagacacagaaa

SEQ ID NO: 536080 - DNA, 25 bp, Homo sapien
gctacaaattgcaatgtgttgtccc

SEQ ID NO: 536081 - DNA, 25 bp, Homo sapien
gtgttgtccctaaaaaattctcatg

SEQ ID NO: 536082 - DNA, 25 bp, Homo sapien
gttacttggcacctggtacttcatt

SEQ ID NO: 536083 - DNA, 25 bp, Homo sapien
gtgtgacagcaaattgaaccgaaat

SEQ ID NO: 536084 - DNA, 25 bp, Homo sapien
ctccatccaatgtgatgatggcttt

SEQ ID NO: 536085 - DNA, 25 bp, Homo sapien
ggctccatccaatgtgatgatggct

SEQ ID NO: 536086 - DNA, 25 bp, Homo sapien
aggggctccatccaatgtgatgatg

SEQ ID NO: 536087 - DNA, 25 bp, Homo sapien
tcaagtgactaaacctgaggcaggg

SEQ ID NO: 536088 - DNA, 25 bp, Homo sapien
cagatacagggtctcttagctcttt

SEQ ID NO: 536089 - DNA, 25 bp, Homo sapien
atacagggtctcttagctcttttct

SEQ ID NO: 536090 - DNA, 25 bp, Homo sapien
gggtgagggacagatacagggtctc

SEQ ID NO: 536091 - DNA, 25 bp, Homo sapien
gacagatacagggtctcttagctct

SEQ ID NO: 536092 - DNA, 25 bp, Homo sapien
tcaccacttagatcagtcaactcac

SEQ ID NO: 536093 - DNA, 25 bp, Homo sapien
tttttcaccacttagatcagtcaac

SEQ ID NO: 536094 - DNA, 25 bp, Homo sapien
ttcaccacttagatcagtcaactca

SEQ ID NO: 536095 - DNA, 25 bp, Homo sapien
ttttcaccacttagatcagtcaact

SEQ ID NO: 536096 - DNA, 25 bp, Homo sapien
atggtagacgctggtaatgaatcca

SEQ ID NO: 536097 - DNA, 25 bp, Homo sapien
tagacgctggtaatgaatccagaat

SEQ ID NO: 536098 - DNA, 25 bp, Homo sapien
agacgctggtaatgaatccagaatt

SEQ ID NO: 536099 - DNA, 25 bp, Homo sapien
ggtagacgctggtaatgaatccaga

SEQ ID NO: 536100 - DNA, 25 bp, Homo sapien
tataccagctcatgtgcaatagaaa

SEQ ID NO: 536101 - DNA, 25 bp, Homo sapien
accagctcatgtgcaatagaaatag

SEQ ID NO: 536102 - DNA, 25 bp, Homo sapien
gggttataccagctcatgtgcaata

SEQ ID NO: 536103 - DNA, 25 bp, Homo sapien
ctttggggttataccagctcatgtg

SEQ ID NO: 536104 - DNA, 25 bp, Homo sapien
ctgggagtttctccctgtaagccct

SEQ ID NO: 536105 - DNA, 25 bp, Homo sapien
cagccgctaaaatgacacaagtctc

SEQ ID NO: 536106 - DNA, 25 bp, Homo sapien
ccactgccgctcagaagaagttggg

SEQ ID NO: 536107 - DNA, 25 bp, Homo sapien
tcaggtctcgtgtcttcagtacaac

SEQ ID NO: 536108 - DNA, 25 bp, Homo sapien
cacaagtctcaggtctcgtgtcttc

SEQ ID NO: 536109 - DNA, 25 bp, Homo sapien
gctctgagattctcctagagtaggg

SEQ ID NO: 536110 - DNA, 25 bp, Homo sapien
tgctctgagattctcctagagtagg

SEQ ID NO: 536111 - DNA, 25 bp, Homo sapien
ctctgagattctcctagagtaggga

SEQ ID NO: 536112 - DNA, 25 bp, Homo sapien
gcactggggttttcaggactggata

SEQ ID NO: 536113 - DNA, 25 bp, Homo sapien
aagactgttctaaggccacagtgtg

SEQ ID NO: 536114 - DNA, 25 bp, Homo sapien
tgtccttctgaccaatcctgatgtt

SEQ ID NO: 536115 - DNA, 25 bp, Homo sapien
gactggataagactgttctaaggcc

SEQ ID NO: 536116 - DNA, 25 bp, Homo sapien
tctggcactgtctaaagtgcctttc

SEQ ID NO: 536117 - DNA, 25 bp, Homo sapien
ctctggcactgtctaaagtgccttt

SEQ ID NO: 536118 - DNA, 25 bp, Homo sapien
actctggcactgtctaaagtgcctt

SEQ ID NO: 536119 - DNA, 25 bp, Homo sapien
gtttccacaggcgaagtcaaccgaa

SEQ ID NO: 536120 - DNA, 25 bp, Homo sapien
aaaggtccctcgagcatccagaaag

SEQ ID NO: 536121 - DNA, 25 bp, Homo sapien
agaaagctcgcctgacccttatagg

SEQ ID NO: 536122 - DNA, 25 bp, Homo sapien
gaaacggcccgccatgttgaagcct

SEQ ID NO: 536123 - DNA, 25 bp, Homo sapien
cagtccccttgcttcgcaacagagg

SEQ ID NO: 536124 - DNA, 25 bp, Homo sapien
ccatgacctcatgcagaatgaaaca

SEQ ID NO: 536125 - DNA, 25 bp, Homo sapien
aacagaggtgaccactcttctgaag

SEQ ID NO: 536126 - DNA, 25 bp, Homo sapien
tctcaacatgggatgtgcatctaag

SEQ ID NO: 536127 - DNA, 25 bp, Homo sapien
cttcccatgtttaggttcctgcttc

SEQ ID NO: 536128 - DNA, 25 bp, Homo sapien
cacttcccatgtttaggttcctgct

SEQ ID NO: 536129 - DNA, 25 bp, Homo sapien
tcacttcccatgtttaggttcctgc

SEQ ID NO: 536130 - DNA, 25 bp, Homo sapien
tcccatgtttaggttcctgcttctc

SEQ ID NO: 536131 - DNA, 25 bp, Homo sapien
cataccccaggaaactgtgcagttg

SEQ ID NO: 536132 - DNA, 25 bp, Homo sapien
taccccaggaaactgtgcagttgtt

SEQ ID NO: 536133 - DNA, 25 bp, Homo sapien
taacataccccaggaaactgtgcag

SEQ ID NO: 536134 - DNA, 25 bp, Homo sapien
aacataccccaggaaactgtgcagt

SEQ ID NO: 536135 - DNA, 25 bp, Homo sapien
agcttggcagtgatcacttcccttg

SEQ ID NO: 536136 - DNA, 25 bp, Homo sapien
cctagcaaccaggaagaatatcccg

SEQ ID NO: 536137 - DNA, 25 bp, Homo sapien
gaccactacggacattccaggctct

SEQ ID NO: 536138 - DNA, 25 bp, Homo sapien
gaatatcccgggaatgctttggcag

SEQ ID NO: 536139 - DNA, 25 bp, Homo sapien
gcatgcatgcctttttgtatttctt

SEQ ID NO: 536140 - DNA, 25 bp, Homo sapien
taaaagctatgtttagcaaaaagtc

SEQ ID NO: 536141 - DNA, 25 bp, Homo sapien
gaaaagaaattatgcgccaggcacg

SEQ ID NO: 536142 - DNA, 25 bp, Homo sapien
aaaagaaattatgcgccaggcacgg

SEQ ID NO: 536143 - DNA, 25 bp, Homo sapien
ttctcaatagagcaaatacaggcat

SEQ ID NO: 536144 - DNA, 25 bp, Homo sapien
aaaagagctaatgtcacaatgcaaa

SEQ ID NO: 536145 - DNA, 25 bp, Homo sapien
ggaagttgaatctaggaataaacaa

SEQ ID NO: 536146 - DNA, 25 bp, Homo sapien
atacaggcatatcatggtggttttg

SEQ ID NO: 536147 - DNA, 25 bp, Homo sapien
gaagtttcccacatatccaccaaag

SEQ ID NO: 536148 - DNA, 25 bp, Homo sapien
tattgagctgctactctatggcagc

SEQ ID NO: 536149 - DNA, 25 bp, Homo sapien
caatggtgaagactagattatttct

SEQ ID NO: 536150 - DNA, 25 bp, Homo sapien
ctaggacttagggacacaatggtga

SEQ ID NO: 536151 - DNA, 25 bp, Homo sapien
cagaaaagtgggctaggtagataga

SEQ ID NO: 536152 - DNA, 25 bp, Homo sapien
atgttaaaacattgccgaaaggagg

SEQ ID NO: 536153 - DNA, 25 bp, Homo sapien
gacactgtagggtacatcactgtga

SEQ ID NO: 536154 - DNA, 25 bp, Homo sapien
tgtcctcaaaggttggcatgcaggc

SEQ ID NO: 536155 - DNA, 25 bp, Homo sapien
taccagctgtccgagaactctgaat

SEQ ID NO: 536156 - DNA, 25 bp, Homo sapien
gactgcccatgtggtaactaaaact

SEQ ID NO: 536157 - DNA, 25 bp, Homo sapien
gagtacatgagattgcagactgccc

SEQ ID NO: 536158 - DNA, 25 bp, Homo sapien
tggcagttagagaggtcaccacgaa

SEQ ID NO: 536159 - DNA, 25 bp, Homo sapien
aaatgcagctactctagggatacag

SEQ ID NO: 536160 - DNA, 25 bp, Homo sapien
ggaaactgccaatgcaatgttcaga

SEQ ID NO: 536161 - DNA, 25 bp, Homo sapien
gcgagtagcagaccccagctgtgta

SEQ ID NO: 536162 - DNA, 25 bp, Homo sapien
agtagcagaccccagctgtgtaaag

SEQ ID NO: 536163 - DNA, 25 bp, Homo sapien
cgagtagcagaccccagctgtgtaa

SEQ ID NO: 536164 - DNA, 25 bp, Homo sapien
gagtagcagaccccagctgtgtaaa

SEQ ID NO: 536165 - DNA, 25 bp, Homo sapien
tatggcacaactggcctgagtcaca

SEQ ID NO: 536166 - DNA, 25 bp, Homo sapien
gcaggtccgcgtcctagagctgtag

SEQ ID NO: 536167 - DNA, 25 bp, Homo sapien
tttccaaatctaagggagcgctggg

SEQ ID NO: 536168 - DNA, 25 bp, Homo sapien
tgaaatgggcgttcctggcatggct

SEQ ID NO: 536169 - DNA, 25 bp, Homo sapien
tgatgaacaagcacaaggatatacc

SEQ ID NO: 536170 - DNA, 25 bp, Homo sapien
tctgggcgttggactggaagctctc

SEQ ID NO: 536171 - DNA, 25 bp, Homo sapien
taggtcagagggatgcctgtgtccc

SEQ ID NO: 536172 - DNA, 25 bp, Homo sapien
gaagctctcgctgccagaggcatca

SEQ ID NO: 536173 - DNA, 25 bp, Homo sapien
ctcaaactggtttgtcccacggtca

SEQ ID NO: 536174 - DNA, 25 bp, Homo sapien
caaactggtttgtcccacggtcatc

SEQ ID NO: 536175 - DNA, 25 bp, Homo sapien
actggtttgtcccacggtcatcaaa

SEQ ID NO: 536176 - DNA, 25 bp, Homo sapien
cttccattgtgaggggtacttttct

SEQ ID NO: 536177 - DNA, 25 bp, Homo sapien
tgcacataggttcctgaaaaatttt

SEQ ID NO: 536178 - DNA, 25 bp, Homo sapien
aaaatttttctcaacaggtacatct

SEQ ID NO: 536179 - DNA, 25 bp, Homo sapien
ttgcacataggttcctgaaaaattt

SEQ ID NO: 536180 - DNA, 25 bp, Homo sapien
tttttctcaacaggtacatctgctg

SEQ ID NO: 536181 - DNA, 25 bp, Homo sapien
acagctggagaaaagcccaaaagct

SEQ ID NO: 536182 - DNA, 25 bp, Homo sapien
tcttcacttgactctgttatctttt

SEQ ID NO: 536183 - DNA, 25 bp, Homo sapien
tggcctcgcccatctgtatctctag

SEQ ID NO: 536184 - DNA, 25 bp, Homo sapien
tatctttttactctggctggcttcc

SEQ ID NO: 536185 - DNA, 25 bp, Homo sapien
aacacagggaggcctccaaggacat

SEQ ID NO: 536186 - DNA, 25 bp, Homo sapien
tccagggaacacagggaggcctcca

SEQ ID NO: 536187 - DNA, 25 bp, Homo sapien
agcacactcctccagggaacacagg

SEQ ID NO: 536188 - DNA, 25 bp, Homo sapien
gggaacacagggaggcctccaagga

SEQ ID NO: 536189 - DNA, 25 bp, Homo sapien
aagtgagacacactcggcgacgctc

SEQ ID NO: 536190 - DNA, 25 bp, Homo sapien
actcggcgacgctctctgacaccat

SEQ ID NO: 536191 - DNA, 25 bp, Homo sapien
catgtggcactacactggctccatg

SEQ ID NO: 536192 - DNA, 25 bp, Homo sapien
tgacaccatccccacatgtggcact

SEQ ID NO: 536193 - DNA, 25 bp, Homo sapien
gaagacagtgaccactccttggacg

SEQ ID NO: 536194 - DNA, 25 bp, Homo sapien
ttctctgaattagcatgcactcctc

SEQ ID NO: 536195 - DNA, 25 bp, Homo sapien
gccaagtgaatggtcctcttcccag

SEQ ID NO: 536196 - DNA, 25 bp, Homo sapien
gggcaggctgttttcagccaagtga

SEQ ID NO: 536197 - DNA, 25 bp, Homo sapien
taatgactgagtctcgcccaagcag

SEQ ID NO: 536198 - DNA, 25 bp, Homo sapien
gactcacatgtgagttctggcacca

SEQ ID NO: 536199 - DNA, 25 bp, Homo sapien
tctaccccggactcacatgtgagtt

SEQ ID NO: 536200 - DNA, 25 bp, Homo sapien
gcaccatcaccagtttgtatccaaa

SEQ ID NO: 536201 - DNA, 25 bp, Homo sapien
cccaagggtgcacagccaaactcaa

SEQ ID NO: 536202 - DNA, 25 bp, Homo sapien
ggccccaagggtgcacagccaaact

SEQ ID NO: 536203 - DNA, 25 bp, Homo sapien
ctggccccaagggtgcacagccaaa

SEQ ID NO: 536204 - DNA, 25 bp, Homo sapien
caagggtgcacagccaaactcaacc

SEQ ID NO: 536205 - DNA, 25 bp, Homo sapien
cactacgatgttgggcttgtccaca

SEQ ID NO: 536206 - DNA, 25 bp, Homo sapien
tgtcgttgcttagtgctacatggcc

SEQ ID NO: 536207 - DNA, 25 bp, Homo sapien
taaataggcccacttggaaggtgcc

SEQ ID NO: 536208 - DNA, 25 bp, Homo sapien
tcaagtcaacgtgaaagacaggcca

SEQ ID NO: 536209 - DNA, 25 bp, Homo sapien
tgaaatgaagtggtcagaattggtt

SEQ ID NO: 536210 - DNA, 25 bp, Homo sapien
aatgaagtggtcagaattggttttt

SEQ ID NO: 536211 - DNA, 25 bp, Homo sapien
gaaatgaagtggtcagaattggttt

SEQ ID NO: 536212 - DNA, 25 bp, Homo sapien
catagtcacagagtaccaccaacaa

SEQ ID NO: 536213 - DNA, 25 bp, Homo sapien
gtcacagagtaccaccaacaataga

SEQ ID NO: 536214 - DNA, 25 bp, Homo sapien
gagtaccaccaacaatagatttgaa

SEQ ID NO: 536215 - DNA, 25 bp, Homo sapien
cagagtaccaccaacaatagatttg

SEQ ID NO: 536216 - DNA, 25 bp, Homo sapien
tagtctcctcatgtcctttctcacg

SEQ ID NO: 536217 - DNA, 25 bp, Homo sapien
gtcctttctcacgtccagattgtga

SEQ ID NO: 536218 - DNA, 25 bp, Homo sapien
tttagtctcctcatgtcctttctca

SEQ ID NO: 536219 - DNA, 25 bp, Homo sapien
tctcacgtccagattgtgatttttt

SEQ ID NO: 536220 - DNA, 25 bp, Homo sapien
cacgagatcggtggttcacacagca

SEQ ID NO: 536221 - DNA, 25 bp, Homo sapien
gctgctggtatgcatcacgagatcg

SEQ ID NO: 536222 - DNA, 25 bp, Homo sapien
aatcttcccagtctacctaagaggg

SEQ ID NO: 536223 - DNA, 25 bp, Homo sapien
ttcattgtgttaggcaggatctcga

SEQ ID NO: 536224 - DNA, 25 bp, Homo sapien
cgatttttcaaggttctgtggccag

SEQ ID NO: 536225 - DNA, 25 bp, Homo sapien
cccacaggttgggtgcagcgttcct

SEQ ID NO: 536226 - DNA, 25 bp, Homo sapien
tccgaagtgtggagaccaatacccc

SEQ ID NO: 536227 - DNA, 25 bp, Homo sapien
gagccaggttcacttaaattcggga

SEQ ID NO: 536228 - DNA, 25 bp, Homo sapien
tttaacgaaggacgagcgagcaatc

SEQ ID NO: 536229 - DNA, 25 bp, Homo sapien
tgggcagcgcatcctttcctgccgg

SEQ ID NO: 536230 - DNA, 25 bp, Homo sapien
gcgagcaatctcctgacacttcaca

SEQ ID NO: 536231 - DNA, 25 bp, Homo sapien
cggcgaggtagagcgccaagcatcc

SEQ ID NO: 536232 - DNA, 25 bp, Homo sapien
aagtggagccaaattataaatagga

SEQ ID NO: 536233 - DNA, 25 bp, Homo sapien
gaattgaatgggagctaaagtagga

SEQ ID NO: 536234 - DNA, 25 bp, Homo sapien
ctaaagtaggataaagtggagccaa

SEQ ID NO: 536235 - DNA, 25 bp, Homo sapien
tttttattgaattgaatgggagcta

SEQ ID NO: 536236 - DNA, 25 bp, Homo sapien
tacaagttgtgactccactgtacca

SEQ ID NO: 536237 - DNA, 25 bp, Homo sapien
tatactctagatcgtaagggatggg

SEQ ID NO: 536238 - DNA, 25 bp, Homo sapien
tgcccttgcgcagcttatactctag

SEQ ID NO: 536239 - DNA, 25 bp, Homo sapien
gaagactctgagacttttgggcaaa

SEQ ID NO: 536240 - DNA, 25 bp, Homo sapien
gataatgcgaacatactggaggctg

SEQ ID NO: 536241 - DNA, 25 bp, Homo sapien
caagtttgccagagcagtgtgagac

SEQ ID NO: 536242 - DNA, 25 bp, Homo sapien
aaactaaagtgggatgtctcaggca

SEQ ID NO: 536243 - DNA, 25 bp, Homo sapien
tggaggatacgaagcagcaatagcc

SEQ ID NO: 536244 - DNA, 25 bp, Homo sapien
gaggagcctcatatagcatgctgca

SEQ ID NO: 536245 - DNA, 25 bp, Homo sapien
tctacatgacgcaagcatatggaca

SEQ ID NO: 536246 - DNA, 25 bp, Homo sapien
tgagggttctgcactatagcatgat

SEQ ID NO: 536247 - DNA, 25 bp, Homo sapien
gggtttatctcttagctcaatgtca

SEQ ID NO: 536248 - DNA, 25 bp, Homo sapien
ggtaaaaacgcaggccttccactga

SEQ ID NO: 536249 - DNA, 25 bp, Homo sapien
catcacggcaaagatggcccatctt

SEQ ID NO: 536250 - DNA, 25 bp, Homo sapien
aaaacgcaggccttccactgagtca

SEQ ID NO: 536251 - DNA, 25 bp, Homo sapien
cactgagtcatcacggcaaagatgg

SEQ ID NO: 536252 - DNA, 25 bp, Homo sapien
aattatctgttcatgcagacacaca

SEQ ID NO: 536253 - DNA, 25 bp, Homo sapien
cacaattatctgttcatgcagacac

SEQ ID NO: 536254 - DNA, 25 bp, Homo sapien
aaacccccacacaattatctgttca

SEQ ID NO: 536255 - DNA, 25 bp, Homo sapien
cccacacaattatctgttcatgcag

SEQ ID NO: 536256 - DNA, 25 bp, Homo sapien
cacaagcttagcaaactcttctgat

SEQ ID NO: 536257 - DNA, 25 bp, Homo sapien
ctcttctgatgttagggatcccttt

SEQ ID NO: 536258 - DNA, 25 bp, Homo sapien
cccacaagcttagcaaactcttctg

SEQ ID NO: 536259 - DNA, 25 bp, Homo sapien
gatgttagggatcccttttctgaaa

SEQ ID NO: 536260 - DNA, 25 bp, Homo sapien
cacactctgggttctaatggtaggc

SEQ ID NO: 536261 - DNA, 25 bp, Homo sapien
caaaagttgaagtacccagaagaga

SEQ ID NO: 536262 - DNA, 25 bp, Homo sapien
ggcagtttggccagtaaaatccatc

SEQ ID NO: 536263 - DNA, 25 bp, Homo sapien
gagtacatattaacgctccagcgaa

SEQ ID NO: 536264 - DNA, 25 bp, Homo sapien
taccatgacgccactgtcaaacaca

SEQ ID NO: 536265 - DNA, 25 bp, Homo sapien
ctgaagctcaattaccatgacgcca

SEQ ID NO: 536266 - DNA, 25 bp, Homo sapien
tgacgccactgtcaaacacacggag

SEQ ID NO: 536267 - DNA, 25 bp, Homo sapien
tcaattaccatgacgccactgtcaa

SEQ ID NO: 536268 - DNA, 25 bp, Homo sapien
aaccacaggtgcgagaacaaagcca

SEQ ID NO: 536269 - DNA, 25 bp, Homo sapien
tctggcttgacactagggatggcaa

SEQ ID NO: 536270 - DNA, 25 bp, Homo sapien
gagtctgactcctagccctgttagg

SEQ ID NO: 536271 - DNA, 25 bp, Homo sapien
tcacagctgaacatctccagagact

SEQ ID NO: 536272 - DNA, 25 bp, Homo sapien
cttgcacgcattcactaaatcttct

SEQ ID NO: 536273 - DNA, 25 bp, Homo sapien
tcttgcacgcattcactaaatcttc

SEQ ID NO: 536274 - DNA, 25 bp, Homo sapien
gatcgcaccatgcattctagcctgg

SEQ ID NO: 536275 - DNA, 25 bp, Homo sapien
gacagtgcagccttaacaaatcagc

SEQ ID NO: 536276 - DNA, 25 bp, Homo sapien
tacatttcaagtccccagtcagcac

SEQ ID NO: 536277 - DNA, 25 bp, Homo sapien
tacaaggtcagtaattcgagaccgg

SEQ ID NO: 536278 - DNA, 25 bp, Homo sapien
atacattgttgcctccctactctgc

SEQ ID NO: 536279 - DNA, 25 bp, Homo sapien
atttgggggtacctattacctgatg

SEQ ID NO: 536280 - DNA, 25 bp, Homo sapien
cctattacctgatgtatttatcatg

SEQ ID NO: 536281 - DNA, 25 bp, Homo sapien
acattgttgcctccctactctgcta

SEQ ID NO: 536282 - DNA, 25 bp, Homo sapien
gtctctacccttaagtacattccag

SEQ ID NO: 536283 - DNA, 25 bp, Homo sapien
gggtatttggctttcgttgctgcac

SEQ ID NO: 536284 - DNA, 25 bp, Homo sapien
taacataaggacttccagtttctcc

SEQ ID NO: 536285 - DNA, 25 bp, Homo sapien
cacagataaactcgtgtcactaggg

SEQ ID NO: 536286 - DNA, 25 bp, Homo sapien
acctccgtgagtgacattattcccc

SEQ ID NO: 536287 - DNA, 25 bp, Homo sapien
tccattcctcgagctcggtttacta

SEQ ID NO: 536288 - DNA, 25 bp, Homo sapien
taagcagtacacctccgtgagtgac

SEQ ID NO: 536289 - DNA, 25 bp, Homo sapien
gctcggtttactaagcagtacacct

SEQ ID NO: 536290 - DNA, 25 bp, Homo sapien
gacaataaccatatcatgaaaatag

SEQ ID NO: 536291 - DNA, 25 bp, Homo sapien
catttctaatgacatagggctaatt

SEQ ID NO: 536292 - DNA, 25 bp, Homo sapien
aaaaaacatgtcagttgacaataac

SEQ ID NO: 536293 - DNA, 25 bp, Homo sapien
gaaaatagttatgctcttgttaaca

SEQ ID NO: 536294 - DNA, 25 bp, Homo sapien
tattccagccagttgtttggccagc

SEQ ID NO: 536295 - DNA, 25 bp, Homo sapien
tttggccagctgcatgtggtactgt

SEQ ID NO: 536296 - DNA, 25 bp, Homo sapien
ctctaaaggcacctgcaatattcca

SEQ ID NO: 536297 - DNA, 25 bp, Homo sapien
gtactgtgtgcctgagccgtaggtt

SEQ ID NO: 536298 - DNA, 25 bp, Homo sapien
actgggttagctattcccatgctca

SEQ ID NO: 536299 - DNA, 25 bp, Homo sapien
tctctggtaactgggttagctattc

SEQ ID NO: 536300 - DNA, 25 bp, Homo sapien
tgctcagcaagtaggatttaaacct

SEQ ID NO: 536301 - DNA, 25 bp, Homo sapien
gctcagcaagtaggatttaaacctg

SEQ ID NO: 536302 - DNA, 25 bp, Homo sapien
aattttattagcaattgattttgat

SEQ ID NO: 536303 - DNA, 25 bp, Homo sapien
taattttattagcaattgattttga

SEQ ID NO: 536304 - DNA, 25 bp, Homo sapien
tattagcaattgattttgataattc

SEQ ID NO: 536305 - DNA, 25 bp, Homo sapien
tcatcttctgtgatgtcaccttgtt

SEQ ID NO: 536306 - DNA, 25 bp, Homo sapien
ttagtttgctgaggtcttcaaaggc

SEQ ID NO: 536307 - DNA, 25 bp, Homo sapien
attagtttgctgaggtcttcaaagg

SEQ ID NO: 536308 - DNA, 25 bp, Homo sapien
agtttatggaaccttgtatccctct

SEQ ID NO: 536309 - DNA, 25 bp, Homo sapien
tgagtaaagaaactacctacaataa

SEQ ID NO: 536310 - DNA, 25 bp, Homo sapien
tataattgcatctgccagtttatgg

SEQ ID NO: 536311 - DNA, 25 bp, Homo sapien
ttaagctgacttacagcatgatttc

SEQ ID NO: 536312 - DNA, 25 bp, Homo sapien
cactttggctattagcatcagtaac

SEQ ID NO: 536313 - DNA, 25 bp, Homo sapien
gtgccttgcatattccattcccttt

SEQ ID NO: 536314 - DNA, 25 bp, Homo sapien
tcagtactcttgaatgtgccttgca

SEQ ID NO: 536315 - DNA, 25 bp, Homo sapien
tatccatgctggtcatctgctagag

SEQ ID NO: 536316 - DNA, 25 bp, Homo sapien
tggtgccttcttcaattacgggagg

SEQ ID NO: 536317 - DNA, 25 bp, Homo sapien
cacagacctgagaatgcaagagccc

SEQ ID NO: 536318 - DNA, 25 bp, Homo sapien
taatggtccgtatggtgagcacaat

SEQ ID NO: 536319 - DNA, 25 bp, Homo sapien
ggaaggcaggccaattagagaacag

SEQ ID NO: 536320 - DNA, 25 bp, Homo sapien
ccctgggtggtcatcaacataaaat

SEQ ID NO: 536321 - DNA, 25 bp, Homo sapien
ccccagtagaagtgatgggctgctt

SEQ ID NO: 536322 - DNA, 25 bp, Homo sapien
tacagaatctaatgcataactggtc

SEQ ID NO: 536323 - DNA, 25 bp, Homo sapien
tgaaaagcaaccatcaacagaattt

SEQ ID NO: 536324 - DNA, 25 bp, Homo sapien
ctttcaatacctacaattcctacag

SEQ ID NO: 536325 - DNA, 25 bp, Homo sapien
cagtttcctttcaatacctacaatt

SEQ ID NO: 536326 - DNA, 25 bp, Homo sapien
ttcaatacctacaattcctacagcc

SEQ ID NO: 536327 - DNA, 25 bp, Homo sapien
ttcctttcaatacctacaattccta

SEQ ID NO: 536328 - DNA, 25 bp, Homo sapien
gggtcctctatttgtttgtaatgac

SEQ ID NO: 536329 - DNA, 25 bp, Homo sapien
gtaatgactgggaaactggcatatt

SEQ ID NO: 536330 - DNA, 25 bp, Homo sapien
tttcctctgataaacgcctgtaaaa

SEQ ID NO: 536331 - DNA, 25 bp, Homo sapien
tgtcatttcctctgataaacgcctg

SEQ ID NO: 536332 - DNA, 25 bp, Homo sapien
gagatagttcaacataccactgcat

SEQ ID NO: 536333 - DNA, 25 bp, Homo sapien
tagcaggcgaatggcatgacttagt

SEQ ID NO: 536334 - DNA, 25 bp, Homo sapien
gggaaccttcagatactgagatagt

SEQ ID NO: 536335 - DNA, 25 bp, Homo sapien
cactgctaaggcttaagatataata

SEQ ID NO: 536336 - DNA, 25 bp, Homo sapien
acacacctttctagtacgattttat

SEQ ID NO: 536337 - DNA, 25 bp, Homo sapien
cacacctttctagtacgattttatt

SEQ ID NO: 536338 - DNA, 25 bp, Homo sapien
cacctttctagtacgattttattca

SEQ ID NO: 536339 - DNA, 25 bp, Homo sapien
aggagttcttactactctggaatgg

SEQ ID NO: 536340 - DNA, 25 bp, Homo sapien
tgttctttgaaggagagtttgatgt

SEQ ID NO: 536341 - DNA, 25 bp, Homo sapien
aaggagagtttgatgtaggagttct

SEQ ID NO: 536342 - DNA, 25 bp, Homo sapien
gatgtaggagttcttactactctgg

SEQ ID NO: 536343 - DNA, 25 bp, Homo sapien
attccagccgcctgttcttcaatga

SEQ ID NO: 536344 - DNA, 25 bp, Homo sapien
aattccagccgcctgttcttcaatg

SEQ ID NO: 536345 - DNA, 25 bp, Homo sapien
ttccagccgcctgttcttcaatgaa

SEQ ID NO: 536346 - DNA, 25 bp, Homo sapien
ctctccaaatcagtcggtgtgtact

SEQ ID NO: 536347 - DNA, 25 bp, Homo sapien
cagtcggtgtgtactaagaaggaga

SEQ ID NO: 536348 - DNA, 25 bp, Homo sapien
ccaaatcagtcggtgtgtactaaga

SEQ ID NO: 536349 - DNA, 25 bp, Homo sapien
gtgtgtactaagaaggagagtccca

SEQ ID NO: 536350 - DNA, 25 bp, Homo sapien
taggaaatcctttcgaagcaatccc

SEQ ID NO: 536351 - DNA, 25 bp, Homo sapien
tgcccagatatgctaatccctccga

SEQ ID NO: 536352 - DNA, 25 bp, Homo sapien
tccctccgactgcataaggtccaag

SEQ ID NO: 536353 - DNA, 25 bp, Homo sapien
ggaaatcctttcgaagcaatccctc

SEQ ID NO: 536354 - DNA, 25 bp, Homo sapien
gctggggcacggactgtacggccac

SEQ ID NO: 536355 - DNA, 25 bp, Homo sapien
taaagcttccgctggggcacggact

SEQ ID NO: 536356 - DNA, 25 bp, Homo sapien
ctaaagcttccgctggggcacggac

SEQ ID NO: 536357 - DNA, 25 bp, Homo sapien
ttccgctggggcacggactgtacgg

SEQ ID NO: 536358 - DNA, 25 bp, Homo sapien
gggcggagggaagcggccgcgatcc

SEQ ID NO: 536359 - DNA, 25 bp, Homo sapien
gccgacgccgaggttggtgtcgtca

SEQ ID NO: 536360 - DNA, 25 bp, Homo sapien
tggaaccacgccaaggaagtcgact

SEQ ID NO: 536361 - DNA, 25 bp, Homo sapien
tcctcacagaaaggcgaaacggggc

SEQ ID NO: 536362 - DNA, 25 bp, Homo sapien
cgccagcccgttgggaaggttggca

SEQ ID NO: 536363 - DNA, 25 bp, Homo sapien
gccagcccgttgggaaggttggcag

SEQ ID NO: 536364 - DNA, 25 bp, Homo sapien
tctcctcgccatcgtagattcgcac

SEQ ID NO: 536365 - DNA, 25 bp, Homo sapien
ggtctcgttgatctccaggaggccg

SEQ ID NO: 536366 - DNA, 25 bp, Homo sapien
aggaggccgctggtccaaacgaagc

SEQ ID NO: 536367 - DNA, 25 bp, Homo sapien
ccgcgctgctggatcaccagggtct

SEQ ID NO: 536368 - DNA, 25 bp, Homo sapien
cgctggtccaaacgaagcggtccat

SEQ ID NO: 536369 - DNA, 25 bp, Homo sapien
aggccgcgagcagcgcgccaggcag

SEQ ID NO: 536370 - DNA, 25 bp, Homo sapien
cacacgctgtgcaaacgtggacaaa

SEQ ID NO: 536371 - DNA, 25 bp, Homo sapien
gtggtgataacgtcccacctcagaa

SEQ ID NO: 536372 - DNA, 25 bp, Homo sapien
cgtggacaaacaacctctgaacctg

SEQ ID NO: 536373 - DNA, 25 bp, Homo sapien
taaaggtatggaaagtagatcccaa

SEQ ID NO: 536374 - DNA, 25 bp, Homo sapien
tacgtcctcgtcagtgaacgcgtcg

SEQ ID NO: 536375 - DNA, 25 bp, Homo sapien
tacacacgctcgtggtacgccagat

SEQ ID NO: 536376 - DNA, 25 bp, Homo sapien
tgtttaataagaagggcagccaatc

SEQ ID NO: 536377 - DNA, 25 bp, Homo sapien
tacgccagatcggtgtttacgtcct

SEQ ID NO: 536378 - DNA, 25 bp, Homo sapien
ctgtgagggtctcaagatgtgtccc

SEQ ID NO: 536379 - DNA, 25 bp, Homo sapien
gtgagggtctcaagatgtgtcccat

SEQ ID NO: 536380 - DNA, 25 bp, Homo sapien
tgtgagggtctcaagatgtgtccca

SEQ ID NO: 536381 - DNA, 25 bp, Homo sapien
tggggactgagcaggccgactcctc

SEQ ID NO: 536382 - DNA, 25 bp, Homo sapien
tccaggatgaagagcgctgtttagg

SEQ ID NO: 536383 - DNA, 25 bp, Homo sapien
ctcggttgtttgtcaacctagtcct

SEQ ID NO: 536384 - DNA, 25 bp, Homo sapien
caacctagtcctgctatgtcgtggg

SEQ ID NO: 536385 - DNA, 25 bp, Homo sapien
gaattaatttgaaacacatcacaac

SEQ ID NO: 536386 - DNA, 25 bp, Homo sapien
cacaacataacttgagaaaattttc

SEQ ID NO: 536387 - DNA, 25 bp, Homo sapien
gctgcaaggattgcattataaaagc

SEQ ID NO: 536388 - DNA, 25 bp, Homo sapien
aagctgtttgttggctttctaagtc

SEQ ID NO: 536389 - DNA, 25 bp, Homo sapien
gagagtaggacttttattccgtgta

SEQ ID NO: 536390 - DNA, 25 bp, Homo sapien
gacttctcatgttctagagagtagg

SEQ ID NO: 536391 - DNA, 25 bp, Homo sapien
tgtaaggttccaaactaatatggca

SEQ ID NO: 536392 - DNA, 25 bp, Homo sapien
tcactgttaagtcatgtcccttgaa

SEQ ID NO: 536393 - DNA, 25 bp, Homo sapien
gctaaatgatgtgataccgtgcata

SEQ ID NO: 536394 - DNA, 25 bp, Homo sapien
aaatgcctctgttagagaactcaag

SEQ ID NO: 536395 - DNA, 25 bp, Homo sapien
tagttctaacattcaaccagaggtc

SEQ ID NO: 536396 - DNA, 25 bp, Homo sapien
cccttttctggtgcttaaggacagc

SEQ ID NO: 536397 - DNA, 25 bp, Homo sapien
tctctcaccatgtcattggcgtgga

SEQ ID NO: 536398 - DNA, 25 bp, Homo sapien
ttctctcaccatgtcattggcgtgg

SEQ ID NO: 536399 - DNA, 25 bp, Homo sapien
tattctctcaccatgtcattggcgt

SEQ ID NO: 536400 - DNA, 25 bp, Homo sapien
attctctcaccatgtcattggcgtg

SEQ ID NO: 536401 - DNA, 25 bp, Homo sapien
gaggtcatgggtttatggatgttat

SEQ ID NO: 536402 - DNA, 25 bp, Homo sapien
ctgcatgaggtcatgggtttatgga

SEQ ID NO: 536403 - DNA, 25 bp, Homo sapien
ataacttagatgcacatcccatgtt

SEQ ID NO: 536404 - DNA, 25 bp, Homo sapien
cttagatgcacatcccatgttgaga

SEQ ID NO: 536405 - DNA, 25 bp, Homo sapien
tatggttgataaagtagtggtagga

SEQ ID NO: 536406 - DNA, 25 bp, Homo sapien
tttgatatagtgaagttcgttgttg

SEQ ID NO: 536407 - DNA, 25 bp, Homo sapien
gctatcaaatggcatcacatgttac

SEQ ID NO: 536408 - DNA, 25 bp, Homo sapien
gaagagtcatttgatatagtgaagt

SEQ ID NO: 536409 - DNA, 25 bp, Homo sapien
ccagcaagttccacgtccagagagc

SEQ ID NO: 536410 - DNA, 25 bp, Homo sapien
caagttccacgtccagagagccagg

SEQ ID NO: 536411 - DNA, 25 bp, Homo sapien
tgctccaaaccaacccttacatccg

SEQ ID NO: 536412 - DNA, 25 bp, Homo sapien
ggcacaccacagacccattagggag

SEQ ID NO: 536413 - DNA, 25 bp, Homo sapien
aggactggacttcacgtttgcccac

SEQ ID NO: 536414 - DNA, 25 bp, Homo sapien
tcgtggaaggcagctcgctggacct

SEQ ID NO: 536415 - DNA, 25 bp, Homo sapien
tctcgtggaaggcagctcgctggac

SEQ ID NO: 536416 - DNA, 25 bp, Homo sapien
gcaggactggacttcacgtttgccc

SEQ ID NO: 536417 - DNA, 25 bp, Homo sapien
tcatttcgttcactgagaatcacaa

SEQ ID NO: 536418 - DNA, 25 bp, Homo sapien
gaaaagccgcacctcatttcgttca

SEQ ID NO: 536419 - DNA, 25 bp, Homo sapien
taagcaccagaaatttggagatgaa

SEQ ID NO: 536420 - DNA, 25 bp, Homo sapien
tctctgttccaattaagcaccagaa

SEQ ID NO: 536421 - DNA, 25 bp, Homo sapien
tctgtgatctctgctagatcaccag

SEQ ID NO: 536422 - DNA, 25 bp, Homo sapien
cctaggccagcgaaccttactgaac

SEQ ID NO: 536423 - DNA, 25 bp, Homo sapien
gcggtctcggcggtctggaatcctc

SEQ ID NO: 536424 - DNA, 25 bp, Homo sapien
tcatctgtagtttttgcacaactga

SEQ ID NO: 536425 - DNA, 25 bp, Homo sapien
tgatcacgccctccactatcttgtt

SEQ ID NO: 536426 - DNA, 25 bp, Homo sapien
gtaccgcagttcagcacttttggct

SEQ ID NO: 536427 - DNA, 25 bp, Homo sapien
gcgtggaactgtcaggtaccgcagt

SEQ ID NO: 536428 - DNA, 25 bp, Homo sapien
gcagttcagcacttttggctccgca

SEQ ID NO: 536429 - DNA, 25 bp, Homo sapien
gctgcaattttgctactcgctgctc

SEQ ID NO: 536430 - DNA, 25 bp, Homo sapien
gctgttggatatgtgagcattatga

SEQ ID NO: 536431 - DNA, 25 bp, Homo sapien
tggatatgtgagcattatgaatgca

SEQ ID NO: 536432 - DNA, 25 bp, Homo sapien
cttattgtgggtgtgtatgattgct

SEQ ID NO: 536433 - DNA, 25 bp, Homo sapien
tgtatgattgctgttggatatgtga

SEQ ID NO: 536434 - DNA, 25 bp, Homo sapien
gggaaccatgtgctggagttagcca

SEQ ID NO: 536435 - DNA, 25 bp, Homo sapien
catgtgctggagttagccagtcctg

SEQ ID NO: 536436 - DNA, 25 bp, Homo sapien
ctagagagggaaccatgtgctggag

SEQ ID NO: 536437 - DNA, 25 bp, Homo sapien
gtgctggagttagccagtcctgcat

SEQ ID NO: 536438 - DNA, 25 bp, Homo sapien
tatagattcaatgcgagcccaataa

SEQ ID NO: 536439 - DNA, 25 bp, Homo sapien
tatactgcaatctatccaagcacag

SEQ ID NO: 536440 - DNA, 25 bp, Homo sapien
taacaagggaacttagcaagatgct

SEQ ID NO: 536441 - DNA, 25 bp, Homo sapien
cctagaaatacaaaggccgtagaat

SEQ ID NO: 536442 - DNA, 25 bp, Homo sapien
tcccctcagtaccttcggatgaaag

SEQ ID NO: 536443 - DNA, 25 bp, Homo sapien
acaaagcggcactgagataacttca

SEQ ID NO: 536444 - DNA, 25 bp, Homo sapien
cgatctgcaagggttaaagggcgct

SEQ ID NO: 536445 - DNA, 25 bp, Homo sapien
catccctagaacgtgctggcagctt

SEQ ID NO: 536446 - DNA, 25 bp, Homo sapien
tctgtggcttgaagtgactgaaagt

SEQ ID NO: 536447 - DNA, 25 bp, Homo sapien
cattcataagtaatgagcttaggct

SEQ ID NO: 536448 - DNA, 25 bp, Homo sapien
tgtagacattaatatgggctcactg

SEQ ID NO: 536449 - DNA, 25 bp, Homo sapien
ctcactgtcagctgggagttctcac

SEQ ID NO: 536450 - DNA, 25 bp, Homo sapien
aaaactgagtttgtatgctacctcc

SEQ ID NO: 536451 - DNA, 25 bp, Homo sapien
ctgagtttcttgagggcgcggtcta

SEQ ID NO: 536452 - DNA, 25 bp, Homo sapien
tgtcagaccagtacattacagttgg

SEQ ID NO: 536453 - DNA, 25 bp, Homo sapien
tatggttgagacatcactggatcct

SEQ ID NO: 536454 - DNA, 25 bp, Homo sapien
gagtacaggagaggccagatcttaa

SEQ ID NO: 536455 - DNA, 25 bp, Homo sapien
gtttttaacccacagccacgagagc

SEQ ID NO: 536456 - DNA, 25 bp, Homo sapien
gaatgtaatggcatggtcgcagctc

SEQ ID NO: 536457 - DNA, 25 bp, Homo sapien
gcgtgcaccaccgtttctgacagga

SEQ ID NO: 536458 - DNA, 25 bp, Homo sapien
tattggtgagtaaccttcacttggg

SEQ ID NO: 536459 - DNA, 25 bp, Homo sapien
gctgatttgccctaatcctctgctg

SEQ ID NO: 536460 - DNA, 25 bp, Homo sapien
gctgacattctgatatcggacaact

SEQ ID NO: 536461 - DNA, 25 bp, Homo sapien
aatcagtacctttgagagagggtcc

SEQ ID NO: 536462 - DNA, 25 bp, Homo sapien
ccagattgaggctaaaaatgttcac

SEQ ID NO: 536463 - DNA, 25 bp, Homo sapien
tccagattgaggctaaaaatgttca

SEQ ID NO: 536464 - DNA, 25 bp, Homo sapien
ggtagattccattatatatcctttc

SEQ ID NO: 536465 - DNA, 25 bp, Homo sapien
acttttaggtagattccattatata

SEQ ID NO: 536466 - DNA, 25 bp, Homo sapien
gagtgtcaagaataaccgctcaggt

SEQ ID NO: 536467 - DNA, 25 bp, Homo sapien
tcaacctgccttaatgcttctttgg

SEQ ID NO: 536468 - DNA, 25 bp, Homo sapien
tacaagcaagggaagacttatggca

SEQ ID NO: 536469 - DNA, 25 bp, Homo sapien
tatggcattttagacttgaactacc

SEQ ID NO: 536470 - DNA, 25 bp, Homo sapien
tccagtctagggtcgaatgtcatgc

SEQ ID NO: 536471 - DNA, 25 bp, Homo sapien
gcatgatgactctgcaggccgaacg

SEQ ID NO: 536472 - DNA, 25 bp, Homo sapien
ttataaggccatgggtaatagcccc

SEQ ID NO: 536473 - DNA, 25 bp, Homo sapien
tcttctggcagtgggtgtagctccg

SEQ ID NO: 536474 - DNA, 25 bp, Homo sapien
catagtgggaaggtcatagcatgca

SEQ ID NO: 536475 - DNA, 25 bp, Homo sapien
gcctttaatgaactatggttaccac

SEQ ID NO: 536476 - DNA, 25 bp, Homo sapien
tgaatttttcactgctacaggaagg

SEQ ID NO: 536477 - DNA, 25 bp, Homo sapien
ttttgacaccaaggaatctacacct

SEQ ID NO: 536478 - DNA, 25 bp, Homo sapien
gagtcctcttgaacactgggtctgg

SEQ ID NO: 536479 - DNA, 25 bp, Homo sapien
gcctgggttgctccgtggtccactg

SEQ ID NO: 536480 - DNA, 25 bp, Homo sapien
tatcaggattgaaggcttgtgagtc

SEQ ID NO: 536481 - DNA, 25 bp, Homo sapien
cattattcagtcttccagcgcctgg

SEQ ID NO: 536482 - DNA, 25 bp, Homo sapien
gagacactgcgacatgcatcctgat

SEQ ID NO: 536483 - DNA, 25 bp, Homo sapien
tgttaacatgctcaggcctgtggag

SEQ ID NO: 536484 - DNA, 25 bp, Homo sapien
ggttggaggaacctcacatgcatga

SEQ ID NO: 536485 - DNA, 25 bp, Homo sapien
gcatcctgatttatcctccttgtta

SEQ ID NO: 536486 - DNA, 25 bp, Homo sapien
tagaactcaagaagctgttgtcctt

SEQ ID NO: 536487 - DNA, 25 bp, Homo sapien
tcatatttgactggcatgatcttgc

SEQ ID NO: 536488 - DNA, 25 bp, Homo sapien
ttcacaggctgatctacagccaccc

SEQ ID NO: 536489 - DNA, 25 bp, Homo sapien
gaaggtcaccgcagagttctaacac

SEQ ID NO: 536490 - DNA, 25 bp, Homo sapien
ttctgttttgagacaccgcctgcag

SEQ ID NO: 536491 - DNA, 25 bp, Homo sapien
tgttctgttttgagacaccgcctgc

SEQ ID NO: 536492 - DNA, 25 bp, Homo sapien
gttctgttttgagacaccgcctgca

SEQ ID NO: 536493 - DNA, 25 bp, Homo sapien
ttgttctgttttgagacaccgcctg

SEQ ID NO: 536494 - DNA, 25 bp, Homo sapien
agatgctctgtttggtcacggcgcc

SEQ ID NO: 536495 - DNA, 25 bp, Homo sapien
tgctctgtttggtcacggcgcccac

SEQ ID NO: 536496 - DNA, 25 bp, Homo sapien
gagatgctctgtttggtcacggcgc

SEQ ID NO: 536497 - DNA, 25 bp, Homo sapien
atgctctgtttggtcacggcgccca

SEQ ID NO: 536498 - DNA, 25 bp, Homo sapien
gaatacgagccttcacttgcgcttt

SEQ ID NO: 536499 - DNA, 25 bp, Homo sapien
gctttaatgtagcacttctctcctc

SEQ ID NO: 536500 - DNA, 25 bp, Homo sapien
ctcaggaatacgagccttcacttgc

SEQ ID NO: 536501 - DNA, 25 bp, Homo sapien
tctctcctccagcaaaacgaattcc

SEQ ID NO: 536502 - DNA, 25 bp, Homo sapien
ataaaaaagggccaagcatagtgtc

SEQ ID NO: 536503 - DNA, 25 bp, Homo sapien
gtagtggattagtggcactacaact

SEQ ID NO: 536504 - DNA, 25 bp, Homo sapien
atgaaggacaaagtctggtcctttc

SEQ ID NO: 536505 - DNA, 25 bp, Homo sapien
gaatatgctacatgtagtggattag

SEQ ID NO: 536506 - DNA, 25 bp, Homo sapien
tagtggattagtggcactacaactg

SEQ ID NO: 536507 - DNA, 25 bp, Homo sapien
taaagaacagttaccatttggatgt

SEQ ID NO: 536508 - DNA, 25 bp, Homo sapien
caggcttgcctggttaaattctcta

SEQ ID NO: 536509 - DNA, 25 bp, Homo sapien
atgtgtgtgagaaacgctgctcctc

SEQ ID NO: 536510 - DNA, 25 bp, Homo sapien
gctcctccttgaattagaaaagtcc

SEQ ID NO: 536511 - DNA, 25 bp, Homo sapien
tgttcccagcgtctatttccattga

SEQ ID NO: 536512 - DNA, 25 bp, Homo sapien
tccattgacccatcttgtaatttcc

SEQ ID NO: 536513 - DNA, 25 bp, Homo sapien
tgtaatttcccattgatactcatgg

SEQ ID NO: 536514 - DNA, 25 bp, Homo sapien
tactcatggtgtaatggacattgta

SEQ ID NO: 536515 - DNA, 25 bp, Homo sapien
ctgaaagtgagcataagagttagtg

SEQ ID NO: 536516 - DNA, 25 bp, Homo sapien
gagttagtgatgctttcttttttga

SEQ ID NO: 536517 - DNA, 25 bp, Homo sapien
aagtgagcataagagttagtgatgc

SEQ ID NO: 536518 - DNA, 25 bp, Homo sapien
gcataagagttagtgatgctttctt

SEQ ID NO: 536519 - DNA, 25 bp, Homo sapien
aaagactttggttgcctctgacacc

SEQ ID NO: 536520 - DNA, 25 bp, Homo sapien
cttagaactgttgggatctcccggg

SEQ ID NO: 536521 - DNA, 25 bp, Homo sapien
tgcagaagagcatcggtccagtaat

SEQ ID NO: 536522 - DNA, 25 bp, Homo sapien
cagaaggttaattgggctcccagct

SEQ ID NO: 536523 - DNA, 25 bp, Homo sapien
agcagcacagctcccgaaatgagga

SEQ ID NO: 536524 - DNA, 25 bp, Homo sapien
gtgactgtcgctccccttccagaag

SEQ ID NO: 536525 - DNA, 25 bp, Homo sapien
gctggagggcttcaccgtcagcgta

SEQ ID NO: 536526 - DNA, 25 bp, Homo sapien
gaagtagaaggccccgatggcccca

SEQ ID NO: 536527 - DNA, 25 bp, Homo sapien
gaccgtcgcgtttgtgccgccagca

SEQ ID NO: 536528 - DNA, 25 bp, Homo sapien
agctcgcccgggctcctacgggtgc

SEQ ID NO: 536529 - DNA, 25 bp, Homo sapien
ctacgggtgcccctttcgccgcgct

SEQ ID NO: 536530 - DNA, 25 bp, Homo sapien
ggagtcgggcgggaaacagctcgcc

SEQ ID NO: 536531 - DNA, 25 bp, Homo sapien
ggaactttgtcggagttctctgtca

SEQ ID NO: 536532 - DNA, 25 bp, Homo sapien
ccagggcaatgggaactttgtcgga

SEQ ID NO: 536533 - DNA, 25 bp, Homo sapien
agaattccacgtcatcaggtcccac

SEQ ID NO: 536534 - DNA, 25 bp, Homo sapien
gggctgcagaattccacgtcatcag

SEQ ID NO: 536535 - DNA, 25 bp, Homo sapien
agggcatttcaacgccgcgcgcaca

SEQ ID NO: 536536 - DNA, 25 bp, Homo sapien
acacacggtgcacggtcccgcctgg

SEQ ID NO: 536537 - DNA, 25 bp, Homo sapien
cgggaggagtgaggcacttggagac

SEQ ID NO: 536538 - DNA, 25 bp, Homo sapien
gacgtgcagggcatttcaacgccgc

SEQ ID NO: 536539 - DNA, 25 bp, Homo sapien
taagcgggtaggatccctgcacagt

SEQ ID NO: 536540 - DNA, 25 bp, Homo sapien
cacagtgagttaatccatatgcaaa

SEQ ID NO: 536541 - DNA, 25 bp, Homo sapien
cacagtgaccccaattgctttgcaa

SEQ ID NO: 536542 - DNA, 25 bp, Homo sapien
tgctttgcaatcgtgagccacatgg

SEQ ID NO: 536543 - DNA, 25 bp, Homo sapien
taaaagcttccctaataagctggct

SEQ ID NO: 536544 - DNA, 25 bp, Homo sapien
gggaccaagatttccactgacgttg

SEQ ID NO: 536545 - DNA, 25 bp, Homo sapien
cctggcagttctcttgggaccaaga

SEQ ID NO: 536546 - DNA, 25 bp, Homo sapien
cagattgatgccagctacatatacc

SEQ ID NO: 536547 - DNA, 25 bp, Homo sapien
cagtgatgacacatactagggagcc

SEQ ID NO: 536548 - DNA, 25 bp, Homo sapien
cgaatctggaagagatggtccctgc

SEQ ID NO: 536549 - DNA, 25 bp, Homo sapien
taaaaagttggcattcgtcacacag

SEQ ID NO: 536550 - DNA, 25 bp, Homo sapien
tttctaacttctctatttgcttcag

SEQ ID NO: 536551 - DNA, 25 bp, Homo sapien
cctctagtgaatggacaggagggat

SEQ ID NO: 536552 - DNA, 25 bp, Homo sapien
cccataatgttaagataatggcagc

SEQ ID NO: 536553 - DNA, 25 bp, Homo sapien
taacccataatgttaagataatggc

SEQ ID NO: 536554 - DNA, 25 bp, Homo sapien
ctcctaacccataatgttaagataa

SEQ ID NO: 536555 - DNA, 25 bp, Homo sapien
gctgtaatttttcaatctcaaaatg

SEQ ID NO: 536556 - DNA, 25 bp, Homo sapien
aatttttcaatctcaaaatgccaca

SEQ ID NO: 536557 - DNA, 25 bp, Homo sapien
gcagaattctgattgctgtaatttt

SEQ ID NO: 536558 - DNA, 25 bp, Homo sapien
gggcatggcatggcagaattctgat

SEQ ID NO: 536559 - DNA, 25 bp, Homo sapien
ttgtccactttaagcacttccttct

SEQ ID NO: 536560 - DNA, 25 bp, Homo sapien
ccttctctattacttgataaatgat

SEQ ID NO: 536561 - DNA, 25 bp, Homo sapien
ttgatttccaaactatggttgtcca

SEQ ID NO: 536562 - DNA, 25 bp, Homo sapien
aactatggttgtccactttaagcac

SEQ ID NO: 536563 - DNA, 25 bp, Homo sapien
cgattattgatgtgtttgtgcaggg

SEQ ID NO: 536564 - DNA, 25 bp, Homo sapien
tcaggtgtgtgtataatgggacgat

SEQ ID NO: 536565 - DNA, 25 bp, Homo sapien
cacagtgttaatacaatttgcggga

SEQ ID NO: 536566 - DNA, 25 bp, Homo sapien
tgaattctagaagcagcaccgcctc

SEQ ID NO: 536567 - DNA, 25 bp, Homo sapien
gacttctttaaggacagcccatttg

SEQ ID NO: 536568 - DNA, 25 bp, Homo sapien
gacggtggcgttggatgggaatgac

SEQ ID NO: 536569 - DNA, 25 bp, Homo sapien
tgagagaacactgacggtggcgttg

SEQ ID NO: 536570 - DNA, 25 bp, Homo sapien
gaatgactgttcgtcagcatgtgac

SEQ ID NO: 536571 - DNA, 25 bp, Homo sapien
aaggcgcctttcagtggcctccagg

SEQ ID NO: 536572 - DNA, 25 bp, Homo sapien
tcaggtatgaaagggcgcttcatct

SEQ ID NO: 536573 - DNA, 25 bp, Homo sapien
ttcatcttctgcaaggcgcctttca

SEQ ID NO: 536574 - DNA, 25 bp, Homo sapien
tggcctccaggcatttgcggttaat

SEQ ID NO: 536575 - DNA, 25 bp, Homo sapien
caagaatttgtggtagccatggcaa

SEQ ID NO: 536576 - DNA, 25 bp, Homo sapien
taggactgaagctactgccctagga

SEQ ID NO: 536577 - DNA, 25 bp, Homo sapien
ttagattgcgagctgggcagagaca

SEQ ID NO: 536578 - DNA, 25 bp, Homo sapien
gagacactgcccctttgtggagggc

SEQ ID NO: 536579 - DNA, 25 bp, Homo sapien
gacagtgttattcctgttgcttcct

SEQ ID NO: 536580 - DNA, 25 bp, Homo sapien
aggattttcttcagcgttcaggtgc

SEQ ID NO: 536581 - DNA, 25 bp, Homo sapien
cagtgttattcctgttgcttcctac

SEQ ID NO: 536582 - DNA, 25 bp, Homo sapien
cgttcaggtgcgttctgcactccca

SEQ ID NO: 536583 - DNA, 25 bp, Homo sapien
acacctgcgttgcagcccacagtct

SEQ ID NO: 536584 - DNA, 25 bp, Homo sapien
gggtcatcagctgctctcacacctg

SEQ ID NO: 536585 - DNA, 25 bp, Homo sapien
gtttctagcctatttctggttactg

SEQ ID NO: 536586 - DNA, 25 bp, Homo sapien
ttctagcctatttctggttactggg

SEQ ID NO: 536587 - DNA, 25 bp, Homo sapien
tcctgtggtggtccggccctctctg

SEQ ID NO: 536588 - DNA, 25 bp, Homo sapien
ccttttgacaaggtgctgtttgctg

SEQ ID NO: 536589 - DNA, 25 bp, Homo sapien
ttaggtaagccttttgacaaggtgc

SEQ ID NO: 536590 - DNA, 25 bp, Homo sapien
tgtttgctgatgcatcctgtggtgg

SEQ ID NO: 536591 - DNA, 25 bp, Homo sapien
cagaagcctgagtgcgctgactcct

SEQ ID NO: 536592 - DNA, 25 bp, Homo sapien
tgcgctgactcctaactatgagctc

SEQ ID NO: 536593 - DNA, 25 bp, Homo sapien
gcctgagtgcgctgactcctaacta

SEQ ID NO: 536594 - DNA, 25 bp, Homo sapien
cctttgccaagggttgccaccccat

SEQ ID NO: 536595 - DNA, 25 bp, Homo sapien
agcatctggcgattgacatgatcct

SEQ ID NO: 536596 - DNA, 25 bp, Homo sapien
catgatcctgtaagtcaattttgca

SEQ ID NO: 536597 - DNA, 25 bp, Homo sapien
caattttgcagctgagtggactgag

SEQ ID NO: 536598 - DNA, 25 bp, Homo sapien
cagaagctggacccgctgctctgct

SEQ ID NO: 536599 - DNA, 25 bp, Homo sapien
tggaaaatatagagcaggtgactca

SEQ ID NO: 536600 - DNA, 25 bp, Homo sapien
gtggaaaatatagagcaggtgactc

SEQ ID NO: 536601 - DNA, 25 bp, Homo sapien
agtggaaaatatagagcaggtgact

SEQ ID NO: 536602 - DNA, 25 bp, Homo sapien
tcatctgccgccaacattatctggg

SEQ ID NO: 536603 - DNA, 25 bp, Homo sapien
catctgccgccaacattatctgggg

SEQ ID NO: 536604 - DNA, 25 bp, Homo sapien
atctgccgccaacattatctggggc

SEQ ID NO: 536605 - DNA, 25 bp, Homo sapien
ctcatctgccgccaacattatctgg

SEQ ID NO: 536606 - DNA, 25 bp, Homo sapien
tcagcgccctcttagagacagatcc

SEQ ID NO: 536607 - DNA, 25 bp, Homo sapien
gcgccaagcccgttgtaacataaac

SEQ ID NO: 536608 - DNA, 25 bp, Homo sapien
caaaatgggaatggtggcgccaaca

SEQ ID NO: 536609 - DNA, 25 bp, Homo sapien
tgtaagggttgttcttgtactctcc

SEQ ID NO: 536610 - DNA, 25 bp, Homo sapien
ctgaatcgattggttgtgtctgatt

SEQ ID NO: 536611 - DNA, 25 bp, Homo sapien
attggttgtgtctgattcggaggct

SEQ ID NO: 536612 - DNA, 25 bp, Homo sapien
gtgtctgattcggaggcttatttag

SEQ ID NO: 536613 - DNA, 25 bp, Homo sapien
gtctgattcggaggcttatttagct

SEQ ID NO: 536614 - DNA, 25 bp, Homo sapien
cagaaacggctgaactttgcacggg

SEQ ID NO: 536615 - DNA, 25 bp, Homo sapien
ctccgttgcctgcagaaacggctga

SEQ ID NO: 536616 - DNA, 25 bp, Homo sapien
tctgagcttgtcaggcgcacgtgcg

SEQ ID NO: 536617 - DNA, 25 bp, Homo sapien
gcacgtgcgactccgttgcctgcag

SEQ ID NO: 536618 - DNA, 25 bp, Homo sapien
tcatgcagaatgcttggtaaggagc

SEQ ID NO: 536619 - DNA, 25 bp, Homo sapien
gacataggcatagtactcttgagtg

SEQ ID NO: 536620 - DNA, 25 bp, Homo sapien
gctctgctcacagaagacttgctca

SEQ ID NO: 536621 - DNA, 25 bp, Homo sapien
tttatctaaccttcttgtgcctcgg

SEQ ID NO: 536622 - DNA, 25 bp, Homo sapien
cactgaaaccggtcaataacttagg

SEQ ID NO: 536623 - DNA, 25 bp, Homo sapien
tattactgtgcttataagtgacacg

SEQ ID NO: 536624 - DNA, 25 bp, Homo sapien
tggcaagccgcaattgaaatcaaag

SEQ ID NO: 536625 - DNA, 25 bp, Homo sapien
gtcttacagacagttcctttggcaa

SEQ ID NO: 536626 - DNA, 25 bp, Homo sapien
acattttcattggctcccttcttcg

SEQ ID NO: 536627 - DNA, 25 bp, Homo sapien
cattggctcccttcttcggggacag

SEQ ID NO: 536628 - DNA, 25 bp, Homo sapien
tggctcccttcttcggggacaggta

SEQ ID NO: 536629 - DNA, 25 bp, Homo sapien
attttcattggctcccttcttcggg

SEQ ID NO: 536630 - DNA, 25 bp, Homo sapien
ggcccaggatcttacactcagcggt

SEQ ID NO: 536631 - DNA, 25 bp, Homo sapien
ggatcccgaggcagtgacgtgctct

SEQ ID NO: 536632 - DNA, 25 bp, Homo sapien
gacgtgctcttacagaaggttgaca

SEQ ID NO: 536633 - DNA, 25 bp, Homo sapien
attgtccctgcgcagaggatcccga

SEQ ID NO: 536634 - DNA, 25 bp, Homo sapien
aggaaacagcatgacgattattcct

SEQ ID NO: 536635 - DNA, 25 bp, Homo sapien
aacagcatgacgattattcctgaga

SEQ ID NO: 536636 - DNA, 25 bp, Homo sapien
gcatgacgattattcctgagattat

SEQ ID NO: 536637 - DNA, 25 bp, Homo sapien
gaaacagcatgacgattattcctga

SEQ ID NO: 536638 - DNA, 25 bp, Homo sapien
aaaaattgataagcagaacccactt

SEQ ID NO: 536639 - DNA, 25 bp, Homo sapien
ccactttttaatggctagcatcacc

SEQ ID NO: 536640 - DNA, 25 bp, Homo sapien
catgctgctgcctaacaggatgagg

SEQ ID NO: 536641 - DNA, 25 bp, Homo sapien
taaagccatcttaatgcaaagctgg

SEQ ID NO: 536642 - DNA, 25 bp, Homo sapien
tttggcgggaaagaagagtcctcac

SEQ ID NO: 536643 - DNA, 25 bp, Homo sapien
ggaaccgagattgagaggaggcaaa

SEQ ID NO: 536644 - DNA, 25 bp, Homo sapien
gctgggaaccgagattgagaggagg

SEQ ID NO: 536645 - DNA, 25 bp, Homo sapien
gaagggaggaatgccgaatttggcg

SEQ ID NO: 536646 - DNA, 25 bp, Homo sapien
cagaaatggtgttgaaggagtgtcc

SEQ ID NO: 536647 - DNA, 25 bp, Homo sapien
tcggaatcgctgtcgttgaaatcac

SEQ ID NO: 536648 - DNA, 25 bp, Homo sapien
tgtctttgccgctgaacttctctgc

SEQ ID NO: 536649 - DNA, 25 bp, Homo sapien
gagatcctttttcagagcgtccccg

SEQ ID NO: 536650 - DNA, 25 bp, Homo sapien
caagtgcgacaggttgtctacctga

SEQ ID NO: 536651 - DNA, 25 bp, Homo sapien
ggttgtctacctgaatgcacccacc

SEQ ID NO: 536652 - DNA, 25 bp, Homo sapien
caaaaaacaagtgcgacaggttgtc

SEQ ID NO: 536653 - DNA, 25 bp, Homo sapien
gacaggttgtctacctgaatgcacc

SEQ ID NO: 536654 - DNA, 25 bp, Homo sapien
agcctgtccgcggagctcggagggg

SEQ ID NO: 536655 - DNA, 25 bp, Homo sapien
ggcgcccagccgaaggaaggcctca

SEQ ID NO: 536656 - DNA, 25 bp, Homo sapien
gcggagctcggaggggggcgcccag

SEQ ID NO: 536657 - DNA, 25 bp, Homo sapien
gggcgcccagccgaaggaaggcctc

SEQ ID NO: 536658 - DNA, 25 bp, Homo sapien
tgctgcccctcgaagtgacaggcgc

SEQ ID NO: 536659 - DNA, 25 bp, Homo sapien
tgagcacgtcgaacatgttgggcct

SEQ ID NO: 536660 - DNA, 25 bp, Homo sapien
gccaaagggcgctttgccggtgcca

SEQ ID NO: 536661 - DNA, 25 bp, Homo sapien
gacaggcgctttccccagtggcgct

SEQ ID NO: 536662 - DNA, 25 bp, Homo sapien
agccgggagccgaggctccgccgcc

SEQ ID NO: 536663 - DNA, 25 bp, Homo sapien
gggagccgggagccgaggctccgcc

SEQ ID NO: 536664 - DNA, 25 bp, Homo sapien
cggggagccgggagccgaggctccg

SEQ ID NO: 536665 - DNA, 25 bp, Homo sapien
ctccggggagccgggagccgaggct

SEQ ID NO: 536666 - DNA, 25 bp, Homo sapien
tagatggctccggtagctgggtcca

SEQ ID NO: 536667 - DNA, 25 bp, Homo sapien
tgtggtcattcgcatccaggacgcg

SEQ ID NO: 536668 - DNA, 25 bp, Homo sapien
gtctcatagtcgaagctgcgcagcg

SEQ ID NO: 536669 - DNA, 25 bp, Homo sapien
tgttaccacgaagctgacagttgcg

SEQ ID NO: 536670 - DNA, 25 bp, Homo sapien
caaggggatgcgcgtgcccactgcc

SEQ ID NO: 536671 - DNA, 25 bp, Homo sapien
actgccgcaccctcggacacctcta

SEQ ID NO: 536672 - DNA, 25 bp, Homo sapien
caccctcggacacctctaccgggat

SEQ ID NO: 536673 - DNA, 25 bp, Homo sapien
atgcgcgtgcccactgccgcaccct

SEQ ID NO: 536674 - DNA, 25 bp, Homo sapien
gcgcgtggtcgttgacgtccctcac

SEQ ID NO: 536675 - DNA, 25 bp, Homo sapien
aagcgcggcgcgtggtcgttgacgt

SEQ ID NO: 536676 - DNA, 25 bp, Homo sapien
gcggcgcgtggtcgttgacgtccct

SEQ ID NO: 536677 - DNA, 25 bp, Homo sapien
gcgcggcgcgtggtcgttgacgtcc

SEQ ID NO: 536678 - DNA, 25 bp, Homo sapien
ttgaattgcttcatcaggcggaagc

SEQ ID NO: 536679 - DNA, 25 bp, Homo sapien
tcctcgaaggtgctgtatcggactg

SEQ ID NO: 536680 - DNA, 25 bp, Homo sapien
catcaggcggaagcttgtgtcaccc

SEQ ID NO: 536681 - DNA, 25 bp, Homo sapien
gatactttcatatgcaggtcctcgg

SEQ ID NO: 536682 - DNA, 25 bp, Homo sapien
ggggctgccccaacgcctcacagga

SEQ ID NO: 536683 - DNA, 25 bp, Homo sapien
ggcgtcagtctcaggctctcggaat

SEQ ID NO: 536684 - DNA, 25 bp, Homo sapien
agaagtctgcgggtagcagctccga

SEQ ID NO: 536685 - DNA, 25 bp, Homo sapien
tctttgcgagccctgtgcgggagaa

SEQ ID NO: 536686 - DNA, 25 bp, Homo sapien
tccagcctcaagtgcgatccgaaag

SEQ ID NO: 536687 - DNA, 25 bp, Homo sapien
cctcgcgccgcctttgcctttatag

SEQ ID NO: 536688 - DNA, 25 bp, Homo sapien
gagccgggtagccaatggccgcctc

SEQ ID NO: 536689 - DNA, 25 bp, Homo sapien
tttgcctttatagccgccgatatgc

SEQ ID NO: 536690 - DNA, 25 bp, Homo sapien
atatgctaatcacccgagccgggta

SEQ ID NO: 536691 - DNA, 25 bp, Homo sapien
taaaatagcacatcaacgtccgcag

SEQ ID NO: 536692 - DNA, 25 bp, Homo sapien
gcacaggtctttccgtgccggcggt

SEQ ID NO: 536693 - DNA, 25 bp, Homo sapien
cagcggacagccactcgattatgga

SEQ ID NO: 536694 - DNA, 25 bp, Homo sapien
tgaaggcacgcgaacaccgtgagct

SEQ ID NO: 536695 - DNA, 25 bp, Homo sapien
caatcttgagaacaaacacagctcc

SEQ ID NO: 536696 - DNA, 25 bp, Homo sapien
ccggcaactgtctcgcaatcttgag

SEQ ID NO: 536697 - DNA, 25 bp, Homo sapien
caaaaggtctgggcaggcccaaagg

SEQ ID NO: 536698 - DNA, 25 bp, Homo sapien
ctttctctcggttttagcaacttcg

SEQ ID NO: 536699 - DNA, 25 bp, Homo sapien
tttctgttaccgagcctaatgccgg

SEQ ID NO: 536700 - DNA, 25 bp, Homo sapien
gaatgcaaatgttgcgggctccgca

SEQ ID NO: 536701 - DNA, 25 bp, Homo sapien
tggccggcgttttctcggaatgcaa

SEQ ID NO: 536702 - DNA, 25 bp, Homo sapien
taatgccggcattgtgaaactcgcg

SEQ ID NO: 536703 - DNA, 25 bp, Homo sapien
aagcctgcgctggtggaaatttgac

SEQ ID NO: 536704 - DNA, 25 bp, Homo sapien
gaaagaaaatcaggtgcagggaaag

SEQ ID NO: 536705 - DNA, 25 bp, Homo sapien
gaaagaagcctgcgctggtggaaat

SEQ ID NO: 536706 - DNA, 25 bp, Homo sapien
gtgaaagaaaatcaggtgcagggaa

SEQ ID NO: 536707 - DNA, 25 bp, Homo sapien
gagtgactggtaaggccaaatccca

SEQ ID NO: 536708 - DNA, 25 bp, Homo sapien
actgtgtttcctactatgagtccca

SEQ ID NO: 536709 - DNA, 25 bp, Homo sapien
acacttgttcgtctatgggctgagc

SEQ ID NO: 536710 - DNA, 25 bp, Homo sapien
gagagaagagcacactctgatgaca

SEQ ID NO: 536711 - DNA, 25 bp, Homo sapien
cctacgaccttgtttttggtgcttg

SEQ ID NO: 536712 - DNA, 25 bp, Homo sapien
tgtgggatatgggatgtggcctggg

SEQ ID NO: 536713 - DNA, 25 bp, Homo sapien
tctgtccatgacaaatgatggtggg

SEQ ID NO: 536714 - DNA, 25 bp, Homo sapien
ttaacacccgaaggattcagtgtgt

SEQ ID NO: 536715 - DNA, 25 bp, Homo sapien
tgctttaagtgggtcacaatccact

SEQ ID NO: 536716 - DNA, 25 bp, Homo sapien
ttgctttaagtgggtcacaatccac

SEQ ID NO: 536717 - DNA, 25 bp, Homo sapien
ctttaagtgggtcacaatccacttt

SEQ ID NO: 536718 - DNA, 25 bp, Homo sapien
gctttaagtgggtcacaatccactt

SEQ ID NO: 536719 - DNA, 25 bp, Homo sapien
taggcgaggtgcgagggcctgtgtt

SEQ ID NO: 536720 - DNA, 25 bp, Homo sapien
ttgtgttcggaggatgaacaaaggt

SEQ ID NO: 536721 - DNA, 25 bp, Homo sapien
ggtggattatttgtgttcggaggat

SEQ ID NO: 536722 - DNA, 25 bp, Homo sapien
aagattttgagtaggcgaggtgcga

SEQ ID NO: 536723 - DNA, 25 bp, Homo sapien
catcaaaccccagtggaggcttttg

SEQ ID NO: 536724 - DNA, 25 bp, Homo sapien
caaaccccagtggaggcttttgctg

SEQ ID NO: 536725 - DNA, 25 bp, Homo sapien
tccatcaaaccccagtggaggcttt

SEQ ID NO: 536726 - DNA, 25 bp, Homo sapien
tcaaaccccagtggaggcttttgct

SEQ ID NO: 536727 - DNA, 25 bp, Homo sapien
gcaaacaccaatttccactggcaac

SEQ ID NO: 536728 - DNA, 25 bp, Homo sapien
tggcaacaaggacctccacatacat

SEQ ID NO: 536729 - DNA, 25 bp, Homo sapien
ggtgcctgattgtttcccacacttg

SEQ ID NO: 536730 - DNA, 25 bp, Homo sapien
cacattactggtgcatccgggctga

SEQ ID NO: 536731 - DNA, 25 bp, Homo sapien
tgactttctgttatgctcctgtttt

SEQ ID NO: 536732 - DNA, 25 bp, Homo sapien
gggctgtgaacaaggtgttgctgag

SEQ ID NO: 536733 - DNA, 25 bp, Homo sapien
tggtgtctcggctggatgcttgggc

SEQ ID NO: 536734 - DNA, 25 bp, Homo sapien
gtgtctcggctggatgcttgggctg

SEQ ID NO: 536735 - DNA, 25 bp, Homo sapien
ctgtgaacaaggtgttgctgaggtt

SEQ ID NO: 536736 - DNA, 25 bp, Homo sapien
tctgttctgctctcaatcccagaat

SEQ ID NO: 536737 - DNA, 25 bp, Homo sapien
tctgctctcaatcccagaataagcc

SEQ ID NO: 536738 - DNA, 25 bp, Homo sapien
atctctgttctgctctcaatcccag

SEQ ID NO: 536739 - DNA, 25 bp, Homo sapien
ctctcaatcccagaataagccacat

SEQ ID NO: 536740 - DNA, 25 bp, Homo sapien
cacacatctccctgagtggttctgg

SEQ ID NO: 536741 - DNA, 25 bp, Homo sapien
tttgatcagactctggcacacatct

SEQ ID NO: 536742 - DNA, 25 bp, Homo sapien
ccagaatatagtagacagctttgat

SEQ ID NO: 536743 - DNA, 25 bp, Homo sapien
gtggtctgggtccagaatatagtag

SEQ ID NO: 536744 - DNA, 25 bp, Homo sapien
aaaggcatgtgactcgactctcctc

SEQ ID NO: 536745 - DNA, 25 bp, Homo sapien
cttctttgtaacataagttccatta

SEQ ID NO: 536746 - DNA, 25 bp, Homo sapien
aaggcatgtgactcgactctcctcc

SEQ ID NO: 536747 - DNA, 25 bp, Homo sapien
tctttgtaacataagttccattaaa

SEQ ID NO: 536748 - DNA, 25 bp, Homo sapien
cttccagggaaaaatcattatttct

SEQ ID NO: 536749 - DNA, 25 bp, Homo sapien
tgaactgttggagttggactattct

SEQ ID NO: 536750 - DNA, 25 bp, Homo sapien
gcttgaactgttggagttggactat

SEQ ID NO: 536751 - DNA, 25 bp, Homo sapien
tgttggagttggactattcttggtc

SEQ ID NO: 536752 - DNA, 25 bp, Homo sapien
tcatgcttgaactgttggagttgga

SEQ ID NO: 536753 - DNA, 25 bp, Homo sapien
gattcaacgtgggactggctgccaa

SEQ ID NO: 536754 - DNA, 25 bp, Homo sapien
gggatgcctcataggtaagatggcc

SEQ ID NO: 536755 - DNA, 25 bp, Homo sapien
caaccaccaacgtgcttctttcttt

SEQ ID NO: 536756 - DNA, 25 bp, Homo sapien
tggccatcaccggattcaacgtggg

SEQ ID NO: 536757 - DNA, 25 bp, Homo sapien
tgtaagtttgaattgatgaagtctg

SEQ ID NO: 536758 - DNA, 25 bp, Homo sapien
atattgagaaacgtgggaaggagaa

SEQ ID NO: 536759 - DNA, 25 bp, Homo sapien
tatgcaaatgtggatattgagaaac

SEQ ID NO: 536760 - DNA, 25 bp, Homo sapien
aattgatgaagtctgtatgcaaatg

SEQ ID NO: 536761 - DNA, 25 bp, Homo sapien
tcctcatttgggacaaactttatct

SEQ ID NO: 536762 - DNA, 25 bp, Homo sapien
ccaaatcttttgtttatgccccaag

SEQ ID NO: 536763 - DNA, 25 bp, Homo sapien
ctttatctggctctcaggaacagga

SEQ ID NO: 536764 - DNA, 25 bp, Homo sapien
actggctccgactgatcacatttta

SEQ ID NO: 536765 - DNA, 25 bp, Homo sapien
gctttttggctcttgcacacccctg

SEQ ID NO: 536766 - DNA, 25 bp, Homo sapien
ttcccaggcttcaatattggtgcgc

SEQ ID NO: 536767 - DNA, 25 bp, Homo sapien
gagatttagcagcttgggtttccca

SEQ ID NO: 536768 - DNA, 25 bp, Homo sapien
aattaatgctcccatgctttttggc

SEQ ID NO: 536769 - DNA, 25 bp, Homo sapien
ttgggttccagtagggggcagctgc

SEQ ID NO: 536770 - DNA, 25 bp, Homo sapien
tccttgggttccagtagggggcagc

SEQ ID NO: 536771 - DNA, 25 bp, Homo sapien
gggttccagtagggggcagctgcca

SEQ ID NO: 536772 - DNA, 25 bp, Homo sapien
ccttgggttccagtagggggcagct

SEQ ID NO: 536773 - DNA, 25 bp, Homo sapien
gatcgcaacttcaggtaaggaaaag

SEQ ID NO: 536774 - DNA, 25 bp, Homo sapien
ccccatgctgagtggtctaaataag

SEQ ID NO: 536775 - DNA, 25 bp, Homo sapien
ccagccagtgatgtacaggaaatac

SEQ ID NO: 536776 - DNA, 25 bp, Homo sapien
catcccctgaggataattgtttggc

SEQ ID NO: 536777 - DNA, 25 bp, Homo sapien
gctgtggggtgaagactctggattc

SEQ ID NO: 536778 - DNA, 25 bp, Homo sapien
ctgtggggtgaagactctggattct

SEQ ID NO: 536779 - DNA, 25 bp, Homo sapien
caggagagacagacatttgtgattc

SEQ ID NO: 536780 - DNA, 25 bp, Homo sapien
gacagacatttgtgattccctcttc

SEQ ID NO: 536781 - DNA, 25 bp, Homo sapien
ggaaacatgggatctaaggtgagca

SEQ ID NO: 536782 - DNA, 25 bp, Homo sapien
tagtaaacacttcgatgggaatctc

SEQ ID NO: 536783 - DNA, 25 bp, Homo sapien
tttctggccaagaggtaagaagtgg

SEQ ID NO: 536784 - DNA, 25 bp, Homo sapien
ctaaggtgagcagatgtgctagtaa

SEQ ID NO: 536785 - DNA, 25 bp, Homo sapien
attgctgtttttttctgctcgctgt

SEQ ID NO: 536786 - DNA, 25 bp, Homo sapien
gctgtttttttctgctcgctgttcc

SEQ ID NO: 536787 - DNA, 25 bp, Homo sapien
agttttggggtccacattgctgttt

SEQ ID NO: 536788 - DNA, 25 bp, Homo sapien
ctggagttttggggtccacattgct

SEQ ID NO: 536789 - DNA, 25 bp, Homo sapien
tagtgtgctttgttgtgtcacgaaa

SEQ ID NO: 536790 - DNA, 25 bp, Homo sapien
gcgcagagtggcaacgtcgtgaatt

SEQ ID NO: 536791 - DNA, 25 bp, Homo sapien
cagggtctgcccgaatacatttgtg

SEQ ID NO: 536792 - DNA, 25 bp, Homo sapien
tgtgttgtctccaaacctggcactt

SEQ ID NO: 536793 - DNA, 25 bp, Homo sapien
gctcatacgcttttctgcattctaa

SEQ ID NO: 536794 - DNA, 25 bp, Homo sapien
ctgcattctaatttgcccatgaatg

SEQ ID NO: 536795 - DNA, 25 bp, Homo sapien
tgcaaatgagtcctgtgtaaaatag

SEQ ID NO: 536796 - DNA, 25 bp, Homo sapien
gaagtgtaaacctgcacattgctca

SEQ ID NO: 536797 - DNA, 25 bp, Homo sapien
acttcagcagatgtagacaagattt

SEQ ID NO: 536798 - DNA, 25 bp, Homo sapien
tggagtatcatgtgaacctgcggaa

SEQ ID NO: 536799 - DNA, 25 bp, Homo sapien
tgttgccagccgttgggtcacacct

SEQ ID NO: 536800 - DNA, 25 bp, Homo sapien
aaatatcgagcgtctttcccttggc

SEQ ID NO: 536801 - DNA, 25 bp, Homo sapien
gcttcaggctgccacgattacaatc

SEQ ID NO: 536802 - DNA, 25 bp, Homo sapien
ttttgctgagccgaggactgcaggc

SEQ ID NO: 536803 - DNA, 25 bp, Homo sapien
gccgagaggcaagaaaatgaatatg

SEQ ID NO: 536804 - DNA, 25 bp, Homo sapien
cagtgtattcactccagaaaatagc

SEQ ID NO: 536805 - DNA, 25 bp, Homo sapien
gctctccaacctctagggttttaca

SEQ ID NO: 536806 - DNA, 25 bp, Homo sapien
ctagagctctccaacctctagggtt

SEQ ID NO: 536807 - DNA, 25 bp, Homo sapien
tagagctctccaacctctagggttt

SEQ ID NO: 536808 - DNA, 25 bp, Homo sapien
gagctctccaacctctagggtttta

SEQ ID NO: 536809 - DNA, 25 bp, Homo sapien
tagattgatccagtgacctcagagg

SEQ ID NO: 536810 - DNA, 25 bp, Homo sapien
cattgtgacgtggagagtgaactgt

SEQ ID NO: 536811 - DNA, 25 bp, Homo sapien
gacttggacaaaagttgctgatgct

SEQ ID NO: 536812 - DNA, 25 bp, Homo sapien
tgctgatgctagtcctgctgatagg

SEQ ID NO: 536813 - DNA, 25 bp, Homo sapien
gtccaggtctcaataggactccatg

SEQ ID NO: 536814 - DNA, 25 bp, Homo sapien
gagcctcagtcacaccatgggaggg

SEQ ID NO: 536815 - DNA, 25 bp, Homo sapien
agtggaccggcagcagcatattcag

SEQ ID NO: 536816 - DNA, 25 bp, Homo sapien
gcagcagcatattcagtccaggtct

SEQ ID NO: 536817 - DNA, 25 bp, Homo sapien
ccctctgcggcttagtacaaattag

SEQ ID NO: 536818 - DNA, 25 bp, Homo sapien
aataatgagaacaagtgtcccaaga

SEQ ID NO: 536819 - DNA, 25 bp, Homo sapien
ctctgcggcttagtacaaattagct

SEQ ID NO: 536820 - DNA, 25 bp, Homo sapien
gagaacaagtgtcccaagactggag

SEQ ID NO: 536821 - DNA, 25 bp, Homo sapien
ccagtcctgacctagctattatctg

SEQ ID NO: 536822 - DNA, 25 bp, Homo sapien
tttcttgtagtgtcaaagcattgga

SEQ ID NO: 536823 - DNA, 25 bp, Homo sapien
tccttgtttcttgtagtgtcaaagc

SEQ ID NO: 536824 - DNA, 25 bp, Homo sapien
ctgacctagctattatctgtccacc

SEQ ID NO: 536825 - DNA, 25 bp, Homo sapien
gagttcagcaacctccattatatca

SEQ ID NO: 536826 - DNA, 25 bp, Homo sapien
gggcgctgctggtcattaggtgcag

SEQ ID NO: 536827 - DNA, 25 bp, Homo sapien
tctctggagttcagcaacctccatt

SEQ ID NO: 536828 - DNA, 25 bp, Homo sapien
taggtgcagggttccctctctggag

SEQ ID NO: 536829 - DNA, 25 bp, Homo sapien
cctttctgtcagcaccgccggtaga

SEQ ID NO: 536830 - DNA, 25 bp, Homo sapien
tcagcaccgccggtagagggcagct

SEQ ID NO: 536831 - DNA, 25 bp, Homo sapien
tttctgtcagcaccgccggtagagg

SEQ ID NO: 536832 - DNA, 25 bp, Homo sapien
accgccggtagagggcagctccagc

SEQ ID NO: 536833 - DNA, 25 bp, Homo sapien
tccaactgtcagtctgatgccccag

SEQ ID NO: 536834 - DNA, 25 bp, Homo sapien
gcccatgctccaactgtcagtctga

SEQ ID NO: 536835 - DNA, 25 bp, Homo sapien
tagagagtctttccctaaactccca

SEQ ID NO: 536836 - DNA, 25 bp, Homo sapien
tcagatactagagagtctttcccta

SEQ ID NO: 536837 - DNA, 25 bp, Homo sapien
gctgagcagattgctcccaagggag

SEQ ID NO: 536838 - DNA, 25 bp, Homo sapien
tttcctgggcccaaattgtaggatc

SEQ ID NO: 536839 - DNA, 25 bp, Homo sapien
gatcccaccaattttgcactgcaga

SEQ ID NO: 536840 - DNA, 25 bp, Homo sapien
ttacttcacacaagtgagcacttgg

SEQ ID NO: 536841 - DNA, 25 bp, Homo sapien
tgagaagaggatttttaatgagagc

SEQ ID NO: 536842 - DNA, 25 bp, Homo sapien
ggatttttaatgagagctattgcta

SEQ ID NO: 536843 - DNA, 25 bp, Homo sapien
gttctgagggtgaaagcagtttgcc

SEQ ID NO: 536844 - DNA, 25 bp, Homo sapien
ggtgaaagcagtttgcctataggag

SEQ ID NO: 536845 - DNA, 25 bp, Homo sapien
ttgattgggtgttgattggttctga

SEQ ID NO: 536846 - DNA, 25 bp, Homo sapien
agtttgattgggtgttgattggttc

SEQ ID NO: 536847 - DNA, 25 bp, Homo sapien
cactgagtttgattgggtgttgatt

SEQ ID NO: 536848 - DNA, 25 bp, Homo sapien
ggcactgagtttgattgggtgttga

SEQ ID NO: 536849 - DNA, 25 bp, Homo sapien
tggaggatttagttcagtcagaaaa

SEQ ID NO: 536850 - DNA, 25 bp, Homo sapien
cggcgatggccgaacaatgtgctac

SEQ ID NO: 536851 - DNA, 25 bp, Homo sapien
tactaaagcgtgatttaatgaggct

SEQ ID NO: 536852 - DNA, 25 bp, Homo sapien
tttgacatacaacgctgggagcggc

SEQ ID NO: 536853 - DNA, 25 bp, Homo sapien
tttagtggaccccaaacatggcgca

SEQ ID NO: 536854 - DNA, 25 bp, Homo sapien
cagacacagttgtcagggagacttg

SEQ ID NO: 536855 - DNA, 25 bp, Homo sapien
gaaacctctgactgatttagtggac

SEQ ID NO: 536856 - DNA, 25 bp, Homo sapien
tgtttgttcggatcccagacacagt

SEQ ID NO: 536857 - DNA, 25 bp, Homo sapien
gatgccttcccctgatgattttgaa

SEQ ID NO: 536858 - DNA, 25 bp, Homo sapien
tcatggataattgaccctgcagtag

SEQ ID NO: 536859 - DNA, 25 bp, Homo sapien
tgagcttgtagaagcactgctgctg

SEQ ID NO: 536860 - DNA, 25 bp, Homo sapien
gctatatcagaggtagatgccttcc

SEQ ID NO: 536861 - DNA, 25 bp, Homo sapien
cttctgccttatatttaattagcag

SEQ ID NO: 536862 - DNA, 25 bp, Homo sapien
tgaccttctgccttatatttaatta

SEQ ID NO: 536863 - DNA, 25 bp, Homo sapien
gaccttctgccttatatttaattag

SEQ ID NO: 536864 - DNA, 25 bp, Homo sapien
accttctgccttatatttaattagc

SEQ ID NO: 536865 - DNA, 25 bp, Homo sapien
tgaacagtgtaatacccaagatcat

SEQ ID NO: 536866 - DNA, 25 bp, Homo sapien
tcagcttagctaaatcagagctcca

SEQ ID NO: 536867 - DNA, 25 bp, Homo sapien
ttagctaaatcagagctccaaatga

SEQ ID NO: 536868 - DNA, 25 bp, Homo sapien
cagagagttttcaggctagacatgt

SEQ ID NO: 536869 - DNA, 25 bp, Homo sapien
cggttggtacgctggcttgaagccc

SEQ ID NO: 536870 - DNA, 25 bp, Homo sapien
gactggcgctaagatgaggctctct

SEQ ID NO: 536871 - DNA, 25 bp, Homo sapien
tggagcctgatggtgcggttggtac

SEQ ID NO: 536872 - DNA, 25 bp, Homo sapien
actccaggtctaagtctggctctag

SEQ ID NO: 536873 - DNA, 25 bp, Homo sapien
gaaggcgttctgacatgttccgtga

SEQ ID NO: 536874 - DNA, 25 bp, Homo sapien
tgttgggccatcacgttaagctgtc

SEQ ID NO: 536875 - DNA, 25 bp, Homo sapien
ttaagctgtcgatgcctaagaccac

SEQ ID NO: 536876 - DNA, 25 bp, Homo sapien
ccgtgagggatattcgagaagcaac

SEQ ID NO: 536877 - DNA, 25 bp, Homo sapien
cacattgcaccctcttgataaggca

SEQ ID NO: 536878 - DNA, 25 bp, Homo sapien
gccctaggctatcacccaaggctgt

SEQ ID NO: 536879 - DNA, 25 bp, Homo sapien
gataaggcaccgtgaaccaatgagc

SEQ ID NO: 536880 - DNA, 25 bp, Homo sapien
tctgatagactagttgctgataagc

SEQ ID NO: 536881 - DNA, 25 bp, Homo sapien
tcctgccatcattgtgccactgtcc

SEQ ID NO: 536882 - DNA, 25 bp, Homo sapien
ttttctcctgccatcattgtgccac

SEQ ID NO: 536883 - DNA, 25 bp, Homo sapien
tcttttctcctgccatcattgtgcc

SEQ ID NO: 536884 - DNA, 25 bp, Homo sapien
tctcctgccatcattgtgccactgt

SEQ ID NO: 536885 - DNA, 25 bp, Homo sapien
cttggtggagaatccatgattttcc

SEQ ID NO: 536886 - DNA, 25 bp, Homo sapien
ttttccagttatcctcagttgcact

SEQ ID NO: 536887 - DNA, 25 bp, Homo sapien
tagagggctgacagtgttgactgcc

SEQ ID NO: 536888 - DNA, 25 bp, Homo sapien
caaagcgccatttgctggcctgcca

SEQ ID NO: 536889 - DNA, 25 bp, Homo sapien
ctgccacgtttgctggtgctgcttc

SEQ ID NO: 536890 - DNA, 25 bp, Homo sapien
cctgccacgtttgctggtgctgctt

SEQ ID NO: 536891 - DNA, 25 bp, Homo sapien
ctgcttctgtgggacatagcgcttt

SEQ ID NO: 536892 - DNA, 25 bp, Homo sapien
ttctgtgggacatagcgctttagag

SEQ ID NO: 536893 - DNA, 25 bp, Homo sapien
tgtgccgaagagtgtggaaagccac

SEQ ID NO: 536894 - DNA, 25 bp, Homo sapien
agggcggccgatctgagcacctcag

SEQ ID NO: 536895 - DNA, 25 bp, Homo sapien
gtagtcttaccccactgtgccgaag

SEQ ID NO: 536896 - DNA, 25 bp, Homo sapien
aaagccacaggataaatgcggtgca

SEQ ID NO: 536897 - DNA, 25 bp, Homo sapien
cagatgggagactgttggagtatta

SEQ ID NO: 536898 - DNA, 25 bp, Homo sapien
gtgcttggggtagggattactctcc

SEQ ID NO: 536899 - DNA, 25 bp, Homo sapien
gagggttttcttatctatatggtgc

SEQ ID NO: 536900 - DNA, 25 bp, Homo sapien
caaaggactgtattgggtggcgcca

SEQ ID NO: 536901 - DNA, 25 bp, Homo sapien
tctaggacgagctatagaaaagcta

SEQ ID NO: 536902 - DNA, 25 bp, Homo sapien
gagagtatctagttaatcagtgcag

SEQ ID NO: 536903 - DNA, 25 bp, Homo sapien
tatgtgcaacttatgagtgtatcag

SEQ ID NO: 536904 - DNA, 25 bp, Homo sapien
ggcagctcagaagattagaaccaga

SEQ ID NO: 536905 - DNA, 25 bp, Homo sapien
ttgtaccaagtacacagtatgacct

SEQ ID NO: 536906 - DNA, 25 bp, Homo sapien
cagatcaatgttttgtaccaagtac

SEQ ID NO: 536907 - DNA, 25 bp, Homo sapien
tggctctaggcagttttccagatca

SEQ ID NO: 536908 - DNA, 25 bp, Homo sapien
ttaatctggctctaggcagttttcc

SEQ ID NO: 536909 - DNA, 25 bp, Homo sapien
attgaaagggagagcttcaccctct

SEQ ID NO: 536910 - DNA, 25 bp, Homo sapien
ttgaaagggagagcttcaccctctg

SEQ ID NO: 536911 - DNA, 25 bp, Homo sapien
tgaaagggagagcttcaccctctgt

SEQ ID NO: 536912 - DNA, 25 bp, Homo sapien
cagagctctggtctgcatggctgcc

SEQ ID NO: 536913 - DNA, 25 bp, Homo sapien
gcagcagagctctggtctgcatggc

SEQ ID NO: 536914 - DNA, 25 bp, Homo sapien
tcagtgccgctctgctgtcatttgg

SEQ ID NO: 536915 - DNA, 25 bp, Homo sapien
tgtcatttggctgcagattgggcca

SEQ ID NO: 536916 - DNA, 25 bp, Homo sapien
tcgcagagttgtgcgtcctgtggcc

SEQ ID NO: 536917 - DNA, 25 bp, Homo sapien
ggattctggagtgggcccccaacat

SEQ ID NO: 536918 - DNA, 25 bp, Homo sapien
cccaacatccgtgaggcatcgcaga

SEQ ID NO: 536919 - DNA, 25 bp, Homo sapien
attgccgacggggagaaacttcatt

SEQ ID NO: 536920 - DNA, 25 bp, Homo sapien
gagtgccagcttggcaatcatgcac

SEQ ID NO: 536921 - DNA, 25 bp, Homo sapien
cacaggtgagagtgccagcttggca

SEQ ID NO: 536922 - DNA, 25 bp, Homo sapien
ggtgagagtgccagcttggcaatca

SEQ ID NO: 536923 - DNA, 25 bp, Homo sapien
ctgcacaggtgagagtgccagcttg

SEQ ID NO: 536924 - DNA, 25 bp, Homo sapien
ctctcatcaaccttgtatcgataaa

SEQ ID NO: 536925 - DNA, 25 bp, Homo sapien
tctcatcaaccttgtatcgataaag

SEQ ID NO: 536926 - DNA, 25 bp, Homo sapien
taatcccagggattcaattcgcatg

SEQ ID NO: 536927 - DNA, 25 bp, Homo sapien
ctgtgagccagttaatcccagggat

SEQ ID NO: 536928 - DNA, 25 bp, Homo sapien
gattcaattcgcatgagtgccaggt

SEQ ID NO: 536929 - DNA, 25 bp, Homo sapien
tgtgagccagttaatcccagggatt

SEQ ID NO: 536930 - DNA, 25 bp, Homo sapien
cctttgcctcagagatttgttcaca

SEQ ID NO: 536931 - DNA, 25 bp, Homo sapien
ccgattccgtggctgctgagagcca

SEQ ID NO: 536932 - DNA, 25 bp, Homo sapien
ctggtgtacaattccgattccgtgg

SEQ ID NO: 536933 - DNA, 25 bp, Homo sapien
aattccgattccgtggctgctgaga

SEQ ID NO: 536934 - DNA, 25 bp, Homo sapien
tcttggatctagaatttacctttcc

SEQ ID NO: 536935 - DNA, 25 bp, Homo sapien
ttcttggatctagaatttacctttc

SEQ ID NO: 536936 - DNA, 25 bp, Homo sapien
gggtattgttaagcttcttctccat

SEQ ID NO: 536937 - DNA, 25 bp, Homo sapien
ctggcttgggtattgttaagcttct

SEQ ID NO: 536938 - DNA, 25 bp, Homo sapien
cattacttgctgttctacagtggac

SEQ ID NO: 536939 - DNA, 25 bp, Homo sapien
ggcattacttgctgttctacagtgg

SEQ ID NO: 536940 - DNA, 25 bp, Homo sapien
ttcagacttcttactttccccttgc

SEQ ID NO: 536941 - DNA, 25 bp, Homo sapien
gcttaattgccatccctttacccat

SEQ ID NO: 536942 - DNA, 25 bp, Homo sapien
agagtgagtattaagaagccacatc

SEQ ID NO: 536943 - DNA, 25 bp, Homo sapien
gagtgagtattaagaagccacatca

SEQ ID NO: 536944 - DNA, 25 bp, Homo sapien
gtgagtattaagaagccacatcatg

SEQ ID NO: 536945 - DNA, 25 bp, Homo sapien
aagagtgagtattaagaagccacat

SEQ ID NO: 536946 - DNA, 25 bp, Homo sapien
gaagaaaggctgttgtggacactta

SEQ ID NO: 536947 - DNA, 25 bp, Homo sapien
gctgttgtggacacttagaaagtct

SEQ ID NO: 536948 - DNA, 25 bp, Homo sapien
caggtgcagtcggagaagctgcctc

SEQ ID NO: 536949 - DNA, 25 bp, Homo sapien
tgaaagggagccatctggtgcttag

SEQ ID NO: 536950 - DNA, 25 bp, Homo sapien
cgggtcttcactgcctccgtgagca

SEQ ID NO: 536951 - DNA, 25 bp, Homo sapien
tgcacagtccccctgggctttgtga

SEQ ID NO: 536952 - DNA, 25 bp, Homo sapien
ctggtggctgatgcacagtccccct

SEQ ID NO: 536953 - DNA, 25 bp, Homo sapien
tgtaaaaggctgcatctcatgcctg

SEQ ID NO: 536954 - DNA, 25 bp, Homo sapien
gattgtctccaacaaggatggcgct

SEQ ID NO: 536955 - DNA, 25 bp, Homo sapien
ggatggcgctaatcttcctgtttag

SEQ ID NO: 536956 - DNA, 25 bp, Homo sapien
ccaggaaccttgtaacttctgattg

SEQ ID NO: 536957 - DNA, 25 bp, Homo sapien
cctgtttagctgtgggcatctgtac

SEQ ID NO: 536958 - DNA, 25 bp, Homo sapien
gcagctgacagtcgcagaggtgata

SEQ ID NO: 536959 - DNA, 25 bp, Homo sapien
tcgcagaggtgataatgggtagaca

SEQ ID NO: 536960 - DNA, 25 bp, Homo sapien
gataatgggtagacagactccagaa

SEQ ID NO: 536961 - DNA, 25 bp, Homo sapien
cttctggcgagggcagctgacagtc

SEQ ID NO: 536962 - DNA, 25 bp, Homo sapien
ctcctttttattaggtgagatgctg

SEQ ID NO: 536963 - DNA, 25 bp, Homo sapien
aaacgcatcatgtgttctggccaga

SEQ ID NO: 536964 - DNA, 25 bp, Homo sapien
tttattaggtgagatgctgagatgt

SEQ ID NO: 536965 - DNA, 25 bp, Homo sapien
cctgctccaggtgctaggctggaaa

SEQ ID NO: 536966 - DNA, 25 bp, Homo sapien
cccacttctgctgtccaggtgtgag

SEQ ID NO: 536967 - DNA, 25 bp, Homo sapien
tgttgcttgagaaagccatgaaacc

SEQ ID NO: 536968 - DNA, 25 bp, Homo sapien
ccagtcaagttccatggtagtccaa

SEQ ID NO: 536969 - DNA, 25 bp, Homo sapien
tttgtcgacaaccttccctggtgca

SEQ ID NO: 536970 - DNA, 25 bp, Homo sapien
gaagaggatgttggagggtcagaga

SEQ ID NO: 536971 - DNA, 25 bp, Homo sapien
tcttctgaagcactggttcaggtgg

SEQ ID NO: 536972 - DNA, 25 bp, Homo sapien
aagcactggttcaggtgggcaatgc

SEQ ID NO: 536973 - DNA, 25 bp, Homo sapien
gaagttcttcgagaggaccacggga

SEQ ID NO: 536974 - DNA, 25 bp, Homo sapien
tcttcagaggctgaataacttttca

SEQ ID NO: 536975 - DNA, 25 bp, Homo sapien
aacttttcactttggatgtaggtca

SEQ ID NO: 536976 - DNA, 25 bp, Homo sapien
caagcatacttgaagatccccaaac

SEQ ID NO: 536977 - DNA, 25 bp, Homo sapien
gaagatccccaaacaaaatgcttct

SEQ ID NO: 536978 - DNA, 25 bp, Homo sapien
tagttccagcttctatattctggaa

SEQ ID NO: 536979 - DNA, 25 bp, Homo sapien
gtagttccagcttctatattctgga

SEQ ID NO: 536980 - DNA, 25 bp, Homo sapien
atgcactaactttcatactcatgct

SEQ ID NO: 536981 - DNA, 25 bp, Homo sapien
ttcaatcattctattccagcatcct

SEQ ID NO: 536982 - DNA, 25 bp, Homo sapien
tattccagcatccttaatgcactaa

SEQ ID NO: 536983 - DNA, 25 bp, Homo sapien
gcatccttaatgcactaactttcat

SEQ ID NO: 536984 - DNA, 25 bp, Homo sapien
ccttttgtattgtgatcctttgtat

SEQ ID NO: 536985 - DNA, 25 bp, Homo sapien
cttttgtattgtgatcctttgtatg

SEQ ID NO: 536986 - DNA, 25 bp, Homo sapien
ggccttttgtattgtgatcctttgt

SEQ ID NO: 536987 - DNA, 25 bp, Homo sapien
gccttttgtattgtgatcctttgta

SEQ ID NO: 536988 - DNA, 25 bp, Homo sapien
cctgtttcggtgctgatcctgtctc

SEQ ID NO: 536989 - DNA, 25 bp, Homo sapien
tggattgactagttcatctattctg

SEQ ID NO: 536990 - DNA, 25 bp, Homo sapien
tccaccgtggttcctctgactttaa

SEQ ID NO: 536991 - DNA, 25 bp, Homo sapien
ttggttctagcttctggaatctttc

SEQ ID NO: 536992 - DNA, 25 bp, Homo sapien
ggttgctccctcaaagaatggctgt

SEQ ID NO: 536993 - DNA, 25 bp, Homo sapien
tatagaacctacctgatgttagtgg

SEQ ID NO: 536994 - DNA, 25 bp, Homo sapien
tgttagtgggtatcaggctacctac

SEQ ID NO: 536995 - DNA, 25 bp, Homo sapien
tccctcagaactctggagactttgc

SEQ ID NO: 536996 - DNA, 25 bp, Homo sapien
gtgtgggaggatccccactcaactc

SEQ ID NO: 536997 - DNA, 25 bp, Homo sapien
gtagactggcgactgatttggagca

SEQ ID NO: 536998 - DNA, 25 bp, Homo sapien
gtcatcaattgttagttctcttgcc

SEQ ID NO: 536999 - DNA, 25 bp, Homo sapien
tgttactcactcaaaagtcccacgt

SEQ ID NO: 537000 - DNA, 25 bp, Homo sapien
cgtacggttccactatcccatctag

SEQ ID NO: 537001 - DNA, 25 bp, Homo sapien
gaaatttagctggtaattttccagc

SEQ ID NO: 537002 - DNA, 25 bp, Homo sapien
catctagtccccctgcaaacttctc

SEQ ID NO: 537003 - DNA, 25 bp, Homo sapien
tgcaaacttctctccacgcacattt

SEQ ID NO: 537004 - DNA, 25 bp, Homo sapien
tcttcagggagtggagccgggtctt

SEQ ID NO: 537005 - DNA, 25 bp, Homo sapien
taatttctgttttactattcaggcc

SEQ ID NO: 537006 - DNA, 25 bp, Homo sapien
tgttttactattcaggccctgattg

SEQ ID NO: 537007 - DNA, 25 bp, Homo sapien
gatgtgggggagcatacacctggct

SEQ ID NO: 537008 - DNA, 25 bp, Homo sapien
ttatctttgggatttctgtgactct

SEQ ID NO: 537009 - DNA, 25 bp, Homo sapien
tgtgtgtccttgctatcccctccat

SEQ ID NO: 537010 - DNA, 25 bp, Homo sapien
ctctctgaccagcagttttggctcc

SEQ ID NO: 537011 - DNA, 25 bp, Homo sapien
ccatcaacattctctggtccctctg

SEQ ID NO: 537012 - DNA, 25 bp, Homo sapien
tgttcacctagcaagaatagaggaa

SEQ ID NO: 537013 - DNA, 25 bp, Homo sapien
tgaatgtctagaacgaatgtataac

SEQ ID NO: 537014 - DNA, 25 bp, Homo sapien
ccgtggtctaactgctgtctactga

SEQ ID NO: 537015 - DNA, 25 bp, Homo sapien
tattgatttggcacgcttgactttc

SEQ ID NO: 537016 - DNA, 25 bp, Homo sapien
agctagccttgctttcatccaggta

SEQ ID NO: 537017 - DNA, 25 bp, Homo sapien
tgctttcatccaggtatacagcaga

SEQ ID NO: 537018 - DNA, 25 bp, Homo sapien
gctaaagataggcagcaagttcata

SEQ ID NO: 537019 - DNA, 25 bp, Homo sapien
acagcagaagaggtttgtggatgtc

SEQ ID NO: 537020 - DNA, 25 bp, Homo sapien
tgtggtctagtagatgtcagagaag

SEQ ID NO: 537021 - DNA, 25 bp, Homo sapien
ttaatgtggtctagtagatgtcaga

SEQ ID NO: 537022 - DNA, 25 bp, Homo sapien
gagaagtccactgaagtgatgcagg

SEQ ID NO: 537023 - DNA, 25 bp, Homo sapien
gaagtccactgaagtgatgcaggat

SEQ ID NO: 537024 - DNA, 25 bp, Homo sapien
agaggcactaatgatggtgccagag

SEQ ID NO: 537025 - DNA, 25 bp, Homo sapien
gcatccgtgcaaggtgccaatgaag

SEQ ID NO: 537026 - DNA, 25 bp, Homo sapien
gaaattctctctttatgccagatga

SEQ ID NO: 537027 - DNA, 25 bp, Homo sapien
aatgaagcacttgtgtctcttcccc

SEQ ID NO: 537028 - DNA, 25 bp, Homo sapien
tgatctattaatgggacacgtgcac

SEQ ID NO: 537029 - DNA, 25 bp, Homo sapien
tctcaagggttaggcagacaatctt

SEQ ID NO: 537030 - DNA, 25 bp, Homo sapien
ggatatggctgatgtgtcttctgag

SEQ ID NO: 537031 - DNA, 25 bp, Homo sapien
caatcttgtagcacactgcttcagg

SEQ ID NO: 537032 - DNA, 25 bp, Homo sapien
cagcctgtccaggcattctgagaag

SEQ ID NO: 537033 - DNA, 25 bp, Homo sapien
tgtccaggcattctgagaaggctgc

SEQ ID NO: 537034 - DNA, 25 bp, Homo sapien
ttacaaagcagcagcctgtccaggc

SEQ ID NO: 537035 - DNA, 25 bp, Homo sapien
cagcagcctgtccaggcattctgag

SEQ ID NO: 537036 - DNA, 25 bp, Homo sapien
gggcgaggtgcccagtggcaaacac

SEQ ID NO: 537037 - DNA, 25 bp, Homo sapien
ggagcagggaatgtgacttatctcc

SEQ ID NO: 537038 - DNA, 25 bp, Homo sapien
acgagttatcccattagcgctgtca

SEQ ID NO: 537039 - DNA, 25 bp, Homo sapien
tcctcagtaggactcgaaagtccct

SEQ ID NO: 537040 - DNA, 25 bp, Homo sapien
tccagatgcttcctccattcagtga

SEQ ID NO: 537041 - DNA, 25 bp, Homo sapien
tttccagatgcttcctccattcagt

SEQ ID NO: 537042 - DNA, 25 bp, Homo sapien
ttccagatgcttcctccattcagtg

SEQ ID NO: 537043 - DNA, 25 bp, Homo sapien
ccagatgcttcctccattcagtgac

SEQ ID NO: 537044 - DNA, 25 bp, Homo sapien
gggtgccgtggtcttcaaacactct

SEQ ID NO: 537045 - DNA, 25 bp, Homo sapien
ccgtggtcttcaaacactctgtgct

SEQ ID NO: 537046 - DNA, 25 bp, Homo sapien
tgccgtggtcttcaaacactctgtg

SEQ ID NO: 537047 - DNA, 25 bp, Homo sapien
cttcaaacactctgtgcttcctcat

SEQ ID NO: 537048 - DNA, 25 bp, Homo sapien
tcaggtgcgagagacacatgtaacc

SEQ ID NO: 537049 - DNA, 25 bp, Homo sapien
tactaagtgggagaagcgttcatct

SEQ ID NO: 537050 - DNA, 25 bp, Homo sapien
cagtgcctgaccttatgcagctgag

SEQ ID NO: 537051 - DNA, 25 bp, Homo sapien
tggtgactgacagcccgaataagca

SEQ ID NO: 537052 - DNA, 25 bp, Homo sapien
ttttcctgagttgttagcacctcca

SEQ ID NO: 537053 - DNA, 25 bp, Homo sapien
tcagctctccagacctgcatgagtg

SEQ ID NO: 537054 - DNA, 25 bp, Homo sapien
tcaaggccttattgatgacaccttc

SEQ ID NO: 537055 - DNA, 25 bp, Homo sapien
tccagaaaagttagttactccatcc

SEQ ID NO: 537056 - DNA, 25 bp, Homo sapien
tgcacagctgcagtcacagtttctg

SEQ ID NO: 537057 - DNA, 25 bp, Homo sapien
gcccaaagccttgtcatggagcact

SEQ ID NO: 537058 - DNA, 25 bp, Homo sapien
gctatgctgattgggtgtctgcact

SEQ ID NO: 537059 - DNA, 25 bp, Homo sapien
tggagcactgcactaaacctgtagt

SEQ ID NO: 537060 - DNA, 25 bp, Homo sapien
gaaacagtggtcactaggcatggtg

SEQ ID NO: 537061 - DNA, 25 bp, Homo sapien
catggcaggctattggcttctagaa

SEQ ID NO: 537062 - DNA, 25 bp, Homo sapien
gaaagtgcaggatatccactgagaa

SEQ ID NO: 537063 - DNA, 25 bp, Homo sapien
gcaaatggtaagttgtgctccacaa

SEQ ID NO: 537064 - DNA, 25 bp, Homo sapien
gatcttgtcaatttacatggcaggc

SEQ ID NO: 537065 - DNA, 25 bp, Homo sapien
taacaaatgaagattgaccacctgt

SEQ ID NO: 537066 - DNA, 25 bp, Homo sapien
aaattcagcaatgtctcttaacaaa

SEQ ID NO: 537067 - DNA, 25 bp, Homo sapien
tgttcaccacgcgttcttggattta

SEQ ID NO: 537068 - DNA, 25 bp, Homo sapien
ttgctcagggtaaacctcagtatga

SEQ ID NO: 537069 - DNA, 25 bp, Homo sapien
gctaagacccaactctaattctata

SEQ ID NO: 537070 - DNA, 25 bp, Homo sapien
aagacccaactctaattctatattc

SEQ ID NO: 537071 - DNA, 25 bp, Homo sapien
tgctaagacccaactctaattctat

SEQ ID NO: 537072 - DNA, 25 bp, Homo sapien
tactgctaagacccaactctaattc

SEQ ID NO: 537073 - DNA, 25 bp, Homo sapien
tttctaaggcaccaagtaaaatgcc

SEQ ID NO: 537074 - DNA, 25 bp, Homo sapien
caagactcatttctaaggcaccaag

SEQ ID NO: 537075 - DNA, 25 bp, Homo sapien
cagcaagatactgcatgtcacatcg

SEQ ID NO: 537076 - DNA, 25 bp, Homo sapien
gatactgcatgtcacatcggagatc

SEQ ID NO: 537077 - DNA, 25 bp, Homo sapien
ctctttttctccctttgcccttcat

SEQ ID NO: 537078 - DNA, 25 bp, Homo sapien
tctctttttctccctttgcccttca

SEQ ID NO: 537079 - DNA, 25 bp, Homo sapien
tcaagttaggaggtacaaaccagat

SEQ ID NO: 537080 - DNA, 25 bp, Homo sapien
tcttggtccgctgttggtcaattcc

SEQ ID NO: 537081 - DNA, 25 bp, Homo sapien
caattccagatagaaccagagtggt

SEQ ID NO: 537082 - DNA, 25 bp, Homo sapien
ggtttaggcttgaccaatgccatta

SEQ ID NO: 537083 - DNA, 25 bp, Homo sapien
tcacaggtacgcttagtctccatcg

SEQ ID NO: 537084 - DNA, 25 bp, Homo sapien
tgtgattgggtaaaaacttctcgta

SEQ ID NO: 537085 - DNA, 25 bp, Homo sapien
gtctccatcgctcttacaaggatgc

SEQ ID NO: 537086 - DNA, 25 bp, Homo sapien
tcccattccaattactacagtgtag

SEQ ID NO: 537087 - DNA, 25 bp, Homo sapien
caatgtcctttttcaatctctctaa

SEQ ID NO: 537088 - DNA, 25 bp, Homo sapien
aggtaattttctcttatctgagttt

SEQ ID NO: 537089 - DNA, 25 bp, Homo sapien
ttctccaaggaggattcagaaatag

SEQ ID NO: 537090 - DNA, 25 bp, Homo sapien
ctgcaggaatccatcaatgtccttt

SEQ ID NO: 537091 - DNA, 25 bp, Homo sapien
cagagaataattcatatccttgcta

SEQ ID NO: 537092 - DNA, 25 bp, Homo sapien
gagaataattcatatccttgctaac

SEQ ID NO: 537093 - DNA, 25 bp, Homo sapien
agagaataattcatatccttgctaa

SEQ ID NO: 537094 - DNA, 25 bp, Homo sapien
cagggaaaactaacccattgtcatc

SEQ ID NO: 537095 - DNA, 25 bp, Homo sapien
gaaaactaacccattgtcatcatct

SEQ ID NO: 537096 - DNA, 25 bp, Homo sapien
taagaggtaattagccatgaataat

SEQ ID NO: 537097 - DNA, 25 bp, Homo sapien
atatcagggaaaactaacccattgt

SEQ ID NO: 537098 - DNA, 25 bp, Homo sapien
tctattccagtcactggcgcaactt

SEQ ID NO: 537099 - DNA, 25 bp, Homo sapien
cactggcgcaacttcgtcttgctga

SEQ ID NO: 537100 - DNA, 25 bp, Homo sapien
cagtcactggcgcaacttcgtcttg

SEQ ID NO: 537101 - DNA, 25 bp, Homo sapien
cgcaacttcgtcttgctgagagcct

SEQ ID NO: 537102 - DNA, 25 bp, Homo sapien
aaagtagattatgcctgtctggagc

SEQ ID NO: 537103 - DNA, 25 bp, Homo sapien
taatccatctttaccgtgtaggcag

SEQ ID NO: 537104 - DNA, 25 bp, Homo sapien
tgagaagcctcagaatggtgactgg

SEQ ID NO: 537105 - DNA, 25 bp, Homo sapien
gtaggcagtgccgtcaccacaaatc

SEQ ID NO: 537106 - DNA, 25 bp, Homo sapien
ccgcccgtggccctccagccgggca

SEQ ID NO: 537107 - DNA, 25 bp, Homo sapien
gcccgtggccctccagccgggcagc

SEQ ID NO: 537108 - DNA, 25 bp, Homo sapien
cgtggccctccagccgggcagctga

SEQ ID NO: 537109 - DNA, 25 bp, Homo sapien
ccgtggccctccagccgggcagctg

SEQ ID NO: 537110 - DNA, 25 bp, Homo sapien
gtggtgcttgcggttcgcgtggatc

SEQ ID NO: 537111 - DNA, 25 bp, Homo sapien
ttgcggttcgcgtggatcctgctgt

SEQ ID NO: 537112 - DNA, 25 bp, Homo sapien
cagtggtggtgcttgcggttcgcgt

SEQ ID NO: 537113 - DNA, 25 bp, Homo sapien
tgcttgcggttcgcgtggatcctgc

SEQ ID NO: 537114 - DNA, 25 bp, Homo sapien
ttacagctccacaggtggattgaac

SEQ ID NO: 537115 - DNA, 25 bp, Homo sapien
cagctccacaggtggattgaactcc

SEQ ID NO: 537116 - DNA, 25 bp, Homo sapien
acagctccacaggtggattgaactc

SEQ ID NO: 537117 - DNA, 25 bp, Homo sapien
tacagctccacaggtggattgaact

SEQ ID NO: 537118 - DNA, 25 bp, Homo sapien
atctctccgagtgatgacagacggg

SEQ ID NO: 537119 - DNA, 25 bp, Homo sapien
aaagcagacgatggaatctctccga

SEQ ID NO: 537120 - DNA, 25 bp, Homo sapien
ctactgggtgacaagtggtgaagca

SEQ ID NO: 537121 - DNA, 25 bp, Homo sapien
tacccatgaggtcagcatctcgaac

SEQ ID NO: 537122 - DNA, 25 bp, Homo sapien
gacttccatctaatagggtcatatt

SEQ ID NO: 537123 - DNA, 25 bp, Homo sapien
tatgttgctagaagggctgccgact

SEQ ID NO: 537124 - DNA, 25 bp, Homo sapien
gctagaagggctgccgactggcttc

SEQ ID NO: 537125 - DNA, 25 bp, Homo sapien
gtcatatttatgttgctagaagggc

SEQ ID NO: 537126 - DNA, 25 bp, Homo sapien
ctattctgcaacatgacagagggat

SEQ ID NO: 537127 - DNA, 25 bp, Homo sapien
caatgtgagtttttgcaacaatgta

SEQ ID NO: 537128 - DNA, 25 bp, Homo sapien
atacttccaccccaggaatttccag

SEQ ID NO: 537129 - DNA, 25 bp, Homo sapien
tcaaacactattctgcaacatgaca

SEQ ID NO: 537130 - DNA, 25 bp, Homo sapien
caatgacttggcagataattcctga

SEQ ID NO: 537131 - DNA, 25 bp, Homo sapien
tgaagttccatgaattcctttgcca

SEQ ID NO: 537132 - DNA, 25 bp, Homo sapien
cagtaagtttctacttgatgttgaa

SEQ ID NO: 537133 - DNA, 25 bp, Homo sapien
tcctttgccatctattatatttgtt

SEQ ID NO: 537134 - DNA, 25 bp, Homo sapien
ctttttgataattatggggaccatt

SEQ ID NO: 537135 - DNA, 25 bp, Homo sapien
tttgataattatggggaccattttc

SEQ ID NO: 537136 - DNA, 25 bp, Homo sapien
actttttgataattatggggaccat

SEQ ID NO: 537137 - DNA, 25 bp, Homo sapien
gataattatggggaccattttcttc

SEQ ID NO: 537138 - DNA, 25 bp, Homo sapien
ctttgtctggtggaggtttagtgct

SEQ ID NO: 537139 - DNA, 25 bp, Homo sapien
ggtttagtgctgctgttgtcggtat

SEQ ID NO: 537140 - DNA, 25 bp, Homo sapien
ttatcttcactctgtgaaaaattgc

SEQ ID NO: 537141 - DNA, 25 bp, Homo sapien
tgtctggtggaggtttagtgctgct

SEQ ID NO: 537142 - DNA, 25 bp, Homo sapien
ctttgctccggctcccttagagcat

SEQ ID NO: 537143 - DNA, 25 bp, Homo sapien
tgctccggctcccttagagcatgtg

SEQ ID NO: 537144 - DNA, 25 bp, Homo sapien
gctcccttagagcatgtgcttctgt

SEQ ID NO: 537145 - DNA, 25 bp, Homo sapien
tccggctcccttagagcatgtgctt

SEQ ID NO: 537146 - DNA, 25 bp, Homo sapien
tttctctggtgaagttatgcttcct

SEQ ID NO: 537147 - DNA, 25 bp, Homo sapien
ctggtgaagttatgcttcctcacat

SEQ ID NO: 537148 - DNA, 25 bp, Homo sapien
gtgaagttatgcttcctcacatgcc

SEQ ID NO: 537149 - DNA, 25 bp, Homo sapien
ttctctggtgaagttatgcttcctc

SEQ ID NO: 537150 - DNA, 25 bp, Homo sapien
gcaacatttcatctgtgggttgctg

SEQ ID NO: 537151 - DNA, 25 bp, Homo sapien
catttcatctgtgggttgctgttga

SEQ ID NO: 537152 - DNA, 25 bp, Homo sapien
caacatttcatctgtgggttgctgt

SEQ ID NO: 537153 - DNA, 25 bp, Homo sapien
tcatctgtgggttgctgttgagaca

SEQ ID NO: 537154 - DNA, 25 bp, Homo sapien
tcatattcccaaacccagtgtcctt

SEQ ID NO: 537155 - DNA, 25 bp, Homo sapien
catctctagctgcacacacttcctt

SEQ ID NO: 537156 - DNA, 25 bp, Homo sapien
ccttagcaaggcttgttgacctatc

SEQ ID NO: 537157 - DNA, 25 bp, Homo sapien
tcctcctatgctctgtatctccaca

SEQ ID NO: 537158 - DNA, 25 bp, Homo sapien
tagtcatgtggtagacatcctccca

SEQ ID NO: 537159 - DNA, 25 bp, Homo sapien
cacagcaatgggtgataggagccag

SEQ ID NO: 537160 - DNA, 25 bp, Homo sapien
gcccttatggtactgaagctgccag

SEQ ID NO: 537161 - DNA, 25 bp, Homo sapien
gattggatgtaactcaaagtctgtg

SEQ ID NO: 537162 - DNA, 25 bp, Homo sapien
agccaggtagttgcccctgtgccca

SEQ ID NO: 537163 - DNA, 25 bp, Homo sapien
cctgtgcccaccactagtagaagtt

SEQ ID NO: 537164 - DNA, 25 bp, Homo sapien
ctggcatgcctgtattgaaatgaca

SEQ ID NO: 537165 - DNA, 25 bp, Homo sapien
ccaagaggcatttgtggagagataa

SEQ ID NO: 537166 - DNA, 25 bp, Homo sapien
caattgctctgaatgtaatgacaca

SEQ ID NO: 537167 - DNA, 25 bp, Homo sapien
aagtggcaattgctctgaatgtaat

SEQ ID NO: 537168 - DNA, 25 bp, Homo sapien
tgcaggatgaaataagtggggatca

SEQ ID NO: 537169 - DNA, 25 bp, Homo sapien
gatcaatcatagtcagggaagtggc

SEQ ID NO: 537170 - DNA, 25 bp, Homo sapien
aaatgcatggcataagccttagagg

SEQ ID NO: 537171 - DNA, 25 bp, Homo sapien
ggctgaagggctgcaaaagctctca

SEQ ID NO: 537172 - DNA, 25 bp, Homo sapien
tatcttcttccctataagtggctga

SEQ ID NO: 537173 - DNA, 25 bp, Homo sapien
gcagcttacttgcagactccctgag

SEQ ID NO: 537174 - DNA, 25 bp, Homo sapien
ttgacttgacagtcttttggctgtc

SEQ ID NO: 537175 - DNA, 25 bp, Homo sapien
ttttaagatactcttttgacttgac

SEQ ID NO: 537176 - DNA, 25 bp, Homo sapien
ccttttaagatactcttttgacttg

SEQ ID NO: 537177 - DNA, 25 bp, Homo sapien
tggctgtcaaagccccatccaaatc

SEQ ID NO: 537178 - DNA, 25 bp, Homo sapien
agtcacgagggggcaagtttttgtg

SEQ ID NO: 537179 - DNA, 25 bp, Homo sapien
gaatcctctggaatgctttctggaa

SEQ ID NO: 537180 - DNA, 25 bp, Homo sapien
gctattcttgcccatattcttattc

SEQ ID NO: 537181 - DNA, 25 bp, Homo sapien
ggctggaattcttgtgtgtatgact

SEQ ID NO: 537182 - DNA, 25 bp, Homo sapien
ttcttgtgtgtatgactgataaagc

SEQ ID NO: 537183 - DNA, 25 bp, Homo sapien
tcttattcctaagggaaatacatgg

SEQ ID NO: 537184 - DNA, 25 bp, Homo sapien
tccacataaccaagactattcaatt

SEQ ID NO: 537185 - DNA, 25 bp, Homo sapien
gcagatctgtatacctcaccaagaa

SEQ ID NO: 537186 - DNA, 25 bp, Homo sapien
tagtgattggaaacgtggctgaaaa

SEQ ID NO: 537187 - DNA, 25 bp, Homo sapien
tcaccaagaattgaggaccatttat

SEQ ID NO: 537188 - DNA, 25 bp, Homo sapien
aaagccttccctagacctagcactg

SEQ ID NO: 537189 - DNA, 25 bp, Homo sapien
gcttccccctcattgattagcaaag

SEQ ID NO: 537190 - DNA, 25 bp, Homo sapien
cattgattagcaaagccttccctag

SEQ ID NO: 537191 - DNA, 25 bp, Homo sapien
aaaaatccttgtaactccacagctt

SEQ ID NO: 537192 - DNA, 25 bp, Homo sapien
catgtaacgacatatcctctaaatc

SEQ ID NO: 537193 - DNA, 25 bp, Homo sapien
aaggatcttagaaactcttactaca

SEQ ID NO: 537194 - DNA, 25 bp, Homo sapien
gtttcactgtatattctgagaagcc

SEQ ID NO: 537195 - DNA, 25 bp, Homo sapien
tgttcctactcaccacttctaggtg

SEQ ID NO: 537196 - DNA, 25 bp, Homo sapien
gatctcattgaactctgctggctcg

SEQ ID NO: 537197 - DNA, 25 bp, Homo sapien
ggacaccctcttgcacatactggta

SEQ ID NO: 537198 - DNA, 25 bp, Homo sapien
ggtggcccattaagtgtcctggctg

SEQ ID NO: 537199 - DNA, 25 bp, Homo sapien
tgggcccacaccataggtacagaaa

SEQ ID NO: 537200 - DNA, 25 bp, Homo sapien
atggaggagtaaatgagaaacaaaa

SEQ ID NO: 537201 - DNA, 25 bp, Homo sapien
atgagaaacaaaatggtggtctttt

SEQ ID NO: 537202 - DNA, 25 bp, Homo sapien
aaatgagaaacaaaatggtggtctt

SEQ ID NO: 537203 - DNA, 25 bp, Homo sapien
ctatggaggagtaaatgagaaacaa

SEQ ID NO: 537204 - DNA, 25 bp, Homo sapien
ctggtatccagtcctttggaatgta

SEQ ID NO: 537205 - DNA, 25 bp, Homo sapien
tccagtcctttggaatgtagatcat

SEQ ID NO: 537206 - DNA, 25 bp, Homo sapien
tatccagtcctttggaatgtagatc

SEQ ID NO: 537207 - DNA, 25 bp, Homo sapien
tggtatccagtcctttggaatgtag

SEQ ID NO: 537208 - DNA, 25 bp, Homo sapien
gaaaggtgcattactctctcgtagc

SEQ ID NO: 537209 - DNA, 25 bp, Homo sapien
gcattactctctcgtagctgtcgtt

SEQ ID NO: 537210 - DNA, 25 bp, Homo sapien
ctgatctgggaaaggtgcattactc

SEQ ID NO: 537211 - DNA, 25 bp, Homo sapien
tctctcgtagctgtcgttctttcat

SEQ ID NO: 537212 - DNA, 25 bp, Homo sapien
ctggggctgggggatattttcccat

SEQ ID NO: 537213 - DNA, 25 bp, Homo sapien
ttccaacctccagtggaggatattt

SEQ ID NO: 537214 - DNA, 25 bp, Homo sapien
caatcgcagaatgcctcacctgtga

SEQ ID NO: 537215 - DNA, 25 bp, Homo sapien
tcacctgtgaagtatgactattatc

SEQ ID NO: 537216 - DNA, 25 bp, Homo sapien
ggaggatattttgccaagagaaact

SEQ ID NO: 537217 - DNA, 25 bp, Homo sapien
agtcacacattggtcacatttgaat

SEQ ID NO: 537218 - DNA, 25 bp, Homo sapien
acacattggtcacatttgaatggat

SEQ ID NO: 537219 - DNA, 25 bp, Homo sapien
cacacattggtcacatttgaatgga

SEQ ID NO: 537220 - DNA, 25 bp, Homo sapien
cattggtcacatttgaatggatttt

SEQ ID NO: 537221 - DNA, 25 bp, Homo sapien
aaagctcttctgttactattgtggc

SEQ ID NO: 537222 - DNA, 25 bp, Homo sapien
cactctggtgctctatctgcaataa

SEQ ID NO: 537223 - DNA, 25 bp, Homo sapien
gtggctgacaccctacaggcagcct

SEQ ID NO: 537224 - DNA, 25 bp, Homo sapien
ttctgctttcactctggtgctctat

SEQ ID NO: 537225 - DNA, 25 bp, Homo sapien
tgctctgcttatcccaggaatgata

SEQ ID NO: 537226 - DNA, 25 bp, Homo sapien
agatgtttagattgctctgcttatc

SEQ ID NO: 537227 - DNA, 25 bp, Homo sapien
atgtctaagatgtttagattgctct

SEQ ID NO: 537228 - DNA, 25 bp, Homo sapien
tctaagatgtttagattgctctgct

SEQ ID NO: 537229 - DNA, 25 bp, Homo sapien
actggactctggttctataaacgct

SEQ ID NO: 537230 - DNA, 25 bp, Homo sapien
tggactctggttctataaacgctca

SEQ ID NO: 537231 - DNA, 25 bp, Homo sapien
gaactggactctggttctataaacg

SEQ ID NO: 537232 - DNA, 25 bp, Homo sapien
ggactctggttctataaacgctcat

SEQ ID NO: 537233 - DNA, 25 bp, Homo sapien
ctttgtcccttgttacttcttctga

SEQ ID NO: 537234 - DNA, 25 bp, Homo sapien
gacaccagctgtatgccgtctatta

SEQ ID NO: 537235 - DNA, 25 bp, Homo sapien
tacttcttctgaacctgacaccagc

SEQ ID NO: 537236 - DNA, 25 bp, Homo sapien
gccgtctattaacctgtcatattca

SEQ ID NO: 537237 - DNA, 25 bp, Homo sapien
aatatgactgaggattactttctgg

SEQ ID NO: 537238 - DNA, 25 bp, Homo sapien
cagtgaaacaaatatgactgaggat

SEQ ID NO: 537239 - DNA, 25 bp, Homo sapien
catctgtaggatacagtgaaacaaa

SEQ ID NO: 537240 - DNA, 25 bp, Homo sapien
gactgaggattactttctgggtcat

SEQ ID NO: 537241 - DNA, 25 bp, Homo sapien
ctttggatcgacacccatgggtctt

SEQ ID NO: 537242 - DNA, 25 bp, Homo sapien
tgcagtacttgagtgggaatcaagt

SEQ ID NO: 537243 - DNA, 25 bp, Homo sapien
agtaaacactttggatcgacaccca

SEQ ID NO: 537244 - DNA, 25 bp, Homo sapien
gatcgacacccatgggtcttttcct

SEQ ID NO: 537245 - DNA, 25 bp, Homo sapien
gtggcattttctgcattttcataga

SEQ ID NO: 537246 - DNA, 25 bp, Homo sapien
ggcattttctgcattttcatagatg

SEQ ID NO: 537247 - DNA, 25 bp, Homo sapien
cattttctgcattttcatagatgtt

SEQ ID NO: 537248 - DNA, 25 bp, Homo sapien
ttaagttgtggcattttctgcattt

SEQ ID NO: 537249 - DNA, 25 bp, Homo sapien
caaaatcattgaagtatttcactgg

SEQ ID NO: 537250 - DNA, 25 bp, Homo sapien
cctgcttttgagttattgatatagt

SEQ ID NO: 537251 - DNA, 25 bp, Homo sapien
cattgaagtatttcactggaggagt

SEQ ID NO: 537252 - DNA, 25 bp, Homo sapien
ctccattctgtacatcctgcttttg

SEQ ID NO: 537253 - DNA, 25 bp, Homo sapien
tctgatccttaaagatattaggcca

SEQ ID NO: 537254 - DNA, 25 bp, Homo sapien
gatattaggccaaaaactacttctg

SEQ ID NO: 537255 - DNA, 25 bp, Homo sapien
tctttggccacagtctgatatataa

SEQ ID NO: 537256 - DNA, 25 bp, Homo sapien
ccacattagaaggagatgagagttc

SEQ ID NO: 537257 - DNA, 25 bp, Homo sapien
tcccttggagtcagtagggtccgtg

SEQ ID NO: 537258 - DNA, 25 bp, Homo sapien
cacagccaatattccacaaagatca

SEQ ID NO: 537259 - DNA, 25 bp, Homo sapien
tgattgctgttgaagtctgtgaagc

SEQ ID NO: 537260 - DNA, 25 bp, Homo sapien
gctgaattactcctcagaacactca

SEQ ID NO: 537261 - DNA, 25 bp, Homo sapien
attacagcatcttcagaataagctc

SEQ ID NO: 537262 - DNA, 25 bp, Homo sapien
tttccagtgtgagtagcattcatga

SEQ ID NO: 537263 - DNA, 25 bp, Homo sapien
ttagtttccagtgtgagtagcattc

SEQ ID NO: 537264 - DNA, 25 bp, Homo sapien
tagtttccagtgtgagtagcattca

SEQ ID NO: 537265 - DNA, 25 bp, Homo sapien
tctagctgtggacttgaaagcacaa

SEQ ID NO: 537266 - DNA, 25 bp, Homo sapien
tctcctaagtgttcgaatatcggcc

SEQ ID NO: 537267 - DNA, 25 bp, Homo sapien
tcagttttggttaatagagcatcca

SEQ ID NO: 537268 - DNA, 25 bp, Homo sapien
aatatcggccaagtttctagctgtg

SEQ ID NO: 537269 - DNA, 25 bp, Homo sapien
atggccttgaagccaagaggtttcc

SEQ ID NO: 537270 - DNA, 25 bp, Homo sapien
gccttgaagccaagaggtttcctac

SEQ ID NO: 537271 - DNA, 25 bp, Homo sapien
tggccttgaagccaagaggtttcct

SEQ ID NO: 537272 - DNA, 25 bp, Homo sapien
ggccttgaagccaagaggtttccta

SEQ ID NO: 537273 - DNA, 25 bp, Homo sapien
ggagccagaacgagccaaagctgac

SEQ ID NO: 537274 - DNA, 25 bp, Homo sapien
tccagagttccgtggagccagaacg

SEQ ID NO: 537275 - DNA, 25 bp, Homo sapien
ccagagttccgtggagccagaacga

SEQ ID NO: 537276 - DNA, 25 bp, Homo sapien
ctatagttcagaaggttcactgtta

SEQ ID NO: 537277 - DNA, 25 bp, Homo sapien
tatagttcagaaggttcactgttag

SEQ ID NO: 537278 - DNA, 25 bp, Homo sapien
atagttcagaaggttcactgttagc

SEQ ID NO: 537279 - DNA, 25 bp, Homo sapien
aatgccattatacacgtttgagaag

SEQ ID NO: 537280 - DNA, 25 bp, Homo sapien
gatgggaaggaccactaaggtaatg

SEQ ID NO: 537281 - DNA, 25 bp, Homo sapien
tagcaaatgccttcgtgcctccctg

SEQ ID NO: 537282 - DNA, 25 bp, Homo sapien
gtagatgtacatataggagatacag

SEQ ID NO: 537283 - DNA, 25 bp, Homo sapien
cagccgtgtccaccaattaaaacta

SEQ ID NO: 537284 - DNA, 25 bp, Homo sapien
gatgaatgacatgcaatactcccca

SEQ ID NO: 537285 - DNA, 25 bp, Homo sapien
cggcacctggtgcaggatgaatgac

SEQ ID NO: 537286 - DNA, 25 bp, Homo sapien
atgctgaagatgtgccgccagccca

SEQ ID NO: 537287 - DNA, 25 bp, Homo sapien
ccggcgatggcagagcataataact

SEQ ID NO: 537288 - DNA, 25 bp, Homo sapien
ggcgatggcagagcataataactgc

SEQ ID NO: 537289 - DNA, 25 bp, Homo sapien
tgcagggccggcgatggcagagcat

SEQ ID NO: 537290 - DNA, 25 bp, Homo sapien
ggccggcgatggcagagcataataa

SEQ ID NO: 537291 - DNA, 25 bp, Homo sapien
tgctgatttcaacgacactctctgg

SEQ ID NO: 537292 - DNA, 25 bp, Homo sapien
taaccttgagaccagaagcacacca

SEQ ID NO: 537293 - DNA, 25 bp, Homo sapien
gctgttttgaaaagggacacctgaa

SEQ ID NO: 537294 - DNA, 25 bp, Homo sapien
ttgtgtgtaaccctgcaaccacagg

SEQ ID NO: 537295 - DNA, 25 bp, Homo sapien
ccacctgtctgacccataatctagg

SEQ ID NO: 537296 - DNA, 25 bp, Homo sapien
tgtcctcgacatgggttgttgtgca

SEQ ID NO: 537297 - DNA, 25 bp, Homo sapien
tctaggtgattgttatacaacgatt

SEQ ID NO: 537298 - DNA, 25 bp, Homo sapien
cctgtctgacccataatctaggtga

SEQ ID NO: 537299 - DNA, 25 bp, Homo sapien
tctttaataatgcaaggtcctcttg

SEQ ID NO: 537300 - DNA, 25 bp, Homo sapien
tgcatgctttgtattaagtgaacaa

SEQ ID NO: 537301 - DNA, 25 bp, Homo sapien
ggaataactgttgattcgatttgaa

SEQ ID NO: 537302 - DNA, 25 bp, Homo sapien
agaaaaccgtatctatttgactggg

SEQ ID NO: 537303 - DNA, 25 bp, Homo sapien
tgcttctcgatgaaattgaagtaaa

SEQ ID NO: 537304 - DNA, 25 bp, Homo sapien
taatgaagaacgcaaatgcttctcg

SEQ ID NO: 537305 - DNA, 25 bp, Homo sapien
tcatcatgacttaatgaagaacgca

SEQ ID NO: 537306 - DNA, 25 bp, Homo sapien
gattatctgatgtgtcatcatgact

SEQ ID NO: 537307 - DNA, 25 bp, Homo sapien
tctgcattttttgcacgttcagtat

SEQ ID NO: 537308 - DNA, 25 bp, Homo sapien
tttgcacgttcagtatgtgaatcta

SEQ ID NO: 537309 - DNA, 25 bp, Homo sapien
agatttatccagattgtcatctgca

SEQ ID NO: 537310 - DNA, 25 bp, Homo sapien
tgtgagatttatccagattgtcatc

SEQ ID NO: 537311 - DNA, 25 bp, Homo sapien
gtggtcctgtcagcgcataacgaag

SEQ ID NO: 537312 - DNA, 25 bp, Homo sapien
gcgcataacgaaggaaaaagacttg

SEQ ID NO: 537313 - DNA, 25 bp, Homo sapien
cctgtcagcgcataacgaaggaaaa

SEQ ID NO: 537314 - DNA, 25 bp, Homo sapien
cacagtggtcctgtcagcgcataac

SEQ ID NO: 537315 - DNA, 25 bp, Homo sapien
agccggatccacacagcgtgacatg

SEQ ID NO: 537316 - DNA, 25 bp, Homo sapien
ctcatctggtcgaagttctcctgcc

SEQ ID NO: 537317 - DNA, 25 bp, Homo sapien
gataaggttggcaaactgtttccac

SEQ ID NO: 537318 - DNA, 25 bp, Homo sapien
acagcgtgacatgtgcttgtgaaag

SEQ ID NO: 537319 - DNA, 25 bp, Homo sapien
tctggggtttaatgttgcaaaatta

SEQ ID NO: 537320 - DNA, 25 bp, Homo sapien
aatgagccctcggacatacatggga

SEQ ID NO: 537321 - DNA, 25 bp, Homo sapien
tctgcaccttcaatacgtgaacact

SEQ ID NO: 537322 - DNA, 25 bp, Homo sapien
gattcaggtgaagaacgaggctgct

SEQ ID NO: 537323 - DNA, 25 bp, Homo sapien
tgaacacttttggttaatgagccct

SEQ ID NO: 537324 - DNA, 25 bp, Homo sapien
taattatgcttaacctttccaaagc

SEQ ID NO: 537325 - DNA, 25 bp, Homo sapien
tttgtaattatgcttaacctttcca

SEQ ID NO: 537326 - DNA, 25 bp, Homo sapien
tgtaattatgcttaacctttccaaa

SEQ ID NO: 537327 - DNA, 25 bp, Homo sapien
tccagcattgcataaaatacccatt

SEQ ID NO: 537328 - DNA, 25 bp, Homo sapien
catgaagctgcaaatctacatagag

SEQ ID NO: 537329 - DNA, 25 bp, Homo sapien
ttaatagcctctgaacaccttcgct

SEQ ID NO: 537330 - DNA, 25 bp, Homo sapien
gaggtagccattagtattaggccca

SEQ ID NO: 537331 - DNA, 25 bp, Homo sapien
tgtcttcagaggcaacataacttct

SEQ ID NO: 537332 - DNA, 25 bp, Homo sapien
caggtaaaacgccatgatactgagg

SEQ ID NO: 537333 - DNA, 25 bp, Homo sapien
acgccatgatactgaggctcttgca

SEQ ID NO: 537334 - DNA, 25 bp, Homo sapien
tcagatttgcaggtaaaacgccatg

SEQ ID NO: 537335 - DNA, 25 bp, Homo sapien
gatttgcaggtaaaacgccatgata

SEQ ID NO: 537336 - DNA, 25 bp, Homo sapien
catgttcttacttgttgattttgct

SEQ ID NO: 537337 - DNA, 25 bp, Homo sapien
ttgttgattttgctaagagccccat

SEQ ID NO: 537338 - DNA, 25 bp, Homo sapien
aattcaatatcaggtttcatgttct

SEQ ID NO: 537339 - DNA, 25 bp, Homo sapien
caatatcaggtttcatgttcttact

SEQ ID NO: 537340 - DNA, 25 bp, Homo sapien
aatttctttcacctttagtggctga

SEQ ID NO: 537341 - DNA, 25 bp, Homo sapien
taaggtacataggaagcaattggct

SEQ ID NO: 537342 - DNA, 25 bp, Homo sapien
cagaagacaattaagtgttcggtgt

SEQ ID NO: 537343 - DNA, 25 bp, Homo sapien
tggctttaatagtgcaagctgcaca

SEQ ID NO: 537344 - DNA, 25 bp, Homo sapien
gattttggatcagtccttcactgtg

SEQ ID NO: 537345 - DNA, 25 bp, Homo sapien
gaatcctaggtctgttgtggctggc

SEQ ID NO: 537346 - DNA, 25 bp, Homo sapien
tctatgttctgggtgagtttctcga

SEQ ID NO: 537347 - DNA, 25 bp, Homo sapien
ggattccagttatcagcatattggg

SEQ ID NO: 537348 - DNA, 25 bp, Homo sapien
attcttcagagtggcccctttgact

SEQ ID NO: 537349 - DNA, 25 bp, Homo sapien
tttctaattcttcagagtggcccct

SEQ ID NO: 537350 - DNA, 25 bp, Homo sapien
tgtttcagagagtgacatattattt

SEQ ID NO: 537351 - DNA, 25 bp, Homo sapien
cagagagtgacatattatttgattt

SEQ ID NO: 537352 - DNA, 25 bp, Homo sapien
ctgtggtgtgatgactttctctgct

SEQ ID NO: 537353 - DNA, 25 bp, Homo sapien
tgtggtgtgatgactttctctgctc

SEQ ID NO: 537354 - DNA, 25 bp, Homo sapien
gtggtgtgatgactttctctgctca

SEQ ID NO: 537355 - DNA, 25 bp, Homo sapien
gtcttggagcacagccaaagtaaga

SEQ ID NO: 537356 - DNA, 25 bp, Homo sapien
gatatttcgtggctactgatttggg

SEQ ID NO: 537357 - DNA, 25 bp, Homo sapien
agaaggacaatcagggctctaaagc

SEQ ID NO: 537358 - DNA, 25 bp, Homo sapien
cattgtaactgacatcagatatttc

SEQ ID NO: 537359 - DNA, 25 bp, Homo sapien
tccttcgttctagtcccaccccata

SEQ ID NO: 537360 - DNA, 25 bp, Homo sapien
ccaccccataatccagaaaagtagt

SEQ ID NO: 537361 - DNA, 25 bp, Homo sapien
tagtcgttactaaatagaaatttca

SEQ ID NO: 537362 - DNA, 25 bp, Homo sapien
cataatccagaaaagtagtcgttac

SEQ ID NO: 537363 - DNA, 25 bp, Homo sapien
ttctgagacacgtgtaactgccaat

SEQ ID NO: 537364 - DNA, 25 bp, Homo sapien
tggccattttcaagcctttcacgtt

SEQ ID NO: 537365 - DNA, 25 bp, Homo sapien
cctttcacgtttaggcaggatgttt

SEQ ID NO: 537366 - DNA, 25 bp, Homo sapien
gagacacgtgtaactgccaataaca

SEQ ID NO: 537367 - DNA, 25 bp, Homo sapien
tcttgaactgaacatagaacatgtg

SEQ ID NO: 537368 - DNA, 25 bp, Homo sapien
tgaacatagaacatgtgtgcatggc

SEQ ID NO: 537369 - DNA, 25 bp, Homo sapien
acatgtgtgcatggcttcctctggc

SEQ ID NO: 537370 - DNA, 25 bp, Homo sapien
tcatcttgaactgaacatagaacat

SEQ ID NO: 537371 - DNA, 25 bp, Homo sapien
cctgaagtttataggtaggccaatc

SEQ ID NO: 537372 - DNA, 25 bp, Homo sapien
tataggtaggccaatcagcaccttt

SEQ ID NO: 537373 - DNA, 25 bp, Homo sapien
cagggccacggaagcctgaagttta

SEQ ID NO: 537374 - DNA, 25 bp, Homo sapien
cacagggccacggaagcctgaagtt

SEQ ID NO: 537375 - DNA, 25 bp, Homo sapien
gatgccactgaattggaccacttga

SEQ ID NO: 537376 - DNA, 25 bp, Homo sapien
gaccacttgaggacaaataccaaca

SEQ ID NO: 537377 - DNA, 25 bp, Homo sapien
taaactgtagtacatagggaaagat

SEQ ID NO: 537378 - DNA, 25 bp, Homo sapien
tcatcacagccaatagcaccactgt

SEQ ID NO: 537379 - DNA, 25 bp, Homo sapien
tcctctgacagcaacgctactggtt

SEQ ID NO: 537380 - DNA, 25 bp, Homo sapien
tagagttagcctcatccttaaaaat

SEQ ID NO: 537381 - DNA, 25 bp, Homo sapien
gttccaagtcaattcatcctcctct

SEQ ID NO: 537382 - DNA, 25 bp, Homo sapien
gaaaccctatgtgcttcctatgaat

SEQ ID NO: 537383 - DNA, 25 bp, Homo sapien
acttcagtgtgctttgatgcatgga

SEQ ID NO: 537384 - DNA, 25 bp, Homo sapien
gtcagactgccggaacttcagtgtg

SEQ ID NO: 537385 - DNA, 25 bp, Homo sapien
ctgtggctgtagacatgttgctatt

SEQ ID NO: 537386 - DNA, 25 bp, Homo sapien
ctttgatgcatggaataaggaactg

SEQ ID NO: 537387 - DNA, 25 bp, Homo sapien
ctggtcacagctgtggctatttcac

SEQ ID NO: 537388 - DNA, 25 bp, Homo sapien
cactctgcttttgttggctccacat

SEQ ID NO: 537389 - DNA, 25 bp, Homo sapien
taagcccggatgaagagcatccagt

SEQ ID NO: 537390 - DNA, 25 bp, Homo sapien
tggactctgaacgtgtaagcccgga

SEQ ID NO: 537391 - DNA, 25 bp, Homo sapien
catctgtaaatgaactgctggactc

SEQ ID NO: 537392 - DNA, 25 bp, Homo sapien
tagctgtatcaagaacttgtaacag

SEQ ID NO: 537393 - DNA, 25 bp, Homo sapien
aacagccttagaagatactcgccac

SEQ ID NO: 537394 - DNA, 25 bp, Homo sapien
tgtaacagccttagaagatactcgc

SEQ ID NO: 537395 - DNA, 25 bp, Homo sapien
acctataaagatagctgtatcaaga

SEQ ID NO: 537396 - DNA, 25 bp, Homo sapien
cttgtaatactccttgtgtgctttt

SEQ ID NO: 537397 - DNA, 25 bp, Homo sapien
aagtttgtaagtgtttctcataatt

SEQ ID NO: 537398 - DNA, 25 bp, Homo sapien
caagtttgtaagtgtttctcataat

SEQ ID NO: 537399 - DNA, 25 bp, Homo sapien
catagtttatgtctgttgttccaca

SEQ ID NO: 537400 - DNA, 25 bp, Homo sapien
caaagatcaactggcaagaaacatt

SEQ ID NO: 537401 - DNA, 25 bp, Homo sapien
tccatagtttatgtctgttgttcca

SEQ ID NO: 537402 - DNA, 25 bp, Homo sapien
ttttctaagacaaagatcaactggc

SEQ ID NO: 537403 - DNA, 25 bp, Homo sapien
tctagcagatcatagatgaggactc

SEQ ID NO: 537404 - DNA, 25 bp, Homo sapien
aattcaagctctagacccaaagggc

SEQ ID NO: 537405 - DNA, 25 bp, Homo sapien
tgaggactcctgatagccagcagag

SEQ ID NO: 537406 - DNA, 25 bp, Homo sapien
cataatgttcttgtggactcaaagc

SEQ ID NO: 537407 - DNA, 25 bp, Homo sapien
gctctttctctagatagaattttag

SEQ ID NO: 537408 - DNA, 25 bp, Homo sapien
tgcgatcatgcctagaaaataatga

SEQ ID NO: 537409 - DNA, 25 bp, Homo sapien
tttagctaaaaatgagctctttctc

SEQ ID NO: 537410 - DNA, 25 bp, Homo sapien
ccctgctaagaaggggcatcgtggt

SEQ ID NO: 537411 - DNA, 25 bp, Homo sapien
catggcctcgtctatccatctggga

SEQ ID NO: 537412 - DNA, 25 bp, Homo sapien
tctgggagttgcaggtgatgtcctc

SEQ ID NO: 537413 - DNA, 25 bp, Homo sapien
caaggtgtaggactgctcagcgtgc

SEQ ID NO: 537414 - DNA, 25 bp, Homo sapien
gcccctgccagactggcgctagtat

SEQ ID NO: 537415 - DNA, 25 bp, Homo sapien
aatcccaggagatgcaatggagaac

SEQ ID NO: 537416 - DNA, 25 bp, Homo sapien
agtgtaaattcctcacgtcccaaag

SEQ ID NO: 537417 - DNA, 25 bp, Homo sapien
gaggtaattcaagcaaacaaccaga

SEQ ID NO: 537418 - DNA, 25 bp, Homo sapien
gcctatggcaaaaatcccaggagat

SEQ ID NO: 537419 - DNA, 25 bp, Homo sapien
cacacagtaggttgcactatcaaaa

SEQ ID NO: 537420 - DNA, 25 bp, Homo sapien
attaaattatccagcaaacgtcagg

SEQ ID NO: 537421 - DNA, 25 bp, Homo sapien
tttgaattacacatgtggagggcac

SEQ ID NO: 537422 - DNA, 25 bp, Homo sapien
ttgctgctataagaacaacagtggc

SEQ ID NO: 537423 - DNA, 25 bp, Homo sapien
ggtttcacaggtcgtacaggtagca

SEQ ID NO: 537424 - DNA, 25 bp, Homo sapien
tatggtttcacaggtcgtacaggta

SEQ ID NO: 537425 - DNA, 25 bp, Homo sapien
cttatggtttcacaggtcgtacagg

SEQ ID NO: 537426 - DNA, 25 bp, Homo sapien
tcacaggtcgtacaggtagcatggc

SEQ ID NO: 537427 - DNA, 25 bp, Homo sapien
tagcagttggctaaaaagaccacag

SEQ ID NO: 537428 - DNA, 25 bp, Homo sapien
gaaagctacaacttatggacatcct

SEQ ID NO: 537429 - DNA, 25 bp, Homo sapien
tacgccaactaagcagacgtagaga

SEQ ID NO: 537430 - DNA, 25 bp, Homo sapien
tccaaaccggacactattgagagtc

SEQ ID NO: 537431 - DNA, 25 bp, Homo sapien
atgacagctccattatgtattattg

SEQ ID NO: 537432 - DNA, 25 bp, Homo sapien
attatgtattattgtctctgaagac

SEQ ID NO: 537433 - DNA, 25 bp, Homo sapien
tccattatgtattattgtctctgaa

SEQ ID NO: 537434 - DNA, 25 bp, Homo sapien
tgacagctccattatgtattattgt

SEQ ID NO: 537435 - DNA, 25 bp, Homo sapien
tgggatcaatctccagaggtcatcg

SEQ ID NO: 537436 - DNA, 25 bp, Homo sapien
catttgaatttctaccacagtggct

SEQ ID NO: 537437 - DNA, 25 bp, Homo sapien
gaatgagtccaatccttgagtaggc

SEQ ID NO: 537438 - DNA, 25 bp, Homo sapien
gaagctaactctgtcagaacactgg

SEQ ID NO: 537439 - DNA, 25 bp, Homo sapien
taggaaggttgtgagatgtccatcc

SEQ ID NO: 537440 - DNA, 25 bp, Homo sapien
ctcacagtacttgctgtaggaaggt

SEQ ID NO: 537441 - DNA, 25 bp, Homo sapien
cctttgagatttaaatatagttcag

SEQ ID NO: 537442 - DNA, 25 bp, Homo sapien
tatagttcagtccagaagaaaaagt

SEQ ID NO: 537443 - DNA, 25 bp, Homo sapien
gagagttactcgaagctcggcatcc

SEQ ID NO: 537444 - DNA, 25 bp, Homo sapien
gtctagggggcttccaaggcgattg

SEQ ID NO: 537445 - DNA, 25 bp, Homo sapien
tagggggcttccaaggcgattgggc

SEQ ID NO: 537446 - DNA, 25 bp, Homo sapien
gtgagagttactcgaagctcggcat

SEQ ID NO: 537447 - DNA, 25 bp, Homo sapien
atcagagaggcacccccgcaattat

SEQ ID NO: 537448 - DNA, 25 bp, Homo sapien
cagagaggcacccccgcaattatta

SEQ ID NO: 537449 - DNA, 25 bp, Homo sapien
gaggcacccccgcaattattaaaca

SEQ ID NO: 537450 - DNA, 25 bp, Homo sapien
gagaggcacccccgcaattattaaa

SEQ ID NO: 537451 - DNA, 25 bp, Homo sapien
aggtcctaggtagatctttctcacg

SEQ ID NO: 537452 - DNA, 25 bp, Homo sapien
gggaggtaccccgatccgagtcatg

SEQ ID NO: 537453 - DNA, 25 bp, Homo sapien
ccaaatttcatgcgcgtttgtgtga

SEQ ID NO: 537454 - DNA, 25 bp, Homo sapien
caccaaatttcatgcgcgtttgtgt

SEQ ID NO: 537455 - DNA, 25 bp, Homo sapien
ggattagtggtagttttatggaaca

SEQ ID NO: 537456 - DNA, 25 bp, Homo sapien
gctgctttggaacaggtggattagt

SEQ ID NO: 537457 - DNA, 25 bp, Homo sapien
ttgcaggcctgaaattgcaagttca

SEQ ID NO: 537458 - DNA, 25 bp, Homo sapien
gctttgcaggcctgaaattgcaagt

SEQ ID NO: 537459 - DNA, 25 bp, Homo sapien
ggaagcgtggatctctgacaaacag

SEQ ID NO: 537460 - DNA, 25 bp, Homo sapien
taagagaccattccctgtcatagga

SEQ ID NO: 537461 - DNA, 25 bp, Homo sapien
tgacattggtactggctttgccaca

SEQ ID NO: 537462 - DNA, 25 bp, Homo sapien
tcacaccagaaaaatggaagcgtgg

SEQ ID NO: 537463 - DNA, 25 bp, Homo sapien
tgtctttgttctactttcagctgat

SEQ ID NO: 537464 - DNA, 25 bp, Homo sapien
tgatgccgggatgcaagagaggttg

SEQ ID NO: 537465 - DNA, 25 bp, Homo sapien
cacgtggcccacaaacttgctgtag

SEQ ID NO: 537466 - DNA, 25 bp, Homo sapien
ctgatctggagtcacaaaggctggg

SEQ ID NO: 537467 - DNA, 25 bp, Homo sapien
taatatctgagtagcataagctgcc

SEQ ID NO: 537468 - DNA, 25 bp, Homo sapien
gcctaagtaccagtgatgaatgtaa

SEQ ID NO: 537469 - DNA, 25 bp, Homo sapien
caaaaaagaaatattgcagtccaaa

SEQ ID NO: 537470 - DNA, 25 bp, Homo sapien
tagttaataagcctaagtaccagtg

SEQ ID NO: 537471 - DNA, 25 bp, Homo sapien
cttgcaactccagtttcttaagaag

SEQ ID NO: 537472 - DNA, 25 bp, Homo sapien
caactccagtttcttaagaagccca

SEQ ID NO: 537473 - DNA, 25 bp, Homo sapien
gtttcttaagaagcccattacattc

SEQ ID NO: 537474 - DNA, 25 bp, Homo sapien
ccagtttcttaagaagcccattaca

SEQ ID NO: 537475 - DNA, 25 bp, Homo sapien
acatcaaaagatttgtcagcacttc

SEQ ID NO: 537476 - DNA, 25 bp, Homo sapien
tatacttttcccgatccaacccaga

SEQ ID NO: 537477 - DNA, 25 bp, Homo sapien
agtattttgtgaacagagctctccg

SEQ ID NO: 537478 - DNA, 25 bp, Homo sapien
tgaacagagctctccggtgggaacg

SEQ ID NO: 537479 - DNA, 25 bp, Homo sapien
ccgatccaacccagagacaattttg

SEQ ID NO: 537480 - DNA, 25 bp, Homo sapien
ttttaatagacagtgtatcatcccc

SEQ ID NO: 537481 - DNA, 25 bp, Homo sapien
tgaaatggtttccatatcgaatgag

SEQ ID NO: 537482 - DNA, 25 bp, Homo sapien
tatcgaatgagttcccagaggtgct

SEQ ID NO: 537483 - DNA, 25 bp, Homo sapien
gacagtgtatcatccccataatgaa

SEQ ID NO: 537484 - DNA, 25 bp, Homo sapien
gaattttctctcaacggcttcagcc

SEQ ID NO: 537485 - DNA, 25 bp, Homo sapien
tctcaacggcttcagcctggctaaa

SEQ ID NO: 537486 - DNA, 25 bp, Homo sapien
gcttctcatgcgagtgaagaatttt

SEQ ID NO: 537487 - DNA, 25 bp, Homo sapien
catctttgcttctcatgcgagtgaa

SEQ ID NO: 537488 - DNA, 25 bp, Homo sapien
tccagcgctgtgctgatagcttccc

SEQ ID NO: 537489 - DNA, 25 bp, Homo sapien
cagcgctgtgctgatagcttcccat

SEQ ID NO: 537490 - DNA, 25 bp, Homo sapien
actccagcgctgtgctgatagcttc

SEQ ID NO: 537491 - DNA, 25 bp, Homo sapien
ccagcgctgtgctgatagcttccca

SEQ ID NO: 537492 - DNA, 25 bp, Homo sapien
cacaggcggcggaatgctacatttg

SEQ ID NO: 537493 - DNA, 25 bp, Homo sapien
gctacatttgtactattatgtgctt

SEQ ID NO: 537494 - DNA, 25 bp, Homo sapien
gctttgtcagtcagacaaatcccca

SEQ ID NO: 537495 - DNA, 25 bp, Homo sapien
cattccaagatctcacacaggcggc

SEQ ID NO: 537496 - DNA, 25 bp, Homo sapien
ttctatatggtcaaggcactcaagc

SEQ ID NO: 537497 - DNA, 25 bp, Homo sapien
aattgccggtttcatcaaatcctag

SEQ ID NO: 537498 - DNA, 25 bp, Homo sapien
tttttacaagatgcctcatctagcc

SEQ ID NO: 537499 - DNA, 25 bp, Homo sapien
caaatcctagatctccagattcgga

SEQ ID NO: 537500 - DNA, 25 bp, Homo sapien
cttctaagttttctctattatacat

SEQ ID NO: 537501 - DNA, 25 bp, Homo sapien
tgtagcttctaagttttctctatta

SEQ ID NO: 537502 - DNA, 25 bp, Homo sapien
caagtgtagcttctaagttttctct

SEQ ID NO: 537503 - DNA, 25 bp, Homo sapien
agtgtagcttctaagttttctctat

SEQ ID NO: 537504 - DNA, 25 bp, Homo sapien
gctgaagtggcccaaatgaatgtgg

SEQ ID NO: 537505 - DNA, 25 bp, Homo sapien
ggactgtgaaacaacacctagagca

SEQ ID NO: 537506 - DNA, 25 bp, Homo sapien
gagcatcatgataccaactagttgt

SEQ ID NO: 537507 - DNA, 25 bp, Homo sapien
actgggctggatacatgtagaggat

SEQ ID NO: 537508 - DNA, 25 bp, Homo sapien
atacttttcttttccataatattct

SEQ ID NO: 537509 - DNA, 25 bp, Homo sapien
ttttcttttccataatattctccat

SEQ ID NO: 537510 - DNA, 25 bp, Homo sapien
tgaatatacttttcttttccataat

SEQ ID NO: 537511 - DNA, 25 bp, Homo sapien
ctgaatatacttttcttttccataa

SEQ ID NO: 537512 - DNA, 25 bp, Homo sapien
tatagaacacataagcagaaggaat

SEQ ID NO: 537513 - DNA, 25 bp, Homo sapien
taagcttatagaacacataagcaga

SEQ ID NO: 537514 - DNA, 25 bp, Homo sapien
gcttatagaacacataagcagaagg

SEQ ID NO: 537515 - DNA, 25 bp, Homo sapien
ttaagcttatagaacacataagcag

SEQ ID NO: 537516 - DNA, 25 bp, Homo sapien
gaggaattaacagtctttattgggc

SEQ ID NO: 537517 - DNA, 25 bp, Homo sapien
ccacgttcttctcggcctgtttccg

SEQ ID NO: 537518 - DNA, 25 bp, Homo sapien
cttcttccggtagtggatcttggct

SEQ ID NO: 537519 - DNA, 25 bp, Homo sapien
tcttctcggcctgtttccgtagcct

SEQ ID NO: 537520 - DNA, 25 bp, Homo sapien
ttctccacgttcttctcggcctgtt

SEQ ID NO: 537521 - DNA, 25 bp, Homo sapien
gtcagacaccttgagacggtccaaa

SEQ ID NO: 537522 - DNA, 25 bp, Homo sapien
cagacaccttgagacggtccaaagc

SEQ ID NO: 537523 - DNA, 25 bp, Homo sapien
gacaccttgagacggtccaaagcgg

SEQ ID NO: 537524 - DNA, 25 bp, Homo sapien
agcatacctcgcaccgtccgccaga

SEQ ID NO: 537525 - DNA, 25 bp, Homo sapien
gatggcctctaccatcaagcaccag

SEQ ID NO: 537526 - DNA, 25 bp, Homo sapien
ctctggaagggctggtgttcatccg

SEQ ID NO: 537527 - DNA, 25 bp, Homo sapien
tgatgccttcgcagcatacgaccac

SEQ ID NO: 537528 - DNA, 25 bp, Homo sapien
aatgttgatgccttcgcagcatacg

SEQ ID NO: 537529 - DNA, 25 bp, Homo sapien
actttcacatatgttggtggttcaa

SEQ ID NO: 537530 - DNA, 25 bp, Homo sapien
gattttggtgtataagagacctttc

SEQ ID NO: 537531 - DNA, 25 bp, Homo sapien
gacctttcactaaacatgtcccaga

SEQ ID NO: 537532 - DNA, 25 bp, Homo sapien
aatactctgataattgcctgcattt

SEQ ID NO: 537533 - DNA, 25 bp, Homo sapien
gcttcctggaataagcctattgagg

SEQ ID NO: 537534 - DNA, 25 bp, Homo sapien
cggttttaggtaagctagcttcctg

SEQ ID NO: 537535 - DNA, 25 bp, Homo sapien
ggaataagcctattgaggagtctct

SEQ ID NO: 537536 - DNA, 25 bp, Homo sapien
tattgaggagtctcttaatatccac

SEQ ID NO: 537537 - DNA, 25 bp, Homo sapien
ctgcctgccgaaacacacaaattgg

SEQ ID NO: 537538 - DNA, 25 bp, Homo sapien
tgtcttcagattctatcatttccca

SEQ ID NO: 537539 - DNA, 25 bp, Homo sapien
tcatccagaaccagttttgaagtat

SEQ ID NO: 537540 - DNA, 25 bp, Homo sapien
cagaaccagttttgaagtatgtgaa

SEQ ID NO: 537541 - DNA, 25 bp, Homo sapien
ggactctgtctttgtagaaacattc

SEQ ID NO: 537542 - DNA, 25 bp, Homo sapien
gctgcttattctcaaggaagtaatt

SEQ ID NO: 537543 - DNA, 25 bp, Homo sapien
aattagacatcattagggtattatt

SEQ ID NO: 537544 - DNA, 25 bp, Homo sapien
aaattagggtttgctttcatgtgga

SEQ ID NO: 537545 - DNA, 25 bp, Homo sapien
gacagtaagacagcaatggaagaga

SEQ ID NO: 537546 - DNA, 25 bp, Homo sapien
aaagccctgaagcatcagattggca

SEQ ID NO: 537547 - DNA, 25 bp, Homo sapien
taacttgtgggttcctttctcggca

SEQ ID NO: 537548 - DNA, 25 bp, Homo sapien
cattgcctaaagtccgtctgctgaa

SEQ ID NO: 537549 - DNA, 25 bp, Homo sapien
gaggacagtttgagtcaagtttcca

SEQ ID NO: 537550 - DNA, 25 bp, Homo sapien
gagtcaagtttccattaggcatatg

SEQ ID NO: 537551 - DNA, 25 bp, Homo sapien
cagtttgagtcaagtttccattagg

SEQ ID NO: 537552 - DNA, 25 bp, Homo sapien
caagtttccattaggcatatggatg

SEQ ID NO: 537553 - DNA, 25 bp, Homo sapien
ttattctaatgggcttccaaaggct

SEQ ID NO: 537554 - DNA, 25 bp, Homo sapien
aagacagctgcaactcctctagtaa

SEQ ID NO: 537555 - DNA, 25 bp, Homo sapien
acttgctttggaagacagctgcaac

SEQ ID NO: 537556 - DNA, 25 bp, Homo sapien
actcctctagtaatagtctcaattt

SEQ ID NO: 537557 - DNA, 25 bp, Homo sapien
tgccccacttgctttggaagacagc

SEQ ID NO: 537558 - DNA, 25 bp, Homo sapien
gactgaattctttggtagtgcacaa

SEQ ID NO: 537559 - DNA, 25 bp, Homo sapien
agcagcagattgggtgtgcaggtct

SEQ ID NO: 537560 - DNA, 25 bp, Homo sapien
cccgtaatgactgaattctttggta

SEQ ID NO: 537561 - DNA, 25 bp, Homo sapien
gtgtgcaggtctcccgtaatgactg

SEQ ID NO: 537562 - DNA, 25 bp, Homo sapien
acgaaaagtcttttgtcatatttgg

SEQ ID NO: 537563 - DNA, 25 bp, Homo sapien
ttagctgtcaaacaacgaaaagtct

SEQ ID NO: 537564 - DNA, 25 bp, Homo sapien
aatcagccgacataaggtggaatca

SEQ ID NO: 537565 - DNA, 25 bp, Homo sapien
tggattaaagcagccacgatgtggc

SEQ ID NO: 537566 - DNA, 25 bp, Homo sapien
ctttctttttgtctttctccctgct

SEQ ID NO: 537567 - DNA, 25 bp, Homo sapien
tttctttttgtctttctccctgctc

SEQ ID NO: 537568 - DNA, 25 bp, Homo sapien
ttctttttgtctttctccctgctca

SEQ ID NO: 537569 - DNA, 25 bp, Homo sapien
tctttttgtctttctccctgctcat

SEQ ID NO: 537570 - DNA, 25 bp, Homo sapien
tgattttccctaacacattcatatt

SEQ ID NO: 537571 - DNA, 25 bp, Homo sapien
caacacttaaggaatgaagtgtgtt

SEQ ID NO: 537572 - DNA, 25 bp, Homo sapien
cttaaggaatgaagtgtgttggtcc

SEQ ID NO: 537573 - DNA, 25 bp, Homo sapien
catcagaggaatctcaatttcaaca

SEQ ID NO: 537574 - DNA, 25 bp, Homo sapien
cctatacatcccctcatcagtatgt

SEQ ID NO: 537575 - DNA, 25 bp, Homo sapien
acatcccctcatcagtatgtgttag

SEQ ID NO: 537576 - DNA, 25 bp, Homo sapien
tcccctcatcagtatgtgttagtcc

SEQ ID NO: 537577 - DNA, 25 bp, Homo sapien
tatacatcccctcatcagtatgtgt

SEQ ID NO: 537578 - DNA, 25 bp, Homo sapien
agagtttccacacacaggttctcca

SEQ ID NO: 537579 - DNA, 25 bp, Homo sapien
agagcagctagatacagggtgtcga

SEQ ID NO: 537580 - DNA, 25 bp, Homo sapien
ccagagcagctagatacagggtgtc

SEQ ID NO: 537581 - DNA, 25 bp, Homo sapien
acagagtttccacacacaggttctc

SEQ ID NO: 537582 - DNA, 25 bp, Homo sapien
gacaaccggaggcttgtgacctttg

SEQ ID NO: 537583 - DNA, 25 bp, Homo sapien
ggcttttcaaatgaggcgcatgtac

SEQ ID NO: 537584 - DNA, 25 bp, Homo sapien
ggcgcatgtaccctgaaatccaaaa

SEQ ID NO: 537585 - DNA, 25 bp, Homo sapien
aatatgctgtgctctaacagatgga

SEQ ID NO: 537586 - DNA, 25 bp, Homo sapien
attccacaaatactttcgtgcttat

SEQ ID NO: 537587 - DNA, 25 bp, Homo sapien
acaaatactttcgtgcttattaagg

SEQ ID NO: 537588 - DNA, 25 bp, Homo sapien
tgcttattaagggtattcttctagc

SEQ ID NO: 537589 - DNA, 25 bp, Homo sapien
tattaagggtattcttctagcacct

SEQ ID NO: 537590 - DNA, 25 bp, Homo sapien
tcactctcaaatcctctaatattag

SEQ ID NO: 537591 - DNA, 25 bp, Homo sapien
caaatcctctaatattagtcaagaa

SEQ ID NO: 537592 - DNA, 25 bp, Homo sapien
taatattagtcaagaatgtggcaac

SEQ ID NO: 537593 - DNA, 25 bp, Homo sapien
atgtggcaacttgaattcccaccat

SEQ ID NO: 537594 - DNA, 25 bp, Homo sapien
taccataccaatgttattaagattt

SEQ ID NO: 537595 - DNA, 25 bp, Homo sapien
accataccaatgttattaagatttc

SEQ ID NO: 537596 - DNA, 25 bp, Homo sapien
ctataccataccaatgttattaaga

SEQ ID NO: 537597 - DNA, 25 bp, Homo sapien
tataccataccaatgttattaagat

SEQ ID NO: 537598 - DNA, 25 bp, Homo sapien
tcaaatgtgcaagatttccttgaat

SEQ ID NO: 537599 - DNA, 25 bp, Homo sapien
cccatattgatatcagtttatccac

SEQ ID NO: 537600 - DNA, 25 bp, Homo sapien
tccaagacttccttgtcagttaccc

SEQ ID NO: 537601 - DNA, 25 bp, Homo sapien
ttgatatcagtttatccacatccat

SEQ ID NO: 537602 - DNA, 25 bp, Homo sapien
tgtcagttacccatattgatatcag

SEQ ID NO: 537603 - DNA, 25 bp, Homo sapien
tcctagtttcatattgtgacattcc

SEQ ID NO: 537604 - DNA, 25 bp, Homo sapien
taagggtaagccagaggcactgtca

SEQ ID NO: 537605 - DNA, 25 bp, Homo sapien
tcatattgtgacattccttccaagg

SEQ ID NO: 537606 - DNA, 25 bp, Homo sapien
acatgtgggagcataagggtaagcc

SEQ ID NO: 537607 - DNA, 25 bp, Homo sapien
aaaatatggctttatctgtataaga

SEQ ID NO: 537608 - DNA, 25 bp, Homo sapien
aagtcgtttacattagatttcatgc

SEQ ID NO: 537609 - DNA, 25 bp, Homo sapien
ttatctgtataagaaagtcgtttac

SEQ ID NO: 537610 - DNA, 25 bp, Homo sapien
tcatgctctcaatggtcagcaacgt

SEQ ID NO: 537611 - DNA, 25 bp, Homo sapien
gatagaatagtctttgttctactaa

SEQ ID NO: 537612 - DNA, 25 bp, Homo sapien
atagtctttgttctactaaggctgt

SEQ ID NO: 537613 - DNA, 25 bp, Homo sapien
ttctactaaggctgttctctgccac

SEQ ID NO: 537614 - DNA, 25 bp, Homo sapien
tctttgttctactaaggctgttctc

SEQ ID NO: 537615 - DNA, 25 bp, Homo sapien
tactgtgtcaaagagattgatctcc

SEQ ID NO: 537616 - DNA, 25 bp, Homo sapien
tattggtgctcattatagctgatac

SEQ ID NO: 537617 - DNA, 25 bp, Homo sapien
tatatttgcccttggcaaagcagct

SEQ ID NO: 537618 - DNA, 25 bp, Homo sapien
aagatacagtgtagtagatccgatt

SEQ ID NO: 537619 - DNA, 25 bp, Homo sapien
gaactgtttgggtaacataagtcaa

SEQ ID NO: 537620 - DNA, 25 bp, Homo sapien
agaactgtttgggtaacataagtca

SEQ ID NO: 537621 - DNA, 25 bp, Homo sapien
actgtttgggtaacataagtcaatt

SEQ ID NO: 537622 - DNA, 25 bp, Homo sapien
tgtttgggtaacataagtcaattta

SEQ ID NO: 537623 - DNA, 25 bp, Homo sapien
caaccattaggtagatgccggacat

SEQ ID NO: 537624 - DNA, 25 bp, Homo sapien
ctggaacaaccattaggtagatgcc

SEQ ID NO: 537625 - DNA, 25 bp, Homo sapien
gaacaaccattaggtagatgccgga

SEQ ID NO: 537626 - DNA, 25 bp, Homo sapien
acaaccattaggtagatgccggaca

SEQ ID NO: 537627 - DNA, 25 bp, Homo sapien
gcactcggaagactttagttctttg

SEQ ID NO: 537628 - DNA, 25 bp, Homo sapien
cactcggaagactttagttctttgc

SEQ ID NO: 537629 - DNA, 25 bp, Homo sapien
aaatcaactctcagcttaatatctg

SEQ ID NO: 537630 - DNA, 25 bp, Homo sapien
ctgattctcatgttcctgcattggg

SEQ ID NO: 537631 - DNA, 25 bp, Homo sapien
ctgccagctgtgtaaggggctgcca

SEQ ID NO: 537632 - DNA, 25 bp, Homo sapien
gattctcatgttcctgcattgggct

SEQ ID NO: 537633 - DNA, 25 bp, Homo sapien
tgccagctgtgtaaggggctgccaa

SEQ ID NO: 537634 - DNA, 25 bp, Homo sapien
tccattatcaactgccaggggtgct

SEQ ID NO: 537635 - DNA, 25 bp, Homo sapien
gccagttgcccccattctgtgacag

SEQ ID NO: 537636 - DNA, 25 bp, Homo sapien
ccagccaagattgtacactgtagga

SEQ ID NO: 537637 - DNA, 25 bp, Homo sapien
taatcattgccaacagccctccatt

SEQ ID NO: 537638 - DNA, 25 bp, Homo sapien
tattataaaacaggtcgtagcatcc

SEQ ID NO: 537639 - DNA, 25 bp, Homo sapien
gtattataaaacaggtcgtagcatc

SEQ ID NO: 537640 - DNA, 25 bp, Homo sapien
tataaaacaggtcgtagcatcctcc

SEQ ID NO: 537641 - DNA, 25 bp, Homo sapien
aaaacaggtcgtagcatcctccagc

SEQ ID NO: 537642 - DNA, 25 bp, Homo sapien
agggcactggtggaaagcaactaga

SEQ ID NO: 537643 - DNA, 25 bp, Homo sapien
tcaagtggtagttggagggcactgg

SEQ ID NO: 537644 - DNA, 25 bp, Homo sapien
gtggtagttggagggcactggtgga

SEQ ID NO: 537645 - DNA, 25 bp, Homo sapien
tagttggagggcactggtggaaagc

SEQ ID NO: 537646 - DNA, 25 bp, Homo sapien
gtgctgagtaactgatctttgttcc

SEQ ID NO: 537647 - DNA, 25 bp, Homo sapien
aggactgaatcaagtgctgagtaac

SEQ ID NO: 537648 - DNA, 25 bp, Homo sapien
tcaagtgctgagtaactgatctttg

SEQ ID NO: 537649 - DNA, 25 bp, Homo sapien
actgaatcaagtgctgagtaactga

SEQ ID NO: 537650 - DNA, 25 bp, Homo sapien
tcccgtgtctagagccagttcttct

SEQ ID NO: 537651 - DNA, 25 bp, Homo sapien
ctgactctcccgtgtctagagccag

SEQ ID NO: 537652 - DNA, 25 bp, Homo sapien
tctatggttattggatctttcttgc

SEQ ID NO: 537653 - DNA, 25 bp, Homo sapien
gagccagttcttctatggttattgg

SEQ ID NO: 537654 - DNA, 25 bp, Homo sapien
tccttggtagggcaggaaccaattg

SEQ ID NO: 537655 - DNA, 25 bp, Homo sapien
aattagaatgaaatctgatccctcc

SEQ ID NO: 537656 - DNA, 25 bp, Homo sapien
tacttcaggttccacataacttttc

SEQ ID NO: 537657 - DNA, 25 bp, Homo sapien
tatattgtacaagtgacccttccta

SEQ ID NO: 537658 - DNA, 25 bp, Homo sapien
tatgtgtactagacactctgttgcc

SEQ ID NO: 537659 - DNA, 25 bp, Homo sapien
tataaagtacatatttggtggtcac

SEQ ID NO: 537660 - DNA, 25 bp, Homo sapien
tatagagtactatcatggaaataca

SEQ ID NO: 537661 - DNA, 25 bp, Homo sapien
catgaagctgacataattatagagt

SEQ ID NO: 537662 - DNA, 25 bp, Homo sapien
aagttaggcttttagagaaggccat

SEQ ID NO: 537663 - DNA, 25 bp, Homo sapien
tgcctaaagttaggcttttagagaa

SEQ ID NO: 537664 - DNA, 25 bp, Homo sapien
ttgcctaaagttaggcttttagaga

SEQ ID NO: 537665 - DNA, 25 bp, Homo sapien
cccaagaagcttacagcctatccgg

SEQ ID NO: 537666 - DNA, 25 bp, Homo sapien
gcttacagcctatccggggagaaaa

SEQ ID NO: 537667 - DNA, 25 bp, Homo sapien
gaagcttacagcctatccggggaga

SEQ ID NO: 537668 - DNA, 25 bp, Homo sapien
ccaagaagcttacagcctatccggg

SEQ ID NO: 537669 - DNA, 25 bp, Homo sapien
cctcagaccaacgtgaagaaaacat

SEQ ID NO: 537670 - DNA, 25 bp, Homo sapien
tttcctcagaccaacgtgaagaaaa

SEQ ID NO: 537671 - DNA, 25 bp, Homo sapien
tctttcctcagaccaacgtgaagaa

SEQ ID NO: 537672 - DNA, 25 bp, Homo sapien
tgtctttgctaagtcatgtcttctt

SEQ ID NO: 537673 - DNA, 25 bp, Homo sapien
gagaatgtgccactcatagatgagc

SEQ ID NO: 537674 - DNA, 25 bp, Homo sapien
taggacaaggtcattactaccaaga

SEQ ID NO: 537675 - DNA, 25 bp, Homo sapien
gacagcacaatgtcttctaaagcag

SEQ ID NO: 537676 - DNA, 25 bp, Homo sapien
gatgagcaacattcccagacattat

SEQ ID NO: 537677 - DNA, 25 bp, Homo sapien
catattatttgctgatattattgaa

SEQ ID NO: 537678 - DNA, 25 bp, Homo sapien
agacaaagttctcaaatgttatagg

SEQ ID NO: 537679 - DNA, 25 bp, Homo sapien
ttactatatcacaaaatttcctaca

SEQ ID NO: 537680 - DNA, 25 bp, Homo sapien
aaatgttataggtttcagaggcagg

SEQ ID NO: 537681 - DNA, 25 bp, Homo sapien
gaacgggaatactagtttggtctgc

SEQ ID NO: 537682 - DNA, 25 bp, Homo sapien
tttggtctgcgcgagaatgatgtgc

SEQ ID NO: 537683 - DNA, 25 bp, Homo sapien
gtctgcgcgagaatgatgtgcaaca

SEQ ID NO: 537684 - DNA, 25 bp, Homo sapien
aatactagtttggtctgcgcgagaa

SEQ ID NO: 537685 - DNA, 25 bp, Homo sapien
ctgtttattgtgaatgctcaccttc

SEQ ID NO: 537686 - DNA, 25 bp, Homo sapien
tattgtgaatgctcaccttccattc

SEQ ID NO: 537687 - DNA, 25 bp, Homo sapien
tgtttattgtgaatgctcaccttcc

SEQ ID NO: 537688 - DNA, 25 bp, Homo sapien
tttattgtgaatgctcaccttccat

SEQ ID NO: 537689 - DNA, 25 bp, Homo sapien
ttcctcctttcgggcctgaactcca

SEQ ID NO: 537690 - DNA, 25 bp, Homo sapien
tgtagccctttggggttgaactaca

SEQ ID NO: 537691 - DNA, 25 bp, Homo sapien
ttgcttctaagctgtagccctttgg

SEQ ID NO: 537692 - DNA, 25 bp, Homo sapien
ctcctttcgggcctgaactccactt

SEQ ID NO: 537693 - DNA, 25 bp, Homo sapien
tatcttgcaacaacatttgttaata

SEQ ID NO: 537694 - DNA, 25 bp, Homo sapien
tgtatcttgcaacaacatttgttaa

SEQ ID NO: 537695 - DNA, 25 bp, Homo sapien
taataaaactaggaccaccttcatc

SEQ ID NO: 537696 - DNA, 25 bp, Homo sapien
tttgtatcttgcaacaacatttgtt

SEQ ID NO: 537697 - DNA, 25 bp, Homo sapien
tcctgtaagtaacatgaggttcaga

SEQ ID NO: 537698 - DNA, 25 bp, Homo sapien
taaagcagcagtcaggatttcactg

SEQ ID NO: 537699 - DNA, 25 bp, Homo sapien
tacaagtactctaccttcagggatc

SEQ ID NO: 537700 - DNA, 25 bp, Homo sapien
ggcaagtcagatcctaaatccaatg

SEQ ID NO: 537701 - DNA, 25 bp, Homo sapien
tcattctttttctaagtttccatta

SEQ ID NO: 537702 - DNA, 25 bp, Homo sapien
cattctttttctaagtttccattag

SEQ ID NO: 537703 - DNA, 25 bp, Homo sapien
tccttatgaccgataaaatcttgtc

SEQ ID NO: 537704 - DNA, 25 bp, Homo sapien
gaggccatagtctggtattcatcta

SEQ ID NO: 537705 - DNA, 25 bp, Homo sapien
gaactgaagcaatctatatggtaga

SEQ ID NO: 537706 - DNA, 25 bp, Homo sapien
tgagttcagaaatgggaggccatag

SEQ ID NO: 537707 - DNA, 25 bp, Homo sapien
aaaggagagtttctttatgtgtgat

SEQ ID NO: 537708 - DNA, 25 bp, Homo sapien
cactgctgagcagagaggtactgaa

SEQ ID NO: 537709 - DNA, 25 bp, Homo sapien
gtaatattgcttggaattggagaca

SEQ ID NO: 537710 - DNA, 25 bp, Homo sapien
agaggtactgaactgctagctgtaa

SEQ ID NO: 537711 - DNA, 25 bp, Homo sapien
ctgggccaaatacttgattcttttt

SEQ ID NO: 537712 - DNA, 25 bp, Homo sapien
aatacttgattcttttttctcagca

SEQ ID NO: 537713 - DNA, 25 bp, Homo sapien
tacttgattcttttttctcagcacc

SEQ ID NO: 537714 - DNA, 25 bp, Homo sapien
cttgattcttttttctcagcaccat

SEQ ID NO: 537715 - DNA, 25 bp, Homo sapien
ggcaaaggagccaacaaaggtgagt

SEQ ID NO: 537716 - DNA, 25 bp, Homo sapien
tcaacttgactaaggcatccccagc

SEQ ID NO: 537717 - DNA, 25 bp, Homo sapien
aatcttctcaagagtatgggctgga

SEQ ID NO: 537718 - DNA, 25 bp, Homo sapien
ggcaaagagtcactgggcatcatct

SEQ ID NO: 537719 - DNA, 25 bp, Homo sapien
acctatttatatctcatcagcgaac

SEQ ID NO: 537720 - DNA, 25 bp, Homo sapien
tctgcagctgtacttccaacataga

SEQ ID NO: 537721 - DNA, 25 bp, Homo sapien
tgtcacattcgttgtaatctctgcc

SEQ ID NO: 537722 - DNA, 25 bp, Homo sapien
cagcgaacactctagcaagtaatca

SEQ ID NO: 537723 - DNA, 25 bp, Homo sapien
gcttatgcacagaggtcaagatccc

SEQ ID NO: 537724 - DNA, 25 bp, Homo sapien
tctacagcgtggtgatctagaggcc

SEQ ID NO: 537725 - DNA, 25 bp, Homo sapien
tgtctgaggatgcaaatagtaaccc

SEQ ID NO: 537726 - DNA, 25 bp, Homo sapien
tgatagcgcagtacatcaaggaggc

SEQ ID NO: 537727 - DNA, 25 bp, Homo sapien
gattgataatgtgcaggtcctgaac

SEQ ID NO: 537728 - DNA, 25 bp, Homo sapien
ttttttagttatcggtctcagggca

SEQ ID NO: 537729 - DNA, 25 bp, Homo sapien
caatttgattgataatgtgcaggtc

SEQ ID NO: 537730 - DNA, 25 bp, Homo sapien
tttgattgataatgtgcaggtcctg

SEQ ID NO: 537731 - DNA, 25 bp, Homo sapien
ctgaagctcggcgtcagtgacgttc

SEQ ID NO: 537732 - DNA, 25 bp, Homo sapien
gtcagtgacgttctagggggcttcc

SEQ ID NO: 537733 - DNA, 25 bp, Homo sapien
gaagctcggcgtcagtgacgttcta

SEQ ID NO: 537734 - DNA, 25 bp, Homo sapien
agctcggcgtcagtgacgttctagg

SEQ ID NO: 537735 - DNA, 25 bp, Homo sapien
gcctgtcttgtctttgaacgtccta

SEQ ID NO: 537736 - DNA, 25 bp, Homo sapien
cagtcgagatcagtttctttctcaa

SEQ ID NO: 537737 - DNA, 25 bp, Homo sapien
tctttctcaaacagattaataccct

SEQ ID NO: 537738 - DNA, 25 bp, Homo sapien
ttaataccctcaacgtcttccacag

SEQ ID NO: 537739 - DNA, 25 bp, Homo sapien
attctttgacagcaaaactctccat

SEQ ID NO: 537740 - DNA, 25 bp, Homo sapien
gattctttgacagcaaaactctcca

SEQ ID NO: 537741 - DNA, 25 bp, Homo sapien
tgattctttgacagcaaaactctcc

SEQ ID NO: 537742 - DNA, 25 bp, Homo sapien
ctgattctttgacagcaaaactctc

SEQ ID NO: 537743 - DNA, 25 bp, Homo sapien
gataaactacttcaactgatacttg

SEQ ID NO: 537744 - DNA, 25 bp, Homo sapien
ccttcagggatattgctttgcataa

SEQ ID NO: 537745 - DNA, 25 bp, Homo sapien
gcatttagattccatccctctagga

SEQ ID NO: 537746 - DNA, 25 bp, Homo sapien
ccctctaggagatgttaattgcttg

SEQ ID NO: 537747 - DNA, 25 bp, Homo sapien
taaaagtattaatgcagtggcagcc

SEQ ID NO: 537748 - DNA, 25 bp, Homo sapien
cctctaaaagtattaatgcagtggc

SEQ ID NO: 537749 - DNA, 25 bp, Homo sapien
agtattaatgcagtggcagccactg

SEQ ID NO: 537750 - DNA, 25 bp, Homo sapien
aaagtattaatgcagtggcagccac

SEQ ID NO: 537751 - DNA, 25 bp, Homo sapien
aaatcactaaagttaagggtcacag

SEQ ID NO: 537752 - DNA, 25 bp, Homo sapien
aatcactaaagttaagggtcacagt

SEQ ID NO: 537753 - DNA, 25 bp, Homo sapien
cactaaagttaagggtcacagtaag

SEQ ID NO: 537754 - DNA, 25 bp, Homo sapien
tcactaaagttaagggtcacagtaa

SEQ ID NO: 537755 - DNA, 25 bp, Homo sapien
gaaaatgccctttctatgctgggac

SEQ ID NO: 537756 - DNA, 25 bp, Homo sapien
gaacctttctgactaggactgagcc

SEQ ID NO: 537757 - DNA, 25 bp, Homo sapien
ctcagggacttgcaccactagcgta

SEQ ID NO: 537758 - DNA, 25 bp, Homo sapien
tcttcagcatttgtactcagggact

SEQ ID NO: 537759 - DNA, 25 bp, Homo sapien
ctacaaaaggcaattgtccagcaca

SEQ ID NO: 537760 - DNA, 25 bp, Homo sapien
tacaaaaggcaattgtccagcacac

SEQ ID NO: 537761 - DNA, 25 bp, Homo sapien
ctactatatcccacaagtccgtgct

SEQ ID NO: 537762 - DNA, 25 bp, Homo sapien
tatatcccacaagtccgtgctgttg

SEQ ID NO: 537763 - DNA, 25 bp, Homo sapien
ccacaagtccgtgctgttggtgttc

SEQ ID NO: 537764 - DNA, 25 bp, Homo sapien
tgcttcttactaactactatatccc

SEQ ID NO: 537765 - DNA, 25 bp, Homo sapien
gatgaacatgtatggtagaaccttc

SEQ ID NO: 537766 - DNA, 25 bp, Homo sapien
tacagcagccttagtgatgaacatg

SEQ ID NO: 537767 - DNA, 25 bp, Homo sapien
accttcaagatgtagctaattcccc

SEQ ID NO: 537768 - DNA, 25 bp, Homo sapien
ccccaagtgcaaccagctgtgagaa

SEQ ID NO: 537769 - DNA, 25 bp, Homo sapien
tcttgaaacagaaatcgaactgaga

SEQ ID NO: 537770 - DNA, 25 bp, Homo sapien
gtacctcaatttcgcattcttgaaa

SEQ ID NO: 537771 - DNA, 25 bp, Homo sapien
tgaactacagtttctatctgttatt

SEQ ID NO: 537772 - DNA, 25 bp, Homo sapien
tttccatatcaccatagtacctcaa

SEQ ID NO: 537773 - DNA, 25 bp, Homo sapien
gcagatctaatagcagagctcaata

SEQ ID NO: 537774 - DNA, 25 bp, Homo sapien
gcagcagttgtccattatccagaga

SEQ ID NO: 537775 - DNA, 25 bp, Homo sapien
cacccagccggaagggtcaggttct

SEQ ID NO: 537776 - DNA, 25 bp, Homo sapien
gcaaagatactgctgtaactgcctg

SEQ ID NO: 537777 - DNA, 25 bp, Homo sapien
tctgagtggagggatccttgaatgc

SEQ ID NO: 537778 - DNA, 25 bp, Homo sapien
tgacaaatgccagctcaaataggtg

SEQ ID NO: 537779 - DNA, 25 bp, Homo sapien
taaaaccatctaggttagctgggtg

SEQ ID NO: 537780 - DNA, 25 bp, Homo sapien
gatttttggctcattgctacctctg

SEQ ID NO: 537781 - DNA, 25 bp, Homo sapien
tcaggttacccatgcaattgccact

SEQ ID NO: 537782 - DNA, 25 bp, Homo sapien
gtctcaatcagcaccaagttccagg

SEQ ID NO: 537783 - DNA, 25 bp, Homo sapien
tcacatggctgtctcagtggtcagg

SEQ ID NO: 537784 - DNA, 25 bp, Homo sapien
tttttcaccagttccttgactcgag

SEQ ID NO: 537785 - DNA, 25 bp, Homo sapien
aatatgaacaatcatctgcgccatc

SEQ ID NO: 537786 - DNA, 25 bp, Homo sapien
gaacaatcatctgcgccatctgctg

SEQ ID NO: 537787 - DNA, 25 bp, Homo sapien
aaaatatgaacaatcatctgcgcca

SEQ ID NO: 537788 - DNA, 25 bp, Homo sapien
tatgaacaatcatctgcgccatctg

SEQ ID NO: 537789 - DNA, 25 bp, Homo sapien
ttttcagccctatatatgtctctgt

SEQ ID NO: 537790 - DNA, 25 bp, Homo sapien
tcagccctatatatgtctctgtttg

SEQ ID NO: 537791 - DNA, 25 bp, Homo sapien
gccctatatatgtctctgtttgtag

SEQ ID NO: 537792 - DNA, 25 bp, Homo sapien
cctatatatgtctctgtttgtagca

SEQ ID NO: 537793 - DNA, 25 bp, Homo sapien
gaatgcataagatgtccgccatccc

SEQ ID NO: 537794 - DNA, 25 bp, Homo sapien
tagtccaaaatcatgtactgaatgc

SEQ ID NO: 537795 - DNA, 25 bp, Homo sapien
catgtactgaatgcataagatgtcc

SEQ ID NO: 537796 - DNA, 25 bp, Homo sapien
gtccaaaatcatgtactgaatgcat

SEQ ID NO: 537797 - DNA, 25 bp, Homo sapien
gtgcacatcacacatttattgcctt

SEQ ID NO: 537798 - DNA, 25 bp, Homo sapien
cacatcacacatttattgcctttaa

SEQ ID NO: 537799 - DNA, 25 bp, Homo sapien
tcaaaattatcttagcctttttgga

SEQ ID NO: 537800 - DNA, 25 bp, Homo sapien
gtgtgcacatcacacatttattgcc

SEQ ID NO: 537801 - DNA, 25 bp, Homo sapien
ctcacttagtagtgtaaaataaccg

SEQ ID NO: 537802 - DNA, 25 bp, Homo sapien
gtagtgtaaaataaccgacatttca

SEQ ID NO: 537803 - DNA, 25 bp, Homo sapien
tcttgagtctcacttagtagtgtaa

SEQ ID NO: 537804 - DNA, 25 bp, Homo sapien
agcataattcttgagtctcacttag

SEQ ID NO: 537805 - DNA, 25 bp, Homo sapien
caaatgatgcgcagcagtgtgggca

SEQ ID NO: 537806 - DNA, 25 bp, Homo sapien
gaagtaggtggccaatttaagtcaa

SEQ ID NO: 537807 - DNA, 25 bp, Homo sapien
tactgcgtgcggatcattgacggag

SEQ ID NO: 537808 - DNA, 25 bp, Homo sapien
taagaaccagtgtgtacatgggacc

SEQ ID NO: 537809 - DNA, 25 bp, Homo sapien
tgaaatggttgaaccagctcaacta

SEQ ID NO: 537810 - DNA, 25 bp, Homo sapien
cttgaaatggttgaaccagctcaac

SEQ ID NO: 537811 - DNA, 25 bp, Homo sapien
gaacccgactgattacactgctaat

SEQ ID NO: 537812 - DNA, 25 bp, Homo sapien
acccgactgattacactgctaatct

SEQ ID NO: 537813 - DNA, 25 bp, Homo sapien
taagtgttctcctgcatgatatctc

SEQ ID NO: 537814 - DNA, 25 bp, Homo sapien
ctgcatgatatctcaacagcgccac

SEQ ID NO: 537815 - DNA, 25 bp, Homo sapien
ggcagttaagtgttctcctgcatga

SEQ ID NO: 537816 - DNA, 25 bp, Homo sapien
atagctccaggcagttaagtgttct

SEQ ID NO: 537817 - DNA, 25 bp, Homo sapien
gtcatccaatggtaactgacagaag

SEQ ID NO: 537818 - DNA, 25 bp, Homo sapien
ttgtcatccaatggtaactgacaga

SEQ ID NO: 537819 - DNA, 25 bp, Homo sapien
cttgtcatccaatggtaactgacag

SEQ ID NO: 537820 - DNA, 25 bp, Homo sapien
tgtcatccaatggtaactgacagaa

SEQ ID NO: 537821 - DNA, 25 bp, Homo sapien
tcagtacttgccccaaggcttgaga

SEQ ID NO: 537822 - DNA, 25 bp, Homo sapien
cagtacttgccccaaggcttgagac

SEQ ID NO: 537823 - DNA, 25 bp, Homo sapien
atatcagtacttgccccaaggcttg

SEQ ID NO: 537824 - DNA, 25 bp, Homo sapien
tatcagtacttgccccaaggcttga

SEQ ID NO: 537825 - DNA, 25 bp, Homo sapien
ggatattgctgccatcacatgtgct

SEQ ID NO: 537826 - DNA, 25 bp, Homo sapien
cagaacttcagcttgtgccagtgtg

SEQ ID NO: 537827 - DNA, 25 bp, Homo sapien
tctggtgcttgttctattgcattca

SEQ ID NO: 537828 - DNA, 25 bp, Homo sapien
tcattatgcacaacttctttttcca

SEQ ID NO: 537829 - DNA, 25 bp, Homo sapien
aattgactgtatctacattgatttc

SEQ ID NO: 537830 - DNA, 25 bp, Homo sapien
ttaattgactgtatctacattgatt

SEQ ID NO: 537831 - DNA, 25 bp, Homo sapien
tcttttggccttgtcaacaaaacat

SEQ ID NO: 537832 - DNA, 25 bp, Homo sapien
ctgtatctacattgatttcttttgg

SEQ ID NO: 537833 - DNA, 25 bp, Homo sapien
gcagaagtacctgcgcagagccact

SEQ ID NO: 537834 - DNA, 25 bp, Homo sapien
tatgctgcatctgaagaagcccttg

SEQ ID NO: 537835 - DNA, 25 bp, Homo sapien
ggagctctggagctgcagtcactgc

SEQ ID NO: 537836 - DNA, 25 bp, Homo sapien
taaacgttactcttgcatatgctgc

SEQ ID NO: 537837 - DNA, 25 bp, Homo sapien
ggcatttagaatactgagagtgtct

SEQ ID NO: 537838 - DNA, 25 bp, Homo sapien
gtaaaactctggttactgagtgctg

SEQ ID NO: 537839 - DNA, 25 bp, Homo sapien
gactgctagcttacgtctaaacaat

SEQ ID NO: 537840 - DNA, 25 bp, Homo sapien
tggtataacagagatgactgctagc

SEQ ID NO: 537841 - DNA, 25 bp, Homo sapien
gagcgggtgagctgctggaataata

SEQ ID NO: 537842 - DNA, 25 bp, Homo sapien
cccatactctgaaagagcgggtgag

SEQ ID NO: 537843 - DNA, 25 bp, Homo sapien
tggaataatagacccggctgcttac

SEQ ID NO: 537844 - DNA, 25 bp, Homo sapien
tcccagattattggtagaagtaaat

SEQ ID NO: 537845 - DNA, 25 bp, Homo sapien
ttttgaaaatgttggcatgtggtac

SEQ ID NO: 537846 - DNA, 25 bp, Homo sapien
ttcatttctggagcctttttcagac

SEQ ID NO: 537847 - DNA, 25 bp, Homo sapien
ggcatgtggtactgatattttcatt

SEQ ID NO: 537848 - DNA, 25 bp, Homo sapien
catttctggagcctttttcagacct

SEQ ID NO: 537849 - DNA, 25 bp, Homo sapien
tctctgtagcagaaatccacgtcaa

SEQ ID NO: 537850 - DNA, 25 bp, Homo sapien
tagcagaaatccacgtcaagattgc

SEQ ID NO: 537851 - DNA, 25 bp, Homo sapien
tccacgtcaagattgcctcatacaa

SEQ ID NO: 537852 - DNA, 25 bp, Homo sapien
gaaatccacgtcaagattgcctcat

SEQ ID NO: 537853 - DNA, 25 bp, Homo sapien
tgcatattagtttcatgtttttgtg

SEQ ID NO: 537854 - DNA, 25 bp, Homo sapien
ttttggttctgcctttttctgcata

SEQ ID NO: 537855 - DNA, 25 bp, Homo sapien
gcatattagtttcatgtttttgtgt

SEQ ID NO: 537856 - DNA, 25 bp, Homo sapien
ttctgcatattagtttcatgttttt

SEQ ID NO: 537857 - DNA, 25 bp, Homo sapien
gctgtcattgctcagtgtttggatg

SEQ ID NO: 537858 - DNA, 25 bp, Homo sapien
tggtttcaatcctctcagttaaaaa

SEQ ID NO: 537859 - DNA, 25 bp, Homo sapien
gctttctcctatctggggagcctga

SEQ ID NO: 537860 - DNA, 25 bp, Homo sapien
tgctgtcattgctcagtgtttggat

SEQ ID NO: 537861 - DNA, 25 bp, Homo sapien
ccctcaaaagtgatatggctgccat

SEQ ID NO: 537862 - DNA, 25 bp, Homo sapien
tccctcaaaagtgatatggctgcca

SEQ ID NO: 537863 - DNA, 25 bp, Homo sapien
tgtccctcaaaagtgatatggctgc

SEQ ID NO: 537864 - DNA, 25 bp, Homo sapien
atgtccctcaaaagtgatatggctg

SEQ ID NO: 537865 - DNA, 25 bp, Homo sapien
gaatcagctgaagttatatcttgca

SEQ ID NO: 537866 - DNA, 25 bp, Homo sapien
tcccttctggtatgtggatgcaatt

SEQ ID NO: 537867 - DNA, 25 bp, Homo sapien
ggtagctcatctgtaagacagccac

SEQ ID NO: 537868 - DNA, 25 bp, Homo sapien
tgcaattgagagaacgggtttatcc

SEQ ID NO: 537869 - DNA, 25 bp, Homo sapien
agctctgaggcagggtccttggaaa

SEQ ID NO: 537870 - DNA, 25 bp, Homo sapien
tgaagttggctgtcttaggtctccc

SEQ ID NO: 537871 - DNA, 25 bp, Homo sapien
ccaatgtcgaaagtgggctgcccaa

SEQ ID NO: 537872 - DNA, 25 bp, Homo sapien
ccctggatagacaaagtagcctaaa

SEQ ID NO: 537873 - DNA, 25 bp, Homo sapien
gaagtttgtgatgctcttctgagaa

SEQ ID NO: 537874 - DNA, 25 bp, Homo sapien
ttgaagtttgtgatgctcttctgag

SEQ ID NO: 537875 - DNA, 25 bp, Homo sapien
gaattgaagtttgtgatgctcttct

SEQ ID NO: 537876 - DNA, 25 bp, Homo sapien
aagtttgtgatgctcttctgagaag

SEQ ID NO: 537877 - DNA, 25 bp, Homo sapien
ctggccaggcaaaggtacttttaag

SEQ ID NO: 537878 - DNA, 25 bp, Homo sapien
aggtctgcccattcccgaacattca

SEQ ID NO: 537879 - DNA, 25 bp, Homo sapien
ggtctgcccattcccgaacattcat

SEQ ID NO: 537880 - DNA, 25 bp, Homo sapien
aaggtctgcccattcccgaacattc

SEQ ID NO: 537881 - DNA, 25 bp, Homo sapien
cattataaggccatggtaaccaaaa

SEQ ID NO: 537882 - DNA, 25 bp, Homo sapien
tgggataactgccttgctgaatgca

SEQ ID NO: 537883 - DNA, 25 bp, Homo sapien
taaatatatatcaacgcaaccgtcc

SEQ ID NO: 537884 - DNA, 25 bp, Homo sapien
gagagatctctacaaaggcagctac

SEQ ID NO: 537885 - DNA, 25 bp, Homo sapien
aagatttaatagtctgaccaatgac

SEQ ID NO: 537886 - DNA, 25 bp, Homo sapien
tgtcagctggatgatcacttggtgg

SEQ ID NO: 537887 - DNA, 25 bp, Homo sapien
catcaaagttcctcaagtgtcagct

SEQ ID NO: 537888 - DNA, 25 bp, Homo sapien
tagtctgaccaatgactgatgaact

SEQ ID NO: 537889 - DNA, 25 bp, Homo sapien
tcacaccagctcctccatccacctt

SEQ ID NO: 537890 - DNA, 25 bp, Homo sapien
gctcctccatccaccttctcactca

SEQ ID NO: 537891 - DNA, 25 bp, Homo sapien
ccagctcctccatccaccttctcac

SEQ ID NO: 537892 - DNA, 25 bp, Homo sapien
acaccagctcctccatccaccttct

SEQ ID NO: 537893 - DNA, 25 bp, Homo sapien
catttgtgtcatcagggtaaaagag

SEQ ID NO: 537894 - DNA, 25 bp, Homo sapien
ccccagtggctcaggacttttgttc

SEQ ID NO: 537895 - DNA, 25 bp, Homo sapien
ctttgcttgtccttcccccattgta

SEQ ID NO: 537896 - DNA, 25 bp, Homo sapien
gtggagggacattttcgccactttg

SEQ ID NO: 537897 - DNA, 25 bp, Homo sapien
cttctgagcttcttctcaattaatt

SEQ ID NO: 537898 - DNA, 25 bp, Homo sapien
ttcttctcaattaatttgctttcct

SEQ ID NO: 537899 - DNA, 25 bp, Homo sapien
cttgacatctccagacttctgagct

SEQ ID NO: 537900 - DNA, 25 bp, Homo sapien
tgagcttcttctcaattaatttgct

SEQ ID NO: 537901 - DNA, 25 bp, Homo sapien
tattgcaatgtagtgtttgttagta

SEQ ID NO: 537902 - DNA, 25 bp, Homo sapien
agtagcatttgttataggattagtg

SEQ ID NO: 537903 - DNA, 25 bp, Homo sapien
cacaaataagtcatgtgttgcagat

SEQ ID NO: 537904 - DNA, 25 bp, Homo sapien
ttataggattagtgtatgtgttgtc

SEQ ID NO: 537905 - DNA, 25 bp, Homo sapien
agaagagcttgaaataatgaccgaa

SEQ ID NO: 537906 - DNA, 25 bp, Homo sapien
cagaataatcacagacataggagga

SEQ ID NO: 537907 - DNA, 25 bp, Homo sapien
ccttgaacaaagtgcaagaagagct

SEQ ID NO: 537908 - DNA, 25 bp, Homo sapien
tcatccagtataagcgtagagagtt

SEQ ID NO: 537909 - DNA, 25 bp, Homo sapien
catgaggtaagaagagacatgtccc

SEQ ID NO: 537910 - DNA, 25 bp, Homo sapien
atgaggtaagaagagacatgtccca

SEQ ID NO: 537911 - DNA, 25 bp, Homo sapien
tcatgaggtaagaagagacatgtcc

SEQ ID NO: 537912 - DNA, 25 bp, Homo sapien
tttcatgaggtaagaagagacatgt

SEQ ID NO: 537913 - DNA, 25 bp, Homo sapien
ggtggttctagtggcttcaacaaga

SEQ ID NO: 537914 - DNA, 25 bp, Homo sapien
tcccgttattattaacagataagac

SEQ ID NO: 537915 - DNA, 25 bp, Homo sapien
tggagaacatgcaagaaccatatca

SEQ ID NO: 537916 - DNA, 25 bp, Homo sapien
tagaatctgtgacaatcccgttatt

SEQ ID NO: 537917 - DNA, 25 bp, Homo sapien
tcacacatgaaaaggatcttgagca

SEQ ID NO: 537918 - DNA, 25 bp, Homo sapien
gagcatttgcagctgaggcactggc

SEQ ID NO: 537919 - DNA, 25 bp, Homo sapien
gatcttgagcatttgcagctgaggc

SEQ ID NO: 537920 - DNA, 25 bp, Homo sapien
cacacatgaaaaggatcttgagcat

SEQ ID NO: 537921 - DNA, 25 bp, Homo sapien
tcaatgagcgactgactgatctcca

SEQ ID NO: 537922 - DNA, 25 bp, Homo sapien
agtgttggtctctgatgcaaagtca

SEQ ID NO: 537923 - DNA, 25 bp, Homo sapien
cagtctgcaaagtcgcaaaatgaag

SEQ ID NO: 537924 - DNA, 25 bp, Homo sapien
gcttcaaagtgttggtctctgatgc

SEQ ID NO: 537925 - DNA, 25 bp, Homo sapien
gatccctggtactcacttgacatca

SEQ ID NO: 537926 - DNA, 25 bp, Homo sapien
ctgtcacactaccattaaggtcttt

SEQ ID NO: 537927 - DNA, 25 bp, Homo sapien
ggtactcacttgacatcaaaaatcc

SEQ ID NO: 537928 - DNA, 25 bp, Homo sapien
tcacactaccattaaggtctttcct

SEQ ID NO: 537929 - DNA, 25 bp, Homo sapien
cctccaaagaactagagcccaggtc

SEQ ID NO: 537930 - DNA, 25 bp, Homo sapien
ccaaagaactagagcccaggtccag

SEQ ID NO: 537931 - DNA, 25 bp, Homo sapien
gagcccaggtccagcagagtggtca

SEQ ID NO: 537932 - DNA, 25 bp, Homo sapien
agcccaggtccagcagagtggtcat

SEQ ID NO: 537933 - DNA, 25 bp, Homo sapien
tgttatgacaactctaatcttggct

SEQ ID NO: 537934 - DNA, 25 bp, Homo sapien
tatttactgtgaataggactcctct

SEQ ID NO: 537935 - DNA, 25 bp, Homo sapien
cattttctagagactgcaggttcat

SEQ ID NO: 537936 - DNA, 25 bp, Homo sapien
gaatataaatatcccagcagtcatc

SEQ ID NO: 537937 - DNA, 25 bp, Homo sapien
ttatcctattcaggaattcagtttc

SEQ ID NO: 537938 - DNA, 25 bp, Homo sapien
attagaattagaatgtgtctggtcc

SEQ ID NO: 537939 - DNA, 25 bp, Homo sapien
agaattagaatgtgtctggtcctgg

SEQ ID NO: 537940 - DNA, 25 bp, Homo sapien
aactcattattatcctattcaggaa

SEQ ID NO: 537941 - DNA, 25 bp, Homo sapien
ggcattctatctgtcaaaaagcata

SEQ ID NO: 537942 - DNA, 25 bp, Homo sapien
gctggcattctatctgtcaaaaagc

SEQ ID NO: 537943 - DNA, 25 bp, Homo sapien
ttctatctgtcaaaaagcatatgaa

SEQ ID NO: 537944 - DNA, 25 bp, Homo sapien
atttgggtcatctctactttttctc

SEQ ID NO: 537945 - DNA, 25 bp, Homo sapien
catgctgtgagacccgttgagtctc

SEQ ID NO: 537946 - DNA, 25 bp, Homo sapien
tcatgctgtgagacccgttgagtct

SEQ ID NO: 537947 - DNA, 25 bp, Homo sapien
ttccctgaagacattgtgtgctgga

SEQ ID NO: 537948 - DNA, 25 bp, Homo sapien
ctgaagacattgtgtgctggaatcc

SEQ ID NO: 537949 - DNA, 25 bp, Homo sapien
ccttctgcttgggatgtaggacaaa

SEQ ID NO: 537950 - DNA, 25 bp, Homo sapien
tcccttctgcttgggatgtaggaca

SEQ ID NO: 537951 - DNA, 25 bp, Homo sapien
tctgcttgggatgtaggacaaatag

SEQ ID NO: 537952 - DNA, 25 bp, Homo sapien
cttctgcttgggatgtaggacaaat

SEQ ID NO: 537953 - DNA, 25 bp, Homo sapien
tgcccaccatgagaggggcctgtat

SEQ ID NO: 537954 - DNA, 25 bp, Homo sapien
cctgcccaccatgagaggggcctgt

SEQ ID NO: 537955 - DNA, 25 bp, Homo sapien
ccaccatgagaggggcctgtatgca

SEQ ID NO: 537956 - DNA, 25 bp, Homo sapien
cccaccatgagaggggcctgtatgc

SEQ ID NO: 537957 - DNA, 25 bp, Homo sapien
ttttgttccctgatttattatcacc

SEQ ID NO: 537958 - DNA, 25 bp, Homo sapien
tagtggaggaaagtgttagtattcc

SEQ ID NO: 537959 - DNA, 25 bp, Homo sapien
gatttcacgtcattcatattgtgaa

SEQ ID NO: 537960 - DNA, 25 bp, Homo sapien
tactttggtagaaagtgtagtggag

SEQ ID NO: 537961 - DNA, 25 bp, Homo sapien
cacccactgagggtcttttgacttg

SEQ ID NO: 537962 - DNA, 25 bp, Homo sapien
tggaaaccaccgatcttgagcactg

SEQ ID NO: 537963 - DNA, 25 bp, Homo sapien
cctcattgcatggatgtaacacagt

SEQ ID NO: 537964 - DNA, 25 bp, Homo sapien
caattataatagctatgtgcaccca

SEQ ID NO: 537965 - DNA, 25 bp, Homo sapien
catctattggttgtaggatttgcca

SEQ ID NO: 537966 - DNA, 25 bp, Homo sapien
ggagatttgagctcacttgtaggca

SEQ ID NO: 537967 - DNA, 25 bp, Homo sapien
taggtgtaacttaagggatcgtggc

SEQ ID NO: 537968 - DNA, 25 bp, Homo sapien
tatggatcaggtgcaaagaaagagg

SEQ ID NO: 537969 - DNA, 25 bp, Homo sapien
gctaaactcatcatcttgtgtggga

SEQ ID NO: 537970 - DNA, 25 bp, Homo sapien
cacaagccaattgctgctgggaggg

SEQ ID NO: 537971 - DNA, 25 bp, Homo sapien
cacgtaagaataggtcttgggccag

SEQ ID NO: 537972 - DNA, 25 bp, Homo sapien
taagcacggcattgtgtaacacctg

SEQ ID NO: 537973 - DNA, 25 bp, Homo sapien
tatgaaaatcatcgggcaggccaat

SEQ ID NO: 537974 - DNA, 25 bp, Homo sapien
gacaacctcaggcacattagtaaag

SEQ ID NO: 537975 - DNA, 25 bp, Homo sapien
tttttggaacctgacgccaccagag

SEQ ID NO: 537976 - DNA, 25 bp, Homo sapien
gccaggcaagatcagcagaattatc

SEQ ID NO: 537977 - DNA, 25 bp, Homo sapien
ctgaagctatcaaaagcaggtgttg

SEQ ID NO: 537978 - DNA, 25 bp, Homo sapien
tgaagctatcaaaagcaggtgttgt

SEQ ID NO: 537979 - DNA, 25 bp, Homo sapien
gaagctatcaaaagcaggtgttgtt

SEQ ID NO: 537980 - DNA, 25 bp, Homo sapien
tttttgatggcattagaagaaagag

SEQ ID NO: 537981 - DNA, 25 bp, Homo sapien
attttttgatggcattagaagaaag

SEQ ID NO: 537982 - DNA, 25 bp, Homo sapien
tttgatggcattagaagaaagagat

SEQ ID NO: 537983 - DNA, 25 bp, Homo sapien
tcattttttgatggcattagaagaa

SEQ ID NO: 537984 - DNA, 25 bp, Homo sapien
gtactgatttctatgattgttgcca

SEQ ID NO: 537985 - DNA, 25 bp, Homo sapien
tgttgtcgctattttcccagtgggt

SEQ ID NO: 537986 - DNA, 25 bp, Homo sapien
gacaaagatgcatcataccactgat

SEQ ID NO: 537987 - DNA, 25 bp, Homo sapien
tggctgtcagatgttgtcgctattt

SEQ ID NO: 537988 - DNA, 25 bp, Homo sapien
caacatcaacaacgcagaaagaaaa

SEQ ID NO: 537989 - DNA, 25 bp, Homo sapien
ctgctatacatataaacaacatcaa

SEQ ID NO: 537990 - DNA, 25 bp, Homo sapien
aacaacatcaacaacgcagaaagaa

SEQ ID NO: 537991 - DNA, 25 bp, Homo sapien
ctatacatataaacaacatcaacaa

SEQ ID NO: 537992 - DNA, 25 bp, Homo sapien
gaagcagtatctctacatgattgtg

SEQ ID NO: 537993 - DNA, 25 bp, Homo sapien
tcattgtagtatacgagaagcagta

SEQ ID NO: 537994 - DNA, 25 bp, Homo sapien
gatttgcatttgactagtggccaat

SEQ ID NO: 537995 - DNA, 25 bp, Homo sapien
tgaggtaggtatccaactccattcc

SEQ ID NO: 537996 - DNA, 25 bp, Homo sapien
atggcactctgggagatccttcttt

SEQ ID NO: 537997 - DNA, 25 bp, Homo sapien
tctttgtttattgaactgttgggca

SEQ ID NO: 537998 - DNA, 25 bp, Homo sapien
ggcactctgggagatccttctttgt

SEQ ID NO: 537999 - DNA, 25 bp, Homo sapien
cttctttgtttattgaactgttggg

SEQ ID NO: 538000 - DNA, 25 bp, Homo sapien
tggtgactgatagcttgctgtcctt

SEQ ID NO: 538001 - DNA, 25 bp, Homo sapien
gatgatggtgactgatagcttgctg

SEQ ID NO: 538002 - DNA, 25 bp, Homo sapien
tgatggtgactgatagcttgctgtc

SEQ ID NO: 538003 - DNA, 25 bp, Homo sapien
gatggtgactgatagcttgctgtcc

SEQ ID NO: 538004 - DNA, 25 bp, Homo sapien
taatcatgatattggtggtactgag

SEQ ID NO: 538005 - DNA, 25 bp, Homo sapien
atattggtggtactgagaggtgaca

SEQ ID NO: 538006 - DNA, 25 bp, Homo sapien
tcaataatcatgatattggtggtac

SEQ ID NO: 538007 - DNA, 25 bp, Homo sapien
tcatgatattggtggtactgagagg

SEQ ID NO: 538008 - DNA, 25 bp, Homo sapien
cctgcactggagcacgcagtcttct

SEQ ID NO: 538009 - DNA, 25 bp, Homo sapien
actggagcacgcagtcttctcccag

SEQ ID NO: 538010 - DNA, 25 bp, Homo sapien
gagcacgcagtcttctcccagctgg

SEQ ID NO: 538011 - DNA, 25 bp, Homo sapien
tggtggctgtcctcattggcataat

SEQ ID NO: 538012 - DNA, 25 bp, Homo sapien
atcctccttgactgaacacacagct

SEQ ID NO: 538013 - DNA, 25 bp, Homo sapien
ctccttgactgaacacacagcttcg

SEQ ID NO: 538014 - DNA, 25 bp, Homo sapien
tccttgactgaacacacagcttcgg

SEQ ID NO: 538015 - DNA, 25 bp, Homo sapien
tcctccttgactgaacacacagctt

SEQ ID NO: 538016 - DNA, 25 bp, Homo sapien
tgtagtcacttctacttgtaactgc

SEQ ID NO: 538017 - DNA, 25 bp, Homo sapien
tctacttgtaactgcctgattatcc

SEQ ID NO: 538018 - DNA, 25 bp, Homo sapien
catctgtagtcacttctacttgtaa

SEQ ID NO: 538019 - DNA, 25 bp, Homo sapien
ttcagttagttcatctgtagtcact

SEQ ID NO: 538020 - DNA, 25 bp, Homo sapien
gttaattgcttgtgacagccaagag

SEQ ID NO: 538021 - DNA, 25 bp, Homo sapien
tatataacataggagaacagctgca

SEQ ID NO: 538022 - DNA, 25 bp, Homo sapien
tctcctaatgccctaaaaacagctt

SEQ ID NO: 538023 - DNA, 25 bp, Homo sapien
cctgcatggctgttacttcacactt

SEQ ID NO: 538024 - DNA, 25 bp, Homo sapien
gctactagtaaagttcactattgtg

SEQ ID NO: 538025 - DNA, 25 bp, Homo sapien
gttcactattgtgtcaatatattta

SEQ ID NO: 538026 - DNA, 25 bp, Homo sapien
aaagttcactattgtgtcaatatat

SEQ ID NO: 538027 - DNA, 25 bp, Homo sapien
ttggctactagtaaagttcactatt

SEQ ID NO: 538028 - DNA, 25 bp, Homo sapien
cttgatccatccgaaggtggactgg

SEQ ID NO: 538029 - DNA, 25 bp, Homo sapien
ttaagcttgatccatccgaaggtgg

SEQ ID NO: 538030 - DNA, 25 bp, Homo sapien
aagcttgatccatccgaaggtggac

SEQ ID NO: 538031 - DNA, 25 bp, Homo sapien
tccatccgaaggtggactggtttta

SEQ ID NO: 538032 - DNA, 25 bp, Homo sapien
tatcatatcggaatgatctacattg

SEQ ID NO: 538033 - DNA, 25 bp, Homo sapien
tgtgactaaatatcatatcggaatg

SEQ ID NO: 538034 - DNA, 25 bp, Homo sapien
tcatatcggaatgatctacattgtt

SEQ ID NO: 538035 - DNA, 25 bp, Homo sapien
aaaatccctgtgactaaatatcata

SEQ ID NO: 538036 - DNA, 25 bp, Homo sapien
tcttgttagcatcttctattgatct

SEQ ID NO: 538037 - DNA, 25 bp, Homo sapien
gttagcatcttctattgatctttcc

SEQ ID NO: 538038 - DNA, 25 bp, Homo sapien
ttgttagcatcttctattgatcttt

SEQ ID NO: 538039 - DNA, 25 bp, Homo sapien
tagcatcttctattgatctttccat

SEQ ID NO: 538040 - DNA, 25 bp, Homo sapien
tcatcagtgtctcatcagggcacag

SEQ ID NO: 538041 - DNA, 25 bp, Homo sapien
aggtggaaatggacagtttctagaa

SEQ ID NO: 538042 - DNA, 25 bp, Homo sapien
gagtctcggtaagatggtggtactc

SEQ ID NO: 538043 - DNA, 25 bp, Homo sapien
gatggtggtactcttgtcctatcgt

SEQ ID NO: 538044 - DNA, 25 bp, Homo sapien
tgatactttaaggtggtggagtctc

SEQ ID NO: 538045 - DNA, 25 bp, Homo sapien
aattgagtttgctgccaattggtcc

SEQ ID NO: 538046 - DNA, 25 bp, Homo sapien
tttgctgccaattggtccaaacaat

SEQ ID NO: 538047 - DNA, 25 bp, Homo sapien
tgagtttgctgccaattggtccaaa

SEQ ID NO: 538048 - DNA, 25 bp, Homo sapien
tgccaattggtccaaacaattttgt

SEQ ID NO: 538049 - DNA, 25 bp, Homo sapien
tatttcccaacttaacagatttcag

SEQ ID NO: 538050 - DNA, 25 bp, Homo sapien
taaaaactatcaattctcggtgagt

SEQ ID NO: 538051 - DNA, 25 bp, Homo sapien
tgctctaatggctcactgatgatgt

SEQ ID NO: 538052 - DNA, 25 bp, Homo sapien
gaagtcttccaagctctatcttgat

SEQ ID NO: 538053 - DNA, 25 bp, Homo sapien
gcagcattaattcatatgtacttag

SEQ ID NO: 538054 - DNA, 25 bp, Homo sapien
ggagatgcatctagaaaccttttag

SEQ ID NO: 538055 - DNA, 25 bp, Homo sapien
aaacaacatgttggagaaatttggg

SEQ ID NO: 538056 - DNA, 25 bp, Homo sapien
tagtcagtttcataaacttgcagag

SEQ ID NO: 538057 - DNA, 25 bp, Homo sapien
tatgatagctacaccattgataacc

SEQ ID NO: 538058 - DNA, 25 bp, Homo sapien
tgtagagcaattagcctattagact

SEQ ID NO: 538059 - DNA, 25 bp, Homo sapien
tgataaccataagaagggaaaccaa

SEQ ID NO: 538060 - DNA, 25 bp, Homo sapien
tatagttaatgaagtagggtttctc

SEQ ID NO: 538061 - DNA, 25 bp, Homo sapien
gcaggtagatgcgtcagcagatcct

SEQ ID NO: 538062 - DNA, 25 bp, Homo sapien
gggccatatgtggaaccagcttcag

SEQ ID NO: 538063 - DNA, 25 bp, Homo sapien
tacatggaagcaggactcctttggg

SEQ ID NO: 538064 - DNA, 25 bp, Homo sapien
gtgatctcagtgcaggacagtcctt

SEQ ID NO: 538065 - DNA, 25 bp, Homo sapien
aaattctgttgaaagtgtcagctat

SEQ ID NO: 538066 - DNA, 25 bp, Homo sapien
ttcctactcaataacccaaagcagc

SEQ ID NO: 538067 - DNA, 25 bp, Homo sapien
gcaatttgcagaatttctaagataa

SEQ ID NO: 538068 - DNA, 25 bp, Homo sapien
gacaacagtgtatatctatagattc

SEQ ID NO: 538069 - DNA, 25 bp, Homo sapien
tgccaatatcagtgaaggtgaccct

SEQ ID NO: 538070 - DNA, 25 bp, Homo sapien
tgacttggcggtttacaactataaa

SEQ ID NO: 538071 - DNA, 25 bp, Homo sapien
aaataaatctgctgccgggaacaac

SEQ ID NO: 538072 - DNA, 25 bp, Homo sapien
tccaccaggcccttagataaattta

SEQ ID NO: 538073 - DNA, 25 bp, Homo sapien
ttaggaagtgaaaagtatcctggat

SEQ ID NO: 538074 - DNA, 25 bp, Homo sapien
aaaagtatcctggatctacacaaaa

SEQ ID NO: 538075 - DNA, 25 bp, Homo sapien
agtatcctggatctacacaaaaggg

SEQ ID NO: 538076 - DNA, 25 bp, Homo sapien
gaagtgaaaagtatcctggatctac

SEQ ID NO: 538077 - DNA, 25 bp, Homo sapien
cagcaacacttgtaaccctggttta

SEQ ID NO: 538078 - DNA, 25 bp, Homo sapien
tgtcctgtgggatgtccatggtgag

SEQ ID NO: 538079 - DNA, 25 bp, Homo sapien
ttatttgttcagtggattgtcctgt

SEQ ID NO: 538080 - DNA, 25 bp, Homo sapien
atttgttcagtggattgtcctgtgg

SEQ ID NO: 538081 - DNA, 25 bp, Homo sapien
caggagtcaaagataattcaggaag

SEQ ID NO: 538082 - DNA, 25 bp, Homo sapien
taccaggagtcaaagataattcagg

SEQ ID NO: 538083 - DNA, 25 bp, Homo sapien
gaggccataccaggagtcaaagata

SEQ ID NO: 538084 - DNA, 25 bp, Homo sapien
ggccataccaggagtcaaagataat

SEQ ID NO: 538085 - DNA, 25 bp, Homo sapien
tgaacctgacacttgcagccgtttg

SEQ ID NO: 538086 - DNA, 25 bp, Homo sapien
ctgacacttgcagccgtttgccacg

SEQ ID NO: 538087 - DNA, 25 bp, Homo sapien
gaacctgacacttgcagccgtttgc

SEQ ID NO: 538088 - DNA, 25 bp, Homo sapien
acctgacacttgcagccgtttgcca

SEQ ID NO: 538089 - DNA, 25 bp, Homo sapien
catcagggttggcaccttgagcact

SEQ ID NO: 538090 - DNA, 25 bp, Homo sapien
ttagctcagcttgaaggtgcacatc

SEQ ID NO: 538091 - DNA, 25 bp, Homo sapien
atagagcctctccacaagaacacct

SEQ ID NO: 538092 - DNA, 25 bp, Homo sapien
ttatccatgacgtgtgtaagtctca

SEQ ID NO: 538093 - DNA, 25 bp, Homo sapien
tccaaatcctctcgtgatgttaggt

SEQ ID NO: 538094 - DNA, 25 bp, Homo sapien
aatcctctcgtgatgttaggtggtc

SEQ ID NO: 538095 - DNA, 25 bp, Homo sapien
gtggataatcaagttcacgtaggaa

SEQ ID NO: 538096 - DNA, 25 bp, Homo sapien
ttaggtggtcacctaacatggatgt

SEQ ID NO: 538097 - DNA, 25 bp, Homo sapien
cagattatttcttccttgagtgttt

SEQ ID NO: 538098 - DNA, 25 bp, Homo sapien
tgagtgtttttgcttaggagcctca

SEQ ID NO: 538099 - DNA, 25 bp, Homo sapien
gagtgtttttgcttaggagcctcat

SEQ ID NO: 538100 - DNA, 25 bp, Homo sapien
attatttcttccttgagtgtttttg

SEQ ID NO: 538101 - DNA, 25 bp, Homo sapien
tttagggaagagctgccccactctg

SEQ ID NO: 538102 - DNA, 25 bp, Homo sapien
tgatggaagttgatcctctcagagt

SEQ ID NO: 538103 - DNA, 25 bp, Homo sapien
cctctcagagtggtttttctgcctg

SEQ ID NO: 538104 - DNA, 25 bp, Homo sapien
taaattgtagcattgcagactttag

SEQ ID NO: 538105 - DNA, 25 bp, Homo sapien
ctacagatgtcaagaaaacatattg

SEQ ID NO: 538106 - DNA, 25 bp, Homo sapien
tacagatgtcaagaaaacatattgt

SEQ ID NO: 538107 - DNA, 25 bp, Homo sapien
ttttcctctaagtacactgttacca

SEQ ID NO: 538108 - DNA, 25 bp, Homo sapien
tttcctctaagtacactgttaccat

SEQ ID NO: 538109 - DNA, 25 bp, Homo sapien
gtttccagtcctcttaaggtctcac

SEQ ID NO: 538110 - DNA, 25 bp, Homo sapien
tgagttgccagttcagctttgccat

SEQ ID NO: 538111 - DNA, 25 bp, Homo sapien
gacttaataagttgacctggagtca

SEQ ID NO: 538112 - DNA, 25 bp, Homo sapien
ttctatcagaacaacagcttctagg

SEQ ID NO: 538113 - DNA, 25 bp, Homo sapien
caacagcttctaggtcacgtgactt

SEQ ID NO: 538114 - DNA, 25 bp, Homo sapien
aaaaaagtagctcaccctctgctgc

SEQ ID NO: 538115 - DNA, 25 bp, Homo sapien
tattataagcatctgaagatacgtc

SEQ ID NO: 538116 - DNA, 25 bp, Homo sapien
taattaagcatattaacctaggtcg

SEQ ID NO: 538117 - DNA, 25 bp, Homo sapien
tgggatatccatagcctcacattta

SEQ ID NO: 538118 - DNA, 25 bp, Homo sapien
gaatttgaaggtctatgtctgagcc

SEQ ID NO: 538119 - DNA, 25 bp, Homo sapien
caggcaagacaatcgttttttctgc

SEQ ID NO: 538120 - DNA, 25 bp, Homo sapien
tgtctgagcctccacgaacctgaaa

SEQ ID NO: 538121 - DNA, 25 bp, Homo sapien
gcttgtgataaatccagagtctctg

SEQ ID NO: 538122 - DNA, 25 bp, Homo sapien
ttttttcaccaattgagtctttgag

SEQ ID NO: 538123 - DNA, 25 bp, Homo sapien
gtttcaaaccataatctcttctctc

SEQ ID NO: 538124 - DNA, 25 bp, Homo sapien
tgatttatgcggtttgtttcaaacc

SEQ ID NO: 538125 - DNA, 25 bp, Homo sapien
gagccagtcgcctaatatttatttg

SEQ ID NO: 538126 - DNA, 25 bp, Homo sapien
ttcagtaactgggccttagtaaata

SEQ ID NO: 538127 - DNA, 25 bp, Homo sapien
taaaagcaaatggatgtccttgaga

SEQ ID NO: 538128 - DNA, 25 bp, Homo sapien
gtgttctctcggagaaatggaaaag

SEQ ID NO: 538129 - DNA, 25 bp, Homo sapien
catcagtatgagaaaccagtttcag

SEQ ID NO: 538130 - DNA, 25 bp, Homo sapien
aggcaggacctccggtgacacagct

SEQ ID NO: 538131 - DNA, 25 bp, Homo sapien
gaaaggcaggacctccggtgacaca

SEQ ID NO: 538132 - DNA, 25 bp, Homo sapien
aaaggcaggacctccggtgacacag

SEQ ID NO: 538133 - DNA, 25 bp, Homo sapien
ccggtgacacagctttttgaaacat

SEQ ID NO: 538134 - DNA, 25 bp, Homo sapien
cagggatcgcgagcccggcggatgc

SEQ ID NO: 538135 - DNA, 25 bp, Homo sapien
agcagggatcgcgagcccggcggat

SEQ ID NO: 538136 - DNA, 25 bp, Homo sapien
gagagcagggatcgcgagcccggcg

SEQ ID NO: 538137 - DNA, 25 bp, Homo sapien
ggagagagcagggatcgcgagcccg

SEQ ID NO: 538138 - DNA, 25 bp, Homo sapien
tgccagctgtccctcgaggtgttcg

SEQ ID NO: 538139 - DNA, 25 bp, Homo sapien
tctcctcggaccagatcgaaatgga

SEQ ID NO: 538140 - DNA, 25 bp, Homo sapien
tcgaaatggacatctcggagaacgc

SEQ ID NO: 538141 - DNA, 25 bp, Homo sapien
tgttcgccaacgacaaggagatctg

SEQ ID NO: 538142 - DNA, 25 bp, Homo sapien
atttgggttagaatgcgtgcccagt

SEQ ID NO: 538143 - DNA, 25 bp, Homo sapien
ggttagaatgcgtgcccagttcccc

SEQ ID NO: 538144 - DNA, 25 bp, Homo sapien
catctcaaaactcaatttgttacca

SEQ ID NO: 538145 - DNA, 25 bp, Homo sapien
tccccatctcaaaactcaatttgtt

SEQ ID NO: 538146 - DNA, 25 bp, Homo sapien
taatattttccatcacgctcttcgg

SEQ ID NO: 538147 - DNA, 25 bp, Homo sapien
caggaaaggagcagataatattttc

SEQ ID NO: 538148 - DNA, 25 bp, Homo sapien
caatgttgagaaagcacgacttagc

SEQ ID NO: 538149 - DNA, 25 bp, Homo sapien
tcttcggttgcctggttaagtttga

SEQ ID NO: 538150 - DNA, 25 bp, Homo sapien
cagctgcaagaagaagtaatgtgta

SEQ ID NO: 538151 - DNA, 25 bp, Homo sapien
catgaattgcatgatccctgtgtca

SEQ ID NO: 538152 - DNA, 25 bp, Homo sapien
taatcttgtaggaacccatagctgc

SEQ ID NO: 538153 - DNA, 25 bp, Homo sapien
aagactctgttccatgatacaagga

SEQ ID NO: 538154 - DNA, 25 bp, Homo sapien
tagtttgcattgagtcaacagctat

SEQ ID NO: 538155 - DNA, 25 bp, Homo sapien
ctgtcactactgtccaaggctgaag

SEQ ID NO: 538156 - DNA, 25 bp, Homo sapien
tcttctataatgatgtgtcctcttg

SEQ ID NO: 538157 - DNA, 25 bp, Homo sapien
ctcacacgtggcagattgtcctcca

SEQ ID NO: 538158 - DNA, 25 bp, Homo sapien
agctcccccagtggagctaagtcct

SEQ ID NO: 538159 - DNA, 25 bp, Homo sapien
agtatgacacgcaactgcatgtggc

SEQ ID NO: 538160 - DNA, 25 bp, Homo sapien
tagatatactctccctttgcctcca

SEQ ID NO: 538161 - DNA, 25 bp, Homo sapien
aaagcaggcagctagagtcaaagga

SEQ ID NO: 538162 - DNA, 25 bp, Homo sapien
tccaagtactgaaagagctcagcag

SEQ ID NO: 538163 - DNA, 25 bp, Homo sapien
gatgaggagaagaattaccttttga

SEQ ID NO: 538164 - DNA, 25 bp, Homo sapien
gaattaatgatgcttaaagagaaaa

SEQ ID NO: 538165 - DNA, 25 bp, Homo sapien
gataacaatggtttcgttttgacca

SEQ ID NO: 538166 - DNA, 25 bp, Homo sapien
tgaccaaacttgtattaggacagaa

SEQ ID NO: 538167 - DNA, 25 bp, Homo sapien
tatcattatttcgccagaaccctga

SEQ ID NO: 538168 - DNA, 25 bp, Homo sapien
tactatcattatttcgccagaaccc

SEQ ID NO: 538169 - DNA, 25 bp, Homo sapien
tcattatttcgccagaaccctgaag

SEQ ID NO: 538170 - DNA, 25 bp, Homo sapien
ctatcattatttcgccagaaccctg

SEQ ID NO: 538171 - DNA, 25 bp, Homo sapien
cttgtttgccactagcttgtagggg

SEQ ID NO: 538172 - DNA, 25 bp, Homo sapien
ggtcaaatgcttctcagtaaagtta

SEQ ID NO: 538173 - DNA, 25 bp, Homo sapien
taggggtatgtagtccatggtcaaa

SEQ ID NO: 538174 - DNA, 25 bp, Homo sapien
taaagttaaacaagtggcagctggc

SEQ ID NO: 538175 - DNA, 25 bp, Homo sapien
ggcttggggccacgaaatttggcat

SEQ ID NO: 538176 - DNA, 25 bp, Homo sapien
tttggcatcccaagaactgattctg

SEQ ID NO: 538177 - DNA, 25 bp, Homo sapien
cacaaagtgatgcatgccatgcatt

SEQ ID NO: 538178 - DNA, 25 bp, Homo sapien
gattctgtgctctgccaagtttctg

SEQ ID NO: 538179 - DNA, 25 bp, Homo sapien
tttcctcttcaacagaatctctttg

SEQ ID NO: 538180 - DNA, 25 bp, Homo sapien
ctgaatcacagcctctaatttcctc

SEQ ID NO: 538181 - DNA, 25 bp, Homo sapien
atctctttgaattgtgagaccagag

SEQ ID NO: 538182 - DNA, 25 bp, Homo sapien
tcacagcctctaatttcctcttcaa

SEQ ID NO: 538183 - DNA, 25 bp, Homo sapien
gaagttttctgtatgcatataattt

SEQ ID NO: 538184 - DNA, 25 bp, Homo sapien
tgaagttttctgtatgcatataatt

SEQ ID NO: 538185 - DNA, 25 bp, Homo sapien
gaatatgtactttatgggcattcca

SEQ ID NO: 538186 - DNA, 25 bp, Homo sapien
cactctcactacacccatataatgg

SEQ ID NO: 538187 - DNA, 25 bp, Homo sapien
tcagtactaatctgaatctgttcat

SEQ ID NO: 538188 - DNA, 25 bp, Homo sapien
tttatgggcattccatattctgcac

SEQ ID NO: 538189 - DNA, 25 bp, Homo sapien
cctgctcagctgtgattttgcacca

SEQ ID NO: 538190 - DNA, 25 bp, Homo sapien
ctagggaaatcatccacttttggca

SEQ ID NO: 538191 - DNA, 25 bp, Homo sapien
catctgtagctagtgaagagaggac

SEQ ID NO: 538192 - DNA, 25 bp, Homo sapien
ctgtagctagtgaagagaggactga

SEQ ID NO: 538193 - DNA, 25 bp, Homo sapien
gaatgacattactatatgatatgat

SEQ ID NO: 538194 - DNA, 25 bp, Homo sapien
tcacttcttgtatgactgaattcat

SEQ ID NO: 538195 - DNA, 25 bp, Homo sapien
agtcacttcttgtatgactgaattc

SEQ ID NO: 538196 - DNA, 25 bp, Homo sapien
ttccagtcacttcttgtatgactga

SEQ ID NO: 538197 - DNA, 25 bp, Homo sapien
ttacaggcatgcactgctacaccca

SEQ ID NO: 538198 - DNA, 25 bp, Homo sapien
gtgatctcggctcactgtaacctct

SEQ ID NO: 538199 - DNA, 25 bp, Homo sapien
tgatctcggctcactgtaacctctg

SEQ ID NO: 538200 - DNA, 25 bp, Homo sapien
ctgggtttcgccacgttggccaggc

SEQ ID NO: 538201 - DNA, 25 bp, Homo sapien
aaggatctactccactcttatcctc

SEQ ID NO: 538202 - DNA, 25 bp, Homo sapien
gatctactccactcttatcctcaac

SEQ ID NO: 538203 - DNA, 25 bp, Homo sapien
tcaaggatctactccactcttatcc

SEQ ID NO: 538204 - DNA, 25 bp, Homo sapien
ggatctactccactcttatcctcaa

SEQ ID NO: 538205 - DNA, 25 bp, Homo sapien
gtattttttccgcatatctccattg

SEQ ID NO: 538206 - DNA, 25 bp, Homo sapien
cttattgtattttttccgcatatct

SEQ ID NO: 538207 - DNA, 25 bp, Homo sapien
tattttttccgcatatctccattgt

SEQ ID NO: 538208 - DNA, 25 bp, Homo sapien
attgtattttttccgcatatctcca

SEQ ID NO: 538209 - DNA, 25 bp, Homo sapien
tcctcgggtctgttatctgaagtta

SEQ ID NO: 538210 - DNA, 25 bp, Homo sapien
tcattttagcaagtagttgaagtaa

SEQ ID NO: 538211 - DNA, 25 bp, Homo sapien
caagtagttgaagtaattctgcata

SEQ ID NO: 538212 - DNA, 25 bp, Homo sapien
ttatctgaagttagagatttgttca

SEQ ID NO: 538213 - DNA, 25 bp, Homo sapien
gggctcatgatgtcaccctgtggga

SEQ ID NO: 538214 - DNA, 25 bp, Homo sapien
gacaagtgtacagctggataaccca

SEQ ID NO: 538215 - DNA, 25 bp, Homo sapien
gatgccaggcagcttcagtagctag

SEQ ID NO: 538216 - DNA, 25 bp, Homo sapien
tcagtgtgccagatgacaagggtta

SEQ ID NO: 538217 - DNA, 25 bp, Homo sapien
atgagaagaaggcagatcagaatta

SEQ ID NO: 538218 - DNA, 25 bp, Homo sapien
tagggaaggggcgaagacgatatga

SEQ ID NO: 538219 - DNA, 25 bp, Homo sapien
gaagaaggcagatcagaattactgc

SEQ ID NO: 538220 - DNA, 25 bp, Homo sapien
ggcgaagacgatatgagaagaaggc

SEQ ID NO: 538221 - DNA, 25 bp, Homo sapien
tcagagctgctatggtccactgtgt

SEQ ID NO: 538222 - DNA, 25 bp, Homo sapien
ttaatgcgctgatccgagcctgcag

SEQ ID NO: 538223 - DNA, 25 bp, Homo sapien
tccactgtgtcaatgcatactgagg

SEQ ID NO: 538224 - DNA, 25 bp, Homo sapien
tgtcaatgcatactaagggagtcct

SEQ ID NO: 538225 - DNA, 25 bp, Homo sapien
gaatcaaaccccagccgcggcggtg

SEQ ID NO: 538226 - DNA, 25 bp, Homo sapien
aatcaaaccccagccgcggcggtga

SEQ ID NO: 538227 - DNA, 25 bp, Homo sapien
atcaaaccccagccgcggcggtgag

SEQ ID NO: 538228 - DNA, 25 bp, Homo sapien
tttacatgactgggaatcaaacccc

SEQ ID NO: 538229 - DNA, 25 bp, Homo sapien
tggtgatgccagaactgaagaatct

SEQ ID NO: 538230 - DNA, 25 bp, Homo sapien
cagaactgaagaatcttttagggca

SEQ ID NO: 538231 - DNA, 25 bp, Homo sapien
gtgatgccagaactgaagaatcttt

SEQ ID NO: 538232 - DNA, 25 bp, Homo sapien
gccagaactgaagaatcttttaggg

SEQ ID NO: 538233 - DNA, 25 bp, Homo sapien
catagtactggcaagaagactggca

SEQ ID NO: 538234 - DNA, 25 bp, Homo sapien
cattcacaaagtcgtacagcacgtt

SEQ ID NO: 538235 - DNA, 25 bp, Homo sapien
gaaataagtccatactcctgctggt

SEQ ID NO: 538236 - DNA, 25 bp, Homo sapien
cctgctggttaatgctactgccata

SEQ ID NO: 538237 - DNA, 25 bp, Homo sapien
tacaagaaagaaattgcccatatct

SEQ ID NO: 538238 - DNA, 25 bp, Homo sapien
ctgattggcgtgattacaagaaaga

SEQ ID NO: 538239 - DNA, 25 bp, Homo sapien
tgattggcgtgattacaagaaagaa

SEQ ID NO: 538240 - DNA, 25 bp, Homo sapien
attggcgtgattacaagaaagaaat

SEQ ID NO: 538241 - DNA, 25 bp, Homo sapien
agcggcttgagtaaagggactatgc

SEQ ID NO: 538242 - DNA, 25 bp, Homo sapien
cggcttgagtaaagggactatgcat

SEQ ID NO: 538243 - DNA, 25 bp, Homo sapien
actgagcggcttgagtaaagggact

SEQ ID NO: 538244 - DNA, 25 bp, Homo sapien
ctttcagactgagcggcttgagtaa

SEQ ID NO: 538245 - DNA, 25 bp, Homo sapien
ttcatgtacagtccacacgtcatca

SEQ ID NO: 538246 - DNA, 25 bp, Homo sapien
cacgtcatcatagtcatttgccatt

SEQ ID NO: 538247 - DNA, 25 bp, Homo sapien
gtccacacgtcatcatagtcatttg

SEQ ID NO: 538248 - DNA, 25 bp, Homo sapien
tgtacagtccacacgtcatcatagt

SEQ ID NO: 538249 - DNA, 25 bp, Homo sapien
tgacagtgtctttctgtcaaagaat

SEQ ID NO: 538250 - DNA, 25 bp, Homo sapien
acagtgtctttctgtcaaagaattt

SEQ ID NO: 538251 - DNA, 25 bp, Homo sapien
gacagtgtctttctgtcaaagaatt

SEQ ID NO: 538252 - DNA, 25 bp, Homo sapien
tattgccagtgtccatattgatcca

SEQ ID NO: 538253 - DNA, 25 bp, Homo sapien
cactgagcctgcatcatcatggcat

SEQ ID NO: 538254 - DNA, 25 bp, Homo sapien
ctttcagtagcacaatatcagccac

SEQ ID NO: 538255 - DNA, 25 bp, Homo sapien
tatgccagaaagtttatattgccag

SEQ ID NO: 538256 - DNA, 25 bp, Homo sapien
gaataattgcaacataaccgtctta

SEQ ID NO: 538257 - DNA, 25 bp, Homo sapien
aataattgcaacataaccgtcttac

SEQ ID NO: 538258 - DNA, 25 bp, Homo sapien
gccagattcagttgtcgcttttctg

SEQ ID NO: 538259 - DNA, 25 bp, Homo sapien
gtcgcttttctgcttcaaatctttc

SEQ ID NO: 538260 - DNA, 25 bp, Homo sapien
attcagttgtcgcttttctgcttca

SEQ ID NO: 538261 - DNA, 25 bp, Homo sapien
agttgtcgcttttctgcttcaaatc

SEQ ID NO: 538262 - DNA, 25 bp, Homo sapien
caactgtttctcgaatattctttga

SEQ ID NO: 538263 - DNA, 25 bp, Homo sapien
tgttctgagatttgtcggtatgact

SEQ ID NO: 538264 - DNA, 25 bp, Homo sapien
gatttgtcggtatgactcctagtca

SEQ ID NO: 538265 - DNA, 25 bp, Homo sapien
ctttgatgctgtattggtgatttta

SEQ ID NO: 538266 - DNA, 25 bp, Homo sapien
tctcttcgatgggtctgacatgtga

SEQ ID NO: 538267 - DNA, 25 bp, Homo sapien
ttcccagtcacagggtgactttctc

SEQ ID NO: 538268 - DNA, 25 bp, Homo sapien
gacatgtgatatggatttccaatgg

SEQ ID NO: 538269 - DNA, 25 bp, Homo sapien
gggtgactttctccgagttgctgct

SEQ ID NO: 538270 - DNA, 25 bp, Homo sapien
tgatatggatctgcacaggagacag

SEQ ID NO: 538271 - DNA, 25 bp, Homo sapien
cttgtgcactacttccaagtgcaga

SEQ ID NO: 538272 - DNA, 25 bp, Homo sapien
tgagaatgatatggatctgcacagg

SEQ ID NO: 538273 - DNA, 25 bp, Homo sapien
gacaggaacaactgttctcgaggta

SEQ ID NO: 538274 - DNA, 25 bp, Homo sapien
ctcattgtcttcaataatagttgga

SEQ ID NO: 538275 - DNA, 25 bp, Homo sapien
catgggactcattgtcttcaataat

SEQ ID NO: 538276 - DNA, 25 bp, Homo sapien
tgtcttcaataatagttggaagcat

SEQ ID NO: 538277 - DNA, 25 bp, Homo sapien
cattgtcttcaataatagttggaag

SEQ ID NO: 538278 - DNA, 25 bp, Homo sapien
ccttatggttggctaaaagaggttg

SEQ ID NO: 538279 - DNA, 25 bp, Homo sapien
aagataatcagttgagtgtttgaac

SEQ ID NO: 538280 - DNA, 25 bp, Homo sapien
gactgattcacattccttatggttg

SEQ ID NO: 538281 - DNA, 25 bp, Homo sapien
gaactagattcaacagcaattgttg

SEQ ID NO: 538282 - DNA, 25 bp, Homo sapien
gctgacccttgagtgactgtggtct

SEQ ID NO: 538283 - DNA, 25 bp, Homo sapien
tcataggtggaggcgttaaagagat

SEQ ID NO: 538284 - DNA, 25 bp, Homo sapien
cccttgagtgactgtggtctggtgt

SEQ ID NO: 538285 - DNA, 25 bp, Homo sapien
cagctgctgacccttgagtgactgt

SEQ ID NO: 538286 - DNA, 25 bp, Homo sapien
ctgaaagtacaaggaggaggaggaa

SEQ ID NO: 538287 - DNA, 25 bp, Homo sapien
ggaggaggaggaacaaggtgagtga

SEQ ID NO: 538288 - DNA, 25 bp, Homo sapien
aaggaggaggaggaacaaggtgagt

SEQ ID NO: 538289 - DNA, 25 bp, Homo sapien
aggaggaggaacaaggtgagtgaga

SEQ ID NO: 538290 - DNA, 25 bp, Homo sapien
gaaagaccaaacgtgaaataaggca

SEQ ID NO: 538291 - DNA, 25 bp, Homo sapien
caaacgtgaaataaggcagactgtc

SEQ ID NO: 538292 - DNA, 25 bp, Homo sapien
ttgcactgtcacatataaaggagaa

SEQ ID NO: 538293 - DNA, 25 bp, Homo sapien
catgttgcactgtcacatataaagg

SEQ ID NO: 538294 - DNA, 25 bp, Homo sapien
tgctgtactcacaacttctgagcat

SEQ ID NO: 538295 - DNA, 25 bp, Homo sapien
tactcacaacttctgagcatgattt

SEQ ID NO: 538296 - DNA, 25 bp, Homo sapien
tttctcacagatggtacctgctgta

SEQ ID NO: 538297 - DNA, 25 bp, Homo sapien
taaagtctgcgaggctcagtttctc

SEQ ID NO: 538298 - DNA, 25 bp, Homo sapien
gaacgctgaatccaaccaatgaagt

SEQ ID NO: 538299 - DNA, 25 bp, Homo sapien
caaccaatgaagttttccacttact

SEQ ID NO: 538300 - DNA, 25 bp, Homo sapien
tccacttactattcaccttgctgtg

SEQ ID NO: 538301 - DNA, 25 bp, Homo sapien
cagatactggaacgctgaatccaac

SEQ ID NO: 538302 - DNA, 25 bp, Homo sapien
tataaactccagatgaagattattc

SEQ ID NO: 538303 - DNA, 25 bp, Homo sapien
cctttataaactccagatgaagatt

SEQ ID NO: 538304 - DNA, 25 bp, Homo sapien
taacaaagattcacagtcctatcag

SEQ ID NO: 538305 - DNA, 25 bp, Homo sapien
cagtcctatcagtcacctttataaa

SEQ ID NO: 538306 - DNA, 25 bp, Homo sapien
ctacatgggttgtccagcatgtctt

SEQ ID NO: 538307 - DNA, 25 bp, Homo sapien
tgttggttgtgggtctaagagttat

SEQ ID NO: 538308 - DNA, 25 bp, Homo sapien
gtgttggttgtgggtctaagagtta

SEQ ID NO: 538309 - DNA, 25 bp, Homo sapien
tgtgttggttgtgggtctaagagtt

SEQ ID NO: 538310 - DNA, 25 bp, Homo sapien
tacagagaaacgattaagatgactt

SEQ ID NO: 538311 - DNA, 25 bp, Homo sapien
gactttcgtcttatagttggatacc

SEQ ID NO: 538312 - DNA, 25 bp, Homo sapien
catattctcacctcgtgaactctgg

SEQ ID NO: 538313 - DNA, 25 bp, Homo sapien
catattagaatgagcccttagtagt

SEQ ID NO: 538314 - DNA, 25 bp, Homo sapien
cagcagtgagtgtcgccaaggcagc

SEQ ID NO: 538315 - DNA, 25 bp, Homo sapien
tgtcgccaaggcagcgcttttgttg

SEQ ID NO: 538316 - DNA, 25 bp, Homo sapien
gagtgtcgccaaggcagcgcttttg

SEQ ID NO: 538317 - DNA, 25 bp, Homo sapien
agtgagtgtcgccaaggcagcgctt

SEQ ID NO: 538318 - DNA, 25 bp, Homo sapien
tcatggcagtgatggatcatcaatg

SEQ ID NO: 538319 - DNA, 25 bp, Homo sapien
ggatcatcaatgttcggtagcagac

SEQ ID NO: 538320 - DNA, 25 bp, Homo sapien
cagtgatggatcatcaatgttcggt

SEQ ID NO: 538321 - DNA, 25 bp, Homo sapien
gatggatcatcaatgttcggtagca

SEQ ID NO: 538322 - DNA, 25 bp, Homo sapien
ctggctttaacttattcaggcctgg

SEQ ID NO: 538323 - DNA, 25 bp, Homo sapien
gctttaacttattcaggcctgggta

SEQ ID NO: 538324 - DNA, 25 bp, Homo sapien
tggctttaacttattcaggcctggg

SEQ ID NO: 538325 - DNA, 25 bp, Homo sapien
ctttaacttattcaggcctgggtat

SEQ ID NO: 538326 - DNA, 25 bp, Homo sapien
tcattgcaaatggtccttgatttgt

SEQ ID NO: 538327 - DNA, 25 bp, Homo sapien
gcaaatggtccttgatttgtctcac

SEQ ID NO: 538328 - DNA, 25 bp, Homo sapien
cattgcaaatggtccttgatttgtc

SEQ ID NO: 538329 - DNA, 25 bp, Homo sapien
ttgcaaatggtccttgatttgtctc

SEQ ID NO: 538330 - DNA, 25 bp, Homo sapien
tgtatacatttggtctccagcttga

SEQ ID NO: 538331 - DNA, 25 bp, Homo sapien
tccagcttgacgtactcttatgttt

SEQ ID NO: 538332 - DNA, 25 bp, Homo sapien
ctacctgacctgatttatgagcacc

SEQ ID NO: 538333 - DNA, 25 bp, Homo sapien
gattcttgaaggtccatctacctga

SEQ ID NO: 538334 - DNA, 25 bp, Homo sapien
ttatatagctatagaaggtaagagc

SEQ ID NO: 538335 - DNA, 25 bp, Homo sapien
tgttatatagctatagaaggtaaga

SEQ ID NO: 538336 - DNA, 25 bp, Homo sapien
gttatatagctatagaaggtaagag

SEQ ID NO: 538337 - DNA, 25 bp, Homo sapien
ctgtgcaacacatacttcacttcct

SEQ ID NO: 538338 - DNA, 25 bp, Homo sapien
gacttctgccattgaattccgacat

SEQ ID NO: 538339 - DNA, 25 bp, Homo sapien
tagatgacgtttgactgctgcaact

SEQ ID NO: 538340 - DNA, 25 bp, Homo sapien
agatagatgacgtttgactgctgca

SEQ ID NO: 538341 - DNA, 25 bp, Homo sapien
tgacgtttgactgctgcaactggtg

SEQ ID NO: 538342 - DNA, 25 bp, Homo sapien
tatacagatagatgacgtttgactg

SEQ ID NO: 538343 - DNA, 25 bp, Homo sapien
tcatcatcaataagattaaggccga

SEQ ID NO: 538344 - DNA, 25 bp, Homo sapien
caataagattaaggccgatttctca

SEQ ID NO: 538345 - DNA, 25 bp, Homo sapien
gattaaggccgatttctcaacagaa

SEQ ID NO: 538346 - DNA, 25 bp, Homo sapien
aagtcatcatcaataagattaaggc

SEQ ID NO: 538347 - DNA, 25 bp, Homo sapien
tccaaactcagagcctacctttttc

SEQ ID NO: 538348 - DNA, 25 bp, Homo sapien
cagcaacaacttcattatctctgta

SEQ ID NO: 538349 - DNA, 25 bp, Homo sapien
catgactttatacctcctctgcata

SEQ ID NO: 538350 - DNA, 25 bp, Homo sapien
ctctccagcaacaacttcattatct

SEQ ID NO: 538351 - DNA, 25 bp, Homo sapien
ctccctgtattccagatagacaagc

SEQ ID NO: 538352 - DNA, 25 bp, Homo sapien
tccctgtattccagatagacaagcc

SEQ ID NO: 538353 - DNA, 25 bp, Homo sapien
gtccaataaatgatgtactagaata

SEQ ID NO: 538354 - DNA, 25 bp, Homo sapien
cttgccagatgccatgtatttgttg

SEQ ID NO: 538355 - DNA, 25 bp, Homo sapien
ttggtccaataaatgatgtactaga

SEQ ID NO: 538356 - DNA, 25 bp, Homo sapien
caataaatgatgtactagaatatac

SEQ ID NO: 538357 - DNA, 25 bp, Homo sapien
tcgggtgtatacgtctgtggttgtt

SEQ ID NO: 538358 - DNA, 25 bp, Homo sapien
cgtctgtggttgttgatatctttga

SEQ ID NO: 538359 - DNA, 25 bp, Homo sapien
tatacgtctgtggttgttgatatct

SEQ ID NO: 538360 - DNA, 25 bp, Homo sapien
cttgtcgggtgtatacgtctgtggt

SEQ ID NO: 538361 - DNA, 25 bp, Homo sapien
tacaacttctattagatccctgtct

SEQ ID NO: 538362 - DNA, 25 bp, Homo sapien
tccagtgtatgccttttcagcaaga

SEQ ID NO: 538363 - DNA, 25 bp, Homo sapien
taagtcagcgaagtgcaaagcaagc

SEQ ID NO: 538364 - DNA, 25 bp, Homo sapien
tttcagcaagatttgacaacttaca

SEQ ID NO: 538365 - DNA, 25 bp, Homo sapien
agttataggctttgtatcagttgta

SEQ ID NO: 538366 - DNA, 25 bp, Homo sapien
gtatcagttgtaattaaaatatcat

SEQ ID NO: 538367 - DNA, 25 bp, Homo sapien
cattgtagaactagttatgagaaat

SEQ ID NO: 538368 - DNA, 25 bp, Homo sapien
caacttatcactctctcataccaaa

SEQ ID NO: 538369 - DNA, 25 bp, Homo sapien
caagaaatacacacgagtctggagc

SEQ ID NO: 538370 - DNA, 25 bp, Homo sapien
tagatacagagttccacagtcaaat

SEQ ID NO: 538371 - DNA, 25 bp, Homo sapien
gaagccttaagagaaatgacaaccc

SEQ ID NO: 538372 - DNA, 25 bp, Homo sapien
tcatatactcgtttgctctgtcagc

SEQ ID NO: 538373 - DNA, 25 bp, Homo sapien
gagaatgtgccctcccttgtgaata

SEQ ID NO: 538374 - DNA, 25 bp, Homo sapien
taagcccacgttcaaatggcctaaa

SEQ ID NO: 538375 - DNA, 25 bp, Homo sapien
ggtgtattccttggataagcccacg

SEQ ID NO: 538376 - DNA, 25 bp, Homo sapien
tatcaataatgaggagtacggtttc

SEQ ID NO: 538377 - DNA, 25 bp, Homo sapien
gatatgtgtcttttccgtaggaact

SEQ ID NO: 538378 - DNA, 25 bp, Homo sapien
atatgtgtcttttccgtaggaactt

SEQ ID NO: 538379 - DNA, 25 bp, Homo sapien
tgatatgtgtcttttccgtaggaac

SEQ ID NO: 538380 - DNA, 25 bp, Homo sapien
tatatttgtaacaagagtcaagtgt

SEQ ID NO: 538381 - DNA, 25 bp, Homo sapien
atatttgtaacaagagtcaagtgtt

SEQ ID NO: 538382 - DNA, 25 bp, Homo sapien
tttgtatatttgtaacaagagtcaa

SEQ ID NO: 538383 - DNA, 25 bp, Homo sapien
tgtatatttgtaacaagagtcaagt

SEQ ID NO: 538384 - DNA, 25 bp, Homo sapien
tcagaataactcaatcccgatggga

SEQ ID NO: 538385 - DNA, 25 bp, Homo sapien
tactgctgcaactgaataccctgaa

SEQ ID NO: 538386 - DNA, 25 bp, Homo sapien
gacgtgcaagattttactaagcgct

SEQ ID NO: 538387 - DNA, 25 bp, Homo sapien
gatatgcatggaacaatcgacgtgc

SEQ ID NO: 538388 - DNA, 25 bp, Homo sapien
tctcttcctaattctatttggttta

SEQ ID NO: 538389 - DNA, 25 bp, Homo sapien
tgcaataactgcatttctgctgctt

SEQ ID NO: 538390 - DNA, 25 bp, Homo sapien
ttaagcagcacacattttgccttgg

SEQ ID NO: 538391 - DNA, 25 bp, Homo sapien
tgccttggcaggaatgcaataactg

SEQ ID NO: 538392 - DNA, 25 bp, Homo sapien
tgtgggatagcctcttcccgaagta

SEQ ID NO: 538393 - DNA, 25 bp, Homo sapien
tctgaaaggatggtcctccgagggc

SEQ ID NO: 538394 - DNA, 25 bp, Homo sapien
gaatgcaagtaggaaactcagccct

SEQ ID NO: 538395 - DNA, 25 bp, Homo sapien
tcccgaagtaagtgggaaatccata

SEQ ID NO: 538396 - DNA, 25 bp, Homo sapien
gcaagaccactgaaatctcccctga

SEQ ID NO: 538397 - DNA, 25 bp, Homo sapien
ctcagagcctatgagggactccctc

SEQ ID NO: 538398 - DNA, 25 bp, Homo sapien
tccagtaactcccaaaatgtggcca

SEQ ID NO: 538399 - DNA, 25 bp, Homo sapien
atgtggccagttccaacaagtcttc

SEQ ID NO: 538400 - DNA, 25 bp, Homo sapien
tttggtgcttttgacacaaacgtgg

SEQ ID NO: 538401 - DNA, 25 bp, Homo sapien
gcttttgacacaaacgtggccagtg

SEQ ID NO: 538402 - DNA, 25 bp, Homo sapien
ttttgacacaaacgtggccagtgga

SEQ ID NO: 538403 - DNA, 25 bp, Homo sapien
ggtgcttttgacacaaacgtggcca

SEQ ID NO: 538404 - DNA, 25 bp, Homo sapien
tcttcatccatccaataacccctcc

SEQ ID NO: 538405 - DNA, 25 bp, Homo sapien
atggtgtcagggcaagagtcgtgtc

SEQ ID NO: 538406 - DNA, 25 bp, Homo sapien
ggtgtcagggcaagagtcgtgtcca

SEQ ID NO: 538407 - DNA, 25 bp, Homo sapien
tggatgtgaatggtgtcagggcaag

SEQ ID NO: 538408 - DNA, 25 bp, Homo sapien
gacaatggatgtgaatggtgtcagg

SEQ ID NO: 538409 - DNA, 25 bp, Homo sapien
ggcattgcacagaacctgacataaa

SEQ ID NO: 538410 - DNA, 25 bp, Homo sapien
tgggaagggaattatcaacaaactg

SEQ ID NO: 538411 - DNA, 25 bp, Homo sapien
tattgaaagtaaaggtgtggcagtc

SEQ ID NO: 538412 - DNA, 25 bp, Homo sapien
caaggattagatataccggagaaga

SEQ ID NO: 538413 - DNA, 25 bp, Homo sapien
tgccaatggctggatatgaaaggaa

SEQ ID NO: 538414 - DNA, 25 bp, Homo sapien
caatggctggatatgaaaggaagaa

SEQ ID NO: 538415 - DNA, 25 bp, Homo sapien
tatcctgccaatggctggatatgaa

SEQ ID NO: 538416 - DNA, 25 bp, Homo sapien
ctatcctgccaatggctggatatga

SEQ ID NO: 538417 - DNA, 25 bp, Homo sapien
agagggaggcaccagtcctagggac

SEQ ID NO: 538418 - DNA, 25 bp, Homo sapien
gcaccagtcctagggacatcagtga

SEQ ID NO: 538419 - DNA, 25 bp, Homo sapien
gaggcaccagtcctagggacatcag

SEQ ID NO: 538420 - DNA, 25 bp, Homo sapien
accagtcctagggacatcagtgagc

SEQ ID NO: 538421 - DNA, 25 bp, Homo sapien
tttttggttgctccagccagaagcc

SEQ ID NO: 538422 - DNA, 25 bp, Homo sapien
tagaggattccttttttggttgctc

SEQ ID NO: 538423 - DNA, 25 bp, Homo sapien
aggattccttttttggttgctccag

SEQ ID NO: 538424 - DNA, 25 bp, Homo sapien
tccttttttggttgctccagccaga

SEQ ID NO: 538425 - DNA, 25 bp, Homo sapien
taaacagccaatctgtgcttaattc

SEQ ID NO: 538426 - DNA, 25 bp, Homo sapien
gcccatacgtgccttcatgtgtaaa

SEQ ID NO: 538427 - DNA, 25 bp, Homo sapien
ttttcttaaattgcccatacgtgcc

SEQ ID NO: 538428 - DNA, 25 bp, Homo sapien
taattccactatttagagactcata

SEQ ID NO: 538429 - DNA, 25 bp, Homo sapien
gggtttcagtgatcccatgccacaa

SEQ ID NO: 538430 - DNA, 25 bp, Homo sapien
gcctatgctatgtacagcgtgacag

SEQ ID NO: 538431 - DNA, 25 bp, Homo sapien
tatggatgtggctcattgcacctgg

SEQ ID NO: 538432 - DNA, 25 bp, Homo sapien
gatgcgctcttgcttcgttgctcag

SEQ ID NO: 538433 - DNA, 25 bp, Homo sapien
gggacaggtagcactattatgaggg

SEQ ID NO: 538434 - DNA, 25 bp, Homo sapien
cttagattggccttcctcaagcttg

SEQ ID NO: 538435 - DNA, 25 bp, Homo sapien
catgttcctacatcttagattggcc

SEQ ID NO: 538436 - DNA, 25 bp, Homo sapien
ccgactgacactcatgttcctacat

SEQ ID NO: 538437 - DNA, 25 bp, Homo sapien
ggtctatcttcaaaataggtatgaa

SEQ ID NO: 538438 - DNA, 25 bp, Homo sapien
ggtatgaattgctgctgctatatca

SEQ ID NO: 538439 - DNA, 25 bp, Homo sapien
tatcaataatatgcaatctatccag

SEQ ID NO: 538440 - DNA, 25 bp, Homo sapien
caatactggctgattttggagtgtg

SEQ ID NO: 538441 - DNA, 25 bp, Homo sapien
cacaacagagtatgttgcctgtttc

SEQ ID NO: 538442 - DNA, 25 bp, Homo sapien
ttcagagtgtcatagggcacaacag

SEQ ID NO: 538443 - DNA, 25 bp, Homo sapien
aggcttcatgtgcttcagagtgtca

SEQ ID NO: 538444 - DNA, 25 bp, Homo sapien
taaacagtcgtctaaaggcttcatg

SEQ ID NO: 538445 - DNA, 25 bp, Homo sapien
ctccagtgacactaagtgacagcat

SEQ ID NO: 538446 - DNA, 25 bp, Homo sapien
tctccagtgacactaagtgacagca

SEQ ID NO: 538447 - DNA, 25 bp, Homo sapien
ttctccagtgacactaagtgacagc

SEQ ID NO: 538448 - DNA, 25 bp, Homo sapien
cattaattgcctctgtcatgacagt

SEQ ID NO: 538449 - DNA, 25 bp, Homo sapien
tcatgacagtttgggccggagcaaa

SEQ ID NO: 538450 - DNA, 25 bp, Homo sapien
taatgtatgagacctccaaggttca

SEQ ID NO: 538451 - DNA, 25 bp, Homo sapien
tgaagtttcccaagcagtcggctga

SEQ ID NO: 538452 - DNA, 25 bp, Homo sapien
atctccaagctgaatgaacaggatg

SEQ ID NO: 538453 - DNA, 25 bp, Homo sapien
aacaggatgtaatcacagcagcgca

SEQ ID NO: 538454 - DNA, 25 bp, Homo sapien
gaaggaggtgagtgtatagtctaaa

SEQ ID NO: 538455 - DNA, 25 bp, Homo sapien
ggtgagtgtatagtctaaagataaa

SEQ ID NO: 538456 - DNA, 25 bp, Homo sapien
cagagacacagaatgcataaggaag

SEQ ID NO: 538457 - DNA, 25 bp, Homo sapien
gacatacaaaatctggttcaccaaa

SEQ ID NO: 538458 - DNA, 25 bp, Homo sapien
tatgtgtcatcagctttgagaaagg

SEQ ID NO: 538459 - DNA, 25 bp, Homo sapien
aatatgttctccctaaaacaggaag

SEQ ID NO: 538460 - DNA, 25 bp, Homo sapien
ctgataacccactatcattggacca

SEQ ID NO: 538461 - DNA, 25 bp, Homo sapien
ataacccactatcattggaccaacc

SEQ ID NO: 538462 - DNA, 25 bp, Homo sapien
taaaccatttaaatttagcagtgga

SEQ ID NO: 538463 - DNA, 25 bp, Homo sapien
tagcagtggagggttttataccaac

SEQ ID NO: 538464 - DNA, 25 bp, Homo sapien
ctacctccaggcatgatctttgtca

SEQ ID NO: 538465 - DNA, 25 bp, Homo sapien
tggctgcatctccttgatggtaggg

SEQ ID NO: 538466 - DNA, 25 bp, Homo sapien
catctccttgatggtagggactctg

SEQ ID NO: 538467 - DNA, 25 bp, Homo sapien
ggtggagtgattgctacctccaggc

SEQ ID NO: 538468 - DNA, 25 bp, Homo sapien
gctcactgccttgtgtaatagtccc

SEQ ID NO: 538469 - DNA, 25 bp, Homo sapien
ctgtttcagacacaatgtgtcctcc

SEQ ID NO: 538470 - DNA, 25 bp, Homo sapien
gcccacacagtctgtagagagctca

SEQ ID NO: 538471 - DNA, 25 bp, Homo sapien
ggcccccgacttgcaatgttttcag

SEQ ID NO: 538472 - DNA, 25 bp, Homo sapien
gacagaattcagccaaaaacattcc

SEQ ID NO: 538473 - DNA, 25 bp, Homo sapien
tgacagaattcagccaaaaacattc

SEQ ID NO: 538474 - DNA, 25 bp, Homo sapien
cctataaggaaagcacagagctccc

SEQ ID NO: 538475 - DNA, 25 bp, Homo sapien
aaggaaagcacagagctcccacagg

SEQ ID NO: 538476 - DNA, 25 bp, Homo sapien
gtttcctataaggaaagcacagagc

SEQ ID NO: 538477 - DNA, 25 bp, Homo sapien
taagcactctgggtgatctgctttc

SEQ ID NO: 538478 - DNA, 25 bp, Homo sapien
tttgtcaagtgtctcccctataaag

SEQ ID NO: 538479 - DNA, 25 bp, Homo sapien
tactgtcacttcccacgcctttcca

SEQ ID NO: 538480 - DNA, 25 bp, Homo sapien
tgtcacttcccacgcctttccatat

SEQ ID NO: 538481 - DNA, 25 bp, Homo sapien
ttgtcaagtgtctcccctataaagt

SEQ ID NO: 538482 - DNA, 25 bp, Homo sapien
caacttgctgtattagaaattcagc

SEQ ID NO: 538483 - DNA, 25 bp, Homo sapien
gcacaaagacttagactagaaaaaa

SEQ ID NO: 538484 - DNA, 25 bp, Homo sapien
acttgctgtattagaaattcagcac

SEQ ID NO: 538485 - DNA, 25 bp, Homo sapien
aggcacaaagacttagactagaaaa

SEQ ID NO: 538486 - DNA, 25 bp, Homo sapien
ccatcgtagtattccccaaatatag

SEQ ID NO: 538487 - DNA, 25 bp, Homo sapien
tattccccaaatatagcgccattct

SEQ ID NO: 538488 - DNA, 25 bp, Homo sapien
aatatagcgccattcttggaaaata

SEQ ID NO: 538489 - DNA, 25 bp, Homo sapien
cgtagtattccccaaatatagcgcc

SEQ ID NO: 538490 - DNA, 25 bp, Homo sapien
tgccatagactttgattcttctgat

SEQ ID NO: 538491 - DNA, 25 bp, Homo sapien
catttgtggtttataagaggaggtc

SEQ ID NO: 538492 - DNA, 25 bp, Homo sapien
ttcttctgatgagtatgggcaaagt

SEQ ID NO: 538493 - DNA, 25 bp, Homo sapien
ggaataattcacctttctagatgcc

SEQ ID NO: 538494 - DNA, 25 bp, Homo sapien
gatgctcttcctgaaagatataggg

SEQ ID NO: 538495 - DNA, 25 bp, Homo sapien
tactgtgatgctcttcctgaaagat

SEQ ID NO: 538496 - DNA, 25 bp, Homo sapien
ggcttgtacagattgttctaatgag

SEQ ID NO: 538497 - DNA, 25 bp, Homo sapien
ctaatgagagtaacgcagagagcta

SEQ ID NO: 538498 - DNA, 25 bp, Homo sapien
ctaactagcaaatcagggccggacc

SEQ ID NO: 538499 - DNA, 25 bp, Homo sapien
cttcctaactagcaaatcagggccg

SEQ ID NO: 538500 - DNA, 25 bp, Homo sapien
tcctaactagcaaatcagggccgga

SEQ ID NO: 538501 - DNA, 25 bp, Homo sapien
actagcaaatcagggccggaccatt

SEQ ID NO: 538502 - DNA, 25 bp, Homo sapien
ggttaaatttcatctctggtatcat

SEQ ID NO: 538503 - DNA, 25 bp, Homo sapien
ctggggaaagagctaaagcctggtt

SEQ ID NO: 538504 - DNA, 25 bp, Homo sapien
agagctaaagcctggttaaatttca

SEQ ID NO: 538505 - DNA, 25 bp, Homo sapien
aagcctggttaaatttcatctctgg

SEQ ID NO: 538506 - DNA, 25 bp, Homo sapien
gtaatggtactttgtgtgcttgtcc

SEQ ID NO: 538507 - DNA, 25 bp, Homo sapien
ctcggtaatggtactttgtgtgctt

SEQ ID NO: 538508 - DNA, 25 bp, Homo sapien
ggtaatggtactttgtgtgcttgtc

SEQ ID NO: 538509 - DNA, 25 bp, Homo sapien
tcggtaatggtactttgtgtgcttg

SEQ ID NO: 538510 - DNA, 25 bp, Homo sapien
ggaacaagcttttcgtccagtggta

SEQ ID NO: 538511 - DNA, 25 bp, Homo sapien
gcttagtggtataacatggccttca

SEQ ID NO: 538512 - DNA, 25 bp, Homo sapien
gacaagcattgtgaaccggagttag

SEQ ID NO: 538513 - DNA, 25 bp, Homo sapien
caaagggagaccacatgcagagaca

SEQ ID NO: 538514 - DNA, 25 bp, Homo sapien
aatcacaaacgtgtccagtgacagc

SEQ ID NO: 538515 - DNA, 25 bp, Homo sapien
ctttgtacggtcttcatttctagga

SEQ ID NO: 538516 - DNA, 25 bp, Homo sapien
catttctttgtacggtcttcatttc

SEQ ID NO: 538517 - DNA, 25 bp, Homo sapien
tctaggaatcacaaacgtgtccagt

SEQ ID NO: 538518 - DNA, 25 bp, Homo sapien
tgtgtcctttacagtcttaaacctc

SEQ ID NO: 538519 - DNA, 25 bp, Homo sapien
atgtgtcctttacagtcttaaacct

SEQ ID NO: 538520 - DNA, 25 bp, Homo sapien
tcatgtgtcctttacagtcttaaac

SEQ ID NO: 538521 - DNA, 25 bp, Homo sapien
catgtgtcctttacagtcttaaacc

SEQ ID NO: 538522 - DNA, 25 bp, Homo sapien
tttctcatgctccatctgcgagtta

SEQ ID NO: 538523 - DNA, 25 bp, Homo sapien
tcccacaaagatagttgctggaact

SEQ ID NO: 538524 - DNA, 25 bp, Homo sapien
ttagtgcctagtagaggatctcctc

SEQ ID NO: 538525 - DNA, 25 bp, Homo sapien
ctgcgagttactaatccaagaactg

SEQ ID NO: 538526 - DNA, 25 bp, Homo sapien
ctaatcttcatcacttcctgattgc

SEQ ID NO: 538527 - DNA, 25 bp, Homo sapien
aatcttcatcacttcctgattgctg

SEQ ID NO: 538528 - DNA, 25 bp, Homo sapien
tcttcatcacttcctgattgctgac

SEQ ID NO: 538529 - DNA, 25 bp, Homo sapien
ttcatcacttcctgattgctgacat

SEQ ID NO: 538530 - DNA, 25 bp, Homo sapien
catttgaatagtcctgtggatcaac

SEQ ID NO: 538531 - DNA, 25 bp, Homo sapien
tgctagtttgatgctgtgattcttc

SEQ ID NO: 538532 - DNA, 25 bp, Homo sapien
ggtctggaagttgctagtttgatgc

SEQ ID NO: 538533 - DNA, 25 bp, Homo sapien
gggactctggcaaatttgcttggtc

SEQ ID NO: 538534 - DNA, 25 bp, Homo sapien
attcttggtggagagaatactaatc

SEQ ID NO: 538535 - DNA, 25 bp, Homo sapien
ttcttggtggagagaatactaatcc

SEQ ID NO: 538536 - DNA, 25 bp, Homo sapien
aattcttggtggagagaatactaat

SEQ ID NO: 538537 - DNA, 25 bp, Homo sapien
ggctctgtccagtccaattactgaa

SEQ ID NO: 538538 - DNA, 25 bp, Homo sapien
gacagtcttgagaattacattgcca

SEQ ID NO: 538539 - DNA, 25 bp, Homo sapien
gctgaattaaatagctcaccctaga

SEQ ID NO: 538540 - DNA, 25 bp, Homo sapien
tacattgccaaatggtctaccagat

SEQ ID NO: 538541 - DNA, 25 bp, Homo sapien
caataatgggtggatgtaaactccc

SEQ ID NO: 538542 - DNA, 25 bp, Homo sapien
aactccctaaataatcatagattgg

SEQ ID NO: 538543 - DNA, 25 bp, Homo sapien
taagggctgttgcatcaataatggg

SEQ ID NO: 538544 - DNA, 25 bp, Homo sapien
tattgtgtagcagtttcaaaagcac

SEQ ID NO: 538545 - DNA, 25 bp, Homo sapien
aggatggcaaggttggctttcagag

SEQ ID NO: 538546 - DNA, 25 bp, Homo sapien
aaggatggcaaggttggctttcaga

SEQ ID NO: 538547 - DNA, 25 bp, Homo sapien
ggatggcaaggttggctttcagaga

SEQ ID NO: 538548 - DNA, 25 bp, Homo sapien
tctgaaaggatggcaaggttggctt

SEQ ID NO: 538549 - DNA, 25 bp, Homo sapien
taggatgatgtttataatcctcata

SEQ ID NO: 538550 - DNA, 25 bp, Homo sapien
caccacctctaggatgatgtttata

SEQ ID NO: 538551 - DNA, 25 bp, Homo sapien
catatgcttctccattgtcatgctg

SEQ ID NO: 538552 - DNA, 25 bp, Homo sapien
gtttgacactgaacaccacctctag

SEQ ID NO: 538553 - DNA, 25 bp, Homo sapien
cttttctcatttggatcgaagtcca

SEQ ID NO: 538554 - DNA, 25 bp, Homo sapien
tctcatttggatcgaagtccaccag

SEQ ID NO: 538555 - DNA, 25 bp, Homo sapien
ttctcatttggatcgaagtccacca

SEQ ID NO: 538556 - DNA, 25 bp, Homo sapien
tttctcatttggatcgaagtccacc

SEQ ID NO: 538557 - DNA, 25 bp, Homo sapien
gattagataatttggcagctcttca

SEQ ID NO: 538558 - DNA, 25 bp, Homo sapien
tcgattagataatttggcagctctt

SEQ ID NO: 538559 - DNA, 25 bp, Homo sapien
ttcatatgggctacataaattggca

SEQ ID NO: 538560 - DNA, 25 bp, Homo sapien
tttcagcaagagagttcatcagctg

SEQ ID NO: 538561 - DNA, 25 bp, Homo sapien
gatatctccatgctgacaatctgac

SEQ ID NO: 538562 - DNA, 25 bp, Homo sapien
agatatctccatgctgacaatctga

SEQ ID NO: 538563 - DNA, 25 bp, Homo sapien
aagatatctccatgctgacaatctg

SEQ ID NO: 538564 - DNA, 25 bp, Homo sapien
ccaagatatctccatgctgacaatc

SEQ ID NO: 538565 - DNA, 25 bp, Homo sapien
cagtcattaagagtggaagctacaa

SEQ ID NO: 538566 - DNA, 25 bp, Homo sapien
cattgaataaaaacagtgtgctcct

SEQ ID NO: 538567 - DNA, 25 bp, Homo sapien
tatctcctagctccaatcctggttc

SEQ ID NO: 538568 - DNA, 25 bp, Homo sapien
gagaggtgatgactacagttcagtc

SEQ ID NO: 538569 - DNA, 25 bp, Homo sapien
cagtaactatgcaattgggacagcc

SEQ ID NO: 538570 - DNA, 25 bp, Homo sapien
ttctccatggccctagcactctatg

SEQ ID NO: 538571 - DNA, 25 bp, Homo sapien
gcactctatgcccacggattaaatt

SEQ ID NO: 538572 - DNA, 25 bp, Homo sapien
gattaaatttgctaaaccattccag

SEQ ID NO: 538573 - DNA, 25 bp, Homo sapien
tgacagctgacacacatttttacct

SEQ ID NO: 538574 - DNA, 25 bp, Homo sapien
tcttctaaggttattgacagctgac

SEQ ID NO: 538575 - DNA, 25 bp, Homo sapien
ggagagccagaagcgctacctgctc

SEQ ID NO: 538576 - DNA, 25 bp, Homo sapien
caggagagccagaagcgctacctgc

SEQ ID NO: 538577 - DNA, 25 bp, Homo sapien
aacagaaactgggttctctcaccat

SEQ ID NO: 538578 - DNA, 25 bp, Homo sapien
tacgagagtggtacttcaatgccag

SEQ ID NO: 538579 - DNA, 25 bp, Homo sapien
ccttcattcaggttcttacgagagt

SEQ ID NO: 538580 - DNA, 25 bp, Homo sapien
tttgagcagcattgagttttacccc

SEQ ID NO: 538581 - DNA, 25 bp, Homo sapien
accttgattgtgtcactctcagtac

SEQ ID NO: 538582 - DNA, 25 bp, Homo sapien
gaggccctgaggtttaccttgattg

SEQ ID NO: 538583 - DNA, 25 bp, Homo sapien
ccctcaatatctgcattcgagacat

SEQ ID NO: 538584 - DNA, 25 bp, Homo sapien
aaaataaacttgatcacctagcctg

SEQ ID NO: 538585 - DNA, 25 bp, Homo sapien
gaggctaaaccagtccttcctgtaa

SEQ ID NO: 538586 - DNA, 25 bp, Homo sapien
tcaggacacactcccgaagagtaaa

SEQ ID NO: 538587 - DNA, 25 bp, Homo sapien
gacaaaggtctggatagccttgcaa

SEQ ID NO: 538588 - DNA, 25 bp, Homo sapien
tgccctccctaagatggaaaacagg

SEQ ID NO: 538589 - DNA, 25 bp, Homo sapien
caagccgcttcataggtctgcaggg

SEQ ID NO: 538590 - DNA, 25 bp, Homo sapien
caattatgcaaaacatcaagccgct

SEQ ID NO: 538591 - DNA, 25 bp, Homo sapien
tctgcagggactggaaagaatatct

SEQ ID NO: 538592 - DNA, 25 bp, Homo sapien
gagaaccaatcagtagcaacccaat

SEQ ID NO: 538593 - DNA, 25 bp, Homo sapien
catttgcattaacaatatctgccat

SEQ ID NO: 538594 - DNA, 25 bp, Homo sapien
tgtgtcatttgcattaacaatatct

SEQ ID NO: 538595 - DNA, 25 bp, Homo sapien
gtcatttgcattaacaatatctgcc

SEQ ID NO: 538596 - DNA, 25 bp, Homo sapien
tgtcatttgcattaacaatatctgc

SEQ ID NO: 538597 - DNA, 25 bp, Homo sapien
agtatggacaagcagacctactgct

SEQ ID NO: 538598 - DNA, 25 bp, Homo sapien
gtttcagagctgtccagagtagtgt

SEQ ID NO: 538599 - DNA, 25 bp, Homo sapien
gataatcgccaagataagtatggac

SEQ ID NO: 538600 - DNA, 25 bp, Homo sapien
cctgagcgagcattccagagatggg

SEQ ID NO: 538601 - DNA, 25 bp, Homo sapien
caagttccgcctcctgggttcacgt

SEQ ID NO: 538602 - DNA, 25 bp, Homo sapien
cagtggccaagatctcggctactgc

SEQ ID NO: 538603 - DNA, 25 bp, Homo sapien
ttccgcctcctgggttcacgtcatt

SEQ ID NO: 538604 - DNA, 25 bp, Homo sapien
ctgagtatctgtgactacatgcggc

SEQ ID NO: 538605 - DNA, 25 bp, Homo sapien
tattcaaagagtggactgctgagga

SEQ ID NO: 538606 - DNA, 25 bp, Homo sapien
tgaggaagtgagtagttaagatgta

SEQ ID NO: 538607 - DNA, 25 bp, Homo sapien
gcgtataggatgctgatgagtatca

SEQ ID NO: 538608 - DNA, 25 bp, Homo sapien
catgtagcatggaatggaaatatga

SEQ ID NO: 538609 - DNA, 25 bp, Homo sapien
ctattatatttaattcttcaccttt

SEQ ID NO: 538610 - DNA, 25 bp, Homo sapien
tattatatttaattcttcacctttg

SEQ ID NO: 538611 - DNA, 25 bp, Homo sapien
ctgaagggcttacttctcccatcca

SEQ ID NO: 538612 - DNA, 25 bp, Homo sapien
tttatacatcaagtggtcagtgatg

SEQ ID NO: 538613 - DNA, 25 bp, Homo sapien
cagtgatgttaaacttgttagaacc

SEQ ID NO: 538614 - DNA, 25 bp, Homo sapien
tagaacctatgcgtccaatggccat

SEQ ID NO: 538615 - DNA, 25 bp, Homo sapien
tactcttcatattaattccatcact

SEQ ID NO: 538616 - DNA, 25 bp, Homo sapien
tctaagcaggcttgctctgcagctg

SEQ ID NO: 538617 - DNA, 25 bp, Homo sapien
agctgctaggatgccctccaaagga

SEQ ID NO: 538618 - DNA, 25 bp, Homo sapien
tgcagctgctaggatgccctccaaa

SEQ ID NO: 538619 - DNA, 25 bp, Homo sapien
ctaggatgccctccaaaggattcat

SEQ ID NO: 538620 - DNA, 25 bp, Homo sapien
tggagagggagcaaacaaaagttat

SEQ ID NO: 538621 - DNA, 25 bp, Homo sapien
ctgaatggagagggagcaaacaaaa

SEQ ID NO: 538622 - DNA, 25 bp, Homo sapien
aatggagagggagcaaacaaaagtt

SEQ ID NO: 538623 - DNA, 25 bp, Homo sapien
gagagggagcaaacaaaagttatta

SEQ ID NO: 538624 - DNA, 25 bp, Homo sapien
tcatcaccatcgtaatagcaccttt

SEQ ID NO: 538625 - DNA, 25 bp, Homo sapien
tctgtgagactccttcaaaactgag

SEQ ID NO: 538626 - DNA, 25 bp, Homo sapien
gagctgctacagataatcatttcac

SEQ ID NO: 538627 - DNA, 25 bp, Homo sapien
gcaattttaggctgcattgcatcat

SEQ ID NO: 538628 - DNA, 25 bp, Homo sapien
aaactaatgaattgcgattagtgaa

SEQ ID NO: 538629 - DNA, 25 bp, Homo sapien
aatgaattgcgattagtgaatttca

SEQ ID NO: 538630 - DNA, 25 bp, Homo sapien
tgaattgcgattagtgaatttcaaa

SEQ ID NO: 538631 - DNA, 25 bp, Homo sapien
ctaatgaattgcgattagtgaattt

SEQ ID NO: 538632 - DNA, 25 bp, Homo sapien
ctaaagctctcagccagaaagtggt

SEQ ID NO: 538633 - DNA, 25 bp, Homo sapien
ttcatcacctaaagctctcagccag

SEQ ID NO: 538634 - DNA, 25 bp, Homo sapien
ccagaaagtggtgacagaggcggct

SEQ ID NO: 538635 - DNA, 25 bp, Homo sapien
ctgcccttcatcacctaaagctctc

SEQ ID NO: 538636 - DNA, 25 bp, Homo sapien
gaatcacaaagctgtctgctaaacc

SEQ ID NO: 538637 - DNA, 25 bp, Homo sapien
ctaaaaaggctcttgcaaagaacgg

SEQ ID NO: 538638 - DNA, 25 bp, Homo sapien
gaagggagataaccctgcagaacat

SEQ ID NO: 538639 - DNA, 25 bp, Homo sapien
tggagatgctaacgcagaccaggca

SEQ ID NO: 538640 - DNA, 25 bp, Homo sapien
taataggactatttgcatttggaaa

SEQ ID NO: 538641 - DNA, 25 bp, Homo sapien
tcaatatgaggtaattgaggtgact

SEQ ID NO: 538642 - DNA, 25 bp, Homo sapien
tagagaagggtgctttaggagccat

SEQ ID NO: 538643 - DNA, 25 bp, Homo sapien
taagggatgcagatattgtaatagg

SEQ ID NO: 538644 - DNA, 25 bp, Homo sapien
gcccttgtagaaggcagtcattggc

SEQ ID NO: 538645 - DNA, 25 bp, Homo sapien
tgaacaggagggtgttcgcactggg

SEQ ID NO: 538646 - DNA, 25 bp, Homo sapien
catgaagtgaacaggagggtgttcg

SEQ ID NO: 538647 - DNA, 25 bp, Homo sapien
aagtgaacaggagggtgttcgcact

SEQ ID NO: 538648 - DNA, 25 bp, Homo sapien
tgaagtgaacaggagggtgttcgca

SEQ ID NO: 538649 - DNA, 25 bp, Homo sapien
cttctttcagctttggatacttcca

SEQ ID NO: 538650 - DNA, 25 bp, Homo sapien
caatttgtgatcttatagttgatac

SEQ ID NO: 538651 - DNA, 25 bp, Homo sapien
cattctcctaggcagttgctctccc

SEQ ID NO: 538652 - DNA, 25 bp, Homo sapien
ttccaatttgtgatcttatagttga

SEQ ID NO: 538653 - DNA, 25 bp, Homo sapien
gaagggcaggtgttgcaggtggagc

SEQ ID NO: 538654 - DNA, 25 bp, Homo sapien
cctggtaaattcaccaagacgctga

SEQ ID NO: 538655 - DNA, 25 bp, Homo sapien
ggtaaattcaccaagacgctgaggt

SEQ ID NO: 538656 - DNA, 25 bp, Homo sapien
ggccctggtaaattcaccaagacgc

SEQ ID NO: 538657 - DNA, 25 bp, Homo sapien
tcatcccgggccctggtaaattcac

SEQ ID NO: 538658 - DNA, 25 bp, Homo sapien
gccattttaaagacaccttctacag

SEQ ID NO: 538659 - DNA, 25 bp, Homo sapien
gatatggatataactctcacctagg

SEQ ID NO: 538660 - DNA, 25 bp, Homo sapien
tagccaggtcattgtcacgcattgc

SEQ ID NO: 538661 - DNA, 25 bp, Homo sapien
tagggatgtgttaataggtcaagcc

SEQ ID NO: 538662 - DNA, 25 bp, Homo sapien
gataacctagtggagctttgggctt

SEQ ID NO: 538663 - DNA, 25 bp, Homo sapien
cctagtggagctttgggctttgaat

SEQ ID NO: 538664 - DNA, 25 bp, Homo sapien
tctaaaagataacctagtggagctt

SEQ ID NO: 538665 - DNA, 25 bp, Homo sapien
caatctaaaagataacctagtggag

SEQ ID NO: 538666 - DNA, 25 bp, Homo sapien
tttcaatgtcctaatgtgcactcag

SEQ ID NO: 538667 - DNA, 25 bp, Homo sapien
aattaaatgtgctttcaatgtccta

SEQ ID NO: 538668 - DNA, 25 bp, Homo sapien
cctaatgtgcactcagatatacaaa

SEQ ID NO: 538669 - DNA, 25 bp, Homo sapien
cagatatacaaaccaaggttcttga

SEQ ID NO: 538670 - DNA, 25 bp, Homo sapien
ggctgtgacaggctctaataacaac

SEQ ID NO: 538671 - DNA, 25 bp, Homo sapien
tcttccaacagcaaccaggctgacg

SEQ ID NO: 538672 - DNA, 25 bp, Homo sapien
tgacaggctctaataacaacaccag

SEQ ID NO: 538673 - DNA, 25 bp, Homo sapien
agccctcttccaacagcaaccaggc

SEQ ID NO: 538674 - DNA, 25 bp, Homo sapien
ctgcgggagggacatatgtgccctc

SEQ ID NO: 538675 - DNA, 25 bp, Homo sapien
cgggagggacatatgtgccctcatg

SEQ ID NO: 538676 - DNA, 25 bp, Homo sapien
tgcgggagggacatatgtgccctca

SEQ ID NO: 538677 - DNA, 25 bp, Homo sapien
gcgggagggacatatgtgccctcat

SEQ ID NO: 538678 - DNA, 25 bp, Homo sapien
gcagggctgctaacatcaggctcca

SEQ ID NO: 538679 - DNA, 25 bp, Homo sapien
aggcagggctgctaacatcaggctc

SEQ ID NO: 538680 - DNA, 25 bp, Homo sapien
tacagagaaataggcagggctgcta

SEQ ID NO: 538681 - DNA, 25 bp, Homo sapien
cagggctgctaacatcaggctccat

SEQ ID NO: 538682 - DNA, 25 bp, Homo sapien
caaggttacttttggcagcgagaaa

SEQ ID NO: 538683 - DNA, 25 bp, Homo sapien
taaaccatcaattgccaaggttact

SEQ ID NO: 538684 - DNA, 25 bp, Homo sapien
tagaccccaagagaagtgcgaagaa

SEQ ID NO: 538685 - DNA, 25 bp, Homo sapien
taagatgactctttctaccctcctg

SEQ ID NO: 538686 - DNA, 25 bp, Homo sapien
caaggcgtcctcttgattctttgct

SEQ ID NO: 538687 - DNA, 25 bp, Homo sapien
tcccgctggtgacgtatttctaacc

SEQ ID NO: 538688 - DNA, 25 bp, Homo sapien
tccagcaacaggcttagctttcaac

SEQ ID NO: 538689 - DNA, 25 bp, Homo sapien
gcaagactcagttgccttgtggtgt

SEQ ID NO: 538690 - DNA, 25 bp, Homo sapien
tagatctcagtcctgctaagaaaag

SEQ ID NO: 538691 - DNA, 25 bp, Homo sapien
ttttgcctgaccctatggaagctgg

SEQ ID NO: 538692 - DNA, 25 bp, Homo sapien
tgagaactaagatacatacctgaag

SEQ ID NO: 538693 - DNA, 25 bp, Homo sapien
gaagctgggcttaagtaaccttatg

SEQ ID NO: 538694 - DNA, 25 bp, Homo sapien
cagcctgctcctgattcaccccagg

SEQ ID NO: 538695 - DNA, 25 bp, Homo sapien
gcctgctcctgattcaccccaggta

SEQ ID NO: 538696 - DNA, 25 bp, Homo sapien
ctgctcctgattcaccccaggtatt

SEQ ID NO: 538697 - DNA, 25 bp, Homo sapien
gctcctgattcaccccaggtattca

SEQ ID NO: 538698 - DNA, 25 bp, Homo sapien
tggtccccgaaaaatgcaagttcat

SEQ ID NO: 538699 - DNA, 25 bp, Homo sapien
cttgggatagagtcaagaactgagg

SEQ ID NO: 538700 - DNA, 25 bp, Homo sapien
ctagggcactctgatccagctgctg

SEQ ID NO: 538701 - DNA, 25 bp, Homo sapien
aactgagggaagacacctagggcac

SEQ ID NO: 538702 - DNA, 25 bp, Homo sapien
agcagtcagcctgaagcaatgtgcc

SEQ ID NO: 538703 - DNA, 25 bp, Homo sapien
gcagcagtcagcctgaagcaatgtg

SEQ ID NO: 538704 - DNA, 25 bp, Homo sapien
agtcagcctgaagcaatgtgcccat

SEQ ID NO: 538705 - DNA, 25 bp, Homo sapien
tgcatagcagcagtcagcctgaagc

SEQ ID NO: 538706 - DNA, 25 bp, Homo sapien
taatccttattggtacagaatcccc

SEQ ID NO: 538707 - DNA, 25 bp, Homo sapien
accagagtcccgaaaagagacaggg

SEQ ID NO: 538708 - DNA, 25 bp, Homo sapien
tatgccttggcaataacgtaccttt

SEQ ID NO: 538709 - DNA, 25 bp, Homo sapien
tatggaagtcaatatcctaactggc

SEQ ID NO: 538710 - DNA, 25 bp, Homo sapien
gtgtaaatacaagatcggagcctga

SEQ ID NO: 538711 - DNA, 25 bp, Homo sapien
gattcaaagggcaagtaacctcagt

SEQ ID NO: 538712 - DNA, 25 bp, Homo sapien
gcatgggctctggtgttagaccaca

SEQ ID NO: 538713 - DNA, 25 bp, Homo sapien
caggcactaccttgagcataatagg

SEQ ID NO: 538714 - DNA, 25 bp, Homo sapien
ggtaatttaaactcacatagtggtg

SEQ ID NO: 538715 - DNA, 25 bp, Homo sapien
cacattgtttgacacggaaagtgag

SEQ ID NO: 538716 - DNA, 25 bp, Homo sapien
ccaacaagtggaagtgaagcatgtt

SEQ ID NO: 538717 - DNA, 25 bp, Homo sapien
tattggcattgggtaatttaaactc

SEQ ID NO: 538718 - DNA, 25 bp, Homo sapien
cctgcagtctgcctgagtctcaagt

SEQ ID NO: 538719 - DNA, 25 bp, Homo sapien
tgcagtctgcctgagtctcaagtca

SEQ ID NO: 538720 - DNA, 25 bp, Homo sapien
tgctttagggcttctgaagagtaat

SEQ ID NO: 538721 - DNA, 25 bp, Homo sapien
gtaataaattgtcaccactcctgca

SEQ ID NO: 538722 - DNA, 25 bp, Homo sapien
atccgaagccacagggtcgggcaca

SEQ ID NO: 538723 - DNA, 25 bp, Homo sapien
tgagcaagtccaagctaccttcagg

SEQ ID NO: 538724 - DNA, 25 bp, Homo sapien
cagggtgccacctgtcaagttttca

SEQ ID NO: 538725 - DNA, 25 bp, Homo sapien
tggaaaaagactcggtgaacatccg

SEQ ID NO: 538726 - DNA, 25 bp, Homo sapien
agagagccagaggtacagacgtgat

SEQ ID NO: 538727 - DNA, 25 bp, Homo sapien
gacgtgatttgctgggcaagaacct

SEQ ID NO: 538728 - DNA, 25 bp, Homo sapien
gatgaatcccataggggagcaaagg

SEQ ID NO: 538729 - DNA, 25 bp, Homo sapien
ggtcccaggagaggtggagctctga

SEQ ID NO: 538730 - DNA, 25 bp, Homo sapien
tctgagcggcttgattaactggcac

SEQ ID NO: 538731 - DNA, 25 bp, Homo sapien
ctatgtaggagaagtctctaccagc

SEQ ID NO: 538732 - DNA, 25 bp, Homo sapien
ggcactggctctagtcccttaaaaa

SEQ ID NO: 538733 - DNA, 25 bp, Homo sapien
ccaggagtcagaaactaaaggaaca

SEQ ID NO: 538734 - DNA, 25 bp, Homo sapien
cacaagatagtgattgcaggaaatg

SEQ ID NO: 538735 - DNA, 25 bp, Homo sapien
gatgagaccctcagacttcttccac

SEQ ID NO: 538736 - DNA, 25 bp, Homo sapien
gcaaaggtggcaataagcccttcat

SEQ ID NO: 538737 - DNA, 25 bp, Homo sapien
tttttaacaaccagccctcacagga

SEQ ID NO: 538738 - DNA, 25 bp, Homo sapien
gagagaacctaagtactaaagatgc

SEQ ID NO: 538739 - DNA, 25 bp, Homo sapien
caatatggagaccagcaagatctct

SEQ ID NO: 538740 - DNA, 25 bp, Homo sapien
caagatctctgggacaatattatag

SEQ ID NO: 538741 - DNA, 25 bp, Homo sapien
gaacagactgggtcaggcaaatata

SEQ ID NO: 538742 - DNA, 25 bp, Homo sapien
cttgactgacaggtaactcacaaaa

SEQ ID NO: 538743 - DNA, 25 bp, Homo sapien
tatcttggcacttctctgtctgacc

SEQ ID NO: 538744 - DNA, 25 bp, Homo sapien
tcaggtctgttcattccctcatcgt

SEQ ID NO: 538745 - DNA, 25 bp, Homo sapien
ccagggtgcatgtcaaattcaggtc

SEQ ID NO: 538746 - DNA, 25 bp, Homo sapien
tagaactagattgtgcctcagccca

SEQ ID NO: 538747 - DNA, 25 bp, Homo sapien
acttgaacggcaaaccatatggctt

SEQ ID NO: 538748 - DNA, 25 bp, Homo sapien
tcacaaatgcatcagacttgaacgg

SEQ ID NO: 538749 - DNA, 25 bp, Homo sapien
gaacaatacagctaagacagtgcct

SEQ ID NO: 538750 - DNA, 25 bp, Homo sapien
atatgcataaattgccggtacagag

SEQ ID NO: 538751 - DNA, 25 bp, Homo sapien
tatgcataaattgccggtacagagg

SEQ ID NO: 538752 - DNA, 25 bp, Homo sapien
cataaattgccggtacagaggctgg

SEQ ID NO: 538753 - DNA, 25 bp, Homo sapien
aattgccggtacagaggctggtgcc

SEQ ID NO: 538754 - DNA, 25 bp, Homo sapien
tccaaatacagtagtgacatgcagt

SEQ ID NO: 538755 - DNA, 25 bp, Homo sapien
caagttacaaatagccctgagtcca

SEQ ID NO: 538756 - DNA, 25 bp, Homo sapien
gctgaccctgatctatggcatctgg

SEQ ID NO: 538757 - DNA, 25 bp, Homo sapien
gccctgaacggactgctgggtgctt

SEQ ID NO: 538758 - DNA, 25 bp, Homo sapien
cttctacaatggtagccagggtcat

SEQ ID NO: 538759 - DNA, 25 bp, Homo sapien
gccgttctggacatcggccaacaag

SEQ ID NO: 538760 - DNA, 25 bp, Homo sapien
tccctagcgctctgggccgttctgg

SEQ ID NO: 538761 - DNA, 25 bp, Homo sapien
cattgtgatggttcttcctggtctc

SEQ ID NO: 538762 - DNA, 25 bp, Homo sapien
tcaagtccagtaaacaagaatcccc

SEQ ID NO: 538763 - DNA, 25 bp, Homo sapien
tcacaggccttgagacaagggtgcc

SEQ ID NO: 538764 - DNA, 25 bp, Homo sapien
ggtcataggtcacacgaacaaattg

SEQ ID NO: 538765 - DNA, 25 bp, Homo sapien
ggtgcctcacttactcagtctgcag

SEQ ID NO: 538766 - DNA, 25 bp, Homo sapien
tcttttgccccatcccatgtgtagg

SEQ ID NO: 538767 - DNA, 25 bp, Homo sapien
tgtaggctggcatcatattgtggaa

SEQ ID NO: 538768 - DNA, 25 bp, Homo sapien
gagagtgatatgatccgacatgcat

SEQ ID NO: 538769 - DNA, 25 bp, Homo sapien
gctctggtgagtgttggaagtttct

SEQ ID NO: 538770 - DNA, 25 bp, Homo sapien
agggataggcgtctttggtctgtaa

SEQ ID NO: 538771 - DNA, 25 bp, Homo sapien
tggaaatttcatgcccaagcacagg

SEQ ID NO: 538772 - DNA, 25 bp, Homo sapien
tctgctaaatgctgtaagagattct

SEQ ID NO: 538773 - DNA, 25 bp, Homo sapien
caagcacaggagggataggcgtctt

SEQ ID NO: 538774 - DNA, 25 bp, Homo sapien
gtgctgaaagatctgtattctgtag

SEQ ID NO: 538775 - DNA, 25 bp, Homo sapien
ctgtattctgtagaatactctcaaa

SEQ ID NO: 538776 - DNA, 25 bp, Homo sapien
ttgccagtagctgtttttcctacac

SEQ ID NO: 538777 - DNA, 25 bp, Homo sapien
tctttaatttgccagtagctgtttt

SEQ ID NO: 538778 - DNA, 25 bp, Homo sapien
gacccatagttagcaccagacagtg

SEQ ID NO: 538779 - DNA, 25 bp, Homo sapien
cattaatgctaatgtctccagtgag

SEQ ID NO: 538780 - DNA, 25 bp, Homo sapien
gaaatagataaacagcagctctctc

SEQ ID NO: 538781 - DNA, 25 bp, Homo sapien
ccagacagtgcaggagtcagctcat

SEQ ID NO: 538782 - DNA, 25 bp, Homo sapien
gaaccccttgtgacagataatgaca

SEQ ID NO: 538783 - DNA, 25 bp, Homo sapien
aatcactttgtttagcttatggaag

SEQ ID NO: 538784 - DNA, 25 bp, Homo sapien
cacagattgcatcaacccatgggat

SEQ ID NO: 538785 - DNA, 25 bp, Homo sapien
ggagctaatttgtagtgtaattgca

SEQ ID NO: 538786 - DNA, 25 bp, Homo sapien
ttcagttgaagtacaagttgtggca

SEQ ID NO: 538787 - DNA, 25 bp, Homo sapien
tcagttgaagtacaagttgtggcat

SEQ ID NO: 538788 - DNA, 25 bp, Homo sapien
cgtgaatgcggagcactgcagctga

SEQ ID NO: 538789 - DNA, 25 bp, Homo sapien
tgtaaatcataaggcttgtccgtga

SEQ ID NO: 538790 - DNA, 25 bp, Homo sapien
ggcctagaaactccgctgttaggac

SEQ ID NO: 538791 - DNA, 25 bp, Homo sapien
ctgcagctgatttagtcgttggcct

SEQ ID NO: 538792 - DNA, 25 bp, Homo sapien
taaagatgaggatacagaaggattc

SEQ ID NO: 538793 - DNA, 25 bp, Homo sapien
caaagaccagatgtgaaaagtattc

SEQ ID NO: 538794 - DNA, 25 bp, Homo sapien
tgcaaaatttgcacaagcattggca

SEQ ID NO: 538795 - DNA, 25 bp, Homo sapien
gcttcttgaggtctatgaatactaa

SEQ ID NO: 538796 - DNA, 25 bp, Homo sapien
tgcttgagtggtgccagtaatgaag

SEQ ID NO: 538797 - DNA, 25 bp, Homo sapien
gagctttactgcttgagtggtgcca

SEQ ID NO: 538798 - DNA, 25 bp, Homo sapien
tagccaatgaccgtatttaacgcat

SEQ ID NO: 538799 - DNA, 25 bp, Homo sapien
cgcatttcctacgtccttgcatttg

SEQ ID NO: 538800 - DNA, 25 bp, Homo sapien
tttcattcctttacgcactggaaaa

SEQ ID NO: 538801 - DNA, 25 bp, Homo sapien
taaactttcattcctttacgcactg

SEQ ID NO: 538802 - DNA, 25 bp, Homo sapien
aatttccactcgtgacaaaagagca

SEQ ID NO: 538803 - DNA, 25 bp, Homo sapien
cactcgtgacaaaagagcagccatc

SEQ ID NO: 538804 - DNA, 25 bp, Homo sapien
tgctgacagtcgagccaaggtcttc

SEQ ID NO: 538805 - DNA, 25 bp, Homo sapien
ccagctgcagatagccacggttcct

SEQ ID NO: 538806 - DNA, 25 bp, Homo sapien
tgtgaaccctggagcctactgctcc

SEQ ID NO: 538807 - DNA, 25 bp, Homo sapien
caaggtcttcccgaacgatggctga

SEQ ID NO: 538808 - DNA, 25 bp, Homo sapien
tccccaaggaaacagatcaccgtga

SEQ ID NO: 538809 - DNA, 25 bp, Homo sapien
gactaatttgagaccaccacctgat

SEQ ID NO: 538810 - DNA, 25 bp, Homo sapien
aatgtatttgagttccatggccagc

SEQ ID NO: 538811 - DNA, 25 bp, Homo sapien
tacctaggcgcctgttcgaaatgca

SEQ ID NO: 538812 - DNA, 25 bp, Homo sapien
tggcagcaccatttagggtgcttgg

SEQ ID NO: 538813 - DNA, 25 bp, Homo sapien
tctggcagcaccatttagggtgctt

SEQ ID NO: 538814 - DNA, 25 bp, Homo sapien
gcaccatttagggtgcttggaagag

SEQ ID NO: 538815 - DNA, 25 bp, Homo sapien
gcagcaccatttagggtgcttggaa

SEQ ID NO: 538816 - DNA, 25 bp, Homo sapien
cagactactcaggaagtatgaaaat

SEQ ID NO: 538817 - DNA, 25 bp, Homo sapien
tgggaactgatgagcaaggcctgga

SEQ ID NO: 538818 - DNA, 25 bp, Homo sapien
ggaactgatgagcaaggcctggaca

SEQ ID NO: 538819 - DNA, 25 bp, Homo sapien
actactcaggaagtatgaaaatggg

SEQ ID NO: 538820 - DNA, 25 bp, Homo sapien
ttaaccctctcctacaagccgatag

SEQ ID NO: 538821 - DNA, 25 bp, Homo sapien
tacaagccgataggaaaatgcagca

SEQ ID NO: 538822 - DNA, 25 bp, Homo sapien
tgttggaaaatcctctggactcctg

SEQ ID NO: 538823 - DNA, 25 bp, Homo sapien
agcaaacagtccaacccactcgtgt

SEQ ID NO: 538824 - DNA, 25 bp, Homo sapien
aggctgacaatcatgtcaaatgggg

SEQ ID NO: 538825 - DNA, 25 bp, Homo sapien
ctgcaagttaacactccctgttttt

SEQ ID NO: 538826 - DNA, 25 bp, Homo sapien
ctccaacggccactaagaacttgcc

SEQ ID NO: 538827 - DNA, 25 bp, Homo sapien
caaacatcataggtgttgttccaaa

SEQ ID NO: 538828 - DNA, 25 bp, Homo sapien
cttgcctatacataagagacgtttc

SEQ ID NO: 538829 - DNA, 25 bp, Homo sapien
gagacgtttccaaacatcataggtg

SEQ ID NO: 538830 - DNA, 25 bp, Homo sapien
caatgtacctgaatggagagctggg

SEQ ID NO: 538831 - DNA, 25 bp, Homo sapien
gcagagcaaggaagcaattcgcact

SEQ ID NO: 538832 - DNA, 25 bp, Homo sapien
tagcagattccggagcctacaaaag

SEQ ID NO: 538833 - DNA, 25 bp, Homo sapien
tacaaaagccgtgtcccagggtaga

SEQ ID NO: 538834 - DNA, 25 bp, Homo sapien
cgggacgtttcaaaccttcgagcat

SEQ ID NO: 538835 - DNA, 25 bp, Homo sapien
cagtgggcagggatagttatcagaa

SEQ ID NO: 538836 - DNA, 25 bp, Homo sapien
cactgaacaaatggacgggacgttt

SEQ ID NO: 538837 - DNA, 25 bp, Homo sapien
ccttcgagcatcaagcttctccaaa

SEQ ID NO: 538838 - DNA, 25 bp, Homo sapien
ggtgcccggttgatgtcaatcctag

SEQ ID NO: 538839 - DNA, 25 bp, Homo sapien
cattctccttccgaagacctttctt

SEQ ID NO: 538840 - DNA, 25 bp, Homo sapien
atcgggtgcccggttgatgtcaatc

SEQ ID NO: 538841 - DNA, 25 bp, Homo sapien
cagagagatgtagatcgggtgcccg

SEQ ID NO: 538842 - DNA, 25 bp, Homo sapien
caggggctatcacctgaaattgtcc

SEQ ID NO: 538843 - DNA, 25 bp, Homo sapien
atacaacaggggctatcacctgaaa

SEQ ID NO: 538844 - DNA, 25 bp, Homo sapien
cagcatgaataacaagttggaaatc

SEQ ID NO: 538845 - DNA, 25 bp, Homo sapien
catgaataacaagttggaaatcagg

SEQ ID NO: 538846 - DNA, 25 bp, Homo sapien
catgatttgtccaccgatgagcgaa

SEQ ID NO: 538847 - DNA, 25 bp, Homo sapien
catggccatgatttgtccaccgatg

SEQ ID NO: 538848 - DNA, 25 bp, Homo sapien
caccgatgagcgaatttggaagatg

SEQ ID NO: 538849 - DNA, 25 bp, Homo sapien
tcagtggaagtgtggcatgcatggc

SEQ ID NO: 538850 - DNA, 25 bp, Homo sapien
cctcctcgggggctaagcctcctgg

SEQ ID NO: 538851 - DNA, 25 bp, Homo sapien
tcctcgggggctaagcctcctggcc

SEQ ID NO: 538852 - DNA, 25 bp, Homo sapien
ctcgggggctaagcctcctggcctc

SEQ ID NO: 538853 - DNA, 25 bp, Homo sapien
tcctcctcgggggctaagcctcctg

SEQ ID NO: 538854 - DNA, 25 bp, Homo sapien
ttgcatgcagcaaagtagctcccag

SEQ ID NO: 538855 - DNA, 25 bp, Homo sapien
gaaggattgatcgagtacgctgaag

SEQ ID NO: 538856 - DNA, 25 bp, Homo sapien
cactctctctgggtcaattgatggc

SEQ ID NO: 538857 - DNA, 25 bp, Homo sapien
tcaattgatggctcccacaagggcc

SEQ ID NO: 538858 - DNA, 25 bp, Homo sapien
taggaacacaggacattggatcgaa

SEQ ID NO: 538859 - DNA, 25 bp, Homo sapien
ctgttaggaacacaggacattggat

SEQ ID NO: 538860 - DNA, 25 bp, Homo sapien
ggtccaatgaaaggcacgatgctgg

SEQ ID NO: 538861 - DNA, 25 bp, Homo sapien
gaagacacatcatgttggctgttag

SEQ ID NO: 538862 - DNA, 25 bp, Homo sapien
gtgctctcgtgcacactgtgctcat

SEQ ID NO: 538863 - DNA, 25 bp, Homo sapien
tcgtgcacactgtgctcatctttca

SEQ ID NO: 538864 - DNA, 25 bp, Homo sapien
gctctcgtgcacactgtgctcatct

SEQ ID NO: 538865 - DNA, 25 bp, Homo sapien
tgcacactgtgctcatctttcacat

SEQ ID NO: 538866 - DNA, 25 bp, Homo sapien
caagactgattcatgagtcatgcat

SEQ ID NO: 538867 - DNA, 25 bp, Homo sapien
gtcatgcattgatcctccttcttct

SEQ ID NO: 538868 - DNA, 25 bp, Homo sapien
ttcatgagtcatgcattgatcctcc

SEQ ID NO: 538869 - DNA, 25 bp, Homo sapien
aagcaagactgattcatgagtcatg

SEQ ID NO: 538870 - DNA, 25 bp, Homo sapien
cctactgaggtctctctttgtactc

SEQ ID NO: 538871 - DNA, 25 bp, Homo sapien
tgaggtctctctttgtactcccact

SEQ ID NO: 538872 - DNA, 25 bp, Homo sapien
gggtttcagctagattgttgccttt

SEQ ID NO: 538873 - DNA, 25 bp, Homo sapien
tcttcctagggtttcagctagattg

SEQ ID NO: 538874 - DNA, 25 bp, Homo sapien
caagcatttaaatccgaaagctgtg

SEQ ID NO: 538875 - DNA, 25 bp, Homo sapien
tccgaaagctgtgtacccagtagcc

SEQ ID NO: 538876 - DNA, 25 bp, Homo sapien
ttaaatccgaaagctgtgtacccag

SEQ ID NO: 538877 - DNA, 25 bp, Homo sapien
tgagccaagcatttaaatccgaaag

SEQ ID NO: 538878 - DNA, 25 bp, Homo sapien
agagccttccccgagctgctgtcat

SEQ ID NO: 538879 - DNA, 25 bp, Homo sapien
ggttgttttacttcacagcccagag

SEQ ID NO: 538880 - DNA, 25 bp, Homo sapien
cgagctgctgtcattctgaccctga

SEQ ID NO: 538881 - DNA, 25 bp, Homo sapien
tgaccctgaggccgcccttcacagc

SEQ ID NO: 538882 - DNA, 25 bp, Homo sapien
ggcttcgtttgcttccctatgagat

SEQ ID NO: 538883 - DNA, 25 bp, Homo sapien
tgccagtaaatccagcacacttccc

SEQ ID NO: 538884 - DNA, 25 bp, Homo sapien
acagaatttcgcagaggggatgctt

SEQ ID NO: 538885 - DNA, 25 bp, Homo sapien
cacacagacctaattaatctttggt

SEQ ID NO: 538886 - DNA, 25 bp, Homo sapien
gagtatctggaaccaacttctttga

SEQ ID NO: 538887 - DNA, 25 bp, Homo sapien
agagtatctggaaccaacttctttg

SEQ ID NO: 538888 - DNA, 25 bp, Homo sapien
cagagtatctggaaccaacttcttt

SEQ ID NO: 538889 - DNA, 25 bp, Homo sapien
cacagagtatctggaaccaacttct

SEQ ID NO: 538890 - DNA, 25 bp, Homo sapien
gtctctccccgagactccattgatg

SEQ ID NO: 538891 - DNA, 25 bp, Homo sapien
tgaagccccgatgccaaagcacatt

SEQ ID NO: 538892 - DNA, 25 bp, Homo sapien
tcaataatctgttcatttgctagag

SEQ ID NO: 538893 - DNA, 25 bp, Homo sapien
ccattgatgggtgatttatcagagc

SEQ ID NO: 538894 - DNA, 25 bp, Homo sapien
tctgggtgtgtaaaattgatgtagc

SEQ ID NO: 538895 - DNA, 25 bp, Homo sapien
tagtggatacaaccttgcctgcatg

SEQ ID NO: 538896 - DNA, 25 bp, Homo sapien
gcctgcatggatcttagacaaaaca

SEQ ID NO: 538897 - DNA, 25 bp, Homo sapien
gacaaaacaccactgttcatagttg

SEQ ID NO: 538898 - DNA, 25 bp, Homo sapien
cgaaattcctgtcaactgccggtca

SEQ ID NO: 538899 - DNA, 25 bp, Homo sapien
cactcctagggagagcagtgcacgg

SEQ ID NO: 538900 - DNA, 25 bp, Homo sapien
cagtgcacgggaaggcgaccactgt

SEQ ID NO: 538901 - DNA, 25 bp, Homo sapien
gtcttccaaacgcagagggtctgac

SEQ ID NO: 538902 - DNA, 25 bp, Homo sapien
tcactctccgtatgtgtgcatggtc

SEQ ID NO: 538903 - DNA, 25 bp, Homo sapien
ttatgcagcttatagcaaaggaacc

SEQ ID NO: 538904 - DNA, 25 bp, Homo sapien
cttctgaaggcagttgctgtttagc

SEQ ID NO: 538905 - DNA, 25 bp, Homo sapien
tccagtcagtgcacctgtcagccag

SEQ ID NO: 538906 - DNA, 25 bp, Homo sapien
gagagggtaacggatacaagctata

SEQ ID NO: 538907 - DNA, 25 bp, Homo sapien
tataactcaggaaggtgatacaagg

SEQ ID NO: 538908 - DNA, 25 bp, Homo sapien
tgtgtgagatcatgttagaaatatc

SEQ ID NO: 538909 - DNA, 25 bp, Homo sapien
tgatacaaggaaggtcgggcaggac

SEQ ID NO: 538910 - DNA, 25 bp, Homo sapien
agttgtaaaggtgccttaattcttg

SEQ ID NO: 538911 - DNA, 25 bp, Homo sapien
tgtaaaggtgccttaattcttgtcc

SEQ ID NO: 538912 - DNA, 25 bp, Homo sapien
tttatcagacatttagaggtttcct

SEQ ID NO: 538913 - DNA, 25 bp, Homo sapien
ctttatcagacatttagaggtttcc

SEQ ID NO: 538914 - DNA, 25 bp, Homo sapien
gacgcttctgatactctgctagcct

SEQ ID NO: 538915 - DNA, 25 bp, Homo sapien
gatactctgctagccttgggctcct

SEQ ID NO: 538916 - DNA, 25 bp, Homo sapien
ctgtgggtggccagacgcttctgat

SEQ ID NO: 538917 - DNA, 25 bp, Homo sapien
tcggagtctccgtcatcttcacttt

SEQ ID NO: 538918 - DNA, 25 bp, Homo sapien
acatttattcctacactggctacag

SEQ ID NO: 538919 - DNA, 25 bp, Homo sapien
ctggctacagagaatactctgttct

SEQ ID NO: 538920 - DNA, 25 bp, Homo sapien
tacactggctacagagaatactctg

SEQ ID NO: 538921 - DNA, 25 bp, Homo sapien
gctacagagaatactctgttctcca

SEQ ID NO: 538922 - DNA, 25 bp, Homo sapien
tcaattgccttatggtcccctagag

SEQ ID NO: 538923 - DNA, 25 bp, Homo sapien
tcccctagagggtctacttaacatg

SEQ ID NO: 538924 - DNA, 25 bp, Homo sapien
gtattttcttaaggacacactgctg

SEQ ID NO: 538925 - DNA, 25 bp, Homo sapien
gatcaagaatttcggcagcactgca

SEQ ID NO: 538926 - DNA, 25 bp, Homo sapien
gcagggcttcaacttcgggaactga

SEQ ID NO: 538927 - DNA, 25 bp, Homo sapien
gatcctcccagtagacgtatgagtg

SEQ ID NO: 538928 - DNA, 25 bp, Homo sapien
gatattgtagtgtgaacgtgaccct

SEQ ID NO: 538929 - DNA, 25 bp, Homo sapien
taattaagctccttggcgactggag

SEQ ID NO: 538930 - DNA, 25 bp, Homo sapien
catgtaaccttgaatggggcttgaa

SEQ ID NO: 538931 - DNA, 25 bp, Homo sapien
caatattcatgtaaccttgaatggg

SEQ ID NO: 538932 - DNA, 25 bp, Homo sapien
cctcaatattcatgtaaccttgaat

SEQ ID NO: 538933 - DNA, 25 bp, Homo sapien
gggcttgaaaatggcttcaacaaac

SEQ ID NO: 538934 - DNA, 25 bp, Homo sapien
ctgacatgacatttaaagttttttg

SEQ ID NO: 538935 - DNA, 25 bp, Homo sapien
tttggttattctctgagagatgttc

SEQ ID NO: 538936 - DNA, 25 bp, Homo sapien
ggttattctctgagagatgttccat

SEQ ID NO: 538937 - DNA, 25 bp, Homo sapien
tttttggttattctctgagagatgt

SEQ ID NO: 538938 - DNA, 25 bp, Homo sapien
tgtcccaatagtaatgactttggag

SEQ ID NO: 538939 - DNA, 25 bp, Homo sapien
ctttggagcacaagcagtcactcat

SEQ ID NO: 538940 - DNA, 25 bp, Homo sapien
tgactttggagcacaagcagtcact

SEQ ID NO: 538941 - DNA, 25 bp, Homo sapien
gtcccaatagtaatgactttggagc

SEQ ID NO: 538942 - DNA, 25 bp, Homo sapien
aagatatttactgcactgtcatttt

SEQ ID NO: 538943 - DNA, 25 bp, Homo sapien
ctgaaaacagcttgtacattaaaag

SEQ ID NO: 538944 - DNA, 25 bp, Homo sapien
agatatttactgcactgtcattttc

SEQ ID NO: 538945 - DNA, 25 bp, Homo sapien
aactgaaaacagcttgtacattaaa

SEQ ID NO: 538946 - DNA, 25 bp, Homo sapien
tcttttgtggtcaatggtgagttgt

SEQ ID NO: 538947 - DNA, 25 bp, Homo sapien
ataaaattgagctcctgtcttttgt

SEQ ID NO: 538948 - DNA, 25 bp, Homo sapien
ggcttcttaggagtgccaactctca

SEQ ID NO: 538949 - DNA, 25 bp, Homo sapien
gccaactctcagatgaagtataaaa

SEQ ID NO: 538950 - DNA, 25 bp, Homo sapien
gattccgagtgctaataacttgcga

SEQ ID NO: 538951 - DNA, 25 bp, Homo sapien
caaagtgcaggtatcaacaagccca

SEQ ID NO: 538952 - DNA, 25 bp, Homo sapien
ggtggaaccacctagccaatgctcg

SEQ ID NO: 538953 - DNA, 25 bp, Homo sapien
gtttagagaagtccatgaactgcca

SEQ ID NO: 538954 - DNA, 25 bp, Homo sapien
cacagcattggcagagcttgtgctt

SEQ ID NO: 538955 - DNA, 25 bp, Homo sapien
agcattggcagagcttgtgcttcct

SEQ ID NO: 538956 - DNA, 25 bp, Homo sapien
acagcattggcagagcttgtgcttc

SEQ ID NO: 538957 - DNA, 25 bp, Homo sapien
cagcattggcagagcttgtgcttcc

SEQ ID NO: 538958 - DNA, 25 bp, Homo sapien
tcaggcttctcttgtcagcagggac

SEQ ID NO: 538959 - DNA, 25 bp, Homo sapien
gctgtagattcttgcctcaggcttc

SEQ ID NO: 538960 - DNA, 25 bp, Homo sapien
tgggccacacaatccccctctttcc

SEQ ID NO: 538961 - DNA, 25 bp, Homo sapien
tccagtctgtcttctcggggctttg

SEQ ID NO: 538962 - DNA, 25 bp, Homo sapien
ccaaaacatagcgatgccaacttgt

SEQ ID NO: 538963 - DNA, 25 bp, Homo sapien
ggcagagaataaacagacacagtcc

SEQ ID NO: 538964 - DNA, 25 bp, Homo sapien
caaaagtatgaacagtgggccatgc

SEQ ID NO: 538965 - DNA, 25 bp, Homo sapien
tctttggtgtactgcaaggcacaag

SEQ ID NO: 538966 - DNA, 25 bp, Homo sapien
caggattcccatcaataaagtgtgg

SEQ ID NO: 538967 - DNA, 25 bp, Homo sapien
tctaactttgaaccactgccatagc

SEQ ID NO: 538968 - DNA, 25 bp, Homo sapien
gtgtggccatcccattaaaggccca

SEQ ID NO: 538969 - DNA, 25 bp, Homo sapien
taagcatcataaagtgctacagtcg

SEQ ID NO: 538970 - DNA, 25 bp, Homo sapien
gaacttgctgttacaatccagatgg

SEQ ID NO: 538971 - DNA, 25 bp, Homo sapien
cttccccaatgctggaactcaggtg

SEQ ID NO: 538972 - DNA, 25 bp, Homo sapien
tagaatgaggaatgccaggaggaat

SEQ ID NO: 538973 - DNA, 25 bp, Homo sapien
tttaaagatgtgcaccctggtgctt

SEQ ID NO: 538974 - DNA, 25 bp, Homo sapien
cccattcactagcttctattcagat

SEQ ID NO: 538975 - DNA, 25 bp, Homo sapien
atggcatgttactgaaattaacaat

SEQ ID NO: 538976 - DNA, 25 bp, Homo sapien
gttgagaggtaaggatgcagctctt

SEQ ID NO: 538977 - DNA, 25 bp, Homo sapien
tattcagatgacatggttccgttga

SEQ ID NO: 538978 - DNA, 25 bp, Homo sapien
cagagtaggttgatcttcctgttat

SEQ ID NO: 538979 - DNA, 25 bp, Homo sapien
cctgttattgacttgtcatccccca

SEQ ID NO: 538980 - DNA, 25 bp, Homo sapien
cttcagagtaggttgatcttcctgt

SEQ ID NO: 538981 - DNA, 25 bp, Homo sapien
gagtaggttgatcttcctgttattg

SEQ ID NO: 538982 - DNA, 25 bp, Homo sapien
caaagaaggtgtagccccaaagcat

SEQ ID NO: 538983 - DNA, 25 bp, Homo sapien
tcaagaaacgtaccgcaagctggaa

SEQ ID NO: 538984 - DNA, 25 bp, Homo sapien
gctaagtctaacaccaagcacgaag

SEQ ID NO: 538985 - DNA, 25 bp, Homo sapien
tcaaggaatctatgcccaaggctgg

SEQ ID NO: 538986 - DNA, 25 bp, Homo sapien
gatcaacagttgtcagggtctgagt

SEQ ID NO: 538987 - DNA, 25 bp, Homo sapien
aattaatctccatgtcatcagtacc

SEQ ID NO: 538988 - DNA, 25 bp, Homo sapien
gtcaaattaatctccatgtcatcag

SEQ ID NO: 538989 - DNA, 25 bp, Homo sapien
ccagatcaacagttgtcagggtctg

SEQ ID NO: 538990 - DNA, 25 bp, Homo sapien
aatctaagcttgttagtgagataca

SEQ ID NO: 538991 - DNA, 25 bp, Homo sapien
ctgcttcagcatcttttataatcta

SEQ ID NO: 538992 - DNA, 25 bp, Homo sapien
tataatctaagcttgttagtgagat

SEQ ID NO: 538993 - DNA, 25 bp, Homo sapien
cagcatcttttataatctaagcttg

SEQ ID NO: 538994 - DNA, 25 bp, Homo sapien
cgggaacctaacctaagctactgct

SEQ ID NO: 538995 - DNA, 25 bp, Homo sapien
tatcagatgggagctcagaattttc

SEQ ID NO: 538996 - DNA, 25 bp, Homo sapien
taagcagtgatacccgagtccttca

SEQ ID NO: 538997 - DNA, 25 bp, Homo sapien
ccaatctgtgctcgggtgcttatcc

SEQ ID NO: 538998 - DNA, 25 bp, Homo sapien
ggagaaatttgaggaaaccaacata

SEQ ID NO: 538999 - DNA, 25 bp, Homo sapien
ctatggaacacaagcagaacaagag

SEQ ID NO: 539000 - DNA, 25 bp, Homo sapien
ccttataaacttagactctgaactt

SEQ ID NO: 539001 - DNA, 25 bp, Homo sapien
ttcaaggagcttctaaagtctgtcc

SEQ ID NO: 539002 - DNA, 25 bp, Homo sapien
taacctgttcatgcttaagagtctg

SEQ ID NO: 539003 - DNA, 25 bp, Homo sapien
atgccaaaaggttgtcctgccctga

SEQ ID NO: 539004 - DNA, 25 bp, Homo sapien
gtttgataatgactatgccaaaagg

SEQ ID NO: 539005 - DNA, 25 bp, Homo sapien
acttgaagtcttcactacttgagac

SEQ ID NO: 539006 - DNA, 25 bp, Homo sapien
aaatcacagatcaataggataaaag

SEQ ID NO: 539007 - DNA, 25 bp, Homo sapien
agaatttcacagcagtctactaaaa

SEQ ID NO: 539008 - DNA, 25 bp, Homo sapien
gagaatttcacagcagtctactaaa

SEQ ID NO: 539009 - DNA, 25 bp, Homo sapien
tatattggaacttgagaatttcaca

SEQ ID NO: 539010 - DNA, 25 bp, Homo sapien
aggcctctgagacattggactgaga

SEQ ID NO: 539011 - DNA, 25 bp, Homo sapien
attggactgagactctgccgaacat

SEQ ID NO: 539012 - DNA, 25 bp, Homo sapien
ggcctctgagacattggactgagac

SEQ ID NO: 539013 - DNA, 25 bp, Homo sapien
tctggcagcaaagtaatgcttcaat

SEQ ID NO: 539014 - DNA, 25 bp, Homo sapien
tacttgaagcagtaatgttatgact

SEQ ID NO: 539015 - DNA, 25 bp, Homo sapien
atttctggcagcaaagtaatgcttc

SEQ ID NO: 539016 - DNA, 25 bp, Homo sapien
atacttgaagcagtaatgttatgac

SEQ ID NO: 539017 - DNA, 25 bp, Homo sapien
gttgcccacggcactgcattcttga

SEQ ID NO: 539018 - DNA, 25 bp, Homo sapien
aacttctgaacagttgttgcccacg

SEQ ID NO: 539019 - DNA, 25 bp, Homo sapien
gaaaaacaggattctttctctgtga

SEQ ID NO: 539020 - DNA, 25 bp, Homo sapien
gatagctccctagaaagtaacatga

SEQ ID NO: 539021 - DNA, 25 bp, Homo sapien
aggcagccccggactgcaaggcctc

SEQ ID NO: 539022 - DNA, 25 bp, Homo sapien
tttttcttctgtcgcggaaggcagc

SEQ ID NO: 539023 - DNA, 25 bp, Homo sapien
tttggcatcggtgtcctttttcttc

SEQ ID NO: 539024 - DNA, 25 bp, Homo sapien
aggcctccagcagattatccatcac

SEQ ID NO: 539025 - DNA, 25 bp, Homo sapien
aaaagagatgcagggaattccatca

SEQ ID NO: 539026 - DNA, 25 bp, Homo sapien
tgaaaagagatgcagggaattccat

SEQ ID NO: 539027 - DNA, 25 bp, Homo sapien
ctgtgaaaagagatgcagggaattc

SEQ ID NO: 539028 - DNA, 25 bp, Homo sapien
aagagatgcagggaattccatcagc

SEQ ID NO: 539029 - DNA, 25 bp, Homo sapien
caatacctgtctagggttaatgagg

SEQ ID NO: 539030 - DNA, 25 bp, Homo sapien
gacatatgcaatacagacaatacct

SEQ ID NO: 539031 - DNA, 25 bp, Homo sapien
tgaaagcacttgataaattgctaag

SEQ ID NO: 539032 - DNA, 25 bp, Homo sapien
gctaagtgatatacaaatataggga

SEQ ID NO: 539033 - DNA, 25 bp, Homo sapien
cacctggcatatggtacggtgtgcc

SEQ ID NO: 539034 - DNA, 25 bp, Homo sapien
gcacggccgagggaagtcttttata

SEQ ID NO: 539035 - DNA, 25 bp, Homo sapien
catgcatatggtactgtgtgccagg

SEQ ID NO: 539036 - DNA, 25 bp, Homo sapien
ccaggatgttactaggcaccaagat

SEQ ID NO: 539037 - DNA, 25 bp, Homo sapien
tgctctgacagcagcatatggtgcg

SEQ ID NO: 539038 - DNA, 25 bp, Homo sapien
ctctgacagcagcatatggtgcgca

SEQ ID NO: 539039 - DNA, 25 bp, Homo sapien
tcatgctctgacagcagcatatggt

SEQ ID NO: 539040 - DNA, 25 bp, Homo sapien
catgctctgacagcagcatatggtg

SEQ ID NO: 539041 - DNA, 25 bp, Homo sapien
atttgtacatattagtgctttcatc

SEQ ID NO: 539042 - DNA, 25 bp, Homo sapien
tgctttcatcagggggtaagtgcat

SEQ ID NO: 539043 - DNA, 25 bp, Homo sapien
gtgctttcatcagggggtaagtgca

SEQ ID NO: 539044 - DNA, 25 bp, Homo sapien
tgtgaacggtatttccaacgatcat

SEQ ID NO: 539045 - DNA, 25 bp, Homo sapien
ttcagaatcccatggaacgggtctc

SEQ ID NO: 539046 - DNA, 25 bp, Homo sapien
gcatctttgctcaagtgtgaacggt

SEQ ID NO: 539047 - DNA, 25 bp, Homo sapien
aaacgacatgtttcctcagaccaaa

SEQ ID NO: 539048 - DNA, 25 bp, Homo sapien
ctcgctctgctaattctttagctat

SEQ ID NO: 539049 - DNA, 25 bp, Homo sapien
tagctattctgacacgtttttcttt

SEQ ID NO: 539050 - DNA, 25 bp, Homo sapien
gttggcgttcgagtctttctcgctc

SEQ ID NO: 539051 - DNA, 25 bp, Homo sapien
tcttttgttggcgttcgagtctttc

SEQ ID NO: 539052 - DNA, 25 bp, Homo sapien
ttaaatacaacctttagagcagagg

SEQ ID NO: 539053 - DNA, 25 bp, Homo sapien
catagtacctatggcttcctgtctc

SEQ ID NO: 539054 - DNA, 25 bp, Homo sapien
gagcagaggctatcgaactataatc

SEQ ID NO: 539055 - DNA, 25 bp, Homo sapien
gattgaccacgtattttgtaaacaa

SEQ ID NO: 539056 - DNA, 25 bp, Homo sapien
ttgcttctgtaaatagccagggatc

SEQ ID NO: 539057 - DNA, 25 bp, Homo sapien
tagtcttggttttcattcccagggc

SEQ ID NO: 539058 - DNA, 25 bp, Homo sapien
tcttgaggacctaaattgtaactgt

SEQ ID NO: 539059 - DNA, 25 bp, Homo sapien
taactttcccctttgctcacctgtg

SEQ ID NO: 539060 - DNA, 25 bp, Homo sapien
ctgaagttattcaggtcagtaagaa

SEQ ID NO: 539061 - DNA, 25 bp, Homo sapien
tcaatggcatagtatcctattatac

SEQ ID NO: 539062 - DNA, 25 bp, Homo sapien
agttattcaggtcagtaagaaagtc

SEQ ID NO: 539063 - DNA, 25 bp, Homo sapien
aggtcagtaagaaagtcttccacag

SEQ ID NO: 539064 - DNA, 25 bp, Homo sapien
cgtgtaacttcgaaagtgtctcata

SEQ ID NO: 539065 - DNA, 25 bp, Homo sapien
tttcgtgtaacttcgaaagtgtctc

SEQ ID NO: 539066 - DNA, 25 bp, Homo sapien
gtctcatattgttcttttgcactga

SEQ ID NO: 539067 - DNA, 25 bp, Homo sapien
ttgttcttttgcactgataacaaat

SEQ ID NO: 539068 - DNA, 25 bp, Homo sapien
aaagagacagcactactgccaggta

SEQ ID NO: 539069 - DNA, 25 bp, Homo sapien
ccaggtagggagtaaatgtaggcta

SEQ ID NO: 539070 - DNA, 25 bp, Homo sapien
ggaaactgatgcaggtccttttctt

SEQ ID NO: 539071 - DNA, 25 bp, Homo sapien
tcagtagaggatgaaataaggaaac

SEQ ID NO: 539072 - DNA, 25 bp, Homo sapien
aatttgccattttaataagatctgt

SEQ ID NO: 539073 - DNA, 25 bp, Homo sapien
atgcatttaatatgcaaaatctgac

SEQ ID NO: 539074 - DNA, 25 bp, Homo sapien
tgccattttaataagatctgtataa

SEQ ID NO: 539075 - DNA, 25 bp, Homo sapien
ttaataagatctgtataaatgcatt

SEQ ID NO: 539076 - DNA, 25 bp, Homo sapien
tgtaaacaaagactcgcaatgaatg

SEQ ID NO: 539077 - DNA, 25 bp, Homo sapien
gcaaacgagtgcaatctaatctcag

SEQ ID NO: 539078 - DNA, 25 bp, Homo sapien
tgtcaatagcaaagtgcaccaactg

SEQ ID NO: 539079 - DNA, 25 bp, Homo sapien
tatgagccgcatacctttcaagaag

SEQ ID NO: 539080 - DNA, 25 bp, Homo sapien
taagctgactagttaaacacgttta

SEQ ID NO: 539081 - DNA, 25 bp, Homo sapien
tgccaattcttgaagttaagctgac

SEQ ID NO: 539082 - DNA, 25 bp, Homo sapien
ttaaacaggacacaagcctcatgct

SEQ ID NO: 539083 - DNA, 25 bp, Homo sapien
taaggtatatgacagggaaaagatg

SEQ ID NO: 539084 - DNA, 25 bp, Homo sapien
tcacaaacttgtcatgcaagtcctc

SEQ ID NO: 539085 - DNA, 25 bp, Homo sapien
cttgtcatgcaagtcctcaggaggg

SEQ ID NO: 539086 - DNA, 25 bp, Homo sapien
aaattcttttccagcgtttctacag

SEQ ID NO: 539087 - DNA, 25 bp, Homo sapien
tctcaagctgttgaagctgccttcc

SEQ ID NO: 539088 - DNA, 25 bp, Homo sapien
aatcctctatgaatatctcctggag

SEQ ID NO: 539089 - DNA, 25 bp, Homo sapien
ggaggtgttggtcattatttcataa

SEQ ID NO: 539090 - DNA, 25 bp, Homo sapien
cacatcatgatacaatccagggaaa

SEQ ID NO: 539091 - DNA, 25 bp, Homo sapien
catgcaaactaaatcaaaccttcct

SEQ ID NO: 539092 - DNA, 25 bp, Homo sapien
cttttagcactgaagatcagagcca

SEQ ID NO: 539093 - DNA, 25 bp, Homo sapien
aaaatgagatattgggtatgaaaac

SEQ ID NO: 539094 - DNA, 25 bp, Homo sapien
ttaaaatgagatattgggtatgaaa

SEQ ID NO: 539095 - DNA, 25 bp, Homo sapien
tcttttagcactgaagatcagagcc

SEQ ID NO: 539096 - DNA, 25 bp, Homo sapien
gtatatcagggtacttctcttcaca

SEQ ID NO: 539097 - DNA, 25 bp, Homo sapien
taaaggttccaaatcatccacaaaa

SEQ ID NO: 539098 - DNA, 25 bp, Homo sapien
tgtctaaaggttccaaatcatccac

SEQ ID NO: 539099 - DNA, 25 bp, Homo sapien
catccacaaaattcagtatatcagg

SEQ ID NO: 539100 - DNA, 25 bp, Homo sapien
agtcatggcagggtcgcagtgagac

SEQ ID NO: 539101 - DNA, 25 bp, Homo sapien
cagggtcgcagtgagactggcactt

SEQ ID NO: 539102 - DNA, 25 bp, Homo sapien
atggcagggtcgcagtgagactggc

SEQ ID NO: 539103 - DNA, 25 bp, Homo sapien
gtcgcagtgagactggcactttcat

SEQ ID NO: 539104 - DNA, 25 bp, Homo sapien
tagggatcttcaccaaatacagctg

SEQ ID NO: 539105 - DNA, 25 bp, Homo sapien
ctagggatcttcaccaaatacagct

SEQ ID NO: 539106 - DNA, 25 bp, Homo sapien
agggatcttcaccaaatacagctgc

SEQ ID NO: 539107 - DNA, 25 bp, Homo sapien
tacagagagagctaaggttaaatcc

SEQ ID NO: 539108 - DNA, 25 bp, Homo sapien
caggcagtactgacagccatgatgt

SEQ ID NO: 539109 - DNA, 25 bp, Homo sapien
ggtttgagcattccgggagccagca

SEQ ID NO: 539110 - DNA, 25 bp, Homo sapien
gagaatagcactgagccgtggccgt

SEQ ID NO: 539111 - DNA, 25 bp, Homo sapien
gattgaaaagaaaacagcagatttc

SEQ ID NO: 539112 - DNA, 25 bp, Homo sapien
ctgattgaaaagaaaacagcagatt

SEQ ID NO: 539113 - DNA, 25 bp, Homo sapien
tgattgaaaagaaaacagcagattt

SEQ ID NO: 539114 - DNA, 25 bp, Homo sapien
agtcggccagcaccctgatcatgga

SEQ ID NO: 539115 - DNA, 25 bp, Homo sapien
gaatcagaaataagtgggccctcac

SEQ ID NO: 539116 - DNA, 25 bp, Homo sapien
tcaccagtgtgataggattatgaca

SEQ ID NO: 539117 - DNA, 25 bp, Homo sapien
gcagccaaaatagaccaagacaacc

SEQ ID NO: 539118 - DNA, 25 bp, Homo sapien
acaggttctcttgtttggcacagta

SEQ ID NO: 539119 - DNA, 25 bp, Homo sapien
atcctctctgagactcggtacttac

SEQ ID NO: 539120 - DNA, 25 bp, Homo sapien
tggcacagtataaaaatcctctctg

SEQ ID NO: 539121 - DNA, 25 bp, Homo sapien
catttagcgatataaaaacagttga

SEQ ID NO: 539122 - DNA, 25 bp, Homo sapien
cataagttgctatattcactcttga

SEQ ID NO: 539123 - DNA, 25 bp, Homo sapien
ttcacataagttgctatattcactc

SEQ ID NO: 539124 - DNA, 25 bp, Homo sapien
atgaatttaattgctcttgatcagg

SEQ ID NO: 539125 - DNA, 25 bp, Homo sapien
caggttcacataagttgctatattc

SEQ ID NO: 539126 - DNA, 25 bp, Homo sapien
catctacttccaatatcatcattct

SEQ ID NO: 539127 - DNA, 25 bp, Homo sapien
ctcatatggcacccgaaaagagctc

SEQ ID NO: 539128 - DNA, 25 bp, Homo sapien
tatggcacccgaaaagagctcagga

SEQ ID NO: 539129 - DNA, 25 bp, Homo sapien
catagactctgccaaccgtgtttca

SEQ ID NO: 539130 - DNA, 25 bp, Homo sapien
aaggttctgggcaattttagaatct

SEQ ID NO: 539131 - DNA, 25 bp, Homo sapien
aggttctgggcaattttagaatcta

SEQ ID NO: 539132 - DNA, 25 bp, Homo sapien
cctaaagtgatatctgtgcacctcc

SEQ ID NO: 539133 - DNA, 25 bp, Homo sapien
acttgtgttctctgcgcttcactga

SEQ ID NO: 539134 - DNA, 25 bp, Homo sapien
tcaagaaacctatcttcaaactcag

SEQ ID NO: 539135 - DNA, 25 bp, Homo sapien
gagaattactatgttcctttgaggt

SEQ ID NO: 539136 - DNA, 25 bp, Homo sapien
ttcctagagatgctgtgtaaggctc

SEQ ID NO: 539137 - DNA, 25 bp, Homo sapien
tcctagagatgctgtgtaaggctcc

SEQ ID NO: 539138 - DNA, 25 bp, Homo sapien
ctagagatgctgtgtaaggctccat

SEQ ID NO: 539139 - DNA, 25 bp, Homo sapien
cctagagatgctgtgtaaggctcca

SEQ ID NO: 539140 - DNA, 25 bp, Homo sapien
cagtctgcaaccaagcacattagaa

SEQ ID NO: 539141 - DNA, 25 bp, Homo sapien
caagcctagagcatcctctgggaca

SEQ ID NO: 539142 - DNA, 25 bp, Homo sapien
tttcccttgctgtacatgttcacca

SEQ ID NO: 539143 - DNA, 25 bp, Homo sapien
aggataactccccacactttgcatt

SEQ ID NO: 539144 - DNA, 25 bp, Homo sapien
aatcactgagttaggctctctatag

SEQ ID NO: 539145 - DNA, 25 bp, Homo sapien
taaggcttgctcataaagaatctcg

SEQ ID NO: 539146 - DNA, 25 bp, Homo sapien
aaagtcaaatgttaaggcttgctca

SEQ ID NO: 539147 - DNA, 25 bp, Homo sapien
aagaatctcggttgaaattggaaca

SEQ ID NO: 539148 - DNA, 25 bp, Homo sapien
catgctcattaacatttttttcatc

SEQ ID NO: 539149 - DNA, 25 bp, Homo sapien
tgctcattaacatttttttcatccc

SEQ ID NO: 539150 - DNA, 25 bp, Homo sapien
ctcattaacatttttttcatcccac

SEQ ID NO: 539151 - DNA, 25 bp, Homo sapien
tcatgcatgctcattaacatttttt

SEQ ID NO: 539152 - DNA, 25 bp, Homo sapien
tgacacagctcataccggaataata

SEQ ID NO: 539153 - DNA, 25 bp, Homo sapien
gttctagacaacagctggacaggca

SEQ ID NO: 539154 - DNA, 25 bp, Homo sapien
cagagtgcagaggtgaacattctca

SEQ ID NO: 539155 - DNA, 25 bp, Homo sapien
taactcgctgataattgttctagac

SEQ ID NO: 539156 - DNA, 25 bp, Homo sapien
tacaattagtaaaagagtcacatgt

SEQ ID NO: 539157 - DNA, 25 bp, Homo sapien
ttagtaaaagagtcacatgttcgtg

SEQ ID NO: 539158 - DNA, 25 bp, Homo sapien
caattagtaaaagagtcacatgttc

SEQ ID NO: 539159 - DNA, 25 bp, Homo sapien
tagtaaaagagtcacatgttcgtgt

SEQ ID NO: 539160 - DNA, 25 bp, Homo sapien
catggttaatttccacattagaatc

SEQ ID NO: 539161 - DNA, 25 bp, Homo sapien
ctggcttcatggttaatttccacat

SEQ ID NO: 539162 - DNA, 25 bp, Homo sapien
cattagaatcttgtttattttccat

SEQ ID NO: 539163 - DNA, 25 bp, Homo sapien
cttcatggttaatttccacattaga

SEQ ID NO: 539164 - DNA, 25 bp, Homo sapien
agccccatgggccaagaccagtttg

SEQ ID NO: 539165 - DNA, 25 bp, Homo sapien
tataggctcaggtaaaataggcccc

SEQ ID NO: 539166 - DNA, 25 bp, Homo sapien
gattgtctaaacctcgtggatcaca

SEQ ID NO: 539167 - DNA, 25 bp, Homo sapien
gattaaatggcacctagcacaagtg

SEQ ID NO: 539168 - DNA, 25 bp, Homo sapien
tacattgtggaatgagggtgaactg

SEQ ID NO: 539169 - DNA, 25 bp, Homo sapien
agaagtgaatagaggtacgaaatga

SEQ ID NO: 539170 - DNA, 25 bp, Homo sapien
gaatagaggtacgaaatgatgaaag

SEQ ID NO: 539171 - DNA, 25 bp, Homo sapien
gaggtacgaaatgatgaaagatggt

SEQ ID NO: 539172 - DNA, 25 bp, Homo sapien
gaaccaaatgatatgtccctagaga

SEQ ID NO: 539173 - DNA, 25 bp, Homo sapien
tagttcccatttcgctaaagctttc

SEQ ID NO: 539174 - DNA, 25 bp, Homo sapien
caaagcattaggtggacttgcaagt

SEQ ID NO: 539175 - DNA, 25 bp, Homo sapien
tgtaactaagcatttaaccaaagca

SEQ ID NO: 539176 - DNA, 25 bp, Homo sapien
caaagcaaatccacgttttcatact

SEQ ID NO: 539177 - DNA, 25 bp, Homo sapien
ttacaaagcaaatccacgttttcat

SEQ ID NO: 539178 - DNA, 25 bp, Homo sapien
aagcaaatccacgttttcatactta

SEQ ID NO: 539179 - DNA, 25 bp, Homo sapien
gcaaatccacgttttcatacttatt

SEQ ID NO: 539180 - DNA, 25 bp, Homo sapien
tggtagaggaggagaattttgtcct

SEQ ID NO: 539181 - DNA, 25 bp, Homo sapien
attttgtcctccaaggaatcccagg

SEQ ID NO: 539182 - DNA, 25 bp, Homo sapien
caggaccactgaatggcatccgcat

SEQ ID NO: 539183 - DNA, 25 bp, Homo sapien
gaatggcatccgcattcctggaagt

SEQ ID NO: 539184 - DNA, 25 bp, Homo sapien
ttccaccttctttagagggaggcaa

SEQ ID NO: 539185 - DNA, 25 bp, Homo sapien
ccagttccaccttctttagagggag

SEQ ID NO: 539186 - DNA, 25 bp, Homo sapien
tattacaatcagctggcaaggcacc

SEQ ID NO: 539187 - DNA, 25 bp, Homo sapien
ggcaaaggaatattacaatcagctg

SEQ ID NO: 539188 - DNA, 25 bp, Homo sapien
aaagcttgtagctctgcttgaagct

SEQ ID NO: 539189 - DNA, 25 bp, Homo sapien
ctgcttgaagctcattaatctttgc

SEQ ID NO: 539190 - DNA, 25 bp, Homo sapien
agcttgtagctctgcttgaagctca

SEQ ID NO: 539191 - DNA, 25 bp, Homo sapien
gaagctcattaatctttgcctcttt

SEQ ID NO: 539192 - DNA, 25 bp, Homo sapien
tagttttgcttgatctatgcaaatg

SEQ ID NO: 539193 - DNA, 25 bp, Homo sapien
ttcttgtaaagttctgatgctttct

SEQ ID NO: 539194 - DNA, 25 bp, Homo sapien
aactcttctagttttgcttgatcta

SEQ ID NO: 539195 - DNA, 25 bp, Homo sapien
tcttgtaaagttctgatgctttctc

SEQ ID NO: 539196 - DNA, 25 bp, Homo sapien
tgcaatacaatctgggatacacact

SEQ ID NO: 539197 - DNA, 25 bp, Homo sapien
caaactgggttaaatctaaatctag

SEQ ID NO: 539198 - DNA, 25 bp, Homo sapien
tttcgatatgtgaagtctggatcca

SEQ ID NO: 539199 - DNA, 25 bp, Homo sapien
tggatccattccatctctatgcaat

SEQ ID NO: 539200 - DNA, 25 bp, Homo sapien
aatcatttcgaatcagcaaaagatg

SEQ ID NO: 539201 - DNA, 25 bp, Homo sapien
tataaaataatcatttcgaatcagc

SEQ ID NO: 539202 - DNA, 25 bp, Homo sapien
taaaataatcatttcgaatcagcaa

SEQ ID NO: 539203 - DNA, 25 bp, Homo sapien
ataatcatttcgaatcagcaaaaga

SEQ ID NO: 539204 - DNA, 25 bp, Homo sapien
agaaataaaatatccctctgctcta

SEQ ID NO: 539205 - DNA, 25 bp, Homo sapien
aaatatccctctgctctagtttctt

SEQ ID NO: 539206 - DNA, 25 bp, Homo sapien
aataaaatatccctctgctctagtt

SEQ ID NO: 539207 - DNA, 25 bp, Homo sapien
taaaatatccctctgctctagtttc

SEQ ID NO: 539208 - DNA, 25 bp, Homo sapien
ttgtttatatagaaatgagctaaat

SEQ ID NO: 539209 - DNA, 25 bp, Homo sapien
tatttgtggctgagtattttggatt

SEQ ID NO: 539210 - DNA, 25 bp, Homo sapien
gaaatgagctaaatatttgtggctg

SEQ ID NO: 539211 - DNA, 25 bp, Homo sapien
gagctaaatatttgtggctgagtat

SEQ ID NO: 539212 - DNA, 25 bp, Homo sapien
gactttaagttggatatccaggcca

SEQ ID NO: 539213 - DNA, 25 bp, Homo sapien
ggccatcattcttaatgcattttaa

SEQ ID NO: 539214 - DNA, 25 bp, Homo sapien
caaggcgatgggataactcaaacaa

SEQ ID NO: 539215 - DNA, 25 bp, Homo sapien
gttcagctctaatatcttcaaggcg

SEQ ID NO: 539216 - DNA, 25 bp, Homo sapien
aatatctctttcaatccacaacgca

SEQ ID NO: 539217 - DNA, 25 bp, Homo sapien
tcatcaggagatgtaaccagggcat

SEQ ID NO: 539218 - DNA, 25 bp, Homo sapien
cattgatgagctgcatacaagctac

SEQ ID NO: 539219 - DNA, 25 bp, Homo sapien
ttctgatgtgaagcctgaaatccaa

SEQ ID NO: 539220 - DNA, 25 bp, Homo sapien
aatcagtcgtatgaccaacagcaag

SEQ ID NO: 539221 - DNA, 25 bp, Homo sapien
tcaatcagtcgtatgaccaacagca

SEQ ID NO: 539222 - DNA, 25 bp, Homo sapien
atgctcttgatactccaggaaagta

SEQ ID NO: 539223 - DNA, 25 bp, Homo sapien
aaatgctcttgatactccaggaaag

SEQ ID NO: 539224 - DNA, 25 bp, Homo sapien
tggaatatgcaactctataaagaca

SEQ ID NO: 539225 - DNA, 25 bp, Homo sapien
caaagattgtggagttatagctaag

SEQ ID NO: 539226 - DNA, 25 bp, Homo sapien
aatgtctggaatatgcaactctata

SEQ ID NO: 539227 - DNA, 25 bp, Homo sapien
agttgtctcaggctagagagaatca

SEQ ID NO: 539228 - DNA, 25 bp, Homo sapien
cagttgaactgaattgtgccggagg

SEQ ID NO: 539229 - DNA, 25 bp, Homo sapien
gccggaggccttccacaatacaaaa

SEQ ID NO: 539230 - DNA, 25 bp, Homo sapien
tgaattgtgccggaggccttccaca

SEQ ID NO: 539231 - DNA, 25 bp, Homo sapien
ccagctgaagttaaagcttctaaaa

SEQ ID NO: 539232 - DNA, 25 bp, Homo sapien
tttggccaataaggaaaggctcctc

SEQ ID NO: 539233 - DNA, 25 bp, Homo sapien
gtgtctgggatccacggctttggcc

SEQ ID NO: 539234 - DNA, 25 bp, Homo sapien
tcccctacaatgcataccgcagaga

SEQ ID NO: 539235 - DNA, 25 bp, Homo sapien
taccgcagagagaagtttaaccaca

SEQ ID NO: 539236 - DNA, 25 bp, Homo sapien
cactccggacaatatggtaactggc

SEQ ID NO: 539237 - DNA, 25 bp, Homo sapien
ctgaatgtcaaggacccactccgga

SEQ ID NO: 539238 - DNA, 25 bp, Homo sapien
cagtgctcggattaaagtgcattta

SEQ ID NO: 539239 - DNA, 25 bp, Homo sapien
ggtaactggcctgttctaaactgag

SEQ ID NO: 539240 - DNA, 25 bp, Homo sapien
ttcatcagggcttttagacactgta

SEQ ID NO: 539241 - DNA, 25 bp, Homo sapien
cactgtatgactttatgttgatttt

SEQ ID NO: 539242 - DNA, 25 bp, Homo sapien
ctgcgtattcatcagggcttttaga

SEQ ID NO: 539243 - DNA, 25 bp, Homo sapien
tcagggcttttagacactgtatgac

SEQ ID NO: 539244 - DNA, 25 bp, Homo sapien
tgtctaataataatccaagcccttc

SEQ ID NO: 539245 - DNA, 25 bp, Homo sapien
ctttcttcccagatgtgctcgtaga

SEQ ID NO: 539246 - DNA, 25 bp, Homo sapien
tttcttcccagatgtgctcgtagaa

SEQ ID NO: 539247 - DNA, 25 bp, Homo sapien
gatgccagcattgagtgtctatagc

SEQ ID NO: 539248 - DNA, 25 bp, Homo sapien
caaggccttaggtagctctgcccct

SEQ ID NO: 539249 - DNA, 25 bp, Homo sapien
tctatgtgaggattctgccagcccc

SEQ ID NO: 539250 - DNA, 25 bp, Homo sapien
cctacagcagtgttctacctggaca

SEQ ID NO: 539251 - DNA, 25 bp, Homo sapien
cataccatgcatgacctttgctctg

SEQ ID NO: 539252 - DNA, 25 bp, Homo sapien
taatgagtcgcaaggaagtttcaaa

SEQ ID NO: 539253 - DNA, 25 bp, Homo sapien
gggcagaggtgacatacacttttaa

SEQ ID NO: 539254 - DNA, 25 bp, Homo sapien
ttctgggtcggccttaggaagcttg

SEQ ID NO: 539255 - DNA, 25 bp, Homo sapien
tgattggcacagtgtaccacagccc

SEQ ID NO: 539256 - DNA, 25 bp, Homo sapien
aatttggtgatctgccgtgctcagg

SEQ ID NO: 539257 - DNA, 25 bp, Homo sapien
tgggcaatttggtgatctgccgtgc

SEQ ID NO: 539258 - DNA, 25 bp, Homo sapien
ctgattggcacagtgtaccacagcc

SEQ ID NO: 539259 - DNA, 25 bp, Homo sapien
tggtcaaagacactcggagagactc

SEQ ID NO: 539260 - DNA, 25 bp, Homo sapien
ttgctggtcaaagacactcggagag

SEQ ID NO: 539261 - DNA, 25 bp, Homo sapien
attgctggtcaaagacactcggaga

SEQ ID NO: 539262 - DNA, 25 bp, Homo sapien
aaagacactcggagagactccaggc

SEQ ID NO: 539263 - DNA, 25 bp, Homo sapien
gagatctgtcggcttctcttaagac

SEQ ID NO: 539264 - DNA, 25 bp, Homo sapien
ggtgagatctgtcggcttctcttaa

SEQ ID NO: 539265 - DNA, 25 bp, Homo sapien
tgaggtgagatctgtcggcttctct

SEQ ID NO: 539266 - DNA, 25 bp, Homo sapien
attcctgaggtgagatctgtcggct

SEQ ID NO: 539267 - DNA, 25 bp, Homo sapien
actattctctttcgtaagagcctta

SEQ ID NO: 539268 - DNA, 25 bp, Homo sapien
caacctcatatcccactattctctt

SEQ ID NO: 539269 - DNA, 25 bp, Homo sapien
ctattctctttcgtaagagccttaa

SEQ ID NO: 539270 - DNA, 25 bp, Homo sapien
ccaacctcatatcccactattctct

SEQ ID NO: 539271 - DNA, 25 bp, Homo sapien
tttccaatccagctatgcacaccat

SEQ ID NO: 539272 - DNA, 25 bp, Homo sapien
ctttccaatccagctatgcacacca

SEQ ID NO: 539273 - DNA, 25 bp, Homo sapien
ggagaacaactttccaatccagcta

SEQ ID NO: 539274 - DNA, 25 bp, Homo sapien
tgagggggagaacaactttccaatc

SEQ ID NO: 539275 - DNA, 25 bp, Homo sapien
ttctcgatgcgcatctgccaatctc

SEQ ID NO: 539276 - DNA, 25 bp, Homo sapien
catcaggaacctcataatctacaag

SEQ ID NO: 539277 - DNA, 25 bp, Homo sapien
gtctcttctcgatgcgcatctgcca

SEQ ID NO: 539278 - DNA, 25 bp, Homo sapien
ataatctacaagtctcttctcgatg

SEQ ID NO: 539279 - DNA, 25 bp, Homo sapien
gatgtagatatgcttgtagcagctg

SEQ ID NO: 539280 - DNA, 25 bp, Homo sapien
tcctcctctacccacttaacagaca

SEQ ID NO: 539281 - DNA, 25 bp, Homo sapien
cagctggtcgttgtcctttcatgag

SEQ ID NO: 539282 - DNA, 25 bp, Homo sapien
atagatgtagatatgcttgtagcag

SEQ ID NO: 539283 - DNA, 25 bp, Homo sapien
aagtccagcttgttccaaccataag

SEQ ID NO: 539284 - DNA, 25 bp, Homo sapien
gtcaatgccttctgaaagatccaca

SEQ ID NO: 539285 - DNA, 25 bp, Homo sapien
gaccaatgttttggcacaagtccag

SEQ ID NO: 539286 - DNA, 25 bp, Homo sapien
gcctcttgcctttagaacctagcag

SEQ ID NO: 539287 - DNA, 25 bp, Homo sapien
aattctttaagatagtctttcacag

SEQ ID NO: 539288 - DNA, 25 bp, Homo sapien
gggtatagtactgaagggcagtctg

SEQ ID NO: 539289 - DNA, 25 bp, Homo sapien
tttcctgctgtgatagatttaacac

SEQ ID NO: 539290 - DNA, 25 bp, Homo sapien
catatacaagcagatgagacctatt

SEQ ID NO: 539291 - DNA, 25 bp, Homo sapien
tgggtcccatccacaggaactgttt

SEQ ID NO: 539292 - DNA, 25 bp, Homo sapien
tcaccaggagggctttactcaatat

SEQ ID NO: 539293 - DNA, 25 bp, Homo sapien
ggctgtatcctagaatcaccaggag

SEQ ID NO: 539294 - DNA, 25 bp, Homo sapien
gacatctggtgataaggctcatctt

SEQ ID NO: 539295 - DNA, 25 bp, Homo sapien
caggaatgcattaagccagagaagc

SEQ ID NO: 539296 - DNA, 25 bp, Homo sapien
tgacatcaagcaccgtacaacctct

SEQ ID NO: 539297 - DNA, 25 bp, Homo sapien
ccggagtagcttccatgagaacctg

SEQ ID NO: 539298 - DNA, 25 bp, Homo sapien
tcaggactctttaacagcggcaaag

SEQ ID NO: 539299 - DNA, 25 bp, Homo sapien
tactgaagtccttttcccgcaatgg

SEQ ID NO: 539300 - DNA, 25 bp, Homo sapien
cttagaagcagtattaatgtactgc

SEQ ID NO: 539301 - DNA, 25 bp, Homo sapien
ccgcaatggtgcctttttatcttca

SEQ ID NO: 539302 - DNA, 25 bp, Homo sapien
tttcccgcaatggtgcctttttatc

SEQ ID NO: 539303 - DNA, 25 bp, Homo sapien
cacaattaaaatgcctcattttaga

SEQ ID NO: 539304 - DNA, 25 bp, Homo sapien
taaaatgcctcattttagaatctaa

SEQ ID NO: 539305 - DNA, 25 bp, Homo sapien
tagaatctaagtagagcagcaattc

SEQ ID NO: 539306 - DNA, 25 bp, Homo sapien
cattttagaatctaagtagagcagc

SEQ ID NO: 539307 - DNA, 25 bp, Homo sapien
tgtgccccacagagagattcacaca

SEQ ID NO: 539308 - DNA, 25 bp, Homo sapien
gtgccccacagagagattcacacac

SEQ ID NO: 539309 - DNA, 25 bp, Homo sapien
ccttggcttccttgccaatgcaagc

SEQ ID NO: 539310 - DNA, 25 bp, Homo sapien
gaatctccataatccttatctctga

SEQ ID NO: 539311 - DNA, 25 bp, Homo sapien
tacagtcctaatgaccacacctgga

SEQ ID NO: 539312 - DNA, 25 bp, Homo sapien
tagttgcggtccaagacaagtcttc

SEQ ID NO: 539313 - DNA, 25 bp, Homo sapien
tcgtggcactgacacaaagatggcc

SEQ ID NO: 539314 - DNA, 25 bp, Homo sapien
caaacatgagatgcaggtaagcttc

SEQ ID NO: 539315 - DNA, 25 bp, Homo sapien
tttcaccgtgcatggaacataatgg

SEQ ID NO: 539316 - DNA, 25 bp, Homo sapien
gtagaaatcttcaggtcgtggcact

SEQ ID NO: 539317 - DNA, 25 bp, Homo sapien
gctccctggaattcttatgctggca

SEQ ID NO: 539318 - DNA, 25 bp, Homo sapien
tgagcaatcactgcttgcaaatgca

SEQ ID NO: 539319 - DNA, 25 bp, Homo sapien
tctctaaaggtgctgctgagcaatc

SEQ ID NO: 539320 - DNA, 25 bp, Homo sapien
gcaaatgcagtcttcaggttgggaa

SEQ ID NO: 539321 - DNA, 25 bp, Homo sapien
ctgcctattgccctttccataatgc

SEQ ID NO: 539322 - DNA, 25 bp, Homo sapien
gcccctctgcctattgccctttcca

SEQ ID NO: 539323 - DNA, 25 bp, Homo sapien
gcctattgccctttccataatgcat

SEQ ID NO: 539324 - DNA, 25 bp, Homo sapien
cctcctggcccctctgcctattgcc

SEQ ID NO: 539325 - DNA, 25 bp, Homo sapien
tggtcaaagagatttcctgaagaaa

SEQ ID NO: 539326 - DNA, 25 bp, Homo sapien
tttcctgaagaaacagccagaagta

SEQ ID NO: 539327 - DNA, 25 bp, Homo sapien
ctggtcaaagagatttcctgaagaa

SEQ ID NO: 539328 - DNA, 25 bp, Homo sapien
cctgaagaaacagccagaagtagaa

SEQ ID NO: 539329 - DNA, 25 bp, Homo sapien
tgagctcaccggaatagcaaccaga

SEQ ID NO: 539330 - DNA, 25 bp, Homo sapien
gcaaccagaggtgactacaacatta

SEQ ID NO: 539331 - DNA, 25 bp, Homo sapien
ggatctgggcagttcaaatcaatgt

SEQ ID NO: 539332 - DNA, 25 bp, Homo sapien
caaacggcaccatctttagttcatg

SEQ ID NO: 539333 - DNA, 25 bp, Homo sapien
ggaacttgtgatgctgatatgaaaa

SEQ ID NO: 539334 - DNA, 25 bp, Homo sapien
gaggggctttggaatgtaagtacaa

SEQ ID NO: 539335 - DNA, 25 bp, Homo sapien
aatgtaagtacaacagggaacttgt

SEQ ID NO: 539336 - DNA, 25 bp, Homo sapien
gtacaacagggaacttgtgatgctg

SEQ ID NO: 539337 - DNA, 25 bp, Homo sapien
caaaaacactcagtggacacactga

SEQ ID NO: 539338 - DNA, 25 bp, Homo sapien
agacaaatggttatgaaggacagga

SEQ ID NO: 539339 - DNA, 25 bp, Homo sapien
taggagtttatgcatgccaggctac

SEQ ID NO: 539340 - DNA, 25 bp, Homo sapien
gatttgaaaaccattgctgcaggcc

SEQ ID NO: 539341 - DNA, 25 bp, Homo sapien
catatcatccgtcagtgtcctaata

SEQ ID NO: 539342 - DNA, 25 bp, Homo sapien
catccgtcagtgtcctaatatttaa

SEQ ID NO: 539343 - DNA, 25 bp, Homo sapien
tccgtcagtgtcctaatatttaaat

SEQ ID NO: 539344 - DNA, 25 bp, Homo sapien
tatcatccgtcagtgtcctaatatt

SEQ ID NO: 539345 - DNA, 25 bp, Homo sapien
agctctgataccaatcatctgtgtg

SEQ ID NO: 539346 - DNA, 25 bp, Homo sapien
ggaaggttctctaagcttgcccaca

SEQ ID NO: 539347 - DNA, 25 bp, Homo sapien
aacagcctcggctctgggataagac

SEQ ID NO: 539348 - DNA, 25 bp, Homo sapien
catcaagcgtgccttcctagcactt

SEQ ID NO: 539349 - DNA, 25 bp, Homo sapien
gaagggtagggagtcccagcggctg

SEQ ID NO: 539350 - DNA, 25 bp, Homo sapien
ccgggtggtgcagccgcggctggtg

SEQ ID NO: 539351 - DNA, 25 bp, Homo sapien
ttgggggcccttcctgcgcggcatc

SEQ ID NO: 539352 - DNA, 25 bp, Homo sapien
cggctgagccttgggccgggtggtg

SEQ ID NO: 539353 - DNA, 25 bp, Homo sapien
gccactcagcaagccgcaagctgga

SEQ ID NO: 539354 - DNA, 25 bp, Homo sapien
cggaaagaaggtggccactcagcaa

SEQ ID NO: 539355 - DNA, 25 bp, Homo sapien
aaggtggccactcagcaagccgcaa

SEQ ID NO: 539356 - DNA, 25 bp, Homo sapien
ggaccggaaagaaggtggccactca

SEQ ID NO: 539357 - DNA, 25 bp, Homo sapien
cgccacccgtgttggcccgggactg

SEQ ID NO: 539358 - DNA, 25 bp, Homo sapien
agcctagcccaaccgctgaagtcgg

SEQ ID NO: 539359 - DNA, 25 bp, Homo sapien
gggccgcagccaacacatctgaaaa

SEQ ID NO: 539360 - DNA, 25 bp, Homo sapien
ctgagggatcgacaacaggttttac

SEQ ID NO: 539361 - DNA, 25 bp, Homo sapien
ggaggaagtcatcggcctggatttc

SEQ ID NO: 539362 - DNA, 25 bp, Homo sapien
ggaaggtgggcgagacaggccctgc

SEQ ID NO: 539363 - DNA, 25 bp, Homo sapien
ggatttgcagatagggttccagcag

SEQ ID NO: 539364 - DNA, 25 bp, Homo sapien
ccgctcaccttaaggacgcagagtg

SEQ ID NO: 539365 - DNA, 25 bp, Homo sapien
tgctctgataagttttctccaaggt

SEQ ID NO: 539366 - DNA, 25 bp, Homo sapien
aattagtataacacagtttaatgtc

SEQ ID NO: 539367 - DNA, 25 bp, Homo sapien
tcttcatagggaatgtaattagtat

SEQ ID NO: 539368 - DNA, 25 bp, Homo sapien
ccaaggtcttatgctctaagttcag

SEQ ID NO: 539369 - DNA, 25 bp, Homo sapien
tggtcttgagcaaggacaaaccatg

SEQ ID NO: 539370 - DNA, 25 bp, Homo sapien
agtggtcttgagcaaggacaaacca

SEQ ID NO: 539371 - DNA, 25 bp, Homo sapien
cctgaaagtggtcttgagcaaggac

SEQ ID NO: 539372 - DNA, 25 bp, Homo sapien
gtttcctgaaagtggtcttgagcaa

SEQ ID NO: 539373 - DNA, 25 bp, Homo sapien
tagtgtcactaatgctatgttttga

SEQ ID NO: 539374 - DNA, 25 bp, Homo sapien
tcactaatgctatgttttgataacc

SEQ ID NO: 539375 - DNA, 25 bp, Homo sapien
taatgctatgttttgataacccact

SEQ ID NO: 539376 - DNA, 25 bp, Homo sapien
taactttagtgtcactaatgctatg

SEQ ID NO: 539377 - DNA, 25 bp, Homo sapien
aatgattgacatacttgtaaacctc

SEQ ID NO: 539378 - DNA, 25 bp, Homo sapien
caaaattaaaagctggagtaatatc

SEQ ID NO: 539379 - DNA, 25 bp, Homo sapien
ttcaaaggaatgattgacatacttg

SEQ ID NO: 539380 - DNA, 25 bp, Homo sapien
aggaatgattgacatacttgtaaac

SEQ ID NO: 539381 - DNA, 25 bp, Homo sapien
tgatgcctggtcaacaataactcca

SEQ ID NO: 539382 - DNA, 25 bp, Homo sapien
gatgcatatccctcctttcttgatg

SEQ ID NO: 539383 - DNA, 25 bp, Homo sapien
cagagaaaatgtgtcattgtcctcc

SEQ ID NO: 539384 - DNA, 25 bp, Homo sapien
tctacaggaaacacaaagatcctcc

SEQ ID NO: 539385 - DNA, 25 bp, Homo sapien
taataaaaggatagagaagtagaac

SEQ ID NO: 539386 - DNA, 25 bp, Homo sapien
caaacaagcctgatggtatagattt

SEQ ID NO: 539387 - DNA, 25 bp, Homo sapien
tatagatttaggactgcctgacaga

SEQ ID NO: 539388 - DNA, 25 bp, Homo sapien
ccttggatgtgagttaatggaacca

SEQ ID NO: 539389 - DNA, 25 bp, Homo sapien
ctgattcatgcgcactgggatggtc

SEQ ID NO: 539390 - DNA, 25 bp, Homo sapien
gattcatgcgcactgggatggtcca

SEQ ID NO: 539391 - DNA, 25 bp, Homo sapien
tgattcatgcgcactgggatggtcc

SEQ ID NO: 539392 - DNA, 25 bp, Homo sapien
gctcttcgatcagctgattggctta

SEQ ID NO: 539393 - DNA, 25 bp, Homo sapien
tctgaaaagacgattgctgtaaatt

SEQ ID NO: 539394 - DNA, 25 bp, Homo sapien
gagccctcagggcatgctcatgtct

SEQ ID NO: 539395 - DNA, 25 bp, Homo sapien
gattggcttagtgggtgagccctca

SEQ ID NO: 539396 - DNA, 25 bp, Homo sapien
gttccttcaaagcaggcagccacca

SEQ ID NO: 539397 - DNA, 25 bp, Homo sapien
tctgttgttccttcaaagcaggcag

SEQ ID NO: 539398 - DNA, 25 bp, Homo sapien
tgttgttccttcaaagcaggcagcc

SEQ ID NO: 539399 - DNA, 25 bp, Homo sapien
gttgttccttcaaagcaggcagcca

SEQ ID NO: 539400 - DNA, 25 bp, Homo sapien
caaagccaggcccatccgtagaggg

SEQ ID NO: 539401 - DNA, 25 bp, Homo sapien
tgtggtgcctttctgtttcgtttcc

SEQ ID NO: 539402 - DNA, 25 bp, Homo sapien
aatgtgctcacattcaaagccaggc

SEQ ID NO: 539403 - DNA, 25 bp, Homo sapien
ctaatggctgttgtcaatgtgctca

SEQ ID NO: 539404 - DNA, 25 bp, Homo sapien
gcatgaagccactctagagtattcc

SEQ ID NO: 539405 - DNA, 25 bp, Homo sapien
gacctgagtactcctaaagacacca

SEQ ID NO: 539406 - DNA, 25 bp, Homo sapien
cttttcctcaaaggctagagacctg

SEQ ID NO: 539407 - DNA, 25 bp, Homo sapien
tatttatctcgttgaatggcaccag

SEQ ID NO: 539408 - DNA, 25 bp, Homo sapien
gacaacctgtgatcctggaatgaca

SEQ ID NO: 539409 - DNA, 25 bp, Homo sapien
tgtgggacaacctgtgatcctggaa

SEQ ID NO: 539410 - DNA, 25 bp, Homo sapien
ctgtgatcctggaatgacatcccac

SEQ ID NO: 539411 - DNA, 25 bp, Homo sapien
caggacttgtgggacaacctgtgat

SEQ ID NO: 539412 - DNA, 25 bp, Homo sapien
taagattactttgcacccataactg

SEQ ID NO: 539413 - DNA, 25 bp, Homo sapien
gatagcatcaagtctagtgtgcaga

SEQ ID NO: 539414 - DNA, 25 bp, Homo sapien
tattatctccctctaacagaaggag

SEQ ID NO: 539415 - DNA, 25 bp, Homo sapien
taggaaaataggtccattgaagctc

SEQ ID NO: 539416 - DNA, 25 bp, Homo sapien
cagagggctgtacacagggagacaa

SEQ ID NO: 539417 - DNA, 25 bp, Homo sapien
ctctacccagagggctgtacacagg

SEQ ID NO: 539418 - DNA, 25 bp, Homo sapien
tcagcatctgtatttagatgacagc

SEQ ID NO: 539419 - DNA, 25 bp, Homo sapien
tacccagagggctgtacacagggag

SEQ ID NO: 539420 - DNA, 25 bp, Homo sapien
ccagctgtccggagcatgcagcaga

SEQ ID NO: 539421 - DNA, 25 bp, Homo sapien
cttccaagcctgcagtgctccctaa

SEQ ID NO: 539422 - DNA, 25 bp, Homo sapien
catcctgacagtttaattctgagca

SEQ ID NO: 539423 - DNA, 25 bp, Homo sapien
agtgctccctaacggccagctgtcc

SEQ ID NO: 539424 - DNA, 25 bp, Homo sapien
cacgtctgcaatttacctggaggga

SEQ ID NO: 539425 - DNA, 25 bp, Homo sapien
acgtctgcaatttacctggagggaa

SEQ ID NO: 539426 - DNA, 25 bp, Homo sapien
gatcaaagctgatgaaaaacagacc

SEQ ID NO: 539427 - DNA, 25 bp, Homo sapien
acagacctctaaagggttgaattgc

SEQ ID NO: 539428 - DNA, 25 bp, Homo sapien
cagtactccaaacacttgtctcaat

SEQ ID NO: 539429 - DNA, 25 bp, Homo sapien
gtgacagtactccaaacacttgtct

SEQ ID NO: 539430 - DNA, 25 bp, Homo sapien
gcagctgaccgcagcgagtgataga

SEQ ID NO: 539431 - DNA, 25 bp, Homo sapien
aaagaattggtgtggcagctgaccg

SEQ ID NO: 539432 - DNA, 25 bp, Homo sapien
atgtaacacgtaaggttcttgccta

SEQ ID NO: 539433 - DNA, 25 bp, Homo sapien
gaccgcagcgagtgatagacacaag

SEQ ID NO: 539434 - DNA, 25 bp, Homo sapien
gattgctggtggtgccaaagcatga

SEQ ID NO: 539435 - DNA, 25 bp, Homo sapien
taacttggtgagctatgtctctcaa

SEQ ID NO: 539436 - DNA, 25 bp, Homo sapien
tttttaacttggtgagctatgtctc

SEQ ID NO: 539437 - DNA, 25 bp, Homo sapien
caagaaagggagaaagtgcgtgcag

SEQ ID NO: 539438 - DNA, 25 bp, Homo sapien
caaaggcctgcaatatttgggcgag

SEQ ID NO: 539439 - DNA, 25 bp, Homo sapien
gattgaacatttgacttgggccaca

SEQ ID NO: 539440 - DNA, 25 bp, Homo sapien
tatttgaaatgttgagggtctcctc

SEQ ID NO: 539441 - DNA, 25 bp, Homo sapien
tgtggcatcccctagaactcagtta

SEQ ID NO: 539442 - DNA, 25 bp, Homo sapien
gatcctagctgctggcaagagacat

SEQ ID NO: 539443 - DNA, 25 bp, Homo sapien
agtgggttcaatcttctgggagtag

SEQ ID NO: 539444 - DNA, 25 bp, Homo sapien
aagagacattggttgagctcccaca

SEQ ID NO: 539445 - DNA, 25 bp, Homo sapien
gtattttaggcactactgtcaccag

SEQ ID NO: 539446 - DNA, 25 bp, Homo sapien
agggacaggaattgccatcaatatg

SEQ ID NO: 539447 - DNA, 25 bp, Homo sapien
gaaaggggctaagacagggacagga

SEQ ID NO: 539448 - DNA, 25 bp, Homo sapien
ccatctggaaaggggctaagacagg

SEQ ID NO: 539449 - DNA, 25 bp, Homo sapien
ccatcaatatggacagagtttgatt

SEQ ID NO: 539450 - DNA, 25 bp, Homo sapien
gactcataccctcgtgaaggctggg

SEQ ID NO: 539451 - DNA, 25 bp, Homo sapien
taagatcacgactggcctactctga

SEQ ID NO: 539452 - DNA, 25 bp, Homo sapien
gaaaatctcgaggttgaacagtcac

SEQ ID NO: 539453 - DNA, 25 bp, Homo sapien
gaacagtcacaactggatgcaggct

SEQ ID NO: 539454 - DNA, 25 bp, Homo sapien
ctagctttctaccaggacatgtgtg

SEQ ID NO: 539455 - DNA, 25 bp, Homo sapien
cacaggcatacagtgtgagtgaaaa

SEQ ID NO: 539456 - DNA, 25 bp, Homo sapien
ttcattggcaatgctcccaaaagag

SEQ ID NO: 539457 - DNA, 25 bp, Homo sapien
tcagttgcccataaataaaaaggtg

SEQ ID NO: 539458 - DNA, 25 bp, Homo sapien
tgcttttgctaaagtaccagtgacc

SEQ ID NO: 539459 - DNA, 25 bp, Homo sapien
gtgaccttccagttgtgagatatct

SEQ ID NO: 539460 - DNA, 25 bp, Homo sapien
tactggctctgttactttggacggt

SEQ ID NO: 539461 - DNA, 25 bp, Homo sapien
tggacggtttatgtctatcttggaa

SEQ ID NO: 539462 - DNA, 25 bp, Homo sapien
atgaaatactctgcacaattcgaac

SEQ ID NO: 539463 - DNA, 25 bp, Homo sapien
gaacttcaaaatacagccttatata

SEQ ID NO: 539464 - DNA, 25 bp, Homo sapien
ggcctgaacttcaaaatacagcctt

SEQ ID NO: 539465 - DNA, 25 bp, Homo sapien
acaattcgaactaggtatcccaggg

SEQ ID NO: 539466 - DNA, 25 bp, Homo sapien
cactcttgttttagaggtggtacac

SEQ ID NO: 539467 - DNA, 25 bp, Homo sapien
ccaagttcttcttctctttacactc

SEQ ID NO: 539468 - DNA, 25 bp, Homo sapien
cttgttttagaggtggtacactcat

SEQ ID NO: 539469 - DNA, 25 bp, Homo sapien
tctctttacactcttgttttagagg

SEQ ID NO: 539470 - DNA, 25 bp, Homo sapien
taatgtacagggaatcgttatgcta

SEQ ID NO: 539471 - DNA, 25 bp, Homo sapien
taactgcctatgataattgaagtag

SEQ ID NO: 539472 - DNA, 25 bp, Homo sapien
tgttccaggcagaaacagttgcaca

SEQ ID NO: 539473 - DNA, 25 bp, Homo sapien
cagttgcacagtctaatggaataac

SEQ ID NO: 539474 - DNA, 25 bp, Homo sapien
aactccatgtgagtagcctgctaga

SEQ ID NO: 539475 - DNA, 25 bp, Homo sapien
actccatgtgagtagcctgctagaa

SEQ ID NO: 539476 - DNA, 25 bp, Homo sapien
tccatgtgagtagcctgctagaaat

SEQ ID NO: 539477 - DNA, 25 bp, Homo sapien
gaactccatgtgagtagcctgctag

SEQ ID NO: 539478 - DNA, 25 bp, Homo sapien
tagtggtgctttcaagtagtacagc

SEQ ID NO: 539479 - DNA, 25 bp, Homo sapien
tcagggtcttagcttcaacaggagt

SEQ ID NO: 539480 - DNA, 25 bp, Homo sapien
caattagctagctgatagtcttcag

SEQ ID NO: 539481 - DNA, 25 bp, Homo sapien
aaacaaggttgtcatctagtggtgc

SEQ ID NO: 539482 - DNA, 25 bp, Homo sapien
tacatctctaggactccttcatctg

SEQ ID NO: 539483 - DNA, 25 bp, Homo sapien
gctgaattgggagttaggagtcatt

SEQ ID NO: 539484 - DNA, 25 bp, Homo sapien
tggtgtgttataatggaaagagtgc

SEQ ID NO: 539485 - DNA, 25 bp, Homo sapien
tctgtaaagttgaagaggtgaattt

SEQ ID NO: 539486 - DNA, 25 bp, Homo sapien
tcgtagaagtgccaatccggtgagg

SEQ ID NO: 539487 - DNA, 25 bp, Homo sapien
tgaggaggctgaataagtgccccct

SEQ ID NO: 539488 - DNA, 25 bp, Homo sapien
gtgaggaggctgaataagtgccccc

SEQ ID NO: 539489 - DNA, 25 bp, Homo sapien
gaggaggctgaataagtgccccctc

SEQ ID NO: 539490 - DNA, 25 bp, Homo sapien
agctgggattacaggtgtgcaccac

SEQ ID NO: 539491 - DNA, 25 bp, Homo sapien
tactgcaacctctgcctcccaggtt

SEQ ID NO: 539492 - DNA, 25 bp, Homo sapien
gtacaatggcacgatttcggcttac

SEQ ID NO: 539493 - DNA, 25 bp, Homo sapien
caagcgatctcctgtctcagcctcc

SEQ ID NO: 539494 - DNA, 25 bp, Homo sapien
gaccgtattctagatatgacagaac

SEQ ID NO: 539495 - DNA, 25 bp, Homo sapien
gagataactctatgcaaagcagatc

SEQ ID NO: 539496 - DNA, 25 bp, Homo sapien
tatctgaagtatgggctgaagacag

SEQ ID NO: 539497 - DNA, 25 bp, Homo sapien
taggttctcagcatagtgatggtgc

SEQ ID NO: 539498 - DNA, 25 bp, Homo sapien
cattcttcgggtatgacagcagttg

SEQ ID NO: 539499 - DNA, 25 bp, Homo sapien
ggtatgacagcagttgttaaattca

SEQ ID NO: 539500 - DNA, 25 bp, Homo sapien
ttaccgggcagaagttgaagccctc

SEQ ID NO: 539501 - DNA, 25 bp, Homo sapien
gaagccctccattcttcgggtatga

SEQ ID NO: 539502 - DNA, 25 bp, Homo sapien
aatctctgttggatgtgcaatgtca

SEQ ID NO: 539503 - DNA, 25 bp, Homo sapien
tttactaaattatgtccagcagctg

SEQ ID NO: 539504 - DNA, 25 bp, Homo sapien
taccaaatgttatgtcaaagctgtg

SEQ ID NO: 539505 - DNA, 25 bp, Homo sapien
gattcttacatttaggcaaaaacag

SEQ ID NO: 539506 - DNA, 25 bp, Homo sapien
gtaaatgcttgctttgtacttggcc

SEQ ID NO: 539507 - DNA, 25 bp, Homo sapien
tgattattgtaaatgcttgctttgt

SEQ ID NO: 539508 - DNA, 25 bp, Homo sapien
cttttgtatgccctgattattgtaa

SEQ ID NO: 539509 - DNA, 25 bp, Homo sapien
ttgatcttttgtatgccctgattat

SEQ ID NO: 539510 - DNA, 25 bp, Homo sapien
gcgtgtctgtaacttttgattgatc

SEQ ID NO: 539511 - DNA, 25 bp, Homo sapien
tactcagactttatagcgtgtctgt

SEQ ID NO: 539512 - DNA, 25 bp, Homo sapien
taggctaaaggcaagatgttcaaag

SEQ ID NO: 539513 - DNA, 25 bp, Homo sapien
taatcataattgctctacttctacc

SEQ ID NO: 539514 - DNA, 25 bp, Homo sapien
tggaagttgatctctaaaaggcagt

SEQ ID NO: 539515 - DNA, 25 bp, Homo sapien
ggatatagggaaaggaaaactcatc

SEQ ID NO: 539516 - DNA, 25 bp, Homo sapien
tttcagtgatgataggcccctcagg

SEQ ID NO: 539517 - DNA, 25 bp, Homo sapien
agatgttctccagccaattctgcag

SEQ ID NO: 539518 - DNA, 25 bp, Homo sapien
acgtggttcattggcagactgcatc

SEQ ID NO: 539519 - DNA, 25 bp, Homo sapien
ttaggatagggaaagacgtggttca

SEQ ID NO: 539520 - DNA, 25 bp, Homo sapien
cagaggcgttcacagaagaactgga

SEQ ID NO: 539521 - DNA, 25 bp, Homo sapien
tgtggagcaactcaattcagaggcg

SEQ ID NO: 539522 - DNA, 25 bp, Homo sapien
ttgctgtctagggagagactgctcc

SEQ ID NO: 539523 - DNA, 25 bp, Homo sapien
gatcaaatcctattgtattaaccac

SEQ ID NO: 539524 - DNA, 25 bp, Homo sapien
aattcctccaacacgagatcaaatc

SEQ ID NO: 539525 - DNA, 25 bp, Homo sapien
ttttcttgagccatcccgaattcct

SEQ ID NO: 539526 - DNA, 25 bp, Homo sapien
tctgatcttgtggctcccactcaag

SEQ ID NO: 539527 - DNA, 25 bp, Homo sapien
tcttgtggctcccactcaagaactg

SEQ ID NO: 539528 - DNA, 25 bp, Homo sapien
ttgtggctcccactcaagaactgac

SEQ ID NO: 539529 - DNA, 25 bp, Homo sapien
gtggctcccactcaagaactgactc

SEQ ID NO: 539530 - DNA, 25 bp, Homo sapien
gggcactctcacctaataccaatgg

SEQ ID NO: 539531 - DNA, 25 bp, Homo sapien
taccaatggtgctccataggtggca

SEQ ID NO: 539532 - DNA, 25 bp, Homo sapien
tttgactagttacacaggacttggc

SEQ ID NO: 539533 - DNA, 25 bp, Homo sapien
tcagggaaccctctcgtttgactag

SEQ ID NO: 539534 - DNA, 25 bp, Homo sapien
agaacccttttggtcccagactgca

SEQ ID NO: 539535 - DNA, 25 bp, Homo sapien
gaacccttttggtcccagactgcac

SEQ ID NO: 539536 - DNA, 25 bp, Homo sapien
ggcttggcacgctagacttatcgat

SEQ ID NO: 539537 - DNA, 25 bp, Homo sapien
caatgtgcagtcgaagtgcctggct

SEQ ID NO: 539538 - DNA, 25 bp, Homo sapien
tctctgaggaggctaacaatttgtc

SEQ ID NO: 539539 - DNA, 25 bp, Homo sapien
cgcatcgtgcgtggtaagttccccg

SEQ ID NO: 539540 - DNA, 25 bp, Homo sapien
ggatccttgtttggccctaagtagc

SEQ ID NO: 539541 - DNA, 25 bp, Homo sapien
taagagtagcccttaataaccagag

SEQ ID NO: 539542 - DNA, 25 bp, Homo sapien
gatacagcagtaccaatttgagcct

SEQ ID NO: 539543 - DNA, 25 bp, Homo sapien
cagggccggtagttcagaggcttct

SEQ ID NO: 539544 - DNA, 25 bp, Homo sapien
gctctgtttactgttaaacagatgc

SEQ ID NO: 539545 - DNA, 25 bp, Homo sapien
agctctgtttactgttaaacagatg

SEQ ID NO: 539546 - DNA, 25 bp, Homo sapien
ttactgttaaacagatgctttgcct

SEQ ID NO: 539547 - DNA, 25 bp, Homo sapien
ctgttaaacagatgctttgcctcac

SEQ ID NO: 539548 - DNA, 25 bp, Homo sapien
tttcagttgcagaagatatccgttt

SEQ ID NO: 539549 - DNA, 25 bp, Homo sapien
ggtatggctgtctaactgtatctag

SEQ ID NO: 539550 - DNA, 25 bp, Homo sapien
tgtatctagacaaattatttcccca

SEQ ID NO: 539551 - DNA, 25 bp, Homo sapien
aattaaattggtatggctgtctaac

SEQ ID NO: 539552 - DNA, 25 bp, Homo sapien
tgcctgttctgcctgtgatccaagg

SEQ ID NO: 539553 - DNA, 25 bp, Homo sapien
gcctgttctgcctgtgatccaaggc

SEQ ID NO: 539554 - DNA, 25 bp, Homo sapien
tatccgcatccttaaggtcaaacca

SEQ ID NO: 539555 - DNA, 25 bp, Homo sapien
gtcaccatgttaatatccgcatcct

SEQ ID NO: 539556 - DNA, 25 bp, Homo sapien
aaggtcaaaccatctacctcgactg

SEQ ID NO: 539557 - DNA, 25 bp, Homo sapien
tgttaatatccgcatccttaaggtc

SEQ ID NO: 539558 - DNA, 25 bp, Homo sapien
aaagaaagtcgttgcatatcaatat

SEQ ID NO: 539559 - DNA, 25 bp, Homo sapien
ctaaagaaagtcgttgcatatcaat

SEQ ID NO: 539560 - DNA, 25 bp, Homo sapien
gatgactaaagaaagtcgttgcata

SEQ ID NO: 539561 - DNA, 25 bp, Homo sapien
tgactaaagaaagtcgttgcatatc

SEQ ID NO: 539562 - DNA, 25 bp, Homo sapien
ggcagcaggtcagtggtaatcaata

SEQ ID NO: 539563 - DNA, 25 bp, Homo sapien
tgggcagcaggtcagtggtaatcaa

SEQ ID NO: 539564 - DNA, 25 bp, Homo sapien
ctgggcagcaggtcagtggtaatca

SEQ ID NO: 539565 - DNA, 25 bp, Homo sapien
gcagcaggtcagtggtaatcaatac

SEQ ID NO: 539566 - DNA, 25 bp, Homo sapien
aatgaaactccttctgatcacatcg

SEQ ID NO: 539567 - DNA, 25 bp, Homo sapien
agtgtgtccagcttctacctcttat

SEQ ID NO: 539568 - DNA, 25 bp, Homo sapien
ttctgatcacatcgcgttccttttg

SEQ ID NO: 539569 - DNA, 25 bp, Homo sapien
gcagtcagggttttatacaagtcac

SEQ ID NO: 539570 - DNA, 25 bp, Homo sapien
actcttccttcctaacaagaatccg

SEQ ID NO: 539571 - DNA, 25 bp, Homo sapien
gcattatagctgacagcaaaacaac

SEQ ID NO: 539572 - DNA, 25 bp, Homo sapien
aggcattatagctgacagcaaaaca

SEQ ID NO: 539573 - DNA, 25 bp, Homo sapien
ccttcctaacaagaatccgaatggg

SEQ ID NO: 539574 - DNA, 25 bp, Homo sapien
tgaacgatcgcatcataacccttga

SEQ ID NO: 539575 - DNA, 25 bp, Homo sapien
catgaccaggagtacccacgatgat

SEQ ID NO: 539576 - DNA, 25 bp, Homo sapien
cacacacgttggtgccccaaataca

SEQ ID NO: 539577 - DNA, 25 bp, Homo sapien
aaacacatgaccaggagtacccacg

SEQ ID NO: 539578 - DNA, 25 bp, Homo sapien
tggatgacagagggcttctcagaac

SEQ ID NO: 539579 - DNA, 25 bp, Homo sapien
gctggatgacagagggcttctcaga

SEQ ID NO: 539580 - DNA, 25 bp, Homo sapien
ctggatgacagagggcttctcagaa

SEQ ID NO: 539581 - DNA, 25 bp, Homo sapien
tgctggatgacagagggcttctcag

SEQ ID NO: 539582 - DNA, 25 bp, Homo sapien
tgtagatgtacatgccatggaggag

SEQ ID NO: 539583 - DNA, 25 bp, Homo sapien
catcaaagctgtcgtcaacctcatt

SEQ ID NO: 539584 - DNA, 25 bp, Homo sapien
tcaaagctgtcgtcaacctcattcc

SEQ ID NO: 539585 - DNA, 25 bp, Homo sapien
gtcatcaaagctgtcgtcaacctca

SEQ ID NO: 539586 - DNA, 25 bp, Homo sapien
tgtcgcatgcatgcccagagctctg

SEQ ID NO: 539587 - DNA, 25 bp, Homo sapien
ggctgattgtgatgcgacaccccag

SEQ ID NO: 539588 - DNA, 25 bp, Homo sapien
gacagagttgctagggatgcttcag

SEQ ID NO: 539589 - DNA, 25 bp, Homo sapien
tcttcctttctgtggacagagttgc

SEQ ID NO: 539590 - DNA, 25 bp, Homo sapien
caccatacagagtggaacccagtct

SEQ ID NO: 539591 - DNA, 25 bp, Homo sapien
aatctcagagacgagccatgggctc

SEQ ID NO: 539592 - DNA, 25 bp, Homo sapien
tctgcttgatcacttctgcggtggc

SEQ ID NO: 539593 - DNA, 25 bp, Homo sapien
ctaaaggatttgatggtgggcctcc

SEQ ID NO: 539594 - DNA, 25 bp, Homo sapien
catgccaggtctgagaatcgaactc

SEQ ID NO: 539595 - DNA, 25 bp, Homo sapien
tgtcccttgtttggtgcatgccagg

SEQ ID NO: 539596 - DNA, 25 bp, Homo sapien
tgcttttgccatactgctggaggag

SEQ ID NO: 539597 - DNA, 25 bp, Homo sapien
ttccaaggacagtaaggtaacagct

SEQ ID NO: 539598 - DNA, 25 bp, Homo sapien
ctccaaccaaatgtttcccacagtc

SEQ ID NO: 539599 - DNA, 25 bp, Homo sapien
caaccaaatgtttcccacagtcaag

SEQ ID NO: 539600 - DNA, 25 bp, Homo sapien
tccaaccaaatgtttcccacagtca

SEQ ID NO: 539601 - DNA, 25 bp, Homo sapien
accaaatgtttcccacagtcaagca

SEQ ID NO: 539602 - DNA, 25 bp, Homo sapien
caactttaatgccatcaatgttaat

SEQ ID NO: 539603 - DNA, 25 bp, Homo sapien
ataccaactttaatgccatcaatgt

SEQ ID NO: 539604 - DNA, 25 bp, Homo sapien
gataactcattaccatacgaccagc

SEQ ID NO: 539605 - DNA, 25 bp, Homo sapien
ttctgataactcattaccatacgac

SEQ ID NO: 539606 - DNA, 25 bp, Homo sapien
caggtttagctgatgagggcaccca

SEQ ID NO: 539607 - DNA, 25 bp, Homo sapien
agcaggtttagctgatgagggcacc

SEQ ID NO: 539608 - DNA, 25 bp, Homo sapien
aggtttagctgatgagggcacccaa

SEQ ID NO: 539609 - DNA, 25 bp, Homo sapien
ggtttagctgatgagggcacccaac

SEQ ID NO: 539610 - DNA, 25 bp, Homo sapien
taggaactacagcaccccttatagc

SEQ ID NO: 539611 - DNA, 25 bp, Homo sapien
tacagcaccccttatagcctttgtg

SEQ ID NO: 539612 - DNA, 25 bp, Homo sapien
cccttatagcctttgtgaagctggg

SEQ ID NO: 539613 - DNA, 25 bp, Homo sapien
agggatgcctaggaactacagcacc

SEQ ID NO: 539614 - DNA, 25 bp, Homo sapien
ctgagctgagctgcaaaaacttgcc

SEQ ID NO: 539615 - DNA, 25 bp, Homo sapien
tgagctgagctgcaaaaacttgcca

SEQ ID NO: 539616 - DNA, 25 bp, Homo sapien
accgctggcagctggagtatagacc

SEQ ID NO: 539617 - DNA, 25 bp, Homo sapien
ccgctggcagctggagtatagacca

SEQ ID NO: 539618 - DNA, 25 bp, Homo sapien
cgctggcagctggagtatagaccat

SEQ ID NO: 539619 - DNA, 25 bp, Homo sapien
caccgctggcagctggagtatagac

SEQ ID NO: 539620 - DNA, 25 bp, Homo sapien
acttaacagcgtatttagaaagcat

SEQ ID NO: 539621 - DNA, 25 bp, Homo sapien
aacttaacagcgtatttagaaagca

SEQ ID NO: 539622 - DNA, 25 bp, Homo sapien
cagttataaatcttatacgagtgaa

SEQ ID NO: 539623 - DNA, 25 bp, Homo sapien
gtaaatatcaggattgaatactaaa

SEQ ID NO: 539624 - DNA, 25 bp, Homo sapien
agaaggttatcaacaggtattttca

SEQ ID NO: 539625 - DNA, 25 bp, Homo sapien
caggattgaatactaaaatatcagt

SEQ ID NO: 539626 - DNA, 25 bp, Homo sapien
tctctgtcttacccctgagttgaat

SEQ ID NO: 539627 - DNA, 25 bp, Homo sapien
gtgggcagttctcttatctctgtct

SEQ ID NO: 539628 - DNA, 25 bp, Homo sapien
atctctgtcttacccctgagttgaa

SEQ ID NO: 539629 - DNA, 25 bp, Homo sapien
ggtgggcagttctcttatctctgtc

SEQ ID NO: 539630 - DNA, 25 bp, Homo sapien
ttcatggttcgtgaattcgttgtta

SEQ ID NO: 539631 - DNA, 25 bp, Homo sapien
catggttcgtgaattcgttgttatt

SEQ ID NO: 539632 - DNA, 25 bp, Homo sapien
caatttcatggttcgtgaattcgtt

SEQ ID NO: 539633 - DNA, 25 bp, Homo sapien
ttcgtgaattcgttgttattattgc

SEQ ID NO: 539634 - DNA, 25 bp, Homo sapien
ctttctcatattttcctccaatctc

SEQ ID NO: 539635 - DNA, 25 bp, Homo sapien
ttaggtctctttctcatattttcct

SEQ ID NO: 539636 - DNA, 25 bp, Homo sapien
tcatattttcctccaatctctactg

SEQ ID NO: 539637 - DNA, 25 bp, Homo sapien
ttctcatattttcctccaatctcta

SEQ ID NO: 539638 - DNA, 25 bp, Homo sapien
tagcagtcagtgttccatagaatac

SEQ ID NO: 539639 - DNA, 25 bp, Homo sapien
ctagcagtcagtgttccatagaata

SEQ ID NO: 539640 - DNA, 25 bp, Homo sapien
taactggtggcactttaattttaga

SEQ ID NO: 539641 - DNA, 25 bp, Homo sapien
ctgctttaaaattaactggtggcac

SEQ ID NO: 539642 - DNA, 25 bp, Homo sapien
tttgggacaggccagatgttagttc

SEQ ID NO: 539643 - DNA, 25 bp, Homo sapien
gctgtagatgccataaaaagagaat

SEQ ID NO: 539644 - DNA, 25 bp, Homo sapien
taaggatcacgtttccaggacaagc

SEQ ID NO: 539645 - DNA, 25 bp, Homo sapien
gaggacgagggtctaacagaaccat

SEQ ID NO: 539646 - DNA, 25 bp, Homo sapien
gacaagcctcctgaggacgagggtc

SEQ ID NO: 539647 - DNA, 25 bp, Homo sapien
ctggtccataaggatcacgtttcca

SEQ ID NO: 539648 - DNA, 25 bp, Homo sapien
gttccttgcagagaggagtgtaagt

SEQ ID NO: 539649 - DNA, 25 bp, Homo sapien
agtcagcacagttaggaatcttatt

SEQ ID NO: 539650 - DNA, 25 bp, Homo sapien
cttgcagagaggagtgtaagtcagc

SEQ ID NO: 539651 - DNA, 25 bp, Homo sapien
gtcagcacagttaggaatcttattt

SEQ ID NO: 539652 - DNA, 25 bp, Homo sapien
aggcttgcttgaaatccactggata

SEQ ID NO: 539653 - DNA, 25 bp, Homo sapien
ggcttgcttgaaatccactggatac

SEQ ID NO: 539654 - DNA, 25 bp, Homo sapien
gagaacggagtaagtgttcactccc

SEQ ID NO: 539655 - DNA, 25 bp, Homo sapien
atgaggatatagaatgagtgagaac

SEQ ID NO: 539656 - DNA, 25 bp, Homo sapien
gcatagagaggttccccatcctcca

SEQ ID NO: 539657 - DNA, 25 bp, Homo sapien
cactcccatattgctcccttgagag

SEQ ID NO: 539658 - DNA, 25 bp, Homo sapien
gatttctcatagttaataaaaccag

SEQ ID NO: 539659 - DNA, 25 bp, Homo sapien
gagaatatcatgtatgctacataac

SEQ ID NO: 539660 - DNA, 25 bp, Homo sapien
gaatgccgtcaacaggatgtccctg

SEQ ID NO: 539661 - DNA, 25 bp, Homo sapien
ccagaatgtttaggtttatgagaca

SEQ ID NO: 539662 - DNA, 25 bp, Homo sapien
ctgactctgattcctcgccctcctc

SEQ ID NO: 539663 - DNA, 25 bp, Homo sapien
tcatttctgctgtcagattttgctg

SEQ ID NO: 539664 - DNA, 25 bp, Homo sapien
ttctgctgtcagattttgctgactc

SEQ ID NO: 539665 - DNA, 25 bp, Homo sapien
ctcatttctgctgtcagattttgct

SEQ ID NO: 539666 - DNA, 25 bp, Homo sapien
taccaacctcttctgtacatgtatg

SEQ ID NO: 539667 - DNA, 25 bp, Homo sapien
gacagttcacagatgtaccaacctc

SEQ ID NO: 539668 - DNA, 25 bp, Homo sapien
cgttttgccaactatcatgctgtct

SEQ ID NO: 539669 - DNA, 25 bp, Homo sapien
gaatgccatacagatccaagtactg

SEQ ID NO: 539670 - DNA, 25 bp, Homo sapien
ccaagtccaagttcaggtagctttg

SEQ ID NO: 539671 - DNA, 25 bp, Homo sapien
caagtccaagttcaggtagctttgt

SEQ ID NO: 539672 - DNA, 25 bp, Homo sapien
tatttgtttttatgacgaaattgca

SEQ ID NO: 539673 - DNA, 25 bp, Homo sapien
ccagaagttggagcaaatgggttct

SEQ ID NO: 539674 - DNA, 25 bp, Homo sapien
taagagacggtgagcacagatttca

SEQ ID NO: 539675 - DNA, 25 bp, Homo sapien
gaaactcttcgatatatcagcccac

SEQ ID NO: 539676 - DNA, 25 bp, Homo sapien
taagatttctgaaacagcccttgga

SEQ ID NO: 539677 - DNA, 25 bp, Homo sapien
gccttttgccactatccgaagggac

SEQ ID NO: 539678 - DNA, 25 bp, Homo sapien
cttttgccactatccgaagggacat

SEQ ID NO: 539679 - DNA, 25 bp, Homo sapien
tgccttttgccactatccgaaggga

SEQ ID NO: 539680 - DNA, 25 bp, Homo sapien
ccttttgccactatccgaagggaca

SEQ ID NO: 539681 - DNA, 25 bp, Homo sapien
acgctgcctgatcgcctcagaagcc

SEQ ID NO: 539682 - DNA, 25 bp, Homo sapien
cgctgcctgatcgcctcagaagccc

SEQ ID NO: 539683 - DNA, 25 bp, Homo sapien
taaatatccttggttaagcagctca

SEQ ID NO: 539684 - DNA, 25 bp, Homo sapien
ctcaggctgatcactggcagagaca

SEQ ID NO: 539685 - DNA, 25 bp, Homo sapien
caaaccctgtggaagcgggagaatc

SEQ ID NO: 539686 - DNA, 25 bp, Homo sapien
ccatgtattctcagggaaaggtgca

SEQ ID NO: 539687 - DNA, 25 bp, Homo sapien
cttgatatggatcctgatcatcctt

SEQ ID NO: 539688 - DNA, 25 bp, Homo sapien
tggcttgatatggatcctgatcatc

SEQ ID NO: 539689 - DNA, 25 bp, Homo sapien
ctggcttgatatggatcctgatcat

SEQ ID NO: 539690 - DNA, 25 bp, Homo sapien
ggcttgatatggatcctgatcatcc

SEQ ID NO: 539691 - DNA, 25 bp, Homo sapien
agctcccgaatttttattgtctgta

SEQ ID NO: 539692 - DNA, 25 bp, Homo sapien
tcagctcccgaatttttattgtctg

SEQ ID NO: 539693 - DNA, 25 bp, Homo sapien
ctttcagctcccgaatttttattgt

SEQ ID NO: 539694 - DNA, 25 bp, Homo sapien
cttgctttcagctcccgaattttta

SEQ ID NO: 539695 - DNA, 25 bp, Homo sapien
tcagtagatgtaatttattccatca

SEQ ID NO: 539696 - DNA, 25 bp, Homo sapien
atcatgctggttccctatttgcctt

SEQ ID NO: 539697 - DNA, 25 bp, Homo sapien
tgctggttccctatttgccttctct

SEQ ID NO: 539698 - DNA, 25 bp, Homo sapien
tatttttagcactgcctgattttgt

SEQ ID NO: 539699 - DNA, 25 bp, Homo sapien
cttattctttcatttgtattcctac

SEQ ID NO: 539700 - DNA, 25 bp, Homo sapien
tctagcacttcaatgtgagactccc

SEQ ID NO: 539701 - DNA, 25 bp, Homo sapien
gcacttcaatgtgagactccctcat

SEQ ID NO: 539702 - DNA, 25 bp, Homo sapien
agcacttcaatgtgagactccctca

SEQ ID NO: 539703 - DNA, 25 bp, Homo sapien
tagcacttcaatgtgagactccctc

SEQ ID NO: 539704 - DNA, 25 bp, Homo sapien
cacatctctaacatgtccccaggta

SEQ ID NO: 539705 - DNA, 25 bp, Homo sapien
agagcccaagcattcacccagctgt

SEQ ID NO: 539706 - DNA, 25 bp, Homo sapien
tttgttctcagactccacatctcta

SEQ ID NO: 539707 - DNA, 25 bp, Homo sapien
tcagcaggtaaagtacagacgcctt

SEQ ID NO: 539708 - DNA, 25 bp, Homo sapien
tatcgctcgcctactacagcttggc

SEQ ID NO: 539709 - DNA, 25 bp, Homo sapien
taaagcctgttatcgctcgcctact

SEQ ID NO: 539710 - DNA, 25 bp, Homo sapien
acctgtcctaggaccagacaagcct

SEQ ID NO: 539711 - DNA, 25 bp, Homo sapien
ctgtcctaggaccagacaagcctta

SEQ ID NO: 539712 - DNA, 25 bp, Homo sapien
agacttcttactccttctcaaattt

SEQ ID NO: 539713 - DNA, 25 bp, Homo sapien
gatatcactagacttcttactcctt

SEQ ID NO: 539714 - DNA, 25 bp, Homo sapien
attagtaaactgatatcactagact

SEQ ID NO: 539715 - DNA, 25 bp, Homo sapien
agggacacgcatgaaaaagatcatc

SEQ ID NO: 539716 - DNA, 25 bp, Homo sapien
gaatgaggtcctagcatgcagtaca

SEQ ID NO: 539717 - DNA, 25 bp, Homo sapien
gccacatgctttataagatcaggca

SEQ ID NO: 539718 - DNA, 25 bp, Homo sapien
tacatgatctactgtgctcattgcc

SEQ ID NO: 539719 - DNA, 25 bp, Homo sapien
ttaaaaaatattgggatcagagcca

SEQ ID NO: 539720 - DNA, 25 bp, Homo sapien
tctttgccactgtcaataatggtcc

SEQ ID NO: 539721 - DNA, 25 bp, Homo sapien
tttgccactgtcaataatggtcccc

SEQ ID NO: 539722 - DNA, 25 bp, Homo sapien
tgtctttgccactgtcaataatggt

SEQ ID NO: 539723 - DNA, 25 bp, Homo sapien
ttgccactgtcaataatggtcccca

SEQ ID NO: 539724 - DNA, 25 bp, Homo sapien
ggcccctgatagaaataagtgcacc

SEQ ID NO: 539725 - DNA, 25 bp, Homo sapien
gcccctgatagaaataagtgcacca

SEQ ID NO: 539726 - DNA, 25 bp, Homo sapien
cccctgatagaaataagtgcaccat

SEQ ID NO: 539727 - DNA, 25 bp, Homo sapien
ctgtttcttcgtggagccccttgac

SEQ ID NO: 539728 - DNA, 25 bp, Homo sapien
gatcaacttctattgtggccacaag

SEQ ID NO: 539729 - DNA, 25 bp, Homo sapien
ctgtgttgccttagcctttagatca

SEQ ID NO: 539730 - DNA, 25 bp, Homo sapien
ctctgtttcttcgtggagccccttg

SEQ ID NO: 539731 - DNA, 25 bp, Homo sapien
actcttcagttgggcgtcttttcat

SEQ ID NO: 539732 - DNA, 25 bp, Homo sapien
cagacatattgcgtagggtgcagac

SEQ ID NO: 539733 - DNA, 25 bp, Homo sapien
gaatttggcagacatattgcgtagg

SEQ ID NO: 539734 - DNA, 25 bp, Homo sapien
tagggtgcagacgataaaaacacat

SEQ ID NO: 539735 - DNA, 25 bp, Homo sapien
tcggactttctttccacggttgcgc

SEQ ID NO: 539736 - DNA, 25 bp, Homo sapien
ggtggtatcataccattcaggtaga

SEQ ID NO: 539737 - DNA, 25 bp, Homo sapien
gcgctgaaactcatccattccatca

SEQ ID NO: 539738 - DNA, 25 bp, Homo sapien
tcataccattcaggtagaggtaatt

SEQ ID NO: 539739 - DNA, 25 bp, Homo sapien
tcgtcattgtttgtggcaatgccat

SEQ ID NO: 539740 - DNA, 25 bp, Homo sapien
tattgacttcgtcattgtttgtggc

SEQ ID NO: 539741 - DNA, 25 bp, Homo sapien
cttcgtcattgtttgtggcaatgcc

SEQ ID NO: 539742 - DNA, 25 bp, Homo sapien
tctcatttattgacttcgtcattgt

SEQ ID NO: 539743 - DNA, 25 bp, Homo sapien
ctcaccaagcatgtcgtactctcca

SEQ ID NO: 539744 - DNA, 25 bp, Homo sapien
tcaccaagcatgtcgtactctccac

SEQ ID NO: 539745 - DNA, 25 bp, Homo sapien
gcatgtcgtactctccaccagaaca

SEQ ID NO: 539746 - DNA, 25 bp, Homo sapien
caagcatgtcgtactctccaccaga

SEQ ID NO: 539747 - DNA, 25 bp, Homo sapien
ctcagatgcctctcgtacaaaagga

SEQ ID NO: 539748 - DNA, 25 bp, Homo sapien
tgcaagctattgcaacacagctaac

SEQ ID NO: 539749 - DNA, 25 bp, Homo sapien
tgactagtaagagatgtttcctcca

SEQ ID NO: 539750 - DNA, 25 bp, Homo sapien
tcatgctggagatcaagtccattcc

SEQ ID NO: 539751 - DNA, 25 bp, Homo sapien
ataacaagcccatgttcaaatataa

SEQ ID NO: 539752 - DNA, 25 bp, Homo sapien
gacaggcacttcagtgaaataacaa

SEQ ID NO: 539753 - DNA, 25 bp, Homo sapien
aaatgacaggcacttcagtgaaata

SEQ ID NO: 539754 - DNA, 25 bp, Homo sapien
gcagaatactacaggttacccacat

SEQ ID NO: 539755 - DNA, 25 bp, Homo sapien
tgtatgaaagctgcaaaccatgtcc

SEQ ID NO: 539756 - DNA, 25 bp, Homo sapien
ggtacagtacagatgcatgatgcca

SEQ ID NO: 539757 - DNA, 25 bp, Homo sapien
tataaagtacgaccaacaagttgtg

SEQ ID NO: 539758 - DNA, 25 bp, Homo sapien
caggctgaatctgtaacacaaggca

SEQ ID NO: 539759 - DNA, 25 bp, Homo sapien
tgaccagtgtgatggaacccaagct

SEQ ID NO: 539760 - DNA, 25 bp, Homo sapien
tttttcctttcagtggaatctgtac

SEQ ID NO: 539761 - DNA, 25 bp, Homo sapien
tacagacagagctactaaggtgggc

SEQ ID NO: 539762 - DNA, 25 bp, Homo sapien
tggctttctctctcgcatatgcaag

SEQ ID NO: 539763 - DNA, 25 bp, Homo sapien
gagaggctcgggataaccatgatca

SEQ ID NO: 539764 - DNA, 25 bp, Homo sapien
tttcaccagtaagcgatggagccca

SEQ ID NO: 539765 - DNA, 25 bp, Homo sapien
ttagggtcaatcctgaaggactcag

SEQ ID NO: 539766 - DNA, 25 bp, Homo sapien
tggagcccataatctgtctgcagca

SEQ ID NO: 539767 - DNA, 25 bp, Homo sapien
gaaggcagtactaacagataagaca

SEQ ID NO: 539768 - DNA, 25 bp, Homo sapien
tgatatctagaaggagaattgtgat

SEQ ID NO: 539769 - DNA, 25 bp, Homo sapien
gtcattgatatctagaaggagaatt

SEQ ID NO: 539770 - DNA, 25 bp, Homo sapien
ggcagtactaacagataagacatat

SEQ ID NO: 539771 - DNA, 25 bp, Homo sapien
ttttatccaacactgtgagggccac

SEQ ID NO: 539772 - DNA, 25 bp, Homo sapien
gagggcgacccatccatttcgtcca

SEQ ID NO: 539773 - DNA, 25 bp, Homo sapien
tctcggtccagctgagtagaaactg

SEQ ID NO: 539774 - DNA, 25 bp, Homo sapien
tgaagtccttgttgataaaccgagg

SEQ ID NO: 539775 - DNA, 25 bp, Homo sapien
tccaggtagcagttaaccttgtatt

SEQ ID NO: 539776 - DNA, 25 bp, Homo sapien
catccaggtagcagttaaccttgta

SEQ ID NO: 539777 - DNA, 25 bp, Homo sapien
caggtagcagttaaccttgtattta

SEQ ID NO: 539778 - DNA, 25 bp, Homo sapien
caccatccaggtagcagttaacctt

SEQ ID NO: 539779 - DNA, 25 bp, Homo sapien
gcagcctggtccattagcaaggatg

SEQ ID NO: 539780 - DNA, 25 bp, Homo sapien
tctcttatggtgaaaaacgcaatgg

SEQ ID NO: 539781 - DNA, 25 bp, Homo sapien
tgagcttgtgggactccagaacact

SEQ ID NO: 539782 - DNA, 25 bp, Homo sapien
tatgtaacgagggacaatttcaggg

SEQ ID NO: 539783 - DNA, 25 bp, Homo sapien
gtgaagagagggcaattgtcattaa

SEQ ID NO: 539784 - DNA, 25 bp, Homo sapien
caatggtgagagtggcactgcccaa

SEQ ID NO: 539785 - DNA, 25 bp, Homo sapien
tcattaatgtcactgatgccaatgg

SEQ ID NO: 539786 - DNA, 25 bp, Homo sapien
gagagtggcactgcccaaaagtggt

SEQ ID NO: 539787 - DNA, 25 bp, Homo sapien
gatgatgctcacatactggtcctgg

SEQ ID NO: 539788 - DNA, 25 bp, Homo sapien
cagtaagcgataggtctgtacccca

SEQ ID NO: 539789 - DNA, 25 bp, Homo sapien
ttgtctagggtcacgtactggccac

SEQ ID NO: 539790 - DNA, 25 bp, Homo sapien
tacaggtgcattttccgggacccac

SEQ ID NO: 539791 - DNA, 25 bp, Homo sapien
tgtacagaagctcggtggcccggct

SEQ ID NO: 539792 - DNA, 25 bp, Homo sapien
cgcgggtagtccctcgtttaggctg

SEQ ID NO: 539793 - DNA, 25 bp, Homo sapien
ctcgtttaggctgtacagaagctcg

SEQ ID NO: 539794 - DNA, 25 bp, Homo sapien
tggcccggctgtaactcccgaggca

SEQ ID NO: 539795 - DNA, 25 bp, Homo sapien
ccacgaagaggaaaaacagaaacag

SEQ ID NO: 539796 - DNA, 25 bp, Homo sapien
cgaagaggaaaaacagaaacagatg

SEQ ID NO: 539797 - DNA, 25 bp, Homo sapien
acgaagaggaaaaacagaaacagat

SEQ ID NO: 539798 - DNA, 25 bp, Homo sapien
cacgaagaggaaaaacagaaacaga

SEQ ID NO: 539799 - DNA, 25 bp, Homo sapien
aagaaccctgctgcgaaggagagat

SEQ ID NO: 539800 - DNA, 25 bp, Homo sapien
ctagcgcccctgtgatccttgctgt

SEQ ID NO: 539801 - DNA, 25 bp, Homo sapien
gggtccgagagagaaactagcgccc

SEQ ID NO: 539802 - DNA, 25 bp, Homo sapien
ggaagaaagctcattacacacacgg

SEQ ID NO: 539803 - DNA, 25 bp, Homo sapien
acacggaaacccagggtaggtgatg

SEQ ID NO: 539804 - DNA, 25 bp, Homo sapien
agtggagaggattccgactcagaga

SEQ ID NO: 539805 - DNA, 25 bp, Homo sapien
gactcagagactgcgcaaagcgaca

SEQ ID NO: 539806 - DNA, 25 bp, Homo sapien
actgcgcaaagcgacacggaaaccc

SEQ ID NO: 539807 - DNA, 25 bp, Homo sapien
ctcctgggacgatgtagacgcccca

SEQ ID NO: 539808 - DNA, 25 bp, Homo sapien
gctgctcctgggacgatgtagacgc

SEQ ID NO: 539809 - DNA, 25 bp, Homo sapien
tcctgggacgatgtagacgccccat

SEQ ID NO: 539810 - DNA, 25 bp, Homo sapien
tgctcctgggacgatgtagacgccc

SEQ ID NO: 539811 - DNA, 25 bp, Homo sapien
ccaggcgcgggtgccaggtcgccgg

SEQ ID NO: 539812 - DNA, 25 bp, Homo sapien
atccaggcgcgggtgccaggtcgcc

SEQ ID NO: 539813 - DNA, 25 bp, Homo sapien
tgcgcgcattccctcggccgcgcat

SEQ ID NO: 539814 - DNA, 25 bp, Homo sapien
gggcctgtgagctgcgcgcattccc

SEQ ID NO: 539815 - DNA, 25 bp, Homo sapien
gggagggcggcagaagacactccct

SEQ ID NO: 539816 - DNA, 25 bp, Homo sapien
aagggagggcggcagaagacactcc

SEQ ID NO: 539817 - DNA, 25 bp, Homo sapien
cttgaagggagggcggcagaagaca

SEQ ID NO: 539818 - DNA, 25 bp, Homo sapien
tgaagggagggcggcagaagacact

SEQ ID NO: 539819 - DNA, 25 bp, Homo sapien
ttgccgcaccagtcagatgccaagt

SEQ ID NO: 539820 - DNA, 25 bp, Homo sapien
gggaacttcagccaatagtcactgg

SEQ ID NO: 539821 - DNA, 25 bp, Homo sapien
taaggacgggaactcaaagagtggc

SEQ ID NO: 539822 - DNA, 25 bp, Homo sapien
cactggctcttcaattaaggacggg

SEQ ID NO: 539823 - DNA, 25 bp, Homo sapien
tcctagttggaggctcaaatgtctc

SEQ ID NO: 539824 - DNA, 25 bp, Homo sapien
cagtggtagagcttctgctagtttc

SEQ ID NO: 539825 - DNA, 25 bp, Homo sapien
tctctgggtgtttgccttgtggtct

SEQ ID NO: 539826 - DNA, 25 bp, Homo sapien
ccttgtggtcttattttagaggcag

SEQ ID NO: 539827 - DNA, 25 bp, Homo sapien
gcagagtgggctgtttatccgctca

SEQ ID NO: 539828 - DNA, 25 bp, Homo sapien
acagcttcccgaagttggaggccca

SEQ ID NO: 539829 - DNA, 25 bp, Homo sapien
tgcaacaattctcccccagagacag

SEQ ID NO: 539830 - DNA, 25 bp, Homo sapien
ccagagttaggcaatctgtcagcag

SEQ ID NO: 539831 - DNA, 25 bp, Homo sapien
gaagaaccaagtgaatcaaactgta

SEQ ID NO: 539832 - DNA, 25 bp, Homo sapien
gcaggctgaagcctcgaagtattca

SEQ ID NO: 539833 - DNA, 25 bp, Homo sapien
tattcatgcggcattgtcactgcgc

SEQ ID NO: 539834 - DNA, 25 bp, Homo sapien
caatggagatgggatacctacagcc

SEQ ID NO: 539835 - DNA, 25 bp, Homo sapien
cactgtaactatatgagggtactca

SEQ ID NO: 539836 - DNA, 25 bp, Homo sapien
tctgcctgcttaagtaatatctgcc

SEQ ID NO: 539837 - DNA, 25 bp, Homo sapien
tgaatggacctcctaccatctggag

SEQ ID NO: 539838 - DNA, 25 bp, Homo sapien
ccagatataggagactctgcctgct

SEQ ID NO: 539839 - DNA, 25 bp, Homo sapien
tcacatggtcttcaatgccaaagct

SEQ ID NO: 539840 - DNA, 25 bp, Homo sapien
taaatcagccactgggatattgctg

SEQ ID NO: 539841 - DNA, 25 bp, Homo sapien
taacttgagatggtaggcattgcag

SEQ ID NO: 539842 - DNA, 25 bp, Homo sapien
tattgtttggactttatgacgcgaa

SEQ ID NO: 539843 - DNA, 25 bp, Homo sapien
cctccagttgactacagagggccca

SEQ ID NO: 539844 - DNA, 25 bp, Homo sapien
ggtacttctcagaacactggagcag

SEQ ID NO: 539845 - DNA, 25 bp, Homo sapien
gagagaaaatggttaggccttgcca

SEQ ID NO: 539846 - DNA, 25 bp, Homo sapien
cactggagcagggatctatgatatt

SEQ ID NO: 539847 - DNA, 25 bp, Homo sapien
gaaaagcttgaacttcagacttgac

SEQ ID NO: 539848 - DNA, 25 bp, Homo sapien
gaacttcagacttgaccttttcatc

SEQ ID NO: 539849 - DNA, 25 bp, Homo sapien
cttcagacttgaccttttcatcttc

SEQ ID NO: 539850 - DNA, 25 bp, Homo sapien
ttgaacttcagacttgaccttttca

SEQ ID NO: 539851 - DNA, 25 bp, Homo sapien
aacgtccactaatgcttctaaatct

SEQ ID NO: 539852 - DNA, 25 bp, Homo sapien
gcttctaaatcttggtcagagtcca

SEQ ID NO: 539853 - DNA, 25 bp, Homo sapien
gataacgtccactaatgcttctaaa

SEQ ID NO: 539854 - DNA, 25 bp, Homo sapien
taaatcttggtcagagtccaagaat

SEQ ID NO: 539855 - DNA, 25 bp, Homo sapien
cagctgcagggatgatcaatgctgc

SEQ ID NO: 539856 - DNA, 25 bp, Homo sapien
ctgcagggatgatcaatgctgccat

SEQ ID NO: 539857 - DNA, 25 bp, Homo sapien
gctgcagggatgatcaatgctgcca

SEQ ID NO: 539858 - DNA, 25 bp, Homo sapien
ggacttaacacatccaggaacgtgg

SEQ ID NO: 539859 - DNA, 25 bp, Homo sapien
catccaggaacgtgggccttacatt

SEQ ID NO: 539860 - DNA, 25 bp, Homo sapien
taacacatccaggaacgtgggcctt

SEQ ID NO: 539861 - DNA, 25 bp, Homo sapien
cacatccaggaacgtgggccttaca

SEQ ID NO: 539862 - DNA, 25 bp, Homo sapien
acaaactacagaaatgaaagtatag

SEQ ID NO: 539863 - DNA, 25 bp, Homo sapien
aactacagaaatgaaagtatagtct

SEQ ID NO: 539864 - DNA, 25 bp, Homo sapien
tgtccatgtgttctggtgctctaca

SEQ ID NO: 539865 - DNA, 25 bp, Homo sapien
gtgtccatgtgttctggtgctctac

SEQ ID NO: 539866 - DNA, 25 bp, Homo sapien
cacttcaggcaagattgctaaacaa

SEQ ID NO: 539867 - DNA, 25 bp, Homo sapien
gctagcatatggaacctcagggctc

SEQ ID NO: 539868 - DNA, 25 bp, Homo sapien
tgctttggcaatcccaggcacctaa

SEQ ID NO: 539869 - DNA, 25 bp, Homo sapien
agtgctaagtgcatccaaggttgcc

SEQ ID NO: 539870 - DNA, 25 bp, Homo sapien
gatgtgtggaaatgtctaggaacaa

SEQ ID NO: 539871 - DNA, 25 bp, Homo sapien
tccacagtggtctgcttaatagagg

SEQ ID NO: 539872 - DNA, 25 bp, Homo sapien
tggaaagactggcagacatgagatg

SEQ ID NO: 539873 - DNA, 25 bp, Homo sapien
cacatggagatagccactgaagtcc

SEQ ID NO: 539874 - DNA, 25 bp, Homo sapien
gcttcttgcatatccacactccaga

SEQ ID NO: 539875 - DNA, 25 bp, Homo sapien
ttcttgcatatccacactccagatc

SEQ ID NO: 539876 - DNA, 25 bp, Homo sapien
atagcttcttgcatatccacactcc

SEQ ID NO: 539877 - DNA, 25 bp, Homo sapien
agcttcttgcatatccacactccag

SEQ ID NO: 539878 - DNA, 25 bp, Homo sapien
ctttttgcatctgggactgcactag

SEQ ID NO: 539879 - DNA, 25 bp, Homo sapien
tctgaagtgttaggcagctactagc

SEQ ID NO: 539880 - DNA, 25 bp, Homo sapien
tcattctgaagtgttaggcagctac

SEQ ID NO: 539881 - DNA, 25 bp, Homo sapien
agctactagcatgtgtgcgccaaca

SEQ ID NO: 539882 - DNA, 25 bp, Homo sapien
ttcacataattgtagcgaagtttac

SEQ ID NO: 539883 - DNA, 25 bp, Homo sapien
cacataattgtagcgaagtttaccc

SEQ ID NO: 539884 - DNA, 25 bp, Homo sapien
aaacttcacataattgtagcgaagt

SEQ ID NO: 539885 - DNA, 25 bp, Homo sapien
taattgtagcgaagtttaccctcca

SEQ ID NO: 539886 - DNA, 25 bp, Homo sapien
aatactctaatgaatttacacttac

SEQ ID NO: 539887 - DNA, 25 bp, Homo sapien
tccaaatactctaatgaatttacac

SEQ ID NO: 539888 - DNA, 25 bp, Homo sapien
actctaatgaatttacacttacatc

SEQ ID NO: 539889 - DNA, 25 bp, Homo sapien
tctccaaatactctaatgaatttac

SEQ ID NO: 539890 - DNA, 25 bp, Homo sapien
tgtaaacatcaagtattatgaaaat

SEQ ID NO: 539891 - DNA, 25 bp, Homo sapien
catatatctccaagaaatatatggg

SEQ ID NO: 539892 - DNA, 25 bp, Homo sapien
tgggtataagcatacatagaaacag

SEQ ID NO: 539893 - DNA, 25 bp, Homo sapien
ttttcttgcactgatgagaaaaatg

SEQ ID NO: 539894 - DNA, 25 bp, Homo sapien
gaggaataattaggatcaaagggat

SEQ ID NO: 539895 - DNA, 25 bp, Homo sapien
gcttgaagaacaggttgttgagccc

SEQ ID NO: 539896 - DNA, 25 bp, Homo sapien
gcaggaagcctattactgagacagc

SEQ ID NO: 539897 - DNA, 25 bp, Homo sapien
gaggctgaggaataattaggatcaa

SEQ ID NO: 539898 - DNA, 25 bp, Homo sapien
gaatctggtctcatggaagagcatg

SEQ ID NO: 539899 - DNA, 25 bp, Homo sapien
caatagctggtagaagaaggattca

SEQ ID NO: 539900 - DNA, 25 bp, Homo sapien
cagtgagatgtgttccatcatgtcc

SEQ ID NO: 539901 - DNA, 25 bp, Homo sapien
ctcaaatgggaccttctgaagcttt

SEQ ID NO: 539902 - DNA, 25 bp, Homo sapien
ttgaatgaggctttattagatgcat

SEQ ID NO: 539903 - DNA, 25 bp, Homo sapien
tcttgaatgaggctttattagatgc

SEQ ID NO: 539904 - DNA, 25 bp, Homo sapien
aatgaggctttattagatgcattca

SEQ ID NO: 539905 - DNA, 25 bp, Homo sapien
cctcttgaatgaggctttattagat

SEQ ID NO: 539906 - DNA, 25 bp, Homo sapien
tataaacaatgtttatgactatgag

SEQ ID NO: 539907 - DNA, 25 bp, Homo sapien
taaacaatgtttatgactatgagac

SEQ ID NO: 539908 - DNA, 25 bp, Homo sapien
tttctgtccacagatctatataaac

SEQ ID NO: 539909 - DNA, 25 bp, Homo sapien
tgtccacagatctatataaacaatg

SEQ ID NO: 539910 - DNA, 25 bp, Homo sapien
gcatcttcaggtccaattgccacat

SEQ ID NO: 539911 - DNA, 25 bp, Homo sapien
caaagaaggtacataatactgcatc

SEQ ID NO: 539912 - DNA, 25 bp, Homo sapien
ttcttcaacaaagaaggtacataat

SEQ ID NO: 539913 - DNA, 25 bp, Homo sapien
atactgcatcttcaggtccaattgc

SEQ ID NO: 539914 - DNA, 25 bp, Homo sapien
ttttgaggctccactaaatgattgc

SEQ ID NO: 539915 - DNA, 25 bp, Homo sapien
ctttgccagactttgctaacagttt

SEQ ID NO: 539916 - DNA, 25 bp, Homo sapien
aacttataatcctgaagctttgaga

SEQ ID NO: 539917 - DNA, 25 bp, Homo sapien
tcttgtaacagcaccataattatga

SEQ ID NO: 539918 - DNA, 25 bp, Homo sapien
gagcgtttgctactggatcccagag

SEQ ID NO: 539919 - DNA, 25 bp, Homo sapien
cctccccacatgtgtaggagcgttt

SEQ ID NO: 539920 - DNA, 25 bp, Homo sapien
cttatctgaatctggtcttcctcca

SEQ ID NO: 539921 - DNA, 25 bp, Homo sapien
cccttatctgaatctggtcttcctc

SEQ ID NO: 539922 - DNA, 25 bp, Homo sapien
tcaaacaaattcgtgtaaaagtaca

SEQ ID NO: 539923 - DNA, 25 bp, Homo sapien
aggcatactgctccctgacaacatt

SEQ ID NO: 539924 - DNA, 25 bp, Homo sapien
taaaagtacaccctgaattggaatg

SEQ ID NO: 539925 - DNA, 25 bp, Homo sapien
gaagaccataaatcaaaatccaggc

SEQ ID NO: 539926 - DNA, 25 bp, Homo sapien
tcccagaaacaaagcaaaggtcaag

SEQ ID NO: 539927 - DNA, 25 bp, Homo sapien
tggtgttcccagaaacaaagcaaag

SEQ ID NO: 539928 - DNA, 25 bp, Homo sapien
ggtgatggtgttcccagaaacaaag

SEQ ID NO: 539929 - DNA, 25 bp, Homo sapien
gaaacaaagcaaaggtcaagctcac

SEQ ID NO: 539930 - DNA, 25 bp, Homo sapien
ctttagtaatatagcaggttttctt

SEQ ID NO: 539931 - DNA, 25 bp, Homo sapien
agtaatatagcaggttttcttgctt

SEQ ID NO: 539932 - DNA, 25 bp, Homo sapien
ttagtaatatagcaggttttcttgc

SEQ ID NO: 539933 - DNA, 25 bp, Homo sapien
tagtaatatagcaggttttcttgct

SEQ ID NO: 539934 - DNA, 25 bp, Homo sapien
tccgttatggttgctaccaccatca

SEQ ID NO: 539935 - DNA, 25 bp, Homo sapien
tcatccgttatggttgctaccacca

SEQ ID NO: 539936 - DNA, 25 bp, Homo sapien
tcatcatccgttatggttgctacca

SEQ ID NO: 539937 - DNA, 25 bp, Homo sapien
tatggttgctaccaccatcacctgc

SEQ ID NO: 539938 - DNA, 25 bp, Homo sapien
ctgaacgagtcttctagcatgaatg

SEQ ID NO: 539939 - DNA, 25 bp, Homo sapien
gaacgagtcttctagcatgaatgat

SEQ ID NO: 539940 - DNA, 25 bp, Homo sapien
agtcttctagcatgaatgatgtcac

SEQ ID NO: 539941 - DNA, 25 bp, Homo sapien
tttccatcaatgactcctgaacgag

SEQ ID NO: 539942 - DNA, 25 bp, Homo sapien
tcttgctccctgagtaggtggttct

SEQ ID NO: 539943 - DNA, 25 bp, Homo sapien
tgctccctgagtaggtggttctgat

SEQ ID NO: 539944 - DNA, 25 bp, Homo sapien
cctgagtaggtggttctgatctctt

SEQ ID NO: 539945 - DNA, 25 bp, Homo sapien
ttttagcctctccatctcactcttg

SEQ ID NO: 539946 - DNA, 25 bp, Homo sapien
ccctcaaatctattgtgtatatgca

SEQ ID NO: 539947 - DNA, 25 bp, Homo sapien
tccctcaaatctattgtgtatatgc

SEQ ID NO: 539948 - DNA, 25 bp, Homo sapien
gtccctcaaatctattgtgtatatg

SEQ ID NO: 539949 - DNA, 25 bp, Homo sapien
cctcaaatctattgtgtatatgcat

SEQ ID NO: 539950 - DNA, 25 bp, Homo sapien
gagctactgttaaatagggtagtaa

SEQ ID NO: 539951 - DNA, 25 bp, Homo sapien
tccagagtatattctgagctactgt

SEQ ID NO: 539952 - DNA, 25 bp, Homo sapien
tctgagctactgttaaatagggtag

SEQ ID NO: 539953 - DNA, 25 bp, Homo sapien
gagtatattctgagctactgttaaa

SEQ ID NO: 539954 - DNA, 25 bp, Homo sapien
caaatgtccgttggaatgggaaggc

SEQ ID NO: 539955 - DNA, 25 bp, Homo sapien
tcctgtttgtagttcgacacccaca

SEQ ID NO: 539956 - DNA, 25 bp, Homo sapien
tttaatggacccactgttcacctgg

SEQ ID NO: 539957 - DNA, 25 bp, Homo sapien
ggctgcctccactggacaacgtagg

SEQ ID NO: 539958 - DNA, 25 bp, Homo sapien
tgctaaaggacataattttgagggt

SEQ ID NO: 539959 - DNA, 25 bp, Homo sapien
ctgtgagttgatctttttgctaaag

SEQ ID NO: 539960 - DNA, 25 bp, Homo sapien
cataattttgagggtaattttggca

SEQ ID NO: 539961 - DNA, 25 bp, Homo sapien
gtgagttgatctttttgctaaagga

SEQ ID NO: 539962 - DNA, 25 bp, Homo sapien
aaacacctgcctatttgactctaaa

SEQ ID NO: 539963 - DNA, 25 bp, Homo sapien
gatgtgggtttgaagctagactccc

SEQ ID NO: 539964 - DNA, 25 bp, Homo sapien
cagggttagcaagggtagaatcaaa

SEQ ID NO: 539965 - DNA, 25 bp, Homo sapien
gaattagattcagtcagatgtgggt

SEQ ID NO: 539966 - DNA, 25 bp, Homo sapien
tacaggtgctatttgaagttcaagc

SEQ ID NO: 539967 - DNA, 25 bp, Homo sapien
gagtttagaatttaggagaagcgta

SEQ ID NO: 539968 - DNA, 25 bp, Homo sapien
taggttgtaatcactgagagtttag

SEQ ID NO: 539969 - DNA, 25 bp, Homo sapien
gagaagcgtaaagctaaatatattg

SEQ ID NO: 539970 - DNA, 25 bp, Homo sapien
agtctcaaatactgggggcatttct

SEQ ID NO: 539971 - DNA, 25 bp, Homo sapien
gattgtagcatttgtaagtctcaaa

SEQ ID NO: 539972 - DNA, 25 bp, Homo sapien
tggattgtagcatttgtaagtctca

SEQ ID NO: 539973 - DNA, 25 bp, Homo sapien
ttgtaagtctcaaatactgggggca

SEQ ID NO: 539974 - DNA, 25 bp, Homo sapien
tacctctgagagctaggatctctag

SEQ ID NO: 539975 - DNA, 25 bp, Homo sapien
tctccttcactcgtacctctgagag

SEQ ID NO: 539976 - DNA, 25 bp, Homo sapien
tctctgccccacatctgtattctct

SEQ ID NO: 539977 - DNA, 25 bp, Homo sapien
gctaggatctctagccaaccagcta

SEQ ID NO: 539978 - DNA, 25 bp, Homo sapien
tgattcagagctttgtttgttctag

SEQ ID NO: 539979 - DNA, 25 bp, Homo sapien
ttgattcagagctttgtttgttcta

SEQ ID NO: 539980 - DNA, 25 bp, Homo sapien
cttgattcagagctttgtttgttct

SEQ ID NO: 539981 - DNA, 25 bp, Homo sapien
tcttgattcagagctttgtttgttc

SEQ ID NO: 539982 - DNA, 25 bp, Homo sapien
ctttgaagaggcacagtttcttctc

SEQ ID NO: 539983 - DNA, 25 bp, Homo sapien
tttgaagaggcacagtttcttctct

SEQ ID NO: 539984 - DNA, 25 bp, Homo sapien
tgaagaggcacagtttcttctctct

SEQ ID NO: 539985 - DNA, 25 bp, Homo sapien
ttgaagaggcacagtttcttctctc

SEQ ID NO: 539986 - DNA, 25 bp, Homo sapien
gaataggaggaagcacaagaagatt

SEQ ID NO: 539987 - DNA, 25 bp, Homo sapien
cttgaataggaggaagcacaagaag

SEQ ID NO: 539988 - DNA, 25 bp, Homo sapien
taggaggaagcacaagaagattgaa

SEQ ID NO: 539989 - DNA, 25 bp, Homo sapien
tgaataggaggaagcacaagaagat

SEQ ID NO: 539990 - DNA, 25 bp, Homo sapien
acatctttagctttaatattcacag

SEQ ID NO: 539991 - DNA, 25 bp, Homo sapien
caggatgcattgagcttgaagctgc

SEQ ID NO: 539992 - DNA, 25 bp, Homo sapien
gctgcccaggtgtgtaacatcttta

SEQ ID NO: 539993 - DNA, 25 bp, Homo sapien
taacatctcctatttaatctgcttt

SEQ ID NO: 539994 - DNA, 25 bp, Homo sapien
ttcccaaggagcctccaggtattct

SEQ ID NO: 539995 - DNA, 25 bp, Homo sapien
tcccaaggagcctccaggtattctc

SEQ ID NO: 539996 - DNA, 25 bp, Homo sapien
cccaaggagcctccaggtattctct

SEQ ID NO: 539997 - DNA, 25 bp, Homo sapien
tttccttgtaagatattagatcctc

SEQ ID NO: 539998 - DNA, 25 bp, Homo sapien
tttttccttgtaagatattagatcc

SEQ ID NO: 539999 - DNA, 25 bp, Homo sapien
ccttgtaagatattagatcctccat

SEQ ID NO: 540000 - DNA, 25 bp, Homo sapien
cctgtttttccttgtaagatattag

SEQ ID NO: 540001 - DNA, 25 bp, Homo sapien
acttggtcaagatgtttatttgctt

SEQ ID NO: 540002 - DNA, 25 bp, Homo sapien
caggacttggtcaagatgtttattt

SEQ ID NO: 540003 - DNA, 25 bp, Homo sapien
tcaggacttggtcaagatgtttatt

SEQ ID NO: 540004 - DNA, 25 bp, Homo sapien
ggacttggtcaagatgtttatttgc

SEQ ID NO: 540005 - DNA, 25 bp, Homo sapien
cagattcctattgggcctggaggtt

SEQ ID NO: 540006 - DNA, 25 bp, Homo sapien
tatgtaactacatccctcgaaacta

SEQ ID NO: 540007 - DNA, 25 bp, Homo sapien
ccccagttgtcaatccgtaccaaat

SEQ ID NO: 540008 - DNA, 25 bp, Homo sapien
cctggaggttaacttgcaggtcgcc

SEQ ID NO: 540009 - DNA, 25 bp, Homo sapien
gcaccttcatgacatcacaatcaat

SEQ ID NO: 540010 - DNA, 25 bp, Homo sapien
tgcagacccaaacactgagcagtct

SEQ ID NO: 540011 - DNA, 25 bp, Homo sapien
cacgcacctttgcagttaggattac

SEQ ID NO: 540012 - DNA, 25 bp, Homo sapien
agtaatctttaactgtctttgcacc

SEQ ID NO: 540013 - DNA, 25 bp, Homo sapien
gaatggttccaagcacctcaacaag

SEQ ID NO: 540014 - DNA, 25 bp, Homo sapien
tcaacaagttggctcattagttcct

SEQ ID NO: 540015 - DNA, 25 bp, Homo sapien
aaacctcaggagcatcttcttctcg

SEQ ID NO: 540016 - DNA, 25 bp, Homo sapien
tcgaagccatgggagatgaacttaa

SEQ ID NO: 540017 - DNA, 25 bp, Homo sapien
gaagtattgacaacagggtttgtag

SEQ ID NO: 540018 - DNA, 25 bp, Homo sapien
gatgccctacatatgggagcaacaa

SEQ ID NO: 540019 - DNA, 25 bp, Homo sapien
tgagattgcttacaatgtttcctcc

SEQ ID NO: 540020 - DNA, 25 bp, Homo sapien
ggcgccagttagacgatatgtcaaa

SEQ ID NO: 540021 - DNA, 25 bp, Homo sapien
tccacaaacactatcagttgcaatt

SEQ ID NO: 540022 - DNA, 25 bp, Homo sapien
tatccacaaacactatcagttgcaa

SEQ ID NO: 540023 - DNA, 25 bp, Homo sapien
aaacactatcagttgcaattaatga

SEQ ID NO: 540024 - DNA, 25 bp, Homo sapien
cacaaacactatcagttgcaattaa

SEQ ID NO: 540025 - DNA, 25 bp, Homo sapien
cctgaatctgatccactgcattggg

SEQ ID NO: 540026 - DNA, 25 bp, Homo sapien
aagatgttgcaggttaaatggtgga

SEQ ID NO: 540027 - DNA, 25 bp, Homo sapien
taaatggtggatctaatgactcaaa

SEQ ID NO: 540028 - DNA, 25 bp, Homo sapien
cacatgtggaaatttatgatgcgac

SEQ ID NO: 540029 - DNA, 25 bp, Homo sapien
agctcctcagaggtttttgaatgca

SEQ ID NO: 540030 - DNA, 25 bp, Homo sapien
tcagctcctcagaggtttttgaatg

SEQ ID NO: 540031 - DNA, 25 bp, Homo sapien
cagctcctcagaggtttttgaatgc

SEQ ID NO: 540032 - DNA, 25 bp, Homo sapien
tctcaaagttgatagaggccaagtt

SEQ ID NO: 540033 - DNA, 25 bp, Homo sapien
ctcaaagttgatagaggccaagttt

SEQ ID NO: 540034 - DNA, 25 bp, Homo sapien
tctctcaaagttgatagaggccaag

SEQ ID NO: 540035 - DNA, 25 bp, Homo sapien
gtctctcaaagttgatagaggccaa

SEQ ID NO: 540036 - DNA, 25 bp, Homo sapien
atcggagagtcccatggactgcatc

SEQ ID NO: 540037 - DNA, 25 bp, Homo sapien
tggtaattcctggtgtctaggagcc

SEQ ID NO: 540038 - DNA, 25 bp, Homo sapien
ggcagccaccttcatcggagagtcc

SEQ ID NO: 540039 - DNA, 25 bp, Homo sapien
ggtactggattctttgaatactgga

SEQ ID NO: 540040 - DNA, 25 bp, Homo sapien
tatgtgggaacaaggcagcctcctt

SEQ ID NO: 540041 - DNA, 25 bp, Homo sapien
aacaaggcagcctccttcagtcctg

SEQ ID NO: 540042 - DNA, 25 bp, Homo sapien
tggagttcacttgtagacaggccca

SEQ ID NO: 540043 - DNA, 25 bp, Homo sapien
ctgaaggaatatgtgggaacaaggc

SEQ ID NO: 540044 - DNA, 25 bp, Homo sapien
agagaattccggagaggggctccca

SEQ ID NO: 540045 - DNA, 25 bp, Homo sapien
gctcccagagggtcagagggactca

SEQ ID NO: 540046 - DNA, 25 bp, Homo sapien
tctgcgtccatagccagaggctggg

SEQ ID NO: 540047 - DNA, 25 bp, Homo sapien
ccgtgtctctgcgtccatagccaga

SEQ ID NO: 540048 - DNA, 25 bp, Homo sapien
ggcccaggaaatatcgagagtcact

SEQ ID NO: 540049 - DNA, 25 bp, Homo sapien
aactcttgtctcctgagcatggccc

SEQ ID NO: 540050 - DNA, 25 bp, Homo sapien
ggaaatatcgagagtcactgtactg

SEQ ID NO: 540051 - DNA, 25 bp, Homo sapien
cccaggaaatatcgagagtcactgt

SEQ ID NO: 540052 - DNA, 25 bp, Homo sapien
gtcagcttgattccaaacttttacc

SEQ ID NO: 540053 - DNA, 25 bp, Homo sapien
cttgctgcttactgtcagcttgatt

SEQ ID NO: 540054 - DNA, 25 bp, Homo sapien
cagcttgattccaaacttttaccat

SEQ ID NO: 540055 - DNA, 25 bp, Homo sapien
ctgtcagcttgattccaaactttta

SEQ ID NO: 540056 - DNA, 25 bp, Homo sapien
ggattgtgaacaacagcagttctta

SEQ ID NO: 540057 - DNA, 25 bp, Homo sapien
gtgaggattgtgaacaacagcagtt

SEQ ID NO: 540058 - DNA, 25 bp, Homo sapien
aggattgtgaacaacagcagttctt

SEQ ID NO: 540059 - DNA, 25 bp, Homo sapien
taccttcgcagaccacaggagtcgt

SEQ ID NO: 540060 - DNA, 25 bp, Homo sapien
gctaccggttctcccagcaatataa

SEQ ID NO: 540061 - DNA, 25 bp, Homo sapien
cataggcgacgatcttatggcatct

SEQ ID NO: 540062 - DNA, 25 bp, Homo sapien
ggcatctgcatccagtaccttcgca

SEQ ID NO: 540063 - DNA, 25 bp, Homo sapien
gtctcattcaccacactcttgaaaa

SEQ ID NO: 540064 - DNA, 25 bp, Homo sapien
cgtctcattcaccacactcttgaaa

SEQ ID NO: 540065 - DNA, 25 bp, Homo sapien
ttccgtctcattcaccacactcttg

SEQ ID NO: 540066 - DNA, 25 bp, Homo sapien
tgtactctttccgtctcattcacca

SEQ ID NO: 540067 - DNA, 25 bp, Homo sapien
ttttcttatcttgtgactgctgtag

SEQ ID NO: 540068 - DNA, 25 bp, Homo sapien
caagaattatagaatcagtcaataa

SEQ ID NO: 540069 - DNA, 25 bp, Homo sapien
tagaatcagtcaataaaagcctttt

SEQ ID NO: 540070 - DNA, 25 bp, Homo sapien
tcttatcttgtgactgctgtagttc

SEQ ID NO: 540071 - DNA, 25 bp, Homo sapien
tgctcccatgattggtagcttcaaa

SEQ ID NO: 540072 - DNA, 25 bp, Homo sapien
ttcaaaagagccaaaatagatcttc

SEQ ID NO: 540073 - DNA, 25 bp, Homo sapien
aactttatccttgaatacttgctgt

SEQ ID NO: 540074 - DNA, 25 bp, Homo sapien
cttcaaaagagccaaaatagatctt

SEQ ID NO: 540075 - DNA, 25 bp, Homo sapien
cgaaccagctcatcactttaccctc

SEQ ID NO: 540076 - DNA, 25 bp, Homo sapien
gaaccagctcatcactttaccctca

SEQ ID NO: 540077 - DNA, 25 bp, Homo sapien
gacaaattctctactggctgcccta

SEQ ID NO: 540078 - DNA, 25 bp, Homo sapien
agtgacagcacaaatgaacagttgt

SEQ ID NO: 540079 - DNA, 25 bp, Homo sapien
ggctgccctattccgatgtcatcct

SEQ ID NO: 540080 - DNA, 25 bp, Homo sapien
gaggaggccctagtgatttggacaa

SEQ ID NO: 540081 - DNA, 25 bp, Homo sapien
gcaaacactttgatgaaaatcaaca

SEQ ID NO: 540082 - DNA, 25 bp, Homo sapien
ccttccccccgagaattctgagcaa

SEQ ID NO: 540083 - DNA, 25 bp, Homo sapien
ttccttccccccgagaattctgagc

SEQ ID NO: 540084 - DNA, 25 bp, Homo sapien
gaattctgagcaaacactttgatga

SEQ ID NO: 540085 - DNA, 25 bp, Homo sapien
cttggaaccaggaacatactgtggc

SEQ ID NO: 540086 - DNA, 25 bp, Homo sapien
gcaagttcagttctagacccaagaa

SEQ ID NO: 540087 - DNA, 25 bp, Homo sapien
gagcttgtgtttctacttgagtcca

SEQ ID NO: 540088 - DNA, 25 bp, Homo sapien
aaactgattggaagatggctcccca

SEQ ID NO: 540089 - DNA, 25 bp, Homo sapien
ggaagtaagctgctaattgcatact

SEQ ID NO: 540090 - DNA, 25 bp, Homo sapien
taggaagtaagctgctaattgcata

SEQ ID NO: 540091 - DNA, 25 bp, Homo sapien
taaattgatcatggcctctcttcca

SEQ ID NO: 540092 - DNA, 25 bp, Homo sapien
tgatctaggacaagatactaaattg

SEQ ID NO: 540093 - DNA, 25 bp, Homo sapien
tttcacaaaaatcatccgactgcca

SEQ ID NO: 540094 - DNA, 25 bp, Homo sapien
aatcatccgactgccaaatccaatt

SEQ ID NO: 540095 - DNA, 25 bp, Homo sapien
gccaaatccaattgatccctatcca

SEQ ID NO: 540096 - DNA, 25 bp, Homo sapien
caaatccaattgatccctatccagt

SEQ ID NO: 540097 - DNA, 25 bp, Homo sapien
cacgtctgtcacataggattgtgat

SEQ ID NO: 540098 - DNA, 25 bp, Homo sapien
ccaactgttgttctcacgtctgtca

SEQ ID NO: 540099 - DNA, 25 bp, Homo sapien
tgttctcacgtctgtcacataggat

SEQ ID NO: 540100 - DNA, 25 bp, Homo sapien
tgtggcccactcatgctcatgcagg

SEQ ID NO: 540101 - DNA, 25 bp, Homo sapien
gaagcgtgtcttattttggatccaa

SEQ ID NO: 540102 - DNA, 25 bp, Homo sapien
aatctgaactttgtccaaacctaag

SEQ ID NO: 540103 - DNA, 25 bp, Homo sapien
caagaatcactaaaccaatttccag

SEQ ID NO: 540104 - DNA, 25 bp, Homo sapien
tcatcctgctaagtaactcatgtat

SEQ ID NO: 540105 - DNA, 25 bp, Homo sapien
tgttccacttgactacctcccattg

SEQ ID NO: 540106 - DNA, 25 bp, Homo sapien
tcatactgttccacttgactacctc

SEQ ID NO: 540107 - DNA, 25 bp, Homo sapien
gttccacttgactacctcccattgg

SEQ ID NO: 540108 - DNA, 25 bp, Homo sapien
ttttcatactgttccacttgactac

SEQ ID NO: 540109 - DNA, 25 bp, Homo sapien
tatcatggtctttacataatcattg

SEQ ID NO: 540110 - DNA, 25 bp, Homo sapien
catggtctttacataatcattgtta

SEQ ID NO: 540111 - DNA, 25 bp, Homo sapien
tcatggtctttacataatcattgtt

SEQ ID NO: 540112 - DNA, 25 bp, Homo sapien
ttatatcatggtctttacataatca

SEQ ID NO: 540113 - DNA, 25 bp, Homo sapien
ttccaagatacatggatcagttggt

SEQ ID NO: 540114 - DNA, 25 bp, Homo sapien
tagcttgattaagattccactgcat

SEQ ID NO: 540115 - DNA, 25 bp, Homo sapien
cataatcagtcacagtgatagcttg

SEQ ID NO: 540116 - DNA, 25 bp, Homo sapien
catggatcagttggtacttcatcat

SEQ ID NO: 540117 - DNA, 25 bp, Homo sapien
tatagacaaggattgagacatatac

SEQ ID NO: 540118 - DNA, 25 bp, Homo sapien
gtgaagctaaagaaggccaagtttc

SEQ ID NO: 540119 - DNA, 25 bp, Homo sapien
cactttggtaacgtgtttacactct

SEQ ID NO: 540120 - DNA, 25 bp, Homo sapien
tatactattattggaggtggaaggc

SEQ ID NO: 540121 - DNA, 25 bp, Homo sapien
atccgtgtaataatagtctattgtc

SEQ ID NO: 540122 - DNA, 25 bp, Homo sapien
ttgtcttgagtatgcttttctaaaa

SEQ ID NO: 540123 - DNA, 25 bp, Homo sapien
tatccgtgtaataatagtctattgt

SEQ ID NO: 540124 - DNA, 25 bp, Homo sapien
aatagtctattgtcttgagtatgct

SEQ ID NO: 540125 - DNA, 25 bp, Homo sapien
cagcattgctttggtagaaatttgg

SEQ ID NO: 540126 - DNA, 25 bp, Homo sapien
cctactgcggacagaacagcattgc

SEQ ID NO: 540127 - DNA, 25 bp, Homo sapien
tttggtagaaatttggacatctctc

SEQ ID NO: 540128 - DNA, 25 bp, Homo sapien
cacacaaactgcctactgcggacag

SEQ ID NO: 540129 - DNA, 25 bp, Homo sapien
cagggtcacaagacgaaagatggag

SEQ ID NO: 540130 - DNA, 25 bp, Homo sapien
aatccagggccagtagcttgcagca

SEQ ID NO: 540131 - DNA, 25 bp, Homo sapien
gaatgtattctagttcccgtccaaa

SEQ ID NO: 540132 - DNA, 25 bp, Homo sapien
gctatagtggaaagagacttcacat

SEQ ID NO: 540133 - DNA, 25 bp, Homo sapien
gctaaatatggaattctggattaac

SEQ ID NO: 540134 - DNA, 25 bp, Homo sapien
gggtggcagattatcttgcagtttt

SEQ ID NO: 540135 - DNA, 25 bp, Homo sapien
aattcctctctatgagtctctaaca

SEQ ID NO: 540136 - DNA, 25 bp, Homo sapien
gctgcaacggttcaagtatggccat

SEQ ID NO: 540137 - DNA, 25 bp, Homo sapien
caaaggaacaaagtctgctgttgct

SEQ ID NO: 540138 - DNA, 25 bp, Homo sapien
tctggatccatcaaaggaacaaagt

SEQ ID NO: 540139 - DNA, 25 bp, Homo sapien
catgcattaaccagtgcacatccag

SEQ ID NO: 540140 - DNA, 25 bp, Homo sapien
catattccttgatgtggcgatcttc

SEQ ID NO: 540141 - DNA, 25 bp, Homo sapien
ttgctgattatccacataggaaagg

SEQ ID NO: 540142 - DNA, 25 bp, Homo sapien
gattatccacataggaaaggcatgg

SEQ ID NO: 540143 - DNA, 25 bp, Homo sapien
cctgagttgcttcccgatgtcctca

SEQ ID NO: 540144 - DNA, 25 bp, Homo sapien
tcccgatgtcctcagctttgctgat

SEQ ID NO: 540145 - DNA, 25 bp, Homo sapien
aggatactgcccctccaactggtga

SEQ ID NO: 540146 - DNA, 25 bp, Homo sapien
tcttctagatgtaagctgtctttca

SEQ ID NO: 540147 - DNA, 25 bp, Homo sapien
ccttcttggcactattcttgtaatg

SEQ ID NO: 540148 - DNA, 25 bp, Homo sapien
gtctttcaacagttagaaatgatga

SEQ ID NO: 540149 - DNA, 25 bp, Homo sapien
gcagcagccactttgagacatgata

SEQ ID NO: 540150 - DNA, 25 bp, Homo sapien
tgataaaaacgtgagcatgggtgag

SEQ ID NO: 540151 - DNA, 25 bp, Homo sapien
caatgatagggattaaagcttttcc

SEQ ID NO: 540152 - DNA, 25 bp, Homo sapien
tgggtgagtcatgctagaaatatca

SEQ ID NO: 540153 - DNA, 25 bp, Homo sapien
ttttacacaaatgcactatacccta

SEQ ID NO: 540154 - DNA, 25 bp, Homo sapien
tattttaccaggcatcctgaatata

SEQ ID NO: 540155 - DNA, 25 bp, Homo sapien
ctataccctataatccccaagtgtt

SEQ ID NO: 540156 - DNA, 25 bp, Homo sapien
attattttaccaggcatcctgaata

SEQ ID NO: 540157 - DNA, 25 bp, Homo sapien
atgtgcacacttcactctggcattt

SEQ ID NO: 540158 - DNA, 25 bp, Homo sapien
gcattttccctctctccctgtagca

SEQ ID NO: 540159 - DNA, 25 bp, Homo sapien
gcacacttcactctggcattttccc

SEQ ID NO: 540160 - DNA, 25 bp, Homo sapien
tgtgcacacttcactctggcatttt

SEQ ID NO: 540161 - DNA, 25 bp, Homo sapien
tctctagtggattaaccattgtagc

SEQ ID NO: 540162 - DNA, 25 bp, Homo sapien
attccaggcataaaacttttccctg

SEQ ID NO: 540163 - DNA, 25 bp, Homo sapien
tccctgtatttggacctggggtgct

SEQ ID NO: 540164 - DNA, 25 bp, Homo sapien
tagccaggatcctatgagtatgcat

SEQ ID NO: 540165 - DNA, 25 bp, Homo sapien
tacaggctattagtaatatcttgca

SEQ ID NO: 540166 - DNA, 25 bp, Homo sapien
aaggtttatttcatgtcaattcctg

SEQ ID NO: 540167 - DNA, 25 bp, Homo sapien
ggtttatttcatgtcaattcctggg

SEQ ID NO: 540168 - DNA, 25 bp, Homo sapien
gaagttacaggctattagtaatatc

SEQ ID NO: 540169 - DNA, 25 bp, Homo sapien
caactgaaaggctataaagctctga

SEQ ID NO: 540170 - DNA, 25 bp, Homo sapien
tctcaactgaaaggctataaagctc

SEQ ID NO: 540171 - DNA, 25 bp, Homo sapien
tgaaaggctataaagctctgaggat

SEQ ID NO: 540172 - DNA, 25 bp, Homo sapien
tatttctcaactgaaaggctataaa

SEQ ID NO: 540173 - DNA, 25 bp, Homo sapien
tcaggcataggagacaaagcactct

SEQ ID NO: 540174 - DNA, 25 bp, Homo sapien
tggaacatcccttacattgttgagt

SEQ ID NO: 540175 - DNA, 25 bp, Homo sapien
ggatgcttggagtgtcaaggtcaaa

SEQ ID NO: 540176 - DNA, 25 bp, Homo sapien
ctcataactaacagtattcttttgt

SEQ ID NO: 540177 - DNA, 25 bp, Homo sapien
tttcccatcttgatgtttcacacca

SEQ ID NO: 540178 - DNA, 25 bp, Homo sapien
atcttgatgtttcacaccatcatca

SEQ ID NO: 540179 - DNA, 25 bp, Homo sapien
gctgtgtgtctgcttcttctatatt

SEQ ID NO: 540180 - DNA, 25 bp, Homo sapien
tgtttcacaccatcatcaatccaat

SEQ ID NO: 540181 - DNA, 25 bp, Homo sapien
aagatataaatatgaaaaacattca

SEQ ID NO: 540182 - DNA, 25 bp, Homo sapien
agatataaatatgaaaaacattcat

SEQ ID NO: 540183 - DNA, 25 bp, Homo sapien
taagatataaatatgaaaaacattc

SEQ ID NO: 540184 - DNA, 25 bp, Homo sapien
tggaagattgggtaaagtaaacatg

SEQ ID NO: 540185 - DNA, 25 bp, Homo sapien
agtaaacatgaagcatatgcaccat

SEQ ID NO: 540186 - DNA, 25 bp, Homo sapien
tatgggaacaataggcattgtagac

SEQ ID NO: 540187 - DNA, 25 bp, Homo sapien
aagtgggacctaagcattgggcaca

SEQ ID NO: 540188 - DNA, 25 bp, Homo sapien
tgtagatggtaaaaggaaggtgtcc

SEQ ID NO: 540189 - DNA, 25 bp, Homo sapien
aaccatatttaggtgatttatgtag

SEQ ID NO: 540190 - DNA, 25 bp, Homo sapien
cctatgttgggcatggtatttccta

SEQ ID NO: 540191 - DNA, 25 bp, Homo sapien
cattggcctatgtggaatctgctgt

SEQ ID NO: 540192 - DNA, 25 bp, Homo sapien
tctctgcctctccttctttctcccc

SEQ ID NO: 540193 - DNA, 25 bp, Homo sapien
ctctctgcctctccttctttctccc

SEQ ID NO: 540194 - DNA, 25 bp, Homo sapien
tgcctctccttctttctccccttta

SEQ ID NO: 540195 - DNA, 25 bp, Homo sapien
tctgcctctccttctttctcccctt

SEQ ID NO: 540196 - DNA, 25 bp, Homo sapien
aagactttagtccacctatacaaga

SEQ ID NO: 540197 - DNA, 25 bp, Homo sapien
taaacctcaagtcagatagtgtaca

SEQ ID NO: 540198 - DNA, 25 bp, Homo sapien
gagacacagtttaaagttacaacat

SEQ ID NO: 540199 - DNA, 25 bp, Homo sapien
agtactaacaacaagccaatggctg

SEQ ID NO: 540200 - DNA, 25 bp, Homo sapien
tagctttccattaactgactcatga

SEQ ID NO: 540201 - DNA, 25 bp, Homo sapien
cattaactgactcatgaagacacca

SEQ ID NO: 540202 - DNA, 25 bp, Homo sapien
caaaaagccaatctcttgcaatggc

SEQ ID NO: 540203 - DNA, 25 bp, Homo sapien
tcatgaagacaccaaaaagccaatc

SEQ ID NO: 540204 - DNA, 25 bp, Homo sapien
tacaaatataatatacagcctgcat

SEQ ID NO: 540205 - DNA, 25 bp, Homo sapien
ttttgaaggataaaattcattacaa

SEQ ID NO: 540206 - DNA, 25 bp, Homo sapien
cattacaaatataatatacagcctg

SEQ ID NO: 540207 - DNA, 25 bp, Homo sapien
ttcattacaaatataatatacagcc

SEQ ID NO: 540208 - DNA, 25 bp, Homo sapien
gcatcttccacagctcctctaagca

SEQ ID NO: 540209 - DNA, 25 bp, Homo sapien
acagctcctctaagcaaaagcacca

SEQ ID NO: 540210 - DNA, 25 bp, Homo sapien
tcttccacagctcctctaagcaaaa

SEQ ID NO: 540211 - DNA, 25 bp, Homo sapien
tcctctaagcaaaagcaccacattg

SEQ ID NO: 540212 - DNA, 25 bp, Homo sapien
tacaccttgtgacaacgtctttggc

SEQ ID NO: 540213 - DNA, 25 bp, Homo sapien
tgattatcaacatgagcctgaggga

SEQ ID NO: 540214 - DNA, 25 bp, Homo sapien
tgtatactaccgttaagctgttgtg

SEQ ID NO: 540215 - DNA, 25 bp, Homo sapien
gtggcagcccttacactatcataca

SEQ ID NO: 540216 - DNA, 25 bp, Homo sapien
catagaagagtaaggtttttgaact

SEQ ID NO: 540217 - DNA, 25 bp, Homo sapien
atagaagagtaaggtttttgaactg

SEQ ID NO: 540218 - DNA, 25 bp, Homo sapien
gagtgattgcagtaccaccaagaga

SEQ ID NO: 540219 - DNA, 25 bp, Homo sapien
ccacaggtcttttgggacagttacg

SEQ ID NO: 540220 - DNA, 25 bp, Homo sapien
caagataaagacgttcagttagtcc

SEQ ID NO: 540221 - DNA, 25 bp, Homo sapien
tacacattcgggtcacactgagtga

SEQ ID NO: 540222 - DNA, 25 bp, Homo sapien
catgtcttcttgagatttgtgccat

SEQ ID NO: 540223 - DNA, 25 bp, Homo sapien
cttcatgtcttcttgagatttgtgc

SEQ ID NO: 540224 - DNA, 25 bp, Homo sapien
ctgtgataggcaaagaagacgtgca

SEQ ID NO: 540225 - DNA, 25 bp, Homo sapien
aagaagacgtgcatgtcttcatgtc

SEQ ID NO: 540226 - DNA, 25 bp, Homo sapien
attgttggtgaatagcagaactagt

SEQ ID NO: 540227 - DNA, 25 bp, Homo sapien
gaactagtaataatattggtgacca

SEQ ID NO: 540228 - DNA, 25 bp, Homo sapien
tgattgatacggctaagacttccag

SEQ ID NO: 540229 - DNA, 25 bp, Homo sapien
ggtgaccagtgatatttcgtcttcc

SEQ ID NO: 540230 - DNA, 25 bp, Homo sapien
gttcgaatctccttctgccctgtga

SEQ ID NO: 540231 - DNA, 25 bp, Homo sapien
agcctgcgagcctgccatcataaga

SEQ ID NO: 540232 - DNA, 25 bp, Homo sapien
tctggctacgaaattccaactgctt

SEQ ID NO: 540233 - DNA, 25 bp, Homo sapien
tactctcaatgtaacgaagcctgcg

SEQ ID NO: 540234 - DNA, 25 bp, Homo sapien
cttggtgccatatgctacttgtgga

SEQ ID NO: 540235 - DNA, 25 bp, Homo sapien
tatgctacttgtggatctatggtca

SEQ ID NO: 540236 - DNA, 25 bp, Homo sapien
caagcctggaagtaacttggtgcca

SEQ ID NO: 540237 - DNA, 25 bp, Homo sapien
tttgaacagctatcaagcctggaag

SEQ ID NO: 540238 - DNA, 25 bp, Homo sapien
cttcctacagtactctaacgtctgt

SEQ ID NO: 540239 - DNA, 25 bp, Homo sapien
ctaacgtctgtgaaccttttgactg

SEQ ID NO: 540240 - DNA, 25 bp, Homo sapien
tacagtactctaacgtctgtgaacc

SEQ ID NO: 540241 - DNA, 25 bp, Homo sapien
tactctaacgtctgtgaaccttttg

SEQ ID NO: 540242 - DNA, 25 bp, Homo sapien
tgaccaacacgaacaaatatctgct

SEQ ID NO: 540243 - DNA, 25 bp, Homo sapien
gaccaacacgaacaaatatctgctt

SEQ ID NO: 540244 - DNA, 25 bp, Homo sapien
gtgaccaacacgaacaaatatctgc

SEQ ID NO: 540245 - DNA, 25 bp, Homo sapien
ggtgaccaacacgaacaaatatctg

SEQ ID NO: 540246 - DNA, 25 bp, Homo sapien
tgattctgcctcagtcgtcaagtgg

SEQ ID NO: 540247 - DNA, 25 bp, Homo sapien
ggctcatagctatatactttacaaa

SEQ ID NO: 540248 - DNA, 25 bp, Homo sapien
aggagtagcaaaggctcatagctat

SEQ ID NO: 540249 - DNA, 25 bp, Homo sapien
caagtggtataatactcacgaacag

SEQ ID NO: 540250 - DNA, 25 bp, Homo sapien
cttgaaccataaacacaaggaaatt

SEQ ID NO: 540251 - DNA, 25 bp, Homo sapien
cacaaggaaattccaggtggattca

SEQ ID NO: 540252 - DNA, 25 bp, Homo sapien
aggaaattccaggtggattcaatac

SEQ ID NO: 540253 - DNA, 25 bp, Homo sapien
caaggaaattccaggtggattcaat

SEQ ID NO: 540254 - DNA, 25 bp, Homo sapien
caagagcagccattaactcagagca

SEQ ID NO: 540255 - DNA, 25 bp, Homo sapien
tagctgaatcacttcaatacggatc

SEQ ID NO: 540256 - DNA, 25 bp, Homo sapien
cacttcaatacggatccgaagaatt

SEQ ID NO: 540257 - DNA, 25 bp, Homo sapien
gaagattatcaatttctagctgaat

SEQ ID NO: 540258 - DNA, 25 bp, Homo sapien
ctccccctgttgtgcagttatatgc

SEQ ID NO: 540259 - DNA, 25 bp, Homo sapien
gcagttatatgcaaccaggagagag

SEQ ID NO: 540260 - DNA, 25 bp, Homo sapien
tctccagtctgataggccctctgct

SEQ ID NO: 540261 - DNA, 25 bp, Homo sapien
ggagttctgtcagaattgtatccac

SEQ ID NO: 540262 - DNA, 25 bp, Homo sapien
cagaaggataggctgtctctgagtc

SEQ ID NO: 540263 - DNA, 25 bp, Homo sapien
tcttaaatgatactgcagctgtgag

SEQ ID NO: 540264 - DNA, 25 bp, Homo sapien
aactctttggatcacagggtccttc

SEQ ID NO: 540265 - DNA, 25 bp, Homo sapien
tttcagcccctttgcccagaaggat

SEQ ID NO: 540266 - DNA, 25 bp, Homo sapien
tgaccatgcctcacttgttaagccc

SEQ ID NO: 540267 - DNA, 25 bp, Homo sapien
tgcctcacttgttaagcccttacaa

SEQ ID NO: 540268 - DNA, 25 bp, Homo sapien
tgtattttgaccatgcctcacttgt

SEQ ID NO: 540269 - DNA, 25 bp, Homo sapien
ctggattcctgggtgtattttgacc

SEQ ID NO: 540270 - DNA, 25 bp, Homo sapien
gaccacgaacccactggaaggaaca

SEQ ID NO: 540271 - DNA, 25 bp, Homo sapien
tcagtgaattaaggatgtctttagt

SEQ ID NO: 540272 - DNA, 25 bp, Homo sapien
gaatccaagacttttgaatgtcaag

SEQ ID NO: 540273 - DNA, 25 bp, Homo sapien
gaatgtcaagttgaatgcaattttc

SEQ ID NO: 540274 - DNA, 25 bp, Homo sapien
cacacatgtagggaacagtagatct

SEQ ID NO: 540275 - DNA, 25 bp, Homo sapien
cggttggaaagtgcacttcgttgat

SEQ ID NO: 540276 - DNA, 25 bp, Homo sapien
tcaaacaataatcagcaggcgcaaa

SEQ ID NO: 540277 - DNA, 25 bp, Homo sapien
tcagcaggcgcaaaccctgatgtag

SEQ ID NO: 540278 - DNA, 25 bp, Homo sapien
ccctgatgtagctcggttggaaagt

SEQ ID NO: 540279 - DNA, 25 bp, Homo sapien
aatcctggacctgcgtaagcttagg

SEQ ID NO: 540280 - DNA, 25 bp, Homo sapien
acattaataatcctggacctgcgta

SEQ ID NO: 540281 - DNA, 25 bp, Homo sapien
tttggagtgtactgactccttctac

SEQ ID NO: 540282 - DNA, 25 bp, Homo sapien
tgacagctccatgcgtgttcttgct

SEQ ID NO: 540283 - DNA, 25 bp, Homo sapien
cttcatgttactgaaagatacactg

SEQ ID NO: 540284 - DNA, 25 bp, Homo sapien
gcagctgctgatcaaagtcagccat

SEQ ID NO: 540285 - DNA, 25 bp, Homo sapien
tgcagctgctgatcaaagtcagcca

SEQ ID NO: 540286 - DNA, 25 bp, Homo sapien
ctgcagctgctgatcaaagtcagcc

SEQ ID NO: 540287 - DNA, 25 bp, Homo sapien
gcttctcacttctatgacctcttca

SEQ ID NO: 540288 - DNA, 25 bp, Homo sapien
ttatgctgccctagaaaatcctgat

SEQ ID NO: 540289 - DNA, 25 bp, Homo sapien
tacctactcgcagaataattatgct

SEQ ID NO: 540290 - DNA, 25 bp, Homo sapien
caaaactcctttacctactcgcaga

SEQ ID NO: 540291 - DNA, 25 bp, Homo sapien
ttgccaagaatcctggaaaattacc

SEQ ID NO: 540292 - DNA, 25 bp, Homo sapien
ttttgccaagaatcctggaaaatta

SEQ ID NO: 540293 - DNA, 25 bp, Homo sapien
ttggttttgccaagaatcctggaaa

SEQ ID NO: 540294 - DNA, 25 bp, Homo sapien
ccaagaatcctggaaaattacccat

SEQ ID NO: 540295 - DNA, 25 bp, Homo sapien
ctttgttctgctatgcagacaagag

SEQ ID NO: 540296 - DNA, 25 bp, Homo sapien
acaagagacaattctcctttgtgct

SEQ ID NO: 540297 - DNA, 25 bp, Homo sapien
ttgttctgctatgcagacaagagac

SEQ ID NO: 540298 - DNA, 25 bp, Homo sapien
gttctgctatgcagacaagagacaa

SEQ ID NO: 540299 - DNA, 25 bp, Homo sapien
attcaaagcctagggcctcttcctt

SEQ ID NO: 540300 - DNA, 25 bp, Homo sapien
cttctatctgtcttgatcgttccac

SEQ ID NO: 540301 - DNA, 25 bp, Homo sapien
tcttaaccttcctcaatacagggaa

SEQ ID NO: 540302 - DNA, 25 bp, Homo sapien
tgtcttgatcgttccacattcaaag

SEQ ID NO: 540303 - DNA, 25 bp, Homo sapien
taaatttgagacactgaagatcccc

SEQ ID NO: 540304 - DNA, 25 bp, Homo sapien
gatccccatgaaattcaaattcatt

SEQ ID NO: 540305 - DNA, 25 bp, Homo sapien
gaagatccccatgaaattcaaattc

SEQ ID NO: 540306 - DNA, 25 bp, Homo sapien
gagacactgaagatccccatgaaat

SEQ ID NO: 540307 - DNA, 25 bp, Homo sapien
ttttgaaattatacacccttcacca

SEQ ID NO: 540308 - DNA, 25 bp, Homo sapien
tcatgaggacctaaatagcgacacc

SEQ ID NO: 540309 - DNA, 25 bp, Homo sapien
caccatcatgaggacctaaatagcg

SEQ ID NO: 540310 - DNA, 25 bp, Homo sapien
gacctaaatagcgacaccagtaata

SEQ ID NO: 540311 - DNA, 25 bp, Homo sapien
aatcttggacttcaatgtaaagtct

SEQ ID NO: 540312 - DNA, 25 bp, Homo sapien
ttcacatttctgagttgggcctgct

SEQ ID NO: 540313 - DNA, 25 bp, Homo sapien
catttcacatttctgagttgggcct

SEQ ID NO: 540314 - DNA, 25 bp, Homo sapien
caatgtaaagtcttgaagcagaaag

SEQ ID NO: 540315 - DNA, 25 bp, Homo sapien
ttgtactggattggatgcaagctgg

SEQ ID NO: 540316 - DNA, 25 bp, Homo sapien
gcttatgtttgcttccctgttgtta

SEQ ID NO: 540317 - DNA, 25 bp, Homo sapien
gaatttaattgatgacccaacttag

SEQ ID NO: 540318 - DNA, 25 bp, Homo sapien
gacccaacttagatattcccttaga

SEQ ID NO: 540319 - DNA, 25 bp, Homo sapien
tgcttttgtaagaccacccaaacta

SEQ ID NO: 540320 - DNA, 25 bp, Homo sapien
atttctgttaccattgcacagttca

SEQ ID NO: 540321 - DNA, 25 bp, Homo sapien
ttatttctgttaccattgcacagtt

SEQ ID NO: 540322 - DNA, 25 bp, Homo sapien
tatttctgttaccattgcacagttc

SEQ ID NO: 540323 - DNA, 25 bp, Homo sapien
gttttatcaaatttaggccatcaga

SEQ ID NO: 540324 - DNA, 25 bp, Homo sapien
taaatgaattgaacttggcagctcc

SEQ ID NO: 540325 - DNA, 25 bp, Homo sapien
cattctggaaatgaatctgatctac

SEQ ID NO: 540326 - DNA, 25 bp, Homo sapien
gctgtcaatgtaacagatagctgac

SEQ ID NO: 540327 - DNA, 25 bp, Homo sapien
cctataatggaaaagtctcaaggga

SEQ ID NO: 540328 - DNA, 25 bp, Homo sapien
tctcaagggaaatattcagggctgc

SEQ ID NO: 540329 - DNA, 25 bp, Homo sapien
tagcttcatgatttcagtatgacag

SEQ ID NO: 540330 - DNA, 25 bp, Homo sapien
cagaaactcaggcttctagtagccc

SEQ ID NO: 540331 - DNA, 25 bp, Homo sapien
gacaaaataatggtggcatcttacc

SEQ ID NO: 540332 - DNA, 25 bp, Homo sapien
cgacccttgctggagatattagaga

SEQ ID NO: 540333 - DNA, 25 bp, Homo sapien
gttttattggcaccgatacttgagt

SEQ ID NO: 540334 - DNA, 25 bp, Homo sapien
taccacaaattgaggaagtgtcagc

SEQ ID NO: 540335 - DNA, 25 bp, Homo sapien
gagaacacgagacttgccaccatct

SEQ ID NO: 540336 - DNA, 25 bp, Homo sapien
cttggaagcggcctgccaccatctt

SEQ ID NO: 540337 - DNA, 25 bp, Homo sapien
atcttggaagcggcctgccaccatc

SEQ ID NO: 540338 - DNA, 25 bp, Homo sapien
aagcggctcaccaccatcttggaag

SEQ ID NO: 540339 - DNA, 25 bp, Homo sapien
tgaatgcctttgcagaaatgccttc

SEQ ID NO: 540340 - DNA, 25 bp, Homo sapien
atcaatgacgaacttttcttctgtg

SEQ ID NO: 540341 - DNA, 25 bp, Homo sapien
caatgacgaacttttcttctgtgct

SEQ ID NO: 540342 - DNA, 25 bp, Homo sapien
cagtcatcaatgacgaacttttctt

SEQ ID NO: 540343 - DNA, 25 bp, Homo sapien
gtcatcaatgacgaacttttcttct

SEQ ID NO: 540344 - DNA, 25 bp, Homo sapien
gactttgcaattacatttgaaggac

SEQ ID NO: 540345 - DNA, 25 bp, Homo sapien
aaatcggtagcatctggaagggaag

SEQ ID NO: 540346 - DNA, 25 bp, Homo sapien
gatgagagcttttgatccccatttc

SEQ ID NO: 540347 - DNA, 25 bp, Homo sapien
ccctgtaggtctctgactttgcaat

SEQ ID NO: 540348 - DNA, 25 bp, Homo sapien
cagatcgggtaaccccagggctgaa

SEQ ID NO: 540349 - DNA, 25 bp, Homo sapien
taaaagtccacctgccatcttttct

SEQ ID NO: 540350 - DNA, 25 bp, Homo sapien
gtccacctgccatcttttctctctc

SEQ ID NO: 540351 - DNA, 25 bp, Homo sapien
tcagatcgggtaaccccagggctga

SEQ ID NO: 540352 - DNA, 25 bp, Homo sapien
catattaaaagtgtcctgcggcggc

SEQ ID NO: 540353 - DNA, 25 bp, Homo sapien
tgtacacggtgatcaccccatgctg

SEQ ID NO: 540354 - DNA, 25 bp, Homo sapien
gtccaatctccgtatcttcttatct

SEQ ID NO: 540355 - DNA, 25 bp, Homo sapien
gcagcaccgtccaatctccgtatct

SEQ ID NO: 540356 - DNA, 25 bp, Homo sapien
tagtgtgggttaacaaaggcagcaa

SEQ ID NO: 540357 - DNA, 25 bp, Homo sapien
tttgtagtgtgggttaacaaaggca

SEQ ID NO: 540358 - DNA, 25 bp, Homo sapien
gagtatacacagatggggtataccc

SEQ ID NO: 540359 - DNA, 25 bp, Homo sapien
tacacagatggggtatacccactgt

SEQ ID NO: 540360 - DNA, 25 bp, Homo sapien
ggccataggatccacggtgtcatct

SEQ ID NO: 540361 - DNA, 25 bp, Homo sapien
ataggatccacggtgtcatctgact

SEQ ID NO: 540362 - DNA, 25 bp, Homo sapien
ccataggatccacggtgtcatctga

SEQ ID NO: 540363 - DNA, 25 bp, Homo sapien
taggatccacggtgtcatctgactg

SEQ ID NO: 540364 - DNA, 25 bp, Homo sapien
tcttccacattatcttctttaaaga

SEQ ID NO: 540365 - DNA, 25 bp, Homo sapien
cattatcttctttaaagaactgcat

SEQ ID NO: 540366 - DNA, 25 bp, Homo sapien
tatcggacaccacatttttctcttc

SEQ ID NO: 540367 - DNA, 25 bp, Homo sapien
tttctcttccacattatcttcttta

SEQ ID NO: 540368 - DNA, 25 bp, Homo sapien
atccactgaaagagattcaactgtg

SEQ ID NO: 540369 - DNA, 25 bp, Homo sapien
ctagatccactgaaagagattcaac

SEQ ID NO: 540370 - DNA, 25 bp, Homo sapien
gatccactgaaagagattcaactgt

SEQ ID NO: 540371 - DNA, 25 bp, Homo sapien
attcaactgtgtggaacctatgccg

SEQ ID NO: 540372 - DNA, 25 bp, Homo sapien
taaagcatctgctgaccattaggct

SEQ ID NO: 540373 - DNA, 25 bp, Homo sapien
tcgactagagctgataagacagcca

SEQ ID NO: 540374 - DNA, 25 bp, Homo sapien
caagattatcgctgatgaagacctg

SEQ ID NO: 540375 - DNA, 25 bp, Homo sapien
gggatgtactaatgcaacaggcaaa

SEQ ID NO: 540376 - DNA, 25 bp, Homo sapien
tggataagacataatgccagcaggc

SEQ ID NO: 540377 - DNA, 25 bp, Homo sapien
gcaggcaaacaggacgcctatttga

SEQ ID NO: 540378 - DNA, 25 bp, Homo sapien
ttatgtgccgtgctctcgacatagg

SEQ ID NO: 540379 - DNA, 25 bp, Homo sapien
cctatttgagaataccaggtctcag

SEQ ID NO: 540380 - DNA, 25 bp, Homo sapien
tttcactgttcacggggcggtcaag

SEQ ID NO: 540381 - DNA, 25 bp, Homo sapien
ctgcagtagttgtgccttaacactc

SEQ ID NO: 540382 - DNA, 25 bp, Homo sapien
gtgccttaacactctcagtttcaca

SEQ ID NO: 540383 - DNA, 25 bp, Homo sapien
ctgtgtttcactgttcacggggcgg

SEQ ID NO: 540384 - DNA, 25 bp, Homo sapien
gggagtgccaaaggatcactgaagc

SEQ ID NO: 540385 - DNA, 25 bp, Homo sapien
gccaaaggatcactgaagcttgggc

SEQ ID NO: 540386 - DNA, 25 bp, Homo sapien
cccttgggtctgaaatatagaaagc

SEQ ID NO: 540387 - DNA, 25 bp, Homo sapien
ttccccttgggtctgaaatatagaa

SEQ ID NO: 540388 - DNA, 25 bp, Homo sapien
tgttggactgtttcaggagagtcat

SEQ ID NO: 540389 - DNA, 25 bp, Homo sapien
gcatgttggactgtttcaggagagt

SEQ ID NO: 540390 - DNA, 25 bp, Homo sapien
agcatgttggactgtttcaggagag

SEQ ID NO: 540391 - DNA, 25 bp, Homo sapien
catgttggactgtttcaggagagtc

SEQ ID NO: 540392 - DNA, 25 bp, Homo sapien
gccgcatctgccgtctcagaaacgg

SEQ ID NO: 540393 - DNA, 25 bp, Homo sapien
tcgacactcccgctgggctgttcag

SEQ ID NO: 540394 - DNA, 25 bp, Homo sapien
agtccaggccgccatttctgggcgc

SEQ ID NO: 540395 - DNA, 25 bp, Homo sapien
tagctaagatatctggtgccacggc

SEQ ID NO: 540396 - DNA, 25 bp, Homo sapien
tgtccaaggcctgaaatttctacga

SEQ ID NO: 540397 - DNA, 25 bp, Homo sapien
cctgaaatttctacgattagtgtca

SEQ ID NO: 540398 - DNA, 25 bp, Homo sapien
caaggcctgaaatttctacgattag

SEQ ID NO: 540399 - DNA, 25 bp, Homo sapien
aatgtccaaggcctgaaatttctac

SEQ ID NO: 540400 - DNA, 25 bp, Homo sapien
tagaaaccacacagttgatttagac

SEQ ID NO: 540401 - DNA, 25 bp, Homo sapien
cacacagttgatttagacaggagaa

SEQ ID NO: 540402 - DNA, 25 bp, Homo sapien
taatacaaaagactggtacactttg

SEQ ID NO: 540403 - DNA, 25 bp, Homo sapien
gagtttgtgtcaatctatatccata

SEQ ID NO: 540404 - DNA, 25 bp, Homo sapien
tcaacagcaccgcgtttcactgctt

SEQ ID NO: 540405 - DNA, 25 bp, Homo sapien
caacagcaccgcgtttcactgcttt

SEQ ID NO: 540406 - DNA, 25 bp, Homo sapien
cggcataggttccacacagttgaat

SEQ ID NO: 540407 - DNA, 25 bp, Homo sapien
gcataggttccacacagttgaatct

SEQ ID NO: 540408 - DNA, 25 bp, Homo sapien
tcaggtcagagctattcggcaactg

SEQ ID NO: 540409 - DNA, 25 bp, Homo sapien
gtcagagctattcggcaactgctgg

SEQ ID NO: 540410 - DNA, 25 bp, Homo sapien
aagctacttaaactctggtgcttaa

SEQ ID NO: 540411 - DNA, 25 bp, Homo sapien
agtgagaattaatacccacttcctg

SEQ ID NO: 540412 - DNA, 25 bp, Homo sapien
gtcttcacttatacagtgagaatta

SEQ ID NO: 540413 - DNA, 25 bp, Homo sapien
gctacttaaactctggtgcttaatg

SEQ ID NO: 540414 - DNA, 25 bp, Homo sapien
cattaggcagttgatggtaacacat

SEQ ID NO: 540415 - DNA, 25 bp, Homo sapien
tagtcattacacaatcccaggctgt

SEQ ID NO: 540416 - DNA, 25 bp, Homo sapien
taatcaacataccacagtggctgaa

SEQ ID NO: 540417 - DNA, 25 bp, Homo sapien
aaagcaaagggacatcaagacaata

SEQ ID NO: 540418 - DNA, 25 bp, Homo sapien
ccatagccacaggagttgccgtagt

SEQ ID NO: 540419 - DNA, 25 bp, Homo sapien
atagccacaggagttgccgtagtag

SEQ ID NO: 540420 - DNA, 25 bp, Homo sapien
tagccacaggagttgccgtagtagt

SEQ ID NO: 540421 - DNA, 25 bp, Homo sapien
catagccacaggagttgccgtagta

SEQ ID NO: 540422 - DNA, 25 bp, Homo sapien
ccttatactgcccacgtgatgatga

SEQ ID NO: 540423 - DNA, 25 bp, Homo sapien
agaaggccttatactgcccacgtga

SEQ ID NO: 540424 - DNA, 25 bp, Homo sapien
gcccacgtgatgatgaaacactcag

SEQ ID NO: 540425 - DNA, 25 bp, Homo sapien
aggccttatactgcccacgtgatga

SEQ ID NO: 540426 - DNA, 25 bp, Homo sapien
aaaaaaggcgggaactgagagccag

SEQ ID NO: 540427 - DNA, 25 bp, Homo sapien
gccagcccctcttcctccgctggct

SEQ ID NO: 540428 - DNA, 25 bp, Homo sapien
gagccagcccctcttcctccgctgg

SEQ ID NO: 540429 - DNA, 25 bp, Homo sapien
aaaggcgggaactgagagccagccc

SEQ ID NO: 540430 - DNA, 25 bp, Homo sapien
gaggcacccatcgagaggcgagtac

SEQ ID NO: 540431 - DNA, 25 bp, Homo sapien
cccctgacacttgggaccgccatcg

SEQ ID NO: 540432 - DNA, 25 bp, Homo sapien
cgagccgaggagtgacagccacccc

SEQ ID NO: 540433 - DNA, 25 bp, Homo sapien
catcgagaggcgagtacagagagcc

SEQ ID NO: 540434 - DNA, 25 bp, Homo sapien
tgggatttactctccgacaggggtc

SEQ ID NO: 540435 - DNA, 25 bp, Homo sapien
cgacaggggtccgaactcagcccgg

SEQ ID NO: 540436 - DNA, 25 bp, Homo sapien
tactctccgacaggggtccgaactc

SEQ ID NO: 540437 - DNA, 25 bp, Homo sapien
actcagcccgggaacagaaagaaag

SEQ ID NO: 540438 - DNA, 25 bp, Homo sapien
aagctcaaatctgccgaaggcaggt

SEQ ID NO: 540439 - DNA, 25 bp, Homo sapien
tgggtataggtgtccaagaagaaag

SEQ ID NO: 540440 - DNA, 25 bp, Homo sapien
ggtataggtgtccaagaagaaagct

SEQ ID NO: 540441 - DNA, 25 bp, Homo sapien
aagaaagctcaaatctgccgaaggc

SEQ ID NO: 540442 - DNA, 25 bp, Homo sapien
gggatttactgtccaacaggtgtca

SEQ ID NO: 540443 - DNA, 25 bp, Homo sapien
aacaggtgtcagaacgcagcccggg

SEQ ID NO: 540444 - DNA, 25 bp, Homo sapien
tactgtccaacaggtgtcagaacgc

SEQ ID NO: 540445 - DNA, 25 bp, Homo sapien
gtccaacaggtgtcagaacgcagcc

SEQ ID NO: 540446 - DNA, 25 bp, Homo sapien
caaatctgccgacggcgggtacctt

SEQ ID NO: 540447 - DNA, 25 bp, Homo sapien
ctcaaatctgccgacggcgggtacc

SEQ ID NO: 540448 - DNA, 25 bp, Homo sapien
aagctcaaatctgccgacggcgggt

SEQ ID NO: 540449 - DNA, 25 bp, Homo sapien
ctgccgacggcgggtaccttaattg

SEQ ID NO: 540450 - DNA, 25 bp, Homo sapien
tagattgtacacgtcagagagagac

SEQ ID NO: 540451 - DNA, 25 bp, Homo sapien
ggacacccatcgtggatcctaagaa

SEQ ID NO: 540452 - DNA, 25 bp, Homo sapien
gctcttcggaaacccatggcagcgg

SEQ ID NO: 540453 - DNA, 25 bp, Homo sapien
cagactcttgggatcaccatcgcag

SEQ ID NO: 540454 - DNA, 25 bp, Homo sapien
caggcagaaagctcaaatctgccga

SEQ ID NO: 540455 - DNA, 25 bp, Homo sapien
gtgtccaggcagaaagctcaaatct

SEQ ID NO: 540456 - DNA, 25 bp, Homo sapien
taggtgtccaggcagaaagctcaaa

SEQ ID NO: 540457 - DNA, 25 bp, Homo sapien
ggcagaaagctcaaatctgccgacg

SEQ ID NO: 540458 - DNA, 25 bp, Homo sapien
cttaggatccccatcccggagaggg

SEQ ID NO: 540459 - DNA, 25 bp, Homo sapien
cagcacctggtcccccccctggctt

SEQ ID NO: 540460 - DNA, 25 bp, Homo sapien
ccaaaggcaggcgagagaattctca

SEQ ID NO: 540461 - DNA, 25 bp, Homo sapien
atctaccagagcctaagggccaaag

SEQ ID NO: 540462 - DNA, 25 bp, Homo sapien
taccagagcctaagggccaaaggca

SEQ ID NO: 540463 - DNA, 25 bp, Homo sapien
ctttggaatggggatcctaacaaca

SEQ ID NO: 540464 - DNA, 25 bp, Homo sapien
attcttgggactcccatcgcggggg

SEQ ID NO: 540465 - DNA, 25 bp, Homo sapien
ttggatccccatcccagggcgggag

SEQ ID NO: 540466 - DNA, 25 bp, Homo sapien
tctcttcgccccctgattcttggga

SEQ ID NO: 540467 - DNA, 25 bp, Homo sapien
tggctctttggatccccatcccagg

SEQ ID NO: 540468 - DNA, 25 bp, Homo sapien
cgtttgctaaacatagattcgagtt

SEQ ID NO: 540469 - DNA, 25 bp, Homo sapien
ttttccgtttgctaaacatagattc

SEQ ID NO: 540470 - DNA, 25 bp, Homo sapien
catagattcgagtttcatattataa

SEQ ID NO: 540471 - DNA, 25 bp, Homo sapien
gctaaacatagattcgagtttcata

SEQ ID NO: 540472 - DNA, 25 bp, Homo sapien
ggttgtagacagacgaagagtgatt

SEQ ID NO: 540473 - DNA, 25 bp, Homo sapien
tagacagacgaagagtgatttagtc

SEQ ID NO: 540474 - DNA, 25 bp, Homo sapien
tgggttgtagacagacgaagagtga

SEQ ID NO: 540475 - DNA, 25 bp, Homo sapien
tgtagacagacgaagagtgatttag

SEQ ID NO: 540476 - DNA, 25 bp, Homo sapien
tatttggtgctaagtagagagtgcc

SEQ ID NO: 540477 - DNA, 25 bp, Homo sapien
gaaaacataggaagccgcataggga

SEQ ID NO: 540478 - DNA, 25 bp, Homo sapien
gagagtgcctatatgatcagcccaa

SEQ ID NO: 540479 - DNA, 25 bp, Homo sapien
ggtgttcccaattaacaggtggctg

SEQ ID NO: 540480 - DNA, 25 bp, Homo sapien
cagtccgaccacgatgttctttcca

SEQ ID NO: 540481 - DNA, 25 bp, Homo sapien
ttctaaagcctgcagtccgaccacg

SEQ ID NO: 540482 - DNA, 25 bp, Homo sapien
caacaccagtcccatcgtggtttgc

SEQ ID NO: 540483 - DNA, 25 bp, Homo sapien
tgtcatataggacttgaccacagct

SEQ ID NO: 540484 - DNA, 25 bp, Homo sapien
gctgtgttttctccaacaacctgaa

SEQ ID NO: 540485 - DNA, 25 bp, Homo sapien
tgtgttttctccaacaacctgaatt

SEQ ID NO: 540486 - DNA, 25 bp, Homo sapien
attgctgtgttttctccaacaacct

SEQ ID NO: 540487 - DNA, 25 bp, Homo sapien
tgctgtgttttctccaacaacctga

SEQ ID NO: 540488 - DNA, 25 bp, Homo sapien
gagagattctttgggtggcagtcac

SEQ ID NO: 540489 - DNA, 25 bp, Homo sapien
tacagatagaaatagagggtgccct

SEQ ID NO: 540490 - DNA, 25 bp, Homo sapien
aattactggccaaaggactcctctg

SEQ ID NO: 540491 - DNA, 25 bp, Homo sapien
tgagatggatggtcggcttcaccca

SEQ ID NO: 540492 - DNA, 25 bp, Homo sapien
gatggtttagccttgtccctcaggg

SEQ ID NO: 540493 - DNA, 25 bp, Homo sapien
gagtctggtcttgttggccctgaac

SEQ ID NO: 540494 - DNA, 25 bp, Homo sapien
tatatctgctacaaggctgtgtccc

SEQ ID NO: 540495 - DNA, 25 bp, Homo sapien
gactcgctggagaatgttgccatct

SEQ ID NO: 540496 - DNA, 25 bp, Homo sapien
ttgttgtcatttggtgtgatttaac

SEQ ID NO: 540497 - DNA, 25 bp, Homo sapien
gtcatttggtgtgatttaacaggcc

SEQ ID NO: 540498 - DNA, 25 bp, Homo sapien
tgtcatttggtgtgatttaacaggc

SEQ ID NO: 540499 - DNA, 25 bp, Homo sapien
gttgtcatttggtgtgatttaacag

SEQ ID NO: 540500 - DNA, 25 bp, Homo sapien
gaaacatcaaggcataacccctttc

SEQ ID NO: 540501 - DNA, 25 bp, Homo sapien
ccagtattctgtggtgaggtattgc

SEQ ID NO: 540502 - DNA, 25 bp, Homo sapien
tctgtccactctctaaaccagtatt

SEQ ID NO: 540503 - DNA, 25 bp, Homo sapien
tgctgtttactgcatgtcgctccat

SEQ ID NO: 540504 - DNA, 25 bp, Homo sapien
tttatataaaacacgcagtatctaa

SEQ ID NO: 540505 - DNA, 25 bp, Homo sapien
aaaaggcaccaatccgctagcacga

SEQ ID NO: 540506 - DNA, 25 bp, Homo sapien
aacacgcagtatctaaaaaagcaca

SEQ ID NO: 540507 - DNA, 25 bp, Homo sapien
gacacaaggttacaacgaactttca

SEQ ID NO: 540508 - DNA, 25 bp, Homo sapien
cagagcagagtgagttctattttcc

SEQ ID NO: 540509 - DNA, 25 bp, Homo sapien
tattcctcctcatacaagccagagc

SEQ ID NO: 540510 - DNA, 25 bp, Homo sapien
ggaaaggaattgcttcacctagctt

SEQ ID NO: 540511 - DNA, 25 bp, Homo sapien
ggaaggatggcaactcatggaccgt

SEQ ID NO: 540512 - DNA, 25 bp, Homo sapien
ccggacaatgtcgtttttttctgat

SEQ ID NO: 540513 - DNA, 25 bp, Homo sapien
gcataatctattgtttaaaactcac

SEQ ID NO: 540514 - DNA, 25 bp, Homo sapien
gattagcataatctattgtttaaaa

SEQ ID NO: 540515 - DNA, 25 bp, Homo sapien
ttctgataagattagcataatctat

SEQ ID NO: 540516 - DNA, 25 bp, Homo sapien
cacttattagtctaacactttgggc

SEQ ID NO: 540517 - DNA, 25 bp, Homo sapien
tgtccaaccctgtcacttattagtc

SEQ ID NO: 540518 - DNA, 25 bp, Homo sapien
tgggttcattgtccaaccctgtcac

SEQ ID NO: 540519 - DNA, 25 bp, Homo sapien
aacactttgggcagcgtttcttatc

SEQ ID NO: 540520 - DNA, 25 bp, Homo sapien
gtttgagcatcagtgactgctaaca

SEQ ID NO: 540521 - DNA, 25 bp, Homo sapien
cctgagacgcagacgtttcagtaag

SEQ ID NO: 540522 - DNA, 25 bp, Homo sapien
tgagacgcagacgtttcagtaagct

SEQ ID NO: 540523 - DNA, 25 bp, Homo sapien
aacctgagacgcagacgtttcagta

SEQ ID NO: 540524 - DNA, 25 bp, Homo sapien
agacgcagacgtttcagtaagctgt

SEQ ID NO: 540525 - DNA, 25 bp, Homo sapien
cattcagttgcactaggccaacatt

SEQ ID NO: 540526 - DNA, 25 bp, Homo sapien
aatttgcattcagttgcactaggcc

SEQ ID NO: 540527 - DNA, 25 bp, Homo sapien
ctaggccaacattctggaaattatt

SEQ ID NO: 540528 - DNA, 25 bp, Homo sapien
actaggccaacattctggaaattat

SEQ ID NO: 540529 - DNA, 25 bp, Homo sapien
gttgtcgttgttgtccctatactgg

SEQ ID NO: 540530 - DNA, 25 bp, Homo sapien
gtccagacattctgacacatctgca

SEQ ID NO: 540531 - DNA, 25 bp, Homo sapien
gatatctacaggaactagtccagac

SEQ ID NO: 540532 - DNA, 25 bp, Homo sapien
gatattgcttttactgcacactctg

SEQ ID NO: 540533 - DNA, 25 bp, Homo sapien
aaagagttaacagcccatgaggatc

SEQ ID NO: 540534 - DNA, 25 bp, Homo sapien
agttaacagcccatgaggatctcat

SEQ ID NO: 540535 - DNA, 25 bp, Homo sapien
aatgtggaaagagttaacagcccat

SEQ ID NO: 540536 - DNA, 25 bp, Homo sapien
tggaaagagttaacagcccatgagg

SEQ ID NO: 540537 - DNA, 25 bp, Homo sapien
ggtggaaaagcaggcaccaacactg

SEQ ID NO: 540538 - DNA, 25 bp, Homo sapien
tctgcaatgcttgggtcctgtgctt

SEQ ID NO: 540539 - DNA, 25 bp, Homo sapien
ctgtcagtggctccgaatgcacatt

SEQ ID NO: 540540 - DNA, 25 bp, Homo sapien
cacattggcgtgatacaactgtctg

SEQ ID NO: 540541 - DNA, 25 bp, Homo sapien
cattcatagcgtagagagtttccca

SEQ ID NO: 540542 - DNA, 25 bp, Homo sapien
agctaacattcatagcgtagagagt

SEQ ID NO: 540543 - DNA, 25 bp, Homo sapien
catagcgtagagagtttcccaaaca

SEQ ID NO: 540544 - DNA, 25 bp, Homo sapien
tgtttgctgccagctaacattcata

SEQ ID NO: 540545 - DNA, 25 bp, Homo sapien
cctaggtgagtcgttaatgttaaca

SEQ ID NO: 540546 - DNA, 25 bp, Homo sapien
taccctaggtgagtcgttaatgtta

SEQ ID NO: 540547 - DNA, 25 bp, Homo sapien
ctaggtgagtcgttaatgttaacac

SEQ ID NO: 540548 - DNA, 25 bp, Homo sapien
aaataccctaggtgagtcgttaatg

SEQ ID NO: 540549 - DNA, 25 bp, Homo sapien
gagtgctccatatcatttcctatcc

SEQ ID NO: 540550 - DNA, 25 bp, Homo sapien
cctgcttgtcctgacgtaagcacct

SEQ ID NO: 540551 - DNA, 25 bp, Homo sapien
tggctgctagagtgctccatatcat

SEQ ID NO: 540552 - DNA, 25 bp, Homo sapien
gtcctgacgtaagcacctctctgga

SEQ ID NO: 540553 - DNA, 25 bp, Homo sapien
tattttagctccaccataccggcaa

SEQ ID NO: 540554 - DNA, 25 bp, Homo sapien
tctcctaagtctgggtttgccgaag

SEQ ID NO: 540555 - DNA, 25 bp, Homo sapien
tcccaagagcacagagacttccggg

SEQ ID NO: 540556 - DNA, 25 bp, Homo sapien
ctcacaaggaggcagggttttcacc

SEQ ID NO: 540557 - DNA, 25 bp, Homo sapien
cagtacatggacagaaaatcacaca

SEQ ID NO: 540558 - DNA, 25 bp, Homo sapien
gaataggaaatttactgacaaagag

SEQ ID NO: 540559 - DNA, 25 bp, Homo sapien
gaggctctgatatgcgtaaacccag

SEQ ID NO: 540560 - DNA, 25 bp, Homo sapien
gaaaagccactttaatctccttagc

SEQ ID NO: 540561 - DNA, 25 bp, Homo sapien
tgcttgtcacctgacacggtagtgg

SEQ ID NO: 540562 - DNA, 25 bp, Homo sapien
ttatatcgtgttccttcaactgctg

SEQ ID NO: 540563 - DNA, 25 bp, Homo sapien
aaaatctcttggtcatgatcatggc

SEQ ID NO: 540564 - DNA, 25 bp, Homo sapien
cacggtagtggttgctaaggtaaat

SEQ ID NO: 540565 - DNA, 25 bp, Homo sapien
gagccctcttgatataaatgcaccc

SEQ ID NO: 540566 - DNA, 25 bp, Homo sapien
gccctcttgatataaatgcacccat

SEQ ID NO: 540567 - DNA, 25 bp, Homo sapien
gggagccctcttgatataaatgcac

SEQ ID NO: 540568 - DNA, 25 bp, Homo sapien
ctgggagccctcttgatataaatgc

SEQ ID NO: 540569 - DNA, 25 bp, Homo sapien
cagatgtcgctacaaggtcatgact

SEQ ID NO: 540570 - DNA, 25 bp, Homo sapien
catagtcacgagtttctatacctct

SEQ ID NO: 540571 - DNA, 25 bp, Homo sapien
gatcaaggtgaagcatttacccaaa

SEQ ID NO: 540572 - DNA, 25 bp, Homo sapien
cctctacactcagaaactatcttgg

SEQ ID NO: 540573 - DNA, 25 bp, Homo sapien
ctttaactgcaacgggactttgtca

SEQ ID NO: 540574 - DNA, 25 bp, Homo sapien
gcaacgggactttgtcacactccat

SEQ ID NO: 540575 - DNA, 25 bp, Homo sapien
cacactccattacagttgtggtcca

SEQ ID NO: 540576 - DNA, 25 bp, Homo sapien
acagttgtggtccagtagtttatct

SEQ ID NO: 540577 - DNA, 25 bp, Homo sapien
tagaggaaactaatgaggcactggt

SEQ ID NO: 540578 - DNA, 25 bp, Homo sapien
ctatagtactgggtccagctttgta

SEQ ID NO: 540579 - DNA, 25 bp, Homo sapien
ggcactggtaccagagccctggttc

SEQ ID NO: 540580 - DNA, 25 bp, Homo sapien
actaatgaggcactggtaccagagc

SEQ ID NO: 540581 - DNA, 25 bp, Homo sapien
gatgaaatcagggatgataatacct

SEQ ID NO: 540582 - DNA, 25 bp, Homo sapien
tgagactggtaattctctgctcccc

SEQ ID NO: 540583 - DNA, 25 bp, Homo sapien
tgatgataggatcattcatttcagc

SEQ ID NO: 540584 - DNA, 25 bp, Homo sapien
ctcaaaagcacaaggaaagagcagg

SEQ ID NO: 540585 - DNA, 25 bp, Homo sapien
aagaaattgggtcatagtggccagg

SEQ ID NO: 540586 - DNA, 25 bp, Homo sapien
tgagggcatgattgaaaagctgaac

SEQ ID NO: 540587 - DNA, 25 bp, Homo sapien
caggaacgtggtttgactccaagga

SEQ ID NO: 540588 - DNA, 25 bp, Homo sapien
ggtgatcccttgaaaactttatctg

SEQ ID NO: 540589 - DNA, 25 bp, Homo sapien
tatgttaaactcagactagctgcct

SEQ ID NO: 540590 - DNA, 25 bp, Homo sapien
ctgttaatgagaatgggactaccac

SEQ ID NO: 540591 - DNA, 25 bp, Homo sapien
gaaaatgtctcttgtgactctggcc

SEQ ID NO: 540592 - DNA, 25 bp, Homo sapien
gaaaatggcccttgagcagacaaat

SEQ ID NO: 540593 - DNA, 25 bp, Homo sapien
atcctgatagccttgtgttagagga

SEQ ID NO: 540594 - DNA, 25 bp, Homo sapien
gtttgtctgtaggagagtataggct

SEQ ID NO: 540595 - DNA, 25 bp, Homo sapien
ggagagtataggctatcctgatagc

SEQ ID NO: 540596 - DNA, 25 bp, Homo sapien
ccttgtgttagaggaattataaaca

SEQ ID NO: 540597 - DNA, 25 bp, Homo sapien
taactaaacgctagcaggaccctaa

SEQ ID NO: 540598 - DNA, 25 bp, Homo sapien
gcaggaccctaataacagtgatata

SEQ ID NO: 540599 - DNA, 25 bp, Homo sapien
tcagaaatcacaaggtgattgatgg

SEQ ID NO: 540600 - DNA, 25 bp, Homo sapien
gaaatcacaaggtgattgatggctg

SEQ ID NO: 540601 - DNA, 25 bp, Homo sapien
gcttcctggtactgatagtttctga

SEQ ID NO: 540602 - DNA, 25 bp, Homo sapien
cttcctggtactgatagtttctgat

SEQ ID NO: 540603 - DNA, 25 bp, Homo sapien
agcttcctggtactgatagtttctg

SEQ ID NO: 540604 - DNA, 25 bp, Homo sapien
cagcttcctggtactgatagtttct

SEQ ID NO: 540605 - DNA, 25 bp, Homo sapien
cccagacaaacacatagcagcaatt

SEQ ID NO: 540606 - DNA, 25 bp, Homo sapien
tttgcacatgcaattccatagccat

SEQ ID NO: 540607 - DNA, 25 bp, Homo sapien
ctggaaacatcaggaggaggaccct

SEQ ID NO: 540608 - DNA, 25 bp, Homo sapien
caattatggatgacttttgcacatg

SEQ ID NO: 540609 - DNA, 25 bp, Homo sapien
catttttttcttccttgcagaaact

SEQ ID NO: 540610 - DNA, 25 bp, Homo sapien
tcatttttttcttccttgcagaaac

SEQ ID NO: 540611 - DNA, 25 bp, Homo sapien
ttcttccttgcagaaacttctgtac

SEQ ID NO: 540612 - DNA, 25 bp, Homo sapien
tttttcttccttgcagaaacttctg

SEQ ID NO: 540613 - DNA, 25 bp, Homo sapien
aatctgatagcaacagagcttcagc

SEQ ID NO: 540614 - DNA, 25 bp, Homo sapien
cttagattaatgtgagtgaatgctt

SEQ ID NO: 540615 - DNA, 25 bp, Homo sapien
ttagattaatgtgagtgaatgcttt

SEQ ID NO: 540616 - DNA, 25 bp, Homo sapien
tctgttcctcttgaactttgagcaa

SEQ ID NO: 540617 - DNA, 25 bp, Homo sapien
ctttgagcaaaactagaggaccaag

SEQ ID NO: 540618 - DNA, 25 bp, Homo sapien
ctagaggaccaagattagctttttc

SEQ ID NO: 540619 - DNA, 25 bp, Homo sapien
caaaactagaggaccaagattagct

SEQ ID NO: 540620 - DNA, 25 bp, Homo sapien
gtaggtctttgagtcctgcagtgaa

SEQ ID NO: 540621 - DNA, 25 bp, Homo sapien
taggtctttgagtcctgcagtgaag

SEQ ID NO: 540622 - DNA, 25 bp, Homo sapien
agcagtaggtctttgagtcctgcag

SEQ ID NO: 540623 - DNA, 25 bp, Homo sapien
cagtaggtctttgagtcctgcagtg

SEQ ID NO: 540624 - DNA, 25 bp, Homo sapien
atagaggcttttcaattcccgcttt

SEQ ID NO: 540625 - DNA, 25 bp, Homo sapien
tcccgctttgtcttgagttttttca

SEQ ID NO: 540626 - DNA, 25 bp, Homo sapien
caattcccgctttgtcttgagtttt

SEQ ID NO: 540627 - DNA, 25 bp, Homo sapien
ttcttttgaggtactatcaaaattc

SEQ ID NO: 540628 - DNA, 25 bp, Homo sapien
cttgtcttctgataagttcttagct

SEQ ID NO: 540629 - DNA, 25 bp, Homo sapien
acacattcgggggagtgcttccact

SEQ ID NO: 540630 - DNA, 25 bp, Homo sapien
caatttgtaggttttcagagaagac

SEQ ID NO: 540631 - DNA, 25 bp, Homo sapien
cccactccaatttgtaggttttcag

SEQ ID NO: 540632 - DNA, 25 bp, Homo sapien
ggagtgcttccacttggaaaagctt

SEQ ID NO: 540633 - DNA, 25 bp, Homo sapien
ctgtgaagcggatacggtttctcac

SEQ ID NO: 540634 - DNA, 25 bp, Homo sapien
gcctccaggtagcagctatgccccg

SEQ ID NO: 540635 - DNA, 25 bp, Homo sapien
aggtagcagctatgccccgtgaacg

SEQ ID NO: 540636 - DNA, 25 bp, Homo sapien
ctccaggtagcagctatgccccgtg

SEQ ID NO: 540637 - DNA, 25 bp, Homo sapien
ccaggtagcagctatgccccgtgaa

SEQ ID NO: 540638 - DNA, 25 bp, Homo sapien
cctccagatcgttggtgttcatcag

SEQ ID NO: 540639 - DNA, 25 bp, Homo sapien
cagatgccgctggatctcctctgtg

SEQ ID NO: 540640 - DNA, 25 bp, Homo sapien
tgaggtgcctggcatccagatgccg

SEQ ID NO: 540641 - DNA, 25 bp, Homo sapien
cagtttccttttcacgatcatgagg

SEQ ID NO: 540642 - DNA, 25 bp, Homo sapien
taggagaactggctttgtgtttcat

SEQ ID NO: 540643 - DNA, 25 bp, Homo sapien
cagggagataggagaactggctttg

SEQ ID NO: 540644 - DNA, 25 bp, Homo sapien
gagataggagaactggctttgtgtt

SEQ ID NO: 540645 - DNA, 25 bp, Homo sapien
gataggagaactggctttgtgtttc

SEQ ID NO: 540646 - DNA, 25 bp, Homo sapien
ttcgtttccgtactgcatgatgtgg

SEQ ID NO: 540647 - DNA, 25 bp, Homo sapien
tttaatgtggagatcgtttcgtttc

SEQ ID NO: 540648 - DNA, 25 bp, Homo sapien
gagatcgtttcgtttccgtactgca

SEQ ID NO: 540649 - DNA, 25 bp, Homo sapien
taatgtggagatcgtttcgtttccg

SEQ ID NO: 540650 - DNA, 25 bp, Homo sapien
gcactgcttgtgcagggtctggtta

SEQ ID NO: 540651 - DNA, 25 bp, Homo sapien
tgcttgtgcagggtctggttagtca

SEQ ID NO: 540652 - DNA, 25 bp, Homo sapien
gggtctggttagtcagatcttccac

SEQ ID NO: 540653 - DNA, 25 bp, Homo sapien
tgtgcagggtctggttagtcagatc

SEQ ID NO: 540654 - DNA, 25 bp, Homo sapien
taaacattagtatcaccaggcaggt

SEQ ID NO: 540655 - DNA, 25 bp, Homo sapien
ataaacattagtatcaccaggcagg

SEQ ID NO: 540656 - DNA, 25 bp, Homo sapien
agttgcataaacattagtatcacca

SEQ ID NO: 540657 - DNA, 25 bp, Homo sapien
tgcataaacattagtatcaccaggc

SEQ ID NO: 540658 - DNA, 25 bp, Homo sapien
gtacatgtaatggatggtctcattc

SEQ ID NO: 540659 - DNA, 25 bp, Homo sapien
tacatgtaatggatggtctcattca

SEQ ID NO: 540660 - DNA, 25 bp, Homo sapien
catgtaatggatggtctcattcagg

SEQ ID NO: 540661 - DNA, 25 bp, Homo sapien
tgtacatgtaatggatggtctcatt

SEQ ID NO: 540662 - DNA, 25 bp, Homo sapien
tccagtagatccatggtcagtgaag

SEQ ID NO: 540663 - DNA, 25 bp, Homo sapien
gtagatccatggtcagtgaagtaaa

SEQ ID NO: 540664 - DNA, 25 bp, Homo sapien
cagtagatccatggtcagtgaagta

SEQ ID NO: 540665 - DNA, 25 bp, Homo sapien
ttccagtagatccatggtcagtgaa

SEQ ID NO: 540666 - DNA, 25 bp, Homo sapien
tgtagtcagtccttcgggaatccct

SEQ ID NO: 540667 - DNA, 25 bp, Homo sapien
tggggaccgctcttcaggactttcc

SEQ ID NO: 540668 - DNA, 25 bp, Homo sapien
atgatcctggggaccgctcttcagg

SEQ ID NO: 540669 - DNA, 25 bp, Homo sapien
tagtcagtccttcgggaatccctga

SEQ ID NO: 540670 - DNA, 25 bp, Homo sapien
gtcttcagagtgagcagtgtcatcg

SEQ ID NO: 540671 - DNA, 25 bp, Homo sapien
gatgtgctcgtctggaatcccattc

SEQ ID NO: 540672 - DNA, 25 bp, Homo sapien
tgtcttcagagtgagcagtgtcatc

SEQ ID NO: 540673 - DNA, 25 bp, Homo sapien
gctcgtctggaatcccattccagta

SEQ ID NO: 540674 - DNA, 25 bp, Homo sapien
catctatgggaacagcaccagtgcc

SEQ ID NO: 540675 - DNA, 25 bp, Homo sapien
tctatgggaacagcaccagtgccca

SEQ ID NO: 540676 - DNA, 25 bp, Homo sapien
tcatctatgggaacagcaccagtgc

SEQ ID NO: 540677 - DNA, 25 bp, Homo sapien
atctatgggaacagcaccagtgccc

SEQ ID NO: 540678 - DNA, 25 bp, Homo sapien
ctgaggaatacagctactttccaaa

SEQ ID NO: 540679 - DNA, 25 bp, Homo sapien
catttagaaagattgatgtagattt

SEQ ID NO: 540680 - DNA, 25 bp, Homo sapien
tcatttagaaagattgatgtagatt

SEQ ID NO: 540681 - DNA, 25 bp, Homo sapien
ctttctgtggtaaagtcctgttcat

SEQ ID NO: 540682 - DNA, 25 bp, Homo sapien
aatatctttctgtggtaaagtcctg

SEQ ID NO: 540683 - DNA, 25 bp, Homo sapien
tagcagttcacatttaatatctttc

SEQ ID NO: 540684 - DNA, 25 bp, Homo sapien
tctgtagcagttcacatttaatatc

SEQ ID NO: 540685 - DNA, 25 bp, Homo sapien
ggatgccgctgttagatagccctga

SEQ ID NO: 540686 - DNA, 25 bp, Homo sapien
tgacctctgtcaaggaaataacact

SEQ ID NO: 540687 - DNA, 25 bp, Homo sapien
tcctccgaagggtagtgcccaacag

SEQ ID NO: 540688 - DNA, 25 bp, Homo sapien
ctcaaacccgcgtcagcatgaacag

SEQ ID NO: 540689 - DNA, 25 bp, Homo sapien
tatcttcactttgtatccaaagatt

SEQ ID NO: 540690 - DNA, 25 bp, Homo sapien
atccaaagatttatcttcttcaaca

SEQ ID NO: 540691 - DNA, 25 bp, Homo sapien
cattatcttcactttgtatccaaag

SEQ ID NO: 540692 - DNA, 25 bp, Homo sapien
tccaaagatttatcttcttcaacat

SEQ ID NO: 540693 - DNA, 25 bp, Homo sapien
cccaagagtgcactttgaaatttaa

SEQ ID NO: 540694 - DNA, 25 bp, Homo sapien
aattcccaagagtgcactttgaaat

SEQ ID NO: 540695 - DNA, 25 bp, Homo sapien
ccaagagtgcactttgaaatttaac

SEQ ID NO: 540696 - DNA, 25 bp, Homo sapien
aaaaattcccaagagtgcactttga

SEQ ID NO: 540697 - DNA, 25 bp, Homo sapien
taagcctaggtgtcccaaggtgaca

SEQ ID NO: 540698 - DNA, 25 bp, Homo sapien
gacatcagatcgtatcagtctgtca

SEQ ID NO: 540699 - DNA, 25 bp, Homo sapien
tccactatgacatcagatcgtatca

SEQ ID NO: 540700 - DNA, 25 bp, Homo sapien
agtctgtcagggtgacgaagtaagc

SEQ ID NO: 540701 - DNA, 25 bp, Homo sapien
gaagaatacttaatttcttttctca

SEQ ID NO: 540702 - DNA, 25 bp, Homo sapien
ttttctcaaacttagattttcttca

SEQ ID NO: 540703 - DNA, 25 bp, Homo sapien
ctgcgttttggaagaatacttaatt

SEQ ID NO: 540704 - DNA, 25 bp, Homo sapien
gattttcttcatcatctacgttcat

SEQ ID NO: 540705 - DNA, 25 bp, Homo sapien
caaagtctgatatctcacaaacaac

SEQ ID NO: 540706 - DNA, 25 bp, Homo sapien
aagcgactgtggtgagagtcatcaa

SEQ ID NO: 540707 - DNA, 25 bp, Homo sapien
caactttccaataagtgtggttgtg

SEQ ID NO: 540708 - DNA, 25 bp, Homo sapien
tggtcagacgtagaccaccaaagcg

SEQ ID NO: 540709 - DNA, 25 bp, Homo sapien
gagggactgagtcatcaaatgtgtt

SEQ ID NO: 540710 - DNA, 25 bp, Homo sapien
ctggcaacccggactggtttccctg

SEQ ID NO: 540711 - DNA, 25 bp, Homo sapien
ccctggatacaagagcttccctgct

SEQ ID NO: 540712 - DNA, 25 bp, Homo sapien
tttccctggatacaagagcttccct

SEQ ID NO: 540713 - DNA, 25 bp, Homo sapien
ctatgttcttggagtgcactggtct

SEQ ID NO: 540714 - DNA, 25 bp, Homo sapien
gagtgcactggtctcattgcacttc

SEQ ID NO: 540715 - DNA, 25 bp, Homo sapien
cttggagtgcactggtctcattgca

SEQ ID NO: 540716 - DNA, 25 bp, Homo sapien
tgttcttggagtgcactggtctcat

SEQ ID NO: 540717 - DNA, 25 bp, Homo sapien
tgggacaggacctggttgatgatgc

SEQ ID NO: 540718 - DNA, 25 bp, Homo sapien
ctgggacaggacctggttgatgatg

SEQ ID NO: 540719 - DNA, 25 bp, Homo sapien
gggacaggacctggttgatgatgct

SEQ ID NO: 540720 - DNA, 25 bp, Homo sapien
tgggaagccaccccttgaggtcgat

SEQ ID NO: 540721 - DNA, 25 bp, Homo sapien
ttgggaagccaccccttgaggtcga

SEQ ID NO: 540722 - DNA, 25 bp, Homo sapien
cttgggaagccaccccttgaggtcg

SEQ ID NO: 540723 - DNA, 25 bp, Homo sapien
gggaagccaccccttgaggtcgatg

SEQ ID NO: 540724 - DNA, 25 bp, Homo sapien
ctgagcagtcatgtaagtttggtct

SEQ ID NO: 540725 - DNA, 25 bp, Homo sapien
cagtcatgtaagtttggtcttggag

SEQ ID NO: 540726 - DNA, 25 bp, Homo sapien
gcagtcatgtaagtttggtcttgga

SEQ ID NO: 540727 - DNA, 25 bp, Homo sapien
gagcagtcatgtaagtttggtcttg

SEQ ID NO: 540728 - DNA, 25 bp, Homo sapien
tgggaccatgctccccctgatgaca

SEQ ID NO: 540729 - DNA, 25 bp, Homo sapien
caagtgggaccatgctccccctgat

SEQ ID NO: 540730 - DNA, 25 bp, Homo sapien
agtgggaccatgctccccctgatga

SEQ ID NO: 540731 - DNA, 25 bp, Homo sapien
tgcaagtgggaccatgctccccctg

SEQ ID NO: 540732 - DNA, 25 bp, Homo sapien
gccagctcatgggcaatgaatgtat

SEQ ID NO: 540733 - DNA, 25 bp, Homo sapien
gagccttgacgcttggcacagcaca

SEQ ID NO: 540734 - DNA, 25 bp, Homo sapien
acagagtcacaaggccccactaggt

SEQ ID NO: 540735 - DNA, 25 bp, Homo sapien
cacagcacatgctcacagagtcaca

SEQ ID NO: 540736 - DNA, 25 bp, Homo sapien
cttttctgatcatcttctgcaagac

SEQ ID NO: 540737 - DNA, 25 bp, Homo sapien
cttgatcgccttgatattggagttg

SEQ ID NO: 540738 - DNA, 25 bp, Homo sapien
ttggagttgcactcccccattgcct

SEQ ID NO: 540739 - DNA, 25 bp, Homo sapien
cactccacgagctctttgtagagcc

SEQ ID NO: 540740 - DNA, 25 bp, Homo sapien
gccttgatattggagttgcactccc

SEQ ID NO: 540741 - DNA, 25 bp, Homo sapien
tccagccctcgtagttgccgagggc

SEQ ID NO: 540742 - DNA, 25 bp, Homo sapien
gttgccgagggctaaggatgcccaa

SEQ ID NO: 540743 - DNA, 25 bp, Homo sapien
gccctcgtagttgccgagggctaag

SEQ ID NO: 540744 - DNA, 25 bp, Homo sapien
ctcgtagttgccgagggctaaggat

SEQ ID NO: 540745 - DNA, 25 bp, Homo sapien
gagaacgaagcagagagctccgccg

SEQ ID NO: 540746 - DNA, 25 bp, Homo sapien
agagaacgaagcagagagctccgcc

SEQ ID NO: 540747 - DNA, 25 bp, Homo sapien
agaacgaagcagagagctccgccgc

SEQ ID NO: 540748 - DNA, 25 bp, Homo sapien
cagagaacgaagcagagagctccgc

SEQ ID NO: 540749 - DNA, 25 bp, Homo sapien
ccctccggttaagctcctgcccgat

SEQ ID NO: 540750 - DNA, 25 bp, Homo sapien
cctccggttaagctcctgcccgatg

SEQ ID NO: 540751 - DNA, 25 bp, Homo sapien
gccctccggttaagctcctgcccga

SEQ ID NO: 540752 - DNA, 25 bp, Homo sapien
gccaacgccggtgaggctgcctctt

SEQ ID NO: 540753 - DNA, 25 bp, Homo sapien
tgttccacgtattaaatgtccccca

SEQ ID NO: 540754 - DNA, 25 bp, Homo sapien
ccgccaacgccggtgaggctgcctc

SEQ ID NO: 540755 - DNA, 25 bp, Homo sapien
tgcagcctggacccggtgttccacg

SEQ ID NO: 540756 - DNA, 25 bp, Homo sapien
gagtcccagtatagattaactttat

SEQ ID NO: 540757 - DNA, 25 bp, Homo sapien
tatacttctgctccgatcaccaatg

SEQ ID NO: 540758 - DNA, 25 bp, Homo sapien
ctttatacttctgctccgatcacca

SEQ ID NO: 540759 - DNA, 25 bp, Homo sapien
gaaggatgaagtactgagagtccca

SEQ ID NO: 540760 - DNA, 25 bp, Homo sapien
cgaaatactttggaagattttctca

SEQ ID NO: 540761 - DNA, 25 bp, Homo sapien
gaaatactttggaagattttctcat

SEQ ID NO: 540762 - DNA, 25 bp, Homo sapien
cttggggagttagcacactgaggag

SEQ ID NO: 540763 - DNA, 25 bp, Homo sapien
cacactgaggagggatgaaaagggc

SEQ ID NO: 540764 - DNA, 25 bp, Homo sapien
cactgaggagggatgaaaagggcat

SEQ ID NO: 540765 - DNA, 25 bp, Homo sapien
agttagcacactgaggagggatgaa

SEQ ID NO: 540766 - DNA, 25 bp, Homo sapien
cctgctcatcagcatacagcttaag

SEQ ID NO: 540767 - DNA, 25 bp, Homo sapien
tgctcatcagcatacagcttaagga

SEQ ID NO: 540768 - DNA, 25 bp, Homo sapien
ctgctcatcagcatacagcttaagg

SEQ ID NO: 540769 - DNA, 25 bp, Homo sapien
ttcctgctcatcagcatacagctta

SEQ ID NO: 540770 - DNA, 25 bp, Homo sapien
taagcttagggtgtaagttcaaata

SEQ ID NO: 540771 - DNA, 25 bp, Homo sapien
cttagggtgtaagttcaaatactgt

SEQ ID NO: 540772 - DNA, 25 bp, Homo sapien
agaataagcttagggtgtaagttca

SEQ ID NO: 540773 - DNA, 25 bp, Homo sapien
tagggtgtaagttcaaatactgtag

SEQ ID NO: 540774 - DNA, 25 bp, Homo sapien
gccatgggcctttgtatgattctgt

SEQ ID NO: 540775 - DNA, 25 bp, Homo sapien
gattctgttgggagctacagcctgg

SEQ ID NO: 540776 - DNA, 25 bp, Homo sapien
gctggggtaaactgccatgggcctt

SEQ ID NO: 540777 - DNA, 25 bp, Homo sapien
atatttggggaacctgaaagctggg

SEQ ID NO: 540778 - DNA, 25 bp, Homo sapien
cttggatatcatttgtactggattc

SEQ ID NO: 540779 - DNA, 25 bp, Homo sapien
gaatttagtttgaacttggatatca

SEQ ID NO: 540780 - DNA, 25 bp, Homo sapien
gaaaatatagcattggaatttagtt

SEQ ID NO: 540781 - DNA, 25 bp, Homo sapien
atcatttgtactggattctgtctcc

SEQ ID NO: 540782 - DNA, 25 bp, Homo sapien
ttaatagataggaaactgaattatg

SEQ ID NO: 540783 - DNA, 25 bp, Homo sapien
taatagataggaaactgaattatga

SEQ ID NO: 540784 - DNA, 25 bp, Homo sapien
tcaaccttaggggctacacatccca

SEQ ID NO: 540785 - DNA, 25 bp, Homo sapien
aaccttaggggctacacatcccagc

SEQ ID NO: 540786 - DNA, 25 bp, Homo sapien
ccatcaaccttaggggctacacatc

SEQ ID NO: 540787 - DNA, 25 bp, Homo sapien
cttaggggctacacatcccagcctg

SEQ ID NO: 540788 - DNA, 25 bp, Homo sapien
aggaactaccttctcactggagatt

SEQ ID NO: 540789 - DNA, 25 bp, Homo sapien
tgtttgatttcatactggagaattg

SEQ ID NO: 540790 - DNA, 25 bp, Homo sapien
tcagcagggtctacactggcaggaa

SEQ ID NO: 540791 - DNA, 25 bp, Homo sapien
gagaattgtttcagtgtcagcaggg

SEQ ID NO: 540792 - DNA, 25 bp, Homo sapien
tcctataaccgctaaactctttctg

SEQ ID NO: 540793 - DNA, 25 bp, Homo sapien
cagggtccctgaagaagtctatagg

SEQ ID NO: 540794 - DNA, 25 bp, Homo sapien
tatagggcaattcttggttttggtg

SEQ ID NO: 540795 - DNA, 25 bp, Homo sapien
gggacctggaaacgcctcctctgca

SEQ ID NO: 540796 - DNA, 25 bp, Homo sapien
tttgaaccagttagtctggagagct

SEQ ID NO: 540797 - DNA, 25 bp, Homo sapien
cttgttttaacactttgatgggtgt

SEQ ID NO: 540798 - DNA, 25 bp, Homo sapien
tgcaagcacagtttcctaggagtca

SEQ ID NO: 540799 - DNA, 25 bp, Homo sapien
cacataaaactgcaggcctgttgag

SEQ ID NO: 540800 - DNA, 25 bp, Homo sapien
tgacagtcacagaggctaatgattg

SEQ ID NO: 540801 - DNA, 25 bp, Homo sapien
gctaatgattgatgaactgacagtg

SEQ ID NO: 540802 - DNA, 25 bp, Homo sapien
tcacttctcgttgtagatgtttttg

SEQ ID NO: 540803 - DNA, 25 bp, Homo sapien
cacttctcgttgtagatgtttttga

SEQ ID NO: 540804 - DNA, 25 bp, Homo sapien
acttctcgttgtagatgtttttgaa

SEQ ID NO: 540805 - DNA, 25 bp, Homo sapien
cttcacttctcgttgtagatgtttt

SEQ ID NO: 540806 - DNA, 25 bp, Homo sapien
gagtatagcagaagagtagcatttc

SEQ ID NO: 540807 - DNA, 25 bp, Homo sapien
gcaagtttgtctccaaattttttca

SEQ ID NO: 540808 - DNA, 25 bp, Homo sapien
tatttaaatctatgctgtcctccat

SEQ ID NO: 540809 - DNA, 25 bp, Homo sapien
ttttatttaaatctatgctgtcctc

SEQ ID NO: 540810 - DNA, 25 bp, Homo sapien
atagcaagtttgtctccaaattttt

SEQ ID NO: 540811 - DNA, 25 bp, Homo sapien
tagcagttctcaagtgcagtctctc

SEQ ID NO: 540812 - DNA, 25 bp, Homo sapien
gatagcagttctcaagtgcagtctc

SEQ ID NO: 540813 - DNA, 25 bp, Homo sapien
gcagttctcaagtgcagtctctcac

SEQ ID NO: 540814 - DNA, 25 bp, Homo sapien
ctagatagcagttctcaagtgcagt

SEQ ID NO: 540815 - DNA, 25 bp, Homo sapien
tgtgaagcttgcacaatgtgaggag

SEQ ID NO: 540816 - DNA, 25 bp, Homo sapien
gcaacaacagtgtctgggttggcac

SEQ ID NO: 540817 - DNA, 25 bp, Homo sapien
gcattgctgttaggagcagcaacaa

SEQ ID NO: 540818 - DNA, 25 bp, Homo sapien
atgtatcacgtaggagggcattgct

SEQ ID NO: 540819 - DNA, 25 bp, Homo sapien
ctttcggattcctaaataaacatgg

SEQ ID NO: 540820 - DNA, 25 bp, Homo sapien
gataaggactgtgagccagctttcg

SEQ ID NO: 540821 - DNA, 25 bp, Homo sapien
gaacgcatgcattacagataaggac

SEQ ID NO: 540822 - DNA, 25 bp, Homo sapien
tggacggtcatcaaagcacactttg

SEQ ID NO: 540823 - DNA, 25 bp, Homo sapien
gaatatccttatccaaagacagcag

SEQ ID NO: 540824 - DNA, 25 bp, Homo sapien
caggaatatccttatccaaagacag

SEQ ID NO: 540825 - DNA, 25 bp, Homo sapien
tatccttatccaaagacagcagatc

SEQ ID NO: 540826 - DNA, 25 bp, Homo sapien
tttcaggaatatccttatccaaaga

SEQ ID NO: 540827 - DNA, 25 bp, Homo sapien
tctcattgttaaccctccactgaac

SEQ ID NO: 540828 - DNA, 25 bp, Homo sapien
tctattatttgaggtagcacatttt

SEQ ID NO: 540829 - DNA, 25 bp, Homo sapien
tatttgaggtagcacattttctatt

SEQ ID NO: 540830 - DNA, 25 bp, Homo sapien
tattatttgaggtagcacattttct

SEQ ID NO: 540831 - DNA, 25 bp, Homo sapien
ggtgctgaaggaaagtgattactgt

SEQ ID NO: 540832 - DNA, 25 bp, Homo sapien
tactctagagtataacaaaacatga

SEQ ID NO: 540833 - DNA, 25 bp, Homo sapien
tgattactgtattatgaggcgacca

SEQ ID NO: 540834 - DNA, 25 bp, Homo sapien
tgtggtaagctgctccaattatagc

SEQ ID NO: 540835 - DNA, 25 bp, Homo sapien
aatacctctggatgccctttccact

SEQ ID NO: 540836 - DNA, 25 bp, Homo sapien
ctttccactgttactctcatagcct

SEQ ID NO: 540837 - DNA, 25 bp, Homo sapien
cttccacgtcaaatgcctgacaata

SEQ ID NO: 540838 - DNA, 25 bp, Homo sapien
tgacaatacctctggatgccctttc

SEQ ID NO: 540839 - DNA, 25 bp, Homo sapien
gagtctgcaaaataggtattctgat

SEQ ID NO: 540840 - DNA, 25 bp, Homo sapien
gcaaaataggtattctgatttcctg

SEQ ID NO: 540841 - DNA, 25 bp, Homo sapien
tatgacaaactcttaggaacttaag

SEQ ID NO: 540842 - DNA, 25 bp, Homo sapien
gaacttaagagtctgcaaaataggt

SEQ ID NO: 540843 - DNA, 25 bp, Homo sapien
attcctattgtgcaactgatggtgt

SEQ ID NO: 540844 - DNA, 25 bp, Homo sapien
tgtgcaactgatggtgtgccttttg

SEQ ID NO: 540845 - DNA, 25 bp, Homo sapien
cctattgtgcaactgatggtgtgcc

SEQ ID NO: 540846 - DNA, 25 bp, Homo sapien
gcttttcggttaagagaagtattca

SEQ ID NO: 540847 - DNA, 25 bp, Homo sapien
gctggctataaattgcttattaatg

SEQ ID NO: 540848 - DNA, 25 bp, Homo sapien
agggattcttatatagctggctata

SEQ ID NO: 540849 - DNA, 25 bp, Homo sapien
taagcatagagcatagccacaagtc

SEQ ID NO: 540850 - DNA, 25 bp, Homo sapien
tgatttagtaatgttgtagggattc

SEQ ID NO: 540851 - DNA, 25 bp, Homo sapien
ctacaaccggcacattcagaagcaa

SEQ ID NO: 540852 - DNA, 25 bp, Homo sapien
gactaagatacattaaggcaccaat

SEQ ID NO: 540853 - DNA, 25 bp, Homo sapien
gcaccaattttggtacataccttca

SEQ ID NO: 540854 - DNA, 25 bp, Homo sapien
agcaagaaagaatattgcatgcatt

SEQ ID NO: 540855 - DNA, 25 bp, Homo sapien
ccacagtatgcagaaagtaccgtac

SEQ ID NO: 540856 - DNA, 25 bp, Homo sapien
catttggaagtcttcctgaaaataa

SEQ ID NO: 540857 - DNA, 25 bp, Homo sapien
tttttccacagtatgcagaaagtac

SEQ ID NO: 540858 - DNA, 25 bp, Homo sapien
acactgccccttgttcaatctttgc

SEQ ID NO: 540859 - DNA, 25 bp, Homo sapien
ggaatctacatctagttgacactat

SEQ ID NO: 540860 - DNA, 25 bp, Homo sapien
ttgggacaactctctcgaggtaacc

SEQ ID NO: 540861 - DNA, 25 bp, Homo sapien
ctctctcgaggtaacctgcagcttt

SEQ ID NO: 540862 - DNA, 25 bp, Homo sapien
taatgcatttgggacaactctctcg

SEQ ID NO: 540863 - DNA, 25 bp, Homo sapien
ttagaaccttctgctaccatatcca

SEQ ID NO: 540864 - DNA, 25 bp, Homo sapien
agatccataaccaccaccataggga

SEQ ID NO: 540865 - DNA, 25 bp, Homo sapien
accatagggactgcccgagcttctt

SEQ ID NO: 540866 - DNA, 25 bp, Homo sapien
tccaccacttccaccaccagatcca

SEQ ID NO: 540867 - DNA, 25 bp, Homo sapien
aaatcattatagttcccaccaccac

SEQ ID NO: 540868 - DNA, 25 bp, Homo sapien
caccatagttaccaccgccaaaatt

SEQ ID NO: 540869 - DNA, 25 bp, Homo sapien
aatttgattgctgttgtccactatg

SEQ ID NO: 540870 - DNA, 25 bp, Homo sapien
gctgttgtccactatgatttccaaa

SEQ ID NO: 540871 - DNA, 25 bp, Homo sapien
agttgccaccgtcacgtccaaatct

SEQ ID NO: 540872 - DNA, 25 bp, Homo sapien
accatagttgccaccgtcacgtcca

SEQ ID NO: 540873 - DNA, 25 bp, Homo sapien
gtcacgtccaaatctattatatcca

SEQ ID NO: 540874 - DNA, 25 bp, Homo sapien
gccaccgtcacgtccaaatctatta

SEQ ID NO: 540875 - DNA, 25 bp, Homo sapien
tggtttcaatcttgctacacttttc

SEQ ID NO: 540876 - DNA, 25 bp, Homo sapien
actgttagatgggcaacgggcttta

SEQ ID NO: 540877 - DNA, 25 bp, Homo sapien
ttagatgggcaacgggctttacaga

SEQ ID NO: 540878 - DNA, 25 bp, Homo sapien
atgggcaacgggctttacagaatcc

SEQ ID NO: 540879 - DNA, 25 bp, Homo sapien
ctttggttccactacaagacatttt

SEQ ID NO: 540880 - DNA, 25 bp, Homo sapien
aattgacaagtaattaatttgctga

SEQ ID NO: 540881 - DNA, 25 bp, Homo sapien
attgacaagtaattaatttgctgac

SEQ ID NO: 540882 - DNA, 25 bp, Homo sapien
gcatacaattattcacaaaggtcac

SEQ ID NO: 540883 - DNA, 25 bp, Homo sapien
atctggggcatacaattattcacaa

SEQ ID NO: 540884 - DNA, 25 bp, Homo sapien
gggcatacaattattcacaaaggtc

SEQ ID NO: 540885 - DNA, 25 bp, Homo sapien
tacaattattcacaaaggtcacttt

SEQ ID NO: 540886 - DNA, 25 bp, Homo sapien
gtttactcagataatacaggtggat

SEQ ID NO: 540887 - DNA, 25 bp, Homo sapien
atggggctctttgattgggagaggg

SEQ ID NO: 540888 - DNA, 25 bp, Homo sapien
tactcagataatacaggtggatggg

SEQ ID NO: 540889 - DNA, 25 bp, Homo sapien
ggctctttgattgggagagggactg

SEQ ID NO: 540890 - DNA, 25 bp, Homo sapien
aagctgttgcaagctgaaatgctgc

SEQ ID NO: 540891 - DNA, 25 bp, Homo sapien
gcaagctgaaatgctgcagcttcac

SEQ ID NO: 540892 - DNA, 25 bp, Homo sapien
gctgttgcaagctgaaatgctgcag

SEQ ID NO: 540893 - DNA, 25 bp, Homo sapien
aaaagctgttgcaagctgaaatgct

SEQ ID NO: 540894 - DNA, 25 bp, Homo sapien
agtcttcctcctgatattatttccc

SEQ ID NO: 540895 - DNA, 25 bp, Homo sapien
cacattgggtcagtcttcctcctga

SEQ ID NO: 540896 - DNA, 25 bp, Homo sapien
cattgggtcagtcttcctcctgata

SEQ ID NO: 540897 - DNA, 25 bp, Homo sapien
gggtcagtcttcctcctgatattat

SEQ ID NO: 540898 - DNA, 25 bp, Homo sapien
tcagttcagctcaccatacaacagc

SEQ ID NO: 540899 - DNA, 25 bp, Homo sapien
gctgtcatccattttttatacttgt

SEQ ID NO: 540900 - DNA, 25 bp, Homo sapien
caacagctggccaggtgtcctcctg

SEQ ID NO: 540901 - DNA, 25 bp, Homo sapien
tgttccttcagcctgccctatttga

SEQ ID NO: 540902 - DNA, 25 bp, Homo sapien
ttctacgaagaatgacaccaggata

SEQ ID NO: 540903 - DNA, 25 bp, Homo sapien
aaacggatgttttctacgaagaatg

SEQ ID NO: 540904 - DNA, 25 bp, Homo sapien
tctgagtattggaacgaaacggatg

SEQ ID NO: 540905 - DNA, 25 bp, Homo sapien
gacaccaggatacctttcagtatct

SEQ ID NO: 540906 - DNA, 25 bp, Homo sapien
gccagtcacctgtgaggaatttatg

SEQ ID NO: 540907 - DNA, 25 bp, Homo sapien
cctgtgaggaatttatgcttccttc

SEQ ID NO: 540908 - DNA, 25 bp, Homo sapien
gaggaatttatgcttccttcctctg

SEQ ID NO: 540909 - DNA, 25 bp, Homo sapien
gtcacctgtgaggaatttatgcttc

SEQ ID NO: 540910 - DNA, 25 bp, Homo sapien
tcttcggatatcacagacagtctgg

SEQ ID NO: 540911 - DNA, 25 bp, Homo sapien
tgaaatgcctgaaggccttagtggt

SEQ ID NO: 540912 - DNA, 25 bp, Homo sapien
acacatttgcctgccaagaagccca

SEQ ID NO: 540913 - DNA, 25 bp, Homo sapien
acacttgtagctgccttgcttgcgc

SEQ ID NO: 540914 - DNA, 25 bp, Homo sapien
cttgaataggagtctttagattaga

SEQ ID NO: 540915 - DNA, 25 bp, Homo sapien
aataggagtctttagattagattcc

SEQ ID NO: 540916 - DNA, 25 bp, Homo sapien
ttagattagattccaagaaaatcat

SEQ ID NO: 540917 - DNA, 25 bp, Homo sapien
ctctcttcttgaataggagtcttta

SEQ ID NO: 540918 - DNA, 25 bp, Homo sapien
gtagttcgcagattctgctgtggtt

SEQ ID NO: 540919 - DNA, 25 bp, Homo sapien
ggtggtagttcgcagattctgctgt

SEQ ID NO: 540920 - DNA, 25 bp, Homo sapien
tggtagttcgcagattctgctgtgg

SEQ ID NO: 540921 - DNA, 25 bp, Homo sapien
tggtggtagttcgcagattctgctg

SEQ ID NO: 540922 - DNA, 25 bp, Homo sapien
agtcaggttttacaaaatgatttgt

SEQ ID NO: 540923 - DNA, 25 bp, Homo sapien
tcaggttttacaaaatgatttgtgc

SEQ ID NO: 540924 - DNA, 25 bp, Homo sapien
ttttacaaaatgatttgtgcctaca

SEQ ID NO: 540925 - DNA, 25 bp, Homo sapien
tacaaaatgatttgtgcctacaaat

SEQ ID NO: 540926 - DNA, 25 bp, Homo sapien
ccaaatgagaaacttagagagaacc

SEQ ID NO: 540927 - DNA, 25 bp, Homo sapien
gggacaccaccagttgccaaatgag

SEQ ID NO: 540928 - DNA, 25 bp, Homo sapien
tatgagagtgtaaaagcaccctcag

SEQ ID NO: 540929 - DNA, 25 bp, Homo sapien
gcaccctcagtgtaaaaacaccaaa

SEQ ID NO: 540930 - DNA, 25 bp, Homo sapien
ttggttaggtgtattaatgctggcc

SEQ ID NO: 540931 - DNA, 25 bp, Homo sapien
cattttgccttttgtgactctggtg

SEQ ID NO: 540932 - DNA, 25 bp, Homo sapien
ttctgttgacagtgtctagtaacgg

SEQ ID NO: 540933 - DNA, 25 bp, Homo sapien
tagtaacggtaacagagtggtgtcc

SEQ ID NO: 540934 - DNA, 25 bp, Homo sapien
gtatggtatgtaagagtatgcacca

SEQ ID NO: 540935 - DNA, 25 bp, Homo sapien
catgtatggtatgtaagagtatgca

SEQ ID NO: 540936 - DNA, 25 bp, Homo sapien
tatggtatgtaagagtatgcaccat

SEQ ID NO: 540937 - DNA, 25 bp, Homo sapien
tgtatggtatgtaagagtatgcacc

SEQ ID NO: 540938 - DNA, 25 bp, Homo sapien
gctttgcagagaactagccgtgtag

SEQ ID NO: 540939 - DNA, 25 bp, Homo sapien
tgagctttgcagagaactagccgtg

SEQ ID NO: 540940 - DNA, 25 bp, Homo sapien
gaactagccgtgtagcatcacacat

SEQ ID NO: 540941 - DNA, 25 bp, Homo sapien
tgcagagaactagccgtgtagcatc

SEQ ID NO: 540942 - DNA, 25 bp, Homo sapien
cccatcatcatataccacatcattc

SEQ ID NO: 540943 - DNA, 25 bp, Homo sapien
acttcccatcatcatataccacatc

SEQ ID NO: 540944 - DNA, 25 bp, Homo sapien
ttcccatcatcatataccacatcat

SEQ ID NO: 540945 - DNA, 25 bp, Homo sapien
atcatcatataccacatcattcagg

SEQ ID NO: 540946 - DNA, 25 bp, Homo sapien
cctggcaaagacacaaccaaaaaag

SEQ ID NO: 540947 - DNA, 25 bp, Homo sapien
gatctgaaattgtggcaataatcaa

SEQ ID NO: 540948 - DNA, 25 bp, Homo sapien
tggcaaagacacaaccaaaaaagag

SEQ ID NO: 540949 - DNA, 25 bp, Homo sapien
aatcaatagcttaccaaccaaaaag

SEQ ID NO: 540950 - DNA, 25 bp, Homo sapien
catttcttgagatgcctaatgtgag

SEQ ID NO: 540951 - DNA, 25 bp, Homo sapien
ttacttttgataactgtaagccact

SEQ ID NO: 540952 - DNA, 25 bp, Homo sapien
taatgtgagtgtcaaattaccagcc

SEQ ID NO: 540953 - DNA, 25 bp, Homo sapien
gcttaatccttccataagctggctg

SEQ ID NO: 540954 - DNA, 25 bp, Homo sapien
ttaccaaatgagtaatttccttcca

SEQ ID NO: 540955 - DNA, 25 bp, Homo sapien
accaaatgagtaatttccttccata

SEQ ID NO: 540956 - DNA, 25 bp, Homo sapien
taccaaatgagtaatttccttccat

SEQ ID NO: 540957 - DNA, 25 bp, Homo sapien
tctccatataaatggtacgctagga

SEQ ID NO: 540958 - DNA, 25 bp, Homo sapien
tctctagtcgtactctgaagtagcc

SEQ ID NO: 540959 - DNA, 25 bp, Homo sapien
aatggtacgctaggaaatatacttt

SEQ ID NO: 540960 - DNA, 25 bp, Homo sapien
tactttattctctagtcgtactctg

SEQ ID NO: 540961 - DNA, 25 bp, Homo sapien
ttaaagtacctttgcttgagatcct

SEQ ID NO: 540962 - DNA, 25 bp, Homo sapien
taaagtacctttgcttgagatcctg

SEQ ID NO: 540963 - DNA, 25 bp, Homo sapien
ttccactgtgggagaatacagtgct

SEQ ID NO: 540964 - DNA, 25 bp, Homo sapien
tcatcaattccactgtgggagaata

SEQ ID NO: 540965 - DNA, 25 bp, Homo sapien
taggtctgaagtgcttttttctcac

SEQ ID NO: 540966 - DNA, 25 bp, Homo sapien
ctaggtctgaagtgcttttttctca

SEQ ID NO: 540967 - DNA, 25 bp, Homo sapien
gggacgactcaggatatctgattag

SEQ ID NO: 540968 - DNA, 25 bp, Homo sapien
gaattgggacgactcaggatatctg

SEQ ID NO: 540969 - DNA, 25 bp, Homo sapien
tctaagaattgggacgactcaggat

SEQ ID NO: 540970 - DNA, 25 bp, Homo sapien
taagaattgggacgactcaggatat

SEQ ID NO: 540971 - DNA, 25 bp, Homo sapien
tctcctgatcccagagtgtcaatga

SEQ ID NO: 540972 - DNA, 25 bp, Homo sapien
ctttctgctctgagtacatcatgaa

SEQ ID NO: 540973 - DNA, 25 bp, Homo sapien
tgtctgatgtccaatagtccctctc

SEQ ID NO: 540974 - DNA, 25 bp, Homo sapien
gagtacatcatgaatagacacttgt

SEQ ID NO: 540975 - DNA, 25 bp, Homo sapien
tcatcagtgagagtggtttgcctcg

SEQ ID NO: 540976 - DNA, 25 bp, Homo sapien
actgtagactggctcatcagtgaga

SEQ ID NO: 540977 - DNA, 25 bp, Homo sapien
tcgggaagcatgagtttctaaggtg

SEQ ID NO: 540978 - DNA, 25 bp, Homo sapien
aaggtggttgtcattgagatgaaga

SEQ ID NO: 540979 - DNA, 25 bp, Homo sapien
attagctctgagtgactacctccag

SEQ ID NO: 540980 - DNA, 25 bp, Homo sapien
tacggcacacacaattagctctgag

SEQ ID NO: 540981 - DNA, 25 bp, Homo sapien
tctgagtgactacctccagtcttct

SEQ ID NO: 540982 - DNA, 25 bp, Homo sapien
tattaaatacggcacacacaattag

SEQ ID NO: 540983 - DNA, 25 bp, Homo sapien
tgacactgcttgttacgtcctgagt

SEQ ID NO: 540984 - DNA, 25 bp, Homo sapien
gtaaatatatctctaggcagggcct

SEQ ID NO: 540985 - DNA, 25 bp, Homo sapien
tatgccgcagagcaaaaagctgacg

SEQ ID NO: 540986 - DNA, 25 bp, Homo sapien
gattcctctgcgtccatgagatgta

SEQ ID NO: 540987 - DNA, 25 bp, Homo sapien
ctaagtgtgataggaggtaaaacca

SEQ ID NO: 540988 - DNA, 25 bp, Homo sapien
gatatgtaagaggtttgctgataaa

SEQ ID NO: 540989 - DNA, 25 bp, Homo sapien
gccagcaacctggttacatgctttt

SEQ ID NO: 540990 - DNA, 25 bp, Homo sapien
gggaaataggattccatagatcctt

SEQ ID NO: 540991 - DNA, 25 bp, Homo sapien
tctgtcttgggtactggtgggctct

SEQ ID NO: 540992 - DNA, 25 bp, Homo sapien
agaagggatattcagtggtctgtct

SEQ ID NO: 540993 - DNA, 25 bp, Homo sapien
tctctttccatagcacagctgccgg

SEQ ID NO: 540994 - DNA, 25 bp, Homo sapien
aggcagctggtaggggaagagtggc

SEQ ID NO: 540995 - DNA, 25 bp, Homo sapien
ggtgcaaattaaaagggctatagct

SEQ ID NO: 540996 - DNA, 25 bp, Homo sapien
atcaaggtgcaaattaaaagggcta

SEQ ID NO: 540997 - DNA, 25 bp, Homo sapien
caaggtgcaaattaaaagggctata

SEQ ID NO: 540998 - DNA, 25 bp, Homo sapien
taaatgcccataaataacgacagaa

SEQ ID NO: 540999 - DNA, 25 bp, Homo sapien
gaatttctgatctcagtccagtcat

SEQ ID NO: 541000 - DNA, 25 bp, Homo sapien
caaaaatgtctcctatagacccaaa

SEQ ID NO: 541001 - DNA, 25 bp, Homo sapien
gtcataaaacctatcatcacaattg

SEQ ID NO: 541002 - DNA, 25 bp, Homo sapien
tgatgcaagtcaatgccttttccat

SEQ ID NO: 541003 - DNA, 25 bp, Homo sapien
cagagagattaaagaatacctgttc

SEQ ID NO: 541004 - DNA, 25 bp, Homo sapien
gagattaaagaatacctgttccatc

SEQ ID NO: 541005 - DNA, 25 bp, Homo sapien
gagagattaaagaatacctgttcca

SEQ ID NO: 541006 - DNA, 25 bp, Homo sapien
agattaaagaatacctgttccatcc

SEQ ID NO: 541007 - DNA, 25 bp, Homo sapien
ttttaaattgatggtgaaccgtggc

SEQ ID NO: 541008 - DNA, 25 bp, Homo sapien
gaaccgtggcattaagataacttcc

SEQ ID NO: 541009 - DNA, 25 bp, Homo sapien
taagtgacaatatgctggtacctgc

SEQ ID NO: 541010 - DNA, 25 bp, Homo sapien
taaataacgtagaactggcaaagca

SEQ ID NO: 541011 - DNA, 25 bp, Homo sapien
tatgaggatcaacacagactctgcc

SEQ ID NO: 541012 - DNA, 25 bp, Homo sapien
cagaattccggcatcataagctatc

SEQ ID NO: 541013 - DNA, 25 bp, Homo sapien
tacataaagctctgacgcacacggt

SEQ ID NO: 541014 - DNA, 25 bp, Homo sapien
gttacatcatgaaggcacaacacat

SEQ ID NO: 541015 - DNA, 25 bp, Homo sapien
tgatatggacccaagccaggaggca

SEQ ID NO: 541016 - DNA, 25 bp, Homo sapien
ttatcagagtgacccaaaaccaagc

SEQ ID NO: 541017 - DNA, 25 bp, Homo sapien
aggaatgtctgtcatgtggctgcca

SEQ ID NO: 541018 - DNA, 25 bp, Homo sapien
tcattggagccatactgcttacggt

SEQ ID NO: 541019 - DNA, 25 bp, Homo sapien
aaaggtatttggagtatcgtccttg

SEQ ID NO: 541020 - DNA, 25 bp, Homo sapien
tgtatatggcacactgatgacctag

SEQ ID NO: 541021 - DNA, 25 bp, Homo sapien
tatttggagtatcgtccttgacaca

SEQ ID NO: 541022 - DNA, 25 bp, Homo sapien
gacctagttgctcaatgcaggaaaa

SEQ ID NO: 541023 - DNA, 25 bp, Homo sapien
cttgcactgacacatcttttctcaa

SEQ ID NO: 541024 - DNA, 25 bp, Homo sapien
atcttgcactgacacatcttttctc

SEQ ID NO: 541025 - DNA, 25 bp, Homo sapien
tcttgcactgacacatcttttctca

SEQ ID NO: 541026 - DNA, 25 bp, Homo sapien
catcttgcactgacacatcttttct

SEQ ID NO: 541027 - DNA, 25 bp, Homo sapien
ttgactgtgtctccccagtattcca

SEQ ID NO: 541028 - DNA, 25 bp, Homo sapien
atatatgtaaccccagcagtgttct

SEQ ID NO: 541029 - DNA, 25 bp, Homo sapien
ctcttgactgtgtctccccagtatt

SEQ ID NO: 541030 - DNA, 25 bp, Homo sapien
cccagcagtgttctcttgactgtgt

SEQ ID NO: 541031 - DNA, 25 bp, Homo sapien
taattgctcatagggtccattttca

SEQ ID NO: 541032 - DNA, 25 bp, Homo sapien
gtaattgctcatagggtccattttc

SEQ ID NO: 541033 - DNA, 25 bp, Homo sapien
agtaattgctcatagggtccatttt

SEQ ID NO: 541034 - DNA, 25 bp, Homo sapien
gaacaagacagagtatccccttgag

SEQ ID NO: 541035 - DNA, 25 bp, Homo sapien
gctctgtctcagaacttaggaacaa

SEQ ID NO: 541036 - DNA, 25 bp, Homo sapien
ccttgagggttacactttagtggca

SEQ ID NO: 541037 - DNA, 25 bp, Homo sapien
gctatgagactttacctgaagcaca

SEQ ID NO: 541038 - DNA, 25 bp, Homo sapien
gggtggtcacagaaagcttcctagg

SEQ ID NO: 541039 - DNA, 25 bp, Homo sapien
cctaggagagatgactcctgggatc

SEQ ID NO: 541040 - DNA, 25 bp, Homo sapien
taaaagcactgaggtctagcctctc

SEQ ID NO: 541041 - DNA, 25 bp, Homo sapien
tcctgggatctattccacaggaagg

SEQ ID NO: 541042 - DNA, 25 bp, Homo sapien
tcatcagtgttacacaatgaaacag

SEQ ID NO: 541043 - DNA, 25 bp, Homo sapien
ttttgacattatctgtgcctttgca

SEQ ID NO: 541044 - DNA, 25 bp, Homo sapien
attccaaccaaagatacctcttttg

SEQ ID NO: 541045 - DNA, 25 bp, Homo sapien
catctaattcagagggttttttgac

SEQ ID NO: 541046 - DNA, 25 bp, Homo sapien
aagaatatcagcattccgcaggggc

SEQ ID NO: 541047 - DNA, 25 bp, Homo sapien
gaatatcagcattccgcaggggctg

SEQ ID NO: 541048 - DNA, 25 bp, Homo sapien
agaatatcagcattccgcaggggct

SEQ ID NO: 541049 - DNA, 25 bp, Homo sapien
aatatcagcattccgcaggggctgt

SEQ ID NO: 541050 - DNA, 25 bp, Homo sapien
ctataacatagttaaaacgtagcac

SEQ ID NO: 541051 - DNA, 25 bp, Homo sapien
attgtattaaaacttatgacagtta

SEQ ID NO: 541052 - DNA, 25 bp, Homo sapien
aatcaaagtattgggagattgtatt

SEQ ID NO: 541053 - DNA, 25 bp, Homo sapien
ttgtattaaaacttatgacagttac

SEQ ID NO: 541054 - DNA, 25 bp, Homo sapien
caaagtattgggagattgtattaaa

SEQ ID NO: 541055 - DNA, 25 bp, Homo sapien
tttcctccccaggattctagggtca

SEQ ID NO: 541056 - DNA, 25 bp, Homo sapien
ttcctccccaggattctagggtcat

SEQ ID NO: 541057 - DNA, 25 bp, Homo sapien
aagatgaattacattctaggagaaa

SEQ ID NO: 541058 - DNA, 25 bp, Homo sapien
aaagtattgctagctgtaaaatttg

SEQ ID NO: 541059 - DNA, 25 bp, Homo sapien
taaaatttgtaagcaggttccatcc

SEQ ID NO: 541060 - DNA, 25 bp, Homo sapien
ccatcctgtcggcacagaaacaatg

SEQ ID NO: 541061 - DNA, 25 bp, Homo sapien
agtccaagtgatgtgctacctctag

SEQ ID NO: 541062 - DNA, 25 bp, Homo sapien
catctaacggctcttgtagtccaag

SEQ ID NO: 541063 - DNA, 25 bp, Homo sapien
aagtgaagccgctacagcaggcagg

SEQ ID NO: 541064 - DNA, 25 bp, Homo sapien
cagaacgacaaggttctgtcttgga

SEQ ID NO: 541065 - DNA, 25 bp, Homo sapien
tggcctcctattgccatagtcttga

SEQ ID NO: 541066 - DNA, 25 bp, Homo sapien
ccttgctatttttacctagtgtcta

SEQ ID NO: 541067 - DNA, 25 bp, Homo sapien
gatcatgtctcgctctatccttgaa

SEQ ID NO: 541068 - DNA, 25 bp, Homo sapien
caagtattaaccactgcttttggcc

SEQ ID NO: 541069 - DNA, 25 bp, Homo sapien
ggctcaactacaagccctgcttgaa

SEQ ID NO: 541070 - DNA, 25 bp, Homo sapien
gatttgtgatcttcaggctcaacta

SEQ ID NO: 541071 - DNA, 25 bp, Homo sapien
tatgtactgattgctaattgtgtgc

SEQ ID NO: 541072 - DNA, 25 bp, Homo sapien
taagaatctgaagagactccctccc

SEQ ID NO: 541073 - DNA, 25 bp, Homo sapien
ttgccacaggaactgtaaactctaa

SEQ ID NO: 541074 - DNA, 25 bp, Homo sapien
gtgttgtttgccacaggaactgtaa

SEQ ID NO: 541075 - DNA, 25 bp, Homo sapien
aaaacagtgttgtttgccacaggaa

SEQ ID NO: 541076 - DNA, 25 bp, Homo sapien
atttaaaacagtgttgtttgccaca

SEQ ID NO: 541077 - DNA, 25 bp, Homo sapien
tgctgcaaacttcggtttctcagca

SEQ ID NO: 541078 - DNA, 25 bp, Homo sapien
tgcaaacttcggtttctcagcattt

SEQ ID NO: 541079 - DNA, 25 bp, Homo sapien
aacttcggtttctcagcattttgaa

SEQ ID NO: 541080 - DNA, 25 bp, Homo sapien
ctctgctgcaaacttcggtttctca

SEQ ID NO: 541081 - DNA, 25 bp, Homo sapien
ccaatttccttaacagggatgacag

SEQ ID NO: 541082 - DNA, 25 bp, Homo sapien
gcagcaggaacttcggtatgattac

SEQ ID NO: 541083 - DNA, 25 bp, Homo sapien
ggaagtcacatacacgaaatcactg

SEQ ID NO: 541084 - DNA, 25 bp, Homo sapien
tagctccttgtgaatgcctagttgc

SEQ ID NO: 541085 - DNA, 25 bp, Homo sapien
aaaatgcaagtgcttctaattcatt

SEQ ID NO: 541086 - DNA, 25 bp, Homo sapien
aaaaaatgcaagtgcttctaattca

SEQ ID NO: 541087 - DNA, 25 bp, Homo sapien
aaatgcaagtgcttctaattcattc

SEQ ID NO: 541088 - DNA, 25 bp, Homo sapien
aaaaatgcaagtgcttctaattcat

SEQ ID NO: 541089 - DNA, 25 bp, Homo sapien
ctaatgagtgtgattggacaccttc

SEQ ID NO: 541090 - DNA, 25 bp, Homo sapien
agcaatctctggtccactacctctt

SEQ ID NO: 541091 - DNA, 25 bp, Homo sapien
tgggaccctctcactattagcaatc

SEQ ID NO: 541092 - DNA, 25 bp, Homo sapien
tcttcccatcacaattgaacatagg

SEQ ID NO: 541093 - DNA, 25 bp, Homo sapien
ccatgaggttcaaattgattttgtg

SEQ ID NO: 541094 - DNA, 25 bp, Homo sapien
ttttgtgttctaaactagttgccac

SEQ ID NO: 541095 - DNA, 25 bp, Homo sapien
tctaaactagttgccacagcacctt

SEQ ID NO: 541096 - DNA, 25 bp, Homo sapien
tgtccatggtttccatgaggttcaa

SEQ ID NO: 541097 - DNA, 25 bp, Homo sapien
gctgaagtgagcaaaatgatgaatt

SEQ ID NO: 541098 - DNA, 25 bp, Homo sapien
gaaattactatgagcgttgtttaac

SEQ ID NO: 541099 - DNA, 25 bp, Homo sapien
ctgggacaacaagctgaaaaatttt

SEQ ID NO: 541100 - DNA, 25 bp, Homo sapien
catcacagacagttggtcattaccc

SEQ ID NO: 541101 - DNA, 25 bp, Homo sapien
taaccggaatgtctatcaaaaccag

SEQ ID NO: 541102 - DNA, 25 bp, Homo sapien
cctctcagtgtaaccggaatgtcta

SEQ ID NO: 541103 - DNA, 25 bp, Homo sapien
cagtgtaaccggaatgtctatcaaa

SEQ ID NO: 541104 - DNA, 25 bp, Homo sapien
cttcccctctcagtgtaaccggaat

SEQ ID NO: 541105 - DNA, 25 bp, Homo sapien
gacaagactgctcccggtttcctgt

SEQ ID NO: 541106 - DNA, 25 bp, Homo sapien
gactgctcccggtttcctgtggatt

SEQ ID NO: 541107 - DNA, 25 bp, Homo sapien
aagacaagactgctcccggtttcct

SEQ ID NO: 541108 - DNA, 25 bp, Homo sapien
aagactgctcccggtttcctgtgga

SEQ ID NO: 541109 - DNA, 25 bp, Homo sapien
cacttggcttaaagcacaataggaa

SEQ ID NO: 541110 - DNA, 25 bp, Homo sapien
taaacagtggttaaggatcacttgg

SEQ ID NO: 541111 - DNA, 25 bp, Homo sapien
taataagagcctggttttcgctgaa

SEQ ID NO: 541112 - DNA, 25 bp, Homo sapien
gaaattctctcgtaaattttgccac

SEQ ID NO: 541113 - DNA, 25 bp, Homo sapien
agctgattccacatcgcgggactgt

SEQ ID NO: 541114 - DNA, 25 bp, Homo sapien
ggactgtgatactggtaggccccat

SEQ ID NO: 541115 - DNA, 25 bp, Homo sapien
catcgcgggactgtgatactggtag

SEQ ID NO: 541116 - DNA, 25 bp, Homo sapien
ctagtgcaggtactttgggttaagc

SEQ ID NO: 541117 - DNA, 25 bp, Homo sapien
atctccagtatcacatcattcttaa

SEQ ID NO: 541118 - DNA, 25 bp, Homo sapien
cattcttaagcgatagaataactgg

SEQ ID NO: 541119 - DNA, 25 bp, Homo sapien
gaataactggtttgctagaagtttc

SEQ ID NO: 541120 - DNA, 25 bp, Homo sapien
cataagcatatgcttaatctccagt

SEQ ID NO: 541121 - DNA, 25 bp, Homo sapien
ttaggcctgtttccttcaaagcaca

SEQ ID NO: 541122 - DNA, 25 bp, Homo sapien
aggattaggcctgtttccttcaaag

SEQ ID NO: 541123 - DNA, 25 bp, Homo sapien
attaggcctgtttccttcaaagcac

SEQ ID NO: 541124 - DNA, 25 bp, Homo sapien
cttaggattaggcctgtttccttca

SEQ ID NO: 541125 - DNA, 25 bp, Homo sapien
gataaacccataatagtccatttca

SEQ ID NO: 541126 - DNA, 25 bp, Homo sapien
cactggtctactgtagtgtatttcc

SEQ ID NO: 541127 - DNA, 25 bp, Homo sapien
gggcccacatatctacttatttcca

SEQ ID NO: 541128 - DNA, 25 bp, Homo sapien
ctggtccactggtctactgtagtgt

SEQ ID NO: 541129 - DNA, 25 bp, Homo sapien
tgaccatcaacggaagaggcagacg

SEQ ID NO: 541130 - DNA, 25 bp, Homo sapien
taatcgggttatgcacaaactggta

SEQ ID NO: 541131 - DNA, 25 bp, Homo sapien
tctcaggcctgcttctaattagcag

SEQ ID NO: 541132 - DNA, 25 bp, Homo sapien
gaggcagacgagcactctttataat

SEQ ID NO: 541133 - DNA, 25 bp, Homo sapien
gccaggatgactagctttacagact

SEQ ID NO: 541134 - DNA, 25 bp, Homo sapien
attttgcagaccgaagcagctctcg

SEQ ID NO: 541135 - DNA, 25 bp, Homo sapien
ttcaggacaaaaaagtgagcgggcc

SEQ ID NO: 541136 - DNA, 25 bp, Homo sapien
tcctgtcctgactgcgagcaatgat

SEQ ID NO: 541137 - DNA, 25 bp, Homo sapien
cattgtcccgaaactccttaggtct

SEQ ID NO: 541138 - DNA, 25 bp, Homo sapien
tcatttgctttggaactcagcattg

SEQ ID NO: 541139 - DNA, 25 bp, Homo sapien
tggaactcagcattgtcccgaaact

SEQ ID NO: 541140 - DNA, 25 bp, Homo sapien
gctttggaactcagcattgtcccga

SEQ ID NO: 541141 - DNA, 25 bp, Homo sapien
tgtgtgaaatgctgcgtactcctcc

SEQ ID NO: 541142 - DNA, 25 bp, Homo sapien
ctttgtgtgaaatgctgcgtactcc

SEQ ID NO: 541143 - DNA, 25 bp, Homo sapien
tttgtgtgaaatgctgcgtactcct

SEQ ID NO: 541144 - DNA, 25 bp, Homo sapien
ttgtgtgaaatgctgcgtactcctc

SEQ ID NO: 541145 - DNA, 25 bp, Homo sapien
cccagaagggtacgtagtgtacgca

SEQ ID NO: 541146 - DNA, 25 bp, Homo sapien
cattgagcaacacaccttgaagggc

SEQ ID NO: 541147 - DNA, 25 bp, Homo sapien
aaagcagactggattgggttacaag

SEQ ID NO: 541148 - DNA, 25 bp, Homo sapien
tgtacgcaagtaactggttgacccc

SEQ ID NO: 541149 - DNA, 25 bp, Homo sapien
ggatctgctaatctatttctcttca

SEQ ID NO: 541150 - DNA, 25 bp, Homo sapien
tcatatggatatggaacacaggatc

SEQ ID NO: 541151 - DNA, 25 bp, Homo sapien
cagcataatgactattcatatggat

SEQ ID NO: 541152 - DNA, 25 bp, Homo sapien
tcctctggaaagccaatgagaatcc

SEQ ID NO: 541153 - DNA, 25 bp, Homo sapien
gaactatttgcataatgtgattaaa

SEQ ID NO: 541154 - DNA, 25 bp, Homo sapien
gcataaaggtcatccgcctacaaca

SEQ ID NO: 541155 - DNA, 25 bp, Homo sapien
ataaatgcataaaggtcatccgcct

SEQ ID NO: 541156 - DNA, 25 bp, Homo sapien
ggtcatccgcctacaacatcatgtt

SEQ ID NO: 541157 - DNA, 25 bp, Homo sapien
cccaggctcaggttaaattgaaata

SEQ ID NO: 541158 - DNA, 25 bp, Homo sapien
tatctactagaggaaagtaatgcca

SEQ ID NO: 541159 - DNA, 25 bp, Homo sapien
tagtacagtgtatccatactcagcc

SEQ ID NO: 541160 - DNA, 25 bp, Homo sapien
tagttgagactactgcctgcctcag

SEQ ID NO: 541161 - DNA, 25 bp, Homo sapien
tattggcatggatgtcaacatcaca

SEQ ID NO: 541162 - DNA, 25 bp, Homo sapien
taattgcctcataccagcacttagg

SEQ ID NO: 541163 - DNA, 25 bp, Homo sapien
gtctgttgcatatcctgcacaactg

SEQ ID NO: 541164 - DNA, 25 bp, Homo sapien
aacatcacagtttatggctgaactc

SEQ ID NO: 541165 - DNA, 25 bp, Homo sapien
tgcagtttggggtagtgacatagaa

SEQ ID NO: 541166 - DNA, 25 bp, Homo sapien
tcaagagtctactagatttgcagga

SEQ ID NO: 541167 - DNA, 25 bp, Homo sapien
tgcaggcagctcttttagctattag

SEQ ID NO: 541168 - DNA, 25 bp, Homo sapien
gtgacatagaaatcatggggctccc

SEQ ID NO: 541169 - DNA, 25 bp, Homo sapien
tcactcaaacctccaattccccaaa

SEQ ID NO: 541170 - DNA, 25 bp, Homo sapien
cctccaattccccaaactaatagtg

SEQ ID NO: 541171 - DNA, 25 bp, Homo sapien
cataccccggtatctggtaggaaga

SEQ ID NO: 541172 - DNA, 25 bp, Homo sapien
gaggtctagggaactccaaggctac

SEQ ID NO: 541173 - DNA, 25 bp, Homo sapien
tagcagaggttaaaaggcacagcac

SEQ ID NO: 541174 - DNA, 25 bp, Homo sapien
gagggctgagttccgcagtttcacc

SEQ ID NO: 541175 - DNA, 25 bp, Homo sapien
aactggaagttgtttaagcttactg

SEQ ID NO: 541176 - DNA, 25 bp, Homo sapien
cttgtggtcctcttggaccaagtaa

SEQ ID NO: 541177 - DNA, 25 bp, Homo sapien
gcatcactgcttcatagctcataga

SEQ ID NO: 541178 - DNA, 25 bp, Homo sapien
ctaagaattcttgcactaaactgga

SEQ ID NO: 541179 - DNA, 25 bp, Homo sapien
ctatggcagacaaactctagggtga

SEQ ID NO: 541180 - DNA, 25 bp, Homo sapien
taacaggtctacatggctagcagct

SEQ ID NO: 541181 - DNA, 25 bp, Homo sapien
gctgagtgtgacctctaagagctga

SEQ ID NO: 541182 - DNA, 25 bp, Homo sapien
gaacactgatagaggagtcggcgta

SEQ ID NO: 541183 - DNA, 25 bp, Homo sapien
tgtggaggaagaagcgccagcggga

SEQ ID NO: 541184 - DNA, 25 bp, Homo sapien
cccacgggcactgcactcgatttgt

SEQ ID NO: 541185 - DNA, 25 bp, Homo sapien
ccgaggagcctaccctacgagtgca

SEQ ID NO: 541186 - DNA, 25 bp, Homo sapien
actgcactcgatttgtcaccgggcc

SEQ ID NO: 541187 - DNA, 25 bp, Homo sapien
gtaataaccacccatatagccatca

SEQ ID NO: 541188 - DNA, 25 bp, Homo sapien
aatatcatttaaaagccagcccaca

SEQ ID NO: 541189 - DNA, 25 bp, Homo sapien
taccagtctgccactatgtacttaa

SEQ ID NO: 541190 - DNA, 25 bp, Homo sapien
catccatccatacttgtgtacagtg

SEQ ID NO: 541191 - DNA, 25 bp, Homo sapien
cctatggcatgaggtatcagcaatt

SEQ ID NO: 541192 - DNA, 25 bp, Homo sapien
ccaggaggactggaatgaaggcagt

SEQ ID NO: 541193 - DNA, 25 bp, Homo sapien
cttccctatggcatgaggtatcagc

SEQ ID NO: 541194 - DNA, 25 bp, Homo sapien
ggcatgaggtatcagcaatttccca

SEQ ID NO: 541195 - DNA, 25 bp, Homo sapien
tcataataactttatacatttgcct

SEQ ID NO: 541196 - DNA, 25 bp, Homo sapien
aaggatccctgaatctccggacaaa

SEQ ID NO: 541197 - DNA, 25 bp, Homo sapien
tcagactcttagactgtgttaggct

SEQ ID NO: 541198 - DNA, 25 bp, Homo sapien
cacttgaggaaaaggtggtcttgct

SEQ ID NO: 541199 - DNA, 25 bp, Homo sapien
caattatttttgaaagctcaagtgc

SEQ ID NO: 541200 - DNA, 25 bp, Homo sapien
gaaagctcaagtgcactacaaaacc

SEQ ID NO: 541201 - DNA, 25 bp, Homo sapien
gaacaactccaagcaatcaaaattt

SEQ ID NO: 541202 - DNA, 25 bp, Homo sapien
atgttcatccttgccccctacaatt

SEQ ID NO: 541203 - DNA, 25 bp, Homo sapien
cttcagtcctcttgtccggagaggc

SEQ ID NO: 541204 - DNA, 25 bp, Homo sapien
ttgtccggagaggcctggtcataga

SEQ ID NO: 541205 - DNA, 25 bp, Homo sapien
tgcttcagtcctcttgtccggagag

SEQ ID NO: 541206 - DNA, 25 bp, Homo sapien
atctgcttcagtcctcttgtccgga

SEQ ID NO: 541207 - DNA, 25 bp, Homo sapien
tacccaccggctcatggtctcctag

SEQ ID NO: 541208 - DNA, 25 bp, Homo sapien
gaagagggtgtgagatcagggttcc

SEQ ID NO: 541209 - DNA, 25 bp, Homo sapien
tcagggagatgaaacgtaacacggc

SEQ ID NO: 541210 - DNA, 25 bp, Homo sapien
gtctcctagaccactgtcactgcag

SEQ ID NO: 541211 - DNA, 25 bp, Homo sapien
tccaaaaattttgcattttgattca

SEQ ID NO: 541212 - DNA, 25 bp, Homo sapien
tgcctccaaaaattttgcattttga

SEQ ID NO: 541213 - DNA, 25 bp, Homo sapien
cctccaaaaattttgcattttgatt

SEQ ID NO: 541214 - DNA, 25 bp, Homo sapien
ccaaaaattttgcattttgattcat

SEQ ID NO: 541215 - DNA, 25 bp, Homo sapien
ttatggaaataagctcagtctgggt

SEQ ID NO: 541216 - DNA, 25 bp, Homo sapien
ctttatggaaataagctcagtctgg

SEQ ID NO: 541217 - DNA, 25 bp, Homo sapien
tttatggaaataagctcagtctggg

SEQ ID NO: 541218 - DNA, 25 bp, Homo sapien
aaatgaggcatatgttaaatcttct

SEQ ID NO: 541219 - DNA, 25 bp, Homo sapien
ggaatcctttgcagatagagcctga

SEQ ID NO: 541220 - DNA, 25 bp, Homo sapien
accccacagtgctcattcaagtgaa

SEQ ID NO: 541221 - DNA, 25 bp, Homo sapien
cagtgctcattcaagtgaagagtca

SEQ ID NO: 541222 - DNA, 25 bp, Homo sapien
aaatacacgtcagttttaatgccct

SEQ ID NO: 541223 - DNA, 25 bp, Homo sapien
tgttaaaataaccaatatagcttct

SEQ ID NO: 541224 - DNA, 25 bp, Homo sapien
tctcttttcctaactgtatcctgaa

SEQ ID NO: 541225 - DNA, 25 bp, Homo sapien
ggttttgtcctatattagcatggct

SEQ ID NO: 541226 - DNA, 25 bp, Homo sapien
actgcccctgtagctcaaaagtgga

SEQ ID NO: 541227 - DNA, 25 bp, Homo sapien
tgttggcaaaacaatccctgacttc

SEQ ID NO: 541228 - DNA, 25 bp, Homo sapien
gatacatggcttcctcagtctaagt

SEQ ID NO: 541229 - DNA, 25 bp, Homo sapien
cgcagaaacgtggaagatacatggc

SEQ ID NO: 541230 - DNA, 25 bp, Homo sapien
attgagattgaaagctttagccata

SEQ ID NO: 541231 - DNA, 25 bp, Homo sapien
taagatagtcttcaggctttttcat

SEQ ID NO: 541232 - DNA, 25 bp, Homo sapien
gctggtagaaaacacgacttgacaa

SEQ ID NO: 541233 - DNA, 25 bp, Homo sapien
gtaatatattgtgagatatgctggt

SEQ ID NO: 541234 - DNA, 25 bp, Homo sapien
tgtggaccataagaacctcatcata

SEQ ID NO: 541235 - DNA, 25 bp, Homo sapien
tgtatcatgacaaatagactctgct

SEQ ID NO: 541236 - DNA, 25 bp, Homo sapien
catcatatgtggaaggctataagca

SEQ ID NO: 541237 - DNA, 25 bp, Homo sapien
tgtaagatgtgtcaggatcaaatca

SEQ ID NO: 541238 - DNA, 25 bp, Homo sapien
gcagaaactagctctcttcataaag

SEQ ID NO: 541239 - DNA, 25 bp, Homo sapien
tttctgaaacatacacttcctttac

SEQ ID NO: 541240 - DNA, 25 bp, Homo sapien
tatctgaatccaatctgtcatgcag

SEQ ID NO: 541241 - DNA, 25 bp, Homo sapien
taacaactctatcttccagagatct

SEQ ID NO: 541242 - DNA, 25 bp, Homo sapien
gatcatttgtcttacttataaagcc

SEQ ID NO: 541243 - DNA, 25 bp, Homo sapien
ggcaacttcgcaggatcatttgtct

SEQ ID NO: 541244 - DNA, 25 bp, Homo sapien
tatcaggcaacttcgcaggatcatt

SEQ ID NO: 541245 - DNA, 25 bp, Homo sapien
accttctttatcaggcaacttcgca

SEQ ID NO: 541246 - DNA, 25 bp, Homo sapien
tttagcccttgtgcagtttttcagc

SEQ ID NO: 541247 - DNA, 25 bp, Homo sapien
ccatctcccatgaaacgcagggtag

SEQ ID NO: 541248 - DNA, 25 bp, Homo sapien
catataaaaacacgtgattgcttgc

SEQ ID NO: 541249 - DNA, 25 bp, Homo sapien
tctggtttctgccatgccattagca

SEQ ID NO: 541250 - DNA, 25 bp, Homo sapien
gtggctggccacatctacagcattt

SEQ ID NO: 541251 - DNA, 25 bp, Homo sapien
tctcaagtaggcaattggagccaga

SEQ ID NO: 541252 - DNA, 25 bp, Homo sapien
gaaaagaaggctctaaggtccacac

SEQ ID NO: 541253 - DNA, 25 bp, Homo sapien
gagtggagtttcagcccaagagaca

SEQ ID NO: 541254 - DNA, 25 bp, Homo sapien
taaaatccatcaatggaggacataa

SEQ ID NO: 541255 - DNA, 25 bp, Homo sapien
gagggtccaagatgttggtaaatgg

SEQ ID NO: 541256 - DNA, 25 bp, Homo sapien
acataaatagtataagctctggatt

SEQ ID NO: 541257 - DNA, 25 bp, Homo sapien
attgagggtccaagatgttggtaaa

SEQ ID NO: 541258 - DNA, 25 bp, Homo sapien
tactttacatatgtagctgctctga

SEQ ID NO: 541259 - DNA, 25 bp, Homo sapien
gctgctctgaagttgggtacgtata

SEQ ID NO: 541260 - DNA, 25 bp, Homo sapien
tctctgatctttactgctatcaata

SEQ ID NO: 541261 - DNA, 25 bp, Homo sapien
tttagttgacctcctcaaaaagcca

SEQ ID NO: 541262 - DNA, 25 bp, Homo sapien
ggtaaataaggacttactattgcca

SEQ ID NO: 541263 - DNA, 25 bp, Homo sapien
gtttatacattcagccactctttgt

SEQ ID NO: 541264 - DNA, 25 bp, Homo sapien
tatacattcagccactctttgtttt

SEQ ID NO: 541265 - DNA, 25 bp, Homo sapien
gtaaataaggacttactattgccat

SEQ ID NO: 541266 - DNA, 25 bp, Homo sapien
tggtgagttgatttctgggcttgga

SEQ ID NO: 541267 - DNA, 25 bp, Homo sapien
gatctccatacagaatcctgtacaa

SEQ ID NO: 541268 - DNA, 25 bp, Homo sapien
gcttggatacctcatagatattaca

SEQ ID NO: 541269 - DNA, 25 bp, Homo sapien
gctctggcagatctaatcgaatcca

SEQ ID NO: 541270 - DNA, 25 bp, Homo sapien
taagtgactgaaaaaggagcatcca

SEQ ID NO: 541271 - DNA, 25 bp, Homo sapien
tacactgggaaatagggttgcatgc

SEQ ID NO: 541272 - DNA, 25 bp, Homo sapien
tgtagaccacatgtagctgctttgc

SEQ ID NO: 541273 - DNA, 25 bp, Homo sapien
cacagaattgtagagcctaagggaa

SEQ ID NO: 541274 - DNA, 25 bp, Homo sapien
gactctatattctccattagtaaag

SEQ ID NO: 541275 - DNA, 25 bp, Homo sapien
taagtgagcagtgtacaaactgttc

SEQ ID NO: 541276 - DNA, 25 bp, Homo sapien
tcttgcatctagaactttgtctgtc

SEQ ID NO: 541277 - DNA, 25 bp, Homo sapien
gtatccccgttttatgctctgttgg

SEQ ID NO: 541278 - DNA, 25 bp, Homo sapien
cacctctcacaaagagaggttctaa

SEQ ID NO: 541279 - DNA, 25 bp, Homo sapien
aatatgctttggatagtaatcattc

SEQ ID NO: 541280 - DNA, 25 bp, Homo sapien
tcttattgattcctagcagttcata

SEQ ID NO: 541281 - DNA, 25 bp, Homo sapien
tagttgtaaacctttatgctttctc

SEQ ID NO: 541282 - DNA, 25 bp, Homo sapien
taaatgccagcaaatacagggtaat

SEQ ID NO: 541283 - DNA, 25 bp, Homo sapien
ctaatcagacagtttcgcaaatgga

SEQ ID NO: 541284 - DNA, 25 bp, Homo sapien
tcagttctggtgtcactaatcagac

SEQ ID NO: 541285 - DNA, 25 bp, Homo sapien
tggaactaacccaaacggacacaca

SEQ ID NO: 541286 - DNA, 25 bp, Homo sapien
tcctctggagtatatgcaggcatag

SEQ ID NO: 541287 - DNA, 25 bp, Homo sapien
ggcataggtgtgcacagacactgaa

SEQ ID NO: 541288 - DNA, 25 bp, Homo sapien
tatggccactgattttcttgatcca

SEQ ID NO: 541289 - DNA, 25 bp, Homo sapien
cttgatccaaatgcgtctttaagac

SEQ ID NO: 541290 - DNA, 25 bp, Homo sapien
ctcagggctgcttcgttcaatttgc

SEQ ID NO: 541291 - DNA, 25 bp, Homo sapien
gggctgcttcgttcaatttgcttca

SEQ ID NO: 541292 - DNA, 25 bp, Homo sapien
cagggctgcttcgttcaatttgctt

SEQ ID NO: 541293 - DNA, 25 bp, Homo sapien
tcatcgccttcccaatatcaaacat

SEQ ID NO: 541294 - DNA, 25 bp, Homo sapien
tgaagtttacatattgctgcaggca

SEQ ID NO: 541295 - DNA, 25 bp, Homo sapien
tgctggaatacctagaactacgtgt

SEQ ID NO: 541296 - DNA, 25 bp, Homo sapien
gttatgcaaattaccagagtgtcag

SEQ ID NO: 541297 - DNA, 25 bp, Homo sapien
tatcctcagaacgtcacacattgcc

SEQ ID NO: 541298 - DNA, 25 bp, Homo sapien
catataaggctgttgattcatacag

SEQ ID NO: 541299 - DNA, 25 bp, Homo sapien
gaaaaatgtggcaggtactatccat

SEQ ID NO: 541300 - DNA, 25 bp, Homo sapien
caaagtttcatcaatacagttctaa

SEQ ID NO: 541301 - DNA, 25 bp, Homo sapien
taaacaggtcaactgtacatagaat

SEQ ID NO: 541302 - DNA, 25 bp, Homo sapien
tccactctggatacaatgcaatcac

SEQ ID NO: 541303 - DNA, 25 bp, Homo sapien
cacatttgaggtttggcagactgcc

SEQ ID NO: 541304 - DNA, 25 bp, Homo sapien
caatgtgactctagctgcaaacagc

SEQ ID NO: 541305 - DNA, 25 bp, Homo sapien
gaatgtgtaaaccttccagctaaaa

SEQ ID NO: 541306 - DNA, 25 bp, Homo sapien
ttacccacgattactaaaagcagat

SEQ ID NO: 541307 - DNA, 25 bp, Homo sapien
tgcagtatttcaggccttacccacg

SEQ ID NO: 541308 - DNA, 25 bp, Homo sapien
aagccccactaaaggtattcttgtg

SEQ ID NO: 541309 - DNA, 25 bp, Homo sapien
cccagaagcttatgagtaatgcagt

SEQ ID NO: 541310 - DNA, 25 bp, Homo sapien
ttctgaattctggataaatatgcgg

SEQ ID NO: 541311 - DNA, 25 bp, Homo sapien
cactgcactcggatgatattctgga

SEQ ID NO: 541312 - DNA, 25 bp, Homo sapien
tatactatataggaattgctaatat

SEQ ID NO: 541313 - DNA, 25 bp, Homo sapien
taaatatgcggtatcacatatatac

SEQ ID NO: 541314 - DNA, 25 bp, Homo sapien
cactaatatatatcatgaacatgca

SEQ ID NO: 541315 - DNA, 25 bp, Homo sapien
taagtttaattgtgaatgataatgt

SEQ ID NO: 541316 - DNA, 25 bp, Homo sapien
ggctctcctaggacatctttatata

SEQ ID NO: 541317 - DNA, 25 bp, Homo sapien
catttcacagtataggatgaagatg

SEQ ID NO: 541318 - DNA, 25 bp, Homo sapien
tgggaaacaatttcctctggcagct

SEQ ID NO: 541319 - DNA, 25 bp, Homo sapien
taaagctaattcatggcggttccca

SEQ ID NO: 541320 - DNA, 25 bp, Homo sapien
ttttgtaggaaattgcctcttggag

SEQ ID NO: 541321 - DNA, 25 bp, Homo sapien
tgaagacaatcgtcagccaggccta

SEQ ID NO: 541322 - DNA, 25 bp, Homo sapien
ccatttcaatcaaagagtgccagga

SEQ ID NO: 541323 - DNA, 25 bp, Homo sapien
gataaaagcactccccaggcaatag

SEQ ID NO: 541324 - DNA, 25 bp, Homo sapien
ttttcatcaaataggcttcaaggag

SEQ ID NO: 541325 - DNA, 25 bp, Homo sapien
tgtactttttaccatgacttccagg

SEQ ID NO: 541326 - DNA, 25 bp, Homo sapien
ttctgtcctcacagacactaatatt

SEQ ID NO: 541327 - DNA, 25 bp, Homo sapien
tctgtcctcacagacactaatattt

SEQ ID NO: 541328 - DNA, 25 bp, Homo sapien
tcagaggcggcaacgtaaaagttat

SEQ ID NO: 541329 - DNA, 25 bp, Homo sapien
taagtgactaacgagcaggcagcat

SEQ ID NO: 541330 - DNA, 25 bp, Homo sapien
tactgcaggtcaatcttctactaag

SEQ ID NO: 541331 - DNA, 25 bp, Homo sapien
tgtgttctaagatccctagtgggtg

SEQ ID NO: 541332 - DNA, 25 bp, Homo sapien
aagctaggtcaaaggcattttgtat

SEQ ID NO: 541333 - DNA, 25 bp, Homo sapien
gaaatttcttaatatacatcctgag

SEQ ID NO: 541334 - DNA, 25 bp, Homo sapien
tatcattttcagtagcaatctaaac

SEQ ID NO: 541335 - DNA, 25 bp, Homo sapien
ggctctaactcatattgaacatcac

SEQ ID NO: 541336 - DNA, 25 bp, Homo sapien
gattttctgtagacgtatgttgaga

SEQ ID NO: 541337 - DNA, 25 bp, Homo sapien
ttgtgagttaggctgattttctgta

SEQ ID NO: 541338 - DNA, 25 bp, Homo sapien
acgtatgttgagagactgagttggt

SEQ ID NO: 541339 - DNA, 25 bp, Homo sapien
tgcagtattgaaagaatcttgtgag

SEQ ID NO: 541340 - DNA, 25 bp, Homo sapien
agccagaggccacgaaagctgccat

SEQ ID NO: 541341 - DNA, 25 bp, Homo sapien
tttctgtatactccctcatttgcag

SEQ ID NO: 541342 - DNA, 25 bp, Homo sapien
tcttccttccagctcgaaagggtac

SEQ ID NO: 541343 - DNA, 25 bp, Homo sapien
ctctgttcaaactgggcataagccc

SEQ ID NO: 541344 - DNA, 25 bp, Homo sapien
cctgctcccaactccttgtcactta

SEQ ID NO: 541345 - DNA, 25 bp, Homo sapien
ctgctcccaactccttgtcacttac

SEQ ID NO: 541346 - DNA, 25 bp, Homo sapien
ctggagatcttggttccctgctccc

SEQ ID NO: 541347 - DNA, 25 bp, Homo sapien
tgtcccctggagatcttggttccct

SEQ ID NO: 541348 - DNA, 25 bp, Homo sapien
gccctccgattgctactaccaggag

SEQ ID NO: 541349 - DNA, 25 bp, Homo sapien
gaactttgccctccgattgctacta

SEQ ID NO: 541350 - DNA, 25 bp, Homo sapien
agaactttgccctccgattgctact

SEQ ID NO: 541351 - DNA, 25 bp, Homo sapien
tttgccctccgattgctactaccag

SEQ ID NO: 541352 - DNA, 25 bp, Homo sapien
cattactctgggtaacagcttcttg

SEQ ID NO: 541353 - DNA, 25 bp, Homo sapien
cagagcccgggtatctggcaatata

SEQ ID NO: 541354 - DNA, 25 bp, Homo sapien
gactatgtacatcgctttttggcga

SEQ ID NO: 541355 - DNA, 25 bp, Homo sapien
tattatctatagcaacgatggtctc

SEQ ID NO: 541356 - DNA, 25 bp, Homo sapien
tttctcttcctgcatagcatcatta

SEQ ID NO: 541357 - DNA, 25 bp, Homo sapien
tagcatcattattctactgctcttg

SEQ ID NO: 541358 - DNA, 25 bp, Homo sapien
ctcttgttctctgacaataatgaca

SEQ ID NO: 541359 - DNA, 25 bp, Homo sapien
atcattattctactgctcttgttct

SEQ ID NO: 541360 - DNA, 25 bp, Homo sapien
tctcctagtcttagtgggaaggcaa

SEQ ID NO: 541361 - DNA, 25 bp, Homo sapien
ggcaattagcaaactcaaatggcct

SEQ ID NO: 541362 - DNA, 25 bp, Homo sapien
tgccttttgtttcgattgagctcag

SEQ ID NO: 541363 - DNA, 25 bp, Homo sapien
ttctcaagtacctggaagtcatccc

SEQ ID NO: 541364 - DNA, 25 bp, Homo sapien
tttctgatttgcatgttgtttaaaa

SEQ ID NO: 541365 - DNA, 25 bp, Homo sapien
caagcacacctttgatatcatatat

SEQ ID NO: 541366 - DNA, 25 bp, Homo sapien
ctttacgtctttcataacaagtatg

SEQ ID NO: 541367 - DNA, 25 bp, Homo sapien
acaagtatgcagataatatgtacac

SEQ ID NO: 541368 - DNA, 25 bp, Homo sapien
tctacatgaacagctgcatcacagc

SEQ ID NO: 541369 - DNA, 25 bp, Homo sapien
taaagatatctttggccgataagcc

SEQ ID NO: 541370 - DNA, 25 bp, Homo sapien
tgtcaggctgaatggtaaagatatc

SEQ ID NO: 541371 - DNA, 25 bp, Homo sapien
atatctttggccgataagcctatgc

SEQ ID NO: 541372 - DNA, 25 bp, Homo sapien
tcaaattccctagacctttagtcaa

SEQ ID NO: 541373 - DNA, 25 bp, Homo sapien
cctgtgcttcggaccttataaaata

SEQ ID NO: 541374 - DNA, 25 bp, Homo sapien
gtcttcctgtgcttcggaccttata

SEQ ID NO: 541375 - DNA, 25 bp, Homo sapien
gacctttagtcaaaccctgtgcaag

SEQ ID NO: 541376 - DNA, 25 bp, Homo sapien
atgtggaaacccgtggagctgggac

SEQ ID NO: 541377 - DNA, 25 bp, Homo sapien
tggaaacccgtggagctgggacatt

SEQ ID NO: 541378 - DNA, 25 bp, Homo sapien
cctgaatgtggaaacccgtggagct

SEQ ID NO: 541379 - DNA, 25 bp, Homo sapien
tcctgaatgtggaaacccgtggagc

SEQ ID NO: 541380 - DNA, 25 bp, Homo sapien
gaggagtgacaggaatattgtcact

SEQ ID NO: 541381 - DNA, 25 bp, Homo sapien
ctgaggagtgacaggaatattgtca

SEQ ID NO: 541382 - DNA, 25 bp, Homo sapien
tgtcacttttgctgtgtgagttaca

SEQ ID NO: 541383 - DNA, 25 bp, Homo sapien
ggagtgacaggaatattgtcacttt

SEQ ID NO: 541384 - DNA, 25 bp, Homo sapien
gtgacaaactactccacatttagag

SEQ ID NO: 541385 - DNA, 25 bp, Homo sapien
ttaccaaataattgtgacaaactac

SEQ ID NO: 541386 - DNA, 25 bp, Homo sapien
tactccacatttagagtgtccattg

SEQ ID NO: 541387 - DNA, 25 bp, Homo sapien
catttagagtgtccattgagagaca

SEQ ID NO: 541388 - DNA, 25 bp, Homo sapien
gaagtctaaagctcaataacaacaa

SEQ ID NO: 541389 - DNA, 25 bp, Homo sapien
ggtaagatgcatttgctaaatcaga

SEQ ID NO: 541390 - DNA, 25 bp, Homo sapien
tgccactccaaaacatccattgtag

SEQ ID NO: 541391 - DNA, 25 bp, Homo sapien
tctcaaggttcatcccaccaaaaaa

SEQ ID NO: 541392 - DNA, 25 bp, Homo sapien
tatctatagtatacagagtctgttt

SEQ ID NO: 541393 - DNA, 25 bp, Homo sapien
agaattgtagatggctataatacac

SEQ ID NO: 541394 - DNA, 25 bp, Homo sapien
ggcagaccctaaaatgatatgaagg

SEQ ID NO: 541395 - DNA, 25 bp, Homo sapien
taaaaacagggattgcttatgtgaa

SEQ ID NO: 541396 - DNA, 25 bp, Homo sapien
atgttcgaggatgattggttccttc

SEQ ID NO: 541397 - DNA, 25 bp, Homo sapien
gtgtatggttatgttcgaggatgat

SEQ ID NO: 541398 - DNA, 25 bp, Homo sapien
tatggttatgttcgaggatgattgg

SEQ ID NO: 541399 - DNA, 25 bp, Homo sapien
ggttatgttcgaggatgattggttc

SEQ ID NO: 541400 - DNA, 25 bp, Homo sapien
ctatcttctaagtgcctgcggggat

SEQ ID NO: 541401 - DNA, 25 bp, Homo sapien
tatcttctaagtgcctgcggggatc

SEQ ID NO: 541402 - DNA, 25 bp, Homo sapien
cttctaagtgcctgcggggatctag

SEQ ID NO: 541403 - DNA, 25 bp, Homo sapien
tcttctaagtgcctgcggggatcta

SEQ ID NO: 541404 - DNA, 25 bp, Homo sapien
tctgtgtaggtaaccagatggctct

SEQ ID NO: 541405 - DNA, 25 bp, Homo sapien
agctctgtgtaggtaaccagatggc

SEQ ID NO: 541406 - DNA, 25 bp, Homo sapien
ctctgtgtaggtaaccagatggctc

SEQ ID NO: 541407 - DNA, 25 bp, Homo sapien
gctctgtgtaggtaaccagatggct

SEQ ID NO: 541408 - DNA, 25 bp, Homo sapien
tcagcaaaggatacttgggttcctt

SEQ ID NO: 541409 - DNA, 25 bp, Homo sapien
cagcaaaggatacttgggttccttc

SEQ ID NO: 541410 - DNA, 25 bp, Homo sapien
caagggtgctgggtctatcagcaaa

SEQ ID NO: 541411 - DNA, 25 bp, Homo sapien
gtgctgggtctatcagcaaaggata

SEQ ID NO: 541412 - DNA, 25 bp, Homo sapien
tatccatcttctttccaatcagcac

SEQ ID NO: 541413 - DNA, 25 bp, Homo sapien
tgtagtatatccatcttctttccaa

SEQ ID NO: 541414 - DNA, 25 bp, Homo sapien
gtatcagataaacagcaaagtcgct

SEQ ID NO: 541415 - DNA, 25 bp, Homo sapien
gcaaagtcgctttagagactttctt

SEQ ID NO: 541416 - DNA, 25 bp, Homo sapien
ttatacaccaagtgctataatatca

SEQ ID NO: 541417 - DNA, 25 bp, Homo sapien
agaggaactttacaatgagtggaaa

SEQ ID NO: 541418 - DNA, 25 bp, Homo sapien
agtgctataatatcatccccctcca

SEQ ID NO: 541419 - DNA, 25 bp, Homo sapien
aatgagtggaaagtaatacatttct

SEQ ID NO: 541420 - DNA, 25 bp, Homo sapien
tatccataggaccacctttattatc

SEQ ID NO: 541421 - DNA, 25 bp, Homo sapien
ccataggaccacctttattatcatt

SEQ ID NO: 541422 - DNA, 25 bp, Homo sapien
tccataggaccacctttattatcat

SEQ ID NO: 541423 - DNA, 25 bp, Homo sapien
tttatccataggaccacctttatta

SEQ ID NO: 541424 - DNA, 25 bp, Homo sapien
acggtgatgacagcctttatgccaa

SEQ ID NO: 541425 - DNA, 25 bp, Homo sapien
taacgtggtagtgcccagatcacag

SEQ ID NO: 541426 - DNA, 25 bp, Homo sapien
tactataaacggcagcatatggctg

SEQ ID NO: 541427 - DNA, 25 bp, Homo sapien
gtcatagcagcaggataacgtggta

SEQ ID NO: 541428 - DNA, 25 bp, Homo sapien
taaatggaacacaactgggcgacat

SEQ ID NO: 541429 - DNA, 25 bp, Homo sapien
tggaacacaactgggcgacatcaga

SEQ ID NO: 541430 - DNA, 25 bp, Homo sapien
ctaaatggaacacaactgggcgaca

SEQ ID NO: 541431 - DNA, 25 bp, Homo sapien
aatggaacacaactgggcgacatca

SEQ ID NO: 541432 - DNA, 25 bp, Homo sapien
aggttccagcttgaatggtaactga

SEQ ID NO: 541433 - DNA, 25 bp, Homo sapien
tgacaactgtcatagcaggttccag

SEQ ID NO: 541434 - DNA, 25 bp, Homo sapien
tgttgacaactgtcatagcaggttc

SEQ ID NO: 541435 - DNA, 25 bp, Homo sapien
gcaggttccagcttgaatggtaact

SEQ ID NO: 541436 - DNA, 25 bp, Homo sapien
caatgaaggcaaaactcgttttcat

SEQ ID NO: 541437 - DNA, 25 bp, Homo sapien
tatgtagcaatgacactaacttaaa

SEQ ID NO: 541438 - DNA, 25 bp, Homo sapien
tctcatagctcagtgctcaatactt

SEQ ID NO: 541439 - DNA, 25 bp, Homo sapien
gatccttccatcaacttgttcctta

SEQ ID NO: 541440 - DNA, 25 bp, Homo sapien
tctatccttcagatcacaatttgaa

SEQ ID NO: 541441 - DNA, 25 bp, Homo sapien
ttacttcctataagatacttcttga

SEQ ID NO: 541442 - DNA, 25 bp, Homo sapien
atcatatcttcctttgcatgctcac

SEQ ID NO: 541443 - DNA, 25 bp, Homo sapien
cttgatttgatataaaattggtccc

SEQ ID NO: 541444 - DNA, 25 bp, Homo sapien
tgccacctctgtcgaaactaacttg

SEQ ID NO: 541445 - DNA, 25 bp, Homo sapien
ctaccccgggttctcctggaatgag

SEQ ID NO: 541446 - DNA, 25 bp, Homo sapien
cagtgtagaagctcatagttaggaa

SEQ ID NO: 541447 - DNA, 25 bp, Homo sapien
ggattcttcaatctcgctggcaaca

SEQ ID NO: 541448 - DNA, 25 bp, Homo sapien
tcggagttatcagagactaaaagtc

SEQ ID NO: 541449 - DNA, 25 bp, Homo sapien
ggatttcggagttatcagagactaa

SEQ ID NO: 541450 - DNA, 25 bp, Homo sapien
agaaggaaggatttcggagttatca

SEQ ID NO: 541451 - DNA, 25 bp, Homo sapien
tatcagagactaaaagtctggcaca

SEQ ID NO: 541452 - DNA, 25 bp, Homo sapien
aatacgttgaatggttagtgagtcg

SEQ ID NO: 541453 - DNA, 25 bp, Homo sapien
tcaaatagttaacgctaaaacactc

SEQ ID NO: 541454 - DNA, 25 bp, Homo sapien
taaagagtcacactgtagcgaaaat

SEQ ID NO: 541455 - DNA, 25 bp, Homo sapien
cttttcattgatgcaagaaagaaag

SEQ ID NO: 541456 - DNA, 25 bp, Homo sapien
gagtatctaggtgaatgtattggaa

SEQ ID NO: 541457 - DNA, 25 bp, Homo sapien
actcagaaataaccagtgctaaaat

SEQ ID NO: 541458 - DNA, 25 bp, Homo sapien
tagctgtgatcatatagtagtcttt

SEQ ID NO: 541459 - DNA, 25 bp, Homo sapien
cctgttacagtttttcgaggccata

SEQ ID NO: 541460 - DNA, 25 bp, Homo sapien
caaatctgaagatatgtgggcgaat

SEQ ID NO: 541461 - DNA, 25 bp, Homo sapien
tccctggacaggctcactggcttct

SEQ ID NO: 541462 - DNA, 25 bp, Homo sapien
gcttctgtgactctgtaagcaggta

SEQ ID NO: 541463 - DNA, 25 bp, Homo sapien
acgcatttaacaagaggatactcca

SEQ ID NO: 541464 - DNA, 25 bp, Homo sapien
gcacctactacataggacccaaggg

SEQ ID NO: 541465 - DNA, 25 bp, Homo sapien
atagcacctactacataggacccaa

SEQ ID NO: 541466 - DNA, 25 bp, Homo sapien
catgtaagccttcaagagtgtgctt

SEQ ID NO: 541467 - DNA, 25 bp, Homo sapien
tagcacctactacataggacccaag

SEQ ID NO: 541468 - DNA, 25 bp, Homo sapien
cctccgcctcaagtggttctcctca

SEQ ID NO: 541469 - DNA, 25 bp, Homo sapien
tccgcctcaagtggttctcctcact

SEQ ID NO: 541470 - DNA, 25 bp, Homo sapien
gcctcaagtggttctcctcactcag

SEQ ID NO: 541471 - DNA, 25 bp, Homo sapien
aacctccgcctcaagtggttctcct

SEQ ID NO: 541472 - DNA, 25 bp, Homo sapien
taactacagtaatgctcaatggcca

SEQ ID NO: 541473 - DNA, 25 bp, Homo sapien
gattacctagacttgagacactgaa

SEQ ID NO: 541474 - DNA, 25 bp, Homo sapien
tggcaaatactacttagcagggctt

SEQ ID NO: 541475 - DNA, 25 bp, Homo sapien
aattggccatggtgaagtccttaca

SEQ ID NO: 541476 - DNA, 25 bp, Homo sapien
cctttcaggagattccgataaaata

SEQ ID NO: 541477 - DNA, 25 bp, Homo sapien
ttcctgctctaaacatgttggtttt

SEQ ID NO: 541478 - DNA, 25 bp, Homo sapien
tgctctaaacatgttggttttccct

SEQ ID NO: 541479 - DNA, 25 bp, Homo sapien
ggagattccgataaaatatatgatc

SEQ ID NO: 541480 - DNA, 25 bp, Homo sapien
tgcttagaacgtcagaaaaccgtat

SEQ ID NO: 541481 - DNA, 25 bp, Homo sapien
gatttatatcctaagacaaacgggc

SEQ ID NO: 541482 - DNA, 25 bp, Homo sapien
tgtctttaagtggacaatactcccc

SEQ ID NO: 541483 - DNA, 25 bp, Homo sapien
gacaggctccagcttataaatgtga

SEQ ID NO: 541484 - DNA, 25 bp, Homo sapien
aattaatcaaatacagctagactgc

SEQ ID NO: 541485 - DNA, 25 bp, Homo sapien
ttgtaaacacatgtactctccttgt

SEQ ID NO: 541486 - DNA, 25 bp, Homo sapien
tacagctagactgcaaatatatgct

SEQ ID NO: 541487 - DNA, 25 bp, Homo sapien
taaccacagcataagttagggcctt

SEQ ID NO: 541488 - DNA, 25 bp, Homo sapien
ttcttacatagctgttccctgggag

SEQ ID NO: 541489 - DNA, 25 bp, Homo sapien
cttcctcttcttacatagctgttcc

SEQ ID NO: 541490 - DNA, 25 bp, Homo sapien
cctcttcttacatagctgttccctg

SEQ ID NO: 541491 - DNA, 25 bp, Homo sapien
cttacatagctgttccctgggagag

SEQ ID NO: 541492 - DNA, 25 bp, Homo sapien
gatgccaagagaactgggaatatgt

SEQ ID NO: 541493 - DNA, 25 bp, Homo sapien
ggatactcccgcaccaaattgtaac

SEQ ID NO: 541494 - DNA, 25 bp, Homo sapien
ggttaaattgcaagccaagactgtc

SEQ ID NO: 541495 - DNA, 25 bp, Homo sapien
tcctctgttgcctagttggctgctt

SEQ ID NO: 541496 - DNA, 25 bp, Homo sapien
gtttgttccttacagtggacttagc

SEQ ID NO: 541497 - DNA, 25 bp, Homo sapien
ctttgaatcatgaaccttctgtcca

SEQ ID NO: 541498 - DNA, 25 bp, Homo sapien
tctaaccatgttattgtcactgcct

SEQ ID NO: 541499 - DNA, 25 bp, Homo sapien
cagaatctggccaaactctccaaca

SEQ ID NO: 541500 - DNA, 25 bp, Homo sapien
atgaaatataataatgggtccccat

SEQ ID NO: 541501 - DNA, 25 bp, Homo sapien
atataataatgggtccccatgctcc

SEQ ID NO: 541502 - DNA, 25 bp, Homo sapien
cctcaggtaataaaagagacaatga

SEQ ID NO: 541503 - DNA, 25 bp, Homo sapien
tgctccatggcaccgtataacatct

SEQ ID NO: 541504 - DNA, 25 bp, Homo sapien
tgtgctgctggtggttgaagacaat

SEQ ID NO: 541505 - DNA, 25 bp, Homo sapien
gctgctggtggttgaagacaatgca

SEQ ID NO: 541506 - DNA, 25 bp, Homo sapien
gatgctttgcatgtgtgctgctggt

SEQ ID NO: 541507 - DNA, 25 bp, Homo sapien
cagggatgctttgcatgtgtgctgc

SEQ ID NO: 541508 - DNA, 25 bp, Homo sapien
tcaccacaatttaccagggtcagca

SEQ ID NO: 541509 - DNA, 25 bp, Homo sapien
aaaaagctatatgacctggcatgca

SEQ ID NO: 541510 - DNA, 25 bp, Homo sapien
caggtgtgtttagatcttagccggg

SEQ ID NO: 541511 - DNA, 25 bp, Homo sapien
tcagccaggccgtaatggatggaaa

SEQ ID NO: 541512 - DNA, 25 bp, Homo sapien
catctcttactgtccctaacaacag

SEQ ID NO: 541513 - DNA, 25 bp, Homo sapien
aagagttgaagactttctactgttt

SEQ ID NO: 541514 - DNA, 25 bp, Homo sapien
gtttcccaagcctatgtatgtttat

SEQ ID NO: 541515 - DNA, 25 bp, Homo sapien
tcttactgtccctaacaacagaaaa

SEQ ID NO: 541516 - DNA, 25 bp, Homo sapien
gatgtacctcgcctacagtgagagt

SEQ ID NO: 541517 - DNA, 25 bp, Homo sapien
taattgcactagtgtggataccagc

SEQ ID NO: 541518 - DNA, 25 bp, Homo sapien
catgtcatctgttgcaagggagtca

SEQ ID NO: 541519 - DNA, 25 bp, Homo sapien
ctggagatgggagcacttttttgtc

SEQ ID NO: 541520 - DNA, 25 bp, Homo sapien
gaagagacaggacttacaagcccat

SEQ ID NO: 541521 - DNA, 25 bp, Homo sapien
ggctgcattcataagcaacctgcct

SEQ ID NO: 541522 - DNA, 25 bp, Homo sapien
tacatgacctcgtgctgaaacacag

SEQ ID NO: 541523 - DNA, 25 bp, Homo sapien
cagcagggttaatcaacgttatggc

SEQ ID NO: 541524 - DNA, 25 bp, Homo sapien
ggcatctggcatgagtaaaacggca

SEQ ID NO: 541525 - DNA, 25 bp, Homo sapien
gctgtatgtagttaaagggtaccaa

SEQ ID NO: 541526 - DNA, 25 bp, Homo sapien
tgtaccatagaaactgtaaaggagc

SEQ ID NO: 541527 - DNA, 25 bp, Homo sapien
gcagtttaaactccttgactcgcca

SEQ ID NO: 541528 - DNA, 25 bp, Homo sapien
taggccaagtgaacgactttgtgac

SEQ ID NO: 541529 - DNA, 25 bp, Homo sapien
tacagggtgcccattattcatgtga

SEQ ID NO: 541530 - DNA, 25 bp, Homo sapien
tatctgctccagagggcataggcca

SEQ ID NO: 541531 - DNA, 25 bp, Homo sapien
gcgtaccccgagtcaccaatggaat

SEQ ID NO: 541532 - DNA, 25 bp, Homo sapien
cagtagttacattctttaggaagac

SEQ ID NO: 541533 - DNA, 25 bp, Homo sapien
tacattctttaggaagacgatgaaa

SEQ ID NO: 541534 - DNA, 25 bp, Homo sapien
atttaaagtgttcgcagtagttaca

SEQ ID NO: 541535 - DNA, 25 bp, Homo sapien
tgttcgcagtagttacattctttag

SEQ ID NO: 541536 - DNA, 25 bp, Homo sapien
tgaggatgttcacagattttcagat

SEQ ID NO: 541537 - DNA, 25 bp, Homo sapien
ggatgttcacagattttcagattcc

SEQ ID NO: 541538 - DNA, 25 bp, Homo sapien
ggtgaggatgttcacagattttcag

SEQ ID NO: 541539 - DNA, 25 bp, Homo sapien
ggaaggtgaggatgttcacagattt

SEQ ID NO: 541540 - DNA, 25 bp, Homo sapien
cgttgaagcgagagaggagcacatc

SEQ ID NO: 541541 - DNA, 25 bp, Homo sapien
caatgttgtcagaagctagataccc

SEQ ID NO: 541542 - DNA, 25 bp, Homo sapien
taggaacacacaggccgttgaagcg

SEQ ID NO: 541543 - DNA, 25 bp, Homo sapien
gaactgaatgcaaacggccagcagg

SEQ ID NO: 541544 - DNA, 25 bp, Homo sapien
aaatgcaacaacagcaaatactcca

SEQ ID NO: 541545 - DNA, 25 bp, Homo sapien
cagcaaatactccaaaagttttata

SEQ ID NO: 541546 - DNA, 25 bp, Homo sapien
gcaacaacagcaaatactccaaaag

SEQ ID NO: 541547 - DNA, 25 bp, Homo sapien
caacagcaaatactccaaaagtttt

SEQ ID NO: 541548 - DNA, 25 bp, Homo sapien
tacagcctcagaagagtgtcgggca

SEQ ID NO: 541549 - DNA, 25 bp, Homo sapien
cagttaatgaaatacctccgtgagg

SEQ ID NO: 541550 - DNA, 25 bp, Homo sapien
tcagtgacggaaacacctggcttag

SEQ ID NO: 541551 - DNA, 25 bp, Homo sapien
taaacacagtttaaccatggagccc

SEQ ID NO: 541552 - DNA, 25 bp, Homo sapien
gccactgaactccaagaggagtaag

SEQ ID NO: 541553 - DNA, 25 bp, Homo sapien
gactcacatgcagatctattttttg

SEQ ID NO: 541554 - DNA, 25 bp, Homo sapien
tggcagggaactgttgaccgtagaa

SEQ ID NO: 541555 - DNA, 25 bp, Homo sapien
cgtagaatgtaccactcacagtgta

SEQ ID NO: 541556 - DNA, 25 bp, Homo sapien
gccagagcagaccatgagaaaagtt

SEQ ID NO: 541557 - DNA, 25 bp, Homo sapien
gaatttgctgcgtcaagtaactgaa

SEQ ID NO: 541558 - DNA, 25 bp, Homo sapien
tactgtagaaactccgtgtgcatga

SEQ ID NO: 541559 - DNA, 25 bp, Homo sapien
gatgtgctgttgcaaactctcccta

SEQ ID NO: 541560 - DNA, 25 bp, Homo sapien
gtgacactggaagtcctcagcacca

SEQ ID NO: 541561 - DNA, 25 bp, Homo sapien
atattcatgggacatcacaaataaa

SEQ ID NO: 541562 - DNA, 25 bp, Homo sapien
tgacactggaagtcctcagcaccac

SEQ ID NO: 541563 - DNA, 25 bp, Homo sapien
ttggaaatattatcctcacattgtg

SEQ ID NO: 541564 - DNA, 25 bp, Homo sapien
tcattgaactgagagctaaagctgc

SEQ ID NO: 541565 - DNA, 25 bp, Homo sapien
tagcccagagtgacggtacaagcct

SEQ ID NO: 541566 - DNA, 25 bp, Homo sapien
taaagctgcattcgtcaggtgagca

SEQ ID NO: 541567 - DNA, 25 bp, Homo sapien
tgggagctcctatagcaatacaagg

SEQ ID NO: 541568 - DNA, 25 bp, Homo sapien
tggaaaattcatgggctttataagg

SEQ ID NO: 541569 - DNA, 25 bp, Homo sapien
aattcatgggctttataaggctcag

SEQ ID NO: 541570 - DNA, 25 bp, Homo sapien
gaaaattcatgggctttataaggct

SEQ ID NO: 541571 - DNA, 25 bp, Homo sapien
tgggctttataaggctcagctgtta

SEQ ID NO: 541572 - DNA, 25 bp, Homo sapien
acgtcacctccttgtaactgcttct

SEQ ID NO: 541573 - DNA, 25 bp, Homo sapien
gctgaagagtggacataatgagtac

SEQ ID NO: 541574 - DNA, 25 bp, Homo sapien
aagtgcaaattgcttgacatttcga

SEQ ID NO: 541575 - DNA, 25 bp, Homo sapien
gtctagaatactcagttaaagtgca

SEQ ID NO: 541576 - DNA, 25 bp, Homo sapien
caggtaacacgtgattgccaaagag

SEQ ID NO: 541577 - DNA, 25 bp, Homo sapien
tctgcaagaagtcaggcggcatgag

SEQ ID NO: 541578 - DNA, 25 bp, Homo sapien
acaagtgagatcgttttcagccaca

SEQ ID NO: 541579 - DNA, 25 bp, Homo sapien
ttttgcatggagtaagcatggcacc

SEQ ID NO: 541580 - DNA, 25 bp, Homo sapien
tatgagttccattgaaaagagtatc

SEQ ID NO: 541581 - DNA, 25 bp, Homo sapien
tgagctaaaagtaaacctgcctgca

SEQ ID NO: 541582 - DNA, 25 bp, Homo sapien
tcagaagactgtaaacctatagtga

SEQ ID NO: 541583 - DNA, 25 bp, Homo sapien
cattgtctggtgaacaacataaact

SEQ ID NO: 541584 - DNA, 25 bp, Homo sapien
caaggaagatattaagcagcccgta

SEQ ID NO: 541585 - DNA, 25 bp, Homo sapien
cacgcccggctgatactgttaaagt

SEQ ID NO: 541586 - DNA, 25 bp, Homo sapien
gatatattctcccagtgcattgcag

SEQ ID NO: 541587 - DNA, 25 bp, Homo sapien
ggaggagggcctatactgatcttag

SEQ ID NO: 541588 - DNA, 25 bp, Homo sapien
cgtaaactattctcccctgactaga

SEQ ID NO: 541589 - DNA, 25 bp, Homo sapien
cacgcacatggagtacttaataaat

SEQ ID NO: 541590 - DNA, 25 bp, Homo sapien
ttagcagctaagagagcgcagtgtc

SEQ ID NO: 541591 - DNA, 25 bp, Homo sapien
agtatcctcctcagaaagtagttgg

SEQ ID NO: 541592 - DNA, 25 bp, Homo sapien
gactaatcatgtcaatgcgatcaat

SEQ ID NO: 541593 - DNA, 25 bp, Homo sapien
aaatccttgcgtgttcatttgacac

SEQ ID NO: 541594 - DNA, 25 bp, Homo sapien
aattcacactgtattgtccctggaa

SEQ ID NO: 541595 - DNA, 25 bp, Homo sapien
gggaagcacagtctataccagttta

SEQ ID NO: 541596 - DNA, 25 bp, Homo sapien
tagcaccacatacttccgatgtcat

SEQ ID NO: 541597 - DNA, 25 bp, Homo sapien
aaacatgtcctttcaacgtacgaag

SEQ ID NO: 541598 - DNA, 25 bp, Homo sapien
catagtctgtcttggctgtaatagc

SEQ ID NO: 541599 - DNA, 25 bp, Homo sapien
gcattggttccttgaagtactgtga

SEQ ID NO: 541600 - DNA, 25 bp, Homo sapien
aaaatatcatgacttgaaacagccc

SEQ ID NO: 541601 - DNA, 25 bp, Homo sapien
ggactttctaggacagttacctctc

SEQ ID NO: 541602 - DNA, 25 bp, Homo sapien
taaaagctaatagaaggcgcggtgg

SEQ ID NO: 541603 - DNA, 25 bp, Homo sapien
tcagggaacccattcacatagggaa

SEQ ID NO: 541604 - DNA, 25 bp, Homo sapien
tacctccaaataagtgctcagcagg

SEQ ID NO: 541605 - DNA, 25 bp, Homo sapien
aaaattcccagatgggtggagcttc

SEQ ID NO: 541606 - DNA, 25 bp, Homo sapien
taataggagtgatggatacggtgaa

SEQ ID NO: 541607 - DNA, 25 bp, Homo sapien
gattccagctgtgttaagtactgac

SEQ ID NO: 541608 - DNA, 25 bp, Homo sapien
gaaccagcaggtttcaaatgattcc

SEQ ID NO: 541609 - DNA, 25 bp, Homo sapien
gtatttggatttactgagttgccat

SEQ ID NO: 541610 - DNA, 25 bp, Homo sapien
agtatttggatttactgagttgcca

SEQ ID NO: 541611 - DNA, 25 bp, Homo sapien
atttgagaccaaaagatcatcagga

SEQ ID NO: 541612 - DNA, 25 bp, Homo sapien
catttgagaccaaaagatcatcagg

SEQ ID NO: 541613 - DNA, 25 bp, Homo sapien
acaaggaagtacaaacaagcctgca

SEQ ID NO: 541614 - DNA, 25 bp, Homo sapien
agaaatgaaggccagatcatgggca

SEQ ID NO: 541615 - DNA, 25 bp, Homo sapien
aagagagtctgcatacacaattgag

SEQ ID NO: 541616 - DNA, 25 bp, Homo sapien
gggtgttaatctgatttaggttcag

SEQ ID NO: 541617 - DNA, 25 bp, Homo sapien
tctcaagcccatcatttaaaacgtg

SEQ ID NO: 541618 - DNA, 25 bp, Homo sapien
gccactattcttgtctatcagagac

SEQ ID NO: 541619 - DNA, 25 bp, Homo sapien
taaaacgtgatatgtgcttatggca

SEQ ID NO: 541620 - DNA, 25 bp, Homo sapien
tatgtaaaaacagatccctaatgaa

SEQ ID NO: 541621 - DNA, 25 bp, Homo sapien
tgttctttgcaggttaacacaaggg

SEQ ID NO: 541622 - DNA, 25 bp, Homo sapien
ggctaatcgcacttccaaaaatttg

SEQ ID NO: 541623 - DNA, 25 bp, Homo sapien
aattaccgagacatgaccttttgcc

SEQ ID NO: 541624 - DNA, 25 bp, Homo sapien
aaagatggtgtgagcaatagtcgtc

SEQ ID NO: 541625 - DNA, 25 bp, Homo sapien
ggtgaactccatatcgacaaagaca

SEQ ID NO: 541626 - DNA, 25 bp, Homo sapien
cctggccagcacaagcgacatgata

SEQ ID NO: 541627 - DNA, 25 bp, Homo sapien
tgataccctagtgccatctacaggc

SEQ ID NO: 541628 - DNA, 25 bp, Homo sapien
tgctactgcgggattggcacctggc

SEQ ID NO: 541629 - DNA, 25 bp, Homo sapien
gaatttggcatatcaggacaggttt

SEQ ID NO: 541630 - DNA, 25 bp, Homo sapien
taaggtgaaagtcttgaagcagtca

SEQ ID NO: 541631 - DNA, 25 bp, Homo sapien
aatcagttatattaggcagcaagca

SEQ ID NO: 541632 - DNA, 25 bp, Homo sapien
tggccactgcggacactaaaaatct

SEQ ID NO: 541633 - DNA, 25 bp, Homo sapien
ttctaactaagctaaagttagacca

SEQ ID NO: 541634 - DNA, 25 bp, Homo sapien
cagtacttatagaccagtaaaagtg

SEQ ID NO: 541635 - DNA, 25 bp, Homo sapien
aatactggttgactgggcacttgta

SEQ ID NO: 541636 - DNA, 25 bp, Homo sapien
gggcacttgtatgcagtacttatag

SEQ ID NO: 541637 - DNA, 25 bp, Homo sapien
tggttgactgggcacttgtatgcag

SEQ ID NO: 541638 - DNA, 25 bp, Homo sapien
tgaaccttgatgcatggcgacagcg

SEQ ID NO: 541639 - DNA, 25 bp, Homo sapien
tgtgcaaagacttagggtaccccag

SEQ ID NO: 541640 - DNA, 25 bp, Homo sapien
tcatagtccaacaaagaagaggtct

SEQ ID NO: 541641 - DNA, 25 bp, Homo sapien
tacagaggtacctacgggagcattc

SEQ ID NO: 541642 - DNA, 25 bp, Homo sapien
aaggtttccactgaggaatgatgca

SEQ ID NO: 541643 - DNA, 25 bp, Homo sapien
tatatctcatcacttatttggagac

SEQ ID NO: 541644 - DNA, 25 bp, Homo sapien
gaagcgtgcatggactggaggatgc

SEQ ID NO: 541645 - DNA, 25 bp, Homo sapien
gaggatgcattatatctcatcactt

SEQ ID NO: 541646 - DNA, 25 bp, Homo sapien
gattctctgacagctatccgggtga

SEQ ID NO: 541647 - DNA, 25 bp, Homo sapien
tgttccaacacatagaaagccatgc

SEQ ID NO: 541648 - DNA, 25 bp, Homo sapien
tcttgtaggaaacgtcagagttgcg

SEQ ID NO: 541649 - DNA, 25 bp, Homo sapien
aaaatgtgttgcttcgggctggcaa

SEQ ID NO: 541650 - DNA, 25 bp, Homo sapien
ctgcgaactttgcttccgaggggct

SEQ ID NO: 541651 - DNA, 25 bp, Homo sapien
actgcgaactttgcttccgaggggc

SEQ ID NO: 541652 - DNA, 25 bp, Homo sapien
cactgcgaactttgcttccgagggg

SEQ ID NO: 541653 - DNA, 25 bp, Homo sapien
tcactgcgaactttgcttccgaggg

SEQ ID NO: 541654 - DNA, 25 bp, Homo sapien
cactgtccttattccgattgtttct

SEQ ID NO: 541655 - DNA, 25 bp, Homo sapien
ctagccgcaactcaaaaaccacaat

SEQ ID NO: 541656 - DNA, 25 bp, Homo sapien
acagtttcacctacttctagccgca

SEQ ID NO: 541657 - DNA, 25 bp, Homo sapien
tacttctagccgcaactcaaaaacc

SEQ ID NO: 541658 - DNA, 25 bp, Homo sapien
tagcttggtattctcttcagcaggc

SEQ ID NO: 541659 - DNA, 25 bp, Homo sapien
ggcttcgtggctattacactgtact

SEQ ID NO: 541660 - DNA, 25 bp, Homo sapien
tcttcagcaggcttcgtggctatta

SEQ ID NO: 541661 - DNA, 25 bp, Homo sapien
tatagcttggtattctcttcagcag

SEQ ID NO: 541662 - DNA, 25 bp, Homo sapien
aagacctttcagtggttgctcctac

SEQ ID NO: 541663 - DNA, 25 bp, Homo sapien
ttaagacctttcagtggttgctcct

SEQ ID NO: 541664 - DNA, 25 bp, Homo sapien
taagacctttcagtggttgctccta

SEQ ID NO: 541665 - DNA, 25 bp, Homo sapien
cagagcggtcttccgtggcaggctg

SEQ ID NO: 541666 - DNA, 25 bp, Homo sapien
tgcagagcggtcttccgtggcaggc

SEQ ID NO: 541667 - DNA, 25 bp, Homo sapien
agctgcagagcggtcttccgtggca

SEQ ID NO: 541668 - DNA, 25 bp, Homo sapien
gtgggagctgcagagcggtcttccg

SEQ ID NO: 541669 - DNA, 25 bp, Homo sapien
gtcacctgcacgctttcagaccagt

SEQ ID NO: 541670 - DNA, 25 bp, Homo sapien
gaggtcacctgcacgctttcagacc

SEQ ID NO: 541671 - DNA, 25 bp, Homo sapien
ttcagtaggcacagaggtcacctgc

SEQ ID NO: 541672 - DNA, 25 bp, Homo sapien
cttcagtaggcacagaggtcacctg

SEQ ID NO: 541673 - DNA, 25 bp, Homo sapien
ctaagtagcagtgaactcaggagct

SEQ ID NO: 541674 - DNA, 25 bp, Homo sapien
actcaggagctggagcagtacattc

SEQ ID NO: 541675 - DNA, 25 bp, Homo sapien
gaactcaggagctggagcagtacat

SEQ ID NO: 541676 - DNA, 25 bp, Homo sapien
tcaggagctggagcagtacattcac

SEQ ID NO: 541677 - DNA, 25 bp, Homo sapien
ctgaaattcctcctcagtcacagcc

SEQ ID NO: 541678 - DNA, 25 bp, Homo sapien
ttcctcctcagtcacagccttttca

SEQ ID NO: 541679 - DNA, 25 bp, Homo sapien
gaaattcctcctcagtcacagcctt

SEQ ID NO: 541680 - DNA, 25 bp, Homo sapien
tcctcagtcacagccttttcagcaa

SEQ ID NO: 541681 - DNA, 25 bp, Homo sapien
gtgttcatgggaaatggtgccacac

SEQ ID NO: 541682 - DNA, 25 bp, Homo sapien
ctccatgggtgttcatgggaaatgg

SEQ ID NO: 541683 - DNA, 25 bp, Homo sapien
gggtgttcatgggaaatggtgccac

SEQ ID NO: 541684 - DNA, 25 bp, Homo sapien
atgggtgttcatgggaaatggtgcc

SEQ ID NO: 541685 - DNA, 25 bp, Homo sapien
tgtgcagaatttcccgagccagcat

SEQ ID NO: 541686 - DNA, 25 bp, Homo sapien
atgtgcagaatttcccgagccagca

SEQ ID NO: 541687 - DNA, 25 bp, Homo sapien
gatgtcaatgtccacatagcgcagg

SEQ ID NO: 541688 - DNA, 25 bp, Homo sapien
tcaatgtccacatagcgcaggggag

SEQ ID NO: 541689 - DNA, 25 bp, Homo sapien
ccacaagaagccatggctcctggaa

SEQ ID NO: 541690 - DNA, 25 bp, Homo sapien
tgtcaatgtccacatagcgcagggg

SEQ ID NO: 541691 - DNA, 25 bp, Homo sapien
cttccaggaatgaagtggccagcaa

SEQ ID NO: 541692 - DNA, 25 bp, Homo sapien
aatgaagtggccagcaattggagtt

SEQ ID NO: 541693 - DNA, 25 bp, Homo sapien
ggaatgaagtggccagcaattggag

SEQ ID NO: 541694 - DNA, 25 bp, Homo sapien
tgaagtggccagcaattggagtttg

SEQ ID NO: 541695 - DNA, 25 bp, Homo sapien
ttcagcatggccctctggccagtat

SEQ ID NO: 541696 - DNA, 25 bp, Homo sapien
gtattcctggaggatatgacactga

SEQ ID NO: 541697 - DNA, 25 bp, Homo sapien
tcagcatggccctctggccagtatt

SEQ ID NO: 541698 - DNA, 25 bp, Homo sapien
ggccagtattcctggaggatatgac

SEQ ID NO: 541699 - DNA, 25 bp, Homo sapien
cagatttatgatgtagatgccatca

SEQ ID NO: 541700 - DNA, 25 bp, Homo sapien
acaatggcatgagctgccagcggaa

SEQ ID NO: 541701 - DNA, 25 bp, Homo sapien
gcaacaatggcatgagctgccagcg

SEQ ID NO: 541702 - DNA, 25 bp, Homo sapien
tccttttatagatgtactgttccat

SEQ ID NO: 541703 - DNA, 25 bp, Homo sapien
agtcaagattggtgccacctaagtg

SEQ ID NO: 541704 - DNA, 25 bp, Homo sapien
aagattggtgccacctaagtgggtt

SEQ ID NO: 541705 - DNA, 25 bp, Homo sapien
caagattggtgccacctaagtgggt

SEQ ID NO: 541706 - DNA, 25 bp, Homo sapien
ctggaagtcaagattggtgccacct

SEQ ID NO: 541707 - DNA, 25 bp, Homo sapien
tgcaaggaacgtaaggacatcatcc

SEQ ID NO: 541708 - DNA, 25 bp, Homo sapien
caaggaacgtaaggacatcatcctc

SEQ ID NO: 541709 - DNA, 25 bp, Homo sapien
ctgcaaggaacgtaaggacatcatc

SEQ ID NO: 541710 - DNA, 25 bp, Homo sapien
ggaacgtaaggacatcatcctcctt

SEQ ID NO: 541711 - DNA, 25 bp, Homo sapien
tctagctacatcagacagacttcct

SEQ ID NO: 541712 - DNA, 25 bp, Homo sapien
gctgccacaattgtcaaacccctag

SEQ ID NO: 541713 - DNA, 25 bp, Homo sapien
cttccttgaagtgataacctggcca

SEQ ID NO: 541714 - DNA, 25 bp, Homo sapien
tcctaaatggagatccatggctgcc

SEQ ID NO: 541715 - DNA, 25 bp, Homo sapien
aattagaggactgcagaaatacacg

SEQ ID NO: 541716 - DNA, 25 bp, Homo sapien
tacacgtgaagatggtactgatgga

SEQ ID NO: 541717 - DNA, 25 bp, Homo sapien
gaataaaaacaggagtaagtgagat

SEQ ID NO: 541718 - DNA, 25 bp, Homo sapien
acatgcttaacaggtgattcctcac

SEQ ID NO: 541719 - DNA, 25 bp, Homo sapien
cttgcttgtagattggggcagacat

SEQ ID NO: 541720 - DNA, 25 bp, Homo sapien
aacttgcttgtagattggggcagac

SEQ ID NO: 541721 - DNA, 25 bp, Homo sapien
tgcttgtagattggggcagacattt

SEQ ID NO: 541722 - DNA, 25 bp, Homo sapien
gaacttgcttgtagattggggcaga

SEQ ID NO: 541723 - DNA, 25 bp, Homo sapien
gcacaggtggctgagtaataaacac

SEQ ID NO: 541724 - DNA, 25 bp, Homo sapien
gggactgagtctgcttaaattgctt

SEQ ID NO: 541725 - DNA, 25 bp, Homo sapien
gatgcaatgtcttgtattgaagaca

SEQ ID NO: 541726 - DNA, 25 bp, Homo sapien
tcaggaatccaattagtgtacaatg

SEQ ID NO: 541727 - DNA, 25 bp, Homo sapien
gtctttttaatccaactcccatcaa

SEQ ID NO: 541728 - DNA, 25 bp, Homo sapien
cacatggaacataggcttctgcttt

SEQ ID NO: 541729 - DNA, 25 bp, Homo sapien
cccatcaacgatgccagagtaatca

SEQ ID NO: 541730 - DNA, 25 bp, Homo sapien
ttgcacatggaacataggcttctgc

SEQ ID NO: 541731 - DNA, 25 bp, Homo sapien
cgttctctgaatcttctagggctat

SEQ ID NO: 541732 - DNA, 25 bp, Homo sapien
cttctagggctatttgtaagtgtat

SEQ ID NO: 541733 - DNA, 25 bp, Homo sapien
ggctatttgtaagtgtatcatttcc

SEQ ID NO: 541734 - DNA, 25 bp, Homo sapien
ctagggctatttgtaagtgtatcat

SEQ ID NO: 541735 - DNA, 25 bp, Homo sapien
tggttcatatattgcattgttgtca

SEQ ID NO: 541736 - DNA, 25 bp, Homo sapien
gttcatatattgcattgttgtcaag

SEQ ID NO: 541737 - DNA, 25 bp, Homo sapien
tcatggttcatatattgcattgttg

SEQ ID NO: 541738 - DNA, 25 bp, Homo sapien
catggttcatatattgcattgttgt

SEQ ID NO: 541739 - DNA, 25 bp, Homo sapien
cagtgtcccaacatattgtctgata

SEQ ID NO: 541740 - DNA, 25 bp, Homo sapien
ttgtctgatatcaaccacccctgaa

SEQ ID NO: 541741 - DNA, 25 bp, Homo sapien
cacactgatcagtgtcccaacatat

SEQ ID NO: 541742 - DNA, 25 bp, Homo sapien
gaaatggcactatctgtcatccacc

SEQ ID NO: 541743 - DNA, 25 bp, Homo sapien
cctgtacattctgcttctatgtggc

SEQ ID NO: 541744 - DNA, 25 bp, Homo sapien
atctggaccttcctgtacattctgc

SEQ ID NO: 541745 - DNA, 25 bp, Homo sapien
tctatgtggctgtctaacctggtca

SEQ ID NO: 541746 - DNA, 25 bp, Homo sapien
cttctatgtggctgtctaacctggt

SEQ ID NO: 541747 - DNA, 25 bp, Homo sapien
taaatgtaagggttgttgatccaga

SEQ ID NO: 541748 - DNA, 25 bp, Homo sapien
gaaacctgacagtgcaaaccaaatt

SEQ ID NO: 541749 - DNA, 25 bp, Homo sapien
tgctctcttgtaacattacctcctg

SEQ ID NO: 541750 - DNA, 25 bp, Homo sapien
gaatgctctccacaggctggctatg

SEQ ID NO: 541751 - DNA, 25 bp, Homo sapien
aaaatatcgatgtgtgggtctcacc

SEQ ID NO: 541752 - DNA, 25 bp, Homo sapien
taaacactaggcttccagtaagtgg

SEQ ID NO: 541753 - DNA, 25 bp, Homo sapien
tccagctgggaggtatcatccactt

SEQ ID NO: 541754 - DNA, 25 bp, Homo sapien
gaattatcctaacgtgcagccaaaa

SEQ ID NO: 541755 - DNA, 25 bp, Homo sapien
taattatgaagtagttacgccctgt

SEQ ID NO: 541756 - DNA, 25 bp, Homo sapien
tacgccctgtgctatattgctgata

SEQ ID NO: 541757 - DNA, 25 bp, Homo sapien
cacctttgaccttatttgggagata

SEQ ID NO: 541758 - DNA, 25 bp, Homo sapien
gcatgaatgctatcctttctgccat

SEQ ID NO: 541759 - DNA, 25 bp, Homo sapien
agatatggaacattccaccatatcc

SEQ ID NO: 541760 - DNA, 25 bp, Homo sapien
tcagatatggaacattccaccatat

SEQ ID NO: 541761 - DNA, 25 bp, Homo sapien
cagatatggaacattccaccatatc

SEQ ID NO: 541762 - DNA, 25 bp, Homo sapien
catgacactgatcttgcttatgtta

SEQ ID NO: 541763 - DNA, 25 bp, Homo sapien
ccatctggcccctctggttcagaga

SEQ ID NO: 541764 - DNA, 25 bp, Homo sapien
tgtgtaagttacaaactgcccaaac

SEQ ID NO: 541765 - DNA, 25 bp, Homo sapien
gatgtaggaagccaacatgacactg

SEQ ID NO: 541766 - DNA, 25 bp, Homo sapien
gaagacctttctggcattcggcaga

SEQ ID NO: 541767 - DNA, 25 bp, Homo sapien
gaaatcctctttgttccggctatga

SEQ ID NO: 541768 - DNA, 25 bp, Homo sapien
ttcggcagagactcccaatcagctg

SEQ ID NO: 541769 - DNA, 25 bp, Homo sapien
tcagctgtagcctgatctatagaaa

SEQ ID NO: 541770 - DNA, 25 bp, Homo sapien
aacccgtgatttattgcaatttagc

SEQ ID NO: 541771 - DNA, 25 bp, Homo sapien
tctgtggaggaggtttactgtgctg

SEQ ID NO: 541772 - DNA, 25 bp, Homo sapien
gaaaactcattaatctcattcacag

SEQ ID NO: 541773 - DNA, 25 bp, Homo sapien
tcattcacagctcgtagtctaaaca

SEQ ID NO: 541774 - DNA, 25 bp, Homo sapien
tcagttgcaccttgttgcttatgcc

SEQ ID NO: 541775 - DNA, 25 bp, Homo sapien
taactaatttccagatctctccaat

SEQ ID NO: 541776 - DNA, 25 bp, Homo sapien
ctctttaagaataactaatttccag

SEQ ID NO: 541777 - DNA, 25 bp, Homo sapien
gtttatgcgctatcattaagcctcc

SEQ ID NO: 541778 - DNA, 25 bp, Homo sapien
ttagccctccttcttttcagatatt

SEQ ID NO: 541779 - DNA, 25 bp, Homo sapien
tagccctccttcttttcagatattc

SEQ ID NO: 541780 - DNA, 25 bp, Homo sapien
agccctccttcttttcagatattcc

SEQ ID NO: 541781 - DNA, 25 bp, Homo sapien
ttctccgtaccctgggaatttgctc

SEQ ID NO: 541782 - DNA, 25 bp, Homo sapien
tctgctggatatagatgccatttta

SEQ ID NO: 541783 - DNA, 25 bp, Homo sapien
ccctgggaatttgctctgctggata

SEQ ID NO: 541784 - DNA, 25 bp, Homo sapien
gccattttagattcttgtgtgtccc

SEQ ID NO: 541785 - DNA, 25 bp, Homo sapien
acaggtggtttgttaacagcagcag

SEQ ID NO: 541786 - DNA, 25 bp, Homo sapien
tgaatcgacttttgatggatacagg

SEQ ID NO: 541787 - DNA, 25 bp, Homo sapien
agacctcgccttcaatctttttgaa

SEQ ID NO: 541788 - DNA, 25 bp, Homo sapien
tttcaatcagggttgagacctcgcc

SEQ ID NO: 541789 - DNA, 25 bp, Homo sapien
gttgtttttgttatatccaaggaca

SEQ ID NO: 541790 - DNA, 25 bp, Homo sapien
ttgtttttgttatatccaaggacat

SEQ ID NO: 541791 - DNA, 25 bp, Homo sapien
aacctgttatctggcatgaaagaag

SEQ ID NO: 541792 - DNA, 25 bp, Homo sapien
ctgggatgatttgatagactcagag

SEQ ID NO: 541793 - DNA, 25 bp, Homo sapien
ggagacaacaatgactgcacggggt

SEQ ID NO: 541794 - DNA, 25 bp, Homo sapien
gaaagaagcaatttcaatatgctgg

SEQ ID NO: 541795 - DNA, 25 bp, Homo sapien
gaaggggcagctgtatgaataaatc

SEQ ID NO: 541796 - DNA, 25 bp, Homo sapien
accaatcagctgcatccaggggtgc

SEQ ID NO: 541797 - DNA, 25 bp, Homo sapien
tcttttgtaacaccaatttgaattc

SEQ ID NO: 541798 - DNA, 25 bp, Homo sapien
gatacaggtacccaagtctggacca

SEQ ID NO: 541799 - DNA, 25 bp, Homo sapien
cagatttctatgatttgatctagcg

SEQ ID NO: 541800 - DNA, 25 bp, Homo sapien
acacgaggggaaataattcttcctg

SEQ ID NO: 541801 - DNA, 25 bp, Homo sapien
cattaacatgactcagatttctatg

SEQ ID NO: 541802 - DNA, 25 bp, Homo sapien
tgatttgatctagcgaacacgaggg

SEQ ID NO: 541803 - DNA, 25 bp, Homo sapien
tactgtgtaagacctatgctggatg

SEQ ID NO: 541804 - DNA, 25 bp, Homo sapien
cactctacgatgaaaaagctagtct

SEQ ID NO: 541805 - DNA, 25 bp, Homo sapien
gaacaagccaagtggtgtttgccct

SEQ ID NO: 541806 - DNA, 25 bp, Homo sapien
caataggctccatgctaagtggcag

SEQ ID NO: 541807 - DNA, 25 bp, Homo sapien
ggacagcaggcaaagtgtgcagtat

SEQ ID NO: 541808 - DNA, 25 bp, Homo sapien
agtttcgggcttacaacatatagaa

SEQ ID NO: 541809 - DNA, 25 bp, Homo sapien
gttacagtaggcagtaatttgatac

SEQ ID NO: 541810 - DNA, 25 bp, Homo sapien
tatatatccaattgtagtttcgggc

SEQ ID NO: 541811 - DNA, 25 bp, Homo sapien
aatactaaaagaggtaggtcaggct

SEQ ID NO: 541812 - DNA, 25 bp, Homo sapien
aaatatccgaaataaatctgacgac

SEQ ID NO: 541813 - DNA, 25 bp, Homo sapien
tgttaaatatccgaaataaatctga

SEQ ID NO: 541814 - DNA, 25 bp, Homo sapien
taactcagtcaaatcagagtaacat

SEQ ID NO: 541815 - DNA, 25 bp, Homo sapien
tatcacagaggcaattgataactca

SEQ ID NO: 541816 - DNA, 25 bp, Homo sapien
tgttccctctgtgaagaagtttttg

SEQ ID NO: 541817 - DNA, 25 bp, Homo sapien
tatagatagatagttgcaaatgtct

SEQ ID NO: 541818 - DNA, 25 bp, Homo sapien
tcttcactatgtcagttgttccctc

SEQ ID NO: 541819 - DNA, 25 bp, Homo sapien
ttcaacttaacaggctgtctcttca

SEQ ID NO: 541820 - DNA, 25 bp, Homo sapien
gaaggaaatggtgatacagagctta

SEQ ID NO: 541821 - DNA, 25 bp, Homo sapien
ctatgccagtggcttggtaaacaat

SEQ ID NO: 541822 - DNA, 25 bp, Homo sapien
tacagagcttaaggttttctgggtc

SEQ ID NO: 541823 - DNA, 25 bp, Homo sapien
tggcccataatgcatagaggtctgc

SEQ ID NO: 541824 - DNA, 25 bp, Homo sapien
cctctgtatctgcacagtccaacat

SEQ ID NO: 541825 - DNA, 25 bp, Homo sapien
gcagaaggaattctcttgcgtttat

SEQ ID NO: 541826 - DNA, 25 bp, Homo sapien
aacagccattcttccgaccaagcaa

SEQ ID NO: 541827 - DNA, 25 bp, Homo sapien
tacggtgctcaatcgtaaaactagc

SEQ ID NO: 541828 - DNA, 25 bp, Homo sapien
ttcttccgaccaagcaatgcaggcc

SEQ ID NO: 541829 - DNA, 25 bp, Homo sapien
tcttatggcctcagtggtgcagcac

SEQ ID NO: 541830 - DNA, 25 bp, Homo sapien
tatccttagtaacctgtagcagagg

SEQ ID NO: 541831 - DNA, 25 bp, Homo sapien
gagaagcagcatttggtagctccca

SEQ ID NO: 541832 - DNA, 25 bp, Homo sapien
gattgtggaggcaagatctgacttc

SEQ ID NO: 541833 - DNA, 25 bp, Homo sapien
ccaagcttatattttgtgccttcaa

SEQ ID NO: 541834 - DNA, 25 bp, Homo sapien
gaaggagcagaaatttgtctggtgc

SEQ ID NO: 541835 - DNA, 25 bp, Homo sapien
gcctgctcttgtcaccagtattggg

SEQ ID NO: 541836 - DNA, 25 bp, Homo sapien
gttgccaaaggaacccaagcttata

SEQ ID NO: 541837 - DNA, 25 bp, Homo sapien
aatttcatcggtgcaatgacctgtg

SEQ ID NO: 541838 - DNA, 25 bp, Homo sapien
gaattaaacctgtattcagcagctt

SEQ ID NO: 541839 - DNA, 25 bp, Homo sapien
gtcacacaggtgttttatcagatta

SEQ ID NO: 541840 - DNA, 25 bp, Homo sapien
gtgatgatgatgcattgcttaagga

SEQ ID NO: 541841 - DNA, 25 bp, Homo sapien
gctgtgctgactggtaaatatacaa

SEQ ID NO: 541842 - DNA, 25 bp, Homo sapien
tggttgataggaccgggctctgcag

SEQ ID NO: 541843 - DNA, 25 bp, Homo sapien
tccgcgggtggagctacccgccagt

SEQ ID NO: 541844 - DNA, 25 bp, Homo sapien
cccggcgagaatttgagcgtggcac

SEQ ID NO: 541845 - DNA, 25 bp, Homo sapien
tttatcctgtgattgacatgtgacc

SEQ ID NO: 541846 - DNA, 25 bp, Homo sapien
ctttatcctgtgattgacatgtgac

SEQ ID NO: 541847 - DNA, 25 bp, Homo sapien
ggaaacttgtgctattctttggtgc

SEQ ID NO: 541848 - DNA, 25 bp, Homo sapien
ggaaggaaacttgtgctattctttg

SEQ ID NO: 541849 - DNA, 25 bp, Homo sapien
acttgtgctattctttggtgctata

SEQ ID NO: 541850 - DNA, 25 bp, Homo sapien
aaacttgtgctattctttggtgcta

SEQ ID NO: 541851 - DNA, 25 bp, Homo sapien
gattatgcctgatctcttcaacctc

SEQ ID NO: 541852 - DNA, 25 bp, Homo sapien
tcttcaacctcatatatcatttcta

SEQ ID NO: 541853 - DNA, 25 bp, Homo sapien
ggtttcagggcacaaagattatgcc

SEQ ID NO: 541854 - DNA, 25 bp, Homo sapien
tcaattgggtagaggtttcagggca

SEQ ID NO: 541855 - DNA, 25 bp, Homo sapien
ttattatgacggatggctgcagcac

SEQ ID NO: 541856 - DNA, 25 bp, Homo sapien
tgtttgctctcagcaattattatga

SEQ ID NO: 541857 - DNA, 25 bp, Homo sapien
ctcagcaattattatgacggatggc

SEQ ID NO: 541858 - DNA, 25 bp, Homo sapien
cctcggaggtggtcgtggcaagact

SEQ ID NO: 541859 - DNA, 25 bp, Homo sapien
ctcctcctcagtcatccggaagcaa

SEQ ID NO: 541860 - DNA, 25 bp, Homo sapien
agagatcttgaacagcctcctcctc

SEQ ID NO: 541861 - DNA, 25 bp, Homo sapien
ctcctcagtcatccggaagcaattc

SEQ ID NO: 541862 - DNA, 25 bp, Homo sapien
gagatcttgaacagcctcctcctca

SEQ ID NO: 541863 - DNA, 25 bp, Homo sapien
ctttgatcttggtgtcgatgctggt

SEQ ID NO: 541864 - DNA, 25 bp, Homo sapien
taatgtcctctacagcacttggttc

SEQ ID NO: 541865 - DNA, 25 bp, Homo sapien
atgtcctctacagcacttggttctt

SEQ ID NO: 541866 - DNA, 25 bp, Homo sapien
tctttgatcttggtgtcgatgctgg

SEQ ID NO: 541867 - DNA, 25 bp, Homo sapien
ctgatttgaattttgtgcatttttg

SEQ ID NO: 541868 - DNA, 25 bp, Homo sapien
tgatttgaattttgtgcatttttgg

SEQ ID NO: 541869 - DNA, 25 bp, Homo sapien
tcatcaaaatcatcaccatcatctt

SEQ ID NO: 541870 - DNA, 25 bp, Homo sapien
gagtatctcatatagatttcttcac

SEQ ID NO: 541871 - DNA, 25 bp, Homo sapien
tcatcatcttcatcactagcaagtt

SEQ ID NO: 541872 - DNA, 25 bp, Homo sapien
tcatcttcatcactagcaagtttta

SEQ ID NO: 541873 - DNA, 25 bp, Homo sapien
ctccagggggagaaggctttccaga

SEQ ID NO: 541874 - DNA, 25 bp, Homo sapien
ccagggggagaaggctttccagata

SEQ ID NO: 541875 - DNA, 25 bp, Homo sapien
ctgactctgcattttcctccccagc

SEQ ID NO: 541876 - DNA, 25 bp, Homo sapien
attttcctccccagctactaagtgc

SEQ ID NO: 541877 - DNA, 25 bp, Homo sapien
cagctgctaaactcaccgttcttaa

SEQ ID NO: 541878 - DNA, 25 bp, Homo sapien
gctgctaaactcaccgttcttaaag

SEQ ID NO: 541879 - DNA, 25 bp, Homo sapien
gaaaccattggatgtacaggcattg

SEQ ID NO: 541880 - DNA, 25 bp, Homo sapien
tgtcagcgttactttaattggaatc

SEQ ID NO: 541881 - DNA, 25 bp, Homo sapien
gaatcttccatcgcgtggcggcacg

SEQ ID NO: 541882 - DNA, 25 bp, Homo sapien
tcgaatcttccatcgcgtggcggca

SEQ ID NO: 541883 - DNA, 25 bp, Homo sapien
catcgaatcttccatcgcgtggcgg

SEQ ID NO: 541884 - DNA, 25 bp, Homo sapien
atcttccatcgcgtggcggcacgca

SEQ ID NO: 541885 - DNA, 25 bp, Homo sapien
gctcaggagaacagtcgctcaggac

SEQ ID NO: 541886 - DNA, 25 bp, Homo sapien
tcctcatatataagcagatagcacc

SEQ ID NO: 541887 - DNA, 25 bp, Homo sapien
tagcaccacctgtcttataagctgg

SEQ ID NO: 541888 - DNA, 25 bp, Homo sapien
tataagcagatagcaccacctgtct

SEQ ID NO: 541889 - DNA, 25 bp, Homo sapien
ccacctgtcttataagctggtgcct

SEQ ID NO: 541890 - DNA, 25 bp, Homo sapien
gaaattcaaagctcaaactgttgcc

SEQ ID NO: 541891 - DNA, 25 bp, Homo sapien
tctttatggtgctctgatcaggctg

SEQ ID NO: 541892 - DNA, 25 bp, Homo sapien
gctgcactcgtgagacatatatcaa

SEQ ID NO: 541893 - DNA, 25 bp, Homo sapien
gatcaggctgataaaggcagttcag

SEQ ID NO: 541894 - DNA, 25 bp, Homo sapien
tagggcatatccgtagcatgaattt

SEQ ID NO: 541895 - DNA, 25 bp, Homo sapien
agggcatatccgtagcatgaatttt

SEQ ID NO: 541896 - DNA, 25 bp, Homo sapien
gggcatatccgtagcatgaattttc

SEQ ID NO: 541897 - DNA, 25 bp, Homo sapien
ctagggcatatccgtagcatgaatt

SEQ ID NO: 541898 - DNA, 25 bp, Homo sapien
caccacggtccccaagatgactgtg

SEQ ID NO: 541899 - DNA, 25 bp, Homo sapien
tccagaatgacagccggtcctcgct

SEQ ID NO: 541900 - DNA, 25 bp, Homo sapien
tcagaggatccagaatgacagccgg

SEQ ID NO: 541901 - DNA, 25 bp, Homo sapien
gatgactgtggacatccagtctcac

SEQ ID NO: 541902 - DNA, 25 bp, Homo sapien
ttccccgagaaaggctgcagtggcc

SEQ ID NO: 541903 - DNA, 25 bp, Homo sapien
catcttccccgagaaaggctgcagt

SEQ ID NO: 541904 - DNA, 25 bp, Homo sapien
cgagaaaggctgcagtggcctcagt

SEQ ID NO: 541905 - DNA, 25 bp, Homo sapien
ctcagttcagatgtgtcatcttccc

SEQ ID NO: 541906 - DNA, 25 bp, Homo sapien
caatagacctaagggaacatgccca

SEQ ID NO: 541907 - DNA, 25 bp, Homo sapien
ttcccaatagacctaagggaacatg

SEQ ID NO: 541908 - DNA, 25 bp, Homo sapien
cagatttcccaatagacctaaggga

SEQ ID NO: 541909 - DNA, 25 bp, Homo sapien
ttaatccctcatgggcaccttctgg

SEQ ID NO: 541910 - DNA, 25 bp, Homo sapien
cctgaagacctcctgaaattacttt

SEQ ID NO: 541911 - DNA, 25 bp, Homo sapien
gacctgaagacctcctgaaattact

SEQ ID NO: 541912 - DNA, 25 bp, Homo sapien
aagacctgaagacctcctgaaatta

SEQ ID NO: 541913 - DNA, 25 bp, Homo sapien
tgaagacctcctgaaattactttta

SEQ ID NO: 541914 - DNA, 25 bp, Homo sapien
ctatggttagcaacctggaggtgga

SEQ ID NO: 541915 - DNA, 25 bp, Homo sapien
atcagaactatggttagcaacctgg

SEQ ID NO: 541916 - DNA, 25 bp, Homo sapien
tggcagaatcagaactatggttagc

SEQ ID NO: 541917 - DNA, 25 bp, Homo sapien
gattttggcagaatcagaactatgg

SEQ ID NO: 541918 - DNA, 25 bp, Homo sapien
caactgagacttttgaaaaacagtt

SEQ ID NO: 541919 - DNA, 25 bp, Homo sapien
tcaactgagacttttgaaaaacagt

SEQ ID NO: 541920 - DNA, 25 bp, Homo sapien
ttcaactgagacttttgaaaaacag

SEQ ID NO: 541921 - DNA, 25 bp, Homo sapien
tttcaactgagacttttgaaaaaca

SEQ ID NO: 541922 - DNA, 25 bp, Homo sapien
cactgattgtctgaaagatcaactc

SEQ ID NO: 541923 - DNA, 25 bp, Homo sapien
ggcctcctccgtcattaacctgtct

SEQ ID NO: 541924 - DNA, 25 bp, Homo sapien
taacctgtcttcaacggttacagaa

SEQ ID NO: 541925 - DNA, 25 bp, Homo sapien
gacatcccattcatgatgctctcgt

SEQ ID NO: 541926 - DNA, 25 bp, Homo sapien
tctccacgtcatcatatggaggtat

SEQ ID NO: 541927 - DNA, 25 bp, Homo sapien
cacgtcatcatatggaggtatagtc

SEQ ID NO: 541928 - DNA, 25 bp, Homo sapien
tcagaacccccactggtagattctc

SEQ ID NO: 541929 - DNA, 25 bp, Homo sapien
gtcatcatatggaggtatagtcatc

SEQ ID NO: 541930 - DNA, 25 bp, Homo sapien
caactgggctccatctggccatgat

SEQ ID NO: 541931 - DNA, 25 bp, Homo sapien
tggccatgattgtgctgctctgaga

SEQ ID NO: 541932 - DNA, 25 bp, Homo sapien
tcctctcaaggtcagcgtcaatgta

SEQ ID NO: 541933 - DNA, 25 bp, Homo sapien
gctgctctgagagtagattttcttt

SEQ ID NO: 541934 - DNA, 25 bp, Homo sapien
agttttatttagctccacaatcttg

SEQ ID NO: 541935 - DNA, 25 bp, Homo sapien
ccacaatcttgaagcattttagcat

SEQ ID NO: 541936 - DNA, 25 bp, Homo sapien
gttttatttagctccacaatcttga

SEQ ID NO: 541937 - DNA, 25 bp, Homo sapien
ctccacaatcttgaagcattttagc

SEQ ID NO: 541938 - DNA, 25 bp, Homo sapien
caacaaatgaatgacggttatgtgt

SEQ ID NO: 541939 - DNA, 25 bp, Homo sapien
gacggttatgtgtgctaggtttatg

SEQ ID NO: 541940 - DNA, 25 bp, Homo sapien
aatgaatgacggttatgtgtgctag

SEQ ID NO: 541941 - DNA, 25 bp, Homo sapien
tgaatgacggttatgtgtgctaggt

SEQ ID NO: 541942 - DNA, 25 bp, Homo sapien
ctgggctgtgatgtcatgcacatac

SEQ ID NO: 541943 - DNA, 25 bp, Homo sapien
taaacatgcccgcagctgggctgtg

SEQ ID NO: 541944 - DNA, 25 bp, Homo sapien
aacatgcccgcagctgggctgtgat

SEQ ID NO: 541945 - DNA, 25 bp, Homo sapien
ttagccatgccaccataaacatgcc

SEQ ID NO: 541946 - DNA, 25 bp, Homo sapien
tagcgctagccctatagatgcctgc

SEQ ID NO: 541947 - DNA, 25 bp, Homo sapien
tgaagccactgtagaaccatcagag

SEQ ID NO: 541948 - DNA, 25 bp, Homo sapien
tgcataagctattgagacaccacgc

SEQ ID NO: 541949 - DNA, 25 bp, Homo sapien
tgctaaggacaccaacagcccttga

SEQ ID NO: 541950 - DNA, 25 bp, Homo sapien
acatgtgaagggctaaagttttctt

SEQ ID NO: 541951 - DNA, 25 bp, Homo sapien
tcctggacatgtgaagggctaaagt

SEQ ID NO: 541952 - DNA, 25 bp, Homo sapien
acctttgctacatctaaaatgattt

SEQ ID NO: 541953 - DNA, 25 bp, Homo sapien
ttctttgacctttgctacatctaaa

SEQ ID NO: 541954 - DNA, 25 bp, Homo sapien
caatagaggtcgctttggaagagtt

SEQ ID NO: 541955 - DNA, 25 bp, Homo sapien
gaggtcgctttggaagagttcactg

SEQ ID NO: 541956 - DNA, 25 bp, Homo sapien
aaacagagagcaatagaggtcgctt

SEQ ID NO: 541957 - DNA, 25 bp, Homo sapien
cagagagcaatagaggtcgctttgg

SEQ ID NO: 541958 - DNA, 25 bp, Homo sapien
catctatctgacacataattcttta

SEQ ID NO: 541959 - DNA, 25 bp, Homo sapien
tgtgatcatggtcaaattactccta

SEQ ID NO: 541960 - DNA, 25 bp, Homo sapien
cagtttgcacagaggctggcgagaa

SEQ ID NO: 541961 - DNA, 25 bp, Homo sapien
acctatcccttagggtcattttgag

SEQ ID NO: 541962 - DNA, 25 bp, Homo sapien
cccattgtcctccataggttgaact

SEQ ID NO: 541963 - DNA, 25 bp, Homo sapien
ttcattccccattgtcctccatagg

SEQ ID NO: 541964 - DNA, 25 bp, Homo sapien
gcctgcaggtatggcatggatctac

SEQ ID NO: 541965 - DNA, 25 bp, Homo sapien
tgaactggtgagagatgtatagagc

SEQ ID NO: 541966 - DNA, 25 bp, Homo sapien
aataattaattgaagagcactgaaa

SEQ ID NO: 541967 - DNA, 25 bp, Homo sapien
aaaattattagaatgtagtatgagg

SEQ ID NO: 541968 - DNA, 25 bp, Homo sapien
ttttttattgctaggagacctgcac

SEQ ID NO: 541969 - DNA, 25 bp, Homo sapien
ggttttgtaatattcttacaccata

SEQ ID NO: 541970 - DNA, 25 bp, Homo sapien
gaagacgtgagaactcttggcccct

SEQ ID NO: 541971 - DNA, 25 bp, Homo sapien
tatttaatattagcgggcattgcca

SEQ ID NO: 541972 - DNA, 25 bp, Homo sapien
taaagtggttctactcaggcaggag

SEQ ID NO: 541973 - DNA, 25 bp, Homo sapien
ttccctgaataaggccggtaggtca

SEQ ID NO: 541974 - DNA, 25 bp, Homo sapien
tcagggtcacagacttagaaggggg

SEQ ID NO: 541975 - DNA, 25 bp, Homo sapien
ggaaattttcccagatgattcataa

SEQ ID NO: 541976 - DNA, 25 bp, Homo sapien
tgattcataaagaagcatgtagagt

SEQ ID NO: 541977 - DNA, 25 bp, Homo sapien
gcatgtagagtaaaaacctcagggt

SEQ ID NO: 541978 - DNA, 25 bp, Homo sapien
tctgacctgaaaagctgtcatggtt

SEQ ID NO: 541979 - DNA, 25 bp, Homo sapien
cctgaaaagctgtcatggttcttgt

SEQ ID NO: 541980 - DNA, 25 bp, Homo sapien
aagctgtcatggttcttgtttgtca

SEQ ID NO: 541981 - DNA, 25 bp, Homo sapien
ctgtctgacctgaaaagctgtcatg

SEQ ID NO: 541982 - DNA, 25 bp, Homo sapien
ttcctgtgaagagatcagtgcacaa

SEQ ID NO: 541983 - DNA, 25 bp, Homo sapien
tgcacaaatggagggcggtataatc

SEQ ID NO: 541984 - DNA, 25 bp, Homo sapien
cagtgcacaaatggagggcggtata

SEQ ID NO: 541985 - DNA, 25 bp, Homo sapien
ctgaattcctgtgaagagatcagtg

SEQ ID NO: 541986 - DNA, 25 bp, Homo sapien
gaatttgtatttcccatgggtggtc

SEQ ID NO: 541987 - DNA, 25 bp, Homo sapien
ctaaaaagacccatgttgtgtattg

SEQ ID NO: 541988 - DNA, 25 bp, Homo sapien
ggatggctttgcctccaacagctag

SEQ ID NO: 541989 - DNA, 25 bp, Homo sapien
aaaacagtatcaaatcgctttggga

SEQ ID NO: 541990 - DNA, 25 bp, Homo sapien
ccacaggaaccagtgaaatgtctgg

SEQ ID NO: 541991 - DNA, 25 bp, Homo sapien
caggaaccagtgaaatgtctggaat

SEQ ID NO: 541992 - DNA, 25 bp, Homo sapien
ctggaatacctcttcacacataaat

SEQ ID NO: 541993 - DNA, 25 bp, Homo sapien
ctaatagaggatgcttgatgtttcc

SEQ ID NO: 541994 - DNA, 25 bp, Homo sapien
gaacagagatgacttgggtatagcc

SEQ ID NO: 541995 - DNA, 25 bp, Homo sapien
tatagccttgtctaaatgagtggtg

SEQ ID NO: 541996 - DNA, 25 bp, Homo sapien
taagcctctttaaatccatgaacag

SEQ ID NO: 541997 - DNA, 25 bp, Homo sapien
tatccttctattactaaagatcact

SEQ ID NO: 541998 - DNA, 25 bp, Homo sapien
gttgagagggtcaaatgcattatcc

SEQ ID NO: 541999 - DNA, 25 bp, Homo sapien
acagtgagtctactgtgttgagagg

SEQ ID NO: 542000 - DNA, 25 bp, Homo sapien
ttaggcagagattaacaagccagtg

SEQ ID NO: 542001 - DNA, 25 bp, Homo sapien
caagccagtgaaagtgctctctggg

SEQ ID NO: 542002 - DNA, 25 bp, Homo sapien
aaagccaatggcattatcccaagta

SEQ ID NO: 542003 - DNA, 25 bp, Homo sapien
gccaatggcattatcccaagtactt

SEQ ID NO: 542004 - DNA, 25 bp, Homo sapien
caatggcattatcccaagtactttc

SEQ ID NO: 542005 - DNA, 25 bp, Homo sapien
aagccaatggcattatcccaagtac

SEQ ID NO: 542006 - DNA, 25 bp, Homo sapien
ctgtgtacaatggactgtgatgtct

SEQ ID NO: 542007 - DNA, 25 bp, Homo sapien
gtgatgtcttataggtgtgcttcag

SEQ ID NO: 542008 - DNA, 25 bp, Homo sapien
gctccatgcttgctatctctataga

SEQ ID NO: 542009 - DNA, 25 bp, Homo sapien
gcttgctatctctatagacaggcat

SEQ ID NO: 542010 - DNA, 25 bp, Homo sapien
cagctgtagtctccaccctggtatg

SEQ ID NO: 542011 - DNA, 25 bp, Homo sapien
cctggtatgcaaggactcacactta

SEQ ID NO: 542012 - DNA, 25 bp, Homo sapien
tctgacactcttttgaactggagga

SEQ ID NO: 542013 - DNA, 25 bp, Homo sapien
gtatttgtcttgtagtctgagccac

SEQ ID NO: 542014 - DNA, 25 bp, Homo sapien
gatgctttagtaggattgaatcaga

SEQ ID NO: 542015 - DNA, 25 bp, Homo sapien
tgtgagacgttaaatggttttctca

SEQ ID NO: 542016 - DNA, 25 bp, Homo sapien
gtctccatggaagcaaatgtttcat

SEQ ID NO: 542017 - DNA, 25 bp, Homo sapien
tagaggctttggatgctttagtagg

SEQ ID NO: 542018 - DNA, 25 bp, Homo sapien
tggtcctcagagatgatatcatttt

SEQ ID NO: 542019 - DNA, 25 bp, Homo sapien
tctagaagtatgtcttgctggtcct

SEQ ID NO: 542020 - DNA, 25 bp, Homo sapien
ctggccttttatagtggtgagggaa

SEQ ID NO: 542021 - DNA, 25 bp, Homo sapien
taaaatttacaatcagaggaagctt

SEQ ID NO: 542022 - DNA, 25 bp, Homo sapien
catgtaagggcttctgaatggctgc

SEQ ID NO: 542023 - DNA, 25 bp, Homo sapien
gctctgatgagtttcctatgctggg

SEQ ID NO: 542024 - DNA, 25 bp, Homo sapien
agtgtgtaagtgcatccccttctgg

SEQ ID NO: 542025 - DNA, 25 bp, Homo sapien
aagatccttagaattccagctggct

SEQ ID NO: 542026 - DNA, 25 bp, Homo sapien
attgtcatcatctaaattctccagc

SEQ ID NO: 542027 - DNA, 25 bp, Homo sapien
tccagccctacctgctccagctcca

SEQ ID NO: 542028 - DNA, 25 bp, Homo sapien
attctccagccctacctgctccagc

SEQ ID NO: 542029 - DNA, 25 bp, Homo sapien
ctcattgtcatcatctaaattctcc

SEQ ID NO: 542030 - DNA, 25 bp, Homo sapien
ggcttttccagctactgccacagct

SEQ ID NO: 542031 - DNA, 25 bp, Homo sapien
acaaacctcaacaacttcaagatag

SEQ ID NO: 542032 - DNA, 25 bp, Homo sapien
tggtgtgctgctggtttggttaatt

SEQ ID NO: 542033 - DNA, 25 bp, Homo sapien
cagctactgccacagctacagctgg

SEQ ID NO: 542034 - DNA, 25 bp, Homo sapien
gcaaagtataatattaccctccacc

SEQ ID NO: 542035 - DNA, 25 bp, Homo sapien
tcatagccaccctaggctcatagtt

SEQ ID NO: 542036 - DNA, 25 bp, Homo sapien
ataatattaccctccaccatcatag

SEQ ID NO: 542037 - DNA, 25 bp, Homo sapien
cctaggctcatagtttggcaaagta

SEQ ID NO: 542038 - DNA, 25 bp, Homo sapien
gaagatcggttattataattgccaa

SEQ ID NO: 542039 - DNA, 25 bp, Homo sapien
ccaaaatttgaagatcggttattat

SEQ ID NO: 542040 - DNA, 25 bp, Homo sapien
tttgaagatcggttattataattgc

SEQ ID NO: 542041 - DNA, 25 bp, Homo sapien
aagtcattatagcatccaccacctc

SEQ ID NO: 542042 - DNA, 25 bp, Homo sapien
aaagccacctggaccactgaggttt

SEQ ID NO: 542043 - DNA, 25 bp, Homo sapien
gataaccaaagttgtcatacccacc

SEQ ID NO: 542044 - DNA, 25 bp, Homo sapien
aagcctgctgtcactatatccacca

SEQ ID NO: 542045 - DNA, 25 bp, Homo sapien
ctgaggttttctcgataaccaaagt

SEQ ID NO: 542046 - DNA, 25 bp, Homo sapien
ttaagagccacttcgacctctttgg

SEQ ID NO: 542047 - DNA, 25 bp, Homo sapien
tttaagagccacttcgacctctttg

SEQ ID NO: 542048 - DNA, 25 bp, Homo sapien
agttttaagagccacttcgacctct

SEQ ID NO: 542049 - DNA, 25 bp, Homo sapien
caaatgcaaaccccttttcttgcca

SEQ ID NO: 542050 - DNA, 25 bp, Homo sapien
aacagtcttatccaaggagttatga

SEQ ID NO: 542051 - DNA, 25 bp, Homo sapien
cacctcttggttccacagggctttc

SEQ ID NO: 542052 - DNA, 25 bp, Homo sapien
tcccatcctattcaaagtaatctct

SEQ ID NO: 542053 - DNA, 25 bp, Homo sapien
acaaagatcttttttcacagttaag

SEQ ID NO: 542054 - DNA, 25 bp, Homo sapien
tcttttttcacagttaagtggacac

SEQ ID NO: 542055 - DNA, 25 bp, Homo sapien
cacaaagatcttttttcacagttaa

SEQ ID NO: 542056 - DNA, 25 bp, Homo sapien
agatcttttttcacagttaagtgga

SEQ ID NO: 542057 - DNA, 25 bp, Homo sapien
aattttgtcttagggcagcagctgt

SEQ ID NO: 542058 - DNA, 25 bp, Homo sapien
gaattttgtcttagggcagcagctg

SEQ ID NO: 542059 - DNA, 25 bp, Homo sapien
gtctttggctgcacaactcttctat

SEQ ID NO: 542060 - DNA, 25 bp, Homo sapien
tgagaattttgtcttagggcagcag

SEQ ID NO: 542061 - DNA, 25 bp, Homo sapien
tcctcaaactatctcatgtagagct

SEQ ID NO: 542062 - DNA, 25 bp, Homo sapien
ctcttatactagtctgtgagcattc

SEQ ID NO: 542063 - DNA, 25 bp, Homo sapien
ggtgtttgactcttatactagtctg

SEQ ID NO: 542064 - DNA, 25 bp, Homo sapien
tcatgtagagcttccatagctgtcc

SEQ ID NO: 542065 - DNA, 25 bp, Homo sapien
cacctttatctctaacagattcatg

SEQ ID NO: 542066 - DNA, 25 bp, Homo sapien
tctctaacagattcatggaagactt

SEQ ID NO: 542067 - DNA, 25 bp, Homo sapien
tatctctaacagattcatggaagac

SEQ ID NO: 542068 - DNA, 25 bp, Homo sapien
gattttcacctttatctctaacaga

SEQ ID NO: 542069 - DNA, 25 bp, Homo sapien
ggtgcacatgaagatttcatccaca

SEQ ID NO: 542070 - DNA, 25 bp, Homo sapien
gtgcacatgaagatttcatccacaa

SEQ ID NO: 542071 - DNA, 25 bp, Homo sapien
tggtgcacatgaagatttcatccac

SEQ ID NO: 542072 - DNA, 25 bp, Homo sapien
gaagatttcatccacaatcacagca

SEQ ID NO: 542073 - DNA, 25 bp, Homo sapien
caatgtctgccctcaataatgccat

SEQ ID NO: 542074 - DNA, 25 bp, Homo sapien
tcttttcagtagagatatggctttc

SEQ ID NO: 542075 - DNA, 25 bp, Homo sapien
aacaggcacaattttacaatccaac

SEQ ID NO: 542076 - DNA, 25 bp, Homo sapien
agtagtaacaggcacaattttacaa

SEQ ID NO: 542077 - DNA, 25 bp, Homo sapien
taggtgctttattcagccagtaccg

SEQ ID NO: 542078 - DNA, 25 bp, Homo sapien
gaatctgcgatacacaaattttagg

SEQ ID NO: 542079 - DNA, 25 bp, Homo sapien
acatgcctgttttcttgtgacacat

SEQ ID NO: 542080 - DNA, 25 bp, Homo sapien
gccagtaccgatagcattttgttgt

SEQ ID NO: 542081 - DNA, 25 bp, Homo sapien
atgcagagtggtcgtgctgttgacc

SEQ ID NO: 542082 - DNA, 25 bp, Homo sapien
cattgaggactgtgaagtttttgga

SEQ ID NO: 542083 - DNA, 25 bp, Homo sapien
cgtgctgttgaccaatagccataga

SEQ ID NO: 542084 - DNA, 25 bp, Homo sapien
ccatagagactgtgcattgaggact

SEQ ID NO: 542085 - DNA, 25 bp, Homo sapien
tgagcttcagaatgtcatctacgta

SEQ ID NO: 542086 - DNA, 25 bp, Homo sapien
cttgctggtaatcttcatatgggta

SEQ ID NO: 542087 - DNA, 25 bp, Homo sapien
cttcatatgggtagtttttctcaca

SEQ ID NO: 542088 - DNA, 25 bp, Homo sapien
gcttcagaatgtcatctacgtaatc

SEQ ID NO: 542089 - DNA, 25 bp, Homo sapien
gacaacattgtttttgctgtcagtc

SEQ ID NO: 542090 - DNA, 25 bp, Homo sapien
acaacattgtttttgctgtcagtca

SEQ ID NO: 542091 - DNA, 25 bp, Homo sapien
caacattgtttttgctgtcagtcat

SEQ ID NO: 542092 - DNA, 25 bp, Homo sapien
gactatattacatcttgtactgaag

SEQ ID NO: 542093 - DNA, 25 bp, Homo sapien
ctggtatctgtgtctaagaggaata

SEQ ID NO: 542094 - DNA, 25 bp, Homo sapien
gaagtagcgactggtatctgtgtct

SEQ ID NO: 542095 - DNA, 25 bp, Homo sapien
ttgtactgaagtagcgactggtatc

SEQ ID NO: 542096 - DNA, 25 bp, Homo sapien
tatttgctgggccaaaaaccaagac

SEQ ID NO: 542097 - DNA, 25 bp, Homo sapien
caagaccattggctattgcccagga

SEQ ID NO: 542098 - DNA, 25 bp, Homo sapien
cagttgatgctgagtggaccatctc

SEQ ID NO: 542099 - DNA, 25 bp, Homo sapien
ccttggaataaagaaattgtccatt

SEQ ID NO: 542100 - DNA, 25 bp, Homo sapien
ttaataggaaaatatcctctgtaac

SEQ ID NO: 542101 - DNA, 25 bp, Homo sapien
tgagttgatttcattaataggaaaa

SEQ ID NO: 542102 - DNA, 25 bp, Homo sapien
ttcattaataggaaaatatcctctg

SEQ ID NO: 542103 - DNA, 25 bp, Homo sapien
tgatttcattaataggaaaatatcc

SEQ ID NO: 542104 - DNA, 25 bp, Homo sapien
ctgaatatctagattggagataata

SEQ ID NO: 542105 - DNA, 25 bp, Homo sapien
gaaagtcattgaagggattctgaat

SEQ ID NO: 542106 - DNA, 25 bp, Homo sapien
ctgaaagtcattgaagggattctga

SEQ ID NO: 542107 - DNA, 25 bp, Homo sapien
gtcattgaagggattctgaatatct

SEQ ID NO: 542108 - DNA, 25 bp, Homo sapien
cgaatgtggagtaagggtaagttct

SEQ ID NO: 542109 - DNA, 25 bp, Homo sapien
tatagagtctgtcaacgaatgtgga

SEQ ID NO: 542110 - DNA, 25 bp, Homo sapien
tccatcacctcatcccttgttatag

SEQ ID NO: 542111 - DNA, 25 bp, Homo sapien
tcatcccttgttatagagtctgtca

SEQ ID NO: 542112 - DNA, 25 bp, Homo sapien
agaaactcaaaccaattatggagaa

SEQ ID NO: 542113 - DNA, 25 bp, Homo sapien
ttatggagaatgttcaaggcaaaaa

SEQ ID NO: 542114 - DNA, 25 bp, Homo sapien
gcattagaaactcaaaccaattatg

SEQ ID NO: 542115 - DNA, 25 bp, Homo sapien
aattatggagaatgttcaaggcaaa

SEQ ID NO: 542116 - DNA, 25 bp, Homo sapien
gggagggtccgaggattacagtgaa

SEQ ID NO: 542117 - DNA, 25 bp, Homo sapien
ggcctgatcatcgaatccctgaagg

SEQ ID NO: 542118 - DNA, 25 bp, Homo sapien
accaaggcaacccatgactgggagg

SEQ ID NO: 542119 - DNA, 25 bp, Homo sapien
ttgcctctggcctgatcatcgaatc

SEQ ID NO: 542120 - DNA, 25 bp, Homo sapien
ccaacacatgcattgctgatcttta

SEQ ID NO: 542121 - DNA, 25 bp, Homo sapien
catttcccaacacatgcattgctga

SEQ ID NO: 542122 - DNA, 25 bp, Homo sapien
tttcccaacacatgcattgctgatc

SEQ ID NO: 542123 - DNA, 25 bp, Homo sapien
acacatgcattgctgatctttagcc

SEQ ID NO: 542124 - DNA, 25 bp, Homo sapien
cagttgctgtaccaagaccgtatca

SEQ ID NO: 542125 - DNA, 25 bp, Homo sapien
gggctcaagcagttgctgtaccaag

SEQ ID NO: 542126 - DNA, 25 bp, Homo sapien
tggttgctttggtgatattatcacc

SEQ ID NO: 542127 - DNA, 25 bp, Homo sapien
gatattatcaccaccctttctttgc

SEQ ID NO: 542128 - DNA, 25 bp, Homo sapien
gtcccactcctgatcattatgagag

SEQ ID NO: 542129 - DNA, 25 bp, Homo sapien
gcttttcacaagaacagtcccactc

SEQ ID NO: 542130 - DNA, 25 bp, Homo sapien
caacctggtggtatattaatgtcaa

SEQ ID NO: 542131 - DNA, 25 bp, Homo sapien
cagacattggatcagcatagagcat

SEQ ID NO: 542132 - DNA, 25 bp, Homo sapien
ttccgttctacacattcttattgcc

SEQ ID NO: 542133 - DNA, 25 bp, Homo sapien
taaatcacagttttccgttctacac

SEQ ID NO: 542134 - DNA, 25 bp, Homo sapien
gtactaatttcaggcagtacagctt

SEQ ID NO: 542135 - DNA, 25 bp, Homo sapien
ttttcagctgaggaggattttccct

SEQ ID NO: 542136 - DNA, 25 bp, Homo sapien
caagtgtcttttaacggcagaattt

SEQ ID NO: 542137 - DNA, 25 bp, Homo sapien
caattctttacacaagtgtctttta

SEQ ID NO: 542138 - DNA, 25 bp, Homo sapien
acaagtgtcttttaacggcagaatt

SEQ ID NO: 542139 - DNA, 25 bp, Homo sapien
tggaattgcaccaattttttggctc

SEQ ID NO: 542140 - DNA, 25 bp, Homo sapien
caattttttggctcctaaggccaag

SEQ ID NO: 542141 - DNA, 25 bp, Homo sapien
ctcctaaggccaaggttttcttctg

SEQ ID NO: 542142 - DNA, 25 bp, Homo sapien
ttactgatatttggaattgcaccaa

SEQ ID NO: 542143 - DNA, 25 bp, Homo sapien
ctaaagttctattattagattcaca

SEQ ID NO: 542144 - DNA, 25 bp, Homo sapien
tattagattcacaatctaatcttta

SEQ ID NO: 542145 - DNA, 25 bp, Homo sapien
tagattcacaatctaatctttattt

SEQ ID NO: 542146 - DNA, 25 bp, Homo sapien
agtttctaaagttctattattagat

SEQ ID NO: 542147 - DNA, 25 bp, Homo sapien
cttgttgctgttcttcacttagggt

SEQ ID NO: 542148 - DNA, 25 bp, Homo sapien
ctatccgataaaacggtctgctttt

SEQ ID NO: 542149 - DNA, 25 bp, Homo sapien
cacttagggtgtattgcctcttgtt

SEQ ID NO: 542150 - DNA, 25 bp, Homo sapien
cgataaaacggtctgctttttcttg

SEQ ID NO: 542151 - DNA, 25 bp, Homo sapien
taaagacacatacaacagcaatatt

SEQ ID NO: 542152 - DNA, 25 bp, Homo sapien
aaagacacatacaacagcaatattc

SEQ ID NO: 542153 - DNA, 25 bp, Homo sapien
caacagcaatattcacacagatcat

SEQ ID NO: 542154 - DNA, 25 bp, Homo sapien
tccttctgtgctggacatgtgttct

SEQ ID NO: 542155 - DNA, 25 bp, Homo sapien
tccttccttctgtgctggacatgtg

SEQ ID NO: 542156 - DNA, 25 bp, Homo sapien
ccttccttctgtgctggacatgtgt

SEQ ID NO: 542157 - DNA, 25 bp, Homo sapien
tcagatgtctccttccttctgtgct

SEQ ID NO: 542158 - DNA, 25 bp, Homo sapien
ttgaagtccagttatcaggctacag

SEQ ID NO: 542159 - DNA, 25 bp, Homo sapien
tacagcagcattggactagaccact

SEQ ID NO: 542160 - DNA, 25 bp, Homo sapien
tcaggctacagcagcattggactag

SEQ ID NO: 542161 - DNA, 25 bp, Homo sapien
ttctttcccctgagagtgcctcttc

SEQ ID NO: 542162 - DNA, 25 bp, Homo sapien
gacccaatggctgttcaggagcgtg

SEQ ID NO: 542163 - DNA, 25 bp, Homo sapien
catggttgcttgcacctaaggcctg

SEQ ID NO: 542164 - DNA, 25 bp, Homo sapien
gctcagtctcaggtgtggtcaacca

SEQ ID NO: 542165 - DNA, 25 bp, Homo sapien
gccagtgatgttggactctagcaca

SEQ ID NO: 542166 - DNA, 25 bp, Homo sapien
tgtgactctccttctaattcctacg

SEQ ID NO: 542167 - DNA, 25 bp, Homo sapien
aattcctacgctgtttattataggg

SEQ ID NO: 542168 - DNA, 25 bp, Homo sapien
gaacccaagagaattatacgtatgt

SEQ ID NO: 542169 - DNA, 25 bp, Homo sapien
cacctgagactaggataaggaaact

SEQ ID NO: 542170 - DNA, 25 bp, Homo sapien
tcgaagcttagtgcatgattctcta

SEQ ID NO: 542171 - DNA, 25 bp, Homo sapien
cattggagtctgagtagaagaaacc

SEQ ID NO: 542172 - DNA, 25 bp, Homo sapien
ggcacttttgcttataaactttcga

SEQ ID NO: 542173 - DNA, 25 bp, Homo sapien
gacttgtcaagatggatactctgtc

SEQ ID NO: 542174 - DNA, 25 bp, Homo sapien
ggaaatgggtcaggcgcagtcactc

SEQ ID NO: 542175 - DNA, 25 bp, Homo sapien
ggcaaaagggatatatgtgccatac

SEQ ID NO: 542176 - DNA, 25 bp, Homo sapien
tggacactcctctcactgaaaagtg

SEQ ID NO: 542177 - DNA, 25 bp, Homo sapien
ttgtcttctaatgacactcatcagg

SEQ ID NO: 542178 - DNA, 25 bp, Homo sapien
tccaagcaccatcctgttagggagg

SEQ ID NO: 542179 - DNA, 25 bp, Homo sapien
catcaggccttactttatgcagtca

SEQ ID NO: 542180 - DNA, 25 bp, Homo sapien
tagtctaatgttactgaaacccagg

SEQ ID NO: 542181 - DNA, 25 bp, Homo sapien
ttgacagggattacaaaaacactgg

SEQ ID NO: 542182 - DNA, 25 bp, Homo sapien
gaaattccgaagcagcatctaacat

SEQ ID NO: 542183 - DNA, 25 bp, Homo sapien
agtatcagattgtcttgtaccagga

SEQ ID NO: 542184 - DNA, 25 bp, Homo sapien
gattgtcttgtaccaggagcagaac

SEQ ID NO: 542185 - DNA, 25 bp, Homo sapien
agattgtcttgtaccaggagcagaa

SEQ ID NO: 542186 - DNA, 25 bp, Homo sapien
ttgagtatcagattgtcttgtacca

SEQ ID NO: 542187 - DNA, 25 bp, Homo sapien
ctccctatgggacatacagacagag

SEQ ID NO: 542188 - DNA, 25 bp, Homo sapien
cagttactgaatgtggtgagtccag

SEQ ID NO: 542189 - DNA, 25 bp, Homo sapien
tgagtccagatatctgccctcaata

SEQ ID NO: 542190 - DNA, 25 bp, Homo sapien
gacttctttgtgacctccctatggg

SEQ ID NO: 542191 - DNA, 25 bp, Homo sapien
gaaaatcaagtggtagtacctgtgc

SEQ ID NO: 542192 - DNA, 25 bp, Homo sapien
taccagaaaatcaagtggtagtacc

SEQ ID NO: 542193 - DNA, 25 bp, Homo sapien
atcaagtggtagtacctgtgctaaa

SEQ ID NO: 542194 - DNA, 25 bp, Homo sapien
ccagaaaatcaagtggtagtacctg

SEQ ID NO: 542195 - DNA, 25 bp, Homo sapien
ttcattagtgcagggcaggaattgg

SEQ ID NO: 542196 - DNA, 25 bp, Homo sapien
gagcactacctttattcattagtgc

SEQ ID NO: 542197 - DNA, 25 bp, Homo sapien
ctttattcattagtgcagggcagga

SEQ ID NO: 542198 - DNA, 25 bp, Homo sapien
ttacagtaaccatgacagcagtgcc

SEQ ID NO: 542199 - DNA, 25 bp, Homo sapien
gggtcaagtaactagagatctgaca

SEQ ID NO: 542200 - DNA, 25 bp, Homo sapien
tgatttgaggtttggagcagtaccc

SEQ ID NO: 542201 - DNA, 25 bp, Homo sapien
gacacaagggtgcaatccaatatga

SEQ ID NO: 542202 - DNA, 25 bp, Homo sapien
tgtctctcctgacccacaaataggg

SEQ ID NO: 542203 - DNA, 25 bp, Homo sapien
tatgtgtgccatcagtaaactgttt

SEQ ID NO: 542204 - DNA, 25 bp, Homo sapien
atatgtgtgccatcagtaaactgtt

SEQ ID NO: 542205 - DNA, 25 bp, Homo sapien
aaggcacaccttgtattcctttctc

SEQ ID NO: 542206 - DNA, 25 bp, Homo sapien
tacccatatgtctggacaatatccc

SEQ ID NO: 542207 - DNA, 25 bp, Homo sapien
ttaaatttccgctatcactggcttc

SEQ ID NO: 542208 - DNA, 25 bp, Homo sapien
tagcaagtggatgggacaaggcaca

SEQ ID NO: 542209 - DNA, 25 bp, Homo sapien
taggtgttgtacacactgttactgg

SEQ ID NO: 542210 - DNA, 25 bp, Homo sapien
ttgtaatctcaaaaagcaactgggt

SEQ ID NO: 542211 - DNA, 25 bp, Homo sapien
caaatcatgaatcacaagagatgtg

SEQ ID NO: 542212 - DNA, 25 bp, Homo sapien
tttttgacacaaaaggctatcctgg

SEQ ID NO: 542213 - DNA, 25 bp, Homo sapien
tattggtcagggaagcatcctatgt

SEQ ID NO: 542214 - DNA, 25 bp, Homo sapien
gagggatgagaagattaatcgctcc

SEQ ID NO: 542215 - DNA, 25 bp, Homo sapien
tacagtaatccacctacagcagaat

SEQ ID NO: 542216 - DNA, 25 bp, Homo sapien
gaaattaccactttaggattgaagc

SEQ ID NO: 542217 - DNA, 25 bp, Homo sapien
gaacacttgatagtgctcatggtct

SEQ ID NO: 542218 - DNA, 25 bp, Homo sapien
taacagagaacacttgatagtgctc

SEQ ID NO: 542219 - DNA, 25 bp, Homo sapien
cacttgatagtgctcatggtcttca

SEQ ID NO: 542220 - DNA, 25 bp, Homo sapien
tgatagtgctcatggtcttcactta

SEQ ID NO: 542221 - DNA, 25 bp, Homo sapien
ccttgagtgaagaatacatttgcat

SEQ ID NO: 542222 - DNA, 25 bp, Homo sapien
ttaacatgcagacccttgagtgaag

SEQ ID NO: 542223 - DNA, 25 bp, Homo sapien
tattatcatgtttgaacattcttgt

SEQ ID NO: 542224 - DNA, 25 bp, Homo sapien
tttgcctgcctaatgctattatcat

SEQ ID NO: 542225 - DNA, 25 bp, Homo sapien
cttactattctttgtagcacggaaa

SEQ ID NO: 542226 - DNA, 25 bp, Homo sapien
ttgtagcacggaaatttagcatagg

SEQ ID NO: 542227 - DNA, 25 bp, Homo sapien
tattctttgtagcacggaaatttag

SEQ ID NO: 542228 - DNA, 25 bp, Homo sapien
ttcttactattctttgtagcacgga

SEQ ID NO: 542229 - DNA, 25 bp, Homo sapien
cagtcgtccttttaaatcaggtgtc

SEQ ID NO: 542230 - DNA, 25 bp, Homo sapien
cagattctgaagtcaatcagtcgtc

SEQ ID NO: 542231 - DNA, 25 bp, Homo sapien
ccaactatcccaagattgattaaga

SEQ ID NO: 542232 - DNA, 25 bp, Homo sapien
taaatcaggtgtccaactatcccaa

SEQ ID NO: 542233 - DNA, 25 bp, Homo sapien
gtaataagtcgatagaaagcccaca

SEQ ID NO: 542234 - DNA, 25 bp, Homo sapien
ccagtcagggtatctaggtaataag

SEQ ID NO: 542235 - DNA, 25 bp, Homo sapien
gaaagcccacatcatttgaggaaga

SEQ ID NO: 542236 - DNA, 25 bp, Homo sapien
cagttccagtcagggtatctaggta

SEQ ID NO: 542237 - DNA, 25 bp, Homo sapien
gataccattcgtacatcctctgaag

SEQ ID NO: 542238 - DNA, 25 bp, Homo sapien
tgataccattcgtacatcctctgaa

SEQ ID NO: 542239 - DNA, 25 bp, Homo sapien
ataccattcgtacatcctctgaagc

SEQ ID NO: 542240 - DNA, 25 bp, Homo sapien
atgataccattcgtacatcctctga

SEQ ID NO: 542241 - DNA, 25 bp, Homo sapien
ggtccgtgtcacagatagtgcccat

SEQ ID NO: 542242 - DNA, 25 bp, Homo sapien
taggagactccaccagcataaggca

SEQ ID NO: 542243 - DNA, 25 bp, Homo sapien
tctgttttcagaccacctgggtagg

SEQ ID NO: 542244 - DNA, 25 bp, Homo sapien
tgccaaggccgtttgtaggagactc

SEQ ID NO: 542245 - DNA, 25 bp, Homo sapien
tgacaattctttttccccgcctgtc

SEQ ID NO: 542246 - DNA, 25 bp, Homo sapien
cctcagtgtccttggttgggatacc

SEQ ID NO: 542247 - DNA, 25 bp, Homo sapien
gatacctgaaggtaagttatccaca

SEQ ID NO: 542248 - DNA, 25 bp, Homo sapien
gagtcatgcggcttcccaacatggc

SEQ ID NO: 542249 - DNA, 25 bp, Homo sapien
gacaagggctgaaaacgacctgttg

SEQ ID NO: 542250 - DNA, 25 bp, Homo sapien
tggtaacaaggtttacaactcatcg

SEQ ID NO: 542251 - DNA, 25 bp, Homo sapien
agaaactagggactaatagacaggg

SEQ ID NO: 542252 - DNA, 25 bp, Homo sapien
gggatcataagtaccccaaacttca

SEQ ID NO: 542253 - DNA, 25 bp, Homo sapien
gttcctttctacattctagctcatt

SEQ ID NO: 542254 - DNA, 25 bp, Homo sapien
tcctttctacattctagctcattga

SEQ ID NO: 542255 - DNA, 25 bp, Homo sapien
ttcctttctacattctagctcattg

SEQ ID NO: 542256 - DNA, 25 bp, Homo sapien
agttcctttctacattctagctcat

SEQ ID NO: 542257 - DNA, 25 bp, Homo sapien
cagacaaacgcagatggagaccaga

SEQ ID NO: 542258 - DNA, 25 bp, Homo sapien
tacaacagaagtgagtttggcagcc

SEQ ID NO: 542259 - DNA, 25 bp, Homo sapien
ttctaatctggctgggtgccctgac

SEQ ID NO: 542260 - DNA, 25 bp, Homo sapien
agaccagaagccaaataacatgagg

SEQ ID NO: 542261 - DNA, 25 bp, Homo sapien
catcttccataaccctatccaaggg

SEQ ID NO: 542262 - DNA, 25 bp, Homo sapien
ctgcatcttccataaccctatccaa

SEQ ID NO: 542263 - DNA, 25 bp, Homo sapien
cataaccctatccaagggggagtgc

SEQ ID NO: 542264 - DNA, 25 bp, Homo sapien
gtaaatctggctgaaaaactgccca

SEQ ID NO: 542265 - DNA, 25 bp, Homo sapien
ccccaggttattaaaatcgcagcca

SEQ ID NO: 542266 - DNA, 25 bp, Homo sapien
ctgcttacactaataagctttgtgt

SEQ ID NO: 542267 - DNA, 25 bp, Homo sapien
ccaggttattaaaatcgcagccatc

SEQ ID NO: 542268 - DNA, 25 bp, Homo sapien
ggccccaggttattaaaatcgcagc

SEQ ID NO: 542269 - DNA, 25 bp, Homo sapien
ttattaagatatgcatgagaaacat

SEQ ID NO: 542270 - DNA, 25 bp, Homo sapien
atatgcatgagaaacattgcagcag

SEQ ID NO: 542271 - DNA, 25 bp, Homo sapien
aagatatgcatgagaaacattgcag

SEQ ID NO: 542272 - DNA, 25 bp, Homo sapien
ttaagatatgcatgagaaacattgc

SEQ ID NO: 542273 - DNA, 25 bp, Homo sapien
actgattcctgaatgtcaagtcccc

SEQ ID NO: 542274 - DNA, 25 bp, Homo sapien
aaatgtcagctgtcctcagtaagaa

SEQ ID NO: 542275 - DNA, 25 bp, Homo sapien
aatgtcagctgtcctcagtaagaac

SEQ ID NO: 542276 - DNA, 25 bp, Homo sapien
gattcctgaatgtcaagtccccaag

SEQ ID NO: 542277 - DNA, 25 bp, Homo sapien
aacccattgtccacaataatagcga

SEQ ID NO: 542278 - DNA, 25 bp, Homo sapien
tgtccacaataatagcgaatgattt

SEQ ID NO: 542279 - DNA, 25 bp, Homo sapien
accccactgcctcctaacccattgt

SEQ ID NO: 542280 - DNA, 25 bp, Homo sapien
actccagtctccaaaaccccactgc

SEQ ID NO: 542281 - DNA, 25 bp, Homo sapien
tcagcctctaaggaatcagggcact

SEQ ID NO: 542282 - DNA, 25 bp, Homo sapien
acacaaatatcagcctctaaggaat

SEQ ID NO: 542283 - DNA, 25 bp, Homo sapien
caaatatcagcctctaaggaatcag

SEQ ID NO: 542284 - DNA, 25 bp, Homo sapien
tatcagcctctaaggaatcagggca

SEQ ID NO: 542285 - DNA, 25 bp, Homo sapien
tggtaagcctagtgaaaacaatcct

SEQ ID NO: 542286 - DNA, 25 bp, Homo sapien
tctaaaggagttcaacatgcaatgg

SEQ ID NO: 542287 - DNA, 25 bp, Homo sapien
gatatgcagctttgattagtaggac

SEQ ID NO: 542288 - DNA, 25 bp, Homo sapien
taggtaacgctacagagatccttgt

SEQ ID NO: 542289 - DNA, 25 bp, Homo sapien
acctgctctcccaatattcaaggaa

SEQ ID NO: 542290 - DNA, 25 bp, Homo sapien
ggcacctgctctcccaatattcaag

SEQ ID NO: 542291 - DNA, 25 bp, Homo sapien
tcaaggttgcttgatgactaccaca

SEQ ID NO: 542292 - DNA, 25 bp, Homo sapien
tgcttgatgactaccacacaggcac

SEQ ID NO: 542293 - DNA, 25 bp, Homo sapien
ggattccatagtgttgaggtatgtc

SEQ ID NO: 542294 - DNA, 25 bp, Homo sapien
cactcattagtttgtgggtcatagg

SEQ ID NO: 542295 - DNA, 25 bp, Homo sapien
ctgtgtccactcattagtttgtggg

SEQ ID NO: 542296 - DNA, 25 bp, Homo sapien
tgtgggtcataggattccatagtgt

SEQ ID NO: 542297 - DNA, 25 bp, Homo sapien
agcatctctgggcatactcaaagga

SEQ ID NO: 542298 - DNA, 25 bp, Homo sapien
ccaacagcatctctgggcatactca

SEQ ID NO: 542299 - DNA, 25 bp, Homo sapien
gtcaccaaggagacagaccccaaca

SEQ ID NO: 542300 - DNA, 25 bp, Homo sapien
catctctgggcatactcaaaggagc

SEQ ID NO: 542301 - DNA, 25 bp, Homo sapien
ccaagtgtctgttttgggatcatat

SEQ ID NO: 542302 - DNA, 25 bp, Homo sapien
ggtccaagtgtctgttttgggatca

SEQ ID NO: 542303 - DNA, 25 bp, Homo sapien
gtccaagtgtctgttttgggatcat

SEQ ID NO: 542304 - DNA, 25 bp, Homo sapien
tccaagtgtctgttttgggatcata

SEQ ID NO: 542305 - DNA, 25 bp, Homo sapien
aatattccattgaactcaaacagga

SEQ ID NO: 542306 - DNA, 25 bp, Homo sapien
tacataatccagtagccgggaacag

SEQ ID NO: 542307 - DNA, 25 bp, Homo sapien
tcctcttacacatgggagcacacat

SEQ ID NO: 542308 - DNA, 25 bp, Homo sapien
ccgggaacagtgatttgaagcagga

SEQ ID NO: 542309 - DNA, 25 bp, Homo sapien
accaactgtgctccgagcaattgac

SEQ ID NO: 542310 - DNA, 25 bp, Homo sapien
caactgtgctccgagcaattgacat

SEQ ID NO: 542311 - DNA, 25 bp, Homo sapien
caccaactgtgctccgagcaattga

SEQ ID NO: 542312 - DNA, 25 bp, Homo sapien
ccaactgtgctccgagcaattgaca

SEQ ID NO: 542313 - DNA, 25 bp, Homo sapien
atagggccttcaagtactgttacac

SEQ ID NO: 542314 - DNA, 25 bp, Homo sapien
tcccacagcataaatagggccttca

SEQ ID NO: 542315 - DNA, 25 bp, Homo sapien
ccacagcataaatagggccttcaag

SEQ ID NO: 542316 - DNA, 25 bp, Homo sapien
cataaatagggccttcaagtactgt

SEQ ID NO: 542317 - DNA, 25 bp, Homo sapien
gaatgcaaccatggtttgataattt

SEQ ID NO: 542318 - DNA, 25 bp, Homo sapien
caagctgcaaagaatgcaaccatgg

SEQ ID NO: 542319 - DNA, 25 bp, Homo sapien
gctgcaaagaatgcaaccatggttt

SEQ ID NO: 542320 - DNA, 25 bp, Homo sapien
gcaaagaatgcaaccatggtttgat

SEQ ID NO: 542321 - DNA, 25 bp, Homo sapien
ctactgtcctactatctgatcattc

SEQ ID NO: 542322 - DNA, 25 bp, Homo sapien
tactgtcctactatctgatcattct

SEQ ID NO: 542323 - DNA, 25 bp, Homo sapien
tgtcctactatctgatcattcttac

SEQ ID NO: 542324 - DNA, 25 bp, Homo sapien
actgtcctactatctgatcattctt

SEQ ID NO: 542325 - DNA, 25 bp, Homo sapien
gacaataagttgagctacttctcct

SEQ ID NO: 542326 - DNA, 25 bp, Homo sapien
taaggccaatagtgtgcttccaaca

SEQ ID NO: 542327 - DNA, 25 bp, Homo sapien
acatatatagacatcagtgttcttg

SEQ ID NO: 542328 - DNA, 25 bp, Homo sapien
tggaaagcaaggcttgtatttcact

SEQ ID NO: 542329 - DNA, 25 bp, Homo sapien
ggagaatgtaacttagagctaccta

SEQ ID NO: 542330 - DNA, 25 bp, Homo sapien
gcattgtcaaaggttgaagcaacat

SEQ ID NO: 542331 - DNA, 25 bp, Homo sapien
tgtcaaaggttgaagcaacattaag

SEQ ID NO: 542332 - DNA, 25 bp, Homo sapien
tggaggagaatgtaacttagagcta

SEQ ID NO: 542333 - DNA, 25 bp, Homo sapien
ggttgccaccaatccactacaaaat

SEQ ID NO: 542334 - DNA, 25 bp, Homo sapien
gacatgataactaactctagaccag

SEQ ID NO: 542335 - DNA, 25 bp, Homo sapien
catggtgccaatattaccttgatac

SEQ ID NO: 542336 - DNA, 25 bp, Homo sapien
gatacctaaaccagacagagacatg

SEQ ID NO: 542337 - DNA, 25 bp, Homo sapien
tctcgacctccaattacaaagagtt

SEQ ID NO: 542338 - DNA, 25 bp, Homo sapien
gacagtccatgtcttggttttggga

SEQ ID NO: 542339 - DNA, 25 bp, Homo sapien
caataacagccacaccaaactgcag

SEQ ID NO: 542340 - DNA, 25 bp, Homo sapien
ttgacattggtggtaagacagtcca

SEQ ID NO: 542341 - DNA, 25 bp, Homo sapien
cagatcatatttctctatagttgta

SEQ ID NO: 542342 - DNA, 25 bp, Homo sapien
gatcatatttctctatagttgtagc

SEQ ID NO: 542343 - DNA, 25 bp, Homo sapien
ttctcagatcatatttctctatagt

SEQ ID NO: 542344 - DNA, 25 bp, Homo sapien
tcatatttctctatagttgtagctc

SEQ ID NO: 542345 - DNA, 25 bp, Homo sapien
cagctctaggcttagagaccttgca

SEQ ID NO: 542346 - DNA, 25 bp, Homo sapien
gaaatgattgattcataagcagctc

SEQ ID NO: 542347 - DNA, 25 bp, Homo sapien
gaccttgcaatgcatgtgggctgag

SEQ ID NO: 542348 - DNA, 25 bp, Homo sapien
tagagaccttgcaatgcatgtgggc

SEQ ID NO: 542349 - DNA, 25 bp, Homo sapien
tcctacagcatacaaagttccgact

SEQ ID NO: 542350 - DNA, 25 bp, Homo sapien
tctgggtttagttctcggactttgc

SEQ ID NO: 542351 - DNA, 25 bp, Homo sapien
tgttgttatccattcctcctacagc

SEQ ID NO: 542352 - DNA, 25 bp, Homo sapien
ctttctggcaatagatggtatttca

SEQ ID NO: 542353 - DNA, 25 bp, Homo sapien
tcttttgatcaacatcagtgaaata

SEQ ID NO: 542354 - DNA, 25 bp, Homo sapien
ctcttttgatcaacatcagtgaaat

SEQ ID NO: 542355 - DNA, 25 bp, Homo sapien
ttttgatcaacatcagtgaaataag

SEQ ID NO: 542356 - DNA, 25 bp, Homo sapien
tgatcaacatcagtgaaataagttc

SEQ ID NO: 542357 - DNA, 25 bp, Homo sapien
ggttcccgcattttcaccatagttc

SEQ ID NO: 542358 - DNA, 25 bp, Homo sapien
catgggttacgagctccagtagggc

SEQ ID NO: 542359 - DNA, 25 bp, Homo sapien
accatagttcgagttctctgagtcc

SEQ ID NO: 542360 - DNA, 25 bp, Homo sapien
taggatatgctaaaaaggttcccgc

SEQ ID NO: 542361 - DNA, 25 bp, Homo sapien
agaggtaataagagggcttcgtaat

SEQ ID NO: 542362 - DNA, 25 bp, Homo sapien
cagacacaaatttagaggtaataag

SEQ ID NO: 542363 - DNA, 25 bp, Homo sapien
gagggcttcgtaattcagaacacca

SEQ ID NO: 542364 - DNA, 25 bp, Homo sapien
taataagagggcttcgtaattcaga

SEQ ID NO: 542365 - DNA, 25 bp, Homo sapien
gaataagaaagctatatgcagccat

SEQ ID NO: 542366 - DNA, 25 bp, Homo sapien
tcagttactgcagctcttttgtcac

SEQ ID NO: 542367 - DNA, 25 bp, Homo sapien
tttcagttactgcagctcttttgtc

SEQ ID NO: 542368 - DNA, 25 bp, Homo sapien
ttgtttcagttactgcagctctttt

SEQ ID NO: 542369 - DNA, 25 bp, Homo sapien
gcagcccacattgagtctttcaaat

SEQ ID NO: 542370 - DNA, 25 bp, Homo sapien
gaattttgtaagcagcccacattga

SEQ ID NO: 542371 - DNA, 25 bp, Homo sapien
ttggtgaggaattttgtaagcagcc

SEQ ID NO: 542372 - DNA, 25 bp, Homo sapien
tatactcttgtcttggtcagtgttt

SEQ ID NO: 542373 - DNA, 25 bp, Homo sapien
aattggccatttacatctgcaggaa

SEQ ID NO: 542374 - DNA, 25 bp, Homo sapien
ctgaaattggccatttacatctgca

SEQ ID NO: 542375 - DNA, 25 bp, Homo sapien
ggccatttacatctgcaggaattac

SEQ ID NO: 542376 - DNA, 25 bp, Homo sapien
gaaattggccatttacatctgcagg

SEQ ID NO: 542377 - DNA, 25 bp, Homo sapien
tcaggaacattgacatcatcactgg

SEQ ID NO: 542378 - DNA, 25 bp, Homo sapien
aagcagtggcagtcttataaaggca

SEQ ID NO: 542379 - DNA, 25 bp, Homo sapien
gacccacatcatcaatgcatggaag

SEQ ID NO: 542380 - DNA, 25 bp, Homo sapien
agcatgctcaggtcattgcatctac

SEQ ID NO: 542381 - DNA, 25 bp, Homo sapien
cacattgccttgaggtctgtacaag

SEQ ID NO: 542382 - DNA, 25 bp, Homo sapien
caccagaccaacttctattcacatt

SEQ ID NO: 542383 - DNA, 25 bp, Homo sapien
atctttagccatgatggagttgtcc

SEQ ID NO: 542384 - DNA, 25 bp, Homo sapien
gtatcattggccagcgtaatcctgc

SEQ ID NO: 542385 - DNA, 25 bp, Homo sapien
caatacgatctggtctaataagcgc

SEQ ID NO: 542386 - DNA, 25 bp, Homo sapien
ccaatcaatctcaacaaagtggctg

SEQ ID NO: 542387 - DNA, 25 bp, Homo sapien
tgcaactaatttggtcgacaaggtt

SEQ ID NO: 542388 - DNA, 25 bp, Homo sapien
tagagaatgatctccttagaggact

SEQ ID NO: 542389 - DNA, 25 bp, Homo sapien
ttgcggttgagcagaaccaagcagc

SEQ ID NO: 542390 - DNA, 25 bp, Homo sapien
ccttgcggttgagcagaaccaagca

SEQ ID NO: 542391 - DNA, 25 bp, Homo sapien
accctaactagcacctctatcatgg

SEQ ID NO: 542392 - DNA, 25 bp, Homo sapien
cttcttcaccctaactagcacctct

SEQ ID NO: 542393 - DNA, 25 bp, Homo sapien
tcacaaatgtagacacggtggtatg

SEQ ID NO: 542394 - DNA, 25 bp, Homo sapien
ctactgatgtcagagtctccttcag

SEQ ID NO: 542395 - DNA, 25 bp, Homo sapien
ttgctttcttcttcttgcttttctt

SEQ ID NO: 542396 - DNA, 25 bp, Homo sapien
ttcggatcttgctttcttcttcttg

SEQ ID NO: 542397 - DNA, 25 bp, Homo sapien
atcttgctttcttcttcttgctttt

SEQ ID NO: 542398 - DNA, 25 bp, Homo sapien
tcggatcttgctttcttcttcttgc

SEQ ID NO: 542399 - DNA, 25 bp, Homo sapien
tcatttgttccttatatataatgaa

SEQ ID NO: 542400 - DNA, 25 bp, Homo sapien
attctaacttcaataattttaacag

SEQ ID NO: 542401 - DNA, 25 bp, Homo sapien
tgagaaggtagtctttaattctaac

SEQ ID NO: 542402 - DNA, 25 bp, Homo sapien
gtttcatttgttccttatatataat

SEQ ID NO: 542403 - DNA, 25 bp, Homo sapien
tgagtaggctcaaatcttggctgca

SEQ ID NO: 542404 - DNA, 25 bp, Homo sapien
gagtaggctcaaatcttggctgcag

SEQ ID NO: 542405 - DNA, 25 bp, Homo sapien
taaccaacttatgttgttttagcac

SEQ ID NO: 542406 - DNA, 25 bp, Homo sapien
atgttgttttagcaccaacttggca

SEQ ID NO: 542407 - DNA, 25 bp, Homo sapien
gtttctgcataacaattaaccaact

SEQ ID NO: 542408 - DNA, 25 bp, Homo sapien
cctgttttaacatatccataaggtc

SEQ ID NO: 542409 - DNA, 25 bp, Homo sapien
cattgtgtagctgtgggccaccttc

SEQ ID NO: 542410 - DNA, 25 bp, Homo sapien
tcctaaacagttagatggatgcaaa

SEQ ID NO: 542411 - DNA, 25 bp, Homo sapien
tgcgaaggctcgaattcctaaacag

SEQ ID NO: 542412 - DNA, 25 bp, Homo sapien
gctgaagaaggcacgctgcagcaag

SEQ ID NO: 542413 - DNA, 25 bp, Homo sapien
gaaaatcagacggaagacctacatg

SEQ ID NO: 542414 - DNA, 25 bp, Homo sapien
ggtgacttcctgtaatctaattaac

SEQ ID NO: 542415 - DNA, 25 bp, Homo sapien
tgctgatggcatggtttctattgac

SEQ ID NO: 542416 - DNA, 25 bp, Homo sapien
agttgtcaagaagacggttgcatgc

SEQ ID NO: 542417 - DNA, 25 bp, Homo sapien
tattttgccgtaacaattcatagcc

SEQ ID NO: 542418 - DNA, 25 bp, Homo sapien
gtagagacatgctgtgcttagaagc

SEQ ID NO: 542419 - DNA, 25 bp, Homo sapien
tgctgagtcttgtgaagtatcccag

SEQ ID NO: 542420 - DNA, 25 bp, Homo sapien
gggatcacccaacatagcattctaa

SEQ ID NO: 542421 - DNA, 25 bp, Homo sapien
tgaacttgaatcagcccacagaagc

SEQ ID NO: 542422 - DNA, 25 bp, Homo sapien
gccagattttcgcaagttagtagga

SEQ ID NO: 542423 - DNA, 25 bp, Homo sapien
tgcagagctcttccgtcttgagatg

SEQ ID NO: 542424 - DNA, 25 bp, Homo sapien
caacacctgtgtttatggtgaggaa

SEQ ID NO: 542425 - DNA, 25 bp, Homo sapien
ctcctcttgcttggcttcacaaaca

SEQ ID NO: 542426 - DNA, 25 bp, Homo sapien
gtcggagactgaactcagaacaagc

SEQ ID NO: 542427 - DNA, 25 bp, Homo sapien
agagcattggggtctatgccttcca

SEQ ID NO: 542428 - DNA, 25 bp, Homo sapien
tgtaaacatggccgcaaaatagtcg

SEQ ID NO: 542429 - DNA, 25 bp, Homo sapien
tatctttcggttcccaacaatcagg

SEQ ID NO: 542430 - DNA, 25 bp, Homo sapien
ttcccaacaatcaggataacatcac

SEQ ID NO: 542431 - DNA, 25 bp, Homo sapien
tgtgcaggtatctttcggttcccaa

SEQ ID NO: 542432 - DNA, 25 bp, Homo sapien
ataacatcacaaagttgctgctgct

SEQ ID NO: 542433 - DNA, 25 bp, Homo sapien
ctttctgaaggtttgctcagcatga

SEQ ID NO: 542434 - DNA, 25 bp, Homo sapien
tgaacagcttgatagaattcttcag

SEQ ID NO: 542435 - DNA, 25 bp, Homo sapien
gcttgatagaattcttcagagctac

SEQ ID NO: 542436 - DNA, 25 bp, Homo sapien
tctgaaggtttgctcagcatgatga

SEQ ID NO: 542437 - DNA, 25 bp, Homo sapien
ggattaagaaactcactcaaaacca

SEQ ID NO: 542438 - DNA, 25 bp, Homo sapien
ttaagaaactcactcaaaaccactc

SEQ ID NO: 542439 - DNA, 25 bp, Homo sapien
agaaactcactcaaaaccactcaac

SEQ ID NO: 542440 - DNA, 25 bp, Homo sapien
aaactcactcaaaaccactcaacta

SEQ ID NO: 542441 - DNA, 25 bp, Homo sapien
tagtattgcaattctggcctgaaca

SEQ ID NO: 542442 - DNA, 25 bp, Homo sapien
tgctgttgcagttgagaactcaata

SEQ ID NO: 542443 - DNA, 25 bp, Homo sapien
cactggagaggttgctaggttttta

SEQ ID NO: 542444 - DNA, 25 bp, Homo sapien
gatattctgttatatacccggcttt

SEQ ID NO: 542445 - DNA, 25 bp, Homo sapien
tactctctgatgttgcacaagggca

SEQ ID NO: 542446 - DNA, 25 bp, Homo sapien
tatgactcacagaataaccttggga

SEQ ID NO: 542447 - DNA, 25 bp, Homo sapien
gtttttcaatagtcagcacaccagg

SEQ ID NO: 542448 - DNA, 25 bp, Homo sapien
gaaaattgcctcatcctggtaaagg

SEQ ID NO: 542449 - DNA, 25 bp, Homo sapien
ggctgccacaatccaatttgtagct

SEQ ID NO: 542450 - DNA, 25 bp, Homo sapien
tagctttttccttagagtccattcc

SEQ ID NO: 542451 - DNA, 25 bp, Homo sapien
tcagattttctcttcacactgaggc

SEQ ID NO: 542452 - DNA, 25 bp, Homo sapien
tctcttcacactgaggctgccacaa

SEQ ID NO: 542453 - DNA, 25 bp, Homo sapien
cattcttgcttcttaatgtattaaa

SEQ ID NO: 542454 - DNA, 25 bp, Homo sapien
gtctctgtggacaagcatactattt

SEQ ID NO: 542455 - DNA, 25 bp, Homo sapien
tctctgtggacaagcatactatttt

SEQ ID NO: 542456 - DNA, 25 bp, Homo sapien
ttatcattcttgcttcttaatgtat

SEQ ID NO: 542457 - DNA, 25 bp, Homo sapien
gtataatagagattcttagaccact

SEQ ID NO: 542458 - DNA, 25 bp, Homo sapien
tctaatgaagggaattaactcaatc

SEQ ID NO: 542459 - DNA, 25 bp, Homo sapien
gaaggatttacagagctgacaaagc

SEQ ID NO: 542460 - DNA, 25 bp, Homo sapien
agctcctcatgtctgtctagcatgc

SEQ ID NO: 542461 - DNA, 25 bp, Homo sapien
gttttcttgctgatcgccagtgcag

SEQ ID NO: 542462 - DNA, 25 bp, Homo sapien
ccaatctctggctcagtaggtaaaa

SEQ ID NO: 542463 - DNA, 25 bp, Homo sapien
cagtgcaggttcacaccaggatgtg

SEQ ID NO: 542464 - DNA, 25 bp, Homo sapien
gaagggatttgtggataggtaccaa

SEQ ID NO: 542465 - DNA, 25 bp, Homo sapien
tgcaacattgtatggcacttcataa

SEQ ID NO: 542466 - DNA, 25 bp, Homo sapien
ggcttgactacctaccacaaaataa

SEQ ID NO: 542467 - DNA, 25 bp, Homo sapien
tatttaaacaccacattatacccca

SEQ ID NO: 542468 - DNA, 25 bp, Homo sapien
ggataacaacatgtgctttatgaaa

SEQ ID NO: 542469 - DNA, 25 bp, Homo sapien
tgaatccctttaacaccagtgtcag

SEQ ID NO: 542470 - DNA, 25 bp, Homo sapien
aatatagtttgatatctttcttaga

SEQ ID NO: 542471 - DNA, 25 bp, Homo sapien
tcagcaggtgtcgaataggatacag

SEQ ID NO: 542472 - DNA, 25 bp, Homo sapien
tatcattttgacttcatctttcctg

SEQ ID NO: 542473 - DNA, 25 bp, Homo sapien
taattcatcaatctgctgcaggagt

SEQ ID NO: 542474 - DNA, 25 bp, Homo sapien
tcatcaatctgctgcaggagtacat

SEQ ID NO: 542475 - DNA, 25 bp, Homo sapien
attcatcaatctgctgcaggagtac

SEQ ID NO: 542476 - DNA, 25 bp, Homo sapien
atcaatctgctgcaggagtacatca

SEQ ID NO: 542477 - DNA, 25 bp, Homo sapien
tcctgggaaaggtacagcacgttta

SEQ ID NO: 542478 - DNA, 25 bp, Homo sapien
gtttcggtgatgaagaactcctttc

SEQ ID NO: 542479 - DNA, 25 bp, Homo sapien
cacaggatatgaatttgtttcggtg

SEQ ID NO: 542480 - DNA, 25 bp, Homo sapien
gcacgtttatgcatgacatctctgt

SEQ ID NO: 542481 - DNA, 25 bp, Homo sapien
gaaggttggtaagtgaatggcctac

SEQ ID NO: 542482 - DNA, 25 bp, Homo sapien
ggaaggttggtaagtgaatggccta

SEQ ID NO: 542483 - DNA, 25 bp, Homo sapien
tccatggtacagattgtcatcagtt

SEQ ID NO: 542484 - DNA, 25 bp, Homo sapien
gaaccaggtaatccatggtacagat

SEQ ID NO: 542485 - DNA, 25 bp, Homo sapien
ttgtcatcagttggcgtccatagta

SEQ ID NO: 542486 - DNA, 25 bp, Homo sapien
gttggcgtccatagtataaactgta

SEQ ID NO: 542487 - DNA, 25 bp, Homo sapien
gaccctggaattctggcttgcacaa

SEQ ID NO: 542488 - DNA, 25 bp, Homo sapien
gactggactctatgacatctatcaa

SEQ ID NO: 542489 - DNA, 25 bp, Homo sapien
cagtttatggatggtagctaaaacc

SEQ ID NO: 542490 - DNA, 25 bp, Homo sapien
tggctatgtaagactacagttcagg

SEQ ID NO: 542491 - DNA, 25 bp, Homo sapien
tgtggtccaggaaagtccatgcctg

SEQ ID NO: 542492 - DNA, 25 bp, Homo sapien
ctctagtgactccacgtagaagaga

SEQ ID NO: 542493 - DNA, 25 bp, Homo sapien
ccactttgagctcttgcagaaccag

SEQ ID NO: 542494 - DNA, 25 bp, Homo sapien
gcagaaccagccctttttcgtgtgg

SEQ ID NO: 542495 - DNA, 25 bp, Homo sapien
gaagcagggtgccattcagcggatt

SEQ ID NO: 542496 - DNA, 25 bp, Homo sapien
cagggtgccattcagcggattgaag

SEQ ID NO: 542497 - DNA, 25 bp, Homo sapien
tggaagcagggtgccattcagcgga

SEQ ID NO: 542498 - DNA, 25 bp, Homo sapien
gccattcagcggattgaaggaagag

SEQ ID NO: 542499 - DNA, 25 bp, Homo sapien
cagcggagtcgcagaatgtgcttca

SEQ ID NO: 542500 - DNA, 25 bp, Homo sapien
aaagctgccactgccgtcctgttgc

SEQ ID NO: 542501 - DNA, 25 bp, Homo sapien
tcttggcttttgagcaggcgactct

SEQ ID NO: 542502 - DNA, 25 bp, Homo sapien
tcgaagtcttttcgcccagagcctg

SEQ ID NO: 542503 - DNA, 25 bp, Homo sapien
tgttatggcgaggtgggacaaccct

SEQ ID NO: 542504 - DNA, 25 bp, Homo sapien
tggccttttcgaggatgccccgata

SEQ ID NO: 542505 - DNA, 25 bp, Homo sapien
tattctagcgcatatagggaggcaa

SEQ ID NO: 542506 - DNA, 25 bp, Homo sapien
gatacacctcactgggatgcgcttg

SEQ ID NO: 542507 - DNA, 25 bp, Homo sapien
gccagaggcgtacggtagaaatttg

SEQ ID NO: 542508 - DNA, 25 bp, Homo sapien
ctgctattaaggcacccaggcactg

SEQ ID NO: 542509 - DNA, 25 bp, Homo sapien
gtgcatttggtgtgtagcctcggaa

SEQ ID NO: 542510 - DNA, 25 bp, Homo sapien
gacgggttttgcgaaatcagtgcat

SEQ ID NO: 542511 - DNA, 25 bp, Homo sapien
gacagggtgattataggtcagctca

SEQ ID NO: 542512 - DNA, 25 bp, Homo sapien
cattaggagatgtaaggaaaaatct

SEQ ID NO: 542513 - DNA, 25 bp, Homo sapien
taggtcagctcattaggagatgtaa

SEQ ID NO: 542514 - DNA, 25 bp, Homo sapien
tagagggtagacagggtgattatag

SEQ ID NO: 542515 - DNA, 25 bp, Homo sapien
ctgcctgtgtatcgctgaaactttg

SEQ ID NO: 542516 - DNA, 25 bp, Homo sapien
catattgggctataacagtggttcc

SEQ ID NO: 542517 - DNA, 25 bp, Homo sapien
atgaccctgtcatctcttgcttcgg

SEQ ID NO: 542518 - DNA, 25 bp, Homo sapien
aaaattaacatgacagggcctagta

SEQ ID NO: 542519 - DNA, 25 bp, Homo sapien
gggataaccctagatgtcaagttgt

SEQ ID NO: 542520 - DNA, 25 bp, Homo sapien
tcctactggattgattggacctttg

SEQ ID NO: 542521 - DNA, 25 bp, Homo sapien
aatactggggataaccctagatgtc

SEQ ID NO: 542522 - DNA, 25 bp, Homo sapien
tgattggacctttgtcccctccaat

SEQ ID NO: 542523 - DNA, 25 bp, Homo sapien
actgaagtcagggctctctgctgtc

SEQ ID NO: 542524 - DNA, 25 bp, Homo sapien
tcaactgaagtcagggctctctgct

SEQ ID NO: 542525 - DNA, 25 bp, Homo sapien
tgaagtcagggctctctgctgtcct

SEQ ID NO: 542526 - DNA, 25 bp, Homo sapien
aagtcagggctctctgctgtcctgc

SEQ ID NO: 542527 - DNA, 25 bp, Homo sapien
ctttgggatatcacaccacctttgg

SEQ ID NO: 542528 - DNA, 25 bp, Homo sapien
tgcctacctgggaaacctttggcaa

SEQ ID NO: 542529 - DNA, 25 bp, Homo sapien
ccacctttggttgctatgagataat

SEQ ID NO: 542530 - DNA, 25 bp, Homo sapien
gagataatatcacccaacccaaatg

SEQ ID NO: 542531 - DNA, 25 bp, Homo sapien
gatggcaaagtttcagtccattttc

SEQ ID NO: 542532 - DNA, 25 bp, Homo sapien
gtccattttcatgcttctgctgata

SEQ ID NO: 542533 - DNA, 25 bp, Homo sapien
tttcatgcttctgctgataaagaca

SEQ ID NO: 542534 - DNA, 25 bp, Homo sapien
agatggcaaagtttcagtccatttt

SEQ ID NO: 542535 - DNA, 25 bp, Homo sapien
ctcatttctatagaaaacaatggta

SEQ ID NO: 542536 - DNA, 25 bp, Homo sapien
ttctatagaaaacaatggtatccaa

SEQ ID NO: 542537 - DNA, 25 bp, Homo sapien
tatagaaaacaatggtatccaagcc

SEQ ID NO: 542538 - DNA, 25 bp, Homo sapien
cttctgaatgttggtgtcctcattt

SEQ ID NO: 542539 - DNA, 25 bp, Homo sapien
tcttgggctccattagttagtccgg

SEQ ID NO: 542540 - DNA, 25 bp, Homo sapien
attggaacttcttgggctccattag

SEQ ID NO: 542541 - DNA, 25 bp, Homo sapien
tgggctccattagttagtccggtgg

SEQ ID NO: 542542 - DNA, 25 bp, Homo sapien
gaacttcttgggctccattagttag

SEQ ID NO: 542543 - DNA, 25 bp, Homo sapien
ctagcaccgatattgtgtaggatct

SEQ ID NO: 542544 - DNA, 25 bp, Homo sapien
tattgtgtaggatctattcacaaac

SEQ ID NO: 542545 - DNA, 25 bp, Homo sapien
tatactagcaccgatattgtgtagg

SEQ ID NO: 542546 - DNA, 25 bp, Homo sapien
ccgatattgtgtaggatctattcac

SEQ ID NO: 542547 - DNA, 25 bp, Homo sapien
cttgctgatgttcgatgtctaccac

SEQ ID NO: 542548 - DNA, 25 bp, Homo sapien
gctgatgttcgatgtctaccactct

SEQ ID NO: 542549 - DNA, 25 bp, Homo sapien
tgatgttcgatgtctaccactcttt

SEQ ID NO: 542550 - DNA, 25 bp, Homo sapien
tgctgatgttcgatgtctaccactc

SEQ ID NO: 542551 - DNA, 25 bp, Homo sapien
ctgtagacacagcaccaattctggt

SEQ ID NO: 542552 - DNA, 25 bp, Homo sapien
gacacagcaccaattctggtccaag

SEQ ID NO: 542553 - DNA, 25 bp, Homo sapien
cagcaccaattctggtccaagactt

SEQ ID NO: 542554 - DNA, 25 bp, Homo sapien
caattctggtccaagacttcaccat

SEQ ID NO: 542555 - DNA, 25 bp, Homo sapien
gttttgaataagcttcccatgtgga

SEQ ID NO: 542556 - DNA, 25 bp, Homo sapien
tgttttgaataagcttcccatgtgg

SEQ ID NO: 542557 - DNA, 25 bp, Homo sapien
gattcatcagacattacttgggatg

SEQ ID NO: 542558 - DNA, 25 bp, Homo sapien
tgcaatggattcatcagacattact

SEQ ID NO: 542559 - DNA, 25 bp, Homo sapien
agatgggtatatgcaatggattcat

SEQ ID NO: 542560 - DNA, 25 bp, Homo sapien
tatatgcaatggattcatcagacat

SEQ ID NO: 542561 - DNA, 25 bp, Homo sapien
tgagagagtctagatcacccgcatc

SEQ ID NO: 542562 - DNA, 25 bp, Homo sapien
gatcacccgcatcagtgtcattttg

SEQ ID NO: 542563 - DNA, 25 bp, Homo sapien
caccaataagctttccaaagatgag

SEQ ID NO: 542564 - DNA, 25 bp, Homo sapien
cgcatcagtgtcattttggccaaga

SEQ ID NO: 542565 - DNA, 25 bp, Homo sapien
gaagtcactgagtaatattgaagtc

SEQ ID NO: 542566 - DNA, 25 bp, Homo sapien
agtcactgagtaatattgaagtctg

SEQ ID NO: 542567 - DNA, 25 bp, Homo sapien
tcactgagtaatattgaagtctgct

SEQ ID NO: 542568 - DNA, 25 bp, Homo sapien
gtcactgagtaatattgaagtctgc

SEQ ID NO: 542569 - DNA, 25 bp, Homo sapien
ctagggcatcttagattatttcccc

SEQ ID NO: 542570 - DNA, 25 bp, Homo sapien
tgtccccgaactagggcatcttaga

SEQ ID NO: 542571 - DNA, 25 bp, Homo sapien
cccgaactagggcatcttagattat

SEQ ID NO: 542572 - DNA, 25 bp, Homo sapien
tatttaatgtccccgaactagggca

SEQ ID NO: 542573 - DNA, 25 bp, Homo sapien
tttcttccatgaactttcgtgggtc

SEQ ID NO: 542574 - DNA, 25 bp, Homo sapien
tccatgaactttcgtgggtcaatca

SEQ ID NO: 542575 - DNA, 25 bp, Homo sapien
catgaactttcgtgggtcaatcact

SEQ ID NO: 542576 - DNA, 25 bp, Homo sapien
gaactttcgtgggtcaatcactaat

SEQ ID NO: 542577 - DNA, 25 bp, Homo sapien
atttcacactagaggggatttctga

SEQ ID NO: 542578 - DNA, 25 bp, Homo sapien
aaaaggtgagaagcttcattaaaga

SEQ ID NO: 542579 - DNA, 25 bp, Homo sapien
gtgcttagaggagtggctgtcatta

SEQ ID NO: 542580 - DNA, 25 bp, Homo sapien
ggagtggctgtcattaggaatttct

SEQ ID NO: 542581 - DNA, 25 bp, Homo sapien
atttgacttttctgcagtgatctcc

SEQ ID NO: 542582 - DNA, 25 bp, Homo sapien
cttgtatttgacttttctgcagtga

SEQ ID NO: 542583 - DNA, 25 bp, Homo sapien
gtatttgacttttctgcagtgatct

SEQ ID NO: 542584 - DNA, 25 bp, Homo sapien
ttgacttttctgcagtgatctccat

SEQ ID NO: 542585 - DNA, 25 bp, Homo sapien
aatgtgtaatagtttgcctaactgg

SEQ ID NO: 542586 - DNA, 25 bp, Homo sapien
tcacgtgatgaaataagtccctcaa

SEQ ID NO: 542587 - DNA, 25 bp, Homo sapien
gcctttttgccgtacttattcctga

SEQ ID NO: 542588 - DNA, 25 bp, Homo sapien
ggagctgcgatgtaaggtacagccc

SEQ ID NO: 542589 - DNA, 25 bp, Homo sapien
gaatgacgtggccatatttcttccc

SEQ ID NO: 542590 - DNA, 25 bp, Homo sapien
caagatttgaactcttctggtcatt

SEQ ID NO: 542591 - DNA, 25 bp, Homo sapien
tttatccatgtcttgatgaatgacg

SEQ ID NO: 542592 - DNA, 25 bp, Homo sapien
taataaaatggcttggcaagatttg

SEQ ID NO: 542593 - DNA, 25 bp, Homo sapien
tgcatacccattctgagcattggca

SEQ ID NO: 542594 - DNA, 25 bp, Homo sapien
gaaatttggcatcttagtggccacc

SEQ ID NO: 542595 - DNA, 25 bp, Homo sapien
ggatgaagggttgctcttccagttt

SEQ ID NO: 542596 - DNA, 25 bp, Homo sapien
agtttttattctagctgcataccca

SEQ ID NO: 542597 - DNA, 25 bp, Homo sapien
agcttcctattaaaggtcttaggca

SEQ ID NO: 542598 - DNA, 25 bp, Homo sapien
tagagctgatttgaatatctaaagc

SEQ ID NO: 542599 - DNA, 25 bp, Homo sapien
gagctttcaaggcacttgcattcaa

SEQ ID NO: 542600 - DNA, 25 bp, Homo sapien
cataacaaatggaagacatagagct

SEQ ID NO: 542601 - DNA, 25 bp, Homo sapien
gttgctgaggttttcaattggtgca

SEQ ID NO: 542602 - DNA, 25 bp, Homo sapien
ttttcttgacaagtgggcagctggt

SEQ ID NO: 542603 - DNA, 25 bp, Homo sapien
gatggctgctgtaaatgagagctcc

SEQ ID NO: 542604 - DNA, 25 bp, Homo sapien
cttcaaaagtgccaggaaaaaggtg

SEQ ID NO: 542605 - DNA, 25 bp, Homo sapien
gacataggcaaatgaatacaaggga

SEQ ID NO: 542606 - DNA, 25 bp, Homo sapien
ttcagagacataggcaaatgaatac

SEQ ID NO: 542607 - DNA, 25 bp, Homo sapien
atttcagagacataggcaaatgaat

SEQ ID NO: 542608 - DNA, 25 bp, Homo sapien
gagacataggcaaatgaatacaagg

SEQ ID NO: 542609 - DNA, 25 bp, Homo sapien
gcttcgtggtataaagcatataatc

SEQ ID NO: 542610 - DNA, 25 bp, Homo sapien
ataaagcaaaatctgacaccaagta

SEQ ID NO: 542611 - DNA, 25 bp, Homo sapien
caaaatctgacaccaagtaatggag

SEQ ID NO: 542612 - DNA, 25 bp, Homo sapien
cgtggtataaagcatataatcaagt

SEQ ID NO: 542613 - DNA, 25 bp, Homo sapien
tcctgtctcttcacgtcaaggagac

SEQ ID NO: 542614 - DNA, 25 bp, Homo sapien
tttttgttaattgaggatatggcac

SEQ ID NO: 542615 - DNA, 25 bp, Homo sapien
tctcttcacgtcaaggagacttcct

SEQ ID NO: 542616 - DNA, 25 bp, Homo sapien
gtgctccttatctctatgctcctgt

SEQ ID NO: 542617 - DNA, 25 bp, Homo sapien
ggattcttaccgaactgagtttgat

SEQ ID NO: 542618 - DNA, 25 bp, Homo sapien
gtttgatttgcagtaatctctctag

SEQ ID NO: 542619 - DNA, 25 bp, Homo sapien
tgatttgcagtaatctctctagagt

SEQ ID NO: 542620 - DNA, 25 bp, Homo sapien
tggttctttgattaactctatggat

SEQ ID NO: 542621 - DNA, 25 bp, Homo sapien
aaggtttttccaccgcttgcctatg

SEQ ID NO: 542622 - DNA, 25 bp, Homo sapien
gcctatgttgcccttaacgtttcca

SEQ ID NO: 542623 - DNA, 25 bp, Homo sapien
catcctcatcgtggttaaggtccaa

SEQ ID NO: 542624 - DNA, 25 bp, Homo sapien
aacaaattattgtactctgcactgc

SEQ ID NO: 542625 - DNA, 25 bp, Homo sapien
aatgtgtgtcatcctcaattagcct

SEQ ID NO: 542626 - DNA, 25 bp, Homo sapien
gatgagtcttcatgtaaaaatgctg

SEQ ID NO: 542627 - DNA, 25 bp, Homo sapien
gagtcttcatgtaaaaatgctgatt

SEQ ID NO: 542628 - DNA, 25 bp, Homo sapien
catcctcaattagcctttccttcat

SEQ ID NO: 542629 - DNA, 25 bp, Homo sapien
atttggctgtttacgaggacatttg

SEQ ID NO: 542630 - DNA, 25 bp, Homo sapien
tggctgtttacgaggacatttgggt

SEQ ID NO: 542631 - DNA, 25 bp, Homo sapien
gaggaatttggctgtttacgaggac

SEQ ID NO: 542632 - DNA, 25 bp, Homo sapien
cctgaggaatttggctgtttacgag

SEQ ID NO: 542633 - DNA, 25 bp, Homo sapien
agggcattcatcactttggcatcaa

SEQ ID NO: 542634 - DNA, 25 bp, Homo sapien
tgtctgcgataagaataaggcttcc

SEQ ID NO: 542635 - DNA, 25 bp, Homo sapien
gatccctttctaggttgcaggagaa

SEQ ID NO: 542636 - DNA, 25 bp, Homo sapien
ccaatattagtcacagtctgcttag

SEQ ID NO: 542637 - DNA, 25 bp, Homo sapien
gaacgggtccaagcaagaggtcacc

SEQ ID NO: 542638 - DNA, 25 bp, Homo sapien
aatgcagtgactgtgagtcggctaa

SEQ ID NO: 542639 - DNA, 25 bp, Homo sapien
tatgacagacggaaggtgatgaacg

SEQ ID NO: 542640 - DNA, 25 bp, Homo sapien
caccttgtgtcaagactggtatata

SEQ ID NO: 542641 - DNA, 25 bp, Homo sapien
gcttctgcgcagcttgaacatcact

SEQ ID NO: 542642 - DNA, 25 bp, Homo sapien
tgccttgaatatctttaacttctcc

SEQ ID NO: 542643 - DNA, 25 bp, Homo sapien
aacttcccatagtccatcccagatg

SEQ ID NO: 542644 - DNA, 25 bp, Homo sapien
cagaaccacttagcattactatgct

SEQ ID NO: 542645 - DNA, 25 bp, Homo sapien
cagccaaataacaggacgtcaccag

SEQ ID NO: 542646 - DNA, 25 bp, Homo sapien
gacagcccagaaagggtacagtgag

SEQ ID NO: 542647 - DNA, 25 bp, Homo sapien
tgcacaccactatcaatgacggcct

SEQ ID NO: 542648 - DNA, 25 bp, Homo sapien
aacatcatggaccacggccctgtgg

SEQ ID NO: 542649 - DNA, 25 bp, Homo sapien
ttaaaagacggacagcacggttaca

SEQ ID NO: 542650 - DNA, 25 bp, Homo sapien
aagacggacagcacggttacattta

SEQ ID NO: 542651 - DNA, 25 bp, Homo sapien
taaaagacggacagcacggttacat

SEQ ID NO: 542652 - DNA, 25 bp, Homo sapien
aaaagacggacagcacggttacatt

SEQ ID NO: 542653 - DNA, 25 bp, Homo sapien
caagacacaggtgcataaaagatga

SEQ ID NO: 542654 - DNA, 25 bp, Homo sapien
tgccaacaagacacaggtgcataaa

SEQ ID NO: 542655 - DNA, 25 bp, Homo sapien
agacacaggtgcataaaagatgagc

SEQ ID NO: 542656 - DNA, 25 bp, Homo sapien
gcaaactgccaacaagacacaggtg

SEQ ID NO: 542657 - DNA, 25 bp, Homo sapien
cctaagcagtggtaataaataggcc

SEQ ID NO: 542658 - DNA, 25 bp, Homo sapien
taagcagtggtaataaataggccca

SEQ ID NO: 542659 - DNA, 25 bp, Homo sapien
agtggtaataaataggcccaatagg

SEQ ID NO: 542660 - DNA, 25 bp, Homo sapien
gcccaataggtatcatgaatcctac

SEQ ID NO: 542661 - DNA, 25 bp, Homo sapien
atcatcgatgatcattcttgcttgc

SEQ ID NO: 542662 - DNA, 25 bp, Homo sapien
caatttgcagcaattctttgcagct

SEQ ID NO: 542663 - DNA, 25 bp, Homo sapien
tctttgcagctattccggtgtccat

SEQ ID NO: 542664 - DNA, 25 bp, Homo sapien
ggcacgtgttcccaatttgcagcaa

SEQ ID NO: 542665 - DNA, 25 bp, Homo sapien
agcagcagctatcttagcagattgc

SEQ ID NO: 542666 - DNA, 25 bp, Homo sapien
agcagaattggcattaatagagtat

SEQ ID NO: 542667 - DNA, 25 bp, Homo sapien
atcttagcagattgcactgtcactg

SEQ ID NO: 542668 - DNA, 25 bp, Homo sapien
gcagaattggcattaatagagtatt

SEQ ID NO: 542669 - DNA, 25 bp, Homo sapien
acagcgttcaaagtagaaagagtgc

SEQ ID NO: 542670 - DNA, 25 bp, Homo sapien
taaagcactttgttcttgacagcgt

SEQ ID NO: 542671 - DNA, 25 bp, Homo sapien
gaaagagtgctatcctgaatgcgca

SEQ ID NO: 542672 - DNA, 25 bp, Homo sapien
cactgtgcggatgcaaagaaatata

SEQ ID NO: 542673 - DNA, 25 bp, Homo sapien
ttgtcttgatgaatgtgttcttcat

SEQ ID NO: 542674 - DNA, 25 bp, Homo sapien
cttaagtcacattttgtcttgatga

SEQ ID NO: 542675 - DNA, 25 bp, Homo sapien
attttgtcttgatgaatgtgttctt

SEQ ID NO: 542676 - DNA, 25 bp, Homo sapien
ttaagtcacattttgtcttgatgaa

SEQ ID NO: 542677 - DNA, 25 bp, Homo sapien
tttatattccagagccaagctctct

SEQ ID NO: 542678 - DNA, 25 bp, Homo sapien
ttatattccagagccaagctctctc

SEQ ID NO: 542679 - DNA, 25 bp, Homo sapien
gtttatattccagagccaagctctc

SEQ ID NO: 542680 - DNA, 25 bp, Homo sapien
tgtttatattccagagccaagctct

SEQ ID NO: 542681 - DNA, 25 bp, Homo sapien
gaaatattgcattctctgagatgat

SEQ ID NO: 542682 - DNA, 25 bp, Homo sapien
atattgcattctctgagatgataaa

SEQ ID NO: 542683 - DNA, 25 bp, Homo sapien
aaatattgcattctctgagatgata

SEQ ID NO: 542684 - DNA, 25 bp, Homo sapien
ggaaatattgcattctctgagatga

SEQ ID NO: 542685 - DNA, 25 bp, Homo sapien
tttttaaagtgtctgtgtttcctca

SEQ ID NO: 542686 - DNA, 25 bp, Homo sapien
ttttaaagtgtctgtgtttcctcat

SEQ ID NO: 542687 - DNA, 25 bp, Homo sapien
aataccatacttgttctgtcctcat

SEQ ID NO: 542688 - DNA, 25 bp, Homo sapien
caaataccatacttgttctgtcctc

SEQ ID NO: 542689 - DNA, 25 bp, Homo sapien
ctccaaataccatacttgttctgtc

SEQ ID NO: 542690 - DNA, 25 bp, Homo sapien
tccaaataccatacttgttctgtcc

SEQ ID NO: 542691 - DNA, 25 bp, Homo sapien
ctggcctacattcagatgtgtcaga

SEQ ID NO: 542692 - DNA, 25 bp, Homo sapien
ggcctacattcagatgtgtcagatt

SEQ ID NO: 542693 - DNA, 25 bp, Homo sapien
gatgtgtcagattccgactagtaag

SEQ ID NO: 542694 - DNA, 25 bp, Homo sapien
ttccgactagtaagccgtgtgtcct

SEQ ID NO: 542695 - DNA, 25 bp, Homo sapien
ccattgagtaaactttcataaggga

SEQ ID NO: 542696 - DNA, 25 bp, Homo sapien
gcaaagtgacatcagctccattgag

SEQ ID NO: 542697 - DNA, 25 bp, Homo sapien
tcagctccattgagtaaactttcat

SEQ ID NO: 542698 - DNA, 25 bp, Homo sapien
attgcaaagtgacatcagctccatt

SEQ ID NO: 542699 - DNA, 25 bp, Homo sapien
aatatgtccactgaatctctcaatg

SEQ ID NO: 542700 - DNA, 25 bp, Homo sapien
tccaatatgtccactgaatctctca

SEQ ID NO: 542701 - DNA, 25 bp, Homo sapien
actgaatctctcaatgtagtttctc

SEQ ID NO: 542702 - DNA, 25 bp, Homo sapien
tgtccactgaatctctcaatgtagt

SEQ ID NO: 542703 - DNA, 25 bp, Homo sapien
aacttctcgttatccttgcaaacac

SEQ ID NO: 542704 - DNA, 25 bp, Homo sapien
tgtaactttcaacttctcgttatcc

SEQ ID NO: 542705 - DNA, 25 bp, Homo sapien
tcactgtgtaactttcaacttctcg

SEQ ID NO: 542706 - DNA, 25 bp, Homo sapien
tttcaacttctcgttatccttgcaa

SEQ ID NO: 542707 - DNA, 25 bp, Homo sapien
gggatactacacactgatatctgcc

SEQ ID NO: 542708 - DNA, 25 bp, Homo sapien
cacttggagaacgtatatccccttt

SEQ ID NO: 542709 - DNA, 25 bp, Homo sapien
gatatctgccacttggagaacgtat

SEQ ID NO: 542710 - DNA, 25 bp, Homo sapien
aacctagaatatacaaggcacagtg

SEQ ID NO: 542711 - DNA, 25 bp, Homo sapien
ggttctcaaattgcttggtgcctgg

SEQ ID NO: 542712 - DNA, 25 bp, Homo sapien
tgtgaaagtcatccatcgcagcaac

SEQ ID NO: 542713 - DNA, 25 bp, Homo sapien
tactgcataaagctagtggttctca

SEQ ID NO: 542714 - DNA, 25 bp, Homo sapien
gaaatggcgtagtttcaaagtcaca

SEQ ID NO: 542715 - DNA, 25 bp, Homo sapien
aaaacgagttgaagatgtatcacca

SEQ ID NO: 542716 - DNA, 25 bp, Homo sapien
tgaagatgtatcaccaaaggacagt

SEQ ID NO: 542717 - DNA, 25 bp, Homo sapien
caccaaaggacagtcttatagccaa

SEQ ID NO: 542718 - DNA, 25 bp, Homo sapien
ggacagtcttatagccaatctcaga

SEQ ID NO: 542719 - DNA, 25 bp, Homo sapien
tcccatgtgccttcggatctagcct

SEQ ID NO: 542720 - DNA, 25 bp, Homo sapien
ccatgtgccttcggatctagcctca

SEQ ID NO: 542721 - DNA, 25 bp, Homo sapien
cccatgtgccttcggatctagcctc

SEQ ID NO: 542722 - DNA, 25 bp, Homo sapien
catgtgccttcggatctagcctcat

SEQ ID NO: 542723 - DNA, 25 bp, Homo sapien
gaaatacctacagtgtctacggaga

SEQ ID NO: 542724 - DNA, 25 bp, Homo sapien
taaggaaacacaatactgcagtttg

SEQ ID NO: 542725 - DNA, 25 bp, Homo sapien
taataaacaatgtctctgggactca

SEQ ID NO: 542726 - DNA, 25 bp, Homo sapien
gtttgtgatataagctgaggcccca

SEQ ID NO: 542727 - DNA, 25 bp, Homo sapien
ctaggatacgtttcttttctcaagg

SEQ ID NO: 542728 - DNA, 25 bp, Homo sapien
tctgtatttctggacggtttcttct

SEQ ID NO: 542729 - DNA, 25 bp, Homo sapien
tgcccactgaagctcggaaacaagg

SEQ ID NO: 542730 - DNA, 25 bp, Homo sapien
tcttcttcactacattgatgtgaat

SEQ ID NO: 542731 - DNA, 25 bp, Homo sapien
cactgaagctcggaaacaagggttc

SEQ ID NO: 542732 - DNA, 25 bp, Homo sapien
ggcgggggtgagggcaggtatgcat

SEQ ID NO: 542733 - DNA, 25 bp, Homo sapien
gggcgggggtgagggcaggtatgca

SEQ ID NO: 542734 - DNA, 25 bp, Homo sapien
ggggtgagggcaggtatgcattcat

SEQ ID NO: 542735 - DNA, 25 bp, Homo sapien
cgggggtgagggcaggtatgcattc

SEQ ID NO: 542736 - DNA, 25 bp, Homo sapien
ctgtatagttggagataagttcatt

SEQ ID NO: 542737 - DNA, 25 bp, Homo sapien
gtatagttggagataagttcattta

SEQ ID NO: 542738 - DNA, 25 bp, Homo sapien
tgtatagttggagataagttcattt

SEQ ID NO: 542739 - DNA, 25 bp, Homo sapien
gaaatgttgacagctttctctggtt

SEQ ID NO: 542740 - DNA, 25 bp, Homo sapien
acccttgtaagacttaatatgtgcc

SEQ ID NO: 542741 - DNA, 25 bp, Homo sapien
ccttgtaagacttaatatgtgccac

SEQ ID NO: 542742 - DNA, 25 bp, Homo sapien
ttgtaagacttaatatgtgccacat

SEQ ID NO: 542743 - DNA, 25 bp, Homo sapien
agcaccactctggtgataggaatct

SEQ ID NO: 542744 - DNA, 25 bp, Homo sapien
tggaattgattcctggttgatctcc

SEQ ID NO: 542745 - DNA, 25 bp, Homo sapien
gaattgattcctggttgatctccat

SEQ ID NO: 542746 - DNA, 25 bp, Homo sapien
accactctggtgataggaatctgga

SEQ ID NO: 542747 - DNA, 25 bp, Homo sapien
gaaacctgaatatcacattgaatca

SEQ ID NO: 542748 - DNA, 25 bp, Homo sapien
tcataggcacatcagttggtagctt

SEQ ID NO: 542749 - DNA, 25 bp, Homo sapien
tcttaaggtaaggtagacataacta

SEQ ID NO: 542750 - DNA, 25 bp, Homo sapien
gtttcactaatccaaatttgcactg

SEQ ID NO: 542751 - DNA, 25 bp, Homo sapien
ctaatgctttctgttgctagatatc

SEQ ID NO: 542752 - DNA, 25 bp, Homo sapien
ggtgaacataataataagtagggat

SEQ ID NO: 542753 - DNA, 25 bp, Homo sapien
ttttcttggcagttggtgaacataa

SEQ ID NO: 542754 - DNA, 25 bp, Homo sapien
attttttctggagcaaatctaatgc

SEQ ID NO: 542755 - DNA, 25 bp, Homo sapien
gttctctgagatcctttttaattgg

SEQ ID NO: 542756 - DNA, 25 bp, Homo sapien
ggagtcagagataaaatggctttgt

SEQ ID NO: 542757 - DNA, 25 bp, Homo sapien
caggagtcagagataaaatggcttt

SEQ ID NO: 542758 - DNA, 25 bp, Homo sapien
tatttcttcagggtattctaatggt

SEQ ID NO: 542759 - DNA, 25 bp, Homo sapien
tagatgtgtaagactaagctctttg

SEQ ID NO: 542760 - DNA, 25 bp, Homo sapien
tcagtctctgctgattcaaacttgg

SEQ ID NO: 542761 - DNA, 25 bp, Homo sapien
caaacttggtctttagatgtgtaag

SEQ ID NO: 542762 - DNA, 25 bp, Homo sapien
tgtgtaagactaagctctttggcag

SEQ ID NO: 542763 - DNA, 25 bp, Homo sapien
tggtggtttggtgccgctcaaatga

SEQ ID NO: 542764 - DNA, 25 bp, Homo sapien
ttggtgccgctcaaatgatcttctc

SEQ ID NO: 542765 - DNA, 25 bp, Homo sapien
acctctggtggtttggtgccgctca

SEQ ID NO: 542766 - DNA, 25 bp, Homo sapien
ggtttggtgccgctcaaatgatctt

SEQ ID NO: 542767 - DNA, 25 bp, Homo sapien
gctgcggaaattggctccacatcca

SEQ ID NO: 542768 - DNA, 25 bp, Homo sapien
cagtgccaaattgaggattagtaca

SEQ ID NO: 542769 - DNA, 25 bp, Homo sapien
agctggcctcaatttagatttcttt

SEQ ID NO: 542770 - DNA, 25 bp, Homo sapien
gtggaagctgcggaaattggctcca

SEQ ID NO: 542771 - DNA, 25 bp, Homo sapien
ttcatgggtgattccattcacttta

SEQ ID NO: 542772 - DNA, 25 bp, Homo sapien
tttcatgggtgattccattcacttt

SEQ ID NO: 542773 - DNA, 25 bp, Homo sapien
ttccagagctcctctatacagtcat

SEQ ID NO: 542774 - DNA, 25 bp, Homo sapien
aatccctcggagcataatgaatctt

SEQ ID NO: 542775 - DNA, 25 bp, Homo sapien
aacaatcacaatccctcggagcata

SEQ ID NO: 542776 - DNA, 25 bp, Homo sapien
ccagagctcctctatacagtcattt

SEQ ID NO: 542777 - DNA, 25 bp, Homo sapien
ttatttactagccaaatctatgacc

SEQ ID NO: 542778 - DNA, 25 bp, Homo sapien
tagccaaatctatgacccctttaaa

SEQ ID NO: 542779 - DNA, 25 bp, Homo sapien
tatgacccctttaaaagttagcatc

SEQ ID NO: 542780 - DNA, 25 bp, Homo sapien
tctatgacccctttaaaagttagca

SEQ ID NO: 542781 - DNA, 25 bp, Homo sapien
cctgttgggtcttaatgaagtccgt

SEQ ID NO: 542782 - DNA, 25 bp, Homo sapien
gtccgtgaatatacctgattgcatt

SEQ ID NO: 542783 - DNA, 25 bp, Homo sapien
tgggtcttaatgaagtccgtgaata

SEQ ID NO: 542784 - DNA, 25 bp, Homo sapien
taatgaagtccgtgaatatacctga

SEQ ID NO: 542785 - DNA, 25 bp, Homo sapien
ttaatctattgtatacccataaatg

SEQ ID NO: 542786 - DNA, 25 bp, Homo sapien
ctattgtatacccataaatgtaaga

SEQ ID NO: 542787 - DNA, 25 bp, Homo sapien
gtatacccataaatgtaagaactat

SEQ ID NO: 542788 - DNA, 25 bp, Homo sapien
ttgtatacccataaatgtaagaact

SEQ ID NO: 542789 - DNA, 25 bp, Homo sapien
tcactctcattccatcatggataag

SEQ ID NO: 542790 - DNA, 25 bp, Homo sapien
ttcactctcattccatcatggataa

SEQ ID NO: 542791 - DNA, 25 bp, Homo sapien
gttttcagggtgataattgtcttca

SEQ ID NO: 542792 - DNA, 25 bp, Homo sapien
tgttttcagggtgataattgtcttc

SEQ ID NO: 542793 - DNA, 25 bp, Homo sapien
agttatgccaatcacatctgttgtg

SEQ ID NO: 542794 - DNA, 25 bp, Homo sapien
gctcataggctctagctggctgatt

SEQ ID NO: 542795 - DNA, 25 bp, Homo sapien
tcacaagtgtagatttcctttatgc

SEQ ID NO: 542796 - DNA, 25 bp, Homo sapien
tatgctaatcagctcataggctcta

SEQ ID NO: 542797 - DNA, 25 bp, Homo sapien
caagtagcagatatgttcctgagtg

SEQ ID NO: 542798 - DNA, 25 bp, Homo sapien
ctgtggcagaataggcacaatgaga

SEQ ID NO: 542799 - DNA, 25 bp, Homo sapien
ttggcaatcactaagtgatgccttg

SEQ ID NO: 542800 - DNA, 25 bp, Homo sapien
cagaataggcacaatgagagaaaca

SEQ ID NO: 542801 - DNA, 25 bp, Homo sapien
aacaggtgactctatgccaggagca

SEQ ID NO: 542802 - DNA, 25 bp, Homo sapien
cactcagcgctacatggtattggac

SEQ ID NO: 542803 - DNA, 25 bp, Homo sapien
tccaagggcttgcatagagcgcaaa

SEQ ID NO: 542804 - DNA, 25 bp, Homo sapien
gaaaccaggctcaaataactaggct

SEQ ID NO: 542805 - DNA, 25 bp, Homo sapien
tttacaaacattctcaggtctctgg

SEQ ID NO: 542806 - DNA, 25 bp, Homo sapien
cattcgttcattccaagtgttcttg

SEQ ID NO: 542807 - DNA, 25 bp, Homo sapien
tacataccactaccagtttggaatg

SEQ ID NO: 542808 - DNA, 25 bp, Homo sapien
taaccactgctacaagagtctcttg

SEQ ID NO: 542809 - DNA, 25 bp, Homo sapien
cccatgacgaatgtctgactgcaaa

SEQ ID NO: 542810 - DNA, 25 bp, Homo sapien
tctgaactttcccatgacgaatgtc

SEQ ID NO: 542811 - DNA, 25 bp, Homo sapien
tcttttctataacatggatttcttc

SEQ ID NO: 542812 - DNA, 25 bp, Homo sapien
tgtctgactgcaaagttcttttcta

SEQ ID NO: 542813 - DNA, 25 bp, Homo sapien
gtacatgacagtagttttcaaatac

SEQ ID NO: 542814 - DNA, 25 bp, Homo sapien
cagtacatgacagtagttttcaaat

SEQ ID NO: 542815 - DNA, 25 bp, Homo sapien
acatgacagtagttttcaaatacag

SEQ ID NO: 542816 - DNA, 25 bp, Homo sapien
tcagtacatgacagtagttttcaaa

SEQ ID NO: 542817 - DNA, 25 bp, Homo sapien
gggggttccacgaactatgcccata

SEQ ID NO: 542818 - DNA, 25 bp, Homo sapien
tggcaactccgcactggggaaatgc

SEQ ID NO: 542819 - DNA, 25 bp, Homo sapien
cttaccatggtctcaaatgaaagga

SEQ ID NO: 542820 - DNA, 25 bp, Homo sapien
gaaattacgtcaattaataatctta

SEQ ID NO: 542821 - DNA, 25 bp, Homo sapien
acatgacagctcatattcttcagtg

SEQ ID NO: 542822 - DNA, 25 bp, Homo sapien
ccttgatttgggcttgacacggttg

SEQ ID NO: 542823 - DNA, 25 bp, Homo sapien
tgtttaacatgacagctcatattct

SEQ ID NO: 542824 - DNA, 25 bp, Homo sapien
atgattgggtggtgttgatgcccca

SEQ ID NO: 542825 - DNA, 25 bp, Homo sapien
gttggctggcactcattactatcta

SEQ ID NO: 542826 - DNA, 25 bp, Homo sapien
gagaacataaataagcccgcatcat

SEQ ID NO: 542827 - DNA, 25 bp, Homo sapien
tatggtactactgggcttatggtcc

SEQ ID NO: 542828 - DNA, 25 bp, Homo sapien
gatactttggaacaagagaggccta

SEQ ID NO: 542829 - DNA, 25 bp, Homo sapien
cagttaaagtgagttaccaaggtca

SEQ ID NO: 542830 - DNA, 25 bp, Homo sapien
tttggtaatatcctgaaacactgct

SEQ ID NO: 542831 - DNA, 25 bp, Homo sapien
caaggcgtatggagacaaaggaact

SEQ ID NO: 542832 - DNA, 25 bp, Homo sapien
gctgtcacgtaggaagcaaggcgta

SEQ ID NO: 542833 - DNA, 25 bp, Homo sapien
gtccaacacaaatcatgccatataa

SEQ ID NO: 542834 - DNA, 25 bp, Homo sapien
tccaacacaaatcatgccatataaa

SEQ ID NO: 542835 - DNA, 25 bp, Homo sapien
agtccaacacaaatcatgccatata

SEQ ID NO: 542836 - DNA, 25 bp, Homo sapien
ccaacacaaatcatgccatataaat

SEQ ID NO: 542837 - DNA, 25 bp, Homo sapien
catatagcaagatctagatttatag

SEQ ID NO: 542838 - DNA, 25 bp, Homo sapien
tatagcaagatctagatttatagcc

SEQ ID NO: 542839 - DNA, 25 bp, Homo sapien
atatagcaagatctagatttatagc

SEQ ID NO: 542840 - DNA, 25 bp, Homo sapien
agcatctgttctgccgccactgcgg

SEQ ID NO: 542841 - DNA, 25 bp, Homo sapien
ctgttctgccgccactgcggtcagc

SEQ ID NO: 542842 - DNA, 25 bp, Homo sapien
atctgttctgccgccactgcggtca

SEQ ID NO: 542843 - DNA, 25 bp, Homo sapien
ttcagcatctgttctgccgccactg

SEQ ID NO: 542844 - DNA, 25 bp, Homo sapien
cagaaaggtaagagtgacacatatt

SEQ ID NO: 542845 - DNA, 25 bp, Homo sapien
aaaagcacagaaaggtaagagtgac

SEQ ID NO: 542846 - DNA, 25 bp, Homo sapien
aggtaagagtgacacatatttcatt

SEQ ID NO: 542847 - DNA, 25 bp, Homo sapien
gaaaggtaagagtgacacatatttc

SEQ ID NO: 542848 - DNA, 25 bp, Homo sapien
gttctgcttgttcacgccgtttcgt

SEQ ID NO: 542849 - DNA, 25 bp, Homo sapien
ctgagactatctgttgaagctgcct

SEQ ID NO: 542850 - DNA, 25 bp, Homo sapien
cacgccgtttcgtctcaaactcaag

SEQ ID NO: 542851 - DNA, 25 bp, Homo sapien
gctgcctgttttagcgtctgttctg

SEQ ID NO: 542852 - DNA, 25 bp, Homo sapien
gctctggcattatctatggcaactt

SEQ ID NO: 542853 - DNA, 25 bp, Homo sapien
tcttttgttccatagccaactgctt

SEQ ID NO: 542854 - DNA, 25 bp, Homo sapien
cttgagctctggcattatctatggc

SEQ ID NO: 542855 - DNA, 25 bp, Homo sapien
ttctcaagtgtttcccttagttctc

SEQ ID NO: 542856 - DNA, 25 bp, Homo sapien
tctatcccaaacactcttattatct

SEQ ID NO: 542857 - DNA, 25 bp, Homo sapien
tattatcttggctccacactctatg

SEQ ID NO: 542858 - DNA, 25 bp, Homo sapien
ggctccacactctatgttattgtta

SEQ ID NO: 542859 - DNA, 25 bp, Homo sapien
catcctgaggaccacataggaaatc

SEQ ID NO: 542860 - DNA, 25 bp, Homo sapien
ctgtatgttagtcagaagagtctcg

SEQ ID NO: 542861 - DNA, 25 bp, Homo sapien
gtggttgtccatgcccagttagaga

SEQ ID NO: 542862 - DNA, 25 bp, Homo sapien
cagttagagagagtttgtcaaggct

SEQ ID NO: 542863 - DNA, 25 bp, Homo sapien
tctcgatggaagacagtccatcagg

SEQ ID NO: 542864 - DNA, 25 bp, Homo sapien
ctctctggggcagaaatattgtaga

SEQ ID NO: 542865 - DNA, 25 bp, Homo sapien
cgttttccaattacgtctctctggg

SEQ ID NO: 542866 - DNA, 25 bp, Homo sapien
accatctaaccacacaacacgtttt

SEQ ID NO: 542867 - DNA, 25 bp, Homo sapien
gtccctcactaatgtcagaacaagt

SEQ ID NO: 542868 - DNA, 25 bp, Homo sapien
tgccaatgtaactcaactaggaaag

SEQ ID NO: 542869 - DNA, 25 bp, Homo sapien
gacaagatttgccttgagatgacca

SEQ ID NO: 542870 - DNA, 25 bp, Homo sapien
taaatgctttgcatgcactggctca

SEQ ID NO: 542871 - DNA, 25 bp, Homo sapien
taaataactagcacacagagagtgc

SEQ ID NO: 542872 - DNA, 25 bp, Homo sapien
cattctgcatactgcctagccttct

SEQ ID NO: 542873 - DNA, 25 bp, Homo sapien
gcattctgcatactgcctagccttc

SEQ ID NO: 542874 - DNA, 25 bp, Homo sapien
ttctgcatactgcctagccttctct

SEQ ID NO: 542875 - DNA, 25 bp, Homo sapien
attctgcatactgcctagccttctc

SEQ ID NO: 542876 - DNA, 25 bp, Homo sapien
taatgaggtttgattgtaccaagaa

SEQ ID NO: 542877 - DNA, 25 bp, Homo sapien
taaactttatcaagcccaagctgaa

SEQ ID NO: 542878 - DNA, 25 bp, Homo sapien
aaattaatgaggtttgattgtacca

SEQ ID NO: 542879 - DNA, 25 bp, Homo sapien
tatcaagcccaagctgaattatcat

SEQ ID NO: 542880 - DNA, 25 bp, Homo sapien
tccctctaggcccatatggcaagtc

SEQ ID NO: 542881 - DNA, 25 bp, Homo sapien
cctctaggcccatatggcaagtcca

SEQ ID NO: 542882 - DNA, 25 bp, Homo sapien
ttccctctaggcccatatggcaagt

SEQ ID NO: 542883 - DNA, 25 bp, Homo sapien
tttccctctaggcccatatggcaag

SEQ ID NO: 542884 - DNA, 25 bp, Homo sapien
gggtgattcctcatgtcttttcttc

SEQ ID NO: 542885 - DNA, 25 bp, Homo sapien
atgccaaatcgcctacgcggtcagc

SEQ ID NO: 542886 - DNA, 25 bp, Homo sapien
gcctctacaccatacttaagcttca

SEQ ID NO: 542887 - DNA, 25 bp, Homo sapien
cataaaaatgccaaatcgcctacgc

SEQ ID NO: 542888 - DNA, 25 bp, Homo sapien
gcggtcagcctctacaccatactta

SEQ ID NO: 542889 - DNA, 25 bp, Homo sapien
ctaaaaggggcagtcaacaaaaatg

SEQ ID NO: 542890 - DNA, 25 bp, Homo sapien
tgctaaaaggggcagtcaacaaaaa

SEQ ID NO: 542891 - DNA, 25 bp, Homo sapien
ctcattgtgaggtgagctgctaaaa

SEQ ID NO: 542892 - DNA, 25 bp, Homo sapien
ttgtgaggtgagctgctaaaagggg

SEQ ID NO: 542893 - DNA, 25 bp, Homo sapien
caggcataaaattagcggcaggacc

SEQ ID NO: 542894 - DNA, 25 bp, Homo sapien
cggcaggaccttaaaaaggctggca

SEQ ID NO: 542895 - DNA, 25 bp, Homo sapien
ttaaatttcaatcgccctatggcag

SEQ ID NO: 542896 - DNA, 25 bp, Homo sapien
aacccatttggaacaggcgcgaagg

SEQ ID NO: 542897 - DNA, 25 bp, Homo sapien
tgagcctttgcttcgctttaataaa

SEQ ID NO: 542898 - DNA, 25 bp, Homo sapien
ccagggaagataggaaaccgcagat

SEQ ID NO: 542899 - DNA, 25 bp, Homo sapien
taaacatattctcaaggccagggaa

SEQ ID NO: 542900 - DNA, 25 bp, Homo sapien
aaataatgagcctttgcttcgcttt

SEQ ID NO: 542901 - DNA, 25 bp, Homo sapien
ttgaagacatgaggactacccaagt

SEQ ID NO: 542902 - DNA, 25 bp, Homo sapien
tgcttcaaaatcaagtcgagactgc

SEQ ID NO: 542903 - DNA, 25 bp, Homo sapien
tcgagactgctgctgatatacaagt

SEQ ID NO: 542904 - DNA, 25 bp, Homo sapien
taagtatttgtcaggctggaaccga

SEQ ID NO: 542905 - DNA, 25 bp, Homo sapien
gactgactcttttaacgatacatag

SEQ ID NO: 542906 - DNA, 25 bp, Homo sapien
ttagtggacagaatgtcaatgcttc

SEQ ID NO: 542907 - DNA, 25 bp, Homo sapien
catagagtcttgtgatattacatgc

SEQ ID NO: 542908 - DNA, 25 bp, Homo sapien
taccatatattttaccagctgtgcc

SEQ ID NO: 542909 - DNA, 25 bp, Homo sapien
gggagcactgaacaacaaactacca

SEQ ID NO: 542910 - DNA, 25 bp, Homo sapien
caagcgtggcaaaagaaaccttgga

SEQ ID NO: 542911 - DNA, 25 bp, Homo sapien
tgtgaacttcgaagggaaacactga

SEQ ID NO: 542912 - DNA, 25 bp, Homo sapien
gaacacaggcaagggaatgtgaact

SEQ ID NO: 542913 - DNA, 25 bp, Homo sapien
cacacagctctatttgttaagaggc

SEQ ID NO: 542914 - DNA, 25 bp, Homo sapien
ttcaaaatgcaaatgtataacagct

SEQ ID NO: 542915 - DNA, 25 bp, Homo sapien
agctgaaattgttatggttctgcca

SEQ ID NO: 542916 - DNA, 25 bp, Homo sapien
tgttgtataaaaacactctcacacc

SEQ ID NO: 542917 - DNA, 25 bp, Homo sapien
cactttgagaagccaagacaggcag

SEQ ID NO: 542918 - DNA, 25 bp, Homo sapien
ttgagaagccaagacaggcagatca

SEQ ID NO: 542919 - DNA, 25 bp, Homo sapien
catggtgaaactccttcactattaa

SEQ ID NO: 542920 - DNA, 25 bp, Homo sapien
acatggtgaaactccttcactatta

SEQ ID NO: 542921 - DNA, 25 bp, Homo sapien
gtctacctctatataaggaagctga

SEQ ID NO: 542922 - DNA, 25 bp, Homo sapien
gtaccatccacatgttatagagaaa

SEQ ID NO: 542923 - DNA, 25 bp, Homo sapien
taagaacttataagccagtctacct

SEQ ID NO: 542924 - DNA, 25 bp, Homo sapien
tcaaagtttctcactgtaccatcca

SEQ ID NO: 542925 - DNA, 25 bp, Homo sapien
gaggatacactggaatcagcacaca

SEQ ID NO: 542926 - DNA, 25 bp, Homo sapien
gcacacatcccacattggagtcttt

SEQ ID NO: 542927 - DNA, 25 bp, Homo sapien
tttattgggatctgaaggacttagg

SEQ ID NO: 542928 - DNA, 25 bp, Homo sapien
taattgcatcacttttggtctcagt

SEQ ID NO: 542929 - DNA, 25 bp, Homo sapien
atcaagatatttagatgattaaaac

SEQ ID NO: 542930 - DNA, 25 bp, Homo sapien
aatcaagatatttagatgattaaaa

SEQ ID NO: 542931 - DNA, 25 bp, Homo sapien
aaatcaagatatttagatgattaaa

SEQ ID NO: 542932 - DNA, 25 bp, Homo sapien
tttccataatagattacttgtgtta

SEQ ID NO: 542933 - DNA, 25 bp, Homo sapien
ggtcaatatatagcaaattgaagaa

SEQ ID NO: 542934 - DNA, 25 bp, Homo sapien
aacaatcatgataaataataaggtc

SEQ ID NO: 542935 - DNA, 25 bp, Homo sapien
tgcttcattagtaacctcaaagtat

SEQ ID NO: 542936 - DNA, 25 bp, Homo sapien
aattccaaacttagaagaagagcac

SEQ ID NO: 542937 - DNA, 25 bp, Homo sapien
gtttgaaatatatagccatcatgat

SEQ ID NO: 542938 - DNA, 25 bp, Homo sapien
cccttcattaacataagggaagata

SEQ ID NO: 542939 - DNA, 25 bp, Homo sapien
cagagaggcatgcagtaattccaaa

SEQ ID NO: 542940 - DNA, 25 bp, Homo sapien
gctggaagaagctctgttcattaat

SEQ ID NO: 542941 - DNA, 25 bp, Homo sapien
actaatttagttgcactcctctgca

SEQ ID NO: 542942 - DNA, 25 bp, Homo sapien
aggcttgaattctaatcaaccttaa

SEQ ID NO: 542943 - DNA, 25 bp, Homo sapien
atgaaaattacaactctgggagctg

SEQ ID NO: 542944 - DNA, 25 bp, Homo sapien
tgaaaatggtccataagattggatg

SEQ ID NO: 542945 - DNA, 25 bp, Homo sapien
tggtccataagattggatgctaaga

SEQ ID NO: 542946 - DNA, 25 bp, Homo sapien
gctttgtatgaaaatggtccataag

SEQ ID NO: 542947 - DNA, 25 bp, Homo sapien
ggctttgtatgaaaatggtccataa

SEQ ID NO: 542948 - DNA, 25 bp, Homo sapien
ttgggcccaggaagtacatttggtg

SEQ ID NO: 542949 - DNA, 25 bp, Homo sapien
catggacaacccattctgatggacc

SEQ ID NO: 542950 - DNA, 25 bp, Homo sapien
tcccatgtcatgaccggccaaatct

SEQ ID NO: 542951 - DNA, 25 bp, Homo sapien
acatttggtgataagcccatcagca

SEQ ID NO: 542952 - DNA, 25 bp, Homo sapien
tattgagatatcactttcagagaac

SEQ ID NO: 542953 - DNA, 25 bp, Homo sapien
aaatattggtgggaaaaccagtgca

SEQ ID NO: 542954 - DNA, 25 bp, Homo sapien
tctagaagataaacgatgatgaatt

SEQ ID NO: 542955 - DNA, 25 bp, Homo sapien
taacatgaatgtataacaaaactca

SEQ ID NO: 542956 - DNA, 25 bp, Homo sapien
atccagctgaaccctaataaagttt

SEQ ID NO: 542957 - DNA, 25 bp, Homo sapien
aatccagctgaaccctaataaagtt

SEQ ID NO: 542958 - DNA, 25 bp, Homo sapien
gtgaggggctatcaggaacacgctc

SEQ ID NO: 542959 - DNA, 25 bp, Homo sapien
cagaagagctctcagtccgagcagg

SEQ ID NO: 542960 - DNA, 25 bp, Homo sapien
gatgatgggtgactgccaggccttc

SEQ ID NO: 542961 - DNA, 25 bp, Homo sapien
atgtgatgatgggtgactgccaggc

SEQ ID NO: 542962 - DNA, 25 bp, Homo sapien
taagcgtgactgcagtaatggcgaa

SEQ ID NO: 542963 - DNA, 25 bp, Homo sapien
ctatggttctacaggtaagcgtgac

SEQ ID NO: 542964 - DNA, 25 bp, Homo sapien
atggcgaatgtcaatccactctgga

SEQ ID NO: 542965 - DNA, 25 bp, Homo sapien
ggtattccatcctagtactgctctg

SEQ ID NO: 542966 - DNA, 25 bp, Homo sapien
tgaccttgtgatctgaacagggccg

SEQ ID NO: 542967 - DNA, 25 bp, Homo sapien
acagggccgtttatataagatgtgc

SEQ ID NO: 542968 - DNA, 25 bp, Homo sapien
gatgtgctccagaggataccctaaa

SEQ ID NO: 542969 - DNA, 25 bp, Homo sapien
gaaaaatgggataattgtaatgtca

SEQ ID NO: 542970 - DNA, 25 bp, Homo sapien
taataactgatgtctcaactctgga

SEQ ID NO: 542971 - DNA, 25 bp, Homo sapien
tgctgctgccatatttgcaatggtg

SEQ ID NO: 542972 - DNA, 25 bp, Homo sapien
gggactctgaacttgtgctgctgct

SEQ ID NO: 542973 - DNA, 25 bp, Homo sapien
tgcaatggtgctgaggtggttcatc

SEQ ID NO: 542974 - DNA, 25 bp, Homo sapien
agatggttgagaggatgactaagtg

SEQ ID NO: 542975 - DNA, 25 bp, Homo sapien
agaggatgactaagtggaaggctac

SEQ ID NO: 542976 - DNA, 25 bp, Homo sapien
aaggctacgtgctccaggcatgcgg

SEQ ID NO: 542977 - DNA, 25 bp, Homo sapien
gactaagtggaaggctacgtgctcc

SEQ ID NO: 542978 - DNA, 25 bp, Homo sapien
cagtgtttccttatcccaggaacca

SEQ ID NO: 542979 - DNA, 25 bp, Homo sapien
ttccttatcccaggaaccatcactg

SEQ ID NO: 542980 - DNA, 25 bp, Homo sapien
gtttccttatcccaggaaccatcac

SEQ ID NO: 542981 - DNA, 25 bp, Homo sapien
ggcagtgtttccttatcccaggaac

SEQ ID NO: 542982 - DNA, 25 bp, Homo sapien
ctttcactagaatgatctcttcaaa

SEQ ID NO: 542983 - DNA, 25 bp, Homo sapien
tttcactagaatgatctcttcaaat

SEQ ID NO: 542984 - DNA, 25 bp, Homo sapien
tcctttcactagaatgatctcttca

SEQ ID NO: 542985 - DNA, 25 bp, Homo sapien
cctttcactagaatgatctcttcaa

SEQ ID NO: 542986 - DNA, 25 bp, Homo sapien
ttctgtgccctgagaattaatctat

SEQ ID NO: 542987 - DNA, 25 bp, Homo sapien
gaataataggatacttgaatgaatg

SEQ ID NO: 542988 - DNA, 25 bp, Homo sapien
agagagtacaaatcttctaaaaaga

SEQ ID NO: 542989 - DNA, 25 bp, Homo sapien
aagccagctggatctgaataatagg

SEQ ID NO: 542990 - DNA, 25 bp, Homo sapien
gaaaactctagaatacaactcactg

SEQ ID NO: 542991 - DNA, 25 bp, Homo sapien
tcaggacttctttatacacatggat

SEQ ID NO: 542992 - DNA, 25 bp, Homo sapien
gagctgttgcgaccggcctcaattt

SEQ ID NO: 542993 - DNA, 25 bp, Homo sapien
taatccatagatctacatatcagtg

SEQ ID NO: 542994 - DNA, 25 bp, Homo sapien
gcacctgctatataaatggcatgag

SEQ ID NO: 542995 - DNA, 25 bp, Homo sapien
aataattaaaactgctagctgggcg

SEQ ID NO: 542996 - DNA, 25 bp, Homo sapien
gatgatgagtataaacaaagcacct

SEQ ID NO: 542997 - DNA, 25 bp, Homo sapien
ggcgtggtgacatccacccgtggtc

SEQ ID NO: 542998 - DNA, 25 bp, Homo sapien
agcctctggcaggtggcaaaatttt

SEQ ID NO: 542999 - DNA, 25 bp, Homo sapien
cattttgaagtagtgagccttttga

SEQ ID NO: 543000 - DNA, 25 bp, Homo sapien
agcattttgaagtagtgagcctttt

SEQ ID NO: 543001 - DNA, 25 bp, Homo sapien
taaagcctctggcaggtggcaaaat

SEQ ID NO: 543002 - DNA, 25 bp, Homo sapien
gaattccatgaataagacagcctgt

SEQ ID NO: 543003 - DNA, 25 bp, Homo sapien
caaagtgggagtccaaacagtagac

SEQ ID NO: 543004 - DNA, 25 bp, Homo sapien
tggatgctggcaaaactaaactaga

SEQ ID NO: 543005 - DNA, 25 bp, Homo sapien
gaaaagcatctagaggaattccatg

SEQ ID NO: 543006 - DNA, 25 bp, Homo sapien
tgagaagatccatatctgtgagcag

SEQ ID NO: 543007 - DNA, 25 bp, Homo sapien
tcgctattaggtgctttcaagcttg

SEQ ID NO: 543008 - DNA, 25 bp, Homo sapien
ttccaatccattcgctattaggtgc

SEQ ID NO: 543009 - DNA, 25 bp, Homo sapien
gacagctggtacagcgtgtgactga

SEQ ID NO: 543010 - DNA, 25 bp, Homo sapien
aaataataacatatcatttccaaga

SEQ ID NO: 543011 - DNA, 25 bp, Homo sapien
cattaaataataacatatcatttcc

SEQ ID NO: 543012 - DNA, 25 bp, Homo sapien
ctgtgcagacattaaataataacat

SEQ ID NO: 543013 - DNA, 25 bp, Homo sapien
ttaaataataacatatcatttccaa

SEQ ID NO: 543014 - DNA, 25 bp, Homo sapien
tttcatcagcaggatccttgaaaat

SEQ ID NO: 543015 - DNA, 25 bp, Homo sapien
aatacaaatagagctaaaggcatgg

SEQ ID NO: 543016 - DNA, 25 bp, Homo sapien
tagagctaaaggcatggtctgcgag

SEQ ID NO: 543017 - DNA, 25 bp, Homo sapien
tcatcagcaggatccttgaaaatca

SEQ ID NO: 543018 - DNA, 25 bp, Homo sapien
cattatcaaactggtaattctctca

SEQ ID NO: 543019 - DNA, 25 bp, Homo sapien
aataacaacattcctaatcattatc

SEQ ID NO: 543020 - DNA, 25 bp, Homo sapien
attatcaaactggtaattctctcag

SEQ ID NO: 543021 - DNA, 25 bp, Homo sapien
gttttaataacaacattcctaatca

SEQ ID NO: 543022 - DNA, 25 bp, Homo sapien
tccaactgagaacacagataattct

SEQ ID NO: 543023 - DNA, 25 bp, Homo sapien
cctccgatttggaatctgctcacag

SEQ ID NO: 543024 - DNA, 25 bp, Homo sapien
ggattaactctcatatccaactgag

SEQ ID NO: 543025 - DNA, 25 bp, Homo sapien
cagtgatactgtaattgaactggag

SEQ ID NO: 543026 - DNA, 25 bp, Homo sapien
tatctggcctgtatgttgtggatag

SEQ ID NO: 543027 - DNA, 25 bp, Homo sapien
gttgtggatagtgttgccactaaaa

SEQ ID NO: 543028 - DNA, 25 bp, Homo sapien
gcaatgtagctcatatcagccaacc

SEQ ID NO: 543029 - DNA, 25 bp, Homo sapien
tcagccaacctgtcacaagatagta

SEQ ID NO: 543030 - DNA, 25 bp, Homo sapien
tcatgtccccgttttcagagtctgc

SEQ ID NO: 543031 - DNA, 25 bp, Homo sapien
cgacacttgaattcatgtccccgtt

SEQ ID NO: 543032 - DNA, 25 bp, Homo sapien
ttgaattcatgtccccgttttcaga

SEQ ID NO: 543033 - DNA, 25 bp, Homo sapien
attcatgtccccgttttcagagtct

SEQ ID NO: 543034 - DNA, 25 bp, Homo sapien
ctaatttgatttttttcaccttcat

SEQ ID NO: 543035 - DNA, 25 bp, Homo sapien
tctaatttgatttttttcaccttca

SEQ ID NO: 543036 - DNA, 25 bp, Homo sapien
tcagcaatagctgcattggtagcag

SEQ ID NO: 543037 - DNA, 25 bp, Homo sapien
ttcagcaatagctgcattggtagca

SEQ ID NO: 543038 - DNA, 25 bp, Homo sapien
cttcagcaatagctgcattggtagc

SEQ ID NO: 543039 - DNA, 25 bp, Homo sapien
cagcaatagctgcattggtagcagc

SEQ ID NO: 543040 - DNA, 25 bp, Homo sapien
tctcattaacttaatataaagcatg

SEQ ID NO: 543041 - DNA, 25 bp, Homo sapien
taaagcatgactctccaaaggtatg

SEQ ID NO: 543042 - DNA, 25 bp, Homo sapien
gtatagactaagaataacaaatctc

SEQ ID NO: 543043 - DNA, 25 bp, Homo sapien
tgttacattaagtgtgtatagacta

SEQ ID NO: 543044 - DNA, 25 bp, Homo sapien
gatatattgtctacttttacattgc

SEQ ID NO: 543045 - DNA, 25 bp, Homo sapien
tacattgcattccatataaaatgca

SEQ ID NO: 543046 - DNA, 25 bp, Homo sapien
acttgaaaggcccaatctttgatct

SEQ ID NO: 543047 - DNA, 25 bp, Homo sapien
aaagagacatattgctgtcaaattc

SEQ ID NO: 543048 - DNA, 25 bp, Homo sapien
ggttcctaaccatctgataggcaga

SEQ ID NO: 543049 - DNA, 25 bp, Homo sapien
aaggaggaaaatcgaacatgtggca

SEQ ID NO: 543050 - DNA, 25 bp, Homo sapien
tgtggcattaatacgcagtcctggt

SEQ ID NO: 543051 - DNA, 25 bp, Homo sapien
cagatggtgtgaagcggattctcca

SEQ ID NO: 543052 - DNA, 25 bp, Homo sapien
tgaacctttattgcctcaggcattg

SEQ ID NO: 543053 - DNA, 25 bp, Homo sapien
cctcaggcattggcctagttaataa

SEQ ID NO: 543054 - DNA, 25 bp, Homo sapien
atgaacctttattgcctcaggcatt

SEQ ID NO: 543055 - DNA, 25 bp, Homo sapien
aggcattggcctagttaataaactt

SEQ ID NO: 543056 - DNA, 25 bp, Homo sapien
aaatccttcagtgttctaaatactg

SEQ ID NO: 543057 - DNA, 25 bp, Homo sapien
tccttcagtgttctaaatactgcag

SEQ ID NO: 543058 - DNA, 25 bp, Homo sapien
ttcagtgttctaaatactgcagtcc

SEQ ID NO: 543059 - DNA, 25 bp, Homo sapien
ccttcagtgttctaaatactgcagt

SEQ ID NO: 543060 - DNA, 25 bp, Homo sapien
ccgccaccgcgctgccgtcgctctc

SEQ ID NO: 543061 - DNA, 25 bp, Homo sapien
cgccaccgcgctgccgtcgctctcc

SEQ ID NO: 543062 - DNA, 25 bp, Homo sapien
ggctcgtacaaagcagactgcccgc

SEQ ID NO: 543063 - DNA, 25 bp, Homo sapien
agactgcccgcaaatcgaccggtgg

SEQ ID NO: 543064 - DNA, 25 bp, Homo sapien
tcgaccggtggtaaagcacccagga

SEQ ID NO: 543065 - DNA, 25 bp, Homo sapien
gcaaatcgaccggtggtaaagcacc

SEQ ID NO: 543066 - DNA, 25 bp, Homo sapien
gctatccatgccaaacgtgtaacaa

SEQ ID NO: 543067 - DNA, 25 bp, Homo sapien
ctatccatgccaaacgtgtaacaat

SEQ ID NO: 543068 - DNA, 25 bp, Homo sapien
gtaagtttgctattaaaatacatta

SEQ ID NO: 543069 - DNA, 25 bp, Homo sapien
ttctgtgctgttcctgtaagtttgc

SEQ ID NO: 543070 - DNA, 25 bp, Homo sapien
tcctgtaagtttgctattaaaatac

SEQ ID NO: 543071 - DNA, 25 bp, Homo sapien
ttttctgagttgtactacatgcaag

SEQ ID NO: 543072 - DNA, 25 bp, Homo sapien
ctggggaggtgacactttgagtcct

SEQ ID NO: 543073 - DNA, 25 bp, Homo sapien
gaggtgacactttgagtcctcttag

SEQ ID NO: 543074 - DNA, 25 bp, Homo sapien
aatgcggcatgatgtgagagttctc

SEQ ID NO: 543075 - DNA, 25 bp, Homo sapien
acagaatgcggcatgatgtgagagt

SEQ ID NO: 543076 - DNA, 25 bp, Homo sapien
tagcacatttttcgatgatatgttt

SEQ ID NO: 543077 - DNA, 25 bp, Homo sapien
tttattacttcgcactgctagcctg

SEQ ID NO: 543078 - DNA, 25 bp, Homo sapien
ttacttcgcactgctagcctgatat

SEQ ID NO: 543079 - DNA, 25 bp, Homo sapien
ctatagcacatttttcgatgatatg

SEQ ID NO: 543080 - DNA, 25 bp, Homo sapien
gccttggctaactcaaccaacaggg

SEQ ID NO: 543081 - DNA, 25 bp, Homo sapien
tgtgtttgttcagtagccttggcta

SEQ ID NO: 543082 - DNA, 25 bp, Homo sapien
tattgcaagtcctttgagataatca

SEQ ID NO: 543083 - DNA, 25 bp, Homo sapien
ccactgtccattacagagggcagca

SEQ ID NO: 543084 - DNA, 25 bp, Homo sapien
cttccagtaattcatcaaaatgaga

SEQ ID NO: 543085 - DNA, 25 bp, Homo sapien
tcttccagtaattcatcaaaatgag

SEQ ID NO: 543086 - DNA, 25 bp, Homo sapien
ccagtaattcatcaaaatgagaaaa

SEQ ID NO: 543087 - DNA, 25 bp, Homo sapien
tccagtaattcatcaaaatgagaaa

SEQ ID NO: 543088 - DNA, 25 bp, Homo sapien
ttctctaggcctttgagacaacata

SEQ ID NO: 543089 - DNA, 25 bp, Homo sapien
tctctaggcctttgagacaacatag

SEQ ID NO: 543090 - DNA, 25 bp, Homo sapien
ctctaggcctttgagacaacataga

SEQ ID NO: 543091 - DNA, 25 bp, Homo sapien
ggaatgctccacaggtgttaccatg

SEQ ID NO: 543092 - DNA, 25 bp, Homo sapien
aatgctccacaggtgttaccatggc

SEQ ID NO: 543093 - DNA, 25 bp, Homo sapien
aaggaatgctccacaggtgttacca

SEQ ID NO: 543094 - DNA, 25 bp, Homo sapien
tgctccacaggtgttaccatggcaa

SEQ ID NO: 543095 - DNA, 25 bp, Homo sapien
gaattaatgtgcgtactgagtatat

SEQ ID NO: 543096 - DNA, 25 bp, Homo sapien
tatatgaagaactctaagagctgag

SEQ ID NO: 543097 - DNA, 25 bp, Homo sapien
gcgtactgagtatatgaagaactct

SEQ ID NO: 543098 - DNA, 25 bp, Homo sapien
tgagtatatgaagaactctaagagc

SEQ ID NO: 543099 - DNA, 25 bp, Homo sapien
agcacactttatgagaacccatggc

SEQ ID NO: 543100 - DNA, 25 bp, Homo sapien
acactttatgagaacccatggcagg

SEQ ID NO: 543101 - DNA, 25 bp, Homo sapien
ctgggtgcaactgaagcaccagcct

SEQ ID NO: 543102 - DNA, 25 bp, Homo sapien
gaacccatggcagggagcctgagct

SEQ ID NO: 543103 - DNA, 25 bp, Homo sapien
gtccacgttgacctagcagggcagg

SEQ ID NO: 543104 - DNA, 25 bp, Homo sapien
tatgttccctaatgtcgctttgcca

SEQ ID NO: 543105 - DNA, 25 bp, Homo sapien
cctgatactatcaacccaagggctg

SEQ ID NO: 543106 - DNA, 25 bp, Homo sapien
tggtctaaacgtgcataaaacatgg

SEQ ID NO: 543107 - DNA, 25 bp, Homo sapien
taaggaaagcatcaacatggcaatg

SEQ ID NO: 543108 - DNA, 25 bp, Homo sapien
ggtagtctatcactagtaatcagga

SEQ ID NO: 543109 - DNA, 25 bp, Homo sapien
tctgaatgcaatctatctagtccac

SEQ ID NO: 543110 - DNA, 25 bp, Homo sapien
tctagtccacacatatgagagaaca

SEQ ID NO: 543111 - DNA, 25 bp, Homo sapien
acatcttctaccatcaattccttct

SEQ ID NO: 543112 - DNA, 25 bp, Homo sapien
tctaacatcttctaccatcaattcc

SEQ ID NO: 543113 - DNA, 25 bp, Homo sapien
aacatcttctaccatcaattccttc

SEQ ID NO: 543114 - DNA, 25 bp, Homo sapien
taacatcttctaccatcaattcctt

SEQ ID NO: 543115 - DNA, 25 bp, Homo sapien
atacttactcatatcattttctctg

SEQ ID NO: 543116 - DNA, 25 bp, Homo sapien
tctgcctatacttactcatatcatt

SEQ ID NO: 543117 - DNA, 25 bp, Homo sapien
gatctttcctatctgcctatactta

SEQ ID NO: 543118 - DNA, 25 bp, Homo sapien
cctatctgcctatacttactcatat

SEQ ID NO: 543119 - DNA, 25 bp, Homo sapien
tattcaatagttaacccagaagtat

SEQ ID NO: 543120 - DNA, 25 bp, Homo sapien
gctcagctctgtagtaaacaaagga

SEQ ID NO: 543121 - DNA, 25 bp, Homo sapien
taatcgatctgatgtatatgagtac

SEQ ID NO: 543122 - DNA, 25 bp, Homo sapien
tcacagcaataggattagagcagta

SEQ ID NO: 543123 - DNA, 25 bp, Homo sapien
aaaaagctatgggagttcagaagag

SEQ ID NO: 543124 - DNA, 25 bp, Homo sapien
gagcaggtagcctttgagggaactc

SEQ ID NO: 543125 - DNA, 25 bp, Homo sapien
gaactaggcgttgtgcaaaaccatg

SEQ ID NO: 543126 - DNA, 25 bp, Homo sapien
ccacatagggacaaacaacagccaa

SEQ ID NO: 543127 - DNA, 25 bp, Homo sapien
tcaatcagtaactactgaaggtttt

SEQ ID NO: 543128 - DNA, 25 bp, Homo sapien
agcaccagcaacctattctttgctg

SEQ ID NO: 543129 - DNA, 25 bp, Homo sapien
ggaatcctcttatacccccagagca

SEQ ID NO: 543130 - DNA, 25 bp, Homo sapien
tttggaatcctcttatacccccaga

SEQ ID NO: 543131 - DNA, 25 bp, Homo sapien
caccagcaacctattctttgctgtg

SEQ ID NO: 543132 - DNA, 25 bp, Homo sapien
aatgggtccctgtatagcactgtag

SEQ ID NO: 543133 - DNA, 25 bp, Homo sapien
gataggtaggactttggagaccacc

SEQ ID NO: 543134 - DNA, 25 bp, Homo sapien
cagtttgtgcatgaacttgacaggc

SEQ ID NO: 543135 - DNA, 25 bp, Homo sapien
gcagctttctcaggaccgataggta

SEQ ID NO: 543136 - DNA, 25 bp, Homo sapien
tttatttctttctttcagatggaat

SEQ ID NO: 543137 - DNA, 25 bp, Homo sapien
gctggaatacagtggcatgatctca

SEQ ID NO: 543138 - DNA, 25 bp, Homo sapien
ttctttctttcagatggaatctcac

SEQ ID NO: 543139 - DNA, 25 bp, Homo sapien
tctgtcacccaggctggaatacagt

SEQ ID NO: 543140 - DNA, 25 bp, Homo sapien
tacaggcattcccttaagtgcacaa

SEQ ID NO: 543141 - DNA, 25 bp, Homo sapien
gataatgccgcaaatcccagctctt

SEQ ID NO: 543142 - DNA, 25 bp, Homo sapien
tgcctaaaaatatccaatgactaat

SEQ ID NO: 543143 - DNA, 25 bp, Homo sapien
cagataaaacctgggctgatacacc

SEQ ID NO: 543144 - DNA, 25 bp, Homo sapien
cctctctgatcgtgcccatttccct

SEQ ID NO: 543145 - DNA, 25 bp, Homo sapien
tctgatcgtgcccatttcccttctg

SEQ ID NO: 543146 - DNA, 25 bp, Homo sapien
ttcctctctgatcgtgcccatttcc

SEQ ID NO: 543147 - DNA, 25 bp, Homo sapien
gatcgtgcccatttcccttctggca

SEQ ID NO: 543148 - DNA, 25 bp, Homo sapien
cgtaaaaaacgccactatctggtga

SEQ ID NO: 543149 - DNA, 25 bp, Homo sapien
tctgtttttatccaggagatgggca

SEQ ID NO: 543150 - DNA, 25 bp, Homo sapien
ccacttggctaatactgaatagcag

SEQ ID NO: 543151 - DNA, 25 bp, Homo sapien
ggcacaaatatatcgcacaactctg

SEQ ID NO: 543152 - DNA, 25 bp, Homo sapien
ttcaattggatttgctcgtggtgac

SEQ ID NO: 543153 - DNA, 25 bp, Homo sapien
tgctgattctgacaactggagttct

SEQ ID NO: 543154 - DNA, 25 bp, Homo sapien
acacaatgccacagcctatcacagg

SEQ ID NO: 543155 - DNA, 25 bp, Homo sapien
cctctcagtccaagggacttttcaa

SEQ ID NO: 543156 - DNA, 25 bp, Homo sapien
aggcgaatgattctcagtggcttct

SEQ ID NO: 543157 - DNA, 25 bp, Homo sapien
aaagcgagaggcgaatgattctcag

SEQ ID NO: 543158 - DNA, 25 bp, Homo sapien
ctgccatgggaaagcgagaggcgaa

SEQ ID NO: 543159 - DNA, 25 bp, Homo sapien
ccatgggaaagcgagaggcgaatga

SEQ ID NO: 543160 - DNA, 25 bp, Homo sapien
caatcttcaagtgaggtaagcaggg

SEQ ID NO: 543161 - DNA, 25 bp, Homo sapien
tatccattaggagaactcttctgca

SEQ ID NO: 543162 - DNA, 25 bp, Homo sapien
gggtccccactgataccaatacagt

SEQ ID NO: 543163 - DNA, 25 bp, Homo sapien
taattgcttggcctactgctgtgct

SEQ ID NO: 543164 - DNA, 25 bp, Homo sapien
taatgggcacaatctatgagggaaa

SEQ ID NO: 543165 - DNA, 25 bp, Homo sapien
cacttcatagcacaacttggtttag

SEQ ID NO: 543166 - DNA, 25 bp, Homo sapien
tattcagtaaaagggcgcaaaacaa

SEQ ID NO: 543167 - DNA, 25 bp, Homo sapien
ccaaggttggcaacaccattatgaa

SEQ ID NO: 543168 - DNA, 25 bp, Homo sapien
catctgacttgatctctacaacttg

SEQ ID NO: 543169 - DNA, 25 bp, Homo sapien
tctgacttgatctctacaacttgtt

SEQ ID NO: 543170 - DNA, 25 bp, Homo sapien
ctcatctgacttgatctctacaact

SEQ ID NO: 543171 - DNA, 25 bp, Homo sapien
tgacttgatctctacaacttgttct

SEQ ID NO: 543172 - DNA, 25 bp, Homo sapien
tcttcttcttgtccgtacggtatag

SEQ ID NO: 543173 - DNA, 25 bp, Homo sapien
ttcagatgagttccttaaaatggta

SEQ ID NO: 543174 - DNA, 25 bp, Homo sapien
gttttcagatgagttccttaaaatg

SEQ ID NO: 543175 - DNA, 25 bp, Homo sapien
ttcttcttcttgtccgtacggtata

SEQ ID NO: 543176 - DNA, 25 bp, Homo sapien
caactagacattggttgcccagtaa

SEQ ID NO: 543177 - DNA, 25 bp, Homo sapien
tctatgagatatgagttggcaacct

SEQ ID NO: 543178 - DNA, 25 bp, Homo sapien
caaagatcactctggactgaacaaa

SEQ ID NO: 543179 - DNA, 25 bp, Homo sapien
tgaatgatgctacactgattactgc

SEQ ID NO: 543180 - DNA, 25 bp, Homo sapien
gaaactgagcatgccactagaagga

SEQ ID NO: 543181 - DNA, 25 bp, Homo sapien
tacagtggactaatatgagagctgc

SEQ ID NO: 543182 - DNA, 25 bp, Homo sapien
taacctgtgtggtagcctctttcaa

SEQ ID NO: 543183 - DNA, 25 bp, Homo sapien
tggctggccatcattcgactttatc

SEQ ID NO: 543184 - DNA, 25 bp, Homo sapien
aaactggtttctcttattgatcctc

SEQ ID NO: 543185 - DNA, 25 bp, Homo sapien
catagagacacatcacacactttgt

SEQ ID NO: 543186 - DNA, 25 bp, Homo sapien
catctacggacacttagggttagga

SEQ ID NO: 543187 - DNA, 25 bp, Homo sapien
tagtactaatttgtaagctggacag

SEQ ID NO: 543188 - DNA, 25 bp, Homo sapien
tttggtagcacaggaacacagaggg

SEQ ID NO: 543189 - DNA, 25 bp, Homo sapien
tatgatttgatttagaggcctatgg

SEQ ID NO: 543190 - DNA, 25 bp, Homo sapien
taaattctcactgtatttgtgtgct

SEQ ID NO: 543191 - DNA, 25 bp, Homo sapien
tgccgaacaaaaccaattcccaata

SEQ ID NO: 543192 - DNA, 25 bp, Homo sapien
acagcagtgtttctagactttggag

SEQ ID NO: 543193 - DNA, 25 bp, Homo sapien
ggagaatccactcttttcccttgaa

SEQ ID NO: 543194 - DNA, 25 bp, Homo sapien
gagaatccactcttttcccttgaag

SEQ ID NO: 543195 - DNA, 25 bp, Homo sapien
agtgtttctagactttggagaatcc

SEQ ID NO: 543196 - DNA, 25 bp, Homo sapien
ccagtcacacagaattacaatgttc

SEQ ID NO: 543197 - DNA, 25 bp, Homo sapien
tgaacaccttccagtcacacagaat

SEQ ID NO: 543198 - DNA, 25 bp, Homo sapien
cagggtaaggagttgtaatgaacac

SEQ ID NO: 543199 - DNA, 25 bp, Homo sapien
gagttgtaatgaacaccttccagtc

SEQ ID NO: 543200 - DNA, 25 bp, Homo sapien
cagagagaaacaaaagccgaggagc

SEQ ID NO: 543201 - DNA, 25 bp, Homo sapien
agagaaacaaaagccgaggagctcc

SEQ ID NO: 543202 - DNA, 25 bp, Homo sapien
tcagagagaaacaaaagccgaggag

SEQ ID NO: 543203 - DNA, 25 bp, Homo sapien
cctgtccatctgtcagagagaaaca

SEQ ID NO: 543204 - DNA, 25 bp, Homo sapien
gagaagtatttcacgtttgtttgct

SEQ ID NO: 543205 - DNA, 25 bp, Homo sapien
atttcacgtttgtttgctttgtctt

SEQ ID NO: 543206 - DNA, 25 bp, Homo sapien
agaagtatttcacgtttgtttgctt

SEQ ID NO: 543207 - DNA, 25 bp, Homo sapien
tctggaaggccatagtagacaatgc

SEQ ID NO: 543208 - DNA, 25 bp, Homo sapien
tcccgaaagttcagagtcctcaaga

SEQ ID NO: 543209 - DNA, 25 bp, Homo sapien
tcaggtttatctaatgccaaagcag

SEQ ID NO: 543210 - DNA, 25 bp, Homo sapien
gaaggtctcagttctaaaggaagct

SEQ ID NO: 543211 - DNA, 25 bp, Homo sapien
aatatgatgaagtatccagttatct

SEQ ID NO: 543212 - DNA, 25 bp, Homo sapien
taatggaactgtacaagaaattact

SEQ ID NO: 543213 - DNA, 25 bp, Homo sapien
agtggaaatattaatggaactgtac

SEQ ID NO: 543214 - DNA, 25 bp, Homo sapien
gaaatattaatggaactgtacaaga

SEQ ID NO: 543215 - DNA, 25 bp, Homo sapien
tgaacagtgctagaacagaccagtg

SEQ ID NO: 543216 - DNA, 25 bp, Homo sapien
ccagtggagtcctgccttcaaggaa

SEQ ID NO: 543217 - DNA, 25 bp, Homo sapien
cagggtggcctgatagaaagtatgc

SEQ ID NO: 543218 - DNA, 25 bp, Homo sapien
tatgctgggtgcaagtgtgctttca

SEQ ID NO: 543219 - DNA, 25 bp, Homo sapien
catggaatatattcctgaagcccct

SEQ ID NO: 543220 - DNA, 25 bp, Homo sapien
ccatgcacatgtaaagctaaagaga

SEQ ID NO: 543221 - DNA, 25 bp, Homo sapien
tgaagcccctagtctaacatctggc

SEQ ID NO: 543222 - DNA, 25 bp, Homo sapien
tctggcaaccatgcaaacagctgta

SEQ ID NO: 543223 - DNA, 25 bp, Homo sapien
tgttctttcagccaacggaagttgt

SEQ ID NO: 543224 - DNA, 25 bp, Homo sapien
tcttatgatagccaataggaaacag

SEQ ID NO: 543225 - DNA, 25 bp, Homo sapien
agttcctgtcgtagtgcttttagca

SEQ ID NO: 543226 - DNA, 25 bp, Homo sapien
tgcagtgacacccagagcttttgtt

SEQ ID NO: 543227 - DNA, 25 bp, Homo sapien
ggttctcatataacacgcccgtgaa

SEQ ID NO: 543228 - DNA, 25 bp, Homo sapien
tatctagagctattgtgcccaagag

SEQ ID NO: 543229 - DNA, 25 bp, Homo sapien
gaccaaaatagaccaaagggagctg

SEQ ID NO: 543230 - DNA, 25 bp, Homo sapien
acagggttatgagggaagcacacac

SEQ ID NO: 543231 - DNA, 25 bp, Homo sapien
attatcccagaggtaaaaattatct

SEQ ID NO: 543232 - DNA, 25 bp, Homo sapien
ttatcccagaggtaaaaattatctc

SEQ ID NO: 543233 - DNA, 25 bp, Homo sapien
agtaatattgtttctgtttattctc

SEQ ID NO: 543234 - DNA, 25 bp, Homo sapien
attgtcccaacagaattagtaatat

SEQ ID NO: 543235 - DNA, 25 bp, Homo sapien
gtcccaacagaattagtaatattgt

SEQ ID NO: 543236 - DNA, 25 bp, Homo sapien
gtaatattgtttctgtttattctca

SEQ ID NO: 543237 - DNA, 25 bp, Homo sapien
tttctaacattctcctacaaatctt

SEQ ID NO: 543238 - DNA, 25 bp, Homo sapien
tatcataggtactcagattcaggaa

SEQ ID NO: 543239 - DNA, 25 bp, Homo sapien
ctccaattaaaagcagaacggttga

SEQ ID NO: 543240 - DNA, 25 bp, Homo sapien
caagtgaatggtaatcactgcaggc

SEQ ID NO: 543241 - DNA, 25 bp, Homo sapien
cactgcaggctatttaccaacttga

SEQ ID NO: 543242 - DNA, 25 bp, Homo sapien
tgtacaaagttgagatgggaaacac

SEQ ID NO: 543243 - DNA, 25 bp, Homo sapien
aacctaaaatatgtggatgccatga

SEQ ID NO: 543244 - DNA, 25 bp, Homo sapien
gatacagttgttttaccagcccaag

SEQ ID NO: 543245 - DNA, 25 bp, Homo sapien
gcctaaatagggtaaccttcatgaa

SEQ ID NO: 543246 - DNA, 25 bp, Homo sapien
tagagattaatcaaaggcaagtagc

SEQ ID NO: 543247 - DNA, 25 bp, Homo sapien
gtccatgagtatgcttacgatcaca

SEQ ID NO: 543248 - DNA, 25 bp, Homo sapien
catcagacatttgctgttgaccaca

SEQ ID NO: 543249 - DNA, 25 bp, Homo sapien
catttgtgctgtgatatgtacgtcc

SEQ ID NO: 543250 - DNA, 25 bp, Homo sapien
tgatgagcatagcaacaactgacat

SEQ ID NO: 543251 - DNA, 25 bp, Homo sapien
actgagctggtatatagtggccttc

SEQ ID NO: 543252 - DNA, 25 bp, Homo sapien
catctgaaacttgggactacttcgg

SEQ ID NO: 543253 - DNA, 25 bp, Homo sapien
tgaaatcattcaccctttggacttg

SEQ ID NO: 543254 - DNA, 25 bp, Homo sapien
tgttctccaactacaagaagatagg

SEQ ID NO: 543255 - DNA, 25 bp, Homo sapien
taaagctgtgatcctaattcagagg

SEQ ID NO: 543256 - DNA, 25 bp, Homo sapien
gaggcagtgactacccgctgcttaa

SEQ ID NO: 543257 - DNA, 25 bp, Homo sapien
agccagccgagttcagaggcagtga

SEQ ID NO: 543258 - DNA, 25 bp, Homo sapien
ataaaagcaggtcaagtttctgtcc

SEQ ID NO: 543259 - DNA, 25 bp, Homo sapien
agcaggtcaagtttctgtccctggg

SEQ ID NO: 543260 - DNA, 25 bp, Homo sapien
tcccatggggtaacttgtataaatg

SEQ ID NO: 543261 - DNA, 25 bp, Homo sapien
caatttgaagcatggaagcactgtt

SEQ ID NO: 543262 - DNA, 25 bp, Homo sapien
ggaccacacctttaacacaatgcag

SEQ ID NO: 543263 - DNA, 25 bp, Homo sapien
gcaaaatgtaggtttgcacagagcc

SEQ ID NO: 543264 - DNA, 25 bp, Homo sapien
gaagaatcccagcttgaaatcctgg

SEQ ID NO: 543265 - DNA, 25 bp, Homo sapien
ccttaatgcagtcccaaagcctgaa

SEQ ID NO: 543266 - DNA, 25 bp, Homo sapien
tatgttgctcatacaatgcaatcga

SEQ ID NO: 543267 - DNA, 25 bp, Homo sapien
taatgaaatctagatgactcacctg

SEQ ID NO: 543268 - DNA, 25 bp, Homo sapien
gactcacctgtacctatttagaagg

SEQ ID NO: 543269 - DNA, 25 bp, Homo sapien
tcagacaaggattcaaagggagaca

SEQ ID NO: 543270 - DNA, 25 bp, Homo sapien
caacaggtttggaagagattatcca

SEQ ID NO: 543271 - DNA, 25 bp, Homo sapien
tcaacaacttatatcctgcagtata

SEQ ID NO: 543272 - DNA, 25 bp, Homo sapien
ccacgatattgtgagagactaactc

SEQ ID NO: 543273 - DNA, 25 bp, Homo sapien
aaagtaaagtatcatcataaccatg

SEQ ID NO: 543274 - DNA, 25 bp, Homo sapien
gagacattaggcgttattggaagca

SEQ ID NO: 543275 - DNA, 25 bp, Homo sapien
tactaacttactgagccactttgag

SEQ ID NO: 543276 - DNA, 25 bp, Homo sapien
tctgtgtcattgaaaaccaggcaac

SEQ ID NO: 543277 - DNA, 25 bp, Homo sapien
taattggaggaagctgatcaaggac

SEQ ID NO: 543278 - DNA, 25 bp, Homo sapien
gcaagtttaaactccagatctgttg

SEQ ID NO: 543279 - DNA, 25 bp, Homo sapien
gaaacacataaagaggataccgagg

SEQ ID NO: 543280 - DNA, 25 bp, Homo sapien
atattttacattctgcacgaccaag

SEQ ID NO: 543281 - DNA, 25 bp, Homo sapien
caccaatttactggataggcagaca

SEQ ID NO: 543282 - DNA, 25 bp, Homo sapien
cccactgagcgttcattagcataaa

SEQ ID NO: 543283 - DNA, 25 bp, Homo sapien
ttagcataaaactggtctggctggg

SEQ ID NO: 543284 - DNA, 25 bp, Homo sapien
tctctaccccgaaactgacaagttg

SEQ ID NO: 543285 - DNA, 25 bp, Homo sapien
tgcgcttccttgcagagaaccgtgg

SEQ ID NO: 543286 - DNA, 25 bp, Homo sapien
caagtgcttcaggaacaggtcgaaa

SEQ ID NO: 543287 - DNA, 25 bp, Homo sapien
tagagggtctcgaagtccttcctgg

SEQ ID NO: 543288 - DNA, 25 bp, Homo sapien
ttggtgtagaccgtatgcaagcccc

SEQ ID NO: 543289 - DNA, 25 bp, Homo sapien
gtcccctcaggatgcgaacttgttc

SEQ ID NO: 543290 - DNA, 25 bp, Homo sapien
ctcagatccaccattttgcactcat

SEQ ID NO: 543291 - DNA, 25 bp, Homo sapien
tcagatccaccattttgcactcatt

SEQ ID NO: 543292 - DNA, 25 bp, Homo sapien
gctgccgttgctcgcggccgccagg

SEQ ID NO: 543293 - DNA, 25 bp, Homo sapien
atgggggtgctggaagcgacgccgc

SEQ ID NO: 543294 - DNA, 25 bp, Homo sapien
tcgcggccgccaggttggggttgca

SEQ ID NO: 543295 - DNA, 25 bp, Homo sapien
ccggtgctggcgttgatgggggtgc

SEQ ID NO: 543296 - DNA, 25 bp, Homo sapien
gaccagctgggtcggagggatcaaa

SEQ ID NO: 543297 - DNA, 25 bp, Homo sapien
tccgatggaaggagccggagacgaa

SEQ ID NO: 543298 - DNA, 25 bp, Homo sapien
ctccgggcggaacagagttggccca

SEQ ID NO: 543299 - DNA, 25 bp, Homo sapien
gacgaagtcgccgaagaggtggagg

SEQ ID NO: 543300 - DNA, 25 bp, Homo sapien
gaagcgagaggaaaagttgccacac

SEQ ID NO: 543301 - DNA, 25 bp, Homo sapien
gcgagcacgagaggcgctctggaga

SEQ ID NO: 543302 - DNA, 25 bp, Homo sapien
gggcaacaacaactccgggagagaa

SEQ ID NO: 543303 - DNA, 25 bp, Homo sapien
gaaggtaataaagagcgagcgcaag

SEQ ID NO: 543304 - DNA, 25 bp, Homo sapien
gggctgggatcgagggctggtttgg

SEQ ID NO: 543305 - DNA, 25 bp, Homo sapien
tcggctgttgttgtgtgggtctcgc

SEQ ID NO: 543306 - DNA, 25 bp, Homo sapien
aaaagtgtcccgcaagtcgaaatgc

SEQ ID NO: 543307 - DNA, 25 bp, Homo sapien
agtcgaaatgcgagtcctctccggg

SEQ ID NO: 543308 - DNA, 25 bp, Homo sapien
gcacaaagttaaggatgaaggtgaa

SEQ ID NO: 543309 - DNA, 25 bp, Homo sapien
cacaaagttaaggatgaaggtgaaa

SEQ ID NO: 543310 - DNA, 25 bp, Homo sapien
ctagcacaaagttaaggatgaaggt

SEQ ID NO: 543311 - DNA, 25 bp, Homo sapien
tagcacaaagttaaggatgaaggtg

SEQ ID NO: 543312 - DNA, 25 bp, Homo sapien
catctccacgcgttttggcaatgag

SEQ ID NO: 543313 - DNA, 25 bp, Homo sapien
acttaaagaggagcctgagcgcgcc

SEQ ID NO: 543314 - DNA, 25 bp, Homo sapien
tctccttccaggatttaggatccat

SEQ ID NO: 543315 - DNA, 25 bp, Homo sapien
aaagcttctaaacaatcgcccgcca

SEQ ID NO: 543316 - DNA, 25 bp, Homo sapien
gatgcattctctaatcaagcacaga

SEQ ID NO: 543317 - DNA, 25 bp, Homo sapien
ctcaagaacaatataagacttaagg

SEQ ID NO: 543318 - DNA, 25 bp, Homo sapien
aaggatgcattctctaatcaagcac

SEQ ID NO: 543319 - DNA, 25 bp, Homo sapien
tccttctcctcaagaacaatataag

SEQ ID NO: 543320 - DNA, 25 bp, Homo sapien
tagaacgaagagactttgctatcag

SEQ ID NO: 543321 - DNA, 25 bp, Homo sapien
taaaatggtgtattaccctgtgagc

SEQ ID NO: 543322 - DNA, 25 bp, Homo sapien
ggtgtattaccctgtgagcaattgc

SEQ ID NO: 543323 - DNA, 25 bp, Homo sapien
tcagtagaacgaagagactttgcta

SEQ ID NO: 543324 - DNA, 25 bp, Homo sapien
cactgtgagctcaacagattcatcc

SEQ ID NO: 543325 - DNA, 25 bp, Homo sapien
taacactgtcaggatagaactgtag

SEQ ID NO: 543326 - DNA, 25 bp, Homo sapien
ccctcaagatctgaggcaatctcag

SEQ ID NO: 543327 - DNA, 25 bp, Homo sapien
gaactgtagtctgcctctcactgtg

SEQ ID NO: 543328 - DNA, 25 bp, Homo sapien
ctccatccatgccattcagtcttgg

SEQ ID NO: 543329 - DNA, 25 bp, Homo sapien
catccatgccattcagtcttggtta

SEQ ID NO: 543330 - DNA, 25 bp, Homo sapien
attaggtgtgctttactttctctcc

SEQ ID NO: 543331 - DNA, 25 bp, Homo sapien
ccattaggtgtgctttactttctct

SEQ ID NO: 543332 - DNA, 25 bp, Homo sapien
cataggctgggcaatgattcattcc

SEQ ID NO: 543333 - DNA, 25 bp, Homo sapien
tgttagctacttctgccaagcccaa

SEQ ID NO: 543334 - DNA, 25 bp, Homo sapien
caaagagctataggcctctgtgagc

SEQ ID NO: 543335 - DNA, 25 bp, Homo sapien
agtttccctgagttgttagctactt

SEQ ID NO: 543336 - DNA, 25 bp, Homo sapien
caggtgctgacccatgcccagtctt

SEQ ID NO: 543337 - DNA, 25 bp, Homo sapien
aattcaggtgctgacccatgcccag

SEQ ID NO: 543338 - DNA, 25 bp, Homo sapien
ggtgctgacccatgcccagtcttgg

SEQ ID NO: 543339 - DNA, 25 bp, Homo sapien
ttcaggtgctgacccatgcccagtc

SEQ ID NO: 543340 - DNA, 25 bp, Homo sapien
ttcttgtgagtctcgccactggccc

SEQ ID NO: 543341 - DNA, 25 bp, Homo sapien
gcttcccttcttgtgagtctcgcca

SEQ ID NO: 543342 - DNA, 25 bp, Homo sapien
ttagaccaaggcctgccaatctcag

SEQ ID NO: 543343 - DNA, 25 bp, Homo sapien
ccaaggcctgccaatctcaggacaa

SEQ ID NO: 543344 - DNA, 25 bp, Homo sapien
ctgtgacgcagtggggcagcattac

SEQ ID NO: 543345 - DNA, 25 bp, Homo sapien
aaaactgtttcttcatgcagccttg

SEQ ID NO: 543346 - DNA, 25 bp, Homo sapien
aggaaaactgtttcttcatgcagcc

SEQ ID NO: 543347 - DNA, 25 bp, Homo sapien
tcttgttggtaaggtgcctgtagaa

SEQ ID NO: 543348 - DNA, 25 bp, Homo sapien
ctgtttcttcatgcagccttgacac

SEQ ID NO: 543349 - DNA, 25 bp, Homo sapien
ggatggccttcaagacatgtagctt

SEQ ID NO: 543350 - DNA, 25 bp, Homo sapien
gcttgggcacatgtttgtctgccag

SEQ ID NO: 543351 - DNA, 25 bp, Homo sapien
gccagttctgggtgcttaggtataa

SEQ ID NO: 543352 - DNA, 25 bp, Homo sapien
taggtataaagacatcgctcttggc

SEQ ID NO: 543353 - DNA, 25 bp, Homo sapien
ttgggcactcaacaatgactttacg

SEQ ID NO: 543354 - DNA, 25 bp, Homo sapien
tagatttcaattacacctcaaggca

SEQ ID NO: 543355 - DNA, 25 bp, Homo sapien
gacaggaaaggcaatgtcccctaat

SEQ ID NO: 543356 - DNA, 25 bp, Homo sapien
gagcaaggactccaaccctagcaat

SEQ ID NO: 543357 - DNA, 25 bp, Homo sapien
gatgataatacgatcatttccttca

SEQ ID NO: 543358 - DNA, 25 bp, Homo sapien
tgataatacgatcatttccttcaac

SEQ ID NO: 543359 - DNA, 25 bp, Homo sapien
ttcaaccattggttttggatggagc

SEQ ID NO: 543360 - DNA, 25 bp, Homo sapien
gtgatgatgataatacgatcatttc

SEQ ID NO: 543361 - DNA, 25 bp, Homo sapien
atctgccctttcaatgctatgcaca

SEQ ID NO: 543362 - DNA, 25 bp, Homo sapien
tcaaggacatagtagttttcataca

SEQ ID NO: 543363 - DNA, 25 bp, Homo sapien
caaggacatagtagttttcatacaa

SEQ ID NO: 543364 - DNA, 25 bp, Homo sapien
aaggacatagtagttttcatacaaa

SEQ ID NO: 543365 - DNA, 25 bp, Homo sapien
ttaatcaaggacatagtagttttca

SEQ ID NO: 543366 - DNA, 25 bp, Homo sapien
tgaccgccttcttcaaaagtatgtc

SEQ ID NO: 543367 - DNA, 25 bp, Homo sapien
cttgaccgccttcttcaaaagtatg

SEQ ID NO: 543368 - DNA, 25 bp, Homo sapien
ttgaccgccttcttcaaaagtatgt

SEQ ID NO: 543369 - DNA, 25 bp, Homo sapien
cagaagtgttcagttgggtcccaag

SEQ ID NO: 543370 - DNA, 25 bp, Homo sapien
taattcctaggcagcctatcagaag

SEQ ID NO: 543371 - DNA, 25 bp, Homo sapien
aggtcatcacctctttgctcttgtc

SEQ ID NO: 543372 - DNA, 25 bp, Homo sapien
cttgtctgagggctccggtttccat

SEQ ID NO: 543373 - DNA, 25 bp, Homo sapien
tagttgaagttacccttaaatgctc

SEQ ID NO: 543374 - DNA, 25 bp, Homo sapien
gataaacgcttattgaacccaacac

SEQ ID NO: 543375 - DNA, 25 bp, Homo sapien
tggtgtgccactttgtcactattgt

SEQ ID NO: 543376 - DNA, 25 bp, Homo sapien
tataagcatacaagttcagtgcatg

SEQ ID NO: 543377 - DNA, 25 bp, Homo sapien
gaggagccagttagcaaagatgtta

SEQ ID NO: 543378 - DNA, 25 bp, Homo sapien
ctagagtagatagcgtacataggga

SEQ ID NO: 543379 - DNA, 25 bp, Homo sapien
aaatccaggcacagaagtttccata

SEQ ID NO: 543380 - DNA, 25 bp, Homo sapien
ttcctgaaatatgatgggtaacgag

SEQ ID NO: 543381 - DNA, 25 bp, Homo sapien
gaagagggtcactactgtaatcggc

SEQ ID NO: 543382 - DNA, 25 bp, Homo sapien
caatgaatttgaagagggtcactac

SEQ ID NO: 543383 - DNA, 25 bp, Homo sapien
tgtaatcggcacttgctaacaggga

SEQ ID NO: 543384 - DNA, 25 bp, Homo sapien
cttgctaacagggagataaattggg

SEQ ID NO: 543385 - DNA, 25 bp, Homo sapien
aaaattgaaagtaagccttcagcac

SEQ ID NO: 543386 - DNA, 25 bp, Homo sapien
gaaaaattgaaagtaagccttcagc

SEQ ID NO: 543387 - DNA, 25 bp, Homo sapien
aaattgaaagtaagccttcagcacg

SEQ ID NO: 543388 - DNA, 25 bp, Homo sapien
aaaaattgaaagtaagccttcagca

SEQ ID NO: 543389 - DNA, 25 bp, Homo sapien
cacctggggtagaagtggtagctgg

SEQ ID NO: 543390 - DNA, 25 bp, Homo sapien
gaggcattcacttttcctgcccaga

SEQ ID NO: 543391 - DNA, 25 bp, Homo sapien
caagaggcattcacttttcctgccc

SEQ ID NO: 543392 - DNA, 25 bp, Homo sapien
ggcattcacttttcctgcccagagc

SEQ ID NO: 543393 - DNA, 25 bp, Homo sapien
tcacttccttttgccctatggacat

SEQ ID NO: 543394 - DNA, 25 bp, Homo sapien
catcgtcattttcggcatcattcac

SEQ ID NO: 543395 - DNA, 25 bp, Homo sapien
cacaatcatcgtcattttcggcatc

SEQ ID NO: 543396 - DNA, 25 bp, Homo sapien
caatcatcgtcattttcggcatcat

SEQ ID NO: 543397 - DNA, 25 bp, Homo sapien
tgtgtccttgcaagatggagagttt

SEQ ID NO: 543398 - DNA, 25 bp, Homo sapien
cacagttctgattcaggaaattcgg

SEQ ID NO: 543399 - DNA, 25 bp, Homo sapien
ttgacctgcattggcagcagcactg

SEQ ID NO: 543400 - DNA, 25 bp, Homo sapien
ctaattagagcccattataacttga

SEQ ID NO: 543401 - DNA, 25 bp, Homo sapien
tttatcccatagagaattgtccata

SEQ ID NO: 543402 - DNA, 25 bp, Homo sapien
tttctttaccagacgtccacatggc

SEQ ID NO: 543403 - DNA, 25 bp, Homo sapien
tctttattcacgtagctcctgctta

SEQ ID NO: 543404 - DNA, 25 bp, Homo sapien
ttgttccagtgattgagggagtttg

SEQ ID NO: 543405 - DNA, 25 bp, Homo sapien
tctgggtggcatctcaattatgaat

SEQ ID NO: 543406 - DNA, 25 bp, Homo sapien
tcagcctggtatcgttctgggtggc

SEQ ID NO: 543407 - DNA, 25 bp, Homo sapien
gaaccatgtggagatccacaggtat

SEQ ID NO: 543408 - DNA, 25 bp, Homo sapien
ccatgtggagatccacaggtatggg

SEQ ID NO: 543409 - DNA, 25 bp, Homo sapien
ggcataagcattgacctgctcacaa

SEQ ID NO: 543410 - DNA, 25 bp, Homo sapien
cagcctgtctggcataagcattgac

SEQ ID NO: 543411 - DNA, 25 bp, Homo sapien
ctagaggcagcctgtctggcataag

SEQ ID NO: 543412 - DNA, 25 bp, Homo sapien
agcattgacctgctcacaattggca

SEQ ID NO: 543413 - DNA, 25 bp, Homo sapien
tcacctgtttcacttactcctacca

SEQ ID NO: 543414 - DNA, 25 bp, Homo sapien
ctacttattgaaggggataccattt

SEQ ID NO: 543415 - DNA, 25 bp, Homo sapien
ttcacttactcctaccaaatcttca

SEQ ID NO: 543416 - DNA, 25 bp, Homo sapien
tcctaccaaatcttcaagtaaattc

SEQ ID NO: 543417 - DNA, 25 bp, Homo sapien
gagacacaagggctacataaaagct

SEQ ID NO: 543418 - DNA, 25 bp, Homo sapien
tttatatggatctatgtgagacaca

SEQ ID NO: 543419 - DNA, 25 bp, Homo sapien
agggctacataaaagctgctttgca

SEQ ID NO: 543420 - DNA, 25 bp, Homo sapien
gtttttatatggatctatgtgagac

SEQ ID NO: 543421 - DNA, 25 bp, Homo sapien
ctgggacaccacacagcgtggcgtg

SEQ ID NO: 543422 - DNA, 25 bp, Homo sapien
ttggcacctcctgtgtttgctgcat

SEQ ID NO: 543423 - DNA, 25 bp, Homo sapien
cagcagcggcctctggaagtgaagc

SEQ ID NO: 543424 - DNA, 25 bp, Homo sapien
tgcattgagagtgccaggagccagc

SEQ ID NO: 543425 - DNA, 25 bp, Homo sapien
cagaaagactagtaattatagtgcc

SEQ ID NO: 543426 - DNA, 25 bp, Homo sapien
ttctccattaaaaatgctggcagag

SEQ ID NO: 543427 - DNA, 25 bp, Homo sapien
aactgaatcttaatcgacttctcca

SEQ ID NO: 543428 - DNA, 25 bp, Homo sapien
taaatagcagtgtaaacttacagaa

SEQ ID NO: 543429 - DNA, 25 bp, Homo sapien
tcactatatctctgtttacggggaa

SEQ ID NO: 543430 - DNA, 25 bp, Homo sapien
catttaacagctgttcagtaaggtc

SEQ ID NO: 543431 - DNA, 25 bp, Homo sapien
atgggctcatgcagatcactatatc

SEQ ID NO: 543432 - DNA, 25 bp, Homo sapien
actgccaagcatgaaggaataattc

SEQ ID NO: 543433 - DNA, 25 bp, Homo sapien
cagagcaggctactgttttgaagga

SEQ ID NO: 543434 - DNA, 25 bp, Homo sapien
ggactgtgcctgttgtgtttgccca

SEQ ID NO: 543435 - DNA, 25 bp, Homo sapien
tcttgggaagcaagtaggaccagct

SEQ ID NO: 543436 - DNA, 25 bp, Homo sapien
tgacataggattgtgcacgtgaaca

SEQ ID NO: 543437 - DNA, 25 bp, Homo sapien
caagcctataataacgagggttcaa

SEQ ID NO: 543438 - DNA, 25 bp, Homo sapien
gcacgagaagcctttcaagcctata

SEQ ID NO: 543439 - DNA, 25 bp, Homo sapien
taatcatgcagatcttgcttcggca

SEQ ID NO: 543440 - DNA, 25 bp, Homo sapien
caactcgtgcttggcagcataatca

SEQ ID NO: 543441 - DNA, 25 bp, Homo sapien
taacttgtgtgagttttagctgagt

SEQ ID NO: 543442 - DNA, 25 bp, Homo sapien
cttgtgtgagttttagctgagtcac

SEQ ID NO: 543443 - DNA, 25 bp, Homo sapien
aacttgtgtgagttttagctgagtc

SEQ ID NO: 543444 - DNA, 25 bp, Homo sapien
acttgtgtgagttttagctgagtca

SEQ ID NO: 543445 - DNA, 25 bp, Homo sapien
aaactgctgacattatttcaatggg

SEQ ID NO: 543446 - DNA, 25 bp, Homo sapien
gagagagtactgcagtacaatttct

SEQ ID NO: 543447 - DNA, 25 bp, Homo sapien
taagtgaacaactgttcctgcacaa

SEQ ID NO: 543448 - DNA, 25 bp, Homo sapien
gtaaaaactgctgtgctgatatcat

SEQ ID NO: 543449 - DNA, 25 bp, Homo sapien
ttatagatagtgttgagtcaaaagc

SEQ ID NO: 543450 - DNA, 25 bp, Homo sapien
gaaaaacgaaggtctgtgcaattga

SEQ ID NO: 543451 - DNA, 25 bp, Homo sapien
tggtcacctatcaccactttaaaag

SEQ ID NO: 543452 - DNA, 25 bp, Homo sapien
agctcatgttgttaacctgcagcgt

SEQ ID NO: 543453 - DNA, 25 bp, Homo sapien
tagttggcatgcaccattctcatct

SEQ ID NO: 543454 - DNA, 25 bp, Homo sapien
tttttagttggcatgcaccattctc

SEQ ID NO: 543455 - DNA, 25 bp, Homo sapien
ttggcatgcaccattctcatcttgc

SEQ ID NO: 543456 - DNA, 25 bp, Homo sapien
ctctgttttttagttggcatgcacc

SEQ ID NO: 543457 - DNA, 25 bp, Homo sapien
caaattccatagtgacatatcttgc

SEQ ID NO: 543458 - DNA, 25 bp, Homo sapien
cttcagtggcatgataagttgcttc

SEQ ID NO: 543459 - DNA, 25 bp, Homo sapien
gaactgaagcatgtaataaatcaaa

SEQ ID NO: 543460 - DNA, 25 bp, Homo sapien
tgacatatcttgcttcagtggcatg

SEQ ID NO: 543461 - DNA, 25 bp, Homo sapien
gtgggctaggcaatttactaaatta

SEQ ID NO: 543462 - DNA, 25 bp, Homo sapien
taacttcagggtttagttcatactg

SEQ ID NO: 543463 - DNA, 25 bp, Homo sapien
gttcatactgaaccattgccaaatt

SEQ ID NO: 543464 - DNA, 25 bp, Homo sapien
aatttcctggttccttccactattg

SEQ ID NO: 543465 - DNA, 25 bp, Homo sapien
gcatctgccattttcatggtggtca

SEQ ID NO: 543466 - DNA, 25 bp, Homo sapien
gcaaccattcttccatggtgataaa

SEQ ID NO: 543467 - DNA, 25 bp, Homo sapien
gggcagcaaccattcttccatggtg

SEQ ID NO: 543468 - DNA, 25 bp, Homo sapien
tcatggtggtcaggcacacatccag

SEQ ID NO: 543469 - DNA, 25 bp, Homo sapien
tgaacttttgtggagtgcttggaat

SEQ ID NO: 543470 - DNA, 25 bp, Homo sapien
atgaacttttgtggagtgcttggaa

SEQ ID NO: 543471 - DNA, 25 bp, Homo sapien
gaacttttgtggagtgcttggaatt

SEQ ID NO: 543472 - DNA, 25 bp, Homo sapien
taatcgtcaaatggttgaatcccgc

SEQ ID NO: 543473 - DNA, 25 bp, Homo sapien
tgaatcccgctttgtaaagatgcgt

SEQ ID NO: 543474 - DNA, 25 bp, Homo sapien
cagcaatctctgtgactttgacaaa

SEQ ID NO: 543475 - DNA, 25 bp, Homo sapien
ggaactgctgacttgcatcactgtt

SEQ ID NO: 543476 - DNA, 25 bp, Homo sapien
cacagcatcgccacagagctgctat

SEQ ID NO: 543477 - DNA, 25 bp, Homo sapien
cagagctgctattgacacttcgttc

SEQ ID NO: 543478 - DNA, 25 bp, Homo sapien
cacttcgttcatgggtgctctccag

SEQ ID NO: 543479 - DNA, 25 bp, Homo sapien
tctgccactgagagatggccatgca

SEQ ID NO: 543480 - DNA, 25 bp, Homo sapien
tgatgccccagccatactgtgactc

SEQ ID NO: 543481 - DNA, 25 bp, Homo sapien
cccagccatactgtgactcaaaaca

SEQ ID NO: 543482 - DNA, 25 bp, Homo sapien
accctgaaggcatatttgatgcccc

SEQ ID NO: 543483 - DNA, 25 bp, Homo sapien
gaaggcatatttgatgccccagcca

SEQ ID NO: 543484 - DNA, 25 bp, Homo sapien
ctgggttccgcttactgtagaaaat

SEQ ID NO: 543485 - DNA, 25 bp, Homo sapien
tgggttccgcttactgtagaaaatg

SEQ ID NO: 543486 - DNA, 25 bp, Homo sapien
gcctgggttccgcttactgtagaaa

SEQ ID NO: 543487 - DNA, 25 bp, Homo sapien
gcagcctgggttccgcttactgtag

SEQ ID NO: 543488 - DNA, 25 bp, Homo sapien
tgtgagatgtatgaacacaagtgtc

SEQ ID NO: 543489 - DNA, 25 bp, Homo sapien
ctgtgagatgtatgaacacaagtgt

SEQ ID NO: 543490 - DNA, 25 bp, Homo sapien
gctgtgagatgtatgaacacaagtg

SEQ ID NO: 543491 - DNA, 25 bp, Homo sapien
tgtctcatttcatttttattttccc

SEQ ID NO: 543492 - DNA, 25 bp, Homo sapien
aggtccctctcttgtctcatttcat

SEQ ID NO: 543493 - DNA, 25 bp, Homo sapien
caggtccctctcttgtctcatttca

SEQ ID NO: 543494 - DNA, 25 bp, Homo sapien
tagccacaagttcctccacgttaaa

SEQ ID NO: 543495 - DNA, 25 bp, Homo sapien
gtaaccaccctccactcaagtgtag

SEQ ID NO: 543496 - DNA, 25 bp, Homo sapien
tagactcaggtgatttcagttgttc

SEQ ID NO: 543497 - DNA, 25 bp, Homo sapien
tcttgtctgttcctagactcaggtg

SEQ ID NO: 543498 - DNA, 25 bp, Homo sapien
gtcctctgtggagcaagtcccattg

SEQ ID NO: 543499 - DNA, 25 bp, Homo sapien
ctcagtggcaaaatatgctggtgtg

SEQ ID NO: 543500 - DNA, 25 bp, Homo sapien
tggcaaaatatgctggtgtgctggt

SEQ ID NO: 543501 - DNA, 25 bp, Homo sapien
tgtggagcaagtcccattgggaacc

SEQ ID NO: 543502 - DNA, 25 bp, Homo sapien
taatcgaaaaagcaaacgaggccac

SEQ ID NO: 543503 - DNA, 25 bp, Homo sapien
caatgcattgttcattcttggagac

SEQ ID NO: 543504 - DNA, 25 bp, Homo sapien
tgtaatcaattttccactcaatgca

SEQ ID NO: 543505 - DNA, 25 bp, Homo sapien
agttttgaggaccacctacaacagc

SEQ ID NO: 543506 - DNA, 25 bp, Homo sapien
ttagcatgaccaatggaatttttaa

SEQ ID NO: 543507 - DNA, 25 bp, Homo sapien
gaataaatcattgagtatgattcat

SEQ ID NO: 543508 - DNA, 25 bp, Homo sapien
cttttttagcatgaccaatggaatt

SEQ ID NO: 543509 - DNA, 25 bp, Homo sapien
gtgaataaatcattgagtatgattc

SEQ ID NO: 543510 - DNA, 25 bp, Homo sapien
taagggcaaagtgtactttgacttc

SEQ ID NO: 543511 - DNA, 25 bp, Homo sapien
tccctttgtactctgattgtcatct

SEQ ID NO: 543512 - DNA, 25 bp, Homo sapien
acacacagtcttcttatgcaatatt

SEQ ID NO: 543513 - DNA, 25 bp, Homo sapien
taatcttcttttgggacagcgtggc

SEQ ID NO: 543514 - DNA, 25 bp, Homo sapien
ttcttctttcaatcccaaattcagc

SEQ ID NO: 543515 - DNA, 25 bp, Homo sapien
ttctttcaatcccaaattcagccat

SEQ ID NO: 543516 - DNA, 25 bp, Homo sapien
tcttctttcaatcccaaattcagcc

SEQ ID NO: 543517 - DNA, 25 bp, Homo sapien
ttttcttctttcaatcccaaattca

SEQ ID NO: 543518 - DNA, 25 bp, Homo sapien
acaagaaaagaccttcagtctacaa

SEQ ID NO: 543519 - DNA, 25 bp, Homo sapien
agaaaagaccttcagtctacaaata

SEQ ID NO: 543520 - DNA, 25 bp, Homo sapien
atggtattcatcatatcttgacaag

SEQ ID NO: 543521 - DNA, 25 bp, Homo sapien
cacatggtattcatcatatcttgac

SEQ ID NO: 543522 - DNA, 25 bp, Homo sapien
ttacaaagctttctgtccttctcta

SEQ ID NO: 543523 - DNA, 25 bp, Homo sapien
ttctgtccttctctagttttaaatc

SEQ ID NO: 543524 - DNA, 25 bp, Homo sapien
tgtccttctctagttttaaatccaa

SEQ ID NO: 543525 - DNA, 25 bp, Homo sapien
tacaaagctttctgtccttctctag

SEQ ID NO: 543526 - DNA, 25 bp, Homo sapien
tctgcaaaaagaggacatcggggga

SEQ ID NO: 543527 - DNA, 25 bp, Homo sapien
catcgggggactggtatatgacaaa

SEQ ID NO: 543528 - DNA, 25 bp, Homo sapien
gaaagcttgggattaagagcactaa

SEQ ID NO: 543529 - DNA, 25 bp, Homo sapien
tgcccctgaagctgtatgatcagtg

SEQ ID NO: 543530 - DNA, 25 bp, Homo sapien
attatgcaatggctttagaattctc

SEQ ID NO: 543531 - DNA, 25 bp, Homo sapien
acaataattatgcaatggctttaga

SEQ ID NO: 543532 - DNA, 25 bp, Homo sapien
ttatgcaatggctttagaattctct

SEQ ID NO: 543533 - DNA, 25 bp, Homo sapien
ttcacaataattatgcaatggcttt

SEQ ID NO: 543534 - DNA, 25 bp, Homo sapien
gaatgagctggaatcagtcccaaat

SEQ ID NO: 543535 - DNA, 25 bp, Homo sapien
ttaagtgtaccaggttatcaaggtg

SEQ ID NO: 543536 - DNA, 25 bp, Homo sapien
tcaaggtggtaatttcatacttgct

SEQ ID NO: 543537 - DNA, 25 bp, Homo sapien
tggcagaaataataggaacctgctt

SEQ ID NO: 543538 - DNA, 25 bp, Homo sapien
ctggcgatgtgggacccagtaggac

SEQ ID NO: 543539 - DNA, 25 bp, Homo sapien
aactgcttggtgggtagccaatggc

SEQ ID NO: 543540 - DNA, 25 bp, Homo sapien
tcttggatttatggaactgcttggt

SEQ ID NO: 543541 - DNA, 25 bp, Homo sapien
gacagtgggaacttaatcttggatt

SEQ ID NO: 543542 - DNA, 25 bp, Homo sapien
tcccagcaggaacttgccacgaggg

SEQ ID NO: 543543 - DNA, 25 bp, Homo sapien
tacagcattcattaggttctgggca

SEQ ID NO: 543544 - DNA, 25 bp, Homo sapien
caggtacagtgtcgggcacccattt

SEQ ID NO: 543545 - DNA, 25 bp, Homo sapien
caatgacctggcacatcctgtcagg

SEQ ID NO: 543546 - DNA, 25 bp, Homo sapien
gcaggctctcataggctgtgtcaga

SEQ ID NO: 543547 - DNA, 25 bp, Homo sapien
agggatgctcttccagccgtgtcag

SEQ ID NO: 543548 - DNA, 25 bp, Homo sapien
cttccagccgtgtcagttgcatgcc

SEQ ID NO: 543549 - DNA, 25 bp, Homo sapien
gatgctcttccagccgtgtcagttg

SEQ ID NO: 543550 - DNA, 25 bp, Homo sapien
gaaaagtgctgtcacaacttcgccg

SEQ ID NO: 543551 - DNA, 25 bp, Homo sapien
acttcgccgttaatgccctggactg

SEQ ID NO: 543552 - DNA, 25 bp, Homo sapien
gctgggcagcctcgagaaaatatct

SEQ ID NO: 543553 - DNA, 25 bp, Homo sapien
tagtattcagagtcagcattggcgt

SEQ ID NO: 543554 - DNA, 25 bp, Homo sapien
gaaagctcatagtgggttagccaca

SEQ ID NO: 543555 - DNA, 25 bp, Homo sapien
gtcagatgcaaccttagaaagctca

SEQ ID NO: 543556 - DNA, 25 bp, Homo sapien
taacaaggacatatccctagaatgg

SEQ ID NO: 543557 - DNA, 25 bp, Homo sapien
cagatttctaatccgtggcccaggc

SEQ ID NO: 543558 - DNA, 25 bp, Homo sapien
tgccatccgtgagcaaagctgcgtg

SEQ ID NO: 543559 - DNA, 25 bp, Homo sapien
cgtgagcaaagctgcgtgtctcctc

SEQ ID NO: 543560 - DNA, 25 bp, Homo sapien
cttggctttataggccaaactgcca

SEQ ID NO: 543561 - DNA, 25 bp, Homo sapien
tataggccaaactgccatccgtgag

SEQ ID NO: 543562 - DNA, 25 bp, Homo sapien
tgacgacagattctcgttcatattg

SEQ ID NO: 543563 - DNA, 25 bp, Homo sapien
gtcagtttccccattcccaacagtg

SEQ ID NO: 543564 - DNA, 25 bp, Homo sapien
cagtgacatcgagacagaattgacg

SEQ ID NO: 543565 - DNA, 25 bp, Homo sapien
ggcagtcctgaggaaaattcacagc

SEQ ID NO: 543566 - DNA, 25 bp, Homo sapien
tactgccccttcacgaggtgagcgg

SEQ ID NO: 543567 - DNA, 25 bp, Homo sapien
ccttcacgaggtgagcggcaaggca

SEQ ID NO: 543568 - DNA, 25 bp, Homo sapien
ctacacagcaagcaggctactgccc

SEQ ID NO: 543569 - DNA, 25 bp, Homo sapien
aagcaggctactgccccttcacgag

SEQ ID NO: 543570 - DNA, 25 bp, Homo sapien
gtcataccatccagaagacacgtct

SEQ ID NO: 543571 - DNA, 25 bp, Homo sapien
catccagaagacacgtctgctttac

SEQ ID NO: 543572 - DNA, 25 bp, Homo sapien
tatgtcataccatccagaagacacg

SEQ ID NO: 543573 - DNA, 25 bp, Homo sapien
taccatccagaagacacgtctgctt

SEQ ID NO: 543574 - DNA, 25 bp, Homo sapien
tgagaaccagctcattctccttagc

SEQ ID NO: 543575 - DNA, 25 bp, Homo sapien
ctgtgagcgcattttacaattcctg

SEQ ID NO: 543576 - DNA, 25 bp, Homo sapien
acctacgtccatttccagtggtgat

SEQ ID NO: 543577 - DNA, 25 bp, Homo sapien
ttcttcaaagaacacctacgtccat

SEQ ID NO: 543578 - DNA, 25 bp, Homo sapien
cattttacaattcctgggttcttca

SEQ ID NO: 543579 - DNA, 25 bp, Homo sapien
aagtcactctaggtgtgattattat

SEQ ID NO: 543580 - DNA, 25 bp, Homo sapien
ataataatcacacctagagtgactt

SEQ ID NO: 543581 - DNA, 25 bp, Homo sapien
tctcttaacccctacaaaggactga

SEQ ID NO: 543582 - DNA, 25 bp, Homo sapien
ctacaaaggactgaaactggctgtc

SEQ ID NO: 543583 - DNA, 25 bp, Homo sapien
tctggcccttctttatgccctggtg

SEQ ID NO: 543584 - DNA, 25 bp, Homo sapien
cagattcagtatctctattaaaact

SEQ ID NO: 543585 - DNA, 25 bp, Homo sapien
tcttctcgcccacaggagggcatcg

SEQ ID NO: 543586 - DNA, 25 bp, Homo sapien
gccaaagtgttcaactcagtgccca

SEQ ID NO: 543587 - DNA, 25 bp, Homo sapien
tgtcagctgcctggtactgagtctt

SEQ ID NO: 543588 - DNA, 25 bp, Homo sapien
tcagtgcccactcctagttgaaact

SEQ ID NO: 543589 - DNA, 25 bp, Homo sapien
atgtttttgatgtcagcggaggatc

SEQ ID NO: 543590 - DNA, 25 bp, Homo sapien
gatgtcagcggaggatcattgctga

SEQ ID NO: 543591 - DNA, 25 bp, Homo sapien
gatcattgctgaaagtcttcgtgga

SEQ ID NO: 543592 - DNA, 25 bp, Homo sapien
tgaaagtcttcgtggaagtcatttt

SEQ ID NO: 543593 - DNA, 25 bp, Homo sapien
aaaatgacgaaagaagagatggctg

SEQ ID NO: 543594 - DNA, 25 bp, Homo sapien
cttgacacacgtacaaaaacaaaga

SEQ ID NO: 543595 - DNA, 25 bp, Homo sapien
ttgacacacgtacaaaaacaaagac

SEQ ID NO: 543596 - DNA, 25 bp, Homo sapien
ctcccagtgctgtgccctctctttc

SEQ ID NO: 543597 - DNA, 25 bp, Homo sapien
gctgtgccctctctttccccaatca

SEQ ID NO: 543598 - DNA, 25 bp, Homo sapien
tgccctctctttccccaatcaccat

SEQ ID NO: 543599 - DNA, 25 bp, Homo sapien
tgtgccctctctttccccaatcacc

SEQ ID NO: 543600 - DNA, 25 bp, Homo sapien
accccccatctaccctcaatgctgc

SEQ ID NO: 543601 - DNA, 25 bp, Homo sapien
ccccccatctaccctcaatgctgct

SEQ ID NO: 543602 - DNA, 25 bp, Homo sapien
caccccccatctaccctcaatgctg

SEQ ID NO: 543603 - DNA, 25 bp, Homo sapien
tccacggatgttcttaccaaagcat

SEQ ID NO: 543604 - DNA, 25 bp, Homo sapien
gtaatgtcatggcactgtgcaaagg

SEQ ID NO: 543605 - DNA, 25 bp, Homo sapien
cagtaatgtcatggcactgtgcaaa

SEQ ID NO: 543606 - DNA, 25 bp, Homo sapien
gtccacggatgttcttaccaaagca

SEQ ID NO: 543607 - DNA, 25 bp, Homo sapien
aattcccctgcctcagcctcctgaa

SEQ ID NO: 543608 - DNA, 25 bp, Homo sapien
cgacctccaccccactggttcaagc

SEQ ID NO: 543609 - DNA, 25 bp, Homo sapien
gacggaagtcccgctctgtcaccca

SEQ ID NO: 543610 - DNA, 25 bp, Homo sapien
ggctggagtgccgtggcacaatctc

SEQ ID NO: 543611 - DNA, 25 bp, Homo sapien
taaagtgaggtttcgattgtactta

SEQ ID NO: 543612 - DNA, 25 bp, Homo sapien
ccttgctagagacctggtaaaatct

SEQ ID NO: 543613 - DNA, 25 bp, Homo sapien
gtctggtctggatttgtcatctggt

SEQ ID NO: 543614 - DNA, 25 bp, Homo sapien
taataaaatatagcccttgtaggtc

SEQ ID NO: 543615 - DNA, 25 bp, Homo sapien
tcgagaactacgtgaagaatgcaaa

SEQ ID NO: 543616 - DNA, 25 bp, Homo sapien
aaagcctcaggagccgatgtgatca

SEQ ID NO: 543617 - DNA, 25 bp, Homo sapien
acgtgaagaatgcaaaagcctcagg

SEQ ID NO: 543618 - DNA, 25 bp, Homo sapien
aagaatgcaaaagcctcaggagccg

SEQ ID NO: 543619 - DNA, 25 bp, Homo sapien
taggtgcttaggattagtttctgga

SEQ ID NO: 543620 - DNA, 25 bp, Homo sapien
agtttttgtatcattaaaccaatca

SEQ ID NO: 543621 - DNA, 25 bp, Homo sapien
cttttcacatacacatcatcagctg

SEQ ID NO: 543622 - DNA, 25 bp, Homo sapien
aacatgtaattgcatgttgtttcca

SEQ ID NO: 543623 - DNA, 25 bp, Homo sapien
caggctagaattctcagggctaact

SEQ ID NO: 543624 - DNA, 25 bp, Homo sapien
ccctgtttgaagtggagctcccgca

SEQ ID NO: 543625 - DNA, 25 bp, Homo sapien
tcatgagaatccctgtttgaagtgg

SEQ ID NO: 543626 - DNA, 25 bp, Homo sapien
tggagctcccgcaggctagaattct

SEQ ID NO: 543627 - DNA, 25 bp, Homo sapien
caacccggcattgaaggatgtatca

SEQ ID NO: 543628 - DNA, 25 bp, Homo sapien
aagcacgtggacttttcctattaga

SEQ ID NO: 543629 - DNA, 25 bp, Homo sapien
caccagatagagtatcttattgcaa

SEQ ID NO: 543630 - DNA, 25 bp, Homo sapien
tcagcacttttagctactgccaaca

SEQ ID NO: 543631 - DNA, 25 bp, Homo sapien
tttcccattcacctttaaatatgct

SEQ ID NO: 543632 - DNA, 25 bp, Homo sapien
aaatatgctatcattctctgcctgt

SEQ ID NO: 543633 - DNA, 25 bp, Homo sapien
cagaggaccaaagccacatatatta

SEQ ID NO: 543634 - DNA, 25 bp, Homo sapien
tgatatatgcgatgaatttcagagg

SEQ ID NO: 543635 - DNA, 25 bp, Homo sapien
ggaccaaagccacatatattaagta

SEQ ID NO: 543636 - DNA, 25 bp, Homo sapien
ctgaaaagcgtttttatagccgttg

SEQ ID NO: 543637 - DNA, 25 bp, Homo sapien
tacagttcttgtttgtgcacctagg

SEQ ID NO: 543638 - DNA, 25 bp, Homo sapien
gtgcatgtggcacccccattactga

SEQ ID NO: 543639 - DNA, 25 bp, Homo sapien
cacagcatcttactttcaaacttct

SEQ ID NO: 543640 - DNA, 25 bp, Homo sapien
tctgtttaatggagtccgaattcac

SEQ ID NO: 543641 - DNA, 25 bp, Homo sapien
ttcattttctcagctcctccaggca

SEQ ID NO: 543642 - DNA, 25 bp, Homo sapien
tcattttctcagctcctccaggcat

SEQ ID NO: 543643 - DNA, 25 bp, Homo sapien
tgtcttcattttctcagctcctcca

SEQ ID NO: 543644 - DNA, 25 bp, Homo sapien
tcttcattttctcagctcctccagg

SEQ ID NO: 543645 - DNA, 25 bp, Homo sapien
tattgtcttctccatttttctccaa

SEQ ID NO: 543646 - DNA, 25 bp, Homo sapien
ttgtcttctccatttttctccaaca

SEQ ID NO: 543647 - DNA, 25 bp, Homo sapien
tgtcttctccatttttctccaacat

SEQ ID NO: 543648 - DNA, 25 bp, Homo sapien
ctattgtcttctccatttttctcca

SEQ ID NO: 543649 - DNA, 25 bp, Homo sapien
tactttcattgtaagagaagaagcc

SEQ ID NO: 543650 - DNA, 25 bp, Homo sapien
gccagctgtttgctcctattttaca

SEQ ID NO: 543651 - DNA, 25 bp, Homo sapien
ttccgtcagtagacttccaaggaag

SEQ ID NO: 543652 - DNA, 25 bp, Homo sapien
tagctccctacagttttccgtcagt

SEQ ID NO: 543653 - DNA, 25 bp, Homo sapien
acatgatggttctcggtgttcagca

SEQ ID NO: 543654 - DNA, 25 bp, Homo sapien
tggaccgcttctgatataacatgca

SEQ ID NO: 543655 - DNA, 25 bp, Homo sapien
ccgcttctgatataacatgcatgca

SEQ ID NO: 543656 - DNA, 25 bp, Homo sapien
tcatagtgtggaccgcttctgatat

SEQ ID NO: 543657 - DNA, 25 bp, Homo sapien
agcttctggggagccataagatacc

SEQ ID NO: 543658 - DNA, 25 bp, Homo sapien
caatattctggcctttcggccggaa

SEQ ID NO: 543659 - DNA, 25 bp, Homo sapien
tcaatattctggcctttcggccgga

SEQ ID NO: 543660 - DNA, 25 bp, Homo sapien
aagaagagaggcacctgatatacgt

SEQ ID NO: 543661 - DNA, 25 bp, Homo sapien
ggcacctgatatacgttctccaggc

SEQ ID NO: 543662 - DNA, 25 bp, Homo sapien
agtctgagctgctggagcctattcc

SEQ ID NO: 543663 - DNA, 25 bp, Homo sapien
aaggagtctgagctgctggagccta

SEQ ID NO: 543664 - DNA, 25 bp, Homo sapien
ctgggtgcaactgaagtgccagcct

SEQ ID NO: 543665 - DNA, 25 bp, Homo sapien
ggagtctgagctgctggagcctatt

SEQ ID NO: 543666 - DNA, 25 bp, Homo sapien
agtgtatgtgctgccaaagtgagta

SEQ ID NO: 543667 - DNA, 25 bp, Homo sapien
tagtgtatgtgctgccaaagtgagt

SEQ ID NO: 543668 - DNA, 25 bp, Homo sapien
ctagtcttctattaaattctcagca

SEQ ID NO: 543669 - DNA, 25 bp, Homo sapien
gtcttctattaaattctcagcatct

SEQ ID NO: 543670 - DNA, 25 bp, Homo sapien
tagtcttctattaaattctcagcat

SEQ ID NO: 543671 - DNA, 25 bp, Homo sapien
cttctattaaattctcagcatctac

SEQ ID NO: 543672 - DNA, 25 bp, Homo sapien
ttcgactaccactttggccatctga

SEQ ID NO: 543673 - DNA, 25 bp, Homo sapien
cgactaccactttggccatctgatt

SEQ ID NO: 543674 - DNA, 25 bp, Homo sapien
atccagagcttcgactaccactttg

SEQ ID NO: 543675 - DNA, 25 bp, Homo sapien
gagcttcgactaccactttggccat

SEQ ID NO: 543676 - DNA, 25 bp, Homo sapien
tacttggttggtaaagatgccaggc

SEQ ID NO: 543677 - DNA, 25 bp, Homo sapien
gtcattgacaacaagcacaacactg

SEQ ID NO: 543678 - DNA, 25 bp, Homo sapien
tgttctaccagtaacagatcttcca

SEQ ID NO: 543679 - DNA, 25 bp, Homo sapien
tatcaactcttatggcctggaagta

SEQ ID NO: 543680 - DNA, 25 bp, Homo sapien
cattcaagatttattaggtaagcac

SEQ ID NO: 543681 - DNA, 25 bp, Homo sapien
tattaaataaccattcaagatttat

SEQ ID NO: 543682 - DNA, 25 bp, Homo sapien
ttcaagatttattaggtaagcacta

SEQ ID NO: 543683 - DNA, 25 bp, Homo sapien
caagatttattaggtaagcactaaa

SEQ ID NO: 543684 - DNA, 25 bp, Homo sapien
taaaaattcacaagtggtggctgaa

SEQ ID NO: 543685 - DNA, 25 bp, Homo sapien
tgtgcacatctgatagacagactgc

SEQ ID NO: 543686 - DNA, 25 bp, Homo sapien
tgggttccactatacttcaacctgg

SEQ ID NO: 543687 - DNA, 25 bp, Homo sapien
tagctgcccaacaaactgtttgaaa

SEQ ID NO: 543688 - DNA, 25 bp, Homo sapien
taaatttgtcaatactgcactgtca

SEQ ID NO: 543689 - DNA, 25 bp, Homo sapien
tgtcaatactgcactgtcattaaca

SEQ ID NO: 543690 - DNA, 25 bp, Homo sapien
tgaagataaatttgtcaatactgca

SEQ ID NO: 543691 - DNA, 25 bp, Homo sapien
gtcaatactgcactgtcattaacaa

SEQ ID NO: 543692 - DNA, 25 bp, Homo sapien
taatgggtaaaaggcctagacaaca

SEQ ID NO: 543693 - DNA, 25 bp, Homo sapien
ttcagaggatccaagacataagcct

SEQ ID NO: 543694 - DNA, 25 bp, Homo sapien
tatagcttgggacacggcttcagag

SEQ ID NO: 543695 - DNA, 25 bp, Homo sapien
gcacagagtacaatggctgaggctt

SEQ ID NO: 543696 - DNA, 25 bp, Homo sapien
gctcctggtcttctagtggtgttgc

SEQ ID NO: 543697 - DNA, 25 bp, Homo sapien
gagaatggggctttactgtgttagc

SEQ ID NO: 543698 - DNA, 25 bp, Homo sapien
tgcatgttagtttaaccttgtttaa

SEQ ID NO: 543699 - DNA, 25 bp, Homo sapien
tatgaacatacactattgagctcct

SEQ ID NO: 543700 - DNA, 25 bp, Homo sapien
gccgtacacaaatagacagagtttc

SEQ ID NO: 543701 - DNA, 25 bp, Homo sapien
tagacagagtttccatatctaagcc

SEQ ID NO: 543702 - DNA, 25 bp, Homo sapien
tacacaaatagacagagtttccata

SEQ ID NO: 543703 - DNA, 25 bp, Homo sapien
cagagtttccatatctaagccagta

SEQ ID NO: 543704 - DNA, 25 bp, Homo sapien
ttatatatcactgcacaataccaag

SEQ ID NO: 543705 - DNA, 25 bp, Homo sapien
gcatcccaggttttggaaatctgca

SEQ ID NO: 543706 - DNA, 25 bp, Homo sapien
ttagcatagcatcccaggttttgga

SEQ ID NO: 543707 - DNA, 25 bp, Homo sapien
caataccaaggaattagcatagcat

SEQ ID NO: 543708 - DNA, 25 bp, Homo sapien
tttccatgttagttgctcatgtttt

SEQ ID NO: 543709 - DNA, 25 bp, Homo sapien
tccttttccatgttagttgctcatg

SEQ ID NO: 543710 - DNA, 25 bp, Homo sapien
cttttccatgttagttgctcatgtt

SEQ ID NO: 543711 - DNA, 25 bp, Homo sapien
ccttttccatgttagttgctcatgt

SEQ ID NO: 543712 - DNA, 25 bp, Homo sapien
tcccgcaccgcattcagattcgccg

SEQ ID NO: 543713 - DNA, 25 bp, Homo sapien
gtctcccgcaccgcattcagattcg

SEQ ID NO: 543714 - DNA, 25 bp, Homo sapien
cgcaccgcattcagattcgccgccg

SEQ ID NO: 543715 - DNA, 25 bp, Homo sapien
accgcattcagattcgccgccgcgg

SEQ ID NO: 543716 - DNA, 25 bp, Homo sapien
ggcctgacccggaactggagcgcct

SEQ ID NO: 543717 - DNA, 25 bp, Homo sapien
ctggagcgccttcctctctccgagg

SEQ ID NO: 543718 - DNA, 25 bp, Homo sapien
tccgaggcaatcacacagcgcgtct

SEQ ID NO: 543719 - DNA, 25 bp, Homo sapien
tcctctctccgaggcaatcacacag

SEQ ID NO: 543720 - DNA, 25 bp, Homo sapien
catgcccgggccactttatcttatt

SEQ ID NO: 543721 - DNA, 25 bp, Homo sapien
tatgtactagtggaaggtcgagcag

SEQ ID NO: 543722 - DNA, 25 bp, Homo sapien
gaaaaactgcaaatagggtggctgt

SEQ ID NO: 543723 - DNA, 25 bp, Homo sapien
catacaggttttacaatgagcaagt

SEQ ID NO: 543724 - DNA, 25 bp, Homo sapien
gcaggcatgcattgaggaggtcaca

SEQ ID NO: 543725 - DNA, 25 bp, Homo sapien
tatagttcttgacagttgtggccac

SEQ ID NO: 543726 - DNA, 25 bp, Homo sapien
gggtccagggcattatccaaacaga

SEQ ID NO: 543727 - DNA, 25 bp, Homo sapien
aaactgtgtcgggtgaatgagccct

SEQ ID NO: 543728 - DNA, 25 bp, Homo sapien
gatgggaacggaagcatctccgact

SEQ ID NO: 543729 - DNA, 25 bp, Homo sapien
agaaagctgtttttagatgggaacg

SEQ ID NO: 543730 - DNA, 25 bp, Homo sapien
tcaaacatagtgcatgctggcttct

SEQ ID NO: 543731 - DNA, 25 bp, Homo sapien
tcccggaagtcctcacagtggtgtt

SEQ ID NO: 543732 - DNA, 25 bp, Homo sapien
gtccttatatagatggctgctcgcc

SEQ ID NO: 543733 - DNA, 25 bp, Homo sapien
gccctattcaggctagtgcaaaaaa

SEQ ID NO: 543734 - DNA, 25 bp, Homo sapien
taactaatccgtgtatcagaagtcc

SEQ ID NO: 543735 - DNA, 25 bp, Homo sapien
cagcttgggaagcataactagtcct

SEQ ID NO: 543736 - DNA, 25 bp, Homo sapien
gaagccgtgggtagcatattctccc

SEQ ID NO: 543737 - DNA, 25 bp, Homo sapien
ccagatcacattagccaggccagac

SEQ ID NO: 543738 - DNA, 25 bp, Homo sapien
aaataggagcaagcaacattgggct

SEQ ID NO: 543739 - DNA, 25 bp, Homo sapien
aagaacccgtcacgtaatagccgct

SEQ ID NO: 543740 - DNA, 25 bp, Homo sapien
tgagattgatgcctgccttgatgcc

SEQ ID NO: 543741 - DNA, 25 bp, Homo sapien
tggaacatgacctctagtagtaagc

SEQ ID NO: 543742 - DNA, 25 bp, Homo sapien
caggctgtgggatcttaaggcaaga

SEQ ID NO: 543743 - DNA, 25 bp, Homo sapien
tagtgtgggacaaactccccgcatg

SEQ ID NO: 543744 - DNA, 25 bp, Homo sapien
taatcagtactatgcaggactacct

SEQ ID NO: 543745 - DNA, 25 bp, Homo sapien
agcattgtgtcagtaggctgttcac

SEQ ID NO: 543746 - DNA, 25 bp, Homo sapien
aaatatatagagatagtgcctggcc

SEQ ID NO: 543747 - DNA, 25 bp, Homo sapien
tatacaggtaaatggagcgttgtgc

SEQ ID NO: 543748 - DNA, 25 bp, Homo sapien
caagggcttactgacataggaacaa

SEQ ID NO: 543749 - DNA, 25 bp, Homo sapien
tgtatgtagtaggagcaaactgcct

SEQ ID NO: 543750 - DNA, 25 bp, Homo sapien
caaatgtttaatagggaggccacct

SEQ ID NO: 543751 - DNA, 25 bp, Homo sapien
gataattgcatcctccagtggtcct

SEQ ID NO: 543752 - DNA, 25 bp, Homo sapien
taaatatttttatacttacattgag

SEQ ID NO: 543753 - DNA, 25 bp, Homo sapien
tttttatacttacattgagtgatgt

SEQ ID NO: 543754 - DNA, 25 bp, Homo sapien
aatatttttatacttacattgagtg

SEQ ID NO: 543755 - DNA, 25 bp, Homo sapien
tatttttatacttacattgagtgat

SEQ ID NO: 543756 - DNA, 25 bp, Homo sapien
aaaatgtgccgcgttatgtacctgg

SEQ ID NO: 543757 - DNA, 25 bp, Homo sapien
ggtactaagggtagaagcctcactg

SEQ ID NO: 543758 - DNA, 25 bp, Homo sapien
tacctcatgcctagggtagggacat

SEQ ID NO: 543759 - DNA, 25 bp, Homo sapien
tacttgagtggaacctggcacaacg

SEQ ID NO: 543760 - DNA, 25 bp, Homo sapien
ttagtatgtctttatacagttcccc

SEQ ID NO: 543761 - DNA, 25 bp, Homo sapien
tacagttcccctcgtgtatatacac

SEQ ID NO: 543762 - DNA, 25 bp, Homo sapien
cccctcgtgtatatacactgatata

SEQ ID NO: 543763 - DNA, 25 bp, Homo sapien
taatctgttccctttagtatgtctt

SEQ ID NO: 543764 - DNA, 25 bp, Homo sapien
gccaatgtcttattctggagagaca

SEQ ID NO: 543765 - DNA, 25 bp, Homo sapien
ttttgtaagtaacaagatatagaca

SEQ ID NO: 543766 - DNA, 25 bp, Homo sapien
aatgccaatgtcttattctggagag

SEQ ID NO: 543767 - DNA, 25 bp, Homo sapien
acaagatatagacatttgaatgcca

SEQ ID NO: 543768 - DNA, 25 bp, Homo sapien
ctgaagttcaacaatgatcacactt

SEQ ID NO: 543769 - DNA, 25 bp, Homo sapien
ggagctgaagttcaacaatgatcac

SEQ ID NO: 543770 - DNA, 25 bp, Homo sapien
agctgaagttcaacaatgatcacac

SEQ ID NO: 543771 - DNA, 25 bp, Homo sapien
ctggagctgaagttcaacaatgatc

SEQ ID NO: 543772 - DNA, 25 bp, Homo sapien
taaagacagtaagagaacacctagt

SEQ ID NO: 543773 - DNA, 25 bp, Homo sapien
tccagtcaggtcaaaatatcctact

SEQ ID NO: 543774 - DNA, 25 bp, Homo sapien
cactgacagcttccaagacttagaa

SEQ ID NO: 543775 - DNA, 25 bp, Homo sapien
tcaaggaccactaataaaatacagg

SEQ ID NO: 543776 - DNA, 25 bp, Homo sapien
gctcctcaatgagatgagcactcca

SEQ ID NO: 543777 - DNA, 25 bp, Homo sapien
tgctgtcctgtcactgtatttaagt

SEQ ID NO: 543778 - DNA, 25 bp, Homo sapien
tctgttcaacccagaagtatagtag

SEQ ID NO: 543779 - DNA, 25 bp, Homo sapien
tgtatcacacacttaggcttagaag

SEQ ID NO: 543780 - DNA, 25 bp, Homo sapien
taaggtccatgtttgaagtatcagt

SEQ ID NO: 543781 - DNA, 25 bp, Homo sapien
ccatgtttgaagtatcagtaggaat

SEQ ID NO: 543782 - DNA, 25 bp, Homo sapien
ggtccattaaggtccatgtttgaag

SEQ ID NO: 543783 - DNA, 25 bp, Homo sapien
tttctttggtccattaaggtccatg

SEQ ID NO: 543784 - DNA, 25 bp, Homo sapien
ggttctaccagggacattcggatct

SEQ ID NO: 543785 - DNA, 25 bp, Homo sapien
ctgtggttctaccagggacattcgg

SEQ ID NO: 543786 - DNA, 25 bp, Homo sapien
gttctaccagggacattcggatctt

SEQ ID NO: 543787 - DNA, 25 bp, Homo sapien
gtggttctaccagggacattcggat

SEQ ID NO: 543788 - DNA, 25 bp, Homo sapien
gttgaagattagatgagtctaacat

SEQ ID NO: 543789 - DNA, 25 bp, Homo sapien
tagatgagtctaacatgattttcac

SEQ ID NO: 543790 - DNA, 25 bp, Homo sapien
agattagatgagtctaacatgattt

SEQ ID NO: 543791 - DNA, 25 bp, Homo sapien
ttagatgagtctaacatgattttca

SEQ ID NO: 543792 - DNA, 25 bp, Homo sapien
tgtatcttctattttaagtgagggt

SEQ ID NO: 543793 - DNA, 25 bp, Homo sapien
tatcttctattttaagtgagggtat

SEQ ID NO: 543794 - DNA, 25 bp, Homo sapien
ctgtatcttctattttaagtgaggg

SEQ ID NO: 543795 - DNA, 25 bp, Homo sapien
gtatcttctattttaagtgagggta

SEQ ID NO: 543796 - DNA, 25 bp, Homo sapien
tctacgtgttcaacataacaaaggc

SEQ ID NO: 543797 - DNA, 25 bp, Homo sapien
taattgcttccttacatttgaggct

SEQ ID NO: 543798 - DNA, 25 bp, Homo sapien
aaaggccacaaacctagtagtctca

SEQ ID NO: 543799 - DNA, 25 bp, Homo sapien
gtctagtagaggaacacaaaggtat

SEQ ID NO: 543800 - DNA, 25 bp, Homo sapien
ggcttcttcacttactattcctttg

SEQ ID NO: 543801 - DNA, 25 bp, Homo sapien
tcataaataagctgtgggtttggtt

SEQ ID NO: 543802 - DNA, 25 bp, Homo sapien
ccatactttggaattaataccacaa

SEQ ID NO: 543803 - DNA, 25 bp, Homo sapien
aagactgtcccttctaaaccatact

SEQ ID NO: 543804 - DNA, 25 bp, Homo sapien
agcagtatcgacaaaaggcaaatac

SEQ ID NO: 543805 - DNA, 25 bp, Homo sapien
ctagcagtatcgacaaaaggcaaat

SEQ ID NO: 543806 - DNA, 25 bp, Homo sapien
tagcagtatcgacaaaaggcaaata

SEQ ID NO: 543807 - DNA, 25 bp, Homo sapien
aatagccacagccaaaagccgatga

SEQ ID NO: 543808 - DNA, 25 bp, Homo sapien
tcaactctggataagtacagtcagc

SEQ ID NO: 543809 - DNA, 25 bp, Homo sapien
gaaaagccactgatgcacgttgggc

SEQ ID NO: 543810 - DNA, 25 bp, Homo sapien
gagccattttgtgccggaaatttag

SEQ ID NO: 543811 - DNA, 25 bp, Homo sapien
gtgtgtatattggagacgctaagcc

SEQ ID NO: 543812 - DNA, 25 bp, Homo sapien
cagcttgcatcatacagcgagtggc

SEQ ID NO: 543813 - DNA, 25 bp, Homo sapien
tgatccaaagactcagccaaagact

SEQ ID NO: 543814 - DNA, 25 bp, Homo sapien
aaagtaggagattcggcctgatcca

SEQ ID NO: 543815 - DNA, 25 bp, Homo sapien
gaaacaaaactgtactggtcactac

SEQ ID NO: 543816 - DNA, 25 bp, Homo sapien
cttcccttcaaagtagaagtagtag

SEQ ID NO: 543817 - DNA, 25 bp, Homo sapien
aagtagaagtagtagccagaaacaa

SEQ ID NO: 543818 - DNA, 25 bp, Homo sapien
ccttcaaagtagaagtagtagccag

SEQ ID NO: 543819 - DNA, 25 bp, Homo sapien
tattggcaagtaacataaattcttc

SEQ ID NO: 543820 - DNA, 25 bp, Homo sapien
gagcatgttcagaaaattcctcatg

SEQ ID NO: 543821 - DNA, 25 bp, Homo sapien
ttcttcaaccatggaatttgtttcc

SEQ ID NO: 543822 - DNA, 25 bp, Homo sapien
gagcaggatgttttcgaagcagagc

SEQ ID NO: 543823 - DNA, 25 bp, Homo sapien
ctgccaatggaaaaagcattaaaca

SEQ ID NO: 543824 - DNA, 25 bp, Homo sapien
caatggaaaaagcattaaacaaaca

SEQ ID NO: 543825 - DNA, 25 bp, Homo sapien
tgccaatggaaaaagcattaaacaa

SEQ ID NO: 543826 - DNA, 25 bp, Homo sapien
gccaatggaaaaagcattaaacaaa

SEQ ID NO: 543827 - DNA, 25 bp, Homo sapien
gatccaaacctagggagtctggctt

SEQ ID NO: 543828 - DNA, 25 bp, Homo sapien
ggtaggtgccattatcaatcatagg

SEQ ID NO: 543829 - DNA, 25 bp, Homo sapien
gatattataatagcacgcaagcaca

SEQ ID NO: 543830 - DNA, 25 bp, Homo sapien
cacagaagttctactataagggatt

SEQ ID NO: 543831 - DNA, 25 bp, Homo sapien
tggtctgcagatctataggatcgtg

SEQ ID NO: 543832 - DNA, 25 bp, Homo sapien
tgtccatgtggaatcgaacttcagg

SEQ ID NO: 543833 - DNA, 25 bp, Homo sapien
tcgtgagtttcactgtccatgtgga

SEQ ID NO: 543834 - DNA, 25 bp, Homo sapien
ttcaggagaggatagagtcaaagcc

SEQ ID NO: 543835 - DNA, 25 bp, Homo sapien
gctagtttattcagtccacggagac

SEQ ID NO: 543836 - DNA, 25 bp, Homo sapien
tcagtccacggagactagtggtaat

SEQ ID NO: 543837 - DNA, 25 bp, Homo sapien
tttggctagtttattcagtccacgg

SEQ ID NO: 543838 - DNA, 25 bp, Homo sapien
gctgaatcaattctcaactgagctt

SEQ ID NO: 543839 - DNA, 25 bp, Homo sapien
tcgtttttaagatttcagcattgtg

SEQ ID NO: 543840 - DNA, 25 bp, Homo sapien
cttcgtttttaagatttcagcattg

SEQ ID NO: 543841 - DNA, 25 bp, Homo sapien
cgtttttaagatttcagcattgtga

SEQ ID NO: 543842 - DNA, 25 bp, Homo sapien
aacttcgtttttaagatttcagcat

SEQ ID NO: 543843 - DNA, 25 bp, Homo sapien
tagagctaagcaactctggaaccat

SEQ ID NO: 543844 - DNA, 25 bp, Homo sapien
aacacaagttagagctaagcaactc

SEQ ID NO: 543845 - DNA, 25 bp, Homo sapien
gtccacgtcacattttaaggaacac

SEQ ID NO: 543846 - DNA, 25 bp, Homo sapien
gcaactctggaaccatgtcaatcct

SEQ ID NO: 543847 - DNA, 25 bp, Homo sapien
tttcacaaagatacacagttgttcc

SEQ ID NO: 543848 - DNA, 25 bp, Homo sapien
ttctggctgattcttgatccaaggc

SEQ ID NO: 543849 - DNA, 25 bp, Homo sapien
cacagttgttcctcttctggctgat

SEQ ID NO: 543850 - DNA, 25 bp, Homo sapien
gctgattcttgatccaaggcatttc

SEQ ID NO: 543851 - DNA, 25 bp, Homo sapien
tcacatcagcaatatgaacaccaac

SEQ ID NO: 543852 - DNA, 25 bp, Homo sapien
gagcatcgtctatatcagtacatcc

SEQ ID NO: 543853 - DNA, 25 bp, Homo sapien
gagttctcgacaatgtagagcatcg

SEQ ID NO: 543854 - DNA, 25 bp, Homo sapien
acacagatgcctcaggtcttctcgg

SEQ ID NO: 543855 - DNA, 25 bp, Homo sapien
cagtacatcctggtgggtctacact

SEQ ID NO: 543856 - DNA, 25 bp, Homo sapien
cttttcagtaatgctccagggcatc

SEQ ID NO: 543857 - DNA, 25 bp, Homo sapien
ggaacatcgtgttcaagtaacaaaa

SEQ ID NO: 543858 - DNA, 25 bp, Homo sapien
gggcatctttggcagaaaactaaga

SEQ ID NO: 543859 - DNA, 25 bp, Homo sapien
taagaacagcctgtgaaaaaggctg

SEQ ID NO: 543860 - DNA, 25 bp, Homo sapien
tctgggccaaccatcaatagcaaca

SEQ ID NO: 543861 - DNA, 25 bp, Homo sapien
cgagggattctcttatcagcaggtg

SEQ ID NO: 543862 - DNA, 25 bp, Homo sapien
gaagcctgtctggtttctatgcgaa

SEQ ID NO: 543863 - DNA, 25 bp, Homo sapien
taattctccgtccttctaatgtgga

SEQ ID NO: 543864 - DNA, 25 bp, Homo sapien
gcatgccacaatatggtctccaatt

SEQ ID NO: 543865 - DNA, 25 bp, Homo sapien
tctacctgtaggcttcaacattttc

SEQ ID NO: 543866 - DNA, 25 bp, Homo sapien
ttttctcgcttacagcagtcttaag

SEQ ID NO: 543867 - DNA, 25 bp, Homo sapien
ttattattcctacaactctacctgt

SEQ ID NO: 543868 - DNA, 25 bp, Homo sapien
aatgtttaagtccctgtaagattat

SEQ ID NO: 543869 - DNA, 25 bp, Homo sapien
gatggtgctacccactgactcttgg

SEQ ID NO: 543870 - DNA, 25 bp, Homo sapien
tgaacagctctgtttaaatgtttaa

SEQ ID NO: 543871 - DNA, 25 bp, Homo sapien
gctccacagccacaatatcttcgtg

SEQ ID NO: 543872 - DNA, 25 bp, Homo sapien
attttcttcattgtcgccatgaatc

SEQ ID NO: 543873 - DNA, 25 bp, Homo sapien
cttcattgtcgccatgaatccatac

SEQ ID NO: 543874 - DNA, 25 bp, Homo sapien
tcttcattgtcgccatgaatccata

SEQ ID NO: 543875 - DNA, 25 bp, Homo sapien
tttcttcattgtcgccatgaatcca

SEQ ID NO: 543876 - DNA, 25 bp, Homo sapien
taccagattttatgccttgctgtag

SEQ ID NO: 543877 - DNA, 25 bp, Homo sapien
gccttgctgtagcttacttaaggga

SEQ ID NO: 543878 - DNA, 25 bp, Homo sapien
aaatgttccttgaaggtatgtacca

SEQ ID NO: 543879 - DNA, 25 bp, Homo sapien
tagcttacttaagggaagatgctct

SEQ ID NO: 543880 - DNA, 25 bp, Homo sapien
gacaaacaagcaagacgatctatga

SEQ ID NO: 543881 - DNA, 25 bp, Homo sapien
aacaagcaagacgatctatgagttc

SEQ ID NO: 543882 - DNA, 25 bp, Homo sapien
aagcaagacgatctatgagttcggg

SEQ ID NO: 543883 - DNA, 25 bp, Homo sapien
agttcggggttagcagttaggctct

SEQ ID NO: 543884 - DNA, 25 bp, Homo sapien
catttgttatgaagataacttgcag

SEQ ID NO: 543885 - DNA, 25 bp, Homo sapien
acttgcagctggttgtctgctgaca

SEQ ID NO: 543886 - DNA, 25 bp, Homo sapien
cgctctatcattcctgtcattagca

SEQ ID NO: 543887 - DNA, 25 bp, Homo sapien
ttttgctgctactcgaatcgctcta

SEQ ID NO: 543888 - DNA, 25 bp, Homo sapien
gaaacaaggatatgtgaaaactctt

SEQ ID NO: 543889 - DNA, 25 bp, Homo sapien
tagaaacaaggatatgtgaaaactc

SEQ ID NO: 543890 - DNA, 25 bp, Homo sapien
tcagatgtacacctcagagaagaaa

SEQ ID NO: 543891 - DNA, 25 bp, Homo sapien
aatgtattcagatgtacacctcaga

SEQ ID NO: 543892 - DNA, 25 bp, Homo sapien
caatagcttccagtacttaatggta

SEQ ID NO: 543893 - DNA, 25 bp, Homo sapien
tatccatggtaaacactaatagctg

SEQ ID NO: 543894 - DNA, 25 bp, Homo sapien
gctgaagctatgtagagactgaaaa

SEQ ID NO: 543895 - DNA, 25 bp, Homo sapien
tcaaagccaggtttaagtacaacag

SEQ ID NO: 543896 - DNA, 25 bp, Homo sapien
ggcactgcgatttctcacttcttga

SEQ ID NO: 543897 - DNA, 25 bp, Homo sapien
gaaatgcttctcttggttattagtc

SEQ ID NO: 543898 - DNA, 25 bp, Homo sapien
tacattcctgatggcagggtcctca

SEQ ID NO: 543899 - DNA, 25 bp, Homo sapien
catctcggatgcgtttatatacggg

SEQ ID NO: 543900 - DNA, 25 bp, Homo sapien
ctgggagtcgcaggctggaggccac

SEQ ID NO: 543901 - DNA, 25 bp, Homo sapien
attagtgtcgggcagcaagtagtgc

SEQ ID NO: 543902 - DNA, 25 bp, Homo sapien
gggcgcaccgcagccgatgtcgtct

SEQ ID NO: 543903 - DNA, 25 bp, Homo sapien
gatgtcgtctcgcaggtagtgctcg

SEQ ID NO: 543904 - DNA, 25 bp, Homo sapien
ttttaagaacgtcttggacttgagc

SEQ ID NO: 543905 - DNA, 25 bp, Homo sapien
tagtaacacttctcgcgggaaaatg

SEQ ID NO: 543906 - DNA, 25 bp, Homo sapien
caaagcaaggcgaggagccatttcc

SEQ ID NO: 543907 - DNA, 25 bp, Homo sapien
taaacattggttggctctctgacgg

SEQ ID NO: 543908 - DNA, 25 bp, Homo sapien
gctcttccagcaaaaggcgtcaatc

SEQ ID NO: 543909 - DNA, 25 bp, Homo sapien
gagggcctgcaaccttgtgcttccg

SEQ ID NO: 543910 - DNA, 25 bp, Homo sapien
tgcttccgaccggagacgcctttgg

SEQ ID NO: 543911 - DNA, 25 bp, Homo sapien
tcctcggaacatccgggagagttga

SEQ ID NO: 543912 - DNA, 25 bp, Homo sapien
gacactttcgaggtaacttgcgact

SEQ ID NO: 543913 - DNA, 25 bp, Homo sapien
gggcttaattttcacgccgagtgta

SEQ ID NO: 543914 - DNA, 25 bp, Homo sapien
aattttcacgccgagtgtataggca

SEQ ID NO: 543915 - DNA, 25 bp, Homo sapien
gccgagtgtataggcagtccccgtc

SEQ ID NO: 543916 - DNA, 25 bp, Homo sapien
tgtataggcagtccccgtctcgggc

SEQ ID NO: 543917 - DNA, 25 bp, Homo sapien
tgattatttttgagctagagaccca

SEQ ID NO: 543918 - DNA, 25 bp, Homo sapien
cagagatgtctcagttattgcacta

SEQ ID NO: 543919 - DNA, 25 bp, Homo sapien
gcctgcaatcaatcacatagtatct

SEQ ID NO: 543920 - DNA, 25 bp, Homo sapien
taatttcataattatgcctaccaga

SEQ ID NO: 543921 - DNA, 25 bp, Homo sapien
taatttataatagagtactatcact

SEQ ID NO: 543922 - DNA, 25 bp, Homo sapien
ttaacagatgcatatgatggttcat

SEQ ID NO: 543923 - DNA, 25 bp, Homo sapien
cagtagtcaactgtccaggcacagt

SEQ ID NO: 543924 - DNA, 25 bp, Homo sapien
actatgatgtcattgcccatgtttg

SEQ ID NO: 543925 - DNA, 25 bp, Homo sapien
gaccttatcttaattgttcactcca

SEQ ID NO: 543926 - DNA, 25 bp, Homo sapien
gatgttgctaatacggataactgca

SEQ ID NO: 543927 - DNA, 25 bp, Homo sapien
attctgagcctaagtttcatcattt

SEQ ID NO: 543928 - DNA, 25 bp, Homo sapien
taatgagctgctacttagctgtatg

SEQ ID NO: 543929 - DNA, 25 bp, Homo sapien
tagtgttcgctgtgctcatgaagag

SEQ ID NO: 543930 - DNA, 25 bp, Homo sapien
catgaagaggatcgccttgaaagac

SEQ ID NO: 543931 - DNA, 25 bp, Homo sapien
tatgtagcatccaggcaagatttgc

SEQ ID NO: 543932 - DNA, 25 bp, Homo sapien
gattttctttgagggaactcttggc

SEQ ID NO: 543933 - DNA, 25 bp, Homo sapien
aattcagctgggaatccatctcatc

SEQ ID NO: 543934 - DNA, 25 bp, Homo sapien
attcagctgggaatccatctcatcc

SEQ ID NO: 543935 - DNA, 25 bp, Homo sapien
taccacttactagctcagcagataa

SEQ ID NO: 543936 - DNA, 25 bp, Homo sapien
ggtggcccgtgaggtctaaatgaaa

SEQ ID NO: 543937 - DNA, 25 bp, Homo sapien
ctagctcagcagataagtcacttaa

SEQ ID NO: 543938 - DNA, 25 bp, Homo sapien
taaaatgggctaataggctaggtgt

SEQ ID NO: 543939 - DNA, 25 bp, Homo sapien
tctttccaccagtattccctttgtc

SEQ ID NO: 543940 - DNA, 25 bp, Homo sapien
ttgactgtgcgggtctatttcaggg

SEQ ID NO: 543941 - DNA, 25 bp, Homo sapien
actgtgcgggtctatttcagggctc

SEQ ID NO: 543942 - DNA, 25 bp, Homo sapien
aacatcagttgactgtgcgggtcta

SEQ ID NO: 543943 - DNA, 25 bp, Homo sapien
tcatgattttgtatgtcatccgtgt

SEQ ID NO: 543944 - DNA, 25 bp, Homo sapien
gattttgtatgtcatccgtgtgcag

SEQ ID NO: 543945 - DNA, 25 bp, Homo sapien
atgattttgtatgtcatccgtgtgc

SEQ ID NO: 543946 - DNA, 25 bp, Homo sapien
ttttgtatgtcatccgtgtgcagga

SEQ ID NO: 543947 - DNA, 25 bp, Homo sapien
aaaaaccaaccagtagatgttggca

SEQ ID NO: 543948 - DNA, 25 bp, Homo sapien
tggatgcggcgatcagggaacactt

SEQ ID NO: 543949 - DNA, 25 bp, Homo sapien
ggtgggaaagtaatctagtacagct

SEQ ID NO: 543950 - DNA, 25 bp, Homo sapien
cacttctacgtttctggtgggaaag

SEQ ID NO: 543951 - DNA, 25 bp, Homo sapien
cacatgttctactgatatgtgggag

SEQ ID NO: 543952 - DNA, 25 bp, Homo sapien
tgcagtgtatactgccccggttgat

SEQ ID NO: 543953 - DNA, 25 bp, Homo sapien
aggatctcacaaattaccgctaaag

SEQ ID NO: 543954 - DNA, 25 bp, Homo sapien
tatactgccccggttgatgggtgca

SEQ ID NO: 543955 - DNA, 25 bp, Homo sapien
tactaggtgacaatattcctttaca

SEQ ID NO: 543956 - DNA, 25 bp, Homo sapien
tacacttataatactaggtgacaat

SEQ ID NO: 543957 - DNA, 25 bp, Homo sapien
ggtgacaatattcctttacacagct

SEQ ID NO: 543958 - DNA, 25 bp, Homo sapien
ttataatactaggtgacaatattcc

SEQ ID NO: 543959 - DNA, 25 bp, Homo sapien
tagatggtgtctacttataaagcaa

SEQ ID NO: 543960 - DNA, 25 bp, Homo sapien
gtgaaactaattaaagggcctcaga

SEQ ID NO: 543961 - DNA, 25 bp, Homo sapien
ggaaaatgctgtagagtcataatct

SEQ ID NO: 543962 - DNA, 25 bp, Homo sapien
tctctccaagattacacttctggaa

SEQ ID NO: 543963 - DNA, 25 bp, Homo sapien
gacaatctgaaagggctacgtacgg

SEQ ID NO: 543964 - DNA, 25 bp, Homo sapien
taaactgttctagcccgtcatgcca

SEQ ID NO: 543965 - DNA, 25 bp, Homo sapien
gaagattgcggacagttcatcctgc

SEQ ID NO: 543966 - DNA, 25 bp, Homo sapien
cctgccctttggtgctcatactgga

SEQ ID NO: 543967 - DNA, 25 bp, Homo sapien
tggtatgtgttatgctttacagcac

SEQ ID NO: 543968 - DNA, 25 bp, Homo sapien
gcagttgctgcagattgcctactac

SEQ ID NO: 543969 - DNA, 25 bp, Homo sapien
gatgcttccttctcgattacttgga

SEQ ID NO: 543970 - DNA, 25 bp, Homo sapien
aattgcatctagtccgtctcctcag

SEQ ID NO: 543971 - DNA, 25 bp, Homo sapien
cacccgcctctgcctcctaaaatgc

SEQ ID NO: 543972 - DNA, 25 bp, Homo sapien
cgcctctgcctcctaaaatgctgag

SEQ ID NO: 543973 - DNA, 25 bp, Homo sapien
tccacccgcctctgcctcctaaaat

SEQ ID NO: 543974 - DNA, 25 bp, Homo sapien
ccgcctctgcctcctaaaatgctga

SEQ ID NO: 543975 - DNA, 25 bp, Homo sapien
ggtacgtgcgctcgcggttctctcg

SEQ ID NO: 543976 - DNA, 25 bp, Homo sapien
gggcaggtacgtgcgctcgcggttc

SEQ ID NO: 543977 - DNA, 25 bp, Homo sapien
gtagtcgcggggcaggtacgtgcgc

SEQ ID NO: 543978 - DNA, 25 bp, Homo sapien
cgtgcgctcgcggttctctcgcgga

SEQ ID NO: 543979 - DNA, 25 bp, Homo sapien
ggaagagttttgcttttcgtgcgcg

SEQ ID NO: 543980 - DNA, 25 bp, Homo sapien
gcggaagagttttgcttttcgtgcg

SEQ ID NO: 543981 - DNA, 25 bp, Homo sapien
gtggaagagcggaagagttttgctt

SEQ ID NO: 543982 - DNA, 25 bp, Homo sapien
gtgtggaagagcggaagagttttgc

SEQ ID NO: 543983 - DNA, 25 bp, Homo sapien
ttcgaaaactgcctgccgctgtctg

SEQ ID NO: 543984 - DNA, 25 bp, Homo sapien
gtctgaggagtccacccgaaacctc

SEQ ID NO: 543985 - DNA, 25 bp, Homo sapien
ggcgaggtgggaagtgcgcccgacc

SEQ ID NO: 543986 - DNA, 25 bp, Homo sapien
acccaagccagcgtgggcgaggtgg

SEQ ID NO: 543987 - DNA, 25 bp, Homo sapien
aaatagcctaccttttcagcacagg

SEQ ID NO: 543988 - DNA, 25 bp, Homo sapien
caccgctcagagttgattacccaaa

SEQ ID NO: 543989 - DNA, 25 bp, Homo sapien
gaaatgggttacaagccccagccta

SEQ ID NO: 543990 - DNA, 25 bp, Homo sapien
caggaaggccggtgatgttccctca

SEQ ID NO: 543991 - DNA, 25 bp, Homo sapien
ccattttaagatgaaaccaggtggc

SEQ ID NO: 543992 - DNA, 25 bp, Homo sapien
ctatttgcgattttcttaaaagagc

SEQ ID NO: 543993 - DNA, 25 bp, Homo sapien
cccaaatactccaaatattgtcaaa

SEQ ID NO: 543994 - DNA, 25 bp, Homo sapien
tagatggttactatttgcgattttc

SEQ ID NO: 543995 - DNA, 25 bp, Homo sapien
ctaccggaagcacacaggcgccaag

SEQ ID NO: 543996 - DNA, 25 bp, Homo sapien
gctgcgactggaggttcgcgcgatc

SEQ ID NO: 543997 - DNA, 25 bp, Homo sapien
gcgatcggatgagctgacccgccac

SEQ ID NO: 543998 - DNA, 25 bp, Homo sapien
tgcggggtgtgcaaccgcagcttct

SEQ ID NO: 543999 - DNA, 25 bp, Homo sapien
cagccacgtctcaacatgggtaagg

SEQ ID NO: 544000 - DNA, 25 bp, Homo sapien
cagcgtttttacctaggcaccatca

SEQ ID NO: 544001 - DNA, 25 bp, Homo sapien
tgatgcagtttcaagtaccaaaacg

SEQ ID NO: 544002 - DNA, 25 bp, Homo sapien
taaacaaatcagttggcaggcacca

SEQ ID NO: 544003 - DNA, 25 bp, Homo sapien
taagaggcttcaaaatgtttatacg

SEQ ID NO: 544004 - DNA, 25 bp, Homo sapien
tgcaaataatggagcaaacagctgt

SEQ ID NO: 544005 - DNA, 25 bp, Homo sapien
ggaaacacacctacatgaaaagcag

SEQ ID NO: 544006 - DNA, 25 bp, Homo sapien
aagcagaaatcggttgctgttttgc

SEQ ID NO: 544007 - DNA, 25 bp, Homo sapien
aagtgaattgtggagcttttgttca

SEQ ID NO: 544008 - DNA, 25 bp, Homo sapien
atgacttcaagtgaattgtggagct

SEQ ID NO: 544009 - DNA, 25 bp, Homo sapien
acttcaagtgaattgtggagctttt

SEQ ID NO: 544010 - DNA, 25 bp, Homo sapien
tcaagtgaattgtggagcttttgtt

SEQ ID NO: 544011 - DNA, 25 bp, Homo sapien
gtggcttattccctgagtagatgtg

SEQ ID NO: 544012 - DNA, 25 bp, Homo sapien
gagtagatgtgtgtggcccagtaac

SEQ ID NO: 544013 - DNA, 25 bp, Homo sapien
ttactgataatctgactctggccca

SEQ ID NO: 544014 - DNA, 25 bp, Homo sapien
ctggaggtaagtttcgtatgtagcc

SEQ ID NO: 544015 - DNA, 25 bp, Homo sapien
taacatacgatttgccagggtactg

SEQ ID NO: 544016 - DNA, 25 bp, Homo sapien
gaaacgcaggcagtttttcctgaca

SEQ ID NO: 544017 - DNA, 25 bp, Homo sapien
ggcatgctctatatagggaagccca

SEQ ID NO: 544018 - DNA, 25 bp, Homo sapien
gaaacaagacatgaagggaactctc

SEQ ID NO: 544019 - DNA, 25 bp, Homo sapien
gacaagtgactgtgagaaggtaata

SEQ ID NO: 544020 - DNA, 25 bp, Homo sapien
aagccttcatccaagccaaataaga

SEQ ID NO: 544021 - DNA, 25 bp, Homo sapien
caagcaagtgctttgtccactcgaa

SEQ ID NO: 544022 - DNA, 25 bp, Homo sapien
cagagctgccaagataaaaccctgg

SEQ ID NO: 544023 - DNA, 25 bp, Homo sapien
ggtgacatcaccctgcgtttgtcag

SEQ ID NO: 544024 - DNA, 25 bp, Homo sapien
gtcatcaggattgctggcatagtga

SEQ ID NO: 544025 - DNA, 25 bp, Homo sapien
tgtcagcactctcctgttctgagtc

SEQ ID NO: 544026 - DNA, 25 bp, Homo sapien
caggattgctggcatagtgatccat

SEQ ID NO: 544027 - DNA, 25 bp, Homo sapien
gatttgctcattgaactgagcttgg

SEQ ID NO: 544028 - DNA, 25 bp, Homo sapien
tgctcattgaactgagcttggtcat

SEQ ID NO: 544029 - DNA, 25 bp, Homo sapien
tttgctcattgaactgagcttggtc

SEQ ID NO: 544030 - DNA, 25 bp, Homo sapien
gctcattgaactgagcttggtcatt

SEQ ID NO: 544031 - DNA, 25 bp, Homo sapien
acaggcgacatggttcatgacacac

SEQ ID NO: 544032 - DNA, 25 bp, Homo sapien
gcgacatggttcatgacacactcca

SEQ ID NO: 544033 - DNA, 25 bp, Homo sapien
acatggttcatgacacactccacca

SEQ ID NO: 544034 - DNA, 25 bp, Homo sapien
ccgagtacaggcgacatggttcatg

SEQ ID NO: 544035 - DNA, 25 bp, Homo sapien
cccatttttcgcaaagctattccca

SEQ ID NO: 544036 - DNA, 25 bp, Homo sapien
aatacaatctggcttggccattgcg

SEQ ID NO: 544037 - DNA, 25 bp, Homo sapien
gtttttgccatcacaagtgacaata

SEQ ID NO: 544038 - DNA, 25 bp, Homo sapien
ggccattgcgcccatttttcgcaaa

SEQ ID NO: 544039 - DNA, 25 bp, Homo sapien
tcctagctccttcatgtattcatca

SEQ ID NO: 544040 - DNA, 25 bp, Homo sapien
tttgctgtccaccaggcgccatctt

SEQ ID NO: 544041 - DNA, 25 bp, Homo sapien
caggcgccatcttccttccagctgc

SEQ ID NO: 544042 - DNA, 25 bp, Homo sapien
tcatgtattcatcaaagcctttgct

SEQ ID NO: 544043 - DNA, 25 bp, Homo sapien
gcagagagtggtctgcgtcggcgtg

SEQ ID NO: 544044 - DNA, 25 bp, Homo sapien
agagagtggtctgcgtcggcgtggc

SEQ ID NO: 544045 - DNA, 25 bp, Homo sapien
gtgggtgcgggcgggctggcatgca

SEQ ID NO: 544046 - DNA, 25 bp, Homo sapien
ggcgggctggcatgcagagagtggt

SEQ ID NO: 544047 - DNA, 25 bp, Homo sapien
gtgtgtcatccttgcccaggggtca

SEQ ID NO: 544048 - DNA, 25 bp, Homo sapien
tttaagtagatgtgctgctgaagcg

SEQ ID NO: 544049 - DNA, 25 bp, Homo sapien
tgctaatctctgtattgttccaatt

SEQ ID NO: 544050 - DNA, 25 bp, Homo sapien
tattgttccaatttaagtagatgtg

SEQ ID NO: 544051 - DNA, 25 bp, Homo sapien
aatctctgactgtctgatgctcttc

SEQ ID NO: 544052 - DNA, 25 bp, Homo sapien
tcaatctctgactgtctgatgctct

SEQ ID NO: 544053 - DNA, 25 bp, Homo sapien
agatttggttctgcggttgggatgg

SEQ ID NO: 544054 - DNA, 25 bp, Homo sapien
ttggttctgcggttgggatgggtgg

SEQ ID NO: 544055 - DNA, 25 bp, Homo sapien
taactccctgacaaatgctatggca

SEQ ID NO: 544056 - DNA, 25 bp, Homo sapien
gataactccctgacaaatgctatgg

SEQ ID NO: 544057 - DNA, 25 bp, Homo sapien
aggataactccctgacaaatgctat

SEQ ID NO: 544058 - DNA, 25 bp, Homo sapien
tccctgacaaatgctatggcaaaca

SEQ ID NO: 544059 - DNA, 25 bp, Homo sapien
tggaagctgttcagtcctttcacaa

SEQ ID NO: 544060 - DNA, 25 bp, Homo sapien
ccagtcccagggacgagagtctgga

SEQ ID NO: 544061 - DNA, 25 bp, Homo sapien
ggaggagtccagtcccagggacgag

SEQ ID NO: 544062 - DNA, 25 bp, Homo sapien
ggaagctgttcagtcctttcacaac

SEQ ID NO: 544063 - DNA, 25 bp, Homo sapien
gtatccagagctcacgacacaaaca

SEQ ID NO: 544064 - DNA, 25 bp, Homo sapien
tttaagaagcacctgggttgtctta

SEQ ID NO: 544065 - DNA, 25 bp, Homo sapien
ccaaagcttctagccatttctagcc

SEQ ID NO: 544066 - DNA, 25 bp, Homo sapien
gccactgacctccatttgtatccag

SEQ ID NO: 544067 - DNA, 25 bp, Homo sapien
tcaacttggaagcagagaacagtga

SEQ ID NO: 544068 - DNA, 25 bp, Homo sapien
caacttggaagcagagaacagtgac

SEQ ID NO: 544069 - DNA, 25 bp, Homo sapien
cacagtatggctatggatgatggag

SEQ ID NO: 544070 - DNA, 25 bp, Homo sapien
taggacaccacagtatggctatgga

SEQ ID NO: 544071 - DNA, 25 bp, Homo sapien
cttctagaaggtggcatacagtata

SEQ ID NO: 544072 - DNA, 25 bp, Homo sapien
ggcatacagtataggacaccacagt

SEQ ID NO: 544073 - DNA, 25 bp, Homo sapien
gccaaacgggctattacaattacat

SEQ ID NO: 544074 - DNA, 25 bp, Homo sapien
tgccaaattggatattgctcaactc

SEQ ID NO: 544075 - DNA, 25 bp, Homo sapien
cattagcagtgttgcctttcatggg

SEQ ID NO: 544076 - DNA, 25 bp, Homo sapien
caattacataaagttccttgtgttc

SEQ ID NO: 544077 - DNA, 25 bp, Homo sapien
tccacctttgaactgataccagtca

SEQ ID NO: 544078 - DNA, 25 bp, Homo sapien
acctttgaactgataccagtcataa

SEQ ID NO: 544079 - DNA, 25 bp, Homo sapien
tctccacctttgaactgataccagt

SEQ ID NO: 544080 - DNA, 25 bp, Homo sapien
tgaactgataccagtcataaaactc

SEQ ID NO: 544081 - DNA, 25 bp, Homo sapien
aaagacataagcatccaatctctgt

SEQ ID NO: 544082 - DNA, 25 bp, Homo sapien
cagcattgctgagtcctgaattgtg

SEQ ID NO: 544083 - DNA, 25 bp, Homo sapien
aggtgagcttggtatggcaaagaca

SEQ ID NO: 544084 - DNA, 25 bp, Homo sapien
ggagcaggtcagcattgctgagtcc

SEQ ID NO: 544085 - DNA, 25 bp, Homo sapien
ttgctgccactcatatccaggtctc

SEQ ID NO: 544086 - DNA, 25 bp, Homo sapien
gctccaaggcatgggaccctgtgcc

SEQ ID NO: 544087 - DNA, 25 bp, Homo sapien
tgggctccaaggcatgggaccctgt

SEQ ID NO: 544088 - DNA, 25 bp, Homo sapien
gctcttgctgccactcatatccagg

SEQ ID NO: 544089 - DNA, 25 bp, Homo sapien
tgtctggtgttccagaaatttatag

SEQ ID NO: 544090 - DNA, 25 bp, Homo sapien
gatttatgaactttcatgctgttct

SEQ ID NO: 544091 - DNA, 25 bp, Homo sapien
agtggttttctgaaacccacatact

SEQ ID NO: 544092 - DNA, 25 bp, Homo sapien
gctcctaaagctcctattgttccca

SEQ ID NO: 544093 - DNA, 25 bp, Homo sapien
cctccccagatcgtggcatcccctc

SEQ ID NO: 544094 - DNA, 25 bp, Homo sapien
ttgttccaacctcagctcgggccct

SEQ ID NO: 544095 - DNA, 25 bp, Homo sapien
agctcgggccctgttccaccaaaag

SEQ ID NO: 544096 - DNA, 25 bp, Homo sapien
tcagatgcaactagaaccaaaaatt

SEQ ID NO: 544097 - DNA, 25 bp, Homo sapien
caaatttgtttggtgttaccagtag

SEQ ID NO: 544098 - DNA, 25 bp, Homo sapien
tgttaccagtagtgacctgccttga

SEQ ID NO: 544099 - DNA, 25 bp, Homo sapien
cagtagtgacctgccttgatgtggc

SEQ ID NO: 544100 - DNA, 25 bp, Homo sapien
acagagtccctgcaattatcatcac

SEQ ID NO: 544101 - DNA, 25 bp, Homo sapien
ttacagagtccctgcaattatcatc

SEQ ID NO: 544102 - DNA, 25 bp, Homo sapien
tacagagtccctgcaattatcatca

SEQ ID NO: 544103 - DNA, 25 bp, Homo sapien
cattataaagtacactgttcttggg

SEQ ID NO: 544104 - DNA, 25 bp, Homo sapien
gacttggattgttttagggattgca

SEQ ID NO: 544105 - DNA, 25 bp, Homo sapien
tttggtgtaagtttggagacttgga

SEQ ID NO: 544106 - DNA, 25 bp, Homo sapien
tctgtgatctttccaaggtgagcat

SEQ ID NO: 544107 - DNA, 25 bp, Homo sapien
cacactgtggcaaatgttgacgaga

SEQ ID NO: 544108 - DNA, 25 bp, Homo sapien
cagtccgtgacagagtggtgtagct

SEQ ID NO: 544109 - DNA, 25 bp, Homo sapien
tactaccagacaggataaatcctgg

SEQ ID NO: 544110 - DNA, 25 bp, Homo sapien
gagggtggcaccttctgattgccta

SEQ ID NO: 544111 - DNA, 25 bp, Homo sapien
ggtatgttgaaagctcttactatat

SEQ ID NO: 544112 - DNA, 25 bp, Homo sapien
tgtcaataaaggagacaggtatgtt

SEQ ID NO: 544113 - DNA, 25 bp, Homo sapien
caataaaggagacaggtatgttgaa

SEQ ID NO: 544114 - DNA, 25 bp, Homo sapien
aatttgtcaataaaggagacaggta

SEQ ID NO: 544115 - DNA, 25 bp, Homo sapien
ttctctcaggtagcaacagaggtgt

SEQ ID NO: 544116 - DNA, 25 bp, Homo sapien
gaggtgtatacagccactcacagcc

SEQ ID NO: 544117 - DNA, 25 bp, Homo sapien
gatggagcgccctctctttgttccc

SEQ ID NO: 544118 - DNA, 25 bp, Homo sapien
tttctacagattctagatggagcgc

SEQ ID NO: 544119 - DNA, 25 bp, Homo sapien
taaggtattgccctctattgataaa

SEQ ID NO: 544120 - DNA, 25 bp, Homo sapien
ggtattgccctctattgataaactc

SEQ ID NO: 544121 - DNA, 25 bp, Homo sapien
ccacagtaaggtattgccctctatt

SEQ ID NO: 544122 - DNA, 25 bp, Homo sapien
tattgataaactctagttccaattc

SEQ ID NO: 544123 - DNA, 25 bp, Homo sapien
tgtttgaatccaactgacagtgata

SEQ ID NO: 544124 - DNA, 25 bp, Homo sapien
tgtactttcatgaaagtctctgagt

SEQ ID NO: 544125 - DNA, 25 bp, Homo sapien
gataaatgaacagtaggattcttgc

SEQ ID NO: 544126 - DNA, 25 bp, Homo sapien
tccacttcccggtcaaccatgtttg

SEQ ID NO: 544127 - DNA, 25 bp, Homo sapien
catgaagcctgcttcaatagctggc

SEQ ID NO: 544128 - DNA, 25 bp, Homo sapien
gcttcaatagctggcctgaagtagt

SEQ ID NO: 544129 - DNA, 25 bp, Homo sapien
tctgaggtgttgaacaggaacttct

SEQ ID NO: 544130 - DNA, 25 bp, Homo sapien
tcactcggtgtggacttctgaggtg

SEQ ID NO: 544131 - DNA, 25 bp, Homo sapien
tgatggtaaagggtgaagaactgtt

SEQ ID NO: 544132 - DNA, 25 bp, Homo sapien
ctgaaaaatgatggtaaagggtgaa

SEQ ID NO: 544133 - DNA, 25 bp, Homo sapien
aaatgatggtaaagggtgaagaact

SEQ ID NO: 544134 - DNA, 25 bp, Homo sapien
gaaaaatgatggtaaagggtgaaga

SEQ ID NO: 544135 - DNA, 25 bp, Homo sapien
agcatggctctgcaggtttcacaag

SEQ ID NO: 544136 - DNA, 25 bp, Homo sapien
agaatctggatgacagccaatggcc

SEQ ID NO: 544137 - DNA, 25 bp, Homo sapien
aggtttcacaagggcagaatctgga

SEQ ID NO: 544138 - DNA, 25 bp, Homo sapien
ggcccaacagctgttactgatgagc

SEQ ID NO: 544139 - DNA, 25 bp, Homo sapien
ccactatgacatagagatgagcaca

SEQ ID NO: 544140 - DNA, 25 bp, Homo sapien
gcacgattgatccaggaacacaaca

SEQ ID NO: 544141 - DNA, 25 bp, Homo sapien
taagatgtttatgcaccactatgac

SEQ ID NO: 544142 - DNA, 25 bp, Homo sapien
ggctgatgggtgacaactgtgacac

SEQ ID NO: 544143 - DNA, 25 bp, Homo sapien
atgtgatcacactgtctatacaagt

SEQ ID NO: 544144 - DNA, 25 bp, Homo sapien
cagacaggccaaagaggtactcatc

SEQ ID NO: 544145 - DNA, 25 bp, Homo sapien
cacactgtctatacaagttcatttc

SEQ ID NO: 544146 - DNA, 25 bp, Homo sapien
ttaattttggcatttatgtggatgt

SEQ ID NO: 544147 - DNA, 25 bp, Homo sapien
aatcatgaacctgagaattactttc

SEQ ID NO: 544148 - DNA, 25 bp, Homo sapien
gcttccagcaccctgtcgaccccat

SEQ ID NO: 544149 - DNA, 25 bp, Homo sapien
cacccaaatcatgaacctgagaatt

SEQ ID NO: 544150 - DNA, 25 bp, Homo sapien
catgaacctgagaattactttcatg

SEQ ID NO: 544151 - DNA, 25 bp, Homo sapien
tgtacttggattggaattctgttcc

SEQ ID NO: 544152 - DNA, 25 bp, Homo sapien
tgagaagaaaagcttgtacttggat

SEQ ID NO: 544153 - DNA, 25 bp, Homo sapien
agaagaaaagcttgtacttggattg

SEQ ID NO: 544154 - DNA, 25 bp, Homo sapien
agcttgtacttggattggaattctg

SEQ ID NO: 544155 - DNA, 25 bp, Homo sapien
gttttccagagcttggctttgacag

SEQ ID NO: 544156 - DNA, 25 bp, Homo sapien
tcagttttccagagcttggctttga

SEQ ID NO: 544157 - DNA, 25 bp, Homo sapien
cagttttccagagcttggctttgac

SEQ ID NO: 544158 - DNA, 25 bp, Homo sapien
ttttccagagcttggctttgacagg

SEQ ID NO: 544159 - DNA, 25 bp, Homo sapien
ccctctgtagtaggtgggtgacctg

SEQ ID NO: 544160 - DNA, 25 bp, Homo sapien
actgtgtccctctgtagtaggtggg

SEQ ID NO: 544161 - DNA, 25 bp, Homo sapien
ttttctgagtcagcgactgtgtccc

SEQ ID NO: 544162 - DNA, 25 bp, Homo sapien
gagttttctgagtcagcgactgtgt

SEQ ID NO: 544163 - DNA, 25 bp, Homo sapien
gagtgaatacatgaagctctatcat

SEQ ID NO: 544164 - DNA, 25 bp, Homo sapien
ctgagtgaatacatgaagctctatc

SEQ ID NO: 544165 - DNA, 25 bp, Homo sapien
tgagtgaatacatgaagctctatca

SEQ ID NO: 544166 - DNA, 25 bp, Homo sapien
ggtaacttagctctcagaatgtcaa

SEQ ID NO: 544167 - DNA, 25 bp, Homo sapien
taaagaacagccatgtactgtgatc

SEQ ID NO: 544168 - DNA, 25 bp, Homo sapien
tgggctctgaacactgaagtctttg

SEQ ID NO: 544169 - DNA, 25 bp, Homo sapien
tggaggtggcctttctagaggtaac

SEQ ID NO: 544170 - DNA, 25 bp, Homo sapien
gtgaatgtaggcagctacacttgtt

SEQ ID NO: 544171 - DNA, 25 bp, Homo sapien
tgaatgtaggcagctacacttgtta

SEQ ID NO: 544172 - DNA, 25 bp, Homo sapien
tttactatgtcttggttgctgcccc

SEQ ID NO: 544173 - DNA, 25 bp, Homo sapien
gctctttactatgtcttggttgctg

SEQ ID NO: 544174 - DNA, 25 bp, Homo sapien
tctttactatgtcttggttgctgcc

SEQ ID NO: 544175 - DNA, 25 bp, Homo sapien
tggctctttactatgtcttggttgc

SEQ ID NO: 544176 - DNA, 25 bp, Homo sapien
ctgagtaatttgatggctggatcta

SEQ ID NO: 544177 - DNA, 25 bp, Homo sapien
tggtctctgagtaaatcgcagtagg

SEQ ID NO: 544178 - DNA, 25 bp, Homo sapien
cagtaggtaggaaattaacctgagt

SEQ ID NO: 544179 - DNA, 25 bp, Homo sapien
ggatctatagttatccctttcctcc

SEQ ID NO: 544180 - DNA, 25 bp, Homo sapien
gagagacgatgattttactttgttg

SEQ ID NO: 544181 - DNA, 25 bp, Homo sapien
tagcatgtaagagagacgatgattt

SEQ ID NO: 544182 - DNA, 25 bp, Homo sapien
gattctgatttatgtgcctgtacca

SEQ ID NO: 544183 - DNA, 25 bp, Homo sapien
tactttgttggaataattcaaacat

SEQ ID NO: 544184 - DNA, 25 bp, Homo sapien
agaatatctgtagcctgagcttctc

SEQ ID NO: 544185 - DNA, 25 bp, Homo sapien
tgtagcctgagcttctccaacttgc

SEQ ID NO: 544186 - DNA, 25 bp, Homo sapien
tatctgtagcctgagcttctccaac

SEQ ID NO: 544187 - DNA, 25 bp, Homo sapien
aatatctgtagcctgagcttctcca

SEQ ID NO: 544188 - DNA, 25 bp, Homo sapien
gaaaataagcaaattggttgtaaca

SEQ ID NO: 544189 - DNA, 25 bp, Homo sapien
tatagggaagtgtgaacactgctgt

SEQ ID NO: 544190 - DNA, 25 bp, Homo sapien
tggtccagttccactgctccctata

SEQ ID NO: 544191 - DNA, 25 bp, Homo sapien
gctccctatatagggaagtgtgaac

SEQ ID NO: 544192 - DNA, 25 bp, Homo sapien
aaagatctggttccatgcagactgg

SEQ ID NO: 544193 - DNA, 25 bp, Homo sapien
gatctggttccatgcagactggtgg

SEQ ID NO: 544194 - DNA, 25 bp, Homo sapien
tctggttccatgcagactggtggaa

SEQ ID NO: 544195 - DNA, 25 bp, Homo sapien
ggaaagatctggttccatgcagact

SEQ ID NO: 544196 - DNA, 25 bp, Homo sapien
gtttatgtgatagtacatcttcaga

SEQ ID NO: 544197 - DNA, 25 bp, Homo sapien
gtttttaggcagcatccactttgag

SEQ ID NO: 544198 - DNA, 25 bp, Homo sapien
gaatttcccgttcatgtttatgtga

SEQ ID NO: 544199 - DNA, 25 bp, Homo sapien
acacttgtaatgcaacccttgttgg

SEQ ID NO: 544200 - DNA, 25 bp, Homo sapien
tagaccctgataggtttgcctggat

SEQ ID NO: 544201 - DNA, 25 bp, Homo sapien
tcaattcatccatgatagaccctga

SEQ ID NO: 544202 - DNA, 25 bp, Homo sapien
taaagttaatcctgttgcaaagccg

SEQ ID NO: 544203 - DNA, 25 bp, Homo sapien
tgcaaagccgtggttcaattcatcc

SEQ ID NO: 544204 - DNA, 25 bp, Homo sapien
aaatgccctccctccatggcgcttg

SEQ ID NO: 544205 - DNA, 25 bp, Homo sapien
ctgtgtgtctgcgctgaactgctgc

SEQ ID NO: 544206 - DNA, 25 bp, Homo sapien
gccctccctccatggcgcttgccgt

SEQ ID NO: 544207 - DNA, 25 bp, Homo sapien
tgtgtctgcgctgaactgctgccat

SEQ ID NO: 544208 - DNA, 25 bp, Homo sapien
tcaattaggtcacaggccatggtgc

SEQ ID NO: 544209 - DNA, 25 bp, Homo sapien
ttgctgctcatgaaaggggttggtt

SEQ ID NO: 544210 - DNA, 25 bp, Homo sapien
tgaaggtctgggaagactccaaggc

SEQ ID NO: 544211 - DNA, 25 bp, Homo sapien
gatctggtgcctagcgccaaagcat

SEQ ID NO: 544212 - DNA, 25 bp, Homo sapien
ccactttcccatgacatttaaatct

SEQ ID NO: 544213 - DNA, 25 bp, Homo sapien
gaatagtgtattacttccactttcc

SEQ ID NO: 544214 - DNA, 25 bp, Homo sapien
cttaaagaatagtgtattacttcca

SEQ ID NO: 544215 - DNA, 25 bp, Homo sapien
tccactttcccatgacatttaaatc

SEQ ID NO: 544216 - DNA, 25 bp, Homo sapien
gagagagaaataaggtgttagggac

SEQ ID NO: 544217 - DNA, 25 bp, Homo sapien
agagaaataaggtgttagggacttg

SEQ ID NO: 544218 - DNA, 25 bp, Homo sapien
agagagaaataaggtgttagggact

SEQ ID NO: 544219 - DNA, 25 bp, Homo sapien
tcactaaatagggtgtccacctgcc

SEQ ID NO: 544220 - DNA, 25 bp, Homo sapien
tgtctgcttaaacatggcccgggcc

SEQ ID NO: 544221 - DNA, 25 bp, Homo sapien
aagtcccataaaaggctcccagcat

SEQ ID NO: 544222 - DNA, 25 bp, Homo sapien
tgttctgcggcttcaggtcccagtt

SEQ ID NO: 544223 - DNA, 25 bp, Homo sapien
cctccctaggtgagttggaggccaa

SEQ ID NO: 544224 - DNA, 25 bp, Homo sapien
gaggctagggaagccactcatttta

SEQ ID NO: 544225 - DNA, 25 bp, Homo sapien
ttagcttcaccttgacgaacacgcc

SEQ ID NO: 544226 - DNA, 25 bp, Homo sapien
ctgtgtcccagtcagtatgtgccct

SEQ ID NO: 544227 - DNA, 25 bp, Homo sapien
tcttcaacttcaatggcagacacag

SEQ ID NO: 544228 - DNA, 25 bp, Homo sapien
cctcctatttccgagatggagaagg

SEQ ID NO: 544229 - DNA, 25 bp, Homo sapien
tgaggaggagaattgttaaagactt

SEQ ID NO: 544230 - DNA, 25 bp, Homo sapien
taaagactttccttgaacgcagttc

SEQ ID NO: 544231 - DNA, 25 bp, Homo sapien
cataagctgaataggctttggctgg

SEQ ID NO: 544232 - DNA, 25 bp, Homo sapien
taccacactacctctggttgtgacc

SEQ ID NO: 544233 - DNA, 25 bp, Homo sapien
ctacaggaagtggaacgggtgattc

SEQ ID NO: 544234 - DNA, 25 bp, Homo sapien
gaccttatcaggtttcataagctga

SEQ ID NO: 544235 - DNA, 25 bp, Homo sapien
cccgtacagtccattatgggcttag

SEQ ID NO: 544236 - DNA, 25 bp, Homo sapien
tgttattaacttgggaatgccgtag

SEQ ID NO: 544237 - DNA, 25 bp, Homo sapien
gtaaccctcacaatgcccgtacagt

SEQ ID NO: 544238 - DNA, 25 bp, Homo sapien
catttctgttttccactagccaggg

SEQ ID NO: 544239 - DNA, 25 bp, Homo sapien
tattctagtcatagcacagggctct

SEQ ID NO: 544240 - DNA, 25 bp, Homo sapien
cctgggatgcctaagttataattac

SEQ ID NO: 544241 - DNA, 25 bp, Homo sapien
tcacattcactctcgtttttgcttt

SEQ ID NO: 544242 - DNA, 25 bp, Homo sapien
ccatgaatattagattagggaaact

SEQ ID NO: 544243 - DNA, 25 bp, Homo sapien
tgctccctgtgccttcaaggctgcc

SEQ ID NO: 544244 - DNA, 25 bp, Homo sapien
gagagagaccgtctgtgctccctgt

SEQ ID NO: 544245 - DNA, 25 bp, Homo sapien
tccacagagaaacgagtgacatatg

SEQ ID NO: 544246 - DNA, 25 bp, Homo sapien
tcaaggctgcccttgcaaaggacac

SEQ ID NO: 544247 - DNA, 25 bp, Homo sapien
ggcatttctgggggcggaagagcat

SEQ ID NO: 544248 - DNA, 25 bp, Homo sapien
caggcatttctgggggcggaagagc

SEQ ID NO: 544249 - DNA, 25 bp, Homo sapien
aggcatttctgggggcggaagagca

SEQ ID NO: 544250 - DNA, 25 bp, Homo sapien
gagaaattgcagagtaaatttcccc

SEQ ID NO: 544251 - DNA, 25 bp, Homo sapien
taaatttcccctgaaggccatgtct

SEQ ID NO: 544252 - DNA, 25 bp, Homo sapien
ataattactgagtagagtccagccc

SEQ ID NO: 544253 - DNA, 25 bp, Homo sapien
agatctaggatttccccagagctgg

SEQ ID NO: 544254 - DNA, 25 bp, Homo sapien
gggtccgagtgacacaaactcattg

SEQ ID NO: 544255 - DNA, 25 bp, Homo sapien
gagtcaggcaatgctctctgtttac

SEQ ID NO: 544256 - DNA, 25 bp, Homo sapien
ggctgggaccctctgacattaagta

SEQ ID NO: 544257 - DNA, 25 bp, Homo sapien
cacaccacagttgtttgggtccgag

SEQ ID NO: 544258 - DNA, 25 bp, Homo sapien
cttctcctctaactagtccacattc

SEQ ID NO: 544259 - DNA, 25 bp, Homo sapien
taactagtccacattccttatttcc

SEQ ID NO: 544260 - DNA, 25 bp, Homo sapien
ctagtccacattccttatttcctgc

SEQ ID NO: 544261 - DNA, 25 bp, Homo sapien
tcctctaactagtccacattcctta

SEQ ID NO: 544262 - DNA, 25 bp, Homo sapien
ttgaagtcaccaaatctgcagatct

SEQ ID NO: 544263 - DNA, 25 bp, Homo sapien
acaacagcagtgtttgatagctctg

SEQ ID NO: 544264 - DNA, 25 bp, Homo sapien
gctctgtatccttgacacaacagca

SEQ ID NO: 544265 - DNA, 25 bp, Homo sapien
ttgcaattactctttgaagtcacca

SEQ ID NO: 544266 - DNA, 25 bp, Homo sapien
gggctactgtatcccacagccacag

SEQ ID NO: 544267 - DNA, 25 bp, Homo sapien
tgggctactgtatcccacagccaca

SEQ ID NO: 544268 - DNA, 25 bp, Homo sapien
ggctactgtatcccacagccacagc

SEQ ID NO: 544269 - DNA, 25 bp, Homo sapien
gctactgtatcccacagccacagca

SEQ ID NO: 544270 - DNA, 25 bp, Homo sapien
ggcagctatctgtgaagtccttata

SEQ ID NO: 544271 - DNA, 25 bp, Homo sapien
gcatccacggcagctatctgtgaag

SEQ ID NO: 544272 - DNA, 25 bp, Homo sapien
cagcatccacggcagctatctgtga

SEQ ID NO: 544273 - DNA, 25 bp, Homo sapien
tccacggcagctatctgtgaagtcc

SEQ ID NO: 544274 - DNA, 25 bp, Homo sapien
tacccatttactgtggccgccgtga

SEQ ID NO: 544275 - DNA, 25 bp, Homo sapien
ttttggagtctgacccaagtactgg

SEQ ID NO: 544276 - DNA, 25 bp, Homo sapien
ggctccttcttctagtcttatctca

SEQ ID NO: 544277 - DNA, 25 bp, Homo sapien
tatctctcagggtaatagccatatc

SEQ ID NO: 544278 - DNA, 25 bp, Homo sapien
tctggctcagagggtatgtgaccat

SEQ ID NO: 544279 - DNA, 25 bp, Homo sapien
gttgctgtctggctcagagggtatg

SEQ ID NO: 544280 - DNA, 25 bp, Homo sapien
ctgtctggctcagagggtatgtgac

SEQ ID NO: 544281 - DNA, 25 bp, Homo sapien
ggttgctgtctggctcagagggtat

SEQ ID NO: 544282 - DNA, 25 bp, Homo sapien
ccacacgtgacttggagaccctcat

SEQ ID NO: 544283 - DNA, 25 bp, Homo sapien
ttcctcaatctctgtttacttgtgg

SEQ ID NO: 544284 - DNA, 25 bp, Homo sapien
tgggctaaggacctcaagatttggg

SEQ ID NO: 544285 - DNA, 25 bp, Homo sapien
atggcttgttcacagatggactgct

SEQ ID NO: 544286 - DNA, 25 bp, Homo sapien
tgggagattatctttcaacagaaca

SEQ ID NO: 544287 - DNA, 25 bp, Homo sapien
gagattatctttcaacagaacattt

SEQ ID NO: 544288 - DNA, 25 bp, Homo sapien
gggagattatctttcaacagaacat

SEQ ID NO: 544289 - DNA, 25 bp, Homo sapien
tttgggagattatctttcaacagaa

SEQ ID NO: 544290 - DNA, 25 bp, Homo sapien
ccacctccgtgaagacttgtttgta

SEQ ID NO: 544291 - DNA, 25 bp, Homo sapien
gcttttgtaggccttcgtgccatga

SEQ ID NO: 544292 - DNA, 25 bp, Homo sapien
tgaatatgccaatccacgctgcctg

SEQ ID NO: 544293 - DNA, 25 bp, Homo sapien
tgatgaatggccatgtgagacgcca

SEQ ID NO: 544294 - DNA, 25 bp, Homo sapien
gaaagtaattcccatgtcaacagga

SEQ ID NO: 544295 - DNA, 25 bp, Homo sapien
agtaattcccatgtcaacaggagtc

SEQ ID NO: 544296 - DNA, 25 bp, Homo sapien
attcccatgtcaacaggagtcccag

SEQ ID NO: 544297 - DNA, 25 bp, Homo sapien
taattcccatgtcaacaggagtccc

SEQ ID NO: 544298 - DNA, 25 bp, Homo sapien
tgcccatttcctaagttcaccggga

SEQ ID NO: 544299 - DNA, 25 bp, Homo sapien
agtcacctctataaacgtcttccag

SEQ ID NO: 544300 - DNA, 25 bp, Homo sapien
tcttccagaggataatgcccatttc

SEQ ID NO: 544301 - DNA, 25 bp, Homo sapien
catttcctaagttcaccgggacttg

SEQ ID NO: 544302 - DNA, 25 bp, Homo sapien
tggtatagagacctcactgcagttg

SEQ ID NO: 544303 - DNA, 25 bp, Homo sapien
tatagagacctcactgcagttgacc

SEQ ID NO: 544304 - DNA, 25 bp, Homo sapien
tctgtggtatagagacctcactgca

SEQ ID NO: 544305 - DNA, 25 bp, Homo sapien
cactctgtggtatagagacctcact

SEQ ID NO: 544306 - DNA, 25 bp, Homo sapien
aactgtagacatcctaacacgtgga

SEQ ID NO: 544307 - DNA, 25 bp, Homo sapien
tgcttctgaatccttccacggtatg

SEQ ID NO: 544308 - DNA, 25 bp, Homo sapien
gacatcctaacacgtggactgcttc

SEQ ID NO: 544309 - DNA, 25 bp, Homo sapien
cttccacggtatggcaggactcctg

SEQ ID NO: 544310 - DNA, 25 bp, Homo sapien
aaagcagatgtgctagagggcacac

SEQ ID NO: 544311 - DNA, 25 bp, Homo sapien
taaagcagatgtgctagagggcaca

SEQ ID NO: 544312 - DNA, 25 bp, Homo sapien
agagtgtggggagtcttttctcctc

SEQ ID NO: 544313 - DNA, 25 bp, Homo sapien
aataaagcagatgtgctagagggca

SEQ ID NO: 544314 - DNA, 25 bp, Homo sapien
gttgccatcctcatccagataccag

SEQ ID NO: 544315 - DNA, 25 bp, Homo sapien
ctgttgaagagcggttgccatcctc

SEQ ID NO: 544316 - DNA, 25 bp, Homo sapien
ttgaagagcggttgccatcctcatc

SEQ ID NO: 544317 - DNA, 25 bp, Homo sapien
ggttgccatcctcatccagatacca

SEQ ID NO: 544318 - DNA, 25 bp, Homo sapien
gaacagtgtcccctcttagaggcca

SEQ ID NO: 544319 - DNA, 25 bp, Homo sapien
agtgtcccctcttagaggccacggg

SEQ ID NO: 544320 - DNA, 25 bp, Homo sapien
gaaagaacagtgtcccctcttagag

SEQ ID NO: 544321 - DNA, 25 bp, Homo sapien
aaagaacagtgtcccctcttagagg

SEQ ID NO: 544322 - DNA, 25 bp, Homo sapien
aaacagcagctcttttggagtatga

SEQ ID NO: 544323 - DNA, 25 bp, Homo sapien
tccgttgccgaaggcaaatgttctc

SEQ ID NO: 544324 - DNA, 25 bp, Homo sapien
cagtgaccttcagagtccgttgccg

SEQ ID NO: 544325 - DNA, 25 bp, Homo sapien
ggttcttaagctccagaggacagtg

SEQ ID NO: 544326 - DNA, 25 bp, Homo sapien
tcaaagaaggattcttctgagacat

SEQ ID NO: 544327 - DNA, 25 bp, Homo sapien
ttgtggcagcttcaaagaaggattc

SEQ ID NO: 544328 - DNA, 25 bp, Homo sapien
cttttgtggcagcttcaaagaagga

SEQ ID NO: 544329 - DNA, 25 bp, Homo sapien
ctgcttttgtggcagcttcaaagaa

SEQ ID NO: 544330 - DNA, 25 bp, Homo sapien
gcatccagagttctatggcaccctc

SEQ ID NO: 544331 - DNA, 25 bp, Homo sapien
ctgggtgtttggctaagaagaagca

SEQ ID NO: 544332 - DNA, 25 bp, Homo sapien
gaatgcttgctcttatctcatcatg

SEQ ID NO: 544333 - DNA, 25 bp, Homo sapien
agaaaccaacagtgtctaaattctg

SEQ ID NO: 544334 - DNA, 25 bp, Homo sapien
cagaattaaaaagcacaggtttgct

SEQ ID NO: 544335 - DNA, 25 bp, Homo sapien
ggaagcagaattaaaaagcacaggt

SEQ ID NO: 544336 - DNA, 25 bp, Homo sapien
gaagcagaattaaaaagcacaggtt

SEQ ID NO: 544337 - DNA, 25 bp, Homo sapien
agcagaattaaaaagcacaggtttg

SEQ ID NO: 544338 - DNA, 25 bp, Homo sapien
aacttcgagtaagatcaatgaagaa

SEQ ID NO: 544339 - DNA, 25 bp, Homo sapien
cttcgagtaagatcaatgaagaata

SEQ ID NO: 544340 - DNA, 25 bp, Homo sapien
tcaacttcgagtaagatcaatgaag

SEQ ID NO: 544341 - DNA, 25 bp, Homo sapien
caacttcgagtaagatcaatgaaga

SEQ ID NO: 544342 - DNA, 25 bp, Homo sapien
tatgtcagtcccaaggtctatgtga

SEQ ID NO: 544343 - DNA, 25 bp, Homo sapien
tatgaggtggtttacagcaaaggac

SEQ ID NO: 544344 - DNA, 25 bp, Homo sapien
gattggtattatattcaactctgaa

SEQ ID NO: 544345 - DNA, 25 bp, Homo sapien
cactcagtaaagttaatatcataga

SEQ ID NO: 544346 - DNA, 25 bp, Homo sapien
cagaaattgtgggaggacatggagg

SEQ ID NO: 544347 - DNA, 25 bp, Homo sapien
gattatggaggattgtgagagggca

SEQ ID NO: 544348 - DNA, 25 bp, Homo sapien
ttatggaggattgtgagagggcaca

SEQ ID NO: 544349 - DNA, 25 bp, Homo sapien
tcactggattatggaggattgtgag

SEQ ID NO: 544350 - DNA, 25 bp, Homo sapien
tttctattgggtccgcccctgtcag

SEQ ID NO: 544351 - DNA, 25 bp, Homo sapien
taagaattgtgggagagtcatgcaa

SEQ ID NO: 544352 - DNA, 25 bp, Homo sapien
catgtttgctccttcgtgaccacgt

SEQ ID NO: 544353 - DNA, 25 bp, Homo sapien
tctccgaggccacaccatgtttgct

SEQ ID NO: 544354 - DNA, 25 bp, Homo sapien
gctcctagggccgtactctctgtgc

SEQ ID NO: 544355 - DNA, 25 bp, Homo sapien
tctctgtgctgtcgtaacaacgcct

SEQ ID NO: 544356 - DNA, 25 bp, Homo sapien
gtaacaacgccttctctgacaggcc

SEQ ID NO: 544357 - DNA, 25 bp, Homo sapien
cattctcgtggccagactggagcct

SEQ ID NO: 544358 - DNA, 25 bp, Homo sapien
cagacctcgcccaggcacttcacct

SEQ ID NO: 544359 - DNA, 25 bp, Homo sapien
ctcgcccaggcacttcacctgccgc

SEQ ID NO: 544360 - DNA, 25 bp, Homo sapien
ttccctttgcccagacctcgcccag

SEQ ID NO: 544361 - DNA, 25 bp, Homo sapien
ctttgcccagacctcgcccaggcac

SEQ ID NO: 544362 - DNA, 25 bp, Homo sapien
cattcaggtatttaacaggactata

SEQ ID NO: 544363 - DNA, 25 bp, Homo sapien
gcattcaggtcggaaaaaacttgag

SEQ ID NO: 544364 - DNA, 25 bp, Homo sapien
cttgagaattctgtcttagacgatc

SEQ ID NO: 544365 - DNA, 25 bp, Homo sapien
tatatggatgaccactggaagttac

SEQ ID NO: 544366 - DNA, 25 bp, Homo sapien
ggcgcctggactctgacaaccaatt

SEQ ID NO: 544367 - DNA, 25 bp, Homo sapien
ctccacaagtagaggtcaaggtacc

SEQ ID NO: 544368 - DNA, 25 bp, Homo sapien
ataagaacgcacattactctctggg

SEQ ID NO: 544369 - DNA, 25 bp, Homo sapien
catttccttggatacaggcgcctgg

SEQ ID NO: 544370 - DNA, 25 bp, Homo sapien
gtgtcctcccacattaggaacctgg

SEQ ID NO: 544371 - DNA, 25 bp, Homo sapien
tcagtcagtccttctcttgtataac

SEQ ID NO: 544372 - DNA, 25 bp, Homo sapien
aacttctatctctcttggatctctc

SEQ ID NO: 544373 - DNA, 25 bp, Homo sapien
ctgtgctttggctgcgttctccaaa

SEQ ID NO: 544374 - DNA, 25 bp, Homo sapien
ctgaacattatcaggctcttcatga

SEQ ID NO: 544375 - DNA, 25 bp, Homo sapien
tattctgaacattatcaggctcttc

SEQ ID NO: 544376 - DNA, 25 bp, Homo sapien
caggctcttcatgatacagtttcat

SEQ ID NO: 544377 - DNA, 25 bp, Homo sapien
attattctgaacattatcaggctct

SEQ ID NO: 544378 - DNA, 25 bp, Homo sapien
tggttaataactatgatttccaaag

SEQ ID NO: 544379 - DNA, 25 bp, Homo sapien
aaagatgcctgcttgatttggccaa

SEQ ID NO: 544380 - DNA, 25 bp, Homo sapien
taatgtgtaggacctcctctgggca

SEQ ID NO: 544381 - DNA, 25 bp, Homo sapien
cagggttgcctaaacactacagagt

SEQ ID NO: 544382 - DNA, 25 bp, Homo sapien
tgtattttcacacggacagatctcg

SEQ ID NO: 544383 - DNA, 25 bp, Homo sapien
cagacacgttgataggaaagagcct

SEQ ID NO: 544384 - DNA, 25 bp, Homo sapien
agaacatgacgttagaattgacccc

SEQ ID NO: 544385 - DNA, 25 bp, Homo sapien
tagaacacaagtagggcaaaagcac

SEQ ID NO: 544386 - DNA, 25 bp, Homo sapien
tctgtgaaagtcttgatgaacctgc

SEQ ID NO: 544387 - DNA, 25 bp, Homo sapien
ttgcacaaagggtggactctgtctc

SEQ ID NO: 544388 - DNA, 25 bp, Homo sapien
ccattcattggttctcgccttgcac

SEQ ID NO: 544389 - DNA, 25 bp, Homo sapien
caaggagtccattcattggttctcg

SEQ ID NO: 544390 - DNA, 25 bp, Homo sapien
cttgcacaaagggtggactctgtct

SEQ ID NO: 544391 - DNA, 25 bp, Homo sapien
tcagtgagattaaggaacccagcag

SEQ ID NO: 544392 - DNA, 25 bp, Homo sapien
gagcatgctctgacaaagttggaca

SEQ ID NO: 544393 - DNA, 25 bp, Homo sapien
aaattgcccttacccgatgtgtgac

SEQ ID NO: 544394 - DNA, 25 bp, Homo sapien
tatagattcctttaacacgtggcca

SEQ ID NO: 544395 - DNA, 25 bp, Homo sapien
gagaactgacccattaaccgaagag

SEQ ID NO: 544396 - DNA, 25 bp, Homo sapien
gaagagttaattcccggctatgcct

SEQ ID NO: 544397 - DNA, 25 bp, Homo sapien
gacctggcagacaatatagagcaca

SEQ ID NO: 544398 - DNA, 25 bp, Homo sapien
gttttatagaaacgacgccaggcag

SEQ ID NO: 544399 - DNA, 25 bp, Homo sapien
tacaatccctttagtaagtatgaaa

SEQ ID NO: 544400 - DNA, 25 bp, Homo sapien
aagattacctcagtgctgtaaatgg

SEQ ID NO: 544401 - DNA, 25 bp, Homo sapien
tatgaaaattggtaacgtgagtcct

SEQ ID NO: 544402 - DNA, 25 bp, Homo sapien
tgtggtactcaaccaagcaggacaa

SEQ ID NO: 544403 - DNA, 25 bp, Homo sapien
tttcatgttcactgactttgcctgg

SEQ ID NO: 544404 - DNA, 25 bp, Homo sapien
tcactgactttgcctgggcagcccc

SEQ ID NO: 544405 - DNA, 25 bp, Homo sapien
cactgactttgcctgggcagcccca

SEQ ID NO: 544406 - DNA, 25 bp, Homo sapien
tcatgttcactgactttgcctgggc

SEQ ID NO: 544407 - DNA, 25 bp, Homo sapien
ccttgtaatcaaatactaggggcag

SEQ ID NO: 544408 - DNA, 25 bp, Homo sapien
ttccttgtaatcaaatactaggggc

SEQ ID NO: 544409 - DNA, 25 bp, Homo sapien
gtaatcaaatactaggggcaggaag

SEQ ID NO: 544410 - DNA, 25 bp, Homo sapien
tgtaatcaaatactaggggcaggaa

SEQ ID NO: 544411 - DNA, 25 bp, Homo sapien
ctttgcaggtaatgggacctctcca

SEQ ID NO: 544412 - DNA, 25 bp, Homo sapien
cagagaccaggacgagacttcaact

SEQ ID NO: 544413 - DNA, 25 bp, Homo sapien
ctctgtgccagtccatgccagggca

SEQ ID NO: 544414 - DNA, 25 bp, Homo sapien
gccatcgcgattgcaaagggctgcc

SEQ ID NO: 544415 - DNA, 25 bp, Homo sapien
tctggtttcagacatcgtgggatgg

SEQ ID NO: 544416 - DNA, 25 bp, Homo sapien
tgggtgccgctaagagatccagctc

SEQ ID NO: 544417 - DNA, 25 bp, Homo sapien
tcttacgctcagctggacaggtagc

SEQ ID NO: 544418 - DNA, 25 bp, Homo sapien
gacggttctcgtctagtcatgatgg

SEQ ID NO: 544419 - DNA, 25 bp, Homo sapien
aacatatgcctccggcggtgcaggg

SEQ ID NO: 544420 - DNA, 25 bp, Homo sapien
catatgcctccggcggtgcagggcc

SEQ ID NO: 544421 - DNA, 25 bp, Homo sapien
caacatatgcctccggcggtgcagg

SEQ ID NO: 544422 - DNA, 25 bp, Homo sapien
accaacatatgcctccggcggtgca

SEQ ID NO: 544423 - DNA, 25 bp, Homo sapien
tctgaacgagcgaacttccaggtgc

SEQ ID NO: 544424 - DNA, 25 bp, Homo sapien
tatgtttgcggtaatgcctcgtcag

SEQ ID NO: 544425 - DNA, 25 bp, Homo sapien
cagtccgcgcacttgaatggcttca

SEQ ID NO: 544426 - DNA, 25 bp, Homo sapien
ggaaaagctgcgatcacagtccgcg

SEQ ID NO: 544427 - DNA, 25 bp, Homo sapien
gaacacaagctttggtgctccatcc

SEQ ID NO: 544428 - DNA, 25 bp, Homo sapien
ggaacacaagctttggtgctccatc

SEQ ID NO: 544429 - DNA, 25 bp, Homo sapien
cagggctttcctattacgtattatt

SEQ ID NO: 544430 - DNA, 25 bp, Homo sapien
gctgtagcaacctgcatagagctcg

SEQ ID NO: 544431 - DNA, 25 bp, Homo sapien
caggaccaatgaccccttcagtgct

SEQ ID NO: 544432 - DNA, 25 bp, Homo sapien
gcttgtctgcataggcaggtgatgc

SEQ ID NO: 544433 - DNA, 25 bp, Homo sapien
accaggatgcacagctgtcacaaag

SEQ ID NO: 544434 - DNA, 25 bp, Homo sapien
ctttgtaggaatatcctcaaaccac

SEQ ID NO: 544435 - DNA, 25 bp, Homo sapien
caggatgcacagctgtcacaaagcc

SEQ ID NO: 544436 - DNA, 25 bp, Homo sapien
ttgtaggaatatcctcaaaccactt

SEQ ID NO: 544437 - DNA, 25 bp, Homo sapien
tatacaggattacctactgggcctc

SEQ ID NO: 544438 - DNA, 25 bp, Homo sapien
taattcctaagaaatgtgactacct

SEQ ID NO: 544439 - DNA, 25 bp, Homo sapien
cataaaggtagggaagatcatactc

SEQ ID NO: 544440 - DNA, 25 bp, Homo sapien
tacagagacttcattcatcaagaga

SEQ ID NO: 544441 - DNA, 25 bp, Homo sapien
atcctggaggaactggaagctcagg

SEQ ID NO: 544442 - DNA, 25 bp, Homo sapien
tcagtctcttgccagggccttgcac

SEQ ID NO: 544443 - DNA, 25 bp, Homo sapien
ccttgcactggaggcatcctggagg

SEQ ID NO: 544444 - DNA, 25 bp, Homo sapien
gaagctcaggaagccagaggatgcc

SEQ ID NO: 544445 - DNA, 25 bp, Homo sapien
caggtgagaagccctgcagagcggt

SEQ ID NO: 544446 - DNA, 25 bp, Homo sapien
tggctcacaggtgagaagccctgca

SEQ ID NO: 544447 - DNA, 25 bp, Homo sapien
gctcacaggtgagaagccctgcaga

SEQ ID NO: 544448 - DNA, 25 bp, Homo sapien
ggtgagaagccctgcagagcggtac

SEQ ID NO: 544449 - DNA, 25 bp, Homo sapien
caaaatcacatctgtggatacgccg

SEQ ID NO: 544450 - DNA, 25 bp, Homo sapien
ggatacgccgttttctggagtctgg

SEQ ID NO: 544451 - DNA, 25 bp, Homo sapien
gggattcagaccgtctctggcgtct

SEQ ID NO: 544452 - DNA, 25 bp, Homo sapien
gtcctccggtgagccttcaggtgag

SEQ ID NO: 544453 - DNA, 25 bp, Homo sapien
agtggagttacacggtgagatgcac

SEQ ID NO: 544454 - DNA, 25 bp, Homo sapien
aaagtggagttacacggtgagatgc

SEQ ID NO: 544455 - DNA, 25 bp, Homo sapien
aagtggagttacacggtgagatgca

SEQ ID NO: 544456 - DNA, 25 bp, Homo sapien
aaaagtggagttacacggtgagatg

SEQ ID NO: 544457 - DNA, 25 bp, Homo sapien
tgaccacagttcttgctaccactat

SEQ ID NO: 544458 - DNA, 25 bp, Homo sapien
tggcatgggaacattgtctcagaca

SEQ ID NO: 544459 - DNA, 25 bp, Homo sapien
tcttgctaccactatcttgggcaga

SEQ ID NO: 544460 - DNA, 25 bp, Homo sapien
tcagacactacagcttcacagactc

SEQ ID NO: 544461 - DNA, 25 bp, Homo sapien
cacaggaaggtgataggacagtcca

SEQ ID NO: 544462 - DNA, 25 bp, Homo sapien
agcatatatccacagtcggcgggca

SEQ ID NO: 544463 - DNA, 25 bp, Homo sapien
tgcaagtggacgacaaccgtggact

SEQ ID NO: 544464 - DNA, 25 bp, Homo sapien
agtgctgcgttgtgttgggatcccc

SEQ ID NO: 544465 - DNA, 25 bp, Homo sapien
tttagagtaaggtaaagctgaccca

SEQ ID NO: 544466 - DNA, 25 bp, Homo sapien
tcacacatcatgaagtcatccttat

SEQ ID NO: 544467 - DNA, 25 bp, Homo sapien
tcagtacactcatattgttatacaa

SEQ ID NO: 544468 - DNA, 25 bp, Homo sapien
tggctaataactttactcacacatc

SEQ ID NO: 544469 - DNA, 25 bp, Homo sapien
tcaagatgaatctcctagtctccac

SEQ ID NO: 544470 - DNA, 25 bp, Homo sapien
cctgagtaacatggatctaagtatg

SEQ ID NO: 544471 - DNA, 25 bp, Homo sapien
cattcaaggacttatctcccagcca

SEQ ID NO: 544472 - DNA, 25 bp, Homo sapien
taaccagttgtactacccaggtatg

SEQ ID NO: 544473 - DNA, 25 bp, Homo sapien
caagggtccttacaaatgagtgtca

SEQ ID NO: 544474 - DNA, 25 bp, Homo sapien
cctttcaggtcctatgatgctgtga

SEQ ID NO: 544475 - DNA, 25 bp, Homo sapien
tgtggaaatatacgaaactgtctca

SEQ ID NO: 544476 - DNA, 25 bp, Homo sapien
gcactttggcactaatacgtgactg

SEQ ID NO: 544477 - DNA, 25 bp, Homo sapien
catctccatttattttcacataatc

SEQ ID NO: 544478 - DNA, 25 bp, Homo sapien
tcatctccatttattttcacataat

SEQ ID NO: 544479 - DNA, 25 bp, Homo sapien
atctccatttattttcacataatcc

SEQ ID NO: 544480 - DNA, 25 bp, Homo sapien
cagaacgcatcctagttgcatccac

SEQ ID NO: 544481 - DNA, 25 bp, Homo sapien
tctgtggataccattctagtcgtgg

SEQ ID NO: 544482 - DNA, 25 bp, Homo sapien
tggcacctacctttacatctacgga

SEQ ID NO: 544483 - DNA, 25 bp, Homo sapien
tagtcgtggctagcatgtctttctc

SEQ ID NO: 544484 - DNA, 25 bp, Homo sapien
gtgtacactgtaccctcaccacccc

SEQ ID NO: 544485 - DNA, 25 bp, Homo sapien
ctgagcagccttccatactgtatat

SEQ ID NO: 544486 - DNA, 25 bp, Homo sapien
aagtccattctatgattcttatgct

SEQ ID NO: 544487 - DNA, 25 bp, Homo sapien
tgtacactgtaccctcaccaccccc

SEQ ID NO: 544488 - DNA, 25 bp, Homo sapien
ggcattacgaccttatggaaagcgt

SEQ ID NO: 544489 - DNA, 25 bp, Homo sapien
cattttggctactcgataactaaga

SEQ ID NO: 544490 - DNA, 25 bp, Homo sapien
tactacccttacgagagctttcagg

SEQ ID NO: 544491 - DNA, 25 bp, Homo sapien
gcttgtcatggaaaagctactaccc

SEQ ID NO: 544492 - DNA, 25 bp, Homo sapien
taacgatgacatcaactatggccca

SEQ ID NO: 544493 - DNA, 25 bp, Homo sapien
tgtgacttatttgccaacacgcatg

SEQ ID NO: 544494 - DNA, 25 bp, Homo sapien
taggtgatactgcattatagccaag

SEQ ID NO: 544495 - DNA, 25 bp, Homo sapien
gatttaaaatgtaacaccaccctgc

SEQ ID NO: 544496 - DNA, 25 bp, Homo sapien
gaaaaatgattcacacccggaatgc

SEQ ID NO: 544497 - DNA, 25 bp, Homo sapien
taaggtaaggaggttgaactgcgct

SEQ ID NO: 544498 - DNA, 25 bp, Homo sapien
tccaattggttagagaaaactacaa

SEQ ID NO: 544499 - DNA, 25 bp, Homo sapien
tagagacctcattaacactggagac

SEQ ID NO: 544500 - DNA, 25 bp, Homo sapien
tatcaagcaacgacacatgcccaag

SEQ ID NO: 544501 - DNA, 25 bp, Homo sapien
tgaatatgacctggaaacagctgct

SEQ ID NO: 544502 - DNA, 25 bp, Homo sapien
ttctggagccttaagtcaactgcaa

SEQ ID NO: 544503 - DNA, 25 bp, Homo sapien
tgttacacaacagcccttgatactg

SEQ ID NO: 544504 - DNA, 25 bp, Homo sapien
tcattcgattgccccggacccttga

SEQ ID NO: 544505 - DNA, 25 bp, Homo sapien
tcgattgccccggacccttgatact

SEQ ID NO: 544506 - DNA, 25 bp, Homo sapien
gattgccccggacccttgatactgg

SEQ ID NO: 544507 - DNA, 25 bp, Homo sapien
acccttgatactggggacggatgta

SEQ ID NO: 544508 - DNA, 25 bp, Homo sapien
tgctcagcacagattttctgctcgg

SEQ ID NO: 544509 - DNA, 25 bp, Homo sapien
gctgctcagcacagattttctgctc

SEQ ID NO: 544510 - DNA, 25 bp, Homo sapien
tcagcacagattttctgctcggcat

SEQ ID NO: 544511 - DNA, 25 bp, Homo sapien
gcagctgagctgctcagcacagatt

SEQ ID NO: 544512 - DNA, 25 bp, Homo sapien
taatttctgatatacaccaacagaa

SEQ ID NO: 544513 - DNA, 25 bp, Homo sapien
ttttaactgcttactataactctta

SEQ ID NO: 544514 - DNA, 25 bp, Homo sapien
acattaatttctgatatacaccaac

SEQ ID NO: 544515 - DNA, 25 bp, Homo sapien
taactcttattctaatgtcatagac

SEQ ID NO: 544516 - DNA, 25 bp, Homo sapien
tccaggctcctatgtgctatgaagt

SEQ ID NO: 544517 - DNA, 25 bp, Homo sapien
gataaacggccatggtgcatctgaa

SEQ ID NO: 544518 - DNA, 25 bp, Homo sapien
agttcttaagtgtgttccaggctcc

SEQ ID NO: 544519 - DNA, 25 bp, Homo sapien
ggatgctacaaggattcaaacacag

SEQ ID NO: 544520 - DNA, 25 bp, Homo sapien
tcagtactgaatcacagagcggtct

SEQ ID NO: 544521 - DNA, 25 bp, Homo sapien
gtagtagcagtttcctcactgccaa

SEQ ID NO: 544522 - DNA, 25 bp, Homo sapien
gatccgtaaacagctgtagtagcag

SEQ ID NO: 544523 - DNA, 25 bp, Homo sapien
agagcggtctgatccgtaaacagct

SEQ ID NO: 544524 - DNA, 25 bp, Homo sapien
ggtggcctatatcttactgtaattc

SEQ ID NO: 544525 - DNA, 25 bp, Homo sapien
tgtatcaactgtctctctcattata

SEQ ID NO: 544526 - DNA, 25 bp, Homo sapien
aactgtctctctcattatatcaacc

SEQ ID NO: 544527 - DNA, 25 bp, Homo sapien
cagtgggtggcctatatcttactgt

SEQ ID NO: 544528 - DNA, 25 bp, Homo sapien
ttgggtgtcacagtagcgctagtca

SEQ ID NO: 544529 - DNA, 25 bp, Homo sapien
gagattcttgccacgcagggactaa

SEQ ID NO: 544530 - DNA, 25 bp, Homo sapien
gaaaacgttctggacatcatctagt

SEQ ID NO: 544531 - DNA, 25 bp, Homo sapien
ttcaccaccctgagagacctgggag

SEQ ID NO: 544532 - DNA, 25 bp, Homo sapien
gaatgaatggctccctgatttgccc

SEQ ID NO: 544533 - DNA, 25 bp, Homo sapien
ggctcctaaatacccacagactgag

SEQ ID NO: 544534 - DNA, 25 bp, Homo sapien
gagagctgacttccacctaaatatc

SEQ ID NO: 544535 - DNA, 25 bp, Homo sapien
gattatgggaagcatctaagagcaa

SEQ ID NO: 544536 - DNA, 25 bp, Homo sapien
gaatacgtgatttttgacttggaca

SEQ ID NO: 544537 - DNA, 25 bp, Homo sapien
aacgcagagcccgactgtgggtctc

SEQ ID NO: 544538 - DNA, 25 bp, Homo sapien
tgacttggacagtatctattacaat

SEQ ID NO: 544539 - DNA, 25 bp, Homo sapien
ctttgtcagaatcactgaatacgtg

SEQ ID NO: 544540 - DNA, 25 bp, Homo sapien
gacattcgtgccagttcacagctag

SEQ ID NO: 544541 - DNA, 25 bp, Homo sapien
ggctgaaatctaaccctgcggtcca

SEQ ID NO: 544542 - DNA, 25 bp, Homo sapien
tcaattctaggtacaaggttgactg

SEQ ID NO: 544543 - DNA, 25 bp, Homo sapien
gctattttcaataaacgagggctga

SEQ ID NO: 544544 - DNA, 25 bp, Homo sapien
cagtttcattaacgctatctaaggt

SEQ ID NO: 544545 - DNA, 25 bp, Homo sapien
aaagggccgtagatccagtttcatt

SEQ ID NO: 544546 - DNA, 25 bp, Homo sapien
tcttgtactgctctggctatggaaa

SEQ ID NO: 544547 - DNA, 25 bp, Homo sapien
cattaacgctatctaaggtcacatt

SEQ ID NO: 544548 - DNA, 25 bp, Homo sapien
cagccaagctgaggaagtaattaga

SEQ ID NO: 544549 - DNA, 25 bp, Homo sapien
gctgaggaagtaattagaaaggctt

SEQ ID NO: 544550 - DNA, 25 bp, Homo sapien
cttcagccaagctgaggaagtaatt

SEQ ID NO: 544551 - DNA, 25 bp, Homo sapien
caagctgaggaagtaattagaaagg

SEQ ID NO: 544552 - DNA, 25 bp, Homo sapien
taagctgtgcccttataagtggtac

SEQ ID NO: 544553 - DNA, 25 bp, Homo sapien
ttaaagcatcaagcctaagtacagc

SEQ ID NO: 544554 - DNA, 25 bp, Homo sapien
tggatgtcgatctctgaaacgcagt

SEQ ID NO: 544555 - DNA, 25 bp, Homo sapien
tttagcaacatggaattacctcacg

SEQ ID NO: 544556 - DNA, 25 bp, Homo sapien
tcttgcaacactaaactagctggga

SEQ ID NO: 544557 - DNA, 25 bp, Homo sapien
catactctcgaagtctaaaaacaaa

SEQ ID NO: 544558 - DNA, 25 bp, Homo sapien
acttaggtctcgaattcaggtttga

SEQ ID NO: 544559 - DNA, 25 bp, Homo sapien
aacaaagtagataacttaggtctcg

SEQ ID NO: 544560 - DNA, 25 bp, Homo sapien
ttctgtcatatggatgggtgacgcc

SEQ ID NO: 544561 - DNA, 25 bp, Homo sapien
gatgggtgacgccaggattccacca

SEQ ID NO: 544562 - DNA, 25 bp, Homo sapien
attctgtcatatggatgggtgacgc

SEQ ID NO: 544563 - DNA, 25 bp, Homo sapien
tctgtcatatggatgggtgacgcca

SEQ ID NO: 544564 - DNA, 25 bp, Homo sapien
gaagcgagtctgtgacatgaacgaa

SEQ ID NO: 544565 - DNA, 25 bp, Homo sapien
gaaatctctagcaactgagtacagg

SEQ ID NO: 544566 - DNA, 25 bp, Homo sapien
tcacatgtaaggtagacagaagcga

SEQ ID NO: 544567 - DNA, 25 bp, Homo sapien
catgtaaggtagacagaagcgagtc

SEQ ID NO: 544568 - DNA, 25 bp, Homo sapien
aacaaagacaccaacaagtgagaac

SEQ ID NO: 544569 - DNA, 25 bp, Homo sapien
gaaacaaagacaccaacaagtgaga

SEQ ID NO: 544570 - DNA, 25 bp, Homo sapien
ctgaaacaaagacaccaacaagtga

SEQ ID NO: 544571 - DNA, 25 bp, Homo sapien
acaaagacaccaacaagtgagaacg

SEQ ID NO: 544572 - DNA, 25 bp, Homo sapien
gaagttccatgggaataaactccag

SEQ ID NO: 544573 - DNA, 25 bp, Homo sapien
ggcttctttctataggctgctgaga

SEQ ID NO: 544574 - DNA, 25 bp, Homo sapien
tgcatcaacgggacagaacctaggt

SEQ ID NO: 544575 - DNA, 25 bp, Homo sapien
gaacctaggtcacaatgcgcaatga

SEQ ID NO: 544576 - DNA, 25 bp, Homo sapien
gccaccgcaatttcttctagtaaaa

SEQ ID NO: 544577 - DNA, 25 bp, Homo sapien
gaaaataacttcatgaccagctgca

SEQ ID NO: 544578 - DNA, 25 bp, Homo sapien
gaaaagacagcatgatgccaccgca

SEQ ID NO: 544579 - DNA, 25 bp, Homo sapien
caggcctcagtagtaatatagtgtc

SEQ ID NO: 544580 - DNA, 25 bp, Homo sapien
tccaaaagcggcacgacaatagtgt

SEQ ID NO: 544581 - DNA, 25 bp, Homo sapien
tactgttgacgaagatgacgctgaa

SEQ ID NO: 544582 - DNA, 25 bp, Homo sapien
gatctacagataacgagtcctccgg

SEQ ID NO: 544583 - DNA, 25 bp, Homo sapien
aattcatgggacttgaaggcggtac

SEQ ID NO: 544584 - DNA, 25 bp, Homo sapien
atcgggatagttgtggacgtttgga

SEQ ID NO: 544585 - DNA, 25 bp, Homo sapien
cgggatagttgtggacgtttggaga

SEQ ID NO: 544586 - DNA, 25 bp, Homo sapien
tcgggatagttgtggacgtttggag

SEQ ID NO: 544587 - DNA, 25 bp, Homo sapien
ccaaaagtcttactcctgaaatcat

SEQ ID NO: 544588 - DNA, 25 bp, Homo sapien
cccaaaagtcttactcctgaaatca

SEQ ID NO: 544589 - DNA, 25 bp, Homo sapien
gtaatccgagctactcaggaaggtg

SEQ ID NO: 544590 - DNA, 25 bp, Homo sapien
cagaagaatcgcttgaacccaggag

SEQ ID NO: 544591 - DNA, 25 bp, Homo sapien
gtggaggctgcagtgagccaagatc

SEQ ID NO: 544592 - DNA, 25 bp, Homo sapien
atgccactgctctccagcttgggca

SEQ ID NO: 544593 - DNA, 25 bp, Homo sapien
gaaatgtgccagtggttctaaggca

SEQ ID NO: 544594 - DNA, 25 bp, Homo sapien
tctttccagtaaggattccagacat

SEQ ID NO: 544595 - DNA, 25 bp, Homo sapien
gatacaatctttagtgatctctggc

SEQ ID NO: 544596 - DNA, 25 bp, Homo sapien
tactgttagctaaatctaggcccca

SEQ ID NO: 544597 - DNA, 25 bp, Homo sapien
ctttatgaaagggacccaaagtgat

SEQ ID NO: 544598 - DNA, 25 bp, Homo sapien
atgaaagggacccaaagtgatgaca

SEQ ID NO: 544599 - DNA, 25 bp, Homo sapien
gctttatgaaagggacccaaagtga

SEQ ID NO: 544600 - DNA, 25 bp, Homo sapien
ttatgaaagggacccaaagtgatga

SEQ ID NO: 544601 - DNA, 25 bp, Homo sapien
aggcagttgtgtcagctgtagtact

SEQ ID NO: 544602 - DNA, 25 bp, Homo sapien
cagagtcgagttactagtctgcggg

SEQ ID NO: 544603 - DNA, 25 bp, Homo sapien
gcagttgtgtcagctgtagtactcg

SEQ ID NO: 544604 - DNA, 25 bp, Homo sapien
tcaacgttgcagagtcgagttacta

SEQ ID NO: 544605 - DNA, 25 bp, Homo sapien
tcatattaaggcttgaatcaaagcg

SEQ ID NO: 544606 - DNA, 25 bp, Homo sapien
gaatcaaagcgggatttcctagaga

SEQ ID NO: 544607 - DNA, 25 bp, Homo sapien
taaggcttgaatcaaagcgggattt

SEQ ID NO: 544608 - DNA, 25 bp, Homo sapien
gcttgaatcaaagcgggatttccta

SEQ ID NO: 544609 - DNA, 25 bp, Homo sapien
gaccacacagctttatgtggacatt

SEQ ID NO: 544610 - DNA, 25 bp, Homo sapien
tttcacagaattatagtgagtgacc

SEQ ID NO: 544611 - DNA, 25 bp, Homo sapien
gaagaaaatgtgcacgcttttataa

SEQ ID NO: 544612 - DNA, 25 bp, Homo sapien
tattccatattacagctcagatcat

SEQ ID NO: 544613 - DNA, 25 bp, Homo sapien
cttcttacatgggccaaaaagacat

SEQ ID NO: 544614 - DNA, 25 bp, Homo sapien
gcatgaagtggttccaggtaggcaa

SEQ ID NO: 544615 - DNA, 25 bp, Homo sapien
ggcatgaagtggttccaggtaggca

SEQ ID NO: 544616 - DNA, 25 bp, Homo sapien
tcttacataaaactagactttctca

SEQ ID NO: 544617 - DNA, 25 bp, Homo sapien
tctctagtgacataagatataattt

SEQ ID NO: 544618 - DNA, 25 bp, Homo sapien
ctctgccttggctccggttatcttc

SEQ ID NO: 544619 - DNA, 25 bp, Homo sapien
tattttgcagtctaacttctctagt

SEQ ID NO: 544620 - DNA, 25 bp, Homo sapien
ttggctccggttatcttctcatggt

SEQ ID NO: 544621 - DNA, 25 bp, Homo sapien
ctggtgggcttctctgatttaagct

SEQ ID NO: 544622 - DNA, 25 bp, Homo sapien
tgggcttctctgatttaagctggtt

SEQ ID NO: 544623 - DNA, 25 bp, Homo sapien
gcttctctgatttaagctggtttac

SEQ ID NO: 544624 - DNA, 25 bp, Homo sapien
tctgatttaagctggtttacatcca

SEQ ID NO: 544625 - DNA, 25 bp, Homo sapien
tgcatcttcctaaatcattctcatt

SEQ ID NO: 544626 - DNA, 25 bp, Homo sapien
tcatacaaatgatagtcacagcata

SEQ ID NO: 544627 - DNA, 25 bp, Homo sapien
gcatcttcctaaatcattctcattc

SEQ ID NO: 544628 - DNA, 25 bp, Homo sapien
atacaaatgatagtcacagcatata

SEQ ID NO: 544629 - DNA, 25 bp, Homo sapien
cctgttgtggatctgaatcttattc

SEQ ID NO: 544630 - DNA, 25 bp, Homo sapien
tgttgtggatctgaatcttattcat

SEQ ID NO: 544631 - DNA, 25 bp, Homo sapien
ctgttgtggatctgaatcttattca

SEQ ID NO: 544632 - DNA, 25 bp, Homo sapien
gatcttgcacactcatatggttcat

SEQ ID NO: 544633 - DNA, 25 bp, Homo sapien
taattcagatcttgcacactcatat

SEQ ID NO: 544634 - DNA, 25 bp, Homo sapien
ttcagatcttgcacactcatatggt

SEQ ID NO: 544635 - DNA, 25 bp, Homo sapien
cagatcttgcacactcatatggttc

SEQ ID NO: 544636 - DNA, 25 bp, Homo sapien
tcaaaaatagaaattggtgatacat

SEQ ID NO: 544637 - DNA, 25 bp, Homo sapien
aaaggctgcccgagttagtgagaga

SEQ ID NO: 544638 - DNA, 25 bp, Homo sapien
taatgcagacggcaatagagcacag

SEQ ID NO: 544639 - DNA, 25 bp, Homo sapien
cattggctgaacctacttggaggca

SEQ ID NO: 544640 - DNA, 25 bp, Homo sapien
caagtgagcaagcagacgggacata

SEQ ID NO: 544641 - DNA, 25 bp, Homo sapien
taacagtcagtggttgacagcaact

SEQ ID NO: 544642 - DNA, 25 bp, Homo sapien
tattaccattgtacgagcaacatgc

SEQ ID NO: 544643 - DNA, 25 bp, Homo sapien
gctaaaatctgagacagcgctaacc

SEQ ID NO: 544644 - DNA, 25 bp, Homo sapien
taacagtgatgcgtgtagttcagca

SEQ ID NO: 544645 - DNA, 25 bp, Homo sapien
cctacctcctcatcaagttggtgaa

SEQ ID NO: 544646 - DNA, 25 bp, Homo sapien
aatctgggtatctcaggttcaaaac

SEQ ID NO: 544647 - DNA, 25 bp, Homo sapien
agatcttcctgattactgtcaacag

SEQ ID NO: 544648 - DNA, 25 bp, Homo sapien
tgtgacctgcctgatcttagtctgt

SEQ ID NO: 544649 - DNA, 25 bp, Homo sapien
taatccctgccagtataacccaaat

SEQ ID NO: 544650 - DNA, 25 bp, Homo sapien
ccctgcctgttggtcaataatctgt

SEQ ID NO: 544651 - DNA, 25 bp, Homo sapien
gagcatattaacctcccctgcctgt

SEQ ID NO: 544652 - DNA, 25 bp, Homo sapien
tatgtctacctatggtgcctccaga

SEQ ID NO: 544653 - DNA, 25 bp, Homo sapien
agagacccactctccctatgtggct

SEQ ID NO: 544654 - DNA, 25 bp, Homo sapien
cacccgggtttaccacctctgagag

SEQ ID NO: 544655 - DNA, 25 bp, Homo sapien
tggcacccgggtttaccacctctga

SEQ ID NO: 544656 - DNA, 25 bp, Homo sapien
ctgagagacccactctccctatgtg

SEQ ID NO: 544657 - DNA, 25 bp, Homo sapien
tgccacaagctaaacgggtaccctg

SEQ ID NO: 544658 - DNA, 25 bp, Homo sapien
caaagcagtaaatggtgtcagcggt

SEQ ID NO: 544659 - DNA, 25 bp, Homo sapien
tatagaaaggaagtccggccagcag

SEQ ID NO: 544660 - DNA, 25 bp, Homo sapien
tagttaccccgcattccactgagag

SEQ ID NO: 544661 - DNA, 25 bp, Homo sapien
tatctcttaagtccacgatgatttc

SEQ ID NO: 544662 - DNA, 25 bp, Homo sapien
catctatctcttaagtccacgatga

SEQ ID NO: 544663 - DNA, 25 bp, Homo sapien
caacatctatctcttaagtccacga

SEQ ID NO: 544664 - DNA, 25 bp, Homo sapien
ccaacatctatctcttaagtccacg

SEQ ID NO: 544665 - DNA, 25 bp, Homo sapien
gacactgagaagctgggtgaccctc

SEQ ID NO: 544666 - DNA, 25 bp, Homo sapien
taaacgtagctgattctgacactga

SEQ ID NO: 544667 - DNA, 25 bp, Homo sapien
tgggacttgcaagacaactatgact

SEQ ID NO: 544668 - DNA, 25 bp, Homo sapien
cacaagattactagggtgtcagata

SEQ ID NO: 544669 - DNA, 25 bp, Homo sapien
aaatgtgaatatacccaagggcaat

SEQ ID NO: 544670 - DNA, 25 bp, Homo sapien
tgtcaatggaaagacataactgtct

SEQ ID NO: 544671 - DNA, 25 bp, Homo sapien
tagaagtcagaagctactatggcaa

SEQ ID NO: 544672 - DNA, 25 bp, Homo sapien
tctcggctcacaacatccttcgggt

SEQ ID NO: 544673 - DNA, 25 bp, Homo sapien
gaattgcagcaacataaacgaaagt

SEQ ID NO: 544674 - DNA, 25 bp, Homo sapien
taatttcagatctacctaccctatg

SEQ ID NO: 544675 - DNA, 25 bp, Homo sapien
gatgttgaaatctctactagatact

SEQ ID NO: 544676 - DNA, 25 bp, Homo sapien
aaactctaatcagaatttgaaacat

SEQ ID NO: 544677 - DNA, 25 bp, Homo sapien
gccggcatcccatcaagcattaaca

SEQ ID NO: 544678 - DNA, 25 bp, Homo sapien
tctgttttgactctgactgccggca

SEQ ID NO: 544679 - DNA, 25 bp, Homo sapien
ctgccggcatcccatcaagcattaa

SEQ ID NO: 544680 - DNA, 25 bp, Homo sapien
tgactgccggcatcccatcaagcat

SEQ ID NO: 544681 - DNA, 25 bp, Homo sapien
gaacatgaatagttttgataaagag

SEQ ID NO: 544682 - DNA, 25 bp, Homo sapien
gcagttaaaattatggtagctttac

SEQ ID NO: 544683 - DNA, 25 bp, Homo sapien
ctcattattccaagagcagttaaaa

SEQ ID NO: 544684 - DNA, 25 bp, Homo sapien
tctgatgtttctctaatgagtctat

SEQ ID NO: 544685 - DNA, 25 bp, Homo sapien
tcagtgacgatgaaatgctgcatac

SEQ ID NO: 544686 - DNA, 25 bp, Homo sapien
gcccactgaagtgtatcgaggctca

SEQ ID NO: 544687 - DNA, 25 bp, Homo sapien
gtcaggctactacttctcaatatgg

SEQ ID NO: 544688 - DNA, 25 bp, Homo sapien
tgcatattagagtctgtcaggctac

SEQ ID NO: 544689 - DNA, 25 bp, Homo sapien
gatctgagtgagcttcctcgagcca

SEQ ID NO: 544690 - DNA, 25 bp, Homo sapien
gatccgacatagctgagaaaactgc

SEQ ID NO: 544691 - DNA, 25 bp, Homo sapien
agtatctatatgcttccaggttggc

SEQ ID NO: 544692 - DNA, 25 bp, Homo sapien
caactggcgacatacaggagcatgc

SEQ ID NO: 544693 - DNA, 25 bp, Homo sapien
acttggccgctagcctatgaaaatg

SEQ ID NO: 544694 - DNA, 25 bp, Homo sapien
aataaatcgtttgtgtgttctaaca

SEQ ID NO: 544695 - DNA, 25 bp, Homo sapien
tcaatgtacccaaataaatcgtttg

SEQ ID NO: 544696 - DNA, 25 bp, Homo sapien
cccaagaggtaccagactgtcggac

SEQ ID NO: 544697 - DNA, 25 bp, Homo sapien
tttcggctatatcactcttttccag

SEQ ID NO: 544698 - DNA, 25 bp, Homo sapien
catactgccagcctctaatgcaggc

SEQ ID NO: 544699 - DNA, 25 bp, Homo sapien
gggcgacaatcataatgcaatccaa

SEQ ID NO: 544700 - DNA, 25 bp, Homo sapien
taagagacagaacaaatgatccctg

SEQ ID NO: 544701 - DNA, 25 bp, Homo sapien
ggagacgtccattcatgtgacagca

SEQ ID NO: 544702 - DNA, 25 bp, Homo sapien
tattctagggcagatgagccttcct

SEQ ID NO: 544703 - DNA, 25 bp, Homo sapien
tgtcctctccactacaagggtgggt

SEQ ID NO: 544704 - DNA, 25 bp, Homo sapien
tcagagtcgtgcagaattcataagc

SEQ ID NO: 544705 - DNA, 25 bp, Homo sapien
gaacaggaaccaacagaggtctata

SEQ ID NO: 544706 - DNA, 25 bp, Homo sapien
tctataatcctctataagatcctcg

SEQ ID NO: 544707 - DNA, 25 bp, Homo sapien
atcctctataagatcctcgggtggg

SEQ ID NO: 544708 - DNA, 25 bp, Homo sapien
cagaggtctataatcctctataaga

SEQ ID NO: 544709 - DNA, 25 bp, Homo sapien
tgagaagcactgggtaaacatattg

SEQ ID NO: 544710 - DNA, 25 bp, Homo sapien
gagaagcactgggtaaacatattga

SEQ ID NO: 544711 - DNA, 25 bp, Homo sapien
ttattgtttttctcttcatatggat

SEQ ID NO: 544712 - DNA, 25 bp, Homo sapien
attgtttttctcttcatatggatat

SEQ ID NO: 544713 - DNA, 25 bp, Homo sapien
gtttttctcttcatatggatattca

SEQ ID NO: 544714 - DNA, 25 bp, Homo sapien
tgtttttctcttcatatggatattc

SEQ ID NO: 544715 - DNA, 25 bp, Homo sapien
atttgttcttagagtcacattgatc

SEQ ID NO: 544716 - DNA, 25 bp, Homo sapien
catccatttgttcttagagtcacat

SEQ ID NO: 544717 - DNA, 25 bp, Homo sapien
ccatttgttcttagagtcacattga

SEQ ID NO: 544718 - DNA, 25 bp, Homo sapien
tccatttgttcttagagtcacattg

SEQ ID NO: 544719 - DNA, 25 bp, Homo sapien
tcaagttttaaccaggagccactgg

SEQ ID NO: 544720 - DNA, 25 bp, Homo sapien
ggccagatctcagaagtgctacatg

SEQ ID NO: 544721 - DNA, 25 bp, Homo sapien
cggattgttctgtaggcagcagtca

SEQ ID NO: 544722 - DNA, 25 bp, Homo sapien
gactgactctagctaccatttggga

SEQ ID NO: 544723 - DNA, 25 bp, Homo sapien
tcgatagagcccgttatgggtgagc

SEQ ID NO: 544724 - DNA, 25 bp, Homo sapien
tagagcccgttatgggtgagcaaat

SEQ ID NO: 544725 - DNA, 25 bp, Homo sapien
gcaaattgccaaactggaccatttt

SEQ ID NO: 544726 - DNA, 25 bp, Homo sapien
tgggtgagcaaattgccaaactgga

SEQ ID NO: 544727 - DNA, 25 bp, Homo sapien
ctgaggaaacataagcagctaattc

SEQ ID NO: 544728 - DNA, 25 bp, Homo sapien
gaggaaacataagcagctaattcaa

SEQ ID NO: 544729 - DNA, 25 bp, Homo sapien
ggaaacataagcagctaattcaaat

SEQ ID NO: 544730 - DNA, 25 bp, Homo sapien
tgaggaaacataagcagctaattca

SEQ ID NO: 544731 - DNA, 25 bp, Homo sapien
caacagcaggctactttcaaacact

SEQ ID NO: 544732 - DNA, 25 bp, Homo sapien
ctacaagcatgtgtccccacagctg

SEQ ID NO: 544733 - DNA, 25 bp, Homo sapien
cagcaggctactttcaaacactcac

SEQ ID NO: 544734 - DNA, 25 bp, Homo sapien
tggccaacagcaggctactttcaaa

SEQ ID NO: 544735 - DNA, 25 bp, Homo sapien
tatttcagcagttgaggcacaccag

SEQ ID NO: 544736 - DNA, 25 bp, Homo sapien
tagaagggccctggaacactgtatt

SEQ ID NO: 544737 - DNA, 25 bp, Homo sapien
tactgtgaaaacgttctagaagggc

SEQ ID NO: 544738 - DNA, 25 bp, Homo sapien
taggctattgagcataacttgcagg

SEQ ID NO: 544739 - DNA, 25 bp, Homo sapien
taaaaatatggaatggaaggctggg

SEQ ID NO: 544740 - DNA, 25 bp, Homo sapien
aaaaatatggaatggaaggctgggc

SEQ ID NO: 544741 - DNA, 25 bp, Homo sapien
aaatatggaatggaaggctgggcgc

SEQ ID NO: 544742 - DNA, 25 bp, Homo sapien
atatggaatggaaggctgggcgcag

SEQ ID NO: 544743 - DNA, 25 bp, Homo sapien
cagccgccaattaaaccgtgttgaa

SEQ ID NO: 544744 - DNA, 25 bp, Homo sapien
ttatgcacaagacatccacagccgc

SEQ ID NO: 544745 - DNA, 25 bp, Homo sapien
tggatcactgtatctgcaacccagc

SEQ ID NO: 544746 - DNA, 25 bp, Homo sapien
ccaattcattgcgtatgagcctgca

SEQ ID NO: 544747 - DNA, 25 bp, Homo sapien
tgtttatgactatgtggacccactg

SEQ ID NO: 544748 - DNA, 25 bp, Homo sapien
cacatgtgcaggactgttacacgga

SEQ ID NO: 544749 - DNA, 25 bp, Homo sapien
catttgttgaatagagtgccacttc

SEQ ID NO: 544750 - DNA, 25 bp, Homo sapien
gaactagttgttcccacgagcagta

SEQ ID NO: 544751 - DNA, 25 bp, Homo sapien
gactgagctctgctctcttgcccag

SEQ ID NO: 544752 - DNA, 25 bp, Homo sapien
tctcctgcttcagccacgtcagtag

SEQ ID NO: 544753 - DNA, 25 bp, Homo sapien
gctggggtgcagtggtgcaatctca

SEQ ID NO: 544754 - DNA, 25 bp, Homo sapien
gcacactgcagcctacacctcccag

SEQ ID NO: 544755 - DNA, 25 bp, Homo sapien
ttagccctccaagtggtcaaatgta

SEQ ID NO: 544756 - DNA, 25 bp, Homo sapien
gatagacagacatgctaacaaacag

SEQ ID NO: 544757 - DNA, 25 bp, Homo sapien
gattcttacttctgtcaaggctcct

SEQ ID NO: 544758 - DNA, 25 bp, Homo sapien
tgccagggactgtgacagctgctgt

SEQ ID NO: 544759 - DNA, 25 bp, Homo sapien
acaaaaaatagcacacaatgactac

SEQ ID NO: 544760 - DNA, 25 bp, Homo sapien
aaaaatagcacacaatgactacaat

SEQ ID NO: 544761 - DNA, 25 bp, Homo sapien
ctccactgcacgccacccgggtgac

SEQ ID NO: 544762 - DNA, 25 bp, Homo sapien
aaatagcacacaatgactacaatgt

SEQ ID NO: 544763 - DNA, 25 bp, Homo sapien
cacagtcaggcatcatctctagatc

SEQ ID NO: 544764 - DNA, 25 bp, Homo sapien
ggttatctgacaacattgaaatggg

SEQ ID NO: 544765 - DNA, 25 bp, Homo sapien
aacatcctggctttaaaagcgtggg

SEQ ID NO: 544766 - DNA, 25 bp, Homo sapien
tacacagtgagctcaaacatcctgg

SEQ ID NO: 544767 - DNA, 25 bp, Homo sapien
tcagtttcactgcaagagtccagaa

SEQ ID NO: 544768 - DNA, 25 bp, Homo sapien
caaggacagctgcacgatatggagg

SEQ ID NO: 544769 - DNA, 25 bp, Homo sapien
tcaactatgtgccaagatgtgtgtc

SEQ ID NO: 544770 - DNA, 25 bp, Homo sapien
gatgcactccctgctctcgaagagt

SEQ ID NO: 544771 - DNA, 25 bp, Homo sapien
gcatgacccaggttagttctaccaa

SEQ ID NO: 544772 - DNA, 25 bp, Homo sapien
caaaccatggtgagcttggcccaaa

SEQ ID NO: 544773 - DNA, 25 bp, Homo sapien
gggagtggtatcctacagactggaa

SEQ ID NO: 544774 - DNA, 25 bp, Homo sapien
ccttgaaacttcacagggacgagtg

SEQ ID NO: 544775 - DNA, 25 bp, Homo sapien
aggtgaaagatagatgctttacccc

SEQ ID NO: 544776 - DNA, 25 bp, Homo sapien
tcaccactccaatttaacattgtgc

SEQ ID NO: 544777 - DNA, 25 bp, Homo sapien
ctagaagttctagccaggatagtaa

SEQ ID NO: 544778 - DNA, 25 bp, Homo sapien
cccctaagatgaggaataaaatact

SEQ ID NO: 544779 - DNA, 25 bp, Homo sapien
agagtgaatcctaatgtacactatt

SEQ ID NO: 544780 - DNA, 25 bp, Homo sapien
tagtgtattagtggttatgtatcat

SEQ ID NO: 544781 - DNA, 25 bp, Homo sapien
gggtgataatacatcaatgtagatt

SEQ ID NO: 544782 - DNA, 25 bp, Homo sapien
ctataaatgtaaaaggagtagtggt

SEQ ID NO: 544783 - DNA, 25 bp, Homo sapien
tgtgctccacctttcattgtaactt

SEQ ID NO: 544784 - DNA, 25 bp, Homo sapien
agagaaatgtttatgtgtggcatta

SEQ ID NO: 544785 - DNA, 25 bp, Homo sapien
tgagctactgtgctccacctttcat

SEQ ID NO: 544786 - DNA, 25 bp, Homo sapien
gctactgtgctccacctttcattgt

SEQ ID NO: 544787 - DNA, 25 bp, Homo sapien
tattggatgactatttataaacctc

SEQ ID NO: 544788 - DNA, 25 bp, Homo sapien
gcagagtccacagggagttgggtca

SEQ ID NO: 544789 - DNA, 25 bp, Homo sapien
tctacagctttttacccacctatat

SEQ ID NO: 544790 - DNA, 25 bp, Homo sapien
gttgggtcaccattacattcagtac

SEQ ID NO: 544791 - DNA, 25 bp, Homo sapien
gaaaattgtaagatgtccaaaagca

SEQ ID NO: 544792 - DNA, 25 bp, Homo sapien
tgtaagaagtactctagaacacagg

SEQ ID NO: 544793 - DNA, 25 bp, Homo sapien
aactgaaattatgaaaaccgatccg

SEQ ID NO: 544794 - DNA, 25 bp, Homo sapien
gtttcccaacatttgaagaatagat

SEQ ID NO: 544795 - DNA, 25 bp, Homo sapien
gtgagaatcatagctaagacttttg

SEQ ID NO: 544796 - DNA, 25 bp, Homo sapien
actaagagaggatagtaaactttag

SEQ ID NO: 544797 - DNA, 25 bp, Homo sapien
gagaatcatagctaagacttttggg

SEQ ID NO: 544798 - DNA, 25 bp, Homo sapien
tagtaaactttagccaatgcttaca

SEQ ID NO: 544799 - DNA, 25 bp, Homo sapien
gccaagggctaccagtacctgttta

SEQ ID NO: 544800 - DNA, 25 bp, Homo sapien
gatgttcgtaagtcaaaatccagta

SEQ ID NO: 544801 - DNA, 25 bp, Homo sapien
gttacttggcaagacagcaacacaa

SEQ ID NO: 544802 - DNA, 25 bp, Homo sapien
catttcagaggtgacacgtatagta

SEQ ID NO: 544803 - DNA, 25 bp, Homo sapien
ttagttaagaataacatatagcatg

SEQ ID NO: 544804 - DNA, 25 bp, Homo sapien
tacaaataacgtgtaagatcctcat

SEQ ID NO: 544805 - DNA, 25 bp, Homo sapien
aatgtacaaataacgtgtaagatcc

SEQ ID NO: 544806 - DNA, 25 bp, Homo sapien
taacatatagcatgttgcaacaatg

SEQ ID NO: 544807 - DNA, 25 bp, Homo sapien
ttggcagatgtctaccgaagtcact

SEQ ID NO: 544808 - DNA, 25 bp, Homo sapien
tcgccgagaattccattagccagtg

SEQ ID NO: 544809 - DNA, 25 bp, Homo sapien
gctcgtctctccgatgttacaggga

SEQ ID NO: 544810 - DNA, 25 bp, Homo sapien
taaaatatcagagtgctcgccgaga

SEQ ID NO: 544811 - DNA, 25 bp, Homo sapien
gaccgacgctacttgctttgcaaca

SEQ ID NO: 544812 - DNA, 25 bp, Homo sapien
tctttcttctccacgaatccgaccg

SEQ ID NO: 544813 - DNA, 25 bp, Homo sapien
ttgctttgcaacagcatcgcccttc

SEQ ID NO: 544814 - DNA, 25 bp, Homo sapien
acgaatccgaccgacgctacttgct

SEQ ID NO: 544815 - DNA, 25 bp, Homo sapien
gctgcagagcaggagaaattgtttt

SEQ ID NO: 544816 - DNA, 25 bp, Homo sapien
ctttccctcacacagagtccccctc

SEQ ID NO: 544817 - DNA, 25 bp, Homo sapien
ccctcacacagagtccccctctctc

SEQ ID NO: 544818 - DNA, 25 bp, Homo sapien
ttccctcacacagagtccccctctc

SEQ ID NO: 544819 - DNA, 25 bp, Homo sapien
cctctcagcggctctctgcagttct

SEQ ID NO: 544820 - DNA, 25 bp, Homo sapien
gggaactgttgtacttgcaaatgac

SEQ ID NO: 544821 - DNA, 25 bp, Homo sapien
ccggggaactgttgtacttgcaaat

SEQ ID NO: 544822 - DNA, 25 bp, Homo sapien
acggcgtcacccgcgcacacgcaca

SEQ ID NO: 544823 - DNA, 25 bp, Homo sapien
gtggaggctgccgagttgcgagccc

SEQ ID NO: 544824 - DNA, 25 bp, Homo sapien
ccggatcacatgatgcgctaaatgt

SEQ ID NO: 544825 - DNA, 25 bp, Homo sapien
aggctgccgagttgcgagccccggt

SEQ ID NO: 544826 - DNA, 25 bp, Homo sapien
tgcgctaaatgtagggtgggccggt

SEQ ID NO: 544827 - DNA, 25 bp, Homo sapien
tctgccagggagtttagcctgtcct

SEQ ID NO: 544828 - DNA, 25 bp, Homo sapien
agcctgtcctagagaagaggcttcc

SEQ ID NO: 544829 - DNA, 25 bp, Homo sapien
tgttccaatattagatcaccagggt

SEQ ID NO: 544830 - DNA, 25 bp, Homo sapien
caatattagatcaccagggttttcc

SEQ ID NO: 544831 - DNA, 25 bp, Homo sapien
cagtgtttccgcatggcctgtcatc

SEQ ID NO: 544832 - DNA, 25 bp, Homo sapien
gatggatccctgttgcagtgtccta

SEQ ID NO: 544833 - DNA, 25 bp, Homo sapien
tccactgttggttgtgccacttcta

SEQ ID NO: 544834 - DNA, 25 bp, Homo sapien
tctgctactgataccagtgtttccg

SEQ ID NO: 544835 - DNA, 25 bp, Homo sapien
cagcagctcttaacatagtagacac

SEQ ID NO: 544836 - DNA, 25 bp, Homo sapien
cagctcttaacatagtagacacaaa

SEQ ID NO: 544837 - DNA, 25 bp, Homo sapien
gcagctcttaacatagtagacacaa

SEQ ID NO: 544838 - DNA, 25 bp, Homo sapien
gctcttaacatagtagacacaaata

SEQ ID NO: 544839 - DNA, 25 bp, Homo sapien
taattgggaccagatacctgctgag

SEQ ID NO: 544840 - DNA, 25 bp, Homo sapien
tgctgagtccttagacatcctgctg

SEQ ID NO: 544841 - DNA, 25 bp, Homo sapien
aatgttaacagcctaagattggcca

SEQ ID NO: 544842 - DNA, 25 bp, Homo sapien
aatcctgggatgtaccccagaccag

SEQ ID NO: 544843 - DNA, 25 bp, Homo sapien
caggatgtttggctggattcctgcc

SEQ ID NO: 544844 - DNA, 25 bp, Homo sapien
acctgtgaaggctgcgtgggctgga

SEQ ID NO: 544845 - DNA, 25 bp, Homo sapien
ccctgtgggtggtccgcataggtcc

SEQ ID NO: 544846 - DNA, 25 bp, Homo sapien
tgaagacacatgtgcggctgcagga

SEQ ID NO: 544847 - DNA, 25 bp, Homo sapien
ttggagcaatctgccgccaggattg

SEQ ID NO: 544848 - DNA, 25 bp, Homo sapien
aatctgccgccaggattggggaagc

SEQ ID NO: 544849 - DNA, 25 bp, Homo sapien
tcttggagcaatctgccgccaggat

SEQ ID NO: 544850 - DNA, 25 bp, Homo sapien
aggggggtgtaagatggaggagagc

SEQ ID NO: 544851 - DNA, 25 bp, Homo sapien
ttggattaggaagcagttggccggc

SEQ ID NO: 544852 - DNA, 25 bp, Homo sapien
tggattaggaagcagttggccggct

SEQ ID NO: 544853 - DNA, 25 bp, Homo sapien
ggattaggaagcagttggccggctt

SEQ ID NO: 544854 - DNA, 25 bp, Homo sapien
cttggattaggaagcagttggccgg

SEQ ID NO: 544855 - DNA, 25 bp, Homo sapien
taaaagcacataatccagaaaggga

SEQ ID NO: 544856 - DNA, 25 bp, Homo sapien
acttaaaagcacataatccagaaag

SEQ ID NO: 544857 - DNA, 25 bp, Homo sapien
ttaaaagcacataatccagaaaggg

SEQ ID NO: 544858 - DNA, 25 bp, Homo sapien
aaacttaaaagcacataatccagaa

SEQ ID NO: 544859 - DNA, 25 bp, Homo sapien
ccacccctggcagaggtttgtgggt

SEQ ID NO: 544860 - DNA, 25 bp, Homo sapien
tgggattctgcctgtttattctctt

SEQ ID NO: 544861 - DNA, 25 bp, Homo sapien
ctcttgggattctgcctgtttattc

SEQ ID NO: 544862 - DNA, 25 bp, Homo sapien
cccctggcagaggtttgtgggtcaa

SEQ ID NO: 544863 - DNA, 25 bp, Homo sapien
tctgcccaagtctggtgcactgtta

SEQ ID NO: 544864 - DNA, 25 bp, Homo sapien
ttctgcccaagtctggtgcactgtt

SEQ ID NO: 544865 - DNA, 25 bp, Homo sapien
tcaaagagtgaaactatcacatttt

SEQ ID NO: 544866 - DNA, 25 bp, Homo sapien
gagtgaaactatcacattttctgcc

SEQ ID NO: 544867 - DNA, 25 bp, Homo sapien
ctatcttcttgagggtccttaagct

SEQ ID NO: 544868 - DNA, 25 bp, Homo sapien
ctccactatcttcttgagggtcctt

SEQ ID NO: 544869 - DNA, 25 bp, Homo sapien
ccactatcttcttgagggtccttaa

SEQ ID NO: 544870 - DNA, 25 bp, Homo sapien
cactatcttcttgagggtccttaag

SEQ ID NO: 544871 - DNA, 25 bp, Homo sapien
gacaatacccattctgagattctgg

SEQ ID NO: 544872 - DNA, 25 bp, Homo sapien
acagtctcatcagacaatacccatt

SEQ ID NO: 544873 - DNA, 25 bp, Homo sapien
gtctcatcagacaatacccattctg

SEQ ID NO: 544874 - DNA, 25 bp, Homo sapien
tcagacaatacccattctgagattc

SEQ ID NO: 544875 - DNA, 25 bp, Homo sapien
aacaataagttgatattctgagctt

SEQ ID NO: 544876 - DNA, 25 bp, Homo sapien
atattctgagcttttcatgcctttg

SEQ ID NO: 544877 - DNA, 25 bp, Homo sapien
catgggtcagactcaacaataagtt

SEQ ID NO: 544878 - DNA, 25 bp, Homo sapien
tgggtcagactcaacaataagttga

SEQ ID NO: 544879 - DNA, 25 bp, Homo sapien
cttctttcactagtaaccctctgga

SEQ ID NO: 544880 - DNA, 25 bp, Homo sapien
ctagtaaccctctggaaatactgga

SEQ ID NO: 544881 - DNA, 25 bp, Homo sapien
tctttcactagtaaccctctggaaa

SEQ ID NO: 544882 - DNA, 25 bp, Homo sapien
tcactagtaaccctctggaaatact

SEQ ID NO: 544883 - DNA, 25 bp, Homo sapien
cctccaagccttcatctactttcca

SEQ ID NO: 544884 - DNA, 25 bp, Homo sapien
ctccaagccttcatctactttccac

SEQ ID NO: 544885 - DNA, 25 bp, Homo sapien
gattattcttcctctgtattccata

SEQ ID NO: 544886 - DNA, 25 bp, Homo sapien
tctgattattcttcctctgtattcc

SEQ ID NO: 544887 - DNA, 25 bp, Homo sapien
tatctgattattcttcctctgtatt

SEQ ID NO: 544888 - DNA, 25 bp, Homo sapien
ctgattattcttcctctgtattcca

SEQ ID NO: 544889 - DNA, 25 bp, Homo sapien
tcaggaatgaacacaagagcccctt

SEQ ID NO: 544890 - DNA, 25 bp, Homo sapien
cattcaggtaatgagcccatctggg

SEQ ID NO: 544891 - DNA, 25 bp, Homo sapien
tctgctagaacaggctagggaaggc

SEQ ID NO: 544892 - DNA, 25 bp, Homo sapien
caccatggtgttccagaatgtagag

SEQ ID NO: 544893 - DNA, 25 bp, Homo sapien
caagtatggtaaaggatactctgct

SEQ ID NO: 544894 - DNA, 25 bp, Homo sapien
tacattcagggctaaagagcttgcc

SEQ ID NO: 544895 - DNA, 25 bp, Homo sapien
cagctcccagatgatgggacaagta

SEQ ID NO: 544896 - DNA, 25 bp, Homo sapien
tcttctccattaccacaagacagct

SEQ ID NO: 544897 - DNA, 25 bp, Homo sapien
tgttgggccaactgcacagaattct

SEQ ID NO: 544898 - DNA, 25 bp, Homo sapien
tccccaaccaaatgggtaacagctg

SEQ ID NO: 544899 - DNA, 25 bp, Homo sapien
gaaagtgagcaactatggaggcaga

SEQ ID NO: 544900 - DNA, 25 bp, Homo sapien
gggatgaattctaccccgaggcacc

SEQ ID NO: 544901 - DNA, 25 bp, Homo sapien
aatgttatcttaagcacagaggacc

SEQ ID NO: 544902 - DNA, 25 bp, Homo sapien
cacattaggacacagttgctcagag

SEQ ID NO: 544903 - DNA, 25 bp, Homo sapien
cagaagtccctgaaaccactggaaa

SEQ ID NO: 544904 - DNA, 25 bp, Homo sapien
ctcatggtggtgaaaactgtgcaac

SEQ ID NO: 544905 - DNA, 25 bp, Homo sapien
cgtgtgccagagtctccccagtgct

SEQ ID NO: 544906 - DNA, 25 bp, Homo sapien
cagcttgcagcccgtctgctcattg

SEQ ID NO: 544907 - DNA, 25 bp, Homo sapien
aaagctgcaggccactaggtaaggg

SEQ ID NO: 544908 - DNA, 25 bp, Homo sapien
caggtgacctctgtcggcagaatcg

SEQ ID NO: 544909 - DNA, 25 bp, Homo sapien
gcagcagagtgggactctctaacat

SEQ ID NO: 544910 - DNA, 25 bp, Homo sapien
gaacaatgcggcattcaggcagaat

SEQ ID NO: 544911 - DNA, 25 bp, Homo sapien
taaacggcagacaagcgaggtaacg

SEQ ID NO: 544912 - DNA, 25 bp, Homo sapien
cagagtgggactctctaacatctga

SEQ ID NO: 544913 - DNA, 25 bp, Homo sapien
tacagagagctgtgctaaaagccgc

SEQ ID NO: 544914 - DNA, 25 bp, Homo sapien
tgatccttggctgaaaactggcagg

SEQ ID NO: 544915 - DNA, 25 bp, Homo sapien
ttaggcagaaaaccgtgaagagtca

SEQ ID NO: 544916 - DNA, 25 bp, Homo sapien
aaagccgctctagacaacttgttgg

SEQ ID NO: 544917 - DNA, 25 bp, Homo sapien
gactgcgaacaatcaattttgagat

SEQ ID NO: 544918 - DNA, 25 bp, Homo sapien
ttgactgcgaacaatcaattttgag

SEQ ID NO: 544919 - DNA, 25 bp, Homo sapien
aagagttcgatctgtaattgactgc

SEQ ID NO: 544920 - DNA, 25 bp, Homo sapien
gtaattgactgcgaacaatcaattt

SEQ ID NO: 544921 - DNA, 25 bp, Homo sapien
caagagaactgtctgcaatagtcac

SEQ ID NO: 544922 - DNA, 25 bp, Homo sapien
catccaatctactgccatagcctgg

SEQ ID NO: 544923 - DNA, 25 bp, Homo sapien
cacgaagcaatcttattcctgaaag

SEQ ID NO: 544924 - DNA, 25 bp, Homo sapien
tcatcattttgtctaggtctggaac

SEQ ID NO: 544925 - DNA, 25 bp, Homo sapien
cctctggtagcggtagccattagga

SEQ ID NO: 544926 - DNA, 25 bp, Homo sapien
ggaaaaaggtgtcatggctaatgga

SEQ ID NO: 544927 - DNA, 25 bp, Homo sapien
cagctcctctggtagcggtagccat

SEQ ID NO: 544928 - DNA, 25 bp, Homo sapien
tagcggtagccattaggattcaaca

SEQ ID NO: 544929 - DNA, 25 bp, Homo sapien
gaataccaaatttgaaggtgtcatc

SEQ ID NO: 544930 - DNA, 25 bp, Homo sapien
tcaagaataatacttctgctgtagg

SEQ ID NO: 544931 - DNA, 25 bp, Homo sapien
aggaataccaaatttgaaggtgtca

SEQ ID NO: 544932 - DNA, 25 bp, Homo sapien
ataatacttctgctgtaggaatacc

SEQ ID NO: 544933 - DNA, 25 bp, Homo sapien
ttttacagcccagaggcctttattc

SEQ ID NO: 544934 - DNA, 25 bp, Homo sapien
gcccagaggcctttattcttcttac

SEQ ID NO: 544935 - DNA, 25 bp, Homo sapien
tatttattttttacagcccagaggc

SEQ ID NO: 544936 - DNA, 25 bp, Homo sapien
acagcccagaggcctttattcttct

SEQ ID NO: 544937 - DNA, 25 bp, Homo sapien
tgaattcgtacggaatgggctccag

SEQ ID NO: 544938 - DNA, 25 bp, Homo sapien
ctgtgaattcgtacggaatgggctc

SEQ ID NO: 544939 - DNA, 25 bp, Homo sapien
aattcgtacggaatgggctccagca

SEQ ID NO: 544940 - DNA, 25 bp, Homo sapien
tgtgaattcgtacggaatgggctcc

SEQ ID NO: 544941 - DNA, 25 bp, Homo sapien
tctttttctgattattttctttcac

SEQ ID NO: 544942 - DNA, 25 bp, Homo sapien
gtttgctgacaacattgccagcagc

SEQ ID NO: 544943 - DNA, 25 bp, Homo sapien
tgcccttaccttgtttgctgacaac

SEQ ID NO: 544944 - DNA, 25 bp, Homo sapien
tatattaattcgcttggcaagaacc

SEQ ID NO: 544945 - DNA, 25 bp, Homo sapien
ggcaactcttgcagggcattccgtt

SEQ ID NO: 544946 - DNA, 25 bp, Homo sapien
attcccacttatgtacctaaaggag

SEQ ID NO: 544947 - DNA, 25 bp, Homo sapien
cacttatgtacctaaaggagcaact

SEQ ID NO: 544948 - DNA, 25 bp, Homo sapien
aaaggcctgaaaaacatatagcagg

SEQ ID NO: 544949 - DNA, 25 bp, Homo sapien
cccacttatgtacctaaaggagcaa

SEQ ID NO: 544950 - DNA, 25 bp, Homo sapien
gtgtttttctctttatgtttgtcat

SEQ ID NO: 544951 - DNA, 25 bp, Homo sapien
ttctctttatgtttgtcattttggt

SEQ ID NO: 544952 - DNA, 25 bp, Homo sapien
tctctttatgtttgtcattttggtg

SEQ ID NO: 544953 - DNA, 25 bp, Homo sapien
cttgtgtttttctctttatgtttgt

SEQ ID NO: 544954 - DNA, 25 bp, Homo sapien
catgcttggtctctccgctgagggc

SEQ ID NO: 544955 - DNA, 25 bp, Homo sapien
tgcaacctgcctgcggaaaggagct

SEQ ID NO: 544956 - DNA, 25 bp, Homo sapien
tactcacagagatgttgggacaact

SEQ ID NO: 544957 - DNA, 25 bp, Homo sapien
cagcgtgggcactatggacaatatg

SEQ ID NO: 544958 - DNA, 25 bp, Homo sapien
tggaatccaggctgatagcatgagc

SEQ ID NO: 544959 - DNA, 25 bp, Homo sapien
ttgcccttggcaggtatggaatcca

SEQ ID NO: 544960 - DNA, 25 bp, Homo sapien
caccaggcatgagcaatactcaggc

SEQ ID NO: 544961 - DNA, 25 bp, Homo sapien
tatcccgtgacaatctgagtagcag

SEQ ID NO: 544962 - DNA, 25 bp, Homo sapien
cccattgggagcccctgttctgctt

SEQ ID NO: 544963 - DNA, 25 bp, Homo sapien
gttctgcttcatagccacccttctg

SEQ ID NO: 544964 - DNA, 25 bp, Homo sapien
tagtatcactactttcgccagctgc

SEQ ID NO: 544965 - DNA, 25 bp, Homo sapien
cacccttctgtgctatagtatcact

SEQ ID NO: 544966 - DNA, 25 bp, Homo sapien
tggcttctgagttacaaaataggct

SEQ ID NO: 544967 - DNA, 25 bp, Homo sapien
cttggcttctgagttacaaaatagg

SEQ ID NO: 544968 - DNA, 25 bp, Homo sapien
ttctgagttacaaaataggctcttg

SEQ ID NO: 544969 - DNA, 25 bp, Homo sapien
gagttacaaaataggctcttgagac

SEQ ID NO: 544970 - DNA, 25 bp, Homo sapien
tatgataggagtctatccctggaga

SEQ ID NO: 544971 - DNA, 25 bp, Homo sapien
gacctgtaagggttggaatgctcta

SEQ ID NO: 544972 - DNA, 25 bp, Homo sapien
ggctaatcccaaaagacatctagtt

SEQ ID NO: 544973 - DNA, 25 bp, Homo sapien
cctggagattaggtagggattgtcc

SEQ ID NO: 544974 - DNA, 25 bp, Homo sapien
tctaagcctacatcaatcagggagc

SEQ ID NO: 544975 - DNA, 25 bp, Homo sapien
aagcctacatcaatcagggagcagc

SEQ ID NO: 544976 - DNA, 25 bp, Homo sapien
ctgaaggtggcagggcgtacagccg

SEQ ID NO: 544977 - DNA, 25 bp, Homo sapien
ggcagggcgtacagccgcagatcat

SEQ ID NO: 544978 - DNA, 25 bp, Homo sapien
tattttggaaaactctgatagctga

SEQ ID NO: 544979 - DNA, 25 bp, Homo sapien
attttggaaaactctgatagctgac

SEQ ID NO: 544980 - DNA, 25 bp, Homo sapien
tgtgtccacagactgagtgcctcct

SEQ ID NO: 544981 - DNA, 25 bp, Homo sapien
tcaaaaggatgtgtctggtcagtca

SEQ ID NO: 544982 - DNA, 25 bp, Homo sapien
tggacatggccaggatcgttcagaa

SEQ ID NO: 544983 - DNA, 25 bp, Homo sapien
tccttaaacaggaagtgctctggag

SEQ ID NO: 544984 - DNA, 25 bp, Homo sapien
aaagtgttggcgcagctcagagttg

SEQ ID NO: 544985 - DNA, 25 bp, Homo sapien
aaagaggaagctgcatgcaagctgg

SEQ ID NO: 544986 - DNA, 25 bp, Homo sapien
aggaagctgcatgcaagctggcact

SEQ ID NO: 544987 - DNA, 25 bp, Homo sapien
ctgcatgcaagctggcactgaggaa

SEQ ID NO: 544988 - DNA, 25 bp, Homo sapien
attgttggtaaaatggcaaaaatgg

SEQ ID NO: 544989 - DNA, 25 bp, Homo sapien
gtgtcttgccttttatgtagtctat

SEQ ID NO: 544990 - DNA, 25 bp, Homo sapien
aattgttggtaaaatggcaaaaatg

SEQ ID NO: 544991 - DNA, 25 bp, Homo sapien
aaactttgaggtagacttctgcctc

SEQ ID NO: 544992 - DNA, 25 bp, Homo sapien
cttcccactgtgctcgttcctgaca

SEQ ID NO: 544993 - DNA, 25 bp, Homo sapien
gcctcaatgactgtatctgtttcca

SEQ ID NO: 544994 - DNA, 25 bp, Homo sapien
tgtgctcgttcctgacacactgtca

SEQ ID NO: 544995 - DNA, 25 bp, Homo sapien
cctggaccgggcaatagttgcaaca

SEQ ID NO: 544996 - DNA, 25 bp, Homo sapien
tattgtcattatggccagtccctct

SEQ ID NO: 544997 - DNA, 25 bp, Homo sapien
tcaaatcaacgcatgtaacagagga

SEQ ID NO: 544998 - DNA, 25 bp, Homo sapien
tcttgtgcttcgaagcagcccaggt

SEQ ID NO: 544999 - DNA, 25 bp, Homo sapien
acatctgtcactgccttgctcaagt

SEQ ID NO: 545000 - DNA, 25 bp, Homo sapien
gcttcatactatcatggcctgagat

SEQ ID NO: 545001 - DNA, 25 bp, Homo sapien
tgctcaagtaggttaagaagcctga

SEQ ID NO: 545002 - DNA, 25 bp, Homo sapien
ggcctgagatatccacgtgctccat

SEQ ID NO: 545003 - DNA, 25 bp, Homo sapien
ttaggagccagtgaatgattgtcca

SEQ ID NO: 545004 - DNA, 25 bp, Homo sapien
tgaatgattgtccatgctctttcct

SEQ ID NO: 545005 - DNA, 25 bp, Homo sapien
tatctttctgatcaatgggctctga

SEQ ID NO: 545006 - DNA, 25 bp, Homo sapien
atgttttgcagagctacatttatct

SEQ ID NO: 545007 - DNA, 25 bp, Homo sapien
cagtaaacacttaaggaagttgccg

SEQ ID NO: 545008 - DNA, 25 bp, Homo sapien
caattgttcacctctactgtagggc

SEQ ID NO: 545009 - DNA, 25 bp, Homo sapien
tcttcattccaattgttcacctcta

SEQ ID NO: 545010 - DNA, 25 bp, Homo sapien
tctactgtagggctcagtaaacact

SEQ ID NO: 545011 - DNA, 25 bp, Homo sapien
tggtagtcagcagcagtatatgtca

SEQ ID NO: 545012 - DNA, 25 bp, Homo sapien
ggtagtcagcagcagtatatgtcag

SEQ ID NO: 545013 - DNA, 25 bp, Homo sapien
cagtaatttgccatgggacaggcac

SEQ ID NO: 545014 - DNA, 25 bp, Homo sapien
aacagtaatttgccatgggacaggc

SEQ ID NO: 545015 - DNA, 25 bp, Homo sapien
acagtaatttgccatgggacaggca

SEQ ID NO: 545016 - DNA, 25 bp, Homo sapien
aagggctgtgtggctgcttgatttt

SEQ ID NO: 545017 - DNA, 25 bp, Homo sapien
agacaatgggaaggttctgttttct

SEQ ID NO: 545018 - DNA, 25 bp, Homo sapien
ccaagactgattcaaccagttggat

SEQ ID NO: 545019 - DNA, 25 bp, Homo sapien
tgggaaggttctgttttctgctcca

SEQ ID NO: 545020 - DNA, 25 bp, Homo sapien
gagagaagtgcagactttaaagaca

SEQ ID NO: 545021 - DNA, 25 bp, Homo sapien
cagcagtctaacaacacgacagatg

SEQ ID NO: 545022 - DNA, 25 bp, Homo sapien
taacaacacgacagatgacaggccc

SEQ ID NO: 545023 - DNA, 25 bp, Homo sapien
gcgacagctcatcagcagtctaaca

SEQ ID NO: 545024 - DNA, 25 bp, Homo sapien
tcatccagacttaaatgtttgggcc

SEQ ID NO: 545025 - DNA, 25 bp, Homo sapien
tgtttgggccttgctaagaccatag

SEQ ID NO: 545026 - DNA, 25 bp, Homo sapien
cctgtgcaggatgtcaaagagcagc

SEQ ID NO: 545027 - DNA, 25 bp, Homo sapien
tggaaacagtcctccatacaaagac

SEQ ID NO: 545028 - DNA, 25 bp, Homo sapien
caggctttgctcctggcaggactgg

SEQ ID NO: 545029 - DNA, 25 bp, Homo sapien
tgcataattcacatgccaggcccaa

SEQ ID NO: 545030 - DNA, 25 bp, Homo sapien
ccagtaatgaccttgtggagagcgt

SEQ ID NO: 545031 - DNA, 25 bp, Homo sapien
tgaagccatggagtaaaaccaggtg

SEQ ID NO: 545032 - DNA, 25 bp, Homo sapien
tgattcaaatttctgcttatatgcc

SEQ ID NO: 545033 - DNA, 25 bp, Homo sapien
atgattcaaatttctgcttatatgc

SEQ ID NO: 545034 - DNA, 25 bp, Homo sapien
gctccgtggaaaggttgctcccgtg

SEQ ID NO: 545035 - DNA, 25 bp, Homo sapien
tggaaaggttgctcccgtgaccact

SEQ ID NO: 545036 - DNA, 25 bp, Homo sapien
atccacgaagaacccgggctccgtg

SEQ ID NO: 545037 - DNA, 25 bp, Homo sapien
gaccactcaacctctatttgaacag

SEQ ID NO: 545038 - DNA, 25 bp, Homo sapien
caaggaaaacgatgatgaaacaaaa

SEQ ID NO: 545039 - DNA, 25 bp, Homo sapien
ctgcaaggaaaacgatgatgaaaca

SEQ ID NO: 545040 - DNA, 25 bp, Homo sapien
aaaacgatgatgaaacaaaatgcat

SEQ ID NO: 545041 - DNA, 25 bp, Homo sapien
aaaatgcattcaaagctctcagctg

SEQ ID NO: 545042 - DNA, 25 bp, Homo sapien
ctttccctctgcgtttagatgagac

SEQ ID NO: 545043 - DNA, 25 bp, Homo sapien
cctctgcgtttagatgagacctgct

SEQ ID NO: 545044 - DNA, 25 bp, Homo sapien
tatctttccctctgcgtttagatga

SEQ ID NO: 545045 - DNA, 25 bp, Homo sapien
agctctatctttccctctgcgttta

SEQ ID NO: 545046 - DNA, 25 bp, Homo sapien
gtcctttgaggcgagccactctctc

SEQ ID NO: 545047 - DNA, 25 bp, Homo sapien
caagaaaatctcttccggtcctttg

SEQ ID NO: 545048 - DNA, 25 bp, Homo sapien
tgcaaaacaagggtgggtggtataa

SEQ ID NO: 545049 - DNA, 25 bp, Homo sapien
caggagcttcggtctggagccacat

SEQ ID NO: 545050 - DNA, 25 bp, Homo sapien
ggatgcgagaaacctcgaattggat

SEQ ID NO: 545051 - DNA, 25 bp, Homo sapien
gacacagatttagggctcagtttct

SEQ ID NO: 545052 - DNA, 25 bp, Homo sapien
ctcagtttctgtgacggatgcgaga

SEQ ID NO: 545053 - DNA, 25 bp, Homo sapien
gatggccaattagtgtgactgtccc

SEQ ID NO: 545054 - DNA, 25 bp, Homo sapien
gaagtgaatagagctttggcacttc

SEQ ID NO: 545055 - DNA, 25 bp, Homo sapien
cagagtgattatccctgcagtgcaa

SEQ ID NO: 545056 - DNA, 25 bp, Homo sapien
gctttggcacttcacagagtgatta

SEQ ID NO: 545057 - DNA, 25 bp, Homo sapien
acagagtgattatccctgcagtgca

SEQ ID NO: 545058 - DNA, 25 bp, Homo sapien
ttctgctgctacatcctgacatttg

SEQ ID NO: 545059 - DNA, 25 bp, Homo sapien
tgctgctacatcctgacatttgcat

SEQ ID NO: 545060 - DNA, 25 bp, Homo sapien
ctttctgctgctacatcctgacatt

SEQ ID NO: 545061 - DNA, 25 bp, Homo sapien
tctgctgctacatcctgacatttgc

SEQ ID NO: 545062 - DNA, 25 bp, Homo sapien
gtaattgcacctgagtgtcaaagcc

SEQ ID NO: 545063 - DNA, 25 bp, Homo sapien
ggaggcaaatgcatcactggtaatt

SEQ ID NO: 545064 - DNA, 25 bp, Homo sapien
ttccgaccaaggtatgaatgagaac

SEQ ID NO: 545065 - DNA, 25 bp, Homo sapien
cacttgatgtgtgtgttccgaccaa

SEQ ID NO: 545066 - DNA, 25 bp, Homo sapien
gtgagacaaatatgtcgttaccggc

SEQ ID NO: 545067 - DNA, 25 bp, Homo sapien
taagtgagacaaatatgtcgttacc

SEQ ID NO: 545068 - DNA, 25 bp, Homo sapien
gacaaatatgtcgttaccggcatta

SEQ ID NO: 545069 - DNA, 25 bp, Homo sapien
aaatatgtcgttaccggcattatca

SEQ ID NO: 545070 - DNA, 25 bp, Homo sapien
tttctatgacagtggactttctcca

SEQ ID NO: 545071 - DNA, 25 bp, Homo sapien
tctatgacagtggactttctccaga

SEQ ID NO: 545072 - DNA, 25 bp, Homo sapien
atctggaggagccagtttttcattt

SEQ ID NO: 545073 - DNA, 25 bp, Homo sapien
ctggaggagccagtttttcatttct

SEQ ID NO: 545074 - DNA, 25 bp, Homo sapien
cctgaactgattacgagagcatcct

SEQ ID NO: 545075 - DNA, 25 bp, Homo sapien
gaaaacacgcttagatttgctcaac

SEQ ID NO: 545076 - DNA, 25 bp, Homo sapien
gctgggtcactgcaatgctttcagg

SEQ ID NO: 545077 - DNA, 25 bp, Homo sapien
tgagccgccataaggcagtctcttc

SEQ ID NO: 545078 - DNA, 25 bp, Homo sapien
tgtgttcctagatgtgcccttgtct

SEQ ID NO: 545079 - DNA, 25 bp, Homo sapien
agttctggacttgaatctaatgttc

SEQ ID NO: 545080 - DNA, 25 bp, Homo sapien
actcaaaccgagttctggacttgaa

SEQ ID NO: 545081 - DNA, 25 bp, Homo sapien
tgttccttggctatgtgttcctaga

SEQ ID NO: 545082 - DNA, 25 bp, Homo sapien
aatgacacaagatgtgtctctcaca

SEQ ID NO: 545083 - DNA, 25 bp, Homo sapien
aaatgacacaagatgtgtctctcac

SEQ ID NO: 545084 - DNA, 25 bp, Homo sapien
cctccaaaattgctgtcagtgcctt

SEQ ID NO: 545085 - DNA, 25 bp, Homo sapien
tgttgagaactaccgattacctcca

SEQ ID NO: 545086 - DNA, 25 bp, Homo sapien
tgagaactaccgattacctccaaaa

SEQ ID NO: 545087 - DNA, 25 bp, Homo sapien
ctgttgagaactaccgattacctcc

SEQ ID NO: 545088 - DNA, 25 bp, Homo sapien
tagccaggccataatatttccactt

SEQ ID NO: 545089 - DNA, 25 bp, Homo sapien
gaatgcctctgtaaaccgtgtagcc

SEQ ID NO: 545090 - DNA, 25 bp, Homo sapien
cgcaggtagatgtaagaatgcctct

SEQ ID NO: 545091 - DNA, 25 bp, Homo sapien
catatagggatatttattgggtata

SEQ ID NO: 545092 - DNA, 25 bp, Homo sapien
cctataacccaaaatgggacaacat

SEQ ID NO: 545093 - DNA, 25 bp, Homo sapien
tctgttcgcgaatagtacatttcaa

SEQ ID NO: 545094 - DNA, 25 bp, Homo sapien
catttttagacaagaccttcgacct

SEQ ID NO: 545095 - DNA, 25 bp, Homo sapien
tcagttttctgttcgcgaatagtac

SEQ ID NO: 545096 - DNA, 25 bp, Homo sapien
tttctccaaggtcataattgtacta

SEQ ID NO: 545097 - DNA, 25 bp, Homo sapien
gtcataattgtactagaacatccaa

SEQ ID NO: 545098 - DNA, 25 bp, Homo sapien
aggtcataattgtactagaacatcc

SEQ ID NO: 545099 - DNA, 25 bp, Homo sapien
tctccaaggtcataattgtactaga

SEQ ID NO: 545100 - DNA, 25 bp, Homo sapien
ttgccctcaataacatccattccca

SEQ ID NO: 545101 - DNA, 25 bp, Homo sapien
tttgccctcaataacatccattccc

SEQ ID NO: 545102 - DNA, 25 bp, Homo sapien
atctttgccctcaataacatccatt

SEQ ID NO: 545103 - DNA, 25 bp, Homo sapien
gaagatttgtgactcgtctgcttga

SEQ ID NO: 545104 - DNA, 25 bp, Homo sapien
ggagtgtcacagaccctccagggct

SEQ ID NO: 545105 - DNA, 25 bp, Homo sapien
ggacatttgtcccatcccaactact

SEQ ID NO: 545106 - DNA, 25 bp, Homo sapien
taagctcttgttggaggactgtgtg

SEQ ID NO: 545107 - DNA, 25 bp, Homo sapien
ccttttataatgcagggcgagtctg

SEQ ID NO: 545108 - DNA, 25 bp, Homo sapien
ccctttttcagtgttgtcctcaatc

SEQ ID NO: 545109 - DNA, 25 bp, Homo sapien
tcaatcaggtgagttgtataccgtc

SEQ ID NO: 545110 - DNA, 25 bp, Homo sapien
tgtataccgtctttccctatatggt

SEQ ID NO: 545111 - DNA, 25 bp, Homo sapien
aaccattccaagggacttgatttct

SEQ ID NO: 545112 - DNA, 25 bp, Homo sapien
gtcttcactcgttgcaacttcttaa

SEQ ID NO: 545113 - DNA, 25 bp, Homo sapien
attttttgtcttcactcgttgcaac

SEQ ID NO: 545114 - DNA, 25 bp, Homo sapien
gttgcaacttcttaacacaggacat

SEQ ID NO: 545115 - DNA, 25 bp, Homo sapien
ccaccggcagaggttttggagagtc

SEQ ID NO: 545116 - DNA, 25 bp, Homo sapien
agaaccaccggcagaggttttggag

SEQ ID NO: 545117 - DNA, 25 bp, Homo sapien
aaccaccggcagaggttttggagag

SEQ ID NO: 545118 - DNA, 25 bp, Homo sapien
caccggcagaggttttggagagtct

SEQ ID NO: 545119 - DNA, 25 bp, Homo sapien
cttgaagactgaccgttctgactgt

SEQ ID NO: 545120 - DNA, 25 bp, Homo sapien
tctgactgtcgataatggaggcagc

SEQ ID NO: 545121 - DNA, 25 bp, Homo sapien
gctcatccagaagtaagtggttctt

SEQ ID NO: 545122 - DNA, 25 bp, Homo sapien
catccagaagtaagtggttcttgaa

SEQ ID NO: 545123 - DNA, 25 bp, Homo sapien
ctccttcccttcaatgtgtccacac

SEQ ID NO: 545124 - DNA, 25 bp, Homo sapien
atgctccttcccttcaatgtgtcca

SEQ ID NO: 545125 - DNA, 25 bp, Homo sapien
gctccttcccttcaatgtgtccaca

SEQ ID NO: 545126 - DNA, 25 bp, Homo sapien
caatgctccttcccttcaatgtgtc

SEQ ID NO: 545127 - DNA, 25 bp, Homo sapien
gccaggcttatgcacagccctatat

SEQ ID NO: 545128 - DNA, 25 bp, Homo sapien
ctgggctccatagccaggcttatgc

SEQ ID NO: 545129 - DNA, 25 bp, Homo sapien
tgcacagccctatatccgatgaagc

SEQ ID NO: 545130 - DNA, 25 bp, Homo sapien
tatatccgatgaagcccttctgtgt

SEQ ID NO: 545131 - DNA, 25 bp, Homo sapien
tcagcaggtgcagagaagttcctcc

SEQ ID NO: 545132 - DNA, 25 bp, Homo sapien
tcctcctccactcctattcagagta

SEQ ID NO: 545133 - DNA, 25 bp, Homo sapien
ttcataacatctccatctttagttg

SEQ ID NO: 545134 - DNA, 25 bp, Homo sapien
tattcagagtataagagatgaagaa

SEQ ID NO: 545135 - DNA, 25 bp, Homo sapien
gttggatgacttcagttgaaccact

SEQ ID NO: 545136 - DNA, 25 bp, Homo sapien
gatgacttcagttgaaccactgaca

SEQ ID NO: 545137 - DNA, 25 bp, Homo sapien
ggatgacttcagttgaaccactgac

SEQ ID NO: 545138 - DNA, 25 bp, Homo sapien
ttggatgacttcagttgaaccactg

SEQ ID NO: 545139 - DNA, 25 bp, Homo sapien
cagtcttttactcgtatttcatcag

SEQ ID NO: 545140 - DNA, 25 bp, Homo sapien
tcctttctctgtgtatccagtcttt

SEQ ID NO: 545141 - DNA, 25 bp, Homo sapien
ctatttataaaccttcaatggggct

SEQ ID NO: 545142 - DNA, 25 bp, Homo sapien
ttccatcctggtatccgaggtagcc

SEQ ID NO: 545143 - DNA, 25 bp, Homo sapien
ctggagtcctggagatataacagca

SEQ ID NO: 545144 - DNA, 25 bp, Homo sapien
ttgaaatctgggcaggatgatttgt

SEQ ID NO: 545145 - DNA, 25 bp, Homo sapien
ccattttcttgatttgtgctggctg

SEQ ID NO: 545146 - DNA, 25 bp, Homo sapien
caagaatgcctctctgggatttctt

SEQ ID NO: 545147 - DNA, 25 bp, Homo sapien
gggagaggggctcttcttggatgcg

SEQ ID NO: 545148 - DNA, 25 bp, Homo sapien
tggggagaggggctcttcttggatg

SEQ ID NO: 545149 - DNA, 25 bp, Homo sapien
gaggggctcttcttggatgcgacac

SEQ ID NO: 545150 - DNA, 25 bp, Homo sapien
gagaggggctcttcttggatgcgac

SEQ ID NO: 545151 - DNA, 25 bp, Homo sapien
actgaagggcctgagagcacgtgac

SEQ ID NO: 545152 - DNA, 25 bp, Homo sapien
gggtcccagggcattgtcataatta

SEQ ID NO: 545153 - DNA, 25 bp, Homo sapien
tgacagccgtcgacctgggcaagga

SEQ ID NO: 545154 - DNA, 25 bp, Homo sapien
gcagttttgtaccacatgcaggctt

SEQ ID NO: 545155 - DNA, 25 bp, Homo sapien
tctgggcaagggaatgattaggaaa

SEQ ID NO: 545156 - DNA, 25 bp, Homo sapien
caagggaatgattaggaaaattggc

SEQ ID NO: 545157 - DNA, 25 bp, Homo sapien
tcttagggagtctttaatccttgct

SEQ ID NO: 545158 - DNA, 25 bp, Homo sapien
cactgatgccacattactaactgca

SEQ ID NO: 545159 - DNA, 25 bp, Homo sapien
attcctgtccatgggatcttatcga

SEQ ID NO: 545160 - DNA, 25 bp, Homo sapien
ggtagaggacattgataagagctgc

SEQ ID NO: 545161 - DNA, 25 bp, Homo sapien
gccctgaccatccatgaccaggtag

SEQ ID NO: 545162 - DNA, 25 bp, Homo sapien
ttatcgaatgattacacaaagagcc

SEQ ID NO: 545163 - DNA, 25 bp, Homo sapien
tgacatagttagcaaccttaggcat

SEQ ID NO: 545164 - DNA, 25 bp, Homo sapien
ccaaagaaccaaattatcatgaagg

SEQ ID NO: 545165 - DNA, 25 bp, Homo sapien
tatgagacatacactgtaccaggca

SEQ ID NO: 545166 - DNA, 25 bp, Homo sapien
gcaaaatctctgtgtactacttaaa

SEQ ID NO: 545167 - DNA, 25 bp, Homo sapien
atttaatggctgctgagtattaaca

SEQ ID NO: 545168 - DNA, 25 bp, Homo sapien
ccttgttaaactgatttagttcttg

SEQ ID NO: 545169 - DNA, 25 bp, Homo sapien
agggtcctggtgattgccttgttaa

SEQ ID NO: 545170 - DNA, 25 bp, Homo sapien
taatggctgctgagtattaacagaa

SEQ ID NO: 545171 - DNA, 25 bp, Homo sapien
gccttgtagcatcgggcagcaccat

SEQ ID NO: 545172 - DNA, 25 bp, Homo sapien
gctcactacttaacaaaatacttcc

SEQ ID NO: 545173 - DNA, 25 bp, Homo sapien
gggacttacgctcactacttaacaa

SEQ ID NO: 545174 - DNA, 25 bp, Homo sapien
ttctcctgccttgtagcatcgggca

SEQ ID NO: 545175 - DNA, 25 bp, Homo sapien
tttcctatttgtttctgggctcctc

SEQ ID NO: 545176 - DNA, 25 bp, Homo sapien
gtattatctcacttttcctatttgt

SEQ ID NO: 545177 - DNA, 25 bp, Homo sapien
aagtagtattatctcacttttccta

SEQ ID NO: 545178 - DNA, 25 bp, Homo sapien
cacttttcctatttgtttctgggct

SEQ ID NO: 545179 - DNA, 25 bp, Homo sapien
agtcatcaagtaggctaagagttac

SEQ ID NO: 545180 - DNA, 25 bp, Homo sapien
aagtcatcaagtaggctaagagtta

SEQ ID NO: 545181 - DNA, 25 bp, Homo sapien
aacctccaaaccttgcagaatgctc

SEQ ID NO: 545182 - DNA, 25 bp, Homo sapien
tcagacaaacctccaaagaccttac

SEQ ID NO: 545183 - DNA, 25 bp, Homo sapien
ttggtgtctgtttgccaccatcacc

SEQ ID NO: 545184 - DNA, 25 bp, Homo sapien
gctcccatcaaattcagacaaacct

SEQ ID NO: 545185 - DNA, 25 bp, Homo sapien
tcattaaattgaactcccacttggg

SEQ ID NO: 545186 - DNA, 25 bp, Homo sapien
aatgagtaatagatcctccttgcca

SEQ ID NO: 545187 - DNA, 25 bp, Homo sapien
tactagcatttaaacagggttgctc

SEQ ID NO: 545188 - DNA, 25 bp, Homo sapien
tgaccatctgttaagagagtactgg

SEQ ID NO: 545189 - DNA, 25 bp, Homo sapien
ttctttactctgtggagcaaccccc

SEQ ID NO: 545190 - DNA, 25 bp, Homo sapien
gtgcacatgctggaatcaaggctaa

SEQ ID NO: 545191 - DNA, 25 bp, Homo sapien
tcaaggctaattgggtcatcttcat

SEQ ID NO: 545192 - DNA, 25 bp, Homo sapien
tatttcagtcatagcatctgtgcac

SEQ ID NO: 545193 - DNA, 25 bp, Homo sapien
cacaaggtgtgagcccacaccaaca

SEQ ID NO: 545194 - DNA, 25 bp, Homo sapien
aaggtgtgagcccacaccaacagca

SEQ ID NO: 545195 - DNA, 25 bp, Homo sapien
aggtgtgagcccacaccaacagcat

SEQ ID NO: 545196 - DNA, 25 bp, Homo sapien
tgcacacaaggtgtgagcccacacc

SEQ ID NO: 545197 - DNA, 25 bp, Homo sapien
gtcttctagactcaggaccttggtc

SEQ ID NO: 545198 - DNA, 25 bp, Homo sapien
tctgaacaaccagggcagtcttcta

SEQ ID NO: 545199 - DNA, 25 bp, Homo sapien
cagtgttcccatacagccccagtac

SEQ ID NO: 545200 - DNA, 25 bp, Homo sapien
tacagccccagtaccctctttgcat

SEQ ID NO: 545201 - DNA, 25 bp, Homo sapien
gaagagtctcttttatagtccataa

SEQ ID NO: 545202 - DNA, 25 bp, Homo sapien
agctcttggcacaagctctagggtc

SEQ ID NO: 545203 - DNA, 25 bp, Homo sapien
taaataatgcataagccaccagcat

SEQ ID NO: 545204 - DNA, 25 bp, Homo sapien
gaaatcatatggtgaatcctgataa

SEQ ID NO: 545205 - DNA, 25 bp, Homo sapien
tctacctgattttcacggcatttga

SEQ ID NO: 545206 - DNA, 25 bp, Homo sapien
agtgtgctttgctggccctttagga

SEQ ID NO: 545207 - DNA, 25 bp, Homo sapien
tgctggccctttaggactgtaacca

SEQ ID NO: 545208 - DNA, 25 bp, Homo sapien
aaccaatagtattctctcttccacc

SEQ ID NO: 545209 - DNA, 25 bp, Homo sapien
tctcaaagcgactaagacactttct

SEQ ID NO: 545210 - DNA, 25 bp, Homo sapien
aatctcaaagcgactaagacacttt

SEQ ID NO: 545211 - DNA, 25 bp, Homo sapien
aaagcgactaagacactttctgaca

SEQ ID NO: 545212 - DNA, 25 bp, Homo sapien
tcaaagcgactaagacactttctga

SEQ ID NO: 545213 - DNA, 25 bp, Homo sapien
ttcctcttccccgataccattttca

SEQ ID NO: 545214 - DNA, 25 bp, Homo sapien
ttttattcaaatccctcattcccat

SEQ ID NO: 545215 - DNA, 25 bp, Homo sapien
caatatttttattcaaatccctcat

SEQ ID NO: 545216 - DNA, 25 bp, Homo sapien
acaatatttttattcaaatccctca

SEQ ID NO: 545217 - DNA, 25 bp, Homo sapien
tatttttattcaaatccctcattcc

SEQ ID NO: 545218 - DNA, 25 bp, Homo sapien
ggaaggacccatagttctgacagag

SEQ ID NO: 545219 - DNA, 25 bp, Homo sapien
cattgaagagccagcaaccattagg

SEQ ID NO: 545220 - DNA, 25 bp, Homo sapien
tgatcccacaatactccagcagaga

SEQ ID NO: 545221 - DNA, 25 bp, Homo sapien
ttaggcagacgctcaagtaagcagg

SEQ ID NO: 545222 - DNA, 25 bp, Homo sapien
gaacctagtaaaagtgtagcagcac

SEQ ID NO: 545223 - DNA, 25 bp, Homo sapien
tctgggttgaagtactccgtggtgc

SEQ ID NO: 545224 - DNA, 25 bp, Homo sapien
cagaagctttattgcccagtgtgag

SEQ ID NO: 545225 - DNA, 25 bp, Homo sapien
caatgagacagatacagaacctagt

SEQ ID NO: 545226 - DNA, 25 bp, Homo sapien
tgctcaaatcctgccaatcaggaac

SEQ ID NO: 545227 - DNA, 25 bp, Homo sapien
tctaatgggttgattgctcaaatcc

SEQ ID NO: 545228 - DNA, 25 bp, Homo sapien
gttgattgctcaaatcctgccaatc

SEQ ID NO: 545229 - DNA, 25 bp, Homo sapien
tcctgccaatcaggaacaactcttc

SEQ ID NO: 545230 - DNA, 25 bp, Homo sapien
gacatgtgacactaatagtagccaa

SEQ ID NO: 545231 - DNA, 25 bp, Homo sapien
ttagatttcttgtaaaagaatagct

SEQ ID NO: 545232 - DNA, 25 bp, Homo sapien
tccaaaataatagatggttgacatg

SEQ ID NO: 545233 - DNA, 25 bp, Homo sapien
gcctctgtgcaccaaattgattaga

SEQ ID NO: 545234 - DNA, 25 bp, Homo sapien
cggtcctcagctggacagcactcaa

SEQ ID NO: 545235 - DNA, 25 bp, Homo sapien
ttccatgggaatctccccaggcatt

SEQ ID NO: 545236 - DNA, 25 bp, Homo sapien
tggttggcagctttagggtggcctt

SEQ ID NO: 545237 - DNA, 25 bp, Homo sapien
gcctgatcggtcctcagctggacag

SEQ ID NO: 545238 - DNA, 25 bp, Homo sapien
tatgcttcagcaaaaccgctaccaa

SEQ ID NO: 545239 - DNA, 25 bp, Homo sapien
ccgctaccaataaatctcagaggct

SEQ ID NO: 545240 - DNA, 25 bp, Homo sapien
tgactccacggacttggagaagaca

SEQ ID NO: 545241 - DNA, 25 bp, Homo sapien
ggcaattctttgactccacggactt

SEQ ID NO: 545242 - DNA, 25 bp, Homo sapien
gggtacatggtttgctgattttgac

SEQ ID NO: 545243 - DNA, 25 bp, Homo sapien
actctgtgagggtacatggtttgct

SEQ ID NO: 545244 - DNA, 25 bp, Homo sapien
gctgattttgactgttattgatgat

SEQ ID NO: 545245 - DNA, 25 bp, Homo sapien
catggtttgctgattttgactgtta

SEQ ID NO: 545246 - DNA, 25 bp, Homo sapien
gggccatgcttctagccagaaccgt

SEQ ID NO: 545247 - DNA, 25 bp, Homo sapien
catgattatgcttctaagagctggg

SEQ ID NO: 545248 - DNA, 25 bp, Homo sapien
ctgggaggtaaaggcccatctgtgc

SEQ ID NO: 545249 - DNA, 25 bp, Homo sapien
catggacatgattatgcttctaaga

SEQ ID NO: 545250 - DNA, 25 bp, Homo sapien
aaaggcagaatcaaccatgaaggga

SEQ ID NO: 545251 - DNA, 25 bp, Homo sapien
tggtccagaggattctctcggccgc

SEQ ID NO: 545252 - DNA, 25 bp, Homo sapien
aggagagagaagtcctcgtttcaga

SEQ ID NO: 545253 - DNA, 25 bp, Homo sapien
atatggggaatgctctctgccagat

SEQ ID NO: 545254 - DNA, 25 bp, Homo sapien
tatggggaatgctctctgccagatg

SEQ ID NO: 545255 - DNA, 25 bp, Homo sapien
catatggggaatgctctctgccaga

SEQ ID NO: 545256 - DNA, 25 bp, Homo sapien
tatcatgtccttttttctcgtagga

SEQ ID NO: 545257 - DNA, 25 bp, Homo sapien
tatttgaaacatcaagtgcattagg

SEQ ID NO: 545258 - DNA, 25 bp, Homo sapien
aattatcatgtccttttttctcgta

SEQ ID NO: 545259 - DNA, 25 bp, Homo sapien
catgtccttttttctcgtaggaaat

SEQ ID NO: 545260 - DNA, 25 bp, Homo sapien
tcagataactgaataataatgtggt

SEQ ID NO: 545261 - DNA, 25 bp, Homo sapien
aataagcaccattttccgattgact

SEQ ID NO: 545262 - DNA, 25 bp, Homo sapien
caagcacagcagcctgatcgttcat

SEQ ID NO: 545263 - DNA, 25 bp, Homo sapien
ctaaataagcaccattttccgattg

SEQ ID NO: 545264 - DNA, 25 bp, Homo sapien
ccgattgactgttcacttctaattc

SEQ ID NO: 545265 - DNA, 25 bp, Homo sapien
gatgtgattttatcatttagaactt

SEQ ID NO: 545266 - DNA, 25 bp, Homo sapien
ttgatgtgattttatcatttagaac

SEQ ID NO: 545267 - DNA, 25 bp, Homo sapien
tgtgattttatcatttagaacttgt

SEQ ID NO: 545268 - DNA, 25 bp, Homo sapien
tgattttatcatttagaacttgttc

SEQ ID NO: 545269 - DNA, 25 bp, Homo sapien
tcttcagtcgcttgaaaaatcttgc

SEQ ID NO: 545270 - DNA, 25 bp, Homo sapien
tgcccatcgttcttcagtcgcttga

SEQ ID NO: 545271 - DNA, 25 bp, Homo sapien
gctattgcccatcgttcttcagtcg

SEQ ID NO: 545272 - DNA, 25 bp, Homo sapien
tcgttcttcagtcgcttgaaaaatc

SEQ ID NO: 545273 - DNA, 25 bp, Homo sapien
ttttagaaatatccgccatcaattc

SEQ ID NO: 545274 - DNA, 25 bp, Homo sapien
ttagaaatatccgccatcaattcat

SEQ ID NO: 545275 - DNA, 25 bp, Homo sapien
tttagaaatatccgccatcaattca

SEQ ID NO: 545276 - DNA, 25 bp, Homo sapien
cttttagaaatatccgccatcaatt

SEQ ID NO: 545277 - DNA, 25 bp, Homo sapien
aacttcgtgcttctgctaccgcctt

SEQ ID NO: 545278 - DNA, 25 bp, Homo sapien
tccaaacttcgtgcttctgctaccg

SEQ ID NO: 545279 - DNA, 25 bp, Homo sapien
gggtttcatcctcaagttcagaatt

SEQ ID NO: 545280 - DNA, 25 bp, Homo sapien
tcgtgcttctgctaccgccttctca

SEQ ID NO: 545281 - DNA, 25 bp, Homo sapien
agtccagaaagcgtttcaccaagtt

SEQ ID NO: 545282 - DNA, 25 bp, Homo sapien
aattagtccagaaagcgtttcacca

SEQ ID NO: 545283 - DNA, 25 bp, Homo sapien
tcaccaagttttttctctcttccca

SEQ ID NO: 545284 - DNA, 25 bp, Homo sapien
ttagtccagaaagcgtttcaccaag

SEQ ID NO: 545285 - DNA, 25 bp, Homo sapien
aaggattcgaatctgccgtcatact

SEQ ID NO: 545286 - DNA, 25 bp, Homo sapien
caggtagtgctgccacaactctgcg

SEQ ID NO: 545287 - DNA, 25 bp, Homo sapien
agggctgaggggtagcaccgggctc

SEQ ID NO: 545288 - DNA, 25 bp, Homo sapien
caggtagggctgaggggtagcaccg

SEQ ID NO: 545289 - DNA, 25 bp, Homo sapien
acaactctgcgtagctcctccagga

SEQ ID NO: 545290 - DNA, 25 bp, Homo sapien
gcgaaggctgctctggcggtcacca

SEQ ID NO: 545291 - DNA, 25 bp, Homo sapien
gaaggctgctctggcggtcaccaca

SEQ ID NO: 545292 - DNA, 25 bp, Homo sapien
agcgcgaaggctgctctggcggtca

SEQ ID NO: 545293 - DNA, 25 bp, Homo sapien
tgctctggcggtcaccacagtaaca

SEQ ID NO: 545294 - DNA, 25 bp, Homo sapien
gcacccacaggcttcacaggcccat

SEQ ID NO: 545295 - DNA, 25 bp, Homo sapien
ggaacgcgggcacccacaggcttca

SEQ ID NO: 545296 - DNA, 25 bp, Homo sapien
ggagcggaccactgcggagccggct

SEQ ID NO: 545297 - DNA, 25 bp, Homo sapien
acaggcttcacaggcccatactgca

SEQ ID NO: 545298 - DNA, 25 bp, Homo sapien
gagaagatggggttgatcaagaaga

SEQ ID NO: 545299 - DNA, 25 bp, Homo sapien
agatggggttgatcaagaagaggag

SEQ ID NO: 545300 - DNA, 25 bp, Homo sapien
aagatggggttgatcaagaagagga

SEQ ID NO: 545301 - DNA, 25 bp, Homo sapien
gaagatggggttgatcaagaagagg

SEQ ID NO: 545302 - DNA, 25 bp, Homo sapien
cagggacccctgcagtaaaagactc

SEQ ID NO: 545303 - DNA, 25 bp, Homo sapien
tagaattagtgggaaccctgactgt

SEQ ID NO: 545304 - DNA, 25 bp, Homo sapien
gcagtcatgcttgctcgcatgccca

SEQ ID NO: 545305 - DNA, 25 bp, Homo sapien
aaaacatagatctcctgcatgcaca

SEQ ID NO: 545306 - DNA, 25 bp, Homo sapien
gattccttggctaccatcggtgcat

SEQ ID NO: 545307 - DNA, 25 bp, Homo sapien
aaactgtatggattcaagggcacac

SEQ ID NO: 545308 - DNA, 25 bp, Homo sapien
taacctgatgaagatgtaacgatgc

SEQ ID NO: 545309 - DNA, 25 bp, Homo sapien
taggcgctcagcaccagtattaggt

SEQ ID NO: 545310 - DNA, 25 bp, Homo sapien
acaattgactagagcatccgcgggc

SEQ ID NO: 545311 - DNA, 25 bp, Homo sapien
cagcagcttccggagttgctccact

SEQ ID NO: 545312 - DNA, 25 bp, Homo sapien
ttccaggtttgattccaaggcctgg

SEQ ID NO: 545313 - DNA, 25 bp, Homo sapien
tagggttgcagtttaggtctctcag

SEQ ID NO: 545314 - DNA, 25 bp, Homo sapien
cataggcatgcaactgcttagaaat

SEQ ID NO: 545315 - DNA, 25 bp, Homo sapien
tgaagctcatcctgtagcacatgat

SEQ ID NO: 545316 - DNA, 25 bp, Homo sapien
tcagttggctattggccctctccag

SEQ ID NO: 545317 - DNA, 25 bp, Homo sapien
ctgtaatttttctaggaggtccatg

SEQ ID NO: 545318 - DNA, 25 bp, Homo sapien
ggctgagtgcaaccttgaatataac

SEQ ID NO: 545319 - DNA, 25 bp, Homo sapien
tatcaggtagcgtgtttttaagaaa

SEQ ID NO: 545320 - DNA, 25 bp, Homo sapien
aggtattcatatcaggtagcgtgtt

SEQ ID NO: 545321 - DNA, 25 bp, Homo sapien
tattttcaaagctctcacattccat

SEQ ID NO: 545322 - DNA, 25 bp, Homo sapien
tagagatctctgtgatagtcatgaa

SEQ ID NO: 545323 - DNA, 25 bp, Homo sapien
caaatcctaatgaaaactgagaggc

SEQ ID NO: 545324 - DNA, 25 bp, Homo sapien
gaaggagcctggacagctggtacat

SEQ ID NO: 545325 - DNA, 25 bp, Homo sapien
tcttcaaggtgattgtagagatctc

SEQ ID NO: 545326 - DNA, 25 bp, Homo sapien
tcaggtctgtactgcttgcggaagc

SEQ ID NO: 545327 - DNA, 25 bp, Homo sapien
gctttcaggaggttaaacagtgaca

SEQ ID NO: 545328 - DNA, 25 bp, Homo sapien
gtcctggcccaagctgtactgaaaa

SEQ ID NO: 545329 - DNA, 25 bp, Homo sapien
tgcggaagccgaggtcatacatgag

SEQ ID NO: 545330 - DNA, 25 bp, Homo sapien
ccttataggatatgtcaggaggctg

SEQ ID NO: 545331 - DNA, 25 bp, Homo sapien
taaatccacgagaatcgcatgctgc

SEQ ID NO: 545332 - DNA, 25 bp, Homo sapien
tgtctgagtcggtactgtaaagcca

SEQ ID NO: 545333 - DNA, 25 bp, Homo sapien
gagctgcttcaaaagttccttatag

SEQ ID NO: 545334 - DNA, 25 bp, Homo sapien
gatgaagtaattgccccaagttcac

SEQ ID NO: 545335 - DNA, 25 bp, Homo sapien
tcacccgttgctgactgagcattaa

SEQ ID NO: 545336 - DNA, 25 bp, Homo sapien
tgagggtgcctagctactaagcaca

SEQ ID NO: 545337 - DNA, 25 bp, Homo sapien
ggtaggcaattactattaggtccac

SEQ ID NO: 545338 - DNA, 25 bp, Homo sapien
gctccagaacaacattcgggctttg

SEQ ID NO: 545339 - DNA, 25 bp, Homo sapien
gaattcaattctgcacagtgcaggc

SEQ ID NO: 545340 - DNA, 25 bp, Homo sapien
taagaaggcgtaactgatatgctcc

SEQ ID NO: 545341 - DNA, 25 bp, Homo sapien
tcacaagcagttcaaggacactatg

SEQ ID NO: 545342 - DNA, 25 bp, Homo sapien
tcttatcccaagttattaagacctc

SEQ ID NO: 545343 - DNA, 25 bp, Homo sapien
gttattaagacctctttctgacatg

SEQ ID NO: 545344 - DNA, 25 bp, Homo sapien
cccaagttattaagacctctttctg

SEQ ID NO: 545345 - DNA, 25 bp, Homo sapien
ttaagacctctttctgacatgcacc

SEQ ID NO: 545346 - DNA, 25 bp, Homo sapien
gtgtgcatacagtccaaaactgagt

SEQ ID NO: 545347 - DNA, 25 bp, Homo sapien
tgacctttcccatgttataaccacc

SEQ ID NO: 545348 - DNA, 25 bp, Homo sapien
caacaattataatcagtaggtattc

SEQ ID NO: 545349 - DNA, 25 bp, Homo sapien
tacctaaatatactctaagagtttc

SEQ ID NO: 545350 - DNA, 25 bp, Homo sapien
atcatagcatttagtctgttaaaat

SEQ ID NO: 545351 - DNA, 25 bp, Homo sapien
catagcatttagtctgttaaaatgg

SEQ ID NO: 545352 - DNA, 25 bp, Homo sapien
tcatagcatttagtctgttaaaatg

SEQ ID NO: 545353 - DNA, 25 bp, Homo sapien
agcagctcgttcctgtccaatccat

SEQ ID NO: 545354 - DNA, 25 bp, Homo sapien
ccagacaggaatacaaccagcggtt

SEQ ID NO: 545355 - DNA, 25 bp, Homo sapien
cacaagctcctcagttcttttgatt

SEQ ID NO: 545356 - DNA, 25 bp, Homo sapien
ccattcgaagtaacaagatttgttg

SEQ ID NO: 545357 - DNA, 25 bp, Homo sapien
tgcagagaagaacacagtgagaggc

SEQ ID NO: 545358 - DNA, 25 bp, Homo sapien
cagagaagaacacagtgagaggcat

SEQ ID NO: 545359 - DNA, 25 bp, Homo sapien
gcagagaagaacacagtgagaggca

SEQ ID NO: 545360 - DNA, 25 bp, Homo sapien
ctgcagagaagaacacagtgagagg

SEQ ID NO: 545361 - DNA, 25 bp, Homo sapien
tccttagcagtaacccagactaccc

SEQ ID NO: 545362 - DNA, 25 bp, Homo sapien
tagcagtaacccagactacccaagt

SEQ ID NO: 545363 - DNA, 25 bp, Homo sapien
cccagactacccaagtttctgtaga

SEQ ID NO: 545364 - DNA, 25 bp, Homo sapien
tacccaagtttctgtagaattcaca

SEQ ID NO: 545365 - DNA, 25 bp, Homo sapien
catgtgcaacactcccttaacaggt

SEQ ID NO: 545366 - DNA, 25 bp, Homo sapien
gaccacctcgggcagagttaacttc

SEQ ID NO: 545367 - DNA, 25 bp, Homo sapien
gcttatatcgcaagaacaaattggg

SEQ ID NO: 545368 - DNA, 25 bp, Homo sapien
aaatgacttcgccacccaggtagtg

SEQ ID NO: 545369 - DNA, 25 bp, Homo sapien
aattactcaaagagagctgcctgtg

SEQ ID NO: 545370 - DNA, 25 bp, Homo sapien
tacacagcacgtgcattccattagc

SEQ ID NO: 545371 - DNA, 25 bp, Homo sapien
gagcaaggcccaatctctgggaaaa

SEQ ID NO: 545372 - DNA, 25 bp, Homo sapien
aaattccttagggagtgcaacacag

SEQ ID NO: 545373 - DNA, 25 bp, Homo sapien
tgttcatgggagaagcaaccctgag

SEQ ID NO: 545374 - DNA, 25 bp, Homo sapien
ctcccacacttagggactcattgct

SEQ ID NO: 545375 - DNA, 25 bp, Homo sapien
atccggcgaggagtgacagaggttc

SEQ ID NO: 545376 - DNA, 25 bp, Homo sapien
ctgttgcattgctgagggagatttg

SEQ ID NO: 545377 - DNA, 25 bp, Homo sapien
cgacatcttgaaaaagtagttggtt

SEQ ID NO: 545378 - DNA, 25 bp, Homo sapien
ttggttgctgagatatggcaaaagc

SEQ ID NO: 545379 - DNA, 25 bp, Homo sapien
ctttatcttgtactaaaaatcgaca

SEQ ID NO: 545380 - DNA, 25 bp, Homo sapien
aacaaaccattgaccctttatcttg

SEQ ID NO: 545381 - DNA, 25 bp, Homo sapien
caagcagttatagtcttcaccagat

SEQ ID NO: 545382 - DNA, 25 bp, Homo sapien
gtcctttgtatataggatccatcaa

SEQ ID NO: 545383 - DNA, 25 bp, Homo sapien
tataatatgaacttgtcaaagcttc

SEQ ID NO: 545384 - DNA, 25 bp, Homo sapien
ccccaatatagggtaggaaggctat

SEQ ID NO: 545385 - DNA, 25 bp, Homo sapien
gcatcaggtgcactaacagtttata

SEQ ID NO: 545386 - DNA, 25 bp, Homo sapien
tattttttctacaggatccacagta

SEQ ID NO: 545387 - DNA, 25 bp, Homo sapien
tatataggttctggcttttaactgc

SEQ ID NO: 545388 - DNA, 25 bp, Homo sapien
gcaactattgaaccgaaagctgaaa

SEQ ID NO: 545389 - DNA, 25 bp, Homo sapien
ctgtggggacagtctacctgaattc

SEQ ID NO: 545390 - DNA, 25 bp, Homo sapien
gggacagtctacctgaattctggta

SEQ ID NO: 545391 - DNA, 25 bp, Homo sapien
gacagtctacctgaattctggtaaa

SEQ ID NO: 545392 - DNA, 25 bp, Homo sapien
atactgtggggacagtctacctgaa

SEQ ID NO: 545393 - DNA, 25 bp, Homo sapien
gaggaagaattactctccttgtaca

SEQ ID NO: 545394 - DNA, 25 bp, Homo sapien
ttactctccttgtacatgcgtcgaa

SEQ ID NO: 545395 - DNA, 25 bp, Homo sapien
aagaattactctccttgtacatgcg

SEQ ID NO: 545396 - DNA, 25 bp, Homo sapien
gagaaggaagtgtgaagacttggaa

SEQ ID NO: 545397 - DNA, 25 bp, Homo sapien
tactgtttctcaccaaatatcaagc

SEQ ID NO: 545398 - DNA, 25 bp, Homo sapien
caacgagcatctttacttaacccta

SEQ ID NO: 545399 - DNA, 25 bp, Homo sapien
cataagctaacaggaagttctaatg

SEQ ID NO: 545400 - DNA, 25 bp, Homo sapien
ggacactgcctgtcaattatggtat

SEQ ID NO: 545401 - DNA, 25 bp, Homo sapien
tgtgtgcccgtcttcgaaactgcgg

SEQ ID NO: 545402 - DNA, 25 bp, Homo sapien
tgtgcttgaaggtgggtggctgaac

SEQ ID NO: 545403 - DNA, 25 bp, Homo sapien
aacgtttgccaagctgaggacggtg

SEQ ID NO: 545404 - DNA, 25 bp, Homo sapien
tcccatcctgcaaattcagctttct

SEQ ID NO: 545405 - DNA, 25 bp, Homo sapien
gcggtgtccctggtggagaatcccc

SEQ ID NO: 545406 - DNA, 25 bp, Homo sapien
ggtgtccctggtggagaatcccctg

SEQ ID NO: 545407 - DNA, 25 bp, Homo sapien
tgtccctggtggagaatcccctggt

SEQ ID NO: 545408 - DNA, 25 bp, Homo sapien
gtgtccctggtggagaatcccctgg

SEQ ID NO: 545409 - DNA, 25 bp, Homo sapien
aagtgaaagctattctctcccctga

SEQ ID NO: 545410 - DNA, 25 bp, Homo sapien
tatttcccacgtgggtcatggcaga

SEQ ID NO: 545411 - DNA, 25 bp, Homo sapien
tatgccgtaggctaatcagtatcac

SEQ ID NO: 545412 - DNA, 25 bp, Homo sapien
gtaagacagcatccgtaaagacagg

SEQ ID NO: 545413 - DNA, 25 bp, Homo sapien
ttccaagccgacctctcattctgtt

SEQ ID NO: 545414 - DNA, 25 bp, Homo sapien
caagccgacctctcattctgttagc

SEQ ID NO: 545415 - DNA, 25 bp, Homo sapien
tctgaagcaagactgttggaccgtt

SEQ ID NO: 545416 - DNA, 25 bp, Homo sapien
tgttggaccgttcaaaactgtccac

SEQ ID NO: 545417 - DNA, 25 bp, Homo sapien
tcagaatgtcaagtttgaaccttcc

SEQ ID NO: 545418 - DNA, 25 bp, Homo sapien
ttccagggagctagttaaggatctc

SEQ ID NO: 545419 - DNA, 25 bp, Homo sapien
tttgaaccttccactgcttgttgca

SEQ ID NO: 545420 - DNA, 25 bp, Homo sapien
gcttgttgcattttctgggattgta

SEQ ID NO: 545421 - DNA, 25 bp, Homo sapien
agaagggccttccccgatgtgcacg

SEQ ID NO: 545422 - DNA, 25 bp, Homo sapien
agggccttccccgatgtgcacgtgt

SEQ ID NO: 545423 - DNA, 25 bp, Homo sapien
ggccttccccgatgtgcacgtgtgt

SEQ ID NO: 545424 - DNA, 25 bp, Homo sapien
gccttccccgatgtgcacgtgtgtc

SEQ ID NO: 545425 - DNA, 25 bp, Homo sapien
cagcttgctcattatctgtcagtga

SEQ ID NO: 545426 - DNA, 25 bp, Homo sapien
gatgagagatgcctctgtatcacca

SEQ ID NO: 545427 - DNA, 25 bp, Homo sapien
ctctttcaaagatgtcagcttgctc

SEQ ID NO: 545428 - DNA, 25 bp, Homo sapien
agcttggctcttggtgggtagagac

SEQ ID NO: 545429 - DNA, 25 bp, Homo sapien
gaaggcctgtttcagagtcagcatt

SEQ ID NO: 545430 - DNA, 25 bp, Homo sapien
agtgcatcgggcaggcctcacacag

SEQ ID NO: 545431 - DNA, 25 bp, Homo sapien
taatctgcgtcttggcactctgcag

SEQ ID NO: 545432 - DNA, 25 bp, Homo sapien
gcttatgcaaagagtgcatcgggca

SEQ ID NO: 545433 - DNA, 25 bp, Homo sapien
gataaagccaaagtgatccacatgc

SEQ ID NO: 545434 - DNA, 25 bp, Homo sapien
gcacactggaatacataacaaatat

SEQ ID NO: 545435 - DNA, 25 bp, Homo sapien
tggaatacataacaaatatactggc

SEQ ID NO: 545436 - DNA, 25 bp, Homo sapien
aggctctggagactcccggcagata

SEQ ID NO: 545437 - DNA, 25 bp, Homo sapien
taaggttaatctcaaatcgcccaac

SEQ ID NO: 545438 - DNA, 25 bp, Homo sapien
ataaggttaatctcaaatcgcccaa

SEQ ID NO: 545439 - DNA, 25 bp, Homo sapien
aaattcttttctagcacaactgatt

SEQ ID NO: 545440 - DNA, 25 bp, Homo sapien
tctagcacaactgatttagtgtctg

SEQ ID NO: 545441 - DNA, 25 bp, Homo sapien
ggcagacagcgtccgatcaggtgta

SEQ ID NO: 545442 - DNA, 25 bp, Homo sapien
agggcagacagcgtccgatcaggtg

SEQ ID NO: 545443 - DNA, 25 bp, Homo sapien
ggcaagggcagacagcgtccgatca

SEQ ID NO: 545444 - DNA, 25 bp, Homo sapien
caagggcagacagcgtccgatcagg

SEQ ID NO: 545445 - DNA, 25 bp, Homo sapien
actgggtgcgctcgcgtgtctccgt

SEQ ID NO: 545446 - DNA, 25 bp, Homo sapien
tcttctccgagtccgagggctggac

SEQ ID NO: 545447 - DNA, 25 bp, Homo sapien
ggctggacgtgactgggtgcgctcg

SEQ ID NO: 545448 - DNA, 25 bp, Homo sapien
ttctccgagtccgagggctggacgt

SEQ ID NO: 545449 - DNA, 25 bp, Homo sapien
tgggatttctggctgccctcgtgaa

SEQ ID NO: 545450 - DNA, 25 bp, Homo sapien
ggatttctggctgccctcgtgaact

SEQ ID NO: 545451 - DNA, 25 bp, Homo sapien
tttctggctgccctcgtgaactctc

SEQ ID NO: 545452 - DNA, 25 bp, Homo sapien
ggctgccctcgtgaactctccgttg

SEQ ID NO: 545453 - DNA, 25 bp, Homo sapien
aagccagaatcttccaaaatccgct

SEQ ID NO: 545454 - DNA, 25 bp, Homo sapien
aaaatccgctcagggaagcagaccc

SEQ ID NO: 545455 - DNA, 25 bp, Homo sapien
tgacactgctgcaccgagaccgaaa

SEQ ID NO: 545456 - DNA, 25 bp, Homo sapien
tgcaccgagaccgaaactcctgctg

SEQ ID NO: 545457 - DNA, 25 bp, Homo sapien
ctcctccggcaggcagtctccgggg

SEQ ID NO: 545458 - DNA, 25 bp, Homo sapien
tcctccggcaggcagtctccggggg

SEQ ID NO: 545459 - DNA, 25 bp, Homo sapien
ctccggcaggcagtctccgggggac

SEQ ID NO: 545460 - DNA, 25 bp, Homo sapien
cctccggcaggcagtctccggggga

SEQ ID NO: 545461 - DNA, 25 bp, Homo sapien
ttctccatgcagtcatcgatgaggc

SEQ ID NO: 545462 - DNA, 25 bp, Homo sapien
cccttggatcttcaggcgctgctgt

SEQ ID NO: 545463 - DNA, 25 bp, Homo sapien
cagtacaggacttcgaacttctgag

SEQ ID NO: 545464 - DNA, 25 bp, Homo sapien
cttctgagagttgtaaaaggcgtcc

SEQ ID NO: 545465 - DNA, 25 bp, Homo sapien
ggccgctttagataattgccttatg

SEQ ID NO: 545466 - DNA, 25 bp, Homo sapien
gccgctttagataattgccttatgc

SEQ ID NO: 545467 - DNA, 25 bp, Homo sapien
ccgctttagataattgccttatgct

SEQ ID NO: 545468 - DNA, 25 bp, Homo sapien
taaactgcaagtaatccaagctggt

SEQ ID NO: 545469 - DNA, 25 bp, Homo sapien
tggcatgtgacccaaaccaggtaat

SEQ ID NO: 545470 - DNA, 25 bp, Homo sapien
ccaagctggtccagtgacaggtaaa

SEQ ID NO: 545471 - DNA, 25 bp, Homo sapien
ccaggtaatgtgagttgctccctaa

SEQ ID NO: 545472 - DNA, 25 bp, Homo sapien
tgttttcatcatggtacttcatcgc

SEQ ID NO: 545473 - DNA, 25 bp, Homo sapien
tgtcttggggacctcaactccatgg

SEQ ID NO: 545474 - DNA, 25 bp, Homo sapien
ttccctgtcacatgaaacatgaaag

SEQ ID NO: 545475 - DNA, 25 bp, Homo sapien
gcaggtgccttctatcttgtttctc

SEQ ID NO: 545476 - DNA, 25 bp, Homo sapien
gatcaattatgcattcgagacaagg

SEQ ID NO: 545477 - DNA, 25 bp, Homo sapien
cgagacaaggcaatacatcagagct

SEQ ID NO: 545478 - DNA, 25 bp, Homo sapien
gcaggtgcactcctagcaacaagag

SEQ ID NO: 545479 - DNA, 25 bp, Homo sapien
tcttgactctagatagccatttacc

SEQ ID NO: 545480 - DNA, 25 bp, Homo sapien
aacaccatgctttgaatctgctaac

SEQ ID NO: 545481 - DNA, 25 bp, Homo sapien
tccaaaaccatagaacgaagaggtc

SEQ ID NO: 545482 - DNA, 25 bp, Homo sapien
cgaagaggtctgatatacaaattat

SEQ ID NO: 545483 - DNA, 25 bp, Homo sapien
tttctgattctctgctaacaccatg

SEQ ID NO: 545484 - DNA, 25 bp, Homo sapien
gcttgtttctagaagaaaatgtctc

SEQ ID NO: 545485 - DNA, 25 bp, Homo sapien
gaagaaaatgtctcagaaattttct

SEQ ID NO: 545486 - DNA, 25 bp, Homo sapien
tcagaaattttctttaatgcaggtt

SEQ ID NO: 545487 - DNA, 25 bp, Homo sapien
ttctttaatgcaggtttcaaaatgg

SEQ ID NO: 545488 - DNA, 25 bp, Homo sapien
attcttatgttgcttcctcttgatc

SEQ ID NO: 545489 - DNA, 25 bp, Homo sapien
tcattcttatgttgcttcctcttga

SEQ ID NO: 545490 - DNA, 25 bp, Homo sapien
cattcttatgttgcttcctcttgat

SEQ ID NO: 545491 - DNA, 25 bp, Homo sapien
ttcttatgttgcttcctcttgatct

SEQ ID NO: 545492 - DNA, 25 bp, Homo sapien
tctttatggtcttctttcaggctgt

SEQ ID NO: 545493 - DNA, 25 bp, Homo sapien
agacgccgtgcctctttctggtata

SEQ ID NO: 545494 - DNA, 25 bp, Homo sapien
acagacgccgtgcctctttctggta

SEQ ID NO: 545495 - DNA, 25 bp, Homo sapien
cacagacgccgtgcctctttctggt

SEQ ID NO: 545496 - DNA, 25 bp, Homo sapien
cagacgccgtgcctctttctggtat

SEQ ID NO: 545497 - DNA, 25 bp, Homo sapien
tgggctccattcaaagggaaagtgt

SEQ ID NO: 545498 - DNA, 25 bp, Homo sapien
tgtaataaccaaactatgggctcca

SEQ ID NO: 545499 - DNA, 25 bp, Homo sapien
tatgtaataaccaaactatgggctc

SEQ ID NO: 545500 - DNA, 25 bp, Homo sapien
caaactatgggctccattcaaaggg

SEQ ID NO: 545501 - DNA, 25 bp, Homo sapien
gctgactagcagtttcttctgaccc

SEQ ID NO: 545502 - DNA, 25 bp, Homo sapien
ttcacttgcccaaacctagatccta

SEQ ID NO: 545503 - DNA, 25 bp, Homo sapien
agatcctactggctgactagcagtt

SEQ ID NO: 545504 - DNA, 25 bp, Homo sapien
tgtgaggcacaagggcagggtgggc

SEQ ID NO: 545505 - DNA, 25 bp, Homo sapien
aattccacccaatatctctggtcca

SEQ ID NO: 545506 - DNA, 25 bp, Homo sapien
cacaattccacccaatatctctggt

SEQ ID NO: 545507 - DNA, 25 bp, Homo sapien
cacccatcgtcttctgttctctgcc

SEQ ID NO: 545508 - DNA, 25 bp, Homo sapien
ggaaaagcagctacttcccacccat

SEQ ID NO: 545509 - DNA, 25 bp, Homo sapien
caagacacctactgtacatcatggt

SEQ ID NO: 545510 - DNA, 25 bp, Homo sapien
tgtagaggcactgataagatgttag

SEQ ID NO: 545511 - DNA, 25 bp, Homo sapien
tatatactcgaagtctttgagagag

SEQ ID NO: 545512 - DNA, 25 bp, Homo sapien
ttctacaatgtatatgggtatcaaa

SEQ ID NO: 545513 - DNA, 25 bp, Homo sapien
catgacagctttggtctttgatgga

SEQ ID NO: 545514 - DNA, 25 bp, Homo sapien
tcatcacacatttcataggctccca

SEQ ID NO: 545515 - DNA, 25 bp, Homo sapien
cataaacagggcagattgagggtga

SEQ ID NO: 545516 - DNA, 25 bp, Homo sapien
ccttcttggacagaggcttgccgca

SEQ ID NO: 545517 - DNA, 25 bp, Homo sapien
atgccatggtgacccacgtactgcc

SEQ ID NO: 545518 - DNA, 25 bp, Homo sapien
tactgccactcattcatcagatcca

SEQ ID NO: 545519 - DNA, 25 bp, Homo sapien
tttctgtcatgccatggtgacccac

SEQ ID NO: 545520 - DNA, 25 bp, Homo sapien
ggtgacccacgtactgccactcatt

SEQ ID NO: 545521 - DNA, 25 bp, Homo sapien
tcacttgtaaatgcccagtcacttg

SEQ ID NO: 545522 - DNA, 25 bp, Homo sapien
acttgtaaatgcccagtcacttgta

SEQ ID NO: 545523 - DNA, 25 bp, Homo sapien
cacttgtaaatgcccagtcacttgt

SEQ ID NO: 545524 - DNA, 25 bp, Homo sapien
tacgtaattccaaagagacacaaag

SEQ ID NO: 545525 - DNA, 25 bp, Homo sapien
aaagtcaacaaacagaataatgcga

SEQ ID NO: 545526 - DNA, 25 bp, Homo sapien
cagaataatgcgataagtgttataa

SEQ ID NO: 545527 - DNA, 25 bp, Homo sapien
ctttacgtaattccaaagagacaca

SEQ ID NO: 545528 - DNA, 25 bp, Homo sapien
gtgtaatagcaacattcctgacacg

SEQ ID NO: 545529 - DNA, 25 bp, Homo sapien
taggagtagactgccagtggtaccg

SEQ ID NO: 545530 - DNA, 25 bp, Homo sapien
tcttcattatgatgcggtgtcagaa

SEQ ID NO: 545531 - DNA, 25 bp, Homo sapien
cagaatttccgttttcctccagagg

SEQ ID NO: 545532 - DNA, 25 bp, Homo sapien
ccacagaagtttttacaaattgccg

SEQ ID NO: 545533 - DNA, 25 bp, Homo sapien
caaattgccgtaagtgattttcaac

SEQ ID NO: 545534 - DNA, 25 bp, Homo sapien
cggtattaaatcataaaaggcttca

SEQ ID NO: 545535 - DNA, 25 bp, Homo sapien
taaacattaacccacattccattgc

SEQ ID NO: 545536 - DNA, 25 bp, Homo sapien
tgatatatgagtgatacggaggagt

SEQ ID NO: 545537 - DNA, 25 bp, Homo sapien
ctgatatatgagtgatacggaggag

SEQ ID NO: 545538 - DNA, 25 bp, Homo sapien
tgagtgatacggaggagtgaagtaa

SEQ ID NO: 545539 - DNA, 25 bp, Homo sapien
tatatgagtgatacggaggagtgaa

SEQ ID NO: 545540 - DNA, 25 bp, Homo sapien
tctctcttgtcgcaatctggctcta

SEQ ID NO: 545541 - DNA, 25 bp, Homo sapien
cgcaatctggctctactgcaattcc

SEQ ID NO: 545542 - DNA, 25 bp, Homo sapien
cactactctctcttgtcgcaatctg

SEQ ID NO: 545543 - DNA, 25 bp, Homo sapien
ttgtcgcaatctggctctactgcaa

SEQ ID NO: 545544 - DNA, 25 bp, Homo sapien
tgggctggtcacacgctgatccgct

SEQ ID NO: 545545 - DNA, 25 bp, Homo sapien
ggctggtcacacgctgatccgctcc

SEQ ID NO: 545546 - DNA, 25 bp, Homo sapien
ccctgggctggtcacacgctgatcc

SEQ ID NO: 545547 - DNA, 25 bp, Homo sapien
ctgggctggtcacacgctgatccgc

SEQ ID NO: 545548 - DNA, 25 bp, Homo sapien
tggattcctgggcaaatctttcctg

SEQ ID NO: 545549 - DNA, 25 bp, Homo sapien
gcaaatctttcctgtagcctactgg

SEQ ID NO: 545550 - DNA, 25 bp, Homo sapien
gcctggattcctgggcaaatctttc

SEQ ID NO: 545551 - DNA, 25 bp, Homo sapien
ttcctgggcaaatctttcctgtagc

SEQ ID NO: 545552 - DNA, 25 bp, Homo sapien
actgtgttactaaataggcttccaa

SEQ ID NO: 545553 - DNA, 25 bp, Homo sapien
cactgtgttactaaataggcttcca

SEQ ID NO: 545554 - DNA, 25 bp, Homo sapien
aagcactgtgttactaaataggctt

SEQ ID NO: 545555 - DNA, 25 bp, Homo sapien
gcactgtgttactaaataggcttcc

SEQ ID NO: 545556 - DNA, 25 bp, Homo sapien
aatgaactgtttattccacctgcag

SEQ ID NO: 545557 - DNA, 25 bp, Homo sapien
ttctaaaactgtggtcacccggcca

SEQ ID NO: 545558 - DNA, 25 bp, Homo sapien
cacccggccagtagtttgagcatca

SEQ ID NO: 545559 - DNA, 25 bp, Homo sapien
gttgatgctcaaaacgtttctgacg

SEQ ID NO: 545560 - DNA, 25 bp, Homo sapien
gtccctgctgtagccggccggccgc

SEQ ID NO: 545561 - DNA, 25 bp, Homo sapien
gggaaggggccagccggcgcttgag

SEQ ID NO: 545562 - DNA, 25 bp, Homo sapien
gctcctccacgcgtgctccttggac

SEQ ID NO: 545563 - DNA, 25 bp, Homo sapien
cagacaccgccgtcctcccgggacg

SEQ ID NO: 545564 - DNA, 25 bp, Homo sapien
gctccccgatcccccaaggccgagc

SEQ ID NO: 545565 - DNA, 25 bp, Homo sapien
ccgcgcctccgagcccctgtcttgc

SEQ ID NO: 545566 - DNA, 25 bp, Homo sapien
tcccgccctgctccccgatccccca

SEQ ID NO: 545567 - DNA, 25 bp, Homo sapien
ccccgcgcctccgagcccctgtctt

SEQ ID NO: 545568 - DNA, 25 bp, Homo sapien
tggctggggtctgtggcgcggaaaa

SEQ ID NO: 545569 - DNA, 25 bp, Homo sapien
ggctggggtctgtggcgcggaaaac

SEQ ID NO: 545570 - DNA, 25 bp, Homo sapien
ctggctggggtctgtggcgcggaaa

SEQ ID NO: 545571 - DNA, 25 bp, Homo sapien
gatatgctgcgccttgtgctcgaag

SEQ ID NO: 545572 - DNA, 25 bp, Homo sapien
ctgttgtggatgaagcgcgagatat

SEQ ID NO: 545573 - DNA, 25 bp, Homo sapien
tgctcgaagatgaataccgccgggt

SEQ ID NO: 545574 - DNA, 25 bp, Homo sapien
ataggcagcgtggtcctgtggtcca

SEQ ID NO: 545575 - DNA, 25 bp, Homo sapien
gctccagggggtgcgggaacggctc

SEQ ID NO: 545576 - DNA, 25 bp, Homo sapien
gctgagctgagacgcccggctcggg

SEQ ID NO: 545577 - DNA, 25 bp, Homo sapien
cacagccggaaccgcttatcgcttg

SEQ ID NO: 545578 - DNA, 25 bp, Homo sapien
aaccgcttatcgcttggcttcccgg

SEQ ID NO: 545579 - DNA, 25 bp, Homo sapien
cctgaatgcagctgggcggctccat

SEQ ID NO: 545580 - DNA, 25 bp, Homo sapien
gcgtcgcctgcaaaagcttatccgt

SEQ ID NO: 545581 - DNA, 25 bp, Homo sapien
tctttaatcgggctgctactccgcc

SEQ ID NO: 545582 - DNA, 25 bp, Homo sapien
cggagctgactcctaccagggtgac

SEQ ID NO: 545583 - DNA, 25 bp, Homo sapien
ggctccggcaactactccagtggaa

SEQ ID NO: 545584 - DNA, 25 bp, Homo sapien
ctcttatgactattgccaaagtcat

SEQ ID NO: 545585 - DNA, 25 bp, Homo sapien
tttcactctgctgatacatccaagt

SEQ ID NO: 545586 - DNA, 25 bp, Homo sapien
ttgattttatagatgctgatttcac

SEQ ID NO: 545587 - DNA, 25 bp, Homo sapien
tgatttcactctgctgatacatcca

SEQ ID NO: 545588 - DNA, 25 bp, Homo sapien
ttgtcaaaataaataacatcacagt

SEQ ID NO: 545589 - DNA, 25 bp, Homo sapien
tcaaaataaataacatcacagtttt

SEQ ID NO: 545590 - DNA, 25 bp, Homo sapien
ctttgtcaaaataaataacatcaca

SEQ ID NO: 545591 - DNA, 25 bp, Homo sapien
tgtcaaaataaataacatcacagtt

SEQ ID NO: 545592 - DNA, 25 bp, Homo sapien
cagctggagcagaacccgagttaac

SEQ ID NO: 545593 - DNA, 25 bp, Homo sapien
tcatagctatctgttcctctttact

SEQ ID NO: 545594 - DNA, 25 bp, Homo sapien
atgctcacgtaactttgagactttc

SEQ ID NO: 545595 - DNA, 25 bp, Homo sapien
tcctctttacttcaactgaatcaac

SEQ ID NO: 545596 - DNA, 25 bp, Homo sapien
taactttgagactttcatagctatc

SEQ ID NO: 545597 - DNA, 25 bp, Homo sapien
gtccacgatgacatctgtcccatgg

SEQ ID NO: 545598 - DNA, 25 bp, Homo sapien
atgttgtccacgatgacatctgtcc

SEQ ID NO: 545599 - DNA, 25 bp, Homo sapien
gttgtccacgatgacatctgtccca

SEQ ID NO: 545600 - DNA, 25 bp, Homo sapien
tgtccacgatgacatctgtcccatg

SEQ ID NO: 545601 - DNA, 25 bp, Homo sapien
cagatgtacttgggcctgctggaca

SEQ ID NO: 545602 - DNA, 25 bp, Homo sapien
ttttctggtgaagacggctgcatct

SEQ ID NO: 545603 - DNA, 25 bp, Homo sapien
gatgtacttgggcctgctggacaga

SEQ ID NO: 545604 - DNA, 25 bp, Homo sapien
atttttctggtgaagacggctgcat

SEQ ID NO: 545605 - DNA, 25 bp, Homo sapien
tatttctaggaacacgacgacactg

SEQ ID NO: 545606 - DNA, 25 bp, Homo sapien
ccacagtgtttgagccagggcctaa

SEQ ID NO: 545607 - DNA, 25 bp, Homo sapien
taatgcactggcatccagagggtgg

SEQ ID NO: 545608 - DNA, 25 bp, Homo sapien
ggtagttggtatgcacaaatggccc

SEQ ID NO: 545609 - DNA, 25 bp, Homo sapien
taaaatgggttccatccagtacaag

SEQ ID NO: 545610 - DNA, 25 bp, Homo sapien
ttaactccgtcgtacagaactcaga

SEQ ID NO: 545611 - DNA, 25 bp, Homo sapien
taatgcaataacttgtgctaacggg

SEQ ID NO: 545612 - DNA, 25 bp, Homo sapien
tctaatatggcggaccagaatgtct

SEQ ID NO: 545613 - DNA, 25 bp, Homo sapien
gtccatgactttagaatgatagcaa

SEQ ID NO: 545614 - DNA, 25 bp, Homo sapien
gcaatttatcaaccaaagaatccgt

SEQ ID NO: 545615 - DNA, 25 bp, Homo sapien
caataaatgttccatccttatttag

SEQ ID NO: 545616 - DNA, 25 bp, Homo sapien
gttttgttgccgaaagtgaagtcca

SEQ ID NO: 545617 - DNA, 25 bp, Homo sapien
cgtttcaataactgcagcaatttcc

SEQ ID NO: 545618 - DNA, 25 bp, Homo sapien
taactgcagcaatttccttgaactg

SEQ ID NO: 545619 - DNA, 25 bp, Homo sapien
actgcagcaatttccttgaactgtc

SEQ ID NO: 545620 - DNA, 25 bp, Homo sapien
caataactgcagcaatttccttgaa

SEQ ID NO: 545621 - DNA, 25 bp, Homo sapien
ttagtgttacattctcaattactga

SEQ ID NO: 545622 - DNA, 25 bp, Homo sapien
ttaattatatctgactaccggagac

SEQ ID NO: 545623 - DNA, 25 bp, Homo sapien
caattactgaaggttgctgtaagaa

SEQ ID NO: 545624 - DNA, 25 bp, Homo sapien
tattaagtttgcattttagtgttac

SEQ ID NO: 545625 - DNA, 25 bp, Homo sapien
aaggagactggaggttgccaggagc

SEQ ID NO: 545626 - DNA, 25 bp, Homo sapien
gcagaaaggagactggaggttgcca

SEQ ID NO: 545627 - DNA, 25 bp, Homo sapien
gaagcagaaaggagactggaggttg

SEQ ID NO: 545628 - DNA, 25 bp, Homo sapien
gaaaggagactggaggttgccagga

SEQ ID NO: 545629 - DNA, 25 bp, Homo sapien
tttgtttcaaagcacggatatctat

SEQ ID NO: 545630 - DNA, 25 bp, Homo sapien
gtttcagaagtggatggatcaactg

SEQ ID NO: 545631 - DNA, 25 bp, Homo sapien
taagtctcagttccaagacactaat

SEQ ID NO: 545632 - DNA, 25 bp, Homo sapien
ggaggctaaagtggacggatcaact

SEQ ID NO: 545633 - DNA, 25 bp, Homo sapien
tgtggaatcgtcatttcaaagcact

SEQ ID NO: 545634 - DNA, 25 bp, Homo sapien
ctgaaactgtggaatcgtcatttca

SEQ ID NO: 545635 - DNA, 25 bp, Homo sapien
aagcacttggtctttacttggcctg

SEQ ID NO: 545636 - DNA, 25 bp, Homo sapien
caaagcacttggtctttacttggcc

SEQ ID NO: 545637 - DNA, 25 bp, Homo sapien
taaggatacttaagagatctgcaag

SEQ ID NO: 545638 - DNA, 25 bp, Homo sapien
gatctgcaagtgtctgagctcacag

SEQ ID NO: 545639 - DNA, 25 bp, Homo sapien
gtgtctgagctcacagccataccca

SEQ ID NO: 545640 - DNA, 25 bp, Homo sapien
ctgcaacgtaaggatacttaagaga

SEQ ID NO: 545641 - DNA, 25 bp, Homo sapien
acaaaataatacattagtagtaaca

SEQ ID NO: 545642 - DNA, 25 bp, Homo sapien
aataatacattagtagtaacattac

SEQ ID NO: 545643 - DNA, 25 bp, Homo sapien
ttaataagacaggacaaaataatac

SEQ ID NO: 545644 - DNA, 25 bp, Homo sapien
taataagacaggacaaaataataca

SEQ ID NO: 545645 - DNA, 25 bp, Homo sapien
caacttttagtttcaacgctggtca

SEQ ID NO: 545646 - DNA, 25 bp, Homo sapien
tcctttaacaggcttggagtatctt

SEQ ID NO: 545647 - DNA, 25 bp, Homo sapien
aatctcccctccaatgtataacgga

SEQ ID NO: 545648 - DNA, 25 bp, Homo sapien
tcttcattttaatactgctagagga

SEQ ID NO: 545649 - DNA, 25 bp, Homo sapien
attagcatgtatagtgataaggtgg

SEQ ID NO: 545650 - DNA, 25 bp, Homo sapien
tagcatgtatagtgataaggtggtt

SEQ ID NO: 545651 - DNA, 25 bp, Homo sapien
ttagcatgtatagtgataaggtggt

SEQ ID NO: 545652 - DNA, 25 bp, Homo sapien
gacagatacataccctgggtgatgt

SEQ ID NO: 545653 - DNA, 25 bp, Homo sapien
ggtgatgtgctatgcagtttacatg

SEQ ID NO: 545654 - DNA, 25 bp, Homo sapien
gtgctatgcagtttacatgtattac

SEQ ID NO: 545655 - DNA, 25 bp, Homo sapien
cctgggtgatgtgctatgcagttta

SEQ ID NO: 545656 - DNA, 25 bp, Homo sapien
taccatcaacattaaagtggcagag

SEQ ID NO: 545657 - DNA, 25 bp, Homo sapien
gagctgccatcaagacactgtgcaa

SEQ ID NO: 545658 - DNA, 25 bp, Homo sapien
tagcctgtacaactccttgatggaa

SEQ ID NO: 545659 - DNA, 25 bp, Homo sapien
gaaggcgtgcaatgctaagttccac

SEQ ID NO: 545660 - DNA, 25 bp, Homo sapien
cgctggatcacaaagtaaaagtcta

SEQ ID NO: 545661 - DNA, 25 bp, Homo sapien
caaagccctgagcttacagtcatga

SEQ ID NO: 545662 - DNA, 25 bp, Homo sapien
ccttgttgctaggacaggtggtgac

SEQ ID NO: 545663 - DNA, 25 bp, Homo sapien
gctgtggttctctgtattcgcagtc

SEQ ID NO: 545664 - DNA, 25 bp, Homo sapien
accttgcttttagcaccgtaagact

SEQ ID NO: 545665 - DNA, 25 bp, Homo sapien
ctcccctaccgcctcagaaggaaca

SEQ ID NO: 545666 - DNA, 25 bp, Homo sapien
tagcaccgtaagactagtttaggac

SEQ ID NO: 545667 - DNA, 25 bp, Homo sapien
gtaagactagtttaggacttctgac

SEQ ID NO: 545668 - DNA, 25 bp, Homo sapien
tccttgatctgcattcttcgggcta

SEQ ID NO: 545669 - DNA, 25 bp, Homo sapien
agcccaacaatccttgatctgcatt

SEQ ID NO: 545670 - DNA, 25 bp, Homo sapien
aataactgtcgcctaatcaaagccc

SEQ ID NO: 545671 - DNA, 25 bp, Homo sapien
tgttcctggcttcgaataactgtcg

SEQ ID NO: 545672 - DNA, 25 bp, Homo sapien
aatggcaacggctaccggctcaggt

SEQ ID NO: 545673 - DNA, 25 bp, Homo sapien
accggctcgcggacacaggactagg

SEQ ID NO: 545674 - DNA, 25 bp, Homo sapien
ccggctcaggtgcaaaagagaagga

SEQ ID NO: 545675 - DNA, 25 bp, Homo sapien
gagcaatgcaagagggacggctgaa

SEQ ID NO: 545676 - DNA, 25 bp, Homo sapien
tttcttgctccagagcctcgctgcc

SEQ ID NO: 545677 - DNA, 25 bp, Homo sapien
ctgaaacggaagcagaaacacaatt

SEQ ID NO: 545678 - DNA, 25 bp, Homo sapien
gctccagagcctcgctgcccactct

SEQ ID NO: 545679 - DNA, 25 bp, Homo sapien
aacacaatttagagaaacatctttc

SEQ ID NO: 545680 - DNA, 25 bp, Homo sapien
ggacttagcatccagcggcggctcg

SEQ ID NO: 545681 - DNA, 25 bp, Homo sapien
gcggcggctcgctggacgcctccat

SEQ ID NO: 545682 - DNA, 25 bp, Homo sapien
atcggacttagcatccagcggcggc

SEQ ID NO: 545683 - DNA, 25 bp, Homo sapien
acttagcatccagcggcggctcgct

SEQ ID NO: 545684 - DNA, 25 bp, Homo sapien
acgtcctgcccctagcggcctggcg

SEQ ID NO: 545685 - DNA, 25 bp, Homo sapien
gcccccagaccagcgcttccgcttc

SEQ ID NO: 545686 - DNA, 25 bp, Homo sapien
tgcggcccggactcgagagaacgcc

SEQ ID NO: 545687 - DNA, 25 bp, Homo sapien
ggcagcgtctgggacttgcggcccg

SEQ ID NO: 545688 - DNA, 25 bp, Homo sapien
ggagatactttgagaagagaagcgc

SEQ ID NO: 545689 - DNA, 25 bp, Homo sapien
taattaaatttaggatgccgcttcc

SEQ ID NO: 545690 - DNA, 25 bp, Homo sapien
acatatatcttaggagacattgagc

SEQ ID NO: 545691 - DNA, 25 bp, Homo sapien
tactttgagaagagaagcgctaatt

SEQ ID NO: 545692 - DNA, 25 bp, Homo sapien
actagaatctaatcaagggccgcct

SEQ ID NO: 545693 - DNA, 25 bp, Homo sapien
aactagaatctaatcaagggccgcc

SEQ ID NO: 545694 - DNA, 25 bp, Homo sapien
caactagaatctaatcaagggccgc

SEQ ID NO: 545695 - DNA, 25 bp, Homo sapien
tgtgctaggacaacctctgtaaggt

SEQ ID NO: 545696 - DNA, 25 bp, Homo sapien
tgagtgaccacgacaactttgtgag

SEQ ID NO: 545697 - DNA, 25 bp, Homo sapien
gctcaaccttggctgggaactacaa

SEQ ID NO: 545698 - DNA, 25 bp, Homo sapien
tagaaccagtgatgcccaatcttgg

SEQ ID NO: 545699 - DNA, 25 bp, Homo sapien
ttgagtgtatccctagcaagacagt

SEQ ID NO: 545700 - DNA, 25 bp, Homo sapien
tcagggatctggaacaaggcaattc

SEQ ID NO: 545701 - DNA, 25 bp, Homo sapien
tccctgctgggatgcaaactgtctt

SEQ ID NO: 545702 - DNA, 25 bp, Homo sapien
tgaagtcttaagcaaccctaacagg

SEQ ID NO: 545703 - DNA, 25 bp, Homo sapien
gatacatgacaaatcctgcttaaga

SEQ ID NO: 545704 - DNA, 25 bp, Homo sapien
catgcactgggttaggccctggata

SEQ ID NO: 545705 - DNA, 25 bp, Homo sapien
tcagtggttccttgctgttttcagg

SEQ ID NO: 545706 - DNA, 25 bp, Homo sapien
ccagatgtcttgaccgggttgcctc

SEQ ID NO: 545707 - DNA, 25 bp, Homo sapien
ctccggccttgctgcctggcaatgg

SEQ ID NO: 545708 - DNA, 25 bp, Homo sapien
tgggtagccacctggcgtctgtctc

SEQ ID NO: 545709 - DNA, 25 bp, Homo sapien
gctgcctggcaatgggtagccacct

SEQ ID NO: 545710 - DNA, 25 bp, Homo sapien
gtgctgcacggcgtcctccggcctt

SEQ ID NO: 545711 - DNA, 25 bp, Homo sapien
gggtacattcagggtactatggtca

SEQ ID NO: 545712 - DNA, 25 bp, Homo sapien
tgggtacattcagggtactatggtc

SEQ ID NO: 545713 - DNA, 25 bp, Homo sapien
caggcagtcagctatagagcccaca

SEQ ID NO: 545714 - DNA, 25 bp, Homo sapien
agctttgcaggcctttaagtgtctg

SEQ ID NO: 545715 - DNA, 25 bp, Homo sapien
acagctaataacagctgagccagga

SEQ ID NO: 545716 - DNA, 25 bp, Homo sapien
gaccccgctctattggaagcagaaa

SEQ ID NO: 545717 - DNA, 25 bp, Homo sapien
gcttctgataaatgcatgagttgtg

SEQ ID NO: 545718 - DNA, 25 bp, Homo sapien
tataaactcctagaagagaagttgc

SEQ ID NO: 545719 - DNA, 25 bp, Homo sapien
caaatagtgggtactataagagtgg

SEQ ID NO: 545720 - DNA, 25 bp, Homo sapien
tactgcaaggtacatcattgtagct

SEQ ID NO: 545721 - DNA, 25 bp, Homo sapien
cagaaatagtatacagagctcccat

SEQ ID NO: 545722 - DNA, 25 bp, Homo sapien
aataagttgaagacatgatgcccca

SEQ ID NO: 545723 - DNA, 25 bp, Homo sapien
caaaacaagtggatactctcctaca

SEQ ID NO: 545724 - DNA, 25 bp, Homo sapien
gtcctctattcaggagccaatccag

SEQ ID NO: 545725 - DNA, 25 bp, Homo sapien
tgaggccagataataaccctacaaa

SEQ ID NO: 545726 - DNA, 25 bp, Homo sapien
ccctacaaaggcctgtaagcattca

SEQ ID NO: 545727 - DNA, 25 bp, Homo sapien
caaactatacccatatatgctggca

SEQ ID NO: 545728 - DNA, 25 bp, Homo sapien
gctttgagcaagcttattggcacca

SEQ ID NO: 545729 - DNA, 25 bp, Homo sapien
ttttaatttctgtatagtctctctt

SEQ ID NO: 545730 - DNA, 25 bp, Homo sapien
tggtattctggaagctaacccacag

SEQ ID NO: 545731 - DNA, 25 bp, Homo sapien
tattctggaagctaacccacagtat

SEQ ID NO: 545732 - DNA, 25 bp, Homo sapien
tggaagctaacccacagtatctctc

SEQ ID NO: 545733 - DNA, 25 bp, Homo sapien
catctcgtgatgtttgtcatgtcgc

SEQ ID NO: 545734 - DNA, 25 bp, Homo sapien
taagctccatcattcacgtcgttgg

SEQ ID NO: 545735 - DNA, 25 bp, Homo sapien
tatctgcaccaaaaagcatctcgtg

SEQ ID NO: 545736 - DNA, 25 bp, Homo sapien
ccattgttgggtatttgacagtagc

SEQ ID NO: 545737 - DNA, 25 bp, Homo sapien
tacatgacccatgtacaaggtgcag

SEQ ID NO: 545738 - DNA, 25 bp, Homo sapien
tttggcccatggattagaataacag

SEQ ID NO: 545739 - DNA, 25 bp, Homo sapien
gctgcattcaaaggaaaattgctca

SEQ ID NO: 545740 - DNA, 25 bp, Homo sapien
aattacacgcaaagttgttggcaag

SEQ ID NO: 545741 - DNA, 25 bp, Homo sapien
ttccacagatgggcggaagccattt

SEQ ID NO: 545742 - DNA, 25 bp, Homo sapien
cagatgggcggaagccatttccaat

SEQ ID NO: 545743 - DNA, 25 bp, Homo sapien
tatcctgtaaaaacagctaagcatt

SEQ ID NO: 545744 - DNA, 25 bp, Homo sapien
taaaaacagctaagcattcaattgt

SEQ ID NO: 545745 - DNA, 25 bp, Homo sapien
tgaaactttattagaggtaacagta

SEQ ID NO: 545746 - DNA, 25 bp, Homo sapien
ctttattagaggtaacagtaacact

SEQ ID NO: 545747 - DNA, 25 bp, Homo sapien
tagaggtaacagtaacacttgttgg

SEQ ID NO: 545748 - DNA, 25 bp, Homo sapien
aacagtaacacttgttggcccatct

SEQ ID NO: 545749 - DNA, 25 bp, Homo sapien
tatattagtgttaaaaatctacaac

SEQ ID NO: 545750 - DNA, 25 bp, Homo sapien
tttatattagtgttaaaaatctaca

SEQ ID NO: 545751 - DNA, 25 bp, Homo sapien
atattagtgttaaaaatctacaaca

SEQ ID NO: 545752 - DNA, 25 bp, Homo sapien
ttatattagtgttaaaaatctacaa

SEQ ID NO: 545753 - DNA, 25 bp, Homo sapien
tgaatgtggagtccctaaagtagga

SEQ ID NO: 545754 - DNA, 25 bp, Homo sapien
gccaacatgttgaggcatgcagcca

SEQ ID NO: 545755 - DNA, 25 bp, Homo sapien
tgagatctgaatgactaagcctgtc

SEQ ID NO: 545756 - DNA, 25 bp, Homo sapien
attttaagcaggacaggaacttgct

SEQ ID NO: 545757 - DNA, 25 bp, Homo sapien
gacagtgttctatatctttttggga

SEQ ID NO: 545758 - DNA, 25 bp, Homo sapien
gagaggaatagccattactcgggta

SEQ ID NO: 545759 - DNA, 25 bp, Homo sapien
tagttggttacttggaatatgcatt

SEQ ID NO: 545760 - DNA, 25 bp, Homo sapien
gagttgggccaaaacacagagttga

SEQ ID NO: 545761 - DNA, 25 bp, Homo sapien
gatgtaggcacttagagctatacgc

SEQ ID NO: 545762 - DNA, 25 bp, Homo sapien
cacctccccttattgttggaataga

SEQ ID NO: 545763 - DNA, 25 bp, Homo sapien
gggagacatttcattacagctttaa

SEQ ID NO: 545764 - DNA, 25 bp, Homo sapien
actgggcatttctttggtgggagac

SEQ ID NO: 545765 - DNA, 25 bp, Homo sapien
gaggatgattggtagaggcttttat

SEQ ID NO: 545766 - DNA, 25 bp, Homo sapien
ccagatctcttgaaagtgacttctt

SEQ ID NO: 545767 - DNA, 25 bp, Homo sapien
gatctcttgaaagtgacttctttag

SEQ ID NO: 545768 - DNA, 25 bp, Homo sapien
ttctccagatctcttgaaagtgact

SEQ ID NO: 545769 - DNA, 25 bp, Homo sapien
gatctcttgcactggtagaatatgc

SEQ ID NO: 545770 - DNA, 25 bp, Homo sapien
tgatctcttgcactggtagaatatg

SEQ ID NO: 545771 - DNA, 25 bp, Homo sapien
ttgatctcttgcactggtagaatat

SEQ ID NO: 545772 - DNA, 25 bp, Homo sapien
cacaaggatccacacaggattacat

SEQ ID NO: 545773 - DNA, 25 bp, Homo sapien
ttgaggtttctcagccagtaggaag

SEQ ID NO: 545774 - DNA, 25 bp, Homo sapien
gaacagtggtgaatatctatagcac

SEQ ID NO: 545775 - DNA, 25 bp, Homo sapien
gatgtgtctcacatggcatcagaca

SEQ ID NO: 545776 - DNA, 25 bp, Homo sapien
ccaccacttgctgcaagaaacttgg

SEQ ID NO: 545777 - DNA, 25 bp, Homo sapien
cagccaacaggacctcttctcttat

SEQ ID NO: 545778 - DNA, 25 bp, Homo sapien
tgcaagaaacttgggcctaaggttc

SEQ ID NO: 545779 - DNA, 25 bp, Homo sapien
ttctgcccaattcatcctaactcct

SEQ ID NO: 545780 - DNA, 25 bp, Homo sapien
caaaaagtcgtgcatgaccctcaaa

SEQ ID NO: 545781 - DNA, 25 bp, Homo sapien
gaaggacaccacttaatgtgctggc

SEQ ID NO: 545782 - DNA, 25 bp, Homo sapien
caggtcaagtcgtggttagagaagc

SEQ ID NO: 545783 - DNA, 25 bp, Homo sapien
tctagctgagcgctaatgagagact

SEQ ID NO: 545784 - DNA, 25 bp, Homo sapien
tgggcagcaagtagcaagtcctcct

SEQ ID NO: 545785 - DNA, 25 bp, Homo sapien
aagatattaactagggctggatccc

SEQ ID NO: 545786 - DNA, 25 bp, Homo sapien
tgtaaaggcctatcagtgttgtccc

SEQ ID NO: 545787 - DNA, 25 bp, Homo sapien
cactgaccagatgagggctgtcctg

SEQ ID NO: 545788 - DNA, 25 bp, Homo sapien
ggcgatcatcaaacggcctaaactg

SEQ ID NO: 545789 - DNA, 25 bp, Homo sapien
gaattttgacgctcaccgcgagggc

SEQ ID NO: 545790 - DNA, 25 bp, Homo sapien
aaggaaccctccagcttgctcgaac

SEQ ID NO: 545791 - DNA, 25 bp, Homo sapien
tgtcctcaaaccacgaagggtggga

SEQ ID NO: 545792 - DNA, 25 bp, Homo sapien
cttggccgggaaaggtacaattgtg

SEQ ID NO: 545793 - DNA, 25 bp, Homo sapien
ggtacaattgtgtgcagctatttct

SEQ ID NO: 545794 - DNA, 25 bp, Homo sapien
gccgggaaaggtacaattgtgtgca

SEQ ID NO: 545795 - DNA, 25 bp, Homo sapien
ggctgggccggatcgcggcgggaga

SEQ ID NO: 545796 - DNA, 25 bp, Homo sapien
gttccagtcacttcaagcaactgtg

SEQ ID NO: 545797 - DNA, 25 bp, Homo sapien
ctaagttccagtcacttcaagcaac

SEQ ID NO: 545798 - DNA, 25 bp, Homo sapien
taagttccagtcacttcaagcaact

SEQ ID NO: 545799 - DNA, 25 bp, Homo sapien
aagttccagtcacttcaagcaactg

SEQ ID NO: 545800 - DNA, 25 bp, Homo sapien
caaaccatacagcaccaagacagtg

SEQ ID NO: 545801 - DNA, 25 bp, Homo sapien
ctggagccttgatgatagcccagta

SEQ ID NO: 545802 - DNA, 25 bp, Homo sapien
gccttgatgatagcccagtagaaat

SEQ ID NO: 545803 - DNA, 25 bp, Homo sapien
ttttgaagggaggtgccaaaccata

SEQ ID NO: 545804 - DNA, 25 bp, Homo sapien
gaagcgtgtagagtttttccacagt

SEQ ID NO: 545805 - DNA, 25 bp, Homo sapien
aagtttcagattgcggagcttgtcc

SEQ ID NO: 545806 - DNA, 25 bp, Homo sapien
agcttgtccctctgaagcgtgtaga

SEQ ID NO: 545807 - DNA, 25 bp, Homo sapien
tttcagattgcggagcttgtccctc

SEQ ID NO: 545808 - DNA, 25 bp, Homo sapien
ccaggtctatctgtggatcactttg

SEQ ID NO: 545809 - DNA, 25 bp, Homo sapien
tattccctttgggatccaggtctat

SEQ ID NO: 545810 - DNA, 25 bp, Homo sapien
taaactgcgggcaaagccttactgt

SEQ ID NO: 545811 - DNA, 25 bp, Homo sapien
ggctcttccactcttcgtcttccag

SEQ ID NO: 545812 - DNA, 25 bp, Homo sapien
gaagctaagatagtcctgcagcagc

SEQ ID NO: 545813 - DNA, 25 bp, Homo sapien
ctgcagcagctctcttgcccactct

SEQ ID NO: 545814 - DNA, 25 bp, Homo sapien
tgggggccaaatactttgcctggaa

SEQ ID NO: 545815 - DNA, 25 bp, Homo sapien
gctgaagctaagatagtcctgcagc

SEQ ID NO: 545816 - DNA, 25 bp, Homo sapien
cagcaaacactcatcatcactgata

SEQ ID NO: 545817 - DNA, 25 bp, Homo sapien
gcaaacactcatcatcactgatatc

SEQ ID NO: 545818 - DNA, 25 bp, Homo sapien
aaacactcatcatcactgatatcct

SEQ ID NO: 545819 - DNA, 25 bp, Homo sapien
tcactgatatcctttttgggaagtt

SEQ ID NO: 545820 - DNA, 25 bp, Homo sapien
ccaacttcttgattggctggctgat

SEQ ID NO: 545821 - DNA, 25 bp, Homo sapien
agtgttactataccaggagagctca

SEQ ID NO: 545822 - DNA, 25 bp, Homo sapien
acagtgttactataccaggagagct

SEQ ID NO: 545823 - DNA, 25 bp, Homo sapien
tttccaacttcttgattggctggct

SEQ ID NO: 545824 - DNA, 25 bp, Homo sapien
gcaatctcagagtgaaggtggaaga

SEQ ID NO: 545825 - DNA, 25 bp, Homo sapien
gatgcgaaggtatgagagtatagaa

SEQ ID NO: 545826 - DNA, 25 bp, Homo sapien
tcactgagaagtaaatcggagatgc

SEQ ID NO: 545827 - DNA, 25 bp, Homo sapien
aggtggaagacaagctggagttcac

SEQ ID NO: 545828 - DNA, 25 bp, Homo sapien
caggatatgggatagggacatgatc

SEQ ID NO: 545829 - DNA, 25 bp, Homo sapien
cagaggtttcaggatatgggatagg

SEQ ID NO: 545830 - DNA, 25 bp, Homo sapien
tagggacatgatctggtggaaactg

SEQ ID NO: 545831 - DNA, 25 bp, Homo sapien
atagggacatgatctggtggaaact

SEQ ID NO: 545832 - DNA, 25 bp, Homo sapien
cactatgatagtgtgattgctgcga

SEQ ID NO: 545833 - DNA, 25 bp, Homo sapien
tactggcagcatagtaggttcattt

SEQ ID NO: 545834 - DNA, 25 bp, Homo sapien
cagaacatctttatccggcgtgtga

SEQ ID NO: 545835 - DNA, 25 bp, Homo sapien
tgtagtctcatgagtccaccatcat

SEQ ID NO: 545836 - DNA, 25 bp, Homo sapien
ttaatgatcattccctatgagctgc

SEQ ID NO: 545837 - DNA, 25 bp, Homo sapien
tcaggaataagcagctcactccaca

SEQ ID NO: 545838 - DNA, 25 bp, Homo sapien
ggctttcgcaaagttgtagcaggca

SEQ ID NO: 545839 - DNA, 25 bp, Homo sapien
tgagtaactcatgaatttgcagcct

SEQ ID NO: 545840 - DNA, 25 bp, Homo sapien
ctgtcaaggcatttgttaggtcttt

SEQ ID NO: 545841 - DNA, 25 bp, Homo sapien
ccccagcgtaggtgccatctgtctg

SEQ ID NO: 545842 - DNA, 25 bp, Homo sapien
tcaaggcatttgttaggtctttcct

SEQ ID NO: 545843 - DNA, 25 bp, Homo sapien
gtgttttcccccagcgtaggtgcca

SEQ ID NO: 545844 - DNA, 25 bp, Homo sapien
ctgcatgtggccgaggagcatgggt

SEQ ID NO: 545845 - DNA, 25 bp, Homo sapien
tgcatgtggccgaggagcatgggtg

SEQ ID NO: 545846 - DNA, 25 bp, Homo sapien
ctcctcctctttgtgactgccttct

SEQ ID NO: 545847 - DNA, 25 bp, Homo sapien
ctctttgtgactgccttctgtggtt

SEQ ID NO: 545848 - DNA, 25 bp, Homo sapien
tctgtggttgttgggcagctccccc

SEQ ID NO: 545849 - DNA, 25 bp, Homo sapien
tcctctttgtgactgccttctgtgg

SEQ ID NO: 545850 - DNA, 25 bp, Homo sapien
aattgtatacaaggcagggtgtggc

SEQ ID NO: 545851 - DNA, 25 bp, Homo sapien
gactacatagtcatcactcctgttt

SEQ ID NO: 545852 - DNA, 25 bp, Homo sapien
ggtctctatttatgtggttcctatg

SEQ ID NO: 545853 - DNA, 25 bp, Homo sapien
caacagcattacgtgaaatgtgtca

SEQ ID NO: 545854 - DNA, 25 bp, Homo sapien
gatggaacaagggaatacaggctga

SEQ ID NO: 545855 - DNA, 25 bp, Homo sapien
ttaatcctaccaaaagagcaagcct

SEQ ID NO: 545856 - DNA, 25 bp, Homo sapien
tagaatcagttacctgaagccagtg

SEQ ID NO: 545857 - DNA, 25 bp, Homo sapien
aaaactgtgaatgctctgacttggg

SEQ ID NO: 545858 - DNA, 25 bp, Homo sapien
ttgggtagtttttcttatggcgtca

SEQ ID NO: 545859 - DNA, 25 bp, Homo sapien
ttcttatggcgtcatctgcctctct

SEQ ID NO: 545860 - DNA, 25 bp, Homo sapien
aatgctggtggttgactgtgaatcc

SEQ ID NO: 545861 - DNA, 25 bp, Homo sapien
gttttccgtatgctattctcttctg

SEQ ID NO: 545862 - DNA, 25 bp, Homo sapien
aaattaccagtgagctcaaatccag

SEQ ID NO: 545863 - DNA, 25 bp, Homo sapien
gactgagactacattaccaatctta

SEQ ID NO: 545864 - DNA, 25 bp, Homo sapien
tacaacctcgtcctgctgcataggc

SEQ ID NO: 545865 - DNA, 25 bp, Homo sapien
caaatccagtaggaatgactgagac

SEQ ID NO: 545866 - DNA, 25 bp, Homo sapien
attaggatatggataaatcttcccc

SEQ ID NO: 545867 - DNA, 25 bp, Homo sapien
tattaggatatggataaatcttccc

SEQ ID NO: 545868 - DNA, 25 bp, Homo sapien
tctattaggatatggataaatcttc

SEQ ID NO: 545869 - DNA, 25 bp, Homo sapien
ttttctattaggatatggataaatc

SEQ ID NO: 545870 - DNA, 25 bp, Homo sapien
agtatcaatacaatttgagttgaaa

SEQ ID NO: 545871 - DNA, 25 bp, Homo sapien
gtatcaatacaatttgagttgaaat

SEQ ID NO: 545872 - DNA, 25 bp, Homo sapien
gcagacttgggtttcaatgcaggta

SEQ ID NO: 545873 - DNA, 25 bp, Homo sapien
tgtgcttgccaagtggtagaccctg

SEQ ID NO: 545874 - DNA, 25 bp, Homo sapien
catctgtttgccatgtactgtgcga

SEQ ID NO: 545875 - DNA, 25 bp, Homo sapien
tagagtaagggctatcatcataccc

SEQ ID NO: 545876 - DNA, 25 bp, Homo sapien
cagggacagtggctacggtgacatc

SEQ ID NO: 545877 - DNA, 25 bp, Homo sapien
catctggtgtcctgaacgtggagaa

SEQ ID NO: 545878 - DNA, 25 bp, Homo sapien
gctgctcctctgatatcacgttgag

SEQ ID NO: 545879 - DNA, 25 bp, Homo sapien
tctttaggcactcgaagactccagc

SEQ ID NO: 545880 - DNA, 25 bp, Homo sapien
aaagtgacacagattcggaatttac

SEQ ID NO: 545881 - DNA, 25 bp, Homo sapien
gagccaaagactgcgttacccttca

SEQ ID NO: 545882 - DNA, 25 bp, Homo sapien
gatatgtcgtatcgaaggatttcgg

SEQ ID NO: 545883 - DNA, 25 bp, Homo sapien
tacccaacaaaagtagacagccatc

SEQ ID NO: 545884 - DNA, 25 bp, Homo sapien
tgatctttatgtgcgcaagctcagt

SEQ ID NO: 545885 - DNA, 25 bp, Homo sapien
tctttatgtgcgcaagctcagtcca

SEQ ID NO: 545886 - DNA, 25 bp, Homo sapien
aggatgatctttatgtgcgcaagct

SEQ ID NO: 545887 - DNA, 25 bp, Homo sapien
ctttatgtgcgcaagctcagtccag

SEQ ID NO: 545888 - DNA, 25 bp, Homo sapien
gaaagatgagtaacagatggaactg

SEQ ID NO: 545889 - DNA, 25 bp, Homo sapien
cctagagctagggtttattttggca

SEQ ID NO: 545890 - DNA, 25 bp, Homo sapien
tcagaaatatccattgatcctactc

SEQ ID NO: 545891 - DNA, 25 bp, Homo sapien
tgtatcttccttttactaactttga

SEQ ID NO: 545892 - DNA, 25 bp, Homo sapien
tgatgtaagcctccatacgaaagca

SEQ ID NO: 545893 - DNA, 25 bp, Homo sapien
ttctccttgcccgatcagctggacg

SEQ ID NO: 545894 - DNA, 25 bp, Homo sapien
ctggacggccaaccgccatgtgatg

SEQ ID NO: 545895 - DNA, 25 bp, Homo sapien
aaccgccatgtgatgtaagcctcca

SEQ ID NO: 545896 - DNA, 25 bp, Homo sapien
tcagcatcttgagagcacaagggaa

SEQ ID NO: 545897 - DNA, 25 bp, Homo sapien
gcattgtagtcttggtagaaccagt

SEQ ID NO: 545898 - DNA, 25 bp, Homo sapien
taagtaattcccaatagaaagctgc

SEQ ID NO: 545899 - DNA, 25 bp, Homo sapien
tggtgagcctttctgttcaattgca

SEQ ID NO: 545900 - DNA, 25 bp, Homo sapien
gaaaacttcccagaagctttcagca

SEQ ID NO: 545901 - DNA, 25 bp, Homo sapien
gttattcgtccatttctgaacaaag

SEQ ID NO: 545902 - DNA, 25 bp, Homo sapien
gttctcatcggccagacttgagtta

SEQ ID NO: 545903 - DNA, 25 bp, Homo sapien
tagtgctctcaagtgtgtaggaaaa

SEQ ID NO: 545904 - DNA, 25 bp, Homo sapien
tcagtgaagaccagcttacagtcat

SEQ ID NO: 545905 - DNA, 25 bp, Homo sapien
ttcagtgaagaccagcttacagtca

SEQ ID NO: 545906 - DNA, 25 bp, Homo sapien
catccatcaaagacggccagaagaa

SEQ ID NO: 545907 - DNA, 25 bp, Homo sapien
gagaacatccatcaaagacggccag

SEQ ID NO: 545908 - DNA, 25 bp, Homo sapien
aagacggccagaagaactcctgggt

SEQ ID NO: 545909 - DNA, 25 bp, Homo sapien
cagcaggagaacatccatcaaagac

SEQ ID NO: 545910 - DNA, 25 bp, Homo sapien
gctccacggcagcttggcagttaga

SEQ ID NO: 545911 - DNA, 25 bp, Homo sapien
ccaatggtcatgtccaggtagtaaa

SEQ ID NO: 545912 - DNA, 25 bp, Homo sapien
tctgtgttcgagtcaaggttgggca

SEQ ID NO: 545913 - DNA, 25 bp, Homo sapien
caagtagggatacataggagcagct

SEQ ID NO: 545914 - DNA, 25 bp, Homo sapien
tgcatagtcccgctagaaaagtccc

SEQ ID NO: 545915 - DNA, 25 bp, Homo sapien
gaaagtatggaacaaggctccctcc

SEQ ID NO: 545916 - DNA, 25 bp, Homo sapien
cagagaatgccttacgtggtccaaa

SEQ ID NO: 545917 - DNA, 25 bp, Homo sapien
gaagttgagcattgacacccaggag

SEQ ID NO: 545918 - DNA, 25 bp, Homo sapien
cagcgtcttcaggtaataaggtgga

SEQ ID NO: 545919 - DNA, 25 bp, Homo sapien
cagcagtgagctagaagtggaagcc

SEQ ID NO: 545920 - DNA, 25 bp, Homo sapien
gacattattagaaggacaggcagat

SEQ ID NO: 545921 - DNA, 25 bp, Homo sapien
caggcagatggtgtcactaatttgg

SEQ ID NO: 545922 - DNA, 25 bp, Homo sapien
tgtgactttcaatctgtcttctata

SEQ ID NO: 545923 - DNA, 25 bp, Homo sapien
cctgcaaatgtgtcgaatacagaca

SEQ ID NO: 545924 - DNA, 25 bp, Homo sapien
tacagacaattcactgtgactttca

SEQ ID NO: 545925 - DNA, 25 bp, Homo sapien
tgtgtcgaatacagacaattcactg

SEQ ID NO: 545926 - DNA, 25 bp, Homo sapien
cagttcacagccatctgtctttgta

SEQ ID NO: 545927 - DNA, 25 bp, Homo sapien
agttcacagccatctgtctttgtac

SEQ ID NO: 545928 - DNA, 25 bp, Homo sapien
tcagttcacagccatctgtctttgt

SEQ ID NO: 545929 - DNA, 25 bp, Homo sapien
tgtgaatctgaagctgtggaagttt

SEQ ID NO: 545930 - DNA, 25 bp, Homo sapien
gccacagctgttatgcactctgagg

SEQ ID NO: 545931 - DNA, 25 bp, Homo sapien
cactctgaggtacatgctgttctaa

SEQ ID NO: 545932 - DNA, 25 bp, Homo sapien
gatctggatggagaatacctctgtg

SEQ ID NO: 545933 - DNA, 25 bp, Homo sapien
ttcatctccatgaccaccagcacca

SEQ ID NO: 545934 - DNA, 25 bp, Homo sapien
tcatctccatgaccaccagcaccat

SEQ ID NO: 545935 - DNA, 25 bp, Homo sapien
tggggggaactcttgtttattcatc

SEQ ID NO: 545936 - DNA, 25 bp, Homo sapien
gggaactcttgtttattcatctcca

SEQ ID NO: 545937 - DNA, 25 bp, Homo sapien
gcagtttccagcattgtctacttga

SEQ ID NO: 545938 - DNA, 25 bp, Homo sapien
ccagcattgtctacttgatttgtag

SEQ ID NO: 545939 - DNA, 25 bp, Homo sapien
cagtttccagcattgtctacttgat

SEQ ID NO: 545940 - DNA, 25 bp, Homo sapien
tttccagcattgtctacttgatttg

SEQ ID NO: 545941 - DNA, 25 bp, Homo sapien
gcaggatgatgttacctctgtgact

SEQ ID NO: 545942 - DNA, 25 bp, Homo sapien
ttcggtactttaacctgtggatgct

SEQ ID NO: 545943 - DNA, 25 bp, Homo sapien
caggcaggatgatgttacctctgtg

SEQ ID NO: 545944 - DNA, 25 bp, Homo sapien
ctctgtgactgaagttcgctgaact

SEQ ID NO: 545945 - DNA, 25 bp, Homo sapien
tttccaggtgggctggctcccacag

SEQ ID NO: 545946 - DNA, 25 bp, Homo sapien
tggctcccacagtgctctgttaata

SEQ ID NO: 545947 - DNA, 25 bp, Homo sapien
gctcccacagtgctctgttaatacc

SEQ ID NO: 545948 - DNA, 25 bp, Homo sapien
tcccacagtgctctgttaataccat

SEQ ID NO: 545949 - DNA, 25 bp, Homo sapien
ctctgctgcttattcttggtgtctc

SEQ ID NO: 545950 - DNA, 25 bp, Homo sapien
tgctgcttattcttggtgtctccct

SEQ ID NO: 545951 - DNA, 25 bp, Homo sapien
tgcttattcttggtgtctccctcat

SEQ ID NO: 545952 - DNA, 25 bp, Homo sapien
tctgctgcttattcttggtgtctcc

SEQ ID NO: 545953 - DNA, 25 bp, Homo sapien
ggcatagcagaattgggtaatttct

SEQ ID NO: 545954 - DNA, 25 bp, Homo sapien
cacgagtgccccagaatgttatgag

SEQ ID NO: 545955 - DNA, 25 bp, Homo sapien
tagaaaagactgtggcatagcagaa

SEQ ID NO: 545956 - DNA, 25 bp, Homo sapien
tgggtacgtttgagggaatacagct

SEQ ID NO: 545957 - DNA, 25 bp, Homo sapien
gcttggtttggcacttccatggaag

SEQ ID NO: 545958 - DNA, 25 bp, Homo sapien
cttgcttaggaacgagtagttcctt

SEQ ID NO: 545959 - DNA, 25 bp, Homo sapien
tccttaggaatgtgtagatgcttgg

SEQ ID NO: 545960 - DNA, 25 bp, Homo sapien
agttccttaggaatgtgtagattcc

SEQ ID NO: 545961 - DNA, 25 bp, Homo sapien
atgtcttcttatagcatgtagacag

SEQ ID NO: 545962 - DNA, 25 bp, Homo sapien
tgtcttcttatagcatgtagacagc

SEQ ID NO: 545963 - DNA, 25 bp, Homo sapien
tcttcttatagcatgtagacagcat

SEQ ID NO: 545964 - DNA, 25 bp, Homo sapien
gtcttcttatagcatgtagacagca

SEQ ID NO: 545965 - DNA, 25 bp, Homo sapien
aagccgtgggaaagataaatgtcaa

SEQ ID NO: 545966 - DNA, 25 bp, Homo sapien
tagcaacatgtaccaagaacccctt

SEQ ID NO: 545967 - DNA, 25 bp, Homo sapien
taccagaagcatatcgtcatttcag

SEQ ID NO: 545968 - DNA, 25 bp, Homo sapien
ggattgtgtcaaagctcactagcca

SEQ ID NO: 545969 - DNA, 25 bp, Homo sapien
tcaagaggcaatatatgtcttcagc

SEQ ID NO: 545970 - DNA, 25 bp, Homo sapien
ccaaggttcgtatctgcatttcaga

SEQ ID NO: 545971 - DNA, 25 bp, Homo sapien
gtcttcagcgattgacatttggtca

SEQ ID NO: 545972 - DNA, 25 bp, Homo sapien
gtcattgccaaggttcgtatctgca

SEQ ID NO: 545973 - DNA, 25 bp, Homo sapien
tggctgaaatcacgacacctaagtc

SEQ ID NO: 545974 - DNA, 25 bp, Homo sapien
ctgtttgaagaagctcaatgcaatt

SEQ ID NO: 545975 - DNA, 25 bp, Homo sapien
gacaggtacaaacatgcccaagctg

SEQ ID NO: 545976 - DNA, 25 bp, Homo sapien
caccaaacacattaaggaagcaggg

SEQ ID NO: 545977 - DNA, 25 bp, Homo sapien
taaagagaaacctcccgtcaggatg

SEQ ID NO: 545978 - DNA, 25 bp, Homo sapien
tgctgctggccaaaggcttaggcca

SEQ ID NO: 545979 - DNA, 25 bp, Homo sapien
aaacctcccgtcaggatgtgagcag

SEQ ID NO: 545980 - DNA, 25 bp, Homo sapien
aaaggcttaggccagtgacagttgg

SEQ ID NO: 545981 - DNA, 25 bp, Homo sapien
tcttgagatcctgttccccatggcc

SEQ ID NO: 545982 - DNA, 25 bp, Homo sapien
ccaggtctcttgagatcctgttccc

SEQ ID NO: 545983 - DNA, 25 bp, Homo sapien
tctcttgagatcctgttccccatgg

SEQ ID NO: 545984 - DNA, 25 bp, Homo sapien
aggtctcttgagatcctgttcccca

SEQ ID NO: 545985 - DNA, 25 bp, Homo sapien
ggtcccacagcctgcataagacctg

SEQ ID NO: 545986 - DNA, 25 bp, Homo sapien
ccgttctgaaagatcttagtcatca

SEQ ID NO: 545987 - DNA, 25 bp, Homo sapien
ttagtcatcactactaggtcccaca

SEQ ID NO: 545988 - DNA, 25 bp, Homo sapien
gcctgcataagacctgctgcgattt

SEQ ID NO: 545989 - DNA, 25 bp, Homo sapien
ccgtacttcgaaggacaaaatattg

SEQ ID NO: 545990 - DNA, 25 bp, Homo sapien
tttctgatgtagagaggagccctag

SEQ ID NO: 545991 - DNA, 25 bp, Homo sapien
tgggagtaagtgcaaggtcccagtc

SEQ ID NO: 545992 - DNA, 25 bp, Homo sapien
tgtagaaagggctccacagtgctcc

SEQ ID NO: 545993 - DNA, 25 bp, Homo sapien
tccttgaaatgaagtaccattcaaa

SEQ ID NO: 545994 - DNA, 25 bp, Homo sapien
ttcaggaaagctgctttaatttttc

SEQ ID NO: 545995 - DNA, 25 bp, Homo sapien
atttttccttgaaatgaagtaccat

SEQ ID NO: 545996 - DNA, 25 bp, Homo sapien
acttcaggaaagctgctttaatttt

SEQ ID NO: 545997 - DNA, 25 bp, Homo sapien
aaatcatcctgttggctcctgccat

SEQ ID NO: 545998 - DNA, 25 bp, Homo sapien
tggcgttccattcttcatccacaaa

SEQ ID NO: 545999 - DNA, 25 bp, Homo sapien
gagaacaacaaatcatcctgttggc

SEQ ID NO: 546000 - DNA, 25 bp, Homo sapien
aaacagctgaagatgtggtagcaga

SEQ ID NO: 546001 - DNA, 25 bp, Homo sapien
tgtaccatataggacagaggattct

SEQ ID NO: 546002 - DNA, 25 bp, Homo sapien
tatacggtacctgcacacactctgc

SEQ ID NO: 546003 - DNA, 25 bp, Homo sapien
tgcagggcccgttttaggtactgtg

SEQ ID NO: 546004 - DNA, 25 bp, Homo sapien
ggcaaaagatatgaggctgtaccat

SEQ ID NO: 546005 - DNA, 25 bp, Homo sapien
tatagtccataagtcccctgacagc

SEQ ID NO: 546006 - DNA, 25 bp, Homo sapien
tataggacagctatagtccataagt

SEQ ID NO: 546007 - DNA, 25 bp, Homo sapien
cgttatagactataggacagctata

SEQ ID NO: 546008 - DNA, 25 bp, Homo sapien
tgtccatcttcagctggctcgttat

SEQ ID NO: 546009 - DNA, 25 bp, Homo sapien
tagtccaccaatctctgggaatttt

SEQ ID NO: 546010 - DNA, 25 bp, Homo sapien
taatatagtccaccaatctctggga

SEQ ID NO: 546011 - DNA, 25 bp, Homo sapien
gtttcagccaaggtccggtaatata

SEQ ID NO: 546012 - DNA, 25 bp, Homo sapien
ggtccggtaatatagtccaccaatc

SEQ ID NO: 546013 - DNA, 25 bp, Homo sapien
cacacaacaatgcatctgcagcagg

SEQ ID NO: 546014 - DNA, 25 bp, Homo sapien
acacacaacaatgcatctgcagcag

SEQ ID NO: 546015 - DNA, 25 bp, Homo sapien
cagtcgtcctggaatgacccccgat

SEQ ID NO: 546016 - DNA, 25 bp, Homo sapien
gtcgtcctggaatgacccccgatcc

SEQ ID NO: 546017 - DNA, 25 bp, Homo sapien
cgtcctggaatgacccccgatccct

SEQ ID NO: 546018 - DNA, 25 bp, Homo sapien
tcctggaatgacccccgatcccttc

SEQ ID NO: 546019 - DNA, 25 bp, Homo sapien
gtctggaaaactgccattcccactg

SEQ ID NO: 546020 - DNA, 25 bp, Homo sapien
ctggaaaactgccattcccactgtg

SEQ ID NO: 546021 - DNA, 25 bp, Homo sapien
gggccacattacttccactgtgatc

SEQ ID NO: 546022 - DNA, 25 bp, Homo sapien
ttcctgggccacattacttccactg

SEQ ID NO: 546023 - DNA, 25 bp, Homo sapien
gaagttccacacaagtgcatctcta

SEQ ID NO: 546024 - DNA, 25 bp, Homo sapien
cacaagtgcatctctattaaccatg

SEQ ID NO: 546025 - DNA, 25 bp, Homo sapien
tcatctgtgacctgaagttccacac

SEQ ID NO: 546026 - DNA, 25 bp, Homo sapien
tctctattaaccatgctgaccagtt

SEQ ID NO: 546027 - DNA, 25 bp, Homo sapien
tcctgttgtcatggtcgctcctctt

SEQ ID NO: 546028 - DNA, 25 bp, Homo sapien
atctcaattcatgaatcaagctgga

SEQ ID NO: 546029 - DNA, 25 bp, Homo sapien
attcatgaatcaagctggaattcct

SEQ ID NO: 546030 - DNA, 25 bp, Homo sapien
tgttgtcatggtcgctcctctttcc

SEQ ID NO: 546031 - DNA, 25 bp, Homo sapien
ctttcctcactttcaaagatatatt

SEQ ID NO: 546032 - DNA, 25 bp, Homo sapien
tctttcctcactttcaaagatatat

SEQ ID NO: 546033 - DNA, 25 bp, Homo sapien
tccttgccacatgaacgtctcacag

SEQ ID NO: 546034 - DNA, 25 bp, Homo sapien
ggagaatctcttgctcccatcagct

SEQ ID NO: 546035 - DNA, 25 bp, Homo sapien
cacagtatttgtagggaaggagtct

SEQ ID NO: 546036 - DNA, 25 bp, Homo sapien
cagaatcttagtctcacaaggctgc

SEQ ID NO: 546037 - DNA, 25 bp, Homo sapien
tatgtgaatttgctagaaagggcca

SEQ ID NO: 546038 - DNA, 25 bp, Homo sapien
atcaaatgacatccaccatctgtga

SEQ ID NO: 546039 - DNA, 25 bp, Homo sapien
accatctgtgaagggtattatgtct

SEQ ID NO: 546040 - DNA, 25 bp, Homo sapien
acatatgtgaatttgctagaaaggg

SEQ ID NO: 546041 - DNA, 25 bp, Homo sapien
tatcatcttgtgagtgaacttggga

SEQ ID NO: 546042 - DNA, 25 bp, Homo sapien
attgccctagggagagaattatcat

SEQ ID NO: 546043 - DNA, 25 bp, Homo sapien
gaagtgttgattgccctagggagag

SEQ ID NO: 546044 - DNA, 25 bp, Homo sapien
gcagttggaacccagatgatgactg

SEQ ID NO: 546045 - DNA, 25 bp, Homo sapien
tgaatttcagaactataaccaagtt

SEQ ID NO: 546046 - DNA, 25 bp, Homo sapien
gaggaggatgcttgaaaattccaac

SEQ ID NO: 546047 - DNA, 25 bp, Homo sapien
cctttctctggggtaatgaatttca

SEQ ID NO: 546048 - DNA, 25 bp, Homo sapien
aggaggatgcttgaaaattccaacc

SEQ ID NO: 546049 - DNA, 25 bp, Homo sapien
ttaaaatatctctgtcccatcactg

SEQ ID NO: 546050 - DNA, 25 bp, Homo sapien
aaatatctctgtcccatcactgaaa

SEQ ID NO: 546051 - DNA, 25 bp, Homo sapien
taaaatatctctgtcccatcactga

SEQ ID NO: 546052 - DNA, 25 bp, Homo sapien
atatctctgtcccatcactgaaatc

SEQ ID NO: 546053 - DNA, 25 bp, Homo sapien
tcactgtctccactagcattttcct

SEQ ID NO: 546054 - DNA, 25 bp, Homo sapien
actgtctccactagcattttcctcc

SEQ ID NO: 546055 - DNA, 25 bp, Homo sapien
cactgtctccactagcattttcctc

SEQ ID NO: 546056 - DNA, 25 bp, Homo sapien
gaaaggatgctaacgatatctacgt

SEQ ID NO: 546057 - DNA, 25 bp, Homo sapien
gtatctcaaagccaacttgcctgat

SEQ ID NO: 546058 - DNA, 25 bp, Homo sapien
ggaacagaaatgaacagccttttat

SEQ ID NO: 546059 - DNA, 25 bp, Homo sapien
gcattgaagctatcagccaacgtaa

SEQ ID NO: 546060 - DNA, 25 bp, Homo sapien
caagtcttgctaggaacggatgctg

SEQ ID NO: 546061 - DNA, 25 bp, Homo sapien
taggccggtactgcattcagtctag

SEQ ID NO: 546062 - DNA, 25 bp, Homo sapien
cctccagctgttagtagtttcctca

SEQ ID NO: 546063 - DNA, 25 bp, Homo sapien
tatggtgctctgtccaatgaatgcc

SEQ ID NO: 546064 - DNA, 25 bp, Homo sapien
tcaggcaaagtcccgactggaaaca

SEQ ID NO: 546065 - DNA, 25 bp, Homo sapien
aaagtcccgactggaaacatctcgg

SEQ ID NO: 546066 - DNA, 25 bp, Homo sapien
ggcaaagtcccgactggaaacatct

SEQ ID NO: 546067 - DNA, 25 bp, Homo sapien
tccagtctgaatggaggctcgggga

SEQ ID NO: 546068 - DNA, 25 bp, Homo sapien
ccttatgtctatagcctgcagaaca

SEQ ID NO: 546069 - DNA, 25 bp, Homo sapien
tatgtctatagcctgcagaacatct

SEQ ID NO: 546070 - DNA, 25 bp, Homo sapien
tgcaaaccttatgtctatagcctgc

SEQ ID NO: 546071 - DNA, 25 bp, Homo sapien
gaagatgctgcaaaccttatgtcta

SEQ ID NO: 546072 - DNA, 25 bp, Homo sapien
ccaggtgtgtgttgacttaggcaaa

SEQ ID NO: 546073 - DNA, 25 bp, Homo sapien
tcaatgtcaaacataggtcccctgc

SEQ ID NO: 546074 - DNA, 25 bp, Homo sapien
tgtgccactagagtctgatacattg

SEQ ID NO: 546075 - DNA, 25 bp, Homo sapien
acattgcaggtacccaggaaatatg

SEQ ID NO: 546076 - DNA, 25 bp, Homo sapien
gcttcagtttatggctcccatggca

SEQ ID NO: 546077 - DNA, 25 bp, Homo sapien
tctggcccgaaggagtcatctttga

SEQ ID NO: 546078 - DNA, 25 bp, Homo sapien
ccatggcaatcagtgctgctctcct

SEQ ID NO: 546079 - DNA, 25 bp, Homo sapien
tcatctttgatggttttcggttgtg

SEQ ID NO: 546080 - DNA, 25 bp, Homo sapien
actctctctttaacagcagatagat

SEQ ID NO: 546081 - DNA, 25 bp, Homo sapien
tactctctctttaacagcagataga

SEQ ID NO: 546082 - DNA, 25 bp, Homo sapien
ttactctctctttaacagcagatag

SEQ ID NO: 546083 - DNA, 25 bp, Homo sapien
tccatcccgggattttactctctct

SEQ ID NO: 546084 - DNA, 25 bp, Homo sapien
gaaagaggcttatgccgccctgttg

SEQ ID NO: 546085 - DNA, 25 bp, Homo sapien
gacttgagcacataaagggtaatta

SEQ ID NO: 546086 - DNA, 25 bp, Homo sapien
aattcgcttcagtggtagtaatgac

SEQ ID NO: 546087 - DNA, 25 bp, Homo sapien
ggtctttctccatagtttatctgtc

SEQ ID NO: 546088 - DNA, 25 bp, Homo sapien
cctatcaacttgaggtgccagaggc

SEQ ID NO: 546089 - DNA, 25 bp, Homo sapien
cactctaattacattgtgtctgcaa

SEQ ID NO: 546090 - DNA, 25 bp, Homo sapien
tataagcaccaaccaacactctaat

SEQ ID NO: 546091 - DNA, 25 bp, Homo sapien
caggtaccacttagggcaggaattc

SEQ ID NO: 546092 - DNA, 25 bp, Homo sapien
gacatgaagacagctctgattttgg

SEQ ID NO: 546093 - DNA, 25 bp, Homo sapien
aatggtgacatgaagacagctctga

SEQ ID NO: 546094 - DNA, 25 bp, Homo sapien
taaaaatggtgacatgaagacagct

SEQ ID NO: 546095 - DNA, 25 bp, Homo sapien
tcatctctggttgcctcagcacaag

SEQ ID NO: 546096 - DNA, 25 bp, Homo sapien
tttcacaattctgggttgaggagac

SEQ ID NO: 546097 - DNA, 25 bp, Homo sapien
caagatcatattgaacaagggtctc

SEQ ID NO: 546098 - DNA, 25 bp, Homo sapien
tgaggagacctgtgaaatgacaggc

SEQ ID NO: 546099 - DNA, 25 bp, Homo sapien
caaaaccgtgttctccaagatcata

SEQ ID NO: 546100 - DNA, 25 bp, Homo sapien
agcgagtaagccctggtgaactttt

SEQ ID NO: 546101 - DNA, 25 bp, Homo sapien
tctttagcgagtaagccctggtgaa

SEQ ID NO: 546102 - DNA, 25 bp, Homo sapien
gcgatgcatctttagcgagtaagcc

SEQ ID NO: 546103 - DNA, 25 bp, Homo sapien
catgctttaggcgatgcatctttag

SEQ ID NO: 546104 - DNA, 25 bp, Homo sapien
ctggaccaggaaccacttgttaggg

SEQ ID NO: 546105 - DNA, 25 bp, Homo sapien
tctggaccaggaaccacttgttagg

SEQ ID NO: 546106 - DNA, 25 bp, Homo sapien
ttctggaccaggaaccacttgttag

SEQ ID NO: 546107 - DNA, 25 bp, Homo sapien
cacatatgtactccaggccagagcc

SEQ ID NO: 546108 - DNA, 25 bp, Homo sapien
taggagatctatagactggagtctg

SEQ ID NO: 546109 - DNA, 25 bp, Homo sapien
ccagagccaggtataacaagcagag

SEQ ID NO: 546110 - DNA, 25 bp, Homo sapien
taagccgttgggaccacttgcacat

SEQ ID NO: 546111 - DNA, 25 bp, Homo sapien
agagaagggtctggatcttattcat

SEQ ID NO: 546112 - DNA, 25 bp, Homo sapien
ttgagggttgagagttgcatgcagg

SEQ ID NO: 546113 - DNA, 25 bp, Homo sapien
aaagcagccatagggttgagggttg

SEQ ID NO: 546114 - DNA, 25 bp, Homo sapien
cacagtgaagggcaaatcactattt

SEQ ID NO: 546115 - DNA, 25 bp, Homo sapien
cttgccagggctagggaaaagcagc

SEQ ID NO: 546116 - DNA, 25 bp, Homo sapien
ttgaaaggtttagcatacctctgct

SEQ ID NO: 546117 - DNA, 25 bp, Homo sapien
gagaaaaccaagagtatatgcgtca

SEQ ID NO: 546118 - DNA, 25 bp, Homo sapien
aaggtttagcatacctctgctgtac

SEQ ID NO: 546119 - DNA, 25 bp, Homo sapien
gaaaggtttagcatacctctgctgt

SEQ ID NO: 546120 - DNA, 25 bp, Homo sapien
ggtcatagatgtaaagatgagtaac

SEQ ID NO: 546121 - DNA, 25 bp, Homo sapien
taacagtgtttctactctcagtgga

SEQ ID NO: 546122 - DNA, 25 bp, Homo sapien
tgagtaacagtgtttctactctcag

SEQ ID NO: 546123 - DNA, 25 bp, Homo sapien
caccagggggcaatgcttggtcata

SEQ ID NO: 546124 - DNA, 25 bp, Homo sapien
acaaaaatgatctggctgctaggac

SEQ ID NO: 546125 - DNA, 25 bp, Homo sapien
tgtgtccctaccagttccacaggaa

SEQ ID NO: 546126 - DNA, 25 bp, Homo sapien
ccagttccacaggaacaaaaatgat

SEQ ID NO: 546127 - DNA, 25 bp, Homo sapien
gaacaaaaatgatctggctgctagg

SEQ ID NO: 546128 - DNA, 25 bp, Homo sapien
cttccattccagcaggggccttcaa

SEQ ID NO: 546129 - DNA, 25 bp, Homo sapien
ggttccaccaccaagacagcttcca

SEQ ID NO: 546130 - DNA, 25 bp, Homo sapien
taaggacacaagtgatgctcactgt

SEQ ID NO: 546131 - DNA, 25 bp, Homo sapien
gtaaggacacaagtgatgctcactg

SEQ ID NO: 546132 - DNA, 25 bp, Homo sapien
tggtaaggacacaagtgatgctcac

SEQ ID NO: 546133 - DNA, 25 bp, Homo sapien
ggtaaggacacaagtgatgctcact

SEQ ID NO: 546134 - DNA, 25 bp, Homo sapien
tctaataacttcttgtttgcattcg

SEQ ID NO: 546135 - DNA, 25 bp, Homo sapien
cctgtctaacaacgtctaataactt

SEQ ID NO: 546136 - DNA, 25 bp, Homo sapien
cgttatagccttcattatacctgga

SEQ ID NO: 546137 - DNA, 25 bp, Homo sapien
tcattatacctggatcagtgatgat

SEQ ID NO: 546138 - DNA, 25 bp, Homo sapien
agtgactaaaatgcaggccagtttt

SEQ ID NO: 546139 - DNA, 25 bp, Homo sapien
tagataatctaagaactcagggtgc

SEQ ID NO: 546140 - DNA, 25 bp, Homo sapien
ctcagggtgcatctgttgaaaagtg

SEQ ID NO: 546141 - DNA, 25 bp, Homo sapien
gggacacggtgtcgctctgtgacct

SEQ ID NO: 546142 - DNA, 25 bp, Homo sapien
ggatgggcagacatcgactggacta

SEQ ID NO: 546143 - DNA, 25 bp, Homo sapien
gactggactatcacaccctcaatcg

SEQ ID NO: 546144 - DNA, 25 bp, Homo sapien
tatgtggtccctccaagtctgttct

SEQ ID NO: 546145 - DNA, 25 bp, Homo sapien
ccctcaatcgtattcacatggcaga

SEQ ID NO: 546146 - DNA, 25 bp, Homo sapien
gacacaagcatctttcagctgacat

SEQ ID NO: 546147 - DNA, 25 bp, Homo sapien
tgccactgatggcttgtccctccat

SEQ ID NO: 546148 - DNA, 25 bp, Homo sapien
caattctttgacagggagagtactc

SEQ ID NO: 546149 - DNA, 25 bp, Homo sapien
atcccgggtcactggcgacacaagc

SEQ ID NO: 546150 - DNA, 25 bp, Homo sapien
ggagctctgcagtttattgtaaaac

SEQ ID NO: 546151 - DNA, 25 bp, Homo sapien
tattgtaaaactgctggttctgttg

SEQ ID NO: 546152 - DNA, 25 bp, Homo sapien
gtacatcactgcagagacgctctat

SEQ ID NO: 546153 - DNA, 25 bp, Homo sapien
cttcaattgagccaaagttcaggaa

SEQ ID NO: 546154 - DNA, 25 bp, Homo sapien
caactgtgtgtcaaaggaagacaac

SEQ ID NO: 546155 - DNA, 25 bp, Homo sapien
gaattccaaaggatgggttatgtaa

SEQ ID NO: 546156 - DNA, 25 bp, Homo sapien
ttaattaccctgcttctaggagaag

SEQ ID NO: 546157 - DNA, 25 bp, Homo sapien
caacgtgggctggataatcaaggcc

SEQ ID NO: 546158 - DNA, 25 bp, Homo sapien
tgatcctgccggtgtgacatttcaa

SEQ ID NO: 546159 - DNA, 25 bp, Homo sapien
gacatttcaatctcggcttcatctg

SEQ ID NO: 546160 - DNA, 25 bp, Homo sapien
atctggagaagcagcgtcatgtgag

SEQ ID NO: 546161 - DNA, 25 bp, Homo sapien
tacaacatctaattgatcctgccgg

SEQ ID NO: 546162 - DNA, 25 bp, Homo sapien
gaaaacactgcagatgatgtaaaag

SEQ ID NO: 546163 - DNA, 25 bp, Homo sapien
tggctgctctgaagatacatcctca

SEQ ID NO: 546164 - DNA, 25 bp, Homo sapien
gaagatacatcctcatggcattgtg

SEQ ID NO: 546165 - DNA, 25 bp, Homo sapien
gctctgaagatacatcctcatggca

SEQ ID NO: 546166 - DNA, 25 bp, Homo sapien
ggctgctctgaagatacatcctcat

SEQ ID NO: 546167 - DNA, 25 bp, Homo sapien
cgcgcccggccaatcgttgccattt

SEQ ID NO: 546168 - DNA, 25 bp, Homo sapien
gcgcccggccaatcgttgccatttt

SEQ ID NO: 546169 - DNA, 25 bp, Homo sapien
cttaaggcctaagcgttgtttcgct

SEQ ID NO: 546170 - DNA, 25 bp, Homo sapien
tggctggtgggttggttccagggct

SEQ ID NO: 546171 - DNA, 25 bp, Homo sapien
agcaccgctactgacttctcccagc

SEQ ID NO: 546172 - DNA, 25 bp, Homo sapien
taagcgttgtttcgctgcttctaga

SEQ ID NO: 546173 - DNA, 25 bp, Homo sapien
catccttgatcacgggacctttctc

SEQ ID NO: 546174 - DNA, 25 bp, Homo sapien
ccttgatcacgggacctttctcgct

SEQ ID NO: 546175 - DNA, 25 bp, Homo sapien
ttcccatccttgatcacgggacctt

SEQ ID NO: 546176 - DNA, 25 bp, Homo sapien
atcacgggacctttctcgctttcca

SEQ ID NO: 546177 - DNA, 25 bp, Homo sapien
aagggaatacattttgccactaaca

SEQ ID NO: 546178 - DNA, 25 bp, Homo sapien
cttatttgaaatgtaggaacttttg

SEQ ID NO: 546179 - DNA, 25 bp, Homo sapien
tgcaggggtcagggtaacatgaggg

SEQ ID NO: 546180 - DNA, 25 bp, Homo sapien
ggaatacattttgccactaacactt

SEQ ID NO: 546181 - DNA, 25 bp, Homo sapien
ctggcactgaattgtggccctcgtt

SEQ ID NO: 546182 - DNA, 25 bp, Homo sapien
caagtcccaagtaggcccctggcac

SEQ ID NO: 546183 - DNA, 25 bp, Homo sapien
gcactgaattgtggccctcgtttct

SEQ ID NO: 546184 - DNA, 25 bp, Homo sapien
gtcccaagtaggcccctggcactga

SEQ ID NO: 546185 - DNA, 25 bp, Homo sapien
ctgtggccgatgaggcatggtaaag

SEQ ID NO: 546186 - DNA, 25 bp, Homo sapien
tagaaagccactgcgtcccggaatc

SEQ ID NO: 546187 - DNA, 25 bp, Homo sapien
ccgatgaggcatggtaaaggcagga

SEQ ID NO: 546188 - DNA, 25 bp, Homo sapien
ccataaactagaaagccactgcgtc

SEQ ID NO: 546189 - DNA, 25 bp, Homo sapien
tgaccgttgacccatgtgagctgtg

SEQ ID NO: 546190 - DNA, 25 bp, Homo sapien
accgttgacccatgtgagctgtgca

SEQ ID NO: 546191 - DNA, 25 bp, Homo sapien
cgttgacccatgtgagctgtgcacc

SEQ ID NO: 546192 - DNA, 25 bp, Homo sapien
ctgaccgttgacccatgtgagctgt

SEQ ID NO: 546193 - DNA, 25 bp, Homo sapien
ctcttgggctctgaactgccttccc

SEQ ID NO: 546194 - DNA, 25 bp, Homo sapien
tgccttccccggacggcagttctaa

SEQ ID NO: 546195 - DNA, 25 bp, Homo sapien
acagtccttgcttcggtagccacca

SEQ ID NO: 546196 - DNA, 25 bp, Homo sapien
gcttcggtagccaccaaagcctgtc

SEQ ID NO: 546197 - DNA, 25 bp, Homo sapien
gggtcccggtgattctgcctccagg

SEQ ID NO: 546198 - DNA, 25 bp, Homo sapien
gataccacctccgtcggtttgcagc

SEQ ID NO: 546199 - DNA, 25 bp, Homo sapien
gcctccaggatcacagactgactct

SEQ ID NO: 546200 - DNA, 25 bp, Homo sapien
agcaccaaccaaacccacagtttca

SEQ ID NO: 546201 - DNA, 25 bp, Homo sapien
ctgttactggtgctactaaataccc

SEQ ID NO: 546202 - DNA, 25 bp, Homo sapien
taaataccccaacacaaacatcaca

SEQ ID NO: 546203 - DNA, 25 bp, Homo sapien
gtgtcaccaggagtagggacattca

SEQ ID NO: 546204 - DNA, 25 bp, Homo sapien
ccttttcagtgtcaccaggagtagg

SEQ ID NO: 546205 - DNA, 25 bp, Homo sapien
cagaccaaatggttatgtatatttt

SEQ ID NO: 546206 - DNA, 25 bp, Homo sapien
aaatatatacctctttacctcatgt

SEQ ID NO: 546207 - DNA, 25 bp, Homo sapien
tatacctctttacctcatgtctcag

SEQ ID NO: 546208 - DNA, 25 bp, Homo sapien
cctcatgtctcagtaattaattcaa

SEQ ID NO: 546209 - DNA, 25 bp, Homo sapien
tccacggaacataaatcgagacttc

SEQ ID NO: 546210 - DNA, 25 bp, Homo sapien
cgagacttccatctagctaaaaaag

SEQ ID NO: 546211 - DNA, 25 bp, Homo sapien
tgtcctttcaggctcggtgcttctg

SEQ ID NO: 546212 - DNA, 25 bp, Homo sapien
tgtgttgcctttcacttcgcatcat

SEQ ID NO: 546213 - DNA, 25 bp, Homo sapien
tcatggcctaaaactactccatggc

SEQ ID NO: 546214 - DNA, 25 bp, Homo sapien
tttggtctgttgtgaccctcatggc

SEQ ID NO: 546215 - DNA, 25 bp, Homo sapien
cctcatggcctaaaactactccatg

SEQ ID NO: 546216 - DNA, 25 bp, Homo sapien
ggcttttctctgagcaatctttcag

SEQ ID NO: 546217 - DNA, 25 bp, Homo sapien
ctcaaattcaattttagtgccaatt

SEQ ID NO: 546218 - DNA, 25 bp, Homo sapien
ccaattttgtttagcacagtcttct

SEQ ID NO: 546219 - DNA, 25 bp, Homo sapien
caattttagtgccaattttgtttag

SEQ ID NO: 546220 - DNA, 25 bp, Homo sapien
acctctctgtacttctcaaattcaa

SEQ ID NO: 546221 - DNA, 25 bp, Homo sapien
tatacagcttggatcacatgagtct

SEQ ID NO: 546222 - DNA, 25 bp, Homo sapien
gaagggaaatcagaatcgccgagcc

SEQ ID NO: 546223 - DNA, 25 bp, Homo sapien
ggccccagtagaaaatcaagtgtta

SEQ ID NO: 546224 - DNA, 25 bp, Homo sapien
tttcctcagagaagcagtaggtccc

SEQ ID NO: 546225 - DNA, 25 bp, Homo sapien
gaatcaagggcttctggcgagcagc

SEQ ID NO: 546226 - DNA, 25 bp, Homo sapien
taactgctgccatgtcaaccagtgg

SEQ ID NO: 546227 - DNA, 25 bp, Homo sapien
tcaggtttgcccagaagtcaacgtt

SEQ ID NO: 546228 - DNA, 25 bp, Homo sapien
gctttcctaatacccacgacgtgca

SEQ ID NO: 546229 - DNA, 25 bp, Homo sapien
ggttctctcggttcaggaggtccaa

SEQ ID NO: 546230 - DNA, 25 bp, Homo sapien
tctgtaatcatctctcgggcaggag

SEQ ID NO: 546231 - DNA, 25 bp, Homo sapien
gaaaggatcctttactgtcccacgc

SEQ ID NO: 546232 - DNA, 25 bp, Homo sapien
gaaatcttccgcacattggacacgg

SEQ ID NO: 546233 - DNA, 25 bp, Homo sapien
tagccgatggtgatgtagcccgagc

SEQ ID NO: 546234 - DNA, 25 bp, Homo sapien
cgctctggtcggtgctgctggcaaa

SEQ ID NO: 546235 - DNA, 25 bp, Homo sapien
tctttccgcaaacggtgatgcgcgc

SEQ ID NO: 546236 - DNA, 25 bp, Homo sapien
taatagcgcgaggtgtagcgctccg

SEQ ID NO: 546237 - DNA, 25 bp, Homo sapien
gctccgagtagccaagcggcagcag

SEQ ID NO: 546238 - DNA, 25 bp, Homo sapien
agaggcgccctcctgctgttcgggc

SEQ ID NO: 546239 - DNA, 25 bp, Homo sapien
gcgagccctccttgtgcaccccgcg

SEQ ID NO: 546240 - DNA, 25 bp, Homo sapien
actgcggctagccagctccagcgtg

SEQ ID NO: 546241 - DNA, 25 bp, Homo sapien
tggcagctcgaagtactcggcctcg

SEQ ID NO: 546242 - DNA, 25 bp, Homo sapien
aagaagcggcctttgctgtcccggg

SEQ ID NO: 546243 - DNA, 25 bp, Homo sapien
gctgctgctgcgtgaacatgcgcca

SEQ ID NO: 546244 - DNA, 25 bp, Homo sapien
tagtcgggcagcacgagctgcaagt

SEQ ID NO: 546245 - DNA, 25 bp, Homo sapien
gctccacgatgtcggggaagagcgg

SEQ ID NO: 546246 - DNA, 25 bp, Homo sapien
ggccccccacgttcagctccacgat

SEQ ID NO: 546247 - DNA, 25 bp, Homo sapien
ccacgatgtcggggaagagcggtgg

SEQ ID NO: 546248 - DNA, 25 bp, Homo sapien
gccccccacgttcagctccacgatg

SEQ ID NO: 546249 - DNA, 25 bp, Homo sapien
gtaatccacgtgtgctgtccgccag

SEQ ID NO: 546250 - DNA, 25 bp, Homo sapien
ccccgttgggtaatccacgtgtgct

SEQ ID NO: 546251 - DNA, 25 bp, Homo sapien
cgttgggtaatccacgtgtgctgtc

SEQ ID NO: 546252 - DNA, 25 bp, Homo sapien
cacgtgtgctgtccgccagagccat

SEQ ID NO: 546253 - DNA, 25 bp, Homo sapien
cgagcggtgcgagcgcgccgctgtg

SEQ ID NO: 546254 - DNA, 25 bp, Homo sapien
cagtggcaggaagccgcgctgcact

SEQ ID NO: 546255 - DNA, 25 bp, Homo sapien
gcactcaggagctgcaaccgccttc

SEQ ID NO: 546256 - DNA, 25 bp, Homo sapien
cgccacctcctagagccgcgcggag

SEQ ID NO: 546257 - DNA, 25 bp, Homo sapien
ggtggggagcggggactcgatttgc

SEQ ID NO: 546258 - DNA, 25 bp, Homo sapien
gtggggagcggggactcgatttgca

SEQ ID NO: 546259 - DNA, 25 bp, Homo sapien
tggggagcggggactcgatttgcat

SEQ ID NO: 546260 - DNA, 25 bp, Homo sapien
aggtggggagcggggactcgatttg

SEQ ID NO: 546261 - DNA, 25 bp, Homo sapien
ttccaccacttatcatggtgcttga

SEQ ID NO: 546262 - DNA, 25 bp, Homo sapien
tcatggtgcttgacaagtcttccca

SEQ ID NO: 546263 - DNA, 25 bp, Homo sapien
ggtgcttgacaagtcttcccaataa

SEQ ID NO: 546264 - DNA, 25 bp, Homo sapien
cattattttccaccacttatcatgg

SEQ ID NO: 546265 - DNA, 25 bp, Homo sapien
tacttagaaagaagggctgattcaa

SEQ ID NO: 546266 - DNA, 25 bp, Homo sapien
gacattgggttttaaagatctcatc

SEQ ID NO: 546267 - DNA, 25 bp, Homo sapien
gaaagaagggctgattcaactgcag

SEQ ID NO: 546268 - DNA, 25 bp, Homo sapien
cctagagttctctaatatgctgaat

SEQ ID NO: 546269 - DNA, 25 bp, Homo sapien
tatcgtggtatctgtgtgtaatttt

SEQ ID NO: 546270 - DNA, 25 bp, Homo sapien
gctccctggactgttgttgggcccc

SEQ ID NO: 546271 - DNA, 25 bp, Homo sapien
agcagaaactacctgtgctccctgg

SEQ ID NO: 546272 - DNA, 25 bp, Homo sapien
agtcaggagcagaaactacctgtgc

SEQ ID NO: 546273 - DNA, 25 bp, Homo sapien
gtaaagaaagatccagggacactgg

SEQ ID NO: 546274 - DNA, 25 bp, Homo sapien
tgacaaggatgggatcaatacatgt

SEQ ID NO: 546275 - DNA, 25 bp, Homo sapien
tcatagaaatggaatgccagctatt

SEQ ID NO: 546276 - DNA, 25 bp, Homo sapien
ggagagtatattctggagctcacat

SEQ ID NO: 546277 - DNA, 25 bp, Homo sapien
ttgcgttgctgacccacctccaagt

SEQ ID NO: 546278 - DNA, 25 bp, Homo sapien
tgcacctctgcgtgtttgctgcgtg

SEQ ID NO: 546279 - DNA, 25 bp, Homo sapien
tttgcgttgctgacccacctccaag

SEQ ID NO: 546280 - DNA, 25 bp, Homo sapien
tgcgtgtttgctgcgtgctgcttct

SEQ ID NO: 546281 - DNA, 25 bp, Homo sapien
tgctcgccagattcaccctttcaga

SEQ ID NO: 546282 - DNA, 25 bp, Homo sapien
gagaacagctaagccatgtgaaagt

SEQ ID NO: 546283 - DNA, 25 bp, Homo sapien
gatacagtccaggttgaccacaaca

SEQ ID NO: 546284 - DNA, 25 bp, Homo sapien
tccagaatctctcacagtgggtcgc

SEQ ID NO: 546285 - DNA, 25 bp, Homo sapien
atctgctcccatgacaacacttaac

SEQ ID NO: 546286 - DNA, 25 bp, Homo sapien
gatgttcctgaaccgctgatttgca

SEQ ID NO: 546287 - DNA, 25 bp, Homo sapien
cttaaccaaagtggggatgttcctg

SEQ ID NO: 546288 - DNA, 25 bp, Homo sapien
tgacaacacttaaccaaagtgggga

SEQ ID NO: 546289 - DNA, 25 bp, Homo sapien
tccctgaacccattgtctgcactgc

SEQ ID NO: 546290 - DNA, 25 bp, Homo sapien
tgaatgatctttgtggttaatctga

SEQ ID NO: 546291 - DNA, 25 bp, Homo sapien
ccactctactccctgaacccattgt

SEQ ID NO: 546292 - DNA, 25 bp, Homo sapien
tgatctttgtggttaatctgaccat

SEQ ID NO: 546293 - DNA, 25 bp, Homo sapien
ttttcactttctattgggttcagtc

SEQ ID NO: 546294 - DNA, 25 bp, Homo sapien
tcggtggtacctggtgacaacaggt

SEQ ID NO: 546295 - DNA, 25 bp, Homo sapien
ttcagtccaggtcttcggtggtacc

SEQ ID NO: 546296 - DNA, 25 bp, Homo sapien
tcactttctattgggttcagtccag

SEQ ID NO: 546297 - DNA, 25 bp, Homo sapien
tcaccaccttctgtataagataagc

SEQ ID NO: 546298 - DNA, 25 bp, Homo sapien
tgtgtccattatgacgctgccagat

SEQ ID NO: 546299 - DNA, 25 bp, Homo sapien
taagctttttgaggcaggaaccatc

SEQ ID NO: 546300 - DNA, 25 bp, Homo sapien
cagtgctggactcatagtaagaact

SEQ ID NO: 546301 - DNA, 25 bp, Homo sapien
gtgattaacgatgagcatctgctcg

SEQ ID NO: 546302 - DNA, 25 bp, Homo sapien
gctccctttcaagtgattaacgatg

SEQ ID NO: 546303 - DNA, 25 bp, Homo sapien
tcaggtctgccaagtcttggacgtc

SEQ ID NO: 546304 - DNA, 25 bp, Homo sapien
ctgctcgacattaggcgcaaatacc

SEQ ID NO: 546305 - DNA, 25 bp, Homo sapien
gcatagccccactggagcgctggcg

SEQ ID NO: 546306 - DNA, 25 bp, Homo sapien
ggcgcgttggcgatggggtcccagg

SEQ ID NO: 546307 - DNA, 25 bp, Homo sapien
gcggattccgctctggcgcatagcc

SEQ ID NO: 546308 - DNA, 25 bp, Homo sapien
gatctgtccgctgaacctgcgcatc

SEQ ID NO: 546309 - DNA, 25 bp, Homo sapien
ccaaaacgccatatgtgttgcctaa

SEQ ID NO: 546310 - DNA, 25 bp, Homo sapien
cattgcatcttcatcggagctggag

SEQ ID NO: 546311 - DNA, 25 bp, Homo sapien
cagccttggctaggatgccgctgct

SEQ ID NO: 546312 - DNA, 25 bp, Homo sapien
tttgagatccggatacagcgtgggc

SEQ ID NO: 546313 - DNA, 25 bp, Homo sapien
cagatcttccgtgcagatgatgcca

SEQ ID NO: 546314 - DNA, 25 bp, Homo sapien
gccatatttaccaagcgttcgagca

SEQ ID NO: 546315 - DNA, 25 bp, Homo sapien
ccaagcgttcgagcaatcaaagcgt

SEQ ID NO: 546316 - DNA, 25 bp, Homo sapien
agatcttccgtgcagatgatgccat

SEQ ID NO: 546317 - DNA, 25 bp, Homo sapien
ttgttaagcttcacaaagtttccac

SEQ ID NO: 546318 - DNA, 25 bp, Homo sapien
aagtttccactgaagatttgacgaa

SEQ ID NO: 546319 - DNA, 25 bp, Homo sapien
ttgacgaaggcgaagaagctgcaac

SEQ ID NO: 546320 - DNA, 25 bp, Homo sapien
atttgacgaaggcgaagaagctgca

SEQ ID NO: 546321 - DNA, 25 bp, Homo sapien
tagaagttgccggctttgcttgcca

SEQ ID NO: 546322 - DNA, 25 bp, Homo sapien
atagaagttgccggctttgcttgcc

SEQ ID NO: 546323 - DNA, 25 bp, Homo sapien
aggtacatagaagttgccggctttg

SEQ ID NO: 546324 - DNA, 25 bp, Homo sapien
tacatagaagttgccggctttgctt

SEQ ID NO: 546325 - DNA, 25 bp, Homo sapien
taagttccgtatatctgtctatatt

SEQ ID NO: 546326 - DNA, 25 bp, Homo sapien
ttaagttccgtatatctgtctatat

SEQ ID NO: 546327 - DNA, 25 bp, Homo sapien
agttccgtatatctgtctatattcc

SEQ ID NO: 546328 - DNA, 25 bp, Homo sapien
aagttccgtatatctgtctatattc

SEQ ID NO: 546329 - DNA, 25 bp, Homo sapien
ggtagattgctgctcataagtgaca

SEQ ID NO: 546330 - DNA, 25 bp, Homo sapien
tagctcttgacccagtaggatattt

SEQ ID NO: 546331 - DNA, 25 bp, Homo sapien
ccccgagggtgattctagctcttga

SEQ ID NO: 546332 - DNA, 25 bp, Homo sapien
agatggagtactgtaaatccccgag

SEQ ID NO: 546333 - DNA, 25 bp, Homo sapien
tgcagccgagctcgttttgagagac

SEQ ID NO: 546334 - DNA, 25 bp, Homo sapien
gaagcagaacacactcttagagagc

SEQ ID NO: 546335 - DNA, 25 bp, Homo sapien
gaatcctggctaacctcctcattga

SEQ ID NO: 546336 - DNA, 25 bp, Homo sapien
tgactccattgggacgaatcctggc

SEQ ID NO: 546337 - DNA, 25 bp, Homo sapien
tatcccacctttgcttgaaggacct

SEQ ID NO: 546338 - DNA, 25 bp, Homo sapien
gaaggacctcagtcattccacacag

SEQ ID NO: 546339 - DNA, 25 bp, Homo sapien
tccacacagagaattggcctcaatt

SEQ ID NO: 546340 - DNA, 25 bp, Homo sapien
tagattagagacaacttcgtgtttg

SEQ ID NO: 546341 - DNA, 25 bp, Homo sapien
gatttgaactcgagccatctctgct

SEQ ID NO: 546342 - DNA, 25 bp, Homo sapien
tgtggccctcatacatcatactgtg

SEQ ID NO: 546343 - DNA, 25 bp, Homo sapien
ctaacagtagatggaacctggaacc

SEQ ID NO: 546344 - DNA, 25 bp, Homo sapien
tgtagctctgggaagtcctgaactg

SEQ ID NO: 546345 - DNA, 25 bp, Homo sapien
tggccatagtatacggaggagagct

SEQ ID NO: 546346 - DNA, 25 bp, Homo sapien
tgtaatcaagagacctggagggccc

SEQ ID NO: 546347 - DNA, 25 bp, Homo sapien
tcaggtgcccttcaaatcagacatt

SEQ ID NO: 546348 - DNA, 25 bp, Homo sapien
caaacgtatggtaaaatgcagccca

SEQ ID NO: 546349 - DNA, 25 bp, Homo sapien
cggactggcggctccgcgcatgctc

SEQ ID NO: 546350 - DNA, 25 bp, Homo sapien
cctcgagaggctccggaagtactgg

SEQ ID NO: 546351 - DNA, 25 bp, Homo sapien
ctctggagctgacgcgcaggggcaa

SEQ ID NO: 546352 - DNA, 25 bp, Homo sapien
accggcgtcgcaggcctcgagaggc

SEQ ID NO: 546353 - DNA, 25 bp, Homo sapien
ttactgggcgaccaactcgctctgg

SEQ ID NO: 546354 - DNA, 25 bp, Homo sapien
gaacctgatccgaagtccttattgg

SEQ ID NO: 546355 - DNA, 25 bp, Homo sapien
gcagtcctggttagaccgggaagat

SEQ ID NO: 546356 - DNA, 25 bp, Homo sapien
cagttttgccctcaaaagtcgcgca

SEQ ID NO: 546357 - DNA, 25 bp, Homo sapien
gtgaataatcctgtgattgacaaaa

SEQ ID NO: 546358 - DNA, 25 bp, Homo sapien
taatcctgtgattgacaaaatagtg

SEQ ID NO: 546359 - DNA, 25 bp, Homo sapien
gtgttttgaagcattcttgtctcat

SEQ ID NO: 546360 - DNA, 25 bp, Homo sapien
gatagtggtggcatttgaaagttga

SEQ ID NO: 546361 - DNA, 25 bp, Homo sapien
ttctaatacaacaggctttattctg

SEQ ID NO: 546362 - DNA, 25 bp, Homo sapien
tctaatacaacaggctttattctgt

SEQ ID NO: 546363 - DNA, 25 bp, Homo sapien
taatacaacaggctttattctgttc

SEQ ID NO: 546364 - DNA, 25 bp, Homo sapien
tacaacaggctttattctgttctac

SEQ ID NO: 546365 - DNA, 25 bp, Homo sapien
gcccaagatgagagttgtaaccatg

SEQ ID NO: 546366 - DNA, 25 bp, Homo sapien
aaccattgtttactcaggcatccag

SEQ ID NO: 546367 - DNA, 25 bp, Homo sapien
attaatatgattaggccagccatgg

SEQ ID NO: 546368 - DNA, 25 bp, Homo sapien
cagtaatagccagccttctagagca

SEQ ID NO: 546369 - DNA, 25 bp, Homo sapien
cagttatgtaggacctttggaccca

SEQ ID NO: 546370 - DNA, 25 bp, Homo sapien
ccaaagtgagcgagttaggtgatct

SEQ ID NO: 546371 - DNA, 25 bp, Homo sapien
ggacccagggtcctacagatagata

SEQ ID NO: 546372 - DNA, 25 bp, Homo sapien
gaaattcgtactatattggccaaag

SEQ ID NO: 546373 - DNA, 25 bp, Homo sapien
tgcacttctccgagagaggacaggt

SEQ ID NO: 546374 - DNA, 25 bp, Homo sapien
gagccagacaagctttcaaggtcct

SEQ ID NO: 546375 - DNA, 25 bp, Homo sapien
ttctgttaagatcaccaagtagctg

SEQ ID NO: 546376 - DNA, 25 bp, Homo sapien
cacaaagctgtcagcgcagtggaag

SEQ ID NO: 546377 - DNA, 25 bp, Homo sapien
tgccaaccagatgttactggtctgt

SEQ ID NO: 546378 - DNA, 25 bp, Homo sapien
caggcttttagcaccgaagtgtggt

SEQ ID NO: 546379 - DNA, 25 bp, Homo sapien
cagctagtagtaatgaagtcaggtc

SEQ ID NO: 546380 - DNA, 25 bp, Homo sapien
tgaaccccggttctgctgactgaat

SEQ ID NO: 546381 - DNA, 25 bp, Homo sapien
tttgctgccctttgagcaatatgac

SEQ ID NO: 546382 - DNA, 25 bp, Homo sapien
agatgattcaagaacatgctttcaa

SEQ ID NO: 546383 - DNA, 25 bp, Homo sapien
ttgagaaaccaaaacatagccacgc

SEQ ID NO: 546384 - DNA, 25 bp, Homo sapien
gctattgttatagatgtaggctggg

SEQ ID NO: 546385 - DNA, 25 bp, Homo sapien
gataagctcttacttcactttcgga

SEQ ID NO: 546386 - DNA, 25 bp, Homo sapien
aggcaaacaggctggccaaagtgtt

SEQ ID NO: 546387 - DNA, 25 bp, Homo sapien
tagttggcaggctatacaaagagtg

SEQ ID NO: 546388 - DNA, 25 bp, Homo sapien
tttaaagttgggtgtcagcaagcag

SEQ ID NO: 546389 - DNA, 25 bp, Homo sapien
gtcacaccactgaaaagagccgctt

SEQ ID NO: 546390 - DNA, 25 bp, Homo sapien
tccctcaggagggtagtaatatcta

SEQ ID NO: 546391 - DNA, 25 bp, Homo sapien
tagtgcccagcatcaaagtttatat

SEQ ID NO: 546392 - DNA, 25 bp, Homo sapien
tgctgtaggagagcatatcatcact

SEQ ID NO: 546393 - DNA, 25 bp, Homo sapien
cttacataactatgtaattccaaaa

SEQ ID NO: 546394 - DNA, 25 bp, Homo sapien
caatggtgctccctttatgattttt

SEQ ID NO: 546395 - DNA, 25 bp, Homo sapien
gtttatgctagactgtacaatggtg

SEQ ID NO: 546396 - DNA, 25 bp, Homo sapien
aaaatttgctgtttatgctagactg

SEQ ID NO: 546397 - DNA, 25 bp, Homo sapien
tatatggtttagcagattacagagc

SEQ ID NO: 546398 - DNA, 25 bp, Homo sapien
caggtgtatgtgtaactgaagaccc

SEQ ID NO: 546399 - DNA, 25 bp, Homo sapien
gatatgactgctattacactaagga

SEQ ID NO: 546400 - DNA, 25 bp, Homo sapien
cattcatgggtcttccgataaacaa

SEQ ID NO: 546401 - DNA, 25 bp, Homo sapien
tttgcttgaaattaaggtgctattc

SEQ ID NO: 546402 - DNA, 25 bp, Homo sapien
aattaaggtgctattcatcatgcag

SEQ ID NO: 546403 - DNA, 25 bp, Homo sapien
taaggtgctattcatcatgcagttt

SEQ ID NO: 546404 - DNA, 25 bp, Homo sapien
gcttgaaattaaggtgctattcatc

SEQ ID NO: 546405 - DNA, 25 bp, Homo sapien
caagtgggcatcatgtcgggaaacc

SEQ ID NO: 546406 - DNA, 25 bp, Homo sapien
aagtgggcatcatgtcgggaaacca

SEQ ID NO: 546407 - DNA, 25 bp, Homo sapien
gtgggcatcatgtcgggaaaccaca

SEQ ID NO: 546408 - DNA, 25 bp, Homo sapien
tgggcatcatgtcgggaaaccacac

SEQ ID NO: 546409 - DNA, 25 bp, Homo sapien
tgatctcccaaagtacagatgggtg

SEQ ID NO: 546410 - DNA, 25 bp, Homo sapien
caagtggccgtaatccatttgcaca

SEQ ID NO: 546411 - DNA, 25 bp, Homo sapien
gataattgagataggcggccaccac

SEQ ID NO: 546412 - DNA, 25 bp, Homo sapien
tagttcaaccagtctagggcatgtc

SEQ ID NO: 546413 - DNA, 25 bp, Homo sapien
tgtgacggaggccaaaggacatttt

SEQ ID NO: 546414 - DNA, 25 bp, Homo sapien
taacatacctagaaagcagttccct

SEQ ID NO: 546415 - DNA, 25 bp, Homo sapien
tacttagggtgccatgctttataac

SEQ ID NO: 546416 - DNA, 25 bp, Homo sapien
ttaggtaattacaggaccactgtga

SEQ ID NO: 546417 - DNA, 25 bp, Homo sapien
gggaacctcacacgctggtgcctgt

SEQ ID NO: 546418 - DNA, 25 bp, Homo sapien
caccgggaggggaacctcacacgct

SEQ ID NO: 546419 - DNA, 25 bp, Homo sapien
cgggaggggaacctcacacgctggt

SEQ ID NO: 546420 - DNA, 25 bp, Homo sapien
tcacacgctggtgcctgtcgggagt

SEQ ID NO: 546421 - DNA, 25 bp, Homo sapien
agaagcaccatgaaaagacagtcaa

SEQ ID NO: 546422 - DNA, 25 bp, Homo sapien
aaaagacagtcaaggtcaggcacgg

SEQ ID NO: 546423 - DNA, 25 bp, Homo sapien
catgaaaagacagtcaaggtcaggc

SEQ ID NO: 546424 - DNA, 25 bp, Homo sapien
caccatgaaaagacagtcaaggtca

SEQ ID NO: 546425 - DNA, 25 bp, Homo sapien
gaaagtcagtgtctaggctagtaac

SEQ ID NO: 546426 - DNA, 25 bp, Homo sapien
gcagtcatattaatccaccttcaag

SEQ ID NO: 546427 - DNA, 25 bp, Homo sapien
ggctagtaaccctacagaacttatg

SEQ ID NO: 546428 - DNA, 25 bp, Homo sapien
caccttcaaggttaatgatcatagt

SEQ ID NO: 546429 - DNA, 25 bp, Homo sapien
tattgttggccactagtactttgag

SEQ ID NO: 546430 - DNA, 25 bp, Homo sapien
caacagcttgagtgtatcactattg

SEQ ID NO: 546431 - DNA, 25 bp, Homo sapien
ggatcatctactggagtatcatcta

SEQ ID NO: 546432 - DNA, 25 bp, Homo sapien
actttgagagatggatcatctactg

SEQ ID NO: 546433 - DNA, 25 bp, Homo sapien
cttaagcgaagacagggatttggag

SEQ ID NO: 546434 - DNA, 25 bp, Homo sapien
taagcgaagacagggatttggagtt

SEQ ID NO: 546435 - DNA, 25 bp, Homo sapien
gaagacagggatttggagtttacga

SEQ ID NO: 546436 - DNA, 25 bp, Homo sapien
cagggatttggagtttacgaacaca

SEQ ID NO: 546437 - DNA, 25 bp, Homo sapien
ctgtcagtgcagagataaagtgaga

SEQ ID NO: 546438 - DNA, 25 bp, Homo sapien
gagtgcatcactgacgtctttcccc

SEQ ID NO: 546439 - DNA, 25 bp, Homo sapien
tccctactgtgattaaacaactggt

SEQ ID NO: 546440 - DNA, 25 bp, Homo sapien
tatcctagcctcacttaataaggga

SEQ ID NO: 546441 - DNA, 25 bp, Homo sapien
caaaatattgcaacgccctacttca

SEQ ID NO: 546442 - DNA, 25 bp, Homo sapien
gaatttctcagtaatagataataaa

SEQ ID NO: 546443 - DNA, 25 bp, Homo sapien
tgaatttctcagtaatagataataa

SEQ ID NO: 546444 - DNA, 25 bp, Homo sapien
cactgaatttctcagtaatagataa

SEQ ID NO: 546445 - DNA, 25 bp, Homo sapien
ctgaatttctcagtaatagataata

SEQ ID NO: 546446 - DNA, 25 bp, Homo sapien
gcagttgaaataagtccaagtgttt

SEQ ID NO: 546447 - DNA, 25 bp, Homo sapien
taaatccataaagcttggtcgagca

SEQ ID NO: 546448 - DNA, 25 bp, Homo sapien
cacaagctgcttcagctgattcctt

SEQ ID NO: 546449 - DNA, 25 bp, Homo sapien
caagttgcgatagtatatcacaagc

SEQ ID NO: 546450 - DNA, 25 bp, Homo sapien
tagaagtatcattactagtttattg

SEQ ID NO: 546451 - DNA, 25 bp, Homo sapien
aagtatcattactagtttattgcat

SEQ ID NO: 546452 - DNA, 25 bp, Homo sapien
gaagtatcattactagtttattgca

SEQ ID NO: 546453 - DNA, 25 bp, Homo sapien
ttatagaagtatcattactagttta

SEQ ID NO: 546454 - DNA, 25 bp, Homo sapien
tccaacttggccttttctaagtctc

SEQ ID NO: 546455 - DNA, 25 bp, Homo sapien
ctccaacttggccttttctaagtct

SEQ ID NO: 546456 - DNA, 25 bp, Homo sapien
ccaacttggccttttctaagtctct

SEQ ID NO: 546457 - DNA, 25 bp, Homo sapien
aagtgactgtataaactaatggagt

SEQ ID NO: 546458 - DNA, 25 bp, Homo sapien
aagacctagctttcattatgataag

SEQ ID NO: 546459 - DNA, 25 bp, Homo sapien
gaaaaagtataagggcaattgtcaa

SEQ ID NO: 546460 - DNA, 25 bp, Homo sapien
tttacactgatttattccaaagtga

SEQ ID NO: 546461 - DNA, 25 bp, Homo sapien
caaggctgtagtacagctgcacaat

SEQ ID NO: 546462 - DNA, 25 bp, Homo sapien
gtttaaagatccagtaaacatgtcc

SEQ ID NO: 546463 - DNA, 25 bp, Homo sapien
tctggatatcgcaaaaagccaccca

SEQ ID NO: 546464 - DNA, 25 bp, Homo sapien
tattcatcacccaaacaaaacatga

SEQ ID NO: 546465 - DNA, 25 bp, Homo sapien
aagctgacatattgtagatggtttg

SEQ ID NO: 546466 - DNA, 25 bp, Homo sapien
gtttgatcagctctggatgggtagc

SEQ ID NO: 546467 - DNA, 25 bp, Homo sapien
gctgacatattgtagatggtttgaa

SEQ ID NO: 546468 - DNA, 25 bp, Homo sapien
tcagctctggatgggtagctttcaa

SEQ ID NO: 546469 - DNA, 25 bp, Homo sapien
ttgtgaagcatgagcccggtcaaga

SEQ ID NO: 546470 - DNA, 25 bp, Homo sapien
ccagttgcggcaaacttgtgaagca

SEQ ID NO: 546471 - DNA, 25 bp, Homo sapien
gattaccccaatcacaagtctgaga

SEQ ID NO: 546472 - DNA, 25 bp, Homo sapien
gagaatgctcatttgtagtcctcag

SEQ ID NO: 546473 - DNA, 25 bp, Homo sapien
gggagatacgactgttgaactgttg

SEQ ID NO: 546474 - DNA, 25 bp, Homo sapien
gcaaaacagtattatggctaaagag

SEQ ID NO: 546475 - DNA, 25 bp, Homo sapien
gaaagcagtccagcattaacgacat

SEQ ID NO: 546476 - DNA, 25 bp, Homo sapien
gctctggaaccaagctccttgggtt

SEQ ID NO: 546477 - DNA, 25 bp, Homo sapien
cacccagtacctcgcaaaacttgtg

SEQ ID NO: 546478 - DNA, 25 bp, Homo sapien
gtacctcgcaaaacttgtgaaagag

SEQ ID NO: 546479 - DNA, 25 bp, Homo sapien
caaaacttgtgaaagaggattgagg

SEQ ID NO: 546480 - DNA, 25 bp, Homo sapien
tttctccacccagtacctcgcaaaa

SEQ ID NO: 546481 - DNA, 25 bp, Homo sapien
tacagaccatttactgggctgcttc

SEQ ID NO: 546482 - DNA, 25 bp, Homo sapien
gcttcctgacccctgtctgcaaccc

SEQ ID NO: 546483 - DNA, 25 bp, Homo sapien
ctctcagcttggagatacagaccat

SEQ ID NO: 546484 - DNA, 25 bp, Homo sapien
gtctgcaaccccacctaaaggactg

SEQ ID NO: 546485 - DNA, 25 bp, Homo sapien
caccgactggcttcccctgacattt

SEQ ID NO: 546486 - DNA, 25 bp, Homo sapien
cacaagttgaccaagtttttcgcct

SEQ ID NO: 546487 - DNA, 25 bp, Homo sapien
aagtttttcgcctggctaagcggca

SEQ ID NO: 546488 - DNA, 25 bp, Homo sapien
tgacatttctcatgcgccccaccct

SEQ ID NO: 546489 - DNA, 25 bp, Homo sapien
caagctaccagcacgggcgtagccg

SEQ ID NO: 546490 - DNA, 25 bp, Homo sapien
gagcccacagagtgcgagctccatg

SEQ ID NO: 546491 - DNA, 25 bp, Homo sapien
agccgacgccgggagagcccacaga

SEQ ID NO: 546492 - DNA, 25 bp, Homo sapien
gggcgtagccgacgccgggagagcc

SEQ ID NO: 546493 - DNA, 25 bp, Homo sapien
cttcccccacacaccaccccgtgct

SEQ ID NO: 546494 - DNA, 25 bp, Homo sapien
cggctgcaggtcccgcggctctcac

SEQ ID NO: 546495 - DNA, 25 bp, Homo sapien
ccccacacaccaccccgtgctccgg

SEQ ID NO: 546496 - DNA, 25 bp, Homo sapien
cacaccaccccgtgctccggggacg

SEQ ID NO: 546497 - DNA, 25 bp, Homo sapien
tggccccccgcttcgcgctcccgca

SEQ ID NO: 546498 - DNA, 25 bp, Homo sapien
atgaggcgcccctggccccccgctt

SEQ ID NO: 546499 - DNA, 25 bp, Homo sapien
gccccccgcttcgcgctcccgcagc

SEQ ID NO: 546500 - DNA, 25 bp, Homo sapien
ctggccccccgcttcgcgctcccgc

SEQ ID NO: 546501 - DNA, 25 bp, Homo sapien
cgcgctccgcccgcatccgaggcgc

SEQ ID NO: 546502 - DNA, 25 bp, Homo sapien
cctgggccacaaacagcgagtctaa

SEQ ID NO: 546503 - DNA, 25 bp, Homo sapien
agcgagtctaaaatggcgcccaggg

SEQ ID NO: 546504 - DNA, 25 bp, Homo sapien
accgcgtaagcttcctgcacctggg

SEQ ID NO: 546505 - DNA, 25 bp, Homo sapien
agagactacctcagcgagcggctgc

SEQ ID NO: 546506 - DNA, 25 bp, Homo sapien
cctctagtagcataagagtgtggat

SEQ ID NO: 546507 - DNA, 25 bp, Homo sapien
tgaatcaaactgtacaaagcctcta

SEQ ID NO: 546508 - DNA, 25 bp, Homo sapien
tgtggatttgcctgagctgcaacat

SEQ ID NO: 546509 - DNA, 25 bp, Homo sapien
tgtacaaagcctctagtagcataag

SEQ ID NO: 546510 - DNA, 25 bp, Homo sapien
tattctcctcctaaacaagacaagg

SEQ ID NO: 546511 - DNA, 25 bp, Homo sapien
tcatcaagatcagtggcatggtagg

SEQ ID NO: 546512 - DNA, 25 bp, Homo sapien
gcacacttgacctattgaatacccc

SEQ ID NO: 546513 - DNA, 25 bp, Homo sapien
caagacaaggaccttggcacacttg

SEQ ID NO: 546514 - DNA, 25 bp, Homo sapien
gcaaatttgaaagcctcaagcctcc

SEQ ID NO: 546515 - DNA, 25 bp, Homo sapien
tcaagcctccactgctcagtcaaag

SEQ ID NO: 546516 - DNA, 25 bp, Homo sapien
tcttctcaggctttgcaaatttgaa

SEQ ID NO: 546517 - DNA, 25 bp, Homo sapien
gtctgatgtcgcttcaggttcttct

SEQ ID NO: 546518 - DNA, 25 bp, Homo sapien
gaggaacacgttaatgcctcagttc

SEQ ID NO: 546519 - DNA, 25 bp, Homo sapien
tgcttctgaggaacacgttaatgcc

SEQ ID NO: 546520 - DNA, 25 bp, Homo sapien
gaacacgttaatgcctcagttctca

SEQ ID NO: 546521 - DNA, 25 bp, Homo sapien
tctgaggaacacgttaatgcctcag

SEQ ID NO: 546522 - DNA, 25 bp, Homo sapien
gctgcaagataatgaggcacactca

SEQ ID NO: 546523 - DNA, 25 bp, Homo sapien
ggttttattgacatgtacattccaa

SEQ ID NO: 546524 - DNA, 25 bp, Homo sapien
tccaatatgtttacagctgcaagat

SEQ ID NO: 546525 - DNA, 25 bp, Homo sapien
cactcagtattgcacttcattaaaa

SEQ ID NO: 546526 - DNA, 25 bp, Homo sapien
tctgtagacaaaggatctgcgtgtt

SEQ ID NO: 546527 - DNA, 25 bp, Homo sapien
caatgacggtaatggccacatgcaa

SEQ ID NO: 546528 - DNA, 25 bp, Homo sapien
catggatgtaaaaatggtcccgtcc

SEQ ID NO: 546529 - DNA, 25 bp, Homo sapien
cagcatcgttcttagtccatgggca

SEQ ID NO: 546530 - DNA, 25 bp, Homo sapien
taaaaagtgtgggcatttctgcaca

SEQ ID NO: 546531 - DNA, 25 bp, Homo sapien
aaaaagtgtgggcatttctgcacac

SEQ ID NO: 546532 - DNA, 25 bp, Homo sapien
ctaaaaagtgtgggcatttctgcac

SEQ ID NO: 546533 - DNA, 25 bp, Homo sapien
caacatggagtggacattcagttcc

SEQ ID NO: 546534 - DNA, 25 bp, Homo sapien
cagtgggtggatgaacaacatggag

SEQ ID NO: 546535 - DNA, 25 bp, Homo sapien
agagcaaactcttccccagtgggtg

SEQ ID NO: 546536 - DNA, 25 bp, Homo sapien
cattcagttccttctaactgcttgc

SEQ ID NO: 546537 - DNA, 25 bp, Homo sapien
tgcctagagaggatcacttcgagct

SEQ ID NO: 546538 - DNA, 25 bp, Homo sapien
tcactgataggttattcaaagaaat

SEQ ID NO: 546539 - DNA, 25 bp, Homo sapien
gggtcccttactcactatatcctgc

SEQ ID NO: 546540 - DNA, 25 bp, Homo sapien
cagaaatataaatcactgataggtt

SEQ ID NO: 546541 - DNA, 25 bp, Homo sapien
tgaacaaccacaaactgaggcctga

SEQ ID NO: 546542 - DNA, 25 bp, Homo sapien
cacgagattggatggaatgagctta

SEQ ID NO: 546543 - DNA, 25 bp, Homo sapien
cactgatcaatgaggaatgacgtct

SEQ ID NO: 546544 - DNA, 25 bp, Homo sapien
ctttgtcagaaaaacacgctaggct

SEQ ID NO: 546545 - DNA, 25 bp, Homo sapien
gatacgctggtaattttgagaggca

SEQ ID NO: 546546 - DNA, 25 bp, Homo sapien
taccctactggacactagcattgtt

SEQ ID NO: 546547 - DNA, 25 bp, Homo sapien
tttgtagctatatccctgaagaggg

SEQ ID NO: 546548 - DNA, 25 bp, Homo sapien
tattaagctgttttccggagaggtc

SEQ ID NO: 546549 - DNA, 25 bp, Homo sapien
catcatgacaagcattacaaaaatg

SEQ ID NO: 546550 - DNA, 25 bp, Homo sapien
aaaacagccactgaacagcagtagc

SEQ ID NO: 546551 - DNA, 25 bp, Homo sapien
tgtggtagttcttccttaggaatgc

SEQ ID NO: 546552 - DNA, 25 bp, Homo sapien
aaaagtctgtgccatgtttgggaca

SEQ ID NO: 546553 - DNA, 25 bp, Homo sapien
gcatcgcagcgagcttcaccaccaa

SEQ ID NO: 546554 - DNA, 25 bp, Homo sapien
cagcctcagcatcgcagcgagcttc

SEQ ID NO: 546555 - DNA, 25 bp, Homo sapien
ggatcataatcatctccccgtccag

SEQ ID NO: 546556 - DNA, 25 bp, Homo sapien
ctggaaacatcagaacaggcaccac

SEQ ID NO: 546557 - DNA, 25 bp, Homo sapien
caccaggagttgtgatagcttcact

SEQ ID NO: 546558 - DNA, 25 bp, Homo sapien
tagccagctgggtcattataaaacc

SEQ ID NO: 546559 - DNA, 25 bp, Homo sapien
gcttcactcttatgcagaccttcat

SEQ ID NO: 546560 - DNA, 25 bp, Homo sapien
catttgtagcacacataatatgcat

SEQ ID NO: 546561 - DNA, 25 bp, Homo sapien
taaatccaaatgttatccttgggcc

SEQ ID NO: 546562 - DNA, 25 bp, Homo sapien
gattttctaatactcgccgacagca

SEQ ID NO: 546563 - DNA, 25 bp, Homo sapien
cgccgacagcactgtaagtggaata

SEQ ID NO: 546564 - DNA, 25 bp, Homo sapien
ggccaagccatcgattttctaatac

SEQ ID NO: 546565 - DNA, 25 bp, Homo sapien
gagcgcttcggtgaaacatatcatg

SEQ ID NO: 546566 - DNA, 25 bp, Homo sapien
tgtcacagccgtgtagacagggcag

SEQ ID NO: 546567 - DNA, 25 bp, Homo sapien
cacaaggatgcgtcttactacaggc

SEQ ID NO: 546568 - DNA, 25 bp, Homo sapien
tcatcggcgtcttgcttcaggcttg

SEQ ID NO: 546569 - DNA, 25 bp, Homo sapien
ctggaaccacagaagcgacatgctt

SEQ ID NO: 546570 - DNA, 25 bp, Homo sapien
ctggcaatctgcatcagaacaaaca

SEQ ID NO: 546571 - DNA, 25 bp, Homo sapien
tgcttctgagctactcgtggtgggt

SEQ ID NO: 546572 - DNA, 25 bp, Homo sapien
cacagaagcgacatgcttctgagct

SEQ ID NO: 546573 - DNA, 25 bp, Homo sapien
tgccagtgccatcaaccagaacaat

SEQ ID NO: 546574 - DNA, 25 bp, Homo sapien
gtgttctcggaattccaccattgcc

SEQ ID NO: 546575 - DNA, 25 bp, Homo sapien
gttctaccacaaccttcatgaaggt

SEQ ID NO: 546576 - DNA, 25 bp, Homo sapien
catgaaggtcaacctttatagcttc

SEQ ID NO: 546577 - DNA, 25 bp, Homo sapien
catcatcatggttatcacacatagg

SEQ ID NO: 546578 - DNA, 25 bp, Homo sapien
gatgagttttggttcttcgatgaag

SEQ ID NO: 546579 - DNA, 25 bp, Homo sapien
ttggttcttcgatgaaggtgaagga

SEQ ID NO: 546580 - DNA, 25 bp, Homo sapien
cacagtctgtacataaatttccaca

SEQ ID NO: 546581 - DNA, 25 bp, Homo sapien
tctccccgaggagagacgatctacg

SEQ ID NO: 546582 - DNA, 25 bp, Homo sapien
tccccgaggagagacgatctacgtg

SEQ ID NO: 546583 - DNA, 25 bp, Homo sapien
ccgaggagagacgatctacgtggtc

SEQ ID NO: 546584 - DNA, 25 bp, Homo sapien
catctccccgaggagagacgatcta

SEQ ID NO: 546585 - DNA, 25 bp, Homo sapien
ctgatcaagaacacatagggatgcg

SEQ ID NO: 546586 - DNA, 25 bp, Homo sapien
acacatagggatgcgagagcaagcc

SEQ ID NO: 546587 - DNA, 25 bp, Homo sapien
catagggatgcgagagcaagccaga

SEQ ID NO: 546588 - DNA, 25 bp, Homo sapien
caagaacacatagggatgcgagagc

SEQ ID NO: 546589 - DNA, 25 bp, Homo sapien
tcgggaccaagcttctgacagatga

SEQ ID NO: 546590 - DNA, 25 bp, Homo sapien
ccatcttggtcaaggcaatgatggt

SEQ ID NO: 546591 - DNA, 25 bp, Homo sapien
ggtttctgcaatagcattttttgtc

SEQ ID NO: 546592 - DNA, 25 bp, Homo sapien
tcttcttccatcttggtcaaggcaa

SEQ ID NO: 546593 - DNA, 25 bp, Homo sapien
taaaatttcttcgtgatcctatgga

SEQ ID NO: 546594 - DNA, 25 bp, Homo sapien
taaacaggttcaaactgcaactacc

SEQ ID NO: 546595 - DNA, 25 bp, Homo sapien
tagattatgggcacaaacttttgaa

SEQ ID NO: 546596 - DNA, 25 bp, Homo sapien
gctttagatgagtattacaggaacc

SEQ ID NO: 546597 - DNA, 25 bp, Homo sapien
tgatgatctctgagatctgggtagg

SEQ ID NO: 546598 - DNA, 25 bp, Homo sapien
atgactttcacctcgtcggagataa

SEQ ID NO: 546599 - DNA, 25 bp, Homo sapien
aatgactttcacctcgtcggagata

SEQ ID NO: 546600 - DNA, 25 bp, Homo sapien
ttaatgatgatctctgagatctggg

SEQ ID NO: 546601 - DNA, 25 bp, Homo sapien
taaaaagccaataaattatcagtag

SEQ ID NO: 546602 - DNA, 25 bp, Homo sapien
aaaaagccaataaattatcagtagt

SEQ ID NO: 546603 - DNA, 25 bp, Homo sapien
aaaagccaataaattatcagtagta

SEQ ID NO: 546604 - DNA, 25 bp, Homo sapien
ttaaaaagccaataaattatcagta

SEQ ID NO: 546605 - DNA, 25 bp, Homo sapien
tatgatgctggccagacgactaggg

SEQ ID NO: 546606 - DNA, 25 bp, Homo sapien
aatgcatcctagaaacatgtccaag

SEQ ID NO: 546607 - DNA, 25 bp, Homo sapien
gctgtacagtgagtgctttggcaat

SEQ ID NO: 546608 - DNA, 25 bp, Homo sapien
gagggatttcactcctatgatgctg

SEQ ID NO: 546609 - DNA, 25 bp, Homo sapien
tgtgaagcagcgagaagagatcctg

SEQ ID NO: 546610 - DNA, 25 bp, Homo sapien
tattgccggccaacgttagagccac

SEQ ID NO: 546611 - DNA, 25 bp, Homo sapien
tagcttggacaatatgagcacacac

SEQ ID NO: 546612 - DNA, 25 bp, Homo sapien
gagccactcagtgctaaaaccatag

SEQ ID NO: 546613 - DNA, 25 bp, Homo sapien
gattccaaccatatgttctttcagg

SEQ ID NO: 546614 - DNA, 25 bp, Homo sapien
ttttgtaagttagtcagcttactcc

SEQ ID NO: 546615 - DNA, 25 bp, Homo sapien
caaccatatgttctttcaggtcagc

SEQ ID NO: 546616 - DNA, 25 bp, Homo sapien
agcttactcctgctgaatatgattc

SEQ ID NO: 546617 - DNA, 25 bp, Homo sapien
tcaggtgatgacaatagtgcttttt

SEQ ID NO: 546618 - DNA, 25 bp, Homo sapien
gttctggtgtaggttcagcatctcc

SEQ ID NO: 546619 - DNA, 25 bp, Homo sapien
ttcaggtgatgacaatagtgctttt

SEQ ID NO: 546620 - DNA, 25 bp, Homo sapien
tgttctggtgtaggttcagcatctc

SEQ ID NO: 546621 - DNA, 25 bp, Homo sapien
ggactttgacttgtcgaactctcag

SEQ ID NO: 546622 - DNA, 25 bp, Homo sapien
cagtctgaatactcgcagagtctca

SEQ ID NO: 546623 - DNA, 25 bp, Homo sapien
tgatgtgattatcccctcctggaag

SEQ ID NO: 546624 - DNA, 25 bp, Homo sapien
gaaatctggccagctatttttgtgc

SEQ ID NO: 546625 - DNA, 25 bp, Homo sapien
gcaggaacctgattcagctggatca

SEQ ID NO: 546626 - DNA, 25 bp, Homo sapien
gattcagctggatcacttttatcac

SEQ ID NO: 546627 - DNA, 25 bp, Homo sapien
tttatcactgtgctggacttagcat

SEQ ID NO: 546628 - DNA, 25 bp, Homo sapien
tcactgtgctggacttagcattgat

SEQ ID NO: 546629 - DNA, 25 bp, Homo sapien
ctgcacaaatcttctactgctttgc

SEQ ID NO: 546630 - DNA, 25 bp, Homo sapien
gctttgccagttaagaaggtcattg

SEQ ID NO: 546631 - DNA, 25 bp, Homo sapien
aaatcttctactgctttgccagtta

SEQ ID NO: 546632 - DNA, 25 bp, Homo sapien
gccagttaagaaggtcattgaggta

SEQ ID NO: 546633 - DNA, 25 bp, Homo sapien
caatcatggcaggtcggcttgaagt

SEQ ID NO: 546634 - DNA, 25 bp, Homo sapien
tctgtggagccgtctgtcaaactgc

SEQ ID NO: 546635 - DNA, 25 bp, Homo sapien
caagatctcgggaattgtccacgtg

SEQ ID NO: 546636 - DNA, 25 bp, Homo sapien
tccacgtgaacagacacatagcggg

SEQ ID NO: 546637 - DNA, 25 bp, Homo sapien
gaaagacgttgctctgatgaaggaa

SEQ ID NO: 546638 - DNA, 25 bp, Homo sapien
gactcatagcttcaaagccagactg

SEQ ID NO: 546639 - DNA, 25 bp, Homo sapien
cactatcgccatcatctgactttga

SEQ ID NO: 546640 - DNA, 25 bp, Homo sapien
gtatactgatgctaaaactctcttc

SEQ ID NO: 546641 - DNA, 25 bp, Homo sapien
ctgcagcaagcggtgaaaggtgtgt

SEQ ID NO: 546642 - DNA, 25 bp, Homo sapien
gggagagacatcataaggtctgaga

SEQ ID NO: 546643 - DNA, 25 bp, Homo sapien
gcttccccggcaatcactatgtctg

SEQ ID NO: 546644 - DNA, 25 bp, Homo sapien
tgctgtaatgaactgccgctgggga

SEQ ID NO: 546645 - DNA, 25 bp, Homo sapien
tgttctgaattttctttgcttgttt

SEQ ID NO: 546646 - DNA, 25 bp, Homo sapien
ttgttctgaattttctttgcttgtt

SEQ ID NO: 546647 - DNA, 25 bp, Homo sapien
ttctgaattttctttgcttgtttta

SEQ ID NO: 546648 - DNA, 25 bp, Homo sapien
ctgaattttctttgcttgttttatt

SEQ ID NO: 546649 - DNA, 25 bp, Homo sapien
tctggttccactggtgcaggagtca

SEQ ID NO: 546650 - DNA, 25 bp, Homo sapien
gagagaagtggtttggatgacatta

SEQ ID NO: 546651 - DNA, 25 bp, Homo sapien
gaagtggtttggatgacattacaca

SEQ ID NO: 546652 - DNA, 25 bp, Homo sapien
cattacacagaagccagttgaaagc

SEQ ID NO: 546653 - DNA, 25 bp, Homo sapien
catgatgttgtataacaaaagctaa

SEQ ID NO: 546654 - DNA, 25 bp, Homo sapien
caagaccttctagatcatgatgttg

SEQ ID NO: 546655 - DNA, 25 bp, Homo sapien
tcattgctatttcaagaccttctag

SEQ ID NO: 546656 - DNA, 25 bp, Homo sapien
tccatagcaaaaactcgacaagcag

SEQ ID NO: 546657 - DNA, 25 bp, Homo sapien
tcaggagacggatgtctcaaaaggg

SEQ ID NO: 546658 - DNA, 25 bp, Homo sapien
aggagacggatgtctcaaaagggaa

SEQ ID NO: 546659 - DNA, 25 bp, Homo sapien
gagacggatgtctcaaaagggaaga

SEQ ID NO: 546660 - DNA, 25 bp, Homo sapien
gagattagccgagaaagctcaggag

SEQ ID NO: 546661 - DNA, 25 bp, Homo sapien
gatggcagctccaagagttatcaag

SEQ ID NO: 546662 - DNA, 25 bp, Homo sapien
cattggaactcctggtccacaaaag

SEQ ID NO: 546663 - DNA, 25 bp, Homo sapien
cagatttcccttcaactaagatgca

SEQ ID NO: 546664 - DNA, 25 bp, Homo sapien
attatctacttagaatgatggcagc

SEQ ID NO: 546665 - DNA, 25 bp, Homo sapien
ctcgtgcaggtaaaatggagtgttg

SEQ ID NO: 546666 - DNA, 25 bp, Homo sapien
ggagtgttgtttatcatattcggaa

SEQ ID NO: 546667 - DNA, 25 bp, Homo sapien
ttcggaagcaacaactgagtatgat

SEQ ID NO: 546668 - DNA, 25 bp, Homo sapien
ttaactcgtgcaggtaaaatggagt

SEQ ID NO: 546669 - DNA, 25 bp, Homo sapien
caagatcagtatcagttatgggact

SEQ ID NO: 546670 - DNA, 25 bp, Homo sapien
tctctttgcaagatcagtatcagtt

SEQ ID NO: 546671 - DNA, 25 bp, Homo sapien
tatcagttatgggactggtttctaa

SEQ ID NO: 546672 - DNA, 25 bp, Homo sapien
acagttctctttgcaagatcagtat

SEQ ID NO: 546673 - DNA, 25 bp, Homo sapien
tcaaatacattaggacttgcatcag

SEQ ID NO: 546674 - DNA, 25 bp, Homo sapien
tagacttcatattgctctctggctc

SEQ ID NO: 546675 - DNA, 25 bp, Homo sapien
ggcaggtacagatgttgaacgtaga

SEQ ID NO: 546676 - DNA, 25 bp, Homo sapien
gcatcaggagttactgatatatacg

SEQ ID NO: 546677 - DNA, 25 bp, Homo sapien
aatgccttcttttacactgggcaac

SEQ ID NO: 546678 - DNA, 25 bp, Homo sapien
gaaatgccttcttttacactgggca

SEQ ID NO: 546679 - DNA, 25 bp, Homo sapien
aaatgccttcttttacactgggcaa

SEQ ID NO: 546680 - DNA, 25 bp, Homo sapien
gcaggatggtaacacagaatgctcg

SEQ ID NO: 546681 - DNA, 25 bp, Homo sapien
tgcaggatggtaacacagaatgctc

SEQ ID NO: 546682 - DNA, 25 bp, Homo sapien
caggatggtaacacagaatgctcgg

SEQ ID NO: 546683 - DNA, 25 bp, Homo sapien
cattggttttctcctagattgtttg

SEQ ID NO: 546684 - DNA, 25 bp, Homo sapien
ctggtgagcttccatggtgggcaag

SEQ ID NO: 546685 - DNA, 25 bp, Homo sapien
aaggcacgaggggtcttgacttgca

SEQ ID NO: 546686 - DNA, 25 bp, Homo sapien
agcttccatggtgggcaaggcacga

SEQ ID NO: 546687 - DNA, 25 bp, Homo sapien
atttttctctacagcgatcacatac

SEQ ID NO: 546688 - DNA, 25 bp, Homo sapien
cagcctgtttttcgcggaggtattt

SEQ ID NO: 546689 - DNA, 25 bp, Homo sapien
agcagcctgtttttcgcggaggtat

SEQ ID NO: 546690 - DNA, 25 bp, Homo sapien
ggtatttttctctacagcgatcaca

SEQ ID NO: 546691 - DNA, 25 bp, Homo sapien
caaaaatgcccaatgctattgtaac

SEQ ID NO: 546692 - DNA, 25 bp, Homo sapien
tgctattgtaaccttgtccaccagc

SEQ ID NO: 546693 - DNA, 25 bp, Homo sapien
gtaaccttgtccaccagcatatcgg

SEQ ID NO: 546694 - DNA, 25 bp, Homo sapien
tattgtaaccttgtccaccagcata

SEQ ID NO: 546695 - DNA, 25 bp, Homo sapien
tctggtcctcctactgccagctggg

SEQ ID NO: 546696 - DNA, 25 bp, Homo sapien
tgagcttgtctcatgtgataggtca

SEQ ID NO: 546697 - DNA, 25 bp, Homo sapien
cacacagttcacagatggtatcttt

SEQ ID NO: 546698 - DNA, 25 bp, Homo sapien
cgggtatggatgtgactccccacac

SEQ ID NO: 546699 - DNA, 25 bp, Homo sapien
tgatagtagccaaagagatgtcttc

SEQ ID NO: 546700 - DNA, 25 bp, Homo sapien
tgggaagcagctttgatagtagcca

SEQ ID NO: 546701 - DNA, 25 bp, Homo sapien
gatagtagccaaagagatgtcttcc

SEQ ID NO: 546702 - DNA, 25 bp, Homo sapien
gggaagcagctttgatagtagccaa

SEQ ID NO: 546703 - DNA, 25 bp, Homo sapien
cattgtgttatgcatggacatttca

SEQ ID NO: 546704 - DNA, 25 bp, Homo sapien
tgttatgcatggacatttcaaaagt

SEQ ID NO: 546705 - DNA, 25 bp, Homo sapien
agtggtctcggttttcccatcctca

SEQ ID NO: 546706 - DNA, 25 bp, Homo sapien
gtggtctcggttttcccatcctcac

SEQ ID NO: 546707 - DNA, 25 bp, Homo sapien
atttttcatgcagaggtggttcctt

SEQ ID NO: 546708 - DNA, 25 bp, Homo sapien
tcatgcagaggtggttccttaagca

SEQ ID NO: 546709 - DNA, 25 bp, Homo sapien
cagaggtggttccttaagcatagac

SEQ ID NO: 546710 - DNA, 25 bp, Homo sapien
gtggttccttaagcatagacaatac

SEQ ID NO: 546711 - DNA, 25 bp, Homo sapien
tgatttagaacgttcccgaggagga

SEQ ID NO: 546712 - DNA, 25 bp, Homo sapien
gatgacaaccgagaacctggtcctg

SEQ ID NO: 546713 - DNA, 25 bp, Homo sapien
tacttgaggtgcagacttcgaccac

SEQ ID NO: 546714 - DNA, 25 bp, Homo sapien
gcacccgatgggctagacctattgg

SEQ ID NO: 546715 - DNA, 25 bp, Homo sapien
tcaatgtctgcaaggtgttatggtt

SEQ ID NO: 546716 - DNA, 25 bp, Homo sapien
ctagaaggcatcctcccatcagatt

SEQ ID NO: 546717 - DNA, 25 bp, Homo sapien
ggcatcctcccatcagatttcaatg

SEQ ID NO: 546718 - DNA, 25 bp, Homo sapien
tatggttgggggataatgacctact

SEQ ID NO: 546719 - DNA, 25 bp, Homo sapien
tagaggacagctctgattttcctga

SEQ ID NO: 546720 - DNA, 25 bp, Homo sapien
gtccggctcatacgtccatcaggtt

SEQ ID NO: 546721 - DNA, 25 bp, Homo sapien
gggattcactagcagataaactttc

SEQ ID NO: 546722 - DNA, 25 bp, Homo sapien
ttctgatcagcagtagtccggctca

SEQ ID NO: 546723 - DNA, 25 bp, Homo sapien
catggacgcaaaacaacaggttgaa

SEQ ID NO: 546724 - DNA, 25 bp, Homo sapien
agtgatacctcgcatccttagggca

SEQ ID NO: 546725 - DNA, 25 bp, Homo sapien
gaactgtggaccctcaaaacaagga

SEQ ID NO: 546726 - DNA, 25 bp, Homo sapien
tgagcacatgaatgccctgaagctg

SEQ ID NO: 546727 - DNA, 25 bp, Homo sapien
tttgtaaatgcgctcacgagaagca

SEQ ID NO: 546728 - DNA, 25 bp, Homo sapien
gagaagcaaggttgcgagatggaga

SEQ ID NO: 546729 - DNA, 25 bp, Homo sapien
gtaaatgcgctcacgagaagcaagg

SEQ ID NO: 546730 - DNA, 25 bp, Homo sapien
taatttttgtaaatgcgctcacgag

SEQ ID NO: 546731 - DNA, 25 bp, Homo sapien
tgtgacaatggtcaaatagcactgt

SEQ ID NO: 546732 - DNA, 25 bp, Homo sapien
taatcaagcattacctgacagttct

SEQ ID NO: 546733 - DNA, 25 bp, Homo sapien
ttcagaaagtgacaggactaggcac

SEQ ID NO: 546734 - DNA, 25 bp, Homo sapien
caataggctcctacaagaaacagta

SEQ ID NO: 546735 - DNA, 25 bp, Homo sapien
tcataagacataacggctgctgctg

SEQ ID NO: 546736 - DNA, 25 bp, Homo sapien
cataagacataacggctgctgctga

SEQ ID NO: 546737 - DNA, 25 bp, Homo sapien
taagacataacggctgctgctgatg

SEQ ID NO: 546738 - DNA, 25 bp, Homo sapien
ataagacataacggctgctgctgat

SEQ ID NO: 546739 - DNA, 25 bp, Homo sapien
agtagccaggaatataggtgcagcc

SEQ ID NO: 546740 - DNA, 25 bp, Homo sapien
ttctccctgcaattaaccttagctt

SEQ ID NO: 546741 - DNA, 25 bp, Homo sapien
cttctacattctccctgcaattaac

SEQ ID NO: 546742 - DNA, 25 bp, Homo sapien
agccaggaatataggtgcagccctc

SEQ ID NO: 546743 - DNA, 25 bp, Homo sapien
gggacaaaatgtcttgtaagcaaca

SEQ ID NO: 546744 - DNA, 25 bp, Homo sapien
actgggacaaaatgtcttgtaagca

SEQ ID NO: 546745 - DNA, 25 bp, Homo sapien
ggacaaaatgtcttgtaagcaacat

SEQ ID NO: 546746 - DNA, 25 bp, Homo sapien
tgggacaaaatgtcttgtaagcaac

SEQ ID NO: 546747 - DNA, 25 bp, Homo sapien
tccctggaagagacaaatcaacttt

SEQ ID NO: 546748 - DNA, 25 bp, Homo sapien
tgacacaatgtcacctagaaactgt

SEQ ID NO: 546749 - DNA, 25 bp, Homo sapien
gagacgtcctgttgcgaataagaag

SEQ ID NO: 546750 - DNA, 25 bp, Homo sapien
tggtggtactgataacacatatgca

SEQ ID NO: 546751 - DNA, 25 bp, Homo sapien
aaatgcttgatgaggcaggtaaggc

SEQ ID NO: 546752 - DNA, 25 bp, Homo sapien
tcagaaatgcttgatgaggcaggta

SEQ ID NO: 546753 - DNA, 25 bp, Homo sapien
tgaggcaggtaaggctgacagactt

SEQ ID NO: 546754 - DNA, 25 bp, Homo sapien
cttgatgaggcaggtaaggctgaca

SEQ ID NO: 546755 - DNA, 25 bp, Homo sapien
attgggtcgtgactgaatggaattc

SEQ ID NO: 546756 - DNA, 25 bp, Homo sapien
ggaattcaatatggcactcagttgg

SEQ ID NO: 546757 - DNA, 25 bp, Homo sapien
agctgggagattgggtcgtgactga

SEQ ID NO: 546758 - DNA, 25 bp, Homo sapien
caaatgggctgtgtactagggaaga

SEQ ID NO: 546759 - DNA, 25 bp, Homo sapien
ataaagatttctgggtgaacacaaa

SEQ ID NO: 546760 - DNA, 25 bp, Homo sapien
aagatttctgggtgaacacaaataa

SEQ ID NO: 546761 - DNA, 25 bp, Homo sapien
taataaagatttctgggtgaacaca

SEQ ID NO: 546762 - DNA, 25 bp, Homo sapien
ttttattagctttccatgaacaaat

SEQ ID NO: 546763 - DNA, 25 bp, Homo sapien
ttgctatttccgagtccataatcaa

SEQ ID NO: 546764 - DNA, 25 bp, Homo sapien
ctttgctatttccgagtccataatc

SEQ ID NO: 546765 - DNA, 25 bp, Homo sapien
ccttgggcactgcaacttgcccctt

SEQ ID NO: 546766 - DNA, 25 bp, Homo sapien
cttgggcactgcaacttgccccttt

SEQ ID NO: 546767 - DNA, 25 bp, Homo sapien
tcttcatgtcggaggtactggtttc

SEQ ID NO: 546768 - DNA, 25 bp, Homo sapien
tgtctctagctaaggaccatgcctc

SEQ ID NO: 546769 - DNA, 25 bp, Homo sapien
tctgatccagttgcacccatgtccc

SEQ ID NO: 546770 - DNA, 25 bp, Homo sapien
atcactctcacagaactctaccatg

SEQ ID NO: 546771 - DNA, 25 bp, Homo sapien
gattgattggcttgattctttcagg

SEQ ID NO: 546772 - DNA, 25 bp, Homo sapien
attgattggcttgattctttcaggg

SEQ ID NO: 546773 - DNA, 25 bp, Homo sapien
ctgaatagtgtaatcattccaatac

SEQ ID NO: 546774 - DNA, 25 bp, Homo sapien
tgtctgaatagtgtaatcattccaa

SEQ ID NO: 546775 - DNA, 25 bp, Homo sapien
gtctgaatagtgtaatcattccaat

SEQ ID NO: 546776 - DNA, 25 bp, Homo sapien
gtgtctgaatagtgtaatcattcca

SEQ ID NO: 546777 - DNA, 25 bp, Homo sapien
atttctactaagaaattagtttctg

SEQ ID NO: 546778 - DNA, 25 bp, Homo sapien
ttctactaagaaattagtttctgaa

SEQ ID NO: 546779 - DNA, 25 bp, Homo sapien
tagtttctgaaattaaggccacagc

SEQ ID NO: 546780 - DNA, 25 bp, Homo sapien
attagtttctgaaattaaggccaca

SEQ ID NO: 546781 - DNA, 25 bp, Homo sapien
cagtgagacctatgaatgggaacaa

SEQ ID NO: 546782 - DNA, 25 bp, Homo sapien
taagaattacccaagaacacatggc

SEQ ID NO: 546783 - DNA, 25 bp, Homo sapien
gcttatcagctgaggcaaatgccac

SEQ ID NO: 546784 - DNA, 25 bp, Homo sapien
gacccttactgagaaatagcatgac

SEQ ID NO: 546785 - DNA, 25 bp, Homo sapien
cccagaactaacattccaattggga

SEQ ID NO: 546786 - DNA, 25 bp, Homo sapien
tttcccagaactaacattccaattg

SEQ ID NO: 546787 - DNA, 25 bp, Homo sapien
ttgtttcccagaactaacattccaa

SEQ ID NO: 546788 - DNA, 25 bp, Homo sapien
tcccagaactaacattccaattggg

SEQ ID NO: 546789 - DNA, 25 bp, Homo sapien
tgttgtgacctgaaggtcccgtctt

SEQ ID NO: 546790 - DNA, 25 bp, Homo sapien
ggtcccgtcttcactaccttgtaca

SEQ ID NO: 546791 - DNA, 25 bp, Homo sapien
tggccctcctcgcaagaatggcata

SEQ ID NO: 546792 - DNA, 25 bp, Homo sapien
tggcatatcttgttcttgcattgtt

SEQ ID NO: 546793 - DNA, 25 bp, Homo sapien
aaaagtcatcagtattagttttaga

SEQ ID NO: 546794 - DNA, 25 bp, Homo sapien
aaagtcatcagtattagttttagat

SEQ ID NO: 546795 - DNA, 25 bp, Homo sapien
ccatgaaaatacgtccaaatccctg

SEQ ID NO: 546796 - DNA, 25 bp, Homo sapien
ggaaaaaagctttggaagtccatga

SEQ ID NO: 546797 - DNA, 25 bp, Homo sapien
gactccttggctagcattaaagata

SEQ ID NO: 546798 - DNA, 25 bp, Homo sapien
caaatccctgactccttggctagca

SEQ ID NO: 546799 - DNA, 25 bp, Homo sapien
gacacaaacagtgctgaaggcaact

SEQ ID NO: 546800 - DNA, 25 bp, Homo sapien
ttgggatccaaataacgtgcacaca

SEQ ID NO: 546801 - DNA, 25 bp, Homo sapien
taaacaagacagcatgacaagatca

SEQ ID NO: 546802 - DNA, 25 bp, Homo sapien
tatagtttgtttgagttgggatcca

SEQ ID NO: 546803 - DNA, 25 bp, Homo sapien
gaggcaccaggcttcagtgtaacca

SEQ ID NO: 546804 - DNA, 25 bp, Homo sapien
gactcttgccaagatgttgattaaa

SEQ ID NO: 546805 - DNA, 25 bp, Homo sapien
tcaacagggaccagaagactcttgc

SEQ ID NO: 546806 - DNA, 25 bp, Homo sapien
gttgattaaaagagaggcaccaggc

SEQ ID NO: 546807 - DNA, 25 bp, Homo sapien
gacatacttctttattgtctcatca

SEQ ID NO: 546808 - DNA, 25 bp, Homo sapien
tagggacatacttctttattgtctc

SEQ ID NO: 546809 - DNA, 25 bp, Homo sapien
tacttctttattgtctcatcattca

SEQ ID NO: 546810 - DNA, 25 bp, Homo sapien
gttagggacatacttctttattgtc

SEQ ID NO: 546811 - DNA, 25 bp, Homo sapien
ggctacggatgcgaagccccgcact

SEQ ID NO: 546812 - DNA, 25 bp, Homo sapien
tgaagggaagggtggctacggatgc

SEQ ID NO: 546813 - DNA, 25 bp, Homo sapien
ttgactttcactatgcctatctgct

SEQ ID NO: 546814 - DNA, 25 bp, Homo sapien
gactttcactatgcctatctgctca

SEQ ID NO: 546815 - DNA, 25 bp, Homo sapien
caactgagttcctggtggtatcatc

SEQ ID NO: 546816 - DNA, 25 bp, Homo sapien
ttggtttgaccaactgagttcctgg

SEQ ID NO: 546817 - DNA, 25 bp, Homo sapien
cctggtggtatcatcccttttggtg

SEQ ID NO: 546818 - DNA, 25 bp, Homo sapien
gttcagactttggtttgaccaactg

SEQ ID NO: 546819 - DNA, 25 bp, Homo sapien
taacagcagcgtggaagagagcaca

SEQ ID NO: 546820 - DNA, 25 bp, Homo sapien
gagagcacacctgactagtaacatc

SEQ ID NO: 546821 - DNA, 25 bp, Homo sapien
gaaacctatccatatgtctagtgca

SEQ ID NO: 546822 - DNA, 25 bp, Homo sapien
agagagtcatgagggctacagtgcc

SEQ ID NO: 546823 - DNA, 25 bp, Homo sapien
tattgacacggatcagcatattctc

SEQ ID NO: 546824 - DNA, 25 bp, Homo sapien
catgaagagtgtagagtccaatagc

SEQ ID NO: 546825 - DNA, 25 bp, Homo sapien
caatttgcacaataagtcccatcat

SEQ ID NO: 546826 - DNA, 25 bp, Homo sapien
gcccctggagtccaatttgcacaat

SEQ ID NO: 546827 - DNA, 25 bp, Homo sapien
gagttggtgatgcaaaacgtagttc

SEQ ID NO: 546828 - DNA, 25 bp, Homo sapien
taggagttggtgatgcaaaacgtag

SEQ ID NO: 546829 - DNA, 25 bp, Homo sapien
ctcttaggagttggtgatgcaaaac

SEQ ID NO: 546830 - DNA, 25 bp, Homo sapien
ggtgatgcaaaacgtagttcttcaa

SEQ ID NO: 546831 - DNA, 25 bp, Homo sapien
tctctgattcgattaacttgatctg

SEQ ID NO: 546832 - DNA, 25 bp, Homo sapien
ggtcagaagtagacaagtactttca

SEQ ID NO: 546833 - DNA, 25 bp, Homo sapien
tctgtaattggtgatcccctctgga

SEQ ID NO: 546834 - DNA, 25 bp, Homo sapien
tgcatctgaatcactgaaatgttgg

SEQ ID NO: 546835 - DNA, 25 bp, Homo sapien
gaaacatctagctttggtgatgcca

SEQ ID NO: 546836 - DNA, 25 bp, Homo sapien
tcattgttatggcaatatatcgagc

SEQ ID NO: 546837 - DNA, 25 bp, Homo sapien
gcaatatatcgagcttccttcacta

SEQ ID NO: 546838 - DNA, 25 bp, Homo sapien
gtgatgccagccctccataagtcat

SEQ ID NO: 546839 - DNA, 25 bp, Homo sapien
ttctttgcttgatcttgttgtaaag

SEQ ID NO: 546840 - DNA, 25 bp, Homo sapien
gcagctgttactgcaggactgccag

SEQ ID NO: 546841 - DNA, 25 bp, Homo sapien
ctttgcttgatcttgttgtaaagac

SEQ ID NO: 546842 - DNA, 25 bp, Homo sapien
gatgcagctgttactgcaggactgc

SEQ ID NO: 546843 - DNA, 25 bp, Homo sapien
cgcatatgaatctggctgaagccac

SEQ ID NO: 546844 - DNA, 25 bp, Homo sapien
tgttttctgaggatccgcatatgaa

SEQ ID NO: 546845 - DNA, 25 bp, Homo sapien
ggtaggccaaccacaacgaatatca

SEQ ID NO: 546846 - DNA, 25 bp, Homo sapien
catattgggaacatgtaccacatcc

SEQ ID NO: 546847 - DNA, 25 bp, Homo sapien
cttgcaagccttccaccacttgatc

SEQ ID NO: 546848 - DNA, 25 bp, Homo sapien
tgctttggatttggagtggtaaatt

SEQ ID NO: 546849 - DNA, 25 bp, Homo sapien
tcatccagaaaagactgttcattgc

SEQ ID NO: 546850 - DNA, 25 bp, Homo sapien
ggtaaatttccctcaagtgcttcta

SEQ ID NO: 546851 - DNA, 25 bp, Homo sapien
gcttctaatatagttggtgaatgag

SEQ ID NO: 546852 - DNA, 25 bp, Homo sapien
tccaagaattccagaatgggttttg

SEQ ID NO: 546853 - DNA, 25 bp, Homo sapien
gaattccagaatgggttttgcacac

SEQ ID NO: 546854 - DNA, 25 bp, Homo sapien
ctttccaagaattccagaatgggtt

SEQ ID NO: 546855 - DNA, 25 bp, Homo sapien
aagaattccagaatgggttttgcac

SEQ ID NO: 546856 - DNA, 25 bp, Homo sapien
ccgctttgattaattcacctcagga

SEQ ID NO: 546857 - DNA, 25 bp, Homo sapien
actagctgtatgatcgtgggcgaac

SEQ ID NO: 546858 - DNA, 25 bp, Homo sapien
gccagcgaacaaatcccagtgcagt

SEQ ID NO: 546859 - DNA, 25 bp, Homo sapien
ccagtgcagttgctcactagctgta

SEQ ID NO: 546860 - DNA, 25 bp, Homo sapien
ttgctgcttcttataacacaactat

SEQ ID NO: 546861 - DNA, 25 bp, Homo sapien
ttataacacaactatacatcctttg

SEQ ID NO: 546862 - DNA, 25 bp, Homo sapien
caactatacatcctttgtgaaatgt

SEQ ID NO: 546863 - DNA, 25 bp, Homo sapien
gcttcttataacacaactatacatc

SEQ ID NO: 546864 - DNA, 25 bp, Homo sapien
ctcctcaagaatttcaaggtcttct

SEQ ID NO: 546865 - DNA, 25 bp, Homo sapien
gcagcctcctcaagaatttcaaggt

SEQ ID NO: 546866 - DNA, 25 bp, Homo sapien
caagaatttcaaggtcttcttctaa

SEQ ID NO: 546867 - DNA, 25 bp, Homo sapien
ctgcaatgcagcctcctcaagaatt

SEQ ID NO: 546868 - DNA, 25 bp, Homo sapien
acaaaccccaccaagattggctaat

SEQ ID NO: 546869 - DNA, 25 bp, Homo sapien
gctaaattcatatccaattgcaaaa

SEQ ID NO: 546870 - DNA, 25 bp, Homo sapien
aaccatagaaagaagctttgtcatc

SEQ ID NO: 546871 - DNA, 25 bp, Homo sapien
aaaccatagaaagaagctttgtcat

SEQ ID NO: 546872 - DNA, 25 bp, Homo sapien
agggctaaattcatatccaattgca

SEQ ID NO: 546873 - DNA, 25 bp, Homo sapien
ctgatgcagtctccaatgaaaaaag

SEQ ID NO: 546874 - DNA, 25 bp, Homo sapien
tgcagtctccaatgaaaaaagggcc

SEQ ID NO: 546875 - DNA, 25 bp, Homo sapien
gatgcagtctccaatgaaaaaaggg

SEQ ID NO: 546876 - DNA, 25 bp, Homo sapien
cagtctccaatgaaaaaagggcctc

SEQ ID NO: 546877 - DNA, 25 bp, Homo sapien
catgaacagatgtcaattttggtcc

SEQ ID NO: 546878 - DNA, 25 bp, Homo sapien
cactgagggtcaaattcgattgtca

SEQ ID NO: 546879 - DNA, 25 bp, Homo sapien
accaaaaccatagtaggccacccag

SEQ ID NO: 546880 - DNA, 25 bp, Homo sapien
tctgacaggaatcaacaaacgaagg

SEQ ID NO: 546881 - DNA, 25 bp, Homo sapien
ctatgacagcatagtgactggaggt

SEQ ID NO: 546882 - DNA, 25 bp, Homo sapien
caggcggtgcatacttctgattcaa

SEQ ID NO: 546883 - DNA, 25 bp, Homo sapien
cggaagcaattgttggacaaggcca

SEQ ID NO: 546884 - DNA, 25 bp, Homo sapien
caggcaggtttatacgggtgctcac

SEQ ID NO: 546885 - DNA, 25 bp, Homo sapien
cttgggaatagcagcagctactggt

SEQ ID NO: 546886 - DNA, 25 bp, Homo sapien
gcagcagctactggtcctatgtagg

SEQ ID NO: 546887 - DNA, 25 bp, Homo sapien
tagcagcagctactggtcctatgta

SEQ ID NO: 546888 - DNA, 25 bp, Homo sapien
tgggaatagcagcagctactggtcc

SEQ ID NO: 546889 - DNA, 25 bp, Homo sapien
ggaaaacagactggaagaactcagc

SEQ ID NO: 546890 - DNA, 25 bp, Homo sapien
cagcatggaaaacagactggaagaa

SEQ ID NO: 546891 - DNA, 25 bp, Homo sapien
catggaaaacagactggaagaactc

SEQ ID NO: 546892 - DNA, 25 bp, Homo sapien
tggaaaacagactggaagaactcag

SEQ ID NO: 546893 - DNA, 25 bp, Homo sapien
gaaatgtacttgcaccatggcagtc

SEQ ID NO: 546894 - DNA, 25 bp, Homo sapien
cagagttttgggtggatagcgatac

SEQ ID NO: 546895 - DNA, 25 bp, Homo sapien
taatgataactctgctgccagtgtg

SEQ ID NO: 546896 - DNA, 25 bp, Homo sapien
gctgaatttagacaagtgcctctga

SEQ ID NO: 546897 - DNA, 25 bp, Homo sapien
tcattggctttactcagaagttggg

SEQ ID NO: 546898 - DNA, 25 bp, Homo sapien
cagacaatgctctgctacagttttt

SEQ ID NO: 546899 - DNA, 25 bp, Homo sapien
ggctcgaacgacagtgcttacaaca

SEQ ID NO: 546900 - DNA, 25 bp, Homo sapien
cagaagttgggattgtaaatctcca

SEQ ID NO: 546901 - DNA, 25 bp, Homo sapien
ttacagttagcaggtagaggttgca

SEQ ID NO: 546902 - DNA, 25 bp, Homo sapien
tatactggtatgagaatgggaagct

SEQ ID NO: 546903 - DNA, 25 bp, Homo sapien
gaccaatagtgaaaggagggagact

SEQ ID NO: 546904 - DNA, 25 bp, Homo sapien
tgtagagaactgattgtaggagacc

SEQ ID NO: 546905 - DNA, 25 bp, Homo sapien
gacgccagctttgccgctacaagaa

SEQ ID NO: 546906 - DNA, 25 bp, Homo sapien
gcagatgctcttagtggctctccag

SEQ ID NO: 546907 - DNA, 25 bp, Homo sapien
tactcatgactacctaagacgccag

SEQ ID NO: 546908 - DNA, 25 bp, Homo sapien
tcagtgatttaatgccaagtcaggc

SEQ ID NO: 546909 - DNA, 25 bp, Homo sapien
cgttactgctcaagctgcacgtgct

SEQ ID NO: 546910 - DNA, 25 bp, Homo sapien
tgcacgtgctgaatgtgaatgtcac

SEQ ID NO: 546911 - DNA, 25 bp, Homo sapien
tacggcttccatagttcctcaagcg

SEQ ID NO: 546912 - DNA, 25 bp, Homo sapien
catctccattggctgtacggcttcc

SEQ ID NO: 546913 - DNA, 25 bp, Homo sapien
tgtacgttcctttcactaattccag

SEQ ID NO: 546914 - DNA, 25 bp, Homo sapien
caagtctgatctcagctatatcact

SEQ ID NO: 546915 - DNA, 25 bp, Homo sapien
tgagttgaatctcctgcatgttcac

SEQ ID NO: 546916 - DNA, 25 bp, Homo sapien
tcactgggtgagtcatccgttgtgt

SEQ ID NO: 546917 - DNA, 25 bp, Homo sapien
agaaaccaaccacaactattccagg

SEQ ID NO: 546918 - DNA, 25 bp, Homo sapien
cggttagcactagcttttacagagt

SEQ ID NO: 546919 - DNA, 25 bp, Homo sapien
cagagtgaagagaattaagtccatc

SEQ ID NO: 546920 - DNA, 25 bp, Homo sapien
tccaggtttgtctactgaaaaacag

SEQ ID NO: 546921 - DNA, 25 bp, Homo sapien
gattaactcacaataaaaccagatt

SEQ ID NO: 546922 - DNA, 25 bp, Homo sapien
tctaaattcacaaatcaatgtcact

SEQ ID NO: 546923 - DNA, 25 bp, Homo sapien
ttagccatatgaaactatactttcc

SEQ ID NO: 546924 - DNA, 25 bp, Homo sapien
aatgtcagaagtacaagcttgtctt

SEQ ID NO: 546925 - DNA, 25 bp, Homo sapien
taatccacaggtgttagagacgagg

SEQ ID NO: 546926 - DNA, 25 bp, Homo sapien
tcacggaagcttgtcatccctgaga

SEQ ID NO: 546927 - DNA, 25 bp, Homo sapien
caggctgttcctgactggtagcaca

SEQ ID NO: 546928 - DNA, 25 bp, Homo sapien
tggtagcacaacaatgaccagcatt

SEQ ID NO: 546929 - DNA, 25 bp, Homo sapien
tacttctccatcatacgcaatcggg

SEQ ID NO: 546930 - DNA, 25 bp, Homo sapien
gcaaggagtcggctacttgatgtct

SEQ ID NO: 546931 - DNA, 25 bp, Homo sapien
tcagcttaacagacgtgtgacacag

SEQ ID NO: 546932 - DNA, 25 bp, Homo sapien
cgcaatcgggaagatggaagtcagc

SEQ ID NO: 546933 - DNA, 25 bp, Homo sapien
cattatccaatttcaccatgcagtg

SEQ ID NO: 546934 - DNA, 25 bp, Homo sapien
tctagaagactcaagggttgactga

SEQ ID NO: 546935 - DNA, 25 bp, Homo sapien
ggttgactgagatatccttgaggat

SEQ ID NO: 546936 - DNA, 25 bp, Homo sapien
tattatgacattcctgaaggacagc

SEQ ID NO: 546937 - DNA, 25 bp, Homo sapien
aaagcgcagtctctctaaatctagg

SEQ ID NO: 546938 - DNA, 25 bp, Homo sapien
actcctaagactaaggtggtccagc

SEQ ID NO: 546939 - DNA, 25 bp, Homo sapien
acaacaggtacccacaaagcgcagt

SEQ ID NO: 546940 - DNA, 25 bp, Homo sapien
taaatttcacaggtatagacacgca

SEQ ID NO: 546941 - DNA, 25 bp, Homo sapien
gcaaacggagaagactgacagagcc

SEQ ID NO: 546942 - DNA, 25 bp, Homo sapien
cacaagctctacaaactgccatggc

SEQ ID NO: 546943 - DNA, 25 bp, Homo sapien
caagcatgttgtagagcatcctgta

SEQ ID NO: 546944 - DNA, 25 bp, Homo sapien
taggatgcaaagttaccaagaagcc

SEQ ID NO: 546945 - DNA, 25 bp, Homo sapien
gtacaggttcactggtttgctgttt

SEQ ID NO: 546946 - DNA, 25 bp, Homo sapien
tgtgtacaggttcactggtttgctg

SEQ ID NO: 546947 - DNA, 25 bp, Homo sapien
tgtacaggttcactggtttgctgtt

SEQ ID NO: 546948 - DNA, 25 bp, Homo sapien
gtgtacaggttcactggtttgctgt

SEQ ID NO: 546949 - DNA, 25 bp, Homo sapien
actgaggtatctgacccgcattaac

SEQ ID NO: 546950 - DNA, 25 bp, Homo sapien
tgaggtatctgacccgcattaacat

SEQ ID NO: 546951 - DNA, 25 bp, Homo sapien
gtatctgacccgcattaacatctgt

SEQ ID NO: 546952 - DNA, 25 bp, Homo sapien
tctgacccgcattaacatctgtacc

SEQ ID NO: 546953 - DNA, 25 bp, Homo sapien
tagatgcctgtccatgagatccaca

SEQ ID NO: 546954 - DNA, 25 bp, Homo sapien
gatgcctgtccatgagatccacagt

SEQ ID NO: 546955 - DNA, 25 bp, Homo sapien
ggtaatagatgcctgtccatgagat

SEQ ID NO: 546956 - DNA, 25 bp, Homo sapien
taatagatgcctgtccatgagatcc

SEQ ID NO: 546957 - DNA, 25 bp, Homo sapien
tttcttacttctctgtcacatatat

SEQ ID NO: 546958 - DNA, 25 bp, Homo sapien
cttacttctctgtcacatatattta

SEQ ID NO: 546959 - DNA, 25 bp, Homo sapien
tctaagaagtctggacaagaatgca

SEQ ID NO: 546960 - DNA, 25 bp, Homo sapien
agaagtctggacaagaatgcaagca

SEQ ID NO: 546961 - DNA, 25 bp, Homo sapien
agtcataagccaatacatcagtctc

SEQ ID NO: 546962 - DNA, 25 bp, Homo sapien
gtcataagccaatacatcagtctct

SEQ ID NO: 546963 - DNA, 25 bp, Homo sapien
actgaatgggcagaataaccccagc

SEQ ID NO: 546964 - DNA, 25 bp, Homo sapien
gtaaaatatcagtgtcggcactgaa

SEQ ID NO: 546965 - DNA, 25 bp, Homo sapien
actgaaacgtatagcttctactgaa

SEQ ID NO: 546966 - DNA, 25 bp, Homo sapien
tgaatgggcagaataaccccagcct

SEQ ID NO: 546967 - DNA, 25 bp, Homo sapien
cctgtttaccacactataatcttct

SEQ ID NO: 546968 - DNA, 25 bp, Homo sapien
ttaccacactataatcttctttaga

SEQ ID NO: 546969 - DNA, 25 bp, Homo sapien
tgcatagctgccaaggtatcaagac

SEQ ID NO: 546970 - DNA, 25 bp, Homo sapien
tttcaaacctgtttaccacactata

SEQ ID NO: 546971 - DNA, 25 bp, Homo sapien
taggatactacatctggactgcatg

SEQ ID NO: 546972 - DNA, 25 bp, Homo sapien
tggcatcagcaaccaccgcattgta

SEQ ID NO: 546973 - DNA, 25 bp, Homo sapien
cagctctctagtatttggtcgaaac

SEQ ID NO: 546974 - DNA, 25 bp, Homo sapien
tgtgcaaagctgcatgagatcgggt

SEQ ID NO: 546975 - DNA, 25 bp, Homo sapien
tgcacattcttaaagggcaagctca

SEQ ID NO: 546976 - DNA, 25 bp, Homo sapien
tccagaatgcatataatcctgtata

SEQ ID NO: 546977 - DNA, 25 bp, Homo sapien
tgccttatttatctctatgttttta

SEQ ID NO: 546978 - DNA, 25 bp, Homo sapien
taaagggcaagctcaattatcttct

SEQ ID NO: 546979 - DNA, 25 bp, Homo sapien
catatacaggatcaagacacacacc

SEQ ID NO: 546980 - DNA, 25 bp, Homo sapien
tacatcatatacaggatcaagacac

SEQ ID NO: 546981 - DNA, 25 bp, Homo sapien
caaatccttgcagatcctcttgttc

SEQ ID NO: 546982 - DNA, 25 bp, Homo sapien
caccaaatccttgcagatcctcttg

SEQ ID NO: 546983 - DNA, 25 bp, Homo sapien
tccaatgttaggcatgggagctggc

SEQ ID NO: 546984 - DNA, 25 bp, Homo sapien
aagtttggtccccacttgcacctat

SEQ ID NO: 546985 - DNA, 25 bp, Homo sapien
caaaaatttctgatgtagcaagtac

SEQ ID NO: 546986 - DNA, 25 bp, Homo sapien
catccaaaattggtctgcccagttg

SEQ ID NO: 546987 - DNA, 25 bp, Homo sapien
gccgtatggttgctgcctgcagtga

SEQ ID NO: 546988 - DNA, 25 bp, Homo sapien
tgtccatccattaaaagtactgccg

SEQ ID NO: 546989 - DNA, 25 bp, Homo sapien
tgtgaagacctgtccatccattaaa

SEQ ID NO: 546990 - DNA, 25 bp, Homo sapien
tgtgctagggcctggcaatgcttga

SEQ ID NO: 546991 - DNA, 25 bp, Homo sapien
gatgctggcatcctatcaaggacca

SEQ ID NO: 546992 - DNA, 25 bp, Homo sapien
cctgcctcagctcgaagggtagaga

SEQ ID NO: 546993 - DNA, 25 bp, Homo sapien
cataaacataactcaggacattccc

SEQ ID NO: 546994 - DNA, 25 bp, Homo sapien
catcctggatacatatagaatctgg

SEQ ID NO: 546995 - DNA, 25 bp, Homo sapien
gaaagggaatctttagctgcacgat

SEQ ID NO: 546996 - DNA, 25 bp, Homo sapien
gctgcacgatcatgtcacgaactaa

SEQ ID NO: 546997 - DNA, 25 bp, Homo sapien
gagagaccaataggttctgtccaaa

SEQ ID NO: 546998 - DNA, 25 bp, Homo sapien
caatgactgcatgttattagaccaa

SEQ ID NO: 546999 - DNA, 25 bp, Homo sapien
gcccatgctgcccataaccaaatgt

SEQ ID NO: 547000 - DNA, 25 bp, Homo sapien
cccatgctgcccataaccaaatgta

SEQ ID NO: 547001 - DNA, 25 bp, Homo sapien
ccatgctgcccataaccaaatgtat

SEQ ID NO: 547002 - DNA, 25 bp, Homo sapien
cagtcaaatcgcacagagcctggag

SEQ ID NO: 547003 - DNA, 25 bp, Homo sapien
agggtatgttgtgattttgcttgca

SEQ ID NO: 547004 - DNA, 25 bp, Homo sapien
tccacagctgacttggactgcccgg

SEQ ID NO: 547005 - DNA, 25 bp, Homo sapien
tgcttgcatccttttcgcctctttc

SEQ ID NO: 547006 - DNA, 25 bp, Homo sapien
caataaatagagtgtggttacctac

SEQ ID NO: 547007 - DNA, 25 bp, Homo sapien
gaaactctttacgacactaggacag

SEQ ID NO: 547008 - DNA, 25 bp, Homo sapien
tcggaataacatagaacaggtaggc

SEQ ID NO: 547009 - DNA, 25 bp, Homo sapien
cctgtgtggcttactggaaacgtct

SEQ ID NO: 547010 - DNA, 25 bp, Homo sapien
cacaatgactaaaaaagtagcagct

SEQ ID NO: 547011 - DNA, 25 bp, Homo sapien
tgagggtcttaatctttatcagcag

SEQ ID NO: 547012 - DNA, 25 bp, Homo sapien
gatgagggtcttaatctttatcagc

SEQ ID NO: 547013 - DNA, 25 bp, Homo sapien
aacttctcaattattatagacagtg

SEQ ID NO: 547014 - DNA, 25 bp, Homo sapien
ataggaccagcaaatacaagggggc

SEQ ID NO: 547015 - DNA, 25 bp, Homo sapien
tgcttgtcccgtttatgctttagct

SEQ ID NO: 547016 - DNA, 25 bp, Homo sapien
tctggctagagcctgttctcgatgg

SEQ ID NO: 547017 - DNA, 25 bp, Homo sapien
ctttgtgcttgtcccgtttatgctt

SEQ ID NO: 547018 - DNA, 25 bp, Homo sapien
gaggagaaacattttgtatgtgcat

SEQ ID NO: 547019 - DNA, 25 bp, Homo sapien
gagaaacattttgtatgtgcataga

SEQ ID NO: 547020 - DNA, 25 bp, Homo sapien
ctgaggagaaacattttgtatgtgc

SEQ ID NO: 547021 - DNA, 25 bp, Homo sapien
ggagaaacattttgtatgtgcatag

SEQ ID NO: 547022 - DNA, 25 bp, Homo sapien
gagaagagccttagaacactgtgca

SEQ ID NO: 547023 - DNA, 25 bp, Homo sapien
tggcagccggaacactaacatttta

SEQ ID NO: 547024 - DNA, 25 bp, Homo sapien
cagaaggtcattggatcaaaccgca

SEQ ID NO: 547025 - DNA, 25 bp, Homo sapien
tattcctcatgggagcaaagccact

SEQ ID NO: 547026 - DNA, 25 bp, Homo sapien
cttttaagctcataaacaatgagga

SEQ ID NO: 547027 - DNA, 25 bp, Homo sapien
gataaacaatagacctatctttgca

SEQ ID NO: 547028 - DNA, 25 bp, Homo sapien
tgagcaaggaaatctttagtaatac

SEQ ID NO: 547029 - DNA, 25 bp, Homo sapien
tcatagacttccataacaatttgtc

SEQ ID NO: 547030 - DNA, 25 bp, Homo sapien
gaagcatgaataccctgaatatttt

SEQ ID NO: 547031 - DNA, 25 bp, Homo sapien
gttattagaagaagcatgaataccc

SEQ ID NO: 547032 - DNA, 25 bp, Homo sapien
tattagaagaagcatgaataccctg

SEQ ID NO: 547033 - DNA, 25 bp, Homo sapien
tagaagaagcatgaataccctgaat

SEQ ID NO: 547034 - DNA, 25 bp, Homo sapien
ccttcctctaatctgtgccttctga

SEQ ID NO: 547035 - DNA, 25 bp, Homo sapien
tgattacacgttgccgtttttcttc

SEQ ID NO: 547036 - DNA, 25 bp, Homo sapien
tttcttcttgtcgtaactgaaggtg

SEQ ID NO: 547037 - DNA, 25 bp, Homo sapien
cttcaatgttaaccccgggcactgg

SEQ ID NO: 547038 - DNA, 25 bp, Homo sapien
ctaaaagaagatctaaaggtatcat

SEQ ID NO: 547039 - DNA, 25 bp, Homo sapien
acacagcacaaccagattctccgga

SEQ ID NO: 547040 - DNA, 25 bp, Homo sapien
ttgcacaggccttgcaacatccaca

SEQ ID NO: 547041 - DNA, 25 bp, Homo sapien
tgaccatctaactctcttgcacagg

SEQ ID NO: 547042 - DNA, 25 bp, Homo sapien
tgcaaaccatgcactgctccagctt

SEQ ID NO: 547043 - DNA, 25 bp, Homo sapien
cagctggctccataacctgtacagt

SEQ ID NO: 547044 - DNA, 25 bp, Homo sapien
ggccgtccactactgacacagctgg

SEQ ID NO: 547045 - DNA, 25 bp, Homo sapien
ccatttgtgcatgcctggagggcac

SEQ ID NO: 547046 - DNA, 25 bp, Homo sapien
aagtgtgagctttgcccatagctac

SEQ ID NO: 547047 - DNA, 25 bp, Homo sapien
atggcaccagtatctcgtccacact

SEQ ID NO: 547048 - DNA, 25 bp, Homo sapien
ggcaccagtatctcgtccacactgt

SEQ ID NO: 547049 - DNA, 25 bp, Homo sapien
accagtatctcgtccacactgtcct

SEQ ID NO: 547050 - DNA, 25 bp, Homo sapien
tacaaaatggcccttcaaatcagtt

SEQ ID NO: 547051 - DNA, 25 bp, Homo sapien
aaatggcccttcaaatcagttacca

SEQ ID NO: 547052 - DNA, 25 bp, Homo sapien
tggcccttcaaatcagttaccaaac

SEQ ID NO: 547053 - DNA, 25 bp, Homo sapien
ctgagttacaaaatggcccttcaaa

SEQ ID NO: 547054 - DNA, 25 bp, Homo sapien
gaaataacagaactacttccattat

SEQ ID NO: 547055 - DNA, 25 bp, Homo sapien
ttccaaacatgtagagttctccatc

SEQ ID NO: 547056 - DNA, 25 bp, Homo sapien
tgaactatcagagtaaatggcatct

SEQ ID NO: 547057 - DNA, 25 bp, Homo sapien
ttattgcaggctgtatataccacaa

SEQ ID NO: 547058 - DNA, 25 bp, Homo sapien
gatcctgtaaagaatatgctcccat

SEQ ID NO: 547059 - DNA, 25 bp, Homo sapien
gattttgtaattggtagctcaaccc

SEQ ID NO: 547060 - DNA, 25 bp, Homo sapien
gccatcgtgtccaactgagaagtgt

SEQ ID NO: 547061 - DNA, 25 bp, Homo sapien
aactaaaagggcgtgagagccatcg

SEQ ID NO: 547062 - DNA, 25 bp, Homo sapien
cattagcgcaaactctcgtcctgca

SEQ ID NO: 547063 - DNA, 25 bp, Homo sapien
ctgcaccaagaattgctgactcctc

SEQ ID NO: 547064 - DNA, 25 bp, Homo sapien
caagaattgctgactcctcatcaaa

SEQ ID NO: 547065 - DNA, 25 bp, Homo sapien
tgctgttttcattagcgcaaactct

SEQ ID NO: 547066 - DNA, 25 bp, Homo sapien
tattgagcgtttattaggtaccagg

SEQ ID NO: 547067 - DNA, 25 bp, Homo sapien
tcaagcttggaacaatgccatgcag

SEQ ID NO: 547068 - DNA, 25 bp, Homo sapien
taaccataggtatagtactccaagg

SEQ ID NO: 547069 - DNA, 25 bp, Homo sapien
gagaggttagtccagacacagagtc

SEQ ID NO: 547070 - DNA, 25 bp, Homo sapien
tagaacaggttcagtgcttgtggca

SEQ ID NO: 547071 - DNA, 25 bp, Homo sapien
cattttctagccagtttaagttgca

SEQ ID NO: 547072 - DNA, 25 bp, Homo sapien
tccttttccagatcgaatagtgaga

SEQ ID NO: 547073 - DNA, 25 bp, Homo sapien
tgagataccacaggcatgtaagcat

SEQ ID NO: 547074 - DNA, 25 bp, Homo sapien
tcttgaagcagctatctgattaata

SEQ ID NO: 547075 - DNA, 25 bp, Homo sapien
aaaatattttgaccttcagtgtggc

SEQ ID NO: 547076 - DNA, 25 bp, Homo sapien
atattttgaccttcagtgtggcaat

SEQ ID NO: 547077 - DNA, 25 bp, Homo sapien
tctcttgaagcagctatctgattaa

SEQ ID NO: 547078 - DNA, 25 bp, Homo sapien
tggtaacatcacagtaccatcttgc

SEQ ID NO: 547079 - DNA, 25 bp, Homo sapien
gcttatccttatggctgtcatgctg

SEQ ID NO: 547080 - DNA, 25 bp, Homo sapien
gctccagtgtttcagggcttatcct

SEQ ID NO: 547081 - DNA, 25 bp, Homo sapien
ctgtggttattcacatctctatata

SEQ ID NO: 547082 - DNA, 25 bp, Homo sapien
tttctgtttctaatacgggatgtag

SEQ ID NO: 547083 - DNA, 25 bp, Homo sapien
ctgagcataccctaaccaagacttt

SEQ ID NO: 547084 - DNA, 25 bp, Homo sapien
tgagcataccctaaccaagactttt

SEQ ID NO: 547085 - DNA, 25 bp, Homo sapien
tctaatacgggatgtagaattgtat

SEQ ID NO: 547086 - DNA, 25 bp, Homo sapien
tgcttgtacacttctctgtagcgaa

SEQ ID NO: 547087 - DNA, 25 bp, Homo sapien
cattactaaaccagtcctgaatttg

SEQ ID NO: 547088 - DNA, 25 bp, Homo sapien
tggccacttgtgcattaaagctgct

SEQ ID NO: 547089 - DNA, 25 bp, Homo sapien
ctgtagcgaatttagaattgttggc

SEQ ID NO: 547090 - DNA, 25 bp, Homo sapien
tactcctgctatgagctctaatggc

SEQ ID NO: 547091 - DNA, 25 bp, Homo sapien
ctttccatgaacgtagttcttatac

SEQ ID NO: 547092 - DNA, 25 bp, Homo sapien
atgaacgtagttcttatactcctgc

SEQ ID NO: 547093 - DNA, 25 bp, Homo sapien
gagctctaatggcattcctaagtct

SEQ ID NO: 547094 - DNA, 25 bp, Homo sapien
tgtcattcatcccagtacttcgaac

SEQ ID NO: 547095 - DNA, 25 bp, Homo sapien
cagtacttcgaacggtgatttccaa

SEQ ID NO: 547096 - DNA, 25 bp, Homo sapien
ccaccagactaaagaggcaagcaca

SEQ ID NO: 547097 - DNA, 25 bp, Homo sapien
caggaaagtgctgttaaggactgtc

SEQ ID NO: 547098 - DNA, 25 bp, Homo sapien
ggatggatgagaaaatcgtgtctct

SEQ ID NO: 547099 - DNA, 25 bp, Homo sapien
aatcgtgtctctttgatcaattcaa

SEQ ID NO: 547100 - DNA, 25 bp, Homo sapien
aaacttcacaaaggccaacctcaat

SEQ ID NO: 547101 - DNA, 25 bp, Homo sapien
cgttgagcagggcttggagactcct

SEQ ID NO: 547102 - DNA, 25 bp, Homo sapien
tttaatggtgtttgaaccccagcag

SEQ ID NO: 547103 - DNA, 25 bp, Homo sapien
tgaggcacggatgtgtcaaataact

SEQ ID NO: 547104 - DNA, 25 bp, Homo sapien
catgctaaccctgtttgcagacagg

SEQ ID NO: 547105 - DNA, 25 bp, Homo sapien
gcagacaggtcagtacttggtagaa

SEQ ID NO: 547106 - DNA, 25 bp, Homo sapien
gagtacaattataagcttaggcaga

SEQ ID NO: 547107 - DNA, 25 bp, Homo sapien
gcattatagccagaacacctgcagg

SEQ ID NO: 547108 - DNA, 25 bp, Homo sapien
taattgcccctataacagactccaa

SEQ ID NO: 547109 - DNA, 25 bp, Homo sapien
ctatttttgcccataagccgtgtta

SEQ ID NO: 547110 - DNA, 25 bp, Homo sapien
agatgcggctgccaatgatatttcc

SEQ ID NO: 547111 - DNA, 25 bp, Homo sapien
agttcttagatgcggctgccaatga

SEQ ID NO: 547112 - DNA, 25 bp, Homo sapien
gcggctgccaatgatatttcctttt

SEQ ID NO: 547113 - DNA, 25 bp, Homo sapien
actatctgattctccactctgcaca

SEQ ID NO: 547114 - DNA, 25 bp, Homo sapien
cgcaatggcgtacattacagtaaat

SEQ ID NO: 547115 - DNA, 25 bp, Homo sapien
ggcgtacattacagtaaatattgaa

SEQ ID NO: 547116 - DNA, 25 bp, Homo sapien
ctgccattccagaacgcaatggcgt

SEQ ID NO: 547117 - DNA, 25 bp, Homo sapien
ccagaacgcaatggcgtacattaca

SEQ ID NO: 547118 - DNA, 25 bp, Homo sapien
ggtatgattactgtattctctaagt

SEQ ID NO: 547119 - DNA, 25 bp, Homo sapien
ctatgtagtttgatatctggtatga

SEQ ID NO: 547120 - DNA, 25 bp, Homo sapien
agtttgatatctggtatgattactg

SEQ ID NO: 547121 - DNA, 25 bp, Homo sapien
tatctggtatgattactgtattctc

SEQ ID NO: 547122 - DNA, 25 bp, Homo sapien
gtctgattgactaacaagatatgtc

SEQ ID NO: 547123 - DNA, 25 bp, Homo sapien
tatgtctgtgtgaccaaacccacaa

SEQ ID NO: 547124 - DNA, 25 bp, Homo sapien
caaagtcttgaattctaaaactcac

SEQ ID NO: 547125 - DNA, 25 bp, Homo sapien
ctaacaagatatgtctgtgtgacca

SEQ ID NO: 547126 - DNA, 25 bp, Homo sapien
ctgagcaaaaacaatatacacattt

SEQ ID NO: 547127 - DNA, 25 bp, Homo sapien
aatatacacatttctctgtagttca

SEQ ID NO: 547128 - DNA, 25 bp, Homo sapien
aacaatatacacatttctctgtagt

SEQ ID NO: 547129 - DNA, 25 bp, Homo sapien
tgagcaaaaacaatatacacatttc

SEQ ID NO: 547130 - DNA, 25 bp, Homo sapien
ctgccagagagaaagcatgtctttc

SEQ ID NO: 547131 - DNA, 25 bp, Homo sapien
ccagagagaaagcatgtctttcttt

SEQ ID NO: 547132 - DNA, 25 bp, Homo sapien
agaaagcatgtctttctttctgaca

SEQ ID NO: 547133 - DNA, 25 bp, Homo sapien
gaaagcatgtctttctttctgacat

SEQ ID NO: 547134 - DNA, 25 bp, Homo sapien
gcttcttgtcttcacttttgatttg

SEQ ID NO: 547135 - DNA, 25 bp, Homo sapien
ctcttctgttttcttttcaatttct

SEQ ID NO: 547136 - DNA, 25 bp, Homo sapien
ttttgatttgctcttctgttttctt

SEQ ID NO: 547137 - DNA, 25 bp, Homo sapien
cttgcttcttgtcttcacttttgat

SEQ ID NO: 547138 - DNA, 25 bp, Homo sapien
gcggtctatgtaatccctcactgga

SEQ ID NO: 547139 - DNA, 25 bp, Homo sapien
catacacagtgttagtctagttcgg

SEQ ID NO: 547140 - DNA, 25 bp, Homo sapien
ccagatattaacgttaggaggcaag

SEQ ID NO: 547141 - DNA, 25 bp, Homo sapien
tgggatgaaccaaacagagaacgag

SEQ ID NO: 547142 - DNA, 25 bp, Homo sapien
cctatctcagacttcggtttcactg

SEQ ID NO: 547143 - DNA, 25 bp, Homo sapien
tcaagaacctatctcagacttcggt

SEQ ID NO: 547144 - DNA, 25 bp, Homo sapien
tatctcagacttcggtttcactggc

SEQ ID NO: 547145 - DNA, 25 bp, Homo sapien
gaacctatctcagacttcggtttca

SEQ ID NO: 547146 - DNA, 25 bp, Homo sapien
agtctgtgaacctgaacgtgtatca

SEQ ID NO: 547147 - DNA, 25 bp, Homo sapien
aaatttaccgatttgagaagctcag

SEQ ID NO: 547148 - DNA, 25 bp, Homo sapien
taaggtcaacattaggctgaaagga

SEQ ID NO: 547149 - DNA, 25 bp, Homo sapien
ggaagcaagcatctactcggaatta

SEQ ID NO: 547150 - DNA, 25 bp, Homo sapien
aactaattctaaagcctgacaggat

SEQ ID NO: 547151 - DNA, 25 bp, Homo sapien
cgtgaatttgtcaaaagcttcccca

SEQ ID NO: 547152 - DNA, 25 bp, Homo sapien
tcagagatcccatagaccttaaagg

SEQ ID NO: 547153 - DNA, 25 bp, Homo sapien
ctcactttatgagacgaggataact

SEQ ID NO: 547154 - DNA, 25 bp, Homo sapien
aggatcttttaaccccttgccatca

SEQ ID NO: 547155 - DNA, 25 bp, Homo sapien
caggattctcatagcgccctctgtt

SEQ ID NO: 547156 - DNA, 25 bp, Homo sapien
cgccctctgttggaaatgtttctct

SEQ ID NO: 547157 - DNA, 25 bp, Homo sapien
ccaggatcttttaaccccttgccat

SEQ ID NO: 547158 - DNA, 25 bp, Homo sapien
tttcatagcagtcaacatgccaagc

SEQ ID NO: 547159 - DNA, 25 bp, Homo sapien
cactgagtccattaggtttgaaact

SEQ ID NO: 547160 - DNA, 25 bp, Homo sapien
tcaaaacgaataggatatgatgcct

SEQ ID NO: 547161 - DNA, 25 bp, Homo sapien
tttccaagacggcagagactttgtc

SEQ ID NO: 547162 - DNA, 25 bp, Homo sapien
caataaatgcgcaggtacacacacg

SEQ ID NO: 547163 - DNA, 25 bp, Homo sapien
taaagatgttcctgcggtgccataa

SEQ ID NO: 547164 - DNA, 25 bp, Homo sapien
caaccttcagggtatgcggcatgta

SEQ ID NO: 547165 - DNA, 25 bp, Homo sapien
tccccatgtactgcaagaagctgtg

SEQ ID NO: 547166 - DNA, 25 bp, Homo sapien
cagctggtagtgaccccgggagtcc

SEQ ID NO: 547167 - DNA, 25 bp, Homo sapien
tgagcgcagcggtataaatcctccg

SEQ ID NO: 547168 - DNA, 25 bp, Homo sapien
taaatcctccggtagcggtcggcca

SEQ ID NO: 547169 - DNA, 25 bp, Homo sapien
ccctggtccctgtcattgagcgcag

SEQ ID NO: 547170 - DNA, 25 bp, Homo sapien
tgggtagaatccgtccccgccgagc

SEQ ID NO: 547171 - DNA, 25 bp, Homo sapien
cgggggaggcagtcgctgcgcacat

SEQ ID NO: 547172 - DNA, 25 bp, Homo sapien
tggcggctgggtagaatccgtcccc

SEQ ID NO: 547173 - DNA, 25 bp, Homo sapien
agaaggtggcggctgggtagaatcc

SEQ ID NO: 547174 - DNA, 25 bp, Homo sapien
gcacacacagcccttttccaacgac

SEQ ID NO: 547175 - DNA, 25 bp, Homo sapien
ggccgggcgggcagacacgcgcgcg

SEQ ID NO: 547176 - DNA, 25 bp, Homo sapien
gggcgggcagacacgcgcgcgcaca

SEQ ID NO: 547177 - DNA, 25 bp, Homo sapien
cgcgcgcacacacagcccttttcca

SEQ ID NO: 547178 - DNA, 25 bp, Homo sapien
actacaaagacagcgacctccttct

SEQ ID NO: 547179 - DNA, 25 bp, Homo sapien
ctacaaagacagcgacctccttctc

SEQ ID NO: 547180 - DNA, 25 bp, Homo sapien
tacaaagacagcgacctccttctcc

SEQ ID NO: 547181 - DNA, 25 bp, Homo sapien
gactacaaagacagcgacctccttc

SEQ ID NO: 547182 - DNA, 25 bp, Homo sapien
cccgccaccccgggaatgtgaggag

SEQ ID NO: 547183 - DNA, 25 bp, Homo sapien
ccgccaccccgggaatgtgaggagg

SEQ ID NO: 547184 - DNA, 25 bp, Homo sapien
gggccgctcatctaaccccgccacc

SEQ ID NO: 547185 - DNA, 25 bp, Homo sapien
actggggccgctcatctaaccccgc

SEQ ID NO: 547186 - DNA, 25 bp, Homo sapien
taaagacctcagtgttgaccaggca

SEQ ID NO: 547187 - DNA, 25 bp, Homo sapien
ctgacaggtaagcaatgagagggcc

SEQ ID NO: 547188 - DNA, 25 bp, Homo sapien
ccaagacaatggtgtagaggcagct

SEQ ID NO: 547189 - DNA, 25 bp, Homo sapien
tctaagaattctaaggcctgacagg

SEQ ID NO: 547190 - DNA, 25 bp, Homo sapien
cagctgggcaacttggaaggctccc

SEQ ID NO: 547191 - DNA, 25 bp, Homo sapien
taagaagcccgatgtcattgagctg

SEQ ID NO: 547192 - DNA, 25 bp, Homo sapien
cattgagctgcgcaactaggcgtgc

SEQ ID NO: 547193 - DNA, 25 bp, Homo sapien
gcagcggtcgctctcctcaaaattg

SEQ ID NO: 547194 - DNA, 25 bp, Homo sapien
cgggggagtggggcgcatgccagaa

SEQ ID NO: 547195 - DNA, 25 bp, Homo sapien
gagtggggcgcatgccagaaagaaa

SEQ ID NO: 547196 - DNA, 25 bp, Homo sapien
gggagtggggcgcatgccagaaaga

SEQ ID NO: 547197 - DNA, 25 bp, Homo sapien
ggcgggggagtggggcgcatgccag

SEQ ID NO: 547198 - DNA, 25 bp, Homo sapien
agggtcgcctgaaccgtcgctgcag

SEQ ID NO: 547199 - DNA, 25 bp, Homo sapien
ctgaaccgtcgctgcagatcggaga

SEQ ID NO: 547200 - DNA, 25 bp, Homo sapien
ttctactgtcaaggggacgtgaagg

SEQ ID NO: 547201 - DNA, 25 bp, Homo sapien
agtgtggtcacaagtcgcgagggtc

SEQ ID NO: 547202 - DNA, 25 bp, Homo sapien
agtatgcaaagcaagcgtcccctcc

SEQ ID NO: 547203 - DNA, 25 bp, Homo sapien
gcaaagcaagcgtcccctcccgccg

SEQ ID NO: 547204 - DNA, 25 bp, Homo sapien
gcagtatgcaaagcaagcgtcccct

SEQ ID NO: 547205 - DNA, 25 bp, Homo sapien
tggcagtatgcaaagcaagcgtccc

SEQ ID NO: 547206 - DNA, 25 bp, Homo sapien
gtgagtctgtcctgcacctagagtt

SEQ ID NO: 547207 - DNA, 25 bp, Homo sapien
gtctgtcctgcacctagagttggca

SEQ ID NO: 547208 - DNA, 25 bp, Homo sapien
tgtgagtctgtcctgcacctagagt

SEQ ID NO: 547209 - DNA, 25 bp, Homo sapien
tctgtcctgcacctagagttggcat

SEQ ID NO: 547210 - DNA, 25 bp, Homo sapien
cctcactttgaggagcaaacatagc

SEQ ID NO: 547211 - DNA, 25 bp, Homo sapien
tttctgcacactatagccaaatggc

SEQ ID NO: 547212 - DNA, 25 bp, Homo sapien
caaacatagctctaagggctgacac

SEQ ID NO: 547213 - DNA, 25 bp, Homo sapien
tctggtcattcagccaaggtgcagc

SEQ ID NO: 547214 - DNA, 25 bp, Homo sapien
accatgtaaactgttgtgttcactg

SEQ ID NO: 547215 - DNA, 25 bp, Homo sapien
aaactgttgtgttcactggacagca

SEQ ID NO: 547216 - DNA, 25 bp, Homo sapien
aatgaaccatgtaaactgttgtgtt

SEQ ID NO: 547217 - DNA, 25 bp, Homo sapien
ttgtgttcactggacagcaacttct

SEQ ID NO: 547218 - DNA, 25 bp, Homo sapien
ccattttcaactggcgtgtgcataa

SEQ ID NO: 547219 - DNA, 25 bp, Homo sapien
caactggcgtgtgcataatgcctgc

SEQ ID NO: 547220 - DNA, 25 bp, Homo sapien
ttttcaactggcgtgtgcataatgc

SEQ ID NO: 547221 - DNA, 25 bp, Homo sapien
ctggcgtgtgcataatgcctgcttc

SEQ ID NO: 547222 - DNA, 25 bp, Homo sapien
gagaccaggtaaaagcaacatcatc

SEQ ID NO: 547223 - DNA, 25 bp, Homo sapien
tgggagctgcatggacaattcaaat

SEQ ID NO: 547224 - DNA, 25 bp, Homo sapien
tcactgcaggcaggattcactccca

SEQ ID NO: 547225 - DNA, 25 bp, Homo sapien
taggaacatagctacaaaccagaca

SEQ ID NO: 547226 - DNA, 25 bp, Homo sapien
gtttccgaagaacggcagagcctgg

SEQ ID NO: 547227 - DNA, 25 bp, Homo sapien
tctcccagggtattgatttaagttc

SEQ ID NO: 547228 - DNA, 25 bp, Homo sapien
ctaccctggcctcattggattggat

SEQ ID NO: 547229 - DNA, 25 bp, Homo sapien
cgaagcagctcagatatgacagcca

SEQ ID NO: 547230 - DNA, 25 bp, Homo sapien
tggtcatgtggtcctgctaccctgg

SEQ ID NO: 547231 - DNA, 25 bp, Homo sapien
cacttgtctgataggaagaggccaa

SEQ ID NO: 547232 - DNA, 25 bp, Homo sapien
tacacttgtctgataggaagaggcc

SEQ ID NO: 547233 - DNA, 25 bp, Homo sapien
tctacacttgtctgataggaagagg

SEQ ID NO: 547234 - DNA, 25 bp, Homo sapien
gcttcttcttcaatggggtggccca

SEQ ID NO: 547235 - DNA, 25 bp, Homo sapien
taagtaggtgccaacacagggtgga

SEQ ID NO: 547236 - DNA, 25 bp, Homo sapien
gaagttgggttgctcagtgtgtaaa

SEQ ID NO: 547237 - DNA, 25 bp, Homo sapien
taaatcttcccatgccagtgcactg

SEQ ID NO: 547238 - DNA, 25 bp, Homo sapien
gggctctgacatagggtattaagta

SEQ ID NO: 547239 - DNA, 25 bp, Homo sapien
ctatgtgaggatgtaatcagggatt

SEQ ID NO: 547240 - DNA, 25 bp, Homo sapien
tatgtgaggatgtaatcagggattt

SEQ ID NO: 547241 - DNA, 25 bp, Homo sapien
cttcaggtcccaaacgttcatttgg

SEQ ID NO: 547242 - DNA, 25 bp, Homo sapien
ctgcttcaagctggtaaaacctgaa

SEQ ID NO: 547243 - DNA, 25 bp, Homo sapien
gctggtaaaacctgaaaagcttcag

SEQ ID NO: 547244 - DNA, 25 bp, Homo sapien
caaaggagagggatgtagttcttac

SEQ ID NO: 547245 - DNA, 25 bp, Homo sapien
aatcccctgtactccgcgatcccac

SEQ ID NO: 547246 - DNA, 25 bp, Homo sapien
acataaagtcctgaatcccctgtac

SEQ ID NO: 547247 - DNA, 25 bp, Homo sapien
tgctcctttttaggacataaagtcc

SEQ ID NO: 547248 - DNA, 25 bp, Homo sapien
ctactgctcctttttaggacataaa

SEQ ID NO: 547249 - DNA, 25 bp, Homo sapien
caataccgctaaacacctcttcttg

SEQ ID NO: 547250 - DNA, 25 bp, Homo sapien
catactcagatttcagaaccaagca

SEQ ID NO: 547251 - DNA, 25 bp, Homo sapien
taccgctaaacacctcttcttggtc

SEQ ID NO: 547252 - DNA, 25 bp, Homo sapien
gatgattgtgattgtgtttgtttcc

SEQ ID NO: 547253 - DNA, 25 bp, Homo sapien
tgaacccacttccttatagattggt

SEQ ID NO: 547254 - DNA, 25 bp, Homo sapien
tcggttgggttctgccaagaatcat

SEQ ID NO: 547255 - DNA, 25 bp, Homo sapien
tggttacatgaggttagaaatcact

SEQ ID NO: 547256 - DNA, 25 bp, Homo sapien
cagagtcattgaggctaaggaaaag

SEQ ID NO: 547257 - DNA, 25 bp, Homo sapien
gttgcttagcgcctagatattctgc

SEQ ID NO: 547258 - DNA, 25 bp, Homo sapien
tcgagccagttccttactacttggg

SEQ ID NO: 547259 - DNA, 25 bp, Homo sapien
gatggcttgcctgactgagcgcagc

SEQ ID NO: 547260 - DNA, 25 bp, Homo sapien
gagcgcagctttggtgcccctgtgt

SEQ ID NO: 547261 - DNA, 25 bp, Homo sapien
tcagcttgggtctactaggatcctg

SEQ ID NO: 547262 - DNA, 25 bp, Homo sapien
gcagagcctgcccaaagtaagcaga

SEQ ID NO: 547263 - DNA, 25 bp, Homo sapien
taagcagaccacacatcaaaacaga

SEQ ID NO: 547264 - DNA, 25 bp, Homo sapien
caaaacagaaagctagtgccctcag

SEQ ID NO: 547265 - DNA, 25 bp, Homo sapien
tctccactatgcgatgcctggcatt

SEQ ID NO: 547266 - DNA, 25 bp, Homo sapien
ctccactatgcgatgcctggcattg

SEQ ID NO: 547267 - DNA, 25 bp, Homo sapien
tccactatgcgatgcctggcattga

SEQ ID NO: 547268 - DNA, 25 bp, Homo sapien
tctctccactatgcgatgcctggca

SEQ ID NO: 547269 - DNA, 25 bp, Homo sapien
gaggctgagctatcaggaaatgttg

SEQ ID NO: 547270 - DNA, 25 bp, Homo sapien
tcaggccacttcaggccacttctgg

SEQ ID NO: 547271 - DNA, 25 bp, Homo sapien
tccagtcaggaaccatgtcaggcca

SEQ ID NO: 547272 - DNA, 25 bp, Homo sapien
tctcccatgatcatcaatcatctgg

SEQ ID NO: 547273 - DNA, 25 bp, Homo sapien
cagtgcaatcagctgagaactctcc

SEQ ID NO: 547274 - DNA, 25 bp, Homo sapien
tgtctctgcagatgtatcattaatt

SEQ ID NO: 547275 - DNA, 25 bp, Homo sapien
cattttgaccacctgagaattccag

SEQ ID NO: 547276 - DNA, 25 bp, Homo sapien
aattgcatttactgtctctgcagat

SEQ ID NO: 547277 - DNA, 25 bp, Homo sapien
gatccctgacactcccggtgtgctc

SEQ ID NO: 547278 - DNA, 25 bp, Homo sapien
gggatccctgacactcccggtgtgc

SEQ ID NO: 547279 - DNA, 25 bp, Homo sapien
ggggatccctgacactcccggtgtg

SEQ ID NO: 547280 - DNA, 25 bp, Homo sapien
ggatccctgacactcccggtgtgct

SEQ ID NO: 547281 - DNA, 25 bp, Homo sapien
tgttcttgtcattaaacaggcaacc

SEQ ID NO: 547282 - DNA, 25 bp, Homo sapien
aatgccaacacctccaacaccatag

SEQ ID NO: 547283 - DNA, 25 bp, Homo sapien
gccaacacctccaacaccatagcat

SEQ ID NO: 547284 - DNA, 25 bp, Homo sapien
ctggcggttcattgaatgccaacac

SEQ ID NO: 547285 - DNA, 25 bp, Homo sapien
gaaataatgatgaatgtagggccac

SEQ ID NO: 547286 - DNA, 25 bp, Homo sapien
tgtatctggagatgccgcctctgct

SEQ ID NO: 547287 - DNA, 25 bp, Homo sapien
catgctcctgaaaccggcctgtatc

SEQ ID NO: 547288 - DNA, 25 bp, Homo sapien
caaagaccctttctggagacatcca

SEQ ID NO: 547289 - DNA, 25 bp, Homo sapien
tccatgctctgtacagggtaggtgc

SEQ ID NO: 547290 - DNA, 25 bp, Homo sapien
ggtccatgctctgtacagggtaggt

SEQ ID NO: 547291 - DNA, 25 bp, Homo sapien
catgctctgtacagggtaggtgctc

SEQ ID NO: 547292 - DNA, 25 bp, Homo sapien
tgggtccatgctctgtacagggtag

SEQ ID NO: 547293 - DNA, 25 bp, Homo sapien
ttttattaagacagaccattttgat

SEQ ID NO: 547294 - DNA, 25 bp, Homo sapien
ttattaagacagaccattttgattg

SEQ ID NO: 547295 - DNA, 25 bp, Homo sapien
ttaagacagaccattttgattgagt

SEQ ID NO: 547296 - DNA, 25 bp, Homo sapien
attaagacagaccattttgattgag

SEQ ID NO: 547297 - DNA, 25 bp, Homo sapien
ggagacctcctgcttagtacaaggg

SEQ ID NO: 547298 - DNA, 25 bp, Homo sapien
gctggtggaataagccttagactgg

SEQ ID NO: 547299 - DNA, 25 bp, Homo sapien
ggatatgacctagatgatctcccag

SEQ ID NO: 547300 - DNA, 25 bp, Homo sapien
accaacatcaatctgggtgaccctg

SEQ ID NO: 547301 - DNA, 25 bp, Homo sapien
gcagtgaactcttgtactgctttga

SEQ ID NO: 547302 - DNA, 25 bp, Homo sapien
tattcaggttagcttttttacctca

SEQ ID NO: 547303 - DNA, 25 bp, Homo sapien
tgtggcagtgaactcttgtactgct

SEQ ID NO: 547304 - DNA, 25 bp, Homo sapien
cctttgtggcagtgaactcttgtac

SEQ ID NO: 547305 - DNA, 25 bp, Homo sapien
attattcatctgattagtgctatac

SEQ ID NO: 547306 - DNA, 25 bp, Homo sapien
aatttttccagccattattcatctg

SEQ ID NO: 547307 - DNA, 25 bp, Homo sapien
tagtgctatactttaacatcattca

SEQ ID NO: 547308 - DNA, 25 bp, Homo sapien
catctgattagtgctatactttaac

SEQ ID NO: 547309 - DNA, 25 bp, Homo sapien
aatacacaagtctggaaatagcatc

SEQ ID NO: 547310 - DNA, 25 bp, Homo sapien
ttttttgaatacacaagtctggaaa

SEQ ID NO: 547311 - DNA, 25 bp, Homo sapien
ggaaatagcatcctgggaattttat

SEQ ID NO: 547312 - DNA, 25 bp, Homo sapien
aagtctggaaatagcatcctgggaa

SEQ ID NO: 547313 - DNA, 25 bp, Homo sapien
cgtagacattgacatcccgaagaac

SEQ ID NO: 547314 - DNA, 25 bp, Homo sapien
cgaagaactgtcaaggaagcaagat

SEQ ID NO: 547315 - DNA, 25 bp, Homo sapien
gaatttggattcgtagacattgaca

SEQ ID NO: 547316 - DNA, 25 bp, Homo sapien
tctctaagaatttggattcgtagac

SEQ ID NO: 547317 - DNA, 25 bp, Homo sapien
tgaagttgcttacgtgggcccagga

SEQ ID NO: 547318 - DNA, 25 bp, Homo sapien
ggtgggttacccaaatggctgctga

SEQ ID NO: 547319 - DNA, 25 bp, Homo sapien
gtgactatttcaaaggtgggatgag

SEQ ID NO: 547320 - DNA, 25 bp, Homo sapien
tggctgctgagtcctggacttcagg

SEQ ID NO: 547321 - DNA, 25 bp, Homo sapien
ttagctggtgggggcccctcgtctc

SEQ ID NO: 547322 - DNA, 25 bp, Homo sapien
aagcttagctggtgggggcccctcg

SEQ ID NO: 547323 - DNA, 25 bp, Homo sapien
agctggtgggggcccctcgtctcta

SEQ ID NO: 547324 - DNA, 25 bp, Homo sapien
agatagacatggaagcttagctggt

SEQ ID NO: 547325 - DNA, 25 bp, Homo sapien
ttcttttgtgggacctgtggccggc

SEQ ID NO: 547326 - DNA, 25 bp, Homo sapien
ttgtgggacctgtggccggcagctt

SEQ ID NO: 547327 - DNA, 25 bp, Homo sapien
tcttttgtgggacctgtggccggca

SEQ ID NO: 547328 - DNA, 25 bp, Homo sapien
tgggacctgtggccggcagctttgg

SEQ ID NO: 547329 - DNA, 25 bp, Homo sapien
agtcaggcctcccaaagggaaggat

SEQ ID NO: 547330 - DNA, 25 bp, Homo sapien
ctcccaaagggaaggatgcctccag

SEQ ID NO: 547331 - DNA, 25 bp, Homo sapien
gagctgggcaggtagtctttaccca

SEQ ID NO: 547332 - DNA, 25 bp, Homo sapien
gcactgttggaagtgagtcaggcct

SEQ ID NO: 547333 - DNA, 25 bp, Homo sapien
acacagcctcatagggtcgctgtcc

SEQ ID NO: 547334 - DNA, 25 bp, Homo sapien
cagcctcatagggtcgctgtcccac

SEQ ID NO: 547335 - DNA, 25 bp, Homo sapien
agacacagcctcatagggtcgctgt

SEQ ID NO: 547336 - DNA, 25 bp, Homo sapien
acagcctcatagggtcgctgtccca

SEQ ID NO: 547337 - DNA, 25 bp, Homo sapien
ccgtgggggcagcccggccagctgg

SEQ ID NO: 547338 - DNA, 25 bp, Homo sapien
cggcgcaggcacacgtgcaggagcc

SEQ ID NO: 547339 - DNA, 25 bp, Homo sapien
attcccggcgcaggcacacgtgcag

SEQ ID NO: 547340 - DNA, 25 bp, Homo sapien
cagattcccggcgcaggcacacgtg

SEQ ID NO: 547341 - DNA, 25 bp, Homo sapien
gaacaaaatacacttagtgagttgc

SEQ ID NO: 547342 - DNA, 25 bp, Homo sapien
acaaaatacacttagtgagttgccc

SEQ ID NO: 547343 - DNA, 25 bp, Homo sapien
ctgcagtgggaccaggaacaaaata

SEQ ID NO: 547344 - DNA, 25 bp, Homo sapien
aaaatacacttagtgagttgcccat

SEQ ID NO: 547345 - DNA, 25 bp, Homo sapien
ggcctctccagtgcctctgtgccac

SEQ ID NO: 547346 - DNA, 25 bp, Homo sapien
ctcccccggggcctctccagtgcct

SEQ ID NO: 547347 - DNA, 25 bp, Homo sapien
cagatcccgccaggctcccccgggg

SEQ ID NO: 547348 - DNA, 25 bp, Homo sapien
gccagatcccgccaggctcccccgg

SEQ ID NO: 547349 - DNA, 25 bp, Homo sapien
ctggagccaggcccgccttctccat

SEQ ID NO: 547350 - DNA, 25 bp, Homo sapien
tatgaatgaggaacttaagagaaat

SEQ ID NO: 547351 - DNA, 25 bp, Homo sapien
taagagaaatgttggactgaagccc

SEQ ID NO: 547352 - DNA, 25 bp, Homo sapien
cacgtccaaacgtataaccatggga

SEQ ID NO: 547353 - DNA, 25 bp, Homo sapien
ccatgggagcaaagcataatataaa

SEQ ID NO: 547354 - DNA, 25 bp, Homo sapien
cattgtgtctgtcgtctccctttct

SEQ ID NO: 547355 - DNA, 25 bp, Homo sapien
cagggagatactgctacccgcatct

SEQ ID NO: 547356 - DNA, 25 bp, Homo sapien
agtagtattactccatttctccagg

SEQ ID NO: 547357 - DNA, 25 bp, Homo sapien
cgcatctgccactgagcatgcggga

SEQ ID NO: 547358 - DNA, 25 bp, Homo sapien
cacacagaagctagagatgtagatt

SEQ ID NO: 547359 - DNA, 25 bp, Homo sapien
caagcatgttaaatgcagaacatcc

SEQ ID NO: 547360 - DNA, 25 bp, Homo sapien
caccctgcacacagaagctagagat

SEQ ID NO: 547361 - DNA, 25 bp, Homo sapien
gctagagatgtagattaacaactga

SEQ ID NO: 547362 - DNA, 25 bp, Homo sapien
tctataggattcgttagccagtggc

SEQ ID NO: 547363 - DNA, 25 bp, Homo sapien
tattaccaatgagaacatgagtggc

SEQ ID NO: 547364 - DNA, 25 bp, Homo sapien
ttagaataacgatccccagccttta

SEQ ID NO: 547365 - DNA, 25 bp, Homo sapien
taagtgctgtcacggagcctaacag

SEQ ID NO: 547366 - DNA, 25 bp, Homo sapien
agctgcggagtcgagcggccagcgc

SEQ ID NO: 547367 - DNA, 25 bp, Homo sapien
gcagctgcggagtcgagcggccagc

SEQ ID NO: 547368 - DNA, 25 bp, Homo sapien
gctgcggagtcgagcggccagcgcg

SEQ ID NO: 547369 - DNA, 25 bp, Homo sapien
gagcagctgcggagtcgagcggcca

SEQ ID NO: 547370 - DNA, 25 bp, Homo sapien
cctgctttgcagcctggcgcagcca

SEQ ID NO: 547371 - DNA, 25 bp, Homo sapien
gctttgcagcctggcgcagccaccc

SEQ ID NO: 547372 - DNA, 25 bp, Homo sapien
ctgctttgcagcctggcgcagccac

SEQ ID NO: 547373 - DNA, 25 bp, Homo sapien
tttgcagcctggcgcagccacccga

SEQ ID NO: 547374 - DNA, 25 bp, Homo sapien
ccccagtgttttcggagggatgacg

SEQ ID NO: 547375 - DNA, 25 bp, Homo sapien
taaacgaacgctggacaggatttgc

SEQ ID NO: 547376 - DNA, 25 bp, Homo sapien
tcggaagccgcgcagtgatggatct

SEQ ID NO: 547377 - DNA, 25 bp, Homo sapien
gctatttgctgattgttgggtccca

SEQ ID NO: 547378 - DNA, 25 bp, Homo sapien
tccagaccggtaatattagcatcac

SEQ ID NO: 547379 - DNA, 25 bp, Homo sapien
catgattggcttagctgagtgcctc

SEQ ID NO: 547380 - DNA, 25 bp, Homo sapien
tctcaagatgtggtctccagaccgg

SEQ ID NO: 547381 - DNA, 25 bp, Homo sapien
ggcgtgggcctaaaccagtcaggca

SEQ ID NO: 547382 - DNA, 25 bp, Homo sapien
tttcagataaatgaagttggatcag

SEQ ID NO: 547383 - DNA, 25 bp, Homo sapien
tgtatttgcatatgcatgctcagtc

SEQ ID NO: 547384 - DNA, 25 bp, Homo sapien
tgcagatttgctgtcatcgggtgtg

SEQ ID NO: 547385 - DNA, 25 bp, Homo sapien
cgggtgtgtcctgtacttgtgtata

SEQ ID NO: 547386 - DNA, 25 bp, Homo sapien
ttatcttcagttttgaccaatgatt

SEQ ID NO: 547387 - DNA, 25 bp, Homo sapien
tagtcaagataacttcccctttctg

SEQ ID NO: 547388 - DNA, 25 bp, Homo sapien
agttgatagtcaagataacttcccc

SEQ ID NO: 547389 - DNA, 25 bp, Homo sapien
gaccaatgattaagtggaaacaagt

SEQ ID NO: 547390 - DNA, 25 bp, Homo sapien
aaggatccgataatagtcatgaggg

SEQ ID NO: 547391 - DNA, 25 bp, Homo sapien
cattagatgtgtgatcgtgcagtgg

SEQ ID NO: 547392 - DNA, 25 bp, Homo sapien
gtcctggttaaagaagtcccgcaga

SEQ ID NO: 547393 - DNA, 25 bp, Homo sapien
gctctactttgagactgttgtcctg

SEQ ID NO: 547394 - DNA, 25 bp, Homo sapien
cttcactgatcttaggccattcggt

SEQ ID NO: 547395 - DNA, 25 bp, Homo sapien
tttggcttggaactgaggcttgcat

SEQ ID NO: 547396 - DNA, 25 bp, Homo sapien
taggccattcggtaactggtattta

SEQ ID NO: 547397 - DNA, 25 bp, Homo sapien
tgtttggcttggaactgaggcttgc

SEQ ID NO: 547398 - DNA, 25 bp, Homo sapien
tatcgaaatgctaccaaacggccca

SEQ ID NO: 547399 - DNA, 25 bp, Homo sapien
gaattgcagccgttttgtaactctt

SEQ ID NO: 547400 - DNA, 25 bp, Homo sapien
tgaaaccaagccagatgccgtgtac

SEQ ID NO: 547401 - DNA, 25 bp, Homo sapien
gccgtgtacagtagaatgtatcgaa

SEQ ID NO: 547402 - DNA, 25 bp, Homo sapien
gagcattctttcttgcaatagacgc

SEQ ID NO: 547403 - DNA, 25 bp, Homo sapien
gcttcaatgctaaacaacaatgtag

SEQ ID NO: 547404 - DNA, 25 bp, Homo sapien
taaccttgggcactagtggagcatt

SEQ ID NO: 547405 - DNA, 25 bp, Homo sapien
gacgctaattgtgttcctagttggg

SEQ ID NO: 547406 - DNA, 25 bp, Homo sapien
taaaagggcaacacaggatttttgc

SEQ ID NO: 547407 - DNA, 25 bp, Homo sapien
gcttagggtctcaagagggtctcga

SEQ ID NO: 547408 - DNA, 25 bp, Homo sapien
cattggtggatctttgaacctgtag

SEQ ID NO: 547409 - DNA, 25 bp, Homo sapien
agggtctcgaagctggatgtagtta

SEQ ID NO: 547410 - DNA, 25 bp, Homo sapien
tttgttgcacctcagaaaagtggta

SEQ ID NO: 547411 - DNA, 25 bp, Homo sapien
catcgtagtcaagttgccaagcaga

SEQ ID NO: 547412 - DNA, 25 bp, Homo sapien
tgctgggatactcttcacaggaaag

SEQ ID NO: 547413 - DNA, 25 bp, Homo sapien
cacaggaaagtggagacatatcaca

SEQ ID NO: 547414 - DNA, 25 bp, Homo sapien
tctagggatatatcagcaaaaacac

SEQ ID NO: 547415 - DNA, 25 bp, Homo sapien
tttacacctatgtgaaccactatgg

SEQ ID NO: 547416 - DNA, 25 bp, Homo sapien
tatttataacggcatcatgagctca

SEQ ID NO: 547417 - DNA, 25 bp, Homo sapien
gaagcattgcaaggagataaccaga

SEQ ID NO: 547418 - DNA, 25 bp, Homo sapien
tgtggacacatatgtcattgaacac

SEQ ID NO: 547419 - DNA, 25 bp, Homo sapien
aagggatggacttctatctccttgg

SEQ ID NO: 547420 - DNA, 25 bp, Homo sapien
agctcatgccaaagggatggacttc

SEQ ID NO: 547421 - DNA, 25 bp, Homo sapien
ttccttctctaaagtgttatcagaa

SEQ ID NO: 547422 - DNA, 25 bp, Homo sapien
tgaccaggatgtgattgagccctca

SEQ ID NO: 547423 - DNA, 25 bp, Homo sapien
tagctggcgaattcaagtccttaac

SEQ ID NO: 547424 - DNA, 25 bp, Homo sapien
taccccttttgcctgattgaccagg

SEQ ID NO: 547425 - DNA, 25 bp, Homo sapien
caacttttggagtggctgagctcct

SEQ ID NO: 547426 - DNA, 25 bp, Homo sapien
agcctgtcctgttgtggagtactgt

SEQ ID NO: 547427 - DNA, 25 bp, Homo sapien
cagcctgtcctgttgtggagtactg

SEQ ID NO: 547428 - DNA, 25 bp, Homo sapien
gcctgtcctgttgtggagtactgtt

SEQ ID NO: 547429 - DNA, 25 bp, Homo sapien
gaggacttctgttcccagtggcaaa

SEQ ID NO: 547430 - DNA, 25 bp, Homo sapien
ttttaggaagctacttccctgagct

SEQ ID NO: 547431 - DNA, 25 bp, Homo sapien
tcctgaaagagttgttggttgggct

SEQ ID NO: 547432 - DNA, 25 bp, Homo sapien
catggaggtacatgaatctgtagac

SEQ ID NO: 547433 - DNA, 25 bp, Homo sapien
gggtcctctccctcgtactcatttg

SEQ ID NO: 547434 - DNA, 25 bp, Homo sapien
cctcgtactcatttgcaccgctggt

SEQ ID NO: 547435 - DNA, 25 bp, Homo sapien
catttgcaccgctggtagagttaat

SEQ ID NO: 547436 - DNA, 25 bp, Homo sapien
gtactcatttgcaccgctggtagag

SEQ ID NO: 547437 - DNA, 25 bp, Homo sapien
gcagccctggagattttaggtacag

SEQ ID NO: 547438 - DNA, 25 bp, Homo sapien
ggagaggatattccagcgagagaat

SEQ ID NO: 547439 - DNA, 25 bp, Homo sapien
gaatgatggcgcatgttcaggtcct

SEQ ID NO: 547440 - DNA, 25 bp, Homo sapien
tagagttccacatttgcagccctgg

SEQ ID NO: 547441 - DNA, 25 bp, Homo sapien
gattagcagtgtccttacccttgaa

SEQ ID NO: 547442 - DNA, 25 bp, Homo sapien
taatggcttattacgtggagcccca

SEQ ID NO: 547443 - DNA, 25 bp, Homo sapien
ttgagcaaaggacccgtatccatgg

SEQ ID NO: 547444 - DNA, 25 bp, Homo sapien
ggttctgcctcgacctagcattgtg

SEQ ID NO: 547445 - DNA, 25 bp, Homo sapien
gacctgctgaccagagctgccagtg

SEQ ID NO: 547446 - DNA, 25 bp, Homo sapien
cctgccgatggggttaatgctgaga

SEQ ID NO: 547447 - DNA, 25 bp, Homo sapien
catgatggggttaatcctgccgatg

SEQ ID NO: 547448 - DNA, 25 bp, Homo sapien
ccagagctgccagtggaagcatgat

SEQ ID NO: 547449 - DNA, 25 bp, Homo sapien
taacataaataatgtccacttgtca

SEQ ID NO: 547450 - DNA, 25 bp, Homo sapien
gaattagtgtctgtacagtgaaaaa

SEQ ID NO: 547451 - DNA, 25 bp, Homo sapien
tttaattgaataacttcatacttgc

SEQ ID NO: 547452 - DNA, 25 bp, Homo sapien
taacttcatacttgcttgataattg

SEQ ID NO: 547453 - DNA, 25 bp, Homo sapien
caggcctctgaaaaagtgattggga

SEQ ID NO: 547454 - DNA, 25 bp, Homo sapien
taaagttagctacagcatacccatg

SEQ ID NO: 547455 - DNA, 25 bp, Homo sapien
gtaactatagccactttaggcaacc

SEQ ID NO: 547456 - DNA, 25 bp, Homo sapien
taaactgtattcctttggccatatg

SEQ ID NO: 547457 - DNA, 25 bp, Homo sapien
gcttatttccaacatgtggcccagc

SEQ ID NO: 547458 - DNA, 25 bp, Homo sapien
tctggccacattgttgggttttggt

SEQ ID NO: 547459 - DNA, 25 bp, Homo sapien
caacattactagcttatttccaaca

SEQ ID NO: 547460 - DNA, 25 bp, Homo sapien
tggtttactgtaccatcacattcaa

SEQ ID NO: 547461 - DNA, 25 bp, Homo sapien
gaccgagttaaagctcttgggccca

SEQ ID NO: 547462 - DNA, 25 bp, Homo sapien
tcgtaaagctatgagcacagggcct

SEQ ID NO: 547463 - DNA, 25 bp, Homo sapien
gacgaggcaatgacgaacgttaggc

SEQ ID NO: 547464 - DNA, 25 bp, Homo sapien
gcaggaacgcacaaagctaagaggt

SEQ ID NO: 547465 - DNA, 25 bp, Homo sapien
tccagtgtccgaaaaatgcaacaac

SEQ ID NO: 547466 - DNA, 25 bp, Homo sapien
ttttctttccatgccgtaaacagct

SEQ ID NO: 547467 - DNA, 25 bp, Homo sapien
aaattaagtgctttcacgacgaggc

SEQ ID NO: 547468 - DNA, 25 bp, Homo sapien
gaatatcctggaagttgttaagagc

SEQ ID NO: 547469 - DNA, 25 bp, Homo sapien
atgacttcggtccaatataaagaaa

SEQ ID NO: 547470 - DNA, 25 bp, Homo sapien
cggaagttgtcatatccgtgatcat

SEQ ID NO: 547471 - DNA, 25 bp, Homo sapien
agatgagctgtatttattactggaa

SEQ ID NO: 547472 - DNA, 25 bp, Homo sapien
ttaagcacgactgcttttcctccaa

SEQ ID NO: 547473 - DNA, 25 bp, Homo sapien
ccgtgatcattagctttgaacttta

SEQ ID NO: 547474 - DNA, 25 bp, Homo sapien
tgtatgattaggagttcttgggccc

SEQ ID NO: 547475 - DNA, 25 bp, Homo sapien
gagactgtactgtatgtatactcca

SEQ ID NO: 547476 - DNA, 25 bp, Homo sapien
ttctcaacaagagaaagccactttt

SEQ ID NO: 547477 - DNA, 25 bp, Homo sapien
cagggttctgactttctttgtatga

SEQ ID NO: 547478 - DNA, 25 bp, Homo sapien
taaagcagtttttgaatcttttgct

SEQ ID NO: 547479 - DNA, 25 bp, Homo sapien
aaagcagtttttgaatcttttgctc

SEQ ID NO: 547480 - DNA, 25 bp, Homo sapien
cttaaagcagtttttgaatcttttg

SEQ ID NO: 547481 - DNA, 25 bp, Homo sapien
agcagtttttgaatcttttgctcac

SEQ ID NO: 547482 - DNA, 25 bp, Homo sapien
caaatacagagcaattgggttaatg

SEQ ID NO: 547483 - DNA, 25 bp, Homo sapien
tacagagcaattgggttaatgcagg

SEQ ID NO: 547484 - DNA, 25 bp, Homo sapien
ttaatgcaggaattcagtgaagcca

SEQ ID NO: 547485 - DNA, 25 bp, Homo sapien
gagcaattgggttaatgcaggaatt

SEQ ID NO: 547486 - DNA, 25 bp, Homo sapien
gttgataccaatatagtccaatacc

SEQ ID NO: 547487 - DNA, 25 bp, Homo sapien
tgataccaatatagtccaataccaa

SEQ ID NO: 547488 - DNA, 25 bp, Homo sapien
gataccaatatagtccaataccaac

SEQ ID NO: 547489 - DNA, 25 bp, Homo sapien
ttgataccaatatagtccaatacca

SEQ ID NO: 547490 - DNA, 25 bp, Homo sapien
ctcaaaagttcacatctattgggat

SEQ ID NO: 547491 - DNA, 25 bp, Homo sapien
ttcacatctattgggatcattctga

SEQ ID NO: 547492 - DNA, 25 bp, Homo sapien
caggcaaaagacggttttggccact

SEQ ID NO: 547493 - DNA, 25 bp, Homo sapien
tcattctgattataaagagtgagct

SEQ ID NO: 547494 - DNA, 25 bp, Homo sapien
aactgaatagccaccaatcttttgc

SEQ ID NO: 547495 - DNA, 25 bp, Homo sapien
atggcaagcagaaatagaaactgaa

SEQ ID NO: 547496 - DNA, 25 bp, Homo sapien
tcacaggtcattagtgtataaaaaa

SEQ ID NO: 547497 - DNA, 25 bp, Homo sapien
tttcacaggtcattagtgtataaaa

SEQ ID NO: 547498 - DNA, 25 bp, Homo sapien
gagtcattgatcaccattaactcca

SEQ ID NO: 547499 - DNA, 25 bp, Homo sapien
catcaattctttcatgtggacctgg

SEQ ID NO: 547500 - DNA, 25 bp, Homo sapien
gacctggtttatctatgccactgag

SEQ ID NO: 547501 - DNA, 25 bp, Homo sapien
cttagagaagtagtgatctagcttc

SEQ ID NO: 547502 - DNA, 25 bp, Homo sapien
caagcagattcgcagataacttcct

SEQ ID NO: 547503 - DNA, 25 bp, Homo sapien
tactgctgtccattttggaacccca

SEQ ID NO: 547504 - DNA, 25 bp, Homo sapien
tctactccaagaagcaacagctcga

SEQ ID NO: 547505 - DNA, 25 bp, Homo sapien
aaagctgtcttctgaacgggatgaa

SEQ ID NO: 547506 - DNA, 25 bp, Homo sapien
ctgtcaatactcagagcacatagac

SEQ ID NO: 547507 - DNA, 25 bp, Homo sapien
cacatctcagctccaaatggccagt

SEQ ID NO: 547508 - DNA, 25 bp, Homo sapien
aaaggcaccagcttacacatctcag

SEQ ID NO: 547509 - DNA, 25 bp, Homo sapien
gtatgaaaggcaccagcttacacat

SEQ ID NO: 547510 - DNA, 25 bp, Homo sapien
atctcagctccaaatggccagtcct

SEQ ID NO: 547511 - DNA, 25 bp, Homo sapien
aaacttgagccagtcgcttaagttc

SEQ ID NO: 547512 - DNA, 25 bp, Homo sapien
acttgagccagtcgcttaagttcct

SEQ ID NO: 547513 - DNA, 25 bp, Homo sapien
cttgagccagtcgcttaagttcctc

SEQ ID NO: 547514 - DNA, 25 bp, Homo sapien
aacttgagccagtcgcttaagttcc

SEQ ID NO: 547515 - DNA, 25 bp, Homo sapien
tgaaaattgaacctgtatactgtca

SEQ ID NO: 547516 - DNA, 25 bp, Homo sapien
ctgaaaattgaacctgtatactgtc

SEQ ID NO: 547517 - DNA, 25 bp, Homo sapien
gaaaattgaacctgtatactgtcat

SEQ ID NO: 547518 - DNA, 25 bp, Homo sapien
tcaccacggagagattacagttttc

SEQ ID NO: 547519 - DNA, 25 bp, Homo sapien
tcagacacgtaatcaccacggagag

SEQ ID NO: 547520 - DNA, 25 bp, Homo sapien
aacaatgctcttcaagctcaacaga

SEQ ID NO: 547521 - DNA, 25 bp, Homo sapien
cagagagatagtcagacacgtaatc

SEQ ID NO: 547522 - DNA, 25 bp, Homo sapien
tgttagtgttaagtcctgctggcaa

SEQ ID NO: 547523 - DNA, 25 bp, Homo sapien
tgtgctgacccattttaccctaagg

SEQ ID NO: 547524 - DNA, 25 bp, Homo sapien
tgatcaaatatgagccagttggcaa

SEQ ID NO: 547525 - DNA, 25 bp, Homo sapien
tctctgatcgcaaaaagggtgttta

SEQ ID NO: 547526 - DNA, 25 bp, Homo sapien
gatcacacggcagaaatcatctatg

SEQ ID NO: 547527 - DNA, 25 bp, Homo sapien
ggtcttcttggcacatagagtcaga

SEQ ID NO: 547528 - DNA, 25 bp, Homo sapien
tagtacagtgattggcacacagtgg

SEQ ID NO: 547529 - DNA, 25 bp, Homo sapien
tgcagggcggaaaaggtaacgacaa

SEQ ID NO: 547530 - DNA, 25 bp, Homo sapien
gttcacttatctgagctggatcttc

SEQ ID NO: 547531 - DNA, 25 bp, Homo sapien
ttattagttcacttatctgagctgg

SEQ ID NO: 547532 - DNA, 25 bp, Homo sapien
gagctggatcttctaagatcactgg

SEQ ID NO: 547533 - DNA, 25 bp, Homo sapien
cctattattagttcacttatctgag

SEQ ID NO: 547534 - DNA, 25 bp, Homo sapien
gagtttaaagttcttcagcagcctc

SEQ ID NO: 547535 - DNA, 25 bp, Homo sapien
caggatttcacccacaacacaggag

SEQ ID NO: 547536 - DNA, 25 bp, Homo sapien
gatcagacatgtttcccaatgcttt

SEQ ID NO: 547537 - DNA, 25 bp, Homo sapien
tgaggaagtccaggcagatcagaca

SEQ ID NO: 547538 - DNA, 25 bp, Homo sapien
cacagcctgaagactgtagcttcca

SEQ ID NO: 547539 - DNA, 25 bp, Homo sapien
ccaataagagctatgacattttgtg

SEQ ID NO: 547540 - DNA, 25 bp, Homo sapien
tgtgatttgtcaactttactgaact

SEQ ID NO: 547541 - DNA, 25 bp, Homo sapien
acattttgtgatttgtcaactttac

SEQ ID NO: 547542 - DNA, 25 bp, Homo sapien
tctgggcccttagtgtgccaacaag

SEQ ID NO: 547543 - DNA, 25 bp, Homo sapien
gggtttcaagagaccgaaatcctga

SEQ ID NO: 547544 - DNA, 25 bp, Homo sapien
caacaagagagtaggagaatttcac

SEQ ID NO: 547545 - DNA, 25 bp, Homo sapien
ccaagtattctactgtgggatagca

SEQ ID NO: 547546 - DNA, 25 bp, Homo sapien
tgtgtttctactgacgcccatggta

SEQ ID NO: 547547 - DNA, 25 bp, Homo sapien
tatagcttgcactttggaacctgac

SEQ ID NO: 547548 - DNA, 25 bp, Homo sapien
tgtaatatctacttgtgggctgctg

SEQ ID NO: 547549 - DNA, 25 bp, Homo sapien
tctggagttccaaagcaacctggag

SEQ ID NO: 547550 - DNA, 25 bp, Homo sapien
cgcatgcacttgttcttgtagataa

SEQ ID NO: 547551 - DNA, 25 bp, Homo sapien
tattgggaccgtttcgcatgcactt

SEQ ID NO: 547552 - DNA, 25 bp, Homo sapien
ccagagccaagctggcgatcaagat

SEQ ID NO: 547553 - DNA, 25 bp, Homo sapien
tgtcaatgacgatgtgcagcaggtc

SEQ ID NO: 547554 - DNA, 25 bp, Homo sapien
tgatctcgatgggtccttggcacgg

SEQ ID NO: 547555 - DNA, 25 bp, Homo sapien
cataaggtcttagtgggtggcgtca

SEQ ID NO: 547556 - DNA, 25 bp, Homo sapien
tttgcaaaagcggagtggccctgtc

SEQ ID NO: 547557 - DNA, 25 bp, Homo sapien
gactggcgttggaacccttgggcca

SEQ ID NO: 547558 - DNA, 25 bp, Homo sapien
ccggtggccgctccgcagtttcaga

SEQ ID NO: 547559 - DNA, 25 bp, Homo sapien
cctgctccagaaggcgtccggtggc

SEQ ID NO: 547560 - DNA, 25 bp, Homo sapien
tccagaaggcgtccggtggccgctc

SEQ ID NO: 547561 - DNA, 25 bp, Homo sapien
gtccggtggccgctccgcagtttca

SEQ ID NO: 547562 - DNA, 25 bp, Homo sapien
tatccacgctcaaaagtaactcaag

SEQ ID NO: 547563 - DNA, 25 bp, Homo sapien
gcgcgggtcgaaactccttcctgat

SEQ ID NO: 547564 - DNA, 25 bp, Homo sapien
ttggcgctcatgactcgccagcgcg

SEQ ID NO: 547565 - DNA, 25 bp, Homo sapien
taactcaagtttgcgcgccagtggg

SEQ ID NO: 547566 - DNA, 25 bp, Homo sapien
caagggcttgtgtcaagctctgcat

SEQ ID NO: 547567 - DNA, 25 bp, Homo sapien
cattttgccccgcaggggaacctct

SEQ ID NO: 547568 - DNA, 25 bp, Homo sapien
cttgtgtcaagctctgcattttgcc

SEQ ID NO: 547569 - DNA, 25 bp, Homo sapien
ggccaagggcttgtgtcaagctctg

SEQ ID NO: 547570 - DNA, 25 bp, Homo sapien
gagtgcgccggagattcggaaaccc

SEQ ID NO: 547571 - DNA, 25 bp, Homo sapien
gattgaactcgaaagactcctcccg

SEQ ID NO: 547572 - DNA, 25 bp, Homo sapien
ggatgaaagccgctactccctggct

SEQ ID NO: 547573 - DNA, 25 bp, Homo sapien
tcggaaacccgcagagacttctcaa

SEQ ID NO: 547574 - DNA, 25 bp, Homo sapien
cggctctgacgaaacgctgcgagaa

SEQ ID NO: 547575 - DNA, 25 bp, Homo sapien
tgcgagaatgccagacagtgtagcc

SEQ ID NO: 547576 - DNA, 25 bp, Homo sapien
tgacaaaccagatgcagagcgacga

SEQ ID NO: 547577 - DNA, 25 bp, Homo sapien
agtgtagcctccaccgtttgctcgg

SEQ ID NO: 547578 - DNA, 25 bp, Homo sapien
cccttgggcgatgcctggacagcat

SEQ ID NO: 547579 - DNA, 25 bp, Homo sapien
gctgcaacctttccccttgggcgat

SEQ ID NO: 547580 - DNA, 25 bp, Homo sapien
catcagtagtagttgcccgagggag

SEQ ID NO: 547581 - DNA, 25 bp, Homo sapien
gcatcagtagtagttgcccgaggga

SEQ ID NO: 547582 - DNA, 25 bp, Homo sapien
cataaggcgatttttgcttatctct

SEQ ID NO: 547583 - DNA, 25 bp, Homo sapien
tgatgcatgtatagcaaattgcttc

SEQ ID NO: 547584 - DNA, 25 bp, Homo sapien
aagccatgccaatttcataaggcga

SEQ ID NO: 547585 - DNA, 25 bp, Homo sapien
tcaaagcgagggatcatctggggct

SEQ ID NO: 547586 - DNA, 25 bp, Homo sapien
ttcttatgagggcagcagataatgc

SEQ ID NO: 547587 - DNA, 25 bp, Homo sapien
tcttatgagggcagcagataatgca

SEQ ID NO: 547588 - DNA, 25 bp, Homo sapien
cttatgagggcagcagataatgcaa

SEQ ID NO: 547589 - DNA, 25 bp, Homo sapien
ttatgagggcagcagataatgcaaa

SEQ ID NO: 547590 - DNA, 25 bp, Homo sapien
ggccaaggtaacaggtgccaagtac

SEQ ID NO: 547591 - DNA, 25 bp, Homo sapien
gccaaggtaacaggtgccaagtacc

SEQ ID NO: 547592 - DNA, 25 bp, Homo sapien
gaaaagctgaatttgctctagggat

SEQ ID NO: 547593 - DNA, 25 bp, Homo sapien
gaatttgctctagggataagaagca

SEQ ID NO: 547594 - DNA, 25 bp, Homo sapien
tgctctagggataagaagcaaagac

SEQ ID NO: 547595 - DNA, 25 bp, Homo sapien
agctgaatttgctctagggataaga

SEQ ID NO: 547596 - DNA, 25 bp, Homo sapien
tgtaagcactcaacgaaaatatctg

SEQ ID NO: 547597 - DNA, 25 bp, Homo sapien
gcatgttgtaggtgttccatgatgc

SEQ ID NO: 547598 - DNA, 25 bp, Homo sapien
aaattcttatgtatgggctgggcgc

SEQ ID NO: 547599 - DNA, 25 bp, Homo sapien
ggtagcatgctggacttaaaattct

SEQ ID NO: 547600 - DNA, 25 bp, Homo sapien
gccaatcccagaagctaagatgaat

SEQ ID NO: 547601 - DNA, 25 bp, Homo sapien
atgttgagtaggagccaatcccaga

SEQ ID NO: 547602 - DNA, 25 bp, Homo sapien
gtaggagccaatcccagaagctaag

SEQ ID NO: 547603 - DNA, 25 bp, Homo sapien
gcatgttagaggattagtgcttgca

SEQ ID NO: 547604 - DNA, 25 bp, Homo sapien
ctaccgatcaagacgggagttttga

SEQ ID NO: 547605 - DNA, 25 bp, Homo sapien
tccttaggcaatctcctgggggctc

SEQ ID NO: 547606 - DNA, 25 bp, Homo sapien
catagtatgttacagcgcagagctc

SEQ ID NO: 547607 - DNA, 25 bp, Homo sapien
gtgtagacacccgatgaccatagta

SEQ ID NO: 547608 - DNA, 25 bp, Homo sapien
gcaccacgtcgcacatagttggaag

SEQ ID NO: 547609 - DNA, 25 bp, Homo sapien
agaaataagaaccaacagtctctca

SEQ ID NO: 547610 - DNA, 25 bp, Homo sapien
agaaccaacagtctctcagactaca

SEQ ID NO: 547611 - DNA, 25 bp, Homo sapien
aacttattaggtctgcaccaagcag

SEQ ID NO: 547612 - DNA, 25 bp, Homo sapien
aggagtgtggtacaattatgtctat

SEQ ID NO: 547613 - DNA, 25 bp, Homo sapien
ttataacgacaggagtgtggtacaa

SEQ ID NO: 547614 - DNA, 25 bp, Homo sapien
ataacgacaggagtgtggtacaatt

SEQ ID NO: 547615 - DNA, 25 bp, Homo sapien
gtgtggtacaattatgtctatttac

SEQ ID NO: 547616 - DNA, 25 bp, Homo sapien
gagcctgaggtaatgcattctgcat

SEQ ID NO: 547617 - DNA, 25 bp, Homo sapien
ttgtcctgacactgggttatctccc

SEQ ID NO: 547618 - DNA, 25 bp, Homo sapien
ttatctccctcgtgaccctgcagag

SEQ ID NO: 547619 - DNA, 25 bp, Homo sapien
tgcagagcctgaggtaatgcattct

SEQ ID NO: 547620 - DNA, 25 bp, Homo sapien
agtgacaattatgcattgtgcttca

SEQ ID NO: 547621 - DNA, 25 bp, Homo sapien
ttgggtctgagaaagttctaagaac

SEQ ID NO: 547622 - DNA, 25 bp, Homo sapien
gatgtccactacaggctgatccgag

SEQ ID NO: 547623 - DNA, 25 bp, Homo sapien
cacactggggtaacgtgaatctctc

SEQ ID NO: 547624 - DNA, 25 bp, Homo sapien
tggcaaggcgtcccaccggggcaaa

SEQ ID NO: 547625 - DNA, 25 bp, Homo sapien
cacacactgctctggcaaggcgtcc

SEQ ID NO: 547626 - DNA, 25 bp, Homo sapien
acactgctctggcaaggcgtcccac

SEQ ID NO: 547627 - DNA, 25 bp, Homo sapien
caaggcgtcccaccggggcaaatgc

SEQ ID NO: 547628 - DNA, 25 bp, Homo sapien
cagacaaaattcctcggataccgaa

SEQ ID NO: 547629 - DNA, 25 bp, Homo sapien
gccagagtcccccaccggaatgttc

SEQ ID NO: 547630 - DNA, 25 bp, Homo sapien
tgctctcaggatccacgttgctcgg

SEQ ID NO: 547631 - DNA, 25 bp, Homo sapien
gaggtttattcggccagaagcatcg

SEQ ID NO: 547632 - DNA, 25 bp, Homo sapien
gatgtccaaggttaagaggtcagca

SEQ ID NO: 547633 - DNA, 25 bp, Homo sapien
gatttggagcctcaaagcctgggtt

SEQ ID NO: 547634 - DNA, 25 bp, Homo sapien
gaatctagatgtgcagaagccagga

SEQ ID NO: 547635 - DNA, 25 bp, Homo sapien
cactcagtgtaagcatgcagggcat

SEQ ID NO: 547636 - DNA, 25 bp, Homo sapien
tggtccaactagacactccccattg

SEQ ID NO: 547637 - DNA, 25 bp, Homo sapien
tctcatcaagcctaggcaaggttcc

SEQ ID NO: 547638 - DNA, 25 bp, Homo sapien
aaaatgcaggagtcccctttgtaca

SEQ ID NO: 547639 - DNA, 25 bp, Homo sapien
gtgactgttgatggaaaattcttcc

SEQ ID NO: 547640 - DNA, 25 bp, Homo sapien
gaataattgacttcctcatgcttca

SEQ ID NO: 547641 - DNA, 25 bp, Homo sapien
tgggaggaaaatcgagtgtgtccaa

SEQ ID NO: 547642 - DNA, 25 bp, Homo sapien
gagaaagtctattcatgctgactgc

SEQ ID NO: 547643 - DNA, 25 bp, Homo sapien
gaaaaaggatactgttgtgccagga

SEQ ID NO: 547644 - DNA, 25 bp, Homo sapien
taggtagaagtgacaagctacttca

SEQ ID NO: 547645 - DNA, 25 bp, Homo sapien
gaagtgacaagctacttcagtctgt

SEQ ID NO: 547646 - DNA, 25 bp, Homo sapien
caccttcgtacctcccattcatctt

SEQ ID NO: 547647 - DNA, 25 bp, Homo sapien
aaaagcaagactggtcctaggtaga

SEQ ID NO: 547648 - DNA, 25 bp, Homo sapien
ggtgttggcggttcaattgatgtat

SEQ ID NO: 547649 - DNA, 25 bp, Homo sapien
tgaactccatgcgagaaaactccat

SEQ ID NO: 547650 - DNA, 25 bp, Homo sapien
tggcggttcaattgatgtatacctt

SEQ ID NO: 547651 - DNA, 25 bp, Homo sapien
tgcgagaaaactccattactcccag

SEQ ID NO: 547652 - DNA, 25 bp, Homo sapien
tcacataacctttggtgtatcacac

SEQ ID NO: 547653 - DNA, 25 bp, Homo sapien
ttttgaatgagagtggttgctctcc

SEQ ID NO: 547654 - DNA, 25 bp, Homo sapien
tctttgaggagtccacagtatagcc

SEQ ID NO: 547655 - DNA, 25 bp, Homo sapien
ttgaggagtccacagtatagccaca

SEQ ID NO: 547656 - DNA, 25 bp, Homo sapien
tccggtgtcgtttgattctttctcc

SEQ ID NO: 547657 - DNA, 25 bp, Homo sapien
tcaggattctgtggaaggctcgtct

SEQ ID NO: 547658 - DNA, 25 bp, Homo sapien
gattctgtggaaggctcgtctctgg

SEQ ID NO: 547659 - DNA, 25 bp, Homo sapien
caggattctgtggaaggctcgtctc

SEQ ID NO: 547660 - DNA, 25 bp, Homo sapien
gggcaggacgggtctgcagctgtct

SEQ ID NO: 547661 - DNA, 25 bp, Homo sapien
cagggagagccccactgaagcacct

SEQ ID NO: 547662 - DNA, 25 bp, Homo sapien
gcagggagagccccactgaagcacc

SEQ ID NO: 547663 - DNA, 25 bp, Homo sapien
tgccagtaggctctacttgcttcca

SEQ ID NO: 547664 - DNA, 25 bp, Homo sapien
cagtttttatcatgcactggaaacc

SEQ ID NO: 547665 - DNA, 25 bp, Homo sapien
ttcagtttttatcatgcactggaaa

SEQ ID NO: 547666 - DNA, 25 bp, Homo sapien
aaccaaactgccagtaggctctact

SEQ ID NO: 547667 - DNA, 25 bp, Homo sapien
ccaagtcccagcagatgttagtgta

SEQ ID NO: 547668 - DNA, 25 bp, Homo sapien
tagtgtatgtgggatgaccttgcag

SEQ ID NO: 547669 - DNA, 25 bp, Homo sapien
cagatgttagtgtatgtgggatgac

SEQ ID NO: 547670 - DNA, 25 bp, Homo sapien
gctgcatccaagtcccagcagatgt

SEQ ID NO: 547671 - DNA, 25 bp, Homo sapien
tccctctccatccctggtagctgac

SEQ ID NO: 547672 - DNA, 25 bp, Homo sapien
ccttccctctccatccctggtagct

SEQ ID NO: 547673 - DNA, 25 bp, Homo sapien
tctccatccctggtagctgacggtg

SEQ ID NO: 547674 - DNA, 25 bp, Homo sapien
cctctccatccctggtagctgacgg

SEQ ID NO: 547675 - DNA, 25 bp, Homo sapien
ttaaaaaattcaggatcttggtcat

SEQ ID NO: 547676 - DNA, 25 bp, Homo sapien
cagctctgtagtagctttttaaaaa

SEQ ID NO: 547677 - DNA, 25 bp, Homo sapien
tttaaaaaattcaggatcttggtca

SEQ ID NO: 547678 - DNA, 25 bp, Homo sapien
ccagcctgagaaggatagcacgact

SEQ ID NO: 547679 - DNA, 25 bp, Homo sapien
ggcactaaagactgctgttcttcca

SEQ ID NO: 547680 - DNA, 25 bp, Homo sapien
tgaaggaattctgcattatctggag

SEQ ID NO: 547681 - DNA, 25 bp, Homo sapien
ttctgatctccacaacacagggaag

SEQ ID NO: 547682 - DNA, 25 bp, Homo sapien
caaaggtgtagtgcagtcactgata

SEQ ID NO: 547683 - DNA, 25 bp, Homo sapien
tcactgataggacatcagcagttac

SEQ ID NO: 547684 - DNA, 25 bp, Homo sapien
gacattgatgaataatcagcaggat

SEQ ID NO: 547685 - DNA, 25 bp, Homo sapien
tcagcaggatagcaaaggtgtagtg

SEQ ID NO: 547686 - DNA, 25 bp, Homo sapien
gggtccacacacggaggacccagcc

SEQ ID NO: 547687 - DNA, 25 bp, Homo sapien
ggcaggtactgcagatgttccagag

SEQ ID NO: 547688 - DNA, 25 bp, Homo sapien
gatgttccagagagtggagtgtcca

SEQ ID NO: 547689 - DNA, 25 bp, Homo sapien
cagatgttccagagagtggagtgtc

SEQ ID NO: 547690 - DNA, 25 bp, Homo sapien
tactgcagatgttccagagagtgga

SEQ ID NO: 547691 - DNA, 25 bp, Homo sapien
cctagatgcttgagagcctatgttg

SEQ ID NO: 547692 - DNA, 25 bp, Homo sapien
aacctagatgcttgagagcctatgt

SEQ ID NO: 547693 - DNA, 25 bp, Homo sapien
ctagatgcttgagagcctatgttga

SEQ ID NO: 547694 - DNA, 25 bp, Homo sapien
caacctagatgcttgagagcctatg

SEQ ID NO: 547695 - DNA, 25 bp, Homo sapien
ctgccttcaaaggtggttgagaccc

SEQ ID NO: 547696 - DNA, 25 bp, Homo sapien
tggttgagacccagggggattttca

SEQ ID NO: 547697 - DNA, 25 bp, Homo sapien
taatttccaatgataagacatgagg

SEQ ID NO: 547698 - DNA, 25 bp, Homo sapien
ggtgatgcaatataatttccaatga

SEQ ID NO: 547699 - DNA, 25 bp, Homo sapien
ttttatctttagcacaagtcacctg

SEQ ID NO: 547700 - DNA, 25 bp, Homo sapien
ctttagcacaagtcacctgaacact

SEQ ID NO: 547701 - DNA, 25 bp, Homo sapien
tcctggagtgctccaaagaatgttg

SEQ ID NO: 547702 - DNA, 25 bp, Homo sapien
gaatgttgctcttggatatttccag

SEQ ID NO: 547703 - DNA, 25 bp, Homo sapien
ctcatcctggagtgctccaaagaat

SEQ ID NO: 547704 - DNA, 25 bp, Homo sapien
ctccaaagaatgttgctcttggata

SEQ ID NO: 547705 - DNA, 25 bp, Homo sapien
ccagtttatcctggagcccttgcat

SEQ ID NO: 547706 - DNA, 25 bp, Homo sapien
gtttatcctggagcccttgcatgac

SEQ ID NO: 547707 - DNA, 25 bp, Homo sapien
ctaatggccgtccagtttatcctgg

SEQ ID NO: 547708 - DNA, 25 bp, Homo sapien
ttatcctggagcccttgcatgacac

SEQ ID NO: 547709 - DNA, 25 bp, Homo sapien
gaatgatgctcctccttaattctcc

SEQ ID NO: 547710 - DNA, 25 bp, Homo sapien
ttatatgcaaaagtgcaatgcctgc

SEQ ID NO: 547711 - DNA, 25 bp, Homo sapien
cagttttacactgagtccagcttct

SEQ ID NO: 547712 - DNA, 25 bp, Homo sapien
atagtgttgctctggttttatatgc

SEQ ID NO: 547713 - DNA, 25 bp, Homo sapien
ctacatatttccttatagtgttgct

SEQ ID NO: 547714 - DNA, 25 bp, Homo sapien
tcacagttcaccaggagataacgat

SEQ ID NO: 547715 - DNA, 25 bp, Homo sapien
tgggcctccaaagtgtttagggtca

SEQ ID NO: 547716 - DNA, 25 bp, Homo sapien
gataacgatgtagatgtacattcag

SEQ ID NO: 547717 - DNA, 25 bp, Homo sapien
aagtgtttagggtcacagttcacca

SEQ ID NO: 547718 - DNA, 25 bp, Homo sapien
tcactagactccgatcctccaaatg

SEQ ID NO: 547719 - DNA, 25 bp, Homo sapien
gattcactagactccgatcctccaa

SEQ ID NO: 547720 - DNA, 25 bp, Homo sapien
ttaagattcactagactccgatcct

SEQ ID NO: 547721 - DNA, 25 bp, Homo sapien
gactccgatcctccaaatgtaaaaa

SEQ ID NO: 547722 - DNA, 25 bp, Homo sapien
tgcctcttgacagcttgtgctttat

SEQ ID NO: 547723 - DNA, 25 bp, Homo sapien
ggaattggaagttgctgcctcttga

SEQ ID NO: 547724 - DNA, 25 bp, Homo sapien
gcttcagaccaaggaattggaagtt

SEQ ID NO: 547725 - DNA, 25 bp, Homo sapien
cttgacagcttgtgctttattcttc

SEQ ID NO: 547726 - DNA, 25 bp, Homo sapien
cattttctcattacttttaatttca

SEQ ID NO: 547727 - DNA, 25 bp, Homo sapien
ttcaaaaccccttgctttgcctatc

SEQ ID NO: 547728 - DNA, 25 bp, Homo sapien
caaaaccccttgctttgcctatcat

SEQ ID NO: 547729 - DNA, 25 bp, Homo sapien
tcaaaaccccttgctttgcctatca

SEQ ID NO: 547730 - DNA, 25 bp, Homo sapien
gttctaatgtggaatatttctcaga

SEQ ID NO: 547731 - DNA, 25 bp, Homo sapien
tgttctaatgtggaatatttctcag

SEQ ID NO: 547732 - DNA, 25 bp, Homo sapien
atgttctaatgtggaatatttctca

SEQ ID NO: 547733 - DNA, 25 bp, Homo sapien
tttgctcgttatcccttgaaacagc

SEQ ID NO: 547734 - DNA, 25 bp, Homo sapien
ctaaatttgctcgttatcccttgaa

SEQ ID NO: 547735 - DNA, 25 bp, Homo sapien
aaacagcagttaggaggtacagagg

SEQ ID NO: 547736 - DNA, 25 bp, Homo sapien
aggggacgggatattgctgttcttt

SEQ ID NO: 547737 - DNA, 25 bp, Homo sapien
atatctgacaaataaactgttggga

SEQ ID NO: 547738 - DNA, 25 bp, Homo sapien
aaaatatctgacaaataaactgttg

SEQ ID NO: 547739 - DNA, 25 bp, Homo sapien
ggagaaggaagcaatttgaataaaa

SEQ ID NO: 547740 - DNA, 25 bp, Homo sapien
tctgacaaataaactgttgggaatt

SEQ ID NO: 547741 - DNA, 25 bp, Homo sapien
gataggggctctcttctgcaactgg

SEQ ID NO: 547742 - DNA, 25 bp, Homo sapien
ccctgtcttcgatttattgagctga

SEQ ID NO: 547743 - DNA, 25 bp, Homo sapien
atgaggaagtctttgccctgtcttc

SEQ ID NO: 547744 - DNA, 25 bp, Homo sapien
gagttgaaggcccataatgatgagg

SEQ ID NO: 547745 - DNA, 25 bp, Homo sapien
tgtacactgcctttgtaagtaggca

SEQ ID NO: 547746 - DNA, 25 bp, Homo sapien
tccaggtttgatgatgtacactgcc

SEQ ID NO: 547747 - DNA, 25 bp, Homo sapien
caacaaatgatgactgaacccctga

SEQ ID NO: 547748 - DNA, 25 bp, Homo sapien
gaacccctgattgaacatctgctga

SEQ ID NO: 547749 - DNA, 25 bp, Homo sapien
ctttcctctcattattgttctctct

SEQ ID NO: 547750 - DNA, 25 bp, Homo sapien
tctcattattgttctctctctcctc

SEQ ID NO: 547751 - DNA, 25 bp, Homo sapien
ccccaagggcagaggagttgctcat

SEQ ID NO: 547752 - DNA, 25 bp, Homo sapien
cctccccaagggcagaggagttgct

SEQ ID NO: 547753 - DNA, 25 bp, Homo sapien
gaaaagagtatgaagcactgaagta

SEQ ID NO: 547754 - DNA, 25 bp, Homo sapien
caaaaggtgatggtgaaatgccaat

SEQ ID NO: 547755 - DNA, 25 bp, Homo sapien
tcccaaggctttgtctacactgaag

SEQ ID NO: 547756 - DNA, 25 bp, Homo sapien
ccacaagacaaaaggtgatggtgaa

SEQ ID NO: 547757 - DNA, 25 bp, Homo sapien
tagccactgttccacttttgagaaa

SEQ ID NO: 547758 - DNA, 25 bp, Homo sapien
tcttttactactgccactgaagagg

SEQ ID NO: 547759 - DNA, 25 bp, Homo sapien
agtaaagtataggaaggcttcctct

SEQ ID NO: 547760 - DNA, 25 bp, Homo sapien
caggcactaggatcaatgctttaca

SEQ ID NO: 547761 - DNA, 25 bp, Homo sapien
gagaaggcttccatgtgatcaggga

SEQ ID NO: 547762 - DNA, 25 bp, Homo sapien
tgcacttgtcagagatcccaacctc

SEQ ID NO: 547763 - DNA, 25 bp, Homo sapien
ctccaagaccccttcccattgtttg

SEQ ID NO: 547764 - DNA, 25 bp, Homo sapien
tagcttgtcactgcacttgtcagag

SEQ ID NO: 547765 - DNA, 25 bp, Homo sapien
tggaaggtcatcccagggaggccct

SEQ ID NO: 547766 - DNA, 25 bp, Homo sapien
tgtacataggctttcttgtagcagt

SEQ ID NO: 547767 - DNA, 25 bp, Homo sapien
gaggcccttttcttctcccgctgct

SEQ ID NO: 547768 - DNA, 25 bp, Homo sapien
gtagcagttgtctcctggaaggtca

SEQ ID NO: 547769 - DNA, 25 bp, Homo sapien
tctggctcccagttaggagagcttt

SEQ ID NO: 547770 - DNA, 25 bp, Homo sapien
tttctggctcccagttaggagagct

SEQ ID NO: 547771 - DNA, 25 bp, Homo sapien
gagctttctgacaatgaactggaca

SEQ ID NO: 547772 - DNA, 25 bp, Homo sapien
tttctgacaatgaactggacaccat

SEQ ID NO: 547773 - DNA, 25 bp, Homo sapien
gcttgcttccactgcgagttgctga

SEQ ID NO: 547774 - DNA, 25 bp, Homo sapien
tcactcctagggtaagccacactgt

SEQ ID NO: 547775 - DNA, 25 bp, Homo sapien
tggtccctgatacccaaacattgct

SEQ ID NO: 547776 - DNA, 25 bp, Homo sapien
ggagaactagcagcgtcttcattgg

SEQ ID NO: 547777 - DNA, 25 bp, Homo sapien
tcatgaatggtctccgctggcgtat

SEQ ID NO: 547778 - DNA, 25 bp, Homo sapien
aaagaatgccagtgtctgctatctg

SEQ ID NO: 547779 - DNA, 25 bp, Homo sapien
gaatgccagtgtctgctatctgaga

SEQ ID NO: 547780 - DNA, 25 bp, Homo sapien
cgctggcgtatttctgatgtgcaaa

SEQ ID NO: 547781 - DNA, 25 bp, Homo sapien
ctgtgtttgccctcttaggaaatca

SEQ ID NO: 547782 - DNA, 25 bp, Homo sapien
aatgacactgaacgtgctagctgac

SEQ ID NO: 547783 - DNA, 25 bp, Homo sapien
acaatgacactgaacgtgctagctg

SEQ ID NO: 547784 - DNA, 25 bp, Homo sapien
tgacactgaacgtgctagctgacat

SEQ ID NO: 547785 - DNA, 25 bp, Homo sapien
gtctgtaaggacaggttcaataaca

SEQ ID NO: 547786 - DNA, 25 bp, Homo sapien
tctgtaaggacaggttcaataacat

SEQ ID NO: 547787 - DNA, 25 bp, Homo sapien
acaggccacatgaccaagagaaggt

SEQ ID NO: 547788 - DNA, 25 bp, Homo sapien
gatgtgctgacctgagtcacaggcc

SEQ ID NO: 547789 - DNA, 25 bp, Homo sapien
cacatgaccaagagaaggtctctgc

SEQ ID NO: 547790 - DNA, 25 bp, Homo sapien
ctcctgaatgcctggaaacacatag

SEQ ID NO: 547791 - DNA, 25 bp, Homo sapien
ggttcagcacgaaagcactctgaca

SEQ ID NO: 547792 - DNA, 25 bp, Homo sapien
tctggtttccaggttattgagaagg

SEQ ID NO: 547793 - DNA, 25 bp, Homo sapien
aagtggagcagcacttagttctggg

SEQ ID NO: 547794 - DNA, 25 bp, Homo sapien
gggcatcgagtgaagtccttccatc

SEQ ID NO: 547795 - DNA, 25 bp, Homo sapien
gaacagtggtattggaaaaagaaca

SEQ ID NO: 547796 - DNA, 25 bp, Homo sapien
gtggaacagtggtattggaaaaaga

SEQ ID NO: 547797 - DNA, 25 bp, Homo sapien
ctagtcaagtggaacagtggtattg

SEQ ID NO: 547798 - DNA, 25 bp, Homo sapien
caagtggaacagtggtattggaaaa

SEQ ID NO: 547799 - DNA, 25 bp, Homo sapien
aatccccactagagcctcttcttgg

SEQ ID NO: 547800 - DNA, 25 bp, Homo sapien
tcttgggcatggactgactcatcta

SEQ ID NO: 547801 - DNA, 25 bp, Homo sapien
ttggccccgatccagcctccataac

SEQ ID NO: 547802 - DNA, 25 bp, Homo sapien
attttgtgacctggagttgcttgga

SEQ ID NO: 547803 - DNA, 25 bp, Homo sapien
ctgcctttatagtactcataagaag

SEQ ID NO: 547804 - DNA, 25 bp, Homo sapien
cttcaaaacagtcactgttactgcc

SEQ ID NO: 547805 - DNA, 25 bp, Homo sapien
cactgttactgcctttatagtactc

SEQ ID NO: 547806 - DNA, 25 bp, Homo sapien
acagtcactgttactgcctttatag

SEQ ID NO: 547807 - DNA, 25 bp, Homo sapien
tcttctcttgcaacgtgctggatcc

SEQ ID NO: 547808 - DNA, 25 bp, Homo sapien
tcttgcaacgtgctggatcccacaa

SEQ ID NO: 547809 - DNA, 25 bp, Homo sapien
gcaacgtgctggatcccacaatgat

SEQ ID NO: 547810 - DNA, 25 bp, Homo sapien
aacgtgctggatcccacaatgattt

SEQ ID NO: 547811 - DNA, 25 bp, Homo sapien
tccctctaacttctttcgcttctgg

SEQ ID NO: 547812 - DNA, 25 bp, Homo sapien
aacttctttcgcttctgggttcagc

SEQ ID NO: 547813 - DNA, 25 bp, Homo sapien
gagatgttttcataggctccagtcc

SEQ ID NO: 547814 - DNA, 25 bp, Homo sapien
tctaacttctttcgcttctgggttc

SEQ ID NO: 547815 - DNA, 25 bp, Homo sapien
gtcgtttcaaccatacacatatcgg

SEQ ID NO: 547816 - DNA, 25 bp, Homo sapien
caaatctgggctctttcaatggctc

SEQ ID NO: 547817 - DNA, 25 bp, Homo sapien
ccctaacagcaaatgtgactccaga

SEQ ID NO: 547818 - DNA, 25 bp, Homo sapien
gaaaggagctgtgtgatatattgac

SEQ ID NO: 547819 - DNA, 25 bp, Homo sapien
cacagtgtgacagctgtggacggga

SEQ ID NO: 547820 - DNA, 25 bp, Homo sapien
gatcaagacaaaagcggtgactgct

SEQ ID NO: 547821 - DNA, 25 bp, Homo sapien
aaagcggtgactgctccaagaaaat

SEQ ID NO: 547822 - DNA, 25 bp, Homo sapien
tgtggacgggatcaagacaaaagcg

SEQ ID NO: 547823 - DNA, 25 bp, Homo sapien
gctgtgtcctagcacctggcagata

SEQ ID NO: 547824 - DNA, 25 bp, Homo sapien
tcatatttgttaggaggaatcccct

SEQ ID NO: 547825 - DNA, 25 bp, Homo sapien
gaccatattcagttcgagccagcca

SEQ ID NO: 547826 - DNA, 25 bp, Homo sapien
agattattagtttgacacccagagg

SEQ ID NO: 547827 - DNA, 25 bp, Homo sapien
taaagccgcctatacatcagagctg

SEQ ID NO: 547828 - DNA, 25 bp, Homo sapien
gctggcctactacaccctgggttat

SEQ ID NO: 547829 - DNA, 25 bp, Homo sapien
caaagatgtattgtgcctgtgccct

SEQ ID NO: 547830 - DNA, 25 bp, Homo sapien
tcataatgcatgcaagtgggcgggc

SEQ ID NO: 547831 - DNA, 25 bp, Homo sapien
tatctgagaacatacatctggtaca

SEQ ID NO: 547832 - DNA, 25 bp, Homo sapien
cctaagctagtattgtcacatagac

SEQ ID NO: 547833 - DNA, 25 bp, Homo sapien
gttcttaccaccacagtgctacatg

SEQ ID NO: 547834 - DNA, 25 bp, Homo sapien
gatgattataaagagcgttgcaaag

SEQ ID NO: 547835 - DNA, 25 bp, Homo sapien
ttttaaacaaagagccacatttgcc

SEQ ID NO: 547836 - DNA, 25 bp, Homo sapien
gttgagttcatgtgatcagcagcca

SEQ ID NO: 547837 - DNA, 25 bp, Homo sapien
tgcactctgtggaacatacgcccaa

SEQ ID NO: 547838 - DNA, 25 bp, Homo sapien
tacgcccaacttcaaaaggaccatg

SEQ ID NO: 547839 - DNA, 25 bp, Homo sapien
cccagagctgagtcttatagtcaag

SEQ ID NO: 547840 - DNA, 25 bp, Homo sapien
tatagtcaagcactacaagcacgtc

SEQ ID NO: 547841 - DNA, 25 bp, Homo sapien
tggctgagttcacactctggccgcg

SEQ ID NO: 547842 - DNA, 25 bp, Homo sapien
tgtagttacagttggagtccagcac

SEQ ID NO: 547843 - DNA, 25 bp, Homo sapien
ctttcaggcactcaaagaaatctgg

SEQ ID NO: 547844 - DNA, 25 bp, Homo sapien
ggtgacctgggaatataccatcaac

SEQ ID NO: 547845 - DNA, 25 bp, Homo sapien
gaagggtcgttttgctatcagtgag

SEQ ID NO: 547846 - DNA, 25 bp, Homo sapien
tctttcccacttcggcttggcagaa

SEQ ID NO: 547847 - DNA, 25 bp, Homo sapien
tatctgaagtccaagctttgccgac

SEQ ID NO: 547848 - DNA, 25 bp, Homo sapien
ggtgtagcagtagagccatgaccta

SEQ ID NO: 547849 - DNA, 25 bp, Homo sapien
tgcaacgtggtttgctaaacttccg

SEQ ID NO: 547850 - DNA, 25 bp, Homo sapien
aaaatctgagctttacagaggtgca

SEQ ID NO: 547851 - DNA, 25 bp, Homo sapien
tttacaaaggaccacaatgatgtgt

SEQ ID NO: 547852 - DNA, 25 bp, Homo sapien
gatggctaaatatccctaaggtgga

SEQ ID NO: 547853 - DNA, 25 bp, Homo sapien
tacatcatgacgagggtccaagtgg

SEQ ID NO: 547854 - DNA, 25 bp, Homo sapien
tctagctcaagagggatgccattca

SEQ ID NO: 547855 - DNA, 25 bp, Homo sapien
ccccaccaattctactgtccatcca

SEQ ID NO: 547856 - DNA, 25 bp, Homo sapien
ccactccccaccaattctactgtcc

SEQ ID NO: 547857 - DNA, 25 bp, Homo sapien
caccactccccaccaattctactgt

SEQ ID NO: 547858 - DNA, 25 bp, Homo sapien
actccccaccaattctactgtccat

SEQ ID NO: 547859 - DNA, 25 bp, Homo sapien
catctgagacctctccctcaacctc

SEQ ID NO: 547860 - DNA, 25 bp, Homo sapien
tttcctgcctgtgctcggttttggc

SEQ ID NO: 547861 - DNA, 25 bp, Homo sapien
tgtgctcggttttggcattccaaac

SEQ ID NO: 547862 - DNA, 25 bp, Homo sapien
agcctcttagatctattgttttcct

SEQ ID NO: 547863 - DNA, 25 bp, Homo sapien
gatgaccagtaagaaccaacagaga

SEQ ID NO: 547864 - DNA, 25 bp, Homo sapien
cagactacagatagcaaatgctgct

SEQ ID NO: 547865 - DNA, 25 bp, Homo sapien
taccactggtcggatgaccagtaag

SEQ ID NO: 547866 - DNA, 25 bp, Homo sapien
gaaggaaacgaacgctcccgcagac

SEQ ID NO: 547867 - DNA, 25 bp, Homo sapien
gttattggatcaagcttcttacgca

SEQ ID NO: 547868 - DNA, 25 bp, Homo sapien
ctcaggcatgagtccagttggtaca

SEQ ID NO: 547869 - DNA, 25 bp, Homo sapien
ctgggtaatagacactgccacctga

SEQ ID NO: 547870 - DNA, 25 bp, Homo sapien
tttccttcaggagtcctaggtgttg

SEQ ID NO: 547871 - DNA, 25 bp, Homo sapien
tttcccattatggtcaatagcaggg

SEQ ID NO: 547872 - DNA, 25 bp, Homo sapien
tatcagcaaaggagccaatgcgggt

SEQ ID NO: 547873 - DNA, 25 bp, Homo sapien
tgaggataatcaattgagccctgac

SEQ ID NO: 547874 - DNA, 25 bp, Homo sapien
gagccctgactgacgattcctgctg

SEQ ID NO: 547875 - DNA, 25 bp, Homo sapien
tccaccttccaccatactctcttca

SEQ ID NO: 547876 - DNA, 25 bp, Homo sapien
ggcctgtttgctccctgagtaaatt

SEQ ID NO: 547877 - DNA, 25 bp, Homo sapien
aattagatccctgcatgtgctgctc

SEQ ID NO: 547878 - DNA, 25 bp, Homo sapien
gctccctgagtaaattagatccctg

SEQ ID NO: 547879 - DNA, 25 bp, Homo sapien
ggctctcctcccttgtaggtctctt

SEQ ID NO: 547880 - DNA, 25 bp, Homo sapien
tgtaggtctctttgtgcctccgcat

SEQ ID NO: 547881 - DNA, 25 bp, Homo sapien
ttcccaggctctcctcccttgtagg

SEQ ID NO: 547882 - DNA, 25 bp, Homo sapien
agagatttttcccaggctctcctcc

SEQ ID NO: 547883 - DNA, 25 bp, Homo sapien
tcctctgactcttgtttctttctgc

SEQ ID NO: 547884 - DNA, 25 bp, Homo sapien
cctgagtttcctctgactcttgttt

SEQ ID NO: 547885 - DNA, 25 bp, Homo sapien
tgtttctttctgcttcttgtgacag

SEQ ID NO: 547886 - DNA, 25 bp, Homo sapien
tttcctctgactcttgtttctttct

SEQ ID NO: 547887 - DNA, 25 bp, Homo sapien
tttcttatttccattaacaaccaga

SEQ ID NO: 547888 - DNA, 25 bp, Homo sapien
tcttatttccattaacaaccagaaa

SEQ ID NO: 547889 - DNA, 25 bp, Homo sapien
catttcttatttccattaacaacca

SEQ ID NO: 547890 - DNA, 25 bp, Homo sapien
atttcttatttccattaacaaccag

SEQ ID NO: 547891 - DNA, 25 bp, Homo sapien
taacatctggcgagcatataaggcc

SEQ ID NO: 547892 - DNA, 25 bp, Homo sapien
tagtgggcagacaactaccttggac

SEQ ID NO: 547893 - DNA, 25 bp, Homo sapien
tagaagtctcagtacaccaaaagga

SEQ ID NO: 547894 - DNA, 25 bp, Homo sapien
tctcagagagacttagagcagagcc

SEQ ID NO: 547895 - DNA, 25 bp, Homo sapien
ctacatcagaaggcaaagtggacaa

SEQ ID NO: 547896 - DNA, 25 bp, Homo sapien
gataatccacacaatccaagaacat

SEQ ID NO: 547897 - DNA, 25 bp, Homo sapien
ggataatccacacaatccaagaaca

SEQ ID NO: 547898 - DNA, 25 bp, Homo sapien
taatccacacaatccaagaacattt

SEQ ID NO: 547899 - DNA, 25 bp, Homo sapien
aatccacacaatccaagaacatttc

SEQ ID NO: 547900 - DNA, 25 bp, Homo sapien
gcggctgagcctagaattgaggatt

SEQ ID NO: 547901 - DNA, 25 bp, Homo sapien
tgtggattgttgctctcaggcggct

SEQ ID NO: 547902 - DNA, 25 bp, Homo sapien
ggccacggtgcctttctctgaatgt

SEQ ID NO: 547903 - DNA, 25 bp, Homo sapien
tatacatccagtcagatttgtggca

SEQ ID NO: 547904 - DNA, 25 bp, Homo sapien
gttcctccaggcattagacgttcat

SEQ ID NO: 547905 - DNA, 25 bp, Homo sapien
ccaagaggtcaagtacggctgctca

SEQ ID NO: 547906 - DNA, 25 bp, Homo sapien
gacgttcatctcgattttgcatttg

SEQ ID NO: 547907 - DNA, 25 bp, Homo sapien
aatgtgacttgtggataccaagagg

SEQ ID NO: 547908 - DNA, 25 bp, Homo sapien
ttggaaacccaaagcgacagatata

SEQ ID NO: 547909 - DNA, 25 bp, Homo sapien
cgacagatatatgggctacctttta

SEQ ID NO: 547910 - DNA, 25 bp, Homo sapien
gcctgaaggaattaagttatgagtc

SEQ ID NO: 547911 - DNA, 25 bp, Homo sapien
taagttatgagtctttggaaaccca

SEQ ID NO: 547912 - DNA, 25 bp, Homo sapien
ctcaatattaacctgtccctgtaac

SEQ ID NO: 547913 - DNA, 25 bp, Homo sapien
aagacagacaggttcccttgtgaaa

SEQ ID NO: 547914 - DNA, 25 bp, Homo sapien
taatacctcccatctaatacatagt

SEQ ID NO: 547915 - DNA, 25 bp, Homo sapien
cagtctttgttaatgacacagggcg

SEQ ID NO: 547916 - DNA, 25 bp, Homo sapien
gcaccactcttcaattttaagggag

SEQ ID NO: 547917 - DNA, 25 bp, Homo sapien
ttttaagggagttgcttctggtgct

SEQ ID NO: 547918 - DNA, 25 bp, Homo sapien
aaccccagagctgtttgatagagag

SEQ ID NO: 547919 - DNA, 25 bp, Homo sapien
tgatagagagtttcaataatgcacc

SEQ ID NO: 547920 - DNA, 25 bp, Homo sapien
tgtactctagctgtttgcttggcaa

SEQ ID NO: 547921 - DNA, 25 bp, Homo sapien
gcctcctgctgataaaccactgtac

SEQ ID NO: 547922 - DNA, 25 bp, Homo sapien
gcttgaaattcgctttgcccatgtt

SEQ ID NO: 547923 - DNA, 25 bp, Homo sapien
gcaaataaatgctgttccgccctat

SEQ ID NO: 547924 - DNA, 25 bp, Homo sapien
gttcctgtgcagaaccacgtcccgt

SEQ ID NO: 547925 - DNA, 25 bp, Homo sapien
gaagccgaaaatctccctgttcctg

SEQ ID NO: 547926 - DNA, 25 bp, Homo sapien
tgagtgcactgcgtggaagccgaaa

SEQ ID NO: 547927 - DNA, 25 bp, Homo sapien
gttccaaccctctgagtgcactgcg

SEQ ID NO: 547928 - DNA, 25 bp, Homo sapien
ttcctcaatcggaaagcagctgtct

SEQ ID NO: 547929 - DNA, 25 bp, Homo sapien
cactagggctatgtcggcttctcac

SEQ ID NO: 547930 - DNA, 25 bp, Homo sapien
aggatgctggtctcaacactagggc

SEQ ID NO: 547931 - DNA, 25 bp, Homo sapien
ctgatcaatgcgaggagtctcttcc

SEQ ID NO: 547932 - DNA, 25 bp, Homo sapien
tttgcgattcaggattccacttgaa

SEQ ID NO: 547933 - DNA, 25 bp, Homo sapien
tgcgattcaggattccacttgaatt

SEQ ID NO: 547934 - DNA, 25 bp, Homo sapien
ctttgcgattcaggattccacttga

SEQ ID NO: 547935 - DNA, 25 bp, Homo sapien
gattcaggattccacttgaattccc

SEQ ID NO: 547936 - DNA, 25 bp, Homo sapien
gggttctccccggcacagtcgaatc

SEQ ID NO: 547937 - DNA, 25 bp, Homo sapien
tcgggttctccccggcacagtcgaa

SEQ ID NO: 547938 - DNA, 25 bp, Homo sapien
ttctccccggcacagtcgaatccac

SEQ ID NO: 547939 - DNA, 25 bp, Homo sapien
gttctccccggcacagtcgaatcca

SEQ ID NO: 547940 - DNA, 25 bp, Homo sapien
aggccggtagctgtcctgcagtccg

SEQ ID NO: 547941 - DNA, 25 bp, Homo sapien
cctcaggccggtagctgtcctgcag

SEQ ID NO: 547942 - DNA, 25 bp, Homo sapien
cctgcagtccgagcggagctgcgac

SEQ ID NO: 547943 - DNA, 25 bp, Homo sapien
tcctgcagtccgagcggagctgcga

SEQ ID NO: 547944 - DNA, 25 bp, Homo sapien
gccgccacccggagaaccgcggctg

SEQ ID NO: 547945 - DNA, 25 bp, Homo sapien
gatgagcggcggtcccttcgccgcc

SEQ ID NO: 547946 - DNA, 25 bp, Homo sapien
gcaggcaggatgagcggcggtccct

SEQ ID NO: 547947 - DNA, 25 bp, Homo sapien
cgcggctggtgcccttgaaggccct

SEQ ID NO: 547948 - DNA, 25 bp, Homo sapien
ataactcccggagtcggaacagcgc

SEQ ID NO: 547949 - DNA, 25 bp, Homo sapien
aagttatgccctggagacctgcgag

SEQ ID NO: 547950 - DNA, 25 bp, Homo sapien
cgccccgaagtctgaaagttatgcc

SEQ ID NO: 547951 - DNA, 25 bp, Homo sapien
tgccccacgaggaggcctccagaat

SEQ ID NO: 547952 - DNA, 25 bp, Homo sapien
gagatggcaataacaccgatggcag

SEQ ID NO: 547953 - DNA, 25 bp, Homo sapien
tcacaagtggaaaagaggacctcgc

SEQ ID NO: 547954 - DNA, 25 bp, Homo sapien
tcgtggcgctaagactgagatggca

SEQ ID NO: 547955 - DNA, 25 bp, Homo sapien
tgaaacagctcgaaaggactgcgtg

SEQ ID NO: 547956 - DNA, 25 bp, Homo sapien
tccaacttcacggacgaaaaactgc

SEQ ID NO: 547957 - DNA, 25 bp, Homo sapien
ctagttttagccaggatcagaagcc

SEQ ID NO: 547958 - DNA, 25 bp, Homo sapien
ggacgaaaaactgcgaaagcctatc

SEQ ID NO: 547959 - DNA, 25 bp, Homo sapien
gctggccaccaaggccgttcgaatg

SEQ ID NO: 547960 - DNA, 25 bp, Homo sapien
gatgagtagggatacttcacgcagg

SEQ ID NO: 547961 - DNA, 25 bp, Homo sapien
agggatacttcacgcaggtgccagg

SEQ ID NO: 547962 - DNA, 25 bp, Homo sapien
tgaaagatgagtagggatacttcac

SEQ ID NO: 547963 - DNA, 25 bp, Homo sapien
agtagggatacttcacgcaggtgcc

SEQ ID NO: 547964 - DNA, 25 bp, Homo sapien
tgttctctcacgtgcgctgccacgt

SEQ ID NO: 547965 - DNA, 25 bp, Homo sapien
atcgctgagtgagtcctgcgggctt

SEQ ID NO: 547966 - DNA, 25 bp, Homo sapien
cgccctgttctctcacgtgcgctgc

SEQ ID NO: 547967 - DNA, 25 bp, Homo sapien
gcagagggcagggatcgctgagtga

SEQ ID NO: 547968 - DNA, 25 bp, Homo sapien
aaatcgatacaatcacggcagtggg

SEQ ID NO: 547969 - DNA, 25 bp, Homo sapien
gaaactgtaatcgaagttgagagca

SEQ ID NO: 547970 - DNA, 25 bp, Homo sapien
gagagcaatttcagaacacgcatta

SEQ ID NO: 547971 - DNA, 25 bp, Homo sapien
accgaagtagtctcagtatcacaag

SEQ ID NO: 547972 - DNA, 25 bp, Homo sapien
gaaactttgtacatttggcatctga

SEQ ID NO: 547973 - DNA, 25 bp, Homo sapien
cactgtggagcagtaggtggcacac

SEQ ID NO: 547974 - DNA, 25 bp, Homo sapien
tcccaagtcaccaagaaatagaggc

SEQ ID NO: 547975 - DNA, 25 bp, Homo sapien
tagaggctctctagtcactgtggag

SEQ ID NO: 547976 - DNA, 25 bp, Homo sapien
aacacaaaaacgcacccaaatcata

SEQ ID NO: 547977 - DNA, 25 bp, Homo sapien
acacaaaaacgcacccaaatcataa

SEQ ID NO: 547978 - DNA, 25 bp, Homo sapien
cacaaaaacgcacccaaatcataaa

SEQ ID NO: 547979 - DNA, 25 bp, Homo sapien
ggtctaccagaaagctagcccagtt

SEQ ID NO: 547980 - DNA, 25 bp, Homo sapien
catggacaggtagatcaatccgtga

SEQ ID NO: 547981 - DNA, 25 bp, Homo sapien
gaaatcgcactagccacaaaacggt

SEQ ID NO: 547982 - DNA, 25 bp, Homo sapien
cccctgttgtattttggcgcataga

SEQ ID NO: 547983 - DNA, 25 bp, Homo sapien
tataatttcatgtcctccaagagag

SEQ ID NO: 547984 - DNA, 25 bp, Homo sapien
gccataggcctctcattggaacgga

SEQ ID NO: 547985 - DNA, 25 bp, Homo sapien
caagtcctaccgcaaaagaaagcag

SEQ ID NO: 547986 - DNA, 25 bp, Homo sapien
gaagaaacgggacctagaagagcaa

SEQ ID NO: 547987 - DNA, 25 bp, Homo sapien
cgactcagttcgtgcgtgtagggtt

SEQ ID NO: 547988 - DNA, 25 bp, Homo sapien
tttcgtttttcgactcagttcgtgc

SEQ ID NO: 547989 - DNA, 25 bp, Homo sapien
gaacttcaacttctcgctcgtttgg

SEQ ID NO: 547990 - DNA, 25 bp, Homo sapien
caacttctcgctcgtttggttttcg

SEQ ID NO: 547991 - DNA, 25 bp, Homo sapien
tccccaggatatttaggtaagtgtc

SEQ ID NO: 547992 - DNA, 25 bp, Homo sapien
tgcaggcaggataacggacactcca

SEQ ID NO: 547993 - DNA, 25 bp, Homo sapien
tgtacatagttccttggtccccagg

SEQ ID NO: 547994 - DNA, 25 bp, Homo sapien
aagttgcagattatggctccccgga

SEQ ID NO: 547995 - DNA, 25 bp, Homo sapien
agtggcagagaatttcatccgcttc

SEQ ID NO: 547996 - DNA, 25 bp, Homo sapien
agagaatttcatccgcttctgcttc

SEQ ID NO: 547997 - DNA, 25 bp, Homo sapien
gtaagtggcagagaatttcatccgc

SEQ ID NO: 547998 - DNA, 25 bp, Homo sapien
tggcagagaatttcatccgcttctg

SEQ ID NO: 547999 - DNA, 25 bp, Homo sapien
ttgttcattttctcgcgctgggcgc

SEQ ID NO: 548000 - DNA, 25 bp, Homo sapien
ttctcgccgccgttgaagagctcag

SEQ ID NO: 548001 - DNA, 25 bp, Homo sapien
tgtccgagtcgcagatggacgccag

SEQ ID NO: 548002 - DNA, 25 bp, Homo sapien
cggcgatggaagtccgcttgcgctt

SEQ ID NO: 548003 - DNA, 25 bp, Homo sapien
ccagcccggggtgcggcagcccgga

SEQ ID NO: 548004 - DNA, 25 bp, Homo sapien
gccgccgcggggtgcgacaggtggc

SEQ ID NO: 548005 - DNA, 25 bp, Homo sapien
cccggacggcatgttcatggcggcc

SEQ ID NO: 548006 - DNA, 25 bp, Homo sapien
ccgcggggtgcgacaggtggcccag

SEQ ID NO: 548007 - DNA, 25 bp, Homo sapien
gcccgcgccggccatgagcgcgagc

SEQ ID NO: 548008 - DNA, 25 bp, Homo sapien
cgcgccggccatgagcgcgagcgac

SEQ ID NO: 548009 - DNA, 25 bp, Homo sapien
ggtgagggtgcgcggagccgcccag

SEQ ID NO: 548010 - DNA, 25 bp, Homo sapien
ccgcccgcgccggccatgagcgcga

SEQ ID NO: 548011 - DNA, 25 bp, Homo sapien
agatcgccgggttcgagcgcctggt

SEQ ID NO: 548012 - DNA, 25 bp, Homo sapien
gatcgccgggttcgagcgcctggtg

SEQ ID NO: 548013 - DNA, 25 bp, Homo sapien
tgtggtccagcagatcgccgggttc

SEQ ID NO: 548014 - DNA, 25 bp, Homo sapien
agatgtggtccagcagatcgccggg

SEQ ID NO: 548015 - DNA, 25 bp, Homo sapien
tgttcatcgtgtggtacgtggcgtc

SEQ ID NO: 548016 - DNA, 25 bp, Homo sapien
cttgccctgggacacggcgatgtcc

SEQ ID NO: 548017 - DNA, 25 bp, Homo sapien
tacgtggcgtccggcttgaaaggat

SEQ ID NO: 548018 - DNA, 25 bp, Homo sapien
gtggaagtggacgtgcacggcacgc

SEQ ID NO: 548019 - DNA, 25 bp, Homo sapien
catgcgaagggcaaacacaaagcaa

SEQ ID NO: 548020 - DNA, 25 bp, Homo sapien
acacacaggccggaaagcacagcat

SEQ ID NO: 548021 - DNA, 25 bp, Homo sapien
gcatgcgaagggcaaacacaaagca

SEQ ID NO: 548022 - DNA, 25 bp, Homo sapien
caggccggaaagcacagcatgcgaa

SEQ ID NO: 548023 - DNA, 25 bp, Homo sapien
ggcagacaggaacacgacattaagg

SEQ ID NO: 548024 - DNA, 25 bp, Homo sapien
agggaagtcgagagtcctggcccca

SEQ ID NO: 548025 - DNA, 25 bp, Homo sapien
caaaacgtgcctcgctgcgggactg

SEQ ID NO: 548026 - DNA, 25 bp, Homo sapien
aggaacacgacattaagggccgccg

SEQ ID NO: 548027 - DNA, 25 bp, Homo sapien
acatgcagcgtttcggagacgggga

SEQ ID NO: 548028 - DNA, 25 bp, Homo sapien
tgcagcgtttcggagacggggaggg

SEQ ID NO: 548029 - DNA, 25 bp, Homo sapien
cgacatgcagcgtttcggagacggg

SEQ ID NO: 548030 - DNA, 25 bp, Homo sapien
cccgacatgcagcgtttcggagacg

SEQ ID NO: 548031 - DNA, 25 bp, Homo sapien
gtgcagcgacgggtacttgtgctca

SEQ ID NO: 548032 - DNA, 25 bp, Homo sapien
agggtgggatgcatggcaaagtgag

SEQ ID NO: 548033 - DNA, 25 bp, Homo sapien
aggcccgccggatggcctcggagct

SEQ ID NO: 548034 - DNA, 25 bp, Homo sapien
tggagtgcagcgacgggtacttgtg

SEQ ID NO: 548035 - DNA, 25 bp, Homo sapien
tggcggcttggcatgtatatccaca

SEQ ID NO: 548036 - DNA, 25 bp, Homo sapien
cgggaaagtgcgtacgccggctcac

SEQ ID NO: 548037 - DNA, 25 bp, Homo sapien
cacaaacactccgaaagtccgcggg

SEQ ID NO: 548038 - DNA, 25 bp, Homo sapien
ggtcccgcttctccgacagctctag

SEQ ID NO: 548039 - DNA, 25 bp, Homo sapien
caggacgtcgctagagggaaagagt

SEQ ID NO: 548040 - DNA, 25 bp, Homo sapien
gaaagagtgagtcctacggtagtca

SEQ ID NO: 548041 - DNA, 25 bp, Homo sapien
ggacgatgagcaggacgtcgctaga

SEQ ID NO: 548042 - DNA, 25 bp, Homo sapien
gtagtcatcacaccgggagtccggg

SEQ ID NO: 548043 - DNA, 25 bp, Homo sapien
ccctggtggccgttccctgcgctct

SEQ ID NO: 548044 - DNA, 25 bp, Homo sapien
ctggtggccgttccctgcgctctct

SEQ ID NO: 548045 - DNA, 25 bp, Homo sapien
acccctggtggccgttccctgcgct

SEQ ID NO: 548046 - DNA, 25 bp, Homo sapien
acacccctggtggccgttccctgcg

SEQ ID NO: 548047 - DNA, 25 bp, Homo sapien
tctcaaggaagcgctggtctttagg

SEQ ID NO: 548048 - DNA, 25 bp, Homo sapien
tcaaggaagcgctggtctttaggga

SEQ ID NO: 548049 - DNA, 25 bp, Homo sapien
caaggaagcgctggtctttagggac

SEQ ID NO: 548050 - DNA, 25 bp, Homo sapien
cctctcaaggaagcgctggtcttta

SEQ ID NO: 548051 - DNA, 25 bp, Homo sapien
ttggcagcgcccttttcccgaccta

SEQ ID NO: 548052 - DNA, 25 bp, Homo sapien
tcctttggcagcgcccttttcccga

SEQ ID NO: 548053 - DNA, 25 bp, Homo sapien
tggcagcgcccttttcccgacctaa

SEQ ID NO: 548054 - DNA, 25 bp, Homo sapien
gactggcgggagaggttttgtgcca

SEQ ID NO: 548055 - DNA, 25 bp, Homo sapien
ttgtgccaggatccgcactgtctgg

SEQ ID NO: 548056 - DNA, 25 bp, Homo sapien
cactgtctggggtgaacgctcctca

SEQ ID NO: 548057 - DNA, 25 bp, Homo sapien
ggttggcgtgaggactggcgggaga

SEQ ID NO: 548058 - DNA, 25 bp, Homo sapien
cacttttggagagcgcgcctgatag

SEQ ID NO: 548059 - DNA, 25 bp, Homo sapien
ccatcctccacttttggagagcgcg

SEQ ID NO: 548060 - DNA, 25 bp, Homo sapien
gagcgcgcctgatagctgctgccca

SEQ ID NO: 548061 - DNA, 25 bp, Homo sapien
tttgacctgaaccgccaacttccca

SEQ ID NO: 548062 - DNA, 25 bp, Homo sapien
tatttgactccgcagccactactcg

SEQ ID NO: 548063 - DNA, 25 bp, Homo sapien
ggtgcggagaaagttagtatttgac

SEQ ID NO: 548064 - DNA, 25 bp, Homo sapien
aagttagtatttgactccgcagcca

SEQ ID NO: 548065 - DNA, 25 bp, Homo sapien
gagaaagttagtatttgactccgca

SEQ ID NO: 548066 - DNA, 25 bp, Homo sapien
tgcgtggcggtagtgggtatacagg

SEQ ID NO: 548067 - DNA, 25 bp, Homo sapien
ttcgacataagtgcgtggcggtagt

SEQ ID NO: 548068 - DNA, 25 bp, Homo sapien
ttagggactcaggatcgggtctgag

SEQ ID NO: 548069 - DNA, 25 bp, Homo sapien
tgagggacttcgacataagtgcgtg

SEQ ID NO: 548070 - DNA, 25 bp, Homo sapien
ctggtggccgaagccggagctgtgt

SEQ ID NO: 548071 - DNA, 25 bp, Homo sapien
gccgaagccggagctgtgtttctcg

SEQ ID NO: 548072 - DNA, 25 bp, Homo sapien
gttctggtggccgaagccggagctg

SEQ ID NO: 548073 - DNA, 25 bp, Homo sapien
ttgggttctggtggccgaagccgga

SEQ ID NO: 548074 - DNA, 25 bp, Homo sapien
ggcacatttcaccacgcagccagcg

SEQ ID NO: 548075 - DNA, 25 bp, Homo sapien
acattgtgcgtaggcaattgtttag

SEQ ID NO: 548076 - DNA, 25 bp, Homo sapien
cacatttcaccacgcagccagcgcc

SEQ ID NO: 548077 - DNA, 25 bp, Homo sapien
ctacattgtgcgtaggcaattgttt

SEQ ID NO: 548078 - DNA, 25 bp, Homo sapien
tcccagggtcatgcctgagctgctt

SEQ ID NO: 548079 - DNA, 25 bp, Homo sapien
tggaactttcgcttcccctctgggc

SEQ ID NO: 548080 - DNA, 25 bp, Homo sapien
ggatatgggtaagatcttcgggtct

SEQ ID NO: 548081 - DNA, 25 bp, Homo sapien
agcaggatatgggtaagatcttcgg

SEQ ID NO: 548082 - DNA, 25 bp, Homo sapien
cccaggcgatagctactgggctcct

SEQ ID NO: 548083 - DNA, 25 bp, Homo sapien
tcccaggcgatagctactgggctcc

SEQ ID NO: 548084 - DNA, 25 bp, Homo sapien
ctcccaggcgatagctactgggctc

SEQ ID NO: 548085 - DNA, 25 bp, Homo sapien
ctgaggttggagttctccgggccac

SEQ ID NO: 548086 - DNA, 25 bp, Homo sapien
cacgttccgggtcgcttaggctcgg

SEQ ID NO: 548087 - DNA, 25 bp, Homo sapien
gctcggagatttcccggagaccgtc

SEQ ID NO: 548088 - DNA, 25 bp, Homo sapien
ctctggtccctaaggcccggagtgg

SEQ ID NO: 548089 - DNA, 25 bp, Homo sapien
ggacatgaaacccacctaccttgtg

SEQ ID NO: 548090 - DNA, 25 bp, Homo sapien
taccttgtgaaagccctacgggtga

SEQ ID NO: 548091 - DNA, 25 bp, Homo sapien
tagttgccaggagtttcgcagccca

SEQ ID NO: 548092 - DNA, 25 bp, Homo sapien
tgcgtcccaggaaagttcactgctg

SEQ ID NO: 548093 - DNA, 25 bp, Homo sapien
gaaaaccgcaaggacgcgagtccaa

SEQ ID NO: 548094 - DNA, 25 bp, Homo sapien
cctggaagcgggtgcctgtcgctct

SEQ ID NO: 548095 - DNA, 25 bp, Homo sapien
gagtccaaacccgagagtgcggagc

SEQ ID NO: 548096 - DNA, 25 bp, Homo sapien
cccacgcaaggacataggaagttct

SEQ ID NO: 548097 - DNA, 25 bp, Homo sapien
ctcgccggcgccgccgccagccgcc

SEQ ID NO: 548098 - DNA, 25 bp, Homo sapien
ccggcgccgccgccagccgcccctc

SEQ ID NO: 548099 - DNA, 25 bp, Homo sapien
tcgccggcgccgccgccagccgccc

SEQ ID NO: 548100 - DNA, 25 bp, Homo sapien
ccaacgctcgccggcgccgccgcca

SEQ ID NO: 548101 - DNA, 25 bp, Homo sapien
cttcccgccgcccgcacaaatcaaa

SEQ ID NO: 548102 - DNA, 25 bp, Homo sapien
acaaatcaaagccccttgcgaggga

SEQ ID NO: 548103 - DNA, 25 bp, Homo sapien
cacaaatcaaagccccttgcgaggg

SEQ ID NO: 548104 - DNA, 25 bp, Homo sapien
ttcccgccgcccgcacaaatcaaag

SEQ ID NO: 548105 - DNA, 25 bp, Homo sapien
ccgaggctggcgggccggaccccat

SEQ ID NO: 548106 - DNA, 25 bp, Homo sapien
gcgggaatccgagaaggccgagttc

SEQ ID NO: 548107 - DNA, 25 bp, Homo sapien
gcggcgggaatccgagaaggccgag

SEQ ID NO: 548108 - DNA, 25 bp, Homo sapien
agaaggccgagttcgctgtaatccc

SEQ ID NO: 548109 - DNA, 25 bp, Homo sapien
taggcataccaaatacgtttagaac

SEQ ID NO: 548110 - DNA, 25 bp, Homo sapien
caatattggactaaggctagagtgc

SEQ ID NO: 548111 - DNA, 25 bp, Homo sapien
gaaaactcccctggaatgcaagtgg

SEQ ID NO: 548112 - DNA, 25 bp, Homo sapien
gatcaagaacttggcgatgagctct

SEQ ID NO: 548113 - DNA, 25 bp, Homo sapien
ccctaacttctctggtcacaaagac

SEQ ID NO: 548114 - DNA, 25 bp, Homo sapien
tcaacaggccactgtatctaacagt

SEQ ID NO: 548115 - DNA, 25 bp, Homo sapien
tctgggtacaggttaatccaccatc

SEQ ID NO: 548116 - DNA, 25 bp, Homo sapien
cctgacttgatacttgactaaagat

SEQ ID NO: 548117 - DNA, 25 bp, Homo sapien
ggtttgatttcattagttactggac

SEQ ID NO: 548118 - DNA, 25 bp, Homo sapien
ctctgtctgaaacaagcagcttggg

SEQ ID NO: 548119 - DNA, 25 bp, Homo sapien
tagtcgatgtgaactgcttaacaaa

SEQ ID NO: 548120 - DNA, 25 bp, Homo sapien
ttactggacaagaactggaatggag

SEQ ID NO: 548121 - DNA, 25 bp, Homo sapien
ttgtcaaggtaagcagcatccatcg

SEQ ID NO: 548122 - DNA, 25 bp, Homo sapien
gctttttggaacctcctgcttggac

SEQ ID NO: 548123 - DNA, 25 bp, Homo sapien
ctgagctgaaggcaactaagggaca

SEQ ID NO: 548124 - DNA, 25 bp, Homo sapien
tttgtagggtacacagtcacttggt

SEQ ID NO: 548125 - DNA, 25 bp, Homo sapien
tgccttgcagaactggtgtcacaca

SEQ ID NO: 548126 - DNA, 25 bp, Homo sapien
tatcgccttgattctttgacaccac

SEQ ID NO: 548127 - DNA, 25 bp, Homo sapien
tgttcttagaacagttaaggtctgc

SEQ ID NO: 548128 - DNA, 25 bp, Homo sapien
gcttcgctaggtgagaagaactgga

SEQ ID NO: 548129 - DNA, 25 bp, Homo sapien
actgaagagcagcaactgcaaacct

SEQ ID NO: 548130 - DNA, 25 bp, Homo sapien
gctcatactgttctactttggactg

SEQ ID NO: 548131 - DNA, 25 bp, Homo sapien
tttcttgaggcgattggtttcacgc

SEQ ID NO: 548132 - DNA, 25 bp, Homo sapien
gagcagcaactgcaaaccttccaaa

SEQ ID NO: 548133 - DNA, 25 bp, Homo sapien
gagttatcccctaaaacaatggcaa

SEQ ID NO: 548134 - DNA, 25 bp, Homo sapien
tgatgatttcccctcgaagagctgg

SEQ ID NO: 548135 - DNA, 25 bp, Homo sapien
aattcagaaatcttagcagtcccag

SEQ ID NO: 548136 - DNA, 25 bp, Homo sapien
ttgagagtgcaaactgtcccaggct

SEQ ID NO: 548137 - DNA, 25 bp, Homo sapien
aaaggatgccagttccccttgtcca

SEQ ID NO: 548138 - DNA, 25 bp, Homo sapien
tgtccaaatagctctaagagataca

SEQ ID NO: 548139 - DNA, 25 bp, Homo sapien
taaagtggccttgcatgaaagtaca

SEQ ID NO: 548140 - DNA, 25 bp, Homo sapien
tacatacattggctaatagaaacac

SEQ ID NO: 548141 - DNA, 25 bp, Homo sapien
gaaagtacagcattgacagaccacc

SEQ ID NO: 548142 - DNA, 25 bp, Homo sapien
caccatattttaggcataaatccag

SEQ ID NO: 548143 - DNA, 25 bp, Homo sapien
tagtttagaaagagcagacctgtga

SEQ ID NO: 548144 - DNA, 25 bp, Homo sapien
tagatgcggacaagaaactcaagac

SEQ ID NO: 548145 - DNA, 25 bp, Homo sapien
taactgcacagctcagagtcagcat

SEQ ID NO: 548146 - DNA, 25 bp, Homo sapien
gaaatcctttgctctaatgtggaga

SEQ ID NO: 548147 - DNA, 25 bp, Homo sapien
tctcaaaggacagacagggattaac

SEQ ID NO: 548148 - DNA, 25 bp, Homo sapien
tctaggaaaattagggagggcctca

SEQ ID NO: 548149 - DNA, 25 bp, Homo sapien
gaaaggctgttacaacaggctaggc

SEQ ID NO: 548150 - DNA, 25 bp, Homo sapien
caacaactgggctagatctcaaagg

SEQ ID NO: 548151 - DNA, 25 bp, Homo sapien
tgcccagagtatctagagcctttat

SEQ ID NO: 548152 - DNA, 25 bp, Homo sapien
agtatctagagcctttatcctcccc

SEQ ID NO: 548153 - DNA, 25 bp, Homo sapien
gtccataatgacaagccttggggtt

SEQ ID NO: 548154 - DNA, 25 bp, Homo sapien
cccagagtatctagagcctttatcc

SEQ ID NO: 548155 - DNA, 25 bp, Homo sapien
gtggatgtagtggagtcatgctacc

SEQ ID NO: 548156 - DNA, 25 bp, Homo sapien
gatgtagtggagtcatgctaccaaa

SEQ ID NO: 548157 - DNA, 25 bp, Homo sapien
cccttctgcttagagtagaaagtgg

SEQ ID NO: 548158 - DNA, 25 bp, Homo sapien
ccttctgcttagagtagaaagtggt

SEQ ID NO: 548159 - DNA, 25 bp, Homo sapien
tgacacctaaccaagccgaaaagag

SEQ ID NO: 548160 - DNA, 25 bp, Homo sapien
tatctgccacattgctcaagagggc

SEQ ID NO: 548161 - DNA, 25 bp, Homo sapien
aatatgttctgtgatggactgagcc

SEQ ID NO: 548162 - DNA, 25 bp, Homo sapien
ggagctctcctcaggtgaaccagat

SEQ ID NO: 548163 - DNA, 25 bp, Homo sapien
ggaatacggttttcagctcaaatcg

SEQ ID NO: 548164 - DNA, 25 bp, Homo sapien
gctcaaatcgcttttcaagtgaact

SEQ ID NO: 548165 - DNA, 25 bp, Homo sapien
tgcaaattgatctggaatacggttt

SEQ ID NO: 548166 - DNA, 25 bp, Homo sapien
ggttttcagctcaaatcgcttttca

SEQ ID NO: 548167 - DNA, 25 bp, Homo sapien
cattcagcatgctgtgggaaacggc

SEQ ID NO: 548168 - DNA, 25 bp, Homo sapien
gataggcatagagattcaaaccact

SEQ ID NO: 548169 - DNA, 25 bp, Homo sapien
caaaatagctttcgttccattcagc

SEQ ID NO: 548170 - DNA, 25 bp, Homo sapien
gctccttttctgagcgcagacagag

SEQ ID NO: 548171 - DNA, 25 bp, Homo sapien
gtgtggtgttctcatgtgccatccc

SEQ ID NO: 548172 - DNA, 25 bp, Homo sapien
ccattgtttgcttattcctgcattg

SEQ ID NO: 548173 - DNA, 25 bp, Homo sapien
tgtgccatccctcagagaggttgct

SEQ ID NO: 548174 - DNA, 25 bp, Homo sapien
acattgggggccatattgtcttctc

SEQ ID NO: 548175 - DNA, 25 bp, Homo sapien
cagccttcagtcgtaaattctccct

SEQ ID NO: 548176 - DNA, 25 bp, Homo sapien
cgtaaattctccctcaccagaccac

SEQ ID NO: 548177 - DNA, 25 bp, Homo sapien
cttcagccttcagtcgtaaattctc

SEQ ID NO: 548178 - DNA, 25 bp, Homo sapien
tttgaggtgatctgttatcaacttc

SEQ ID NO: 548179 - DNA, 25 bp, Homo sapien
cctttagcttatccacatcatcttt

SEQ ID NO: 548180 - DNA, 25 bp, Homo sapien
tacttggattatctgtgactagatg

SEQ ID NO: 548181 - DNA, 25 bp, Homo sapien
tcatagatttcattagctgttctga

SEQ ID NO: 548182 - DNA, 25 bp, Homo sapien
gtcttcattttggttgccctgcacc

SEQ ID NO: 548183 - DNA, 25 bp, Homo sapien
ttcaagtctagttttccgaagatgc

SEQ ID NO: 548184 - DNA, 25 bp, Homo sapien
gttttccgaagatgcttcctgaccg

SEQ ID NO: 548185 - DNA, 25 bp, Homo sapien
gcttcctgaccgtatggcttagcat

SEQ ID NO: 548186 - DNA, 25 bp, Homo sapien
tctttgtgtagtaattcaagtctag

SEQ ID NO: 548187 - DNA, 25 bp, Homo sapien
tagattaatgtgtcttttcacggat

SEQ ID NO: 548188 - DNA, 25 bp, Homo sapien
ggactgtaagtcatggcattaactc

SEQ ID NO: 548189 - DNA, 25 bp, Homo sapien
tgatgctctggttaccttctttgta

SEQ ID NO: 548190 - DNA, 25 bp, Homo sapien
ctaacaggctagttacaatggactg

SEQ ID NO: 548191 - DNA, 25 bp, Homo sapien
tgaaaatgtaagttccgtgaggctc

SEQ ID NO: 548192 - DNA, 25 bp, Homo sapien
tatgaagcccttctcggtgttctta

SEQ ID NO: 548193 - DNA, 25 bp, Homo sapien
tagcctatttcagtcttcctcgaaa

SEQ ID NO: 548194 - DNA, 25 bp, Homo sapien
ctcagtgccttgtgccccagttgct

SEQ ID NO: 548195 - DNA, 25 bp, Homo sapien
gctggacactggctattattcttca

SEQ ID NO: 548196 - DNA, 25 bp, Homo sapien
caaatcaatacaaatcgaacaaaat

SEQ ID NO: 548197 - DNA, 25 bp, Homo sapien
tgatggggactctgcaagctggaca

SEQ ID NO: 548198 - DNA, 25 bp, Homo sapien
caaaatacatggttgttgatgcata

SEQ ID NO: 548199 - DNA, 25 bp, Homo sapien
ctcaaatctgagtctacggctcagt

SEQ ID NO: 548200 - DNA, 25 bp, Homo sapien
tattggccggcactcaaatgcttgc

SEQ ID NO: 548201 - DNA, 25 bp, Homo sapien
aaacaccccaggcagatcgtattgg

SEQ ID NO: 548202 - DNA, 25 bp, Homo sapien
aatctgagtctacggctcagtctgc

SEQ ID NO: 548203 - DNA, 25 bp, Homo sapien
caaatgtggcacgtgatgggcagag

SEQ ID NO: 548204 - DNA, 25 bp, Homo sapien
ggcagagtgagcgacaatgtaacat

SEQ ID NO: 548205 - DNA, 25 bp, Homo sapien
taacattctgcacggtctgagccat

SEQ ID NO: 548206 - DNA, 25 bp, Homo sapien
atgtaacattctgcacggtctgagc

SEQ ID NO: 548207 - DNA, 25 bp, Homo sapien
cttcgccaagactgggcacgcgcgg

SEQ ID NO: 548208 - DNA, 25 bp, Homo sapien
taccgctactcttcgccaagactgg

SEQ ID NO: 548209 - DNA, 25 bp, Homo sapien
agtcccgccgacctaccgctactct

SEQ ID NO: 548210 - DNA, 25 bp, Homo sapien
tcagaatcccgccaacacggaagtc

SEQ ID NO: 548211 - DNA, 25 bp, Homo sapien
gaaaacgcgctttcgaaacgcgcga

SEQ ID NO: 548212 - DNA, 25 bp, Homo sapien
ccaggagagaaaacgaaaacgcgct

SEQ ID NO: 548213 - DNA, 25 bp, Homo sapien
gaaacgcgcgatctccaaggcgttt

SEQ ID NO: 548214 - DNA, 25 bp, Homo sapien
caggagagaaaacgaaaacgcgctt

SEQ ID NO: 548215 - DNA, 25 bp, Homo sapien
cctgcctcgagggtcggggagtggt

SEQ ID NO: 548216 - DNA, 25 bp, Homo sapien
ctgcctcgagggtcggggagtggtt

SEQ ID NO: 548217 - DNA, 25 bp, Homo sapien
gcctgcctcgagggtcggggagtgg

SEQ ID NO: 548218 - DNA, 25 bp, Homo sapien
agtccagatgaatgccaggctagtt

SEQ ID NO: 548219 - DNA, 25 bp, Homo sapien
cataagcacaaacaaggtcatagca

SEQ ID NO: 548220 - DNA, 25 bp, Homo sapien
aataatgcaagtggcttaaggtcag

SEQ ID NO: 548221 - DNA, 25 bp, Homo sapien
aaatagatgtcgtttggcccaaatc

SEQ ID NO: 548222 - DNA, 25 bp, Homo sapien
ctccatgtttaatagacagacttcc

SEQ ID NO: 548223 - DNA, 25 bp, Homo sapien
gagttggcacacaacctataaggcg

SEQ ID NO: 548224 - DNA, 25 bp, Homo sapien
aaatacacgtttgtgtttgttccag

SEQ ID NO: 548225 - DNA, 25 bp, Homo sapien
ctgttagtttcctggcagaagtggg

SEQ ID NO: 548226 - DNA, 25 bp, Homo sapien
ctggtggttcactagttgccagtct

SEQ ID NO: 548227 - DNA, 25 bp, Homo sapien
ggttcactagttgccagtctatgga

SEQ ID NO: 548228 - DNA, 25 bp, Homo sapien
cagtctatggagatcctgtaataca

SEQ ID NO: 548229 - DNA, 25 bp, Homo sapien
tagttgccagtctatggagatcctg

SEQ ID NO: 548230 - DNA, 25 bp, Homo sapien
tcctcatattggacagtttttgctc

SEQ ID NO: 548231 - DNA, 25 bp, Homo sapien
caatacacactatcactattttggg

SEQ ID NO: 548232 - DNA, 25 bp, Homo sapien
taagatagatcactagggctggtcg

SEQ ID NO: 548233 - DNA, 25 bp, Homo sapien
ggtattccattaggcacccaccata

SEQ ID NO: 548234 - DNA, 25 bp, Homo sapien
gtcaagagaatgttctccagctggg

SEQ ID NO: 548235 - DNA, 25 bp, Homo sapien
atgtcaagagaatgttctccagctg

SEQ ID NO: 548236 - DNA, 25 bp, Homo sapien
tgtcaagagaatgttctccagctgg

SEQ ID NO: 548237 - DNA, 25 bp, Homo sapien
caagagaatgttctccagctggggc

SEQ ID NO: 548238 - DNA, 25 bp, Homo sapien
caagcggggatatctggtcaggttt

SEQ ID NO: 548239 - DNA, 25 bp, Homo sapien
tggttaccacaagcggggatatctg

SEQ ID NO: 548240 - DNA, 25 bp, Homo sapien
tcaagggctgtaggacaccagagtg

SEQ ID NO: 548241 - DNA, 25 bp, Homo sapien
tgtaggacaccagagtggttaccac

SEQ ID NO: 548242 - DNA, 25 bp, Homo sapien
gagaagagtgaaggatgacagtcaa

SEQ ID NO: 548243 - DNA, 25 bp, Homo sapien
agaagagtgaaggatgacagtcaag

SEQ ID NO: 548244 - DNA, 25 bp, Homo sapien
ctggagaagagtgaaggatgacagt

SEQ ID NO: 548245 - DNA, 25 bp, Homo sapien
aagagtgaaggatgacagtcaaggg

SEQ ID NO: 548246 - DNA, 25 bp, Homo sapien
gacttaaattcctgattatagccat

SEQ ID NO: 548247 - DNA, 25 bp, Homo sapien
gaagtatgacttaaattcctgatta

SEQ ID NO: 548248 - DNA, 25 bp, Homo sapien
caagaagtatgacttaaattcctga

SEQ ID NO: 548249 - DNA, 25 bp, Homo sapien
gtatgacttaaattcctgattatag

SEQ ID NO: 548250 - DNA, 25 bp, Homo sapien
ccacatgttggaccatatgttggaa

SEQ ID NO: 548251 - DNA, 25 bp, Homo sapien
ctggccagagtgggggaaccagaca

SEQ ID NO: 548252 - DNA, 25 bp, Homo sapien
cacatgttggaccatatgttggaaa

SEQ ID NO: 548253 - DNA, 25 bp, Homo sapien
gctggccagagtgggggaaccagac

SEQ ID NO: 548254 - DNA, 25 bp, Homo sapien
ctcactgcatcttggtcgtcctgat

SEQ ID NO: 548255 - DNA, 25 bp, Homo sapien
gcatcttggtcgtcctgatggaact

SEQ ID NO: 548256 - DNA, 25 bp, Homo sapien
tcaacatgaaatcaaaacccaccct

SEQ ID NO: 548257 - DNA, 25 bp, Homo sapien
ggaacttgtagtgcccttgtgcctc

SEQ ID NO: 548258 - DNA, 25 bp, Homo sapien
cacaaaatccaaacaccgtgatact

SEQ ID NO: 548259 - DNA, 25 bp, Homo sapien
gcggctgtgttctgaccgggtctgt

SEQ ID NO: 548260 - DNA, 25 bp, Homo sapien
acaccgtgatactgtgcccctgtga

SEQ ID NO: 548261 - DNA, 25 bp, Homo sapien
tgtgttctgaccgggtctgtggttc

SEQ ID NO: 548262 - DNA, 25 bp, Homo sapien
tggtctccttctcaagtcgctggtt

SEQ ID NO: 548263 - DNA, 25 bp, Homo sapien
taggctcctgtggaacacgcttaga

SEQ ID NO: 548264 - DNA, 25 bp, Homo sapien
gaagcactctgaaatgttctgcagg

SEQ ID NO: 548265 - DNA, 25 bp, Homo sapien
gcacgttgatcaagcaccactcctg

SEQ ID NO: 548266 - DNA, 25 bp, Homo sapien
taaatctcatcagttctgtgaccct

SEQ ID NO: 548267 - DNA, 25 bp, Homo sapien
tagtctgtaggttcagatcttttgc

SEQ ID NO: 548268 - DNA, 25 bp, Homo sapien
ccagagaatagtcaatttagcagtc

SEQ ID NO: 548269 - DNA, 25 bp, Homo sapien
gaatctggctgtagaactgattaaa

SEQ ID NO: 548270 - DNA, 25 bp, Homo sapien
ctccgatgatggctgcctcaccgat

SEQ ID NO: 548271 - DNA, 25 bp, Homo sapien
tcaggtcttgttcggtctcagctgc

SEQ ID NO: 548272 - DNA, 25 bp, Homo sapien
agctgccctccgatgatggctgcct

SEQ ID NO: 548273 - DNA, 25 bp, Homo sapien
gtctcagctgccctccgatgatggc

SEQ ID NO: 548274 - DNA, 25 bp, Homo sapien
tcagcagtcactttctcagcactca

SEQ ID NO: 548275 - DNA, 25 bp, Homo sapien
ctcagcagtcactttctcagcactc

SEQ ID NO: 548276 - DNA, 25 bp, Homo sapien
cagcagtcactttctcagcactcat

SEQ ID NO: 548277 - DNA, 25 bp, Homo sapien
gaatgcccataggtgttgccatgga

SEQ ID NO: 548278 - DNA, 25 bp, Homo sapien
ttggccatgtacatatgaatctata

SEQ ID NO: 548279 - DNA, 25 bp, Homo sapien
ggccatgtacatatgaatctataag

SEQ ID NO: 548280 - DNA, 25 bp, Homo sapien
ggaatgcccataggtgttgccatgg

SEQ ID NO: 548281 - DNA, 25 bp, Homo sapien
cctgaagcacgtgaaggaaaattat

SEQ ID NO: 548282 - DNA, 25 bp, Homo sapien
gaagcacgtgaaggaaaattatcag

SEQ ID NO: 548283 - DNA, 25 bp, Homo sapien
agagaaaagtacctgtgttcaactg

SEQ ID NO: 548284 - DNA, 25 bp, Homo sapien
tacctgtgttcaactgaagccccag

SEQ ID NO: 548285 - DNA, 25 bp, Homo sapien
cctttcatccttgatagtatgactg

SEQ ID NO: 548286 - DNA, 25 bp, Homo sapien
catccttgatagtatgactgaattg

SEQ ID NO: 548287 - DNA, 25 bp, Homo sapien
aagcacaacggcaatgtaataccat

SEQ ID NO: 548288 - DNA, 25 bp, Homo sapien
attgagaagcacaacggcaatgtaa

SEQ ID NO: 548289 - DNA, 25 bp, Homo sapien
cagcgattggacatgatcaggcaaa

SEQ ID NO: 548290 - DNA, 25 bp, Homo sapien
attgtggttctctaggtggtcgccg

SEQ ID NO: 548291 - DNA, 25 bp, Homo sapien
tggtcgccggcacttcagcgattgg

SEQ ID NO: 548292 - DNA, 25 bp, Homo sapien
gacatgatcaggcaaaacagtttgg

SEQ ID NO: 548293 - DNA, 25 bp, Homo sapien
gaagaactcgcagtagaagccttgg

SEQ ID NO: 548294 - DNA, 25 bp, Homo sapien
gggtgcaatcctcccttatacagga

SEQ ID NO: 548295 - DNA, 25 bp, Homo sapien
aatgctgttcagtaggttttccaaa

SEQ ID NO: 548296 - DNA, 25 bp, Homo sapien
gaagccttggaaaacttacacagag

SEQ ID NO: 548297 - DNA, 25 bp, Homo sapien
ctggtttaaatgatcccggggatat

SEQ ID NO: 548298 - DNA, 25 bp, Homo sapien
gggatatccaaagggctcaggatat

SEQ ID NO: 548299 - DNA, 25 bp, Homo sapien
acagtgtggtcctgagtgttggact

SEQ ID NO: 548300 - DNA, 25 bp, Homo sapien
tgtaggcgagaagatctgttgttga

SEQ ID NO: 548301 - DNA, 25 bp, Homo sapien
cacaaaatagtccaagttggcccca

SEQ ID NO: 548302 - DNA, 25 bp, Homo sapien
ccagtttgaacattgtgcctggctt

SEQ ID NO: 548303 - DNA, 25 bp, Homo sapien
tcaggccacaaaatagtccaagttg

SEQ ID NO: 548304 - DNA, 25 bp, Homo sapien
caggtgctcccagtttgaacattgt

SEQ ID NO: 548305 - DNA, 25 bp, Homo sapien
caaacacaggtgcaaaatcccgcat

SEQ ID NO: 548306 - DNA, 25 bp, Homo sapien
tcaaacacaggtgcaaaatcccgca

SEQ ID NO: 548307 - DNA, 25 bp, Homo sapien
cggcttgtaaacctcatcctccatg

SEQ ID NO: 548308 - DNA, 25 bp, Homo sapien
ctgtgagggacagcccgaaaccatg

SEQ ID NO: 548309 - DNA, 25 bp, Homo sapien
catggctttcccctgaccgttttcg

SEQ ID NO: 548310 - DNA, 25 bp, Homo sapien
gggacagcccgaaaccatggctttc

SEQ ID NO: 548311 - DNA, 25 bp, Homo sapien
tctcctacgtgcagagtcagtgcgg

SEQ ID NO: 548312 - DNA, 25 bp, Homo sapien
cacttcctgtttgcgcatgttgagc

SEQ ID NO: 548313 - DNA, 25 bp, Homo sapien
tgtgagctccagaaaacctcggaca

SEQ ID NO: 548314 - DNA, 25 bp, Homo sapien
gtgggtccccggctcctgtgagctc

SEQ ID NO: 548315 - DNA, 25 bp, Homo sapien
cttctttgattatgactcttccttt

SEQ ID NO: 548316 - DNA, 25 bp, Homo sapien
ctcttctttgattatgactcttcct

SEQ ID NO: 548317 - DNA, 25 bp, Homo sapien
ttggattcttgatcactctcttctt

SEQ ID NO: 548318 - DNA, 25 bp, Homo sapien
ctctcttctttgattatgactcttc

SEQ ID NO: 548319 - DNA, 25 bp, Homo sapien
gacaccattacctctttctaattac

SEQ ID NO: 548320 - DNA, 25 bp, Homo sapien
gagagagtcaacctcttatcacttc

SEQ ID NO: 548321 - DNA, 25 bp, Homo sapien
atttagacaccattacctctttcta

SEQ ID NO: 548322 - DNA, 25 bp, Homo sapien
tacaataaatttctggagagagtca

SEQ ID NO: 548323 - DNA, 25 bp, Homo sapien
aggagtttataatactgaaggaaga

SEQ ID NO: 548324 - DNA, 25 bp, Homo sapien
gagaagacagttatacggagagctg

SEQ ID NO: 548325 - DNA, 25 bp, Homo sapien
gtttataatactgaaggaagagaag

SEQ ID NO: 548326 - DNA, 25 bp, Homo sapien
ctgtaacactgagatgggataaatg

SEQ ID NO: 548327 - DNA, 25 bp, Homo sapien
aaggattatctgaggatctttccct

SEQ ID NO: 548328 - DNA, 25 bp, Homo sapien
ggattatctgaggatctttccctgg

SEQ ID NO: 548329 - DNA, 25 bp, Homo sapien
gtaaggattatctgaggatctttcc

SEQ ID NO: 548330 - DNA, 25 bp, Homo sapien
taaggattatctgaggatctttccc

SEQ ID NO: 548331 - DNA, 25 bp, Homo sapien
tgggatccttcgatggtgtcagtgc

SEQ ID NO: 548332 - DNA, 25 bp, Homo sapien
ctcagggagaggattcctaggcact

SEQ ID NO: 548333 - DNA, 25 bp, Homo sapien
acaagctttgccagactcagggaga

SEQ ID NO: 548334 - DNA, 25 bp, Homo sapien
aagcaccaggtgtggtctgggatcc

SEQ ID NO: 548335 - DNA, 25 bp, Homo sapien
tagcgtcctttgcaaaatgggtctg

SEQ ID NO: 548336 - DNA, 25 bp, Homo sapien
tggaaggcatgattaggtagcaggt

SEQ ID NO: 548337 - DNA, 25 bp, Homo sapien
gcaggttgaggtagcgtcctttgca

SEQ ID NO: 548338 - DNA, 25 bp, Homo sapien
tgagcacaaattgcaggtggaaggc

SEQ ID NO: 548339 - DNA, 25 bp, Homo sapien
atgttctcatctcatcatgtagctc

SEQ ID NO: 548340 - DNA, 25 bp, Homo sapien
ctcatctcatcatgtagctcccact

SEQ ID NO: 548341 - DNA, 25 bp, Homo sapien
tgttctcatctcatcatgtagctcc

SEQ ID NO: 548342 - DNA, 25 bp, Homo sapien
ttctcatctcatcatgtagctccca

SEQ ID NO: 548343 - DNA, 25 bp, Homo sapien
cgtcaaatggtttagtccctgctgg

SEQ ID NO: 548344 - DNA, 25 bp, Homo sapien
caagcagtaaggcagccagttggct

SEQ ID NO: 548345 - DNA, 25 bp, Homo sapien
ggctggaatttagcagtccgtcaaa

SEQ ID NO: 548346 - DNA, 25 bp, Homo sapien
tgtagggtttgtcctcctgccagga

SEQ ID NO: 548347 - DNA, 25 bp, Homo sapien
tattaacagactgatcacagaagtc

SEQ ID NO: 548348 - DNA, 25 bp, Homo sapien
cacactcatggtgattatggtctgg

SEQ ID NO: 548349 - DNA, 25 bp, Homo sapien
aaaataatcgtcatggtccccacac

SEQ ID NO: 548350 - DNA, 25 bp, Homo sapien
tcacatcctgtattgagccagaagc

SEQ ID NO: 548351 - DNA, 25 bp, Homo sapien
tgccaatgggtaattatgccccctt

SEQ ID NO: 548352 - DNA, 25 bp, Homo sapien
tgtgttctgaaccttaggaagttct

SEQ ID NO: 548353 - DNA, 25 bp, Homo sapien
ttgaacgtctaggtccctgaagtcc

SEQ ID NO: 548354 - DNA, 25 bp, Homo sapien
ccagcaggctttgaacgtctaggtc

SEQ ID NO: 548355 - DNA, 25 bp, Homo sapien
gaagccagcagattccaagtctggt

SEQ ID NO: 548356 - DNA, 25 bp, Homo sapien
tagaaaggccaagatcaggaagcca

SEQ ID NO: 548357 - DNA, 25 bp, Homo sapien
gctagaaaggccaagatcaggaagc

SEQ ID NO: 548358 - DNA, 25 bp, Homo sapien
gatcaggaagccagcagattccaag

SEQ ID NO: 548359 - DNA, 25 bp, Homo sapien
tggaaatggccatggctgaaatagt

SEQ ID NO: 548360 - DNA, 25 bp, Homo sapien
ggccatctacgtagcactgcagaga

SEQ ID NO: 548361 - DNA, 25 bp, Homo sapien
taaaagatgccgtaacctttctggc

SEQ ID NO: 548362 - DNA, 25 bp, Homo sapien
taacagacgttgctttcccttgtgg

SEQ ID NO: 548363 - DNA, 25 bp, Homo sapien
tgtgagtcgctgaactgactgcagt

SEQ ID NO: 548364 - DNA, 25 bp, Homo sapien
tttgcagtgataagagcagatctct

SEQ ID NO: 548365 - DNA, 25 bp, Homo sapien
gaaccttgaggtagagctttagcaa

SEQ ID NO: 548366 - DNA, 25 bp, Homo sapien
tagcaagcaagtggccgggctgctg

SEQ ID NO: 548367 - DNA, 25 bp, Homo sapien
tcttgctggctgatttgctcttaca

SEQ ID NO: 548368 - DNA, 25 bp, Homo sapien
cttgctggctgatttgctcttacac

SEQ ID NO: 548369 - DNA, 25 bp, Homo sapien
gaactgttttactagatgcaaccca

SEQ ID NO: 548370 - DNA, 25 bp, Homo sapien
gatggatagctactccagcagtctg

SEQ ID NO: 548371 - DNA, 25 bp, Homo sapien
tctgtgggtagcacaagagaactgt

SEQ ID NO: 548372 - DNA, 25 bp, Homo sapien
tcaaagacacactagatcccacagc

SEQ ID NO: 548373 - DNA, 25 bp, Homo sapien
actcaattgtagaaatgtgcatggg

SEQ ID NO: 548374 - DNA, 25 bp, Homo sapien
tgtccatgttggtattgttaggcaa

SEQ ID NO: 548375 - DNA, 25 bp, Homo sapien
tcagtcttctgagttattgtccatg

SEQ ID NO: 548376 - DNA, 25 bp, Homo sapien
tctaggatccattgcacagatgtga

SEQ ID NO: 548377 - DNA, 25 bp, Homo sapien
tcactctaaagctttgtgttgctca

SEQ ID NO: 548378 - DNA, 25 bp, Homo sapien
actctaaagctttgtgttgctcagc

SEQ ID NO: 548379 - DNA, 25 bp, Homo sapien
gctttgtgttgctcagcaaacattt

SEQ ID NO: 548380 - DNA, 25 bp, Homo sapien
ttgtgttgctcagcaaacattttac

SEQ ID NO: 548381 - DNA, 25 bp, Homo sapien
tgtctttgtgttttaggggtgagga

SEQ ID NO: 548382 - DNA, 25 bp, Homo sapien
ctccaaactgccatttgtctttgtg

SEQ ID NO: 548383 - DNA, 25 bp, Homo sapien
actgccatttgtctttgtgttttag

SEQ ID NO: 548384 - DNA, 25 bp, Homo sapien
catttgtctttgtgttttaggggtg

SEQ ID NO: 548385 - DNA, 25 bp, Homo sapien
tccctgtctagtcgcaaagcacttg

SEQ ID NO: 548386 - DNA, 25 bp, Homo sapien
ggacccatatttgggcaccccgata

SEQ ID NO: 548387 - DNA, 25 bp, Homo sapien
tatgagggacgccattacactctcc

SEQ ID NO: 548388 - DNA, 25 bp, Homo sapien
caccccgataaggaatttgtgtcca

SEQ ID NO: 548389 - DNA, 25 bp, Homo sapien
tgatacttgcaaaccctgtgaatgg

SEQ ID NO: 548390 - DNA, 25 bp, Homo sapien
cctgatctggtgtgggctacagcaa

SEQ ID NO: 548391 - DNA, 25 bp, Homo sapien
tgcaaaactgaggatgacacaaatg

SEQ ID NO: 548392 - DNA, 25 bp, Homo sapien
tgtctaggaaccatgccagatctgg

SEQ ID NO: 548393 - DNA, 25 bp, Homo sapien
tcgttcttggaacctctggtgcagc

SEQ ID NO: 548394 - DNA, 25 bp, Homo sapien
cgttcttggaacctctggtgcagcc

SEQ ID NO: 548395 - DNA, 25 bp, Homo sapien
gttcttggaacctctggtgcagcca

SEQ ID NO: 548396 - DNA, 25 bp, Homo sapien
gggagtatcacacgagtgaagttcc

SEQ ID NO: 548397 - DNA, 25 bp, Homo sapien
atcacacgagtgaagttccatctcc

SEQ ID NO: 548398 - DNA, 25 bp, Homo sapien
cagtagagggagtatcacacgagtg

SEQ ID NO: 548399 - DNA, 25 bp, Homo sapien
tcaaacagtagagggagtatcacac

SEQ ID NO: 548400 - DNA, 25 bp, Homo sapien
tgtcccctgagcttgccgttctctg

SEQ ID NO: 548401 - DNA, 25 bp, Homo sapien
caggcgtttggccatatggtgtccc

SEQ ID NO: 548402 - DNA, 25 bp, Homo sapien
tgccccaatgtaacatgcaggcgtt

SEQ ID NO: 548403 - DNA, 25 bp, Homo sapien
gcatatgctgggatatttcaggacc

SEQ ID NO: 548404 - DNA, 25 bp, Homo sapien
caccaagctgagcatcctagctgaa

SEQ ID NO: 548405 - DNA, 25 bp, Homo sapien
caagctgagcatcctagctgaagga

SEQ ID NO: 548406 - DNA, 25 bp, Homo sapien
catcctagctgaaggacttctagag

SEQ ID NO: 548407 - DNA, 25 bp, Homo sapien
gctgagcatcctagctgaaggactt

SEQ ID NO: 548408 - DNA, 25 bp, Homo sapien
ggattgactaaagatttgtcaccag

SEQ ID NO: 548409 - DNA, 25 bp, Homo sapien
ctcgtgtaaatactattgagcaggg

SEQ ID NO: 548410 - DNA, 25 bp, Homo sapien
tcatctcgtgtaaatactattgagc

SEQ ID NO: 548411 - DNA, 25 bp, Homo sapien
gcaggggattgactaaagatttgtc

SEQ ID NO: 548412 - DNA, 25 bp, Homo sapien
gggagacacatgtatcctgggatct

SEQ ID NO: 548413 - DNA, 25 bp, Homo sapien
gccgtggttgcaagtcattcccgaa

SEQ ID NO: 548414 - DNA, 25 bp, Homo sapien
ttcccgaagcaatgaagagagaggg

SEQ ID NO: 548415 - DNA, 25 bp, Homo sapien
agggtcctgttgagctctcttcatg

SEQ ID NO: 548416 - DNA, 25 bp, Homo sapien
tgtcttcattaaattgctgctctcc

SEQ ID NO: 548417 - DNA, 25 bp, Homo sapien
tcccaattgagggtcacatctgagg

SEQ ID NO: 548418 - DNA, 25 bp, Homo sapien
tattggagcataaagttgatacagg

SEQ ID NO: 548419 - DNA, 25 bp, Homo sapien
gagcataaagttgatacaggctggg

SEQ ID NO: 548420 - DNA, 25 bp, Homo sapien
gtctggagattccagtgtaaccgct

SEQ ID NO: 548421 - DNA, 25 bp, Homo sapien
gattccagtgtaaccgctggaagcc

SEQ ID NO: 548422 - DNA, 25 bp, Homo sapien
tggagattccagtgtaaccgctgga

SEQ ID NO: 548423 - DNA, 25 bp, Homo sapien
tcagcgactgagtctggagattcca

SEQ ID NO: 548424 - DNA, 25 bp, Homo sapien
tgtagagacaagagatacggccacc

SEQ ID NO: 548425 - DNA, 25 bp, Homo sapien
tagaacagtgtagtaaacgaggacc

SEQ ID NO: 548426 - DNA, 25 bp, Homo sapien
ggcaaatcccgtttgaggtactcca

SEQ ID NO: 548427 - DNA, 25 bp, Homo sapien
tgtgaggtatatcctttggcaaatc

SEQ ID NO: 548428 - DNA, 25 bp, Homo sapien
taccacagagctgtggatgcgtgcc

SEQ ID NO: 548429 - DNA, 25 bp, Homo sapien
tgcatacagcagaggtcacaaaaga

SEQ ID NO: 548430 - DNA, 25 bp, Homo sapien
tcttgtgctcgcaatgtgtaccaca

SEQ ID NO: 548431 - DNA, 25 bp, Homo sapien
cagatttttcttgtgctcgcaatgt

SEQ ID NO: 548432 - DNA, 25 bp, Homo sapien
tggcagggttactgatgcctccact

SEQ ID NO: 548433 - DNA, 25 bp, Homo sapien
tccactggctcagcagtcagataac

SEQ ID NO: 548434 - DNA, 25 bp, Homo sapien
tattcccctgtgaaccttttgctgc

SEQ ID NO: 548435 - DNA, 25 bp, Homo sapien
gataactaagactattcccctgtga

SEQ ID NO: 548436 - DNA, 25 bp, Homo sapien
ctcagatgccagatccggaattgcc

SEQ ID NO: 548437 - DNA, 25 bp, Homo sapien
ctgcaggcctggcaacagcaggagc

SEQ ID NO: 548438 - DNA, 25 bp, Homo sapien
gcaggagccactcagatgccagatc

SEQ ID NO: 548439 - DNA, 25 bp, Homo sapien
tgctgcaggcctggcaacagcagga

SEQ ID NO: 548440 - DNA, 25 bp, Homo sapien
caatcaactgttatggtgcttgtca

SEQ ID NO: 548441 - DNA, 25 bp, Homo sapien
cacggagatgaatcacgacaatcaa

SEQ ID NO: 548442 - DNA, 25 bp, Homo sapien
gaatcacgacaatcaactgttatgg

SEQ ID NO: 548443 - DNA, 25 bp, Homo sapien
ctggatttccaacacggagatgaat

SEQ ID NO: 548444 - DNA, 25 bp, Homo sapien
ttgacccatgtcaacaaaggtggag

SEQ ID NO: 548445 - DNA, 25 bp, Homo sapien
gttgacccatgtcaacaaaggtgga

SEQ ID NO: 548446 - DNA, 25 bp, Homo sapien
aacaaaggtggagaccgattgagct

SEQ ID NO: 548447 - DNA, 25 bp, Homo sapien
gaccgattgagcttgggtaggttgg

SEQ ID NO: 548448 - DNA, 25 bp, Homo sapien
tcaggtatggggcaatgactgccaa

SEQ ID NO: 548449 - DNA, 25 bp, Homo sapien
actccaataccatggggaacgtgat

SEQ ID NO: 548450 - DNA, 25 bp, Homo sapien
caactccaataccatggggaacgtg

SEQ ID NO: 548451 - DNA, 25 bp, Homo sapien
gtatggggcaatgactgccaactcc

SEQ ID NO: 548452 - DNA, 25 bp, Homo sapien
ttttctgagtaacaagaacagcagc

SEQ ID NO: 548453 - DNA, 25 bp, Homo sapien
attttctgagtaacaagaacagcag

SEQ ID NO: 548454 - DNA, 25 bp, Homo sapien
ctggcagacctttcctgacgtgtcc

SEQ ID NO: 548455 - DNA, 25 bp, Homo sapien
ggaacaagtcatatattcacaatac

SEQ ID NO: 548456 - DNA, 25 bp, Homo sapien
tccaaatgtaaactacttcgctcag

SEQ ID NO: 548457 - DNA, 25 bp, Homo sapien
gctgtataaatatagtacaacacca

SEQ ID NO: 548458 - DNA, 25 bp, Homo sapien
aggacacaacagcacagcaaggaac

SEQ ID NO: 548459 - DNA, 25 bp, Homo sapien
tacagatttctgagtacactctgaa

SEQ ID NO: 548460 - DNA, 25 bp, Homo sapien
acagatttctgagtacactctgaaa

SEQ ID NO: 548461 - DNA, 25 bp, Homo sapien
cagatttctgagtacactctgaaac

SEQ ID NO: 548462 - DNA, 25 bp, Homo sapien
cttttctctcatcatacaccttttc

SEQ ID NO: 548463 - DNA, 25 bp, Homo sapien
tctctcatcatacaccttttccctc

SEQ ID NO: 548464 - DNA, 25 bp, Homo sapien
aatggagactctcacactgtgcgcc

SEQ ID NO: 548465 - DNA, 25 bp, Homo sapien
gtccttgctcagtgctttgccctga

SEQ ID NO: 548466 - DNA, 25 bp, Homo sapien
tgtgcgcccccacaagtgctgaatt

SEQ ID NO: 548467 - DNA, 25 bp, Homo sapien
aagtgctgaattgccccctctccat

SEQ ID NO: 548468 - DNA, 25 bp, Homo sapien
tgccactctgtaaagggcttctcca

SEQ ID NO: 548469 - DNA, 25 bp, Homo sapien
caactggaccatctggtatgatgag

SEQ ID NO: 548470 - DNA, 25 bp, Homo sapien
ggtatgatgagtgttttaacagctg

SEQ ID NO: 548471 - DNA, 25 bp, Homo sapien
aggccaagccttgctcaactggacc

SEQ ID NO: 548472 - DNA, 25 bp, Homo sapien
tcaatccttttccctcatcagtttt

SEQ ID NO: 548473 - DNA, 25 bp, Homo sapien
caatccttttccctcatcagttttt

SEQ ID NO: 548474 - DNA, 25 bp, Homo sapien
catcagttttttaccctctttcctg

SEQ ID NO: 548475 - DNA, 25 bp, Homo sapien
tgtgggggcccatttactgcctgac

SEQ ID NO: 548476 - DNA, 25 bp, Homo sapien
ggcccatttactgcctgactcacag

SEQ ID NO: 548477 - DNA, 25 bp, Homo sapien
attgtgggggcccatttactgcctg

SEQ ID NO: 548478 - DNA, 25 bp, Homo sapien
caccctcacaccgctccagagtgag

SEQ ID NO: 548479 - DNA, 25 bp, Homo sapien
ggatcattggcagatgtcccgtggc

SEQ ID NO: 548480 - DNA, 25 bp, Homo sapien
tgtcccgtggcatatgccagcacat

SEQ ID NO: 548481 - DNA, 25 bp, Homo sapien
agaccaggggatcattggcagatgt

SEQ ID NO: 548482 - DNA, 25 bp, Homo sapien
gcagatgtcccgtggcatatgccag

SEQ ID NO: 548483 - DNA, 25 bp, Homo sapien
caggtgtggctgcacacacgagttt

SEQ ID NO: 548484 - DNA, 25 bp, Homo sapien
caccctcgtattgctcacacgtcat

SEQ ID NO: 548485 - DNA, 25 bp, Homo sapien
gagtttatcaaagtggaaagctgtc

SEQ ID NO: 548486 - DNA, 25 bp, Homo sapien
tatggagtcctcagttggctgtgca

SEQ ID NO: 548487 - DNA, 25 bp, Homo sapien
gaatctgaggttcttgcaggctcag

SEQ ID NO: 548488 - DNA, 25 bp, Homo sapien
caattgaggtgtatgacttggtgtc

SEQ ID NO: 548489 - DNA, 25 bp, Homo sapien
tcctgcaccagacgctctcttggga

SEQ ID NO: 548490 - DNA, 25 bp, Homo sapien
gaaaccctataaggatgactcagcc

SEQ ID NO: 548491 - DNA, 25 bp, Homo sapien
ctgaccatccttcccagacagtctt

SEQ ID NO: 548492 - DNA, 25 bp, Homo sapien
acagtcttttcttctgttcctattg

SEQ ID NO: 548493 - DNA, 25 bp, Homo sapien
agtcttttcttctgttcctattgcc

SEQ ID NO: 548494 - DNA, 25 bp, Homo sapien
gaccatccttcccagacagtctttt

SEQ ID NO: 548495 - DNA, 25 bp, Homo sapien
catcttcccaggcttacacaacaaa

SEQ ID NO: 548496 - DNA, 25 bp, Homo sapien
ccatagaggcatctaatggccttca

SEQ ID NO: 548497 - DNA, 25 bp, Homo sapien
tctgctcaggatcttgacatcttcc

SEQ ID NO: 548498 - DNA, 25 bp, Homo sapien
gcttacacaacaaacaccatagagg

SEQ ID NO: 548499 - DNA, 25 bp, Homo sapien
gagtgatcggtctgtagagagtcat

SEQ ID NO: 548500 - DNA, 25 bp, Homo sapien
gtcatgtctaagaggctgcaggtca

SEQ ID NO: 548501 - DNA, 25 bp, Homo sapien
gatcggtctgtagagagtcatgtct

SEQ ID NO: 548502 - DNA, 25 bp, Homo sapien
ctgtagagagtcatgtctaagaggc

SEQ ID NO: 548503 - DNA, 25 bp, Homo sapien
aagtgttgccaaatatgtgatgggt

SEQ ID NO: 548504 - DNA, 25 bp, Homo sapien
aaagtgctgtatgaacaaaaggctc

SEQ ID NO: 548505 - DNA, 25 bp, Homo sapien
caataaccgaggaacttgtaccaag

SEQ ID NO: 548506 - DNA, 25 bp, Homo sapien
caagaagtcccacagcatagatgtt

SEQ ID NO: 548507 - DNA, 25 bp, Homo sapien
ttcagcccttgcctagttgcttcaa

SEQ ID NO: 548508 - DNA, 25 bp, Homo sapien
cctacagctgctgattaactgaatt

SEQ ID NO: 548509 - DNA, 25 bp, Homo sapien
aagctgggctcctacagctgctgat

SEQ ID NO: 548510 - DNA, 25 bp, Homo sapien
gcctagttgcttcaattccaattcc

SEQ ID NO: 548511 - DNA, 25 bp, Homo sapien
ttgtgcaacctgacagcaccttgcc

SEQ ID NO: 548512 - DNA, 25 bp, Homo sapien
tttctatgtgggctccatccagctt

SEQ ID NO: 548513 - DNA, 25 bp, Homo sapien
gctccatccagcttgacattgtgca

SEQ ID NO: 548514 - DNA, 25 bp, Homo sapien
gcctcagcccacatgtgtttctcac

SEQ ID NO: 548515 - DNA, 25 bp, Homo sapien
ttgctttctagctgtgtcaacacca

SEQ ID NO: 548516 - DNA, 25 bp, Homo sapien
cctttgctttctagctgtgtcaaca

SEQ ID NO: 548517 - DNA, 25 bp, Homo sapien
attgcctttgctttctagctgtgtc

SEQ ID NO: 548518 - DNA, 25 bp, Homo sapien
tgcctttgctttctagctgtgtcaa

SEQ ID NO: 548519 - DNA, 25 bp, Homo sapien
tccccaacctcactcggctgtacac

SEQ ID NO: 548520 - DNA, 25 bp, Homo sapien
aacctcactcggctgtacacactgt

SEQ ID NO: 548521 - DNA, 25 bp, Homo sapien
cccaacctcactcggctgtacacac

SEQ ID NO: 548522 - DNA, 25 bp, Homo sapien
caacctcactcggctgtacacactg

SEQ ID NO: 548523 - DNA, 25 bp, Homo sapien
ctctctgccactggacattgctgct

SEQ ID NO: 548524 - DNA, 25 bp, Homo sapien
cggccatccgtgacacagaggcagg

SEQ ID NO: 548525 - DNA, 25 bp, Homo sapien
gccactggacattgctgctgtgttt

SEQ ID NO: 548526 - DNA, 25 bp, Homo sapien
tgtgtttctgacatgacggccatcc

SEQ ID NO: 548527 - DNA, 25 bp, Homo sapien
taacaggcagtcacgactaacacgt

SEQ ID NO: 548528 - DNA, 25 bp, Homo sapien
cagtcacgactaacacgtaatactt

SEQ ID NO: 548529 - DNA, 25 bp, Homo sapien
gactaacacgtaatacttcccctca

SEQ ID NO: 548530 - DNA, 25 bp, Homo sapien
caggcagtcacgactaacacgtaat

SEQ ID NO: 548531 - DNA, 25 bp, Homo sapien
cgcaaagcatgcttatcctttaggg

SEQ ID NO: 548532 - DNA, 25 bp, Homo sapien
gcatatcgcaaagcatgcttatcct

SEQ ID NO: 548533 - DNA, 25 bp, Homo sapien
ccttggccaaagcatatcgcaaagc

SEQ ID NO: 548534 - DNA, 25 bp, Homo sapien
gccaaagcatatcgcaaagcatgct

SEQ ID NO: 548535 - DNA, 25 bp, Homo sapien
gcaccttctgatttcagcatgccac

SEQ ID NO: 548536 - DNA, 25 bp, Homo sapien
gaccatcaacatcctcttctaactg

SEQ ID NO: 548537 - DNA, 25 bp, Homo sapien
tttctgcaccttctgatttcagcat

SEQ ID NO: 548538 - DNA, 25 bp, Homo sapien
ctaactggtctcctttgctgcaggc

SEQ ID NO: 548539 - DNA, 25 bp, Homo sapien
gataagtgatagcattgggatttaa

SEQ ID NO: 548540 - DNA, 25 bp, Homo sapien
tacaccactgataagtgatagcatt

SEQ ID NO: 548541 - DNA, 25 bp, Homo sapien
actgataagtgatagcattgggatt

SEQ ID NO: 548542 - DNA, 25 bp, Homo sapien
ctgaagttacaccactgataagtga

SEQ ID NO: 548543 - DNA, 25 bp, Homo sapien
cagttttcaacagctcataaggaga

SEQ ID NO: 548544 - DNA, 25 bp, Homo sapien
gaagtcttcgctcactagtacccaa

SEQ ID NO: 548545 - DNA, 25 bp, Homo sapien
caatcaacttgtcctccacaggttc

SEQ ID NO: 548546 - DNA, 25 bp, Homo sapien
tcacctttcttcgagggacagactc

SEQ ID NO: 548547 - DNA, 25 bp, Homo sapien
catgcttgagtagtccttgaaccat

SEQ ID NO: 548548 - DNA, 25 bp, Homo sapien
ggccttgagcaccatattcttgcac

SEQ ID NO: 548549 - DNA, 25 bp, Homo sapien
catattcttgcacactctcattact

SEQ ID NO: 548550 - DNA, 25 bp, Homo sapien
cttgaaccatcaggccttgagcacc

SEQ ID NO: 548551 - DNA, 25 bp, Homo sapien
actttgcaatccttgacattgttta

SEQ ID NO: 548552 - DNA, 25 bp, Homo sapien
tcttactttgcaatccttgacattg

SEQ ID NO: 548553 - DNA, 25 bp, Homo sapien
catttatcttactttgcaatccttg

SEQ ID NO: 548554 - DNA, 25 bp, Homo sapien
tgcaatccttgacattgtttatcat

SEQ ID NO: 548555 - DNA, 25 bp, Homo sapien
gaaatgggatacttatgggcacagg

SEQ ID NO: 548556 - DNA, 25 bp, Homo sapien
aagaatcactatgcctcctgttgag

SEQ ID NO: 548557 - DNA, 25 bp, Homo sapien
gaagtagcatcatacccaaaacagg

SEQ ID NO: 548558 - DNA, 25 bp, Homo sapien
tttcgctccactcaaagagcaggga

SEQ ID NO: 548559 - DNA, 25 bp, Homo sapien
tgtaacagtcgtctccagacaggaa

SEQ ID NO: 548560 - DNA, 25 bp, Homo sapien
tgctcatgctaatgaacacagtagt

SEQ ID NO: 548561 - DNA, 25 bp, Homo sapien
cagtcacaaagctaaattcaggcaa

SEQ ID NO: 548562 - DNA, 25 bp, Homo sapien
gacacaatcctcaatttggctcaga

SEQ ID NO: 548563 - DNA, 25 bp, Homo sapien
cataaattgacctccaacttttcta

SEQ ID NO: 548564 - DNA, 25 bp, Homo sapien
aatcaaaatcaaagttgcaggaaaa

SEQ ID NO: 548565 - DNA, 25 bp, Homo sapien
tacacaaagctttgggctaaaatga

SEQ ID NO: 548566 - DNA, 25 bp, Homo sapien
aaacttgaatcacatcataaattga

SEQ ID NO: 548567 - DNA, 25 bp, Homo sapien
gtatactaagcacaaaggcccacag

SEQ ID NO: 548568 - DNA, 25 bp, Homo sapien
taagaacaagaaaagccccgagaga

SEQ ID NO: 548569 - DNA, 25 bp, Homo sapien
gcctggtatacaaggagaggctaac

SEQ ID NO: 548570 - DNA, 25 bp, Homo sapien
tccaagtaagagtggataaagtccc

SEQ ID NO: 548571 - DNA, 25 bp, Homo sapien
acaacgataacagggagaactggct

SEQ ID NO: 548572 - DNA, 25 bp, Homo sapien
gcaagagacttgtctaaggccacag

SEQ ID NO: 548573 - DNA, 25 bp, Homo sapien
tggactagactggtggctcttagca

SEQ ID NO: 548574 - DNA, 25 bp, Homo sapien
ggaaattccactaagcctacatatg

SEQ ID NO: 548575 - DNA, 25 bp, Homo sapien
tataagtatgaactggcgaatgacc

SEQ ID NO: 548576 - DNA, 25 bp, Homo sapien
aaagcagcagcatcaacgtagagtt

SEQ ID NO: 548577 - DNA, 25 bp, Homo sapien
gacatggtccaccttcctagaggag

SEQ ID NO: 548578 - DNA, 25 bp, Homo sapien
cacccactagctatgactgggcaaa

SEQ ID NO: 548579 - DNA, 25 bp, Homo sapien
ctgtttggtgtaaagagaagaaacg

SEQ ID NO: 548580 - DNA, 25 bp, Homo sapien
ggtgtaaagagaagaaacgtgagcc

SEQ ID NO: 548581 - DNA, 25 bp, Homo sapien
tttggtgtaaagagaagaaacgtga

SEQ ID NO: 548582 - DNA, 25 bp, Homo sapien
aaagagaagaaacgtgagcctctgc

SEQ ID NO: 548583 - DNA, 25 bp, Homo sapien
ctatggtggtggtggaacaacagct

SEQ ID NO: 548584 - DNA, 25 bp, Homo sapien
tactccactggcagaagactatggt

SEQ ID NO: 548585 - DNA, 25 bp, Homo sapien
cacacaacttcaaccccaattaggg

SEQ ID NO: 548586 - DNA, 25 bp, Homo sapien
taaacgtagacacgaattgcaaggc

SEQ ID NO: 548587 - DNA, 25 bp, Homo sapien
taggatcaaaccaaactcaagtggt

SEQ ID NO: 548588 - DNA, 25 bp, Homo sapien
agtctggttccaaactaatcagcct

SEQ ID NO: 548589 - DNA, 25 bp, Homo sapien
ggaagggtagatcaccatctggaat

SEQ ID NO: 548590 - DNA, 25 bp, Homo sapien
caaatgttagctctacttgcagtct

SEQ ID NO: 548591 - DNA, 25 bp, Homo sapien
aatacatacacagtccaacaaaagg

SEQ ID NO: 548592 - DNA, 25 bp, Homo sapien
gactcatgtaaagcagtcatacacc

SEQ ID NO: 548593 - DNA, 25 bp, Homo sapien
tactaatgaaacacaggtagagttc

SEQ ID NO: 548594 - DNA, 25 bp, Homo sapien
catctggatgcataaggactcatgt

SEQ ID NO: 548595 - DNA, 25 bp, Homo sapien
catcatcttgaagtaatgagtcatc

SEQ ID NO: 548596 - DNA, 25 bp, Homo sapien
catcttctccaagaacgagattcat

SEQ ID NO: 548597 - DNA, 25 bp, Homo sapien
taatgagtcatccaccaaagactct

SEQ ID NO: 548598 - DNA, 25 bp, Homo sapien
tccaagaacgagattcattgtcctc

SEQ ID NO: 548599 - DNA, 25 bp, Homo sapien
tacgccatcttctgtacctttaaaa

SEQ ID NO: 548600 - DNA, 25 bp, Homo sapien
gaaaagcaacatttaaccactcaat

SEQ ID NO: 548601 - DNA, 25 bp, Homo sapien
ttgcttgcatgaaacacactaaaca

SEQ ID NO: 548602 - DNA, 25 bp, Homo sapien
aaataaagcctttgtacatgccatt

SEQ ID NO: 548603 - DNA, 25 bp, Homo sapien
ctccccattcaattcaaactcatgg

SEQ ID NO: 548604 - DNA, 25 bp, Homo sapien
tctccccattcaattcaaactcatg

SEQ ID NO: 548605 - DNA, 25 bp, Homo sapien
tccccattcaattcaaactcatgga

SEQ ID NO: 548606 - DNA, 25 bp, Homo sapien
cttgatgatagatagggaccgtgtc

SEQ ID NO: 548607 - DNA, 25 bp, Homo sapien
gcttagggcccagttccactatcaa

SEQ ID NO: 548608 - DNA, 25 bp, Homo sapien
catttatctgatatcccctgcctgg

SEQ ID NO: 548609 - DNA, 25 bp, Homo sapien
tttttgggatggaaacaatcactcc

SEQ ID NO: 548610 - DNA, 25 bp, Homo sapien
gatcttgccctttgaaacgagctcc

SEQ ID NO: 548611 - DNA, 25 bp, Homo sapien
ttagatcttgccctttgaaacgagc

SEQ ID NO: 548612 - DNA, 25 bp, Homo sapien
tgccctttgaaacgagctccatgaa

SEQ ID NO: 548613 - DNA, 25 bp, Homo sapien
ttgaaacgagctccatgaactgcag

SEQ ID NO: 548614 - DNA, 25 bp, Homo sapien
tcagcttctgctcttgtcttgaatg

SEQ ID NO: 548615 - DNA, 25 bp, Homo sapien
cagcttctgctcttgtcttgaatgt

SEQ ID NO: 548616 - DNA, 25 bp, Homo sapien
cttcagcttctgctcttgtcttgaa

SEQ ID NO: 548617 - DNA, 25 bp, Homo sapien
gcttctgctcttgtcttgaatgtaa

SEQ ID NO: 548618 - DNA, 25 bp, Homo sapien
caatctgacaatcttcaatttcacc

SEQ ID NO: 548619 - DNA, 25 bp, Homo sapien
ttactgcatgaagtgaggaatcatc

SEQ ID NO: 548620 - DNA, 25 bp, Homo sapien
tgcatgaagtgaggaatcatcaatc

SEQ ID NO: 548621 - DNA, 25 bp, Homo sapien
gaagtgaggaatcatcaatctgaca

SEQ ID NO: 548622 - DNA, 25 bp, Homo sapien
tatgccagcgtgatacttctctaag

SEQ ID NO: 548623 - DNA, 25 bp, Homo sapien
gacactgacggaggcaacttcaaga

SEQ ID NO: 548624 - DNA, 25 bp, Homo sapien
tatctgtaactgctgcaagcctcca

SEQ ID NO: 548625 - DNA, 25 bp, Homo sapien
gaattattgtaaggcactcagaggg

SEQ ID NO: 548626 - DNA, 25 bp, Homo sapien
ccaatgccctgggacggtgatccac

SEQ ID NO: 548627 - DNA, 25 bp, Homo sapien
agatcttctctatcgctctccgtaa

SEQ ID NO: 548628 - DNA, 25 bp, Homo sapien
cctgggacggtgatccaccacagca

SEQ ID NO: 548629 - DNA, 25 bp, Homo sapien
tatcgctctccgtaaatgcagaaat

SEQ ID NO: 548630 - DNA, 25 bp, Homo sapien
tcgccctcgccccctgcctcggcca

SEQ ID NO: 548631 - DNA, 25 bp, Homo sapien
gccctcgccctcgccccctgcctcg

SEQ ID NO: 548632 - DNA, 25 bp, Homo sapien
cgccctcgccctcgccccctgcctc

SEQ ID NO: 548633 - DNA, 25 bp, Homo sapien
cctcgccctcgccccctgcctcggc

SEQ ID NO: 548634 - DNA, 25 bp, Homo sapien
tctgccccgaccagatgaaagaatc

SEQ ID NO: 548635 - DNA, 25 bp, Homo sapien
tgaatgaattcctctgccccgacca

SEQ ID NO: 548636 - DNA, 25 bp, Homo sapien
tgcacctcgacctcttgaatgaatt

SEQ ID NO: 548637 - DNA, 25 bp, Homo sapien
atgaaagaatccctcgtttggcagc

SEQ ID NO: 548638 - DNA, 25 bp, Homo sapien
gcctgcatcttcttatataaatcca

SEQ ID NO: 548639 - DNA, 25 bp, Homo sapien
aatccagttctgtgtcaagtaattc

SEQ ID NO: 548640 - DNA, 25 bp, Homo sapien
cctgcatcttcttatataaatccag

SEQ ID NO: 548641 - DNA, 25 bp, Homo sapien
ttggaagacagcgtccaggagaagc

SEQ ID NO: 548642 - DNA, 25 bp, Homo sapien
tatactttttggaagacagcgtcca

SEQ ID NO: 548643 - DNA, 25 bp, Homo sapien
gacctcatctttcaacttggtaata

SEQ ID NO: 548644 - DNA, 25 bp, Homo sapien
ggagaagcagctttgacctcatctt

SEQ ID NO: 548645 - DNA, 25 bp, Homo sapien
ttctgtgtttcaatgtgcttttcta

SEQ ID NO: 548646 - DNA, 25 bp, Homo sapien
tttccttttccttacatcctgctga

SEQ ID NO: 548647 - DNA, 25 bp, Homo sapien
ttttccttacatcctgctgaagttt

SEQ ID NO: 548648 - DNA, 25 bp, Homo sapien
ccttttccttacatcctgctgaagt

SEQ ID NO: 548649 - DNA, 25 bp, Homo sapien
tcattattatcaactgcagaggtgg

SEQ ID NO: 548650 - DNA, 25 bp, Homo sapien
tacactgtttttgttaggccagtag

SEQ ID NO: 548651 - DNA, 25 bp, Homo sapien
aacaagtaaggttttctgtgcagcc

SEQ ID NO: 548652 - DNA, 25 bp, Homo sapien
ttaggccagtagatgtagacaacac

SEQ ID NO: 548653 - DNA, 25 bp, Homo sapien
acactcaagagcatggcacaggagg

SEQ ID NO: 548654 - DNA, 25 bp, Homo sapien
aggaaactggttgctgtccctcaat

SEQ ID NO: 548655 - DNA, 25 bp, Homo sapien
ttgtagtgactaaagcagaagccac

SEQ ID NO: 548656 - DNA, 25 bp, Homo sapien
tccaatcctttggtagcaatgctcc

SEQ ID NO: 548657 - DNA, 25 bp, Homo sapien
tcctttgcagagtgtttaatgtaac

SEQ ID NO: 548658 - DNA, 25 bp, Homo sapien
tctactgagctaatcatctagagtt

SEQ ID NO: 548659 - DNA, 25 bp, Homo sapien
ctatgttcatgacagatgttggtct

SEQ ID NO: 548660 - DNA, 25 bp, Homo sapien
caggtttggtatgctgaactcagaa

SEQ ID NO: 548661 - DNA, 25 bp, Homo sapien
gatttgcttagcatctacacaatgg

SEQ ID NO: 548662 - DNA, 25 bp, Homo sapien
tacacaatggcacctgctaaatcaa

SEQ ID NO: 548663 - DNA, 25 bp, Homo sapien
gcaggtaataatcctgagaggccac

SEQ ID NO: 548664 - DNA, 25 bp, Homo sapien
taatatatcatcatgcagagaccaa

SEQ ID NO: 548665 - DNA, 25 bp, Homo sapien
cattatgcccgaagtaatgctgaga

SEQ ID NO: 548666 - DNA, 25 bp, Homo sapien
gaagtggtctacaaacacaagcaaa

SEQ ID NO: 548667 - DNA, 25 bp, Homo sapien
gccatggactaaaaataggagcccc

SEQ ID NO: 548668 - DNA, 25 bp, Homo sapien
gctgagatgcccaagagcaaagtct

SEQ ID NO: 548669 - DNA, 25 bp, Homo sapien
gatggctttgatacaaaacccaacc

SEQ ID NO: 548670 - DNA, 25 bp, Homo sapien
cagatggctttgatacaaaacccaa

SEQ ID NO: 548671 - DNA, 25 bp, Homo sapien
aacagatggctttgatacaaaaccc

SEQ ID NO: 548672 - DNA, 25 bp, Homo sapien
gtccttcacagataacttagttaca

SEQ ID NO: 548673 - DNA, 25 bp, Homo sapien
gactgactgcttcacaacaggcaaa

SEQ ID NO: 548674 - DNA, 25 bp, Homo sapien
tagtacttgaaggtactggacccag

SEQ ID NO: 548675 - DNA, 25 bp, Homo sapien
tggacccagccgctctttgactgac

SEQ ID NO: 548676 - DNA, 25 bp, Homo sapien
aacaggcaaaatgggctgctggact

SEQ ID NO: 548677 - DNA, 25 bp, Homo sapien
aaccagggtatgaactcaggcctac

SEQ ID NO: 548678 - DNA, 25 bp, Homo sapien
agctgagtactcctatctgccacgg

SEQ ID NO: 548679 - DNA, 25 bp, Homo sapien
cagaagctaaatgcagaaccagggt

SEQ ID NO: 548680 - DNA, 25 bp, Homo sapien
cactctaacattacacaccgatggg

SEQ ID NO: 548681 - DNA, 25 bp, Homo sapien
cgtatgttgcaaattggattagggc

SEQ ID NO: 548682 - DNA, 25 bp, Homo sapien
gcgattgtttaatactgcttccgta

SEQ ID NO: 548683 - DNA, 25 bp, Homo sapien
tgtaactgttgggtgcttccttctc

SEQ ID NO: 548684 - DNA, 25 bp, Homo sapien
gattagggcaccttcaggatcacca

SEQ ID NO: 548685 - DNA, 25 bp, Homo sapien
gttccaaatcgactaaaatgttcat

SEQ ID NO: 548686 - DNA, 25 bp, Homo sapien
caaggttccaaatcgactaaaatgt

SEQ ID NO: 548687 - DNA, 25 bp, Homo sapien
ccaaggttccaaatcgactaaaatg

SEQ ID NO: 548688 - DNA, 25 bp, Homo sapien
ggttccaaatcgactaaaatgttca

SEQ ID NO: 548689 - DNA, 25 bp, Homo sapien
catttccaaattgaaccttcttctg

SEQ ID NO: 548690 - DNA, 25 bp, Homo sapien
tcatttccaaattgaaccttcttct

SEQ ID NO: 548691 - DNA, 25 bp, Homo sapien
tctccagaaccaatggttcttttcc

SEQ ID NO: 548692 - DNA, 25 bp, Homo sapien
agaaccaatggttcttttccttgat

SEQ ID NO: 548693 - DNA, 25 bp, Homo sapien
aggctctccagaaccaatggttctt

SEQ ID NO: 548694 - DNA, 25 bp, Homo sapien
gattctgagtccactactatcctca

SEQ ID NO: 548695 - DNA, 25 bp, Homo sapien
gtggcaaatccatatcccctgatgt

SEQ ID NO: 548696 - DNA, 25 bp, Homo sapien
tcctatcaagttgggcctttgtgca

SEQ ID NO: 548697 - DNA, 25 bp, Homo sapien
tcaagttgggcctttgtgcatgcac

SEQ ID NO: 548698 - DNA, 25 bp, Homo sapien
tcccctgatgttagtcctatcaagt

SEQ ID NO: 548699 - DNA, 25 bp, Homo sapien
caggattgtagccatctgtgtcata

SEQ ID NO: 548700 - DNA, 25 bp, Homo sapien
gcttggggcttcaggattgtagcca

SEQ ID NO: 548701 - DNA, 25 bp, Homo sapien
ttgtagccatctgtgtcatatgtat

SEQ ID NO: 548702 - DNA, 25 bp, Homo sapien
gggcttcaggattgtagccatctgt

SEQ ID NO: 548703 - DNA, 25 bp, Homo sapien
gaaaagtagtcctcacagagcaatt

SEQ ID NO: 548704 - DNA, 25 bp, Homo sapien
tacattacgaatataaaaagggcca

SEQ ID NO: 548705 - DNA, 25 bp, Homo sapien
tgaaaacattcaaaactgagggctt

SEQ ID NO: 548706 - DNA, 25 bp, Homo sapien
ccacggctacataattttagtgaga

SEQ ID NO: 548707 - DNA, 25 bp, Homo sapien
aactggttgcagagtttggaggagc

SEQ ID NO: 548708 - DNA, 25 bp, Homo sapien
ctacagtaggaacagaactggttgc

SEQ ID NO: 548709 - DNA, 25 bp, Homo sapien
ggctggtgatgaatgccagttgtta

SEQ ID NO: 548710 - DNA, 25 bp, Homo sapien
gaatgccagttgttactacagtagg

SEQ ID NO: 548711 - DNA, 25 bp, Homo sapien
tgtcaaaaccaaagaataagaaata

SEQ ID NO: 548712 - DNA, 25 bp, Homo sapien
tcaaaaccaaagaataagaaatatc

SEQ ID NO: 548713 - DNA, 25 bp, Homo sapien
aaaaccaaagaataagaaatatcat

SEQ ID NO: 548714 - DNA, 25 bp, Homo sapien
ctgtcaaaaccaaagaataagaaat

SEQ ID NO: 548715 - DNA, 25 bp, Homo sapien
ggcaatggacctggcggtggtactg

SEQ ID NO: 548716 - DNA, 25 bp, Homo sapien
gagattcacaggtgggggtgtaaga

SEQ ID NO: 548717 - DNA, 25 bp, Homo sapien
tcacaggtgggggtgtaagaattgg

SEQ ID NO: 548718 - DNA, 25 bp, Homo sapien
gagactgggtggcaatggacctggc

SEQ ID NO: 548719 - DNA, 25 bp, Homo sapien
gatcacttccatgatcaaaaggaca

SEQ ID NO: 548720 - DNA, 25 bp, Homo sapien
caaaaggacacatgtctcctctcat

SEQ ID NO: 548721 - DNA, 25 bp, Homo sapien
tcttctacaactactggatcacttc

SEQ ID NO: 548722 - DNA, 25 bp, Homo sapien
tacaactactggatcacttccatga

SEQ ID NO: 548723 - DNA, 25 bp, Homo sapien
tcaaagtaggtacagggtagtggcc

SEQ ID NO: 548724 - DNA, 25 bp, Homo sapien
tacgtaagagttatggtccacttgg

SEQ ID NO: 548725 - DNA, 25 bp, Homo sapien
tctctacaccgtttctttggcatgg

SEQ ID NO: 548726 - DNA, 25 bp, Homo sapien
tactaggtaccgaagagactggagt

SEQ ID NO: 548727 - DNA, 25 bp, Homo sapien
aagataaatgacatataaaactaca

SEQ ID NO: 548728 - DNA, 25 bp, Homo sapien
tagtcctgcttctatctctgtccct

SEQ ID NO: 548729 - DNA, 25 bp, Homo sapien
ctgcttctgcttctagtcctgcttc

SEQ ID NO: 548730 - DNA, 25 bp, Homo sapien
ttctagtcctgcttctatctctgtc

SEQ ID NO: 548731 - DNA, 25 bp, Homo sapien
ccctgcttcgtgttctgcttctgct

SEQ ID NO: 548732 - DNA, 25 bp, Homo sapien
ccggtctctgtatgaatctcttcga

SEQ ID NO: 548733 - DNA, 25 bp, Homo sapien
tctcttcgaggagggtttcgatcat

SEQ ID NO: 548734 - DNA, 25 bp, Homo sapien
cataatctcttttgcgagaacgatc

SEQ ID NO: 548735 - DNA, 25 bp, Homo sapien
tcgacttcgactcctgctataactg

SEQ ID NO: 548736 - DNA, 25 bp, Homo sapien
ggactgtgatttagccttctagaaa

SEQ ID NO: 548737 - DNA, 25 bp, Homo sapien
ctattttccctgtatcgggagcttg

SEQ ID NO: 548738 - DNA, 25 bp, Homo sapien
gggaggactgtgatttagccttcta

SEQ ID NO: 548739 - DNA, 25 bp, Homo sapien
tccctgtatcgggagcttgactggg

SEQ ID NO: 548740 - DNA, 25 bp, Homo sapien
cactttgatttctcgagggttccca

SEQ ID NO: 548741 - DNA, 25 bp, Homo sapien
tgaggactccaacacaaagatatag

SEQ ID NO: 548742 - DNA, 25 bp, Homo sapien
taatgctttgatctgcaccctcagg

SEQ ID NO: 548743 - DNA, 25 bp, Homo sapien
tacatactaggtaggcggtgcctat

SEQ ID NO: 548744 - DNA, 25 bp, Homo sapien
tgtaaggtattaacacaaatcgtta

SEQ ID NO: 548745 - DNA, 25 bp, Homo sapien
ctgtaaggtattaacacaaatcgtt

SEQ ID NO: 548746 - DNA, 25 bp, Homo sapien
acctgtaaggtattaacacaaatcg

SEQ ID NO: 548747 - DNA, 25 bp, Homo sapien
cctgtaaggtattaacacaaatcgt

SEQ ID NO: 548748 - DNA, 25 bp, Homo sapien
cttccttctttatatctttttcttg

SEQ ID NO: 548749 - DNA, 25 bp, Homo sapien
tatatctttttcttggtgtggaaaa

SEQ ID NO: 548750 - DNA, 25 bp, Homo sapien
tctttatatctttttcttggtgtgg

SEQ ID NO: 548751 - DNA, 25 bp, Homo sapien
ctttatatctttttcttggtgtgga

SEQ ID NO: 548752 - DNA, 25 bp, Homo sapien
gctctggaggaggtaggtaactctt

SEQ ID NO: 548753 - DNA, 25 bp, Homo sapien
ccatgactaagtcttctccacatcg

SEQ ID NO: 548754 - DNA, 25 bp, Homo sapien
tctccacatcgcctactcagtgttg

SEQ ID NO: 548755 - DNA, 25 bp, Homo sapien
catcgcctactcagtgttgcaaaca

SEQ ID NO: 548756 - DNA, 25 bp, Homo sapien
tccagccatgactaagtcttctcca

SEQ ID NO: 548757 - DNA, 25 bp, Homo sapien
tgtctttctttaccaaagccagaac

SEQ ID NO: 548758 - DNA, 25 bp, Homo sapien
ttctttaccaaagccagaacatatt

SEQ ID NO: 548759 - DNA, 25 bp, Homo sapien
tcaatacataatgcctttaactctt

SEQ ID NO: 548760 - DNA, 25 bp, Homo sapien
tgatcaatacataatgcctttaact

SEQ ID NO: 548761 - DNA, 25 bp, Homo sapien
ctagggcggatggatctgcatcaca

SEQ ID NO: 548762 - DNA, 25 bp, Homo sapien
tagggcggatggatctgcatcacag

SEQ ID NO: 548763 - DNA, 25 bp, Homo sapien
tatgtctcactagatcaatggctca

SEQ ID NO: 548764 - DNA, 25 bp, Homo sapien
gaatggtttcaagcataggctgaac

SEQ ID NO: 548765 - DNA, 25 bp, Homo sapien
tagtgattatcgtccaaatatcgca

SEQ ID NO: 548766 - DNA, 25 bp, Homo sapien
taaatcccacacaagtatcaatgag

SEQ ID NO: 548767 - DNA, 25 bp, Homo sapien
tttacaggtgagagcaatagtgccc

SEQ ID NO: 548768 - DNA, 25 bp, Homo sapien
taaaaacagttcagttggagacttc

SEQ ID NO: 548769 - DNA, 25 bp, Homo sapien
ggatttacaggtgagagcaatagtg

SEQ ID NO: 548770 - DNA, 25 bp, Homo sapien
gttcagttggagacttccagcttca

SEQ ID NO: 548771 - DNA, 25 bp, Homo sapien
gaagtgaccatctaagaaggtcatt

SEQ ID NO: 548772 - DNA, 25 bp, Homo sapien
gaccatctaagaaggtcattctctt

SEQ ID NO: 548773 - DNA, 25 bp, Homo sapien
gtgaccatctaagaaggtcattctc

SEQ ID NO: 548774 - DNA, 25 bp, Homo sapien
ccatctaagaaggtcattctcttcc

SEQ ID NO: 548775 - DNA, 25 bp, Homo sapien
gtgaccaagttttacactttttgca

SEQ ID NO: 548776 - DNA, 25 bp, Homo sapien
gacatgttatactggttgaagtaca

SEQ ID NO: 548777 - DNA, 25 bp, Homo sapien
gaagacaggccgattcttacatctg

SEQ ID NO: 548778 - DNA, 25 bp, Homo sapien
gacctgacacagatacatagttgga

SEQ ID NO: 548779 - DNA, 25 bp, Homo sapien
tctttaaaaggtctggctaatgctg

SEQ ID NO: 548780 - DNA, 25 bp, Homo sapien
gaaaagactggttctagaggccacc

SEQ ID NO: 548781 - DNA, 25 bp, Homo sapien
gatctcaggtaacccatccctctgg

SEQ ID NO: 548782 - DNA, 25 bp, Homo sapien
gagcagaggctagtgaacattttct

SEQ ID NO: 548783 - DNA, 25 bp, Homo sapien
ctcatccatgtactaaccaagccta

SEQ ID NO: 548784 - DNA, 25 bp, Homo sapien
ccaagcctaatcctgcttgccttcc

SEQ ID NO: 548785 - DNA, 25 bp, Homo sapien
actaaccaagcctaatcctgcttgc

SEQ ID NO: 548786 - DNA, 25 bp, Homo sapien
taaccaagcctaatcctgcttgcct

SEQ ID NO: 548787 - DNA, 25 bp, Homo sapien
ctaaatgcattttaaccactcagca

SEQ ID NO: 548788 - DNA, 25 bp, Homo sapien
ggccaaataagattgcagcagcaaa

SEQ ID NO: 548789 - DNA, 25 bp, Homo sapien
aagtcaatttatcacaagttaaggg

SEQ ID NO: 548790 - DNA, 25 bp, Homo sapien
ttatagactattaactcttctacca

SEQ ID NO: 548791 - DNA, 25 bp, Homo sapien
caatcttaagcatttcaagatgaca

SEQ ID NO: 548792 - DNA, 25 bp, Homo sapien
tagtttcatattattggcaagtatg

SEQ ID NO: 548793 - DNA, 25 bp, Homo sapien
caagtatgactaagcaaatctttga

SEQ ID NO: 548794 - DNA, 25 bp, Homo sapien
atctttgagataacaaaacatcaat

SEQ ID NO: 548795 - DNA, 25 bp, Homo sapien
gactatttcagcactctaaccgcag

SEQ ID NO: 548796 - DNA, 25 bp, Homo sapien
cataatgactgcagtgctacagcca

SEQ ID NO: 548797 - DNA, 25 bp, Homo sapien
catgggagacgtggccttgctttca

SEQ ID NO: 548798 - DNA, 25 bp, Homo sapien
caagctaacgaacgcgtaggcggga

SEQ ID NO: 548799 - DNA, 25 bp, Homo sapien
gagagtcttgctgagccaggacttg

SEQ ID NO: 548800 - DNA, 25 bp, Homo sapien
atgggctcgagagtcttgctgagcc

SEQ ID NO: 548801 - DNA, 25 bp, Homo sapien
tgagtgcctcgaagttttcaatgat

SEQ ID NO: 548802 - DNA, 25 bp, Homo sapien
gagtgcctcgaagttttcaatgatc

SEQ ID NO: 548803 - DNA, 25 bp, Homo sapien
aattgatgaagtctcgcggtggctc

SEQ ID NO: 548804 - DNA, 25 bp, Homo sapien
tgacttcagaaacagcgggaacccc

SEQ ID NO: 548805 - DNA, 25 bp, Homo sapien
gatggctgccggtaaatctcgcgag

SEQ ID NO: 548806 - DNA, 25 bp, Homo sapien
cgaagggcagctcaatgggaacgat

SEQ ID NO: 548807 - DNA, 25 bp, Homo sapien
tgtggtagggcccagggaaggaaga

SEQ ID NO: 548808 - DNA, 25 bp, Homo sapien
tcaggtgtggtagggcccagggaag

SEQ ID NO: 548809 - DNA, 25 bp, Homo sapien
caggtgtggtagggcccagggaagg

SEQ ID NO: 548810 - DNA, 25 bp, Homo sapien
gaacactcatcagtagtgtgaggcc

SEQ ID NO: 548811 - DNA, 25 bp, Homo sapien
acactcatcagtagtgtgaggcccc

SEQ ID NO: 548812 - DNA, 25 bp, Homo sapien
aacactcatcagtagtgtgaggccc

SEQ ID NO: 548813 - DNA, 25 bp, Homo sapien
cacagcagcaccccattatactata

SEQ ID NO: 548814 - DNA, 25 bp, Homo sapien
gttaccactatgatatcacagaatg

SEQ ID NO: 548815 - DNA, 25 bp, Homo sapien
tacagatgcagtcgatgtaaattac

SEQ ID NO: 548816 - DNA, 25 bp, Homo sapien
gtattacctttttatgtccagacaa

SEQ ID NO: 548817 - DNA, 25 bp, Homo sapien
caggtgattctgcactctacttggg

SEQ ID NO: 548818 - DNA, 25 bp, Homo sapien
ggtgattctgcactctacttgggct

SEQ ID NO: 548819 - DNA, 25 bp, Homo sapien
aacccaggtgattctgcactctact

SEQ ID NO: 548820 - DNA, 25 bp, Homo sapien
cccaggtgattctgcactctacttg

SEQ ID NO: 548821 - DNA, 25 bp, Homo sapien
cctgccttagctttctaagcagcta

SEQ ID NO: 548822 - DNA, 25 bp, Homo sapien
ccttagctttctaagcagctaggac

SEQ ID NO: 548823 - DNA, 25 bp, Homo sapien
tcctgagttggggttacatgtgtga

SEQ ID NO: 548824 - DNA, 25 bp, Homo sapien
tgccttagctttctaagcagctagg

SEQ ID NO: 548825 - DNA, 25 bp, Homo sapien
tattttctacctcactaccctactg

SEQ ID NO: 548826 - DNA, 25 bp, Homo sapien
aataattatagcgatgagagttggc

SEQ ID NO: 548827 - DNA, 25 bp, Homo sapien
gatgctaacttttggtcagggataa

SEQ ID NO: 548828 - DNA, 25 bp, Homo sapien
ttggcagacttgtcttgtccctggc

SEQ ID NO: 548829 - DNA, 25 bp, Homo sapien
ctcatgccaagatattcaaaaattt

SEQ ID NO: 548830 - DNA, 25 bp, Homo sapien
tgccaagatattcaaaaatttaggt

SEQ ID NO: 548831 - DNA, 25 bp, Homo sapien
ccaagatattcaaaaatttaggtga

SEQ ID NO: 548832 - DNA, 25 bp, Homo sapien
catgccaagatattcaaaaatttag

SEQ ID NO: 548833 - DNA, 25 bp, Homo sapien
gcaatgtatccaatatccactttac

SEQ ID NO: 548834 - DNA, 25 bp, Homo sapien
cactttaccctcgataaaataccat

SEQ ID NO: 548835 - DNA, 25 bp, Homo sapien
tctctgtgacacaaatgcaatgtat

SEQ ID NO: 548836 - DNA, 25 bp, Homo sapien
tctgtgacacaaatgcaatgtatcc

SEQ ID NO: 548837 - DNA, 25 bp, Homo sapien
ggcattcttttgtgtagcagatctt

SEQ ID NO: 548838 - DNA, 25 bp, Homo sapien
taaaaagcactgtaactctcggtgg

SEQ ID NO: 548839 - DNA, 25 bp, Homo sapien
caaaaggatttgtgattgatccctg

SEQ ID NO: 548840 - DNA, 25 bp, Homo sapien
ttgatccctggactctaaacgcagg

SEQ ID NO: 548841 - DNA, 25 bp, Homo sapien
tataatcttgactgtcccataggaa

SEQ ID NO: 548842 - DNA, 25 bp, Homo sapien
aatcttgactgtcccataggaaata

SEQ ID NO: 548843 - DNA, 25 bp, Homo sapien
aatataatcttgactgtcccatagg

SEQ ID NO: 548844 - DNA, 25 bp, Homo sapien
aataagatcatcctgcacttttttt

SEQ ID NO: 548845 - DNA, 25 bp, Homo sapien
tatggacttcattgacttgtcagat

SEQ ID NO: 548846 - DNA, 25 bp, Homo sapien
cttccagtggaagatcacaagccag

SEQ ID NO: 548847 - DNA, 25 bp, Homo sapien
taattccaacacgttgtaagctctc

SEQ ID NO: 548848 - DNA, 25 bp, Homo sapien
ctctgaaacagagcttgttgggtta

SEQ ID NO: 548849 - DNA, 25 bp, Homo sapien
ctggactcctgagatgtatggaact

SEQ ID NO: 548850 - DNA, 25 bp, Homo sapien
tctggactcctgagatgtatggaac

SEQ ID NO: 548851 - DNA, 25 bp, Homo sapien
gaaaatttggaacatcgcctccctg

SEQ ID NO: 548852 - DNA, 25 bp, Homo sapien
tagacggctttctgtaggcaatggc

SEQ ID NO: 548853 - DNA, 25 bp, Homo sapien
tgggactcccaacgaagaatcctgg

SEQ ID NO: 548854 - DNA, 25 bp, Homo sapien
tactgctctttaactggtgggactc

SEQ ID NO: 548855 - DNA, 25 bp, Homo sapien
ccagtggcagtcttcatttcaagga

SEQ ID NO: 548856 - DNA, 25 bp, Homo sapien
aaatggggctccagatccctttcct

SEQ ID NO: 548857 - DNA, 25 bp, Homo sapien
aaggaaataaatggggctccagatc

SEQ ID NO: 548858 - DNA, 25 bp, Homo sapien
ctcctctggacattcatgaaggaaa

SEQ ID NO: 548859 - DNA, 25 bp, Homo sapien
ataccctcccactggcggcgcggat

SEQ ID NO: 548860 - DNA, 25 bp, Homo sapien
actggcggcgcggatggcacgccgg

SEQ ID NO: 548861 - DNA, 25 bp, Homo sapien
gctataccctcccactggcggcgcg

SEQ ID NO: 548862 - DNA, 25 bp, Homo sapien
gcgcggatggcacgccggcggagcc

SEQ ID NO: 548863 - DNA, 25 bp, Homo sapien
caacttgataatatactgtgtgcac

SEQ ID NO: 548864 - DNA, 25 bp, Homo sapien
tcttcagttgttgcatatagtgttc

SEQ ID NO: 548865 - DNA, 25 bp, Homo sapien
tctaaaaatgtcagatcaggttcat

SEQ ID NO: 548866 - DNA, 25 bp, Homo sapien
tatgggctaatatatccaacttgat

SEQ ID NO: 548867 - DNA, 25 bp, Homo sapien
gagatctataacttatgctcttagc

SEQ ID NO: 548868 - DNA, 25 bp, Homo sapien
tataacttatgctcttagcagatgg

SEQ ID NO: 548869 - DNA, 25 bp, Homo sapien
tattatatgtctttaagctaggcca

SEQ ID NO: 548870 - DNA, 25 bp, Homo sapien
taagctaggccatctccatgttctg

SEQ ID NO: 548871 - DNA, 25 bp, Homo sapien
tactattctgcagccaggtaagagg

SEQ ID NO: 548872 - DNA, 25 bp, Homo sapien
gagagatgccgtttcagatccctgg

SEQ ID NO: 548873 - DNA, 25 bp, Homo sapien
tggattcaccccattttgttcggga

SEQ ID NO: 548874 - DNA, 25 bp, Homo sapien
gagagatgtgcttccatgtatggca

SEQ ID NO: 548875 - DNA, 25 bp, Homo sapien
taaggtgtattgaaacctgcagtgc

SEQ ID NO: 548876 - DNA, 25 bp, Homo sapien
taaatgccattgacttctgacctga

SEQ ID NO: 548877 - DNA, 25 bp, Homo sapien
cagtcttccagcttgtaaatgccat

SEQ ID NO: 548878 - DNA, 25 bp, Homo sapien
aagttgtagcagttaagtccagtca

SEQ ID NO: 548879 - DNA, 25 bp, Homo sapien
tatttaatacagctatatggacctt

SEQ ID NO: 548880 - DNA, 25 bp, Homo sapien
tagacattactactaaaaggtacat

SEQ ID NO: 548881 - DNA, 25 bp, Homo sapien
aaaggtacatctaactattcaggga

SEQ ID NO: 548882 - DNA, 25 bp, Homo sapien
tattatgctttataacctcttctgt

SEQ ID NO: 548883 - DNA, 25 bp, Homo sapien
tctatatagtgtatgcaggacagat

SEQ ID NO: 548884 - DNA, 25 bp, Homo sapien
taattggcataattcaatggtagcc

SEQ ID NO: 548885 - DNA, 25 bp, Homo sapien
gctagtcatggctaggataatccat

SEQ ID NO: 548886 - DNA, 25 bp, Homo sapien
cttaaatctcatcatgtaagcaggg

SEQ ID NO: 548887 - DNA, 25 bp, Homo sapien
agaatgcagttgagatgcatagaaa

SEQ ID NO: 548888 - DNA, 25 bp, Homo sapien
aaagtctgggactacttacacctat

SEQ ID NO: 548889 - DNA, 25 bp, Homo sapien
tgggactacttacacctatttgcta

SEQ ID NO: 548890 - DNA, 25 bp, Homo sapien
cagttgagatgcatagaaaaagtct

SEQ ID NO: 548891 - DNA, 25 bp, Homo sapien
cacataaaaagagccctcatgatga

SEQ ID NO: 548892 - DNA, 25 bp, Homo sapien
aggatgagacctgtatacttgtaat

SEQ ID NO: 548893 - DNA, 25 bp, Homo sapien
gatcatccagagaaccatgaagtag

SEQ ID NO: 548894 - DNA, 25 bp, Homo sapien
gagagaagcaggtacaaccttgtga

SEQ ID NO: 548895 - DNA, 25 bp, Homo sapien
ctggtgatgaccacttctgagagct

SEQ ID NO: 548896 - DNA, 25 bp, Homo sapien
cagccttgacttgcatattgatggg

SEQ ID NO: 548897 - DNA, 25 bp, Homo sapien
tcctcagtagtgataggagctatca

SEQ ID NO: 548898 - DNA, 25 bp, Homo sapien
cacttatgatatgaggcagccttga

SEQ ID NO: 548899 - DNA, 25 bp, Homo sapien
ggtacatgtgtaaagaagagatcat

SEQ ID NO: 548900 - DNA, 25 bp, Homo sapien
tggtacatgtgtaaagaagagatca

SEQ ID NO: 548901 - DNA, 25 bp, Homo sapien
ttggtacatgtgtaaagaagagatc

SEQ ID NO: 548902 - DNA, 25 bp, Homo sapien
agcagtgcgacttccatgcagtagc

SEQ ID NO: 548903 - DNA, 25 bp, Homo sapien
agctgcactacagctccagctgaga

SEQ ID NO: 548904 - DNA, 25 bp, Homo sapien
tcctgagcctgaagcagtgcgactt

SEQ ID NO: 548905 - DNA, 25 bp, Homo sapien
tgagcctgaagcagtgcgacttcca

SEQ ID NO: 548906 - DNA, 25 bp, Homo sapien
ctcctctccctttgtcccgggattg

SEQ ID NO: 548907 - DNA, 25 bp, Homo sapien
tgctcctctccctttgtcccgggat

SEQ ID NO: 548908 - DNA, 25 bp, Homo sapien
ctgttttgcagtttatcctggtctt

SEQ ID NO: 548909 - DNA, 25 bp, Homo sapien
gttttgcagtttatcctggtcttta

SEQ ID NO: 548910 - DNA, 25 bp, Homo sapien
tgttttgcagtttatcctggtcttt

SEQ ID NO: 548911 - DNA, 25 bp, Homo sapien
tttgaagagtcgaaggtgagttcct

SEQ ID NO: 548912 - DNA, 25 bp, Homo sapien
tttctgggtgtgacttctaagtctg

SEQ ID NO: 548913 - DNA, 25 bp, Homo sapien
tattttagggctatgtggtatcctt

SEQ ID NO: 548914 - DNA, 25 bp, Homo sapien
cctggtgaacaacagaagggctttc

SEQ ID NO: 548915 - DNA, 25 bp, Homo sapien
gaagctggcttctctagagctgcgg

SEQ ID NO: 548916 - DNA, 25 bp, Homo sapien
gttcatgacgattgcaatacttccc

SEQ ID NO: 548917 - DNA, 25 bp, Homo sapien
tctctgcaagctgcatacagaacgc

SEQ ID NO: 548918 - DNA, 25 bp, Homo sapien
tctgccgtaaggacacacaaagatg

SEQ ID NO: 548919 - DNA, 25 bp, Homo sapien
aacaccaccttttgcctcaaattca

SEQ ID NO: 548920 - DNA, 25 bp, Homo sapien
aggtcattcttaacaacaccacctt

SEQ ID NO: 548921 - DNA, 25 bp, Homo sapien
gatctgcctggaagttcaggtcatt

SEQ ID NO: 548922 - DNA, 25 bp, Homo sapien
ccagatctgcctggaagttcaggtc

SEQ ID NO: 548923 - DNA, 25 bp, Homo sapien
taggaaagtcattgcagcagtcttt

SEQ ID NO: 548924 - DNA, 25 bp, Homo sapien
cccagaagatgttggtgtagattat

SEQ ID NO: 548925 - DNA, 25 bp, Homo sapien
tggaagcttatccagccagctagga

SEQ ID NO: 548926 - DNA, 25 bp, Homo sapien
tgtgaaataatgctggttcttctgg

SEQ ID NO: 548927 - DNA, 25 bp, Homo sapien
ctcactcttgagtgctctaaggcat

SEQ ID NO: 548928 - DNA, 25 bp, Homo sapien
cagttgataatagtcctttgatgta

SEQ ID NO: 548929 - DNA, 25 bp, Homo sapien
tgagtgctctaaggcattgcaaggc

SEQ ID NO: 548930 - DNA, 25 bp, Homo sapien
tgctgtccacttgaacagttgataa

SEQ ID NO: 548931 - DNA, 25 bp, Homo sapien
gatgcctatcataagtccagcttca

SEQ ID NO: 548932 - DNA, 25 bp, Homo sapien
gatacacgctgttctgggattacat

SEQ ID NO: 548933 - DNA, 25 bp, Homo sapien
cgaaggccttaaccacattgaggct

SEQ ID NO: 548934 - DNA, 25 bp, Homo sapien
caaagtggaggctaatccgaaggcc

SEQ ID NO: 548935 - DNA, 25 bp, Homo sapien
actatcttccttttcgatatcttct

SEQ ID NO: 548936 - DNA, 25 bp, Homo sapien
tcagatacccatgatgactgcttgc

SEQ ID NO: 548937 - DNA, 25 bp, Homo sapien
tgcttgcatctaaaagtccactcat

SEQ ID NO: 548938 - DNA, 25 bp, Homo sapien
tcttctttcagatacccatgatgac

SEQ ID NO: 548939 - DNA, 25 bp, Homo sapien
ctgaactaatgtcagctcagctgca

SEQ ID NO: 548940 - DNA, 25 bp, Homo sapien
cagcagtgacaaaagggtttggtga

SEQ ID NO: 548941 - DNA, 25 bp, Homo sapien
ctcaaccttctccaggtaaaactga

SEQ ID NO: 548942 - DNA, 25 bp, Homo sapien
tcaaccttctccaggtaaaactgaa

SEQ ID NO: 548943 - DNA, 25 bp, Homo sapien
gaaccaatacctggtgaaaacttga

SEQ ID NO: 548944 - DNA, 25 bp, Homo sapien
aaccaatacctggtgaaaacttgag

SEQ ID NO: 548945 - DNA, 25 bp, Homo sapien
accaatacctggtgaaaacttgagc

SEQ ID NO: 548946 - DNA, 25 bp, Homo sapien
catctggtcaacacgctggtttcca

SEQ ID NO: 548947 - DNA, 25 bp, Homo sapien
ccaggttgggaagaccatctggtca

SEQ ID NO: 548948 - DNA, 25 bp, Homo sapien
gctattctgtagacagcgtgcaaga

SEQ ID NO: 548949 - DNA, 25 bp, Homo sapien
gctggtttccaaatgatagaacaga

SEQ ID NO: 548950 - DNA, 25 bp, Homo sapien
gtagcttcttgcagtatctcttctt

SEQ ID NO: 548951 - DNA, 25 bp, Homo sapien
aatgtgtttgagtcttactataccc

SEQ ID NO: 548952 - DNA, 25 bp, Homo sapien
caagtgactgtccaatccacatctt

SEQ ID NO: 548953 - DNA, 25 bp, Homo sapien
tcaagtgactgtccaatccacatct

SEQ ID NO: 548954 - DNA, 25 bp, Homo sapien
atgtgtttgagtcttactataccca

SEQ ID NO: 548955 - DNA, 25 bp, Homo sapien
cttggttaagggcaggcatgaagtt

SEQ ID NO: 548956 - DNA, 25 bp, Homo sapien
gaactgagtgtatctggtgcctaga

SEQ ID NO: 548957 - DNA, 25 bp, Homo sapien
aaggaggttctccacaggtaccctg

SEQ ID NO: 548958 - DNA, 25 bp, Homo sapien
ggtgcctagagaggccatgactctc

SEQ ID NO: 548959 - DNA, 25 bp, Homo sapien
ctgttttggctgcaggttccccatg

SEQ ID NO: 548960 - DNA, 25 bp, Homo sapien
gttttggctgcaggttccccatggc

SEQ ID NO: 548961 - DNA, 25 bp, Homo sapien
ttttggctgcaggttccccatggct

SEQ ID NO: 548962 - DNA, 25 bp, Homo sapien
tgttttggctgcaggttccccatgg

SEQ ID NO: 548963 - DNA, 25 bp, Homo sapien
catattccaccttggtgcataaaaa

SEQ ID NO: 548964 - DNA, 25 bp, Homo sapien
ttcgcaattcacacaggaagcacga

SEQ ID NO: 548965 - DNA, 25 bp, Homo sapien
gccacgtattgtgaaaacttgtgtt

SEQ ID NO: 548966 - DNA, 25 bp, Homo sapien
ggaagcacgaggaaaaatgccacgt

SEQ ID NO: 548967 - DNA, 25 bp, Homo sapien
tctattggtgttagtgcctggcaac

SEQ ID NO: 548968 - DNA, 25 bp, Homo sapien
gaaagggctattcccatgttctcca

SEQ ID NO: 548969 - DNA, 25 bp, Homo sapien
gagaagtagccaggagaaacattca

SEQ ID NO: 548970 - DNA, 25 bp, Homo sapien
aaagattgccatgtgattttgcccc

SEQ ID NO: 548971 - DNA, 25 bp, Homo sapien
gccattttctgcaaggccttgaagc

SEQ ID NO: 548972 - DNA, 25 bp, Homo sapien
ccattttctgcaaggccttgaagct

SEQ ID NO: 548973 - DNA, 25 bp, Homo sapien
cattttctgcaaggccttgaagctg

SEQ ID NO: 548974 - DNA, 25 bp, Homo sapien
agccattttctgcaaggccttgaag

SEQ ID NO: 548975 - DNA, 25 bp, Homo sapien
catgaagtcatgacgtgctgtacac

SEQ ID NO: 548976 - DNA, 25 bp, Homo sapien
tgctgtacacgatcctcggctaggg

SEQ ID NO: 548977 - DNA, 25 bp, Homo sapien
cgtgaacaaaggcaaggactcatga

SEQ ID NO: 548978 - DNA, 25 bp, Homo sapien
gctagggcagcatttgtgtgttgtt

SEQ ID NO: 548979 - DNA, 25 bp, Homo sapien
tgtgctacacaaggcattgttttct

SEQ ID NO: 548980 - DNA, 25 bp, Homo sapien
ttggtgtgaactgtgtcagggtacc

SEQ ID NO: 548981 - DNA, 25 bp, Homo sapien
aactgtgtcagggtacctgtgctac

SEQ ID NO: 548982 - DNA, 25 bp, Homo sapien
gtacctgtgctacacaaggcattgt

SEQ ID NO: 548983 - DNA, 25 bp, Homo sapien
ctgaggtggttggaggctttccctg

SEQ ID NO: 548984 - DNA, 25 bp, Homo sapien
ctggatggaaaaagtcatctccacc

SEQ ID NO: 548985 - DNA, 25 bp, Homo sapien
ggctttccctggatggaaaaagtca

SEQ ID NO: 548986 - DNA, 25 bp, Homo sapien
ccctggatggaaaaagtcatctcca

SEQ ID NO: 548987 - DNA, 25 bp, Homo sapien
tcactgtgcaggaaattttggtttt

SEQ ID NO: 548988 - DNA, 25 bp, Homo sapien
cactgtgcaggaaattttggttttc

SEQ ID NO: 548989 - DNA, 25 bp, Homo sapien
ctcagtcttggagggttcaaatcct

SEQ ID NO: 548990 - DNA, 25 bp, Homo sapien
atggacatttaactcagtcttggag

SEQ ID NO: 548991 - DNA, 25 bp, Homo sapien
tggacatttaactcagtcttggagg

SEQ ID NO: 548992 - DNA, 25 bp, Homo sapien
gtcttggagggttcaaatcctgtcc

SEQ ID NO: 548993 - DNA, 25 bp, Homo sapien
gaattagctgccatcgaaccatggg

SEQ ID NO: 548994 - DNA, 25 bp, Homo sapien
ccatcgaaccatgggctctgtgctg

SEQ ID NO: 548995 - DNA, 25 bp, Homo sapien
ggaaatctttgtgcaacactggaat

SEQ ID NO: 548996 - DNA, 25 bp, Homo sapien
agttggaactggtctgctgagcaaa

SEQ ID NO: 548997 - DNA, 25 bp, Homo sapien
gaacaaggtaaattgacagctggta

SEQ ID NO: 548998 - DNA, 25 bp, Homo sapien
taagattacgtgaatttgagaacaa

SEQ ID NO: 548999 - DNA, 25 bp, Homo sapien
ggcctggccgagctgaactagcttt

SEQ ID NO: 549000 - DNA, 25 bp, Homo sapien
tgcaggttgatacgaaagtttgaac

SEQ ID NO: 549001 - DNA, 25 bp, Homo sapien
cctctgtatgctttcttccttgatg

SEQ ID NO: 549002 - DNA, 25 bp, Homo sapien
atgctttcttccttgatggaaaaaa

SEQ ID NO: 549003 - DNA, 25 bp, Homo sapien
aaaactggtataaattatccaccat

SEQ ID NO: 549004 - DNA, 25 bp, Homo sapien
tccttgatggaaaaaaactggtata

SEQ ID NO: 549005 - DNA, 25 bp, Homo sapien
tattcacacttatgcatggacatgc

SEQ ID NO: 549006 - DNA, 25 bp, Homo sapien
caacacccgtgcacatgagaaactg

SEQ ID NO: 549007 - DNA, 25 bp, Homo sapien
tgtgtaacatggcaaagctatctcc

SEQ ID NO: 549008 - DNA, 25 bp, Homo sapien
tatagaaattcctgcctagacttgg

SEQ ID NO: 549009 - DNA, 25 bp, Homo sapien
caaatacctgtccaggcttataagg

SEQ ID NO: 549010 - DNA, 25 bp, Homo sapien
tccaggcttataagggattcagaaa

SEQ ID NO: 549011 - DNA, 25 bp, Homo sapien
agatgtgtaacaagacaaatacctg

SEQ ID NO: 549012 - DNA, 25 bp, Homo sapien
gttccacagatgtgtaacaagacaa

SEQ ID NO: 549013 - DNA, 25 bp, Homo sapien
tgctctggggttcctaagtcctgct

SEQ ID NO: 549014 - DNA, 25 bp, Homo sapien
gctaacattccaggcatgtacttcc

SEQ ID NO: 549015 - DNA, 25 bp, Homo sapien
tatacccactcaaacgcattaatgt

SEQ ID NO: 549016 - DNA, 25 bp, Homo sapien
tgcgccacatcctccactggaaaaa

SEQ ID NO: 549017 - DNA, 25 bp, Homo sapien
aatgaccatcagatcagagaacaga

SEQ ID NO: 549018 - DNA, 25 bp, Homo sapien
gctggcctggttaagcacgctaagt

SEQ ID NO: 549019 - DNA, 25 bp, Homo sapien
gatgagctcatagctattagtgctg

SEQ ID NO: 549020 - DNA, 25 bp, Homo sapien
taccaactgcagtcgcttgaaaatg

SEQ ID NO: 549021 - DNA, 25 bp, Homo sapien
cctgtggtatgcgtcatattgtgag

SEQ ID NO: 549022 - DNA, 25 bp, Homo sapien
caatagggccttttataacagagaa

SEQ ID NO: 549023 - DNA, 25 bp, Homo sapien
agagagggattgatactctggacac

SEQ ID NO: 549024 - DNA, 25 bp, Homo sapien
gattagacattgtacatgccatctc

SEQ ID NO: 549025 - DNA, 25 bp, Homo sapien
tgctctgcccttatgtggcctgggc

SEQ ID NO: 549026 - DNA, 25 bp, Homo sapien
gataccgaaggttgagagtcagcag

SEQ ID NO: 549027 - DNA, 25 bp, Homo sapien
ttgagagtcagcaggtttgtaatgg

SEQ ID NO: 549028 - DNA, 25 bp, Homo sapien
gtccccagtgataccgaaggttgag

SEQ ID NO: 549029 - DNA, 25 bp, Homo sapien
gcagtagtgaagggagcaaagaacc

SEQ ID NO: 549030 - DNA, 25 bp, Homo sapien
tctattttagtgttcctcaaggtct

SEQ ID NO: 549031 - DNA, 25 bp, Homo sapien
tattttagtgttcctcaaggtctcc

SEQ ID NO: 549032 - DNA, 25 bp, Homo sapien
aggtctcctccagtaggatctgcat

SEQ ID NO: 549033 - DNA, 25 bp, Homo sapien
caaggtctcctccagtaggatctgc

SEQ ID NO: 549034 - DNA, 25 bp, Homo sapien
ccagtactatcttttttttggatgc

SEQ ID NO: 549035 - DNA, 25 bp, Homo sapien
cccagtactatcttttttttggatg

SEQ ID NO: 549036 - DNA, 25 bp, Homo sapien
tcttcattatctcagagtgggttcc

SEQ ID NO: 549037 - DNA, 25 bp, Homo sapien
tgagtcttcattatctcagagtggg

SEQ ID NO: 549038 - DNA, 25 bp, Homo sapien
gagtcttcattatctcagagtgggt

SEQ ID NO: 549039 - DNA, 25 bp, Homo sapien
cttgagtcttcattatctcagagtg

SEQ ID NO: 549040 - DNA, 25 bp, Homo sapien
gatctcagcgatcatcagttcctcc

SEQ ID NO: 549041 - DNA, 25 bp, Homo sapien
agttcctccttactacactttctag

SEQ ID NO: 549042 - DNA, 25 bp, Homo sapien
catcagttcctccttactacacttt

SEQ ID NO: 549043 - DNA, 25 bp, Homo sapien
ggccagagatctcagcgatcatcag

SEQ ID NO: 549044 - DNA, 25 bp, Homo sapien
cagcttgtgtaaccgttaaatttat

SEQ ID NO: 549045 - DNA, 25 bp, Homo sapien
catgcagcttgtgtaaccgttaaat

SEQ ID NO: 549046 - DNA, 25 bp, Homo sapien
atgcagcttgtgtaaccgttaaatt

SEQ ID NO: 549047 - DNA, 25 bp, Homo sapien
gcagcttgtgtaaccgttaaattta

SEQ ID NO: 549048 - DNA, 25 bp, Homo sapien
gagcagatccaagcaaactctatcc

SEQ ID NO: 549049 - DNA, 25 bp, Homo sapien
tgagcagatccaagcaaactctatc

SEQ ID NO: 549050 - DNA, 25 bp, Homo sapien
atgagcagatccaagcaaactctat

SEQ ID NO: 549051 - DNA, 25 bp, Homo sapien
gtgacaggcccagcatgcgagacat

SEQ ID NO: 549052 - DNA, 25 bp, Homo sapien
tccttttatgcatatgccaagcaga

SEQ ID NO: 549053 - DNA, 25 bp, Homo sapien
tgcggtgatttttctggtaaaggcc

SEQ ID NO: 549054 - DNA, 25 bp, Homo sapien
gacatgacattcttgcggtgatttt

SEQ ID NO: 549055 - DNA, 25 bp, Homo sapien
tctgtaagactgttaccccaaatgc

SEQ ID NO: 549056 - DNA, 25 bp, Homo sapien
tgctattcacagagttaggcaacca

SEQ ID NO: 549057 - DNA, 25 bp, Homo sapien
gttaccataaaactactcgcttgag

SEQ ID NO: 549058 - DNA, 25 bp, Homo sapien
ctcgcttgagtaaaacaactgggtg

SEQ ID NO: 549059 - DNA, 25 bp, Homo sapien
gaaatcgtcgtgtgctgagctcaat

SEQ ID NO: 549060 - DNA, 25 bp, Homo sapien
tccatccgatggcttgactgctttg

SEQ ID NO: 549061 - DNA, 25 bp, Homo sapien
gagaggtttttccagcctgaccata

SEQ ID NO: 549062 - DNA, 25 bp, Homo sapien
tcaatgccatgtgcaaggtctccga

SEQ ID NO: 549063 - DNA, 25 bp, Homo sapien
ttcctggaaactctccggatagggc

SEQ ID NO: 549064 - DNA, 25 bp, Homo sapien
cttcttcctggaaactctccggata

SEQ ID NO: 549065 - DNA, 25 bp, Homo sapien
tcttcctggaaactctccggatagg

SEQ ID NO: 549066 - DNA, 25 bp, Homo sapien
cttcctggaaactctccggataggg

SEQ ID NO: 549067 - DNA, 25 bp, Homo sapien
gctctgcattcactctgtttgtggc

SEQ ID NO: 549068 - DNA, 25 bp, Homo sapien
tggctctgcattcactctgtttgtg

SEQ ID NO: 549069 - DNA, 25 bp, Homo sapien
tctgcattcactctgtttgtggcag

SEQ ID NO: 549070 - DNA, 25 bp, Homo sapien
ctcttgatggctctgcattcactct

SEQ ID NO: 549071 - DNA, 25 bp, Homo sapien
tgccagttgtccttgtcgctgcaat

SEQ ID NO: 549072 - DNA, 25 bp, Homo sapien
tgtcgctgcaatgtctctgtcttca

SEQ ID NO: 549073 - DNA, 25 bp, Homo sapien
gaatgtgaggcatgccagttgtcct

SEQ ID NO: 549074 - DNA, 25 bp, Homo sapien
tgacatctcttcgtagaaatttgat

SEQ ID NO: 549075 - DNA, 25 bp, Homo sapien
tgtgaaagagaacagggcttcctca

SEQ ID NO: 549076 - DNA, 25 bp, Homo sapien
gtgaaagagaacagggcttcctcac

SEQ ID NO: 549077 - DNA, 25 bp, Homo sapien
ctgtgaaagagaacagggcttcctc

SEQ ID NO: 549078 - DNA, 25 bp, Homo sapien
gcagagcttcatacttctgtgacag

SEQ ID NO: 549079 - DNA, 25 bp, Homo sapien
taatactacactctaccttgcagag

SEQ ID NO: 549080 - DNA, 25 bp, Homo sapien
tgtgacagacgccagagatcaattt

SEQ ID NO: 549081 - DNA, 25 bp, Homo sapien
aatgcacctgcaccgtaatactaca

SEQ ID NO: 549082 - DNA, 25 bp, Homo sapien
ctgccgagatgtggtcctgccgcat

SEQ ID NO: 549083 - DNA, 25 bp, Homo sapien
tctgccgagatgtggtcctgccgca

SEQ ID NO: 549084 - DNA, 25 bp, Homo sapien
ctctgccgagatgtggtcctgccgc

SEQ ID NO: 549085 - DNA, 25 bp, Homo sapien
cccagcacatcttccaatggtagtg

SEQ ID NO: 549086 - DNA, 25 bp, Homo sapien
atggtagtgcctcaaacacatctcc

SEQ ID NO: 549087 - DNA, 25 bp, Homo sapien
gctgtggaccgtctatttctcaact

SEQ ID NO: 549088 - DNA, 25 bp, Homo sapien
cattctaagttgtccgctgtggacc

SEQ ID NO: 549089 - DNA, 25 bp, Homo sapien
tctcatttctatgtgattgctgcaa

SEQ ID NO: 549090 - DNA, 25 bp, Homo sapien
cttcttgtggtatcagtgctttgct

SEQ ID NO: 549091 - DNA, 25 bp, Homo sapien
gatgagcactgtcctctcttaaccc

SEQ ID NO: 549092 - DNA, 25 bp, Homo sapien
gctgcaactggacattcttcttgtg

SEQ ID NO: 549093 - DNA, 25 bp, Homo sapien
tatgcctcattctggccctgactct

SEQ ID NO: 549094 - DNA, 25 bp, Homo sapien
ccaccatagagtgtgctctgcttat

SEQ ID NO: 549095 - DNA, 25 bp, Homo sapien
ccatggaatccaagataagagctcc

SEQ ID NO: 549096 - DNA, 25 bp, Homo sapien
ggcaagggctggcttattctccacc

SEQ ID NO: 549097 - DNA, 25 bp, Homo sapien
ttttgcatgtgacatggcatatgct

SEQ ID NO: 549098 - DNA, 25 bp, Homo sapien
cattttgcatgtgacatggcatatg

SEQ ID NO: 549099 - DNA, 25 bp, Homo sapien
ttggcattttgcatgtgacatggca

SEQ ID NO: 549100 - DNA, 25 bp, Homo sapien
ggcattttgcatgtgacatggcata

SEQ ID NO: 549101 - DNA, 25 bp, Homo sapien
tggacctgctaagggttgacttcct

SEQ ID NO: 549102 - DNA, 25 bp, Homo sapien
tttctcagcagaaccctcaacaaag

SEQ ID NO: 549103 - DNA, 25 bp, Homo sapien
ccaggtggacctgctaagggttgac

SEQ ID NO: 549104 - DNA, 25 bp, Homo sapien
ttctcagcagaaccctcaacaaagg

SEQ ID NO: 549105 - DNA, 25 bp, Homo sapien
tacaggtgaaaatgtctgatccagc

SEQ ID NO: 549106 - DNA, 25 bp, Homo sapien
cagcttatagctcttttccgtgtaa

SEQ ID NO: 549107 - DNA, 25 bp, Homo sapien
tagatgggtctcataaattttctcg

SEQ ID NO: 549108 - DNA, 25 bp, Homo sapien
catacaggtaaatgaaccagcaaac

SEQ ID NO: 549109 - DNA, 25 bp, Homo sapien
gctaagaattctgtttttgcccaaa

SEQ ID NO: 549110 - DNA, 25 bp, Homo sapien
aattctgtttttgcccaaagtggtg

SEQ ID NO: 549111 - DNA, 25 bp, Homo sapien
caaagtggtgtcacattccataggt

SEQ ID NO: 549112 - DNA, 25 bp, Homo sapien
tttaagctcccatcttagagcagga

SEQ ID NO: 549113 - DNA, 25 bp, Homo sapien
cttttcagcagggaagatgggatgc

SEQ ID NO: 549114 - DNA, 25 bp, Homo sapien
tttcagcagggaagatgggatgcta

SEQ ID NO: 549115 - DNA, 25 bp, Homo sapien
ttcagcagggaagatgggatgctat

SEQ ID NO: 549116 - DNA, 25 bp, Homo sapien
ttttcagcagggaagatgggatgct

SEQ ID NO: 549117 - DNA, 25 bp, Homo sapien
tttttctggactccaagttggatgc

SEQ ID NO: 549118 - DNA, 25 bp, Homo sapien
actttgaaagaaggagctctaactt

SEQ ID NO: 549119 - DNA, 25 bp, Homo sapien
tcaaagactggaacaaaaaagcctc

SEQ ID NO: 549120 - DNA, 25 bp, Homo sapien
gccctggctagcacagtccctgtta

SEQ ID NO: 549121 - DNA, 25 bp, Homo sapien
gtttctaggacacgatggtctctgc

SEQ ID NO: 549122 - DNA, 25 bp, Homo sapien
tatagtttctaggacacgatggtct

SEQ ID NO: 549123 - DNA, 25 bp, Homo sapien
tctactatagtttctaggacacgat

SEQ ID NO: 549124 - DNA, 25 bp, Homo sapien
gccaagcagtgacatctactatagt

SEQ ID NO: 549125 - DNA, 25 bp, Homo sapien
tgctgatatgaagcctggagccgca

SEQ ID NO: 549126 - DNA, 25 bp, Homo sapien
aagcccagctatgttcccagaggag

SEQ ID NO: 549127 - DNA, 25 bp, Homo sapien
acaagtggcctctaactgtctccag

SEQ ID NO: 549128 - DNA, 25 bp, Homo sapien
tacagagtgtacagagtgggagttc

SEQ ID NO: 549129 - DNA, 25 bp, Homo sapien
tgcatcttgacacttggccttttgg

SEQ ID NO: 549130 - DNA, 25 bp, Homo sapien
tttgcatttggcaggacttgatttc

SEQ ID NO: 549131 - DNA, 25 bp, Homo sapien
agctcatttgcatttggcaggactt

SEQ ID NO: 549132 - DNA, 25 bp, Homo sapien
gcatcttgacacttggccttttgga

SEQ ID NO: 549133 - DNA, 25 bp, Homo sapien
tcccaaaatcattagacccaccaaa

SEQ ID NO: 549134 - DNA, 25 bp, Homo sapien
aaaatcattagacccaccaaaatgc

SEQ ID NO: 549135 - DNA, 25 bp, Homo sapien
atcattagacccaccaaaatgcttt

SEQ ID NO: 549136 - DNA, 25 bp, Homo sapien
tttcccaaaatcattagacccacca

SEQ ID NO: 549137 - DNA, 25 bp, Homo sapien
agagatctccttgactgttaaccag

SEQ ID NO: 549138 - DNA, 25 bp, Homo sapien
taattgcatgtatcccacctctggt

SEQ ID NO: 549139 - DNA, 25 bp, Homo sapien
gctgctccatcatggtgagccggga

SEQ ID NO: 549140 - DNA, 25 bp, Homo sapien
caaagactggccctgagtaatggcc

SEQ ID NO: 549141 - DNA, 25 bp, Homo sapien
tagtagttggtccagaaaaacacgc

SEQ ID NO: 549142 - DNA, 25 bp, Homo sapien
acatctgaaactcccgtagtagttg

SEQ ID NO: 549143 - DNA, 25 bp, Homo sapien
caagaatgggatctataaagagata

SEQ ID NO: 549144 - DNA, 25 bp, Homo sapien
aaaacacgcctttttcaatgatgag

SEQ ID NO: 549145 - DNA, 25 bp, Homo sapien
caactgttgtatcctagagaccaag

SEQ ID NO: 549146 - DNA, 25 bp, Homo sapien
tgttgccacaactgccaaataggga

SEQ ID NO: 549147 - DNA, 25 bp, Homo sapien
tatgactttcccttggtgttgccac

SEQ ID NO: 549148 - DNA, 25 bp, Homo sapien
tgtattcactagacccgatccagat

SEQ ID NO: 549149 - DNA, 25 bp, Homo sapien
tcccacagcaattacgctggaaggg

SEQ ID NO: 549150 - DNA, 25 bp, Homo sapien
ggagaaatatgaatcccagttcaag

SEQ ID NO: 549151 - DNA, 25 bp, Homo sapien
aaaacctagcaagcccacatagtga

SEQ ID NO: 549152 - DNA, 25 bp, Homo sapien
tatagcctctgtagaaaaacctagc

SEQ ID NO: 549153 - DNA, 25 bp, Homo sapien
tctatgtgtgctgctacatggctca

SEQ ID NO: 549154 - DNA, 25 bp, Homo sapien
cctttgagagtttgtatgcatctat

SEQ ID NO: 549155 - DNA, 25 bp, Homo sapien
gcatctatgtgtgctgctacatggc

SEQ ID NO: 549156 - DNA, 25 bp, Homo sapien
ctatgtgtgctgctacatggctcat

SEQ ID NO: 549157 - DNA, 25 bp, Homo sapien
catccactcaattgaagtggagcca

SEQ ID NO: 549158 - DNA, 25 bp, Homo sapien
taaaattttagtgcgccagtgctcc

SEQ ID NO: 549159 - DNA, 25 bp, Homo sapien
gttcagcagtttgagaaaggccaga

SEQ ID NO: 549160 - DNA, 25 bp, Homo sapien
aatgatgttcgcagaggaagaagga

SEQ ID NO: 549161 - DNA, 25 bp, Homo sapien
ctctcctcttgagggaaggcatcca

SEQ ID NO: 549162 - DNA, 25 bp, Homo sapien
tctcctcttgagggaaggcatccat

SEQ ID NO: 549163 - DNA, 25 bp, Homo sapien
gctctcctcttgagggaaggcatcc

SEQ ID NO: 549164 - DNA, 25 bp, Homo sapien
tatcctgattcatgctctcacctgg

SEQ ID NO: 549165 - DNA, 25 bp, Homo sapien
tgttcagtatcctgattcatgctct

SEQ ID NO: 549166 - DNA, 25 bp, Homo sapien
gccacatcccaaagtaacctgaatg

SEQ ID NO: 549167 - DNA, 25 bp, Homo sapien
ttcctggggtattgttcagtatcct

SEQ ID NO: 549168 - DNA, 25 bp, Homo sapien
ctgtgatgtcaacaaacagaccttg

SEQ ID NO: 549169 - DNA, 25 bp, Homo sapien
ttgagggcaaagcctaattagaggg

SEQ ID NO: 549170 - DNA, 25 bp, Homo sapien
agagacacagcaggccttcatctgt

SEQ ID NO: 549171 - DNA, 25 bp, Homo sapien
ttaacttaattgagggcaaagccta

SEQ ID NO: 549172 - DNA, 25 bp, Homo sapien
tggttctacatctatactgcgtttg

SEQ ID NO: 549173 - DNA, 25 bp, Homo sapien
tgactggttctacatctatactgcg

SEQ ID NO: 549174 - DNA, 25 bp, Homo sapien
catctatactgcgtttgcttctggg

SEQ ID NO: 549175 - DNA, 25 bp, Homo sapien
gtccaggtctctttgtggcagatat

SEQ ID NO: 549176 - DNA, 25 bp, Homo sapien
tcaacaaattccgggtagatatgag

SEQ ID NO: 549177 - DNA, 25 bp, Homo sapien
acaaattccgggtagatatgagcag

SEQ ID NO: 549178 - DNA, 25 bp, Homo sapien
attccgggtagatatgagcagctga

SEQ ID NO: 549179 - DNA, 25 bp, Homo sapien
ttccgggtagatatgagcagctgaa

SEQ ID NO: 549180 - DNA, 25 bp, Homo sapien
tccgccactggagctgatatacctc

SEQ ID NO: 549181 - DNA, 25 bp, Homo sapien
gagctgatatacctcctttgcatcc

SEQ ID NO: 549182 - DNA, 25 bp, Homo sapien
tgcaggtgaagtccgccactggagc

SEQ ID NO: 549183 - DNA, 25 bp, Homo sapien
gatatacctcctttgcatcccgagc

SEQ ID NO: 549184 - DNA, 25 bp, Homo sapien
aggtggagagaaatcactgtggaag

SEQ ID NO: 549185 - DNA, 25 bp, Homo sapien
actgtggaagctgacttatttacag

SEQ ID NO: 549186 - DNA, 25 bp, Homo sapien
ttacagtacagctacccatatccat

SEQ ID NO: 549187 - DNA, 25 bp, Homo sapien
atttacagtacagctacccatatcc

SEQ ID NO: 549188 - DNA, 25 bp, Homo sapien
tagtcatagacaatggcaattgcag

SEQ ID NO: 549189 - DNA, 25 bp, Homo sapien
attgcagagcaagactaataacagg

SEQ ID NO: 549190 - DNA, 25 bp, Homo sapien
cattcacatgttgtgtaataaaagg

SEQ ID NO: 549191 - DNA, 25 bp, Homo sapien
gaagtggtcggacattgggtcaaat

SEQ ID NO: 549192 - DNA, 25 bp, Homo sapien
agtgcctctcatagttgcaaaatag

SEQ ID NO: 549193 - DNA, 25 bp, Homo sapien
gcaacaaccaggacaacccatgtct

SEQ ID NO: 549194 - DNA, 25 bp, Homo sapien
tagttgtcttcaggatagtgcctct

SEQ ID NO: 549195 - DNA, 25 bp, Homo sapien
ggtctttcctgagttagttgtcttc

SEQ ID NO: 549196 - DNA, 25 bp, Homo sapien
gtcatcttcccctgagtcatatggg

SEQ ID NO: 549197 - DNA, 25 bp, Homo sapien
agtcatcttcccctgagtcatatgg

SEQ ID NO: 549198 - DNA, 25 bp, Homo sapien
ttcctccaagcacgtagtcaaacac

SEQ ID NO: 549199 - DNA, 25 bp, Homo sapien
ccttcctccaagcacgtagtcaaac

SEQ ID NO: 549200 - DNA, 25 bp, Homo sapien
tcctccaagcacgtagtcaaacaca

SEQ ID NO: 549201 - DNA, 25 bp, Homo sapien
cttcctccaagcacgtagtcaaaca

SEQ ID NO: 549202 - DNA, 25 bp, Homo sapien
tgacaataaacgtcctcttagcccc

SEQ ID NO: 549203 - DNA, 25 bp, Homo sapien
caggatgaaggctaagatcatcagc

SEQ ID NO: 549204 - DNA, 25 bp, Homo sapien
catcagcagggctgacaataaacgt

SEQ ID NO: 549205 - DNA, 25 bp, Homo sapien
caccaacaggatgaaggctaagatc

SEQ ID NO: 549206 - DNA, 25 bp, Homo sapien
gaaatttggttagttgaagatccac

SEQ ID NO: 549207 - DNA, 25 bp, Homo sapien
ccttgatctgaatctttggaggaga

SEQ ID NO: 549208 - DNA, 25 bp, Homo sapien
cactttggatcgtattttgtcctcc

SEQ ID NO: 549209 - DNA, 25 bp, Homo sapien
gagtataacaggttcattgcgaatt

SEQ ID NO: 549210 - DNA, 25 bp, Homo sapien
gcatcccaagtagcaggctaatttt

SEQ ID NO: 549211 - DNA, 25 bp, Homo sapien
cagacctgagcgttatttgtctcca

SEQ ID NO: 549212 - DNA, 25 bp, Homo sapien
ggcaatgtgcccaaccaactttctg

SEQ ID NO: 549213 - DNA, 25 bp, Homo sapien
tagtagcaagacaataatccccttt

SEQ ID NO: 549214 - DNA, 25 bp, Homo sapien
tctatccttttccaggccagatctc

SEQ ID NO: 549215 - DNA, 25 bp, Homo sapien
gcgctctatccttttccaggccaga

SEQ ID NO: 549216 - DNA, 25 bp, Homo sapien
aagtaaggcgctctatccttttcca

SEQ ID NO: 549217 - DNA, 25 bp, Homo sapien
tggaaaagtaaggcgctctatcctt

SEQ ID NO: 549218 - DNA, 25 bp, Homo sapien
ctaagttaatgctgatgtcctcagc

SEQ ID NO: 549219 - DNA, 25 bp, Homo sapien
tcaaaacctgctttccgaggtccac

SEQ ID NO: 549220 - DNA, 25 bp, Homo sapien
gaggtccacccagagtttggtcaca

SEQ ID NO: 549221 - DNA, 25 bp, Homo sapien
ttcttcttggtagctgacccactca

SEQ ID NO: 549222 - DNA, 25 bp, Homo sapien
agcatttcaccgcaaacagcaaaga

SEQ ID NO: 549223 - DNA, 25 bp, Homo sapien
tagcttatgcaatacatgggtcacc

SEQ ID NO: 549224 - DNA, 25 bp, Homo sapien
aaatatagcacattctctctggaga

SEQ ID NO: 549225 - DNA, 25 bp, Homo sapien
tatcagttaaaacggcacatggaca

SEQ ID NO: 549226 - DNA, 25 bp, Homo sapien
gccaagattataactgtttagttgg

SEQ ID NO: 549227 - DNA, 25 bp, Homo sapien
agattataactgtttagttggttgc

SEQ ID NO: 549228 - DNA, 25 bp, Homo sapien
taactgtttagttggttgcatatgt

SEQ ID NO: 549229 - DNA, 25 bp, Homo sapien
gtgccaagattataactgtttagtt

SEQ ID NO: 549230 - DNA, 25 bp, Homo sapien
caaccaggcctgttaacccggtcat

SEQ ID NO: 549231 - DNA, 25 bp, Homo sapien
cataaacaaggcaaaaagagggaca

SEQ ID NO: 549232 - DNA, 25 bp, Homo sapien
gacagtgggaactttgcagcaaact

SEQ ID NO: 549233 - DNA, 25 bp, Homo sapien
tgagtttttacagcggcaaccaggc

SEQ ID NO: 549234 - DNA, 25 bp, Homo sapien
caacagtgagactggctgcaagaac

SEQ ID NO: 549235 - DNA, 25 bp, Homo sapien
gatagaagagacctttcacacagca

SEQ ID NO: 549236 - DNA, 25 bp, Homo sapien
cagaggccttgggtaggtgcactcc

SEQ ID NO: 549237 - DNA, 25 bp, Homo sapien
catagtcaatcacgttctgggccga

SEQ ID NO: 549238 - DNA, 25 bp, Homo sapien
ccaggtcttgggacgacagtaggcc

SEQ ID NO: 549239 - DNA, 25 bp, Homo sapien
tgagctcagatttgggttgcacccg

SEQ ID NO: 549240 - DNA, 25 bp, Homo sapien
gaccgtgcttatggatctggacaga

SEQ ID NO: 549241 - DNA, 25 bp, Homo sapien
aatggacctgcgagtgctggagcct

SEQ ID NO: 549242 - DNA, 25 bp, Homo sapien
gcaggcttagaacacatctgaactc

SEQ ID NO: 549243 - DNA, 25 bp, Homo sapien
cactccagcaggcttagaacacatc

SEQ ID NO: 549244 - DNA, 25 bp, Homo sapien
ggaagtgtggtcactccagcaggct

SEQ ID NO: 549245 - DNA, 25 bp, Homo sapien
ttggaagtgtggtcactccagcagg

SEQ ID NO: 549246 - DNA, 25 bp, Homo sapien
tacagtctgatagcctagaacacca

SEQ ID NO: 549247 - DNA, 25 bp, Homo sapien
tctgcagctaaaaggttgttctccc

SEQ ID NO: 549248 - DNA, 25 bp, Homo sapien
tacggcgggctactgacaattctgt

SEQ ID NO: 549249 - DNA, 25 bp, Homo sapien
tcaggttcaacgtaaaaatcgcaag

SEQ ID NO: 549250 - DNA, 25 bp, Homo sapien
gtaatggaaaatgatcgcgaccgct

SEQ ID NO: 549251 - DNA, 25 bp, Homo sapien
gcctccgaagggtacgtgtcacgaa

SEQ ID NO: 549252 - DNA, 25 bp, Homo sapien
ggtgacaaacgtctcccaattcgga

SEQ ID NO: 549253 - DNA, 25 bp, Homo sapien
gaatagaggccacagcgaacaaggc

SEQ ID NO: 549254 - DNA, 25 bp, Homo sapien
cacacggagcagaggcgggcactcc

SEQ ID NO: 549255 - DNA, 25 bp, Homo sapien
agagagagctgcacttccgaaccgc

SEQ ID NO: 549256 - DNA, 25 bp, Homo sapien
agagctgcacttccgaaccgcagag

SEQ ID NO: 549257 - DNA, 25 bp, Homo sapien
gctccgggctagactgtccacacgg

SEQ ID NO: 549258 - DNA, 25 bp, Homo sapien
tttagaccaacttccgagcaatcgg

SEQ ID NO: 549259 - DNA, 25 bp, Homo sapien
gaggatatatcgcatccggtcccag

SEQ ID NO: 549260 - DNA, 25 bp, Homo sapien
aaatggcgtcatgtggatccgaggc

SEQ ID NO: 549261 - DNA, 25 bp, Homo sapien
catttaagactaatctgggccacgc

SEQ ID NO: 549262 - DNA, 25 bp, Homo sapien
tatttgtaagattgcacttgctggc

SEQ ID NO: 549263 - DNA, 25 bp, Homo sapien
catcttttagcaaccgtagctcgtt

SEQ ID NO: 549264 - DNA, 25 bp, Homo sapien
ttgtagtaacgggagagtgcatctt

SEQ ID NO: 549265 - DNA, 25 bp, Homo sapien
tttccgggattgcacaaaccacttg

SEQ ID NO: 549266 - DNA, 25 bp, Homo sapien
tggtaaacggactatgattgcatgc

SEQ ID NO: 549267 - DNA, 25 bp, Homo sapien
gggctgccggccagctcggaattaa

SEQ ID NO: 549268 - DNA, 25 bp, Homo sapien
tgccacacaatatcagggctgccgg

SEQ ID NO: 549269 - DNA, 25 bp, Homo sapien
aattaacctccgctaacagatcaag

SEQ ID NO: 549270 - DNA, 25 bp, Homo sapien
ctctgtatcgttcacaattgtagta

SEQ ID NO: 549271 - DNA, 25 bp, Homo sapien
ctgtatcgttcacaattgtagtata

SEQ ID NO: 549272 - DNA, 25 bp, Homo sapien
tatcgttcacaattgtagtatatgt

SEQ ID NO: 549273 - DNA, 25 bp, Homo sapien
ttctctgtatcgttcacaattgtag

SEQ ID NO: 549274 - DNA, 25 bp, Homo sapien
ccagtacgagctgaatgcaaagaca

SEQ ID NO: 549275 - DNA, 25 bp, Homo sapien
gatgaacaaactctatgggtgccct

SEQ ID NO: 549276 - DNA, 25 bp, Homo sapien
tgcccttaaggtgtgtacgaccatg

SEQ ID NO: 549277 - DNA, 25 bp, Homo sapien
gggacccatgcaacccaactgtggg

SEQ ID NO: 549278 - DNA, 25 bp, Homo sapien
taactttctgattaccacaggatcc

SEQ ID NO: 549279 - DNA, 25 bp, Homo sapien
aatatgtggctacaatttctagtgg

SEQ ID NO: 549280 - DNA, 25 bp, Homo sapien
cgtagtcacacctcactccaatatg

SEQ ID NO: 549281 - DNA, 25 bp, Homo sapien
tgtgggaaccacatatgtccgaccc

SEQ ID NO: 549282 - DNA, 25 bp, Homo sapien
ccatgtccatgatttagatactcca

SEQ ID NO: 549283 - DNA, 25 bp, Homo sapien
ctccatgtccatgatttagatactc

SEQ ID NO: 549284 - DNA, 25 bp, Homo sapien
ctcaggtaatgaacattcacctgtg

SEQ ID NO: 549285 - DNA, 25 bp, Homo sapien
caggtaatgaacattcacctgtgct

SEQ ID NO: 549286 - DNA, 25 bp, Homo sapien
ctccagtgaatccacatacaaaagc

SEQ ID NO: 549287 - DNA, 25 bp, Homo sapien
tagctggagtccacaaatgaaaggc

SEQ ID NO: 549288 - DNA, 25 bp, Homo sapien
agctggagtccacaaatgaaaggct

SEQ ID NO: 549289 - DNA, 25 bp, Homo sapien
aaccaaaacattccttaagtgcttg

SEQ ID NO: 549290 - DNA, 25 bp, Homo sapien
tccttaagtgcttgaatttccctat

SEQ ID NO: 549291 - DNA, 25 bp, Homo sapien
aagccaatagtcattgcaaacctct

SEQ ID NO: 549292 - DNA, 25 bp, Homo sapien
caaagccaatagtcattgcaaacct

SEQ ID NO: 549293 - DNA, 25 bp, Homo sapien
gattgtgctgtaatttcttcacctc

SEQ ID NO: 549294 - DNA, 25 bp, Homo sapien
attgtgctgtaatttcttcacctcc

SEQ ID NO: 549295 - DNA, 25 bp, Homo sapien
agattgtgctgtaatttcttcacct

SEQ ID NO: 549296 - DNA, 25 bp, Homo sapien
tcagtagtagatgtatgagaatcac

SEQ ID NO: 549297 - DNA, 25 bp, Homo sapien
ggttcagtagtagatgtatgagaat

SEQ ID NO: 549298 - DNA, 25 bp, Homo sapien
tgtatgagaatcacagatccagctg

SEQ ID NO: 549299 - DNA, 25 bp, Homo sapien
gtagatgtatgagaatcacagatcc

SEQ ID NO: 549300 - DNA, 25 bp, Homo sapien
gcttttcggttagctgtagatacct

SEQ ID NO: 549301 - DNA, 25 bp, Homo sapien
tagatacctgaaccattctttttgg

SEQ ID NO: 549302 - DNA, 25 bp, Homo sapien
gactggatttggcacagaaacactg

SEQ ID NO: 549303 - DNA, 25 bp, Homo sapien
tgttatacaacagtgggtggacagc

SEQ ID NO: 549304 - DNA, 25 bp, Homo sapien
ttttcagatgtgtatcctcgaccca

SEQ ID NO: 549305 - DNA, 25 bp, Homo sapien
tctaggcctctcttcctaagctcat

SEQ ID NO: 549306 - DNA, 25 bp, Homo sapien
caagaaaaaactgtggtccagaatg

SEQ ID NO: 549307 - DNA, 25 bp, Homo sapien
taagctcatctcttaaattacggta

SEQ ID NO: 549308 - DNA, 25 bp, Homo sapien
tgtctgaacctaaattgtatgctca

SEQ ID NO: 549309 - DNA, 25 bp, Homo sapien
caccttatttactactccagattca

SEQ ID NO: 549310 - DNA, 25 bp, Homo sapien
gtacttgtatcaaattgtctgaacc

SEQ ID NO: 549311 - DNA, 25 bp, Homo sapien
tattggtgagtgaaacagctaaatg

SEQ ID NO: 549312 - DNA, 25 bp, Homo sapien
gaggctagctatagaaactagaatc

SEQ ID NO: 549313 - DNA, 25 bp, Homo sapien
tcagaggcaagtttttctcggacct

SEQ ID NO: 549314 - DNA, 25 bp, Homo sapien
agtatttcaaaaggaagacctcagc

SEQ ID NO: 549315 - DNA, 25 bp, Homo sapien
aaggaaatgcccaagttactccaca

SEQ ID NO: 549316 - DNA, 25 bp, Homo sapien
gtcttgtggcagcattaagtctcct

SEQ ID NO: 549317 - DNA, 25 bp, Homo sapien
gccggtttctatgtcagcagtgtga

SEQ ID NO: 549318 - DNA, 25 bp, Homo sapien
tggattctgacagttggtgcaaggg

SEQ ID NO: 549319 - DNA, 25 bp, Homo sapien
cctttctgaggtcgtgtgtcttctg

SEQ ID NO: 549320 - DNA, 25 bp, Homo sapien
taatgtaaaccaagtgttgagaaag

SEQ ID NO: 549321 - DNA, 25 bp, Homo sapien
gatgtcgctgaagtttttaaactgg

SEQ ID NO: 549322 - DNA, 25 bp, Homo sapien
ggtccccagtgatctggatgtcgct

SEQ ID NO: 549323 - DNA, 25 bp, Homo sapien
tgattccaccatttaggtgggtgtg

SEQ ID NO: 549324 - DNA, 25 bp, Homo sapien
ttttccacagacgttgggccagaga

SEQ ID NO: 549325 - DNA, 25 bp, Homo sapien
tccacagacgttgggccagagacat

SEQ ID NO: 549326 - DNA, 25 bp, Homo sapien
gggccagagacatcagggcacccat

SEQ ID NO: 549327 - DNA, 25 bp, Homo sapien
cttatatagcagacattttttccac

SEQ ID NO: 549328 - DNA, 25 bp, Homo sapien
tgctcgtggcaaagcatttgcttca

SEQ ID NO: 549329 - DNA, 25 bp, Homo sapien
tttagcatcatattctcaaatggac

SEQ ID NO: 549330 - DNA, 25 bp, Homo sapien
tattctcaaatggaccagaaggacc

SEQ ID NO: 549331 - DNA, 25 bp, Homo sapien
tcactgagcacacaaggctgctcgt

SEQ ID NO: 549332 - DNA, 25 bp, Homo sapien
cactgccaatggagttccaagacag

SEQ ID NO: 549333 - DNA, 25 bp, Homo sapien
tgccaatggagttccaagacagagc

SEQ ID NO: 549334 - DNA, 25 bp, Homo sapien
gtccactgccaatggagttccaaga

SEQ ID NO: 549335 - DNA, 25 bp, Homo sapien
atggagttccaagacagagcttctg

SEQ ID NO: 549336 - DNA, 25 bp, Homo sapien
ctttccgaaacaacatattctcagc

SEQ ID NO: 549337 - DNA, 25 bp, Homo sapien
cgaaacaacatattctcagctgcat

SEQ ID NO: 549338 - DNA, 25 bp, Homo sapien
tccgaaacaacatattctcagctgc

SEQ ID NO: 549339 - DNA, 25 bp, Homo sapien
ttccgaaacaacatattctcagctg

SEQ ID NO: 549340 - DNA, 25 bp, Homo sapien
gccagagaagcaatttcctttcctt

SEQ ID NO: 549341 - DNA, 25 bp, Homo sapien
ggctggaagccagagaagcaatttc

SEQ ID NO: 549342 - DNA, 25 bp, Homo sapien
ctggaagccagagaagcaatttcct

SEQ ID NO: 549343 - DNA, 25 bp, Homo sapien
gaagccagagaagcaatttcctttc

SEQ ID NO: 549344 - DNA, 25 bp, Homo sapien
gtggcattatccctggtatttcctt

SEQ ID NO: 549345 - DNA, 25 bp, Homo sapien
tcttttgggtggcattatccctggt

SEQ ID NO: 549346 - DNA, 25 bp, Homo sapien
cgttgtaccatctcaggaattctcc

SEQ ID NO: 549347 - DNA, 25 bp, Homo sapien
ccatcgttgtaccatctcaggaatt

SEQ ID NO: 549348 - DNA, 25 bp, Homo sapien
ctgcatactattggcagcagaggtc

SEQ ID NO: 549349 - DNA, 25 bp, Homo sapien
gaccaattcatatgagagattcaga

SEQ ID NO: 549350 - DNA, 25 bp, Homo sapien
agaatcttcaccacgctggtactgc

SEQ ID NO: 549351 - DNA, 25 bp, Homo sapien
gcagtagccctgtgatttgaccaat

SEQ ID NO: 549352 - DNA, 25 bp, Homo sapien
tcaggctgggatgtaattacagggc

SEQ ID NO: 549353 - DNA, 25 bp, Homo sapien
tgttgtccaacagaattaggcagga

SEQ ID NO: 549354 - DNA, 25 bp, Homo sapien
atgactgtaagcatagatcaggctg

SEQ ID NO: 549355 - DNA, 25 bp, Homo sapien
tgtccaacagaattaggcaggaagc

SEQ ID NO: 549356 - DNA, 25 bp, Homo sapien
tttcagaaattcatacacctggcag

SEQ ID NO: 549357 - DNA, 25 bp, Homo sapien
ctgcgctactaaaggctttttcaga

SEQ ID NO: 549358 - DNA, 25 bp, Homo sapien
agaaattcatacacctggcagatga

SEQ ID NO: 549359 - DNA, 25 bp, Homo sapien
ctctgcgctactaaaggctttttca

SEQ ID NO: 549360 - DNA, 25 bp, Homo sapien
tggcatctcggtttattattacatg

SEQ ID NO: 549361 - DNA, 25 bp, Homo sapien
gcatctcggtttattattacatgct

SEQ ID NO: 549362 - DNA, 25 bp, Homo sapien
tttggcatctcggtttattattaca

SEQ ID NO: 549363 - DNA, 25 bp, Homo sapien
aattttggcatctcggtttattatt

SEQ ID NO: 549364 - DNA, 25 bp, Homo sapien
tcattccagatctgatggagggaac

SEQ ID NO: 549365 - DNA, 25 bp, Homo sapien
ttttgagatgagcattctggttgtt

SEQ ID NO: 549366 - DNA, 25 bp, Homo sapien
gagggaactgtcctttacttagaga

SEQ ID NO: 549367 - DNA, 25 bp, Homo sapien
ttacttagagatcctgaattttgag

SEQ ID NO: 549368 - DNA, 25 bp, Homo sapien
cactatggttttgtggttgggcaaa

SEQ ID NO: 549369 - DNA, 25 bp, Homo sapien
aagtgttgacttccaccattaaagg

SEQ ID NO: 549370 - DNA, 25 bp, Homo sapien
taaagggtctagagcttctgcctcc

SEQ ID NO: 549371 - DNA, 25 bp, Homo sapien
tactgctgctattggaaccatcatt

SEQ ID NO: 549372 - DNA, 25 bp, Homo sapien
taaggattgcttattgtaattgcca

SEQ ID NO: 549373 - DNA, 25 bp, Homo sapien
gactcaagttgtcatccccatcgga

SEQ ID NO: 549374 - DNA, 25 bp, Homo sapien
ttccattatagccatgcccactgtc

SEQ ID NO: 549375 - DNA, 25 bp, Homo sapien
caaaatccttgtagtttcaaccacg

SEQ ID NO: 549376 - DNA, 25 bp, Homo sapien
catgtaggcatggtcatcagaggtt

SEQ ID NO: 549377 - DNA, 25 bp, Homo sapien
tttacagttaagcaggcccctggtg

SEQ ID NO: 549378 - DNA, 25 bp, Homo sapien
atcagaggttacagaagcagagccc

SEQ ID NO: 549379 - DNA, 25 bp, Homo sapien
taaagcgcaaccttcaaacagatga

SEQ ID NO: 549380 - DNA, 25 bp, Homo sapien
ctggtgatgctgtttgggcccgcat

SEQ ID NO: 549381 - DNA, 25 bp, Homo sapien
gatgtgcttatcttgtcgtcctccg

SEQ ID NO: 549382 - DNA, 25 bp, Homo sapien
gtcctccgtcgggtagaagctcttc

SEQ ID NO: 549383 - DNA, 25 bp, Homo sapien
ctgtgacagtatttcccaaaaggga

SEQ ID NO: 549384 - DNA, 25 bp, Homo sapien
tgaatcttccaaaattgtctctaaa

SEQ ID NO: 549385 - DNA, 25 bp, Homo sapien
aatgcatcacaccacatggcaggac

SEQ ID NO: 549386 - DNA, 25 bp, Homo sapien
ttggggagattgtttcggccaagat

SEQ ID NO: 549387 - DNA, 25 bp, Homo sapien
gggagattgtttcggccaagataca

SEQ ID NO: 549388 - DNA, 25 bp, Homo sapien
tagtttcataaggaatgtaccagct

SEQ ID NO: 549389 - DNA, 25 bp, Homo sapien
gaatagtttcataaggaatgtacca

SEQ ID NO: 549390 - DNA, 25 bp, Homo sapien
gtttcataaggaatgtaccagctcc

SEQ ID NO: 549391 - DNA, 25 bp, Homo sapien
ttttgttgtaggttctgtttatatg

SEQ ID NO: 549392 - DNA, 25 bp, Homo sapien
tccatcacaaatccatcgttgatcc

SEQ ID NO: 549393 - DNA, 25 bp, Homo sapien
caggctgcaagaatctcccaatttc

SEQ ID NO: 549394 - DNA, 25 bp, Homo sapien
aaatccatcgttgatcctggatgca

SEQ ID NO: 549395 - DNA, 25 bp, Homo sapien
agaatctcccaatttcgtccatcac

SEQ ID NO: 549396 - DNA, 25 bp, Homo sapien
agtgaagttgatgcaccagtcactc

SEQ ID NO: 549397 - DNA, 25 bp, Homo sapien
gattctgtggtaaaagaaagctcag

SEQ ID NO: 549398 - DNA, 25 bp, Homo sapien
ttagattctgtggtaaaagaaagct

SEQ ID NO: 549399 - DNA, 25 bp, Homo sapien
aaagaaagctcagtgaagttgatgc

SEQ ID NO: 549400 - DNA, 25 bp, Homo sapien
taggtatactctagcccacactaca

SEQ ID NO: 549401 - DNA, 25 bp, Homo sapien
actacactgccaagtcgtgttttgg

SEQ ID NO: 549402 - DNA, 25 bp, Homo sapien
caagttcaccaggactctccttttt

SEQ ID NO: 549403 - DNA, 25 bp, Homo sapien
ccaaaaactatctccaatccatagg

SEQ ID NO: 549404 - DNA, 25 bp, Homo sapien
caaaagcagcttggccatttctctc

SEQ ID NO: 549405 - DNA, 25 bp, Homo sapien
cttgattgttaaccccttgctggaa

SEQ ID NO: 549406 - DNA, 25 bp, Homo sapien
gaactcctactttccttgattgtta

SEQ ID NO: 549407 - DNA, 25 bp, Homo sapien
ttccttgattgttaaccccttgctg

SEQ ID NO: 549408 - DNA, 25 bp, Homo sapien
ttcaactctcccaatgggcctctct

SEQ ID NO: 549409 - DNA, 25 bp, Homo sapien
attcaactctcccaatgggcctctc

SEQ ID NO: 549410 - DNA, 25 bp, Homo sapien
agcaaaccagtgatgcacaactcac

SEQ ID NO: 549411 - DNA, 25 bp, Homo sapien
ccagtgatgcacaactcacttttat

SEQ ID NO: 549412 - DNA, 25 bp, Homo sapien
ttgatatggtttcaaaaaccacagc

SEQ ID NO: 549413 - DNA, 25 bp, Homo sapien
acacaggcagtttgatatggtttca

SEQ ID NO: 549414 - DNA, 25 bp, Homo sapien
gttatgtaaccatagaacaactgtg

SEQ ID NO: 549415 - DNA, 25 bp, Homo sapien
ccttctcagttgttgttatgtaacc

SEQ ID NO: 549416 - DNA, 25 bp, Homo sapien
cagttgttgttatgtaaccatagaa

SEQ ID NO: 549417 - DNA, 25 bp, Homo sapien
ccatagaacaactgtgctaaagccc

SEQ ID NO: 549418 - DNA, 25 bp, Homo sapien
tcagtttccatcatgccaaaatctg

SEQ ID NO: 549419 - DNA, 25 bp, Homo sapien
ctcagtttccatcatgccaaaatct

SEQ ID NO: 549420 - DNA, 25 bp, Homo sapien
cagtttccatcatgccaaaatctgt

SEQ ID NO: 549421 - DNA, 25 bp, Homo sapien
gctcagtttccatcatgccaaaatc

SEQ ID NO: 549422 - DNA, 25 bp, Homo sapien
gctatacggtagaggatgtcaaacc

SEQ ID NO: 549423 - DNA, 25 bp, Homo sapien
ccactgcagaagataggcattgcta

SEQ ID NO: 549424 - DNA, 25 bp, Homo sapien
cgtgtgtagacataaattcggctgc

SEQ ID NO: 549425 - DNA, 25 bp, Homo sapien
gactttgaactggtacatgtgccaa

SEQ ID NO: 549426 - DNA, 25 bp, Homo sapien
gtttatctagttattagtctattga

SEQ ID NO: 549427 - DNA, 25 bp, Homo sapien
ttctgctacctttggggttacattg

SEQ ID NO: 549428 - DNA, 25 bp, Homo sapien
ctacctttggggttacattgttctg

SEQ ID NO: 549429 - DNA, 25 bp, Homo sapien
tctagttattagtctattgatcttg

SEQ ID NO: 549430 - DNA, 25 bp, Homo sapien
gactggtccaattgttgcgttatta

SEQ ID NO: 549431 - DNA, 25 bp, Homo sapien
gctgaagtgactggtccaattgttg

SEQ ID NO: 549432 - DNA, 25 bp, Homo sapien
ctgtatcacattcttgatccacatt

SEQ ID NO: 549433 - DNA, 25 bp, Homo sapien
agtgactggtccaattgttgcgtta

SEQ ID NO: 549434 - DNA, 25 bp, Homo sapien
ctctgtttttagcaccttcgttggt

SEQ ID NO: 549435 - DNA, 25 bp, Homo sapien
gaccctttgtctttacttccgtgca

SEQ ID NO: 549436 - DNA, 25 bp, Homo sapien
agcaccttcgttggttcttgaccct

SEQ ID NO: 549437 - DNA, 25 bp, Homo sapien
tgaccctttgtctttacttccgtgc

SEQ ID NO: 549438 - DNA, 25 bp, Homo sapien
caatttagcactctccccattattg

SEQ ID NO: 549439 - DNA, 25 bp, Homo sapien
atagtcatgggagttggatacacaa

SEQ ID NO: 549440 - DNA, 25 bp, Homo sapien
taaccaggtcagtctttgccaccct

SEQ ID NO: 549441 - DNA, 25 bp, Homo sapien
tattcttccagtaaccaggtcagtc

SEQ ID NO: 549442 - DNA, 25 bp, Homo sapien
atataggactggttgttgcttttgc

SEQ ID NO: 549443 - DNA, 25 bp, Homo sapien
atattctgcatataggactggttgt

SEQ ID NO: 549444 - DNA, 25 bp, Homo sapien
caacctgcttctgcctagtatgact

SEQ ID NO: 549445 - DNA, 25 bp, Homo sapien
tgcaacctgcttctgcctagtatga

SEQ ID NO: 549446 - DNA, 25 bp, Homo sapien
agagtgccagtgtttagatgccatt

SEQ ID NO: 549447 - DNA, 25 bp, Homo sapien
cagccggttgctgtgaaatcaggaa

SEQ ID NO: 549448 - DNA, 25 bp, Homo sapien
gcagccggttgctgtgaaatcagga

SEQ ID NO: 549449 - DNA, 25 bp, Homo sapien
agatgccattcatagcagccggttg

SEQ ID NO: 549450 - DNA, 25 bp, Homo sapien
aagttgcaattgtggatctctcctg

SEQ ID NO: 549451 - DNA, 25 bp, Homo sapien
ttcccaggtgaggattacaatcaag

SEQ ID NO: 549452 - DNA, 25 bp, Homo sapien
tctcctgtgtaagagcaaatacgga

SEQ ID NO: 549453 - DNA, 25 bp, Homo sapien
aatgaatcgaattgagtaaagctcc

SEQ ID NO: 549454 - DNA, 25 bp, Homo sapien
gactgctggtgccatcaaggaaaag

SEQ ID NO: 549455 - DNA, 25 bp, Homo sapien
tgaggttcaatgtaagaatcagggc

SEQ ID NO: 549456 - DNA, 25 bp, Homo sapien
tttgtgaagatagctgaggccgtga

SEQ ID NO: 549457 - DNA, 25 bp, Homo sapien
ttcctccacatgaaggttacaaaga

SEQ ID NO: 549458 - DNA, 25 bp, Homo sapien
tagcagttcttacttccagcagttg

SEQ ID NO: 549459 - DNA, 25 bp, Homo sapien
tctcctggcagtaaggtgatacgtg

SEQ ID NO: 549460 - DNA, 25 bp, Homo sapien
tactacctggcattactccatgggc

SEQ ID NO: 549461 - DNA, 25 bp, Homo sapien
gagtcagtaccagtctacagataag

SEQ ID NO: 549462 - DNA, 25 bp, Homo sapien
aaacaaccatctactgcacaggcac

SEQ ID NO: 549463 - DNA, 25 bp, Homo sapien
catctactgcacaggcacctttgaa

SEQ ID NO: 549464 - DNA, 25 bp, Homo sapien
aaaaaacaaccatctactgcacagg

SEQ ID NO: 549465 - DNA, 25 bp, Homo sapien
accatctactgcacaggcacctttg

SEQ ID NO: 549466 - DNA, 25 bp, Homo sapien
taaatagtcaatactcaaagttttg

SEQ ID NO: 549467 - DNA, 25 bp, Homo sapien
taagataaatagtcaatactcaaag

SEQ ID NO: 549468 - DNA, 25 bp, Homo sapien
gataaatagtcaatactcaaagttt

SEQ ID NO: 549469 - DNA, 25 bp, Homo sapien
tagtcaatactcaaagttttgttta

SEQ ID NO: 549470 - DNA, 25 bp, Homo sapien
ctggtgactgaactctcctacccga

SEQ ID NO: 549471 - DNA, 25 bp, Homo sapien
gatttgttcgaggaacagataaggg

SEQ ID NO: 549472 - DNA, 25 bp, Homo sapien
tcaaatctgcatataatcggatttg

SEQ ID NO: 549473 - DNA, 25 bp, Homo sapien
ctacccgatggaggactagctgaga

SEQ ID NO: 549474 - DNA, 25 bp, Homo sapien
cagatgactttgtccttcagaagga

SEQ ID NO: 549475 - DNA, 25 bp, Homo sapien
ggagtcaacctgcagaccttcacaa

SEQ ID NO: 549476 - DNA, 25 bp, Homo sapien
ccctgggaactctaaatcaatgaca

SEQ ID NO: 549477 - DNA, 25 bp, Homo sapien
tacaggatggcacaacttgagaaaa

SEQ ID NO: 549478 - DNA, 25 bp, Homo sapien
ccctgattttggtagccaggcctgt

SEQ ID NO: 549479 - DNA, 25 bp, Homo sapien
aagacactggtgcatacatacttcg

SEQ ID NO: 549480 - DNA, 25 bp, Homo sapien
ctagaaaacttctcagtatgctcaa

SEQ ID NO: 549481 - DNA, 25 bp, Homo sapien
gccaagatatctgtcctagaaaact

SEQ ID NO: 549482 - DNA, 25 bp, Homo sapien
tgtctctgtctacgctctataggtg

SEQ ID NO: 549483 - DNA, 25 bp, Homo sapien
gcacagctcctgtaagtccaattcg

SEQ ID NO: 549484 - DNA, 25 bp, Homo sapien
tataggtgtcacaccaaagaccaac

SEQ ID NO: 549485 - DNA, 25 bp, Homo sapien
tccacatggagaggtctcatctggt

SEQ ID NO: 549486 - DNA, 25 bp, Homo sapien
ttttgaagctgctatggccatgtgc

SEQ ID NO: 549487 - DNA, 25 bp, Homo sapien
aataatgatttttgaagctgctatg

SEQ ID NO: 549488 - DNA, 25 bp, Homo sapien
tgatttttgaagctgctatggccat

SEQ ID NO: 549489 - DNA, 25 bp, Homo sapien
cttctggcctcaataatgatttttg

SEQ ID NO: 549490 - DNA, 25 bp, Homo sapien
agataacatagtgggatattataag

SEQ ID NO: 549491 - DNA, 25 bp, Homo sapien
cccggccttggacttatatctaaat

SEQ ID NO: 549492 - DNA, 25 bp, Homo sapien
tttagaagataacatagtgggatat

SEQ ID NO: 549493 - DNA, 25 bp, Homo sapien
tatgaaattagatcaataaagcttt

SEQ ID NO: 549494 - DNA, 25 bp, Homo sapien
taccagctttggatagaggtgccac

SEQ ID NO: 549495 - DNA, 25 bp, Homo sapien
tacctgctgagatctacttggccag

SEQ ID NO: 549496 - DNA, 25 bp, Homo sapien
ggtgccacaccgtacttacacatgg

SEQ ID NO: 549497 - DNA, 25 bp, Homo sapien
ctgtaggctttaggcatgcagacca

SEQ ID NO: 549498 - DNA, 25 bp, Homo sapien
tttgtgattatcctgtgtagactcg

SEQ ID NO: 549499 - DNA, 25 bp, Homo sapien
tagactcgttatatacagtctcagt

SEQ ID NO: 549500 - DNA, 25 bp, Homo sapien
atccataacccggaggggtgcaggt

SEQ ID NO: 549501 - DNA, 25 bp, Homo sapien
gcaggtgacccccatcagggatttg

SEQ ID NO: 549502 - DNA, 25 bp, Homo sapien
atggattcataactttctgttgctc

SEQ ID NO: 549503 - DNA, 25 bp, Homo sapien
tggattcataactttctgttgctca

SEQ ID NO: 549504 - DNA, 25 bp, Homo sapien
catttcctcctgcattcattcctat

SEQ ID NO: 549505 - DNA, 25 bp, Homo sapien
ttcctcctgcattcattcctataaa

SEQ ID NO: 549506 - DNA, 25 bp, Homo sapien
ctcctgcattcattcctataaactc

SEQ ID NO: 549507 - DNA, 25 bp, Homo sapien
tgtcatttcctcctgcattcattcc

SEQ ID NO: 549508 - DNA, 25 bp, Homo sapien
atcttccagaggtagtacttccctg

SEQ ID NO: 549509 - DNA, 25 bp, Homo sapien
tcattgcatcttccagaggtagtac

SEQ ID NO: 549510 - DNA, 25 bp, Homo sapien
tgctgatagcttgatttggggcttc

SEQ ID NO: 549511 - DNA, 25 bp, Homo sapien
aagtaatacagagccgccagaagcc

SEQ ID NO: 549512 - DNA, 25 bp, Homo sapien
ctgttggtttctgcttgagaggcct

SEQ ID NO: 549513 - DNA, 25 bp, Homo sapien
gcttgagaggcctaatttgcttctt

SEQ ID NO: 549514 - DNA, 25 bp, Homo sapien
tcttccatggcaggaaacaaaggtc

SEQ ID NO: 549515 - DNA, 25 bp, Homo sapien
ttccatggcaggaaacaaaggtcat

SEQ ID NO: 549516 - DNA, 25 bp, Homo sapien
gaggaatcacactcaaatgtcagca

SEQ ID NO: 549517 - DNA, 25 bp, Homo sapien
ggaatcacactcaaatgtcagcatg

SEQ ID NO: 549518 - DNA, 25 bp, Homo sapien
aaattgaggaatcacactcaaatgt

SEQ ID NO: 549519 - DNA, 25 bp, Homo sapien
ttgaggaatcacactcaaatgtcag

SEQ ID NO: 549520 - DNA, 25 bp, Homo sapien
tgtctgcataacaaggcaacctttg

SEQ ID NO: 549521 - DNA, 25 bp, Homo sapien
gctgcgataatttgactctaccacc

SEQ ID NO: 549522 - DNA, 25 bp, Homo sapien
catttcttctcctcacgctgcgata

SEQ ID NO: 549523 - DNA, 25 bp, Homo sapien
tctttctatagctcaggatgtgata

SEQ ID NO: 549524 - DNA, 25 bp, Homo sapien
tggctattttcatcattctgtctct

SEQ ID NO: 549525 - DNA, 25 bp, Homo sapien
ttagtggctattttcatcattctgt

SEQ ID NO: 549526 - DNA, 25 bp, Homo sapien
ttctgtctctctgcttccatttgcc

SEQ ID NO: 549527 - DNA, 25 bp, Homo sapien
tagtggctattttcatcattctgtc

SEQ ID NO: 549528 - DNA, 25 bp, Homo sapien
taaatcggacttgcaaacacagaaa

SEQ ID NO: 549529 - DNA, 25 bp, Homo sapien
gaagacctaagaccttgatcgtaag

SEQ ID NO: 549530 - DNA, 25 bp, Homo sapien
caagatcctaactgatatgatgaca

SEQ ID NO: 549531 - DNA, 25 bp, Homo sapien
gatatgatgacagaacatcaagaag

SEQ ID NO: 549532 - DNA, 25 bp, Homo sapien
gaggtttctgcacattattccctgc

SEQ ID NO: 549533 - DNA, 25 bp, Homo sapien
ttggccagaggtttctgcacattat

SEQ ID NO: 549534 - DNA, 25 bp, Homo sapien
ccctgcagggtgattaggtaatgtt

SEQ ID NO: 549535 - DNA, 25 bp, Homo sapien
agggtgattaggtaatgtttctggc

SEQ ID NO: 549536 - DNA, 25 bp, Homo sapien
ccagtaaatgcaatttagcatattg

SEQ ID NO: 549537 - DNA, 25 bp, Homo sapien
tagagtgcggtatgccagtaaatgc

SEQ ID NO: 549538 - DNA, 25 bp, Homo sapien
tattgtcttcgattaacgcttccca

SEQ ID NO: 549539 - DNA, 25 bp, Homo sapien
gttacatcattttctagagtgcggt

SEQ ID NO: 549540 - DNA, 25 bp, Homo sapien
gagatctccttgaaacagtgacaac

SEQ ID NO: 549541 - DNA, 25 bp, Homo sapien
tcctctttcgtatctccactttgtt

SEQ ID NO: 549542 - DNA, 25 bp, Homo sapien
ttcctttcatcgcgtatttcctctt

SEQ ID NO: 549543 - DNA, 25 bp, Homo sapien
acagtgacaactgattcctttcatc

SEQ ID NO: 549544 - DNA, 25 bp, Homo sapien
cttctctttcactgtactttcatgt

SEQ ID NO: 549545 - DNA, 25 bp, Homo sapien
ctctttcactgtactttcatgtgat

SEQ ID NO: 549546 - DNA, 25 bp, Homo sapien
tcactgtactttcatgtgattctct

SEQ ID NO: 549547 - DNA, 25 bp, Homo sapien
ctttcatgtgattctctgatcaaca

SEQ ID NO: 549548 - DNA, 25 bp, Homo sapien
cctcctttctttgtgacgggccatt

SEQ ID NO: 549549 - DNA, 25 bp, Homo sapien
cataacacttctccattgttgatat

SEQ ID NO: 549550 - DNA, 25 bp, Homo sapien
tttgtgacgggccattttcaatgtc

SEQ ID NO: 549551 - DNA, 25 bp, Homo sapien
acataacacttctccattgttgata

SEQ ID NO: 549552 - DNA, 25 bp, Homo sapien
cttgttgctctacagtacctgatgc

SEQ ID NO: 549553 - DNA, 25 bp, Homo sapien
tgctctacagtacctgatgctttta

SEQ ID NO: 549554 - DNA, 25 bp, Homo sapien
cagtacctgatgcttttagtgtgct

SEQ ID NO: 549555 - DNA, 25 bp, Homo sapien
tacctgatgcttttagtgtgctcct

SEQ ID NO: 549556 - DNA, 25 bp, Homo sapien
tattttctgaatatacgttctgggt

SEQ ID NO: 549557 - DNA, 25 bp, Homo sapien
tttctgaatatacgttctgggtaaa

SEQ ID NO: 549558 - DNA, 25 bp, Homo sapien
ttctgaatatacgttctgggtaaag

SEQ ID NO: 549559 - DNA, 25 bp, Homo sapien
ttttctgaatatacgttctgggtaa

SEQ ID NO: 549560 - DNA, 25 bp, Homo sapien
attactccactactacatgcttccg

SEQ ID NO: 549561 - DNA, 25 bp, Homo sapien
ctggagtagccgcaaccttaagtct

SEQ ID NO: 549562 - DNA, 25 bp, Homo sapien
cactactacatgcttccgtaactgg

SEQ ID NO: 549563 - DNA, 25 bp, Homo sapien
cttccgtaactggagtagccgcaac

SEQ ID NO: 549564 - DNA, 25 bp, Homo sapien
cacttccctccttactcctaagact

SEQ ID NO: 549565 - DNA, 25 bp, Homo sapien
cttctatcttcggtattgctacaat

SEQ ID NO: 549566 - DNA, 25 bp, Homo sapien
tattgctacaataattcctgagtcc

SEQ ID NO: 549567 - DNA, 25 bp, Homo sapien
tcttcggtattgctacaataattcc

SEQ ID NO: 549568 - DNA, 25 bp, Homo sapien
caattctcctaggaggtgaatttgt

SEQ ID NO: 549569 - DNA, 25 bp, Homo sapien
ttctcctaggaggtgaatttgtttc

SEQ ID NO: 549570 - DNA, 25 bp, Homo sapien
attctcctaggaggtgaatttgttt

SEQ ID NO: 549571 - DNA, 25 bp, Homo sapien
aattctcctaggaggtgaatttgtt

SEQ ID NO: 549572 - DNA, 25 bp, Homo sapien
tacatgtgacattggctctggcgtc

SEQ ID NO: 549573 - DNA, 25 bp, Homo sapien
gacattggctctggcgtcaagcagt

SEQ ID NO: 549574 - DNA, 25 bp, Homo sapien
ctaataaagacctaatacatgtgac

SEQ ID NO: 549575 - DNA, 25 bp, Homo sapien
ctctggcgtcaagcagtaagaaaag

SEQ ID NO: 549576 - DNA, 25 bp, Homo sapien
gtatatgtgtattctgatgtaactt

SEQ ID NO: 549577 - DNA, 25 bp, Homo sapien
cttttaacttggtatatgtgtattc

SEQ ID NO: 549578 - DNA, 25 bp, Homo sapien
tattctgatgtaactttgacaatat

SEQ ID NO: 549579 - DNA, 25 bp, Homo sapien
tgtgtattctgatgtaactttgaca

SEQ ID NO: 549580 - DNA, 25 bp, Homo sapien
gtattttcttctgtgtagctgccag

SEQ ID NO: 549581 - DNA, 25 bp, Homo sapien
ttctgtgtagctgccagggctttca

SEQ ID NO: 549582 - DNA, 25 bp, Homo sapien
cttctgtgtagctgccagggctttc

SEQ ID NO: 549583 - DNA, 25 bp, Homo sapien
atttgtattttcttctgtgtagctg

SEQ ID NO: 549584 - DNA, 25 bp, Homo sapien
gatgtcctcttggtaaagccagtcc

SEQ ID NO: 549585 - DNA, 25 bp, Homo sapien
tcaggatgtcctcttggtaaagcca

SEQ ID NO: 549586 - DNA, 25 bp, Homo sapien
tgtcctcttggtaaagccagtccat

SEQ ID NO: 549587 - DNA, 25 bp, Homo sapien
caggatgtcctcttggtaaagccag

SEQ ID NO: 549588 - DNA, 25 bp, Homo sapien
acagctttgtggagattatccaaat

SEQ ID NO: 549589 - DNA, 25 bp, Homo sapien
gctttgtggagattatccaaatcca

SEQ ID NO: 549590 - DNA, 25 bp, Homo sapien
agctttgtggagattatccaaatcc

SEQ ID NO: 549591 - DNA, 25 bp, Homo sapien
cagctttgtggagattatccaaatc

SEQ ID NO: 549592 - DNA, 25 bp, Homo sapien
taataactggatcttggcataacaa

SEQ ID NO: 549593 - DNA, 25 bp, Homo sapien
gaagtccttgaaatgctcagacttg

SEQ ID NO: 549594 - DNA, 25 bp, Homo sapien
gacttgaaataatctactgtgattt

SEQ ID NO: 549595 - DNA, 25 bp, Homo sapien
caattaagcttgtctgttgtgactg

SEQ ID NO: 549596 - DNA, 25 bp, Homo sapien
gagtccctgaactctcgctttcttt

SEQ ID NO: 549597 - DNA, 25 bp, Homo sapien
cagagtccctgaactctcgctttct

SEQ ID NO: 549598 - DNA, 25 bp, Homo sapien
tttttaatcccctgcatcggatcac

SEQ ID NO: 549599 - DNA, 25 bp, Homo sapien
tctttttaatcccctgcatcggatc

SEQ ID NO: 549600 - DNA, 25 bp, Homo sapien
catgtcagacgcagccgtagacgcc

SEQ ID NO: 549601 - DNA, 25 bp, Homo sapien
atgtcagacgcagccgtagacgcca

SEQ ID NO: 549602 - DNA, 25 bp, Homo sapien
tgtcagacgcagccgtagacgccag

SEQ ID NO: 549603 - DNA, 25 bp, Homo sapien
aggaagaggatggagatgaagatga

SEQ ID NO: 549604 - DNA, 25 bp, Homo sapien
aagaggatggagatgaagatgagga

SEQ ID NO: 549605 - DNA, 25 bp, Homo sapien
gaagaagaaggtgatggtgaggaag

SEQ ID NO: 549606 - DNA, 25 bp, Homo sapien
ggaagaagaaggtgatggtgaggaa

SEQ ID NO: 549607 - DNA, 25 bp, Homo sapien
caagaagcagaagaccgacgaggat

SEQ ID NO: 549608 - DNA, 25 bp, Homo sapien
atgaggatgacgatgtcgataccaa

SEQ ID NO: 549609 - DNA, 25 bp, Homo sapien
gaggatgacgatgtcgataccaaga

SEQ ID NO: 549610 - DNA, 25 bp, Homo sapien
ggatgacgatgtcgataccaagaag

SEQ ID NO: 549611 - DNA, 25 bp, Homo sapien
agttggtttgtatgagatggttaaa

SEQ ID NO: 549612 - DNA, 25 bp, Homo sapien
tttgtatgagatggttaaaaaggcc

SEQ ID NO: 549613 - DNA, 25 bp, Homo sapien
gagatggttaaaaaggccaaagata

SEQ ID NO: 549614 - DNA, 25 bp, Homo sapien
tatgagatggttaaaaaggccaaag

SEQ ID NO: 549615 - DNA, 25 bp, Homo sapien
tatttgagttcattattatctggaa

SEQ ID NO: 549616 - DNA, 25 bp, Homo sapien
ttatttgagttcattattatctgga

SEQ ID NO: 549617 - DNA, 25 bp, Homo sapien
gagcctctccaatatgctgaaacaa

SEQ ID NO: 549618 - DNA, 25 bp, Homo sapien
caacaactcctttttcgtcatatct

SEQ ID NO: 549619 - DNA, 25 bp, Homo sapien
tctgcccatctacaaactcagtgat

SEQ ID NO: 549620 - DNA, 25 bp, Homo sapien
tacaaactcagtgatacgagcctct

SEQ ID NO: 549621 - DNA, 25 bp, Homo sapien
tgtatgactttatgctcaagaatgc

SEQ ID NO: 549622 - DNA, 25 bp, Homo sapien
ctttatgctcaagaatgctttcagc

SEQ ID NO: 549623 - DNA, 25 bp, Homo sapien
aggtgtatgactttatgctcaagaa

SEQ ID NO: 549624 - DNA, 25 bp, Homo sapien
gactttatgctcaagaatgctttca

SEQ ID NO: 549625 - DNA, 25 bp, Homo sapien
ttctacatctaaattcaaaaatgca

SEQ ID NO: 549626 - DNA, 25 bp, Homo sapien
tacaacctccgaagaattccatttg

SEQ ID NO: 549627 - DNA, 25 bp, Homo sapien
catctaaattcaaaaatgcaaccat

SEQ ID NO: 549628 - DNA, 25 bp, Homo sapien
ccatttgcacacctacaaattgagg

SEQ ID NO: 549629 - DNA, 25 bp, Homo sapien
ggaaccacttctgatcattggcacc

SEQ ID NO: 549630 - DNA, 25 bp, Homo sapien
ttgttgatgtagtctttcaagctgc

SEQ ID NO: 549631 - DNA, 25 bp, Homo sapien
ttttgttgatgtagtctttcaagct

SEQ ID NO: 549632 - DNA, 25 bp, Homo sapien
atgggccttgggggaaccacttctg

SEQ ID NO: 549633 - DNA, 25 bp, Homo sapien
ccctttgaaggtcagctatacttaa

SEQ ID NO: 549634 - DNA, 25 bp, Homo sapien
ttgaaggtcagctatacttaaagta

SEQ ID NO: 549635 - DNA, 25 bp, Homo sapien
ctttgaaggtcagctatacttaaag

SEQ ID NO: 549636 - DNA, 25 bp, Homo sapien
tgaaggtcagctatacttaaagtat

SEQ ID NO: 549637 - DNA, 25 bp, Homo sapien
ctctttgatttgcctgagttgagag

SEQ ID NO: 549638 - DNA, 25 bp, Homo sapien
ttgatttgcctgagttgagagtaac

SEQ ID NO: 549639 - DNA, 25 bp, Homo sapien
ctttgatttgcctgagttgagagta

SEQ ID NO: 549640 - DNA, 25 bp, Homo sapien
tgatttgcctgagttgagagtaacc

SEQ ID NO: 549641 - DNA, 25 bp, Homo sapien
ttcctttgtagagaggtcatattcc

SEQ ID NO: 549642 - DNA, 25 bp, Homo sapien
tgtagagaggtcatattcctccagt

SEQ ID NO: 549643 - DNA, 25 bp, Homo sapien
tcctccagtaagaatgaaggatttg

SEQ ID NO: 549644 - DNA, 25 bp, Homo sapien
tattcctccagtaagaatgaaggat

SEQ ID NO: 549645 - DNA, 25 bp, Homo sapien
acagcaacatgtaggaaatgccaca

SEQ ID NO: 549646 - DNA, 25 bp, Homo sapien
tgacagcaacatgtaggaaatgcca

SEQ ID NO: 549647 - DNA, 25 bp, Homo sapien
gacagcaacatgtaggaaatgccac

SEQ ID NO: 549648 - DNA, 25 bp, Homo sapien
cagcaacatgtaggaaatgccacac

SEQ ID NO: 549649 - DNA, 25 bp, Homo sapien
ccacgtcaatgagacacatgagact

SEQ ID NO: 549650 - DNA, 25 bp, Homo sapien
gccacgtcaatgagacacatgagac

SEQ ID NO: 549651 - DNA, 25 bp, Homo sapien
gaattgtgattcagccacgtcaatg

SEQ ID NO: 549652 - DNA, 25 bp, Homo sapien
cagccacgtcaatgagacacatgag

SEQ ID NO: 549653 - DNA, 25 bp, Homo sapien
taggcctccagtatttgagaaagtc

SEQ ID NO: 549654 - DNA, 25 bp, Homo sapien
gtcctccagtatttgagaaaacgtc

SEQ ID NO: 549655 - DNA, 25 bp, Homo sapien
tgtttaccaaacaagaaggcagctt

SEQ ID NO: 549656 - DNA, 25 bp, Homo sapien
caggcctccagtatttgagaaagga

SEQ ID NO: 549657 - DNA, 25 bp, Homo sapien
ttgtctgaagttggtagaaccttcc

SEQ ID NO: 549658 - DNA, 25 bp, Homo sapien
taattgtcacaatggggctgacagc

SEQ ID NO: 549659 - DNA, 25 bp, Homo sapien
tgtcatattgtctgaagttggtaga

SEQ ID NO: 549660 - DNA, 25 bp, Homo sapien
gctgaattggcgaggaggtccacat

SEQ ID NO: 549661 - DNA, 25 bp, Homo sapien
acttcagcctcatggaactttttat

SEQ ID NO: 549662 - DNA, 25 bp, Homo sapien
ttcagcctcatggaactttttatta

SEQ ID NO: 549663 - DNA, 25 bp, Homo sapien
gacttcagcctcatggaacttttta

SEQ ID NO: 549664 - DNA, 25 bp, Homo sapien
ctgacttcagcctcatggaactttt

SEQ ID NO: 549665 - DNA, 25 bp, Homo sapien
tgggtacaattaacctcaagggcta

SEQ ID NO: 549666 - DNA, 25 bp, Homo sapien
ataaattatgatgcttccaattgtc

SEQ ID NO: 549667 - DNA, 25 bp, Homo sapien
tatagcagctatagtatttgggtac

SEQ ID NO: 549668 - DNA, 25 bp, Homo sapien
tggcatgaattataggtatagacac

SEQ ID NO: 549669 - DNA, 25 bp, Homo sapien
taagagatatgtccaccgacaccag

SEQ ID NO: 549670 - DNA, 25 bp, Homo sapien
gataaggttctacttctaagccgtc

SEQ ID NO: 549671 - DNA, 25 bp, Homo sapien
cacttagtgaattgggatgggataa

SEQ ID NO: 549672 - DNA, 25 bp, Homo sapien
ccgacaccagtatttcacttagtga

SEQ ID NO: 549673 - DNA, 25 bp, Homo sapien
tttcatcccttactctctgagtgag

SEQ ID NO: 549674 - DNA, 25 bp, Homo sapien
actctctgagtgagtatttttaggg

SEQ ID NO: 549675 - DNA, 25 bp, Homo sapien
tggtgctctgtctaaagatatcctc

SEQ ID NO: 549676 - DNA, 25 bp, Homo sapien
ggtgctctgtctaaagatatcctct

SEQ ID NO: 549677 - DNA, 25 bp, Homo sapien
tgctctgtctaaagatatcctctgc

SEQ ID NO: 549678 - DNA, 25 bp, Homo sapien
ctggtgctctgtctaaagatatcct

SEQ ID NO: 549679 - DNA, 25 bp, Homo sapien
gagccctgagctgccaaatatgaag

SEQ ID NO: 549680 - DNA, 25 bp, Homo sapien
agccctgagctgccaaatatgaagt

SEQ ID NO: 549681 - DNA, 25 bp, Homo sapien
ccctgagctgccaaatatgaagttc

SEQ ID NO: 549682 - DNA, 25 bp, Homo sapien
gccctgagctgccaaatatgaagtt

SEQ ID NO: 549683 - DNA, 25 bp, Homo sapien
ccaaatagttagttgcatattcaca

SEQ ID NO: 549684 - DNA, 25 bp, Homo sapien
gcagagtcaggatcagcacacccat

SEQ ID NO: 549685 - DNA, 25 bp, Homo sapien
tcacaaacgggcagagtcaggatca

SEQ ID NO: 549686 - DNA, 25 bp, Homo sapien
tagttgcatattcacaaacgggcag

SEQ ID NO: 549687 - DNA, 25 bp, Homo sapien
ggaatctctgaaacatatatggcct

SEQ ID NO: 549688 - DNA, 25 bp, Homo sapien
gaactgaagctcttggtctttccaa

SEQ ID NO: 549689 - DNA, 25 bp, Homo sapien
ggaaaatagccagggaggttagaca

SEQ ID NO: 549690 - DNA, 25 bp, Homo sapien
ggttagacatatgacgactccaagg

SEQ ID NO: 549691 - DNA, 25 bp, Homo sapien
gttgatcggaataccatagagccat

SEQ ID NO: 549692 - DNA, 25 bp, Homo sapien
ctgaaaatgttgatcggaataccat

SEQ ID NO: 549693 - DNA, 25 bp, Homo sapien
catcttctatcgctgatggaatctg

SEQ ID NO: 549694 - DNA, 25 bp, Homo sapien
ctatcgctgatggaatctgaaaatg

SEQ ID NO: 549695 - DNA, 25 bp, Homo sapien
caaattcctctttatatggcttact

SEQ ID NO: 549696 - DNA, 25 bp, Homo sapien
tcctctttatatggcttactcgctg

SEQ ID NO: 549697 - DNA, 25 bp, Homo sapien
tatatggcttactcgctgcaaagta

SEQ ID NO: 549698 - DNA, 25 bp, Homo sapien
ggcttactcgctgcaaagtaataca

SEQ ID NO: 549699 - DNA, 25 bp, Homo sapien
ctgcctgtatcatgcttcccagtcc

SEQ ID NO: 549700 - DNA, 25 bp, Homo sapien
cagtcctccacttctgatacatgtg

SEQ ID NO: 549701 - DNA, 25 bp, Homo sapien
tacatgtgattgcttccccgaataa

SEQ ID NO: 549702 - DNA, 25 bp, Homo sapien
ataagctttgcgaacccaaaccttg

SEQ ID NO: 549703 - DNA, 25 bp, Homo sapien
taccttcaatttcagcacaacttca

SEQ ID NO: 549704 - DNA, 25 bp, Homo sapien
ttggctaccgtcaggtataaatacc

SEQ ID NO: 549705 - DNA, 25 bp, Homo sapien
tgtccaaggtgggttggctaccgtc

SEQ ID NO: 549706 - DNA, 25 bp, Homo sapien
acaacttcaacctgtgagctaggaa

SEQ ID NO: 549707 - DNA, 25 bp, Homo sapien
cataatccagttgcatattagggta

SEQ ID NO: 549708 - DNA, 25 bp, Homo sapien
ggtacagctgcttgttttcataatc

SEQ ID NO: 549709 - DNA, 25 bp, Homo sapien
tctgtagttacatgaccaatcttgt

SEQ ID NO: 549710 - DNA, 25 bp, Homo sapien
tgattgcctatcttgttggtacagc

SEQ ID NO: 549711 - DNA, 25 bp, Homo sapien
atgtttcgcccactggactcacagg

SEQ ID NO: 549712 - DNA, 25 bp, Homo sapien
cagatactctaggttaaaaccccag

SEQ ID NO: 549713 - DNA, 25 bp, Homo sapien
ggacactatttgcttcctagggcta

SEQ ID NO: 549714 - DNA, 25 bp, Homo sapien
tgcaagcaggctaaagtatcagacc

SEQ ID NO: 549715 - DNA, 25 bp, Homo sapien
tgcataagcgcttataactataata

SEQ ID NO: 549716 - DNA, 25 bp, Homo sapien
ctaagtcgcctcaaacgcaacagca

SEQ ID NO: 549717 - DNA, 25 bp, Homo sapien
gacatttcaattaaccctgtgattg

SEQ ID NO: 549718 - DNA, 25 bp, Homo sapien
agtcgcctcaaacgcaacagcatgt

SEQ ID NO: 549719 - DNA, 25 bp, Homo sapien
ccatcttgccatgaaggagcttagt

SEQ ID NO: 549720 - DNA, 25 bp, Homo sapien
tccatcttgccatgaaggagcttag

SEQ ID NO: 549721 - DNA, 25 bp, Homo sapien
ggcctttgatttgctctatctccat

SEQ ID NO: 549722 - DNA, 25 bp, Homo sapien
catctggcctttgatttgctctatc

SEQ ID NO: 549723 - DNA, 25 bp, Homo sapien
ccatttccctgaaattaatctgctc

SEQ ID NO: 549724 - DNA, 25 bp, Homo sapien
aaaccagaatatgcttctccaaagc

SEQ ID NO: 549725 - DNA, 25 bp, Homo sapien
tgaaattaatctgctcaaaaccaga

SEQ ID NO: 549726 - DNA, 25 bp, Homo sapien
gcttctccaaagctattattattca

SEQ ID NO: 549727 - DNA, 25 bp, Homo sapien
tgtataggataaaattgtcatcatg

SEQ ID NO: 549728 - DNA, 25 bp, Homo sapien
gaaatataacgattactgaattaag

SEQ ID NO: 549729 - DNA, 25 bp, Homo sapien
tcatgaccttaacagcctcaaatct

SEQ ID NO: 549730 - DNA, 25 bp, Homo sapien
gcaacattaatgcatgcttaaaaca

SEQ ID NO: 549731 - DNA, 25 bp, Homo sapien
aaagtgaagatatttactccttcta

SEQ ID NO: 549732 - DNA, 25 bp, Homo sapien
cgaaaagcagacatatggagccacg

SEQ ID NO: 549733 - DNA, 25 bp, Homo sapien
gccacggaacagaatagggaaccca

SEQ ID NO: 549734 - DNA, 25 bp, Homo sapien
gcagacatatggagccacggaacag

SEQ ID NO: 549735 - DNA, 25 bp, Homo sapien
tatggagccacggaacagaataggg

SEQ ID NO: 549736 - DNA, 25 bp, Homo sapien
tctgcttttggagggcctcaggctg

SEQ ID NO: 549737 - DNA, 25 bp, Homo sapien
tatgcatttgcatgagtacgtcctt

SEQ ID NO: 549738 - DNA, 25 bp, Homo sapien
taatagaacaggaactcactcatct

SEQ ID NO: 549739 - DNA, 25 bp, Homo sapien
tttaacaacacagttagctctgtgg

SEQ ID NO: 549740 - DNA, 25 bp, Homo sapien
tcaaatagtatcaggtcacgttatg

SEQ ID NO: 549741 - DNA, 25 bp, Homo sapien
taactgtatattatcccttaaatca

SEQ ID NO: 549742 - DNA, 25 bp, Homo sapien
gaaattgctaccattaatttcactt

SEQ ID NO: 549743 - DNA, 25 bp, Homo sapien
tatatactataagcacccaattcat

SEQ ID NO: 549744 - DNA, 25 bp, Homo sapien
cacactggtagcgtagatccactag

SEQ ID NO: 549745 - DNA, 25 bp, Homo sapien
ggtagcgtagatccactagttcttt

SEQ ID NO: 549746 - DNA, 25 bp, Homo sapien
taaccctctcttattgtgtttgaaa

SEQ ID NO: 549747 - DNA, 25 bp, Homo sapien
tgaaaccagtgatagcatcacactg

SEQ ID NO: 549748 - DNA, 25 bp, Homo sapien
ctgttttagatcatctacagtctct

SEQ ID NO: 549749 - DNA, 25 bp, Homo sapien
actgttttagatcatctacagtctc

SEQ ID NO: 549750 - DNA, 25 bp, Homo sapien
caactgttttagatcatctacagtc

SEQ ID NO: 549751 - DNA, 25 bp, Homo sapien
aacaactgttttagatcatctacag

SEQ ID NO: 549752 - DNA, 25 bp, Homo sapien
ggctgttgacgccaccactcaaggt

SEQ ID NO: 549753 - DNA, 25 bp, Homo sapien
cttttcctggctgttgacgccacca

SEQ ID NO: 549754 - DNA, 25 bp, Homo sapien
ggtggttctctccattgaattcttt

SEQ ID NO: 549755 - DNA, 25 bp, Homo sapien
gttgacgccaccactcaaggtggtt

SEQ ID NO: 549756 - DNA, 25 bp, Homo sapien
tgagtaggccctgaacgcacaaatt

SEQ ID NO: 549757 - DNA, 25 bp, Homo sapien
tctgacctactaagccataattggg

SEQ ID NO: 549758 - DNA, 25 bp, Homo sapien
tgccctcaaagtggacagcaagagc

SEQ ID NO: 549759 - DNA, 25 bp, Homo sapien
tatgggccatcaagttaccagacag

SEQ ID NO: 549760 - DNA, 25 bp, Homo sapien
agtttggatggtataacacctttat

SEQ ID NO: 549761 - DNA, 25 bp, Homo sapien
acattcatcacagagtgtagctgaa

SEQ ID NO: 549762 - DNA, 25 bp, Homo sapien
cacagagtgtagctgaagtttggat

SEQ ID NO: 549763 - DNA, 25 bp, Homo sapien
ctgaagtttggatggtataacacct

SEQ ID NO: 549764 - DNA, 25 bp, Homo sapien
tctgatacggttgtaggcaggtcct

SEQ ID NO: 549765 - DNA, 25 bp, Homo sapien
gacgatactgccctatgttgaccta

SEQ ID NO: 549766 - DNA, 25 bp, Homo sapien
ggaggtactccagaagaaagctttg

SEQ ID NO: 549767 - DNA, 25 bp, Homo sapien
gcaggacatttaacataggtagccc

SEQ ID NO: 549768 - DNA, 25 bp, Homo sapien
gatagtcatacttctacagtgatca

SEQ ID NO: 549769 - DNA, 25 bp, Homo sapien
ggtgcaacaggtctcaaaatgtctg

SEQ ID NO: 549770 - DNA, 25 bp, Homo sapien
tctggatattcaccaattaccaaag

SEQ ID NO: 549771 - DNA, 25 bp, Homo sapien
aagtcaatgactctaggtcactttg

SEQ ID NO: 549772 - DNA, 25 bp, Homo sapien
gattgagcattcttgatagcttcca

SEQ ID NO: 549773 - DNA, 25 bp, Homo sapien
catcatctttgattaacgatcccat

SEQ ID NO: 549774 - DNA, 25 bp, Homo sapien
ccagtcttccttgaccctaagaaca

SEQ ID NO: 549775 - DNA, 25 bp, Homo sapien
tggcgaagattgtcagattcagctt

SEQ ID NO: 549776 - DNA, 25 bp, Homo sapien
ccaggcccgtaattctcttgtagca

SEQ ID NO: 549777 - DNA, 25 bp, Homo sapien
tcagtatgtcaagatccaggcccgt

SEQ ID NO: 549778 - DNA, 25 bp, Homo sapien
gggatacttttatgggccccgcaga

SEQ ID NO: 549779 - DNA, 25 bp, Homo sapien
gatttgccaggttgaaaattccacc

SEQ ID NO: 549780 - DNA, 25 bp, Homo sapien
atctccattaagtatgcagttcaca

SEQ ID NO: 549781 - DNA, 25 bp, Homo sapien
tctgcagaatctccattaagtatgc

SEQ ID NO: 549782 - DNA, 25 bp, Homo sapien
ttcagatggatctgcagaatctcca

SEQ ID NO: 549783 - DNA, 25 bp, Homo sapien
gcagttcacataagtgtggtttttt

SEQ ID NO: 549784 - DNA, 25 bp, Homo sapien
tgttatgggaaagagtcctttggtg

SEQ ID NO: 549785 - DNA, 25 bp, Homo sapien
ctgaagatcataagttgccaaacac

SEQ ID NO: 549786 - DNA, 25 bp, Homo sapien
caactttaattgtgcttgttatggg

SEQ ID NO: 549787 - DNA, 25 bp, Homo sapien
gatgctgaagatcataagttgccaa

SEQ ID NO: 549788 - DNA, 25 bp, Homo sapien
tatgttgtcaacagaagtaacaaag

SEQ ID NO: 549789 - DNA, 25 bp, Homo sapien
ttgcctatgttgtcaacagaagtaa

SEQ ID NO: 549790 - DNA, 25 bp, Homo sapien
ttgtcaacagaagtaacaaagatgt

SEQ ID NO: 549791 - DNA, 25 bp, Homo sapien
tcaacagaagtaacaaagatgtgca

SEQ ID NO: 549792 - DNA, 25 bp, Homo sapien
attcattaaattgataggttttggt

SEQ ID NO: 549793 - DNA, 25 bp, Homo sapien
gtgctgaatagccctttttatattc

SEQ ID NO: 549794 - DNA, 25 bp, Homo sapien
tattcattaaattgataggttttgg

SEQ ID NO: 549795 - DNA, 25 bp, Homo sapien
tggtgtcagtcgtttttactagttc

SEQ ID NO: 549796 - DNA, 25 bp, Homo sapien
catttcaggcattcacatttataaa

SEQ ID NO: 549797 - DNA, 25 bp, Homo sapien
gaattttgaatatctgctcttttgc

SEQ ID NO: 549798 - DNA, 25 bp, Homo sapien
gttctttctacatttcaggcattca

SEQ ID NO: 549799 - DNA, 25 bp, Homo sapien
tttgaatatctgctcttttgcagtc

SEQ ID NO: 549800 - DNA, 25 bp, Homo sapien
aaatagagtatagccctaaggtaag

SEQ ID NO: 549801 - DNA, 25 bp, Homo sapien
gttatgaccaattcctagcttattg

SEQ ID NO: 549802 - DNA, 25 bp, Homo sapien
aatcaccttgctttgaactgacaag

SEQ ID NO: 549803 - DNA, 25 bp, Homo sapien
taaggtaagttaccatagatcattc

SEQ ID NO: 549804 - DNA, 25 bp, Homo sapien
gatttgtgtgtaatagggctatcgt

SEQ ID NO: 549805 - DNA, 25 bp, Homo sapien
cggtcagctattgtcccttattatg

SEQ ID NO: 549806 - DNA, 25 bp, Homo sapien
gataacaatgttcttccggtcagct

SEQ ID NO: 549807 - DNA, 25 bp, Homo sapien
tctcttagtaaagagactatcccaa

SEQ ID NO: 549808 - DNA, 25 bp, Homo sapien
ttcaatgtatttacttcccatggcc

SEQ ID NO: 549809 - DNA, 25 bp, Homo sapien
tatatcttcaatgtatttacttccc

SEQ ID NO: 549810 - DNA, 25 bp, Homo sapien
tcttcaatgtatttacttcccatgg

SEQ ID NO: 549811 - DNA, 25 bp, Homo sapien
caatgtatttacttcccatggcccc

SEQ ID NO: 549812 - DNA, 25 bp, Homo sapien
gtgcccacaaaatggtccattagca

SEQ ID NO: 549813 - DNA, 25 bp, Homo sapien
gcccacaaaatggtccattagcagc

SEQ ID NO: 549814 - DNA, 25 bp, Homo sapien
tgcccacaaaatggtccattagcag

SEQ ID NO: 549815 - DNA, 25 bp, Homo sapien
tcatatccaacggaaagcttttccc

SEQ ID NO: 549816 - DNA, 25 bp, Homo sapien
aaataaactgtttgaggatgaaaga

SEQ ID NO: 549817 - DNA, 25 bp, Homo sapien
tgaaaagcatgcattgaagtctggt

SEQ ID NO: 549818 - DNA, 25 bp, Homo sapien
tctccacgactttatatgcttctca

SEQ ID NO: 549819 - DNA, 25 bp, Homo sapien
ccacatgaatcccaggaattaccaa

SEQ ID NO: 549820 - DNA, 25 bp, Homo sapien
tttcagtgaatccttagtccactgg

SEQ ID NO: 549821 - DNA, 25 bp, Homo sapien
gtccactggtggtctgcaagagcca

SEQ ID NO: 549822 - DNA, 25 bp, Homo sapien
gagccagagctctcatgtagacccc

SEQ ID NO: 549823 - DNA, 25 bp, Homo sapien
aataggtctttatcgagtgcacaac

SEQ ID NO: 549824 - DNA, 25 bp, Homo sapien
aataatgaccactctgactgctatg

SEQ ID NO: 549825 - DNA, 25 bp, Homo sapien
gctcttcagtttatttgggtcccgc

SEQ ID NO: 549826 - DNA, 25 bp, Homo sapien
tgttgcctgattactctactggtag

SEQ ID NO: 549827 - DNA, 25 bp, Homo sapien
ttcaaatctggtttattgctttcta

SEQ ID NO: 549828 - DNA, 25 bp, Homo sapien
tcaaatctggtttattgctttctat

SEQ ID NO: 549829 - DNA, 25 bp, Homo sapien
gaactaatttgtgaatcatccttgc

SEQ ID NO: 549830 - DNA, 25 bp, Homo sapien
aaatatggaactaatttgtgaatca

SEQ ID NO: 549831 - DNA, 25 bp, Homo sapien
atatggaactaatttgtgaatcatc

SEQ ID NO: 549832 - DNA, 25 bp, Homo sapien
tgctcaggggtcatactaatctatg

SEQ ID NO: 549833 - DNA, 25 bp, Homo sapien
gtttgtatcatagcggaagtattta

SEQ ID NO: 549834 - DNA, 25 bp, Homo sapien
ttgtatcatagcggaagtatttaat

SEQ ID NO: 549835 - DNA, 25 bp, Homo sapien
gtgtttgtatcatagcggaagtatt

SEQ ID NO: 549836 - DNA, 25 bp, Homo sapien
gtatcatagcggaagtatttaattt

SEQ ID NO: 549837 - DNA, 25 bp, Homo sapien
ctacattaagtgtttcccggtggct

SEQ ID NO: 549838 - DNA, 25 bp, Homo sapien
tccagaatacctttactacattaag

SEQ ID NO: 549839 - DNA, 25 bp, Homo sapien
cgtgtgcggctacatctccagaata

SEQ ID NO: 549840 - DNA, 25 bp, Homo sapien
cggtggctgccaaaatctacagatt

SEQ ID NO: 549841 - DNA, 25 bp, Homo sapien
tttagtttgattacatgctcaccag

SEQ ID NO: 549842 - DNA, 25 bp, Homo sapien
gtttgattacatgctcaccagccat

SEQ ID NO: 549843 - DNA, 25 bp, Homo sapien
agtttgattacatgctcaccagcca

SEQ ID NO: 549844 - DNA, 25 bp, Homo sapien
tagtttgattacatgctcaccagcc

SEQ ID NO: 549845 - DNA, 25 bp, Homo sapien
ttagtaatgttattgcaatcattgc

SEQ ID NO: 549846 - DNA, 25 bp, Homo sapien
tttagtaatgttattgcaatcattg

SEQ ID NO: 549847 - DNA, 25 bp, Homo sapien
catgtctttttccgaataccaatta

SEQ ID NO: 549848 - DNA, 25 bp, Homo sapien
tgtctttttccgaataccaattata

SEQ ID NO: 549849 - DNA, 25 bp, Homo sapien
tcaggatccatgaaaacaccgaaca

SEQ ID NO: 549850 - DNA, 25 bp, Homo sapien
tttttaattaccttcaggatccatg

SEQ ID NO: 549851 - DNA, 25 bp, Homo sapien
gaaaacaccgaacatgaaagagtca

SEQ ID NO: 549852 - DNA, 25 bp, Homo sapien
taattaccttcaggatccatgaaaa

SEQ ID NO: 549853 - DNA, 25 bp, Homo sapien
ggtgttatgcatgacaactggcgca

SEQ ID NO: 549854 - DNA, 25 bp, Homo sapien
gtgttatgcatgacaactggcgcat

SEQ ID NO: 549855 - DNA, 25 bp, Homo sapien
tggtgttatgcatgacaactggcgc

SEQ ID NO: 549856 - DNA, 25 bp, Homo sapien
gaggaagatctaaagtggccccatt

SEQ ID NO: 549857 - DNA, 25 bp, Homo sapien
ggcaagcatgcatagtctctcctct

SEQ ID NO: 549858 - DNA, 25 bp, Homo sapien
tgaaggtgttgcatcctagcctcct

SEQ ID NO: 549859 - DNA, 25 bp, Homo sapien
tatagacttgcaccattctccccag

SEQ ID NO: 549860 - DNA, 25 bp, Homo sapien
tctctggatgagtgttgctttatca

SEQ ID NO: 549861 - DNA, 25 bp, Homo sapien
aagtttgtctctggatgagtgttgc

SEQ ID NO: 549862 - DNA, 25 bp, Homo sapien
taaagtttgtctctggatgagtgtt

SEQ ID NO: 549863 - DNA, 25 bp, Homo sapien
ttgtctctggatgagtgttgcttta

SEQ ID NO: 549864 - DNA, 25 bp, Homo sapien
cagatttggtttcggaagtaagaag

SEQ ID NO: 549865 - DNA, 25 bp, Homo sapien
tcatacagatttggtttcggaagta

SEQ ID NO: 549866 - DNA, 25 bp, Homo sapien
tacagatttggtttcggaagtaaga

SEQ ID NO: 549867 - DNA, 25 bp, Homo sapien
gtgaaagtagggatttgcattttta

SEQ ID NO: 549868 - DNA, 25 bp, Homo sapien
tccacatgctgatttggattcacat

SEQ ID NO: 549869 - DNA, 25 bp, Homo sapien
catgaggttgaaaagtgcttccaca

SEQ ID NO: 549870 - DNA, 25 bp, Homo sapien
ggattcacatcctttgaccctacaa

SEQ ID NO: 549871 - DNA, 25 bp, Homo sapien
tcatgccagaaagcccatgaggttg

SEQ ID NO: 549872 - DNA, 25 bp, Homo sapien
cttcttttatcttattttcttcaca

SEQ ID NO: 549873 - DNA, 25 bp, Homo sapien
tcttttatcttattttcttcacatt

SEQ ID NO: 549874 - DNA, 25 bp, Homo sapien
cttttatcttattttcttcacattg

SEQ ID NO: 549875 - DNA, 25 bp, Homo sapien
ttttatcttattttcttcacattgc

SEQ ID NO: 549876 - DNA, 25 bp, Homo sapien
cacaattttgaatttgttcgtgctc

SEQ ID NO: 549877 - DNA, 25 bp, Homo sapien
tcagattcccagtgtttctcatggg

SEQ ID NO: 549878 - DNA, 25 bp, Homo sapien
aatttgttcgtgctcagattcccag

SEQ ID NO: 549879 - DNA, 25 bp, Homo sapien
ttctcatgggtgtccaaccctaagg

SEQ ID NO: 549880 - DNA, 25 bp, Homo sapien
tgtcctccaagggtaaggcctgcct

SEQ ID NO: 549881 - DNA, 25 bp, Homo sapien
cctgcctgagtgtaagggcaatggc

SEQ ID NO: 549882 - DNA, 25 bp, Homo sapien
taagggcaatggcatggcagacagt

SEQ ID NO: 549883 - DNA, 25 bp, Homo sapien
taagggcaatggcatggcaggtggt

SEQ ID NO: 549884 - DNA, 25 bp, Homo sapien
gcttcatctctaattaggattttca

SEQ ID NO: 549885 - DNA, 25 bp, Homo sapien
tcccagagacaaagcaccttagctt

SEQ ID NO: 549886 - DNA, 25 bp, Homo sapien
cacgtgatcacagtcagcaggcaga

SEQ ID NO: 549887 - DNA, 25 bp, Homo sapien
agcctttccggacacgtgatcacag

SEQ ID NO: 549888 - DNA, 25 bp, Homo sapien
ggaatcatcggtgcctcctttgttt

SEQ ID NO: 549889 - DNA, 25 bp, Homo sapien
tgctatgagaaaggcgagtatcact

SEQ ID NO: 549890 - DNA, 25 bp, Homo sapien
gcgagtatcactcctgtccaaggtt

SEQ ID NO: 549891 - DNA, 25 bp, Homo sapien
catagttagaatgaagaggccctaa

SEQ ID NO: 549892 - DNA, 25 bp, Homo sapien
tagcatagcttctctattaggctcc

SEQ ID NO: 549893 - DNA, 25 bp, Homo sapien
gatcagaaataaccatatcgtactt

SEQ ID NO: 549894 - DNA, 25 bp, Homo sapien
tacaagcagagtaggtagcatagct

SEQ ID NO: 549895 - DNA, 25 bp, Homo sapien
tgaaatgcagacattcactacaagc

SEQ ID NO: 549896 - DNA, 25 bp, Homo sapien
tatacaggttttgctgcgtgttacc

SEQ ID NO: 549897 - DNA, 25 bp, Homo sapien
cttttcctctgtgggatatcgctaa

SEQ ID NO: 549898 - DNA, 25 bp, Homo sapien
ggttttgctgcgtgttaccagtgct

SEQ ID NO: 549899 - DNA, 25 bp, Homo sapien
ctgcaacagaggtgttgtcattctc

SEQ ID NO: 549900 - DNA, 25 bp, Homo sapien
tactagtgtgtgcatccagaaaact

SEQ ID NO: 549901 - DNA, 25 bp, Homo sapien
cagcctgagttagaggtagacagag

SEQ ID NO: 549902 - DNA, 25 bp, Homo sapien
tagacagagaattggaaggcaagtc

SEQ ID NO: 549903 - DNA, 25 bp, Homo sapien
gatgaaaatattgaggctagaaaag

SEQ ID NO: 549904 - DNA, 25 bp, Homo sapien
gttttactgcattgaacttaggttc

SEQ ID NO: 549905 - DNA, 25 bp, Homo sapien
ttgttttactgcattgaacttaggt

SEQ ID NO: 549906 - DNA, 25 bp, Homo sapien
cattgaacttaggttcagtgctgct

SEQ ID NO: 549907 - DNA, 25 bp, Homo sapien
tactgcattgaacttaggttcagtg

SEQ ID NO: 549908 - DNA, 25 bp, Homo sapien
gctgtaagggatctttatatgttgc

SEQ ID NO: 549909 - DNA, 25 bp, Homo sapien
tgagagaaacacctgggtgaacttt

SEQ ID NO: 549910 - DNA, 25 bp, Homo sapien
ggtgaactttgctgtaagggatctt

SEQ ID NO: 549911 - DNA, 25 bp, Homo sapien
gatgttccaggggtcacacctgttc

SEQ ID NO: 549912 - DNA, 25 bp, Homo sapien
acagctctactttaagaatactgag

SEQ ID NO: 549913 - DNA, 25 bp, Homo sapien
taacagcaaacagctctactttaag

SEQ ID NO: 549914 - DNA, 25 bp, Homo sapien
tccttacaggcaaaataacagcaaa

SEQ ID NO: 549915 - DNA, 25 bp, Homo sapien
ccatgggttagaattcttccttaca

SEQ ID NO: 549916 - DNA, 25 bp, Homo sapien
ctcttctctggtactgtgtctgaca

SEQ ID NO: 549917 - DNA, 25 bp, Homo sapien
tcttctctggtactgtgtctgacat

SEQ ID NO: 549918 - DNA, 25 bp, Homo sapien
gagtctgcgtatatcacacgtggaa

SEQ ID NO: 549919 - DNA, 25 bp, Homo sapien
gaacgtcttgttaaactgacctgaa

SEQ ID NO: 549920 - DNA, 25 bp, Homo sapien
ctttttcactgggtggaacgtcttg

SEQ ID NO: 549921 - DNA, 25 bp, Homo sapien
gctgtacattccagactagagtgga

SEQ ID NO: 549922 - DNA, 25 bp, Homo sapien
tgtcattggacttatttgaagaaag

SEQ ID NO: 549923 - DNA, 25 bp, Homo sapien
ttcatgttcaaatcaatctgctcca

SEQ ID NO: 549924 - DNA, 25 bp, Homo sapien
gtttttctatcctagaacgtagctc

SEQ ID NO: 549925 - DNA, 25 bp, Homo sapien
ataattgcacccaatggctattgaa

SEQ ID NO: 549926 - DNA, 25 bp, Homo sapien
ctggaatgttggtgcctgagctact

SEQ ID NO: 549927 - DNA, 25 bp, Homo sapien
gaaaatctacacctttgctccctgt

SEQ ID NO: 549928 - DNA, 25 bp, Homo sapien
ctgtactccgcagccgtccgttgga

SEQ ID NO: 549929 - DNA, 25 bp, Homo sapien
tcataagcaaaaccccatgtgtgaa

SEQ ID NO: 549930 - DNA, 25 bp, Homo sapien
caaacacaggaattttgtattgcat

SEQ ID NO: 549931 - DNA, 25 bp, Homo sapien
gcacaaacacaggaattttgtattg

SEQ ID NO: 549932 - DNA, 25 bp, Homo sapien
ctgcacaaacacaggaattttgtat

SEQ ID NO: 549933 - DNA, 25 bp, Homo sapien
cacaaacacaggaattttgtattgc

SEQ ID NO: 549934 - DNA, 25 bp, Homo sapien
acattcatctctaataaattccacc

SEQ ID NO: 549935 - DNA, 25 bp, Homo sapien
attcatctctaataaattccaccat

SEQ ID NO: 549936 - DNA, 25 bp, Homo sapien
gttctgctgacattcatctctaata

SEQ ID NO: 549937 - DNA, 25 bp, Homo sapien
tctgctgacattcatctctaataaa

SEQ ID NO: 549938 - DNA, 25 bp, Homo sapien
ggaagacatcctatacttactatcc

SEQ ID NO: 549939 - DNA, 25 bp, Homo sapien
tactatccattattgcagcaatgcc

SEQ ID NO: 549940 - DNA, 25 bp, Homo sapien
tgaacgctgacaccaacatagaaac

SEQ ID NO: 549941 - DNA, 25 bp, Homo sapien
ggacacttcttgcagtgaacgctga

SEQ ID NO: 549942 - DNA, 25 bp, Homo sapien
catcaagggtgagatcgataggcct

SEQ ID NO: 549943 - DNA, 25 bp, Homo sapien
gcttgaaggcgcatgtaaaaaactt

SEQ ID NO: 549944 - DNA, 25 bp, Homo sapien
gatatatatgcctcaaacacatgga

SEQ ID NO: 549945 - DNA, 25 bp, Homo sapien
gcagaagactacaatcagacagggc

SEQ ID NO: 549946 - DNA, 25 bp, Homo sapien
ccaagatcatagagataatgagcat

SEQ ID NO: 549947 - DNA, 25 bp, Homo sapien
gaaatatcccactgttccccaataa

SEQ ID NO: 549948 - DNA, 25 bp, Homo sapien
agtgccggatatgctaataactctg

SEQ ID NO: 549949 - DNA, 25 bp, Homo sapien
aaaataggtgtttgaagtgccggat

SEQ ID NO: 549950 - DNA, 25 bp, Homo sapien
tctattcacagaaaacgagttagtt

SEQ ID NO: 549951 - DNA, 25 bp, Homo sapien
cagcccttggtcagttagtcattac

SEQ ID NO: 549952 - DNA, 25 bp, Homo sapien
caatccattcccctatagctttaat

SEQ ID NO: 549953 - DNA, 25 bp, Homo sapien
tgctcttatttatccaaaacaatga

SEQ ID NO: 549954 - DNA, 25 bp, Homo sapien
caacccataatatctgtcagaggag

SEQ ID NO: 549955 - DNA, 25 bp, Homo sapien
gattgcttaccgagaacccagttgt

SEQ ID NO: 549956 - DNA, 25 bp, Homo sapien
tgaaatgcagtccacaaacaaaaga

SEQ ID NO: 549957 - DNA, 25 bp, Homo sapien
gagaaaatgatgaatggccttagga

SEQ ID NO: 549958 - DNA, 25 bp, Homo sapien
tctcagcaaagagcgagctggctgc

SEQ ID NO: 549959 - DNA, 25 bp, Homo sapien
ggaaagccggtaaagtctgagcgaa

SEQ ID NO: 549960 - DNA, 25 bp, Homo sapien
gaattgctaccataggatcgcagcc

SEQ ID NO: 549961 - DNA, 25 bp, Homo sapien
tatatatgtatagaaccgcggcatc

SEQ ID NO: 549962 - DNA, 25 bp, Homo sapien
tgtagggaattaatctcggacgcgg

SEQ ID NO: 549963 - DNA, 25 bp, Homo sapien
tttccagcggcaaaacaaagagacg

SEQ ID NO: 549964 - DNA, 25 bp, Homo sapien
tgggcgagatcctagcgtacagctg

SEQ ID NO: 549965 - DNA, 25 bp, Homo sapien
ggtactctaggttttgcagccccgc

SEQ ID NO: 549966 - DNA, 25 bp, Homo sapien
ttttaaagcgagcaattcatccccg

SEQ ID NO: 549967 - DNA, 25 bp, Homo sapien
gcgagcaattcatccccgatctcat

SEQ ID NO: 549968 - DNA, 25 bp, Homo sapien
taaagcgagcaattcatccccgatc

SEQ ID NO: 549969 - DNA, 25 bp, Homo sapien
ccccgatctcatcacaaagtaacag

SEQ ID NO: 549970 - DNA, 25 bp, Homo sapien
aagttcatttagtgctccaatgtcc

SEQ ID NO: 549971 - DNA, 25 bp, Homo sapien
agtgctccaatgtccgaagccagga

SEQ ID NO: 549972 - DNA, 25 bp, Homo sapien
catttagtgctccaatgtccgaagc

SEQ ID NO: 549973 - DNA, 25 bp, Homo sapien
tttagtgctccaatgtccgaagcca

SEQ ID NO: 549974 - DNA, 25 bp, Homo sapien
tgcaatagcccagacgccagtcaat

SEQ ID NO: 549975 - DNA, 25 bp, Homo sapien
tttgcagcgtagtacaggcgcactg

SEQ ID NO: 549976 - DNA, 25 bp, Homo sapien
caggcacgtagtgcaaggcaagcaa

SEQ ID NO: 549977 - DNA, 25 bp, Homo sapien
tatccacaaactatccaggcacgta

SEQ ID NO: 549978 - DNA, 25 bp, Homo sapien
ttccgcggcttctgttgttgaggct

SEQ ID NO: 549979 - DNA, 25 bp, Homo sapien
cttgcctctctgatacaaagcaggg

SEQ ID NO: 549980 - DNA, 25 bp, Homo sapien
caaagcagggttttccgcggcttct

SEQ ID NO: 549981 - DNA, 25 bp, Homo sapien
tgtggttgcgggttgcccagaagtc

SEQ ID NO: 549982 - DNA, 25 bp, Homo sapien
aatcgctgcgttttgtggttgtcca

SEQ ID NO: 549983 - DNA, 25 bp, Homo sapien
tgtgctctcgctctcgcttactagc

SEQ ID NO: 549984 - DNA, 25 bp, Homo sapien
aaatcacgcccgaccgaaggactca

SEQ ID NO: 549985 - DNA, 25 bp, Homo sapien
agccaatggcgctggaaaatttccg

SEQ ID NO: 549986 - DNA, 25 bp, Homo sapien
tccaccattcggaaaggagtgcttt

SEQ ID NO: 549987 - DNA, 25 bp, Homo sapien
tcagggtgtcaagcgaacagcaatt

SEQ ID NO: 549988 - DNA, 25 bp, Homo sapien
gaggtaattatactgcacgccattt

SEQ ID NO: 549989 - DNA, 25 bp, Homo sapien
ttcccaatggcttgaataaaattag

SEQ ID NO: 549990 - DNA, 25 bp, Homo sapien
ggtcattgagagttaggttctttga

SEQ ID NO: 549991 - DNA, 25 bp, Homo sapien
tggagggtgaaacacaatgcatgct

SEQ ID NO: 549992 - DNA, 25 bp, Homo sapien
tatttaactctggagggtgaaacac

SEQ ID NO: 549993 - DNA, 25 bp, Homo sapien
aagtccttgattccagtcccgaaag

SEQ ID NO: 549994 - DNA, 25 bp, Homo sapien
cgcagatgcttgttgggtcactgat

SEQ ID NO: 549995 - DNA, 25 bp, Homo sapien
aggtagccggcagctcctcttcgcg

SEQ ID NO: 549996 - DNA, 25 bp, Homo sapien
agaacgctctctgcaggtagccggc

SEQ ID NO: 549997 - DNA, 25 bp, Homo sapien
tctggactctaaagctcagcgagaa

SEQ ID NO: 549998 - DNA, 25 bp, Homo sapien
acatgctggttgtaaacacttccaa

SEQ ID NO: 549999 - DNA, 25 bp, Homo sapien
cacatgctggttgtaaacacttcca

SEQ ID NO: 550000 - DNA, 25 bp, Homo sapien
ttcacaggtcgcctcgcagtcctgc

SEQ ID NO: 550001 - DNA, 25 bp, Homo sapien
tgttgggatgcctgggtcggtttca

SEQ ID NO: 550002 - DNA, 25 bp, Homo sapien
tgcgctcttgtctaaggttcggtgc

SEQ ID NO: 550003 - DNA, 25 bp, Homo sapien
gcaccaagaatggtctgtccatcag

SEQ ID NO: 550004 - DNA, 25 bp, Homo sapien
gcacattctggagggtagggacgtg

SEQ ID NO: 550005 - DNA, 25 bp, Homo sapien
gacggatgcgctcttgtctaaggtt

SEQ ID NO: 550006 - DNA, 25 bp, Homo sapien
gcagcccctgtctctggcagagcac

SEQ ID NO: 550007 - DNA, 25 bp, Homo sapien
agcccctgtctctggcagagcacac

SEQ ID NO: 550008 - DNA, 25 bp, Homo sapien
aacgcagcccctgtctctggcagag

SEQ ID NO: 550009 - DNA, 25 bp, Homo sapien
tcaaaacgcagcccctgtctctggc

SEQ ID NO: 550010 - DNA, 25 bp, Homo sapien
tggtcccagtgtatccacgccactt

SEQ ID NO: 550011 - DNA, 25 bp, Homo sapien
cagtgtatccacgccacttcctggg

SEQ ID NO: 550012 - DNA, 25 bp, Homo sapien
gtgtatccacgccacttcctgggct

SEQ ID NO: 550013 - DNA, 25 bp, Homo sapien
cagggctggtcccagtgtatccacg

SEQ ID NO: 550014 - DNA, 25 bp, Homo sapien
gtgagtggaaagcccgggcgcgtgg

SEQ ID NO: 550015 - DNA, 25 bp, Homo sapien
tgagtggaaagcccgggcgcgtgga

SEQ ID NO: 550016 - DNA, 25 bp, Homo sapien
ggtgagtggaaagcccgggcgcgtg

SEQ ID NO: 550017 - DNA, 25 bp, Homo sapien
gagtggaaagcccgggcgcgtggag

SEQ ID NO: 550018 - DNA, 25 bp, Homo sapien
gatactggtagtgccggaagacgct

SEQ ID NO: 550019 - DNA, 25 bp, Homo sapien
tgtgagctgcatatccccggccagc

SEQ ID NO: 550020 - DNA, 25 bp, Homo sapien
tcgtgtttcatctggcggttttgaa

SEQ ID NO: 550021 - DNA, 25 bp, Homo sapien
gggctgttcagctgtgaatcctgca

SEQ ID NO: 550022 - DNA, 25 bp, Homo sapien
ttggctccttattcaacccttcaca

SEQ ID NO: 550023 - DNA, 25 bp, Homo sapien
acatgggaccgccaggagtttggct

SEQ ID NO: 550024 - DNA, 25 bp, Homo sapien
ctgtggtgaaggttgtacagacatg

SEQ ID NO: 550025 - DNA, 25 bp, Homo sapien
tggctccttattcaacccttcacag

SEQ ID NO: 550026 - DNA, 25 bp, Homo sapien
tacctctgtccttccttctgagatc

SEQ ID NO: 550027 - DNA, 25 bp, Homo sapien
cctctgtccttccttctgagatcat

SEQ ID NO: 550028 - DNA, 25 bp, Homo sapien
tgtccttccttctgagatcattttc

SEQ ID NO: 550029 - DNA, 25 bp, Homo sapien
tctgtccttccttctgagatcattt

SEQ ID NO: 550030 - DNA, 25 bp, Homo sapien
taagtggaccgcttggattatacac

SEQ ID NO: 550031 - DNA, 25 bp, Homo sapien
cactcagactcttcaacacagtttt

SEQ ID NO: 550032 - DNA, 25 bp, Homo sapien
tacatgaccatggtgagtaggacat

SEQ ID NO: 550033 - DNA, 25 bp, Homo sapien
ttccagctcttctagtaataagtgg

SEQ ID NO: 550034 - DNA, 25 bp, Homo sapien
cataggtcatagacagagagtgaaa

SEQ ID NO: 550035 - DNA, 25 bp, Homo sapien
gagagtgaaagctccacctgttgaa

SEQ ID NO: 550036 - DNA, 25 bp, Homo sapien
tcttaaggtagtgattggcatccat

SEQ ID NO: 550037 - DNA, 25 bp, Homo sapien
tatttatcccaatagacaaggcact

SEQ ID NO: 550038 - DNA, 25 bp, Homo sapien
agtcttatattttgggcttttgctg

SEQ ID NO: 550039 - DNA, 25 bp, Homo sapien
tgaaggtctgatatagtatatttct

SEQ ID NO: 550040 - DNA, 25 bp, Homo sapien
aggtctgatatagtatatttctttt

SEQ ID NO: 550041 - DNA, 25 bp, Homo sapien
ctcttaaccaggtaaaatttcattg

SEQ ID NO: 550042 - DNA, 25 bp, Homo sapien
cacataagcatgaagaggatctcct

SEQ ID NO: 550043 - DNA, 25 bp, Homo sapien
acttggttccgtattatcaggtgtg

SEQ ID NO: 550044 - DNA, 25 bp, Homo sapien
tcaggtgtgtccatctgaatgtacc

SEQ ID NO: 550045 - DNA, 25 bp, Homo sapien
taccactcgacattccgggattcag

SEQ ID NO: 550046 - DNA, 25 bp, Homo sapien
ggagaactcagcatgccctcaaagg

SEQ ID NO: 550047 - DNA, 25 bp, Homo sapien
tcctaaatggagactgcttactgct

SEQ ID NO: 550048 - DNA, 25 bp, Homo sapien
ccagtagtagcagcagagatcctaa

SEQ ID NO: 550049 - DNA, 25 bp, Homo sapien
gacaaggacttcagcccaacaatag

SEQ ID NO: 550050 - DNA, 25 bp, Homo sapien
ccacaagaagatgatatccgatatc

SEQ ID NO: 550051 - DNA, 25 bp, Homo sapien
tatccgatatccattattgttatag

SEQ ID NO: 550052 - DNA, 25 bp, Homo sapien
tcaagtcagcgatgactgattccca

SEQ ID NO: 550053 - DNA, 25 bp, Homo sapien
cgatgactgattcccacaagaagat

SEQ ID NO: 550054 - DNA, 25 bp, Homo sapien
catggtgattttatccctcttgtag

SEQ ID NO: 550055 - DNA, 25 bp, Homo sapien
tgattttatccctcttgtaggttgt

SEQ ID NO: 550056 - DNA, 25 bp, Homo sapien
tggtgattttatccctcttgtaggt

SEQ ID NO: 550057 - DNA, 25 bp, Homo sapien
gtgattttatccctcttgtaggttg

SEQ ID NO: 550058 - DNA, 25 bp, Homo sapien
taggtgtaagtcacatgccttccct

SEQ ID NO: 550059 - DNA, 25 bp, Homo sapien
gaagcagttcaagcgctcatagtat

SEQ ID NO: 550060 - DNA, 25 bp, Homo sapien
catagtatagaaaagtttgtgttcc

SEQ ID NO: 550061 - DNA, 25 bp, Homo sapien
gccttccctttgtcaatcctgtgat

SEQ ID NO: 550062 - DNA, 25 bp, Homo sapien
tctgggctcttatcccactcaacaa

SEQ ID NO: 550063 - DNA, 25 bp, Homo sapien
gagatgtgtctttttgagcatgaag

SEQ ID NO: 550064 - DNA, 25 bp, Homo sapien
gaagttgtgtgtcggaccaataatg

SEQ ID NO: 550065 - DNA, 25 bp, Homo sapien
cccactcaacaaagctcagactttt

SEQ ID NO: 550066 - DNA, 25 bp, Homo sapien
ctggttctgatttagtagcgataat

SEQ ID NO: 550067 - DNA, 25 bp, Homo sapien
gttctgatttagtagcgataattct

SEQ ID NO: 550068 - DNA, 25 bp, Homo sapien
tctgatttagtagcgataattcttt

SEQ ID NO: 550069 - DNA, 25 bp, Homo sapien
ggttctgatttagtagcgataattc

SEQ ID NO: 550070 - DNA, 25 bp, Homo sapien
atctcaatgaagttactcctgcatt

SEQ ID NO: 550071 - DNA, 25 bp, Homo sapien
tcaccaacagactgcttctctcttt

SEQ ID NO: 550072 - DNA, 25 bp, Homo sapien
tggacacccatgcatggcctttcac

SEQ ID NO: 550073 - DNA, 25 bp, Homo sapien
catgcatggcctttcaccaacagac

SEQ ID NO: 550074 - DNA, 25 bp, Homo sapien
cttggacacccatgcatggcctttc

SEQ ID NO: 550075 - DNA, 25 bp, Homo sapien
tcaggtgcttagtttcttgcttcca

SEQ ID NO: 550076 - DNA, 25 bp, Homo sapien
gctgctttttgctcgcctcacctct

SEQ ID NO: 550077 - DNA, 25 bp, Homo sapien
aggtgcttagtttcttgcttccaca

SEQ ID NO: 550078 - DNA, 25 bp, Homo sapien
tgctttttgctcgcctcacctctct

SEQ ID NO: 550079 - DNA, 25 bp, Homo sapien
aagctttgccttttatgaactccat

SEQ ID NO: 550080 - DNA, 25 bp, Homo sapien
tcttggcaaagctttgccttttatg

SEQ ID NO: 550081 - DNA, 25 bp, Homo sapien
gcaaagctttgccttttatgaactc

SEQ ID NO: 550082 - DNA, 25 bp, Homo sapien
cttggcaaagctttgccttttatga

SEQ ID NO: 550083 - DNA, 25 bp, Homo sapien
cagttttcatggttgctactactct

SEQ ID NO: 550084 - DNA, 25 bp, Homo sapien
tactactctagattctgtagatgtg

SEQ ID NO: 550085 - DNA, 25 bp, Homo sapien
ttgttgacagtccagttttcatggt

SEQ ID NO: 550086 - DNA, 25 bp, Homo sapien
cttctttgttgacagtccagttttc

SEQ ID NO: 550087 - DNA, 25 bp, Homo sapien
caagcagatgatataggttgatccg

SEQ ID NO: 550088 - DNA, 25 bp, Homo sapien
tgaaaactagcttgcaaacattgcc

SEQ ID NO: 550089 - DNA, 25 bp, Homo sapien
tgtaagcggtgcaacagaagctcca

SEQ ID NO: 550090 - DNA, 25 bp, Homo sapien
gactcttgtgctgagatatgcggta

SEQ ID NO: 550091 - DNA, 25 bp, Homo sapien
taattgccaaccatatacatgcctt

SEQ ID NO: 550092 - DNA, 25 bp, Homo sapien
tcagttcaaagcagtataccctgct

SEQ ID NO: 550093 - DNA, 25 bp, Homo sapien
attgctaccataaattatccagtaa

SEQ ID NO: 550094 - DNA, 25 bp, Homo sapien
taacaagaaatccactattgctacc

SEQ ID NO: 550095 - DNA, 25 bp, Homo sapien
cctgccaggtggatctttgtgttgc

SEQ ID NO: 550096 - DNA, 25 bp, Homo sapien
aacaccgtcttgacggtggcccctg

SEQ ID NO: 550097 - DNA, 25 bp, Homo sapien
tagatgcgtccggttttctgcttcc

SEQ ID NO: 550098 - DNA, 25 bp, Homo sapien
tgctcattcctgttagatgcgtccg

SEQ ID NO: 550099 - DNA, 25 bp, Homo sapien
aatagctttcttcaaattgcctgtt

SEQ ID NO: 550100 - DNA, 25 bp, Homo sapien
tcagaaatagctttcttcaaattgc

SEQ ID NO: 550101 - DNA, 25 bp, Homo sapien
agctttcttcaaattgcctgttttc

SEQ ID NO: 550102 - DNA, 25 bp, Homo sapien
cagaaatagctttcttcaaattgcc

SEQ ID NO: 550103 - DNA, 25 bp, Homo sapien
ctcctttttcggacatttgaatcag

SEQ ID NO: 550104 - DNA, 25 bp, Homo sapien
cctcctttttcggacatttgaatca

SEQ ID NO: 550105 - DNA, 25 bp, Homo sapien
catccctcctttttcggacatttga

SEQ ID NO: 550106 - DNA, 25 bp, Homo sapien
tcctttttcggacatttgaatcaga

SEQ ID NO: 550107 - DNA, 25 bp, Homo sapien
cttcctcgccttcaaatattaccca

SEQ ID NO: 550108 - DNA, 25 bp, Homo sapien
cacttcctcgccttcaaatattacc

SEQ ID NO: 550109 - DNA, 25 bp, Homo sapien
caagggcattgacaatttggattct

SEQ ID NO: 550110 - DNA, 25 bp, Homo sapien
gattctgtgaataagaatgtactgc

SEQ ID NO: 550111 - DNA, 25 bp, Homo sapien
tactgcctacaccatagacaccaat

SEQ ID NO: 550112 - DNA, 25 bp, Homo sapien
tcactcaagggcattgacaatttgg

SEQ ID NO: 550113 - DNA, 25 bp, Homo sapien
gtgccagcttctacaaactgcggca

SEQ ID NO: 550114 - DNA, 25 bp, Homo sapien
tgccagcttctacaaactgcggcat

SEQ ID NO: 550115 - DNA, 25 bp, Homo sapien
agtgccagcttctacaaactgcggc

SEQ ID NO: 550116 - DNA, 25 bp, Homo sapien
tcttctctcaacttgagaacaagct

SEQ ID NO: 550117 - DNA, 25 bp, Homo sapien
tgagaacaagctcagtaacaggcat

SEQ ID NO: 550118 - DNA, 25 bp, Homo sapien
ttgagaacaagctcagtaacaggca

SEQ ID NO: 550119 - DNA, 25 bp, Homo sapien
tctctcaacttgagaacaagctcag

SEQ ID NO: 550120 - DNA, 25 bp, Homo sapien
tattaacggattgggtggcatcaaa

SEQ ID NO: 550121 - DNA, 25 bp, Homo sapien
gaatgtgcgaagaagagagtcaaga

SEQ ID NO: 550122 - DNA, 25 bp, Homo sapien
aacactgatttgactgcttctttgt

SEQ ID NO: 550123 - DNA, 25 bp, Homo sapien
gcatcaaagggtgaatgtgcgaaga

SEQ ID NO: 550124 - DNA, 25 bp, Homo sapien
ttaagccaaggtgacatacagtttc

SEQ ID NO: 550125 - DNA, 25 bp, Homo sapien
acatgtggggttcagaagaacctgt

SEQ ID NO: 550126 - DNA, 25 bp, Homo sapien
aatatatgtagctctaaaagtgagc

SEQ ID NO: 550127 - DNA, 25 bp, Homo sapien
gcatgcaattaacgtaaatttataa

SEQ ID NO: 550128 - DNA, 25 bp, Homo sapien
aaatgaaaaacatggtgagattttg

SEQ ID NO: 550129 - DNA, 25 bp, Homo sapien
tcaaacaggaagctagctgtgactg

SEQ ID NO: 550130 - DNA, 25 bp, Homo sapien
ctagccacaggattaatttttgcca

SEQ ID NO: 550131 - DNA, 25 bp, Homo sapien
cacatgttagcaggtaatagccagc

SEQ ID NO: 550132 - DNA, 25 bp, Homo sapien
tagaaattgatctcccaggaacccc

SEQ ID NO: 550133 - DNA, 25 bp, Homo sapien
tagccagcagcattggactgtgcca

SEQ ID NO: 550134 - DNA, 25 bp, Homo sapien
gagacatatgcagacttccctttgg

SEQ ID NO: 550135 - DNA, 25 bp, Homo sapien
ctgtagtcgcagccacttgggaagt

SEQ ID NO: 550136 - DNA, 25 bp, Homo sapien
agttgaggcaggagattgtttgagc

SEQ ID NO: 550137 - DNA, 25 bp, Homo sapien
gaagttgaggcaggagattgtttga

SEQ ID NO: 550138 - DNA, 25 bp, Homo sapien
gtagtcgcagccacttgggaagttg

SEQ ID NO: 550139 - DNA, 25 bp, Homo sapien
gacctcttccatctctgaaatggaa

SEQ ID NO: 550140 - DNA, 25 bp, Homo sapien
tgaaatggaaagtccaaccttcctc

SEQ ID NO: 550141 - DNA, 25 bp, Homo sapien
ctctgaaatggaaagtccaaccttc

SEQ ID NO: 550142 - DNA, 25 bp, Homo sapien
cttgacctcttccatctctgaaatg

SEQ ID NO: 550143 - DNA, 25 bp, Homo sapien
caaattcccaaattcgactgtctca

SEQ ID NO: 550144 - DNA, 25 bp, Homo sapien
gtgctaagcccaagttgctctctgg

SEQ ID NO: 550145 - DNA, 25 bp, Homo sapien
tgctctctggtaaatcgcatttcaa

SEQ ID NO: 550146 - DNA, 25 bp, Homo sapien
tcccaaattcgactgtctcagcatt

SEQ ID NO: 550147 - DNA, 25 bp, Homo sapien
tcaattagattccgtgtaagttaaa

SEQ ID NO: 550148 - DNA, 25 bp, Homo sapien
tatggaaagcggatccattgagcag

SEQ ID NO: 550149 - DNA, 25 bp, Homo sapien
ggatccattgagcagaaggagatgc

SEQ ID NO: 550150 - DNA, 25 bp, Homo sapien
aatttcttgtctgatagacctatgg

SEQ ID NO: 550151 - DNA, 25 bp, Homo sapien
tcccattgtcatacgtattaccaga

SEQ ID NO: 550152 - DNA, 25 bp, Homo sapien
cccattgtcatacgtattaccagaa

SEQ ID NO: 550153 - DNA, 25 bp, Homo sapien
cctcccattgtcatacgtattacca

SEQ ID NO: 550154 - DNA, 25 bp, Homo sapien
ttcctcccattgtcatacgtattac

SEQ ID NO: 550155 - DNA, 25 bp, Homo sapien
ccatggttaagtatatttctagtgt

SEQ ID NO: 550156 - DNA, 25 bp, Homo sapien
tatcttgtgcctgttcttagaggga

SEQ ID NO: 550157 - DNA, 25 bp, Homo sapien
gtcctcttacctgattgttctggca

SEQ ID NO: 550158 - DNA, 25 bp, Homo sapien
ggacttccagtactcttataggttg

SEQ ID NO: 550159 - DNA, 25 bp, Homo sapien
ggtgcctgtgggatcaaactctact

SEQ ID NO: 550160 - DNA, 25 bp, Homo sapien
tgttaacatctcagtaggccctttg

SEQ ID NO: 550161 - DNA, 25 bp, Homo sapien
gagcgaccacttttgggcactggca

SEQ ID NO: 550162 - DNA, 25 bp, Homo sapien
tctgccatccacgaacggtttaagt

SEQ ID NO: 550163 - DNA, 25 bp, Homo sapien
tttgctaaacataagttgatcaaac

SEQ ID NO: 550164 - DNA, 25 bp, Homo sapien
cataagttgatcaaacaatagctga

SEQ ID NO: 550165 - DNA, 25 bp, Homo sapien
aaacataagttgatcaaacaatagc

SEQ ID NO: 550166 - DNA, 25 bp, Homo sapien
caatagctgatacactgcaaccacc

SEQ ID NO: 550167 - DNA, 25 bp, Homo sapien
atcatttgcttcgataaaagtgaca

SEQ ID NO: 550168 - DNA, 25 bp, Homo sapien
ctttcatgcgcctttctagctcatg

SEQ ID NO: 550169 - DNA, 25 bp, Homo sapien
tagctcatgacgcagggtccaggtg

SEQ ID NO: 550170 - DNA, 25 bp, Homo sapien
ggtgcatggcctggtgtaaacactg

SEQ ID NO: 550171 - DNA, 25 bp, Homo sapien
ttttcaagggcattgggagccattc

SEQ ID NO: 550172 - DNA, 25 bp, Homo sapien
acaccacttagggtcataagcaagt

SEQ ID NO: 550173 - DNA, 25 bp, Homo sapien
atttctgaccatctgcaaacaccac

SEQ ID NO: 550174 - DNA, 25 bp, Homo sapien
caagtgttacgcattctctggcata

SEQ ID NO: 550175 - DNA, 25 bp, Homo sapien
aggtcgctctttttccgatttgcca

SEQ ID NO: 550176 - DNA, 25 bp, Homo sapien
gaagggaaatatagagctgcaccgg

SEQ ID NO: 550177 - DNA, 25 bp, Homo sapien
gctgcaccggtaaagagtagaaaag

SEQ ID NO: 550178 - DNA, 25 bp, Homo sapien
tgttttacaggaatgttaccagagc

SEQ ID NO: 550179 - DNA, 25 bp, Homo sapien
ttaaccagcacataacatcactcac

SEQ ID NO: 550180 - DNA, 25 bp, Homo sapien
ttttaaccagcacataacatcactc

SEQ ID NO: 550181 - DNA, 25 bp, Homo sapien
cttttaaccagcacataacatcact

SEQ ID NO: 550182 - DNA, 25 bp, Homo sapien
tttaaccagcacataacatcactca

SEQ ID NO: 550183 - DNA, 25 bp, Homo sapien
ccagctatgtccatatactttagtt

SEQ ID NO: 550184 - DNA, 25 bp, Homo sapien
gtttgacaactgtaatcttcttcgt

SEQ ID NO: 550185 - DNA, 25 bp, Homo sapien
gacaactgtaatcttcttcgttcct

SEQ ID NO: 550186 - DNA, 25 bp, Homo sapien
gaattttcttcccagctatgtccat

SEQ ID NO: 550187 - DNA, 25 bp, Homo sapien
tggaccatatagaaacttggctttc

SEQ ID NO: 550188 - DNA, 25 bp, Homo sapien
gtcctggtataagcttgtgcttctc

SEQ ID NO: 550189 - DNA, 25 bp, Homo sapien
gaccaggttttgaagatctatcagc

SEQ ID NO: 550190 - DNA, 25 bp, Homo sapien
atcagcaaatgggaatgtttgtcct

SEQ ID NO: 550191 - DNA, 25 bp, Homo sapien
ggcctgcaatgtgaaacctctttct

SEQ ID NO: 550192 - DNA, 25 bp, Homo sapien
gtctcagtaccagaaaattttgccc

SEQ ID NO: 550193 - DNA, 25 bp, Homo sapien
tcttggtctcagtaccagaaaattt

SEQ ID NO: 550194 - DNA, 25 bp, Homo sapien
tccatcagcagaggacagatctggg

SEQ ID NO: 550195 - DNA, 25 bp, Homo sapien
tatgtctgaaataactagactgcat

SEQ ID NO: 550196 - DNA, 25 bp, Homo sapien
gcttttccagcttgtgcgagtaaaa

SEQ ID NO: 550197 - DNA, 25 bp, Homo sapien
gcttgtgcgagtaaaaaatcattgt

SEQ ID NO: 550198 - DNA, 25 bp, Homo sapien
tgtatcgaatctcttatgtctgaaa

SEQ ID NO: 550199 - DNA, 25 bp, Homo sapien
taggtattcatcccatgctcagtga

SEQ ID NO: 550200 - DNA, 25 bp, Homo sapien
aggtattcatcccatgctcagtgag

SEQ ID NO: 550201 - DNA, 25 bp, Homo sapien
gggaatagtccattaggtattcatc

SEQ ID NO: 550202 - DNA, 25 bp, Homo sapien
tgatctctgtcaaacagtaatttgg

SEQ ID NO: 550203 - DNA, 25 bp, Homo sapien
ccattgggcgatgattagacatcac

SEQ ID NO: 550204 - DNA, 25 bp, Homo sapien
cctgggccttatagctgttacagct

SEQ ID NO: 550205 - DNA, 25 bp, Homo sapien
taatgccactgagcaccattgggcg

SEQ ID NO: 550206 - DNA, 25 bp, Homo sapien
tgtagagctacaacgactgagtctc

SEQ ID NO: 550207 - DNA, 25 bp, Homo sapien
tacacgatggtgtagagctacaacg

SEQ ID NO: 550208 - DNA, 25 bp, Homo sapien
agagcagagactggtacacgatggt

SEQ ID NO: 550209 - DNA, 25 bp, Homo sapien
tgctgttgtttcttatagggagtaa

SEQ ID NO: 550210 - DNA, 25 bp, Homo sapien
cgctatttgaaccaagtttacgctt

SEQ ID NO: 550211 - DNA, 25 bp, Homo sapien
gactcgctatttgaaccaagtttac

SEQ ID NO: 550212 - DNA, 25 bp, Homo sapien
gcagcacagactcgctatttgaacc

SEQ ID NO: 550213 - DNA, 25 bp, Homo sapien
gcatacatcactgctattccattaa

SEQ ID NO: 550214 - DNA, 25 bp, Homo sapien
gttgtagcagtttgagtgacagtat

SEQ ID NO: 550215 - DNA, 25 bp, Homo sapien
agtcatcagtgatgtaatctgtagt

SEQ ID NO: 550216 - DNA, 25 bp, Homo sapien
tcaaggatgacaaggcgacagtggc

SEQ ID NO: 550217 - DNA, 25 bp, Homo sapien
tgagtgacagtatgaatgtcctgtt

SEQ ID NO: 550218 - DNA, 25 bp, Homo sapien
ctgtagagctcaaaatctccacaca

SEQ ID NO: 550219 - DNA, 25 bp, Homo sapien
gcttaggagactctgttcttcttac

SEQ ID NO: 550220 - DNA, 25 bp, Homo sapien
cattgcctaattccacataacgggc

SEQ ID NO: 550221 - DNA, 25 bp, Homo sapien
tatgtggattaagtggaggctgaac

SEQ ID NO: 550222 - DNA, 25 bp, Homo sapien
cataacgggcatatatggatgtcag

SEQ ID NO: 550223 - DNA, 25 bp, Homo sapien
gattaatgtgatcggagcagctcgc

SEQ ID NO: 550224 - DNA, 25 bp, Homo sapien
aatggcattttcactcgctctgaca

SEQ ID NO: 550225 - DNA, 25 bp, Homo sapien
tgccagtcatctcgaaacataaggt

SEQ ID NO: 550226 - DNA, 25 bp, Homo sapien
gcagctcgcttcatcagagaatggc

SEQ ID NO: 550227 - DNA, 25 bp, Homo sapien
ccaaatcttctccatctacaacaac

SEQ ID NO: 550228 - DNA, 25 bp, Homo sapien
aatcttctccatctacaacaacacc

SEQ ID NO: 550229 - DNA, 25 bp, Homo sapien
tctccatctacaacaacaccctttc

SEQ ID NO: 550230 - DNA, 25 bp, Homo sapien
tcactgatattcttatttataaata

SEQ ID NO: 550231 - DNA, 25 bp, Homo sapien
cttctgacctactccttgaggatgc

SEQ ID NO: 550232 - DNA, 25 bp, Homo sapien
tctgacctactccttgaggatgctt

SEQ ID NO: 550233 - DNA, 25 bp, Homo sapien
ccttctgacctactccttgaggatg

SEQ ID NO: 550234 - DNA, 25 bp, Homo sapien
gacctactccttgaggatgcttttt

SEQ ID NO: 550235 - DNA, 25 bp, Homo sapien
tcatcagccgatgcttgaactctac

SEQ ID NO: 550236 - DNA, 25 bp, Homo sapien
ccattaatgcacttgattccgtaga

SEQ ID NO: 550237 - DNA, 25 bp, Homo sapien
catctaagcaagtacctaaatcctg

SEQ ID NO: 550238 - DNA, 25 bp, Homo sapien
tttatatagagtgtctggctgcatc

SEQ ID NO: 550239 - DNA, 25 bp, Homo sapien
caaagaggcttatgcacctttttat

SEQ ID NO: 550240 - DNA, 25 bp, Homo sapien
gttcttacaaagaggcttatgcacc

SEQ ID NO: 550241 - DNA, 25 bp, Homo sapien
tttatggatgttaaggaataccttc

SEQ ID NO: 550242 - DNA, 25 bp, Homo sapien
gaggcttatgcacctttttatggat

SEQ ID NO: 550243 - DNA, 25 bp, Homo sapien
tgattattctattcattttcttcat

SEQ ID NO: 550244 - DNA, 25 bp, Homo sapien
ttgattattctattcattttcttca

SEQ ID NO: 550245 - DNA, 25 bp, Homo sapien
tcataataagaatctacaggttgct

SEQ ID NO: 550246 - DNA, 25 bp, Homo sapien
acaggttgcttctgtatgcatttga

SEQ ID NO: 550247 - DNA, 25 bp, Homo sapien
tttccaaatttgtgacatcagtagt

SEQ ID NO: 550248 - DNA, 25 bp, Homo sapien
atactcgaggtctacattttccaaa

SEQ ID NO: 550249 - DNA, 25 bp, Homo sapien
tctgactggcattccattggtacca

SEQ ID NO: 550250 - DNA, 25 bp, Homo sapien
ttctgactggcattccattggtacc

SEQ ID NO: 550251 - DNA, 25 bp, Homo sapien
tttctgactggcattccattggtac

SEQ ID NO: 550252 - DNA, 25 bp, Homo sapien
ctgactggcattccattggtaccat

SEQ ID NO: 550253 - DNA, 25 bp, Homo sapien
gacacattcttcagtactaaactca

SEQ ID NO: 550254 - DNA, 25 bp, Homo sapien
gcaagatcctattgcggctgtttta

SEQ ID NO: 550255 - DNA, 25 bp, Homo sapien
tccagcatctgtttaacggcaagtt

SEQ ID NO: 550256 - DNA, 25 bp, Homo sapien
agtttgagtgtctgaccaaagcaag

SEQ ID NO: 550257 - DNA, 25 bp, Homo sapien
ttaatgctgagtgtatgggtcccat

SEQ ID NO: 550258 - DNA, 25 bp, Homo sapien
taagctttacttcacttccagatat

SEQ ID NO: 550259 - DNA, 25 bp, Homo sapien
ttcataagctttacttcacttccag

SEQ ID NO: 550260 - DNA, 25 bp, Homo sapien
gagtgtatgggtcccatcttgtttc

SEQ ID NO: 550261 - DNA, 25 bp, Homo sapien
tcagaatgttgatctgggccatttg

SEQ ID NO: 550262 - DNA, 25 bp, Homo sapien
tattatggccacacaatctctatgg

SEQ ID NO: 550263 - DNA, 25 bp, Homo sapien
cacgacccggtgtttacagcagacg

SEQ ID NO: 550264 - DNA, 25 bp, Homo sapien
gtccagctccttgtgtattatggcc

SEQ ID NO: 550265 - DNA, 25 bp, Homo sapien
cacagacaactcacgacccggtgtt

SEQ ID NO: 550266 - DNA, 25 bp, Homo sapien
gaagccactttgcaatgtgtatgct

SEQ ID NO: 550267 - DNA, 25 bp, Homo sapien
cacgaactgaattatgcatagggct

SEQ ID NO: 550268 - DNA, 25 bp, Homo sapien
tgggaccatgagtccagcctttgct

SEQ ID NO: 550269 - DNA, 25 bp, Homo sapien
cattgacgtttgtcaccatgcttca

SEQ ID NO: 550270 - DNA, 25 bp, Homo sapien
gtcgagttgtaaggagctccctctg

SEQ ID NO: 550271 - DNA, 25 bp, Homo sapien
tctgcactacttgttgctgatcaag

SEQ ID NO: 550272 - DNA, 25 bp, Homo sapien
ctgtttattaagagtgaagctgctt

SEQ ID NO: 550273 - DNA, 25 bp, Homo sapien
aagagtgaagctgcttagcttttcc

SEQ ID NO: 550274 - DNA, 25 bp, Homo sapien
ccaattcatctttgcatagtgaacc

SEQ ID NO: 550275 - DNA, 25 bp, Homo sapien
tctgaggatggatctccatttccca

SEQ ID NO: 550276 - DNA, 25 bp, Homo sapien
tgaggcatctttctgagtctgagtc

SEQ ID NO: 550277 - DNA, 25 bp, Homo sapien
gaggcatctttctgagtctgagtcc

SEQ ID NO: 550278 - DNA, 25 bp, Homo sapien
attgtccaggttcttcaatactcat

SEQ ID NO: 550279 - DNA, 25 bp, Homo sapien
gtaggaattctacaccctctgtcat

SEQ ID NO: 550280 - DNA, 25 bp, Homo sapien
cataacttttagatctttgggagag

SEQ ID NO: 550281 - DNA, 25 bp, Homo sapien
ggtaattgtcccatgtagcttgaaa

SEQ ID NO: 550282 - DNA, 25 bp, Homo sapien
gctcgagcacaggaataaaaccatt

SEQ ID NO: 550283 - DNA, 25 bp, Homo sapien
tgttgcactagtcaaactctcaagg

SEQ ID NO: 550284 - DNA, 25 bp, Homo sapien
cttctattgaacacaccggccaaat

SEQ ID NO: 550285 - DNA, 25 bp, Homo sapien
agtaaacataatacccagtaggtag

SEQ ID NO: 550286 - DNA, 25 bp, Homo sapien
tgattaaatccatacacaggaatcc

SEQ ID NO: 550287 - DNA, 25 bp, Homo sapien
tctttaccgctttttggagtctcta

SEQ ID NO: 550288 - DNA, 25 bp, Homo sapien
ttaccaaaacaccatggctctcatc

SEQ ID NO: 550289 - DNA, 25 bp, Homo sapien
gttaccaaaacaccatggctctcat

SEQ ID NO: 550290 - DNA, 25 bp, Homo sapien
tatgtaatacacaggagaggtgcag

SEQ ID NO: 550291 - DNA, 25 bp, Homo sapien
taatggatggccacgaatgctgtga

SEQ ID NO: 550292 - DNA, 25 bp, Homo sapien
caatcctgtgatctttatgtaatac

SEQ ID NO: 550293 - DNA, 25 bp, Homo sapien
gagataaagcagctcacaagttgcc

SEQ ID NO: 550294 - DNA, 25 bp, Homo sapien
acaagtcccattccagtgcttaggg

SEQ ID NO: 550295 - DNA, 25 bp, Homo sapien
catggttgtacactctacggctaag

SEQ ID NO: 550296 - DNA, 25 bp, Homo sapien
ggctaagaattgcacacaagtccca

SEQ ID NO: 550297 - DNA, 25 bp, Homo sapien
taagtgatacgctttggccgtgtcc

SEQ ID NO: 550298 - DNA, 25 bp, Homo sapien
tgcccaatagatgaaaaagtagaag

SEQ ID NO: 550299 - DNA, 25 bp, Homo sapien
agagaaattcaatttttgtctgaat

SEQ ID NO: 550300 - DNA, 25 bp, Homo sapien
caatttttgtctgaataatttccat

SEQ ID NO: 550301 - DNA, 25 bp, Homo sapien
ctgcccaatagatgaaaaagtagaa

SEQ ID NO: 550302 - DNA, 25 bp, Homo sapien
aattttggtagacttcccgcatgac

SEQ ID NO: 550303 - DNA, 25 bp, Homo sapien
tattaccagatagtccaaagcctgc

SEQ ID NO: 550304 - DNA, 25 bp, Homo sapien
tagcatagagtatttaggattcccc

SEQ ID NO: 550305 - DNA, 25 bp, Homo sapien
cccaagaggttttcgagcatgagct

SEQ ID NO: 550306 - DNA, 25 bp, Homo sapien
gttagagcaatttttgctattgtcc

SEQ ID NO: 550307 - DNA, 25 bp, Homo sapien
tagagcaatttttgctattgtcctc

SEQ ID NO: 550308 - DNA, 25 bp, Homo sapien
ctgttagagcaatttttgctattgt

SEQ ID NO: 550309 - DNA, 25 bp, Homo sapien
gagcaatttttgctattgtcctcat

SEQ ID NO: 550310 - DNA, 25 bp, Homo sapien
gaaacaatacctcaaccaggaaatg

SEQ ID NO: 550311 - DNA, 25 bp, Homo sapien
aaacttttagcagatttgccccact

SEQ ID NO: 550312 - DNA, 25 bp, Homo sapien
gccccactcggttgagcactgtgaa

SEQ ID NO: 550313 - DNA, 25 bp, Homo sapien
caggaaatgtactccatgtttgcag

SEQ ID NO: 550314 - DNA, 25 bp, Homo sapien
aattcaggggcacattgatctctga

SEQ ID NO: 550315 - DNA, 25 bp, Homo sapien
tcaggggcacattgatctctgaggg

SEQ ID NO: 550316 - DNA, 25 bp, Homo sapien
atcaatacccatacattctgccaaa

SEQ ID NO: 550317 - DNA, 25 bp, Homo sapien
caaatcaatacccatacattctgcc

SEQ ID NO: 550318 - DNA, 25 bp, Homo sapien
ctgtcaagggtgaaatagctgtgtg

SEQ ID NO: 550319 - DNA, 25 bp, Homo sapien
caagggtgaaatagctgtgtggcac

SEQ ID NO: 550320 - DNA, 25 bp, Homo sapien
aaatagctgtgtggcacccagagtc

SEQ ID NO: 550321 - DNA, 25 bp, Homo sapien
ggtgaaatagctgtgtggcacccag

SEQ ID NO: 550322 - DNA, 25 bp, Homo sapien
cattgaagaattgatagtggtctag

SEQ ID NO: 550323 - DNA, 25 bp, Homo sapien
ctccttctatctttgatgctgcaag

SEQ ID NO: 550324 - DNA, 25 bp, Homo sapien
ttatacagtaagtgccaaacattga

SEQ ID NO: 550325 - DNA, 25 bp, Homo sapien
gatagtggtctagcttactgtccat

SEQ ID NO: 550326 - DNA, 25 bp, Homo sapien
aagatttagcaaatgtgcctcgttt

SEQ ID NO: 550327 - DNA, 25 bp, Homo sapien
aaaagatttagcaaatgtgcctcgt

SEQ ID NO: 550328 - DNA, 25 bp, Homo sapien
tcatatcccaagttctgctaacttt

SEQ ID NO: 550329 - DNA, 25 bp, Homo sapien
aaagatttagcaaatgtgcctcgtt

SEQ ID NO: 550330 - DNA, 25 bp, Homo sapien
gagtgtcacaaggatggttagtgct

SEQ ID NO: 550331 - DNA, 25 bp, Homo sapien
tagtgctacgtttcccgaagtgctc

SEQ ID NO: 550332 - DNA, 25 bp, Homo sapien
gcctgccacaggacatggcatttgc

SEQ ID NO: 550333 - DNA, 25 bp, Homo sapien
tgccacaggacatggcatttgccat

SEQ ID NO: 550334 - DNA, 25 bp, Homo sapien
ctggttggtgccctgtattctaagc

SEQ ID NO: 550335 - DNA, 25 bp, Homo sapien
ggtgccctgtattctaagcgaagta

SEQ ID NO: 550336 - DNA, 25 bp, Homo sapien
cctgtattctaagcgaagtatctca

SEQ ID NO: 550337 - DNA, 25 bp, Homo sapien
ttagtgtagctggttggtgccctgt

SEQ ID NO: 550338 - DNA, 25 bp, Homo sapien
tttccatcattgcacaaattggggt

SEQ ID NO: 550339 - DNA, 25 bp, Homo sapien
cacaaattggggttcttaattctag

SEQ ID NO: 550340 - DNA, 25 bp, Homo sapien
gcacaaattggggttcttaattcta

SEQ ID NO: 550341 - DNA, 25 bp, Homo sapien
ctggatgctttacttctaatctgtg

SEQ ID NO: 550342 - DNA, 25 bp, Homo sapien
tgtccatccggcagcgtgtctgcta

SEQ ID NO: 550343 - DNA, 25 bp, Homo sapien
gctttacttctaatctgtgacaaag

SEQ ID NO: 550344 - DNA, 25 bp, Homo sapien
gtgacaaagacttgacttgtccatc

SEQ ID NO: 550345 - DNA, 25 bp, Homo sapien
gatcttggcagtattaatggaagtg

SEQ ID NO: 550346 - DNA, 25 bp, Homo sapien
gaagatcttggcagtattaatggaa

SEQ ID NO: 550347 - DNA, 25 bp, Homo sapien
ttgtttctatagtgaagggttgcca

SEQ ID NO: 550348 - DNA, 25 bp, Homo sapien
cttgtgaagatcttggcagtattaa

SEQ ID NO: 550349 - DNA, 25 bp, Homo sapien
gattataatcccatcgagtccatca

SEQ ID NO: 550350 - DNA, 25 bp, Homo sapien
ttatggcctgttgctatctcctggc

SEQ ID NO: 550351 - DNA, 25 bp, Homo sapien
ctattcccgtaaaggaagcacactt

SEQ ID NO: 550352 - DNA, 25 bp, Homo sapien
cctggctttgccctagactctggtt

SEQ ID NO: 550353 - DNA, 25 bp, Homo sapien
tctggtaaaactacatcatattcct

SEQ ID NO: 550354 - DNA, 25 bp, Homo sapien
taaaactacatcatattccttctta

SEQ ID NO: 550355 - DNA, 25 bp, Homo sapien
tttgcaaatatctggtaaaactaca

SEQ ID NO: 550356 - DNA, 25 bp, Homo sapien
gcaaatatctggtaaaactacatca

SEQ ID NO: 550357 - DNA, 25 bp, Homo sapien
taccattaccagaggatttgcggaa

SEQ ID NO: 550358 - DNA, 25 bp, Homo sapien
gaaggaatgataccattaccagagg

SEQ ID NO: 550359 - DNA, 25 bp, Homo sapien
gaatgataccattaccagaggattt

SEQ ID NO: 550360 - DNA, 25 bp, Homo sapien
taccagaggatttgcggaaaactgt

SEQ ID NO: 550361 - DNA, 25 bp, Homo sapien
cagagctctctttcgtaatacttca

SEQ ID NO: 550362 - DNA, 25 bp, Homo sapien
gatcagagctctctttcgtaatact

SEQ ID NO: 550363 - DNA, 25 bp, Homo sapien
tcttgatcagagctctctttcgtaa

SEQ ID NO: 550364 - DNA, 25 bp, Homo sapien
ttgatcagagctctctttcgtaata

SEQ ID NO: 550365 - DNA, 25 bp, Homo sapien
gtcccccacgtctggacctctatgg

SEQ ID NO: 550366 - DNA, 25 bp, Homo sapien
aatcatagctttccaacaatggaga

SEQ ID NO: 550367 - DNA, 25 bp, Homo sapien
caggagaagataaatcatagctttc

SEQ ID NO: 550368 - DNA, 25 bp, Homo sapien
catagctttccaacaatggagaggt

SEQ ID NO: 550369 - DNA, 25 bp, Homo sapien
gaataacacatatggctgccaaaag

SEQ ID NO: 550370 - DNA, 25 bp, Homo sapien
gctgccggaagctattactgaataa

SEQ ID NO: 550371 - DNA, 25 bp, Homo sapien
tggaatgtggtgatacgtttttagg

SEQ ID NO: 550372 - DNA, 25 bp, Homo sapien
gataagtttgtctagtaggagtctg

SEQ ID NO: 550373 - DNA, 25 bp, Homo sapien
taaaggatctgaagtatgaacagaa

SEQ ID NO: 550374 - DNA, 25 bp, Homo sapien
tccggtgtctggaaaggtaatatat

SEQ ID NO: 550375 - DNA, 25 bp, Homo sapien
gagaggagtgcattctccggtgtct

SEQ ID NO: 550376 - DNA, 25 bp, Homo sapien
tctggaaaggtaatatataaggcat

SEQ ID NO: 550377 - DNA, 25 bp, Homo sapien
tcagacaattcctcggttgtgatac

SEQ ID NO: 550378 - DNA, 25 bp, Homo sapien
gagtcacaggcattacaatttagct

SEQ ID NO: 550379 - DNA, 25 bp, Homo sapien
tgatacactgtgagcccagtggcaa

SEQ ID NO: 550380 - DNA, 25 bp, Homo sapien
tggagtcacaggcattacaatttag

SEQ ID NO: 550381 - DNA, 25 bp, Homo sapien
tctccgatttctgtctcacgtagat

SEQ ID NO: 550382 - DNA, 25 bp, Homo sapien
ttagatccctcgtttagcttctccg

SEQ ID NO: 550383 - DNA, 25 bp, Homo sapien
tcacgtagatctgtgtcaagatcta

SEQ ID NO: 550384 - DNA, 25 bp, Homo sapien
agatctgtgtcaagatctatgctat

SEQ ID NO: 550385 - DNA, 25 bp, Homo sapien
gcaatttacataagtgtatgtcttc

SEQ ID NO: 550386 - DNA, 25 bp, Homo sapien
aagattatcagtggactgggtcgta

SEQ ID NO: 550387 - DNA, 25 bp, Homo sapien
ggtcgtactgttaggactaaataca

SEQ ID NO: 550388 - DNA, 25 bp, Homo sapien
tataattgcaatttacataagtgta

SEQ ID NO: 550389 - DNA, 25 bp, Homo sapien
gctgtgtcttatgctgttgtcccat

SEQ ID NO: 550390 - DNA, 25 bp, Homo sapien
tctgctgtgtcttatgctgttgtcc

SEQ ID NO: 550391 - DNA, 25 bp, Homo sapien
tgctgtgtcttatgctgttgtccca

SEQ ID NO: 550392 - DNA, 25 bp, Homo sapien
gcttctgctgtgtcttatgctgttg

SEQ ID NO: 550393 - DNA, 25 bp, Homo sapien
aaagaactctttaaatctgtttgca

SEQ ID NO: 550394 - DNA, 25 bp, Homo sapien
ctttaaatctgtttgcataaggcat

SEQ ID NO: 550395 - DNA, 25 bp, Homo sapien
actctttaaatctgtttgcataagg

SEQ ID NO: 550396 - DNA, 25 bp, Homo sapien
aagaactctttaaatctgtttgcat

SEQ ID NO: 550397 - DNA, 25 bp, Homo sapien
tatcattccgattttttagtgcatg

SEQ ID NO: 550398 - DNA, 25 bp, Homo sapien
aatttgcatggcatcattctgcagg

SEQ ID NO: 550399 - DNA, 25 bp, Homo sapien
tatttcataaatttgcatggcatca

SEQ ID NO: 550400 - DNA, 25 bp, Homo sapien
tgtatcattccgattttttagtgca

SEQ ID NO: 550401 - DNA, 25 bp, Homo sapien
ccttcctatcatgggaaggtttcat

SEQ ID NO: 550402 - DNA, 25 bp, Homo sapien
ctgatgactagggagtggctcggtg

SEQ ID NO: 550403 - DNA, 25 bp, Homo sapien
actagggagtggctcggtgtcatcc

SEQ ID NO: 550404 - DNA, 25 bp, Homo sapien
tggctcggtgtcatccaccttccta

SEQ ID NO: 550405 - DNA, 25 bp, Homo sapien
tgatttcccgtttaaatgttgtgct

SEQ ID NO: 550406 - DNA, 25 bp, Homo sapien
tctacactgttgaattgatttcccg

SEQ ID NO: 550407 - DNA, 25 bp, Homo sapien
tcataggaccatccagtatcttcta

SEQ ID NO: 550408 - DNA, 25 bp, Homo sapien
gttccttcaaggagtgctagctgaa

SEQ ID NO: 550409 - DNA, 25 bp, Homo sapien
tctgtaaaactatccatatcaagat

SEQ ID NO: 550410 - DNA, 25 bp, Homo sapien
tctatcttcgtgaattccccacagg

SEQ ID NO: 550411 - DNA, 25 bp, Homo sapien
aatctatcttcgtgaattccccaca

SEQ ID NO: 550412 - DNA, 25 bp, Homo sapien
atctgtaaaactatccatatcaaga

SEQ ID NO: 550413 - DNA, 25 bp, Homo sapien
cccttgccaattggccagaggcatc

SEQ ID NO: 550414 - DNA, 25 bp, Homo sapien
ggcatctgaggtgagaaataagccc

SEQ ID NO: 550415 - DNA, 25 bp, Homo sapien
ggtgccccttgccaattggccagag

SEQ ID NO: 550416 - DNA, 25 bp, Homo sapien
gccccttgccaattggccagaggca

SEQ ID NO: 550417 - DNA, 25 bp, Homo sapien
tgtgccactcttccattatatacaa

SEQ ID NO: 550418 - DNA, 25 bp, Homo sapien
gccactcttccattatatacaatag

SEQ ID NO: 550419 - DNA, 25 bp, Homo sapien
gtgccactcttccattatatacaat

SEQ ID NO: 550420 - DNA, 25 bp, Homo sapien
tgccactcttccattatatacaata

SEQ ID NO: 550421 - DNA, 25 bp, Homo sapien
cacttgtatgggagtcaacagctaa

SEQ ID NO: 550422 - DNA, 25 bp, Homo sapien
aaggtactacaatttcatcatgcaa

SEQ ID NO: 550423 - DNA, 25 bp, Homo sapien
catgctgccagaacgaaataaactt

SEQ ID NO: 550424 - DNA, 25 bp, Homo sapien
cagctaataggaagcagtgacatct

SEQ ID NO: 550425 - DNA, 25 bp, Homo sapien
ataagagtaacataaaaatatcctt

SEQ ID NO: 550426 - DNA, 25 bp, Homo sapien
ataaaaatatccttgacccagtctt

SEQ ID NO: 550427 - DNA, 25 bp, Homo sapien
cataaaaatatccttgacccagtct

SEQ ID NO: 550428 - DNA, 25 bp, Homo sapien
cataagagtaacataaaaatatcct

SEQ ID NO: 550429 - DNA, 25 bp, Homo sapien
tctgtggtaataaaccaggtctggt

SEQ ID NO: 550430 - DNA, 25 bp, Homo sapien
gcatgcagcaagaacattttcacca

SEQ ID NO: 550431 - DNA, 25 bp, Homo sapien
caccaatggtaggaacgaatcatca

SEQ ID NO: 550432 - DNA, 25 bp, Homo sapien
tggtaggaacgaatcatcaatgtcc

SEQ ID NO: 550433 - DNA, 25 bp, Homo sapien
agagagatgttagcctggacttcag

SEQ ID NO: 550434 - DNA, 25 bp, Homo sapien
gacttcaggaacaaaccccgatatc

SEQ ID NO: 550435 - DNA, 25 bp, Homo sapien
aaaccccgatatctcagtatctgcc

SEQ ID NO: 550436 - DNA, 25 bp, Homo sapien
gagagagagatgttagcctggactt

SEQ ID NO: 550437 - DNA, 25 bp, Homo sapien
aagtgaactaggaaatataacggag

SEQ ID NO: 550438 - DNA, 25 bp, Homo sapien
ctaggaaatataacggagatccgat

SEQ ID NO: 550439 - DNA, 25 bp, Homo sapien
cggagatccgattgtaatgatttgg

SEQ ID NO: 550440 - DNA, 25 bp, Homo sapien
tcagtaagaaagtgaactaggaaat

SEQ ID NO: 550441 - DNA, 25 bp, Homo sapien
tctcaaggagcagttgaatgtgtcc

SEQ ID NO: 550442 - DNA, 25 bp, Homo sapien
agttgaatgtgtccatactggaaac

SEQ ID NO: 550443 - DNA, 25 bp, Homo sapien
aaggagcagttgaatgtgtccatac

SEQ ID NO: 550444 - DNA, 25 bp, Homo sapien
gagcagttgaatgtgtccatactgg

SEQ ID NO: 550445 - DNA, 25 bp, Homo sapien
tatagacctttaaaatactcatttg

SEQ ID NO: 550446 - DNA, 25 bp, Homo sapien
tttgcaaaggcttttatttcagaac

SEQ ID NO: 550447 - DNA, 25 bp, Homo sapien
ttaaaatactcatttgcaaaggctt

SEQ ID NO: 550448 - DNA, 25 bp, Homo sapien
gacctttaaaatactcatttgcaaa

SEQ ID NO: 550449 - DNA, 25 bp, Homo sapien
agctgtaactgcttaacctgaacct

SEQ ID NO: 550450 - DNA, 25 bp, Homo sapien
ctgtccagacagctgtaactgctta

SEQ ID NO: 550451 - DNA, 25 bp, Homo sapien
cagctgtaactgcttaacctgaacc

SEQ ID NO: 550452 - DNA, 25 bp, Homo sapien
ccagacagctgtaactgcttaacct

SEQ ID NO: 550453 - DNA, 25 bp, Homo sapien
cttccagtggtccagcatgtaaaca

SEQ ID NO: 550454 - DNA, 25 bp, Homo sapien
ttccagtggtccagcatgtaaacac

SEQ ID NO: 550455 - DNA, 25 bp, Homo sapien
tccagtggtccagcatgtaaacaca

SEQ ID NO: 550456 - DNA, 25 bp, Homo sapien
ccagtggtccagcatgtaaacacat

SEQ ID NO: 550457 - DNA, 25 bp, Homo sapien
gttaatatgatgttccaagtctgta

SEQ ID NO: 550458 - DNA, 25 bp, Homo sapien
actatcgttaatatgatgttccaag

SEQ ID NO: 550459 - DNA, 25 bp, Homo sapien
tatgatgttccaagtctgtatttgg

SEQ ID NO: 550460 - DNA, 25 bp, Homo sapien
tgttttcataactatcgttaatatg

SEQ ID NO: 550461 - DNA, 25 bp, Homo sapien
gattacttacaacaccaaggaaatg

SEQ ID NO: 550462 - DNA, 25 bp, Homo sapien
tactggatgaaaccatacgtagcat

SEQ ID NO: 550463 - DNA, 25 bp, Homo sapien
tcactggtagaacctaagagatgtg

SEQ ID NO: 550464 - DNA, 25 bp, Homo sapien
taaattggaaatacgtgaacctgtg

SEQ ID NO: 550465 - DNA, 25 bp, Homo sapien
tcttgaggcaacttaaaccacttac

SEQ ID NO: 550466 - DNA, 25 bp, Homo sapien
gacatactttagttcacagcagcac

SEQ ID NO: 550467 - DNA, 25 bp, Homo sapien
cacccatggcctatataattgcaac

SEQ ID NO: 550468 - DNA, 25 bp, Homo sapien
ttcaaagttttgagccacccatggc

SEQ ID NO: 550469 - DNA, 25 bp, Homo sapien
gcttaggttctgattgatgacacac

SEQ ID NO: 550470 - DNA, 25 bp, Homo sapien
gatgacacactcacgtaaggcactt

SEQ ID NO: 550471 - DNA, 25 bp, Homo sapien
gcatttctgcgaaagccctcaaact

SEQ ID NO: 550472 - DNA, 25 bp, Homo sapien
gcaagaggactcctatgagacactt

SEQ ID NO: 550473 - DNA, 25 bp, Homo sapien
taatgtgcctccatatcaggctgga

SEQ ID NO: 550474 - DNA, 25 bp, Homo sapien
aataccttccttggacgtgagtaca

SEQ ID NO: 550475 - DNA, 25 bp, Homo sapien
tcttccagatgctttggaccaaagg

SEQ ID NO: 550476 - DNA, 25 bp, Homo sapien
gctccaggacttctaaatagtcagg

SEQ ID NO: 550477 - DNA, 25 bp, Homo sapien
catacatgctgtactgaagatgcac

SEQ ID NO: 550478 - DNA, 25 bp, Homo sapien
tctcctgcggtgaagaacaagaacc

SEQ ID NO: 550479 - DNA, 25 bp, Homo sapien
cagagggtctttcagtagtgtgatg

SEQ ID NO: 550480 - DNA, 25 bp, Homo sapien
ccatgtgctgttcatagagtgaggc

SEQ ID NO: 550481 - DNA, 25 bp, Homo sapien
tatggagaccaaggaacatgccttt

SEQ ID NO: 550482 - DNA, 25 bp, Homo sapien
ggcacagcgtccgtaagagatcgta

SEQ ID NO: 550483 - DNA, 25 bp, Homo sapien
cctcaaggtcaatctgggttagcaa

SEQ ID NO: 550484 - DNA, 25 bp, Homo sapien
aattcctttttgtcgagatgcccgg

SEQ ID NO: 550485 - DNA, 25 bp, Homo sapien
ccaagtgaagcatttccaaagtgaa

SEQ ID NO: 550486 - DNA, 25 bp, Homo sapien
cttcaagaacttcaatacgattgtt

SEQ ID NO: 550487 - DNA, 25 bp, Homo sapien
ggttcataaacgatccttcttcaag

SEQ ID NO: 550488 - DNA, 25 bp, Homo sapien
tgtaatctcgttaggttcataaacg

SEQ ID NO: 550489 - DNA, 25 bp, Homo sapien
ttcggccaatgtgttcgagaaaacc

SEQ ID NO: 550490 - DNA, 25 bp, Homo sapien
gaattccaggttttccagtccatgg

SEQ ID NO: 550491 - DNA, 25 bp, Homo sapien
catttgtgtgaagcatcgtcaagcc

SEQ ID NO: 550492 - DNA, 25 bp, Homo sapien
taagtcacaattgcaggcccatttg

SEQ ID NO: 550493 - DNA, 25 bp, Homo sapien
gataccttttgcttcacaatttatt

SEQ ID NO: 550494 - DNA, 25 bp, Homo sapien
ccttttgcttcacaatttattagca

SEQ ID NO: 550495 - DNA, 25 bp, Homo sapien
accttttgcttcacaatttattagc

SEQ ID NO: 550496 - DNA, 25 bp, Homo sapien
cttgataccttttgcttcacaattt

SEQ ID NO: 550497 - DNA, 25 bp, Homo sapien
attgcaaagagaatcacaagagcct

SEQ ID NO: 550498 - DNA, 25 bp, Homo sapien
ccatctttttcctcacaattgcaaa

SEQ ID NO: 550499 - DNA, 25 bp, Homo sapien
tttttcctcacaattgcaaagagaa

SEQ ID NO: 550500 - DNA, 25 bp, Homo sapien
tgtgccatctttttcctcacaattg

SEQ ID NO: 550501 - DNA, 25 bp, Homo sapien
gaataaaagagatgaatccacagct

SEQ ID NO: 550502 - DNA, 25 bp, Homo sapien
gatatacaggcaaggagagatgaat

SEQ ID NO: 550503 - DNA, 25 bp, Homo sapien
gggagtgtaaagatatacaggcaag

SEQ ID NO: 550504 - DNA, 25 bp, Homo sapien
gatgagagcactggagtttgggagt

SEQ ID NO: 550505 - DNA, 25 bp, Homo sapien
taaagcagagactcttcctgacgtt

SEQ ID NO: 550506 - DNA, 25 bp, Homo sapien
aagcagagactcttcctgacgttat

SEQ ID NO: 550507 - DNA, 25 bp, Homo sapien
tgtaaagcagagactcttcctgacg

SEQ ID NO: 550508 - DNA, 25 bp, Homo sapien
ctgtaaagcagagactcttcctgac

SEQ ID NO: 550509 - DNA, 25 bp, Homo sapien
ctgtaatgcacagctggaagaggtg

SEQ ID NO: 550510 - DNA, 25 bp, Homo sapien
cctctggtcaaagatagaatactga

SEQ ID NO: 550511 - DNA, 25 bp, Homo sapien
tttcaagcagagtgcatactagagc

SEQ ID NO: 550512 - DNA, 25 bp, Homo sapien
gatccaagctacagcaatgttctcc

SEQ ID NO: 550513 - DNA, 25 bp, Homo sapien
atagacatctgaataatcaagggcg

SEQ ID NO: 550514 - DNA, 25 bp, Homo sapien
ccctgaacaatatagtttatagaca

SEQ ID NO: 550515 - DNA, 25 bp, Homo sapien
ctgaataatcaagggcgcatagtac

SEQ ID NO: 550516 - DNA, 25 bp, Homo sapien
caggcaaaccctgaacaatatagtt

SEQ ID NO: 550517 - DNA, 25 bp, Homo sapien
tggtaagtttcaaagcgaggaacaa

SEQ ID NO: 550518 - DNA, 25 bp, Homo sapien
gtaagtttcaaagcgaggaacaaca

SEQ ID NO: 550519 - DNA, 25 bp, Homo sapien
gtggtaagtttcaaagcgaggaaca

SEQ ID NO: 550520 - DNA, 25 bp, Homo sapien
aagtttcaaagcgaggaacaacaca

SEQ ID NO: 550521 - DNA, 25 bp, Homo sapien
gagaaatgtcttgcagagaggcgaa

SEQ ID NO: 550522 - DNA, 25 bp, Homo sapien
cattgtgtgggcagaaaactttgcg

SEQ ID NO: 550523 - DNA, 25 bp, Homo sapien
gaatttggtgttgtgctctcggaga

SEQ ID NO: 550524 - DNA, 25 bp, Homo sapien
tcagagcatggacgacctcgaagac

SEQ ID NO: 550525 - DNA, 25 bp, Homo sapien
tgtgtgctcaggattgtcctttttg

SEQ ID NO: 550526 - DNA, 25 bp, Homo sapien
tgtcctttttgaacaggatgtaggg

SEQ ID NO: 550527 - DNA, 25 bp, Homo sapien
ctcaggattgtcctttttgaacagg

SEQ ID NO: 550528 - DNA, 25 bp, Homo sapien
ttgaacaggatgtaggggttcagca

SEQ ID NO: 550529 - DNA, 25 bp, Homo sapien
taattccgttgaaatcttcattgga

SEQ ID NO: 550530 - DNA, 25 bp, Homo sapien
tgtcttcagtttaagagttagtaat

SEQ ID NO: 550531 - DNA, 25 bp, Homo sapien
tcagtttaagagttagtaattcaaa

SEQ ID NO: 550532 - DNA, 25 bp, Homo sapien
aaaataattccgttgaaatcttcat

SEQ ID NO: 550533 - DNA, 25 bp, Homo sapien
tatttgagtagaatctggtaatttt

SEQ ID NO: 550534 - DNA, 25 bp, Homo sapien
gtatttgagtagaatctggtaattt

SEQ ID NO: 550535 - DNA, 25 bp, Homo sapien
ctgtatttgagtagaatctggtaat

SEQ ID NO: 550536 - DNA, 25 bp, Homo sapien
tgtatttgagtagaatctggtaatt

SEQ ID NO: 550537 - DNA, 25 bp, Homo sapien
gtcatgcagggaagcgaacgtgccc

SEQ ID NO: 550538 - DNA, 25 bp, Homo sapien
tgccagagtgtttagcagctgagaa

SEQ ID NO: 550539 - DNA, 25 bp, Homo sapien
aacgtgcccgataaggatttccttg

SEQ ID NO: 550540 - DNA, 25 bp, Homo sapien
caagtaggagccaaggggtcatgca

SEQ ID NO: 550541 - DNA, 25 bp, Homo sapien
cacaaactagttccacaaacaaggg

SEQ ID NO: 550542 - DNA, 25 bp, Homo sapien
caccgacttccacaaactagttcca

SEQ ID NO: 550543 - DNA, 25 bp, Homo sapien
ccacaaactagttccacaaacaagg

SEQ ID NO: 550544 - DNA, 25 bp, Homo sapien
ttccacaaactagttccacaaacaa

SEQ ID NO: 550545 - DNA, 25 bp, Homo sapien
agcagcaatttcacgatggtcaaat

SEQ ID NO: 550546 - DNA, 25 bp, Homo sapien
gcagcaatttcacgatggtcaaatt

SEQ ID NO: 550547 - DNA, 25 bp, Homo sapien
cagcaatttcacgatggtcaaattc

SEQ ID NO: 550548 - DNA, 25 bp, Homo sapien
aagcagcaatttcacgatggtcaaa

SEQ ID NO: 550549 - DNA, 25 bp, Homo sapien
tttgcaaacaacattcaggaaagag

SEQ ID NO: 550550 - DNA, 25 bp, Homo sapien
tgctgccggttgaatgcactactca

SEQ ID NO: 550551 - DNA, 25 bp, Homo sapien
aaagagtaagttgctaggactgcac

SEQ ID NO: 550552 - DNA, 25 bp, Homo sapien
tggatgtagaaatctttgctgccgg

SEQ ID NO: 550553 - DNA, 25 bp, Homo sapien
tgcattaattggctcatcctgtgct

SEQ ID NO: 550554 - DNA, 25 bp, Homo sapien
gcttgtcttctctaattgcattaat

SEQ ID NO: 550555 - DNA, 25 bp, Homo sapien
cattaattggctcatcctgtgctcc

SEQ ID NO: 550556 - DNA, 25 bp, Homo sapien
tcaaagcttgtcttctctaattgca

SEQ ID NO: 550557 - DNA, 25 bp, Homo sapien
ggtggtatagtgcattctcaggaac

SEQ ID NO: 550558 - DNA, 25 bp, Homo sapien
cctagacatctaggagaacccagat

SEQ ID NO: 550559 - DNA, 25 bp, Homo sapien
tatggaatctaggagaacacgcttg

SEQ ID NO: 550560 - DNA, 25 bp, Homo sapien
tcaagggatgctcacattggtggta

SEQ ID NO: 550561 - DNA, 25 bp, Homo sapien
ctggtgggaggctattgtataatga

SEQ ID NO: 550562 - DNA, 25 bp, Homo sapien
cccatgctcattgattagaataatt

SEQ ID NO: 550563 - DNA, 25 bp, Homo sapien
tattgtataatgaggacagagttct

SEQ ID NO: 550564 - DNA, 25 bp, Homo sapien
aaaacactgacgaaagacatggtag

SEQ ID NO: 550565 - DNA, 25 bp, Homo sapien
ggatatccattagagactgcctcac

SEQ ID NO: 550566 - DNA, 25 bp, Homo sapien
aaatgcttagaaatgtgtagttctt

SEQ ID NO: 550567 - DNA, 25 bp, Homo sapien
tgtgtagttcttgtcagaaaaagaa

SEQ ID NO: 550568 - DNA, 25 bp, Homo sapien
ggaaggatatccattagagactgcc

SEQ ID NO: 550569 - DNA, 25 bp, Homo sapien
gaatctgaggaaaccagtcacaaac

SEQ ID NO: 550570 - DNA, 25 bp, Homo sapien
aatcaggaaccacccgtgtctatat

SEQ ID NO: 550571 - DNA, 25 bp, Homo sapien
gaaccacccgtgtctatatagaata

SEQ ID NO: 550572 - DNA, 25 bp, Homo sapien
ttccctggaagcatcatactgcaga

SEQ ID NO: 550573 - DNA, 25 bp, Homo sapien
ggatgcttgctgtatgcatttataa

SEQ ID NO: 550574 - DNA, 25 bp, Homo sapien
tcatccactctgtaataggtcctca

SEQ ID NO: 550575 - DNA, 25 bp, Homo sapien
tcatgatctttaagggatgcttgct

SEQ ID NO: 550576 - DNA, 25 bp, Homo sapien
tcagggacccatggaatgtcatgat

SEQ ID NO: 550577 - DNA, 25 bp, Homo sapien
taatggctatggtgtctgaaatgtg

SEQ ID NO: 550578 - DNA, 25 bp, Homo sapien
gctcctttcccaaagtaaatctgac

SEQ ID NO: 550579 - DNA, 25 bp, Homo sapien
tgtggctcacggagcggcaacagct

SEQ ID NO: 550580 - DNA, 25 bp, Homo sapien
tctgcggagcctgtatctgggctgt

SEQ ID NO: 550581 - DNA, 25 bp, Homo sapien
tgagttcaatctctatttctcccat

SEQ ID NO: 550582 - DNA, 25 bp, Homo sapien
taacaccaatgagttcaatctctat

SEQ ID NO: 550583 - DNA, 25 bp, Homo sapien
ttaacaccaatgagttcaatctcta

SEQ ID NO: 550584 - DNA, 25 bp, Homo sapien
caatgagttcaatctctatttctcc

SEQ ID NO: 550585 - DNA, 25 bp, Homo sapien
gggaatacaaacagccaagacctgt

SEQ ID NO: 550586 - DNA, 25 bp, Homo sapien
tgtgtgcatgcctatgtctgtgtag

SEQ ID NO: 550587 - DNA, 25 bp, Homo sapien
tctgtgtagttctgtgcaggtagga

SEQ ID NO: 550588 - DNA, 25 bp, Homo sapien
tcaccgggaccgttgcaatagtgtc

SEQ ID NO: 550589 - DNA, 25 bp, Homo sapien
caagtgcttcaaggtttctatagaa

SEQ ID NO: 550590 - DNA, 25 bp, Homo sapien
ccacaaattggatatcattttcaaa

SEQ ID NO: 550591 - DNA, 25 bp, Homo sapien
tttgtttgccaaatcacatagacaa

SEQ ID NO: 550592 - DNA, 25 bp, Homo sapien
ttctacagataaatgagacgcttca

SEQ ID NO: 550593 - DNA, 25 bp, Homo sapien
tcattttccttcgaatccagagaaa

SEQ ID NO: 550594 - DNA, 25 bp, Homo sapien
cattttccttcgaatccagagaaag

SEQ ID NO: 550595 - DNA, 25 bp, Homo sapien
gtattggaatgtagtaagaataaga

SEQ ID NO: 550596 - DNA, 25 bp, Homo sapien
ctgatgacgtgtcgtgcatagaaaa

SEQ ID NO: 550597 - DNA, 25 bp, Homo sapien
gatgacgtgtcgtgcatagaaaaat

SEQ ID NO: 550598 - DNA, 25 bp, Homo sapien
atgtattggaatgtagtaagaataa

SEQ ID NO: 550599 - DNA, 25 bp, Homo sapien
cagcaaaatatagagagtgcttctg

SEQ ID NO: 550600 - DNA, 25 bp, Homo sapien
gttcagcaaaatatagagagtgctt

SEQ ID NO: 550601 - DNA, 25 bp, Homo sapien
tgcttctggcagaagaggactggac

SEQ ID NO: 550602 - DNA, 25 bp, Homo sapien
gcaaaatatagagagtgcttctggc

SEQ ID NO: 550603 - DNA, 25 bp, Homo sapien
cttgtgattgaatgattcagaaaat

SEQ ID NO: 550604 - DNA, 25 bp, Homo sapien
tcagaaaattctcatgaatctcagc

SEQ ID NO: 550605 - DNA, 25 bp, Homo sapien
cccttgtgattgaatgattcagaaa

SEQ ID NO: 550606 - DNA, 25 bp, Homo sapien
ccttgtgattgaatgattcagaaaa

SEQ ID NO: 550607 - DNA, 25 bp, Homo sapien
atattttgcattacaaagccatgta

SEQ ID NO: 550608 - DNA, 25 bp, Homo sapien
tattttgcattacaaagccatgtac

SEQ ID NO: 550609 - DNA, 25 bp, Homo sapien
catgagagggccagactttgtaagc

SEQ ID NO: 550610 - DNA, 25 bp, Homo sapien
gcacctgtgcatagagaacttcctc

SEQ ID NO: 550611 - DNA, 25 bp, Homo sapien
tcatgagagggccagactttgtaag

SEQ ID NO: 550612 - DNA, 25 bp, Homo sapien
ctcatgagagggccagactttgtaa

SEQ ID NO: 550613 - DNA, 25 bp, Homo sapien
gaagccctggatgtaccattcccat

SEQ ID NO: 550614 - DNA, 25 bp, Homo sapien
ccactgaagccctggatgtaccatt

SEQ ID NO: 550615 - DNA, 25 bp, Homo sapien
actgaagccctggatgtaccattcc

SEQ ID NO: 550616 - DNA, 25 bp, Homo sapien
tgaagccctggatgtaccattccca

SEQ ID NO: 550617 - DNA, 25 bp, Homo sapien
gctgacccatacagttgtgtaggca

SEQ ID NO: 550618 - DNA, 25 bp, Homo sapien
cagctgacccatacagttgtgtagg

SEQ ID NO: 550619 - DNA, 25 bp, Homo sapien
tcagctgacccatacagttgtgtag

SEQ ID NO: 550620 - DNA, 25 bp, Homo sapien
tgacccatacagttgtgtaggcaac

SEQ ID NO: 550621 - DNA, 25 bp, Homo sapien
accaaggagcctgcaatattgcagc

SEQ ID NO: 550622 - DNA, 25 bp, Homo sapien
ccaaggagcctgcaatattgcagca

SEQ ID NO: 550623 - DNA, 25 bp, Homo sapien
aagccccttcattaaccaatgccat

SEQ ID NO: 550624 - DNA, 25 bp, Homo sapien
taaagccccttcattaaccaatgcc

SEQ ID NO: 550625 - DNA, 25 bp, Homo sapien
gtaaagccccttcattaaccaatgc

SEQ ID NO: 550626 - DNA, 25 bp, Homo sapien
aaagccccttcattaaccaatgcca

SEQ ID NO: 550627 - DNA, 25 bp, Homo sapien
cattgataagcaattcctgccagac

SEQ ID NO: 550628 - DNA, 25 bp, Homo sapien
taatttcccctgaagtatacacgcc

SEQ ID NO: 550629 - DNA, 25 bp, Homo sapien
gtttaccacacacaccattgataag

SEQ ID NO: 550630 - DNA, 25 bp, Homo sapien
tatctgtgtccacatacagtgcttc

SEQ ID NO: 550631 - DNA, 25 bp, Homo sapien
ggagcacttgtaggcctgtcatggc

SEQ ID NO: 550632 - DNA, 25 bp, Homo sapien
gaaatgtggatgtgtcttgccgcca

SEQ ID NO: 550633 - DNA, 25 bp, Homo sapien
ccagaagtcgtccataactctcaac

SEQ ID NO: 550634 - DNA, 25 bp, Homo sapien
catggcaaagctcaatagtcatgta

SEQ ID NO: 550635 - DNA, 25 bp, Homo sapien
tttctgtgtttctatcggaaatgat

SEQ ID NO: 550636 - DNA, 25 bp, Homo sapien
ttctgtgtttctatcggaaatgatc

SEQ ID NO: 550637 - DNA, 25 bp, Homo sapien
tctgtgtttctatcggaaatgatct

SEQ ID NO: 550638 - DNA, 25 bp, Homo sapien
ctgtgtttctatcggaaatgatctt

SEQ ID NO: 550639 - DNA, 25 bp, Homo sapien
catcttttcctctaatagacaagaa

SEQ ID NO: 550640 - DNA, 25 bp, Homo sapien
ttcctctaatagacaagaaacagta

SEQ ID NO: 550641 - DNA, 25 bp, Homo sapien
ctgcatgatctgctcaatgagagca

SEQ ID NO: 550642 - DNA, 25 bp, Homo sapien
caatcagcgagtgagaaatcccatt

SEQ ID NO: 550643 - DNA, 25 bp, Homo sapien
tttcaagcttagaatcaccttcagc

SEQ ID NO: 550644 - DNA, 25 bp, Homo sapien
gcaacaggctctaagtttacagtag

SEQ ID NO: 550645 - DNA, 25 bp, Homo sapien
taacttgggtataggtctgatggat

SEQ ID NO: 550646 - DNA, 25 bp, Homo sapien
tctgatggatgagaaatagtgcaac

SEQ ID NO: 550647 - DNA, 25 bp, Homo sapien
ctacatgaaagctgttaccagaaac

SEQ ID NO: 550648 - DNA, 25 bp, Homo sapien
tgtcctggcatgaagaatttccagt

SEQ ID NO: 550649 - DNA, 25 bp, Homo sapien
ctagtggtgtactctgctgtcctgg

SEQ ID NO: 550650 - DNA, 25 bp, Homo sapien
tcagtttcttcgagacagtctggag

SEQ ID NO: 550651 - DNA, 25 bp, Homo sapien
ctaccttcagaagatgttgccacat

SEQ ID NO: 550652 - DNA, 25 bp, Homo sapien
ccacattgggtgctatggccaggca

SEQ ID NO: 550653 - DNA, 25 bp, Homo sapien
taagcagagcaaaacgagcagtgag

SEQ ID NO: 550654 - DNA, 25 bp, Homo sapien
catgcaaagaacgtggaaggaccca

SEQ ID NO: 550655 - DNA, 25 bp, Homo sapien
tgcagctgataggttctaggacccc

SEQ ID NO: 550656 - DNA, 25 bp, Homo sapien
ttccacattagacgcaacataaagg

SEQ ID NO: 550657 - DNA, 25 bp, Homo sapien
tgtaaaatcctcacacgtggaatcg

SEQ ID NO: 550658 - DNA, 25 bp, Homo sapien
gaatcgctgacttgactttctggct

SEQ ID NO: 550659 - DNA, 25 bp, Homo sapien
ttcataagtaccagggattagggca

SEQ ID NO: 550660 - DNA, 25 bp, Homo sapien
ttactgttacttgctaagagaaatc

SEQ ID NO: 550661 - DNA, 25 bp, Homo sapien
tccagttttactaaggaggtttgca

SEQ ID NO: 550662 - DNA, 25 bp, Homo sapien
tactgttacttgctaagagaaatcc

SEQ ID NO: 550663 - DNA, 25 bp, Homo sapien
attactgttacttgctaagagaaat

SEQ ID NO: 550664 - DNA, 25 bp, Homo sapien
cctacacgcagactagaaaatgaag

SEQ ID NO: 550665 - DNA, 25 bp, Homo sapien
cacatcgtgcacagacaagttgtcc

SEQ ID NO: 550666 - DNA, 25 bp, Homo sapien
gatcatatgaggaagcatcacctac

SEQ ID NO: 550667 - DNA, 25 bp, Homo sapien
gaaaatgaaggtatcacatcgtgca

SEQ ID NO: 550668 - DNA, 25 bp, Homo sapien
cctagacctccaggcctagtgatgg

SEQ ID NO: 550669 - DNA, 25 bp, Homo sapien
gaggctaccttgaggacttctgatg

SEQ ID NO: 550670 - DNA, 25 bp, Homo sapien
cactatcagcagtttgggtaaagcc

SEQ ID NO: 550671 - DNA, 25 bp, Homo sapien
tcttctctatcgcactgtcaggcag

SEQ ID NO: 550672 - DNA, 25 bp, Homo sapien
agggtaatgattggtgtgctgaata

SEQ ID NO: 550673 - DNA, 25 bp, Homo sapien
ctgcctgagacggtaagagggtaat

SEQ ID NO: 550674 - DNA, 25 bp, Homo sapien
aaggctgaaccctgtattctgcttt

SEQ ID NO: 550675 - DNA, 25 bp, Homo sapien
ttaatgccttaagaatgggttctcc

SEQ ID NO: 550676 - DNA, 25 bp, Homo sapien
tttaagataagcctctcagcattac

SEQ ID NO: 550677 - DNA, 25 bp, Homo sapien
ctctttaagataagcctctcagcat

SEQ ID NO: 550678 - DNA, 25 bp, Homo sapien
cactttgagcaaacagaacattcat

SEQ ID NO: 550679 - DNA, 25 bp, Homo sapien
aatttagctcatattcactttgagc

SEQ ID NO: 550680 - DNA, 25 bp, Homo sapien
gctttactatctgctacactatctg

SEQ ID NO: 550681 - DNA, 25 bp, Homo sapien
actatctgattcatcattcagcttg

SEQ ID NO: 550682 - DNA, 25 bp, Homo sapien
actatctgctacactatctgattca

SEQ ID NO: 550683 - DNA, 25 bp, Homo sapien
tatctgattcatcattcagcttgct

SEQ ID NO: 550684 - DNA, 25 bp, Homo sapien
caagcttgtttatgctctatcaaaa

SEQ ID NO: 550685 - DNA, 25 bp, Homo sapien
cacaagcttgtttatgctctatcaa

SEQ ID NO: 550686 - DNA, 25 bp, Homo sapien
acaagcttgtttatgctctatcaaa

SEQ ID NO: 550687 - DNA, 25 bp, Homo sapien
tgatgaatgtgtgatacggtaatag

SEQ ID NO: 550688 - DNA, 25 bp, Homo sapien
tttatatgtgagatgttaacacttc

SEQ ID NO: 550689 - DNA, 25 bp, Homo sapien
gtgatacggtaatagtacatattgt

SEQ ID NO: 550690 - DNA, 25 bp, Homo sapien
gttgctttatatgtgagatgttaac

SEQ ID NO: 550691 - DNA, 25 bp, Homo sapien
tggctgcccaatattgcaactaaag

SEQ ID NO: 550692 - DNA, 25 bp, Homo sapien
gagagatagtattagctcacaggga

SEQ ID NO: 550693 - DNA, 25 bp, Homo sapien
gcttcaaaattatagctgcacgtgg

SEQ ID NO: 550694 - DNA, 25 bp, Homo sapien
cattgttgctattgtaccacagtag

SEQ ID NO: 550695 - DNA, 25 bp, Homo sapien
tcttaactcttactatgtcacactt

SEQ ID NO: 550696 - DNA, 25 bp, Homo sapien
cttaactcttactatgtcacacttt

SEQ ID NO: 550697 - DNA, 25 bp, Homo sapien
ttcttaactcttactatgtcacact

SEQ ID NO: 550698 - DNA, 25 bp, Homo sapien
ttaactcttactatgtcacactttt

SEQ ID NO: 550699 - DNA, 25 bp, Homo sapien
aggaacggccactgtcgccctgctt

SEQ ID NO: 550700 - DNA, 25 bp, Homo sapien
taaaggcgctgccatatcttccagc

SEQ ID NO: 550701 - DNA, 25 bp, Homo sapien
cccctgggtgcctaatcctggagcc

SEQ ID NO: 550702 - DNA, 25 bp, Homo sapien
ctgcttcaataaaggcgctgccata

SEQ ID NO: 550703 - DNA, 25 bp, Homo sapien
tctcccagctgatggccctgcttga

SEQ ID NO: 550704 - DNA, 25 bp, Homo sapien
gagcgtcaggctcagtggtcacctc

SEQ ID NO: 550705 - DNA, 25 bp, Homo sapien
caggagcagatcatggccctgggcc

SEQ ID NO: 550706 - DNA, 25 bp, Homo sapien
gggtgatgttgctgtgagttctttc

SEQ ID NO: 550707 - DNA, 25 bp, Homo sapien
gggccagtgaaacgctgttcctgtt

SEQ ID NO: 550708 - DNA, 25 bp, Homo sapien
tacggtattaacagcattaggaaaa

SEQ ID NO: 550709 - DNA, 25 bp, Homo sapien
gtgttgtttacggtattaacagcat

SEQ ID NO: 550710 - DNA, 25 bp, Homo sapien
catatggattcgtggaagttgaaca

SEQ ID NO: 550711 - DNA, 25 bp, Homo sapien
gagcttctccatagatcaaggagag

SEQ ID NO: 550712 - DNA, 25 bp, Homo sapien
agagcttctccatagatcaaggaga

SEQ ID NO: 550713 - DNA, 25 bp, Homo sapien
gcttctccatagatcaaggagagaa

SEQ ID NO: 550714 - DNA, 25 bp, Homo sapien
tagagcttctccatagatcaaggag

SEQ ID NO: 550715 - DNA, 25 bp, Homo sapien
cttacgcgatgctggtattgtcctg

SEQ ID NO: 550716 - DNA, 25 bp, Homo sapien
aatcttacgcgatgctggtattgtc

SEQ ID NO: 550717 - DNA, 25 bp, Homo sapien
ctgcatatccaatcttacgcgatgc

SEQ ID NO: 550718 - DNA, 25 bp, Homo sapien
tatccaatcttacgcgatgctggta

SEQ ID NO: 550719 - DNA, 25 bp, Homo sapien
tttccggggatatttaatgctacag

SEQ ID NO: 550720 - DNA, 25 bp, Homo sapien
cagaggtatgaaggagaagagattg

SEQ ID NO: 550721 - DNA, 25 bp, Homo sapien
tggcatggagattttccggggatat

SEQ ID NO: 550722 - DNA, 25 bp, Homo sapien
gagattgattagtgtttcctccagg

SEQ ID NO: 550723 - DNA, 25 bp, Homo sapien
caagagttgatagcagcagcgatgt

SEQ ID NO: 550724 - DNA, 25 bp, Homo sapien
agttgatagcagcagcgatgtccac

SEQ ID NO: 550725 - DNA, 25 bp, Homo sapien
gagttgatagcagcagcgatgtcca

SEQ ID NO: 550726 - DNA, 25 bp, Homo sapien
agagttgatagcagcagcgatgtcc

SEQ ID NO: 550727 - DNA, 25 bp, Homo sapien
cagtttccaaatccgaggggtctga

SEQ ID NO: 550728 - DNA, 25 bp, Homo sapien
agtttccaaatccgaggggtctgag

SEQ ID NO: 550729 - DNA, 25 bp, Homo sapien
ccagtttccaaatccgaggggtctg

SEQ ID NO: 550730 - DNA, 25 bp, Homo sapien
aacagttctgtaagtggttattggg

SEQ ID NO: 550731 - DNA, 25 bp, Homo sapien
gtaacaacagcaacgtacttggttg

SEQ ID NO: 550732 - DNA, 25 bp, Homo sapien
gaaggaagtcacatctacttccaca

SEQ ID NO: 550733 - DNA, 25 bp, Homo sapien
tggttattgggtgtaataatgaagg

SEQ ID NO: 550734 - DNA, 25 bp, Homo sapien
gctgggtcatcaaatcagactcaca

SEQ ID NO: 550735 - DNA, 25 bp, Homo sapien
tgacattcttcagtagtcatcagcc

SEQ ID NO: 550736 - DNA, 25 bp, Homo sapien
taatgctgtatctgacattcttcag

SEQ ID NO: 550737 - DNA, 25 bp, Homo sapien
ttttggaccataagcgacacggaca

SEQ ID NO: 550738 - DNA, 25 bp, Homo sapien
gcgacacggacagaatgtgtttctt

SEQ ID NO: 550739 - DNA, 25 bp, Homo sapien
atttttgaagctgaatagtcaaaac

SEQ ID NO: 550740 - DNA, 25 bp, Homo sapien
caaatttttgaagctgaatagtcaa

SEQ ID NO: 550741 - DNA, 25 bp, Homo sapien
aaatttttgaagctgaatagtcaaa

SEQ ID NO: 550742 - DNA, 25 bp, Homo sapien
tttgaagctgaatagtcaaaacatt

SEQ ID NO: 550743 - DNA, 25 bp, Homo sapien
cagtgaatgactgtatatcctgctg

SEQ ID NO: 550744 - DNA, 25 bp, Homo sapien
agtgaatgactgtatatcctgctga

SEQ ID NO: 550745 - DNA, 25 bp, Homo sapien
tgaatgactgtatatcctgctgact

SEQ ID NO: 550746 - DNA, 25 bp, Homo sapien
gtgaatgactgtatatcctgctgac

SEQ ID NO: 550747 - DNA, 25 bp, Homo sapien
ctcatggctaaacttcgtagtggct

SEQ ID NO: 550748 - DNA, 25 bp, Homo sapien
tccttttgcttaggctcatggctaa

SEQ ID NO: 550749 - DNA, 25 bp, Homo sapien
taaacttcgtagtggcttcttccat

SEQ ID NO: 550750 - DNA, 25 bp, Homo sapien
ttttgcttaggctcatggctaaact

SEQ ID NO: 550751 - DNA, 25 bp, Homo sapien
aggatggaataacctccagaagctc

SEQ ID NO: 550752 - DNA, 25 bp, Homo sapien
cagcacaggatggaataacctccag

SEQ ID NO: 550753 - DNA, 25 bp, Homo sapien
gatggaataacctccagaagctcac

SEQ ID NO: 550754 - DNA, 25 bp, Homo sapien
ggatggaataacctccagaagctca

SEQ ID NO: 550755 - DNA, 25 bp, Homo sapien
gtaaaatgagtgtagacttgacatc

SEQ ID NO: 550756 - DNA, 25 bp, Homo sapien
tgtagacttgacatcctatagccat

SEQ ID NO: 550757 - DNA, 25 bp, Homo sapien
ccatgggcactaagcatgtaaaatg

SEQ ID NO: 550758 - DNA, 25 bp, Homo sapien
gaccccatgggcactaagcatgtaa

SEQ ID NO: 550759 - DNA, 25 bp, Homo sapien
tctctcacagccagaaaataatgca

SEQ ID NO: 550760 - DNA, 25 bp, Homo sapien
cttgttcgagttgcctgaaaatata

SEQ ID NO: 550761 - DNA, 25 bp, Homo sapien
tggctctctcacagccagaaaataa

SEQ ID NO: 550762 - DNA, 25 bp, Homo sapien
ttagtcataagtcagaattaatgac

SEQ ID NO: 550763 - DNA, 25 bp, Homo sapien
aagaccctcactggcaagactgtca

SEQ ID NO: 550764 - DNA, 25 bp, Homo sapien
gaagaccctcactggcaagactgtc

SEQ ID NO: 550765 - DNA, 25 bp, Homo sapien
tggtcgaccctgcacctggtcttct

SEQ ID NO: 550766 - DNA, 25 bp, Homo sapien
tggtcttctgtctgagaggtggtgt

SEQ ID NO: 550767 - DNA, 25 bp, Homo sapien
ttgaaaatgtgaaaccaagatccag

SEQ ID NO: 550768 - DNA, 25 bp, Homo sapien
aaatgtgaaaccaagatccaggata

SEQ ID NO: 550769 - DNA, 25 bp, Homo sapien
tccaggataaagaagacatcctcca

SEQ ID NO: 550770 - DNA, 25 bp, Homo sapien
tcattgaaaatgtgaaaccaagatc

SEQ ID NO: 550771 - DNA, 25 bp, Homo sapien
tcttcagccttgcattcgcagtgcc

SEQ ID NO: 550772 - DNA, 25 bp, Homo sapien
atgtccacactctttctgactataa

SEQ ID NO: 550773 - DNA, 25 bp, Homo sapien
taattcttcagccttgcattcgcag

SEQ ID NO: 550774 - DNA, 25 bp, Homo sapien
gcccagggacagcattactctgcac

SEQ ID NO: 550775 - DNA, 25 bp, Homo sapien
cagcagcagatagaactgttgtctt

SEQ ID NO: 550776 - DNA, 25 bp, Homo sapien
gcagcagatagaactgttgtctttt

SEQ ID NO: 550777 - DNA, 25 bp, Homo sapien
agcagcagatagaactgttgtcttt

SEQ ID NO: 550778 - DNA, 25 bp, Homo sapien
attcctttagctctatgcagagctg

SEQ ID NO: 550779 - DNA, 25 bp, Homo sapien
tatgctgattgggataatcttcttc

SEQ ID NO: 550780 - DNA, 25 bp, Homo sapien
tgctgattgggataatcttcttcat

SEQ ID NO: 550781 - DNA, 25 bp, Homo sapien
aattatgctgattgggataatcttc

SEQ ID NO: 550782 - DNA, 25 bp, Homo sapien
ctatttatagcaaacattatggaaa

SEQ ID NO: 550783 - DNA, 25 bp, Homo sapien
tttatagcaaacattatggaaaagt

SEQ ID NO: 550784 - DNA, 25 bp, Homo sapien
tatttatagcaaacattatggaaaa

SEQ ID NO: 550785 - DNA, 25 bp, Homo sapien
tatagcaaacattatggaaaagtac

SEQ ID NO: 550786 - DNA, 25 bp, Homo sapien
gcagttgagccaccatccaagaggt

SEQ ID NO: 550787 - DNA, 25 bp, Homo sapien
gaagtattacgtccagcagcagttg

SEQ ID NO: 550788 - DNA, 25 bp, Homo sapien
ggaacaatcgaccataggccatgac

SEQ ID NO: 550789 - DNA, 25 bp, Homo sapien
tacaggaactgagtcgttaacaaac

SEQ ID NO: 550790 - DNA, 25 bp, Homo sapien
ttccataaatattagcttctgaagg

SEQ ID NO: 550791 - DNA, 25 bp, Homo sapien
cataaatattagcttctgaaggcat

SEQ ID NO: 550792 - DNA, 25 bp, Homo sapien
catttccataaatattagcttctga

SEQ ID NO: 550793 - DNA, 25 bp, Homo sapien
tcatttccataaatattagcttctg

SEQ ID NO: 550794 - DNA, 25 bp, Homo sapien
cctgtttgccatctggtgtcgtcat

SEQ ID NO: 550795 - DNA, 25 bp, Homo sapien
acttggaggaggacttgatgtatcc

SEQ ID NO: 550796 - DNA, 25 bp, Homo sapien
gaggacttgatgtatcctgtttgcc

SEQ ID NO: 550797 - DNA, 25 bp, Homo sapien
ccagtgaacttggaggaggacttga

SEQ ID NO: 550798 - DNA, 25 bp, Homo sapien
tcatatgtgcactattggtttgcat

SEQ ID NO: 550799 - DNA, 25 bp, Homo sapien
aagtgtcttcgacattcaaatggaa

SEQ ID NO: 550800 - DNA, 25 bp, Homo sapien
caagttaattaatagtttatatgga

SEQ ID NO: 550801 - DNA, 25 bp, Homo sapien
ctcatttcatatgtgcactattggt

SEQ ID NO: 550802 - DNA, 25 bp, Homo sapien
cagtgtacaacgctggcagggtcag

SEQ ID NO: 550803 - DNA, 25 bp, Homo sapien
tcaggtcttaaaagaggagactgtc

SEQ ID NO: 550804 - DNA, 25 bp, Homo sapien
tagaggaaggagcagttcagtgtac

SEQ ID NO: 550805 - DNA, 25 bp, Homo sapien
gcttgcataatgtcgaggggacact

SEQ ID NO: 550806 - DNA, 25 bp, Homo sapien
tttccttcaacttatcctctttcat

SEQ ID NO: 550807 - DNA, 25 bp, Homo sapien
ctgctcctgactttctttttccttc

SEQ ID NO: 550808 - DNA, 25 bp, Homo sapien
gctcctgactttctttttccttcaa

SEQ ID NO: 550809 - DNA, 25 bp, Homo sapien
ttttccttcaacttatcctctttca

SEQ ID NO: 550810 - DNA, 25 bp, Homo sapien
tgggccttcagcagatatgaggcaa

SEQ ID NO: 550811 - DNA, 25 bp, Homo sapien
ctctgcacagtggtgcttcttgggc

SEQ ID NO: 550812 - DNA, 25 bp, Homo sapien
tgcacagtggtgcttcttgggctga

SEQ ID NO: 550813 - DNA, 25 bp, Homo sapien
gaggcaacggtatgactgatgctct

SEQ ID NO: 550814 - DNA, 25 bp, Homo sapien
ttttctcccctttgtctgcctctca

SEQ ID NO: 550815 - DNA, 25 bp, Homo sapien
atttttctcccctttgtctgcctct

SEQ ID NO: 550816 - DNA, 25 bp, Homo sapien
gcatttttctcccctttgtctgcct

SEQ ID NO: 550817 - DNA, 25 bp, Homo sapien
ttctcccctttgtctgcctctcatt

SEQ ID NO: 550818 - DNA, 25 bp, Homo sapien
gatttcagacccttggtagacttct

SEQ ID NO: 550819 - DNA, 25 bp, Homo sapien
tacaggtgaagtccactgcctcatc

SEQ ID NO: 550820 - DNA, 25 bp, Homo sapien
gaacatcccactaggtctggtgaca

SEQ ID NO: 550821 - DNA, 25 bp, Homo sapien
ggtgacacagatagatttcagaccc

SEQ ID NO: 550822 - DNA, 25 bp, Homo sapien
tgcacaccttgaacgatttatagat

SEQ ID NO: 550823 - DNA, 25 bp, Homo sapien
gtccactgggagctcaagtgcaact

SEQ ID NO: 550824 - DNA, 25 bp, Homo sapien
gacaggaagctcaacccagtgcaca

SEQ ID NO: 550825 - DNA, 25 bp, Homo sapien
ctgggagctcaagtgcaactccaga

SEQ ID NO: 550826 - DNA, 25 bp, Homo sapien
tgggcatagccagatgaacaggttc

SEQ ID NO: 550827 - DNA, 25 bp, Homo sapien
ccaatgagggttatactagcggaag

SEQ ID NO: 550828 - DNA, 25 bp, Homo sapien
catatggtctgaaggccgttgtgca

SEQ ID NO: 550829 - DNA, 25 bp, Homo sapien
tactagtggccagttccagatgcag

SEQ ID NO: 550830 - DNA, 25 bp, Homo sapien
ctctcaaattttcacacaaggcggc

SEQ ID NO: 550831 - DNA, 25 bp, Homo sapien
aattttcacacaaggcggctacatc

SEQ ID NO: 550832 - DNA, 25 bp, Homo sapien
acacaaggcggctacatcttctgcc

SEQ ID NO: 550833 - DNA, 25 bp, Homo sapien
tcaaattttcacacaaggcggctac

SEQ ID NO: 550834 - DNA, 25 bp, Homo sapien
cataaactatcttgcaaacaaacac

SEQ ID NO: 550835 - DNA, 25 bp, Homo sapien
aatttacaacataaactatcttgca

SEQ ID NO: 550836 - DNA, 25 bp, Homo sapien
acacacattgaccttcacctcagga

SEQ ID NO: 550837 - DNA, 25 bp, Homo sapien
tcacctcaggacagttataactcta

SEQ ID NO: 550838 - DNA, 25 bp, Homo sapien
aattcgaaaccagtgatgcattggc

SEQ ID NO: 550839 - DNA, 25 bp, Homo sapien
gaaaagcctgtggagacatgactac

SEQ ID NO: 550840 - DNA, 25 bp, Homo sapien
gaaaacgtgagtaagagtcgcagcc

SEQ ID NO: 550841 - DNA, 25 bp, Homo sapien
tcaagcaaagcccaagtgagggaca

SEQ ID NO: 550842 - DNA, 25 bp, Homo sapien
tgctcatcagatctcccatttcagc

SEQ ID NO: 550843 - DNA, 25 bp, Homo sapien
catgtgcagatagatccagctcaag

SEQ ID NO: 550844 - DNA, 25 bp, Homo sapien
aagggctttggttcagtcctccact

SEQ ID NO: 550845 - DNA, 25 bp, Homo sapien
ggagtatgaacttctcctcctgatc

SEQ ID NO: 550846 - DNA, 25 bp, Homo sapien
ttgttaatttgactgttgtctgtct

SEQ ID NO: 550847 - DNA, 25 bp, Homo sapien
gtcttcattacagctggattagaaa

SEQ ID NO: 550848 - DNA, 25 bp, Homo sapien
ctgtcttcattacagctggattaga

SEQ ID NO: 550849 - DNA, 25 bp, Homo sapien
ttaatttgactgttgtctgtcttca

SEQ ID NO: 550850 - DNA, 25 bp, Homo sapien
gagccgagttgtcctcttgcaatct

SEQ ID NO: 550851 - DNA, 25 bp, Homo sapien
agattcttgtggatttagggaggca

SEQ ID NO: 550852 - DNA, 25 bp, Homo sapien
gacatgttaatgcatcgattttaga

SEQ ID NO: 550853 - DNA, 25 bp, Homo sapien
ctgtgttcaaacaaggagattcttg

SEQ ID NO: 550854 - DNA, 25 bp, Homo sapien
catgaagtgtaacctgcccaagcag

SEQ ID NO: 550855 - DNA, 25 bp, Homo sapien
acatcactttctcgctggttcacag

SEQ ID NO: 550856 - DNA, 25 bp, Homo sapien
caaatcgaggatcaattgcaaggca

SEQ ID NO: 550857 - DNA, 25 bp, Homo sapien
tgaatattcttcagccgtggcaact

SEQ ID NO: 550858 - DNA, 25 bp, Homo sapien
tgatataatctgacactttccaaag

SEQ ID NO: 550859 - DNA, 25 bp, Homo sapien
ggtcaacttaaatagcagctcattc

SEQ ID NO: 550860 - DNA, 25 bp, Homo sapien
tcattccctcgccacaatccatcag

SEQ ID NO: 550861 - DNA, 25 bp, Homo sapien
atccatcagaactaagcttgaaatg

SEQ ID NO: 550862 - DNA, 25 bp, Homo sapien
aaatgttccaggataggttgggact

SEQ ID NO: 550863 - DNA, 25 bp, Homo sapien
gagatcatccatggcattaatattt

SEQ ID NO: 550864 - DNA, 25 bp, Homo sapien
cacataagaaatgttccaggatagg

SEQ ID NO: 550865 - DNA, 25 bp, Homo sapien
ccaagcacacataagaaatgttcca

SEQ ID NO: 550866 - DNA, 25 bp, Homo sapien
ttccttaacacaagccactgtggga

SEQ ID NO: 550867 - DNA, 25 bp, Homo sapien
caattccttaacacaagccactgtg

SEQ ID NO: 550868 - DNA, 25 bp, Homo sapien
agccactgtgggaatcatatacctg

SEQ ID NO: 550869 - DNA, 25 bp, Homo sapien
ccactgtgggaatcatatacctggt

SEQ ID NO: 550870 - DNA, 25 bp, Homo sapien
gccggcatgctggttctcaagttcc

SEQ ID NO: 550871 - DNA, 25 bp, Homo sapien
gctggttctcaagttcccaccaaaa

SEQ ID NO: 550872 - DNA, 25 bp, Homo sapien
tcagaatggcgtatagccggcatgc

SEQ ID NO: 550873 - DNA, 25 bp, Homo sapien
cgtatagccggcatgctggttctca

SEQ ID NO: 550874 - DNA, 25 bp, Homo sapien
agatagatgtcagctctcctctctg

SEQ ID NO: 550875 - DNA, 25 bp, Homo sapien
tcttgctcaaagttaacacatcctc

SEQ ID NO: 550876 - DNA, 25 bp, Homo sapien
ctgtaatacaaaagcccagttctga

SEQ ID NO: 550877 - DNA, 25 bp, Homo sapien
ccagttctgaaacatgtattcttgc

SEQ ID NO: 550878 - DNA, 25 bp, Homo sapien
taaaatgaaaggatgatatacggca

SEQ ID NO: 550879 - DNA, 25 bp, Homo sapien
gaagtgctgacagaaaacgtaaaac

SEQ ID NO: 550880 - DNA, 25 bp, Homo sapien
tatacggcaaggtggtagcataaaa

SEQ ID NO: 550881 - DNA, 25 bp, Homo sapien
tttgtcatgcaccaagtaatctctg

SEQ ID NO: 550882 - DNA, 25 bp, Homo sapien
agaacatgtgctgagcttctgcctc

SEQ ID NO: 550883 - DNA, 25 bp, Homo sapien
tcccagtgctggttgggcatagcag

SEQ ID NO: 550884 - DNA, 25 bp, Homo sapien
tccaagggtactcctaggcagaaaa

SEQ ID NO: 550885 - DNA, 25 bp, Homo sapien
gcatagcagtggcttttccaagggt

SEQ ID NO: 550886 - DNA, 25 bp, Homo sapien
tacagagaacccgagatcatgcatg

SEQ ID NO: 550887 - DNA, 25 bp, Homo sapien
tgggtcaaagctgcctgataactgg

SEQ ID NO: 550888 - DNA, 25 bp, Homo sapien
caaagcagccgttgtcccattggca

SEQ ID NO: 550889 - DNA, 25 bp, Homo sapien
tggaaccctaacactcagcacgttg

SEQ ID NO: 550890 - DNA, 25 bp, Homo sapien
ggatacttataatcagcacaatgga

SEQ ID NO: 550891 - DNA, 25 bp, Homo sapien
cttatacctatctagaacggaagga

SEQ ID NO: 550892 - DNA, 25 bp, Homo sapien
ttaatagtgaacagaaccaacgtgc

SEQ ID NO: 550893 - DNA, 25 bp, Homo sapien
tctgtagtcaacaactgtagtccag

SEQ ID NO: 550894 - DNA, 25 bp, Homo sapien
agctttagtttatgcaggttgtatc

SEQ ID NO: 550895 - DNA, 25 bp, Homo sapien
ttctctatcttgagaccgcttacgt

SEQ ID NO: 550896 - DNA, 25 bp, Homo sapien
tcttaatgtcatggaaggccccaaa

SEQ ID NO: 550897 - DNA, 25 bp, Homo sapien
tacagtggtagtcctgaaacttctc

SEQ ID NO: 550898 - DNA, 25 bp, Homo sapien
caatggaggaaatttcaatggagct

SEQ ID NO: 550899 - DNA, 25 bp, Homo sapien
tgacacatggtgatggctcagtaat

SEQ ID NO: 550900 - DNA, 25 bp, Homo sapien
aaacgtaggcctatttatgtcatgc

SEQ ID NO: 550901 - DNA, 25 bp, Homo sapien
ggaaatgacgtgtgatacatcctta

SEQ ID NO: 550902 - DNA, 25 bp, Homo sapien
cctttgttatagtctcagaggcatc

SEQ ID NO: 550903 - DNA, 25 bp, Homo sapien
ggtgctatatcctcacttcagacat

SEQ ID NO: 550904 - DNA, 25 bp, Homo sapien
ccatagagttagtgcagaatcccca

SEQ ID NO: 550905 - DNA, 25 bp, Homo sapien
gatcagatgactttaatctcagaga

SEQ ID NO: 550906 - DNA, 25 bp, Homo sapien
tcatcggcgtgtaatttgggcttca

SEQ ID NO: 550907 - DNA, 25 bp, Homo sapien
gcctagtcaaccctaagccatgaaa

SEQ ID NO: 550908 - DNA, 25 bp, Homo sapien
tctgttgagtttcacaggcctagtc

SEQ ID NO: 550909 - DNA, 25 bp, Homo sapien
tggcactgaaataaccgatctgtat

SEQ ID NO: 550910 - DNA, 25 bp, Homo sapien
acctccacttggacatccatatggt

SEQ ID NO: 550911 - DNA, 25 bp, Homo sapien
cttatgaatttacagctgatatgtc

SEQ ID NO: 550912 - DNA, 25 bp, Homo sapien
tggacatccatatggttcttatgaa

SEQ ID NO: 550913 - DNA, 25 bp, Homo sapien
aggttgaggatctgtgtgtcttcat

SEQ ID NO: 550914 - DNA, 25 bp, Homo sapien
caacaagattctctagataaaggaa

SEQ ID NO: 550915 - DNA, 25 bp, Homo sapien
cattatattcattgcggcacaattt

SEQ ID NO: 550916 - DNA, 25 bp, Homo sapien
ggagcaatggatactggggtttact

SEQ ID NO: 550917 - DNA, 25 bp, Homo sapien
gcaccatggcatactatgctgttaa

SEQ ID NO: 550918 - DNA, 25 bp, Homo sapien
taacagtaagtacacgagacagcag

SEQ ID NO: 550919 - DNA, 25 bp, Homo sapien
tctagtggagtttagcagatgactc

SEQ ID NO: 550920 - DNA, 25 bp, Homo sapien
tcccaatccgagaattgcacagtcc

SEQ ID NO: 550921 - DNA, 25 bp, Homo sapien
tgtttgcagctaggaggaaccactc

SEQ ID NO: 550922 - DNA, 25 bp, Homo sapien
acccgcggtcgccaccgcggcggcg

SEQ ID NO: 550923 - DNA, 25 bp, Homo sapien
cggagagcaccggggagagcctttt

SEQ ID NO: 550924 - DNA, 25 bp, Homo sapien
cgcggagagcaccggggagagcctt

SEQ ID NO: 550925 - DNA, 25 bp, Homo sapien
agagcaccggggagagccttttggg

SEQ ID NO: 550926 - DNA, 25 bp, Homo sapien
aaaactgacgtggtatcaggaaggc

SEQ ID NO: 550927 - DNA, 25 bp, Homo sapien
gatccacgtgtactggcacctcaga

SEQ ID NO: 550928 - DNA, 25 bp, Homo sapien
cctgtgggcagcaagcaatgatgat

SEQ ID NO: 550929 - DNA, 25 bp, Homo sapien
tagggcaattgattgggccattccg

SEQ ID NO: 550930 - DNA, 25 bp, Homo sapien
atgccaagaagccatgtgagatatc

SEQ ID NO: 550931 - DNA, 25 bp, Homo sapien
aaatgatgccaagaagccatgtgag

SEQ ID NO: 550932 - DNA, 25 bp, Homo sapien
tgatgccaagaagccatgtgagata

SEQ ID NO: 550933 - DNA, 25 bp, Homo sapien
gccaagaagccatgtgagatatcat

SEQ ID NO: 550934 - DNA, 25 bp, Homo sapien
cattccggttcgctggttagctttt

SEQ ID NO: 550935 - DNA, 25 bp, Homo sapien
ttccggttcgctggttagcttttca

SEQ ID NO: 550936 - DNA, 25 bp, Homo sapien
tcattccggttcgctggttagcttt

SEQ ID NO: 550937 - DNA, 25 bp, Homo sapien
tccggttcgctggttagcttttcaa

SEQ ID NO: 550938 - DNA, 25 bp, Homo sapien
caaaactctgagtagcagtgctaaa

SEQ ID NO: 550939 - DNA, 25 bp, Homo sapien
cattgtaatacccaggtccttgagc

SEQ ID NO: 550940 - DNA, 25 bp, Homo sapien
taagcttctacactaggccacagac

SEQ ID NO: 550941 - DNA, 25 bp, Homo sapien
tcattccattggacaccttgactgt

SEQ ID NO: 550942 - DNA, 25 bp, Homo sapien
caaactaaagtctgatgggatttca

SEQ ID NO: 550943 - DNA, 25 bp, Homo sapien
ggctgtaggtacctcttccattgaa

SEQ ID NO: 550944 - DNA, 25 bp, Homo sapien
gatgacactattctgctgttggctg

SEQ ID NO: 550945 - DNA, 25 bp, Homo sapien
gcaagctccatgtgttaacaatcag

SEQ ID NO: 550946 - DNA, 25 bp, Homo sapien
ggaatatcacagaggctatactgag

SEQ ID NO: 550947 - DNA, 25 bp, Homo sapien
acaggtcatgtatctttgccaggaa

SEQ ID NO: 550948 - DNA, 25 bp, Homo sapien
aggttcagaatcacccaagtcatca

SEQ ID NO: 550949 - DNA, 25 bp, Homo sapien
cctttgaagattaccagaaaaccat

SEQ ID NO: 550950 - DNA, 25 bp, Homo sapien
gagctgtacttttcgcagagaggta

SEQ ID NO: 550951 - DNA, 25 bp, Homo sapien
ggtaaagaaacctgacggcattaga

SEQ ID NO: 550952 - DNA, 25 bp, Homo sapien
ttgtacaactagaattgctttttca

SEQ ID NO: 550953 - DNA, 25 bp, Homo sapien
cagccagttctcttgtacaactaga

SEQ ID NO: 550954 - DNA, 25 bp, Homo sapien
ccaggtgttgggactgcgtaagtta

SEQ ID NO: 550955 - DNA, 25 bp, Homo sapien
taagagtgtcagatacattgcaggc

SEQ ID NO: 550956 - DNA, 25 bp, Homo sapien
tagagtgaagtgactcgaacaggac

SEQ ID NO: 550957 - DNA, 25 bp, Homo sapien
tgggttcttacatctcagcctctgg

SEQ ID NO: 550958 - DNA, 25 bp, Homo sapien
tatattaacacccagagcctttgct

SEQ ID NO: 550959 - DNA, 25 bp, Homo sapien
catagtgtaagtgagcgttcaaccc

SEQ ID NO: 550960 - DNA, 25 bp, Homo sapien
tctctatttagaggcacacagggct

SEQ ID NO: 550961 - DNA, 25 bp, Homo sapien
tgctccaggatacagatagagtggt

SEQ ID NO: 550962 - DNA, 25 bp, Homo sapien
aagctccagatgcttcctgagatac

SEQ ID NO: 550963 - DNA, 25 bp, Homo sapien
cttgacattggaagctccagatgct

SEQ ID NO: 550964 - DNA, 25 bp, Homo sapien
taaactccttgacattggaagctcc

SEQ ID NO: 550965 - DNA, 25 bp, Homo sapien
tggaagctccagatgcttcctgaga

SEQ ID NO: 550966 - DNA, 25 bp, Homo sapien
tagagccaggactgtcatccactta

SEQ ID NO: 550967 - DNA, 25 bp, Homo sapien
tacctcttcaatagctagagccagg

SEQ ID NO: 550968 - DNA, 25 bp, Homo sapien
gccaggactgtcatccacttactca

SEQ ID NO: 550969 - DNA, 25 bp, Homo sapien
tgagtagatacccactctgatggct

SEQ ID NO: 550970 - DNA, 25 bp, Homo sapien
tagtaggcccattatatcactgaga

SEQ ID NO: 550971 - DNA, 25 bp, Homo sapien
ggtttctgtactcagctgattggtc

SEQ ID NO: 550972 - DNA, 25 bp, Homo sapien
tatttggtgctgattgagtaaacgg

SEQ ID NO: 550973 - DNA, 25 bp, Homo sapien
tttcaatgtggacaaaggctatggt

SEQ ID NO: 550974 - DNA, 25 bp, Homo sapien
tctagttccagctccactacttgac

SEQ ID NO: 550975 - DNA, 25 bp, Homo sapien
aataactatcagcatcactaaaggc

SEQ ID NO: 550976 - DNA, 25 bp, Homo sapien
tattactcaagtaaatttagcgctc

SEQ ID NO: 550977 - DNA, 25 bp, Homo sapien
tgaattgctgaatatactgcttgac

SEQ ID NO: 550978 - DNA, 25 bp, Homo sapien
ttaaatacatctcaacatcagtggc

SEQ ID NO: 550979 - DNA, 25 bp, Homo sapien
aaaagcgtgttctcttcctgtgtca

SEQ ID NO: 550980 - DNA, 25 bp, Homo sapien
taaagacaattgagctctagtttcc

SEQ ID NO: 550981 - DNA, 25 bp, Homo sapien
tgtaaacgtatctagccccaaaagc

SEQ ID NO: 550982 - DNA, 25 bp, Homo sapien
gcatgcattaagtatttgttttaat

SEQ ID NO: 550983 - DNA, 25 bp, Homo sapien
acataggtatatgtaacatgtgcca

SEQ ID NO: 550984 - DNA, 25 bp, Homo sapien
ttttaaggcctgcatgcattaagta

SEQ ID NO: 550985 - DNA, 25 bp, Homo sapien
ggttttaaggcctgcatgcattaag

SEQ ID NO: 550986 - DNA, 25 bp, Homo sapien
agctggttcatacgcttctatattg

SEQ ID NO: 550987 - DNA, 25 bp, Homo sapien
ggttcatacgcttctatattgatta

SEQ ID NO: 550988 - DNA, 25 bp, Homo sapien
gcagctggttcatacgcttctatat

SEQ ID NO: 550989 - DNA, 25 bp, Homo sapien
cagcagctggttcatacgcttctat

SEQ ID NO: 550990 - DNA, 25 bp, Homo sapien
tattttgtaggcttacttagcagat

SEQ ID NO: 550991 - DNA, 25 bp, Homo sapien
cttagcagatgtcatttttgttgca

SEQ ID NO: 550992 - DNA, 25 bp, Homo sapien
agcaaaacaccacttacaattctag

SEQ ID NO: 550993 - DNA, 25 bp, Homo sapien
ttgtacacattgcaacactttgaac

SEQ ID NO: 550994 - DNA, 25 bp, Homo sapien
tcctcgtcatcttcaggttgattag

SEQ ID NO: 550995 - DNA, 25 bp, Homo sapien
cctcgtcatcttcaggttgattagg

SEQ ID NO: 550996 - DNA, 25 bp, Homo sapien
tcagaaaggttttcatcctcgtcat

SEQ ID NO: 550997 - DNA, 25 bp, Homo sapien
tcatcctcgtcatcttcaggttgat

SEQ ID NO: 550998 - DNA, 25 bp, Homo sapien
ggtgaatagaacttttggttatcag

SEQ ID NO: 550999 - DNA, 25 bp, Homo sapien
gaggtgaatagaacttttggttatc

SEQ ID NO: 551000 - DNA, 25 bp, Homo sapien
ttgaggtgaatagaacttttggtta

SEQ ID NO: 551001 - DNA, 25 bp, Homo sapien
aggtgaatagaacttttggttatca

SEQ ID NO: 551002 - DNA, 25 bp, Homo sapien
tatgtacgtctaatcaatacgcgag

SEQ ID NO: 551003 - DNA, 25 bp, Homo sapien
tcaacaagagtgacccagatgtgaa

SEQ ID NO: 551004 - DNA, 25 bp, Homo sapien
taggagacgactaaactcacttctg

SEQ ID NO: 551005 - DNA, 25 bp, Homo sapien
ccagggtcctttgtgtttagaatca

SEQ ID NO: 551006 - DNA, 25 bp, Homo sapien
ctctgacggttaatggttttcttat

SEQ ID NO: 551007 - DNA, 25 bp, Homo sapien
tctctgacggttaatggttttctta

SEQ ID NO: 551008 - DNA, 25 bp, Homo sapien
gaaacagagtctcttactcacagga

SEQ ID NO: 551009 - DNA, 25 bp, Homo sapien
gagcctctatgccttcacctaagga

SEQ ID NO: 551010 - DNA, 25 bp, Homo sapien
taaagtatatctagaccaggatcga

SEQ ID NO: 551011 - DNA, 25 bp, Homo sapien
gaccagacagtttcgcaattcatac

SEQ ID NO: 551012 - DNA, 25 bp, Homo sapien
caattaggccctctacgttgtggca

SEQ ID NO: 551013 - DNA, 25 bp, Homo sapien
gatcccggtcgatgtctccagttga

SEQ ID NO: 551014 - DNA, 25 bp, Homo sapien
tgttgttcattaggacgtccagcca

SEQ ID NO: 551015 - DNA, 25 bp, Homo sapien
tgaagaatcggatcacccataggct

SEQ ID NO: 551016 - DNA, 25 bp, Homo sapien
tgagaggcatgaaagcttaaatgca

SEQ ID NO: 551017 - DNA, 25 bp, Homo sapien
ctcttctcatgcattgtgtattgtc

SEQ ID NO: 551018 - DNA, 25 bp, Homo sapien
ggcatgaaagcttaaatgcagtttg

SEQ ID NO: 551019 - DNA, 25 bp, Homo sapien
gtctctttgcacagggagtagagca

SEQ ID NO: 551020 - DNA, 25 bp, Homo sapien
taaactgtcgatgagccagtaatac

SEQ ID NO: 551021 - DNA, 25 bp, Homo sapien
ttaatttgacgtggcacttcccact

SEQ ID NO: 551022 - DNA, 25 bp, Homo sapien
ggagtggtcagacatttgtttaaac

SEQ ID NO: 551023 - DNA, 25 bp, Homo sapien
tttgacgtggcacttcccactggag

SEQ ID NO: 551024 - DNA, 25 bp, Homo sapien
ggccctccactgaactatcaaaagg

SEQ ID NO: 551025 - DNA, 25 bp, Homo sapien
tctctgtgcgggttagccatttcca

SEQ ID NO: 551026 - DNA, 25 bp, Homo sapien
caaagccttactgtctctgtgcggg

SEQ ID NO: 551027 - DNA, 25 bp, Homo sapien
catttccagttgaacgggccctcca

SEQ ID NO: 551028 - DNA, 25 bp, Homo sapien
caccgcaatgtatgtgagagcataa

SEQ ID NO: 551029 - DNA, 25 bp, Homo sapien
tcaggatcatgttgggacttattca

SEQ ID NO: 551030 - DNA, 25 bp, Homo sapien
cttagagggcagttcaggaccttca

SEQ ID NO: 551031 - DNA, 25 bp, Homo sapien
tggttatagggcaccgcaatgtatg

SEQ ID NO: 551032 - DNA, 25 bp, Homo sapien
tctgaccaatactcacctaggtggg

SEQ ID NO: 551033 - DNA, 25 bp, Homo sapien
tttcagcaggtgacaggcagtcatc

SEQ ID NO: 551034 - DNA, 25 bp, Homo sapien
tcaaaactgagctgtgccatgacca

SEQ ID NO: 551035 - DNA, 25 bp, Homo sapien
tgaccacccgaccaatatatgcagc

SEQ ID NO: 551036 - DNA, 25 bp, Homo sapien
gaggcgaggtcttgagaagagttga

SEQ ID NO: 551037 - DNA, 25 bp, Homo sapien
tcttccagaaggcatcgtgcagtga

SEQ ID NO: 551038 - DNA, 25 bp, Homo sapien
ttcgccaggctgtgcaattctagag

SEQ ID NO: 551039 - DNA, 25 bp, Homo sapien
catcatcttccatcaaagaggcgag

SEQ ID NO: 551040 - DNA, 25 bp, Homo sapien
aagcctggagatggaatggcctctt

SEQ ID NO: 551041 - DNA, 25 bp, Homo sapien
gttgctgagttattcctccacttga

SEQ ID NO: 551042 - DNA, 25 bp, Homo sapien
tcttcaatagagctgggtggctgaa

SEQ ID NO: 551043 - DNA, 25 bp, Homo sapien
tgttttaattgcgaagattggcagc

SEQ ID NO: 551044 - DNA, 25 bp, Homo sapien
gaaaaactattcttgctgccaagct

SEQ ID NO: 551045 - DNA, 25 bp, Homo sapien
aaaaactattcttgctgccaagcta

SEQ ID NO: 551046 - DNA, 25 bp, Homo sapien
aaaactattcttgctgccaagctaa

SEQ ID NO: 551047 - DNA, 25 bp, Homo sapien
ggaaaaactattcttgctgccaagc

SEQ ID NO: 551048 - DNA, 25 bp, Homo sapien
catgttccacacaaatttgttccag

SEQ ID NO: 551049 - DNA, 25 bp, Homo sapien
tatattggaactaattgtgtagcca

SEQ ID NO: 551050 - DNA, 25 bp, Homo sapien
tggtaagctaatggagcatgttgct

SEQ ID NO: 551051 - DNA, 25 bp, Homo sapien
gcaacattttcatgttccacctgat

SEQ ID NO: 551052 - DNA, 25 bp, Homo sapien
aaggagaatgaagtgccacatgtct

SEQ ID NO: 551053 - DNA, 25 bp, Homo sapien
gagaatgaagtgccacatgtctctg

SEQ ID NO: 551054 - DNA, 25 bp, Homo sapien
aaaggagaatgaagtgccacatgtc

SEQ ID NO: 551055 - DNA, 25 bp, Homo sapien
ggagaatgaagtgccacatgtctct

SEQ ID NO: 551056 - DNA, 25 bp, Homo sapien
tacgattttaatggagggtgcatct

SEQ ID NO: 551057 - DNA, 25 bp, Homo sapien
gtacgattttaatggagggtgcatc

SEQ ID NO: 551058 - DNA, 25 bp, Homo sapien
caggtacgattttaatggagggtgc

SEQ ID NO: 551059 - DNA, 25 bp, Homo sapien
gagggtgcatcttcggttggtggga

SEQ ID NO: 551060 - DNA, 25 bp, Homo sapien
agctctgtgtacagccagtcagcca

SEQ ID NO: 551061 - DNA, 25 bp, Homo sapien
tcagccactgagaagcgattgccat

SEQ ID NO: 551062 - DNA, 25 bp, Homo sapien
ctgagaagcgattgccatcccacac

SEQ ID NO: 551063 - DNA, 25 bp, Homo sapien
cagtcagccactgagaagcgattgc

SEQ ID NO: 551064 - DNA, 25 bp, Homo sapien
agcctttgatttttcgtgtaactcg

SEQ ID NO: 551065 - DNA, 25 bp, Homo sapien
gacatcaggtgttttgtagggatag

SEQ ID NO: 551066 - DNA, 25 bp, Homo sapien
tcctgcctcaggtgtatataatatg

SEQ ID NO: 551067 - DNA, 25 bp, Homo sapien
taatgattggacacctattagagct

SEQ ID NO: 551068 - DNA, 25 bp, Homo sapien
tggcatagtcaccactgtggtgttg

SEQ ID NO: 551069 - DNA, 25 bp, Homo sapien
gcatagtcaccactgtggtgttgac

SEQ ID NO: 551070 - DNA, 25 bp, Homo sapien
ggcatagtcaccactgtggtgttga

SEQ ID NO: 551071 - DNA, 25 bp, Homo sapien
ctctttctgattcgctgggacctgc

SEQ ID NO: 551072 - DNA, 25 bp, Homo sapien
gaaaccccgagtgttatctggcaga

SEQ ID NO: 551073 - DNA, 25 bp, Homo sapien
tgtatatagcactctggaccacaaa

SEQ ID NO: 551074 - DNA, 25 bp, Homo sapien
gagacagtgccatagggctcaggcc

SEQ ID NO: 551075 - DNA, 25 bp, Homo sapien
tgttgatttgtagtagctttgaggg

SEQ ID NO: 551076 - DNA, 25 bp, Homo sapien
ggacagaggtggtattagcaacttc

SEQ ID NO: 551077 - DNA, 25 bp, Homo sapien
gatttgtagtagctttgagggcctc

SEQ ID NO: 551078 - DNA, 25 bp, Homo sapien
cagaggtggtattagcaacttcctg

SEQ ID NO: 551079 - DNA, 25 bp, Homo sapien
tggtttagcaccaagggttgcttgt

SEQ ID NO: 551080 - DNA, 25 bp, Homo sapien
ctggtttagcaccaagggttgcttg

SEQ ID NO: 551081 - DNA, 25 bp, Homo sapien
ctgcatgtgtatatctgatggctct

SEQ ID NO: 551082 - DNA, 25 bp, Homo sapien
ggtctgcatgtgtatatctgatggc

SEQ ID NO: 551083 - DNA, 25 bp, Homo sapien
gtctgcatgtgtatatctgatggct

SEQ ID NO: 551084 - DNA, 25 bp, Homo sapien
tctgcatgtgtatatctgatggctc

SEQ ID NO: 551085 - DNA, 25 bp, Homo sapien
gcctcttcagtgtggatttgctcat

SEQ ID NO: 551086 - DNA, 25 bp, Homo sapien
tatttctttttgactttgcctcttc

SEQ ID NO: 551087 - DNA, 25 bp, Homo sapien
tttgcctcttcagtgtggatttgct

SEQ ID NO: 551088 - DNA, 25 bp, Homo sapien
actttgcctcttcagtgtggatttg

SEQ ID NO: 551089 - DNA, 25 bp, Homo sapien
aataggatggaaaccgaatttctga

SEQ ID NO: 551090 - DNA, 25 bp, Homo sapien
ttgaataggatggaaaccgaatttc

SEQ ID NO: 551091 - DNA, 25 bp, Homo sapien
tcaagattgaataggatggaaaccg

SEQ ID NO: 551092 - DNA, 25 bp, Homo sapien
gattgaataggatggaaaccgaatt

SEQ ID NO: 551093 - DNA, 25 bp, Homo sapien
tcctttagcaagtgatgtcttcttt

SEQ ID NO: 551094 - DNA, 25 bp, Homo sapien
cctttagcaagtgatgtcttctttc

SEQ ID NO: 551095 - DNA, 25 bp, Homo sapien
tttcctttagcaagtgatgtcttct

SEQ ID NO: 551096 - DNA, 25 bp, Homo sapien
ttttcctttagcaagtgatgtcttc

SEQ ID NO: 551097 - DNA, 25 bp, Homo sapien
gtttttcaaaactaagctcaggctc

SEQ ID NO: 551098 - DNA, 25 bp, Homo sapien
gtgtttttcaaaactaagctcaggc

SEQ ID NO: 551099 - DNA, 25 bp, Homo sapien
tttcaaaactaagctcaggctcacc

SEQ ID NO: 551100 - DNA, 25 bp, Homo sapien
caaaactaagctcaggctcacccat

SEQ ID NO: 551101 - DNA, 25 bp, Homo sapien
ctaagggatgcatgagacttgggct

SEQ ID NO: 551102 - DNA, 25 bp, Homo sapien
gtttgtctcagggtaattgtactta

SEQ ID NO: 551103 - DNA, 25 bp, Homo sapien
catctgatctaagtgccctgtcctc

SEQ ID NO: 551104 - DNA, 25 bp, Homo sapien
cagggtaattgtacttactgtaggg

SEQ ID NO: 551105 - DNA, 25 bp, Homo sapien
tcaaagtgttatctggccttgcgtt

SEQ ID NO: 551106 - DNA, 25 bp, Homo sapien
tctggccttgcgttgtaggaacagc

SEQ ID NO: 551107 - DNA, 25 bp, Homo sapien
tgttatctggccttgcgttgtagga

SEQ ID NO: 551108 - DNA, 25 bp, Homo sapien
cttgcgttgtaggaacagcacaatc

SEQ ID NO: 551109 - DNA, 25 bp, Homo sapien
tctggatgctgaaccctcacattga

SEQ ID NO: 551110 - DNA, 25 bp, Homo sapien
tctaagaagcgagctgaaagcgccc

SEQ ID NO: 551111 - DNA, 25 bp, Homo sapien
gaatggcttgccgatctggatataa

SEQ ID NO: 551112 - DNA, 25 bp, Homo sapien
agtaacacttatccacgatggcaag

SEQ ID NO: 551113 - DNA, 25 bp, Homo sapien
tcttctggaagtatatctcctttac

SEQ ID NO: 551114 - DNA, 25 bp, Homo sapien
tctctctgatccatgctctgaaata

SEQ ID NO: 551115 - DNA, 25 bp, Homo sapien
tctcctttaccagtttgccttccaa

SEQ ID NO: 551116 - DNA, 25 bp, Homo sapien
gcatcctttggacgctttgtgtaga

SEQ ID NO: 551117 - DNA, 25 bp, Homo sapien
cgtgtctggaattcagaagtcacaa

SEQ ID NO: 551118 - DNA, 25 bp, Homo sapien
ctggaattcagaagtcacaattagg

SEQ ID NO: 551119 - DNA, 25 bp, Homo sapien
tcacaattaggggtcctgtagtcat

SEQ ID NO: 551120 - DNA, 25 bp, Homo sapien
tttcgtgtctggaattcagaagtca

SEQ ID NO: 551121 - DNA, 25 bp, Homo sapien
actgtgagtcaaacttgaggacaca

SEQ ID NO: 551122 - DNA, 25 bp, Homo sapien
tgactgtgagtcaaacttgaggaca

SEQ ID NO: 551123 - DNA, 25 bp, Homo sapien
gactgtgagtcaaacttgaggacac

SEQ ID NO: 551124 - DNA, 25 bp, Homo sapien
atgactgtgagtcaaacttgaggac

SEQ ID NO: 551125 - DNA, 25 bp, Homo sapien
caagtatagataaacagattggcat

SEQ ID NO: 551126 - DNA, 25 bp, Homo sapien
tataatcaagtatagataaacagat

SEQ ID NO: 551127 - DNA, 25 bp, Homo sapien
ctgtgacaggtaaaatctttgtata

SEQ ID NO: 551128 - DNA, 25 bp, Homo sapien
tctttgtataatcaagtatagataa

SEQ ID NO: 551129 - DNA, 25 bp, Homo sapien
tgtgggcgaattgagctcccctcct

SEQ ID NO: 551130 - DNA, 25 bp, Homo sapien
cagttgggtaacgtggaccatggtc

SEQ ID NO: 551131 - DNA, 25 bp, Homo sapien
ggttggttcgccctctcaggtcagt

SEQ ID NO: 551132 - DNA, 25 bp, Homo sapien
tgccgctggcaaccccgcggttggt

SEQ ID NO: 551133 - DNA, 25 bp, Homo sapien
gattccagtggggcgcctcgcttgt

SEQ ID NO: 551134 - DNA, 25 bp, Homo sapien
cagtggggcgcctcgcttgtcccct

SEQ ID NO: 551135 - DNA, 25 bp, Homo sapien
tggggcgcctcgcttgtccccttta

SEQ ID NO: 551136 - DNA, 25 bp, Homo sapien
tcccagtccgaacgggattccagtg

SEQ ID NO: 551137 - DNA, 25 bp, Homo sapien
ctcggtttctagttaagttcgccat

SEQ ID NO: 551138 - DNA, 25 bp, Homo sapien
tgaaggagaatttgcgttttggcga

SEQ ID NO: 551139 - DNA, 25 bp, Homo sapien
gaatttgcgttttggcgataattgg

SEQ ID NO: 551140 - DNA, 25 bp, Homo sapien
tttggcgataattggtgtggcagca

SEQ ID NO: 551141 - DNA, 25 bp, Homo sapien
ctaaggatcaattgaaggagaattt

SEQ ID NO: 551142 - DNA, 25 bp, Homo sapien
gagtcattttggattccatcatgca

SEQ ID NO: 551143 - DNA, 25 bp, Homo sapien
cttcacattgtaaaaagagtcattt

SEQ ID NO: 551144 - DNA, 25 bp, Homo sapien
ccatcatgcagagaccgaagctgtt

SEQ ID NO: 551145 - DNA, 25 bp, Homo sapien
cagagaccgaagctgttgattgact

SEQ ID NO: 551146 - DNA, 25 bp, Homo sapien
tcatctaagttttaggcaggtccag

SEQ ID NO: 551147 - DNA, 25 bp, Homo sapien
tatcgaggggatccacagaaacact

SEQ ID NO: 551148 - DNA, 25 bp, Homo sapien
actcttttccgtgctctatcgaggg

SEQ ID NO: 551149 - DNA, 25 bp, Homo sapien
gcctgagctgggatctgcattcact

SEQ ID NO: 551150 - DNA, 25 bp, Homo sapien
gatagctgttaatgcaagttgggtc

SEQ ID NO: 551151 - DNA, 25 bp, Homo sapien
tgatagctgttaatgcaagttgggt

SEQ ID NO: 551152 - DNA, 25 bp, Homo sapien
tccatgatagctgttaatgcaagtt

SEQ ID NO: 551153 - DNA, 25 bp, Homo sapien
catgatagctgttaatgcaagttgg

SEQ ID NO: 551154 - DNA, 25 bp, Homo sapien
agcctttggccacaagagcctgaga

SEQ ID NO: 551155 - DNA, 25 bp, Homo sapien
gcctttggccacaagagcctgagac

SEQ ID NO: 551156 - DNA, 25 bp, Homo sapien
caaagaagttgattgggcttcaagc

SEQ ID NO: 551157 - DNA, 25 bp, Homo sapien
gaccttgataccctcgacacatgaa

SEQ ID NO: 551158 - DNA, 25 bp, Homo sapien
tcctgagcctcaggtaggcaataca

SEQ ID NO: 551159 - DNA, 25 bp, Homo sapien
gacacatgaactcatagccttggta

SEQ ID NO: 551160 - DNA, 25 bp, Homo sapien
tttcttaatacaatctctgtaccat

SEQ ID NO: 551161 - DNA, 25 bp, Homo sapien
aatacaatctctgtaccattttggg

SEQ ID NO: 551162 - DNA, 25 bp, Homo sapien
tcttcaggtcttgattaatgtgcct

SEQ ID NO: 551163 - DNA, 25 bp, Homo sapien
cttcaggtcttgattaatgtgcctc

SEQ ID NO: 551164 - DNA, 25 bp, Homo sapien
aggatcacgctgtatttccagaaca

SEQ ID NO: 551165 - DNA, 25 bp, Homo sapien
ttctttgttttcaatcagtgaaggg

SEQ ID NO: 551166 - DNA, 25 bp, Homo sapien
tggtttgaatctgaagctacaggat

SEQ ID NO: 551167 - DNA, 25 bp, Homo sapien
ggtaaagattctttgttttcaatca

SEQ ID NO: 551168 - DNA, 25 bp, Homo sapien
ttatcttcggggcagtattttttgc

SEQ ID NO: 551169 - DNA, 25 bp, Homo sapien
tcttcggggcagtattttttgcaga

SEQ ID NO: 551170 - DNA, 25 bp, Homo sapien
tatcttcggggcagtattttttgca

SEQ ID NO: 551171 - DNA, 25 bp, Homo sapien
atcttcggggcagtattttttgcag

SEQ ID NO: 551172 - DNA, 25 bp, Homo sapien
aatgtctggtggcattcccagcacc

SEQ ID NO: 551173 - DNA, 25 bp, Homo sapien
tcaatgtctggtggcattcccagca

SEQ ID NO: 551174 - DNA, 25 bp, Homo sapien
gtctggtggcattcccagcaccagc

SEQ ID NO: 551175 - DNA, 25 bp, Homo sapien
catcaatgtctggtggcattcccag

SEQ ID NO: 551176 - DNA, 25 bp, Homo sapien
caaatatacagatctgaattgggcc

SEQ ID NO: 551177 - DNA, 25 bp, Homo sapien
tgaattgggccactcgtgtcaacat

SEQ ID NO: 551178 - DNA, 25 bp, Homo sapien
tacagatctgaattgggccactcgt

SEQ ID NO: 551179 - DNA, 25 bp, Homo sapien
tgtatccaaatatacagatctgaat

SEQ ID NO: 551180 - DNA, 25 bp, Homo sapien
caagggacagacctcagctgctctt

SEQ ID NO: 551181 - DNA, 25 bp, Homo sapien
tgagggccatcttaggactctaccc

SEQ ID NO: 551182 - DNA, 25 bp, Homo sapien
catgtggtgcggattttgctgccta

SEQ ID NO: 551183 - DNA, 25 bp, Homo sapien
gctcatgccacagttccagaaggta

SEQ ID NO: 551184 - DNA, 25 bp, Homo sapien
acctgcttaatatcacaagcccagt

SEQ ID NO: 551185 - DNA, 25 bp, Homo sapien
tggcacctgcttaatatcacaagcc

SEQ ID NO: 551186 - DNA, 25 bp, Homo sapien
cacctgcttaatatcacaagcccag

SEQ ID NO: 551187 - DNA, 25 bp, Homo sapien
ggcacctgcttaatatcacaagccc

SEQ ID NO: 551188 - DNA, 25 bp, Homo sapien
gaaacctctgttcttctagtccact

SEQ ID NO: 551189 - DNA, 25 bp, Homo sapien
aaacctctgttcttctagtccactg

SEQ ID NO: 551190 - DNA, 25 bp, Homo sapien
atcatccataacctcaatgatgaac

SEQ ID NO: 551191 - DNA, 25 bp, Homo sapien
tcatatattctggatccatcatcca

SEQ ID NO: 551192 - DNA, 25 bp, Homo sapien
ctattcatatattctggatccatca

SEQ ID NO: 551193 - DNA, 25 bp, Homo sapien
cataacctcaatgatgaacaagaca

SEQ ID NO: 551194 - DNA, 25 bp, Homo sapien
gataggacaacctctcttcacaact

SEQ ID NO: 551195 - DNA, 25 bp, Homo sapien
tcattttcctcgcactgataggaca

SEQ ID NO: 551196 - DNA, 25 bp, Homo sapien
gttgtgtaccaatgcctgagccctt

SEQ ID NO: 551197 - DNA, 25 bp, Homo sapien
acagctgtctgtagcaccgtatcat

SEQ ID NO: 551198 - DNA, 25 bp, Homo sapien
cactaacagctcaaaaaggcaaggt

SEQ ID NO: 551199 - DNA, 25 bp, Homo sapien
caggtatctggcctttagaactgtg

SEQ ID NO: 551200 - DNA, 25 bp, Homo sapien
cagtagccacaagaaactagtatgg

SEQ ID NO: 551201 - DNA, 25 bp, Homo sapien
aagacacagatggagacttttctca

SEQ ID NO: 551202 - DNA, 25 bp, Homo sapien
tttcaatgattctgctatatttcca

SEQ ID NO: 551203 - DNA, 25 bp, Homo sapien
gaacttgaggtaatgtaaattgcag

SEQ ID NO: 551204 - DNA, 25 bp, Homo sapien
tcaggaacttaaaatcgatttcaat

SEQ ID NO: 551205 - DNA, 25 bp, Homo sapien
ccatttgtgtctgaacttgaggtaa

SEQ ID NO: 551206 - DNA, 25 bp, Homo sapien
tcactttttgccgaagagctgatta

SEQ ID NO: 551207 - DNA, 25 bp, Homo sapien
tttgccgaagagctgattataaaaa

SEQ ID NO: 551208 - DNA, 25 bp, Homo sapien
ctttttgccgaagagctgattataa

SEQ ID NO: 551209 - DNA, 25 bp, Homo sapien
attttcactttttgccgaagagctg

SEQ ID NO: 551210 - DNA, 25 bp, Homo sapien
ggactacagattcatactgcaccca

SEQ ID NO: 551211 - DNA, 25 bp, Homo sapien
gcatatactgtttaccaagcttcag

SEQ ID NO: 551212 - DNA, 25 bp, Homo sapien
catgcagttacgaaaaagtgcttcc

SEQ ID NO: 551213 - DNA, 25 bp, Homo sapien
tctttagctgtgcatgatcgatcat

SEQ ID NO: 551214 - DNA, 25 bp, Homo sapien
gtgcctatcattgctatctaaccca

SEQ ID NO: 551215 - DNA, 25 bp, Homo sapien
ttagctaaatgagagcctaaaactt

SEQ ID NO: 551216 - DNA, 25 bp, Homo sapien
tgagacaacagtgcctatcattgct

SEQ ID NO: 551217 - DNA, 25 bp, Homo sapien
gtttaactttgcattcatttagcta

SEQ ID NO: 551218 - DNA, 25 bp, Homo sapien
acagtctgtaagtgtccactgattt

SEQ ID NO: 551219 - DNA, 25 bp, Homo sapien
tgtccactgatttcaattctcaaca

SEQ ID NO: 551220 - DNA, 25 bp, Homo sapien
tgtaaagaagtgtaccaccctttca

SEQ ID NO: 551221 - DNA, 25 bp, Homo sapien
tgccgggacattcaatgatccattc

SEQ ID NO: 551222 - DNA, 25 bp, Homo sapien
taatggcctagtgccgggacattca

SEQ ID NO: 551223 - DNA, 25 bp, Homo sapien
gggacattcaatgatccattcttag

SEQ ID NO: 551224 - DNA, 25 bp, Homo sapien
gcctagtgccgggacattcaatgat

SEQ ID NO: 551225 - DNA, 25 bp, Homo sapien
gttttctgtatggtacgtataattc

SEQ ID NO: 551226 - DNA, 25 bp, Homo sapien
ttctgtatggtacgtataattctaa

SEQ ID NO: 551227 - DNA, 25 bp, Homo sapien
tatggtacgtataattctaagaatt

SEQ ID NO: 551228 - DNA, 25 bp, Homo sapien
tatctggtttttcgtttgcttgttc

SEQ ID NO: 551229 - DNA, 25 bp, Homo sapien
tatgtgcgtctccaaaacacttccc

SEQ ID NO: 551230 - DNA, 25 bp, Homo sapien
tgagatatgtgcgtctccaaaacac

SEQ ID NO: 551231 - DNA, 25 bp, Homo sapien
gatatgtgcgtctccaaaacacttc

SEQ ID NO: 551232 - DNA, 25 bp, Homo sapien
tccctgagatatgtgcgtctccaaa

SEQ ID NO: 551233 - DNA, 25 bp, Homo sapien
gggcctgggtctcttcatagaaagc

SEQ ID NO: 551234 - DNA, 25 bp, Homo sapien
tgaaggaccggtctggttactggta

SEQ ID NO: 551235 - DNA, 25 bp, Homo sapien
actgggcctgggtctcttcatagaa

SEQ ID NO: 551236 - DNA, 25 bp, Homo sapien
cagctgttgaaggaccggtctggtt

SEQ ID NO: 551237 - DNA, 25 bp, Homo sapien
ctctaggcctggctgtgtaatcaga

SEQ ID NO: 551238 - DNA, 25 bp, Homo sapien
tcacgtagctctaggcctggctgtg

SEQ ID NO: 551239 - DNA, 25 bp, Homo sapien
tcaacgccatcacttgatgccttga

SEQ ID NO: 551240 - DNA, 25 bp, Homo sapien
gctgtgtaatcagactcaacgccat

SEQ ID NO: 551241 - DNA, 25 bp, Homo sapien
agctgcatggtgcagtaactgcctc

SEQ ID NO: 551242 - DNA, 25 bp, Homo sapien
gctgcatggtgcagtaactgcctct

SEQ ID NO: 551243 - DNA, 25 bp, Homo sapien
catggtgcagtaactgcctctattt

SEQ ID NO: 551244 - DNA, 25 bp, Homo sapien
tgcatggtgcagtaactgcctctat

SEQ ID NO: 551245 - DNA, 25 bp, Homo sapien
gaattggttcttttgtctcacagtg

SEQ ID NO: 551246 - DNA, 25 bp, Homo sapien
ttgtctcacagtgggtccttttcat

SEQ ID NO: 551247 - DNA, 25 bp, Homo sapien
tcacagtgggtccttttcatttcat

SEQ ID NO: 551248 - DNA, 25 bp, Homo sapien
gtctgaattggttcttttgtctcac

SEQ ID NO: 551249 - DNA, 25 bp, Homo sapien
gtggacacctccaccaagatcttac

SEQ ID NO: 551250 - DNA, 25 bp, Homo sapien
taacagctttcacccttaaggccca

SEQ ID NO: 551251 - DNA, 25 bp, Homo sapien
ggtatctcatcgttaaatcctggac

SEQ ID NO: 551252 - DNA, 25 bp, Homo sapien
tctggattctaaatatcttggagtt

SEQ ID NO: 551253 - DNA, 25 bp, Homo sapien
gctttcacccttaaggcccattcag

SEQ ID NO: 551254 - DNA, 25 bp, Homo sapien
tgccctcccactcagcactcgaggc

SEQ ID NO: 551255 - DNA, 25 bp, Homo sapien
ctcccactcagcactcgaggccagt

SEQ ID NO: 551256 - DNA, 25 bp, Homo sapien
cactcagcactcgaggccagtaggg

SEQ ID NO: 551257 - DNA, 25 bp, Homo sapien
ccactcagcactcgaggccagtagg

SEQ ID NO: 551258 - DNA, 25 bp, Homo sapien
tacatattaattattagatctgatc

SEQ ID NO: 551259 - DNA, 25 bp, Homo sapien
tgagaacatgtggttctcacttggt

SEQ ID NO: 551260 - DNA, 25 bp, Homo sapien
taattattagatctgatctctccct

SEQ ID NO: 551261 - DNA, 25 bp, Homo sapien
aacatgtggttctcacttggttttc

SEQ ID NO: 551262 - DNA, 25 bp, Homo sapien
tcttaaagaagagccaaggcaggtc

SEQ ID NO: 551263 - DNA, 25 bp, Homo sapien
gggataatatccaagtgcagctctt

SEQ ID NO: 551264 - DNA, 25 bp, Homo sapien
taattctcaaaggacacaatgcact

SEQ ID NO: 551265 - DNA, 25 bp, Homo sapien
ggttatccctcagcactagtcatag

SEQ ID NO: 551266 - DNA, 25 bp, Homo sapien
tagcacgcagtttacagtctttttc

SEQ ID NO: 551267 - DNA, 25 bp, Homo sapien
tcttcaaagcagttagcacgcagtt

SEQ ID NO: 551268 - DNA, 25 bp, Homo sapien
tattttgcttggcatgacttctcat

SEQ ID NO: 551269 - DNA, 25 bp, Homo sapien
cattagtccccttcttgcaattatc

SEQ ID NO: 551270 - DNA, 25 bp, Homo sapien
atgcaaagaaatgtcttacgtggca

SEQ ID NO: 551271 - DNA, 25 bp, Homo sapien
aatgcaaagaaatgtcttacgtggc

SEQ ID NO: 551272 - DNA, 25 bp, Homo sapien
aagaaatgcaaagaaatgtcttacg

SEQ ID NO: 551273 - DNA, 25 bp, Homo sapien
gaaatgcaaagaaatgtcttacgtg

SEQ ID NO: 551274 - DNA, 25 bp, Homo sapien
tttcttggctcccactatgacactt

SEQ ID NO: 551275 - DNA, 25 bp, Homo sapien
cacaatgttcctttcttaacactag

SEQ ID NO: 551276 - DNA, 25 bp, Homo sapien
taggtaatgccagaacccatggatt

SEQ ID NO: 551277 - DNA, 25 bp, Homo sapien
tcttaacactagctcaatgatataa

SEQ ID NO: 551278 - DNA, 25 bp, Homo sapien
gaaatccagaatgttctgtctggca

SEQ ID NO: 551279 - DNA, 25 bp, Homo sapien
gaagaatccagtttatccaggtcag

SEQ ID NO: 551280 - DNA, 25 bp, Homo sapien
tctggcatcattaattgtggagctg

SEQ ID NO: 551281 - DNA, 25 bp, Homo sapien
caggctgtatacatgttagggtccc

SEQ ID NO: 551282 - DNA, 25 bp, Homo sapien
tgctccagtctgttaagggccactg

SEQ ID NO: 551283 - DNA, 25 bp, Homo sapien
tgtgcctggtaggagatttttcaac

SEQ ID NO: 551284 - DNA, 25 bp, Homo sapien
tcttttggttggacggtaatagctg

SEQ ID NO: 551285 - DNA, 25 bp, Homo sapien
tgtgcactcagggactgctttgtgt

SEQ ID NO: 551286 - DNA, 25 bp, Homo sapien
gtgaaaaactcctacttgctgattt

SEQ ID NO: 551287 - DNA, 25 bp, Homo sapien
ctgtgtgaaaaactcctacttgctg

SEQ ID NO: 551288 - DNA, 25 bp, Homo sapien
gtgtgaaaaactcctacttgctgat

SEQ ID NO: 551289 - DNA, 25 bp, Homo sapien
tttctgagttctgtggttgcatttt

SEQ ID NO: 551290 - DNA, 25 bp, Homo sapien
tccctggaaatctcaatctttaact

SEQ ID NO: 551291 - DNA, 25 bp, Homo sapien
ctccctggaaatctcaatctttaac

SEQ ID NO: 551292 - DNA, 25 bp, Homo sapien
ctctatgggaaaacggagattgttt

SEQ ID NO: 551293 - DNA, 25 bp, Homo sapien
acaagttctctatgggaaaacggag

SEQ ID NO: 551294 - DNA, 25 bp, Homo sapien
gacccagacaagtgcccgttctaaa

SEQ ID NO: 551295 - DNA, 25 bp, Homo sapien
tccattttgaatgtgatgccgtgaa

SEQ ID NO: 551296 - DNA, 25 bp, Homo sapien
cacagtacaagccactctatgttga

SEQ ID NO: 551297 - DNA, 25 bp, Homo sapien
tcaggtagtgctcttgatctcagcc

SEQ ID NO: 551298 - DNA, 25 bp, Homo sapien
cctttaatcccagctgtccaggagg

SEQ ID NO: 551299 - DNA, 25 bp, Homo sapien
aggaggctgaggtttggtggcgggt

SEQ ID NO: 551300 - DNA, 25 bp, Homo sapien
gcgggtacctttaatcccagctgtc

SEQ ID NO: 551301 - DNA, 25 bp, Homo sapien
gaggctgaggtttggtggcgggtac

SEQ ID NO: 551302 - DNA, 25 bp, Homo sapien
gtagccatgtgttattgagaaaaat

SEQ ID NO: 551303 - DNA, 25 bp, Homo sapien
ccatgtgttattgagaaaaataggt

SEQ ID NO: 551304 - DNA, 25 bp, Homo sapien
cactgtagccatgtgttattgagaa

SEQ ID NO: 551305 - DNA, 25 bp, Homo sapien
ttcactgtagccatgtgttattgag

SEQ ID NO: 551306 - DNA, 25 bp, Homo sapien
ttttaaagtagtattgaactgctgc

SEQ ID NO: 551307 - DNA, 25 bp, Homo sapien
ccacacccggccagggagtattatt

SEQ ID NO: 551308 - DNA, 25 bp, Homo sapien
accacacccggccagggagtattat

SEQ ID NO: 551309 - DNA, 25 bp, Homo sapien
taaagtagtattgaactgctgcccc

SEQ ID NO: 551310 - DNA, 25 bp, Homo sapien
ctactaccactcatattaataatct

SEQ ID NO: 551311 - DNA, 25 bp, Homo sapien
ctgtcctactaccactcatattaat

SEQ ID NO: 551312 - DNA, 25 bp, Homo sapien
taccactcatattaataatcttcta

SEQ ID NO: 551313 - DNA, 25 bp, Homo sapien
gtcctactaccactcatattaataa

SEQ ID NO: 551314 - DNA, 25 bp, Homo sapien
taagccgtgaagtacatttagggac

SEQ ID NO: 551315 - DNA, 25 bp, Homo sapien
tatttagtagggaccaagctggtct

SEQ ID NO: 551316 - DNA, 25 bp, Homo sapien
tagggacatgtaccaacaagtctgt

SEQ ID NO: 551317 - DNA, 25 bp, Homo sapien
tgcctgcaacagaacagatcacagc

SEQ ID NO: 551318 - DNA, 25 bp, Homo sapien
gccggattctcttcgactcaataca

SEQ ID NO: 551319 - DNA, 25 bp, Homo sapien
cagtaattccagttcagagtgcaca

SEQ ID NO: 551320 - DNA, 25 bp, Homo sapien
cacgatatattgatgcaggagccac

SEQ ID NO: 551321 - DNA, 25 bp, Homo sapien
ttcgtctgggcggtaaaaatggcag

SEQ ID NO: 551322 - DNA, 25 bp, Homo sapien
gcgcctggcccctggcaaatttatt

SEQ ID NO: 551323 - DNA, 25 bp, Homo sapien
ttatttaattgtttatctgttccaa

SEQ ID NO: 551324 - DNA, 25 bp, Homo sapien
tctgttccaatagttttcttgtgga

SEQ ID NO: 551325 - DNA, 25 bp, Homo sapien
tgcgcctggcccctggcaaatttat

SEQ ID NO: 551326 - DNA, 25 bp, Homo sapien
tgagtggtgagactgttgaatccac

SEQ ID NO: 551327 - DNA, 25 bp, Homo sapien
tgttgaggggttcctaagctctgta

SEQ ID NO: 551328 - DNA, 25 bp, Homo sapien
gagactgttgaatccacgcttcgct

SEQ ID NO: 551329 - DNA, 25 bp, Homo sapien
cacgcttcgctttgtagtttctgag

SEQ ID NO: 551330 - DNA, 25 bp, Homo sapien
ggatgaacaaggataaggaatagct

SEQ ID NO: 551331 - DNA, 25 bp, Homo sapien
caaggagagggatgaacaaggataa

SEQ ID NO: 551332 - DNA, 25 bp, Homo sapien
cagagagcaacaatccagccagcat

SEQ ID NO: 551333 - DNA, 25 bp, Homo sapien
aagacagagagcaacaatccagcca

SEQ ID NO: 551334 - DNA, 25 bp, Homo sapien
cagcaaagcctccccatccagctag

SEQ ID NO: 551335 - DNA, 25 bp, Homo sapien
aagcctccccatccagctaggtcca

SEQ ID NO: 551336 - DNA, 25 bp, Homo sapien
caaagcctccccatccagctaggtc

SEQ ID NO: 551337 - DNA, 25 bp, Homo sapien
agcctccccatccagctaggtccat

SEQ ID NO: 551338 - DNA, 25 bp, Homo sapien
tatcagtgtcagcaattttcgtctg

SEQ ID NO: 551339 - DNA, 25 bp, Homo sapien
agcaattttcgtctgcagcatcaag

SEQ ID NO: 551340 - DNA, 25 bp, Homo sapien
gtgtcagcaattttcgtctgcagca

SEQ ID NO: 551341 - DNA, 25 bp, Homo sapien
tcagcaattttcgtctgcagcatca

SEQ ID NO: 551342 - DNA, 25 bp, Homo sapien
tattttgccactatagtgatagaaa

SEQ ID NO: 551343 - DNA, 25 bp, Homo sapien
tagtgatagaaattactccgttgcc

SEQ ID NO: 551344 - DNA, 25 bp, Homo sapien
ccgttgccaattgtaaatagttcca

SEQ ID NO: 551345 - DNA, 25 bp, Homo sapien
taaatagttccattctgaacacagc

SEQ ID NO: 551346 - DNA, 25 bp, Homo sapien
tatttccagtgtcgcattgcaaccg

SEQ ID NO: 551347 - DNA, 25 bp, Homo sapien
gaggttatttccagtgtcgcattgc

SEQ ID NO: 551348 - DNA, 25 bp, Homo sapien
cagaggttatttccagtgtcgcatt

SEQ ID NO: 551349 - DNA, 25 bp, Homo sapien
ccagtgtcgcattgcaaccggccat

SEQ ID NO: 551350 - DNA, 25 bp, Homo sapien
tagggtatctcgtaggaatatctgt

SEQ ID NO: 551351 - DNA, 25 bp, Homo sapien
gctatttctacaatgacttcagttt

SEQ ID NO: 551352 - DNA, 25 bp, Homo sapien
ctccattttcaacaagggatagggt

SEQ ID NO: 551353 - DNA, 25 bp, Homo sapien
ggaatatctgtaaaccaattgttag

SEQ ID NO: 551354 - DNA, 25 bp, Homo sapien
gtgtttggcatagaatatattggct

SEQ ID NO: 551355 - DNA, 25 bp, Homo sapien
gtttggcatagaatatattggctca

SEQ ID NO: 551356 - DNA, 25 bp, Homo sapien
tgtttggcatagaatatattggctc

SEQ ID NO: 551357 - DNA, 25 bp, Homo sapien
tttgtgtcaatttcaccttgctgac

SEQ ID NO: 551358 - DNA, 25 bp, Homo sapien
tgtgtcaatttcaccttgctgactc

SEQ ID NO: 551359 - DNA, 25 bp, Homo sapien
tgtatgtccagctgtgtcagcaacc

SEQ ID NO: 551360 - DNA, 25 bp, Homo sapien
tcacaagggcactgtgtatgtccag

SEQ ID NO: 551361 - DNA, 25 bp, Homo sapien
ctttgagagaagggatggaaatatt

SEQ ID NO: 551362 - DNA, 25 bp, Homo sapien
gagaagggatggaaatattagccat

SEQ ID NO: 551363 - DNA, 25 bp, Homo sapien
gagagaagggatggaaatattagcc

SEQ ID NO: 551364 - DNA, 25 bp, Homo sapien
ttgagagaagggatggaaatattag

SEQ ID NO: 551365 - DNA, 25 bp, Homo sapien
ctttgccctcccactctccattgcc

SEQ ID NO: 551366 - DNA, 25 bp, Homo sapien
tttgccctcccactctccattgcca

SEQ ID NO: 551367 - DNA, 25 bp, Homo sapien
tgccctcccactctccattgccaac

SEQ ID NO: 551368 - DNA, 25 bp, Homo sapien
ttgccctcccactctccattgccaa

SEQ ID NO: 551369 - DNA, 25 bp, Homo sapien
caacctttgccctcctgttctccat

SEQ ID NO: 551370 - DNA, 25 bp, Homo sapien
ccaacctttgccctcctgttctcca

SEQ ID NO: 551371 - DNA, 25 bp, Homo sapien
tgccaacctttgccctcctgttctc

SEQ ID NO: 551372 - DNA, 25 bp, Homo sapien
gccaacctttgccctcctgttctcc

SEQ ID NO: 551373 - DNA, 25 bp, Homo sapien
cactgctaagatgtgatacgcctta

SEQ ID NO: 551374 - DNA, 25 bp, Homo sapien
ctttaaacatacatcaaggtagcct

SEQ ID NO: 551375 - DNA, 25 bp, Homo sapien
aattgtatagctcttccatgaccag

SEQ ID NO: 551376 - DNA, 25 bp, Homo sapien
cgctggcagacgtatggtttttgaa

SEQ ID NO: 551377 - DNA, 25 bp, Homo sapien
taaccacagtgaatatgtgtttgtg

SEQ ID NO: 551378 - DNA, 25 bp, Homo sapien
aaaataaccacagtgaatatgtgtt

SEQ ID NO: 551379 - DNA, 25 bp, Homo sapien
taaaaataaccacagtgaatatgtg

SEQ ID NO: 551380 - DNA, 25 bp, Homo sapien
aataaccacagtgaatatgtgtttg

SEQ ID NO: 551381 - DNA, 25 bp, Homo sapien
gcagaggtattaaccgttcctattc

SEQ ID NO: 551382 - DNA, 25 bp, Homo sapien
gtatgttcggcaagatggtcacttc

SEQ ID NO: 551383 - DNA, 25 bp, Homo sapien
tcaaagtatcgtcttgcacagcttc

SEQ ID NO: 551384 - DNA, 25 bp, Homo sapien
aagggtatctggattgctggtggca

SEQ ID NO: 551385 - DNA, 25 bp, Homo sapien
gaatgccaatgtagatgagctctga

SEQ ID NO: 551386 - DNA, 25 bp, Homo sapien
ccccggtataggacaaatgtgttgc

SEQ ID NO: 551387 - DNA, 25 bp, Homo sapien
cccaagattggtacttctcccacca

SEQ ID NO: 551388 - DNA, 25 bp, Homo sapien
aacaaaagggcatggtccagaatgc

SEQ ID NO: 551389 - DNA, 25 bp, Homo sapien
tcttccttgatcctagtatctacag

SEQ ID NO: 551390 - DNA, 25 bp, Homo sapien
caacacagttgtgccactcttcagg

SEQ ID NO: 551391 - DNA, 25 bp, Homo sapien
tgtggtcacaacacagttgtgccac

SEQ ID NO: 551392 - DNA, 25 bp, Homo sapien
ctagtatctacaggactgtcagcat

SEQ ID NO: 551393 - DNA, 25 bp, Homo sapien
tgcaagctctggacaccttgtattt

SEQ ID NO: 551394 - DNA, 25 bp, Homo sapien
ctgcaagctctggacaccttgtatt

SEQ ID NO: 551395 - DNA, 25 bp, Homo sapien
tgtttgaacaggtgtcaaagttagt

SEQ ID NO: 551396 - DNA, 25 bp, Homo sapien
gtgtttgaacaggtgtcaaagttag

SEQ ID NO: 551397 - DNA, 25 bp, Homo sapien
ctatggattgtctgtggtgtaatac

SEQ ID NO: 551398 - DNA, 25 bp, Homo sapien
acttcactggttggcggccgagact

SEQ ID NO: 551399 - DNA, 25 bp, Homo sapien
gacttcactggttggcggccgagac

SEQ ID NO: 551400 - DNA, 25 bp, Homo sapien
tttggacttcactggttggcggccg

SEQ ID NO: 551401 - DNA, 25 bp, Homo sapien
tggacttcactggttggcggccgag

SEQ ID NO: 551402 - DNA, 25 bp, Homo sapien
tacctatactatgtatcctaacagc

SEQ ID NO: 551403 - DNA, 25 bp, Homo sapien
tatactatgtatcctaacagccaac

SEQ ID NO: 551404 - DNA, 25 bp, Homo sapien
tatgtatcctaacagccaactgtga

SEQ ID NO: 551405 - DNA, 25 bp, Homo sapien
tgtaatatacctatactatgtatcc

SEQ ID NO: 551406 - DNA, 25 bp, Homo sapien
ctgtatcagtattagtttaattaat

SEQ ID NO: 551407 - DNA, 25 bp, Homo sapien
gtttaattaatatcaggagaaactc

SEQ ID NO: 551408 - DNA, 25 bp, Homo sapien
ttaatatcaggagaaactctctcac

SEQ ID NO: 551409 - DNA, 25 bp, Homo sapien
ttaattaatatcaggagaaactctc

SEQ ID NO: 551410 - DNA, 25 bp, Homo sapien
tctgaattgtctgaactatccgtac

SEQ ID NO: 551411 - DNA, 25 bp, Homo sapien
cagtcttttctgaattgtctgaact

SEQ ID NO: 551412 - DNA, 25 bp, Homo sapien
agtcttttctgaattgtctgaacta

SEQ ID NO: 551413 - DNA, 25 bp, Homo sapien
ttttctgaattgtctgaactatccg

SEQ ID NO: 551414 - DNA, 25 bp, Homo sapien
cactgtctgagaactgtcggagagt

SEQ ID NO: 551415 - DNA, 25 bp, Homo sapien
gtcactgtctgagaactgtcggaga

SEQ ID NO: 551416 - DNA, 25 bp, Homo sapien
tcactgtctgagaactgtcggagag

SEQ ID NO: 551417 - DNA, 25 bp, Homo sapien
tgaaaccagtttgaacctgccgacc

SEQ ID NO: 551418 - DNA, 25 bp, Homo sapien
tgtgaaaccagtttgaacctgccga

SEQ ID NO: 551419 - DNA, 25 bp, Homo sapien
ctgtgaaaccagtttgaacctgccg

SEQ ID NO: 551420 - DNA, 25 bp, Homo sapien
aaaccagtttgaacctgccgaccat

SEQ ID NO: 551421 - DNA, 25 bp, Homo sapien
gatcctgctgcgtctgaaaatgttt

SEQ ID NO: 551422 - DNA, 25 bp, Homo sapien
tgatcctgctgcgtctgaaaatgtt

SEQ ID NO: 551423 - DNA, 25 bp, Homo sapien
agggggagaacatactgcctgccca

SEQ ID NO: 551424 - DNA, 25 bp, Homo sapien
ggggagaacatactgcctgcccact

SEQ ID NO: 551425 - DNA, 25 bp, Homo sapien
gaagggggagaacatactgcctgcc

SEQ ID NO: 551426 - DNA, 25 bp, Homo sapien
ggagaacatactgcctgcccacttg

SEQ ID NO: 551427 - DNA, 25 bp, Homo sapien
tcttttatagttgtaggtgtggctg

SEQ ID NO: 551428 - DNA, 25 bp, Homo sapien
taggtgtggctgacaaaacctccca

SEQ ID NO: 551429 - DNA, 25 bp, Homo sapien
gattaccagcttcatcttttatagt

SEQ ID NO: 551430 - DNA, 25 bp, Homo sapien
gcagcggcgggtgccccggctccgg

SEQ ID NO: 551431 - DNA, 25 bp, Homo sapien
gcgggtgccccggctccggcggcca

SEQ ID NO: 551432 - DNA, 25 bp, Homo sapien
ctccagcagcggcgggtgccccggc

SEQ ID NO: 551433 - DNA, 25 bp, Homo sapien
gtcgctccagcagcggcgggtgccc

SEQ ID NO: 551434 - DNA, 25 bp, Homo sapien
cttgtcgtcgccgggcgttggcggc

SEQ ID NO: 551435 - DNA, 25 bp, Homo sapien
ctcctccttgtcgtcgccgggcgtt

SEQ ID NO: 551436 - DNA, 25 bp, Homo sapien
cctccttgtcgtcgccgggcgttgg

SEQ ID NO: 551437 - DNA, 25 bp, Homo sapien
tgtcgtcgccgggcgttggcggccc

SEQ ID NO: 551438 - DNA, 25 bp, Homo sapien
aggggatgagtggcggttagggctg

SEQ ID NO: 551439 - DNA, 25 bp, Homo sapien
gggatgagtggcggttagggctggg

SEQ ID NO: 551440 - DNA, 25 bp, Homo sapien
aaggggatgagtggcggttagggct

SEQ ID NO: 551441 - DNA, 25 bp, Homo sapien
ggatgagtggcggttagggctgggc

SEQ ID NO: 551442 - DNA, 25 bp, Homo sapien
caaatacagatttgtagaactgttg

SEQ ID NO: 551443 - DNA, 25 bp, Homo sapien
gaactgttgagctattaatattgag

SEQ ID NO: 551444 - DNA, 25 bp, Homo sapien
cagcaggaaaggtagtgttagggta

SEQ ID NO: 551445 - DNA, 25 bp, Homo sapien
taaaaaccagctggactcataaagc

SEQ ID NO: 551446 - DNA, 25 bp, Homo sapien
tgaaatagcctgttttgtgtccctt

SEQ ID NO: 551447 - DNA, 25 bp, Homo sapien
aaatagcctgttttgtgtcccttga

SEQ ID NO: 551448 - DNA, 25 bp, Homo sapien
agaggcgatgctgaaatagcctgtt

SEQ ID NO: 551449 - DNA, 25 bp, Homo sapien
atagcctgttttgtgtcccttgaaa

SEQ ID NO: 551450 - DNA, 25 bp, Homo sapien
tttactacttccaatagcatcccct

SEQ ID NO: 551451 - DNA, 25 bp, Homo sapien
gaacggattgtctcctggattgtgt

SEQ ID NO: 551452 - DNA, 25 bp, Homo sapien
cccctttttcatggagaacggattg

SEQ ID NO: 551453 - DNA, 25 bp, Homo sapien
tgtactgttacgtaatgacaaagca

SEQ ID NO: 551454 - DNA, 25 bp, Homo sapien
tgctcaataaacttatcttgagttg

SEQ ID NO: 551455 - DNA, 25 bp, Homo sapien
tcaataaacttatcttgagttgaat

SEQ ID NO: 551456 - DNA, 25 bp, Homo sapien
ctcaataaacttatcttgagttgaa

SEQ ID NO: 551457 - DNA, 25 bp, Homo sapien
gctcaataaacttatcttgagttga

SEQ ID NO: 551458 - DNA, 25 bp, Homo sapien
cacctgttgtgggactacaataagg

SEQ ID NO: 551459 - DNA, 25 bp, Homo sapien
gtaaatatggtaccttatccacctg

SEQ ID NO: 551460 - DNA, 25 bp, Homo sapien
ggaagataaggcatcatgtctccag

SEQ ID NO: 551461 - DNA, 25 bp, Homo sapien
ccacctgtgtggaccaagtagcaat

SEQ ID NO: 551462 - DNA, 25 bp, Homo sapien
gcaggatccaaaagcttgtggtcag

SEQ ID NO: 551463 - DNA, 25 bp, Homo sapien
ggcaggatccaaaagcttgtggtca

SEQ ID NO: 551464 - DNA, 25 bp, Homo sapien
agggcaggatccaaaagcttgtggt

SEQ ID NO: 551465 - DNA, 25 bp, Homo sapien
gggcaggatccaaaagcttgtggtc

SEQ ID NO: 551466 - DNA, 25 bp, Homo sapien
gctgattgtgttgctaggagaccaa

SEQ ID NO: 551467 - DNA, 25 bp, Homo sapien
taatataagcaggtcacactggatc

SEQ ID NO: 551468 - DNA, 25 bp, Homo sapien
tgtatttaccagtgcacagttccaa

SEQ ID NO: 551469 - DNA, 25 bp, Homo sapien
ccaaggacatgacaacagggaagct

SEQ ID NO: 551470 - DNA, 25 bp, Homo sapien
tatgtatgtcatggagtacagtttc

SEQ ID NO: 551471 - DNA, 25 bp, Homo sapien
tttatgtatgtcatggagtacagtt

SEQ ID NO: 551472 - DNA, 25 bp, Homo sapien
tatgtcatggagtacagtttccaaa

SEQ ID NO: 551473 - DNA, 25 bp, Homo sapien
tgtatgtcatggagtacagtttcca

SEQ ID NO: 551474 - DNA, 25 bp, Homo sapien
gagctggtaatctagaaatgtgact

SEQ ID NO: 551475 - DNA, 25 bp, Homo sapien
cctggatgagctggtaatctagaaa

SEQ ID NO: 551476 - DNA, 25 bp, Homo sapien
cttcatacccagtgcttaggatctg

SEQ ID NO: 551477 - DNA, 25 bp, Homo sapien
tttttgcttggccttcatacccagt

SEQ ID NO: 551478 - DNA, 25 bp, Homo sapien
acatgactggcaggagagctcgagt

SEQ ID NO: 551479 - DNA, 25 bp, Homo sapien
tctcagattgtacagaaaacatgac

SEQ ID NO: 551480 - DNA, 25 bp, Homo sapien
accaagccctgcctacagctttaaa

SEQ ID NO: 551481 - DNA, 25 bp, Homo sapien
tagttgttctcgcattgccataaag

SEQ ID NO: 551482 - DNA, 25 bp, Homo sapien
aacataaaaagcgtattggcctcct

SEQ ID NO: 551483 - DNA, 25 bp, Homo sapien
acataaaaagcgtattggcctcctt

SEQ ID NO: 551484 - DNA, 25 bp, Homo sapien
cataaaaagcgtattggcctccttt

SEQ ID NO: 551485 - DNA, 25 bp, Homo sapien
ataaaaagcgtattggcctcctttg

SEQ ID NO: 551486 - DNA, 25 bp, Homo sapien
aattgaactacacgtttagtgcatc

SEQ ID NO: 551487 - DNA, 25 bp, Homo sapien
tgactggtaactactttaaattgaa

SEQ ID NO: 551488 - DNA, 25 bp, Homo sapien
tcagccagtgactggtaactacttt

SEQ ID NO: 551489 - DNA, 25 bp, Homo sapien
ttaaattgaactacacgtttagtgc

SEQ ID NO: 551490 - DNA, 25 bp, Homo sapien
tgagcacataaaactagcgatggtt

SEQ ID NO: 551491 - DNA, 25 bp, Homo sapien
gagctcggtatcagttgtggcccag

SEQ ID NO: 551492 - DNA, 25 bp, Homo sapien
gcacatttcttttggcaccaagcca

SEQ ID NO: 551493 - DNA, 25 bp, Homo sapien
tgttgtaagaaacgctgagcttagc

SEQ ID NO: 551494 - DNA, 25 bp, Homo sapien
ttaatgctccatgtctaattggaca

SEQ ID NO: 551495 - DNA, 25 bp, Homo sapien
ggacaactacactgtcaaatttgct

SEQ ID NO: 551496 - DNA, 25 bp, Homo sapien
gtctaattggacaactacactgtca

SEQ ID NO: 551497 - DNA, 25 bp, Homo sapien
tccactcagatgtatagcatcaaaa

SEQ ID NO: 551498 - DNA, 25 bp, Homo sapien
ctaattctgtgtcaggaaaggcaat

SEQ ID NO: 551499 - DNA, 25 bp, Homo sapien
tgatgcatgcactactcccttttat

SEQ ID NO: 551500 - DNA, 25 bp, Homo sapien
tgtctttgcaggaatatgtagatcc

SEQ ID NO: 551501 - DNA, 25 bp, Homo sapien
caagatcagggccaacagcatttcc

SEQ ID NO: 551502 - DNA, 25 bp, Homo sapien
ctgagtccttctggctcttacaggc

SEQ ID NO: 551503 - DNA, 25 bp, Homo sapien
gaaaacatcaggcacagaaggcagc

SEQ ID NO: 551504 - DNA, 25 bp, Homo sapien
gttcacgtctctccctagttcaaaa

SEQ ID NO: 551505 - DNA, 25 bp, Homo sapien
caggcttcagatacacttttacaag

SEQ ID NO: 551506 - DNA, 25 bp, Homo sapien
cacgaggatccacagcttcattctt

SEQ ID NO: 551507 - DNA, 25 bp, Homo sapien
tcagcgagacaaagaacccaccgga

SEQ ID NO: 551508 - DNA, 25 bp, Homo sapien
gaaggaaccaattctgggcacaatg

SEQ ID NO: 551509 - DNA, 25 bp, Homo sapien
cggaaggaaccaattctgggcacaa

SEQ ID NO: 551510 - DNA, 25 bp, Homo sapien
ggatccatccataaaaagaaccatt

SEQ ID NO: 551511 - DNA, 25 bp, Homo sapien
taccattttcctgcacataaagcgc

SEQ ID NO: 551512 - DNA, 25 bp, Homo sapien
ctagaaacaggccttgagcaagagc

SEQ ID NO: 551513 - DNA, 25 bp, Homo sapien
tcaagtcatgcatccagtaccattt

SEQ ID NO: 551514 - DNA, 25 bp, Homo sapien
aggcccttggcacttgagatcctca

SEQ ID NO: 551515 - DNA, 25 bp, Homo sapien
tattatcaaaactaggcccttggca

SEQ ID NO: 551516 - DNA, 25 bp, Homo sapien
cttcccatattatcaaaactaggcc

SEQ ID NO: 551517 - DNA, 25 bp, Homo sapien
ggcccttggcacttgagatcctcat

SEQ ID NO: 551518 - DNA, 25 bp, Homo sapien
tcattcactatttaatcacgacaga

SEQ ID NO: 551519 - DNA, 25 bp, Homo sapien
tttaatcacgacagattctcaggaa

SEQ ID NO: 551520 - DNA, 25 bp, Homo sapien
agattctcaggaagccaagagacag

SEQ ID NO: 551521 - DNA, 25 bp, Homo sapien
cagattctcaggaagccaagagaca

SEQ ID NO: 551522 - DNA, 25 bp, Homo sapien
acaccaaatgatggcgagcaggtga

SEQ ID NO: 551523 - DNA, 25 bp, Homo sapien
gaaaacaccaaatgatggcgagcag

SEQ ID NO: 551524 - DNA, 25 bp, Homo sapien
caaatgatggcgagcaggtgaaaca

SEQ ID NO: 551525 - DNA, 25 bp, Homo sapien
ccaaatgatggcgagcaggtgaaac

SEQ ID NO: 551526 - DNA, 25 bp, Homo sapien
tagatctcttcatgtggtgatgctg

SEQ ID NO: 551527 - DNA, 25 bp, Homo sapien
aagatatatcactccccttgtagaa

SEQ ID NO: 551528 - DNA, 25 bp, Homo sapien
gaatgcaagaaggacgacataatca

SEQ ID NO: 551529 - DNA, 25 bp, Homo sapien
cataatcaattgtgactgagttgtt

SEQ ID NO: 551530 - DNA, 25 bp, Homo sapien
ctaggatatagcatgggtctcgtac

SEQ ID NO: 551531 - DNA, 25 bp, Homo sapien
catgggtctcgtactggcaggttgt

SEQ ID NO: 551532 - DNA, 25 bp, Homo sapien
tagcatgggtctcgtactggcaggt

SEQ ID NO: 551533 - DNA, 25 bp, Homo sapien
gatatagcatgggtctcgtactggc

SEQ ID NO: 551534 - DNA, 25 bp, Homo sapien
caacagaagcagtaattgggtcagt

SEQ ID NO: 551535 - DNA, 25 bp, Homo sapien
ccaacagaagcagtaattgggtcag

SEQ ID NO: 551536 - DNA, 25 bp, Homo sapien
cttccaacagaagcagtaattgggt

SEQ ID NO: 551537 - DNA, 25 bp, Homo sapien
ttccaacagaagcagtaattgggtc

SEQ ID NO: 551538 - DNA, 25 bp, Homo sapien
ggccaacattagttggtgaagtcat

SEQ ID NO: 551539 - DNA, 25 bp, Homo sapien
cctccacagctgtattatggataca

SEQ ID NO: 551540 - DNA, 25 bp, Homo sapien
tattatggatacattataactgccc

SEQ ID NO: 551541 - DNA, 25 bp, Homo sapien
cattgggctggccaacattagttgg

SEQ ID NO: 551542 - DNA, 25 bp, Homo sapien
gggcaagataggagtcagacagttt

SEQ ID NO: 551543 - DNA, 25 bp, Homo sapien
taggagtcagacagtttgatagcag

SEQ ID NO: 551544 - DNA, 25 bp, Homo sapien
caagataggagtcagacagtttgat

SEQ ID NO: 551545 - DNA, 25 bp, Homo sapien
gataggagtcagacagtttgatagc

SEQ ID NO: 551546 - DNA, 25 bp, Homo sapien
tcctcgagctccagtgaggggcttc

SEQ ID NO: 551547 - DNA, 25 bp, Homo sapien
caggtacaatctcagaagcccagtg

SEQ ID NO: 551548 - DNA, 25 bp, Homo sapien
tagggtgccctgcattcaggtacaa

SEQ ID NO: 551549 - DNA, 25 bp, Homo sapien
ccagtggaaaaccacagccccttgt

SEQ ID NO: 551550 - DNA, 25 bp, Homo sapien
cttacaaaataagataatcaaaatc

SEQ ID NO: 551551 - DNA, 25 bp, Homo sapien
tacaaaataagataatcaaaatcca

SEQ ID NO: 551552 - DNA, 25 bp, Homo sapien
ttacaaaataagataatcaaaatcc

SEQ ID NO: 551553 - DNA, 25 bp, Homo sapien
tcaggtaggtattaagcacagcatc

SEQ ID NO: 551554 - DNA, 25 bp, Homo sapien
cccgtatcccgtatgtgtccatgtg

SEQ ID NO: 551555 - DNA, 25 bp, Homo sapien
tgatgctctccttacccctactgtc

SEQ ID NO: 551556 - DNA, 25 bp, Homo sapien
caagtgtgtactgttccccccgtat

SEQ ID NO: 551557 - DNA, 25 bp, Homo sapien
ttaagtagtgagtcctgatgtacat

SEQ ID NO: 551558 - DNA, 25 bp, Homo sapien
atttgattccttggaagttaagtag

SEQ ID NO: 551559 - DNA, 25 bp, Homo sapien
ccttggaagttaagtagtgagtcct

SEQ ID NO: 551560 - DNA, 25 bp, Homo sapien
gaagttaagtagtgagtcctgatgt

SEQ ID NO: 551561 - DNA, 25 bp, Homo sapien
tggacagcaactgtggccaacaaat

SEQ ID NO: 551562 - DNA, 25 bp, Homo sapien
tcacagattctgacccaagggctat

SEQ ID NO: 551563 - DNA, 25 bp, Homo sapien
caggaggaaccagggtcacagattc

SEQ ID NO: 551564 - DNA, 25 bp, Homo sapien
gaagtctggatatgaaactgcaggt

SEQ ID NO: 551565 - DNA, 25 bp, Homo sapien
gaaagccagtcaataaaacttaaca

SEQ ID NO: 551566 - DNA, 25 bp, Homo sapien
tagactttatgtctcgtaactgaaa

SEQ ID NO: 551567 - DNA, 25 bp, Homo sapien
tcagccaaataagtagtagccttag

SEQ ID NO: 551568 - DNA, 25 bp, Homo sapien
tgttttctcatagatcttgaagctc

SEQ ID NO: 551569 - DNA, 25 bp, Homo sapien
aacctctttcagttgaccatctgca

SEQ ID NO: 551570 - DNA, 25 bp, Homo sapien
cctgccaacctgaatttagggagaa

SEQ ID NO: 551571 - DNA, 25 bp, Homo sapien
gcagcaggccaagctaagatctcag

SEQ ID NO: 551572 - DNA, 25 bp, Homo sapien
gaaataactgcccatgaaaaggaga

SEQ ID NO: 551573 - DNA, 25 bp, Homo sapien
caaaattagcattaacttctaatga

SEQ ID NO: 551574 - DNA, 25 bp, Homo sapien
gaaataatcgttttttggatatgtg

SEQ ID NO: 551575 - DNA, 25 bp, Homo sapien
gaatattctagcctgtgctgaagta

SEQ ID NO: 551576 - DNA, 25 bp, Homo sapien
tataagaggatcttccagatttact

SEQ ID NO: 551577 - DNA, 25 bp, Homo sapien
ggatggaacattcacctgacataaa

SEQ ID NO: 551578 - DNA, 25 bp, Homo sapien
caggatggaacattcacctgacata

SEQ ID NO: 551579 - DNA, 25 bp, Homo sapien
ttactcttatgagcaccagacccct

SEQ ID NO: 551580 - DNA, 25 bp, Homo sapien
ctcttatgagcaccagacccctcca

SEQ ID NO: 551581 - DNA, 25 bp, Homo sapien
acaccagaggattcttctttaacgg

SEQ ID NO: 551582 - DNA, 25 bp, Homo sapien
ttctttaacggtagataagcaatac

SEQ ID NO: 551583 - DNA, 25 bp, Homo sapien
gattcttctttaacggtagataagc

SEQ ID NO: 551584 - DNA, 25 bp, Homo sapien
cagaggattcttctttaacggtaga

SEQ ID NO: 551585 - DNA, 25 bp, Homo sapien
gcattctcacatttgtgatagctta

SEQ ID NO: 551586 - DNA, 25 bp, Homo sapien
ggttaatgtcgtggacactgtagct

SEQ ID NO: 551587 - DNA, 25 bp, Homo sapien
gggatacactagtttcatagactct

SEQ ID NO: 551588 - DNA, 25 bp, Homo sapien
gtcccaattatagagttggtcacag

SEQ ID NO: 551589 - DNA, 25 bp, Homo sapien
ggaggaggaagagaaaagcaccaca

SEQ ID NO: 551590 - DNA, 25 bp, Homo sapien
gaggaggaagagaaaagcaccacac

SEQ ID NO: 551591 - DNA, 25 bp, Homo sapien
tctcccattacttttagatatttct

SEQ ID NO: 551592 - DNA, 25 bp, Homo sapien
tcttctttaattcaaatgctttcat

SEQ ID NO: 551593 - DNA, 25 bp, Homo sapien
catttatctcccattacttttagat

SEQ ID NO: 551594 - DNA, 25 bp, Homo sapien
cccattacttttagatatttcttct

SEQ ID NO: 551595 - DNA, 25 bp, Homo sapien
tgtcttccataaatgtaagaaggta

SEQ ID NO: 551596 - DNA, 25 bp, Homo sapien
tgtaagaaggtaatactgttaccat

SEQ ID NO: 551597 - DNA, 25 bp, Homo sapien
taaactaccttcatcatatagcatt

SEQ ID NO: 551598 - DNA, 25 bp, Homo sapien
tcatgtagatatcaggatgtcttcc

SEQ ID NO: 551599 - DNA, 25 bp, Homo sapien
aaaaacacatgcttccacttcactg

SEQ ID NO: 551600 - DNA, 25 bp, Homo sapien
gataaaaatgtactgcagtttggca

SEQ ID NO: 551601 - DNA, 25 bp, Homo sapien
aaatgtactgcagtttggcacctgg

SEQ ID NO: 551602 - DNA, 25 bp, Homo sapien
tttctagtttttgaagactaaagca

SEQ ID NO: 551603 - DNA, 25 bp, Homo sapien
tgatggccaagtgagtccatctcct

SEQ ID NO: 551604 - DNA, 25 bp, Homo sapien
atggccaagtgagtccatctccttg

SEQ ID NO: 551605 - DNA, 25 bp, Homo sapien
gcgtttaccctgatggccaagtgag

SEQ ID NO: 551606 - DNA, 25 bp, Homo sapien
gattggtgcgtttaccctgatggcc

SEQ ID NO: 551607 - DNA, 25 bp, Homo sapien
tgaccttggcttgtccctgtttcaa

SEQ ID NO: 551608 - DNA, 25 bp, Homo sapien
tcaaaatgagttcccggacagattt

SEQ ID NO: 551609 - DNA, 25 bp, Homo sapien
tttcaaaatgagttcccggacagat

SEQ ID NO: 551610 - DNA, 25 bp, Homo sapien
gcttgtccctgtttcaaaatgagtt

SEQ ID NO: 551611 - DNA, 25 bp, Homo sapien
cataagtttccactaaaagcagcat

SEQ ID NO: 551612 - DNA, 25 bp, Homo sapien
taggttccggtgggtgacatttaca

SEQ ID NO: 551613 - DNA, 25 bp, Homo sapien
ttccggtgggtgacatttacaaaga

SEQ ID NO: 551614 - DNA, 25 bp, Homo sapien
cggtgggtgacatttacaaagacac

SEQ ID NO: 551615 - DNA, 25 bp, Homo sapien
acttttccttaggtgaagtcttgca

SEQ ID NO: 551616 - DNA, 25 bp, Homo sapien
gaactttcacttctagtcatctgag

SEQ ID NO: 551617 - DNA, 25 bp, Homo sapien
ccaaggtatgaactttcacttctag

SEQ ID NO: 551618 - DNA, 25 bp, Homo sapien
caattccaaggtatgaactttcact

SEQ ID NO: 551619 - DNA, 25 bp, Homo sapien
ctggcaattccaaggtatgaacttt

SEQ ID NO: 551620 - DNA, 25 bp, Homo sapien
gattccaattgcttaaacctgaagc

SEQ ID NO: 551621 - DNA, 25 bp, Homo sapien
caattgcttaaacctgaagcctttt

SEQ ID NO: 551622 - DNA, 25 bp, Homo sapien
ttccaattgcttaaacctgaagcct

SEQ ID NO: 551623 - DNA, 25 bp, Homo sapien
tccaattgcttaaacctgaagcctt

SEQ ID NO: 551624 - DNA, 25 bp, Homo sapien
gtgaccatccaactgcatcagcaac

SEQ ID NO: 551625 - DNA, 25 bp, Homo sapien
tcttgtgccttagggtgataagact

SEQ ID NO: 551626 - DNA, 25 bp, Homo sapien
catccaactgcatcagcaacatctg

SEQ ID NO: 551627 - DNA, 25 bp, Homo sapien
ctcttgtgccttagggtgataagac

SEQ ID NO: 551628 - DNA, 25 bp, Homo sapien
tgttatgacagttgtcacacccacc

SEQ ID NO: 551629 - DNA, 25 bp, Homo sapien
tacccctgggctgtatgttatgaca

SEQ ID NO: 551630 - DNA, 25 bp, Homo sapien
tttccttgaaatccattatcagcag

SEQ ID NO: 551631 - DNA, 25 bp, Homo sapien
tatcagcagatacgaaaataccaat

SEQ ID NO: 551632 - DNA, 25 bp, Homo sapien
gatctgaaaaagagctgactcaaac

SEQ ID NO: 551633 - DNA, 25 bp, Homo sapien
aggaatgatctgaaaaagagctgac

SEQ ID NO: 551634 - DNA, 25 bp, Homo sapien
gaatgatctgaaaaagagctgactc

SEQ ID NO: 551635 - DNA, 25 bp, Homo sapien
aattgctagctgtttatcaaaatcc

SEQ ID NO: 551636 - DNA, 25 bp, Homo sapien
tcagttgctcatcaccaggggagtt

SEQ ID NO: 551637 - DNA, 25 bp, Homo sapien
gttgctcatcaccaggggagttcta

SEQ ID NO: 551638 - DNA, 25 bp, Homo sapien
cagttgctcatcaccaggggagttc

SEQ ID NO: 551639 - DNA, 25 bp, Homo sapien
agttgctcatcaccaggggagttct

SEQ ID NO: 551640 - DNA, 25 bp, Homo sapien
cactatccactgtgtatttccattt

SEQ ID NO: 551641 - DNA, 25 bp, Homo sapien
tctaaagcacgtaacacactatcca

SEQ ID NO: 551642 - DNA, 25 bp, Homo sapien
gtgtctaaagcacgtaacacactat

SEQ ID NO: 551643 - DNA, 25 bp, Homo sapien
tgagtgtctaaagcacgtaacacac

SEQ ID NO: 551644 - DNA, 25 bp, Homo sapien
tagctgaggcattaaacgtgtatgt

SEQ ID NO: 551645 - DNA, 25 bp, Homo sapien
agcagcttgaaagttacatccccaa

SEQ ID NO: 551646 - DNA, 25 bp, Homo sapien
attgtaattgttgacccctgccgca

SEQ ID NO: 551647 - DNA, 25 bp, Homo sapien
taagccagtaatctctatataattg

SEQ ID NO: 551648 - DNA, 25 bp, Homo sapien
catctttgcggtagtagcacaagac

SEQ ID NO: 551649 - DNA, 25 bp, Homo sapien
cagccatccatctttgcggtagtag

SEQ ID NO: 551650 - DNA, 25 bp, Homo sapien
tggctgttgaccagccatccatctt

SEQ ID NO: 551651 - DNA, 25 bp, Homo sapien
gtagcacaagacagtttaatgacag

SEQ ID NO: 551652 - DNA, 25 bp, Homo sapien
tcactatagccatttcagcttttgc

SEQ ID NO: 551653 - DNA, 25 bp, Homo sapien
attgacaaggtcagttaacatgtgc

SEQ ID NO: 551654 - DNA, 25 bp, Homo sapien
cagcttttgcttcgtacttgttagt

SEQ ID NO: 551655 - DNA, 25 bp, Homo sapien
tttacatcacttgattggagaattt

SEQ ID NO: 551656 - DNA, 25 bp, Homo sapien
cttttggttttgtctagggtcactg

SEQ ID NO: 551657 - DNA, 25 bp, Homo sapien
agggtcactggtattactccattca

SEQ ID NO: 551658 - DNA, 25 bp, Homo sapien
ggcatcttgtgttgcaacatctctt

SEQ ID NO: 551659 - DNA, 25 bp, Homo sapien
ttttgtctagggtcactggtattac

SEQ ID NO: 551660 - DNA, 25 bp, Homo sapien
tgttgacaaggggtttgacttgatg

SEQ ID NO: 551661 - DNA, 25 bp, Homo sapien
tttgttgacaaggggtttgacttga

SEQ ID NO: 551662 - DNA, 25 bp, Homo sapien
acaaggggtttgacttgatgatcca

SEQ ID NO: 551663 - DNA, 25 bp, Homo sapien
ttgacaaggggtttgacttgatgat

SEQ ID NO: 551664 - DNA, 25 bp, Homo sapien
tctgtgatagtaggaatctctggct

SEQ ID NO: 551665 - DNA, 25 bp, Homo sapien
tctaagcattccttcaatcctttga

SEQ ID NO: 551666 - DNA, 25 bp, Homo sapien
ggcccaatactacacatgtccttga

SEQ ID NO: 551667 - DNA, 25 bp, Homo sapien
ttgaatatgtctgtgatagtaggaa

SEQ ID NO: 551668 - DNA, 25 bp, Homo sapien
gagtgcatgagctttcacccttggg

SEQ ID NO: 551669 - DNA, 25 bp, Homo sapien
gccataagaagaataaacccgctgt

SEQ ID NO: 551670 - DNA, 25 bp, Homo sapien
cacccttgggttacagtcagaagat

SEQ ID NO: 551671 - DNA, 25 bp, Homo sapien
gggcatgttcgtacaatttacttgt

SEQ ID NO: 551672 - DNA, 25 bp, Homo sapien
aatgcaggtattgtgaggtgtagtt

SEQ ID NO: 551673 - DNA, 25 bp, Homo sapien
cagcaagttgtagtaaaaaagagaa

SEQ ID NO: 551674 - DNA, 25 bp, Homo sapien
aggtgtagttcaatgctgaaagtca

SEQ ID NO: 551675 - DNA, 25 bp, Homo sapien
aagtcactttggcatgatggctggt

SEQ ID NO: 551676 - DNA, 25 bp, Homo sapien
tgtagactattagcaagtcctgtaa

SEQ ID NO: 551677 - DNA, 25 bp, Homo sapien
ttctacttttcaactacatatcaag

SEQ ID NO: 551678 - DNA, 25 bp, Homo sapien
actattagcaagtcctgtaagttct

SEQ ID NO: 551679 - DNA, 25 bp, Homo sapien
tctcttcaacgccattcccatcacc

SEQ ID NO: 551680 - DNA, 25 bp, Homo sapien
tccacaggaaatagtctccgagcat

SEQ ID NO: 551681 - DNA, 25 bp, Homo sapien
ggttaagaatacttcctccacagga

SEQ ID NO: 551682 - DNA, 25 bp, Homo sapien
tgacagatttagacctcagcagctg

SEQ ID NO: 551683 - DNA, 25 bp, Homo sapien
ggttgcttatgaccctactagtagg

SEQ ID NO: 551684 - DNA, 25 bp, Homo sapien
ctattgtatctgcaggcctttcttc

SEQ ID NO: 551685 - DNA, 25 bp, Homo sapien
ctacttctccagcagatttgtgtga

SEQ ID NO: 551686 - DNA, 25 bp, Homo sapien
gcagatttgtgtgaaggcttttcta

SEQ ID NO: 551687 - DNA, 25 bp, Homo sapien
ttctccagcagatttgtgtgaaggc

SEQ ID NO: 551688 - DNA, 25 bp, Homo sapien
tttgggcacaaggagtctgaacttc

SEQ ID NO: 551689 - DNA, 25 bp, Homo sapien
gacaagttggtctttcagaggcagg

SEQ ID NO: 551690 - DNA, 25 bp, Homo sapien
tgcactaggcctcagtagaccagac

SEQ ID NO: 551691 - DNA, 25 bp, Homo sapien
tcttacacctgagacttgaggaggg

SEQ ID NO: 551692 - DNA, 25 bp, Homo sapien
ctttgtgccaagaatgattcgagcc

SEQ ID NO: 551693 - DNA, 25 bp, Homo sapien
caagaatgattcgagcctcaccttc

SEQ ID NO: 551694 - DNA, 25 bp, Homo sapien
cctcaccttccaacagagatggcat

SEQ ID NO: 551695 - DNA, 25 bp, Homo sapien
tgtgccaagaatgattcgagcctca

SEQ ID NO: 551696 - DNA, 25 bp, Homo sapien
taaagtgtgttgttctacccagtgc

SEQ ID NO: 551697 - DNA, 25 bp, Homo sapien
ttcttataagctcagggtgcactcc

SEQ ID NO: 551698 - DNA, 25 bp, Homo sapien
cccctgggattgataactgctgtga

SEQ ID NO: 551699 - DNA, 25 bp, Homo sapien
taagctcgtaagtcaatggtcctca

SEQ ID NO: 551700 - DNA, 25 bp, Homo sapien
tagagcccactgtaatgaccacatc

SEQ ID NO: 551701 - DNA, 25 bp, Homo sapien
ggacaccagtcaaatcgtattagag

SEQ ID NO: 551702 - DNA, 25 bp, Homo sapien
aaatgtttccgtttgccgtggctgc

SEQ ID NO: 551703 - DNA, 25 bp, Homo sapien
gaaagtgatgagcacctactccaca

SEQ ID NO: 551704 - DNA, 25 bp, Homo sapien
catcaggcacataagggtggtaagg

SEQ ID NO: 551705 - DNA, 25 bp, Homo sapien
aacatcaggcacataagggtggtaa

SEQ ID NO: 551706 - DNA, 25 bp, Homo sapien
caacatcaggcacataagggtggta

SEQ ID NO: 551707 - DNA, 25 bp, Homo sapien
tcaggcacataagggtggtaaggcc

SEQ ID NO: 551708 - DNA, 25 bp, Homo sapien
taagctactctagacccattagaga

SEQ ID NO: 551709 - DNA, 25 bp, Homo sapien
tagggcttaatgcactggcgaatat

SEQ ID NO: 551710 - DNA, 25 bp, Homo sapien
tgcactggcgaatataagctactct

SEQ ID NO: 551711 - DNA, 25 bp, Homo sapien
ttagatgtagggcttaatgcactgg

SEQ ID NO: 551712 - DNA, 25 bp, Homo sapien
aatgtgagaactgctactgtaaaac

SEQ ID NO: 551713 - DNA, 25 bp, Homo sapien
tggagtctcaatgtgagaactgcta

SEQ ID NO: 551714 - DNA, 25 bp, Homo sapien
gtctcaatgtgagaactgctactgt

SEQ ID NO: 551715 - DNA, 25 bp, Homo sapien
ctcaatgtgagaactgctactgtaa

SEQ ID NO: 551716 - DNA, 25 bp, Homo sapien
acagatgctatcaaagctgtacaac

SEQ ID NO: 551717 - DNA, 25 bp, Homo sapien
tgctatcaaagctgtacaacatcat

SEQ ID NO: 551718 - DNA, 25 bp, Homo sapien
cctgatgtgagtgacagatgctatc

SEQ ID NO: 551719 - DNA, 25 bp, Homo sapien
tccctgatgtgagtgacagatgcta

SEQ ID NO: 551720 - DNA, 25 bp, Homo sapien
taatgtcactcagctgtagcaggga

SEQ ID NO: 551721 - DNA, 25 bp, Homo sapien
cattcggcccaatacgatgagctgg

SEQ ID NO: 551722 - DNA, 25 bp, Homo sapien
ggttgaccatggagatagaagcccc

SEQ ID NO: 551723 - DNA, 25 bp, Homo sapien
aggtggaggtctgctatgccctgca

SEQ ID NO: 551724 - DNA, 25 bp, Homo sapien
tgtgttaaacctaatcataaaccag

SEQ ID NO: 551725 - DNA, 25 bp, Homo sapien
tcataaaccagccagcatcgggtcc

SEQ ID NO: 551726 - DNA, 25 bp, Homo sapien
tggtgctttccctgtgttaaaccta

SEQ ID NO: 551727 - DNA, 25 bp, Homo sapien
taaacctaatcataaaccagccagc

SEQ ID NO: 551728 - DNA, 25 bp, Homo sapien
gaggaaggacttcttaagcgtctgt

SEQ ID NO: 551729 - DNA, 25 bp, Homo sapien
tatcacttcactcttaggcttggag

SEQ ID NO: 551730 - DNA, 25 bp, Homo sapien
cactcttaggcttggaggaaggact

SEQ ID NO: 551731 - DNA, 25 bp, Homo sapien
tcttaagcgtctgtgactgtatggg

SEQ ID NO: 551732 - DNA, 25 bp, Homo sapien
aggcaagaactctgattggcaagtc

SEQ ID NO: 551733 - DNA, 25 bp, Homo sapien
ttggcaagtcttgggtaataagtcc

SEQ ID NO: 551734 - DNA, 25 bp, Homo sapien
gaacctgtgtctacacgtcagtctg

SEQ ID NO: 551735 - DNA, 25 bp, Homo sapien
gtgtccagagtggtgaacctgtgtc

SEQ ID NO: 551736 - DNA, 25 bp, Homo sapien
ttacaagaagcccaataactgggcc

SEQ ID NO: 551737 - DNA, 25 bp, Homo sapien
taactgggcctgaagttggattgtc

SEQ ID NO: 551738 - DNA, 25 bp, Homo sapien
gtcagttggcgatcacaggacaaaa

SEQ ID NO: 551739 - DNA, 25 bp, Homo sapien
gaatctctgctgactcatattcctc

SEQ ID NO: 551740 - DNA, 25 bp, Homo sapien
tatgctatcttctcgttcaagatgc

SEQ ID NO: 551741 - DNA, 25 bp, Homo sapien
tgccgacaggttctgtttgaggaat

SEQ ID NO: 551742 - DNA, 25 bp, Homo sapien
ggtgtgcctgacagttaataaggct

SEQ ID NO: 551743 - DNA, 25 bp, Homo sapien
taataaggctgtatccacaagctgc

SEQ ID NO: 551744 - DNA, 25 bp, Homo sapien
tctgccacactcacatatggatggg

SEQ ID NO: 551745 - DNA, 25 bp, Homo sapien
tacaagtataaaagaggagacatca

SEQ ID NO: 551746 - DNA, 25 bp, Homo sapien
tctaaagtccattaagagagctgtg

SEQ ID NO: 551747 - DNA, 25 bp, Homo sapien
gctgtgattgcgaagaagtgactga

SEQ ID NO: 551748 - DNA, 25 bp, Homo sapien
caagaagtgcgttctttcctgaagc

SEQ ID NO: 551749 - DNA, 25 bp, Homo sapien
tcagtgccctgatgttcccaagaag

SEQ ID NO: 551750 - DNA, 25 bp, Homo sapien
accaacagtgaaatggcagcatcag

SEQ ID NO: 551751 - DNA, 25 bp, Homo sapien
tattgcctgtcctggttttgtaacc

SEQ ID NO: 551752 - DNA, 25 bp, Homo sapien
ctgacccgaaacaggcttttcctga

SEQ ID NO: 551753 - DNA, 25 bp, Homo sapien
tgacccgaaacaggcttttcctgac

SEQ ID NO: 551754 - DNA, 25 bp, Homo sapien
tgatgaggtataaatattccatgga

SEQ ID NO: 551755 - DNA, 25 bp, Homo sapien
atcagacaacttgcccctctgtaca

SEQ ID NO: 551756 - DNA, 25 bp, Homo sapien
ttccatggagcaataaatagagagg

SEQ ID NO: 551757 - DNA, 25 bp, Homo sapien
ggtccacaagaaagatatattggct

SEQ ID NO: 551758 - DNA, 25 bp, Homo sapien
attccctactgtgtttttccaatag

SEQ ID NO: 551759 - DNA, 25 bp, Homo sapien
aaaagacattgctagtagacaccgg

SEQ ID NO: 551760 - DNA, 25 bp, Homo sapien
catagtacaggtgatagttgaattc

SEQ ID NO: 551761 - DNA, 25 bp, Homo sapien
caccggattgaatgtcatagtacag

SEQ ID NO: 551762 - DNA, 25 bp, Homo sapien
taagtgtcaaccctaactctttgaa

SEQ ID NO: 551763 - DNA, 25 bp, Homo sapien
ctttccgcatccaaagctgccaggg

SEQ ID NO: 551764 - DNA, 25 bp, Homo sapien
tctgactccctttccgcatccaaag

SEQ ID NO: 551765 - DNA, 25 bp, Homo sapien
gcatccaaagctgccagggtaacag

SEQ ID NO: 551766 - DNA, 25 bp, Homo sapien
tgccagggtaacagctcaggagctt

SEQ ID NO: 551767 - DNA, 25 bp, Homo sapien
caagagcaggtagtacatttgtctt

SEQ ID NO: 551768 - DNA, 25 bp, Homo sapien
tttctcactacaggatcttcaagag

SEQ ID NO: 551769 - DNA, 25 bp, Homo sapien
cactatcatggcagttgtgacaatg

SEQ ID NO: 551770 - DNA, 25 bp, Homo sapien
tagtgtgctaatttccgaacaaatg

SEQ ID NO: 551771 - DNA, 25 bp, Homo sapien
agagcaagaattcagacttctcagg

SEQ ID NO: 551772 - DNA, 25 bp, Homo sapien
atctgcagcaacacccactaatgag

SEQ ID NO: 551773 - DNA, 25 bp, Homo sapien
cttctcagggtggaaggtcatggca

SEQ ID NO: 551774 - DNA, 25 bp, Homo sapien
tcatggcagtcccaacctggaaagc

SEQ ID NO: 551775 - DNA, 25 bp, Homo sapien
tgtagagttcatgccccagaagttc

SEQ ID NO: 551776 - DNA, 25 bp, Homo sapien
ccccagatacagtaacgtttggcta

SEQ ID NO: 551777 - DNA, 25 bp, Homo sapien
agtgtttgtagagttcatgccccag

SEQ ID NO: 551778 - DNA, 25 bp, Homo sapien
aacgtttggctaacaagacattctg

SEQ ID NO: 551779 - DNA, 25 bp, Homo sapien
tcggtgctcactggaaagtagagcc

SEQ ID NO: 551780 - DNA, 25 bp, Homo sapien
ccaagctgctgtaacatctctctct

SEQ ID NO: 551781 - DNA, 25 bp, Homo sapien
tggacccattgtgatacctcttcgg

SEQ ID NO: 551782 - DNA, 25 bp, Homo sapien
gatacctcttcggtgctcactggaa

SEQ ID NO: 551783 - DNA, 25 bp, Homo sapien
caaggacataaccaagtaaccaagg

SEQ ID NO: 551784 - DNA, 25 bp, Homo sapien
ctagcaaggacataaccaagtaacc

SEQ ID NO: 551785 - DNA, 25 bp, Homo sapien
cataaccaagtaaccaaggcccaca

SEQ ID NO: 551786 - DNA, 25 bp, Homo sapien
tctcttgatactagcaaggacataa

SEQ ID NO: 551787 - DNA, 25 bp, Homo sapien
actgtgccatagctatgcatactac

SEQ ID NO: 551788 - DNA, 25 bp, Homo sapien
caactgtgccatagctatgcatact

SEQ ID NO: 551789 - DNA, 25 bp, Homo sapien
tcaactgtgccatagctatgcatac

SEQ ID NO: 551790 - DNA, 25 bp, Homo sapien
tttcaactgtgccatagctatgcat

SEQ ID NO: 551791 - DNA, 25 bp, Homo sapien
tcggatttcctgttggatgtctccc

SEQ ID NO: 551792 - DNA, 25 bp, Homo sapien
ctctcggatttcctgttggatgtct

SEQ ID NO: 551793 - DNA, 25 bp, Homo sapien
aattccatgtagtttacattaccct

SEQ ID NO: 551794 - DNA, 25 bp, Homo sapien
taccctctaggagcacatttgtcat

SEQ ID NO: 551795 - DNA, 25 bp, Homo sapien
gacgttgttcccgtggattcagtac

SEQ ID NO: 551796 - DNA, 25 bp, Homo sapien
ctggatcagttggaggagctgccat

SEQ ID NO: 551797 - DNA, 25 bp, Homo sapien
cactggacgttgttcccgtggattc

SEQ ID NO: 551798 - DNA, 25 bp, Homo sapien
tgttcccgtggattcagtacctgga

SEQ ID NO: 551799 - DNA, 25 bp, Homo sapien
ggtattaaggtctttacaggcatca

SEQ ID NO: 551800 - DNA, 25 bp, Homo sapien
agcgattggtggtctctcagggtca

SEQ ID NO: 551801 - DNA, 25 bp, Homo sapien
aaacaacttagcgattggtggtctc

SEQ ID NO: 551802 - DNA, 25 bp, Homo sapien
ttgacaccaaacaacttagcgattg

SEQ ID NO: 551803 - DNA, 25 bp, Homo sapien
gctgcagtaaggtgaagctttctta

SEQ ID NO: 551804 - DNA, 25 bp, Homo sapien
aggtgaagctttcttagacatggaa

SEQ ID NO: 551805 - DNA, 25 bp, Homo sapien
cagtaaggtgaagctttcttagaca

SEQ ID NO: 551806 - DNA, 25 bp, Homo sapien
cagctgcagtaaggtgaagctttct

SEQ ID NO: 551807 - DNA, 25 bp, Homo sapien
caatgcgtgattatgcaagcccaca

SEQ ID NO: 551808 - DNA, 25 bp, Homo sapien
tcatttaaactagatctggaaactg

SEQ ID NO: 551809 - DNA, 25 bp, Homo sapien
tgttttctgcagactgaattgatgg

SEQ ID NO: 551810 - DNA, 25 bp, Homo sapien
gactgtatgttagatgcaatgcgtg

SEQ ID NO: 551811 - DNA, 25 bp, Homo sapien
agagcagtggctatgacctgagtca

SEQ ID NO: 551812 - DNA, 25 bp, Homo sapien
tccaaaaatgtaggttgacaaccca

SEQ ID NO: 551813 - DNA, 25 bp, Homo sapien
cacagcacacgaaaagtccactcat

SEQ ID NO: 551814 - DNA, 25 bp, Homo sapien
aaaatgtaggttgacaacccaggag

SEQ ID NO: 551815 - DNA, 25 bp, Homo sapien
gccatgggatttgcatgagcatcat

SEQ ID NO: 551816 - DNA, 25 bp, Homo sapien
ccatgggatttgcatgagcatcatc

SEQ ID NO: 551817 - DNA, 25 bp, Homo sapien
ggccatgggatttgcatgagcatca

SEQ ID NO: 551818 - DNA, 25 bp, Homo sapien
tataccagcaaacatccagacctag

SEQ ID NO: 551819 - DNA, 25 bp, Homo sapien
cctagaatcagaagatatcctgatt

SEQ ID NO: 551820 - DNA, 25 bp, Homo sapien
catgcttgtataccagcaaacatcc

SEQ ID NO: 551821 - DNA, 25 bp, Homo sapien
tcagaagatatcctgattctatttt

SEQ ID NO: 551822 - DNA, 25 bp, Homo sapien
gtcatcctttgcaaggacactgata

SEQ ID NO: 551823 - DNA, 25 bp, Homo sapien
tcctttgcaaggacactgataatct

SEQ ID NO: 551824 - DNA, 25 bp, Homo sapien
gcaaggacactgataatcttctgag

SEQ ID NO: 551825 - DNA, 25 bp, Homo sapien
ttgcaaggacactgataatcttctg

SEQ ID NO: 551826 - DNA, 25 bp, Homo sapien
tcccaagggagatattctaagcctc

SEQ ID NO: 551827 - DNA, 25 bp, Homo sapien
tctacctaggagcatagtcttcaca

SEQ ID NO: 551828 - DNA, 25 bp, Homo sapien
cgtaaatcagtaggcgtctgtcgcc

SEQ ID NO: 551829 - DNA, 25 bp, Homo sapien
cagatagggctgcatcagacttacc

SEQ ID NO: 551830 - DNA, 25 bp, Homo sapien
gtatcacggtgtatatgaaaacaag

SEQ ID NO: 551831 - DNA, 25 bp, Homo sapien
cttgtatcacggtgtatatgaaaac

SEQ ID NO: 551832 - DNA, 25 bp, Homo sapien
tttatcttgtatcacggtgtatatg

SEQ ID NO: 551833 - DNA, 25 bp, Homo sapien
cacggtgtatatgaaaacaagacaa

SEQ ID NO: 551834 - DNA, 25 bp, Homo sapien
ttccaaagaaacggtgccatttgca

SEQ ID NO: 551835 - DNA, 25 bp, Homo sapien
ccaaagaaacggtgccatttgcaat

SEQ ID NO: 551836 - DNA, 25 bp, Homo sapien
tccaaagaaacggtgccatttgcaa

SEQ ID NO: 551837 - DNA, 25 bp, Homo sapien
gaattatcttcgattttcaaagccg

SEQ ID NO: 551838 - DNA, 25 bp, Homo sapien
ggcatctatgaaaatctcaactgaa

SEQ ID NO: 551839 - DNA, 25 bp, Homo sapien
aatgtcagaaataaggcatctatga

SEQ ID NO: 551840 - DNA, 25 bp, Homo sapien
ttcaaagccgcttcttcacaaacat

SEQ ID NO: 551841 - DNA, 25 bp, Homo sapien
aagtgttccttgtgagattgttttt

SEQ ID NO: 551842 - DNA, 25 bp, Homo sapien
ggatggtgtggtcggtccactacct

SEQ ID NO: 551843 - DNA, 25 bp, Homo sapien
catgcacgggatggtgtggtcggtc

SEQ ID NO: 551844 - DNA, 25 bp, Homo sapien
cggtccactacctgttctggtgcga

SEQ ID NO: 551845 - DNA, 25 bp, Homo sapien
ctacctgttctggtgcgatcaaggc

SEQ ID NO: 551846 - DNA, 25 bp, Homo sapien
tcctcttggacttgcctctgactga

SEQ ID NO: 551847 - DNA, 25 bp, Homo sapien
caggacaagccatttgaacaaagca

SEQ ID NO: 551848 - DNA, 25 bp, Homo sapien
taggtggggcagagttcttttctac

SEQ ID NO: 551849 - DNA, 25 bp, Homo sapien
agcagagtcctcttggacttgcctc

SEQ ID NO: 551850 - DNA, 25 bp, Homo sapien
ggatgtagcctcttgttcccaagaa

SEQ ID NO: 551851 - DNA, 25 bp, Homo sapien
aaatcagtttgaggatgtagcctct

SEQ ID NO: 551852 - DNA, 25 bp, Homo sapien
tcccaagaataactgtatttggatc

SEQ ID NO: 551853 - DNA, 25 bp, Homo sapien
gaataactgtatttggatcatcagg

SEQ ID NO: 551854 - DNA, 25 bp, Homo sapien
tcttgggcacaatctgcatggttcc

SEQ ID NO: 551855 - DNA, 25 bp, Homo sapien
cttagtgggaggcataaaagctctt

SEQ ID NO: 551856 - DNA, 25 bp, Homo sapien
gattttattagctcccaggatcaca

SEQ ID NO: 551857 - DNA, 25 bp, Homo sapien
catcctgtgtacctggtgtggcctc

SEQ ID NO: 551858 - DNA, 25 bp, Homo sapien
tgactgtgtattaatagaactcaac

SEQ ID NO: 551859 - DNA, 25 bp, Homo sapien
taatagaactcaacagggaagtatc

SEQ ID NO: 551860 - DNA, 25 bp, Homo sapien
gtattaatagaactcaacagggaag

SEQ ID NO: 551861 - DNA, 25 bp, Homo sapien
ctcaacagggaagtatcattatttg

SEQ ID NO: 551862 - DNA, 25 bp, Homo sapien
tgcacaggtagacaatgagtctcaa

SEQ ID NO: 551863 - DNA, 25 bp, Homo sapien
agcctccatcaatgccgtatctgca

SEQ ID NO: 551864 - DNA, 25 bp, Homo sapien
gagtctcaaccatgagtgagtggtg

SEQ ID NO: 551865 - DNA, 25 bp, Homo sapien
caatgccgtatctgcacaggtagac

SEQ ID NO: 551866 - DNA, 25 bp, Homo sapien
gagcatcatctttatatggaccaga

SEQ ID NO: 551867 - DNA, 25 bp, Homo sapien
gatgagaattccattgtgccacatt

SEQ ID NO: 551868 - DNA, 25 bp, Homo sapien
ggaaaccatgcaaagagacctagct

SEQ ID NO: 551869 - DNA, 25 bp, Homo sapien
tcctctccgtgctatgacttaaatg

SEQ ID NO: 551870 - DNA, 25 bp, Homo sapien
tggcaggtgcccctctgtgacgaag

SEQ ID NO: 551871 - DNA, 25 bp, Homo sapien
atctggcaggtgcccctctgtgacg

SEQ ID NO: 551872 - DNA, 25 bp, Homo sapien
gtggacccctagcaaactccagcag

SEQ ID NO: 551873 - DNA, 25 bp, Homo sapien
gcagcagagctccggctggcatctg

SEQ ID NO: 551874 - DNA, 25 bp, Homo sapien
cctgtaacggaaatttgtgagccct

SEQ ID NO: 551875 - DNA, 25 bp, Homo sapien
tgagaggacagagtctaacagctgc

SEQ ID NO: 551876 - DNA, 25 bp, Homo sapien
gagccctgttgaaatgaggtccaga

SEQ ID NO: 551877 - DNA, 25 bp, Homo sapien
ttcctgccagtttggtgatccctgg

SEQ ID NO: 551878 - DNA, 25 bp, Homo sapien
aatatccaactctccaaaatttcat

SEQ ID NO: 551879 - DNA, 25 bp, Homo sapien
gcaatatccaactctccaaaatttc

SEQ ID NO: 551880 - DNA, 25 bp, Homo sapien
ctgcaatatccaactctccaaaatt

SEQ ID NO: 551881 - DNA, 25 bp, Homo sapien
aactgcaatatccaactctccaaaa

SEQ ID NO: 551882 - DNA, 25 bp, Homo sapien
aggcagaggtcacagtgaactgaga

SEQ ID NO: 551883 - DNA, 25 bp, Homo sapien
gcagaggtcacagtgaactgagatc

SEQ ID NO: 551884 - DNA, 25 bp, Homo sapien
tgagatcatgccattgcactccagc

SEQ ID NO: 551885 - DNA, 25 bp, Homo sapien
agaggtcacagtgaactgagatcat

SEQ ID NO: 551886 - DNA, 25 bp, Homo sapien
ctgagtgatggagtgagatcccatt

SEQ ID NO: 551887 - DNA, 25 bp, Homo sapien
agccttgatctcagcactgtactcc

SEQ ID NO: 551888 - DNA, 25 bp, Homo sapien
gcctgagtgatggagtgagatccca

SEQ ID NO: 551889 - DNA, 25 bp, Homo sapien
cagtgagccttgatctcagcactgt

SEQ ID NO: 551890 - DNA, 25 bp, Homo sapien
cttttgcatgtcacttttatactca

SEQ ID NO: 551891 - DNA, 25 bp, Homo sapien
tcttttgcatgtcacttttatactc

SEQ ID NO: 551892 - DNA, 25 bp, Homo sapien
gtcttttgcatgtcacttttatact

SEQ ID NO: 551893 - DNA, 25 bp, Homo sapien
tgctacaagtgacacttttgtgcgt

SEQ ID NO: 551894 - DNA, 25 bp, Homo sapien
cacttttgtgcgtgtgccctatgag

SEQ ID NO: 551895 - DNA, 25 bp, Homo sapien
tgccctatgagcaaatcctgcaggt

SEQ ID NO: 551896 - DNA, 25 bp, Homo sapien
tcctgcaggtagagaaaccctctta

SEQ ID NO: 551897 - DNA, 25 bp, Homo sapien
aaatagaatgtaactccctggtaat

SEQ ID NO: 551898 - DNA, 25 bp, Homo sapien
ttttccagcatcaaagactggagga

SEQ ID NO: 551899 - DNA, 25 bp, Homo sapien
attctgactgctgccctggagaaaa

SEQ ID NO: 551900 - DNA, 25 bp, Homo sapien
aaaaattatcgaaattctgactgct

SEQ ID NO: 551901 - DNA, 25 bp, Homo sapien
ctaaagtaagaattgaagcaaaata

SEQ ID NO: 551902 - DNA, 25 bp, Homo sapien
taagaattgaagcaaaataactact

SEQ ID NO: 551903 - DNA, 25 bp, Homo sapien
gtaagaattgaagcaaaataactac

SEQ ID NO: 551904 - DNA, 25 bp, Homo sapien
gaattgaagcaaaataactacttga

SEQ ID NO: 551905 - DNA, 25 bp, Homo sapien
tgaagtcttgcagcacttaatacat

SEQ ID NO: 551906 - DNA, 25 bp, Homo sapien
gagttcattggcttgaaagcttcct

SEQ ID NO: 551907 - DNA, 25 bp, Homo sapien
ctcaagtttacttggcccgagtgtt

SEQ ID NO: 551908 - DNA, 25 bp, Homo sapien
catgcacgtattaaacctctcaagt

SEQ ID NO: 551909 - DNA, 25 bp, Homo sapien
ttgtgggaagtagttgactagacac

SEQ ID NO: 551910 - DNA, 25 bp, Homo sapien
gaagtagttgactagacactaaggg

SEQ ID NO: 551911 - DNA, 25 bp, Homo sapien
tgtgggaagtagttgactagacact

SEQ ID NO: 551912 - DNA, 25 bp, Homo sapien
tgggaagtagttgactagacactaa

SEQ ID NO: 551913 - DNA, 25 bp, Homo sapien
tgcggaagtaagaattagtcctagg

SEQ ID NO: 551914 - DNA, 25 bp, Homo sapien
aggaaagaagggaccagatggtgcg

SEQ ID NO: 551915 - DNA, 25 bp, Homo sapien
ggaccagatggtgcggaagtaagaa

SEQ ID NO: 551916 - DNA, 25 bp, Homo sapien
gatggtgcggaagtaagaattagtc

SEQ ID NO: 551917 - DNA, 25 bp, Homo sapien
gctcctgatgggtgacgcctcttga

SEQ ID NO: 551918 - DNA, 25 bp, Homo sapien
gatgggtgacgcctcttgagttgct

SEQ ID NO: 551919 - DNA, 25 bp, Homo sapien
cacagctcctgatgggtgacgcctc

SEQ ID NO: 551920 - DNA, 25 bp, Homo sapien
gcttcaactgctattctttggacac

SEQ ID NO: 551921 - DNA, 25 bp, Homo sapien
tttgttctctcaagcagtcccttca

SEQ ID NO: 551922 - DNA, 25 bp, Homo sapien
ttgttctctcaagcagtcccttcat

SEQ ID NO: 551923 - DNA, 25 bp, Homo sapien
ttttgttctctcaagcagtcccttc

SEQ ID NO: 551924 - DNA, 25 bp, Homo sapien
gaaagagccagtatacatgcaaagc

SEQ ID NO: 551925 - DNA, 25 bp, Homo sapien
cagtgtcaaggaaaacgagaaatac

SEQ ID NO: 551926 - DNA, 25 bp, Homo sapien
gcatttcagacatcagcagggagga

SEQ ID NO: 551927 - DNA, 25 bp, Homo sapien
tgtgctttcgtgtgcatttcagaca

SEQ ID NO: 551928 - DNA, 25 bp, Homo sapien
caaggaaggcgataacccatggtgg

SEQ ID NO: 551929 - DNA, 25 bp, Homo sapien
tagtatgtcgagaacagcacaccag

SEQ ID NO: 551930 - DNA, 25 bp, Homo sapien
gcacaccagagtttcagcaaaacaa

SEQ ID NO: 551931 - DNA, 25 bp, Homo sapien
cccatggtggtgcatttgccaaaac

SEQ ID NO: 551932 - DNA, 25 bp, Homo sapien
ctttcacgttgaatcttagaatagc

SEQ ID NO: 551933 - DNA, 25 bp, Homo sapien
ttaaccataatccagctaaagctga

SEQ ID NO: 551934 - DNA, 25 bp, Homo sapien
tcttagaatagcaatctctttggag

SEQ ID NO: 551935 - DNA, 25 bp, Homo sapien
gcatgaccattcaggcttaaccata

SEQ ID NO: 551936 - DNA, 25 bp, Homo sapien
gataatctccatatgaatcctgttc

SEQ ID NO: 551937 - DNA, 25 bp, Homo sapien
ataatctccatatgaatcctgttca

SEQ ID NO: 551938 - DNA, 25 bp, Homo sapien
ggataatctccatatgaatcctgtt

SEQ ID NO: 551939 - DNA, 25 bp, Homo sapien
ggtcctgaaggtggaaagattcaga

SEQ ID NO: 551940 - DNA, 25 bp, Homo sapien
gggtcctgaaggtggaaagattcag

SEQ ID NO: 551941 - DNA, 25 bp, Homo sapien
tacccacaaggtgcacaaatcttaa

SEQ ID NO: 551942 - DNA, 25 bp, Homo sapien
tcttaataattgcatgactgaaggc

SEQ ID NO: 551943 - DNA, 25 bp, Homo sapien
gcacactggcgtgaatttgacaaat

SEQ ID NO: 551944 - DNA, 25 bp, Homo sapien
gaatcatttccagaccctgtgcata

SEQ ID NO: 551945 - DNA, 25 bp, Homo sapien
tcaagtaatccatggtatttcatgg

SEQ ID NO: 551946 - DNA, 25 bp, Homo sapien
gaaaacaaaatctgctttcctttca

SEQ ID NO: 551947 - DNA, 25 bp, Homo sapien
tgaaaacaaaatctgctttcctttc

SEQ ID NO: 551948 - DNA, 25 bp, Homo sapien
ggatcccttgatggtgaggcaaccc

SEQ ID NO: 551949 - DNA, 25 bp, Homo sapien
ccttgatggtgaggcaaccccagag

SEQ ID NO: 551950 - DNA, 25 bp, Homo sapien
gatggtgaggcaaccccagagcttg

SEQ ID NO: 551951 - DNA, 25 bp, Homo sapien
cataacaatattggttgtaaaaggg

SEQ ID NO: 551952 - DNA, 25 bp, Homo sapien
tcactcagaaggagatagttacaaa

SEQ ID NO: 551953 - DNA, 25 bp, Homo sapien
caaagctgaccagacttcagatact

SEQ ID NO: 551954 - DNA, 25 bp, Homo sapien
gctgatgaaacgcaagatgtcactc

SEQ ID NO: 551955 - DNA, 25 bp, Homo sapien
tcatggctgatgaaacgcaagatgt

SEQ ID NO: 551956 - DNA, 25 bp, Homo sapien
gagcctgaatagcgaagacaatcca

SEQ ID NO: 551957 - DNA, 25 bp, Homo sapien
cctgaatagcgaagacaatccaaag

SEQ ID NO: 551958 - DNA, 25 bp, Homo sapien
caaaggtggaggcataatgctgtgt

SEQ ID NO: 551959 - DNA, 25 bp, Homo sapien
gcctgaatagcgaagacaatccaaa

SEQ ID NO: 551960 - DNA, 25 bp, Homo sapien
ttaatcaatcatgacatcaagcaaa

SEQ ID NO: 551961 - DNA, 25 bp, Homo sapien
gaaaggctagtgattcttatagaca

SEQ ID NO: 551962 - DNA, 25 bp, Homo sapien
ttgtattactatcccttgaggctga

SEQ ID NO: 551963 - DNA, 25 bp, Homo sapien
cacaggtagctaagatcaagaatat

SEQ ID NO: 551964 - DNA, 25 bp, Homo sapien
ctgtgtcttcaacaagaacgtaaac

SEQ ID NO: 551965 - DNA, 25 bp, Homo sapien
gcactcagagtagatgactgtgtct

SEQ ID NO: 551966 - DNA, 25 bp, Homo sapien
gatgcgtctaacatggcactcagag

SEQ ID NO: 551967 - DNA, 25 bp, Homo sapien
tatgcaaatgatagtccagatccta

SEQ ID NO: 551968 - DNA, 25 bp, Homo sapien
ctgagagggccagcaggctgtggaa

SEQ ID NO: 551969 - DNA, 25 bp, Homo sapien
ggaagctgagcagaaacacagactc

SEQ ID NO: 551970 - DNA, 25 bp, Homo sapien
agctgagcagaaacacagactccat

SEQ ID NO: 551971 - DNA, 25 bp, Homo sapien
agctgagagggccagcaggctgtgg

SEQ ID NO: 551972 - DNA, 25 bp, Homo sapien
tggcagaaaaatctgcgaaaaacct

SEQ ID NO: 551973 - DNA, 25 bp, Homo sapien
taccccaacacaaatggcagaaaaa

SEQ ID NO: 551974 - DNA, 25 bp, Homo sapien
ctttaccccaacacaaatggcagaa

SEQ ID NO: 551975 - DNA, 25 bp, Homo sapien
gaaaaacctaaattgctgtgtgatc

SEQ ID NO: 551976 - DNA, 25 bp, Homo sapien
aatgtcggtagcagtctttccacac

SEQ ID NO: 551977 - DNA, 25 bp, Homo sapien
tctaagacaattctcttttcatgcc

SEQ ID NO: 551978 - DNA, 25 bp, Homo sapien
tagaattcaccaatgtcggtagcag

SEQ ID NO: 551979 - DNA, 25 bp, Homo sapien
gacaattctcttttcatgcctagta

SEQ ID NO: 551980 - DNA, 25 bp, Homo sapien
tgacctttcgtcactgtgcttcagt

SEQ ID NO: 551981 - DNA, 25 bp, Homo sapien
ggagtcttaaaggacatgacatatg

SEQ ID NO: 551982 - DNA, 25 bp, Homo sapien
gcaccaaattctctcatcctgtcag

SEQ ID NO: 551983 - DNA, 25 bp, Homo sapien
ttctccattcaagggctgtcagctt

SEQ ID NO: 551984 - DNA, 25 bp, Homo sapien
gactgggagcttcacattgagaaag

SEQ ID NO: 551985 - DNA, 25 bp, Homo sapien
catatctatgggactgagtggcgga

SEQ ID NO: 551986 - DNA, 25 bp, Homo sapien
actgaagtttcccatatctatggga

SEQ ID NO: 551987 - DNA, 25 bp, Homo sapien
agaaccaaccgccaagtggacagct

SEQ ID NO: 551988 - DNA, 25 bp, Homo sapien
aggccatgaaattctgctaggtcaa

SEQ ID NO: 551989 - DNA, 25 bp, Homo sapien
aaagcgatgggcatcattatcaaca

SEQ ID NO: 551990 - DNA, 25 bp, Homo sapien
aaagcagaaataaagcgatgggcat

SEQ ID NO: 551991 - DNA, 25 bp, Homo sapien
ggagaacaggccatgaaattctgct

SEQ ID NO: 551992 - DNA, 25 bp, Homo sapien
tgtccagatttccaaatgctggagg

SEQ ID NO: 551993 - DNA, 25 bp, Homo sapien
ccagcattagagaccttcacagatg

SEQ ID NO: 551994 - DNA, 25 bp, Homo sapien
gtttcaaatacgcaacaccataggg

SEQ ID NO: 551995 - DNA, 25 bp, Homo sapien
ggctcttttgagatgcaaggatgtc

SEQ ID NO: 551996 - DNA, 25 bp, Homo sapien
ccggttcctcgtgggtaatggcaat

SEQ ID NO: 551997 - DNA, 25 bp, Homo sapien
agaaggcattataaaggtagaatat

SEQ ID NO: 551998 - DNA, 25 bp, Homo sapien
ggtagaatatttgtcaactgacatt

SEQ ID NO: 551999 - DNA, 25 bp, Homo sapien
cctcgtgggtaatggcaatgggatt

SEQ ID NO: 552000 - DNA, 25 bp, Homo sapien
ctcacgatgaaagagagtaaagcaa

SEQ ID NO: 552001 - DNA, 25 bp, Homo sapien
cgatgaaagagagtaaagcaaaatg

SEQ ID NO: 552002 - DNA, 25 bp, Homo sapien
tcacgatgaaagagagtaaagcaaa

SEQ ID NO: 552003 - DNA, 25 bp, Homo sapien
cacgatgaaagagagtaaagcaaaa

SEQ ID NO: 552004 - DNA, 25 bp, Homo sapien
tgtggaggagccggaaggcctcaag

SEQ ID NO: 552005 - DNA, 25 bp, Homo sapien
ccaggcgtaactgtggaggagccgg

SEQ ID NO: 552006 - DNA, 25 bp, Homo sapien
gaggagccggaaggcctcaagggct

SEQ ID NO: 552007 - DNA, 25 bp, Homo sapien
tggaggagccggaaggcctcaaggg

SEQ ID NO: 552008 - DNA, 25 bp, Homo sapien
gatggtgtttgatcagagactgagc

SEQ ID NO: 552009 - DNA, 25 bp, Homo sapien
tggacacaacagttaagtcttcaga

SEQ ID NO: 552010 - DNA, 25 bp, Homo sapien
tctttgagaggtctggacccctctt

SEQ ID NO: 552011 - DNA, 25 bp, Homo sapien
catgcccaaccttgagagcttttca

SEQ ID NO: 552012 - DNA, 25 bp, Homo sapien
tgacagctgtcagaagccattctcg

SEQ ID NO: 552013 - DNA, 25 bp, Homo sapien
ccacagcatgcacgttatgaaggca

SEQ ID NO: 552014 - DNA, 25 bp, Homo sapien
ccgtcgagtgcaatcgaagtgtgag

SEQ ID NO: 552015 - DNA, 25 bp, Homo sapien
gaacctagatttcccacagcatgca

SEQ ID NO: 552016 - DNA, 25 bp, Homo sapien
tacccctcaatgtgcaagcatatcc

SEQ ID NO: 552017 - DNA, 25 bp, Homo sapien
gccaagactgagtgtacccctcaat

SEQ ID NO: 552018 - DNA, 25 bp, Homo sapien
tgaatgtgaacatacctcgccaaga

SEQ ID NO: 552019 - DNA, 25 bp, Homo sapien
tatcccacaaatgggtaccctgtgg

SEQ ID NO: 552020 - DNA, 25 bp, Homo sapien
gagatctgggatccaagagggctta

SEQ ID NO: 552021 - DNA, 25 bp, Homo sapien
gcttacctgattcctacccagtgca

SEQ ID NO: 552022 - DNA, 25 bp, Homo sapien
tcatcctaaaaacgggagatctggg

SEQ ID NO: 552023 - DNA, 25 bp, Homo sapien
caagtcctcatcctaaaaacgggag

SEQ ID NO: 552024 - DNA, 25 bp, Homo sapien
caccaatggcatggcccctaccact

SEQ ID NO: 552025 - DNA, 25 bp, Homo sapien
aatggcatggcccctaccactgcca

SEQ ID NO: 552026 - DNA, 25 bp, Homo sapien
ccaatggcatggcccctaccactgc

SEQ ID NO: 552027 - DNA, 25 bp, Homo sapien
tggcatggcccctaccactgccaac

SEQ ID NO: 552028 - DNA, 25 bp, Homo sapien
ttgccctgtgcaaatcttccaggcg

SEQ ID NO: 552029 - DNA, 25 bp, Homo sapien
tttcttggccctgttctatgttgta

SEQ ID NO: 552030 - DNA, 25 bp, Homo sapien
ccagcttgttatttggctgatcaga

SEQ ID NO: 552031 - DNA, 25 bp, Homo sapien
tcagcaagtcatcctttgccctgtg

SEQ ID NO: 552032 - DNA, 25 bp, Homo sapien
ccgttatgaacctgactttaagatg

SEQ ID NO: 552033 - DNA, 25 bp, Homo sapien
tatgaacctgactttaagatgaggg

SEQ ID NO: 552034 - DNA, 25 bp, Homo sapien
cttatccgttatgaacctgacttta

SEQ ID NO: 552035 - DNA, 25 bp, Homo sapien
gggatgtggatcacccttgtttttc

SEQ ID NO: 552036 - DNA, 25 bp, Homo sapien
acttccatctacatggaacagggta

SEQ ID NO: 552037 - DNA, 25 bp, Homo sapien
aacaggagattcattgatgactggc

SEQ ID NO: 552038 - DNA, 25 bp, Homo sapien
acttctaactacacttccatctaca

SEQ ID NO: 552039 - DNA, 25 bp, Homo sapien
catggaacagggtaggtcttctcat

SEQ ID NO: 552040 - DNA, 25 bp, Homo sapien
attatcaaggcttttcatagcattc

SEQ ID NO: 552041 - DNA, 25 bp, Homo sapien
tcaaggcttttcatagcattcaaca

SEQ ID NO: 552042 - DNA, 25 bp, Homo sapien
caaggcttttcatagcattcaacat

SEQ ID NO: 552043 - DNA, 25 bp, Homo sapien
tatcaaggcttttcatagcattcaa

SEQ ID NO: 552044 - DNA, 25 bp, Homo sapien
tctttcaagcttccaacatcctttg

SEQ ID NO: 552045 - DNA, 25 bp, Homo sapien
caaatatcactctcaggcaatcgta

SEQ ID NO: 552046 - DNA, 25 bp, Homo sapien
cctcggtgccatacagagtattgat

SEQ ID NO: 552047 - DNA, 25 bp, Homo sapien
gtttttccataagtcatcctcggtg

SEQ ID NO: 552048 - DNA, 25 bp, Homo sapien
gaaccatcaattgttcaaaccaacc

SEQ ID NO: 552049 - DNA, 25 bp, Homo sapien
tatctcagcaatggcatcatgaacc

SEQ ID NO: 552050 - DNA, 25 bp, Homo sapien
ggcatcatgaaccatcaattgttca

SEQ ID NO: 552051 - DNA, 25 bp, Homo sapien
gcaatggcatcatgaaccatcaatt

SEQ ID NO: 552052 - DNA, 25 bp, Homo sapien
tgctctcatcaactttctttctgtt

SEQ ID NO: 552053 - DNA, 25 bp, Homo sapien
tctcatcaactttctttctgtttgg

SEQ ID NO: 552054 - DNA, 25 bp, Homo sapien
tgcggtttcattgctctcatcaact

SEQ ID NO: 552055 - DNA, 25 bp, Homo sapien
tttcattgctctcatcaactttctt

SEQ ID NO: 552056 - DNA, 25 bp, Homo sapien
tgatattttgcctacctaaatcagt

SEQ ID NO: 552057 - DNA, 25 bp, Homo sapien
cagtactgtgggtctacaacttgga

SEQ ID NO: 552058 - DNA, 25 bp, Homo sapien
tgtgttcctggtccacctagggtgt

SEQ ID NO: 552059 - DNA, 25 bp, Homo sapien
tgctcagattagagtggtctgtgga

SEQ ID NO: 552060 - DNA, 25 bp, Homo sapien
tagatcatcctttattcatattaag

SEQ ID NO: 552061 - DNA, 25 bp, Homo sapien
tttccctagtattatagattcatgc

SEQ ID NO: 552062 - DNA, 25 bp, Homo sapien
aatgattaagagcttgaactttttc

SEQ ID NO: 552063 - DNA, 25 bp, Homo sapien
aacaagaagggtatgaaatgattaa

SEQ ID NO: 552064 - DNA, 25 bp, Homo sapien
catgcttcatagacaagattaactt

SEQ ID NO: 552065 - DNA, 25 bp, Homo sapien
cattttggtatcatccgtccccaga

SEQ ID NO: 552066 - DNA, 25 bp, Homo sapien
ggtatcatccgtccccagatggaga

SEQ ID NO: 552067 - DNA, 25 bp, Homo sapien
tcctggaagaggctccctcttctta

SEQ ID NO: 552068 - DNA, 25 bp, Homo sapien
cctggaagggggcatcattttggta

SEQ ID NO: 552069 - DNA, 25 bp, Homo sapien
gaccagctgtaatcacaaggcccct

SEQ ID NO: 552070 - DNA, 25 bp, Homo sapien
atggaccagctgtaatcacaaggcc

SEQ ID NO: 552071 - DNA, 25 bp, Homo sapien
cttaaaatagggagaatatcttaga

SEQ ID NO: 552072 - DNA, 25 bp, Homo sapien
tagaatatccagatggaccagctgt

SEQ ID NO: 552073 - DNA, 25 bp, Homo sapien
cagaggtgaagtggctttgtttatg

SEQ ID NO: 552074 - DNA, 25 bp, Homo sapien
gcactgacgtttttatgaggaccca

SEQ ID NO: 552075 - DNA, 25 bp, Homo sapien
agcctttccagttgaaccatcctgg

SEQ ID NO: 552076 - DNA, 25 bp, Homo sapien
caggagctgcaccagatgatgcact

SEQ ID NO: 552077 - DNA, 25 bp, Homo sapien
catcgacagtggtagaaagtttaga

SEQ ID NO: 552078 - DNA, 25 bp, Homo sapien
tatttctgcgttcattaattcactc

SEQ ID NO: 552079 - DNA, 25 bp, Homo sapien
gaaaatgctagtatttctgcgttca

SEQ ID NO: 552080 - DNA, 25 bp, Homo sapien
gcagttgtctacatcgacagtggta

SEQ ID NO: 552081 - DNA, 25 bp, Homo sapien
tctctgttccaagggccatcaggtg

SEQ ID NO: 552082 - DNA, 25 bp, Homo sapien
gagccactcaaagcagcatccgtct

SEQ ID NO: 552083 - DNA, 25 bp, Homo sapien
tacactgaccacaagtccctggtgg

SEQ ID NO: 552084 - DNA, 25 bp, Homo sapien
taagccaggttctgttgtgagagca

SEQ ID NO: 552085 - DNA, 25 bp, Homo sapien
gcgtatatggcaaagcaatttctta

SEQ ID NO: 552086 - DNA, 25 bp, Homo sapien
cttatttcggttggaattataagtg

SEQ ID NO: 552087 - DNA, 25 bp, Homo sapien
gttttgagaggaaagcgtatatggc

SEQ ID NO: 552088 - DNA, 25 bp, Homo sapien
ctgaatgacatccttgaacatctgc

SEQ ID NO: 552089 - DNA, 25 bp, Homo sapien
ttgcttcttttcacaacgcctttca

SEQ ID NO: 552090 - DNA, 25 bp, Homo sapien
acaacgcctttcacataagactgca

SEQ ID NO: 552091 - DNA, 25 bp, Homo sapien
tttatcccctcttcggatcatctgc

SEQ ID NO: 552092 - DNA, 25 bp, Homo sapien
cttcggatcatctgcctgcaagaca

SEQ ID NO: 552093 - DNA, 25 bp, Homo sapien
aaaatgtggtctccaaatcagcggc

SEQ ID NO: 552094 - DNA, 25 bp, Homo sapien
aatcagcggcatcgggatcacctgg

SEQ ID NO: 552095 - DNA, 25 bp, Homo sapien
aatgcctccaggatattctgacgcg

SEQ ID NO: 552096 - DNA, 25 bp, Homo sapien
aaagctggcaaatcaatccctaggg

SEQ ID NO: 552097 - DNA, 25 bp, Homo sapien
ttttgccgaaattaaaggctctggc

SEQ ID NO: 552098 - DNA, 25 bp, Homo sapien
agttttgccgaaattaaaggctctg

SEQ ID NO: 552099 - DNA, 25 bp, Homo sapien
ttaaaggctctggcttcactccctg

SEQ ID NO: 552100 - DNA, 25 bp, Homo sapien
tcagtcaagttttgccgaaattaaa

SEQ ID NO: 552101 - DNA, 25 bp, Homo sapien
tctgttgttttccacgtccggtgga

SEQ ID NO: 552102 - DNA, 25 bp, Homo sapien
ggtggacggcgcctctcctcgggcg

SEQ ID NO: 552103 - DNA, 25 bp, Homo sapien
ggcgccttgacaagggagaccagct

SEQ ID NO: 552104 - DNA, 25 bp, Homo sapien
gagaagaagcgaaagggccgatctt

SEQ ID NO: 552105 - DNA, 25 bp, Homo sapien
gcggcaagggaactagcacgaatgt

SEQ ID NO: 552106 - DNA, 25 bp, Homo sapien
ttgacactagcatcatggcaccagg

SEQ ID NO: 552107 - DNA, 25 bp, Homo sapien
gcatccatgaaaccgaagtaggcta

SEQ ID NO: 552108 - DNA, 25 bp, Homo sapien
cattacagagcagacttgggcggca

SEQ ID NO: 552109 - DNA, 25 bp, Homo sapien
gaggagtcacctctgagtttggtca

SEQ ID NO: 552110 - DNA, 25 bp, Homo sapien
gatctgtgtcgtttgctctgtgttg

SEQ ID NO: 552111 - DNA, 25 bp, Homo sapien
ggaacctgattccataacacttatg

SEQ ID NO: 552112 - DNA, 25 bp, Homo sapien
cccctcagcgctgccagatctgtgt

SEQ ID NO: 552113 - DNA, 25 bp, Homo sapien
gtgatcttctatgccccaaatgcct

SEQ ID NO: 552114 - DNA, 25 bp, Homo sapien
caaatgcctcgtctgcacctagaaa

SEQ ID NO: 552115 - DNA, 25 bp, Homo sapien
aatgcctcgtctgcacctagaaatg

SEQ ID NO: 552116 - DNA, 25 bp, Homo sapien
acatggcggaagaagagtgtgatct

SEQ ID NO: 552117 - DNA, 25 bp, Homo sapien
gggcctcagtagacggaccacattt

SEQ ID NO: 552118 - DNA, 25 bp, Homo sapien
cattaaagccgatgaatatttttgg

SEQ ID NO: 552119 - DNA, 25 bp, Homo sapien
tgcaacttcattaaagccgatgaat

SEQ ID NO: 552120 - DNA, 25 bp, Homo sapien
tctacaaagttaggcaccagggcct

SEQ ID NO: 552121 - DNA, 25 bp, Homo sapien
cttctctggtcctaccgtctcttct

SEQ ID NO: 552122 - DNA, 25 bp, Homo sapien
ttccaacactacttctctggtccta

SEQ ID NO: 552123 - DNA, 25 bp, Homo sapien
acttccaacactacttctctggtcc

SEQ ID NO: 552124 - DNA, 25 bp, Homo sapien
ctcacttccaacactacttctctgg

SEQ ID NO: 552125 - DNA, 25 bp, Homo sapien
tataccacaccttcagatttagcaa

SEQ ID NO: 552126 - DNA, 25 bp, Homo sapien
ccattccttgctagcatgagtttga

SEQ ID NO: 552127 - DNA, 25 bp, Homo sapien
acattttcaacccactgattgcaga

SEQ ID NO: 552128 - DNA, 25 bp, Homo sapien
gcagctccttgactcatttcccgtt

SEQ ID NO: 552129 - DNA, 25 bp, Homo sapien
tgagaaatagtggttggcattaatg

SEQ ID NO: 552130 - DNA, 25 bp, Homo sapien
ccctgttgaattgtaggccttcagc

SEQ ID NO: 552131 - DNA, 25 bp, Homo sapien
gacattatgaattgaatggccctgt

SEQ ID NO: 552132 - DNA, 25 bp, Homo sapien
cagaatgagaagctttctctgctga

SEQ ID NO: 552133 - DNA, 25 bp, Homo sapien
ggtcatgaccactaagaggagcaca

SEQ ID NO: 552134 - DNA, 25 bp, Homo sapien
tccctaggcggaaacacacaagaac

SEQ ID NO: 552135 - DNA, 25 bp, Homo sapien
ttagcagtataaagccagagttctc

SEQ ID NO: 552136 - DNA, 25 bp, Homo sapien
gactggaccacctacctgataggaa

SEQ ID NO: 552137 - DNA, 25 bp, Homo sapien
cagaggaagctgctagaaatcccat

SEQ ID NO: 552138 - DNA, 25 bp, Homo sapien
ttcaacctatcaagaacaatgagtg

SEQ ID NO: 552139 - DNA, 25 bp, Homo sapien
gaaaacaccactttgaagaattggc

SEQ ID NO: 552140 - DNA, 25 bp, Homo sapien
taagggccctaatatagtctgcaga

SEQ ID NO: 552141 - DNA, 25 bp, Homo sapien
caagaacctctggagtgtgaacttg

SEQ ID NO: 552142 - DNA, 25 bp, Homo sapien
gtgtgaacttgctgaggatccttaa

SEQ ID NO: 552143 - DNA, 25 bp, Homo sapien
gccactcctatttccccatggctca

SEQ ID NO: 552144 - DNA, 25 bp, Homo sapien
gaggatccttaatagccactcctat

SEQ ID NO: 552145 - DNA, 25 bp, Homo sapien
ggatacctcaaagtacccagaagga

SEQ ID NO: 552146 - DNA, 25 bp, Homo sapien
ggacaggaggaattgcagaacctca

SEQ ID NO: 552147 - DNA, 25 bp, Homo sapien
gcaagacacaggtgagccagaaggt

SEQ ID NO: 552148 - DNA, 25 bp, Homo sapien
gagggtatccctcaaaacgagcaag

SEQ ID NO: 552149 - DNA, 25 bp, Homo sapien
accctgccagagaccacatgcttgc

SEQ ID NO: 552150 - DNA, 25 bp, Homo sapien
tttcaccctgccagagaccacatgc

SEQ ID NO: 552151 - DNA, 25 bp, Homo sapien
gaaccatttgttttgggcccagcat

SEQ ID NO: 552152 - DNA, 25 bp, Homo sapien
tgccttctttcaccctgccagagac

SEQ ID NO: 552153 - DNA, 25 bp, Homo sapien
taggatgaagttctcgtcatcaaat

SEQ ID NO: 552154 - DNA, 25 bp, Homo sapien
tatgctttaggatgaagttctcgtc

SEQ ID NO: 552155 - DNA, 25 bp, Homo sapien
ctttaggatgaagttctcgtcatca

SEQ ID NO: 552156 - DNA, 25 bp, Homo sapien
gtcatcaaatttctccccgtagatg

SEQ ID NO: 552157 - DNA, 25 bp, Homo sapien
gattaattctgtgaaagcagggacc

SEQ ID NO: 552158 - DNA, 25 bp, Homo sapien
caaatcctttctctctagtgctcac

SEQ ID NO: 552159 - DNA, 25 bp, Homo sapien
tgaaagcagggacccttataaccaa

SEQ ID NO: 552160 - DNA, 25 bp, Homo sapien
cccgacacataaaccctggattaat

SEQ ID NO: 552161 - DNA, 25 bp, Homo sapien
aacttgtccacaaacagctcgaagg

SEQ ID NO: 552162 - DNA, 25 bp, Homo sapien
caagggctcgctgttgacagtgaag

SEQ ID NO: 552163 - DNA, 25 bp, Homo sapien
ttgacagtgaagtcgaagaacacag

SEQ ID NO: 552164 - DNA, 25 bp, Homo sapien
cagtgaagtcgaagaacacagtggg

SEQ ID NO: 552165 - DNA, 25 bp, Homo sapien
tgtacacttgtaccactggtgtctc

SEQ ID NO: 552166 - DNA, 25 bp, Homo sapien
acatggccatccctctgtacacttg

SEQ ID NO: 552167 - DNA, 25 bp, Homo sapien
ggctcaaagctagaatcatccagag

SEQ ID NO: 552168 - DNA, 25 bp, Homo sapien
tccgtaatgcttgtgatctcagctg

SEQ ID NO: 552169 - DNA, 25 bp, Homo sapien
cactctctccttgtaatgggctggg

SEQ ID NO: 552170 - DNA, 25 bp, Homo sapien
caggacactccctggcaagctgcaa

SEQ ID NO: 552171 - DNA, 25 bp, Homo sapien
cagcaggacactccctggcaagctg

SEQ ID NO: 552172 - DNA, 25 bp, Homo sapien
actctctccttgtaatgggctgggc

SEQ ID NO: 552173 - DNA, 25 bp, Homo sapien
cgcggccggccagccgaagatggtg

SEQ ID NO: 552174 - DNA, 25 bp, Homo sapien
ggcctccggtcgtagtaaagcgcag

SEQ ID NO: 552175 - DNA, 25 bp, Homo sapien
ctccggtcgtagtaaagcgcaggcg

SEQ ID NO: 552176 - DNA, 25 bp, Homo sapien
gggcctccggtcgtagtaaagcgca

SEQ ID NO: 552177 - DNA, 25 bp, Homo sapien
gcatagttgcactacaagaagaatg

SEQ ID NO: 552178 - DNA, 25 bp, Homo sapien
gatggtggcctgctatttccttcaa

SEQ ID NO: 552179 - DNA, 25 bp, Homo sapien
gatgtgacagcttctgtagcactaa

SEQ ID NO: 552180 - DNA, 25 bp, Homo sapien
aatctatgcaaaactgatggtggcc

SEQ ID NO: 552181 - DNA, 25 bp, Homo sapien
gctgtgtgatattctgctgtgcaaa

SEQ ID NO: 552182 - DNA, 25 bp, Homo sapien
cactgttctatggttagttttgcag

SEQ ID NO: 552183 - DNA, 25 bp, Homo sapien
cacaggttgggatcggttgcaatgc

SEQ ID NO: 552184 - DNA, 25 bp, Homo sapien
catgcaaaactgactgtggtagtga

SEQ ID NO: 552185 - DNA, 25 bp, Homo sapien
tagtttgaagacacactgactcctg

SEQ ID NO: 552186 - DNA, 25 bp, Homo sapien
caactgagcagtaaaggtaaggaga

SEQ ID NO: 552187 - DNA, 25 bp, Homo sapien
gactcctgacaaaatgcagcctgca

SEQ ID NO: 552188 - DNA, 25 bp, Homo sapien
tgtctaactacaagccagacttggg

SEQ ID NO: 552189 - DNA, 25 bp, Homo sapien
tgaatactttgtgaacccacaggag

SEQ ID NO: 552190 - DNA, 25 bp, Homo sapien
gggaccagctctaagctcctagaga

SEQ ID NO: 552191 - DNA, 25 bp, Homo sapien
cacaggagttgttcagggtacggta

SEQ ID NO: 552192 - DNA, 25 bp, Homo sapien
cccaaatgctgagaggaactgagct

SEQ ID NO: 552193 - DNA, 25 bp, Homo sapien
gcataagcatttgacacaagaattc

SEQ ID NO: 552194 - DNA, 25 bp, Homo sapien
gaagtgttaggtctttcagttgagg

SEQ ID NO: 552195 - DNA, 25 bp, Homo sapien
agaatgatgggtagtggcataagca

SEQ ID NO: 552196 - DNA, 25 bp, Homo sapien
caagaattcatgagactctgcttcc

SEQ ID NO: 552197 - DNA, 25 bp, Homo sapien
gctcgagagcctcggccgctgtgtc

SEQ ID NO: 552198 - DNA, 25 bp, Homo sapien
ggcctcctccgggaagagctaactg

SEQ ID NO: 552199 - DNA, 25 bp, Homo sapien
gaagagctaactgctcccaggtgaa

SEQ ID NO: 552200 - DNA, 25 bp, Homo sapien
gcagccggctcgcaccgctcgagag

SEQ ID NO: 552201 - DNA, 25 bp, Homo sapien
cagacctgcgaagaagttcggaaac

SEQ ID NO: 552202 - DNA, 25 bp, Homo sapien
accaggacggcgaggatggacgcac

SEQ ID NO: 552203 - DNA, 25 bp, Homo sapien
cggaaacttttccagtggcggctgc

SEQ ID NO: 552204 - DNA, 25 bp, Homo sapien
gggtctctggactggcggcgtccga

SEQ ID NO: 552205 - DNA, 25 bp, Homo sapien
gacgaatccccgttctgggcatctg

SEQ ID NO: 552206 - DNA, 25 bp, Homo sapien
tctcttccgagtaggaatttcccca

SEQ ID NO: 552207 - DNA, 25 bp, Homo sapien
gggaattgaattgatcgccccaagt

SEQ ID NO: 552208 - DNA, 25 bp, Homo sapien
gggacacgcagtctaactccgtttc

SEQ ID NO: 552209 - DNA, 25 bp, Homo sapien
ctgcgatatacccctttgctggaga

SEQ ID NO: 552210 - DNA, 25 bp, Homo sapien
tgcgatatacccctttgctggagaa

SEQ ID NO: 552211 - DNA, 25 bp, Homo sapien
ggcagccggtctcctctgtaattag

SEQ ID NO: 552212 - DNA, 25 bp, Homo sapien
gcgatatacccctttgctggagaat

SEQ ID NO: 552213 - DNA, 25 bp, Homo sapien
tcctgtgagcgccttttgcctgtgc

SEQ ID NO: 552214 - DNA, 25 bp, Homo sapien
ggccagcgtggatcttgcttcctgt

SEQ ID NO: 552215 - DNA, 25 bp, Homo sapien
ggagtcacttgacatggatgagatg

SEQ ID NO: 552216 - DNA, 25 bp, Homo sapien
gatgagatgtaccagcgttccaaag

SEQ ID NO: 552217 - DNA, 25 bp, Homo sapien
tttgatgtctaagagaatcacgtgt

SEQ ID NO: 552218 - DNA, 25 bp, Homo sapien
gatgtctaagagaatcacgtgtttc

SEQ ID NO: 552219 - DNA, 25 bp, Homo sapien
gctttgatgtctaagagaatcacgt

SEQ ID NO: 552220 - DNA, 25 bp, Homo sapien
tgtctaagagaatcacgtgtttcat

SEQ ID NO: 552221 - DNA, 25 bp, Homo sapien
caacagctagctctttaggcttcag

SEQ ID NO: 552222 - DNA, 25 bp, Homo sapien
gctagctctttaggcttcagttgaa

SEQ ID NO: 552223 - DNA, 25 bp, Homo sapien
cagctagctctttaggcttcagttg

SEQ ID NO: 552224 - DNA, 25 bp, Homo sapien
tagctctttaggcttcagttgaaaa

SEQ ID NO: 552225 - DNA, 25 bp, Homo sapien
tcatagtaactgataggttttatcc

SEQ ID NO: 552226 - DNA, 25 bp, Homo sapien
tagtaactgataggttttatccaga

SEQ ID NO: 552227 - DNA, 25 bp, Homo sapien
aactgataggttttatccagagcag

SEQ ID NO: 552228 - DNA, 25 bp, Homo sapien
taggttttatccagagcaggtttct

SEQ ID NO: 552229 - DNA, 25 bp, Homo sapien
ttcttcagcccggattgcaggagct

SEQ ID NO: 552230 - DNA, 25 bp, Homo sapien
aggtctttagtgtgtatagatcagt

SEQ ID NO: 552231 - DNA, 25 bp, Homo sapien
tcgatccttgaaaagcaagaggtaa

SEQ ID NO: 552232 - DNA, 25 bp, Homo sapien
cagttgaagcaaatcgatccttgaa

SEQ ID NO: 552233 - DNA, 25 bp, Homo sapien
aaataatctgctatgtttgtttctg

SEQ ID NO: 552234 - DNA, 25 bp, Homo sapien
taatctgctatgtttgtttctgtac

SEQ ID NO: 552235 - DNA, 25 bp, Homo sapien
ccatcataatcttggtccctttttt

SEQ ID NO: 552236 - DNA, 25 bp, Homo sapien
ttctgtaccatcataatcttggtcc

SEQ ID NO: 552237 - DNA, 25 bp, Homo sapien
ttaactagggtgtgaactgggcgta

SEQ ID NO: 552238 - DNA, 25 bp, Homo sapien
tgcacattttgttgaccgactgagt

SEQ ID NO: 552239 - DNA, 25 bp, Homo sapien
aggacttcaccataattaactaggg

SEQ ID NO: 552240 - DNA, 25 bp, Homo sapien
gatttgagcacaatgggtccgcatg

SEQ ID NO: 552241 - DNA, 25 bp, Homo sapien
gaaactaccaaagttcacgaggcta

SEQ ID NO: 552242 - DNA, 25 bp, Homo sapien
ctccagtcatcagagggcaactcca

SEQ ID NO: 552243 - DNA, 25 bp, Homo sapien
gcaactccagtgcacttgaagtcct

SEQ ID NO: 552244 - DNA, 25 bp, Homo sapien
cacgaggctaattccacaaagcaaa

SEQ ID NO: 552245 - DNA, 25 bp, Homo sapien
gcaggttactgtttacttttagcca

SEQ ID NO: 552246 - DNA, 25 bp, Homo sapien
taaaatggtcccttggcttacagag

SEQ ID NO: 552247 - DNA, 25 bp, Homo sapien
ggtggtcatgtatcaccttggctag

SEQ ID NO: 552248 - DNA, 25 bp, Homo sapien
ggcaagctagagatttgatcctgca

SEQ ID NO: 552249 - DNA, 25 bp, Homo sapien
gcttacagagatccatacattcaca

SEQ ID NO: 552250 - DNA, 25 bp, Homo sapien
tgacctcgtaatcggccctcctggg

SEQ ID NO: 552251 - DNA, 25 bp, Homo sapien
ttttaatagagacctggattctcca

SEQ ID NO: 552252 - DNA, 25 bp, Homo sapien
accgagcctggccactaattttgta

SEQ ID NO: 552253 - DNA, 25 bp, Homo sapien
cctgacctcgtaatcggccctcctg

SEQ ID NO: 552254 - DNA, 25 bp, Homo sapien
tctcagttgttcaggtgacagagca

SEQ ID NO: 552255 - DNA, 25 bp, Homo sapien
gaaagggccttgctgttatgtctgg

SEQ ID NO: 552256 - DNA, 25 bp, Homo sapien
tctggtgagatgttgctgacccgga

SEQ ID NO: 552257 - DNA, 25 bp, Homo sapien
cagggctccatcttctgttggtctc

SEQ ID NO: 552258 - DNA, 25 bp, Homo sapien
gaatttccttgactccaattctcta

SEQ ID NO: 552259 - DNA, 25 bp, Homo sapien
ctaggcagagtacagaatttccttg

SEQ ID NO: 552260 - DNA, 25 bp, Homo sapien
cagaatttccttgactccaattctc

SEQ ID NO: 552261 - DNA, 25 bp, Homo sapien
agagtacagaatttccttgactcca

SEQ ID NO: 552262 - DNA, 25 bp, Homo sapien
tgccagcctcctctcggaggaccct

SEQ ID NO: 552263 - DNA, 25 bp, Homo sapien
caattccttcctcaatgttgctgcc

SEQ ID NO: 552264 - DNA, 25 bp, Homo sapien
tctcggaggaccctcttctctctga

SEQ ID NO: 552265 - DNA, 25 bp, Homo sapien
ttccttcctcaatgttgctgccagc

SEQ ID NO: 552266 - DNA, 25 bp, Homo sapien
ccttctagttgccacgttactttca

SEQ ID NO: 552267 - DNA, 25 bp, Homo sapien
tctagttgccacgttactttcagtg

SEQ ID NO: 552268 - DNA, 25 bp, Homo sapien
tagttgccacgttactttcagtgtc

SEQ ID NO: 552269 - DNA, 25 bp, Homo sapien
cttctagttgccacgttactttcag

SEQ ID NO: 552270 - DNA, 25 bp, Homo sapien
gcagattcagttgattgcttacaat

SEQ ID NO: 552271 - DNA, 25 bp, Homo sapien
tcacacttagcagattcagttgatt

SEQ ID NO: 552272 - DNA, 25 bp, Homo sapien
cacttagcagattcagttgattgct

SEQ ID NO: 552273 - DNA, 25 bp, Homo sapien
atgtcacacttagcagattcagttg

SEQ ID NO: 552274 - DNA, 25 bp, Homo sapien
catgtaatgtgccagaacattcaca

SEQ ID NO: 552275 - DNA, 25 bp, Homo sapien
atgtaatgtgccagaacattcacat

SEQ ID NO: 552276 - DNA, 25 bp, Homo sapien
tgtaatgtgccagaacattcacatt

SEQ ID NO: 552277 - DNA, 25 bp, Homo sapien
ttcctattccttgccatgcacacaa

SEQ ID NO: 552278 - DNA, 25 bp, Homo sapien
ccaccttcctattccttgccatgca

SEQ ID NO: 552279 - DNA, 25 bp, Homo sapien
ctattccttgccatgcacacaatca

SEQ ID NO: 552280 - DNA, 25 bp, Homo sapien
tattccttgccatgcacacaatcat

SEQ ID NO: 552281 - DNA, 25 bp, Homo sapien
taaccaagaaatgtgctctcacaaa

SEQ ID NO: 552282 - DNA, 25 bp, Homo sapien
ttaaccaagaaatgtgctctcacaa

SEQ ID NO: 552283 - DNA, 25 bp, Homo sapien
accaagaaatgtgctctcacaaaga

SEQ ID NO: 552284 - DNA, 25 bp, Homo sapien
ccaagaaatgtgctctcacaaagaa

SEQ ID NO: 552285 - DNA, 25 bp, Homo sapien
aaagttcttgtatcccttggttcat

SEQ ID NO: 552286 - DNA, 25 bp, Homo sapien
tctttgccaatcactggcattcttg

SEQ ID NO: 552287 - DNA, 25 bp, Homo sapien
ttgccaatcactggcattcttgtag

SEQ ID NO: 552288 - DNA, 25 bp, Homo sapien
ttcttgtaggcccaaagttcttgta

SEQ ID NO: 552289 - DNA, 25 bp, Homo sapien
aatgatgtagtgtccttgtgctgcc

SEQ ID NO: 552290 - DNA, 25 bp, Homo sapien
ctctccgtaaatgatgtagtgtcct

SEQ ID NO: 552291 - DNA, 25 bp, Homo sapien
tccctcttgtttgaaccgtttctca

SEQ ID NO: 552292 - DNA, 25 bp, Homo sapien
ctagttcagggcagagtaagatccc

SEQ ID NO: 552293 - DNA, 25 bp, Homo sapien
taattccccaagaattgttctcctg

SEQ ID NO: 552294 - DNA, 25 bp, Homo sapien
gctaattccccaagaattgttctcc

SEQ ID NO: 552295 - DNA, 25 bp, Homo sapien
ctgctaattccccaagaattgttct

SEQ ID NO: 552296 - DNA, 25 bp, Homo sapien
aattccccaagaattgttctcctga

SEQ ID NO: 552297 - DNA, 25 bp, Homo sapien
ttgccaacattactgcttactcttt

SEQ ID NO: 552298 - DNA, 25 bp, Homo sapien
tccttggcaatcctgacacccatca

SEQ ID NO: 552299 - DNA, 25 bp, Homo sapien
ttggcaatcctgacacccatcacct

SEQ ID NO: 552300 - DNA, 25 bp, Homo sapien
cattactgcttactctttgctgcag

SEQ ID NO: 552301 - DNA, 25 bp, Homo sapien
ttggcatccttcacggatttttttc

SEQ ID NO: 552302 - DNA, 25 bp, Homo sapien
tttctaacttcaattgcacttaatc

SEQ ID NO: 552303 - DNA, 25 bp, Homo sapien
tggcatccttcacggatttttttct

SEQ ID NO: 552304 - DNA, 25 bp, Homo sapien
gcatccttcacggatttttttctaa

SEQ ID NO: 552305 - DNA, 25 bp, Homo sapien
gattttagaggcacccatagatttc

SEQ ID NO: 552306 - DNA, 25 bp, Homo sapien
agaaggcattaccagctactgagat

SEQ ID NO: 552307 - DNA, 25 bp, Homo sapien
gaggcacccatagatttcagttgga

SEQ ID NO: 552308 - DNA, 25 bp, Homo sapien
taccagctactgagattttagaggc

SEQ ID NO: 552309 - DNA, 25 bp, Homo sapien
gaatattgttggattcctggttcca

SEQ ID NO: 552310 - DNA, 25 bp, Homo sapien
tccatatcggtgaattcctggttcc

SEQ ID NO: 552311 - DNA, 25 bp, Homo sapien
cacttcctaacatgaatattgttgg

SEQ ID NO: 552312 - DNA, 25 bp, Homo sapien
gaattcctggttccacacagtgaga

SEQ ID NO: 552313 - DNA, 25 bp, Homo sapien
taaaattgcacatagatccagaaat

SEQ ID NO: 552314 - DNA, 25 bp, Homo sapien
gatgtttaaaattgcacatagatcc

SEQ ID NO: 552315 - DNA, 25 bp, Homo sapien
ccatgatgtttaaaattgcacatag

SEQ ID NO: 552316 - DNA, 25 bp, Homo sapien
ggcaacacatgttccatgatgttta

SEQ ID NO: 552317 - DNA, 25 bp, Homo sapien
gaatagccatattggcatcatgcat

SEQ ID NO: 552318 - DNA, 25 bp, Homo sapien
ctagttgcatgtgctttctgtagat

SEQ ID NO: 552319 - DNA, 25 bp, Homo sapien
aagtttttggaatagccatattggc

SEQ ID NO: 552320 - DNA, 25 bp, Homo sapien
gttgcatgtgctttctgtagatgta

SEQ ID NO: 552321 - DNA, 25 bp, Homo sapien
gcttttgactatgttactgttggag

SEQ ID NO: 552322 - DNA, 25 bp, Homo sapien
caagcactttgatcttgccctgcaa

SEQ ID NO: 552323 - DNA, 25 bp, Homo sapien
aaaagggctgctagtatcccatagc

SEQ ID NO: 552324 - DNA, 25 bp, Homo sapien
taatatacggattttccaagcactt

SEQ ID NO: 552325 - DNA, 25 bp, Homo sapien
tgaagatgcaatactgcccgcactg

SEQ ID NO: 552326 - DNA, 25 bp, Homo sapien
gaatactcagaatgcatccggatgg

SEQ ID NO: 552327 - DNA, 25 bp, Homo sapien
tatccggtcgttggaagaactctcg

SEQ ID NO: 552328 - DNA, 25 bp, Homo sapien
gggatactgcctcaatgtcatgcga

SEQ ID NO: 552329 - DNA, 25 bp, Homo sapien
atcgagtagttaggaatgtgccaaa

SEQ ID NO: 552330 - DNA, 25 bp, Homo sapien
gcaatccatagtgaatatcgagtag

SEQ ID NO: 552331 - DNA, 25 bp, Homo sapien
tagacactcttacaactcatcaatt

SEQ ID NO: 552332 - DNA, 25 bp, Homo sapien
gtggaattactggatacatttgctt

SEQ ID NO: 552333 - DNA, 25 bp, Homo sapien
ttttccatgggcctgctgaaggacc

SEQ ID NO: 552334 - DNA, 25 bp, Homo sapien
gacattttccatgggcctgctgaag

SEQ ID NO: 552335 - DNA, 25 bp, Homo sapien
tgacattttccatgggcctgctgaa

SEQ ID NO: 552336 - DNA, 25 bp, Homo sapien
catgggcctgctgaaggacctccct

SEQ ID NO: 552337 - DNA, 25 bp, Homo sapien
aacagagacaagttaatacctgtct

SEQ ID NO: 552338 - DNA, 25 bp, Homo sapien
taagagtgttgagaaggggcatcct

SEQ ID NO: 552339 - DNA, 25 bp, Homo sapien
aataagagtgttgagaaggggcatc

SEQ ID NO: 552340 - DNA, 25 bp, Homo sapien
gagacaagttaatacctgtcttccc

SEQ ID NO: 552341 - DNA, 25 bp, Homo sapien
tttctgtctcatgggtccccaacct

SEQ ID NO: 552342 - DNA, 25 bp, Homo sapien
tgtgccctttggttctcagtgccag

SEQ ID NO: 552343 - DNA, 25 bp, Homo sapien
taccacctctaaggctactgccaaa

SEQ ID NO: 552344 - DNA, 25 bp, Homo sapien
agtgccagcatatgagcctcacaca

SEQ ID NO: 552345 - DNA, 25 bp, Homo sapien
tcctcgtccttcaaacaatgtttct

SEQ ID NO: 552346 - DNA, 25 bp, Homo sapien
tcccctgtgcttgtagttggcaggt

SEQ ID NO: 552347 - DNA, 25 bp, Homo sapien
tcagtctaagagtccctagtagggt

SEQ ID NO: 552348 - DNA, 25 bp, Homo sapien
gaaccttttcaggttcgtgtgccaa

SEQ ID NO: 552349 - DNA, 25 bp, Homo sapien
gagcccaatctgattctcatagcac

SEQ ID NO: 552350 - DNA, 25 bp, Homo sapien
ctttgtgagtggaaccgagcccaat

SEQ ID NO: 552351 - DNA, 25 bp, Homo sapien
ttctcatagcacaccctggatcagg

SEQ ID NO: 552352 - DNA, 25 bp, Homo sapien
acaccctggatcaggaggcagacaa

SEQ ID NO: 552353 - DNA, 25 bp, Homo sapien
tctcaaagaattgccccagattcct

SEQ ID NO: 552354 - DNA, 25 bp, Homo sapien
ttctcaaagaattgccccagattcc

SEQ ID NO: 552355 - DNA, 25 bp, Homo sapien
catcagattgacagcgtggttgaca

SEQ ID NO: 552356 - DNA, 25 bp, Homo sapien
tgctagatgggcatccagaaacaca

SEQ ID NO: 552357 - DNA, 25 bp, Homo sapien
gatgcttgtgataccttcgctggcc

SEQ ID NO: 552358 - DNA, 25 bp, Homo sapien
caaaagagcaccgtgagattcatca

SEQ ID NO: 552359 - DNA, 25 bp, Homo sapien
cattgtgaactgatttagagctgca

SEQ ID NO: 552360 - DNA, 25 bp, Homo sapien
ctctcaagaatgtcaggtagcagaa

SEQ ID NO: 552361 - DNA, 25 bp, Homo sapien
gccaggttgacatgagggccatctg

SEQ ID NO: 552362 - DNA, 25 bp, Homo sapien
gaaatctcaataccagacctggcag

SEQ ID NO: 552363 - DNA, 25 bp, Homo sapien
acttggtggaactataatggccttg

SEQ ID NO: 552364 - DNA, 25 bp, Homo sapien
tataatggccttgttggttgtggct

SEQ ID NO: 552365 - DNA, 25 bp, Homo sapien
ctctggctgacgtttgacttggtgg

SEQ ID NO: 552366 - DNA, 25 bp, Homo sapien
aaaactgtaaatcctctggctgacg

SEQ ID NO: 552367 - DNA, 25 bp, Homo sapien
cccttgcttctttggagctctgagg

SEQ ID NO: 552368 - DNA, 25 bp, Homo sapien
cctgctgaaagctcccttgcttctt

SEQ ID NO: 552369 - DNA, 25 bp, Homo sapien
ccttgcttctttggagctctgaggg

SEQ ID NO: 552370 - DNA, 25 bp, Homo sapien
ttatgatcctgctgaaagctccctt

SEQ ID NO: 552371 - DNA, 25 bp, Homo sapien
cacgagcttttgactagctgccaag

SEQ ID NO: 552372 - DNA, 25 bp, Homo sapien
ttgggctgccaagtctcaaattctt

SEQ ID NO: 552373 - DNA, 25 bp, Homo sapien
ccaagatttcggctgctgtgatgca

SEQ ID NO: 552374 - DNA, 25 bp, Homo sapien
tttgaaattttcacgagcttttgac

SEQ ID NO: 552375 - DNA, 25 bp, Homo sapien
tgatcaatatcagaagcatcctcat

SEQ ID NO: 552376 - DNA, 25 bp, Homo sapien
caaggccgggttggtctttgacaga

SEQ ID NO: 552377 - DNA, 25 bp, Homo sapien
tgccaaggccgggttggtctttgac

SEQ ID NO: 552378 - DNA, 25 bp, Homo sapien
actgtattctttcacaaggtggttg

SEQ ID NO: 552379 - DNA, 25 bp, Homo sapien
taatagcgaggtattgatgtggctc

SEQ ID NO: 552380 - DNA, 25 bp, Homo sapien
ggctcttggctgttattatgtaata

SEQ ID NO: 552381 - DNA, 25 bp, Homo sapien
gatcattgtagttgagcaaaatgct

SEQ ID NO: 552382 - DNA, 25 bp, Homo sapien
atttctgtactctccatcactttgg

SEQ ID NO: 552383 - DNA, 25 bp, Homo sapien
cattgtgcaaattctcagagttgct

SEQ ID NO: 552384 - DNA, 25 bp, Homo sapien
cagagttgctttctggcactttcct

SEQ ID NO: 552385 - DNA, 25 bp, Homo sapien
ttgaaaatcatccatgttaaatgtg

SEQ ID NO: 552386 - DNA, 25 bp, Homo sapien
gaaaatcatccatgttaaatgtggt

SEQ ID NO: 552387 - DNA, 25 bp, Homo sapien
gagctgctgacaaaaggagtaacta

SEQ ID NO: 552388 - DNA, 25 bp, Homo sapien
tttgaacatatggaaaagatactgc

SEQ ID NO: 552389 - DNA, 25 bp, Homo sapien
tgagccgtcactcccggaccaattt

SEQ ID NO: 552390 - DNA, 25 bp, Homo sapien
ccaggaaacataacattgaatacat

SEQ ID NO: 552391 - DNA, 25 bp, Homo sapien
tgtgatgactgaataacaggaatat

SEQ ID NO: 552392 - DNA, 25 bp, Homo sapien
tggcaccttggtagccatcagccat

SEQ ID NO: 552393 - DNA, 25 bp, Homo sapien
aataacaggaatattgaacgatggc

SEQ ID NO: 552394 - DNA, 25 bp, Homo sapien
attgaacgatggcaccttggtagcc

SEQ ID NO: 552395 - DNA, 25 bp, Homo sapien
tcaaagtgggcacttcatgtatgtt

SEQ ID NO: 552396 - DNA, 25 bp, Homo sapien
gggcacttcatgtatgtttcctcaa

SEQ ID NO: 552397 - DNA, 25 bp, Homo sapien
gtgggcacttcatgtatgtttcctc

SEQ ID NO: 552398 - DNA, 25 bp, Homo sapien
aagtgggcacttcatgtatgtttcc

SEQ ID NO: 552399 - DNA, 25 bp, Homo sapien
tatccctaacacctcagattgcatg

SEQ ID NO: 552400 - DNA, 25 bp, Homo sapien
gattgcatgttacgtgacagccccg

SEQ ID NO: 552401 - DNA, 25 bp, Homo sapien
cagccccggtaagtctagtgaatga

SEQ ID NO: 552402 - DNA, 25 bp, Homo sapien
tgttggatgaaatgagctagtctgc

SEQ ID NO: 552403 - DNA, 25 bp, Homo sapien
ttttcaacacatacctggaggttta

SEQ ID NO: 552404 - DNA, 25 bp, Homo sapien
cctggaggtttaactccagcagcat

SEQ ID NO: 552405 - DNA, 25 bp, Homo sapien
cacatacctggaggtttaactccag

SEQ ID NO: 552406 - DNA, 25 bp, Homo sapien
caacacatacctggaggtttaactc

SEQ ID NO: 552407 - DNA, 25 bp, Homo sapien
caatctggaagatcagcgctgtgaa

SEQ ID NO: 552408 - DNA, 25 bp, Homo sapien
gaagtcagaaagcttcgcagcatga

SEQ ID NO: 552409 - DNA, 25 bp, Homo sapien
tctaaagatccctgcatatggaagt

SEQ ID NO: 552410 - DNA, 25 bp, Homo sapien
tatccttgtatatgagaaagccaga

SEQ ID NO: 552411 - DNA, 25 bp, Homo sapien
gctgttggtagcagagcagccatct

SEQ ID NO: 552412 - DNA, 25 bp, Homo sapien
ttggtagcagagcagccatctgata

SEQ ID NO: 552413 - DNA, 25 bp, Homo sapien
ggtagcagagcagccatctgatatc

SEQ ID NO: 552414 - DNA, 25 bp, Homo sapien
tagcagagcagccatctgatatcat

SEQ ID NO: 552415 - DNA, 25 bp, Homo sapien
cctgtaggattttactgagatcacc

SEQ ID NO: 552416 - DNA, 25 bp, Homo sapien
gatcaccagagcaacagaacagggt

SEQ ID NO: 552417 - DNA, 25 bp, Homo sapien
aattctgatgcatagggccctgcct

SEQ ID NO: 552418 - DNA, 25 bp, Homo sapien
gaacagggtacttagcctacttcag

SEQ ID NO: 552419 - DNA, 25 bp, Homo sapien
cccaggtgcgactactgtggtgtaa

SEQ ID NO: 552420 - DNA, 25 bp, Homo sapien
aatgatggcattgacacccaggtgc

SEQ ID NO: 552421 - DNA, 25 bp, Homo sapien
tttcaggagaatcataggaccttcc

SEQ ID NO: 552422 - DNA, 25 bp, Homo sapien
gaaatatgacggcagtggcactaag

SEQ ID NO: 552423 - DNA, 25 bp, Homo sapien
gacacatgaagaagattgaatctca

SEQ ID NO: 552424 - DNA, 25 bp, Homo sapien
gacggaggcctgtagtctcataggt

SEQ ID NO: 552425 - DNA, 25 bp, Homo sapien
tgaagttgcaggttagttctggacg

SEQ ID NO: 552426 - DNA, 25 bp, Homo sapien
tctgggatgattagaagacaaccac

SEQ ID NO: 552427 - DNA, 25 bp, Homo sapien
agcccaaggctgaaacatcgtgagt

SEQ ID NO: 552428 - DNA, 25 bp, Homo sapien
cattcagttcaacgcgaattttgtg

SEQ ID NO: 552429 - DNA, 25 bp, Homo sapien
ttttgtgaacagtgggagcagaagc

SEQ ID NO: 552430 - DNA, 25 bp, Homo sapien
tttgtgaacagctggtgtgtggtca

SEQ ID NO: 552431 - DNA, 25 bp, Homo sapien
agtggacaacctgcacgaagttgag

SEQ ID NO: 552432 - DNA, 25 bp, Homo sapien
gagcaagagtggacaacctgcacga

SEQ ID NO: 552433 - DNA, 25 bp, Homo sapien
caagagtggacaacctgcacgaagt

SEQ ID NO: 552434 - DNA, 25 bp, Homo sapien
gagagcaagagtggacaacctgcac

SEQ ID NO: 552435 - DNA, 25 bp, Homo sapien
ggaggggttagcattcacctctttg

SEQ ID NO: 552436 - DNA, 25 bp, Homo sapien
gaggggttagcattcacctctttgc

SEQ ID NO: 552437 - DNA, 25 bp, Homo sapien
cagtgattttgttgtacctatggga

SEQ ID NO: 552438 - DNA, 25 bp, Homo sapien
caacagccagtgattttgttgtacc

SEQ ID NO: 552439 - DNA, 25 bp, Homo sapien
gattttgttgtacctatgggacatc

SEQ ID NO: 552440 - DNA, 25 bp, Homo sapien
ttgtacctatgggacatccagcagg

SEQ ID NO: 552441 - DNA, 25 bp, Homo sapien
agtggaagtaagtagcagttggttt

SEQ ID NO: 552442 - DNA, 25 bp, Homo sapien
tttctcctaagatataagccttttc

SEQ ID NO: 552443 - DNA, 25 bp, Homo sapien
cttttcaaaatctgacctatgattg

SEQ ID NO: 552444 - DNA, 25 bp, Homo sapien
ggaaggactgtatctagaatgtgac

SEQ ID NO: 552445 - DNA, 25 bp, Homo sapien
ctttcttgtaaaggataaagccaag

SEQ ID NO: 552446 - DNA, 25 bp, Homo sapien
cgccagcaatttggggcggggactc

SEQ ID NO: 552447 - DNA, 25 bp, Homo sapien
gagcgccagcaatttggggcgggga

SEQ ID NO: 552448 - DNA, 25 bp, Homo sapien
ctccatcgctagtctgagcgccagc

SEQ ID NO: 552449 - DNA, 25 bp, Homo sapien
tctgagcgccagcaatttggggcgg

SEQ ID NO: 552450 - DNA, 25 bp, Homo sapien
caaaacttcgcatgttcacagtttc

SEQ ID NO: 552451 - DNA, 25 bp, Homo sapien
accaactttcccaaaacttcgcatg

SEQ ID NO: 552452 - DNA, 25 bp, Homo sapien
cacagtttctactagaaactgttgt

SEQ ID NO: 552453 - DNA, 25 bp, Homo sapien
ttcccaaaacttcgcatgttcacag

SEQ ID NO: 552454 - DNA, 25 bp, Homo sapien
ttttgattgatctgcctttttggat

SEQ ID NO: 552455 - DNA, 25 bp, Homo sapien
tttgattgatctgcctttttggatt

SEQ ID NO: 552456 - DNA, 25 bp, Homo sapien
ttttggatacccgttgttgtcacca

SEQ ID NO: 552457 - DNA, 25 bp, Homo sapien
tggattttggatacccgttgttgtc

SEQ ID NO: 552458 - DNA, 25 bp, Homo sapien
cagtctagggattcaaattggcagt

SEQ ID NO: 552459 - DNA, 25 bp, Homo sapien
tcacagcaggcgcatcagaacagat

SEQ ID NO: 552460 - DNA, 25 bp, Homo sapien
tcagtgagcctagtactgtcacagc

SEQ ID NO: 552461 - DNA, 25 bp, Homo sapien
caatttattccgaagggatgccgca

SEQ ID NO: 552462 - DNA, 25 bp, Homo sapien
ctaattcctatccaaagtgatgatg

SEQ ID NO: 552463 - DNA, 25 bp, Homo sapien
aaaaagcagccgtatggagattttc

SEQ ID NO: 552464 - DNA, 25 bp, Homo sapien
ttctcattcaactgagcttgttcat

SEQ ID NO: 552465 - DNA, 25 bp, Homo sapien
ttcattctcctagctaattcctatc

SEQ ID NO: 552466 - DNA, 25 bp, Homo sapien
atcccaatcctgatgctgaacctct

SEQ ID NO: 552467 - DNA, 25 bp, Homo sapien
tcatagctacaagtacagctgacac

SEQ ID NO: 552468 - DNA, 25 bp, Homo sapien
tcccaatcctgatgctgaacctctg

SEQ ID NO: 552469 - DNA, 25 bp, Homo sapien
tttttcatagctacaagtacagctg

SEQ ID NO: 552470 - DNA, 25 bp, Homo sapien
taaaatggttacaggtgattttcat

SEQ ID NO: 552471 - DNA, 25 bp, Homo sapien
gtaaaatggttacaggtgattttca

SEQ ID NO: 552472 - DNA, 25 bp, Homo sapien
ctgtaaaatggttacaggtgatttt

SEQ ID NO: 552473 - DNA, 25 bp, Homo sapien
tgtaaaatggttacaggtgattttc

SEQ ID NO: 552474 - DNA, 25 bp, Homo sapien
tgtcctatcactactttctaattgt

SEQ ID NO: 552475 - DNA, 25 bp, Homo sapien
tcctattcactaaatccatgacaat

SEQ ID NO: 552476 - DNA, 25 bp, Homo sapien
taaatagttttactcctattcacta

SEQ ID NO: 552477 - DNA, 25 bp, Homo sapien
gctgcataacagttatatataacag

SEQ ID NO: 552478 - DNA, 25 bp, Homo sapien
gttttactcctattcactaaatcca

SEQ ID NO: 552479 - DNA, 25 bp, Homo sapien
tcagagtcagatatggcagggtttt

SEQ ID NO: 552480 - DNA, 25 bp, Homo sapien
tgagcttgaagatttcgcaacagac

SEQ ID NO: 552481 - DNA, 25 bp, Homo sapien
caatgggctcattagtatacaggaa

SEQ ID NO: 552482 - DNA, 25 bp, Homo sapien
caaaagtttcaagagactgaacgag

SEQ ID NO: 552483 - DNA, 25 bp, Homo sapien
catggaactgccaagactttcaggg

SEQ ID NO: 552484 - DNA, 25 bp, Homo sapien
gcgcaggccctttggcatggaactg

SEQ ID NO: 552485 - DNA, 25 bp, Homo sapien
cttttaacaaggaggcgcaggccct

SEQ ID NO: 552486 - DNA, 25 bp, Homo sapien
gtgtagcacttttaacaaggaggcg

SEQ ID NO: 552487 - DNA, 25 bp, Homo sapien
ttcattgagaatatgaagcacagcc

SEQ ID NO: 552488 - DNA, 25 bp, Homo sapien
ggacagctaatcaagtgagtgagaa

SEQ ID NO: 552489 - DNA, 25 bp, Homo sapien
gagtgagaagcaaatagccacttac

SEQ ID NO: 552490 - DNA, 25 bp, Homo sapien
aataggagtaaatgctaaaggacag

SEQ ID NO: 552491 - DNA, 25 bp, Homo sapien
ttagtgtttatacattcagacagat

SEQ ID NO: 552492 - DNA, 25 bp, Homo sapien
tctgagaatctgtcagaaaatgagg

SEQ ID NO: 552493 - DNA, 25 bp, Homo sapien
agaatctgtcagaaaatgaggcctt

SEQ ID NO: 552494 - DNA, 25 bp, Homo sapien
ggccttatcttgcttgacaacaatc

SEQ ID NO: 552495 - DNA, 25 bp, Homo sapien
aaaatgaggccttatcttgcttgac

SEQ ID NO: 552496 - DNA, 25 bp, Homo sapien
aaactaaactgcgttttgaactgat

SEQ ID NO: 552497 - DNA, 25 bp, Homo sapien
ctaaactaaactgcgttttgaactg

SEQ ID NO: 552498 - DNA, 25 bp, Homo sapien
actaaactgcgttttgaactgatac

SEQ ID NO: 552499 - DNA, 25 bp, Homo sapien
taaactgcgttttgaactgatacat

SEQ ID NO: 552500 - DNA, 25 bp, Homo sapien
gcctccattctttctcaaatcattg

SEQ ID NO: 552501 - DNA, 25 bp, Homo sapien
tctcaaatcattgaccttgcactgt

SEQ ID NO: 552502 - DNA, 25 bp, Homo sapien
tgtcccggcattgattttatgttta

SEQ ID NO: 552503 - DNA, 25 bp, Homo sapien
caatttgtgtagatgttcatcctgg

SEQ ID NO: 552504 - DNA, 25 bp, Homo sapien
gttatatgatattacgacatttgat

SEQ ID NO: 552505 - DNA, 25 bp, Homo sapien
tttatgtttaattctgatttccaga

SEQ ID NO: 552506 - DNA, 25 bp, Homo sapien
tcaagtttcatgagatcactaaatt

SEQ ID NO: 552507 - DNA, 25 bp, Homo sapien
catgagatcactaaattttggtaaa

SEQ ID NO: 552508 - DNA, 25 bp, Homo sapien
tttggtaaatatgatactttctttg

SEQ ID NO: 552509 - DNA, 25 bp, Homo sapien
tcattggagttctatggcagaattc

SEQ ID NO: 552510 - DNA, 25 bp, Homo sapien
tgtgcatgcaccagatgtgtatggc

SEQ ID NO: 552511 - DNA, 25 bp, Homo sapien
gaaaacttataattacgctcacagc

SEQ ID NO: 552512 - DNA, 25 bp, Homo sapien
gattatgaattgtggtacagctcca

SEQ ID NO: 552513 - DNA, 25 bp, Homo sapien
cagagttttgctcgtaatacgtgca

SEQ ID NO: 552514 - DNA, 25 bp, Homo sapien
tattacttttgacacatgaaaacca

SEQ ID NO: 552515 - DNA, 25 bp, Homo sapien
gaggctcatcaggaatagcttgctt

SEQ ID NO: 552516 - DNA, 25 bp, Homo sapien
aagttgcaggccattccatggagag

SEQ ID NO: 552517 - DNA, 25 bp, Homo sapien
aatagcttgcttgaccgccgctgct

SEQ ID NO: 552518 - DNA, 25 bp, Homo sapien
aaaacttaatgacacggagcactgc

SEQ ID NO: 552519 - DNA, 25 bp, Homo sapien
ttctcggagttctaataagcataca

SEQ ID NO: 552520 - DNA, 25 bp, Homo sapien
tgctttagcttcatgcaattttgct

SEQ ID NO: 552521 - DNA, 25 bp, Homo sapien
tacctccctagtcttcatagcaagg

SEQ ID NO: 552522 - DNA, 25 bp, Homo sapien
agataaagaaatccagggtggagtt

SEQ ID NO: 552523 - DNA, 25 bp, Homo sapien
aagaaatccagggtggagttgtgaa

SEQ ID NO: 552524 - DNA, 25 bp, Homo sapien
aatccagggtggagttgtgaatgaa

SEQ ID NO: 552525 - DNA, 25 bp, Homo sapien
taaagaaatccagggtggagttgtg

SEQ ID NO: 552526 - DNA, 25 bp, Homo sapien
ttttcagaccagcatcatctaccct

SEQ ID NO: 552527 - DNA, 25 bp, Homo sapien
tcagaccagcatcatctaccctctc

SEQ ID NO: 552528 - DNA, 25 bp, Homo sapien
gaccagcatcatctaccctctccat

SEQ ID NO: 552529 - DNA, 25 bp, Homo sapien
tttttcagaccagcatcatctaccc

SEQ ID NO: 552530 - DNA, 25 bp, Homo sapien
catgacctgatattagtgacccagt

SEQ ID NO: 552531 - DNA, 25 bp, Homo sapien
tatcatgacctgatattagtgaccc

SEQ ID NO: 552532 - DNA, 25 bp, Homo sapien
attctggaatatcatgacctgatat

SEQ ID NO: 552533 - DNA, 25 bp, Homo sapien
ggaatatcatgacctgatattagtg

SEQ ID NO: 552534 - DNA, 25 bp, Homo sapien
tctttcttcatatgaggccaaaaat

SEQ ID NO: 552535 - DNA, 25 bp, Homo sapien
caccttataattatcagacagctga

SEQ ID NO: 552536 - DNA, 25 bp, Homo sapien
gatgataaatgcacacacgtaaact

SEQ ID NO: 552537 - DNA, 25 bp, Homo sapien
cttgctatgtctttacaatgaatta

SEQ ID NO: 552538 - DNA, 25 bp, Homo sapien
gatgggaatctctctatgtcatccg

SEQ ID NO: 552539 - DNA, 25 bp, Homo sapien
gacaacaggtgctttgccactgctc

SEQ ID NO: 552540 - DNA, 25 bp, Homo sapien
tgctcctggctttgaacctaaatgt

SEQ ID NO: 552541 - DNA, 25 bp, Homo sapien
aatctctctatgtcatccgggctgg

SEQ ID NO: 552542 - DNA, 25 bp, Homo sapien
tctgttcatatcttggtcttgcact

SEQ ID NO: 552543 - DNA, 25 bp, Homo sapien
aatctgttcatatcttggtcttgca

SEQ ID NO: 552544 - DNA, 25 bp, Homo sapien
tgaatctgttcatatcttggtcttg

SEQ ID NO: 552545 - DNA, 25 bp, Homo sapien
gttcatatcttggtcttgcacttcc

SEQ ID NO: 552546 - DNA, 25 bp, Homo sapien
gctttggttattcagtgtggcatag

SEQ ID NO: 552547 - DNA, 25 bp, Homo sapien
attatatgacaaaattggcatgcca

SEQ ID NO: 552548 - DNA, 25 bp, Homo sapien
gcttgtgtggaacctcattatatga

SEQ ID NO: 552549 - DNA, 25 bp, Homo sapien
gtgtggcataggtgcagaaacagtc

SEQ ID NO: 552550 - DNA, 25 bp, Homo sapien
aatattctgttgttgaacatatctc

SEQ ID NO: 552551 - DNA, 25 bp, Homo sapien
tgttgttgaacatatctcatggaaa

SEQ ID NO: 552552 - DNA, 25 bp, Homo sapien
taaatcgctgtctaccttccaggca

SEQ ID NO: 552553 - DNA, 25 bp, Homo sapien
ctgtgattataaatcgctgtctacc

SEQ ID NO: 552554 - DNA, 25 bp, Homo sapien
agggctctaactttctgcagtgcca

SEQ ID NO: 552555 - DNA, 25 bp, Homo sapien
cttgatgaagggctctaactttctg

SEQ ID NO: 552556 - DNA, 25 bp, Homo sapien
aggtttttacttgatgaagggctct

SEQ ID NO: 552557 - DNA, 25 bp, Homo sapien
tttttacttgatgaagggctctaac

SEQ ID NO: 552558 - DNA, 25 bp, Homo sapien
tcttctctggtcctgattcctccat

SEQ ID NO: 552559 - DNA, 25 bp, Homo sapien
cctcttctctggtcctgattcctcc

SEQ ID NO: 552560 - DNA, 25 bp, Homo sapien
ctcttctctggtcctgattcctcca

SEQ ID NO: 552561 - DNA, 25 bp, Homo sapien
ccctcttctctggtcctgattcctc

SEQ ID NO: 552562 - DNA, 25 bp, Homo sapien
ggccagtgtggccatcctacggtga

SEQ ID NO: 552563 - DNA, 25 bp, Homo sapien
gaaaagctacaattctgacagcaga

SEQ ID NO: 552564 - DNA, 25 bp, Homo sapien
cagtgactccattgtataataattt

SEQ ID NO: 552565 - DNA, 25 bp, Homo sapien
agtgtggccatcctacggtgaaacc

SEQ ID NO: 552566 - DNA, 25 bp, Homo sapien
tcttctgatgaagtgttgcctgtcc

SEQ ID NO: 552567 - DNA, 25 bp, Homo sapien
cctacacgtgtattgtcccggcatg

SEQ ID NO: 552568 - DNA, 25 bp, Homo sapien
tgtccttacactattccacgcagaa

SEQ ID NO: 552569 - DNA, 25 bp, Homo sapien
gtcctgcgttgtacctacacgtgta

SEQ ID NO: 552570 - DNA, 25 bp, Homo sapien
gattgttcacagtggccaaatgaga

SEQ ID NO: 552571 - DNA, 25 bp, Homo sapien
cctgacagctggacgattgttcaca

SEQ ID NO: 552572 - DNA, 25 bp, Homo sapien
caataagtgacagggtattcctttc

SEQ ID NO: 552573 - DNA, 25 bp, Homo sapien
tcttggcacagaagaagtcggttca

SEQ ID NO: 552574 - DNA, 25 bp, Homo sapien
cctatttgcagtgccagaataaggc

SEQ ID NO: 552575 - DNA, 25 bp, Homo sapien
atttgcagtgccagaataaggcaca

SEQ ID NO: 552576 - DNA, 25 bp, Homo sapien
tatttgcagtgccagaataaggcac

SEQ ID NO: 552577 - DNA, 25 bp, Homo sapien
ttcctatttgcagtgccagaataag

SEQ ID NO: 552578 - DNA, 25 bp, Homo sapien
gaccttcaccgaaaaatacactgag

SEQ ID NO: 552579 - DNA, 25 bp, Homo sapien
caagcttttatctgttggcatcatt

SEQ ID NO: 552580 - DNA, 25 bp, Homo sapien
gacaacaaagcttattctagcctga

SEQ ID NO: 552581 - DNA, 25 bp, Homo sapien
tggtatttctatcctcctatcctca

SEQ ID NO: 552582 - DNA, 25 bp, Homo sapien
agaactttgaagttcttcaactgta

SEQ ID NO: 552583 - DNA, 25 bp, Homo sapien
tgaagaactttgaagttcttcaact

SEQ ID NO: 552584 - DNA, 25 bp, Homo sapien
tttaaatctactgaagaactttgaa

SEQ ID NO: 552585 - DNA, 25 bp, Homo sapien
gaagaactttgaagttcttcaactg

SEQ ID NO: 552586 - DNA, 25 bp, Homo sapien
gcagcataccatatgggaatcctga

SEQ ID NO: 552587 - DNA, 25 bp, Homo sapien
tgtgaattcatacctagcagcatac

SEQ ID NO: 552588 - DNA, 25 bp, Homo sapien
cctgaatgactttgattgactatat

SEQ ID NO: 552589 - DNA, 25 bp, Homo sapien
tcagcacgctgaaaataatattaca

SEQ ID NO: 552590 - DNA, 25 bp, Homo sapien
ggctttatagcttctggctctgcaa

SEQ ID NO: 552591 - DNA, 25 bp, Homo sapien
gctttatagcttctggctctgcaag

SEQ ID NO: 552592 - DNA, 25 bp, Homo sapien
tggctttatagcttctggctctgca

SEQ ID NO: 552593 - DNA, 25 bp, Homo sapien
cagcagggtcacaggtgtacctttg

SEQ ID NO: 552594 - DNA, 25 bp, Homo sapien
tcctccatgcagatgtgatgctcag

SEQ ID NO: 552595 - DNA, 25 bp, Homo sapien
agatgtgatgctcagccgagcagca

SEQ ID NO: 552596 - DNA, 25 bp, Homo sapien
tacctttgtgctggtgtattggaaa

SEQ ID NO: 552597 - DNA, 25 bp, Homo sapien
ggaagacgtattgttcgtacttgaa

SEQ ID NO: 552598 - DNA, 25 bp, Homo sapien
cactcagagggatgggaagacgtat

SEQ ID NO: 552599 - DNA, 25 bp, Homo sapien
tattgttcgtacttgaatactgttc

SEQ ID NO: 552600 - DNA, 25 bp, Homo sapien
ggatgggaagacgtattgttcgtac

SEQ ID NO: 552601 - DNA, 25 bp, Homo sapien
gggcgggaatcagcaggccgccttt

SEQ ID NO: 552602 - DNA, 25 bp, Homo sapien
gcgggaatcagcaggccgccttttc

SEQ ID NO: 552603 - DNA, 25 bp, Homo sapien
ggaatcagcaggccgccttttcctg

SEQ ID NO: 552604 - DNA, 25 bp, Homo sapien
aatcagcaggccgccttttcctgta

SEQ ID NO: 552605 - DNA, 25 bp, Homo sapien
ctcaatggagtagtgtgagcattga

SEQ ID NO: 552606 - DNA, 25 bp, Homo sapien
tggagtagtgtgagcattgataatc

SEQ ID NO: 552607 - DNA, 25 bp, Homo sapien
caatggagtagtgtgagcattgata

SEQ ID NO: 552608 - DNA, 25 bp, Homo sapien
gagtagtgtgagcattgataatcat

SEQ ID NO: 552609 - DNA, 25 bp, Homo sapien
tgtggcattctctcaatacgtcggc

SEQ ID NO: 552610 - DNA, 25 bp, Homo sapien
tgccagctctcagcaattccataag

SEQ ID NO: 552611 - DNA, 25 bp, Homo sapien
tcagcaattccataagcctcagaaa

SEQ ID NO: 552612 - DNA, 25 bp, Homo sapien
gctgtgcatttttcgcccaggcaca

SEQ ID NO: 552613 - DNA, 25 bp, Homo sapien
tttgcttcatcataggtctgggggc

SEQ ID NO: 552614 - DNA, 25 bp, Homo sapien
ggtctgggggctagattccagtcca

SEQ ID NO: 552615 - DNA, 25 bp, Homo sapien
ttcttcaatatgctgcgaaatcatc

SEQ ID NO: 552616 - DNA, 25 bp, Homo sapien
aatatgctgcgaaatcatctttgct

SEQ ID NO: 552617 - DNA, 25 bp, Homo sapien
agcaaaggatgtcatcaaaaacacc

SEQ ID NO: 552618 - DNA, 25 bp, Homo sapien
ctaaatatgggtcttgggaatagca

SEQ ID NO: 552619 - DNA, 25 bp, Homo sapien
atagcaaaggatgtcatcaaaaaca

SEQ ID NO: 552620 - DNA, 25 bp, Homo sapien
aatatgggtcttgggaatagcaaag

SEQ ID NO: 552621 - DNA, 25 bp, Homo sapien
tttcgccaaaagctgaataccatca

SEQ ID NO: 552622 - DNA, 25 bp, Homo sapien
cagcagggaagatggataccgctgt

SEQ ID NO: 552623 - DNA, 25 bp, Homo sapien
tttctgagtgtccaaccattgttgt

SEQ ID NO: 552624 - DNA, 25 bp, Homo sapien
cattttggcctttcgccaaaagctg

SEQ ID NO: 552625 - DNA, 25 bp, Homo sapien
gccagggtaggtgccaaatagatgg

SEQ ID NO: 552626 - DNA, 25 bp, Homo sapien
ccagggtaggtgccaaatagatggt

SEQ ID NO: 552627 - DNA, 25 bp, Homo sapien
tgccagggtaggtgccaaatagatg

SEQ ID NO: 552628 - DNA, 25 bp, Homo sapien
cagggtaggtgccaaatagatggtt

SEQ ID NO: 552629 - DNA, 25 bp, Homo sapien
agagaaacgcaatttctccaagtgc

SEQ ID NO: 552630 - DNA, 25 bp, Homo sapien
ggagagaaacgcaatttctccaagt

SEQ ID NO: 552631 - DNA, 25 bp, Homo sapien
gagagaaacgcaatttctccaagtg

SEQ ID NO: 552632 - DNA, 25 bp, Homo sapien
aggagagaaacgcaatttctccaag

SEQ ID NO: 552633 - DNA, 25 bp, Homo sapien
ctcaacgcctttccctgcggggaat

SEQ ID NO: 552634 - DNA, 25 bp, Homo sapien
aagccattgacctgagagtccaccc

SEQ ID NO: 552635 - DNA, 25 bp, Homo sapien
cagctgagggtcacttttccctgaa

SEQ ID NO: 552636 - DNA, 25 bp, Homo sapien
ccctgaagtggctggcagtatgcta

SEQ ID NO: 552637 - DNA, 25 bp, Homo sapien
gctaagcccttcacccaagccattg

SEQ ID NO: 552638 - DNA, 25 bp, Homo sapien
ctctcgtcgttgacaccatccaatt

SEQ ID NO: 552639 - DNA, 25 bp, Homo sapien
ttttctgcaaccaatggtgaaacat

SEQ ID NO: 552640 - DNA, 25 bp, Homo sapien
tttgctaaccctctcgtcgttgaca

SEQ ID NO: 552641 - DNA, 25 bp, Homo sapien
ttttttctgcaaccaatggtgaaac

SEQ ID NO: 552642 - DNA, 25 bp, Homo sapien
aatgaatctgtctttatgttagccc

SEQ ID NO: 552643 - DNA, 25 bp, Homo sapien
gaaacatgtaaccagggcacacact

SEQ ID NO: 552644 - DNA, 25 bp, Homo sapien
gccagacggatactttagctacatg

SEQ ID NO: 552645 - DNA, 25 bp, Homo sapien
gctacatgatgtttgaccaactgca

SEQ ID NO: 552646 - DNA, 25 bp, Homo sapien
tgaactcctctacaagcaactacct

SEQ ID NO: 552647 - DNA, 25 bp, Homo sapien
tatgaaaatagcctccccttggccc

SEQ ID NO: 552648 - DNA, 25 bp, Homo sapien
cattggctcattctgtgtataagca

SEQ ID NO: 552649 - DNA, 25 bp, Homo sapien
gcaggatgatttctatcccaaccac

SEQ ID NO: 552650 - DNA, 25 bp, Homo sapien
ttaactcttcagactgttactacag

SEQ ID NO: 552651 - DNA, 25 bp, Homo sapien
caaattttccaagataagtctgcag

SEQ ID NO: 552652 - DNA, 25 bp, Homo sapien
taaaggccaccctttcagtagcatc

SEQ ID NO: 552653 - DNA, 25 bp, Homo sapien
gtagcatcaacattagtaacctcaa

SEQ ID NO: 552654 - DNA, 25 bp, Homo sapien
catacatccttcatcagattgtcac

SEQ ID NO: 552655 - DNA, 25 bp, Homo sapien
atacatccttcatcagattgtcact

SEQ ID NO: 552656 - DNA, 25 bp, Homo sapien
acatacatccttcatcagattgtca

SEQ ID NO: 552657 - DNA, 25 bp, Homo sapien
tattcataattatatgggctagctt

SEQ ID NO: 552658 - DNA, 25 bp, Homo sapien
taattatatgggctagcttccacca

SEQ ID NO: 552659 - DNA, 25 bp, Homo sapien
ttcataattatatgggctagcttcc

SEQ ID NO: 552660 - DNA, 25 bp, Homo sapien
tcataattatatgggctagcttcca

SEQ ID NO: 552661 - DNA, 25 bp, Homo sapien
gattttgccaccgaatgagttcagg

SEQ ID NO: 552662 - DNA, 25 bp, Homo sapien
tgtggaacacattgtcagacagaca

SEQ ID NO: 552663 - DNA, 25 bp, Homo sapien
tgaagcgcaagacacaatacaaggt

SEQ ID NO: 552664 - DNA, 25 bp, Homo sapien
tcaagtgcaatacagctggagcaag

SEQ ID NO: 552665 - DNA, 25 bp, Homo sapien
cagcagtaattatggacataagttt

SEQ ID NO: 552666 - DNA, 25 bp, Homo sapien
ccacatgttagaaggctctagaagt

SEQ ID NO: 552667 - DNA, 25 bp, Homo sapien
ttaccacatgttagaaggctctaga

SEQ ID NO: 552668 - DNA, 25 bp, Homo sapien
catgttagaaggctctagaagttct

SEQ ID NO: 552669 - DNA, 25 bp, Homo sapien
gacacgttcctctcactgggttcat

SEQ ID NO: 552670 - DNA, 25 bp, Homo sapien
gggttcatctaatgcttgtaacaag

SEQ ID NO: 552671 - DNA, 25 bp, Homo sapien
gaagaagtgtctttatcatactttg

SEQ ID NO: 552672 - DNA, 25 bp, Homo sapien
ttgtaacaagcctatacagtcagca

SEQ ID NO: 552673 - DNA, 25 bp, Homo sapien
aactcttcagttttaggctgaccgt

SEQ ID NO: 552674 - DNA, 25 bp, Homo sapien
tcagttttaggctgaccgtgaccat

SEQ ID NO: 552675 - DNA, 25 bp, Homo sapien
gaatcacacctacttgtctcatgat

SEQ ID NO: 552676 - DNA, 25 bp, Homo sapien
atctttgaatcacacctacttgtct

SEQ ID NO: 552677 - DNA, 25 bp, Homo sapien
tgtaaaataatttattagcaagcat

SEQ ID NO: 552678 - DNA, 25 bp, Homo sapien
gttgtaaaataatttattagcaagc

SEQ ID NO: 552679 - DNA, 25 bp, Homo sapien
cgttgtaaaataatttattagcaag

SEQ ID NO: 552680 - DNA, 25 bp, Homo sapien
cacgttgtaaaataatttattagca

SEQ ID NO: 552681 - DNA, 25 bp, Homo sapien
tccagatattatgtggagttgcatt

SEQ ID NO: 552682 - DNA, 25 bp, Homo sapien
ttcagggtctgaaatgatgctgaat

SEQ ID NO: 552683 - DNA, 25 bp, Homo sapien
atgtggagttgcattatctattgag

SEQ ID NO: 552684 - DNA, 25 bp, Homo sapien
gatttttcagggtctgaaatgatgc

SEQ ID NO: 552685 - DNA, 25 bp, Homo sapien
agagctattaagtatcacagatttc

SEQ ID NO: 552686 - DNA, 25 bp, Homo sapien
tgattagacataagagctattaagt

SEQ ID NO: 552687 - DNA, 25 bp, Homo sapien
caggagtgtatcaatccagctgcat

SEQ ID NO: 552688 - DNA, 25 bp, Homo sapien
cacctgcaggagtgtatcaatccag

SEQ ID NO: 552689 - DNA, 25 bp, Homo sapien
ctgcagtcaaccattattgtgccct

SEQ ID NO: 552690 - DNA, 25 bp, Homo sapien
agtcaaccattattgtgccctgcac

SEQ ID NO: 552691 - DNA, 25 bp, Homo sapien
tgaggctgcagtcaaccattattgt

SEQ ID NO: 552692 - DNA, 25 bp, Homo sapien
tgcagtcaaccattattgtgccctg

SEQ ID NO: 552693 - DNA, 25 bp, Homo sapien
tgagtcagcaagtgctgctctacct

SEQ ID NO: 552694 - DNA, 25 bp, Homo sapien
tgtgtcttctcattactcctgtgtc

SEQ ID NO: 552695 - DNA, 25 bp, Homo sapien
aagtgctgctctacctcctgtgtct

SEQ ID NO: 552696 - DNA, 25 bp, Homo sapien
gttaatgcttctgagtcagcaagtg

SEQ ID NO: 552697 - DNA, 25 bp, Homo sapien
ttcacagaccacaggaagacactga

SEQ ID NO: 552698 - DNA, 25 bp, Homo sapien
gaccacaggaagacactgaaactgc

SEQ ID NO: 552699 - DNA, 25 bp, Homo sapien
cctcttcttgttgttaagtttctct

SEQ ID NO: 552700 - DNA, 25 bp, Homo sapien
taagtttctcttcttcacagaccac

SEQ ID NO: 552701 - DNA, 25 bp, Homo sapien
gggcctgatttgtggcaatttcctt

SEQ ID NO: 552702 - DNA, 25 bp, Homo sapien
tatatctatagcacactctatctcc

SEQ ID NO: 552703 - DNA, 25 bp, Homo sapien
tatagcacactctatctccagagta

SEQ ID NO: 552704 - DNA, 25 bp, Homo sapien
gaatgggcctgatttgtggcaattt

SEQ ID NO: 552705 - DNA, 25 bp, Homo sapien
agacagtcactgttcacggcaacct

SEQ ID NO: 552706 - DNA, 25 bp, Homo sapien
acggcaacctttgttgaagtgctca

SEQ ID NO: 552707 - DNA, 25 bp, Homo sapien
tgttgaagtgctcagaaaagaagtt

SEQ ID NO: 552708 - DNA, 25 bp, Homo sapien
caggatcccttgctgtcagacagtc

SEQ ID NO: 552709 - DNA, 25 bp, Homo sapien
aagtggccccattcaatcttgacag

SEQ ID NO: 552710 - DNA, 25 bp, Homo sapien
aactgatttctgcatgggtgtccac

SEQ ID NO: 552711 - DNA, 25 bp, Homo sapien
gataataatattacaagtggcccca

SEQ ID NO: 552712 - DNA, 25 bp, Homo sapien
ttcctattatgcctcacaagctcga

SEQ ID NO: 552713 - DNA, 25 bp, Homo sapien
gaaacagtcttcttcggtccttgcc

SEQ ID NO: 552714 - DNA, 25 bp, Homo sapien
tgggaagccatacgttgcatatcac

SEQ ID NO: 552715 - DNA, 25 bp, Homo sapien
aaggtaatctaaagcctctccagca

SEQ ID NO: 552716 - DNA, 25 bp, Homo sapien
catggttcagtagatttgggaagcc

SEQ ID NO: 552717 - DNA, 25 bp, Homo sapien
tagacttgagctatatgatttcccc

SEQ ID NO: 552718 - DNA, 25 bp, Homo sapien
gctattggataggtcatggaactca

SEQ ID NO: 552719 - DNA, 25 bp, Homo sapien
tggcatagccataaaagtaaagtga

SEQ ID NO: 552720 - DNA, 25 bp, Homo sapien
tctgggtctgttggtaaccagatcc

SEQ ID NO: 552721 - DNA, 25 bp, Homo sapien
ccagttctgagctaactgagataac

SEQ ID NO: 552722 - DNA, 25 bp, Homo sapien
ttctgagctaactgagataacagtg

SEQ ID NO: 552723 - DNA, 25 bp, Homo sapien
tttgcaatttgggatcctgggacca

SEQ ID NO: 552724 - DNA, 25 bp, Homo sapien
tgctttgcatgtacacgcatgccaa

SEQ ID NO: 552725 - DNA, 25 bp, Homo sapien
aaagccctgattgggaagtcaacag

SEQ ID NO: 552726 - DNA, 25 bp, Homo sapien
tctgtagcacttacacagaggacac

SEQ ID NO: 552727 - DNA, 25 bp, Homo sapien
tgccttcggttccttgatgacatca

SEQ ID NO: 552728 - DNA, 25 bp, Homo sapien
tgacatcattggaagctacagtagc

SEQ ID NO: 552729 - DNA, 25 bp, Homo sapien
gccagaaatgacaacggttggagtc

SEQ ID NO: 552730 - DNA, 25 bp, Homo sapien
ccagaaatgacaacggttggagtca

SEQ ID NO: 552731 - DNA, 25 bp, Homo sapien
gagccagaaatgacaacggttggag

SEQ ID NO: 552732 - DNA, 25 bp, Homo sapien
cagaaatgacaacggttggagtcaa

SEQ ID NO: 552733 - DNA, 25 bp, Homo sapien
cactatgaggaggatcacagggttc

SEQ ID NO: 552734 - DNA, 25 bp, Homo sapien
tcctttagtggaacatgagcataca

SEQ ID NO: 552735 - DNA, 25 bp, Homo sapien
ctggacctccatttgtcttgtgaca

SEQ ID NO: 552736 - DNA, 25 bp, Homo sapien
tgagcatacaccataggaaaattga

SEQ ID NO: 552737 - DNA, 25 bp, Homo sapien
tattctacccatcagttgtggatgc

SEQ ID NO: 552738 - DNA, 25 bp, Homo sapien
acatttttaagctgcccaatcaggt

SEQ ID NO: 552739 - DNA, 25 bp, Homo sapien
gtaaaatccgtttctgctagtcagg

SEQ ID NO: 552740 - DNA, 25 bp, Homo sapien
tgcctcagaaccgtaagtgttattc

SEQ ID NO: 552741 - DNA, 25 bp, Homo sapien
tcttatgaattgcaaagctctttca

SEQ ID NO: 552742 - DNA, 25 bp, Homo sapien
gggactatataagcaataatggtgt

SEQ ID NO: 552743 - DNA, 25 bp, Homo sapien
gagagagagtatctcatttggactt

SEQ ID NO: 552744 - DNA, 25 bp, Homo sapien
taatggtgttactagagcttaaaac

SEQ ID NO: 552745 - DNA, 25 bp, Homo sapien
cacacgtccactgagtaaccatggc

SEQ ID NO: 552746 - DNA, 25 bp, Homo sapien
taaccatggccagttgggctaatat

SEQ ID NO: 552747 - DNA, 25 bp, Homo sapien
tcagcacacgtccactgagtaacca

SEQ ID NO: 552748 - DNA, 25 bp, Homo sapien
agtaaccatggccagttgggctaat

SEQ ID NO: 552749 - DNA, 25 bp, Homo sapien
ctatacatagaaacaggaagggccc

SEQ ID NO: 552750 - DNA, 25 bp, Homo sapien
tatacatagaaacaggaagggccca

SEQ ID NO: 552751 - DNA, 25 bp, Homo sapien
atacatagaaacaggaagggcccac

SEQ ID NO: 552752 - DNA, 25 bp, Homo sapien
tggtttgttctctttaacttcactg

SEQ ID NO: 552753 - DNA, 25 bp, Homo sapien
acttcactgtgggtcactgacaaca

SEQ ID NO: 552754 - DNA, 25 bp, Homo sapien
agagaagatccccagacctttaagg

SEQ ID NO: 552755 - DNA, 25 bp, Homo sapien
gagaagatccccagacctttaagga

SEQ ID NO: 552756 - DNA, 25 bp, Homo sapien
tttgagtgctatgcctctaactcca

SEQ ID NO: 552757 - DNA, 25 bp, Homo sapien
tgagtgctatgcctctaactccatc

SEQ ID NO: 552758 - DNA, 25 bp, Homo sapien
ttgagtgctatgcctctaactccat

SEQ ID NO: 552759 - DNA, 25 bp, Homo sapien
ccagtgttgctggtggggcagctac

SEQ ID NO: 552760 - DNA, 25 bp, Homo sapien
cagtgttgctggtggggcagctacc

SEQ ID NO: 552761 - DNA, 25 bp, Homo sapien
agtgttgctggtggggcagctacca

SEQ ID NO: 552762 - DNA, 25 bp, Homo sapien
gtgttgctggtggggcagctaccat

SEQ ID NO: 552763 - DNA, 25 bp, Homo sapien
agcttgtctaatggtaggataaata

SEQ ID NO: 552764 - DNA, 25 bp, Homo sapien
cagctgacagtgaacctgtgaccat

SEQ ID NO: 552765 - DNA, 25 bp, Homo sapien
tgtctaatggtaggataaatatact

SEQ ID NO: 552766 - DNA, 25 bp, Homo sapien
actggaaatcaagctttgaagctgc

SEQ ID NO: 552767 - DNA, 25 bp, Homo sapien
taatgccagttctacatcatcatgt

SEQ ID NO: 552768 - DNA, 25 bp, Homo sapien
caatctttgctgtaagccaccttcc

SEQ ID NO: 552769 - DNA, 25 bp, Homo sapien
tgatctagggttttactgtcttcca

SEQ ID NO: 552770 - DNA, 25 bp, Homo sapien
gctccactgcacaatctttgctgta

SEQ ID NO: 552771 - DNA, 25 bp, Homo sapien
caaggatcgtagaagatactgccat

SEQ ID NO: 552772 - DNA, 25 bp, Homo sapien
tgtaattctccaaggatcgtagaag

SEQ ID NO: 552773 - DNA, 25 bp, Homo sapien
aggtcctctccctgagaaattgtaa

SEQ ID NO: 552774 - DNA, 25 bp, Homo sapien
gaaattgtaattctccaaggatcgt

SEQ ID NO: 552775 - DNA, 25 bp, Homo sapien
ccccatcatgtatggccactgggtc

SEQ ID NO: 552776 - DNA, 25 bp, Homo sapien
ggacctctttcaatagagcaaaatg

SEQ ID NO: 552777 - DNA, 25 bp, Homo sapien
actgggtcactcacaccatagatag

SEQ ID NO: 552778 - DNA, 25 bp, Homo sapien
gcaactcctggaaccaactgcttca

SEQ ID NO: 552779 - DNA, 25 bp, Homo sapien
tgaagggttacaatgccaacaaaat

SEQ ID NO: 552780 - DNA, 25 bp, Homo sapien
agggttacaatgccaacaaaataat

SEQ ID NO: 552781 - DNA, 25 bp, Homo sapien
gaagggttacaatgccaacaaaata

SEQ ID NO: 552782 - DNA, 25 bp, Homo sapien
ctgaagggttacaatgccaacaaaa

SEQ ID NO: 552783 - DNA, 25 bp, Homo sapien
gacaagaacaaagccggcatgcagc

SEQ ID NO: 552784 - DNA, 25 bp, Homo sapien
cactttgtatgctacggagcgggat

SEQ ID NO: 552785 - DNA, 25 bp, Homo sapien
taaagtgaccgctgatgacaagaac

SEQ ID NO: 552786 - DNA, 25 bp, Homo sapien
gtaacgtgaactctggaactgcggg

SEQ ID NO: 552787 - DNA, 25 bp, Homo sapien
tctgtgttgactcactgcctgattc

SEQ ID NO: 552788 - DNA, 25 bp, Homo sapien
tgcctgattctggtaaggcaccctc

SEQ ID NO: 552789 - DNA, 25 bp, Homo sapien
aatctcgttccaacttcaatgcctg

SEQ ID NO: 552790 - DNA, 25 bp, Homo sapien
ggttagttcatctggttccagcaac

SEQ ID NO: 552791 - DNA, 25 bp, Homo sapien
aaggcgaaggtagtatttgtagcac

SEQ ID NO: 552792 - DNA, 25 bp, Homo sapien
cttttgttcatacatagggctcttg

SEQ ID NO: 552793 - DNA, 25 bp, Homo sapien
tactgagcactagtcacgtagcaag

SEQ ID NO: 552794 - DNA, 25 bp, Homo sapien
tgtagcacatattacttggaggtcg

SEQ ID NO: 552795 - DNA, 25 bp, Homo sapien
ctctttgcaaggctctttaattctt

SEQ ID NO: 552796 - DNA, 25 bp, Homo sapien
caggaggatccattgcccatagcaa

SEQ ID NO: 552797 - DNA, 25 bp, Homo sapien
ccatagcaatgatgaaggaacaact

SEQ ID NO: 552798 - DNA, 25 bp, Homo sapien
caaacaagctgttagtgaatcacag

SEQ ID NO: 552799 - DNA, 25 bp, Homo sapien
cagaaaattgccttgtaacatcaca

SEQ ID NO: 552800 - DNA, 25 bp, Homo sapien
cagtagagccatatttagcagataa

SEQ ID NO: 552801 - DNA, 25 bp, Homo sapien
aatgggctcttcagtctggttttct

SEQ ID NO: 552802 - DNA, 25 bp, Homo sapien
gatctgactcagacttatgtctcca

SEQ ID NO: 552803 - DNA, 25 bp, Homo sapien
gcgtgaatgggctcttcagtctggt

SEQ ID NO: 552804 - DNA, 25 bp, Homo sapien
cgtctccttcactgaggttgtatga

SEQ ID NO: 552805 - DNA, 25 bp, Homo sapien
gtctccttcactgaggttgtatgaa

SEQ ID NO: 552806 - DNA, 25 bp, Homo sapien
actctatagtaatgtcagtagcgag

SEQ ID NO: 552807 - DNA, 25 bp, Homo sapien
aagttatactctatagtaatgtcag

SEQ ID NO: 552808 - DNA, 25 bp, Homo sapien
tagtaatgtcagtagcgagtaacat

SEQ ID NO: 552809 - DNA, 25 bp, Homo sapien
tcatagggggcagtaagttatactc

SEQ ID NO: 552810 - DNA, 25 bp, Homo sapien
gcgagtgtttctgctcggctgatac

SEQ ID NO: 552811 - DNA, 25 bp, Homo sapien
tcatgcagaaggaagttgcgagtgt

SEQ ID NO: 552812 - DNA, 25 bp, Homo sapien
tttctgctcggctgatacactgaag

SEQ ID NO: 552813 - DNA, 25 bp, Homo sapien
gaaggaagttgcgagtgtttctgct

SEQ ID NO: 552814 - DNA, 25 bp, Homo sapien
cctacactccaacagcggctctcgt

SEQ ID NO: 552815 - DNA, 25 bp, Homo sapien
cccctacactccaacagcggctctc

SEQ ID NO: 552816 - DNA, 25 bp, Homo sapien
cactccaacagcggctctcgtgcat

SEQ ID NO: 552817 - DNA, 25 bp, Homo sapien
tacactccaacagcggctctcgtgc

SEQ ID NO: 552818 - DNA, 25 bp, Homo sapien
agctggtcttggcatactagcaact

SEQ ID NO: 552819 - DNA, 25 bp, Homo sapien
cttggcatactagcaacttctatca

SEQ ID NO: 552820 - DNA, 25 bp, Homo sapien
tactagcaacttctatcatcaacta

SEQ ID NO: 552821 - DNA, 25 bp, Homo sapien
cagttctgaaggcttaaacccctga

SEQ ID NO: 552822 - DNA, 25 bp, Homo sapien
aaaatattgcatcattttcccaatt

SEQ ID NO: 552823 - DNA, 25 bp, Homo sapien
acaatcatggttcgctgtaacctca

SEQ ID NO: 552824 - DNA, 25 bp, Homo sapien
tttcccaattttatggattgattga

SEQ ID NO: 552825 - DNA, 25 bp, Homo sapien
tgacacagggtctctttcttccagg

SEQ ID NO: 552826 - DNA, 25 bp, Homo sapien
tggccaaactgaaattgtacagcag

SEQ ID NO: 552827 - DNA, 25 bp, Homo sapien
gcaccagctgcactaagccacacaa

SEQ ID NO: 552828 - DNA, 25 bp, Homo sapien
gcaggctctcgcagggcaccagctg

SEQ ID NO: 552829 - DNA, 25 bp, Homo sapien
ttgtacagcaggctctcgcagggca

SEQ ID NO: 552830 - DNA, 25 bp, Homo sapien
tcccgtatgaacctctccagatgat

SEQ ID NO: 552831 - DNA, 25 bp, Homo sapien
cctgtaccagagatagttagccttg

SEQ ID NO: 552832 - DNA, 25 bp, Homo sapien
gtaccagagatagttagccttgtca

SEQ ID NO: 552833 - DNA, 25 bp, Homo sapien
acttctccctgtaccagagatagtt

SEQ ID NO: 552834 - DNA, 25 bp, Homo sapien
ctatcgataaagaggcaaactggta

SEQ ID NO: 552835 - DNA, 25 bp, Homo sapien
taagagaaatgaagcgggttccact

SEQ ID NO: 552836 - DNA, 25 bp, Homo sapien
aaactggtaagagaaatgaagcggg

SEQ ID NO: 552837 - DNA, 25 bp, Homo sapien
tcgataaagaggcaaactggtaaga

SEQ ID NO: 552838 - DNA, 25 bp, Homo sapien
aagaagtcttgatggagccttcctc

SEQ ID NO: 552839 - DNA, 25 bp, Homo sapien
ccagaatgagtccaaaatcatgcat

SEQ ID NO: 552840 - DNA, 25 bp, Homo sapien
gcagcagccagaatgagtccaaaat

SEQ ID NO: 552841 - DNA, 25 bp, Homo sapien
catcattataattcacagcagcagc

SEQ ID NO: 552842 - DNA, 25 bp, Homo sapien
cagcagcagccagaatgagtccaaa

SEQ ID NO: 552843 - DNA, 25 bp, Homo sapien
tactgaagttggattttgaagcagc

SEQ ID NO: 552844 - DNA, 25 bp, Homo sapien
caaagatgactctattgatgccatg

SEQ ID NO: 552845 - DNA, 25 bp, Homo sapien
agggctactggaatgcaaggtattc

SEQ ID NO: 552846 - DNA, 25 bp, Homo sapien
tagagtgaagggctactggaatgca

SEQ ID NO: 552847 - DNA, 25 bp, Homo sapien
caaggactcatctttactgtagaaa

SEQ ID NO: 552848 - DNA, 25 bp, Homo sapien
gtaagcttccttatcattgtccaag

SEQ ID NO: 552849 - DNA, 25 bp, Homo sapien
taaaatcaaccaacccagtaagatc

SEQ ID NO: 552850 - DNA, 25 bp, Homo sapien
gattccatgtggtttagcatccacc

SEQ ID NO: 552851 - DNA, 25 bp, Homo sapien
tgcacgactcgtctgtcacctatgg

SEQ ID NO: 552852 - DNA, 25 bp, Homo sapien
cattcatgtgatgcccaaaacgggt

SEQ ID NO: 552853 - DNA, 25 bp, Homo sapien
tacaactgaaagtctctgaggttcc

SEQ ID NO: 552854 - DNA, 25 bp, Homo sapien
cacattggctagaaatgggtcttac

SEQ ID NO: 552855 - DNA, 25 bp, Homo sapien
gcttcataggtgagctccacaaaac

SEQ ID NO: 552856 - DNA, 25 bp, Homo sapien
cacaaaactgtgcattaccttgtag

SEQ ID NO: 552857 - DNA, 25 bp, Homo sapien
agtagtttgtgaataatgtgctgac

SEQ ID NO: 552858 - DNA, 25 bp, Homo sapien
tcttcatgtgtagcttcataggtga

SEQ ID NO: 552859 - DNA, 25 bp, Homo sapien
tcggtataaaggatgtgaagtgaat

SEQ ID NO: 552860 - DNA, 25 bp, Homo sapien
gatgtcatttcagatcggtataaag

SEQ ID NO: 552861 - DNA, 25 bp, Homo sapien
tcagatcggtataaaggatgtgaag

SEQ ID NO: 552862 - DNA, 25 bp, Homo sapien
catttcagatcggtataaaggatgt

SEQ ID NO: 552863 - DNA, 25 bp, Homo sapien
tatttcaggaggactctcacaggct

SEQ ID NO: 552864 - DNA, 25 bp, Homo sapien
taagctgaggtttcccctagatctc

SEQ ID NO: 552865 - DNA, 25 bp, Homo sapien
gaatttcggctgtgcaatgtgtagc

SEQ ID NO: 552866 - DNA, 25 bp, Homo sapien
ctttgactcggcctgtgaatttcgg

SEQ ID NO: 552867 - DNA, 25 bp, Homo sapien
tttgccgcacactccggcgagccga

SEQ ID NO: 552868 - DNA, 25 bp, Homo sapien
cgctccaggattctgcggctcggaa

SEQ ID NO: 552869 - DNA, 25 bp, Homo sapien
gagcccgcagcgctccaggattctg

SEQ ID NO: 552870 - DNA, 25 bp, Homo sapien
cgcagcgctccaggattctgcggct

SEQ ID NO: 552871 - DNA, 25 bp, Homo sapien
cttcctcgttttgattgcaccgttt

SEQ ID NO: 552872 - DNA, 25 bp, Homo sapien
tcctcgttttgattgcaccgtttcc

SEQ ID NO: 552873 - DNA, 25 bp, Homo sapien
tcgttttgattgcaccgtttccatc

SEQ ID NO: 552874 - DNA, 25 bp, Homo sapien
tttgattgcaccgtttccatctggg

SEQ ID NO: 552875 - DNA, 25 bp, Homo sapien
taaaagtttgctgagcgcagtccag

SEQ ID NO: 552876 - DNA, 25 bp, Homo sapien
cagccagcccttgttggcttgccat

SEQ ID NO: 552877 - DNA, 25 bp, Homo sapien
agtccagagggctgcgctgctcgtc

SEQ ID NO: 552878 - DNA, 25 bp, Homo sapien
tgctcgtcccctcggctggcagaag

SEQ ID NO: 552879 - DNA, 25 bp, Homo sapien
cttgaggggcaaggtgaagagcgca

SEQ ID NO: 552880 - DNA, 25 bp, Homo sapien
ttgaggggcaaggtgaagagcgcac

SEQ ID NO: 552881 - DNA, 25 bp, Homo sapien
accgagctggatttgtatgttgcac

SEQ ID NO: 552882 - DNA, 25 bp, Homo sapien
gggctgtgattcttcccctcttggg

SEQ ID NO: 552883 - DNA, 25 bp, Homo sapien
tggatcggggctgtgattcttcccc

SEQ ID NO: 552884 - DNA, 25 bp, Homo sapien
tatgttgcaccatgccttcttggat

SEQ ID NO: 552885 - DNA, 25 bp, Homo sapien
ctaccaggagatcgcaggtaagcgc

SEQ ID NO: 552886 - DNA, 25 bp, Homo sapien
ctgcggagaggtccgccaggcgtac

SEQ ID NO: 552887 - DNA, 25 bp, Homo sapien
caggcgtacggtgccaagggattca

SEQ ID NO: 552888 - DNA, 25 bp, Homo sapien
ccaagggattcagcctggcggacat

SEQ ID NO: 552889 - DNA, 25 bp, Homo sapien
ggactccgcgtctccgtgttgggcg

SEQ ID NO: 552890 - DNA, 25 bp, Homo sapien
tttctgccaccgctatgggactccg

SEQ ID NO: 552891 - DNA, 25 bp, Homo sapien
tgttgggcggcggatgctcctgcgg

SEQ ID NO: 552892 - DNA, 25 bp, Homo sapien
tcctgcggcttcttcggcgggggaa

SEQ ID NO: 552893 - DNA, 25 bp, Homo sapien
tttgcccagcgccacagtctgagtg

SEQ ID NO: 552894 - DNA, 25 bp, Homo sapien
ccgcgttctggttcgggcaaacttg

SEQ ID NO: 552895 - DNA, 25 bp, Homo sapien
cacagtctgagtggcgccttctcca

SEQ ID NO: 552896 - DNA, 25 bp, Homo sapien
caaacttggaagaactgcgaccgca

SEQ ID NO: 552897 - DNA, 25 bp, Homo sapien
tgtgtagcacttggtctccgacaac

SEQ ID NO: 552898 - DNA, 25 bp, Homo sapien
caacttgcgcggcagtctgggtgct

SEQ ID NO: 552899 - DNA, 25 bp, Homo sapien
gctcttagctccaaccgaatccgag

SEQ ID NO: 552900 - DNA, 25 bp, Homo sapien
tctctcggcgccagtgtgtgtagca

SEQ ID NO: 552901 - DNA, 25 bp, Homo sapien
gtgtggtgagaataccctgcaaaca

SEQ ID NO: 552902 - DNA, 25 bp, Homo sapien
cctggggagactggtcagtgagtgg

SEQ ID NO: 552903 - DNA, 25 bp, Homo sapien
tgtggtgagaataccctgcaaacat

SEQ ID NO: 552904 - DNA, 25 bp, Homo sapien
agcaggagtgtggaaggggcacaaa

SEQ ID NO: 552905 - DNA, 25 bp, Homo sapien
ttcagcccatgaaaaggaagtggct

SEQ ID NO: 552906 - DNA, 25 bp, Homo sapien
ccacggatgcccagaaggaggctct

SEQ ID NO: 552907 - DNA, 25 bp, Homo sapien
gattttcacggctcatgacagaagc

SEQ ID NO: 552908 - DNA, 25 bp, Homo sapien
tgcacagcgccagcctgtaggtgca

SEQ ID NO: 552909 - DNA, 25 bp, Homo sapien
gggcagaagacaaacaatcttggtt

SEQ ID NO: 552910 - DNA, 25 bp, Homo sapien
tttctgtggcatgtaactaagctct

SEQ ID NO: 552911 - DNA, 25 bp, Homo sapien
tctctgtgccataaagggctcactg

SEQ ID NO: 552912 - DNA, 25 bp, Homo sapien
ctcactggctacaatggtgcccttt

SEQ ID NO: 552913 - DNA, 25 bp, Homo sapien
agaatgtgagctatggctttcaggg

SEQ ID NO: 552914 - DNA, 25 bp, Homo sapien
acagcaatgaatctgcaagtacagt

SEQ ID NO: 552915 - DNA, 25 bp, Homo sapien
aatgtgagctatggctttcagggcc

SEQ ID NO: 552916 - DNA, 25 bp, Homo sapien
atgtgagctatggctttcagggcct

SEQ ID NO: 552917 - DNA, 25 bp, Homo sapien
atgctgtaactcattgaaactcttt

SEQ ID NO: 552918 - DNA, 25 bp, Homo sapien
gctgtaactcattgaaactcttttc

SEQ ID NO: 552919 - DNA, 25 bp, Homo sapien
gttgcaaacagatgctgtaactcat

SEQ ID NO: 552920 - DNA, 25 bp, Homo sapien
gtctgtgttagagggtaatgccaag

SEQ ID NO: 552921 - DNA, 25 bp, Homo sapien
taatgccaagtcagtgatgaaaaac

SEQ ID NO: 552922 - DNA, 25 bp, Homo sapien
ctgcttggtctgtgttagagggtaa

SEQ ID NO: 552923 - DNA, 25 bp, Homo sapien
gttagagggtaatgccaagtcagtg

SEQ ID NO: 552924 - DNA, 25 bp, Homo sapien
ccaggaattggccagcaactcatcc

SEQ ID NO: 552925 - DNA, 25 bp, Homo sapien
tggccagcaactcatccagatcttt

SEQ ID NO: 552926 - DNA, 25 bp, Homo sapien
ttggaaatgccagtgtggttcttat

SEQ ID NO: 552927 - DNA, 25 bp, Homo sapien
agtgtggttcttatgttactgggca

SEQ ID NO: 552928 - DNA, 25 bp, Homo sapien
atgaggtagacaaaagataggccaa

SEQ ID NO: 552929 - DNA, 25 bp, Homo sapien
tatgaggaggttcaaacatggagga

SEQ ID NO: 552930 - DNA, 25 bp, Homo sapien
taggccaaatacagggtcagaaatc

SEQ ID NO: 552931 - DNA, 25 bp, Homo sapien
tcaggagtcgtagccatccaaagtt

SEQ ID NO: 552932 - DNA, 25 bp, Homo sapien
aaatgcgatgggacataagtagggt

SEQ ID NO: 552933 - DNA, 25 bp, Homo sapien
aaatgaagaaaatgcgatgggacat

SEQ ID NO: 552934 - DNA, 25 bp, Homo sapien
agaaaatgcgatgggacataagtag

SEQ ID NO: 552935 - DNA, 25 bp, Homo sapien
tgaagaaaatgcgatgggacataag

SEQ ID NO: 552936 - DNA, 25 bp, Homo sapien
taatagagccgtctttcattgcctg

SEQ ID NO: 552937 - DNA, 25 bp, Homo sapien
cattgcctgttaacaagctgtgctg

SEQ ID NO: 552938 - DNA, 25 bp, Homo sapien
tgtcaaagctccttcaatgcaaaga

SEQ ID NO: 552939 - DNA, 25 bp, Homo sapien
tgtttgtgcaacatccagtgtggtc

SEQ ID NO: 552940 - DNA, 25 bp, Homo sapien
tcagcaagtaacaaaacgagtgatt

SEQ ID NO: 552941 - DNA, 25 bp, Homo sapien
aatatgggcattgtaattcaccagc

SEQ ID NO: 552942 - DNA, 25 bp, Homo sapien
tatccccggtgagttgaatatgggc

SEQ ID NO: 552943 - DNA, 25 bp, Homo sapien
caaaacgagtgatttccactgcaaa

SEQ ID NO: 552944 - DNA, 25 bp, Homo sapien
ttgtgcttgcagagagggtcccatc

SEQ ID NO: 552945 - DNA, 25 bp, Homo sapien
cataacccggaataatttggctggc

SEQ ID NO: 552946 - DNA, 25 bp, Homo sapien
gctgagtcccatacgttccttgtgc

SEQ ID NO: 552947 - DNA, 25 bp, Homo sapien
cagctcttggccagagaccatcgag

SEQ ID NO: 552948 - DNA, 25 bp, Homo sapien
caggtctctggtttcatcaataaag

SEQ ID NO: 552949 - DNA, 25 bp, Homo sapien
aaagtaggctacatcgtttctgagc

SEQ ID NO: 552950 - DNA, 25 bp, Homo sapien
gattagcctgacagcccctattttc

SEQ ID NO: 552951 - DNA, 25 bp, Homo sapien
tgagggcagccagttaatctaagat

SEQ ID NO: 552952 - DNA, 25 bp, Homo sapien
gttctgttcccgtgtcctatttcca

SEQ ID NO: 552953 - DNA, 25 bp, Homo sapien
tggttctgttcccgtgtcctatttc

SEQ ID NO: 552954 - DNA, 25 bp, Homo sapien
tctgcaagaccatgggtgacagttt

SEQ ID NO: 552955 - DNA, 25 bp, Homo sapien
ctgatctgtaagtgtctgcaagacc

SEQ ID NO: 552956 - DNA, 25 bp, Homo sapien
tgccttttatgtccccaagtgtaga

SEQ ID NO: 552957 - DNA, 25 bp, Homo sapien
tatgtccccaagtgtagaaagtgca

SEQ ID NO: 552958 - DNA, 25 bp, Homo sapien
tcttgtctactatgcaaggtgtatc

SEQ ID NO: 552959 - DNA, 25 bp, Homo sapien
cttgtctactatgcaaggtgtatct

SEQ ID NO: 552960 - DNA, 25 bp, Homo sapien
ttgtctactatgcaaggtgtatctt

SEQ ID NO: 552961 - DNA, 25 bp, Homo sapien
ttcttgtctactatgcaaggtgtat

SEQ ID NO: 552962 - DNA, 25 bp, Homo sapien
tgcctgaagctctgaaactttcttg

SEQ ID NO: 552963 - DNA, 25 bp, Homo sapien
ctgaagctctgaaactttcttgcca

SEQ ID NO: 552964 - DNA, 25 bp, Homo sapien
ttgcctgaagctctgaaactttctt

SEQ ID NO: 552965 - DNA, 25 bp, Homo sapien
gcctgaagctctgaaactttcttgc

SEQ ID NO: 552966 - DNA, 25 bp, Homo sapien
tgagaatgtaagggtgggaaaatcc

SEQ ID NO: 552967 - DNA, 25 bp, Homo sapien
tgtaaacccatccaaggtgagaatg

SEQ ID NO: 552968 - DNA, 25 bp, Homo sapien
gattgagtctctttgatcaagggct

SEQ ID NO: 552969 - DNA, 25 bp, Homo sapien
tttgatcaagggctgtaaacccatc

SEQ ID NO: 552970 - DNA, 25 bp, Homo sapien
tacaccttcacctccggtctgtctc

SEQ ID NO: 552971 - DNA, 25 bp, Homo sapien
ttacaccttcacctccggtctgtct

SEQ ID NO: 552972 - DNA, 25 bp, Homo sapien
attacaccttcacctccggtctgtc

SEQ ID NO: 552973 - DNA, 25 bp, Homo sapien
caccttcacctccggtctgtctcca

SEQ ID NO: 552974 - DNA, 25 bp, Homo sapien
ttaatgaaccccaagttaatgcttc

SEQ ID NO: 552975 - DNA, 25 bp, Homo sapien
ggagcacatttcagatcataatgaa

SEQ ID NO: 552976 - DNA, 25 bp, Homo sapien
gcaaaggagcacatttcagatcata

SEQ ID NO: 552977 - DNA, 25 bp, Homo sapien
taatgcttcggtctttttctgtcca

SEQ ID NO: 552978 - DNA, 25 bp, Homo sapien
cttagatggtttcacaaatgcacag

SEQ ID NO: 552979 - DNA, 25 bp, Homo sapien
ttttctgcttcattcgtgaatgctt

SEQ ID NO: 552980 - DNA, 25 bp, Homo sapien
gaatgcttatattaggaattgctga

SEQ ID NO: 552981 - DNA, 25 bp, Homo sapien
taacttagatggtttcacaaatgca

SEQ ID NO: 552982 - DNA, 25 bp, Homo sapien
tatgacaacatgatgccgctgttgt

SEQ ID NO: 552983 - DNA, 25 bp, Homo sapien
tctatgacaacatgatgccgctgtt

SEQ ID NO: 552984 - DNA, 25 bp, Homo sapien
ccctgcgtttcttctatgacaacat

SEQ ID NO: 552985 - DNA, 25 bp, Homo sapien
cttctatgacaacatgatgccgctg

SEQ ID NO: 552986 - DNA, 25 bp, Homo sapien
gaatcacggccatcaaaagttacag

SEQ ID NO: 552987 - DNA, 25 bp, Homo sapien
gccaaaatcattgcagattacacaa

SEQ ID NO: 552988 - DNA, 25 bp, Homo sapien
caaagtcactgcaactactaatgtt

SEQ ID NO: 552989 - DNA, 25 bp, Homo sapien
cactatggctaccatcaaagtcact

SEQ ID NO: 552990 - DNA, 25 bp, Homo sapien
taatagctccctttggtcccacaac

SEQ ID NO: 552991 - DNA, 25 bp, Homo sapien
caaaatcccctgagtgtttggaact

SEQ ID NO: 552992 - DNA, 25 bp, Homo sapien
cctgagtgtttggaactctcattac

SEQ ID NO: 552993 - DNA, 25 bp, Homo sapien
acctgctcattgagaaccttaatag

SEQ ID NO: 552994 - DNA, 25 bp, Homo sapien
gctgttcggactttttaggagagtc

SEQ ID NO: 552995 - DNA, 25 bp, Homo sapien
ttttaggagagtccgacctagacat

SEQ ID NO: 552996 - DNA, 25 bp, Homo sapien
tttttaggagagtccgacctagaca

SEQ ID NO: 552997 - DNA, 25 bp, Homo sapien
ctcctgaatgtctcattggttgttt

SEQ ID NO: 552998 - DNA, 25 bp, Homo sapien
aaattaagggtgaagaaacttgctg

SEQ ID NO: 552999 - DNA, 25 bp, Homo sapien
acttgctgtattaggttcttcccct

SEQ ID NO: 553000 - DNA, 25 bp, Homo sapien
ctggagactggcctacatccaaagc

SEQ ID NO: 553001 - DNA, 25 bp, Homo sapien
ggcctacatccaaagctggcttctg

SEQ ID NO: 553002 - DNA, 25 bp, Homo sapien
aggttgcaatggcttgtgagatgat

SEQ ID NO: 553003 - DNA, 25 bp, Homo sapien
aacctgctttcgatgcgttaatccg

SEQ ID NO: 553004 - DNA, 25 bp, Homo sapien
tgatgacactgatgccctcgtgctg

SEQ ID NO: 553005 - DNA, 25 bp, Homo sapien
gcagcctgactctctatggttgatt

SEQ ID NO: 553006 - DNA, 25 bp, Homo sapien
cacgagcagataggacagatgctgt

SEQ ID NO: 553007 - DNA, 25 bp, Homo sapien
catacttaaacccaccacgagcaga

SEQ ID NO: 553008 - DNA, 25 bp, Homo sapien
ccaccacgagcagataggacagatg

SEQ ID NO: 553009 - DNA, 25 bp, Homo sapien
ttaaacccaccacgagcagatagga

SEQ ID NO: 553010 - DNA, 25 bp, Homo sapien
ggctctttgaagtatggatttaaca

SEQ ID NO: 553011 - DNA, 25 bp, Homo sapien
caggctctttgaagtatggatttaa

SEQ ID NO: 553012 - DNA, 25 bp, Homo sapien
ccacaggctctttgaagtatggatt

SEQ ID NO: 553013 - DNA, 25 bp, Homo sapien
gttccacaggctctttgaagtatgg

SEQ ID NO: 553014 - DNA, 25 bp, Homo sapien
cacattaggccaactgggttggctc

SEQ ID NO: 553015 - DNA, 25 bp, Homo sapien
cattaggccaactgggttggctcta

SEQ ID NO: 553016 - DNA, 25 bp, Homo sapien
gacacattaggccaactgggttggc

SEQ ID NO: 553017 - DNA, 25 bp, Homo sapien
attaagacacattaggccaactggg

SEQ ID NO: 553018 - DNA, 25 bp, Homo sapien
tatgttggcaggtgcttgtgaacgc

SEQ ID NO: 553019 - DNA, 25 bp, Homo sapien
aacgctggtgcaggctgattagcca

SEQ ID NO: 553020 - DNA, 25 bp, Homo sapien
ttatgttggcaggtgcttgtgaacg

SEQ ID NO: 553021 - DNA, 25 bp, Homo sapien
cttgtgaacgctggtgcaggctgat

SEQ ID NO: 553022 - DNA, 25 bp, Homo sapien
tgtgacaatggtagcaacctgtgca

SEQ ID NO: 553023 - DNA, 25 bp, Homo sapien
tcatatgtgatatcagcagcattgg

SEQ ID NO: 553024 - DNA, 25 bp, Homo sapien
cagtctcaagggcacagaccagtta

SEQ ID NO: 553025 - DNA, 25 bp, Homo sapien
cattatccattaactcttagggtcc

SEQ ID NO: 553026 - DNA, 25 bp, Homo sapien
ttcttaaaggcagctaacatctcca

SEQ ID NO: 553027 - DNA, 25 bp, Homo sapien
tgatgccacgggtgaatgcagaatg

SEQ ID NO: 553028 - DNA, 25 bp, Homo sapien
ttattgccaatgagtaatgctgtgc

SEQ ID NO: 553029 - DNA, 25 bp, Homo sapien
taaacatcatctgggcatcacctgc

SEQ ID NO: 553030 - DNA, 25 bp, Homo sapien
aaaaaagactaatcctgccagcaga

SEQ ID NO: 553031 - DNA, 25 bp, Homo sapien
taaaaactctgtagcatggatagac

SEQ ID NO: 553032 - DNA, 25 bp, Homo sapien
actggaactggcacttaaggttgca

SEQ ID NO: 553033 - DNA, 25 bp, Homo sapien
caagaaaaacgtctggagcctgggc

SEQ ID NO: 553034 - DNA, 25 bp, Homo sapien
ataggctgcctacattttttattcc

SEQ ID NO: 553035 - DNA, 25 bp, Homo sapien
caagtaataggctgcctacattttt

SEQ ID NO: 553036 - DNA, 25 bp, Homo sapien
ttattccacttttagaagtattcat

SEQ ID NO: 553037 - DNA, 25 bp, Homo sapien
tttattccacttttagaagtattca

SEQ ID NO: 553038 - DNA, 25 bp, Homo sapien
aatgctcaggcaagaaccatcctaa

SEQ ID NO: 553039 - DNA, 25 bp, Homo sapien
tatgtgcgattagatcattgatacc

SEQ ID NO: 553040 - DNA, 25 bp, Homo sapien
ctctggatttgcaagagtcaaagaa

SEQ ID NO: 553041 - DNA, 25 bp, Homo sapien
gttcatctcttacaatatgtgcgat

SEQ ID NO: 553042 - DNA, 25 bp, Homo sapien
ccccaggaccatgatgaagaagtgt

SEQ ID NO: 553043 - DNA, 25 bp, Homo sapien
caaagaagtcttgctccatagagct

SEQ ID NO: 553044 - DNA, 25 bp, Homo sapien
tattccttggtaaagtgggcaggga

SEQ ID NO: 553045 - DNA, 25 bp, Homo sapien
tacagctggcccatatgtgcattgc

SEQ ID NO: 553046 - DNA, 25 bp, Homo sapien
ttagttaggactgtgtttcatcctc

SEQ ID NO: 553047 - DNA, 25 bp, Homo sapien
ggtggtgctcaggagagaaccatgg

SEQ ID NO: 553048 - DNA, 25 bp, Homo sapien
tggtgctcaggagagaaccatggac

SEQ ID NO: 553049 - DNA, 25 bp, Homo sapien
tagttaggactgtgtttcatcctct

SEQ ID NO: 553050 - DNA, 25 bp, Homo sapien
ttttggatttaggtcatcaggctgc

SEQ ID NO: 553051 - DNA, 25 bp, Homo sapien
ttctaaagtagcttggttcccatca

SEQ ID NO: 553052 - DNA, 25 bp, Homo sapien
cccatcaacttgagataggcctaat

SEQ ID NO: 553053 - DNA, 25 bp, Homo sapien
ggttgcctttaaacagtgtcatccc

SEQ ID NO: 553054 - DNA, 25 bp, Homo sapien
gactggacactgttctgttcaccag

SEQ ID NO: 553055 - DNA, 25 bp, Homo sapien
tgttgatcaagattcagaggcacaa

SEQ ID NO: 553056 - DNA, 25 bp, Homo sapien
aaattcgtgttgatcaagattcaga

SEQ ID NO: 553057 - DNA, 25 bp, Homo sapien
tatatttatacatcctccacacatg

SEQ ID NO: 553058 - DNA, 25 bp, Homo sapien
tctgtgctagtaaaaagagtgctgt

SEQ ID NO: 553059 - DNA, 25 bp, Homo sapien
gataccaaagcaggtcaaagtaatg

SEQ ID NO: 553060 - DNA, 25 bp, Homo sapien
tggaaagctgcatcccataactgtt

SEQ ID NO: 553061 - DNA, 25 bp, Homo sapien
tcttaaaaatgtcgtcaagcaaacc

SEQ ID NO: 553062 - DNA, 25 bp, Homo sapien
taaggtggaacggagctcagtggga

SEQ ID NO: 553063 - DNA, 25 bp, Homo sapien
ctcagtgggaagctaggaaattttc

SEQ ID NO: 553064 - DNA, 25 bp, Homo sapien
tatggaatggacaacctgggtccac

SEQ ID NO: 553065 - DNA, 25 bp, Homo sapien
tttctgtaactgctgaacatgtcag

SEQ ID NO: 553066 - DNA, 25 bp, Homo sapien
gactggaagagtggcaattttgctg

SEQ ID NO: 553067 - DNA, 25 bp, Homo sapien
tagatatgactggaagagtggcaat

SEQ ID NO: 553068 - DNA, 25 bp, Homo sapien
ctaagtagatatgactggaagagtg

SEQ ID NO: 553069 - DNA, 25 bp, Homo sapien
gtggcaattttgctgctgagtccat

SEQ ID NO: 553070 - DNA, 25 bp, Homo sapien
gattgtaggggtgctcattccctgc

SEQ ID NO: 553071 - DNA, 25 bp, Homo sapien
ggtgctcattccctgcattacagta

SEQ ID NO: 553072 - DNA, 25 bp, Homo sapien
ttaccgaagattgtaggggtgctca

SEQ ID NO: 553073 - DNA, 25 bp, Homo sapien
aggggtgctcattccctgcattaca

SEQ ID NO: 553074 - DNA, 25 bp, Homo sapien
ctccattttccaatatgccattgca

SEQ ID NO: 553075 - DNA, 25 bp, Homo sapien
atatgccattgcaggcattctgtgt

SEQ ID NO: 553076 - DNA, 25 bp, Homo sapien
tctccattttccaatatgccattgc

SEQ ID NO: 553077 - DNA, 25 bp, Homo sapien
gccattgcaggcattctgtgtccac

SEQ ID NO: 553078 - DNA, 25 bp, Homo sapien
tttctctgcaactctagttgtacct

SEQ ID NO: 553079 - DNA, 25 bp, Homo sapien
tctctgcaactctagttgtaccttt

SEQ ID NO: 553080 - DNA, 25 bp, Homo sapien
tctgcaactctagttgtaccttttt

SEQ ID NO: 553081 - DNA, 25 bp, Homo sapien
cttttctctgcaactctagttgtac

SEQ ID NO: 553082 - DNA, 25 bp, Homo sapien
ttgtttctgaactaccaccatggtg

SEQ ID NO: 553083 - DNA, 25 bp, Homo sapien
tggttcacagcatatgccacagtgc

SEQ ID NO: 553084 - DNA, 25 bp, Homo sapien
gagtccaacagaagttgagcctgtg

SEQ ID NO: 553085 - DNA, 25 bp, Homo sapien
catggtgattccaaggcgagtccaa

SEQ ID NO: 553086 - DNA, 25 bp, Homo sapien
tatggaggagttagatgatgtttca

SEQ ID NO: 553087 - DNA, 25 bp, Homo sapien
aaaatacggtatggaggagttagat

SEQ ID NO: 553088 - DNA, 25 bp, Homo sapien
gagttagatgatgtttcagagctca

SEQ ID NO: 553089 - DNA, 25 bp, Homo sapien
aatacggtatggaggagttagatga

SEQ ID NO: 553090 - DNA, 25 bp, Homo sapien
gttcgtctgcaatatgcacttccag

SEQ ID NO: 553091 - DNA, 25 bp, Homo sapien
gtctgcaatatgcacttccagcagt

SEQ ID NO: 553092 - DNA, 25 bp, Homo sapien
gcaatatgcacttccagcagtttct

SEQ ID NO: 553093 - DNA, 25 bp, Homo sapien
tgcaatatgcacttccagcagtttc

SEQ ID NO: 553094 - DNA, 25 bp, Homo sapien
tgaggagttccagaaacgtgttctc

SEQ ID NO: 553095 - DNA, 25 bp, Homo sapien
ctgttgaggagtgtagtagtctgcc

SEQ ID NO: 553096 - DNA, 25 bp, Homo sapien
gacctgaggacctaaaggcctgact

SEQ ID NO: 553097 - DNA, 25 bp, Homo sapien
tgttgaaagggcatctgtcagcgtg

SEQ ID NO: 553098 - DNA, 25 bp, Homo sapien
tggattcagcgggttgcacaacatt

SEQ ID NO: 553099 - DNA, 25 bp, Homo sapien
cagcgggttgcacaacattaacttt

SEQ ID NO: 553100 - DNA, 25 bp, Homo sapien
gcacaacattaactttacattgtca

SEQ ID NO: 553101 - DNA, 25 bp, Homo sapien
caacagtctcccctttacatccttt

SEQ ID NO: 553102 - DNA, 25 bp, Homo sapien
tccttcagtgatggccgatggattt

SEQ ID NO: 553103 - DNA, 25 bp, Homo sapien
cttcagtgatggccgatggatttta

SEQ ID NO: 553104 - DNA, 25 bp, Homo sapien
ttcagtgatggccgatggattttac

SEQ ID NO: 553105 - DNA, 25 bp, Homo sapien
ccttcagtgatggccgatggatttt

SEQ ID NO: 553106 - DNA, 25 bp, Homo sapien
tgctactgataagctggcaattttg

SEQ ID NO: 553107 - DNA, 25 bp, Homo sapien
tccacaacccgtttaatagagcttg

SEQ ID NO: 553108 - DNA, 25 bp, Homo sapien
tgagaacacttccaaagagatgtaa

SEQ ID NO: 553109 - DNA, 25 bp, Homo sapien
cagtaacactgtcccttaggcaaat

SEQ ID NO: 553110 - DNA, 25 bp, Homo sapien
cttacatcggatttcagatttagta

SEQ ID NO: 553111 - DNA, 25 bp, Homo sapien
tggccttgatctttagtttcagtgg

SEQ ID NO: 553112 - DNA, 25 bp, Homo sapien
gatttagtaagtatggccttgatct

SEQ ID NO: 553113 - DNA, 25 bp, Homo sapien
tgatctttagtttcagtggtaggat

SEQ ID NO: 553114 - DNA, 25 bp, Homo sapien
tcaagcttcagagctcggagggcat

SEQ ID NO: 553115 - DNA, 25 bp, Homo sapien
tcagagctcggagggcatccagagc

SEQ ID NO: 553116 - DNA, 25 bp, Homo sapien
aagcttcagagctcggagggcatcc

SEQ ID NO: 553117 - DNA, 25 bp, Homo sapien
cttcagagctcggagggcatccaga

SEQ ID NO: 553118 - DNA, 25 bp, Homo sapien
gcaattctgcacgtaggtaattata

SEQ ID NO: 553119 - DNA, 25 bp, Homo sapien
taaatccttcagctgagatacgact

SEQ ID NO: 553120 - DNA, 25 bp, Homo sapien
ttatgctatttgagagcaattctgc

SEQ ID NO: 553121 - DNA, 25 bp, Homo sapien
aattatagtagattgcccctgtgcc

SEQ ID NO: 553122 - DNA, 25 bp, Homo sapien
ggcttggcacctcaaccagatggga

SEQ ID NO: 553123 - DNA, 25 bp, Homo sapien
ggcagaagttggcttgcacacacaa

SEQ ID NO: 553124 - DNA, 25 bp, Homo sapien
accattatggtttgccaaggaacga

SEQ ID NO: 553125 - DNA, 25 bp, Homo sapien
aaaacatgctttgacttgactccag

SEQ ID NO: 553126 - DNA, 25 bp, Homo sapien
gatgaaatcataaaacgtaacgtaa

SEQ ID NO: 553127 - DNA, 25 bp, Homo sapien
catccttaggatggttctcaatttg

SEQ ID NO: 553128 - DNA, 25 bp, Homo sapien
gaggatgtgctttgtaacatcatcc

SEQ ID NO: 553129 - DNA, 25 bp, Homo sapien
ggttctcaatttgttgactgatgaa

SEQ ID NO: 553130 - DNA, 25 bp, Homo sapien
tgtgggaacctgcatcctaaggacc

SEQ ID NO: 553131 - DNA, 25 bp, Homo sapien
tgctagccatgcgaccctgacaatt

SEQ ID NO: 553132 - DNA, 25 bp, Homo sapien
ggaatgaaaggacatatgccccaca

SEQ ID NO: 553133 - DNA, 25 bp, Homo sapien
ccataaaacgaggagtagtactact

SEQ ID NO: 553134 - DNA, 25 bp, Homo sapien
tcatttccaacttcagatttatgat

SEQ ID NO: 553135 - DNA, 25 bp, Homo sapien
cagatttatgatggattttatgata

SEQ ID NO: 553136 - DNA, 25 bp, Homo sapien
tatgatggattttatgatagtacat

SEQ ID NO: 553137 - DNA, 25 bp, Homo sapien
ttcagatttatgatggattttatga

SEQ ID NO: 553138 - DNA, 25 bp, Homo sapien
cacgctatgccttaggtcactgtgc

SEQ ID NO: 553139 - DNA, 25 bp, Homo sapien
tcagtcattcaccacgctatgcctt

SEQ ID NO: 553140 - DNA, 25 bp, Homo sapien
tatgccttaggtcactgtgctctcc

SEQ ID NO: 553141 - DNA, 25 bp, Homo sapien
tcattcaccacgctatgccttaggt

SEQ ID NO: 553142 - DNA, 25 bp, Homo sapien
taaaggatagagttcccaggatcag

SEQ ID NO: 553143 - DNA, 25 bp, Homo sapien
gtgaccatacgcatttccatttcta

SEQ ID NO: 553144 - DNA, 25 bp, Homo sapien
tgcaaataaaggatagagttcccag

SEQ ID NO: 553145 - DNA, 25 bp, Homo sapien
ttcccaggatcagtgaccatacgca

SEQ ID NO: 553146 - DNA, 25 bp, Homo sapien
tcagtttctctagttgtttctcgct

SEQ ID NO: 553147 - DNA, 25 bp, Homo sapien
cagtttctctagttgtttctcgctg

SEQ ID NO: 553148 - DNA, 25 bp, Homo sapien
agtttctctagttgtttctcgctga

SEQ ID NO: 553149 - DNA, 25 bp, Homo sapien
ttgtttctcgctgaacctggaacat

SEQ ID NO: 553150 - DNA, 25 bp, Homo sapien
aattagctggaggagtatcaagccc

SEQ ID NO: 553151 - DNA, 25 bp, Homo sapien
tgggccgtgactggcattccttttc

SEQ ID NO: 553152 - DNA, 25 bp, Homo sapien
ttcccgcatcgtgggacaagcccat

SEQ ID NO: 553153 - DNA, 25 bp, Homo sapien
taaatgcaccctaggtgggccgtga

SEQ ID NO: 553154 - DNA, 25 bp, Homo sapien
gtgctgggtgctgataaatgggaaa

SEQ ID NO: 553155 - DNA, 25 bp, Homo sapien
gctgggtgctgataaatgggaaaga

SEQ ID NO: 553156 - DNA, 25 bp, Homo sapien
tgctgggtgctgataaatgggaaag

SEQ ID NO: 553157 - DNA, 25 bp, Homo sapien
ctgggtgctgataaatgggaaagaa

SEQ ID NO: 553158 - DNA, 25 bp, Homo sapien
ctttcatcaatgaaactctctcttc

SEQ ID NO: 553159 - DNA, 25 bp, Homo sapien
agcactgctagtgttcctcacatac

SEQ ID NO: 553160 - DNA, 25 bp, Homo sapien
agtgttcctcacatactgttgatac

SEQ ID NO: 553161 - DNA, 25 bp, Homo sapien
ttctcaagatgcgaatactggctgt

SEQ ID NO: 553162 - DNA, 25 bp, Homo sapien
gaggtctctccaagtgatcaggcca

SEQ ID NO: 553163 - DNA, 25 bp, Homo sapien
tcttcccagaggctaatgctggcta

SEQ ID NO: 553164 - DNA, 25 bp, Homo sapien
tgtgatgtagactgtagagagcctc

SEQ ID NO: 553165 - DNA, 25 bp, Homo sapien
tatgaagcgtaactgagccctgagc

SEQ ID NO: 553166 - DNA, 25 bp, Homo sapien
gaatttttccgagagctcctggaga

SEQ ID NO: 553167 - DNA, 25 bp, Homo sapien
tgaagattcaggttacccgcgcctt

SEQ ID NO: 553168 - DNA, 25 bp, Homo sapien
gctcaagccatttggagacgtgccc

SEQ ID NO: 553169 - DNA, 25 bp, Homo sapien
acgtgccccggaaactgaagattca

SEQ ID NO: 553170 - DNA, 25 bp, Homo sapien
agcaggcacgttgcaactatgatca

SEQ ID NO: 553171 - DNA, 25 bp, Homo sapien
gcacgttgcaactatgatcatttga

SEQ ID NO: 553172 - DNA, 25 bp, Homo sapien
gagtcaagatgacagtcttcatgga

SEQ ID NO: 553173 - DNA, 25 bp, Homo sapien
gaggttataatcctctagggagtca

SEQ ID NO: 553174 - DNA, 25 bp, Homo sapien
agcctcttaagtggttcattcccaa

SEQ ID NO: 553175 - DNA, 25 bp, Homo sapien
aagtggttcattcccaactaaacag

SEQ ID NO: 553176 - DNA, 25 bp, Homo sapien
gtttttgctcgaagagcctcttaag

SEQ ID NO: 553177 - DNA, 25 bp, Homo sapien
gactgatgtttttgctcgaagagcc

SEQ ID NO: 553178 - DNA, 25 bp, Homo sapien
taatactcataaagctggcccgtca

SEQ ID NO: 553179 - DNA, 25 bp, Homo sapien
gaaggttcttttcaggtaacagcca

SEQ ID NO: 553180 - DNA, 25 bp, Homo sapien
tggcccgtcactgggttaaatgact

SEQ ID NO: 553181 - DNA, 25 bp, Homo sapien
cacgtagatttgagggtgtttcaca

SEQ ID NO: 553182 - DNA, 25 bp, Homo sapien
ggtgctgtggtaggcagagtgtact

SEQ ID NO: 553183 - DNA, 25 bp, Homo sapien
ctgtggtaggcagagtgtactgaga

SEQ ID NO: 553184 - DNA, 25 bp, Homo sapien
cttgtttcaggtgctgtggtaggca

SEQ ID NO: 553185 - DNA, 25 bp, Homo sapien
tgctgtggtaggcagagtgtactga

SEQ ID NO: 553186 - DNA, 25 bp, Homo sapien
attgccactgtctggtgcctatttc

SEQ ID NO: 553187 - DNA, 25 bp, Homo sapien
cattgccactgtctggtgcctattt

SEQ ID NO: 553188 - DNA, 25 bp, Homo sapien
ttgccactgtctggtgcctatttct

SEQ ID NO: 553189 - DNA, 25 bp, Homo sapien
tcattgccactgtctggtgcctatt

SEQ ID NO: 553190 - DNA, 25 bp, Homo sapien
taaaattgctattataatcatgggt

SEQ ID NO: 553191 - DNA, 25 bp, Homo sapien
aattgctattataatcatgggtcac

SEQ ID NO: 553192 - DNA, 25 bp, Homo sapien
cttcaagttcaatggaacttactct

SEQ ID NO: 553193 - DNA, 25 bp, Homo sapien
aatcatgggtcacttcaagttcaat

SEQ ID NO: 553194 - DNA, 25 bp, Homo sapien
caaagcttaagggtaccgatgagca

SEQ ID NO: 553195 - DNA, 25 bp, Homo sapien
agcagaggcggagtccttgaagcca

SEQ ID NO: 553196 - DNA, 25 bp, Homo sapien
tgtgtccaaaaccaaagagtggtgg

SEQ ID NO: 553197 - DNA, 25 bp, Homo sapien
caatggcctgatgtgtccaaaacca

SEQ ID NO: 553198 - DNA, 25 bp, Homo sapien
cattcttgaagcttaaatcatcaac

SEQ ID NO: 553199 - DNA, 25 bp, Homo sapien
catcagtgcaggaacttcattcttg

SEQ ID NO: 553200 - DNA, 25 bp, Homo sapien
gaatgagctgcaagagaatccatgt

SEQ ID NO: 553201 - DNA, 25 bp, Homo sapien
gaatccatgtcttgttgtgggaccc

SEQ ID NO: 553202 - DNA, 25 bp, Homo sapien
gggctgcattctctctaaatatgtt

SEQ ID NO: 553203 - DNA, 25 bp, Homo sapien
tagggctgcattctctctaaatatg

SEQ ID NO: 553204 - DNA, 25 bp, Homo sapien
ggctgcattctctctaaatatgttc

SEQ ID NO: 553205 - DNA, 25 bp, Homo sapien
ctagggctgcattctctctaaatat

SEQ ID NO: 553206 - DNA, 25 bp, Homo sapien
tccaacaaagtctaaactgttggta

SEQ ID NO: 553207 - DNA, 25 bp, Homo sapien
catacgttcctcttgattggagatc

SEQ ID NO: 553208 - DNA, 25 bp, Homo sapien
caacaaagtctaaactgttggtata

SEQ ID NO: 553209 - DNA, 25 bp, Homo sapien
acgttcctcttgattggagatcatt

SEQ ID NO: 553210 - DNA, 25 bp, Homo sapien
tggatgaaaactgggtagagtacag

SEQ ID NO: 553211 - DNA, 25 bp, Homo sapien
actggatgaaaactgggtagagtac

SEQ ID NO: 553212 - DNA, 25 bp, Homo sapien
aaaactgggtagagtacagatccct

SEQ ID NO: 553213 - DNA, 25 bp, Homo sapien
tgaaaactgggtagagtacagatcc

SEQ ID NO: 553214 - DNA, 25 bp, Homo sapien
tgcttgacctcctgcaactgctata

SEQ ID NO: 553215 - DNA, 25 bp, Homo sapien
aacacagttgtcagactcttgtgac

SEQ ID NO: 553216 - DNA, 25 bp, Homo sapien
gcaactgctataataccccaccctt

SEQ ID NO: 553217 - DNA, 25 bp, Homo sapien
cacagttgtcagactcttgtgacaa

SEQ ID NO: 553218 - DNA, 25 bp, Homo sapien
gtaaaacatctttctgcggttcatt

SEQ ID NO: 553219 - DNA, 25 bp, Homo sapien
taaaacatctttctgcggttcattc

SEQ ID NO: 553220 - DNA, 25 bp, Homo sapien
ctggtggttacccaagagaagtgta

SEQ ID NO: 553221 - DNA, 25 bp, Homo sapien
caagagaagtgtaactttccccagt

SEQ ID NO: 553222 - DNA, 25 bp, Homo sapien
ccaagagaagtgtaactttccccag

SEQ ID NO: 553223 - DNA, 25 bp, Homo sapien
aagagaagtgtaactttccccagtg

SEQ ID NO: 553224 - DNA, 25 bp, Homo sapien
tttaaatgcacttcccagaaactgc

SEQ ID NO: 553225 - DNA, 25 bp, Homo sapien
ctttaaatgcacttcccagaaactg

SEQ ID NO: 553226 - DNA, 25 bp, Homo sapien
ttaaatgcacttcccagaaactgca

SEQ ID NO: 553227 - DNA, 25 bp, Homo sapien
taaatgcacttcccagaaactgcat

SEQ ID NO: 553228 - DNA, 25 bp, Homo sapien
tgttattcttctgctgtggatcttg

SEQ ID NO: 553229 - DNA, 25 bp, Homo sapien
gctgtggatcttgctccctggtaac

SEQ ID NO: 553230 - DNA, 25 bp, Homo sapien
ctgttattcttctgctgtggatctt

SEQ ID NO: 553231 - DNA, 25 bp, Homo sapien
ttgctccctggtaactttgaaatcc

SEQ ID NO: 553232 - DNA, 25 bp, Homo sapien
gtgcattcagcatggtatggccttg

SEQ ID NO: 553233 - DNA, 25 bp, Homo sapien
cattcagcatggtatggccttggac

SEQ ID NO: 553234 - DNA, 25 bp, Homo sapien
gcattcagcatggtatggccttgga

SEQ ID NO: 553235 - DNA, 25 bp, Homo sapien
tgcattcagcatggtatggccttgg

SEQ ID NO: 553236 - DNA, 25 bp, Homo sapien
atgctttgttcaccagatggcattc

SEQ ID NO: 553237 - DNA, 25 bp, Homo sapien
agtccggatataagctgttcaggtc

SEQ ID NO: 553238 - DNA, 25 bp, Homo sapien
ttctgagtccggatataagctgttc

SEQ ID NO: 553239 - DNA, 25 bp, Homo sapien
gatggcattctgagtccggatataa

SEQ ID NO: 553240 - DNA, 25 bp, Homo sapien
gattcatatgccagctttattctcg

SEQ ID NO: 553241 - DNA, 25 bp, Homo sapien
tctcagaaggtttgtatgactagat

SEQ ID NO: 553242 - DNA, 25 bp, Homo sapien
gctggtcttcagattgttgactgtt

SEQ ID NO: 553243 - DNA, 25 bp, Homo sapien
gatattgtcgtctgacagggaagga

SEQ ID NO: 553244 - DNA, 25 bp, Homo sapien
catttttctatcatgaccactcata

SEQ ID NO: 553245 - DNA, 25 bp, Homo sapien
aaatttcagtaatgagaaaagggtg

SEQ ID NO: 553246 - DNA, 25 bp, Homo sapien
tatcatgaccactcatatttacatc

SEQ ID NO: 553247 - DNA, 25 bp, Homo sapien
aagggtgcttatagttatcttatca

SEQ ID NO: 553248 - DNA, 25 bp, Homo sapien
gaagtgctacttgtaacacccacag

SEQ ID NO: 553249 - DNA, 25 bp, Homo sapien
agccacagaagtgctacttgtaaca

SEQ ID NO: 553250 - DNA, 25 bp, Homo sapien
cacagaagtgctacttgtaacaccc

SEQ ID NO: 553251 - DNA, 25 bp, Homo sapien
gtgctacttgtaacacccacagcca

SEQ ID NO: 553252 - DNA, 25 bp, Homo sapien
ttactgggtgattttgcagaatctt

SEQ ID NO: 553253 - DNA, 25 bp, Homo sapien
gttactgggtgattttgcagaatct

SEQ ID NO: 553254 - DNA, 25 bp, Homo sapien
tatgacatccatcggggagagtcag

SEQ ID NO: 553255 - DNA, 25 bp, Homo sapien
gtattgttgatgtatgacatccatc

SEQ ID NO: 553256 - DNA, 25 bp, Homo sapien
ttgttgatgtatgacatccatcggg

SEQ ID NO: 553257 - DNA, 25 bp, Homo sapien
aagtgtattgttgatgtatgacatc

SEQ ID NO: 553258 - DNA, 25 bp, Homo sapien
tactaatagatccatattgaaggtg

SEQ ID NO: 553259 - DNA, 25 bp, Homo sapien
attgaaggtgtttttcatatccatc

SEQ ID NO: 553260 - DNA, 25 bp, Homo sapien
gggtctctgcagatgatgtatttga

SEQ ID NO: 553261 - DNA, 25 bp, Homo sapien
ttcgttgaggacagttatttcaccc

SEQ ID NO: 553262 - DNA, 25 bp, Homo sapien
taatgactgtgctcttaaagcccgt

SEQ ID NO: 553263 - DNA, 25 bp, Homo sapien
ctttgtacagtaatccaggagctgc

SEQ ID NO: 553264 - DNA, 25 bp, Homo sapien
taaagcccgtgagtaagaagatgtg

SEQ ID NO: 553265 - DNA, 25 bp, Homo sapien
aagttggcaccaagaagattctctg

SEQ ID NO: 553266 - DNA, 25 bp, Homo sapien
attgaaagtgaaagccaattcatgt

SEQ ID NO: 553267 - DNA, 25 bp, Homo sapien
tcatgtggcattagatgtggaaaat

SEQ ID NO: 553268 - DNA, 25 bp, Homo sapien
tagaactgttcatggctattaatag

SEQ ID NO: 553269 - DNA, 25 bp, Homo sapien
gattctccgcattttagaggcttca

SEQ ID NO: 553270 - DNA, 25 bp, Homo sapien
tgaccagaagatatgggtgtctggg

SEQ ID NO: 553271 - DNA, 25 bp, Homo sapien
gaattcatctgctcttggctgctta

SEQ ID NO: 553272 - DNA, 25 bp, Homo sapien
gtgtcattctgacccataaaatata

SEQ ID NO: 553273 - DNA, 25 bp, Homo sapien
tgatgaggataaatattctgtgtca

SEQ ID NO: 553274 - DNA, 25 bp, Homo sapien
catcttaaatgtcttatggacatat

SEQ ID NO: 553275 - DNA, 25 bp, Homo sapien
tagcagactcattgtaataattcat

SEQ ID NO: 553276 - DNA, 25 bp, Homo sapien
ttctgagagattttcacctttttga

SEQ ID NO: 553277 - DNA, 25 bp, Homo sapien
gagagattttcacctttttgaagcc

SEQ ID NO: 553278 - DNA, 25 bp, Homo sapien
agattttcacctttttgaagccgtg

SEQ ID NO: 553279 - DNA, 25 bp, Homo sapien
aagccgtggaccctgtctctctcac

SEQ ID NO: 553280 - DNA, 25 bp, Homo sapien
gacttcagcaagcttacaccaccat

SEQ ID NO: 553281 - DNA, 25 bp, Homo sapien
caccatgtgctgttggggtaccata

SEQ ID NO: 553282 - DNA, 25 bp, Homo sapien
ttgacttcagcaagcttacaccacc

SEQ ID NO: 553283 - DNA, 25 bp, Homo sapien
tacaccaccatgtgctgttggggta

SEQ ID NO: 553284 - DNA, 25 bp, Homo sapien
ttgtaatgactgcttatcttcattc

SEQ ID NO: 553285 - DNA, 25 bp, Homo sapien
ccattgtaatgactgcttatcttca

SEQ ID NO: 553286 - DNA, 25 bp, Homo sapien
taatgactgcttatcttcattcttg

SEQ ID NO: 553287 - DNA, 25 bp, Homo sapien
cattgtaatgactgcttatcttcat

SEQ ID NO: 553288 - DNA, 25 bp, Homo sapien
tacacagattttcaaggcaaagtta

SEQ ID NO: 553289 - DNA, 25 bp, Homo sapien
cacagattttcaaggcaaagttatt

SEQ ID NO: 553290 - DNA, 25 bp, Homo sapien
ctacacagattttcaaggcaaagtt

SEQ ID NO: 553291 - DNA, 25 bp, Homo sapien
acacagattttcaaggcaaagttat

SEQ ID NO: 553292 - DNA, 25 bp, Homo sapien
ctgcatttatgatctgtgataagta

SEQ ID NO: 553293 - DNA, 25 bp, Homo sapien
tctggaatgccgaaaacctctttaa

SEQ ID NO: 553294 - DNA, 25 bp, Homo sapien
atgatctgtgataagtatatatttt

SEQ ID NO: 553295 - DNA, 25 bp, Homo sapien
ggactgcatttatgatctgtgataa

SEQ ID NO: 553296 - DNA, 25 bp, Homo sapien
gcttaagcctacttaaggtatcatt

SEQ ID NO: 553297 - DNA, 25 bp, Homo sapien
ctggaagggctgaaaacttgcacta

SEQ ID NO: 553298 - DNA, 25 bp, Homo sapien
ttgcactacgggtagcacagccaga

SEQ ID NO: 553299 - DNA, 25 bp, Homo sapien
attttactataagcttaagcctact

SEQ ID NO: 553300 - DNA, 25 bp, Homo sapien
cagtatcgagccttctaatagcagt

SEQ ID NO: 553301 - DNA, 25 bp, Homo sapien
tttattgaagtattaaagcaattgg

SEQ ID NO: 553302 - DNA, 25 bp, Homo sapien
ccttcagtatcgagccttctaatag

SEQ ID NO: 553303 - DNA, 25 bp, Homo sapien
atgtgccttcagtatcgagccttct

SEQ ID NO: 553304 - DNA, 25 bp, Homo sapien
tattgtaacccactaaaatatgcct

SEQ ID NO: 553305 - DNA, 25 bp, Homo sapien
tgtttttaggccagtaagaaatatc

SEQ ID NO: 553306 - DNA, 25 bp, Homo sapien
tatgccttttaaaatcgtagattct

SEQ ID NO: 553307 - DNA, 25 bp, Homo sapien
tttaaaatcgtagattctcttccat

SEQ ID NO: 553308 - DNA, 25 bp, Homo sapien
cagtatctggcgaactcctattttc

SEQ ID NO: 553309 - DNA, 25 bp, Homo sapien
tgccagtattgatgggagacatcag

SEQ ID NO: 553310 - DNA, 25 bp, Homo sapien
tcatatgcaaaaataggtggaacag

SEQ ID NO: 553311 - DNA, 25 bp, Homo sapien
tatgacttaactaaagctactgtat

SEQ ID NO: 553312 - DNA, 25 bp, Homo sapien
tgaaatggccccgtgctaacttggg

SEQ ID NO: 553313 - DNA, 25 bp, Homo sapien
gattctgatggtgacatactgagag

SEQ ID NO: 553314 - DNA, 25 bp, Homo sapien
cagagcccagtagccgctgtgtgct

SEQ ID NO: 553315 - DNA, 25 bp, Homo sapien
ggtgacatactgagagtgattaaat

SEQ ID NO: 553316 - DNA, 25 bp, Homo sapien
taagcatggagggaaacgagtgacc

SEQ ID NO: 553317 - DNA, 25 bp, Homo sapien
gaacctcgtttttaaatgcctggca

SEQ ID NO: 553318 - DNA, 25 bp, Homo sapien
gaagccaatacacatgaacctcgtt

SEQ ID NO: 553319 - DNA, 25 bp, Homo sapien
gcagataccctggaacaagccaaga

SEQ ID NO: 553320 - DNA, 25 bp, Homo sapien
cttctaaccaggtcactacttttgg

SEQ ID NO: 553321 - DNA, 25 bp, Homo sapien
actcatcaatcgtatttccccctta

SEQ ID NO: 553322 - DNA, 25 bp, Homo sapien
gactcatcaatcgtatttccccctt

SEQ ID NO: 553323 - DNA, 25 bp, Homo sapien
tggactcatcaatcgtatttccccc

SEQ ID NO: 553324 - DNA, 25 bp, Homo sapien
tctggactcatcaatcgtatttccc

SEQ ID NO: 553325 - DNA, 25 bp, Homo sapien
ttagatgcagtctatgaggaggtct

SEQ ID NO: 553326 - DNA, 25 bp, Homo sapien
tctatgaggaggtcttctatcacac

SEQ ID NO: 553327 - DNA, 25 bp, Homo sapien
tcacactgagaatctcttgtgtttg

SEQ ID NO: 553328 - DNA, 25 bp, Homo sapien
ggaaacataacttggtcatcttggc

SEQ ID NO: 553329 - DNA, 25 bp, Homo sapien
aatgggttgctcaattttacaaata

SEQ ID NO: 553330 - DNA, 25 bp, Homo sapien
tctacttcacccagtctttccaaag

SEQ ID NO: 553331 - DNA, 25 bp, Homo sapien
gggtcaccgcaacagattctttgaa

SEQ ID NO: 553332 - DNA, 25 bp, Homo sapien
ttttcaaccattctacttcacccag

SEQ ID NO: 553333 - DNA, 25 bp, Homo sapien
aaggttcgattcttgatttctcata

SEQ ID NO: 553334 - DNA, 25 bp, Homo sapien
gaaggttcgattcttgatttctcat

SEQ ID NO: 553335 - DNA, 25 bp, Homo sapien
attagcatttgcactggagcttgac

SEQ ID NO: 553336 - DNA, 25 bp, Homo sapien
aattccagattattagcatttgcac

SEQ ID NO: 553337 - DNA, 25 bp, Homo sapien
gaagatcctggagtcaatctccttt

SEQ ID NO: 553338 - DNA, 25 bp, Homo sapien
gaacctgctcttggaatagcagcct

SEQ ID NO: 553339 - DNA, 25 bp, Homo sapien
gctcgtatgttttatgcagtgaatc

SEQ ID NO: 553340 - DNA, 25 bp, Homo sapien
gaaactgaggctcgtatgttttatg

SEQ ID NO: 553341 - DNA, 25 bp, Homo sapien
tcaccggcataattggaattctaac

SEQ ID NO: 553342 - DNA, 25 bp, Homo sapien
tgcagtgaatcaccggcataattgg

SEQ ID NO: 553343 - DNA, 25 bp, Homo sapien
ttatacatcaaattgatcaaagcag

SEQ ID NO: 553344 - DNA, 25 bp, Homo sapien
ccttatacatcaaattgatcaaagc

SEQ ID NO: 553345 - DNA, 25 bp, Homo sapien
atacatcaaattgatcaaagcagaa

SEQ ID NO: 553346 - DNA, 25 bp, Homo sapien
tatacatcaaattgatcaaagcaga

SEQ ID NO: 553347 - DNA, 25 bp, Homo sapien
tatggggtacattatctctgctgag

SEQ ID NO: 553348 - DNA, 25 bp, Homo sapien
tacattatctctgctgagctaagta

SEQ ID NO: 553349 - DNA, 25 bp, Homo sapien
ttagaatattatccatactgaattc

SEQ ID NO: 553350 - DNA, 25 bp, Homo sapien
gggtacattatctctgctgagctaa

SEQ ID NO: 553351 - DNA, 25 bp, Homo sapien
tggagaggcacttgcaccacacccc

SEQ ID NO: 553352 - DNA, 25 bp, Homo sapien
ggagaggcacttgcaccacacccca

SEQ ID NO: 553353 - DNA, 25 bp, Homo sapien
gagaggcacttgcaccacaccccat

SEQ ID NO: 553354 - DNA, 25 bp, Homo sapien
ctgtccccttctttagggacctctg

SEQ ID NO: 553355 - DNA, 25 bp, Homo sapien
ttttacatagaggttgcttaaatcc

SEQ ID NO: 553356 - DNA, 25 bp, Homo sapien
attttacatagaggttgcttaaatc

SEQ ID NO: 553357 - DNA, 25 bp, Homo sapien
tattttacatagaggttgcttaaat

SEQ ID NO: 553358 - DNA, 25 bp, Homo sapien
ggtgagccccaatttggtggtacag

SEQ ID NO: 553359 - DNA, 25 bp, Homo sapien
gagccccaatttggtggtacaggtc

SEQ ID NO: 553360 - DNA, 25 bp, Homo sapien
caatgaagtggtgggtgagccccaa

SEQ ID NO: 553361 - DNA, 25 bp, Homo sapien
tgggtgagccccaatttggtggtac

SEQ ID NO: 553362 - DNA, 25 bp, Homo sapien
ttttgaacagagagtggtaagtact

SEQ ID NO: 553363 - DNA, 25 bp, Homo sapien
aaccaaccccagtaagaagccattg

SEQ ID NO: 553364 - DNA, 25 bp, Homo sapien
taagaagccattgtgggcatggaaa

SEQ ID NO: 553365 - DNA, 25 bp, Homo sapien
tggtaagtactggtgtccccatgtc

SEQ ID NO: 553366 - DNA, 25 bp, Homo sapien
tccaccatggagagtttagggcaat

SEQ ID NO: 553367 - DNA, 25 bp, Homo sapien
catgaatcagacaagccagtagaac

SEQ ID NO: 553368 - DNA, 25 bp, Homo sapien
gccaggttggcattataatctcatt

SEQ ID NO: 553369 - DNA, 25 bp, Homo sapien
aatggcatgccaggttggcattata

SEQ ID NO: 553370 - DNA, 25 bp, Homo sapien
tcgttcttttgtgagtttgttctaa

SEQ ID NO: 553371 - DNA, 25 bp, Homo sapien
tttgttctaattgtgtcattcactg

SEQ ID NO: 553372 - DNA, 25 bp, Homo sapien
caagggatgttcgttcttttgtgag

SEQ ID NO: 553373 - DNA, 25 bp, Homo sapien
tcactgtattaccattaattagcaa

SEQ ID NO: 553374 - DNA, 25 bp, Homo sapien
caatggccttaaggtctaaagccgt

SEQ ID NO: 553375 - DNA, 25 bp, Homo sapien
ggagacactcaatggccttaaggtc

SEQ ID NO: 553376 - DNA, 25 bp, Homo sapien
ctcaatggccttaaggtctaaagcc

SEQ ID NO: 553377 - DNA, 25 bp, Homo sapien
acactcaatggccttaaggtctaaa

SEQ ID NO: 553378 - DNA, 25 bp, Homo sapien
cagcagatctgtgcctcgcagtacc

SEQ ID NO: 553379 - DNA, 25 bp, Homo sapien
ctcgaaggatgtcgttcccagcagc

SEQ ID NO: 553380 - DNA, 25 bp, Homo sapien
tcgcagtaccgtctgcagctgccat

SEQ ID NO: 553381 - DNA, 25 bp, Homo sapien
atcttccacctcgaaggatgtcgtt

SEQ ID NO: 553382 - DNA, 25 bp, Homo sapien
aggattttcccaggggcgatagatg

SEQ ID NO: 553383 - DNA, 25 bp, Homo sapien
cattgcgaggattctgtacatgaca

SEQ ID NO: 553384 - DNA, 25 bp, Homo sapien
attggtctgtgcatcagggatggga

SEQ ID NO: 553385 - DNA, 25 bp, Homo sapien
gaagtttctggaaatcattgcgagg

SEQ ID NO: 553386 - DNA, 25 bp, Homo sapien
tcttcgtgactggtcattgccccga

SEQ ID NO: 553387 - DNA, 25 bp, Homo sapien
gagtttgccgcactcataaatgctt

SEQ ID NO: 553388 - DNA, 25 bp, Homo sapien
atcctgaagcttcatgactgataat

SEQ ID NO: 553389 - DNA, 25 bp, Homo sapien
ctttccccagaatctggaaatttga

SEQ ID NO: 553390 - DNA, 25 bp, Homo sapien
ctgaactcctatagcacacagtggc

SEQ ID NO: 553391 - DNA, 25 bp, Homo sapien
gattaaatgtttagccccttgagga

SEQ ID NO: 553392 - DNA, 25 bp, Homo sapien
tagctactccttgaagtggtctagg

SEQ ID NO: 553393 - DNA, 25 bp, Homo sapien
ggaccaccctctgacactgctaatt

SEQ ID NO: 553394 - DNA, 25 bp, Homo sapien
tcttgccactgtcctagaaatgtgg

SEQ ID NO: 553395 - DNA, 25 bp, Homo sapien
ttataaatttctatctgtgccgcca

SEQ ID NO: 553396 - DNA, 25 bp, Homo sapien
gaaatgcctctcctacatgagcact

SEQ ID NO: 553397 - DNA, 25 bp, Homo sapien
ttctcttgccactgtcctagaaatg

SEQ ID NO: 553398 - DNA, 25 bp, Homo sapien
cccaggtggactaacttcatcagag

SEQ ID NO: 553399 - DNA, 25 bp, Homo sapien
tgcccctgtcagtggaagtccttcc

SEQ ID NO: 553400 - DNA, 25 bp, Homo sapien
gaaaaatctcagtgctcagtctgca

SEQ ID NO: 553401 - DNA, 25 bp, Homo sapien
gatgattccaatatgcacccaaggg

SEQ ID NO: 553402 - DNA, 25 bp, Homo sapien
tatgtctatacctccacagaagaga

SEQ ID NO: 553403 - DNA, 25 bp, Homo sapien
cctaatgcggtatcttgcacagaga

SEQ ID NO: 553404 - DNA, 25 bp, Homo sapien
gctccttgaaagtagaaccgatgtc

SEQ ID NO: 553405 - DNA, 25 bp, Homo sapien
tgaacacatgcagcgatacagccat

SEQ ID NO: 553406 - DNA, 25 bp, Homo sapien
tactggaacctttgacattgccttg

SEQ ID NO: 553407 - DNA, 25 bp, Homo sapien
cacattctggagacttgctatatca

SEQ ID NO: 553408 - DNA, 25 bp, Homo sapien
tatatgcaggataaatgtgtgcacc

SEQ ID NO: 553409 - DNA, 25 bp, Homo sapien
tacttactaacgaacagacctgatt

SEQ ID NO: 553410 - DNA, 25 bp, Homo sapien
cttgcacactgggaaagtccagcac

SEQ ID NO: 553411 - DNA, 25 bp, Homo sapien
tgcacactgggaaagtccagcaccc

SEQ ID NO: 553412 - DNA, 25 bp, Homo sapien
acaccttgcacactgggaaagtcca

SEQ ID NO: 553413 - DNA, 25 bp, Homo sapien
accttgcacactgggaaagtccagc

SEQ ID NO: 553414 - DNA, 25 bp, Homo sapien
gccctgtgataaaagccgctcaatt

SEQ ID NO: 553415 - DNA, 25 bp, Homo sapien
agcaagggtgagcagattgccctgt

SEQ ID NO: 553416 - DNA, 25 bp, Homo sapien
agattgccctgtgataaaagccgct

SEQ ID NO: 553417 - DNA, 25 bp, Homo sapien
ttgccctgtgataaaagccgctcaa

SEQ ID NO: 553418 - DNA, 25 bp, Homo sapien
tactgaagatataagcagtaaagtg

SEQ ID NO: 553419 - DNA, 25 bp, Homo sapien
gaattagaagggaatttaatgcaca

SEQ ID NO: 553420 - DNA, 25 bp, Homo sapien
ggttgaattcttccccctatcattg

SEQ ID NO: 553421 - DNA, 25 bp, Homo sapien
ttaacaatgttaaatcctaagcaag

SEQ ID NO: 553422 - DNA, 25 bp, Homo sapien
ttttcctacctaagatagatctgct

SEQ ID NO: 553423 - DNA, 25 bp, Homo sapien
cacactacagataaaagcagctaag

SEQ ID NO: 553424 - DNA, 25 bp, Homo sapien
aattaggaaattctctcaggaagac

SEQ ID NO: 553425 - DNA, 25 bp, Homo sapien
gatatacctgacagataagctagag

SEQ ID NO: 553426 - DNA, 25 bp, Homo sapien
caagcagggctttaccgggctatct

SEQ ID NO: 553427 - DNA, 25 bp, Homo sapien
gatgagtcttgcaccctctaggacc

SEQ ID NO: 553428 - DNA, 25 bp, Homo sapien
taaaccttccagagtggagcatgtg

SEQ ID NO: 553429 - DNA, 25 bp, Homo sapien
aaatgtgttccccaactatcctgag

SEQ ID NO: 553430 - DNA, 25 bp, Homo sapien
tcttggccaggtctcacattgcact

SEQ ID NO: 553431 - DNA, 25 bp, Homo sapien
ctaaaagggatcttggagactcatc

SEQ ID NO: 553432 - DNA, 25 bp, Homo sapien
gactcccctggatcaatgttttggg

SEQ ID NO: 553433 - DNA, 25 bp, Homo sapien
taagtaactgtgagtattcggcaac

SEQ ID NO: 553434 - DNA, 25 bp, Homo sapien
ttctcttaggtaaggcatgagcacc

SEQ ID NO: 553435 - DNA, 25 bp, Homo sapien
tattgtcagcgtcagaactgtggct

SEQ ID NO: 553436 - DNA, 25 bp, Homo sapien
ggtagcctcaagcactttagttggg

SEQ ID NO: 553437 - DNA, 25 bp, Homo sapien
caagcaagcaaagcggaaactacag

SEQ ID NO: 553438 - DNA, 25 bp, Homo sapien
tactaagagagttgtgggccaacct

SEQ ID NO: 553439 - DNA, 25 bp, Homo sapien
ctgcttaaatgtgtctccattaggg

SEQ ID NO: 553440 - DNA, 25 bp, Homo sapien
cagtgttcccatgactactaagaga

SEQ ID NO: 553441 - DNA, 25 bp, Homo sapien
aagccaacagcacaaaaagaccaac

SEQ ID NO: 553442 - DNA, 25 bp, Homo sapien
gctgcaaaatatacagcccttggga

SEQ ID NO: 553443 - DNA, 25 bp, Homo sapien
aatgcttatgccgaagaaaccttct

SEQ ID NO: 553444 - DNA, 25 bp, Homo sapien
ggtagtcagaactggcatcccatta

SEQ ID NO: 553445 - DNA, 25 bp, Homo sapien
gcccttgggaagagaaattctgcta

SEQ ID NO: 553446 - DNA, 25 bp, Homo sapien
taacataaatttgaccaccttgacc

SEQ ID NO: 553447 - DNA, 25 bp, Homo sapien
tctgcaatcccatgggaggtcctga

SEQ ID NO: 553448 - DNA, 25 bp, Homo sapien
tctcatagtctaagtggagtcatgc

SEQ ID NO: 553449 - DNA, 25 bp, Homo sapien
gacctgtcctgatgggattcctcca

SEQ ID NO: 553450 - DNA, 25 bp, Homo sapien
gcagatcgatggcatagctgtagcc

SEQ ID NO: 553451 - DNA, 25 bp, Homo sapien
tgtacatccgattgtgaccaatagg

SEQ ID NO: 553452 - DNA, 25 bp, Homo sapien
gcatctgcaggaggattaaatcttt

SEQ ID NO: 553453 - DNA, 25 bp, Homo sapien
tcattagtcactggagggaagaaag

SEQ ID NO: 553454 - DNA, 25 bp, Homo sapien
tctcacttgaattcttgctgttatg

SEQ ID NO: 553455 - DNA, 25 bp, Homo sapien
ggctcatggttaccagcacatgcag

SEQ ID NO: 553456 - DNA, 25 bp, Homo sapien
catggttaccagcacatgcagggaa

SEQ ID NO: 553457 - DNA, 25 bp, Homo sapien
tcccaggctcatggttaccagcaca

SEQ ID NO: 553458 - DNA, 25 bp, Homo sapien
agggagttccttggtcgctttctct

SEQ ID NO: 553459 - DNA, 25 bp, Homo sapien
cagaaagactctgctaggtcaactt

SEQ ID NO: 553460 - DNA, 25 bp, Homo sapien
gagactaagctacctctcaggccat

SEQ ID NO: 553461 - DNA, 25 bp, Homo sapien
gacattacggattggagaaagaacc

SEQ ID NO: 553462 - DNA, 25 bp, Homo sapien
catgcatcataagttgacattacgg

SEQ ID NO: 553463 - DNA, 25 bp, Homo sapien
ccaaattatgaaggctcatcacttg

SEQ ID NO: 553464 - DNA, 25 bp, Homo sapien
gtttgtcccgttcaggaaggaatga

SEQ ID NO: 553465 - DNA, 25 bp, Homo sapien
tgaatgtggcaaagcgtttgtcccg

SEQ ID NO: 553466 - DNA, 25 bp, Homo sapien
aaaatgggatcattggcggctgaat

SEQ ID NO: 553467 - DNA, 25 bp, Homo sapien
tctggagagacaggcaatctcgtat

SEQ ID NO: 553468 - DNA, 25 bp, Homo sapien
ttcttctcagcaaaccttcataggt

SEQ ID NO: 553469 - DNA, 25 bp, Homo sapien
gagagacaggcaatctcgtatgtct

SEQ ID NO: 553470 - DNA, 25 bp, Homo sapien
ggaggattgtcaaacttctggagag

SEQ ID NO: 553471 - DNA, 25 bp, Homo sapien
aaaaatgtagatgcacaaaatacgg

SEQ ID NO: 553472 - DNA, 25 bp, Homo sapien
aagtcattatgggtcgagaagtttc

SEQ ID NO: 553473 - DNA, 25 bp, Homo sapien
aaatacggacatgggcataaatatg

SEQ ID NO: 553474 - DNA, 25 bp, Homo sapien
cattatgggtcgagaagtttcaaaa

SEQ ID NO: 553475 - DNA, 25 bp, Homo sapien
ggccgggggagccacagctctgtgc

SEQ ID NO: 553476 - DNA, 25 bp, Homo sapien
tctgtgccctggagcagtctaagga

SEQ ID NO: 553477 - DNA, 25 bp, Homo sapien
caggctcagggtgttggcagtgaag

SEQ ID NO: 553478 - DNA, 25 bp, Homo sapien
ctatgcaggctcagggtgttggcag

SEQ ID NO: 553479 - DNA, 25 bp, Homo sapien
gacaccacatgcataagaaacagca

SEQ ID NO: 553480 - DNA, 25 bp, Homo sapien
catgtaaataggacaccacatgcat

SEQ ID NO: 553481 - DNA, 25 bp, Homo sapien
gaaacagcactataaagtgacttct

SEQ ID NO: 553482 - DNA, 25 bp, Homo sapien
tataaagtgacttctcctccatgtc

SEQ ID NO: 553483 - DNA, 25 bp, Homo sapien
gaatcttgagttccgactaatcaga

SEQ ID NO: 553484 - DNA, 25 bp, Homo sapien
caaagttccagtagggcaaagcaaa

SEQ ID NO: 553485 - DNA, 25 bp, Homo sapien
aaacagctggtctgtacacacatca

SEQ ID NO: 553486 - DNA, 25 bp, Homo sapien
tcagagtcggatcgtctggtctcgc

SEQ ID NO: 553487 - DNA, 25 bp, Homo sapien
gtgagaaatctatggccctgtaggg

SEQ ID NO: 553488 - DNA, 25 bp, Homo sapien
tccttgatgtgagaaatctatggcc

SEQ ID NO: 553489 - DNA, 25 bp, Homo sapien
aggtaacaaatgcaggtccttgatg

SEQ ID NO: 553490 - DNA, 25 bp, Homo sapien
tggagatctctttccagacacaaca

SEQ ID NO: 553491 - DNA, 25 bp, Homo sapien
acatattagagatgacagaatagaa

SEQ ID NO: 553492 - DNA, 25 bp, Homo sapien
gggaaacatattagagatgacagaa

SEQ ID NO: 553493 - DNA, 25 bp, Homo sapien
ttgggaaacatattagagatgacag

SEQ ID NO: 553494 - DNA, 25 bp, Homo sapien
acaattgggaaacatattagagatg

SEQ ID NO: 553495 - DNA, 25 bp, Homo sapien
tagagccaataagtccatgatgttt

SEQ ID NO: 553496 - DNA, 25 bp, Homo sapien
ctgggctgtatctatagagccaata

SEQ ID NO: 553497 - DNA, 25 bp, Homo sapien
aagcaatagtaatgacatgaatttc

SEQ ID NO: 553498 - DNA, 25 bp, Homo sapien
catgatgttttatagtagtaagaaa

SEQ ID NO: 553499 - DNA, 25 bp, Homo sapien
aagctctggacgatttaatgacctc

SEQ ID NO: 553500 - DNA, 25 bp, Homo sapien
gacaagcatgttcgctgagaccaga

SEQ ID NO: 553501 - DNA, 25 bp, Homo sapien
gaactttcgcgtattttgcctcacc

SEQ ID NO: 553502 - DNA, 25 bp, Homo sapien
tcaggattgggagcccctgatacat

SEQ ID NO: 553503 - DNA, 25 bp, Homo sapien
gattccggaccatgcaggagtacca

SEQ ID NO: 553504 - DNA, 25 bp, Homo sapien
gggcaggtcaccaatttctcaagca

SEQ ID NO: 553505 - DNA, 25 bp, Homo sapien
gaatctaggatggagtcaagccctc

SEQ ID NO: 553506 - DNA, 25 bp, Homo sapien
tgtccctgatgttggctacacggcc

SEQ ID NO: 553507 - DNA, 25 bp, Homo sapien
ggttgctctcttaattaacttgcat

SEQ ID NO: 553508 - DNA, 25 bp, Homo sapien
tgccataccctcaacccaatcacaa

SEQ ID NO: 553509 - DNA, 25 bp, Homo sapien
taatataccttcagccaaggaaaaa

SEQ ID NO: 553510 - DNA, 25 bp, Homo sapien
tcaacccaatcacaaacctgtaata

SEQ ID NO: 553511 - DNA, 25 bp, Homo sapien
tcttcttcgcgagatctaaggcgcc

SEQ ID NO: 553512 - DNA, 25 bp, Homo sapien
cagccagtgttgtgtggtgatcacg

SEQ ID NO: 553513 - DNA, 25 bp, Homo sapien
gatgttctgccgaatcactggtggt

SEQ ID NO: 553514 - DNA, 25 bp, Homo sapien
tgcagtctccacaattatagccggc

SEQ ID NO: 553515 - DNA, 25 bp, Homo sapien
tcctttaagcttcacgtttgtgctc

SEQ ID NO: 553516 - DNA, 25 bp, Homo sapien
ctttaagcttcacgtttgtgctctc

SEQ ID NO: 553517 - DNA, 25 bp, Homo sapien
ttaagcttcacgtttgtgctctcta

SEQ ID NO: 553518 - DNA, 25 bp, Homo sapien
taagcttcacgtttgtgctctctaa

SEQ ID NO: 553519 - DNA, 25 bp, Homo sapien
agcctaatctaagagtctctgtcaa

SEQ ID NO: 553520 - DNA, 25 bp, Homo sapien
ttccttagaaggagctctttcccca

SEQ ID NO: 553521 - DNA, 25 bp, Homo sapien
gcctttcaaagcctaatctaagagt

SEQ ID NO: 553522 - DNA, 25 bp, Homo sapien
tattgaatatgcttccgaccaaaac

SEQ ID NO: 553523 - DNA, 25 bp, Homo sapien
gggaccactccagggccttgtgtcg

SEQ ID NO: 553524 - DNA, 25 bp, Homo sapien
gtttcgtaggatgtagggaccactc

SEQ ID NO: 553525 - DNA, 25 bp, Homo sapien
ttcttggccacagctcacggtcatc

SEQ ID NO: 553526 - DNA, 25 bp, Homo sapien
tccttgttcactaggctgtccaccg

SEQ ID NO: 553527 - DNA, 25 bp, Homo sapien
actgagcagaaacccccaccaaagg

SEQ ID NO: 553528 - DNA, 25 bp, Homo sapien
agcccaagcaactgagcagaaaccc

SEQ ID NO: 553529 - DNA, 25 bp, Homo sapien
gggctcctggcaggattttgcagcc

SEQ ID NO: 553530 - DNA, 25 bp, Homo sapien
gcagactcgggggaactgaccctgg

SEQ ID NO: 553531 - DNA, 25 bp, Homo sapien
ccaaatttaatgagggtagcgcttc

SEQ ID NO: 553532 - DNA, 25 bp, Homo sapien
cacatgtgtacatgaacgtgcacac

SEQ ID NO: 553533 - DNA, 25 bp, Homo sapien
gagttaatttacagagcacccagtc

SEQ ID NO: 553534 - DNA, 25 bp, Homo sapien
gacttaatttccttagaagcgcctc

SEQ ID NO: 553535 - DNA, 25 bp, Homo sapien
gactggcgtgtgtcagccaggcggc

SEQ ID NO: 553536 - DNA, 25 bp, Homo sapien
tggcgtgtgtcagccaggcggctgc

SEQ ID NO: 553537 - DNA, 25 bp, Homo sapien
aggactggcgtgtgtcagccaggcg

SEQ ID NO: 553538 - DNA, 25 bp, Homo sapien
gtgtgtcagccaggcggctgcactc

SEQ ID NO: 553539 - DNA, 25 bp, Homo sapien
ccgcgggcaagacagctgctctcaa

SEQ ID NO: 553540 - DNA, 25 bp, Homo sapien
tgatgggccactacttggaagaggt

SEQ ID NO: 553541 - DNA, 25 bp, Homo sapien
gcaaaaagcaagtccgcgggcaaga

SEQ ID NO: 553542 - DNA, 25 bp, Homo sapien
gaggtccaccttactcacgtctgct

SEQ ID NO: 553543 - DNA, 25 bp, Homo sapien
cttccctgtctgatggtttttgatc

SEQ ID NO: 553544 - DNA, 25 bp, Homo sapien
tgatggtttttgatctattctttgc

SEQ ID NO: 553545 - DNA, 25 bp, Homo sapien
gatggtttttgatctattctttgct

SEQ ID NO: 553546 - DNA, 25 bp, Homo sapien
ctgtctgatggtttttgatctattc

SEQ ID NO: 553547 - DNA, 25 bp, Homo sapien
acagcagagaagcagcgagccttaa

SEQ ID NO: 553548 - DNA, 25 bp, Homo sapien
catagatgtttcctctgaactaagc

SEQ ID NO: 553549 - DNA, 25 bp, Homo sapien
gcttgaggttcccagaatggcagca

SEQ ID NO: 553550 - DNA, 25 bp, Homo sapien
ggtggttgggtcttctcctcataga

SEQ ID NO: 553551 - DNA, 25 bp, Homo sapien
tttgcagttgtcaaagtacagagga

SEQ ID NO: 553552 - DNA, 25 bp, Homo sapien
aatttgcagttgtcaaagtacagag

SEQ ID NO: 553553 - DNA, 25 bp, Homo sapien
aaatttgcagttgtcaaagtacaga

SEQ ID NO: 553554 - DNA, 25 bp, Homo sapien
caaggcatccattgtgcttggaacg

SEQ ID NO: 553555 - DNA, 25 bp, Homo sapien
cttgttgatcttcaggtatgggctg

SEQ ID NO: 553556 - DNA, 25 bp, Homo sapien
aggtatgggctggtggtaagggaca

SEQ ID NO: 553557 - DNA, 25 bp, Homo sapien
tatgggctggtggtaagggacataa

SEQ ID NO: 553558 - DNA, 25 bp, Homo sapien
ttgttgatcttcaggtatgggctgg

SEQ ID NO: 553559 - DNA, 25 bp, Homo sapien
aaatagtgtctagtgggctgtgaat

SEQ ID NO: 553560 - DNA, 25 bp, Homo sapien
tgttcaccatgggaaatgcacaaca

SEQ ID NO: 553561 - DNA, 25 bp, Homo sapien
caccatggatattcggcttctgcag

SEQ ID NO: 553562 - DNA, 25 bp, Homo sapien
ggctgcaacatgctcctagatacca

SEQ ID NO: 553563 - DNA, 25 bp, Homo sapien
tcactgttccatagccccagcccct

SEQ ID NO: 553564 - DNA, 25 bp, Homo sapien
cactgttccatagccccagccccta

SEQ ID NO: 553565 - DNA, 25 bp, Homo sapien
actgttccatagccccagcccctac

SEQ ID NO: 553566 - DNA, 25 bp, Homo sapien
gctctgctgagggtgccttcactgt

SEQ ID NO: 553567 - DNA, 25 bp, Homo sapien
tctgctgagggtgccttcactgttc

SEQ ID NO: 553568 - DNA, 25 bp, Homo sapien
gagggtgccttcactgttccatagc

SEQ ID NO: 553569 - DNA, 25 bp, Homo sapien
gggtgccttcactgttccatagccc

SEQ ID NO: 553570 - DNA, 25 bp, Homo sapien
gcctctgagatttggtggggaatgt

SEQ ID NO: 553571 - DNA, 25 bp, Homo sapien
atgcctctgagatttggtggggaat

SEQ ID NO: 553572 - DNA, 25 bp, Homo sapien
tatgcctctgagatttggtggggaa

SEQ ID NO: 553573 - DNA, 25 bp, Homo sapien
cctctgagatttggtggggaatgtt

SEQ ID NO: 553574 - DNA, 25 bp, Homo sapien
taaacaggagttaaccaggcagagt

SEQ ID NO: 553575 - DNA, 25 bp, Homo sapien
gctaaacaggagttaaccaggcaga

SEQ ID NO: 553576 - DNA, 25 bp, Homo sapien
aaacaggagttaaccaggcagagtg

SEQ ID NO: 553577 - DNA, 25 bp, Homo sapien
aagctaaacaggagttaaccaggca

SEQ ID NO: 553578 - DNA, 25 bp, Homo sapien
gaatcagtacttgtcagtgccaagc

SEQ ID NO: 553579 - DNA, 25 bp, Homo sapien
tcagtacttgtcagtgccaagctgc

SEQ ID NO: 553580 - DNA, 25 bp, Homo sapien
tactgaatcagtacttgtcagtgcc

SEQ ID NO: 553581 - DNA, 25 bp, Homo sapien
caaatactgaatcagtacttgtcag

SEQ ID NO: 553582 - DNA, 25 bp, Homo sapien
ccaaggaaggtgtttgatacacaca

SEQ ID NO: 553583 - DNA, 25 bp, Homo sapien
ttcagctagagaatggaaagttgag

SEQ ID NO: 553584 - DNA, 25 bp, Homo sapien
ggtaggcgacgtgatctccaaggaa

SEQ ID NO: 553585 - DNA, 25 bp, Homo sapien
gttcagctagagaatggaaagttga

SEQ ID NO: 553586 - DNA, 25 bp, Homo sapien
ctcagatcagttgtggcttttgtat

SEQ ID NO: 553587 - DNA, 25 bp, Homo sapien
tctctagcacgttgaggagcctcag

SEQ ID NO: 553588 - DNA, 25 bp, Homo sapien
tgcgtcgaaggggaaagcaatctct

SEQ ID NO: 553589 - DNA, 25 bp, Homo sapien
gatcagttgtggcttttgtattcat

SEQ ID NO: 553590 - DNA, 25 bp, Homo sapien
gcttgtttaaacacccgctgctagg

SEQ ID NO: 553591 - DNA, 25 bp, Homo sapien
tatccagggccgagaatgtgcattt

SEQ ID NO: 553592 - DNA, 25 bp, Homo sapien
ggccaacgttctttagtctgatgcg

SEQ ID NO: 553593 - DNA, 25 bp, Homo sapien
cagaaaggaacgtctagacccgtgg

SEQ ID NO: 553594 - DNA, 25 bp, Homo sapien
ctgccgaaacccgggatcgaaccag

SEQ ID NO: 553595 - DNA, 25 bp, Homo sapien
atcgaaccagggacctttagatctt

SEQ ID NO: 553596 - DNA, 25 bp, Homo sapien
cgctctcccaactgagctatttcgg

SEQ ID NO: 553597 - DNA, 25 bp, Homo sapien
cagggacctttagatcttcagtcta

SEQ ID NO: 553598 - DNA, 25 bp, Homo sapien
gaaactgtgtaagctgcagtcctgt

SEQ ID NO: 553599 - DNA, 25 bp, Homo sapien
tgaggataaagatgttgaagaagac

SEQ ID NO: 553600 - DNA, 25 bp, Homo sapien
tgaagaagactctgtgttggaaaga

SEQ ID NO: 553601 - DNA, 25 bp, Homo sapien
tgttttccaaatgagctcgcggatt

SEQ ID NO: 553602 - DNA, 25 bp, Homo sapien
aaagcttgccattcagctggcaaga

SEQ ID NO: 553603 - DNA, 25 bp, Homo sapien
ttccacttgcaatgccttcgggatc

SEQ ID NO: 553604 - DNA, 25 bp, Homo sapien
tgccttcgggatccacctggtcgtt

SEQ ID NO: 553605 - DNA, 25 bp, Homo sapien
ttgccattcagctggcaagagtgca

SEQ ID NO: 553606 - DNA, 25 bp, Homo sapien
tacattaagatattgacaattttat

SEQ ID NO: 553607 - DNA, 25 bp, Homo sapien
aatacattaagatattgacaatttt

SEQ ID NO: 553608 - DNA, 25 bp, Homo sapien
cattaagatattgacaattttataa

SEQ ID NO: 553609 - DNA, 25 bp, Homo sapien
atacattaagatattgacaatttta

SEQ ID NO: 553610 - DNA, 25 bp, Homo sapien
tgatacaaggttttacatacgttaa

SEQ ID NO: 553611 - DNA, 25 bp, Homo sapien
ctgatacaaggttttacatacgtta

SEQ ID NO: 553612 - DNA, 25 bp, Homo sapien
tctgatacaaggttttacatacgtt

SEQ ID NO: 553613 - DNA, 25 bp, Homo sapien
ttctgatacaaggttttacatacgt

SEQ ID NO: 553614 - DNA, 25 bp, Homo sapien
tgccagtactgaaactctcccaaag

SEQ ID NO: 553615 - DNA, 25 bp, Homo sapien
cacttggcgaggtaggataactttc

SEQ ID NO: 553616 - DNA, 25 bp, Homo sapien
tacccctcatggttgtccgaatcag

SEQ ID NO: 553617 - DNA, 25 bp, Homo sapien
tctcccaaagattgaggcattctgc

SEQ ID NO: 553618 - DNA, 25 bp, Homo sapien
gttgtgaaaattctctctgtaccat

SEQ ID NO: 553619 - DNA, 25 bp, Homo sapien
gggttctaatgccttttccacattc

SEQ ID NO: 553620 - DNA, 25 bp, Homo sapien
aagggttctaatgccttttccacat

SEQ ID NO: 553621 - DNA, 25 bp, Homo sapien
ttccacattcttccagttgtgaaaa

SEQ ID NO: 553622 - DNA, 25 bp, Homo sapien
gggtgtgggaaataagtcatctgcc

SEQ ID NO: 553623 - DNA, 25 bp, Homo sapien
gctaagcagcagacaagggctgact

SEQ ID NO: 553624 - DNA, 25 bp, Homo sapien
taagtcttgcccatcagctaagcag

SEQ ID NO: 553625 - DNA, 25 bp, Homo sapien
tatggtaacactgcatgagaggcac

SEQ ID NO: 553626 - DNA, 25 bp, Homo sapien
tgattcaacacaatattccactggt

SEQ ID NO: 553627 - DNA, 25 bp, Homo sapien
actctaagatgccactgatggatca

SEQ ID NO: 553628 - DNA, 25 bp, Homo sapien
gaaacacaggactgctactagaaat

SEQ ID NO: 553629 - DNA, 25 bp, Homo sapien
caagatatgggaagattgatcagag

SEQ ID NO: 553630 - DNA, 25 bp, Homo sapien
ttttctgacttcattgggtatctca

SEQ ID NO: 553631 - DNA, 25 bp, Homo sapien
ttcattgggtatctcatgtcattgg

SEQ ID NO: 553632 - DNA, 25 bp, Homo sapien
gacttcattgggtatctcatgtcat

SEQ ID NO: 553633 - DNA, 25 bp, Homo sapien
ttctgacttcattgggtatctcatg

SEQ ID NO: 553634 - DNA, 25 bp, Homo sapien
ttacaaatttagatattaggagata

SEQ ID NO: 553635 - DNA, 25 bp, Homo sapien
caaatttagatattaggagatatgt

SEQ ID NO: 553636 - DNA, 25 bp, Homo sapien
tatgcatttttaccacaacccaact

SEQ ID NO: 553637 - DNA, 25 bp, Homo sapien
tgtgtttatgcatttttaccacaac

SEQ ID NO: 553638 - DNA, 25 bp, Homo sapien
ttcagactctgaattggtctctttg

SEQ ID NO: 553639 - DNA, 25 bp, Homo sapien
ttaacataatcaacccaattttcca

SEQ ID NO: 553640 - DNA, 25 bp, Homo sapien
aatcaacccaattttccatttcaga

SEQ ID NO: 553641 - DNA, 25 bp, Homo sapien
cagactctgaattggtctctttgat

SEQ ID NO: 553642 - DNA, 25 bp, Homo sapien
tttcccttttttgaggacagtgaga

SEQ ID NO: 553643 - DNA, 25 bp, Homo sapien
catcagtagcataaaggaagtttct

SEQ ID NO: 553644 - DNA, 25 bp, Homo sapien
tttgaagccctgacccatgaatgca

SEQ ID NO: 553645 - DNA, 25 bp, Homo sapien
tgagaaatgcttctacaacatcagt

SEQ ID NO: 553646 - DNA, 25 bp, Homo sapien
aactccagagaagctaattcccatg

SEQ ID NO: 553647 - DNA, 25 bp, Homo sapien
ctgaaaatacaaattctcgtagctt

SEQ ID NO: 553648 - DNA, 25 bp, Homo sapien
taattcaaagttctatgataggtca

SEQ ID NO: 553649 - DNA, 25 bp, Homo sapien
cattgactgggtactacaactccag

SEQ ID NO: 553650 - DNA, 25 bp, Homo sapien
ttcctgttgtgctgtagcaaagata

SEQ ID NO: 553651 - DNA, 25 bp, Homo sapien
gttgtgctgtagcaaagatataaat

SEQ ID NO: 553652 - DNA, 25 bp, Homo sapien
cctgttgtgctgtagcaaagatata

SEQ ID NO: 553653 - DNA, 25 bp, Homo sapien
ctgttgtgctgtagcaaagatataa

SEQ ID NO: 553654 - DNA, 25 bp, Homo sapien
ctttcaaaatccctgctaagtggtg

SEQ ID NO: 553655 - DNA, 25 bp, Homo sapien
ggcacagttagccagctgacactaa

SEQ ID NO: 553656 - DNA, 25 bp, Homo sapien
tacgctgacatactggtctgactgc

SEQ ID NO: 553657 - DNA, 25 bp, Homo sapien
tctggaagatattcgtgcctacaca

SEQ ID NO: 553658 - DNA, 25 bp, Homo sapien
gatgtggtccataaacattactgct

SEQ ID NO: 553659 - DNA, 25 bp, Homo sapien
atgtggtccataaacattactgctt

SEQ ID NO: 553660 - DNA, 25 bp, Homo sapien
cttttctggatattgatgtggtcca

SEQ ID NO: 553661 - DNA, 25 bp, Homo sapien
ttttctggatattgatgtggtccat

SEQ ID NO: 553662 - DNA, 25 bp, Homo sapien
tcccagtaagactgtacaaaacatt

SEQ ID NO: 553663 - DNA, 25 bp, Homo sapien
cccagtaagactgtacaaaacattc

SEQ ID NO: 553664 - DNA, 25 bp, Homo sapien
tcagcagctgctttagatgatgcat

SEQ ID NO: 553665 - DNA, 25 bp, Homo sapien
ttcccagtaagactgtacaaaacat

SEQ ID NO: 553666 - DNA, 25 bp, Homo sapien
tgtaggttgtttgggtgaagattca

SEQ ID NO: 553667 - DNA, 25 bp, Homo sapien
taggttgtttgggtgaagattcatc

SEQ ID NO: 553668 - DNA, 25 bp, Homo sapien
atttgtaggttgtttgggtgaagat

SEQ ID NO: 553669 - DNA, 25 bp, Homo sapien
ggttgtttgggtgaagattcatcaa

SEQ ID NO: 553670 - DNA, 25 bp, Homo sapien
tgaagaaagaagtttacctgataaa

SEQ ID NO: 553671 - DNA, 25 bp, Homo sapien
ttgcagagaattgaaaaatggttac

SEQ ID NO: 553672 - DNA, 25 bp, Homo sapien
agtcttttcagactatttgattttc

SEQ ID NO: 553673 - DNA, 25 bp, Homo sapien
attgcagagaattgaaaaatggtta

SEQ ID NO: 553674 - DNA, 25 bp, Homo sapien
gactgccaccatatacttcatctgt

SEQ ID NO: 553675 - DNA, 25 bp, Homo sapien
tcatgagcagcacttaccaaaacgt

SEQ ID NO: 553676 - DNA, 25 bp, Homo sapien
gccataaacattaacataggtaaac

SEQ ID NO: 553677 - DNA, 25 bp, Homo sapien
tcaaaggcacgtacgaatgaaagat

SEQ ID NO: 553678 - DNA, 25 bp, Homo sapien
gctaaggtcatgtcaaaaaggactc

SEQ ID NO: 553679 - DNA, 25 bp, Homo sapien
tgaaaaagccttgacacaatgtcca

SEQ ID NO: 553680 - DNA, 25 bp, Homo sapien
aacaatggctcctgacagaaagggc

SEQ ID NO: 553681 - DNA, 25 bp, Homo sapien
ggtgctgttgagaaccaaggtgttc

SEQ ID NO: 553682 - DNA, 25 bp, Homo sapien
acaaggtctcattctattgcccggg

SEQ ID NO: 553683 - DNA, 25 bp, Homo sapien
ccatcatgcctggctttatttttta

SEQ ID NO: 553684 - DNA, 25 bp, Homo sapien
aaggtctcattctattgcccgggct

SEQ ID NO: 553685 - DNA, 25 bp, Homo sapien
catgcctggctttattttttattat

SEQ ID NO: 553686 - DNA, 25 bp, Homo sapien
ccacattgtaattaagaactttcac

SEQ ID NO: 553687 - DNA, 25 bp, Homo sapien
caccattgaaaacgggaaaaggctg

SEQ ID NO: 553688 - DNA, 25 bp, Homo sapien
gagacagaaagagcactacccctaa

SEQ ID NO: 553689 - DNA, 25 bp, Homo sapien
aagataaattaacccacattgtaat

SEQ ID NO: 553690 - DNA, 25 bp, Homo sapien
caaaaagcagtttcacaaagtgaga

SEQ ID NO: 553691 - DNA, 25 bp, Homo sapien
tttgtgcggcaaaatgtagtactat

SEQ ID NO: 553692 - DNA, 25 bp, Homo sapien
tgcggcaaaatgtagtactatatct

SEQ ID NO: 553693 - DNA, 25 bp, Homo sapien
gtgtttgtgcggcaaaatgtagtac

SEQ ID NO: 553694 - DNA, 25 bp, Homo sapien
ctgtataaatttgtagttctgtttg

SEQ ID NO: 553695 - DNA, 25 bp, Homo sapien
tcttcaagcttgcacagtaatccag

SEQ ID NO: 553696 - DNA, 25 bp, Homo sapien
gaaatggtttcaagattcttcaagc

SEQ ID NO: 553697 - DNA, 25 bp, Homo sapien
taaatttgtagttctgtttgttaga

SEQ ID NO: 553698 - DNA, 25 bp, Homo sapien
tatgatcatatagtttggataatct

SEQ ID NO: 553699 - DNA, 25 bp, Homo sapien
atcatatagtttggataatcttcca

SEQ ID NO: 553700 - DNA, 25 bp, Homo sapien
cttgtctagatttatgatcatatag

SEQ ID NO: 553701 - DNA, 25 bp, Homo sapien
tgatcatatagtttggataatcttc

SEQ ID NO: 553702 - DNA, 25 bp, Homo sapien
cacttcttccactagccactgagtt

SEQ ID NO: 553703 - DNA, 25 bp, Homo sapien
attagaaggggtgatttaatgtgca

SEQ ID NO: 553704 - DNA, 25 bp, Homo sapien
ccccaaatgacttgtcggattagaa

SEQ ID NO: 553705 - DNA, 25 bp, Homo sapien
caaatgacttgtcggattagaaggg

SEQ ID NO: 553706 - DNA, 25 bp, Homo sapien
actgcttggctagcggcgccattac

SEQ ID NO: 553707 - DNA, 25 bp, Homo sapien
gccactgcttggctagcggcgccat

SEQ ID NO: 553708 - DNA, 25 bp, Homo sapien
gagccactgcttggctagcggcgcc

SEQ ID NO: 553709 - DNA, 25 bp, Homo sapien
cactgcttggctagcggcgccatta

SEQ ID NO: 553710 - DNA, 25 bp, Homo sapien
atgaaaccagcaccgccggtcacca

SEQ ID NO: 553711 - DNA, 25 bp, Homo sapien
gttcctcccaacacgccgccgacat

SEQ ID NO: 553712 - DNA, 25 bp, Homo sapien
ccgcttcgcaaagccgccgggaaga

SEQ ID NO: 553713 - DNA, 25 bp, Homo sapien
caggacccgcttcgcaaagccgccg

SEQ ID NO: 553714 - DNA, 25 bp, Homo sapien
tttgcgacgcgcctcgctcgcggga

SEQ ID NO: 553715 - DNA, 25 bp, Homo sapien
tctgaaaagcgcagggaagttccgc

SEQ ID NO: 553716 - DNA, 25 bp, Homo sapien
ctagtaccgtaaagagtatggtctg

SEQ ID NO: 553717 - DNA, 25 bp, Homo sapien
ggacacgttaacagagcagccagag

SEQ ID NO: 553718 - DNA, 25 bp, Homo sapien
cagacttaggggtttgagaaaggct

SEQ ID NO: 553719 - DNA, 25 bp, Homo sapien
caggggcatctactacagacttagg

SEQ ID NO: 553720 - DNA, 25 bp, Homo sapien
gcgtgagtgctctggtagggaagta

SEQ ID NO: 553721 - DNA, 25 bp, Homo sapien
tgctctggtagggaagtaagggatt

SEQ ID NO: 553722 - DNA, 25 bp, Homo sapien
ggagcccgcctcattggctctcagg

SEQ ID NO: 553723 - DNA, 25 bp, Homo sapien
tcttcggcttatggcagaggagccc

SEQ ID NO: 553724 - DNA, 25 bp, Homo sapien
actgatgggacgctaggatctgcgc

SEQ ID NO: 553725 - DNA, 25 bp, Homo sapien
gcccatttcggcctctgactggtga

SEQ ID NO: 553726 - DNA, 25 bp, Homo sapien
tgggagccgaggcgtcggtgcagac

SEQ ID NO: 553727 - DNA, 25 bp, Homo sapien
ctgggagccgaggcgtcggtgcaga

SEQ ID NO: 553728 - DNA, 25 bp, Homo sapien
ctggagacgggcatgggggggctgc

SEQ ID NO: 553729 - DNA, 25 bp, Homo sapien
tggagacgggcatgggggggctgcg

SEQ ID NO: 553730 - DNA, 25 bp, Homo sapien
agggccagcgcatcggccacttcga

SEQ ID NO: 553731 - DNA, 25 bp, Homo sapien
ggccacttcgagttccatggtaggt

SEQ ID NO: 553732 - DNA, 25 bp, Homo sapien
agcgcatcggccacttcgagttcca

SEQ ID NO: 553733 - DNA, 25 bp, Homo sapien
ggcagccagggtaagaccctgcggg

SEQ ID NO: 553734 - DNA, 25 bp, Homo sapien
tgttgcatgtgcaaaccctgctgcc

SEQ ID NO: 553735 - DNA, 25 bp, Homo sapien
tgctgcctctagtggagtacagatc

SEQ ID NO: 553736 - DNA, 25 bp, Homo sapien
caaggctcactaggaagtaatgttc

SEQ ID NO: 553737 - DNA, 25 bp, Homo sapien
atttttaggactggtcaaggctcac

SEQ ID NO: 553738 - DNA, 25 bp, Homo sapien
gcagaatatgtgtttgtgacccaaa

SEQ ID NO: 553739 - DNA, 25 bp, Homo sapien
gtgacccaaaatgacaaagttacca

SEQ ID NO: 553740 - DNA, 25 bp, Homo sapien
cattggaaatgactagtattctgcc

SEQ ID NO: 553741 - DNA, 25 bp, Homo sapien
ggtatacatgatcgtctgagtggtc

SEQ ID NO: 553742 - DNA, 25 bp, Homo sapien
tcataagtcatgacacagtattcgc

SEQ ID NO: 553743 - DNA, 25 bp, Homo sapien
tttacatagagattcatcactgcag

SEQ ID NO: 553744 - DNA, 25 bp, Homo sapien
tgttcttgactagtaatcagggaca

SEQ ID NO: 553745 - DNA, 25 bp, Homo sapien
taagagctgttgttaagtggaggaa

SEQ ID NO: 553746 - DNA, 25 bp, Homo sapien
taaaattgctgtacgctttggtagg

SEQ ID NO: 553747 - DNA, 25 bp, Homo sapien
ttcacaggtagaaaagccttagctc

SEQ ID NO: 553748 - DNA, 25 bp, Homo sapien
ggacttttaaggctatctgatgaac

SEQ ID NO: 553749 - DNA, 25 bp, Homo sapien
atgaactgttgatctggtaccacac

SEQ ID NO: 553750 - DNA, 25 bp, Homo sapien
gaaactagtacgaaatgcctttctg

SEQ ID NO: 553751 - DNA, 25 bp, Homo sapien
ccacaggtggtagcatgacattgac

SEQ ID NO: 553752 - DNA, 25 bp, Homo sapien
tgttgagtgttaaacccacaggtgg

SEQ ID NO: 553753 - DNA, 25 bp, Homo sapien
taaatttccatagcaatttagggaa

SEQ ID NO: 553754 - DNA, 25 bp, Homo sapien
cagctgtgacatgtctaaactgcat

SEQ ID NO: 553755 - DNA, 25 bp, Homo sapien
aagtcggtaaggcaatatttcctgc

SEQ ID NO: 553756 - DNA, 25 bp, Homo sapien
ccagggctctgctttaagtcggtaa

SEQ ID NO: 553757 - DNA, 25 bp, Homo sapien
tttctgattcttgatgatacaccac

SEQ ID NO: 553758 - DNA, 25 bp, Homo sapien
ctcgaaaacattggctctagtgaaa

SEQ ID NO: 553759 - DNA, 25 bp, Homo sapien
tatctcgaaaacattggctctagtg

SEQ ID NO: 553760 - DNA, 25 bp, Homo sapien
tctcgaaaacattggctctagtgaa

SEQ ID NO: 553761 - DNA, 25 bp, Homo sapien
tcgaaaacattggctctagtgaaaa

SEQ ID NO: 553762 - DNA, 25 bp, Homo sapien
tcttctacactgctgcagcatttgt

SEQ ID NO: 553763 - DNA, 25 bp, Homo sapien
tcagcctgtaatagcctcttctaca

SEQ ID NO: 553764 - DNA, 25 bp, Homo sapien
atagcctcttctacactgctgcagc

SEQ ID NO: 553765 - DNA, 25 bp, Homo sapien
cagcatttgtgtacacactgtataa

SEQ ID NO: 553766 - DNA, 25 bp, Homo sapien
aagtctgctaaccttcccagatcag

SEQ ID NO: 553767 - DNA, 25 bp, Homo sapien
cttcccagatcagacaatgttgtct

SEQ ID NO: 553768 - DNA, 25 bp, Homo sapien
tgctaaccttcccagatcagacaat

SEQ ID NO: 553769 - DNA, 25 bp, Homo sapien
tactaaccaagtctgctaaccttcc

SEQ ID NO: 553770 - DNA, 25 bp, Homo sapien
agcatcacagcaggtgcagcccaga

SEQ ID NO: 553771 - DNA, 25 bp, Homo sapien
ttcccacagcatcacagcaggtgca

SEQ ID NO: 553772 - DNA, 25 bp, Homo sapien
tcacagcaggtgcagcccagaagct

SEQ ID NO: 553773 - DNA, 25 bp, Homo sapien
acagcatcacagcaggtgcagccca

SEQ ID NO: 553774 - DNA, 25 bp, Homo sapien
gagttgccccgctatctgcaggtgc

SEQ ID NO: 553775 - DNA, 25 bp, Homo sapien
tccagcatcacacagagagcaaggc

SEQ ID NO: 553776 - DNA, 25 bp, Homo sapien
tagaggtcacaaagagagttgcccc

SEQ ID NO: 553777 - DNA, 25 bp, Homo sapien
tgtgctatatatgcccttccaaggg

SEQ ID NO: 553778 - DNA, 25 bp, Homo sapien
tgtttgacatggatgcaacgatgca

SEQ ID NO: 553779 - DNA, 25 bp, Homo sapien
cctgaagacaacctcaagtcatgtg

SEQ ID NO: 553780 - DNA, 25 bp, Homo sapien
tagtgtgacctcagatctcattgac

SEQ ID NO: 553781 - DNA, 25 bp, Homo sapien
tgtgagttcactggctccaaatgaa

SEQ ID NO: 553782 - DNA, 25 bp, Homo sapien
tgaagtgcactataaggtccaaggc

SEQ ID NO: 553783 - DNA, 25 bp, Homo sapien
tgtgtgccttactccaatgtgggtc

SEQ ID NO: 553784 - DNA, 25 bp, Homo sapien
tataagcaggttggagagcatcagc

SEQ ID NO: 553785 - DNA, 25 bp, Homo sapien
catgagaagacctctagctggtgcc

SEQ ID NO: 553786 - DNA, 25 bp, Homo sapien
agaaaacacaaggagaaagtcaaca

SEQ ID NO: 553787 - DNA, 25 bp, Homo sapien
tgcttttctgggtttcaggacggaa

SEQ ID NO: 553788 - DNA, 25 bp, Homo sapien
aaagcattctgcttttctgggtttc

SEQ ID NO: 553789 - DNA, 25 bp, Homo sapien
gcattctgcttttctgggtttcagg

SEQ ID NO: 553790 - DNA, 25 bp, Homo sapien
gtggaaagcattctgcttttctggg

SEQ ID NO: 553791 - DNA, 25 bp, Homo sapien
tagaaaggccagactggcagtcccc

SEQ ID NO: 553792 - DNA, 25 bp, Homo sapien
tgccagtgccgtgaggtagactttc

SEQ ID NO: 553793 - DNA, 25 bp, Homo sapien
acagcctccttgcatgtgaaggtga

SEQ ID NO: 553794 - DNA, 25 bp, Homo sapien
tgagggcaccttagaaaggccagac

SEQ ID NO: 553795 - DNA, 25 bp, Homo sapien
cccacttctgatgaagttctatcca

SEQ ID NO: 553796 - DNA, 25 bp, Homo sapien
tcaactcttgagaggcaatactccg

SEQ ID NO: 553797 - DNA, 25 bp, Homo sapien
agaggcaatactccgcaggacccat

SEQ ID NO: 553798 - DNA, 25 bp, Homo sapien
gatgaagttctatccatgcagccag

SEQ ID NO: 553799 - DNA, 25 bp, Homo sapien
tttcctctatgtggggcaagttctg

SEQ ID NO: 553800 - DNA, 25 bp, Homo sapien
atttcctctatgtggggcaagttct

SEQ ID NO: 553801 - DNA, 25 bp, Homo sapien
aagatgtgaggtccaacccatttct

SEQ ID NO: 553802 - DNA, 25 bp, Homo sapien
aagatggaatctccaccagccggga

SEQ ID NO: 553803 - DNA, 25 bp, Homo sapien
ccctttgagatttgatgtggccata

SEQ ID NO: 553804 - DNA, 25 bp, Homo sapien
gcttacccttgctcatagtgacaaa

SEQ ID NO: 553805 - DNA, 25 bp, Homo sapien
cagcccctgctggagtaaaaaataa

SEQ ID NO: 553806 - DNA, 25 bp, Homo sapien
ggagtcgatcagagcaagttttggt

SEQ ID NO: 553807 - DNA, 25 bp, Homo sapien
catccaatgaggcagtagaaagact

SEQ ID NO: 553808 - DNA, 25 bp, Homo sapien
ggcaaactctaactggagggatttc

SEQ ID NO: 553809 - DNA, 25 bp, Homo sapien
gatgagaactgaccattcgatttag

SEQ ID NO: 553810 - DNA, 25 bp, Homo sapien
tattgcaggcatccaatgggcatag

SEQ ID NO: 553811 - DNA, 25 bp, Homo sapien
ccctatctaccaggaggtcaacata

SEQ ID NO: 553812 - DNA, 25 bp, Homo sapien
gttgtccaggctacattgctttggc

SEQ ID NO: 553813 - DNA, 25 bp, Homo sapien
caatcgtactactcatcagtgcagg

SEQ ID NO: 553814 - DNA, 25 bp, Homo sapien
catctcaaggtttgatcgggtgact

SEQ ID NO: 553815 - DNA, 25 bp, Homo sapien
tttggccagatacatcagctcttgc

SEQ ID NO: 553816 - DNA, 25 bp, Homo sapien
tgctgtgtcacaagtcactccaaaa

SEQ ID NO: 553817 - DNA, 25 bp, Homo sapien
gggccttgctgttgagtatcctcta

SEQ ID NO: 553818 - DNA, 25 bp, Homo sapien
ttcaaacatttgtggctcaagagaa

SEQ ID NO: 553819 - DNA, 25 bp, Homo sapien
ctggattttcctgcgtggatttcac

SEQ ID NO: 553820 - DNA, 25 bp, Homo sapien
gaaagtcattgacttcaaacatttg

SEQ ID NO: 553821 - DNA, 25 bp, Homo sapien
ttcactcatttttcgaaagtcattg

SEQ ID NO: 553822 - DNA, 25 bp, Homo sapien
gtctgtctgcagtcatgataggatg

SEQ ID NO: 553823 - DNA, 25 bp, Homo sapien
tctgcagtcatgataggatggattt

SEQ ID NO: 553824 - DNA, 25 bp, Homo sapien
agtgtcccccgacctgtctgtctgc

SEQ ID NO: 553825 - DNA, 25 bp, Homo sapien
ctgtctgtctgcagtcatgatagga

SEQ ID NO: 553826 - DNA, 25 bp, Homo sapien
ttccaaagacgaagacacggtggct

SEQ ID NO: 553827 - DNA, 25 bp, Homo sapien
tgtaggcccgcagacttcagaaaac

SEQ ID NO: 553828 - DNA, 25 bp, Homo sapien
aaacaagggccttctgtgagcgctg

SEQ ID NO: 553829 - DNA, 25 bp, Homo sapien
caagggcgacttttccaagcgggag

SEQ ID NO: 553830 - DNA, 25 bp, Homo sapien
taacgactggaaagttcgacggctg

SEQ ID NO: 553831 - DNA, 25 bp, Homo sapien
taggagcagcgctgataacgactgg

SEQ ID NO: 553832 - DNA, 25 bp, Homo sapien
taaaacaattgctgtccttggcggc

SEQ ID NO: 553833 - DNA, 25 bp, Homo sapien
cgtgcggccccgacatttggtaagg

SEQ ID NO: 553834 - DNA, 25 bp, Homo sapien
ttcataccacgactattcagtgagc

SEQ ID NO: 553835 - DNA, 25 bp, Homo sapien
tcattcataccacgactattcagtg

SEQ ID NO: 553836 - DNA, 25 bp, Homo sapien
ataccacgactattcagtgagcacc

SEQ ID NO: 553837 - DNA, 25 bp, Homo sapien
tcattcattcataccacgactattc

SEQ ID NO: 553838 - DNA, 25 bp, Homo sapien
taaatggaaactaggccctgaagcc

SEQ ID NO: 553839 - DNA, 25 bp, Homo sapien
tggctcccgggaatgtttgaagatc

SEQ ID NO: 553840 - DNA, 25 bp, Homo sapien
tcatcgcgtatcttggaattgccag

SEQ ID NO: 553841 - DNA, 25 bp, Homo sapien
tattagactctcaaaaacgcggcat

SEQ ID NO: 553842 - DNA, 25 bp, Homo sapien
gccgcagacaatgctaataatggca

SEQ ID NO: 553843 - DNA, 25 bp, Homo sapien
tataaacatcccgaggcagcactct

SEQ ID NO: 553844 - DNA, 25 bp, Homo sapien
gttcaatttctatctgccgcagaca

SEQ ID NO: 553845 - DNA, 25 bp, Homo sapien
tatatataaaaagttccccggctca

SEQ ID NO: 553846 - DNA, 25 bp, Homo sapien
cggccagctggatcggctgaaaaaa

SEQ ID NO: 553847 - DNA, 25 bp, Homo sapien
gtacacattgcaccgctattcattc

SEQ ID NO: 553848 - DNA, 25 bp, Homo sapien
tcattccggccagctggatcggctg

SEQ ID NO: 553849 - DNA, 25 bp, Homo sapien
ccggagggacaaagcgtgtacacat

SEQ ID NO: 553850 - DNA, 25 bp, Homo sapien
aagccgccgctttttcttagctcca

SEQ ID NO: 553851 - DNA, 25 bp, Homo sapien
caaccctgcgttttgttctcggaca

SEQ ID NO: 553852 - DNA, 25 bp, Homo sapien
gattggtttcttcacaatgaggaga

SEQ ID NO: 553853 - DNA, 25 bp, Homo sapien
tggacacagaagaagtgcacaatgc

SEQ ID NO: 553854 - DNA, 25 bp, Homo sapien
gaggcggacgagttgcgggaacttc

SEQ ID NO: 553855 - DNA, 25 bp, Homo sapien
tcgaggcggacgagttgcgggaact

SEQ ID NO: 553856 - DNA, 25 bp, Homo sapien
cctcgaggcggacgagttgcgggaa

SEQ ID NO: 553857 - DNA, 25 bp, Homo sapien
cggacgagttgcgggaacttcgctt

SEQ ID NO: 553858 - DNA, 25 bp, Homo sapien
tggctggcgcgaccgtccctatctg

SEQ ID NO: 553859 - DNA, 25 bp, Homo sapien
tccggggagagtggaatcttctctc

SEQ ID NO: 553860 - DNA, 25 bp, Homo sapien
tccctatctgctccggggagagtgg

SEQ ID NO: 553861 - DNA, 25 bp, Homo sapien
tgattggctggcgcgaccgtcccta

SEQ ID NO: 553862 - DNA, 25 bp, Homo sapien
tggagatagagatcgcgagccagca

SEQ ID NO: 553863 - DNA, 25 bp, Homo sapien
tgcctggccccttggatacgaggct

SEQ ID NO: 553864 - DNA, 25 bp, Homo sapien
tcaagggaagtaacaatcgcggcca

SEQ ID NO: 553865 - DNA, 25 bp, Homo sapien
aatcacagcgctgcatttgtgggcc

SEQ ID NO: 553866 - DNA, 25 bp, Homo sapien
tctgttggcgatatgacctcggtgc

SEQ ID NO: 553867 - DNA, 25 bp, Homo sapien
caaaacccgccaacttgttagcaag

SEQ ID NO: 553868 - DNA, 25 bp, Homo sapien
caaacagccgcacaatctgttggcg

SEQ ID NO: 553869 - DNA, 25 bp, Homo sapien
tcattcatcaacaactccggagcgt

SEQ ID NO: 553870 - DNA, 25 bp, Homo sapien
ggcggggagtcttcaggccgaggag

SEQ ID NO: 553871 - DNA, 25 bp, Homo sapien
aggaggcggggagtcttcaggccga

SEQ ID NO: 553872 - DNA, 25 bp, Homo sapien
ggaggaggcggggagtcttcaggcc

SEQ ID NO: 553873 - DNA, 25 bp, Homo sapien
gaggcggggagtcttcaggccgagg

SEQ ID NO: 553874 - DNA, 25 bp, Homo sapien
caatcttaaggtgaactcagccata

SEQ ID NO: 553875 - DNA, 25 bp, Homo sapien
taagccaattgaggagggaaatcca

SEQ ID NO: 553876 - DNA, 25 bp, Homo sapien
ctgtgtcagaaatccaagcgagtgg

SEQ ID NO: 553877 - DNA, 25 bp, Homo sapien
tgatcatctcacacaaaaggccaga

SEQ ID NO: 553878 - DNA, 25 bp, Homo sapien
acaagcagcttttcccgtgtgccag

SEQ ID NO: 553879 - DNA, 25 bp, Homo sapien
ttcaaatagtacaaacagggaggcg

SEQ ID NO: 553880 - DNA, 25 bp, Homo sapien
cactcccagaaacgaatgacacaag

SEQ ID NO: 553881 - DNA, 25 bp, Homo sapien
caagaatggatctggttgggagttc

SEQ ID NO: 553882 - DNA, 25 bp, Homo sapien
agcgtgcatgcaacacggaccggga

SEQ ID NO: 553883 - DNA, 25 bp, Homo sapien
tgaacagcgtgcatgcaacacggac

SEQ ID NO: 553884 - DNA, 25 bp, Homo sapien
acagcgtgcatgcaacacggaccgg

SEQ ID NO: 553885 - DNA, 25 bp, Homo sapien
atttgaacagcgtgcatgcaacacg

SEQ ID NO: 553886 - DNA, 25 bp, Homo sapien
gccgcagcgctcgtacctatacata

SEQ ID NO: 553887 - DNA, 25 bp, Homo sapien
gttccgaagtgcaaagcaaacgcca

SEQ ID NO: 553888 - DNA, 25 bp, Homo sapien
ccgaagtgcgggtctgaaatgatcc

SEQ ID NO: 553889 - DNA, 25 bp, Homo sapien
tgggtcaaaacgcaacaggttccga

SEQ ID NO: 553890 - DNA, 25 bp, Homo sapien
cggtcctcgcgaggcggccccgcgg

SEQ ID NO: 553891 - DNA, 25 bp, Homo sapien
catagcgcggcagcgtaggccgcgg

SEQ ID NO: 553892 - DNA, 25 bp, Homo sapien
gcccatgcccggcagcaggatgtag

SEQ ID NO: 553893 - DNA, 25 bp, Homo sapien
tcatagcgcggcagcgtaggccgcg

SEQ ID NO: 553894 - DNA, 25 bp, Homo sapien
gggcttgcccatgcccggcagcagg

SEQ ID NO: 553895 - DNA, 25 bp, Homo sapien
ctgcagttgcacgggatcatgtagc

SEQ ID NO: 553896 - DNA, 25 bp, Homo sapien
tgcacgggatcatgtagcccgggtt

SEQ ID NO: 553897 - DNA, 25 bp, Homo sapien
cgggatcatgtagcccgggttgccc

SEQ ID NO: 553898 - DNA, 25 bp, Homo sapien
agttgcacgggatcatgtagcccgg

SEQ ID NO: 553899 - DNA, 25 bp, Homo sapien
ttttggagcccaggtcgagcagcga

SEQ ID NO: 553900 - DNA, 25 bp, Homo sapien
ccttctcgggattggcgagcagcga

SEQ ID NO: 553901 - DNA, 25 bp, Homo sapien
tagcccagcgacgacgcgtacggga

SEQ ID NO: 553902 - DNA, 25 bp, Homo sapien
gacgaggacgacgagatctctgcca

SEQ ID NO: 553903 - DNA, 25 bp, Homo sapien
gcgtcttgggcttgcgccgcggccg

SEQ ID NO: 553904 - DNA, 25 bp, Homo sapien
ttgagcagcgtcttgggcttgcgcc

SEQ ID NO: 553905 - DNA, 25 bp, Homo sapien
cgggaaggcgaacttgtccttcttg

SEQ ID NO: 553906 - DNA, 25 bp, Homo sapien
tccttcttgagcagcgtcttgggct

SEQ ID NO: 553907 - DNA, 25 bp, Homo sapien
ccttcatgtgcatggcgcgtagacg

SEQ ID NO: 553908 - DNA, 25 bp, Homo sapien
tgacgtggtccaccggcttggacat

SEQ ID NO: 553909 - DNA, 25 bp, Homo sapien
ctctgtgagcagtttccactcggcg

SEQ ID NO: 553910 - DNA, 25 bp, Homo sapien
ggccgcttctccgactctgtgagca

SEQ ID NO: 553911 - DNA, 25 bp, Homo sapien
tcggcccggaggaaatcaatgttgg

SEQ ID NO: 553912 - DNA, 25 bp, Homo sapien
ctcggcccggaggaaatcaatgttg

SEQ ID NO: 553913 - DNA, 25 bp, Homo sapien
cctcggcccggaggaaatcaatgtt

SEQ ID NO: 553914 - DNA, 25 bp, Homo sapien
ctgcccgcggagacccgctcggccg

SEQ ID NO: 553915 - DNA, 25 bp, Homo sapien
tcgtcgcgccccggcgtcgctcccg

SEQ ID NO: 553916 - DNA, 25 bp, Homo sapien
cggggctcgtcgcgccccggcgtcg

SEQ ID NO: 553917 - DNA, 25 bp, Homo sapien
gctcgtcgcgccccggcgtcgctcc

SEQ ID NO: 553918 - DNA, 25 bp, Homo sapien
gggccgccttagtgtctccggccga

SEQ ID NO: 553919 - DNA, 25 bp, Homo sapien
ccgagcgctcgagcaggttgtctct

SEQ ID NO: 553920 - DNA, 25 bp, Homo sapien
gtgtctccggccgagcgctcgagca

SEQ ID NO: 553921 - DNA, 25 bp, Homo sapien
gccttagtgtctccggccgagcgct

SEQ ID NO: 553922 - DNA, 25 bp, Homo sapien
cctccccgcggcggcagtttgccct

SEQ ID NO: 553923 - DNA, 25 bp, Homo sapien
ctccccgcggcggcagtttgccctt

SEQ ID NO: 553924 - DNA, 25 bp, Homo sapien
gggtccttcgtctgcagtggcgttt

SEQ ID NO: 553925 - DNA, 25 bp, Homo sapien
gttctttgggtccttcgtctgcagt

SEQ ID NO: 553926 - DNA, 25 bp, Homo sapien
cgctcctcctcctcggtcgttctct

SEQ ID NO: 553927 - DNA, 25 bp, Homo sapien
tggtgagctccccgcaggtagcggc

SEQ ID NO: 553928 - DNA, 25 bp, Homo sapien
agcgtccccaaaagttgcgtcgcgg

SEQ ID NO: 553929 - DNA, 25 bp, Homo sapien
gtcgcggagactcctcgaagttgag

SEQ ID NO: 553930 - DNA, 25 bp, Homo sapien
agttgcgtcgcggagactcctcgaa

SEQ ID NO: 553931 - DNA, 25 bp, Homo sapien
caaaagttgcgtcgcggagactcct

SEQ ID NO: 553932 - DNA, 25 bp, Homo sapien
aggcttgagcaagcgttggtcgccc

SEQ ID NO: 553933 - DNA, 25 bp, Homo sapien
gccgcctggcacttgcaactaactt

SEQ ID NO: 553934 - DNA, 25 bp, Homo sapien
tctcccgctgctggactgacgggtg

SEQ ID NO: 553935 - DNA, 25 bp, Homo sapien
tggtcgcccggcctcagaggaagtt

SEQ ID NO: 553936 - DNA, 25 bp, Homo sapien
gagagttaaggaaaacgggccatca

SEQ ID NO: 553937 - DNA, 25 bp, Homo sapien
ctcagttcgcaggtccgcgctgtgg

SEQ ID NO: 553938 - DNA, 25 bp, Homo sapien
gcgctgtggcacctcccgctctccc

SEQ ID NO: 553939 - DNA, 25 bp, Homo sapien
cctctgcaccggctcaggtgagtgt

SEQ ID NO: 553940 - DNA, 25 bp, Homo sapien
caccggctcaggtgagtgtggctac

SEQ ID NO: 553941 - DNA, 25 bp, Homo sapien
tgtccagccgcggctgtgtgtgtat

SEQ ID NO: 553942 - DNA, 25 bp, Homo sapien
gtgtgcatgtccagccgcggctgtg

SEQ ID NO: 553943 - DNA, 25 bp, Homo sapien
gcccggagccggcactgggtgtgca

SEQ ID NO: 553944 - DNA, 25 bp, Homo sapien
ctgcatgtgtgcgcgcccggagccg

SEQ ID NO: 553945 - DNA, 25 bp, Homo sapien
caggacctcgaattaacagatcccc

SEQ ID NO: 553946 - DNA, 25 bp, Homo sapien
ccaggacctcgaattaacagatccc

SEQ ID NO: 553947 - DNA, 25 bp, Homo sapien
ggacctcgaattaacagatcccctc

SEQ ID NO: 553948 - DNA, 25 bp, Homo sapien
ccccaggacctcgaattaacagatc

SEQ ID NO: 553949 - DNA, 25 bp, Homo sapien
tttaggcgagtggagagtccggagc

SEQ ID NO: 553950 - DNA, 25 bp, Homo sapien
ttggcgttggcaaaccctggtgtca

SEQ ID NO: 553951 - DNA, 25 bp, Homo sapien
tggttgtggccctggaatcctcgcc

SEQ ID NO: 553952 - DNA, 25 bp, Homo sapien
cgggcacgagtaggagagcctctcc

SEQ ID NO: 553953 - DNA, 25 bp, Homo sapien
agaggcttctcgcattttcttgcac

SEQ ID NO: 553954 - DNA, 25 bp, Homo sapien
aaaatgtttgagactgttcctagca

SEQ ID NO: 553955 - DNA, 25 bp, Homo sapien
ccttggaggtccaggtgttgcttgc

SEQ ID NO: 553956 - DNA, 25 bp, Homo sapien
gaggtccaggtgttgcttgcaacag

SEQ ID NO: 553957 - DNA, 25 bp, Homo sapien
gagaattcttgggtcccaatgtgaa

SEQ ID NO: 553958 - DNA, 25 bp, Homo sapien
atgtgaacagaatcattgtccccca

SEQ ID NO: 553959 - DNA, 25 bp, Homo sapien
tgtgaacagaatcattgtcccccat

SEQ ID NO: 553960 - DNA, 25 bp, Homo sapien
attcttgggtcccaatgtgaacaga

SEQ ID NO: 553961 - DNA, 25 bp, Homo sapien
aggtccacactcagcaacatccatc

SEQ ID NO: 553962 - DNA, 25 bp, Homo sapien
gatcttctgttaaatctacaaaatt

SEQ ID NO: 553963 - DNA, 25 bp, Homo sapien
gcaacatccatctttttaggttctt

SEQ ID NO: 553964 - DNA, 25 bp, Homo sapien
tttaggttcttcaagatcttctgtt

SEQ ID NO: 553965 - DNA, 25 bp, Homo sapien
tggtgctcaaatgctcgttccgggc

SEQ ID NO: 553966 - DNA, 25 bp, Homo sapien
caactggagcgccaaagtttactac

SEQ ID NO: 553967 - DNA, 25 bp, Homo sapien
tgaacaatttggtggcctcatcaag

SEQ ID NO: 553968 - DNA, 25 bp, Homo sapien
actactttcagtgtgtgagcctgtc

SEQ ID NO: 553969 - DNA, 25 bp, Homo sapien
tgggccaagtgtcttagtatggcct

SEQ ID NO: 553970 - DNA, 25 bp, Homo sapien
agtatggccttcatcttcaggcaat

SEQ ID NO: 553971 - DNA, 25 bp, Homo sapien
atggccttcatcttcaggcaatgac

SEQ ID NO: 553972 - DNA, 25 bp, Homo sapien
ctgggccaagtgtcttagtatggcc

SEQ ID NO: 553973 - DNA, 25 bp, Homo sapien
aaacatccagtaaactatctgccat

SEQ ID NO: 553974 - DNA, 25 bp, Homo sapien
gatatttgtaaacgtggagtcatac

SEQ ID NO: 553975 - DNA, 25 bp, Homo sapien
agtcatacgtggtgcataagaactg

SEQ ID NO: 553976 - DNA, 25 bp, Homo sapien
aattcacactgacggttcacaggct

SEQ ID NO: 553977 - DNA, 25 bp, Homo sapien
gaactgtaggtccagaattcaagtc

SEQ ID NO: 553978 - DNA, 25 bp, Homo sapien
gcatctccagagtcctctctccctg

SEQ ID NO: 553979 - DNA, 25 bp, Homo sapien
tttctttgccgggactctggaaggc

SEQ ID NO: 553980 - DNA, 25 bp, Homo sapien
ctggaaggcttgtgcttcggcatct

SEQ ID NO: 553981 - DNA, 25 bp, Homo sapien
ttcggcatctccagagtcctctctc

SEQ ID NO: 553982 - DNA, 25 bp, Homo sapien
tagttctatcgactggtagtcattg

SEQ ID NO: 553983 - DNA, 25 bp, Homo sapien
ttatcctttagttctatcgactggt

SEQ ID NO: 553984 - DNA, 25 bp, Homo sapien
atcctttagttctatcgactggtag

SEQ ID NO: 553985 - DNA, 25 bp, Homo sapien
cctttagttctatcgactggtagtc

SEQ ID NO: 553986 - DNA, 25 bp, Homo sapien
aaatcccttgggtgtttaatgatca

SEQ ID NO: 553987 - DNA, 25 bp, Homo sapien
catcagttgattcaaagcttcttga

SEQ ID NO: 553988 - DNA, 25 bp, Homo sapien
cttgggtcttttctctgcaattgtc

SEQ ID NO: 553989 - DNA, 25 bp, Homo sapien
tgtctgttctacttcttcttgtttg

SEQ ID NO: 553990 - DNA, 25 bp, Homo sapien
tgtgagaggatctcacacgggcatg

SEQ ID NO: 553991 - DNA, 25 bp, Homo sapien
gtgagaggatctcacacgggcatga

SEQ ID NO: 553992 - DNA, 25 bp, Homo sapien
tctcgatctcgcttctttttatcct

SEQ ID NO: 553993 - DNA, 25 bp, Homo sapien
gtctcgatctcgcttctttttatcc

SEQ ID NO: 553994 - DNA, 25 bp, Homo sapien
ggtctcgatctcgcttctttttatc

SEQ ID NO: 553995 - DNA, 25 bp, Homo sapien
tcttattcgccttcgaagaggctgg

SEQ ID NO: 553996 - DNA, 25 bp, Homo sapien
tgtatttgtcatgatcttattcgcc

SEQ ID NO: 553997 - DNA, 25 bp, Homo sapien
gaagtgtttgtctgacttgcgctcc

SEQ ID NO: 553998 - DNA, 25 bp, Homo sapien
tacatacccctcatagaagtgtttg

SEQ ID NO: 553999 - DNA, 25 bp, Homo sapien
cagttaatagactccagcagctcag

SEQ ID NO: 554000 - DNA, 25 bp, Homo sapien
tgaattcagttaatagactccagca

SEQ ID NO: 554001 - DNA, 25 bp, Homo sapien
accatgaattcagttaatagactcc

SEQ ID NO: 554002 - DNA, 25 bp, Homo sapien
ccctctttatgctggttattttcct

SEQ ID NO: 554003 - DNA, 25 bp, Homo sapien
cttgtagatatgcacttatgttgcc

SEQ ID NO: 554004 - DNA, 25 bp, Homo sapien
tacattatcgcctttcttgtagata

SEQ ID NO: 554005 - DNA, 25 bp, Homo sapien
ttctcaaaggcctaggggacctcag

SEQ ID NO: 554006 - DNA, 25 bp, Homo sapien
catttgtgaggcatttctttttgga

SEQ ID NO: 554007 - DNA, 25 bp, Homo sapien
tttttggatcatgccaaaccatcat

SEQ ID NO: 554008 - DNA, 25 bp, Homo sapien
ctgttgtttttggatcatgccaaac

SEQ ID NO: 554009 - DNA, 25 bp, Homo sapien
gttgtttttggatcatgccaaacca

SEQ ID NO: 554010 - DNA, 25 bp, Homo sapien
ttggatcatgccaaaccatcatttg

SEQ ID NO: 554011 - DNA, 25 bp, Homo sapien
aattatctgggtgttctggactccc

SEQ ID NO: 554012 - DNA, 25 bp, Homo sapien
caaggctggcggcctccactcaggt

SEQ ID NO: 554013 - DNA, 25 bp, Homo sapien
cactcaggttctcccgtcctgggat

SEQ ID NO: 554014 - DNA, 25 bp, Homo sapien
gggatgaggcttcccgtggcctgga

SEQ ID NO: 554015 - DNA, 25 bp, Homo sapien
cacatttccagggatattaggatcc

SEQ ID NO: 554016 - DNA, 25 bp, Homo sapien
tcttcaacatagtcaaacgaggtat

SEQ ID NO: 554017 - DNA, 25 bp, Homo sapien
gatcctgggtaagagaaattcctat

SEQ ID NO: 554018 - DNA, 25 bp, Homo sapien
taagtcaagtttcacccctgtagcc

SEQ ID NO: 554019 - DNA, 25 bp, Homo sapien
ccgagggagggacaacaaatctgaa

SEQ ID NO: 554020 - DNA, 25 bp, Homo sapien
gactgccatggcatcagaggactga

SEQ ID NO: 554021 - DNA, 25 bp, Homo sapien
gaacccttgatacacacgccgaggg

SEQ ID NO: 554022 - DNA, 25 bp, Homo sapien
taaagacctggactgttagacccga

SEQ ID NO: 554023 - DNA, 25 bp, Homo sapien
tgctgtgggtcttctggtcagccca

SEQ ID NO: 554024 - DNA, 25 bp, Homo sapien
tcagcccatatctggctacatctgt

SEQ ID NO: 554025 - DNA, 25 bp, Homo sapien
gcccatatctggctacatctgtcat

SEQ ID NO: 554026 - DNA, 25 bp, Homo sapien
tccaacacatccaaagttgctgtgg

SEQ ID NO: 554027 - DNA, 25 bp, Homo sapien
ggtgttaaagatgactgagcagcca

SEQ ID NO: 554028 - DNA, 25 bp, Homo sapien
tctagaatcaatgtagggtgttaaa

SEQ ID NO: 554029 - DNA, 25 bp, Homo sapien
tgtagggtgttaaagatgactgagc

SEQ ID NO: 554030 - DNA, 25 bp, Homo sapien
tcaatgtagggtgttaaagatgact

SEQ ID NO: 554031 - DNA, 25 bp, Homo sapien
cagagttatttgcaaaggtcatatt

SEQ ID NO: 554032 - DNA, 25 bp, Homo sapien
tatttgcaaaggtcatattctcttc

SEQ ID NO: 554033 - DNA, 25 bp, Homo sapien
tattctcttcacatacccttgattt

SEQ ID NO: 554034 - DNA, 25 bp, Homo sapien
ttcacatacccttgatttcctttca

SEQ ID NO: 554035 - DNA, 25 bp, Homo sapien
agcccaaatagagagttgtaattac

SEQ ID NO: 554036 - DNA, 25 bp, Homo sapien
aaagcccaaatagagagttgtaatt

SEQ ID NO: 554037 - DNA, 25 bp, Homo sapien
attctccacttatcacatgcagcat

SEQ ID NO: 554038 - DNA, 25 bp, Homo sapien
ttattctccacttatcacatgcagc

SEQ ID NO: 554039 - DNA, 25 bp, Homo sapien
tttcatcatcggataaaacttgccc

SEQ ID NO: 554040 - DNA, 25 bp, Homo sapien
tctatcatctttatctcactaggcc

SEQ ID NO: 554041 - DNA, 25 bp, Homo sapien
ctcactaggccttgctgtttcatca

SEQ ID NO: 554042 - DNA, 25 bp, Homo sapien
gatagtcccccttctatcatcttta

SEQ ID NO: 554043 - DNA, 25 bp, Homo sapien
catttggcctgctgatgattgtaaa

SEQ ID NO: 554044 - DNA, 25 bp, Homo sapien
tggcctgctgatgattgtaaaagtc

SEQ ID NO: 554045 - DNA, 25 bp, Homo sapien
gatgtcacatttggcctgctgatga

SEQ ID NO: 554046 - DNA, 25 bp, Homo sapien
cctgctgatgattgtaaaagtcaga

SEQ ID NO: 554047 - DNA, 25 bp, Homo sapien
aggattgtgccccacacttctgtaa

SEQ ID NO: 554048 - DNA, 25 bp, Homo sapien
tcaacttccaggtaaattaggattg

SEQ ID NO: 554049 - DNA, 25 bp, Homo sapien
gtaaattaggattgtgccccacact

SEQ ID NO: 554050 - DNA, 25 bp, Homo sapien
cttccaggtaaattaggattgtgcc

SEQ ID NO: 554051 - DNA, 25 bp, Homo sapien
cacgtgaaccactgtaagtttttca

SEQ ID NO: 554052 - DNA, 25 bp, Homo sapien
gaagagaagacccactcagcacttg

SEQ ID NO: 554053 - DNA, 25 bp, Homo sapien
acttggctgaacttccacgtgaacc

SEQ ID NO: 554054 - DNA, 25 bp, Homo sapien
ttctaacggcggttcttcatggcta

SEQ ID NO: 554055 - DNA, 25 bp, Homo sapien
tcataggcacgaggcagaacaaatt

SEQ ID NO: 554056 - DNA, 25 bp, Homo sapien
actgcccaaacatgaggataagaat

SEQ ID NO: 554057 - DNA, 25 bp, Homo sapien
ctatcaggggcaagccaatcatagg

SEQ ID NO: 554058 - DNA, 25 bp, Homo sapien
ctgcccaaacatgaggataagaatt

SEQ ID NO: 554059 - DNA, 25 bp, Homo sapien
gcttcctggaccttctgaaaatttc

SEQ ID NO: 554060 - DNA, 25 bp, Homo sapien
tgttcagtgtcattggagaacattc

SEQ ID NO: 554061 - DNA, 25 bp, Homo sapien
tcttaattgggggtcttacatgagt

SEQ ID NO: 554062 - DNA, 25 bp, Homo sapien
tgtcattggagaacattcggaggtt

SEQ ID NO: 554063 - DNA, 25 bp, Homo sapien
tgagagtgagtccatagtttggatc

SEQ ID NO: 554064 - DNA, 25 bp, Homo sapien
ggtttgtgtccccataaatggcaaa

SEQ ID NO: 554065 - DNA, 25 bp, Homo sapien
taaatggcaaagaagcgctcttttg

SEQ ID NO: 554066 - DNA, 25 bp, Homo sapien
caaagaagcgctcttttgcaacaaa

SEQ ID NO: 554067 - DNA, 25 bp, Homo sapien
aagatgccggttgggcacgaatggc

SEQ ID NO: 554068 - DNA, 25 bp, Homo sapien
cagtcaaatatccaccgataattgg

SEQ ID NO: 554069 - DNA, 25 bp, Homo sapien
cgataattggaaagaacttcagcaa

SEQ ID NO: 554070 - DNA, 25 bp, Homo sapien
tcagcaaggagtgaaattaggagat

SEQ ID NO: 554071 - DNA, 25 bp, Homo sapien
tgcttagataaacgtggctgccact

SEQ ID NO: 554072 - DNA, 25 bp, Homo sapien
gccacttgtacccaatggcatccac

SEQ ID NO: 554073 - DNA, 25 bp, Homo sapien
tgtgggtgctggcccgtaacttggg

SEQ ID NO: 554074 - DNA, 25 bp, Homo sapien
tgctggcccgtaacttggggctgta

SEQ ID NO: 554075 - DNA, 25 bp, Homo sapien
tacgagttacagaggtcaaggcaga

SEQ ID NO: 554076 - DNA, 25 bp, Homo sapien
ggcagcttctgggtacgagttacag

SEQ ID NO: 554077 - DNA, 25 bp, Homo sapien
ccccagagtcctgatggttgcaggg

SEQ ID NO: 554078 - DNA, 25 bp, Homo sapien
cccagagtcctgatggttgcaggga

SEQ ID NO: 554079 - DNA, 25 bp, Homo sapien
ttcttgggctggtattgcatgtggt

SEQ ID NO: 554080 - DNA, 25 bp, Homo sapien
tcttgggctggtattgcatgtggtg

SEQ ID NO: 554081 - DNA, 25 bp, Homo sapien
tggtattgcatgtggtgctgaaact

SEQ ID NO: 554082 - DNA, 25 bp, Homo sapien
ggctggtattgcatgtggtgctgaa

SEQ ID NO: 554083 - DNA, 25 bp, Homo sapien
tcttttctgataagaaatttccacc

SEQ ID NO: 554084 - DNA, 25 bp, Homo sapien
tgataagaaatttccacctggttcc

SEQ ID NO: 554085 - DNA, 25 bp, Homo sapien
gcagagaaagtattttgctcttttc

SEQ ID NO: 554086 - DNA, 25 bp, Homo sapien
ttgctcttttctgataagaaatttc

SEQ ID NO: 554087 - DNA, 25 bp, Homo sapien
taatgtgcgtggtagaaagaatccc

SEQ ID NO: 554088 - DNA, 25 bp, Homo sapien
gagctgcgctcggttgcttttacga

SEQ ID NO: 554089 - DNA, 25 bp, Homo sapien
taggccggcactttattatcagaac

SEQ ID NO: 554090 - DNA, 25 bp, Homo sapien
gaaaggagcccatttatcagaccaa

SEQ ID NO: 554091 - DNA, 25 bp, Homo sapien
gaagggtagacaatcaggacaaaat

SEQ ID NO: 554092 - DNA, 25 bp, Homo sapien
gcagtaatatgtttccccttttaca

SEQ ID NO: 554093 - DNA, 25 bp, Homo sapien
gtttctattatgagcatgtcgctcc

SEQ ID NO: 554094 - DNA, 25 bp, Homo sapien
gcacaataatgtctctttgcagtaa

SEQ ID NO: 554095 - DNA, 25 bp, Homo sapien
tggtcagacatagtgacatgatcgg

SEQ ID NO: 554096 - DNA, 25 bp, Homo sapien
catagtgacatgatcggattggagg

SEQ ID NO: 554097 - DNA, 25 bp, Homo sapien
cccagagttattggtcagacatagt

SEQ ID NO: 554098 - DNA, 25 bp, Homo sapien
gagttctgcccagagttattggtca

SEQ ID NO: 554099 - DNA, 25 bp, Homo sapien
ctctcgcgagttagcagaaatattt

SEQ ID NO: 554100 - DNA, 25 bp, Homo sapien
ttggagagaggtgatcctcaaggaa

SEQ ID NO: 554101 - DNA, 25 bp, Homo sapien
tcctcaaggaagtggacttcctgca

SEQ ID NO: 554102 - DNA, 25 bp, Homo sapien
ctcgcgagttagcagaaatatttgg

SEQ ID NO: 554103 - DNA, 25 bp, Homo sapien
atagatgcatatccaacttcaaggc

SEQ ID NO: 554104 - DNA, 25 bp, Homo sapien
tagatgcatatccaacttcaaggct

SEQ ID NO: 554105 - DNA, 25 bp, Homo sapien
aatagatgcatatccaacttcaagg

SEQ ID NO: 554106 - DNA, 25 bp, Homo sapien
aaaatagatgcatatccaacttcaa

SEQ ID NO: 554107 - DNA, 25 bp, Homo sapien
gattcgtgggatatgggctggtgga

SEQ ID NO: 554108 - DNA, 25 bp, Homo sapien
tgcgagcagaggcacgtgtgttctc

SEQ ID NO: 554109 - DNA, 25 bp, Homo sapien
tctgcagcctttggatagattcgtg

SEQ ID NO: 554110 - DNA, 25 bp, Homo sapien
ctggtggatgaaacgctggcctgcg

SEQ ID NO: 554111 - DNA, 25 bp, Homo sapien
tcagccattggagtaagcccagggc

SEQ ID NO: 554112 - DNA, 25 bp, Homo sapien
tctgggaggactggccatagcacct

SEQ ID NO: 554113 - DNA, 25 bp, Homo sapien
tcacggccgttatcacgcaggacaa

SEQ ID NO: 554114 - DNA, 25 bp, Homo sapien
tgggagatgcatttccgcacctgct

SEQ ID NO: 554115 - DNA, 25 bp, Homo sapien
ttatgccgttccagcaggcgtcgaa

SEQ ID NO: 554116 - DNA, 25 bp, Homo sapien
ttagcaatgtagtcattctgggcca

SEQ ID NO: 554117 - DNA, 25 bp, Homo sapien
cattcagacaagagtgcggtttagc

SEQ ID NO: 554118 - DNA, 25 bp, Homo sapien
gccacagagggacaccgaattttca

SEQ ID NO: 554119 - DNA, 25 bp, Homo sapien
atattcaacattcttaaaggaaaga

SEQ ID NO: 554120 - DNA, 25 bp, Homo sapien
acaagccagaagagagtgggggcca

SEQ ID NO: 554121 - DNA, 25 bp, Homo sapien
cagcagatcttttggcagaaaccct

SEQ ID NO: 554122 - DNA, 25 bp, Homo sapien
ggagaggaacaactggtaccagcca

SEQ ID NO: 554123 - DNA, 25 bp, Homo sapien
tattgggtaagcagccaacattgtc

SEQ ID NO: 554124 - DNA, 25 bp, Homo sapien
caaattaacatctaaggcagggtca

SEQ ID NO: 554125 - DNA, 25 bp, Homo sapien
taattgggcaaaactgtgtcacatg

SEQ ID NO: 554126 - DNA, 25 bp, Homo sapien
caccaaggtgtaaccagtcagctgt

SEQ ID NO: 554127 - DNA, 25 bp, Homo sapien
aggtatgcctgggactccagtgctc

SEQ ID NO: 554128 - DNA, 25 bp, Homo sapien
caggtatgcctgggactccagtgct

SEQ ID NO: 554129 - DNA, 25 bp, Homo sapien
ggtatgcctgggactccagtgctct

SEQ ID NO: 554130 - DNA, 25 bp, Homo sapien
tgatttcaaattgctgctccttggg

SEQ ID NO: 554131 - DNA, 25 bp, Homo sapien
gtggaactgtgataggtctcaaaga

SEQ ID NO: 554132 - DNA, 25 bp, Homo sapien
gggactggaatcaccagtggatgat

SEQ ID NO: 554133 - DNA, 25 bp, Homo sapien
ggtctcaaagatcttaggaagtgga

SEQ ID NO: 554134 - DNA, 25 bp, Homo sapien
tgatggtgccgccttcttgtagctg

SEQ ID NO: 554135 - DNA, 25 bp, Homo sapien
tccatccatatgtagagtaagcctt

SEQ ID NO: 554136 - DNA, 25 bp, Homo sapien
gatgtcaagaagcaccacggtgatt

SEQ ID NO: 554137 - DNA, 25 bp, Homo sapien
caattccaacctgtgggccttgggc

SEQ ID NO: 554138 - DNA, 25 bp, Homo sapien
gccctatgtgataatccaattcttc

SEQ ID NO: 554139 - DNA, 25 bp, Homo sapien
catgccctatgtgataatccaattc

SEQ ID NO: 554140 - DNA, 25 bp, Homo sapien
cctatgtgataatccaattcttcca

SEQ ID NO: 554141 - DNA, 25 bp, Homo sapien
tatgtgataatccaattcttccacc

SEQ ID NO: 554142 - DNA, 25 bp, Homo sapien
tgatagtgctcttccttacagctga

SEQ ID NO: 554143 - DNA, 25 bp, Homo sapien
tccttacagctgattacatcagcca

SEQ ID NO: 554144 - DNA, 25 bp, Homo sapien
agactatcactgcatcaaggtaatt

SEQ ID NO: 554145 - DNA, 25 bp, Homo sapien
gtactggaagactatcactgcatca

SEQ ID NO: 554146 - DNA, 25 bp, Homo sapien
gatgctaactgaaaaatcaccgtcc

SEQ ID NO: 554147 - DNA, 25 bp, Homo sapien
caccgtccttaatgaattgtgtaaa

SEQ ID NO: 554148 - DNA, 25 bp, Homo sapien
tcattcagctctaaagcacctttga

SEQ ID NO: 554149 - DNA, 25 bp, Homo sapien
aatataggaaaggatcggcgtgtga

SEQ ID NO: 554150 - DNA, 25 bp, Homo sapien
tactgcagtgcagcgtttatgacac

SEQ ID NO: 554151 - DNA, 25 bp, Homo sapien
cgttacattgaaatcccctgttggg

SEQ ID NO: 554152 - DNA, 25 bp, Homo sapien
cctgcagactgatgacacggcgctt

SEQ ID NO: 554153 - DNA, 25 bp, Homo sapien
tggtcgagccccacaaagtgtaggg

SEQ ID NO: 554154 - DNA, 25 bp, Homo sapien
tggagacttgggttatttgcttcgc

SEQ ID NO: 554155 - DNA, 25 bp, Homo sapien
tctgtaacccggctccaggcatttc

SEQ ID NO: 554156 - DNA, 25 bp, Homo sapien
tatttgcttcgcgtatcctcccctg

SEQ ID NO: 554157 - DNA, 25 bp, Homo sapien
gacaggcgtcgttcaaacctcagct

SEQ ID NO: 554158 - DNA, 25 bp, Homo sapien
caaactggcatcctagcagcagtga

SEQ ID NO: 554159 - DNA, 25 bp, Homo sapien
aagtggccgtagaagaacaggtctc

SEQ ID NO: 554160 - DNA, 25 bp, Homo sapien
gaacaggtctctcaaactggcatcc

SEQ ID NO: 554161 - DNA, 25 bp, Homo sapien
aatgaagtggccgtagaagaacagg

SEQ ID NO: 554162 - DNA, 25 bp, Homo sapien
actagatgggaaccaactgccaatc

SEQ ID NO: 554163 - DNA, 25 bp, Homo sapien
ccacagttctttgcggcttttgtcc

SEQ ID NO: 554164 - DNA, 25 bp, Homo sapien
tgcctggtgagcatatttatcgagg

SEQ ID NO: 554165 - DNA, 25 bp, Homo sapien
gggatgcttccgtctccacagttct

SEQ ID NO: 554166 - DNA, 25 bp, Homo sapien
ccactcgcttcccacggaaccaggg

SEQ ID NO: 554167 - DNA, 25 bp, Homo sapien
cggggagcttcaatgaccactcgct

SEQ ID NO: 554168 - DNA, 25 bp, Homo sapien
ggagcttcaatgaccactcgcttcc

SEQ ID NO: 554169 - DNA, 25 bp, Homo sapien
cagcggggagcttcaatgaccactc

SEQ ID NO: 554170 - DNA, 25 bp, Homo sapien
gaagacacaaggcatctactcctaa

SEQ ID NO: 554171 - DNA, 25 bp, Homo sapien
tactcctaactgctctattatcgct

SEQ ID NO: 554172 - DNA, 25 bp, Homo sapien
cgctttgcgcttcaactgttggtga

SEQ ID NO: 554173 - DNA, 25 bp, Homo sapien
tattatcgctagaacagcatcatcc

SEQ ID NO: 554174 - DNA, 25 bp, Homo sapien
taaagctagattcgagcccttcagc

SEQ ID NO: 554175 - DNA, 25 bp, Homo sapien
ggtccaggttctgcgcagcgcttga

SEQ ID NO: 554176 - DNA, 25 bp, Homo sapien
tgcattctccacagaagtatgcata

SEQ ID NO: 554177 - DNA, 25 bp, Homo sapien
gcttggagggagctgtgcaaaccat

SEQ ID NO: 554178 - DNA, 25 bp, Homo sapien
aagttgggttgagcatagacatggc

SEQ ID NO: 554179 - DNA, 25 bp, Homo sapien
tcatacagtcttctaggtaaaggca

SEQ ID NO: 554180 - DNA, 25 bp, Homo sapien
gaagacaggcttctaaaatctccac

SEQ ID NO: 554181 - DNA, 25 bp, Homo sapien
aataccgagatttgagaagacaggc

SEQ ID NO: 554182 - DNA, 25 bp, Homo sapien
cctggatgcatcctgagaacgtact

SEQ ID NO: 554183 - DNA, 25 bp, Homo sapien
caactctaaaggaggatggacggtc

SEQ ID NO: 554184 - DNA, 25 bp, Homo sapien
cagttaccgtgtccaagtcatgcaa

SEQ ID NO: 554185 - DNA, 25 bp, Homo sapien
cttacagtcaacagagggttagcct

SEQ ID NO: 554186 - DNA, 25 bp, Homo sapien
tcacagtgctgtctcgaaaatagtt

SEQ ID NO: 554187 - DNA, 25 bp, Homo sapien
gaagtgtttgtaaccatgtggtcag

SEQ ID NO: 554188 - DNA, 25 bp, Homo sapien
ggtcagtgtgaccaatatgtggata

SEQ ID NO: 554189 - DNA, 25 bp, Homo sapien
tagttaaggtcgagggctgtccatt

SEQ ID NO: 554190 - DNA, 25 bp, Homo sapien
gtaagatgataccaaataataggac

SEQ ID NO: 554191 - DNA, 25 bp, Homo sapien
gtttctctgttccacaatcatcagt

SEQ ID NO: 554192 - DNA, 25 bp, Homo sapien
ccaatttctagctgaactagaagag

SEQ ID NO: 554193 - DNA, 25 bp, Homo sapien
taaacgtataatcagaacataaagg

SEQ ID NO: 554194 - DNA, 25 bp, Homo sapien
tgagttttccttccaacaaatgaat

SEQ ID NO: 554195 - DNA, 25 bp, Homo sapien
agatgttgagttttccttccaacaa

SEQ ID NO: 554196 - DNA, 25 bp, Homo sapien
tttccttccaacaaatgaattctaa

SEQ ID NO: 554197 - DNA, 25 bp, Homo sapien
cttttcccagatgttgagttttcct

SEQ ID NO: 554198 - DNA, 25 bp, Homo sapien
gagggagccgctgagacaaacttta

SEQ ID NO: 554199 - DNA, 25 bp, Homo sapien
caggcttataattgaaaagggtaca

SEQ ID NO: 554200 - DNA, 25 bp, Homo sapien
acacagtgcttgttaccatacccat

SEQ ID NO: 554201 - DNA, 25 bp, Homo sapien
catggtgccaaattgtgcggaggga

SEQ ID NO: 554202 - DNA, 25 bp, Homo sapien
ccagttgttgcaccatcttgtaaaa

SEQ ID NO: 554203 - DNA, 25 bp, Homo sapien
agcggcttctgccttgcccagttgt

SEQ ID NO: 554204 - DNA, 25 bp, Homo sapien
tgccttgcccagttgttgcaccatc

SEQ ID NO: 554205 - DNA, 25 bp, Homo sapien
ggcttctgccttgcccagttgttgc

SEQ ID NO: 554206 - DNA, 25 bp, Homo sapien
aaaacatacggctcatcatattctt

SEQ ID NO: 554207 - DNA, 25 bp, Homo sapien
aaacatacggctcatcatattcttt

SEQ ID NO: 554208 - DNA, 25 bp, Homo sapien
actgtaaactaagccatgcattgat

SEQ ID NO: 554209 - DNA, 25 bp, Homo sapien
aatgcaaacctcaaatcacttgctg

SEQ ID NO: 554210 - DNA, 25 bp, Homo sapien
attgatgttggtcccgtggccccag

SEQ ID NO: 554211 - DNA, 25 bp, Homo sapien
aactgtaaactaagccatgcattga

SEQ ID NO: 554212 - DNA, 25 bp, Homo sapien
catatgaattactgctgggaagaga

SEQ ID NO: 554213 - DNA, 25 bp, Homo sapien
caggaattccgcaggtgaaggactc

SEQ ID NO: 554214 - DNA, 25 bp, Homo sapien
tccgtagtatgacagttagcatcac

SEQ ID NO: 554215 - DNA, 25 bp, Homo sapien
aagcatgctgaaacaactgtgacag

SEQ ID NO: 554216 - DNA, 25 bp, Homo sapien
ctgtgtgcaatggttagcacggtgc

SEQ ID NO: 554217 - DNA, 25 bp, Homo sapien
attatcttgtcgctgtcaataatgg

SEQ ID NO: 554218 - DNA, 25 bp, Homo sapien
tatcttgtcgctgtcaataatggtg

SEQ ID NO: 554219 - DNA, 25 bp, Homo sapien
ggttagcacggtgcagtgggcaaat

SEQ ID NO: 554220 - DNA, 25 bp, Homo sapien
taaaatgtggactcaaggttacatg

SEQ ID NO: 554221 - DNA, 25 bp, Homo sapien
ttaaaatgtggactcaaggttacat

SEQ ID NO: 554222 - DNA, 25 bp, Homo sapien
ggttacatggacctcagctttatac

SEQ ID NO: 554223 - DNA, 25 bp, Homo sapien
tcaaggttacatggacctcagcttt

SEQ ID NO: 554224 - DNA, 25 bp, Homo sapien
ggatccacatttgccgtcgcttcat

SEQ ID NO: 554225 - DNA, 25 bp, Homo sapien
tttcctgagaattgccctggcaagg

SEQ ID NO: 554226 - DNA, 25 bp, Homo sapien
tgtccaacactaaaattggatcctg

SEQ ID NO: 554227 - DNA, 25 bp, Homo sapien
aaggcacaccagttgtctttgtcca

SEQ ID NO: 554228 - DNA, 25 bp, Homo sapien
tgaactcccttaccaataaccaaca

SEQ ID NO: 554229 - DNA, 25 bp, Homo sapien
tttctggttgagtcaagtttcccaa

SEQ ID NO: 554230 - DNA, 25 bp, Homo sapien
catgctcccaatatagagtctgaag

SEQ ID NO: 554231 - DNA, 25 bp, Homo sapien
ggttgagtcaagtttcccaaagcac

SEQ ID NO: 554232 - DNA, 25 bp, Homo sapien
tccaggtagggaaggaagtttctca

SEQ ID NO: 554233 - DNA, 25 bp, Homo sapien
taaaaacagctggaatcacactgga

SEQ ID NO: 554234 - DNA, 25 bp, Homo sapien
tgtgacaaggaatctcaagctctga

SEQ ID NO: 554235 - DNA, 25 bp, Homo sapien
aaagaatacaagcacccagaaggaa

SEQ ID NO: 554236 - DNA, 25 bp, Homo sapien
gaattctctacgagaagaccctcag

SEQ ID NO: 554237 - DNA, 25 bp, Homo sapien
ttcctcatccgtgtgctcattaaag

SEQ ID NO: 554238 - DNA, 25 bp, Homo sapien
tccacagttcctcatccgtgtgctc

SEQ ID NO: 554239 - DNA, 25 bp, Homo sapien
acagttcctcatccgtgtgctcatt

SEQ ID NO: 554240 - DNA, 25 bp, Homo sapien
agttcctcatccgtgtgctcattaa

SEQ ID NO: 554241 - DNA, 25 bp, Homo sapien
tcatctgtgcatcaaggttacctgg

SEQ ID NO: 554242 - DNA, 25 bp, Homo sapien
ggttacctgggtcacagaacctcat

SEQ ID NO: 554243 - DNA, 25 bp, Homo sapien
cagaggcacctctacttatgaaagg

SEQ ID NO: 554244 - DNA, 25 bp, Homo sapien
tctgcttcaggaggatcccacaatt

SEQ ID NO: 554245 - DNA, 25 bp, Homo sapien
ttaaacatgtgaccaggctgggtgt

SEQ ID NO: 554246 - DNA, 25 bp, Homo sapien
aagctgatattaaacatgtgaccag

SEQ ID NO: 554247 - DNA, 25 bp, Homo sapien
gatattaaacatgtgaccaggctgg

SEQ ID NO: 554248 - DNA, 25 bp, Homo sapien
gctgatattaaacatgtgaccaggc

SEQ ID NO: 554249 - DNA, 25 bp, Homo sapien
cagggagcagttccatggccttaat

SEQ ID NO: 554250 - DNA, 25 bp, Homo sapien
gagttacaaaccagcaggacaaagc

SEQ ID NO: 554251 - DNA, 25 bp, Homo sapien
tcagacacttaaaacgacctgggac

SEQ ID NO: 554252 - DNA, 25 bp, Homo sapien
aaggactgactgcattaggccagaa

SEQ ID NO: 554253 - DNA, 25 bp, Homo sapien
cagagggaatctaacgtgctaaaca

SEQ ID NO: 554254 - DNA, 25 bp, Homo sapien
gctaagtaaacctcatttggcccat

SEQ ID NO: 554255 - DNA, 25 bp, Homo sapien
tgcagggcacgttcctagaaccttt

SEQ ID NO: 554256 - DNA, 25 bp, Homo sapien
caacatttcagtggtcttaaggaca

SEQ ID NO: 554257 - DNA, 25 bp, Homo sapien
tgcagaccccatgccggtggggaca

SEQ ID NO: 554258 - DNA, 25 bp, Homo sapien
gaactgtgaggtccgatggaagcca

SEQ ID NO: 554259 - DNA, 25 bp, Homo sapien
ggtctatgttgctcatgactataca

SEQ ID NO: 554260 - DNA, 25 bp, Homo sapien
ccgatggaagccatgaggccccaca

SEQ ID NO: 554261 - DNA, 25 bp, Homo sapien
gagatgagggaactttttccagctc

SEQ ID NO: 554262 - DNA, 25 bp, Homo sapien
ttctgacaatctaaaaagggctgag

SEQ ID NO: 554263 - DNA, 25 bp, Homo sapien
tccttaaatcgtgaagtccaatttc

SEQ ID NO: 554264 - DNA, 25 bp, Homo sapien
gttgtcaagatcttatcaatccaaa

SEQ ID NO: 554265 - DNA, 25 bp, Homo sapien
gcctgcagagtggtctccaccttct

SEQ ID NO: 554266 - DNA, 25 bp, Homo sapien
gctgcctgcagagtggtctccacct

SEQ ID NO: 554267 - DNA, 25 bp, Homo sapien
cttgctttcagcaagagctacagct

SEQ ID NO: 554268 - DNA, 25 bp, Homo sapien
agcaagagctacagctgatgctgcc

SEQ ID NO: 554269 - DNA, 25 bp, Homo sapien
gtctctggtgcctttactgcctcca

SEQ ID NO: 554270 - DNA, 25 bp, Homo sapien
tttcactgactttgagtgagtctct

SEQ ID NO: 554271 - DNA, 25 bp, Homo sapien
cttgggggtctgatttctgagcact

SEQ ID NO: 554272 - DNA, 25 bp, Homo sapien
tgagtgagtctctggtgcctttact

SEQ ID NO: 554273 - DNA, 25 bp, Homo sapien
aatcttctgaaattgagaagaggca

SEQ ID NO: 554274 - DNA, 25 bp, Homo sapien
aaatcttctgaaattgagaagaggc

SEQ ID NO: 554275 - DNA, 25 bp, Homo sapien
aagaggcaagatgctttaaacaaac

SEQ ID NO: 554276 - DNA, 25 bp, Homo sapien
tgagaagaggcaagatgctttaaac

SEQ ID NO: 554277 - DNA, 25 bp, Homo sapien
cttttcttgtgatttaatgagtgct

SEQ ID NO: 554278 - DNA, 25 bp, Homo sapien
tgatttaatgagtgctgtcagatgc

SEQ ID NO: 554279 - DNA, 25 bp, Homo sapien
cttgtgatttaatgagtgctgtcag

SEQ ID NO: 554280 - DNA, 25 bp, Homo sapien
ttaatgagtgctgtcagatgcttca

SEQ ID NO: 554281 - DNA, 25 bp, Homo sapien
tcaaagattatcactccttcatggg

SEQ ID NO: 554282 - DNA, 25 bp, Homo sapien
tcaaggtctgtgtattcaatgaccc

SEQ ID NO: 554283 - DNA, 25 bp, Homo sapien
ctggtggtgggcgtttctgatattc

SEQ ID NO: 554284 - DNA, 25 bp, Homo sapien
tgggcgtttctgatattcccaaggt

SEQ ID NO: 554285 - DNA, 25 bp, Homo sapien
tgtcgaacacaccactgaaacatcc

SEQ ID NO: 554286 - DNA, 25 bp, Homo sapien
taggacagtgccaaaccaacctgcc

SEQ ID NO: 554287 - DNA, 25 bp, Homo sapien
aacttcagcactttgtcgaacacac

SEQ ID NO: 554288 - DNA, 25 bp, Homo sapien
tgagcgtgagggcataggacagtgc

SEQ ID NO: 554289 - DNA, 25 bp, Homo sapien
tgaattccaacaggatcgacataga

SEQ ID NO: 554290 - DNA, 25 bp, Homo sapien
aagaagggaataaagtcagtctcac

SEQ ID NO: 554291 - DNA, 25 bp, Homo sapien
ccactttctacgtgcaatgcaacca

SEQ ID NO: 554292 - DNA, 25 bp, Homo sapien
gaggaacccttcataatgttgaaac

SEQ ID NO: 554293 - DNA, 25 bp, Homo sapien
agatggcatccagacggacggcaaa

SEQ ID NO: 554294 - DNA, 25 bp, Homo sapien
tgacaaacatggcacagatggcatc

SEQ ID NO: 554295 - DNA, 25 bp, Homo sapien
gggacccaaaggcaacgatgatgac

SEQ ID NO: 554296 - DNA, 25 bp, Homo sapien
gcaaaccagcgggacgttgtcaaaa

SEQ ID NO: 554297 - DNA, 25 bp, Homo sapien
gaacggtaataagcatgatgaataa

SEQ ID NO: 554298 - DNA, 25 bp, Homo sapien
ctgaatttgagaacggtaataagca

SEQ ID NO: 554299 - DNA, 25 bp, Homo sapien
agatgaatgtgcgagtgtgttttgc

SEQ ID NO: 554300 - DNA, 25 bp, Homo sapien
gaataagtagatgaatgtgcgagtg

SEQ ID NO: 554301 - DNA, 25 bp, Homo sapien
ggcaccaaagttgcacacccaagga

SEQ ID NO: 554302 - DNA, 25 bp, Homo sapien
ctacagaagatttttacgtggagta

SEQ ID NO: 554303 - DNA, 25 bp, Homo sapien
cgtggagtagggcaccaaagttgca

SEQ ID NO: 554304 - DNA, 25 bp, Homo sapien
cacccaaggaacctttagattccag

SEQ ID NO: 554305 - DNA, 25 bp, Homo sapien
ctaagtgatacaggcaatatacgat

SEQ ID NO: 554306 - DNA, 25 bp, Homo sapien
tgatacaggcaatatacgatacaca

SEQ ID NO: 554307 - DNA, 25 bp, Homo sapien
aagtgatacaggcaatatacgatac

SEQ ID NO: 554308 - DNA, 25 bp, Homo sapien
gatacaggcaatatacgatacacat

SEQ ID NO: 554309 - DNA, 25 bp, Homo sapien
tgcagcagcgattccgagaggagtc

SEQ ID NO: 554310 - DNA, 25 bp, Homo sapien
gtttgctgacagagccacaggccat

SEQ ID NO: 554311 - DNA, 25 bp, Homo sapien
caacaagctcatctgaccagggagg

SEQ ID NO: 554312 - DNA, 25 bp, Homo sapien
catgcatggtgagagaaagacccca

SEQ ID NO: 554313 - DNA, 25 bp, Homo sapien
ctgaatgtaaatcctggtgtgcatc

SEQ ID NO: 554314 - DNA, 25 bp, Homo sapien
tcctggtgtgcatcaaacagttcct

SEQ ID NO: 554315 - DNA, 25 bp, Homo sapien
ctgctttgtatgcccggatggtcca

SEQ ID NO: 554316 - DNA, 25 bp, Homo sapien
atcaaacagttcctgacacctctct

SEQ ID NO: 554317 - DNA, 25 bp, Homo sapien
gataagtgggaaaacactggactcc

SEQ ID NO: 554318 - DNA, 25 bp, Homo sapien
gagaagatgataagtgggaaaacac

SEQ ID NO: 554319 - DNA, 25 bp, Homo sapien
aagtgggaaaacactggactccgag

SEQ ID NO: 554320 - DNA, 25 bp, Homo sapien
gatgataagtgggaaaacactggac

SEQ ID NO: 554321 - DNA, 25 bp, Homo sapien
gtgcagaaaaacctgcggcctccca

SEQ ID NO: 554322 - DNA, 25 bp, Homo sapien
catggtcacgtatccaccaaacagc

SEQ ID NO: 554323 - DNA, 25 bp, Homo sapien
gggaccctgccactggaatctcaag

SEQ ID NO: 554324 - DNA, 25 bp, Homo sapien
cctcctaggaggcttcatgtttcaa

SEQ ID NO: 554325 - DNA, 25 bp, Homo sapien
tttaagagggagttgccgccctgcc

SEQ ID NO: 554326 - DNA, 25 bp, Homo sapien
ggagctgtatatcccatgaggttcc

SEQ ID NO: 554327 - DNA, 25 bp, Homo sapien
ttaagagggagttgccgccctgccc

SEQ ID NO: 554328 - DNA, 25 bp, Homo sapien
ctgtatatcccatgaggttccctga

SEQ ID NO: 554329 - DNA, 25 bp, Homo sapien
ctccctcctgcatagcagcggacat

SEQ ID NO: 554330 - DNA, 25 bp, Homo sapien
tgttgtgactgaacgcgtccatcat

SEQ ID NO: 554331 - DNA, 25 bp, Homo sapien
gcaagggagtgttgtgactgaacgc

SEQ ID NO: 554332 - DNA, 25 bp, Homo sapien
cgcgtccatcatatagagaatgcca

SEQ ID NO: 554333 - DNA, 25 bp, Homo sapien
gactgaacgcgtccatcatatagag

SEQ ID NO: 554334 - DNA, 25 bp, Homo sapien
gctatcaattccacatgctctaagg

SEQ ID NO: 554335 - DNA, 25 bp, Homo sapien
caaagttgcacgttgcaggctatca

SEQ ID NO: 554336 - DNA, 25 bp, Homo sapien
tgtagaatattactccccatatggc

SEQ ID NO: 554337 - DNA, 25 bp, Homo sapien
tgctctaagggacacaatgattcat

SEQ ID NO: 554338 - DNA, 25 bp, Homo sapien
tgacgtttccaaaaaatatcgccga

SEQ ID NO: 554339 - DNA, 25 bp, Homo sapien
gattccaggcgcttcacatctcttg

SEQ ID NO: 554340 - DNA, 25 bp, Homo sapien
cagagaccacaccaaccacttgtag

SEQ ID NO: 554341 - DNA, 25 bp, Homo sapien
tattgcgatccaaggaatcacggcc

SEQ ID NO: 554342 - DNA, 25 bp, Homo sapien
gaaatagcagaagtagatgcaggtt

SEQ ID NO: 554343 - DNA, 25 bp, Homo sapien
ctgaaatagcagaagtagatgcagg

SEQ ID NO: 554344 - DNA, 25 bp, Homo sapien
aatagcagaagtagatgcaggtttt

SEQ ID NO: 554345 - DNA, 25 bp, Homo sapien
tgaaatagcagaagtagatgcaggt

SEQ ID NO: 554346 - DNA, 25 bp, Homo sapien
gagtgaagtggtgccatctcctctc

SEQ ID NO: 554347 - DNA, 25 bp, Homo sapien
tgaagtggtgccatctcctctcact

SEQ ID NO: 554348 - DNA, 25 bp, Homo sapien
cagcctcccactcccgtgttcaagt

SEQ ID NO: 554349 - DNA, 25 bp, Homo sapien
tgcagcctcccactcccgtgttcaa

SEQ ID NO: 554350 - DNA, 25 bp, Homo sapien
aaatacacatcttagaaaaggcata

SEQ ID NO: 554351 - DNA, 25 bp, Homo sapien
cataaaaatcgacagagaaaatttg

SEQ ID NO: 554352 - DNA, 25 bp, Homo sapien
tgaaattcaaggctgaagtccgtct

SEQ ID NO: 554353 - DNA, 25 bp, Homo sapien
gacttaatgatgacctaaaggctac

SEQ ID NO: 554354 - DNA, 25 bp, Homo sapien
gatgggtcacaagatgattttgcag

SEQ ID NO: 554355 - DNA, 25 bp, Homo sapien
gaattggaatccagcattatcctga

SEQ ID NO: 554356 - DNA, 25 bp, Homo sapien
atttcaggactgcaactaatgctgt

SEQ ID NO: 554357 - DNA, 25 bp, Homo sapien
aaaatgatgggcaaagactgacata

SEQ ID NO: 554358 - DNA, 25 bp, Homo sapien
caaaaacccagagtactcaatagaa

SEQ ID NO: 554359 - DNA, 25 bp, Homo sapien
cacaatattacagggctaaaaagat

SEQ ID NO: 554360 - DNA, 25 bp, Homo sapien
gataagcattagtacagaaggaagg

SEQ ID NO: 554361 - DNA, 25 bp, Homo sapien
gaaggtatctgcaattcagaataca

SEQ ID NO: 554362 - DNA, 25 bp, Homo sapien
caggacaacacagcgagatcccatc

SEQ ID NO: 554363 - DNA, 25 bp, Homo sapien
accagccaggacaacacagcgagat

SEQ ID NO: 554364 - DNA, 25 bp, Homo sapien
agccaggacaacacagcgagatccc

SEQ ID NO: 554365 - DNA, 25 bp, Homo sapien
ccaggacaacacagcgagatcccat

SEQ ID NO: 554366 - DNA, 25 bp, Homo sapien
gactggcacattcagtggtggtctc

SEQ ID NO: 554367 - DNA, 25 bp, Homo sapien
tgcctgcattggtggctcaagtagc

SEQ ID NO: 554368 - DNA, 25 bp, Homo sapien
cattcagtggtggtctccactgctg

SEQ ID NO: 554369 - DNA, 25 bp, Homo sapien
ggactagtcctttgtgttccatgaa

SEQ ID NO: 554370 - DNA, 25 bp, Homo sapien
catttcacaatgttcacagggttcg

SEQ ID NO: 554371 - DNA, 25 bp, Homo sapien
gggaccactggattagtcaacaaga

SEQ ID NO: 554372 - DNA, 25 bp, Homo sapien
cataaggtagatgcaagctagatcc

SEQ ID NO: 554373 - DNA, 25 bp, Homo sapien
gaatcacaactgactctgaggaagc

SEQ ID NO: 554374 - DNA, 25 bp, Homo sapien
catcactaatgcgaaagagagactt

SEQ ID NO: 554375 - DNA, 25 bp, Homo sapien
ccagcattaggtgttgcatggccag

SEQ ID NO: 554376 - DNA, 25 bp, Homo sapien
tacaggtaccctgctcatgcttggc

SEQ ID NO: 554377 - DNA, 25 bp, Homo sapien
caattcctagaagctgatacccagt

SEQ ID NO: 554378 - DNA, 25 bp, Homo sapien
gctcaagaataccatccgtagttgg

SEQ ID NO: 554379 - DNA, 25 bp, Homo sapien
tggtaagtgtagaatttcaactccc

SEQ ID NO: 554380 - DNA, 25 bp, Homo sapien
tggttctgatgatacgtagttcccc

SEQ ID NO: 554381 - DNA, 25 bp, Homo sapien
tgttactatacatcctgccaaagtt

SEQ ID NO: 554382 - DNA, 25 bp, Homo sapien
aacccagggcccgtgatgtcagcag

SEQ ID NO: 554383 - DNA, 25 bp, Homo sapien
cccagggcccgtgatgtcagcagca

SEQ ID NO: 554384 - DNA, 25 bp, Homo sapien
acccagggcccgtgatgtcagcagc

SEQ ID NO: 554385 - DNA, 25 bp, Homo sapien
ccagggccccagtgtccgaagcatg

SEQ ID NO: 554386 - DNA, 25 bp, Homo sapien
gccccagtgtccgaagcatgttttg

SEQ ID NO: 554387 - DNA, 25 bp, Homo sapien
gatgacagccacaaaacccagggcc

SEQ ID NO: 554388 - DNA, 25 bp, Homo sapien
gggccccagtgtccgaagcatgttt

SEQ ID NO: 554389 - DNA, 25 bp, Homo sapien
ggatgttaaacacaaagtcatccag

SEQ ID NO: 554390 - DNA, 25 bp, Homo sapien
gatgttaaacacaaagtcatccagg

SEQ ID NO: 554391 - DNA, 25 bp, Homo sapien
atcatccaagtgtccaatgtctttg

SEQ ID NO: 554392 - DNA, 25 bp, Homo sapien
aacgtcagcggcagcaaatcatcca

SEQ ID NO: 554393 - DNA, 25 bp, Homo sapien
tctaaaaacgtcagcggcagcaaat

SEQ ID NO: 554394 - DNA, 25 bp, Homo sapien
caaatcatccaagtgtccaatgtct

SEQ ID NO: 554395 - DNA, 25 bp, Homo sapien
gcaagaacaggatatgaaaaattac

SEQ ID NO: 554396 - DNA, 25 bp, Homo sapien
aagaacaggatatgaaaaattactc

SEQ ID NO: 554397 - DNA, 25 bp, Homo sapien
caagaacaggatatgaaaaattact

SEQ ID NO: 554398 - DNA, 25 bp, Homo sapien
agaacaggatatgaaaaattactca

SEQ ID NO: 554399 - DNA, 25 bp, Homo sapien
ggcccttctgctgtttgccagacca

SEQ ID NO: 554400 - DNA, 25 bp, Homo sapien
gatgatgactatgacccacaggttc

SEQ ID NO: 554401 - DNA, 25 bp, Homo sapien
tctgcagcatgccaccggggaggaa

SEQ ID NO: 554402 - DNA, 25 bp, Homo sapien
gggggcccttctgctgtttgccaga

SEQ ID NO: 554403 - DNA, 25 bp, Homo sapien
gtgctgacaggaacgaaacatttct

SEQ ID NO: 554404 - DNA, 25 bp, Homo sapien
gatttattcgcattaagtgctgaca

SEQ ID NO: 554405 - DNA, 25 bp, Homo sapien
taaagtacattgtaacccaatcgtc

SEQ ID NO: 554406 - DNA, 25 bp, Homo sapien
tacagtctatcaaagtggtgccaaa

SEQ ID NO: 554407 - DNA, 25 bp, Homo sapien
cagagcattcagctcgacgtggaca

SEQ ID NO: 554408 - DNA, 25 bp, Homo sapien
gagcattcagctcgacgtggacact

SEQ ID NO: 554409 - DNA, 25 bp, Homo sapien
attcagctcgacgtggacactcagc

SEQ ID NO: 554410 - DNA, 25 bp, Homo sapien
gcattcagctcgacgtggacactca

SEQ ID NO: 554411 - DNA, 25 bp, Homo sapien
tgctgtggtagcccctctgtcacca

SEQ ID NO: 554412 - DNA, 25 bp, Homo sapien
ggtcacagaggaggtacctgctgtg

SEQ ID NO: 554413 - DNA, 25 bp, Homo sapien
ctgggtcacagaggaggtacctgct

SEQ ID NO: 554414 - DNA, 25 bp, Homo sapien
gctgtggtagcccctctgtcaccaa

SEQ ID NO: 554415 - DNA, 25 bp, Homo sapien
ctccaacaaaggagaactctccttg

SEQ ID NO: 554416 - DNA, 25 bp, Homo sapien
agaactctccttgtaggataaggag

SEQ ID NO: 554417 - DNA, 25 bp, Homo sapien
ccttgtaggataaggagagcaaagc

SEQ ID NO: 554418 - DNA, 25 bp, Homo sapien
gagcaaagcgaagaacaacaacagc

SEQ ID NO: 554419 - DNA, 25 bp, Homo sapien
ctgaggggaggaatggcaaaggaag

SEQ ID NO: 554420 - DNA, 25 bp, Homo sapien
gaggaatggcaaaggaagagcctgc

SEQ ID NO: 554421 - DNA, 25 bp, Homo sapien
ggggaggaatggcaaaggaagagcc

SEQ ID NO: 554422 - DNA, 25 bp, Homo sapien
tgaggggaggaatggcaaaggaaga

SEQ ID NO: 554423 - DNA, 25 bp, Homo sapien
tagtgtagagtctcctgtccacaga

SEQ ID NO: 554424 - DNA, 25 bp, Homo sapien
gagacaccagcacgagcttgagaat

SEQ ID NO: 554425 - DNA, 25 bp, Homo sapien
tttagctatctgcaagagacaccag

SEQ ID NO: 554426 - DNA, 25 bp, Homo sapien
gtctcccttacgcaaaagctatttg

SEQ ID NO: 554427 - DNA, 25 bp, Homo sapien
aaagatgttgctcacattctaaaca

SEQ ID NO: 554428 - DNA, 25 bp, Homo sapien
gatgttgctcacattctaaacaccc

SEQ ID NO: 554429 - DNA, 25 bp, Homo sapien
ttctaaacacccatattaataagag

SEQ ID NO: 554430 - DNA, 25 bp, Homo sapien
tcctatattaaagatgttgctcaca

SEQ ID NO: 554431 - DNA, 25 bp, Homo sapien
gccagggatagagtagcaggtttat

SEQ ID NO: 554432 - DNA, 25 bp, Homo sapien
gcacagcatacttcttgacacccag

SEQ ID NO: 554433 - DNA, 25 bp, Homo sapien
gcatgtgctgctatctcaaaaaggt

SEQ ID NO: 554434 - DNA, 25 bp, Homo sapien
gctatctcaaaaaggttcccacatt

SEQ ID NO: 554435 - DNA, 25 bp, Homo sapien
aaagcaatataggcaagattgagta

SEQ ID NO: 554436 - DNA, 25 bp, Homo sapien
gagtacatgaaagctgtcaggacgg

SEQ ID NO: 554437 - DNA, 25 bp, Homo sapien
ctttacaatacgcatcaggcaaggg

SEQ ID NO: 554438 - DNA, 25 bp, Homo sapien
caggacggttgttattctcaatttc

SEQ ID NO: 554439 - DNA, 25 bp, Homo sapien
ttaaccatatccacaacagatctca

SEQ ID NO: 554440 - DNA, 25 bp, Homo sapien
acatagcgagtgatttggcatcaat

SEQ ID NO: 554441 - DNA, 25 bp, Homo sapien
aacatagcgagtgatttggcatcaa

SEQ ID NO: 554442 - DNA, 25 bp, Homo sapien
tggcatcaatgggcatattaccaat

SEQ ID NO: 554443 - DNA, 25 bp, Homo sapien
gggcatattaccaattttccagcat

SEQ ID NO: 554444 - DNA, 25 bp, Homo sapien
tccaaataagtgaacttgggaccac

SEQ ID NO: 554445 - DNA, 25 bp, Homo sapien
gggtcgcccattcattaaccacaca

SEQ ID NO: 554446 - DNA, 25 bp, Homo sapien
gcagtcagggggacccttccagaag

SEQ ID NO: 554447 - DNA, 25 bp, Homo sapien
ctctgagtcaccagcaagggtcgcc

SEQ ID NO: 554448 - DNA, 25 bp, Homo sapien
ccggagctttcagaattgactcaaa

SEQ ID NO: 554449 - DNA, 25 bp, Homo sapien
tgtgaagagttaacaaggacgtaga

SEQ ID NO: 554450 - DNA, 25 bp, Homo sapien
tatcaaagaataataccggagcttt

SEQ ID NO: 554451 - DNA, 25 bp, Homo sapien
cgtagaataccaatagagatcttgc

SEQ ID NO: 554452 - DNA, 25 bp, Homo sapien
tgaataaattcctaagtaccagtta

SEQ ID NO: 554453 - DNA, 25 bp, Homo sapien
tagcttctcggttacatttcctcct

SEQ ID NO: 554454 - DNA, 25 bp, Homo sapien
ccatttacagtgacatttagcatac

SEQ ID NO: 554455 - DNA, 25 bp, Homo sapien
gttaagatctagcttctcggttaca

SEQ ID NO: 554456 - DNA, 25 bp, Homo sapien
gtatgaaagccaccaatcttgaagc

SEQ ID NO: 554457 - DNA, 25 bp, Homo sapien
gaaagccaccaatcttgaagcacat

SEQ ID NO: 554458 - DNA, 25 bp, Homo sapien
accaatcttgaagcacataggcaac

SEQ ID NO: 554459 - DNA, 25 bp, Homo sapien
agccaccaatcttgaagcacatagg

SEQ ID NO: 554460 - DNA, 25 bp, Homo sapien
gaacggttctcctctgatagtgtaa

SEQ ID NO: 554461 - DNA, 25 bp, Homo sapien
tttccttcagaacggttctcctctg

SEQ ID NO: 554462 - DNA, 25 bp, Homo sapien
gatagtgtaactgggacattctctg

SEQ ID NO: 554463 - DNA, 25 bp, Homo sapien
aaatgaagacaatccagtgagcacc

SEQ ID NO: 554464 - DNA, 25 bp, Homo sapien
gactctgagaaggtacgattcctta

SEQ ID NO: 554465 - DNA, 25 bp, Homo sapien
tgttgagaccaaaccgaagactctg

SEQ ID NO: 554466 - DNA, 25 bp, Homo sapien
aaaagggagccaaaatctataccag

SEQ ID NO: 554467 - DNA, 25 bp, Homo sapien
ggaactcagtgtaagtccccttctg

SEQ ID NO: 554468 - DNA, 25 bp, Homo sapien
cagctttgaggtactgcaactgatg

SEQ ID NO: 554469 - DNA, 25 bp, Homo sapien
ttcaatatcagaatctgacttgcag

SEQ ID NO: 554470 - DNA, 25 bp, Homo sapien
caactgatgagtcactaaaattgtg

SEQ ID NO: 554471 - DNA, 25 bp, Homo sapien
aatctgacttgcagctttgaggtac

SEQ ID NO: 554472 - DNA, 25 bp, Homo sapien
gatgagctgaaagccataaaggctt

SEQ ID NO: 554473 - DNA, 25 bp, Homo sapien
tttcctgagccaactcgaaatggct

SEQ ID NO: 554474 - DNA, 25 bp, Homo sapien
gctttcctgagccaactcgaaatgg

SEQ ID NO: 554475 - DNA, 25 bp, Homo sapien
agcggacaccagagtaggatgagct

SEQ ID NO: 554476 - DNA, 25 bp, Homo sapien
gttcgaacaagtgtctgctaacttc

SEQ ID NO: 554477 - DNA, 25 bp, Homo sapien
tgcactgagaggatcgtccaggaga

SEQ ID NO: 554478 - DNA, 25 bp, Homo sapien
taacttccgcatctactgcactgag

SEQ ID NO: 554479 - DNA, 25 bp, Homo sapien
ggatcgtccaggagatagatgtcag

SEQ ID NO: 554480 - DNA, 25 bp, Homo sapien
tggttccccgatctcctatcacagt

SEQ ID NO: 554481 - DNA, 25 bp, Homo sapien
cctccactcagcgtggttccccgat

SEQ ID NO: 554482 - DNA, 25 bp, Homo sapien
gatctcctatcacagtcagatcacc

SEQ ID NO: 554483 - DNA, 25 bp, Homo sapien
cttgcaaggtttacccgtgctttct

SEQ ID NO: 554484 - DNA, 25 bp, Homo sapien
tcaaccatggtgacactaaaggcag

SEQ ID NO: 554485 - DNA, 25 bp, Homo sapien
atcaaccatggtgacactaaaggca

SEQ ID NO: 554486 - DNA, 25 bp, Homo sapien
atggggatggtcacaggggccaggc

SEQ ID NO: 554487 - DNA, 25 bp, Homo sapien
tatggggatggtcacaggggccagg

SEQ ID NO: 554488 - DNA, 25 bp, Homo sapien
ctatggggatggtcacaggggccag

SEQ ID NO: 554489 - DNA, 25 bp, Homo sapien
cacccagagacgctcaggaccattt

SEQ ID NO: 554490 - DNA, 25 bp, Homo sapien
agagacgctcaggaccatttctgtc

SEQ ID NO: 554491 - DNA, 25 bp, Homo sapien
tataatcctgctgtatctcccccat

SEQ ID NO: 554492 - DNA, 25 bp, Homo sapien
tatctcccccatttaataagaaatg

SEQ ID NO: 554493 - DNA, 25 bp, Homo sapien
tgcacagggggccagcagtccatgc

SEQ ID NO: 554494 - DNA, 25 bp, Homo sapien
ggatggaaccatgcacagggggcca

SEQ ID NO: 554495 - DNA, 25 bp, Homo sapien
gggccagcagtccatgcttacacac

SEQ ID NO: 554496 - DNA, 25 bp, Homo sapien
acagggggccagcagtccatgctta

SEQ ID NO: 554497 - DNA, 25 bp, Homo sapien
gttactgggccagtcctcaaaggtg

SEQ ID NO: 554498 - DNA, 25 bp, Homo sapien
aaccaagaagtcgccatgcagccca

SEQ ID NO: 554499 - DNA, 25 bp, Homo sapien
tggagtctgcctgccacgcagaagc

SEQ ID NO: 554500 - DNA, 25 bp, Homo sapien
ggtgcctgggacactatccgagtta

SEQ ID NO: 554501 - DNA, 25 bp, Homo sapien
tacggaagaggctgaatggcagcca

SEQ ID NO: 554502 - DNA, 25 bp, Homo sapien
acggaagaggctgaatggcagccac

SEQ ID NO: 554503 - DNA, 25 bp, Homo sapien
gttatcaactgtaactaccagtggg

SEQ ID NO: 554504 - DNA, 25 bp, Homo sapien
tttcctatctccggggcctggtcca

SEQ ID NO: 554505 - DNA, 25 bp, Homo sapien
ttcctatctccggggcctggtccat

SEQ ID NO: 554506 - DNA, 25 bp, Homo sapien
ttggttatcaactgtaactaccagt

SEQ ID NO: 554507 - DNA, 25 bp, Homo sapien
gggctgctgagacacataggcaatt

SEQ ID NO: 554508 - DNA, 25 bp, Homo sapien
tattactcctcagagttcccgagaa

SEQ ID NO: 554509 - DNA, 25 bp, Homo sapien
taggcaattcttccatgcacgctga

SEQ ID NO: 554510 - DNA, 25 bp, Homo sapien
cgagcacggcacttaacagtgatga

SEQ ID NO: 554511 - DNA, 25 bp, Homo sapien
taacaattcgccaggtctgacagta

SEQ ID NO: 554512 - DNA, 25 bp, Homo sapien
cacagctaacaattcgccaggtctg

SEQ ID NO: 554513 - DNA, 25 bp, Homo sapien
cgaccacagctaacaattcgccagg

SEQ ID NO: 554514 - DNA, 25 bp, Homo sapien
gggccgaccacagctaacaattcgc

SEQ ID NO: 554515 - DNA, 25 bp, Homo sapien
tctttttaccatctgacggcagctg

SEQ ID NO: 554516 - DNA, 25 bp, Homo sapien
tgcacatgcaccatctttttaccat

SEQ ID NO: 554517 - DNA, 25 bp, Homo sapien
gacggttgcgctgtgatatctcatc

SEQ ID NO: 554518 - DNA, 25 bp, Homo sapien
catctgacggcagctgacggttgcg

SEQ ID NO: 554519 - DNA, 25 bp, Homo sapien
acacactcacctgcatgaacactgc

SEQ ID NO: 554520 - DNA, 25 bp, Homo sapien
cacactcacctgcatgaacactgca

SEQ ID NO: 554521 - DNA, 25 bp, Homo sapien
aaacacactcacctgcatgaacact

SEQ ID NO: 554522 - DNA, 25 bp, Homo sapien
aacacactcacctgcatgaacactg

SEQ ID NO: 554523 - DNA, 25 bp, Homo sapien
ttagttccgatcagtatattgggca

SEQ ID NO: 554524 - DNA, 25 bp, Homo sapien
ttgggcagaactattcctcctctcc

SEQ ID NO: 554525 - DNA, 25 bp, Homo sapien
tccgatcagtatattgggcagaact

SEQ ID NO: 554526 - DNA, 25 bp, Homo sapien
attgggcagaactattcctcctctc

SEQ ID NO: 554527 - DNA, 25 bp, Homo sapien
cattacactcatcatttacaacctc

SEQ ID NO: 554528 - DNA, 25 bp, Homo sapien
gtgaacattggatcaattcattaca

SEQ ID NO: 554529 - DNA, 25 bp, Homo sapien
agaaagtgaacattggatcaattca

SEQ ID NO: 554530 - DNA, 25 bp, Homo sapien
acattggatcaattcattacactca

SEQ ID NO: 554531 - DNA, 25 bp, Homo sapien
tacttcaaatgcacctacaacttta

SEQ ID NO: 554532 - DNA, 25 bp, Homo sapien
tctacttcaaatgcacctacaactt

SEQ ID NO: 554533 - DNA, 25 bp, Homo sapien
ttctacttcaaatgcacctacaact

SEQ ID NO: 554534 - DNA, 25 bp, Homo sapien
tcattctacttcaaatgcacctaca

SEQ ID NO: 554535 - DNA, 25 bp, Homo sapien
cacactgccgaggagcacgtaggtg

SEQ ID NO: 554536 - DNA, 25 bp, Homo sapien
aacacgatgattttgcttgcactga

SEQ ID NO: 554537 - DNA, 25 bp, Homo sapien
ggcaggaacttctcagaatcttgga

SEQ ID NO: 554538 - DNA, 25 bp, Homo sapien
cggatgctgacgattgcctctgaca

SEQ ID NO: 554539 - DNA, 25 bp, Homo sapien
attggtaataagatttgaaaatgac

SEQ ID NO: 554540 - DNA, 25 bp, Homo sapien
catccgtgaaagttgcagttttact

SEQ ID NO: 554541 - DNA, 25 bp, Homo sapien
ggcatccgtgaaagttgcagtttta

SEQ ID NO: 554542 - DNA, 25 bp, Homo sapien
cctggcatccgtgaaagttgcagtt

SEQ ID NO: 554543 - DNA, 25 bp, Homo sapien
gaccagctaacaaccatattcctaa

SEQ ID NO: 554544 - DNA, 25 bp, Homo sapien
gctaacaaccatattcctaacacat

SEQ ID NO: 554545 - DNA, 25 bp, Homo sapien
acgaccagctaacaaccatattcct

SEQ ID NO: 554546 - DNA, 25 bp, Homo sapien
taacacatatgctactaggactgtg

SEQ ID NO: 554547 - DNA, 25 bp, Homo sapien
gatattcctatctccatccagagta

SEQ ID NO: 554548 - DNA, 25 bp, Homo sapien
ctcagtgatgagaacaacttcccaa

SEQ ID NO: 554549 - DNA, 25 bp, Homo sapien
tgccatcccagcaaggcacgatatt

SEQ ID NO: 554550 - DNA, 25 bp, Homo sapien
tatctccatccagagtagggcagtc

SEQ ID NO: 554551 - DNA, 25 bp, Homo sapien
cacccaccacaggtgaagccattct

SEQ ID NO: 554552 - DNA, 25 bp, Homo sapien
ggtctgggagactcgcaagagaatc

SEQ ID NO: 554553 - DNA, 25 bp, Homo sapien
tcttgatcgtgactatcttcactga

SEQ ID NO: 554554 - DNA, 25 bp, Homo sapien
gaccagcggcattagaagaatgtct

SEQ ID NO: 554555 - DNA, 25 bp, Homo sapien
ggttgtcttccccatggccatgtta

SEQ ID NO: 554556 - DNA, 25 bp, Homo sapien
tggccatgttactaagacgaagtgc

SEQ ID NO: 554557 - DNA, 25 bp, Homo sapien
tgatcaaacttgttcacatcattgg

SEQ ID NO: 554558 - DNA, 25 bp, Homo sapien
cacatcattggacagcagattgact

SEQ ID NO: 554559 - DNA, 25 bp, Homo sapien
tgagttgccgctggaataacagtcc

SEQ ID NO: 554560 - DNA, 25 bp, Homo sapien
cctagctaggacagaagtacggaga

SEQ ID NO: 554561 - DNA, 25 bp, Homo sapien
caagactgtcaacgagggctatgtg

SEQ ID NO: 554562 - DNA, 25 bp, Homo sapien
ttaaacagtagaagcaattggccag

SEQ ID NO: 554563 - DNA, 25 bp, Homo sapien
caattgtgcccaacttgaactatca

SEQ ID NO: 554564 - DNA, 25 bp, Homo sapien
tcaagaaatctgaagtcaattgtgc

SEQ ID NO: 554565 - DNA, 25 bp, Homo sapien
cacagattgtgtctgaggccaacaa

SEQ ID NO: 554566 - DNA, 25 bp, Homo sapien
gatttaggtaagacagcacagatgc

SEQ ID NO: 554567 - DNA, 25 bp, Homo sapien
tcgtgtattactgtgaccaggtgta

SEQ ID NO: 554568 - DNA, 25 bp, Homo sapien
tagaagttaacccaagtgaacgata

SEQ ID NO: 554569 - DNA, 25 bp, Homo sapien
ttgtaatagaagttaacccaagtga

SEQ ID NO: 554570 - DNA, 25 bp, Homo sapien
caggagggctacttgtaagtcgtgt

SEQ ID NO: 554571 - DNA, 25 bp, Homo sapien
agggtactttgccaacggcttcata

SEQ ID NO: 554572 - DNA, 25 bp, Homo sapien
gctatggggctgagtgctgaccgaa

SEQ ID NO: 554573 - DNA, 25 bp, Homo sapien
ataagcagggccagactccatgagg

SEQ ID NO: 554574 - DNA, 25 bp, Homo sapien
caacggcttcataagcagggccaga

SEQ ID NO: 554575 - DNA, 25 bp, Homo sapien
tcatgtgccgtctttaagactaaga

SEQ ID NO: 554576 - DNA, 25 bp, Homo sapien
cgtctttaagactaagaatacttgg

SEQ ID NO: 554577 - DNA, 25 bp, Homo sapien
tgccgtctttaagactaagaatact

SEQ ID NO: 554578 - DNA, 25 bp, Homo sapien
gaaatgtgtttataatgtatcttct

SEQ ID NO: 554579 - DNA, 25 bp, Homo sapien
aatgcagagcctcatgcggcccttt

SEQ ID NO: 554580 - DNA, 25 bp, Homo sapien
tttcaaggaagccacgtccagcctc

SEQ ID NO: 554581 - DNA, 25 bp, Homo sapien
gcacacaggtgacatatggcagatg

SEQ ID NO: 554582 - DNA, 25 bp, Homo sapien
gaaggcctgacagtaaataagcaca

SEQ ID NO: 554583 - DNA, 25 bp, Homo sapien
caagcattgccttggctctgagcta

SEQ ID NO: 554584 - DNA, 25 bp, Homo sapien
tgaagtccaaacacatcacagcagc

SEQ ID NO: 554585 - DNA, 25 bp, Homo sapien
tgtacaacactagaaggcagatgtc

SEQ ID NO: 554586 - DNA, 25 bp, Homo sapien
tctgagctaggacaccactttccga

SEQ ID NO: 554587 - DNA, 25 bp, Homo sapien
catacggttgaaacaccagagagat

SEQ ID NO: 554588 - DNA, 25 bp, Homo sapien
ctggcatacggttgaaacaccagag

SEQ ID NO: 554589 - DNA, 25 bp, Homo sapien
tacggttgaaacaccagagagatca

SEQ ID NO: 554590 - DNA, 25 bp, Homo sapien
ggcatacggttgaaacaccagagag

SEQ ID NO: 554591 - DNA, 25 bp, Homo sapien
aaagatacaaatgatggctaacaac

SEQ ID NO: 554592 - DNA, 25 bp, Homo sapien
gacaatggaacacctttgaagggag

SEQ ID NO: 554593 - DNA, 25 bp, Homo sapien
tatacctaggatcattatcaatcct

SEQ ID NO: 554594 - DNA, 25 bp, Homo sapien
gaatgaaggccagttgacaatggaa

SEQ ID NO: 554595 - DNA, 25 bp, Homo sapien
ttcaataccaaatgtcgacgacggg

SEQ ID NO: 554596 - DNA, 25 bp, Homo sapien
gatttctgccagaccgggaatcagg

SEQ ID NO: 554597 - DNA, 25 bp, Homo sapien
ccatttgcaacagccaacctgattt

SEQ ID NO: 554598 - DNA, 25 bp, Homo sapien
gagtcattttcagacatcctgcaag

SEQ ID NO: 554599 - DNA, 25 bp, Homo sapien
acaatgtacattgtatattgtacat

SEQ ID NO: 554600 - DNA, 25 bp, Homo sapien
cattatataactgtacacaatgtac

SEQ ID NO: 554601 - DNA, 25 bp, Homo sapien
ttatataactgtacacaatgtacat

SEQ ID NO: 554602 - DNA, 25 bp, Homo sapien
cacaatgtacattgtatattgtaca

SEQ ID NO: 554603 - DNA, 25 bp, Homo sapien
tatccgacgtggattccatttacat

SEQ ID NO: 554604 - DNA, 25 bp, Homo sapien
tcaaagtgttatcccaaacatccaa

SEQ ID NO: 554605 - DNA, 25 bp, Homo sapien
atttagaatataaagaaagcctgta

SEQ ID NO: 554606 - DNA, 25 bp, Homo sapien
tagaaacactataagttctctccaa

SEQ ID NO: 554607 - DNA, 25 bp, Homo sapien
aaatcatatggcacatggctactcg

SEQ ID NO: 554608 - DNA, 25 bp, Homo sapien
ggcacatggctactcgtaacctcat

SEQ ID NO: 554609 - DNA, 25 bp, Homo sapien
atggctactcgtaacctcatcccag

SEQ ID NO: 554610 - DNA, 25 bp, Homo sapien
cttccgataaatcatatggcacatg

SEQ ID NO: 554611 - DNA, 25 bp, Homo sapien
gtcagcaccgtggcataggcgtacg

SEQ ID NO: 554612 - DNA, 25 bp, Homo sapien
gcgtgcaaaaagtcagcaccgtggc

SEQ ID NO: 554613 - DNA, 25 bp, Homo sapien
caaaatgagcgtgcaaaaagtcagc

SEQ ID NO: 554614 - DNA, 25 bp, Homo sapien
atgcagtatagccaaaatgagcgtg

SEQ ID NO: 554615 - DNA, 25 bp, Homo sapien
aaaatatgggctggattactttggc

SEQ ID NO: 554616 - DNA, 25 bp, Homo sapien
ccaaaaatatgggctggattacttt

SEQ ID NO: 554617 - DNA, 25 bp, Homo sapien
aaaaatatgggctggattactttgg

SEQ ID NO: 554618 - DNA, 25 bp, Homo sapien
caaaaatatgggctggattactttg

SEQ ID NO: 554619 - DNA, 25 bp, Homo sapien
tctgaacaagatgtagggaatgcaa

SEQ ID NO: 554620 - DNA, 25 bp, Homo sapien
ctgaacaagatgtagggaatgcaat

SEQ ID NO: 554621 - DNA, 25 bp, Homo sapien
aacaagatgtagggaatgcaatttt

SEQ ID NO: 554622 - DNA, 25 bp, Homo sapien
tgaacaagatgtagggaatgcaatt

SEQ ID NO: 554623 - DNA, 25 bp, Homo sapien
ggtcacgactacctaattgtccaga

SEQ ID NO: 554624 - DNA, 25 bp, Homo sapien
cagccgtaggtgagtatgattcaaa

SEQ ID NO: 554625 - DNA, 25 bp, Homo sapien
taaacccagcgaaagagaatgcaaa

SEQ ID NO: 554626 - DNA, 25 bp, Homo sapien
tgattcaaacggcaagagggatgac

SEQ ID NO: 554627 - DNA, 25 bp, Homo sapien
gaggctccatggctaccagacaact

SEQ ID NO: 554628 - DNA, 25 bp, Homo sapien
ctggccacattgacaccgacttgtc

SEQ ID NO: 554629 - DNA, 25 bp, Homo sapien
aacttctctgaggttgcacagccaa

SEQ ID NO: 554630 - DNA, 25 bp, Homo sapien
aactgggccaggaaatcctgcacac

SEQ ID NO: 554631 - DNA, 25 bp, Homo sapien
gcaatccactccgacaacaaggaag

SEQ ID NO: 554632 - DNA, 25 bp, Homo sapien
cttgggtgcacagtcctcggacctt

SEQ ID NO: 554633 - DNA, 25 bp, Homo sapien
gggtagctcttgggtgcttcagcca

SEQ ID NO: 554634 - DNA, 25 bp, Homo sapien
caccggatgggtgtgatgaatcccc

SEQ ID NO: 554635 - DNA, 25 bp, Homo sapien
cactttatgattgctcttgttaaag

SEQ ID NO: 554636 - DNA, 25 bp, Homo sapien
gattgctcttgttaaagaaggcttc

SEQ ID NO: 554637 - DNA, 25 bp, Homo sapien
agaaggcttctgtgcgtcattctca

SEQ ID NO: 554638 - DNA, 25 bp, Homo sapien
gcttctgtgcgtcattctcagctct

SEQ ID NO: 554639 - DNA, 25 bp, Homo sapien
ctctaatctccgtttatggccaatt

SEQ ID NO: 554640 - DNA, 25 bp, Homo sapien
tgtgagcggtcttctggcagcactg

SEQ ID NO: 554641 - DNA, 25 bp, Homo sapien
tccaaggtgctgtgagcggtcttct

SEQ ID NO: 554642 - DNA, 25 bp, Homo sapien
caattttaaacaagggattgagcca

SEQ ID NO: 554643 - DNA, 25 bp, Homo sapien
aagcgagaaggcaggtttgtgctca

SEQ ID NO: 554644 - DNA, 25 bp, Homo sapien
tgaacttaggcctggaatcacggga

SEQ ID NO: 554645 - DNA, 25 bp, Homo sapien
gaatcacgggatccaggaggtaagc

SEQ ID NO: 554646 - DNA, 25 bp, Homo sapien
ctcctgaacttaggcctggaatcac

SEQ ID NO: 554647 - DNA, 25 bp, Homo sapien
ccccacgcctccacgatagaaaggt

SEQ ID NO: 554648 - DNA, 25 bp, Homo sapien
ttagtgcacggccaaccatgactgc

SEQ ID NO: 554649 - DNA, 25 bp, Homo sapien
cctgtgtttctaaggaaaacacctg

SEQ ID NO: 554650 - DNA, 25 bp, Homo sapien
acgatagaaaggttagtgcacggcc

SEQ ID NO: 554651 - DNA, 25 bp, Homo sapien
cattttctcgtaggtaagtgactga

SEQ ID NO: 554652 - DNA, 25 bp, Homo sapien
attttctcgtaggtaagtgactgag

SEQ ID NO: 554653 - DNA, 25 bp, Homo sapien
tttctcgtaggtaagtgactgagtg

SEQ ID NO: 554654 - DNA, 25 bp, Homo sapien
ttttctcgtaggtaagtgactgagt

SEQ ID NO: 554655 - DNA, 25 bp, Homo sapien
cagcaattctgctcagaccccaaaa

SEQ ID NO: 554656 - DNA, 25 bp, Homo sapien
gccagcacacttctcgtgtaacact

SEQ ID NO: 554657 - DNA, 25 bp, Homo sapien
ctgctcagaccccaaaacctgaatg

SEQ ID NO: 554658 - DNA, 25 bp, Homo sapien
tcgtgtaacactccagcaattctgc

SEQ ID NO: 554659 - DNA, 25 bp, Homo sapien
cctcccattctctgtagtccaaaat

SEQ ID NO: 554660 - DNA, 25 bp, Homo sapien
cattctctgtagtccaaaatagcca

SEQ ID NO: 554661 - DNA, 25 bp, Homo sapien
tcaatctcctcccattctctgtagt

SEQ ID NO: 554662 - DNA, 25 bp, Homo sapien
gatttcttcaatctcctcccattct

SEQ ID NO: 554663 - DNA, 25 bp, Homo sapien
ggtatttgcacatggaattaaactg

SEQ ID NO: 554664 - DNA, 25 bp, Homo sapien
aactgaggatgttggagtgaagaca

SEQ ID NO: 554665 - DNA, 25 bp, Homo sapien
taaagaattgaatgttatttgggaa

SEQ ID NO: 554666 - DNA, 25 bp, Homo sapien
gggaaaagggtatttgcacatggaa

SEQ ID NO: 554667 - DNA, 25 bp, Homo sapien
ccaatggcaagtgtccttccaagaa

SEQ ID NO: 554668 - DNA, 25 bp, Homo sapien
aacaagcgacaggctctcgggagcc

SEQ ID NO: 554669 - DNA, 25 bp, Homo sapien
caacaagcgacaggctctcgggagc

SEQ ID NO: 554670 - DNA, 25 bp, Homo sapien
acaagcgacaggctctcgggagcca

SEQ ID NO: 554671 - DNA, 25 bp, Homo sapien
gcctgggtgacacagcgagactcca

SEQ ID NO: 554672 - DNA, 25 bp, Homo sapien
ggctgcagtgagctgagactgcgcc

SEQ ID NO: 554673 - DNA, 25 bp, Homo sapien
ggactgcttgaacacaggaggtgga

SEQ ID NO: 554674 - DNA, 25 bp, Homo sapien
ctgctagtctggtggctgaggcagg

SEQ ID NO: 554675 - DNA, 25 bp, Homo sapien
cagcaagtgctgaagcctaaggcta

SEQ ID NO: 554676 - DNA, 25 bp, Homo sapien
tcacaaaacgtgtcccgcagaaggg

SEQ ID NO: 554677 - DNA, 25 bp, Homo sapien
ggcagcaagcatggctaacacattc

SEQ ID NO: 554678 - DNA, 25 bp, Homo sapien
cagggtcaacaagttccaagcaaag

SEQ ID NO: 554679 - DNA, 25 bp, Homo sapien
ggaagaggattttgagttgctaaga

SEQ ID NO: 554680 - DNA, 25 bp, Homo sapien
gaagaggattttgagttgctaagag

SEQ ID NO: 554681 - DNA, 25 bp, Homo sapien
aggaagaggattttgagttgctaag

SEQ ID NO: 554682 - DNA, 25 bp, Homo sapien
ctgtaaaagagaaagttcaggccag

SEQ ID NO: 554683 - DNA, 25 bp, Homo sapien
tttgcatgtggctgtaaaagagaaa

SEQ ID NO: 554684 - DNA, 25 bp, Homo sapien
ccaggcactgtggcaacatggtgaa

SEQ ID NO: 554685 - DNA, 25 bp, Homo sapien
aagagaaagttcaggccaggcactg

SEQ ID NO: 554686 - DNA, 25 bp, Homo sapien
ataaatagcagttccatatcctctg

SEQ ID NO: 554687 - DNA, 25 bp, Homo sapien
ctactcaaaaggctgtgattagaga

SEQ ID NO: 554688 - DNA, 25 bp, Homo sapien
aataaatagcagttccatatcctct

SEQ ID NO: 554689 - DNA, 25 bp, Homo sapien
tcaaaaggctgtgattagagaatca

SEQ ID NO: 554690 - DNA, 25 bp, Homo sapien
ctgcagcgggttgggcttcacctcc

SEQ ID NO: 554691 - DNA, 25 bp, Homo sapien
gtcctgcagcgggttgggcttcacc

SEQ ID NO: 554692 - DNA, 25 bp, Homo sapien
tgagcagaggttcgcgtcctgcagc

SEQ ID NO: 554693 - DNA, 25 bp, Homo sapien
agaagaacacgcgtgagcagaggtt

SEQ ID NO: 554694 - DNA, 25 bp, Homo sapien
cgcgggctccgctcctggacctcaa

SEQ ID NO: 554695 - DNA, 25 bp, Homo sapien
tcgcgctgatcaggcggcggtggcc

SEQ ID NO: 554696 - DNA, 25 bp, Homo sapien
ccgcgggctccgctcctggacctca

SEQ ID NO: 554697 - DNA, 25 bp, Homo sapien
ccggggtcgcgctgatcaggcggcg

SEQ ID NO: 554698 - DNA, 25 bp, Homo sapien
tggccagtgtgcatgagaagtgccc

SEQ ID NO: 554699 - DNA, 25 bp, Homo sapien
gctacaaggagttaagaaggtgccc

SEQ ID NO: 554700 - DNA, 25 bp, Homo sapien
tgtccagtcttagagccaagaaagg

SEQ ID NO: 554701 - DNA, 25 bp, Homo sapien
aattctatcagtgccccattcaagg

SEQ ID NO: 554702 - DNA, 25 bp, Homo sapien
gtgggagtggaaaaggagcaaagaa

SEQ ID NO: 554703 - DNA, 25 bp, Homo sapien
aaagaaatctgtaactggttgtgat

SEQ ID NO: 554704 - DNA, 25 bp, Homo sapien
agcagtgggagtggaaaaggagcaa

SEQ ID NO: 554705 - DNA, 25 bp, Homo sapien
caaagaaatctgtaactggttgtga

SEQ ID NO: 554706 - DNA, 25 bp, Homo sapien
taggctgtataccaaccttagggac

SEQ ID NO: 554707 - DNA, 25 bp, Homo sapien
tgtataccaaccttagggacatgaa

SEQ ID NO: 554708 - DNA, 25 bp, Homo sapien
gcagtggtaggctgtataccaacct

SEQ ID NO: 554709 - DNA, 25 bp, Homo sapien
ccaaccttagggacatgaatgttaa

SEQ ID NO: 554710 - DNA, 25 bp, Homo sapien
ttaagtgattgctggtgggaccact

SEQ ID NO: 554711 - DNA, 25 bp, Homo sapien
ccagtagcctatgggtacagtggcc

SEQ ID NO: 554712 - DNA, 25 bp, Homo sapien
tgatgggtgtaacagctcaacggct

SEQ ID NO: 554713 - DNA, 25 bp, Homo sapien
aacggctggctcaactgtgctacaa

SEQ ID NO: 554714 - DNA, 25 bp, Homo sapien
cacaattgtgaaggtcgatcgggta

SEQ ID NO: 554715 - DNA, 25 bp, Homo sapien
gtgacgtagtaacctttgagctgag

SEQ ID NO: 554716 - DNA, 25 bp, Homo sapien
agtggtttcactcacatgttcaggc

SEQ ID NO: 554717 - DNA, 25 bp, Homo sapien
tacttcacagcgtggtggtcaggga

SEQ ID NO: 554718 - DNA, 25 bp, Homo sapien
tctgatggatgccatgagaggcatc

SEQ ID NO: 554719 - DNA, 25 bp, Homo sapien
ggatgccatgagaggcatccatcca

SEQ ID NO: 554720 - DNA, 25 bp, Homo sapien
cggtgaattctgatggatgccatga

SEQ ID NO: 554721 - DNA, 25 bp, Homo sapien
ctgaccggtgaattctgatggatgc

SEQ ID NO: 554722 - DNA, 25 bp, Homo sapien
ttgcctgttctttagtttggcaagc

SEQ ID NO: 554723 - DNA, 25 bp, Homo sapien
aatctgttaacaacaccagttctta

SEQ ID NO: 554724 - DNA, 25 bp, Homo sapien
aataatctgttaacaacaccagttc

SEQ ID NO: 554725 - DNA, 25 bp, Homo sapien
aattggaagctctgttattatgaat

SEQ ID NO: 554726 - DNA, 25 bp, Homo sapien
aaaagctcccaataggaatcccact

SEQ ID NO: 554727 - DNA, 25 bp, Homo sapien
caaaggcccattgcctccacaaaag

SEQ ID NO: 554728 - DNA, 25 bp, Homo sapien
tcgcctgttcagagtttggcttttt

SEQ ID NO: 554729 - DNA, 25 bp, Homo sapien
caagattgtgcataaccaactggct

SEQ ID NO: 554730 - DNA, 25 bp, Homo sapien
tcttgtccatttcccttctcagggt

SEQ ID NO: 554731 - DNA, 25 bp, Homo sapien
cttgtccatttcccttctcagggtc

SEQ ID NO: 554732 - DNA, 25 bp, Homo sapien
gggacagatccaagccagcagagca

SEQ ID NO: 554733 - DNA, 25 bp, Homo sapien
ctgggacagatccaagccagcagag

SEQ ID NO: 554734 - DNA, 25 bp, Homo sapien
tgggacagatccaagccagcagagc

SEQ ID NO: 554735 - DNA, 25 bp, Homo sapien
gggtgatttcaggacaatattaagg

SEQ ID NO: 554736 - DNA, 25 bp, Homo sapien
atctgatagtgttccacgattcctt

SEQ ID NO: 554737 - DNA, 25 bp, Homo sapien
tccacgattcctttgcagaagctgt

SEQ ID NO: 554738 - DNA, 25 bp, Homo sapien
gatttcaggacaatattaaggtgct

SEQ ID NO: 554739 - DNA, 25 bp, Homo sapien
ccgtgctaccatgaggctgatatag

SEQ ID NO: 554740 - DNA, 25 bp, Homo sapien
tcttgggtccctctactggaacttc

SEQ ID NO: 554741 - DNA, 25 bp, Homo sapien
catgctggtccttacatccgtgcta

SEQ ID NO: 554742 - DNA, 25 bp, Homo sapien
tccaggtgcggccatttcttgggtc

SEQ ID NO: 554743 - DNA, 25 bp, Homo sapien
cctcttcttcacccgagcatcccca

SEQ ID NO: 554744 - DNA, 25 bp, Homo sapien
ctcttcttcacccgagcatccccag

SEQ ID NO: 554745 - DNA, 25 bp, Homo sapien
tcttcttcacccgagcatccccagc

SEQ ID NO: 554746 - DNA, 25 bp, Homo sapien
tcctcttcttcacccgagcatcccc

SEQ ID NO: 554747 - DNA, 25 bp, Homo sapien
ctggagatctctatacacatagtgc

SEQ ID NO: 554748 - DNA, 25 bp, Homo sapien
tgtcaaccaataacaagagaggatt

SEQ ID NO: 554749 - DNA, 25 bp, Homo sapien
aagttaagcctacatccatacagag

SEQ ID NO: 554750 - DNA, 25 bp, Homo sapien
gagataactaaccatctagcctggg

SEQ ID NO: 554751 - DNA, 25 bp, Homo sapien
tggctgtgacgcttgtcaaagtgtt

SEQ ID NO: 554752 - DNA, 25 bp, Homo sapien
ctggctgtgacgcttgtcaaagtgt

SEQ ID NO: 554753 - DNA, 25 bp, Homo sapien
cttgtcaaagtgttctctatcggct

SEQ ID NO: 554754 - DNA, 25 bp, Homo sapien
tagaccaccaaagcgttctgaccgg

SEQ ID NO: 554755 - DNA, 25 bp, Homo sapien
tgagtggaaagtgaccacgcgagcc

SEQ ID NO: 554756 - DNA, 25 bp, Homo sapien
cgcgacatgtccagggcgcagatct

SEQ ID NO: 554757 - DNA, 25 bp, Homo sapien
ttgctgctaccacgtccaatgagtg

SEQ ID NO: 554758 - DNA, 25 bp, Homo sapien
catttgaggactccatgctatgtct

SEQ ID NO: 554759 - DNA, 25 bp, Homo sapien
tggactttcctaagtacccatttga

SEQ ID NO: 554760 - DNA, 25 bp, Homo sapien
ttttgggtatttcaacactgatcct

SEQ ID NO: 554761 - DNA, 25 bp, Homo sapien
ttagtccctgaaataacatggactt

SEQ ID NO: 554762 - DNA, 25 bp, Homo sapien
agcatgcctggtggctcagttctga

SEQ ID NO: 554763 - DNA, 25 bp, Homo sapien
ctaaatccagcatgcctggtggctc

SEQ ID NO: 554764 - DNA, 25 bp, Homo sapien
tccagcatgcctggtggctcagttc

SEQ ID NO: 554765 - DNA, 25 bp, Homo sapien
taaatccagcatgcctggtggctca

SEQ ID NO: 554766 - DNA, 25 bp, Homo sapien
cattatgttctggacgctattgatc

SEQ ID NO: 554767 - DNA, 25 bp, Homo sapien
caccccacaccttgggaagaactgt

SEQ ID NO: 554768 - DNA, 25 bp, Homo sapien
ctattgatctgcctgatccccaggg

SEQ ID NO: 554769 - DNA, 25 bp, Homo sapien
tgggaagaactgtcaaagcatggct

SEQ ID NO: 554770 - DNA, 25 bp, Homo sapien
cagctatgccgcctctcccttgcca

SEQ ID NO: 554771 - DNA, 25 bp, Homo sapien
agctatgccgcctctcccttgccag

SEQ ID NO: 554772 - DNA, 25 bp, Homo sapien
ccaggttagacatccgcagcacata

SEQ ID NO: 554773 - DNA, 25 bp, Homo sapien
caaagtcctgtcaaatctgatgctc

SEQ ID NO: 554774 - DNA, 25 bp, Homo sapien
cattcagctggtcacccaggttaga

SEQ ID NO: 554775 - DNA, 25 bp, Homo sapien
tgattttcctgctactccattcagc

SEQ ID NO: 554776 - DNA, 25 bp, Homo sapien
cgggagaacccactatcttgtcagc

SEQ ID NO: 554777 - DNA, 25 bp, Homo sapien
tcgggagaacccactatcttgtcag

SEQ ID NO: 554778 - DNA, 25 bp, Homo sapien
gtcgggagaacccactatcttgtca

SEQ ID NO: 554779 - DNA, 25 bp, Homo sapien
tgtcccagacgccatgctgcagtgc

SEQ ID NO: 554780 - DNA, 25 bp, Homo sapien
tgttcatgatgacaagggtgtacat

SEQ ID NO: 554781 - DNA, 25 bp, Homo sapien
ggatggctggagacccgtgattttt

SEQ ID NO: 554782 - DNA, 25 bp, Homo sapien
tttttatggtcttggatgttgttca

SEQ ID NO: 554783 - DNA, 25 bp, Homo sapien
cactccgggtttattagtagctacg

SEQ ID NO: 554784 - DNA, 25 bp, Homo sapien
ggacccctcttcacgaatgaaaaga

SEQ ID NO: 554785 - DNA, 25 bp, Homo sapien
aaagacatgctttgcgggaatcaca

SEQ ID NO: 554786 - DNA, 25 bp, Homo sapien
ggccgtgcacgtcctgcctatttct

SEQ ID NO: 554787 - DNA, 25 bp, Homo sapien
aggattagaagccactctgagccaa

SEQ ID NO: 554788 - DNA, 25 bp, Homo sapien
taggctgagtagtaatagcaaatcc

SEQ ID NO: 554789 - DNA, 25 bp, Homo sapien
cccaggatccttcagtctaggctga

SEQ ID NO: 554790 - DNA, 25 bp, Homo sapien
catcatatttcattaggctctcacg

SEQ ID NO: 554791 - DNA, 25 bp, Homo sapien
aataacatggtctaacaagggctga

SEQ ID NO: 554792 - DNA, 25 bp, Homo sapien
tcagggaagataagaacaggttagc

SEQ ID NO: 554793 - DNA, 25 bp, Homo sapien
gataagaacaggttagccacggctt

SEQ ID NO: 554794 - DNA, 25 bp, Homo sapien
ttagccacggcttctagcagggaag

SEQ ID NO: 554795 - DNA, 25 bp, Homo sapien
ctcagtcagggaagataagaacagg

SEQ ID NO: 554796 - DNA, 25 bp, Homo sapien
tcagctgtgctgactgagcactggc

SEQ ID NO: 554797 - DNA, 25 bp, Homo sapien
ttcagtgctgtttgccccaatggcc

SEQ ID NO: 554798 - DNA, 25 bp, Homo sapien
ctccccaagggagggaagtggccag

SEQ ID NO: 554799 - DNA, 25 bp, Homo sapien
ggtggcaagggctccattcccacct

SEQ ID NO: 554800 - DNA, 25 bp, Homo sapien
ggtggcgtctcagtgaagccagcct

SEQ ID NO: 554801 - DNA, 25 bp, Homo sapien
tgaagccagcctggggtctatcctc

SEQ ID NO: 554802 - DNA, 25 bp, Homo sapien
ctttctctgggtggcgtctcagtga

SEQ ID NO: 554803 - DNA, 25 bp, Homo sapien
agctgcctttctctgggtggcgtct

SEQ ID NO: 554804 - DNA, 25 bp, Homo sapien
tcacctgctcaagggtttgcaacag

SEQ ID NO: 554805 - DNA, 25 bp, Homo sapien
tgaatccctgattgagtctctggtt

SEQ ID NO: 554806 - DNA, 25 bp, Homo sapien
cattaactagagaaaatgttgctac

SEQ ID NO: 554807 - DNA, 25 bp, Homo sapien
aacagagacttcacttgaatccctg

SEQ ID NO: 554808 - DNA, 25 bp, Homo sapien
gagaccaatcttgctgatccagggc

SEQ ID NO: 554809 - DNA, 25 bp, Homo sapien
taagagctgtgctgatctacaaagc

SEQ ID NO: 554810 - DNA, 25 bp, Homo sapien
tccagggcaggaagtctagtccaga

SEQ ID NO: 554811 - DNA, 25 bp, Homo sapien
tcagtgcacacctatgagaccaatc

SEQ ID NO: 554812 - DNA, 25 bp, Homo sapien
gcaatacggggccacacaaaggaag

SEQ ID NO: 554813 - DNA, 25 bp, Homo sapien
agagttgttgtgaagacgaaatgct

SEQ ID NO: 554814 - DNA, 25 bp, Homo sapien
atgcttctatacagggcaatacggg

SEQ ID NO: 554815 - DNA, 25 bp, Homo sapien
aagacgaaatgcttctatacagggc

SEQ ID NO: 554816 - DNA, 25 bp, Homo sapien
gggcccagagcagtatcagctgcag

SEQ ID NO: 554817 - DNA, 25 bp, Homo sapien
ccaacaaggctaggaccaatgatat

SEQ ID NO: 554818 - DNA, 25 bp, Homo sapien
gagcaatgtgtttgaccaacaaggc

SEQ ID NO: 554819 - DNA, 25 bp, Homo sapien
tgttttgccaacaagtctaggaagg

SEQ ID NO: 554820 - DNA, 25 bp, Homo sapien
tctctgccacctccaccacgctggc

SEQ ID NO: 554821 - DNA, 25 bp, Homo sapien
ctggtactgtctcctctctgccacc

SEQ ID NO: 554822 - DNA, 25 bp, Homo sapien
ctctctgccacctccaccacgctgg

SEQ ID NO: 554823 - DNA, 25 bp, Homo sapien
ctgccacctccaccacgctggccat

SEQ ID NO: 554824 - DNA, 25 bp, Homo sapien
attaggcaaacaaagattatacaga

SEQ ID NO: 554825 - DNA, 25 bp, Homo sapien
taaagacctattattaggcaaacaa

SEQ ID NO: 554826 - DNA, 25 bp, Homo sapien
gcacattgctttgtgaatgctttca

SEQ ID NO: 554827 - DNA, 25 bp, Homo sapien
ttggattcagactaaaagacaactt

SEQ ID NO: 554828 - DNA, 25 bp, Homo sapien
ttcaattaccttggatatataccaa

SEQ ID NO: 554829 - DNA, 25 bp, Homo sapien
tgcgtccgggttctttcaactaata

SEQ ID NO: 554830 - DNA, 25 bp, Homo sapien
gaatgaggcctttcacacgttttga

SEQ ID NO: 554831 - DNA, 25 bp, Homo sapien
ccttttcggttaaatgatattccat

SEQ ID NO: 554832 - DNA, 25 bp, Homo sapien
tatgcatccaaaggcagagtgtgtc

SEQ ID NO: 554833 - DNA, 25 bp, Homo sapien
gccattcattctaacaggagtgtga

SEQ ID NO: 554834 - DNA, 25 bp, Homo sapien
gatttgtggcaacctggagatttcc

SEQ ID NO: 554835 - DNA, 25 bp, Homo sapien
cattgaattggatgtatgctgaacc

SEQ ID NO: 554836 - DNA, 25 bp, Homo sapien
tcccatatagtacagcaaagaagga

SEQ ID NO: 554837 - DNA, 25 bp, Homo sapien
tagtacagcaaagaaggatatcagc

SEQ ID NO: 554838 - DNA, 25 bp, Homo sapien
gaaggatatcagctagaggaagcaa

SEQ ID NO: 554839 - DNA, 25 bp, Homo sapien
cagcaaagaaggatatcagctagag

SEQ ID NO: 554840 - DNA, 25 bp, Homo sapien
catgctcagcagtaccttcaaggcc

SEQ ID NO: 554841 - DNA, 25 bp, Homo sapien
agaatgaagcaaaggtcaggcctgc

SEQ ID NO: 554842 - DNA, 25 bp, Homo sapien
gcgggcaatgcagggtaaggataag

SEQ ID NO: 554843 - DNA, 25 bp, Homo sapien
cacactctcacttggcagccatgaa

SEQ ID NO: 554844 - DNA, 25 bp, Homo sapien
tgttcgctctgaaatcctcacgctg

SEQ ID NO: 554845 - DNA, 25 bp, Homo sapien
aatgtgtgtgttcgctctgaaatcc

SEQ ID NO: 554846 - DNA, 25 bp, Homo sapien
tcgctctgaaatcctcacgctgcat

SEQ ID NO: 554847 - DNA, 25 bp, Homo sapien
tgtgtgttcgctctgaaatcctcac

SEQ ID NO: 554848 - DNA, 25 bp, Homo sapien
tatagtcagcaatgtgttactgtcc

SEQ ID NO: 554849 - DNA, 25 bp, Homo sapien
tcctgtggtttgtagagcacgcatc

SEQ ID NO: 554850 - DNA, 25 bp, Homo sapien
tagtgtgccagataggtacgcttcc

SEQ ID NO: 554851 - DNA, 25 bp, Homo sapien
tattgttctctgagatagtgtgcca

SEQ ID NO: 554852 - DNA, 25 bp, Homo sapien
ggagtttatcccctgctctttgctc

SEQ ID NO: 554853 - DNA, 25 bp, Homo sapien
gccttctttgtgcatgcgcaaaatt

SEQ ID NO: 554854 - DNA, 25 bp, Homo sapien
gaaaatctggccaatgatcgtcctt

SEQ ID NO: 554855 - DNA, 25 bp, Homo sapien
aattaacaagttatggctgctgttc

SEQ ID NO: 554856 - DNA, 25 bp, Homo sapien
tggagaaaggtacctcattttccaa

SEQ ID NO: 554857 - DNA, 25 bp, Homo sapien
ctggagaaaggtacctcattttcca

SEQ ID NO: 554858 - DNA, 25 bp, Homo sapien
gctggagaaaggtacctcattttcc

SEQ ID NO: 554859 - DNA, 25 bp, Homo sapien
gttggcacaaaagaaggacctgacc

SEQ ID NO: 554860 - DNA, 25 bp, Homo sapien
tggcacaaaagaaggacctgaccag

SEQ ID NO: 554861 - DNA, 25 bp, Homo sapien
ttggcacaaaagaaggacctgacca

SEQ ID NO: 554862 - DNA, 25 bp, Homo sapien
gctcgaggactgaagtttaaaatac

SEQ ID NO: 554863 - DNA, 25 bp, Homo sapien
agcggagacccagatagccctgcag

SEQ ID NO: 554864 - DNA, 25 bp, Homo sapien
gcagcacaatgattgctatgaaaga

SEQ ID NO: 554865 - DNA, 25 bp, Homo sapien
ggttcagcatttggcagcggagacc

SEQ ID NO: 554866 - DNA, 25 bp, Homo sapien
aagcgcagtgagagacagcgacttg

SEQ ID NO: 554867 - DNA, 25 bp, Homo sapien
cagcgacttgtcacatgttctagtt

SEQ ID NO: 554868 - DNA, 25 bp, Homo sapien
tgttctagtttaaatttctggtgag

SEQ ID NO: 554869 - DNA, 25 bp, Homo sapien
tctagtttaaatttctggtgagcaa

SEQ ID NO: 554870 - DNA, 25 bp, Homo sapien
tcttccgagctacaatcatttgaca

SEQ ID NO: 554871 - DNA, 25 bp, Homo sapien
ggcttctagcatggacttggagtaa

SEQ ID NO: 554872 - DNA, 25 bp, Homo sapien
ttggagtaaagattgcagcaggcac

SEQ ID NO: 554873 - DNA, 25 bp, Homo sapien
gatttccaggacaactctacataag

SEQ ID NO: 554874 - DNA, 25 bp, Homo sapien
aatctgcagtggtgtaggactgtct

SEQ ID NO: 554875 - DNA, 25 bp, Homo sapien
ttgtagaggacccatgctccatgat

SEQ ID NO: 554876 - DNA, 25 bp, Homo sapien
ggaatctcttgtagaggacccatgc

SEQ ID NO: 554877 - DNA, 25 bp, Homo sapien
aaatctgcagtggtgtaggactgtc

SEQ ID NO: 554878 - DNA, 25 bp, Homo sapien
tggatgccttgggtaggaagtcctt

SEQ ID NO: 554879 - DNA, 25 bp, Homo sapien
aagtcttgttggatgccttgggtag

SEQ ID NO: 554880 - DNA, 25 bp, Homo sapien
tgtcactattttgcaagtcttgttg

SEQ ID NO: 554881 - DNA, 25 bp, Homo sapien
ccttgggtaggaagtcctttggcat

SEQ ID NO: 554882 - DNA, 25 bp, Homo sapien
ccctgaaaggatttcctctagtccg

SEQ ID NO: 554883 - DNA, 25 bp, Homo sapien
tctcccctgaaaggatttcctctag

SEQ ID NO: 554884 - DNA, 25 bp, Homo sapien
tatatctcccctgaaaggatttcct

SEQ ID NO: 554885 - DNA, 25 bp, Homo sapien
tatctcccctgaaaggatttcctct

SEQ ID NO: 554886 - DNA, 25 bp, Homo sapien
gttttttgtcctcagtagcactgtt

SEQ ID NO: 554887 - DNA, 25 bp, Homo sapien
tttttgtcctcagtagcactgttca

SEQ ID NO: 554888 - DNA, 25 bp, Homo sapien
tttgtcctcagtagcactgttcata

SEQ ID NO: 554889 - DNA, 25 bp, Homo sapien
gcaagtgatcttgttttttgtcctc

SEQ ID NO: 554890 - DNA, 25 bp, Homo sapien
cctgctgcggtcatcggcagagcac

SEQ ID NO: 554891 - DNA, 25 bp, Homo sapien
gcggtcatcggcagagcactgtcac

SEQ ID NO: 554892 - DNA, 25 bp, Homo sapien
tgctgcggtcatcggcagagcactg

SEQ ID NO: 554893 - DNA, 25 bp, Homo sapien
caggggaagtactgtcttgtttatc

SEQ ID NO: 554894 - DNA, 25 bp, Homo sapien
tagtgacgatttgcacatagcacgt

SEQ ID NO: 554895 - DNA, 25 bp, Homo sapien
ctagactgcagcgattagtgacgat

SEQ ID NO: 554896 - DNA, 25 bp, Homo sapien
tgcctaaatgatttgcgctgcagaa

SEQ ID NO: 554897 - DNA, 25 bp, Homo sapien
cttggcaaggttaaggcagcgtgca

SEQ ID NO: 554898 - DNA, 25 bp, Homo sapien
tcacaggtatgaattaggagccgct

SEQ ID NO: 554899 - DNA, 25 bp, Homo sapien
gttgatggcctctactaagtctcct

SEQ ID NO: 554900 - DNA, 25 bp, Homo sapien
caggagcctcactgtgcataattgg

SEQ ID NO: 554901 - DNA, 25 bp, Homo sapien
taagtctcctagcttccaggagggt

SEQ ID NO: 554902 - DNA, 25 bp, Homo sapien
tttgccctatgtgtagaatagaatc

SEQ ID NO: 554903 - DNA, 25 bp, Homo sapien
ggaagatttacatttagatattggc

SEQ ID NO: 554904 - DNA, 25 bp, Homo sapien
cagagacaggccgaaacagtttctt

SEQ ID NO: 554905 - DNA, 25 bp, Homo sapien
gaatagaatctaccaaactatgttt

SEQ ID NO: 554906 - DNA, 25 bp, Homo sapien
ttcagatacacatacaacggggcca

SEQ ID NO: 554907 - DNA, 25 bp, Homo sapien
cagatacacatacaacggggccaca

SEQ ID NO: 554908 - DNA, 25 bp, Homo sapien
ctttcagatacacatacaacggggc

SEQ ID NO: 554909 - DNA, 25 bp, Homo sapien
gatacacatacaacggggccacatc

SEQ ID NO: 554910 - DNA, 25 bp, Homo sapien
ggccctcccataattaacactcaaa

SEQ ID NO: 554911 - DNA, 25 bp, Homo sapien
catctgttgattgtatggatgtaag

SEQ ID NO: 554912 - DNA, 25 bp, Homo sapien
gcttatgtctaaaagagctcgctgg

SEQ ID NO: 554913 - DNA, 25 bp, Homo sapien
tcttctcggacaaagtatcatggtg

SEQ ID NO: 554914 - DNA, 25 bp, Homo sapien
acatgttactggctgcacacaggca

SEQ ID NO: 554915 - DNA, 25 bp, Homo sapien
ttaaggacatcccaagcccaagtgg

SEQ ID NO: 554916 - DNA, 25 bp, Homo sapien
tacgtgcctcactcagaactgacgg

SEQ ID NO: 554917 - DNA, 25 bp, Homo sapien
tgacgggccgagttctatctaggtg

SEQ ID NO: 554918 - DNA, 25 bp, Homo sapien
tgtccgatatgaatcacaacgtggg

SEQ ID NO: 554919 - DNA, 25 bp, Homo sapien
cagtcacagtgatgtaacagagggc

SEQ ID NO: 554920 - DNA, 25 bp, Homo sapien
caaaacatggaatagagacctggct

SEQ ID NO: 554921 - DNA, 25 bp, Homo sapien
gattaggtcctacaggccagtgtgg

SEQ ID NO: 554922 - DNA, 25 bp, Homo sapien
gtgacaaatgtactccaggaaaatg

SEQ ID NO: 554923 - DNA, 25 bp, Homo sapien
tataaacgcctacgatacgacagca

SEQ ID NO: 554924 - DNA, 25 bp, Homo sapien
taacactagagtacctttctgaaga

SEQ ID NO: 554925 - DNA, 25 bp, Homo sapien
gtaacatgcttacagtggctcaaag

SEQ ID NO: 554926 - DNA, 25 bp, Homo sapien
tgtattgggtgccattaaagagacc

SEQ ID NO: 554927 - DNA, 25 bp, Homo sapien
gcttcgaaatactgttgatgatctg

SEQ ID NO: 554928 - DNA, 25 bp, Homo sapien
gcagcggaagtcttaaacaccttta

SEQ ID NO: 554929 - DNA, 25 bp, Homo sapien
cacctttacatgcttcgaaatactg

SEQ ID NO: 554930 - DNA, 25 bp, Homo sapien
gtgggaaacacggtaaggcagaagc

SEQ ID NO: 554931 - DNA, 25 bp, Homo sapien
tgggaaacacggtaaggcagaagca

SEQ ID NO: 554932 - DNA, 25 bp, Homo sapien
ctgtgggaaacacggtaaggcagaa

SEQ ID NO: 554933 - DNA, 25 bp, Homo sapien
tgtgggaaacacggtaaggcagaag

SEQ ID NO: 554934 - DNA, 25 bp, Homo sapien
ctggaataatcttctgacatgtgga

SEQ ID NO: 554935 - DNA, 25 bp, Homo sapien
gcaaattactgaaacactgtgatac

SEQ ID NO: 554936 - DNA, 25 bp, Homo sapien
tactgaaatactgctggcttctgga

SEQ ID NO: 554937 - DNA, 25 bp, Homo sapien
ctagaatcatggaggcaaattactg

SEQ ID NO: 554938 - DNA, 25 bp, Homo sapien
gttactaagctgctttttaatgtgc

SEQ ID NO: 554939 - DNA, 25 bp, Homo sapien
tgtcgctccaatcagtcacagttac

SEQ ID NO: 554940 - DNA, 25 bp, Homo sapien
ttagacatctgaagtgtcgctccaa

SEQ ID NO: 554941 - DNA, 25 bp, Homo sapien
tcagtcacagttactaagctgcttt

SEQ ID NO: 554942 - DNA, 25 bp, Homo sapien
gagaggcacagagctaccactaatg

SEQ ID NO: 554943 - DNA, 25 bp, Homo sapien
gagtcactctaatgccaacaggtct

SEQ ID NO: 554944 - DNA, 25 bp, Homo sapien
gagctatgtataggacgccacttta

SEQ ID NO: 554945 - DNA, 25 bp, Homo sapien
gaactggtcgcatctctaggataca

SEQ ID NO: 554946 - DNA, 25 bp, Homo sapien
aataacataaagaaagcactgacag

SEQ ID NO: 554947 - DNA, 25 bp, Homo sapien
tatgcatatccaatccttatttaaa

SEQ ID NO: 554948 - DNA, 25 bp, Homo sapien
gacagcttttttgtctgatgatata

SEQ ID NO: 554949 - DNA, 25 bp, Homo sapien
taacataaagaaagcactgacagct

SEQ ID NO: 554950 - DNA, 25 bp, Homo sapien
gaaaatggatcgagcttgtattaga

SEQ ID NO: 554951 - DNA, 25 bp, Homo sapien
taataagaaaatggatcgagcttgt

SEQ ID NO: 554952 - DNA, 25 bp, Homo sapien
taaagatgaaacacaactaataaga

SEQ ID NO: 554953 - DNA, 25 bp, Homo sapien
aatggatcgagcttgtattagaggg

SEQ ID NO: 554954 - DNA, 25 bp, Homo sapien
gccccttaggattaaatgcgcccca

SEQ ID NO: 554955 - DNA, 25 bp, Homo sapien
ccaaagatatctcttcctctaggga

SEQ ID NO: 554956 - DNA, 25 bp, Homo sapien
tgtggttcatttttcgcaggtggag

SEQ ID NO: 554957 - DNA, 25 bp, Homo sapien
caggtggaggttccttctgttcttt

SEQ ID NO: 554958 - DNA, 25 bp, Homo sapien
cagtcttcatcctccacatccgcac

SEQ ID NO: 554959 - DNA, 25 bp, Homo sapien
agtcttcatcctccacatccgcaca

SEQ ID NO: 554960 - DNA, 25 bp, Homo sapien
ccagtcttcatcctccacatccgca

SEQ ID NO: 554961 - DNA, 25 bp, Homo sapien
catctcagggacattagttccaccg

SEQ ID NO: 554962 - DNA, 25 bp, Homo sapien
agttccaccgactggtttgttcaca

SEQ ID NO: 554963 - DNA, 25 bp, Homo sapien
tcagtaggtgttttaacggcgactc

SEQ ID NO: 554964 - DNA, 25 bp, Homo sapien
gacattagttccaccgactggtttg

SEQ ID NO: 554965 - DNA, 25 bp, Homo sapien
gcccttgttttgtggtggcggcaca

SEQ ID NO: 554966 - DNA, 25 bp, Homo sapien
cactgtgttcttcccgaagctgccc

SEQ ID NO: 554967 - DNA, 25 bp, Homo sapien
cgtatgcccggatgaggtcgtcgtc

SEQ ID NO: 554968 - DNA, 25 bp, Homo sapien
tgtcctcgatttcgcttccctcggt

SEQ ID NO: 554969 - DNA, 25 bp, Homo sapien
tacacaaatcaacaccgagataggg

SEQ ID NO: 554970 - DNA, 25 bp, Homo sapien
agataggggcgctgttttcgtaacg

SEQ ID NO: 554971 - DNA, 25 bp, Homo sapien
ctacacaaatcaacaccgagatagg

SEQ ID NO: 554972 - DNA, 25 bp, Homo sapien
tcaacaccgagataggggcgctgtt

SEQ ID NO: 554973 - DNA, 25 bp, Homo sapien
gaggttatacccacggctgtagcat

SEQ ID NO: 554974 - DNA, 25 bp, Homo sapien
tttcctcagtaaaaccactccatgt

SEQ ID NO: 554975 - DNA, 25 bp, Homo sapien
taagagatgtgcctcttaaagtggt

SEQ ID NO: 554976 - DNA, 25 bp, Homo sapien
tttctcaggtaattctcagtgggca

SEQ ID NO: 554977 - DNA, 25 bp, Homo sapien
caactaaatcagtagcacacaggtg

SEQ ID NO: 554978 - DNA, 25 bp, Homo sapien
gaactatctcgtgaaaaaggcagca

SEQ ID NO: 554979 - DNA, 25 bp, Homo sapien
taagacaggaatatctactagggtc

SEQ ID NO: 554980 - DNA, 25 bp, Homo sapien
aacttacactgtcatgagcctagcc

SEQ ID NO: 554981 - DNA, 25 bp, Homo sapien
ctgggaaaaggatcttccatgacat

SEQ ID NO: 554982 - DNA, 25 bp, Homo sapien
gaaaaggatcttccatgacattttt

SEQ ID NO: 554983 - DNA, 25 bp, Homo sapien
atagttgaagactttctgggaaaag

SEQ ID NO: 554984 - DNA, 25 bp, Homo sapien
tgggaaaaggatcttccatgacatt

SEQ ID NO: 554985 - DNA, 25 bp, Homo sapien
aacagctttttgtctaatcagttgt

SEQ ID NO: 554986 - DNA, 25 bp, Homo sapien
tacttctccagttgaaagggtatcc

SEQ ID NO: 554987 - DNA, 25 bp, Homo sapien
gctttttgtctaatcagttgtctgt

SEQ ID NO: 554988 - DNA, 25 bp, Homo sapien
tttggaaggaagttgtatcattttg

SEQ ID NO: 554989 - DNA, 25 bp, Homo sapien
ctgaagagagtagtgctttctcctc

SEQ ID NO: 554990 - DNA, 25 bp, Homo sapien
gatcacttgaaatgccacgtatatc

SEQ ID NO: 554991 - DNA, 25 bp, Homo sapien
gtactctatgcaactgatcacttga

SEQ ID NO: 554992 - DNA, 25 bp, Homo sapien
tacagctgacttgatgttcaaggaa

SEQ ID NO: 554993 - DNA, 25 bp, Homo sapien
tgcattaatccccaaggtttccagt

SEQ ID NO: 554994 - DNA, 25 bp, Homo sapien
tgagggaggagttactcttcaaagc

SEQ ID NO: 554995 - DNA, 25 bp, Homo sapien
tgttcttagtcccttagtgagggag

SEQ ID NO: 554996 - DNA, 25 bp, Homo sapien
cccttagtgagggaggagttactct

SEQ ID NO: 554997 - DNA, 25 bp, Homo sapien
ggaggagttactcttcaaagctttc

SEQ ID NO: 554998 - DNA, 25 bp, Homo sapien
ccatttcctaggtgtagggctccag

SEQ ID NO: 554999 - DNA, 25 bp, Homo sapien
cccatactacttggatttgcaggag

SEQ ID NO: 555000 - DNA, 25 bp, Homo sapien
tcaaaagcctgatctgggagaaatg

SEQ ID NO: 555001 - DNA, 25 bp, Homo sapien
tcagcagacaggattcttaataccc

SEQ ID NO: 555002 - DNA, 25 bp, Homo sapien
gaaagttcttctattggttccagta

SEQ ID NO: 555003 - DNA, 25 bp, Homo sapien
agtatgtgcgacgagaatgcctgtt

SEQ ID NO: 555004 - DNA, 25 bp, Homo sapien
cttcctctgaaagttcttctattgg

SEQ ID NO: 555005 - DNA, 25 bp, Homo sapien
tctattggttccagtatgtgcgacg

SEQ ID NO: 555006 - DNA, 25 bp, Homo sapien
ggaaaaaacgttgaggcaatcagtc

SEQ ID NO: 555007 - DNA, 25 bp, Homo sapien
tcatcaacctagtacacggtagcct

SEQ ID NO: 555008 - DNA, 25 bp, Homo sapien
gcaatcagtcatagatggtcacctt

SEQ ID NO: 555009 - DNA, 25 bp, Homo sapien
gtacaaacaggacaacagcaaagtt

SEQ ID NO: 555010 - DNA, 25 bp, Homo sapien
catgcaccattggcagacttgattt

SEQ ID NO: 555011 - DNA, 25 bp, Homo sapien
caccattggcagacttgatttagtt

SEQ ID NO: 555012 - DNA, 25 bp, Homo sapien
tgcaccattggcagacttgatttag

SEQ ID NO: 555013 - DNA, 25 bp, Homo sapien
gcaccattggcagacttgatttagt

SEQ ID NO: 555014 - DNA, 25 bp, Homo sapien
cggccatcagctacttctataggta

SEQ ID NO: 555015 - DNA, 25 bp, Homo sapien
tggaatacagccaagctccttcact

SEQ ID NO: 555016 - DNA, 25 bp, Homo sapien
aatagatcatctagcctgtgaagcc

SEQ ID NO: 555017 - DNA, 25 bp, Homo sapien
caaactatagcccatgagacatacc

SEQ ID NO: 555018 - DNA, 25 bp, Homo sapien
cagatccctgtgcacatggcacagg

SEQ ID NO: 555019 - DNA, 25 bp, Homo sapien
aatccctgggcccatgagcgtggtg

SEQ ID NO: 555020 - DNA, 25 bp, Homo sapien
acacagtgctctcgcaatccctggg

SEQ ID NO: 555021 - DNA, 25 bp, Homo sapien
gcacaggtacctgcccttactcctt

SEQ ID NO: 555022 - DNA, 25 bp, Homo sapien
tgagattcaaaagcctgccaggcta

SEQ ID NO: 555023 - DNA, 25 bp, Homo sapien
gattcaaaagcctgccaggctaaag

SEQ ID NO: 555024 - DNA, 25 bp, Homo sapien
agctggctgagattcaaaagcctgc

SEQ ID NO: 555025 - DNA, 25 bp, Homo sapien
caaaagcctgccaggctaaaggatt

SEQ ID NO: 555026 - DNA, 25 bp, Homo sapien
tgtaacaattacacggcaacagtgg

SEQ ID NO: 555027 - DNA, 25 bp, Homo sapien
tgtcccctcagaaatgcaagttgaa

SEQ ID NO: 555028 - DNA, 25 bp, Homo sapien
tgccagagatgggagttgaacccag

SEQ ID NO: 555029 - DNA, 25 bp, Homo sapien
gatgccttgcaccataggttgaccc

SEQ ID NO: 555030 - DNA, 25 bp, Homo sapien
tgtttaatggattacaggtaaagtc

SEQ ID NO: 555031 - DNA, 25 bp, Homo sapien
actgtttaatggattacaggtaaag

SEQ ID NO: 555032 - DNA, 25 bp, Homo sapien
gatactgtttaatggattacaggta

SEQ ID NO: 555033 - DNA, 25 bp, Homo sapien
cactgatactgtttaatggattaca

SEQ ID NO: 555034 - DNA, 25 bp, Homo sapien
catttagatcatctatcattgaggt

SEQ ID NO: 555035 - DNA, 25 bp, Homo sapien
tatcattgaggttcgaagtttctct

SEQ ID NO: 555036 - DNA, 25 bp, Homo sapien
ggagtctctgccctagctcttctat

SEQ ID NO: 555037 - DNA, 25 bp, Homo sapien
tcgaagtttctctatatgtgacagg

SEQ ID NO: 555038 - DNA, 25 bp, Homo sapien
aactgtaactcgctttctattccag

SEQ ID NO: 555039 - DNA, 25 bp, Homo sapien
actcgcaatgacaaagtataaaaac

SEQ ID NO: 555040 - DNA, 25 bp, Homo sapien
ttctctctatcacaactcgcaatga

SEQ ID NO: 555041 - DNA, 25 bp, Homo sapien
catgacaactgtccgtctttctctc

SEQ ID NO: 555042 - DNA, 25 bp, Homo sapien
cacttaaatttctgatgtactcagg

SEQ ID NO: 555043 - DNA, 25 bp, Homo sapien
agtttggctctagtattgttcccag

SEQ ID NO: 555044 - DNA, 25 bp, Homo sapien
tacaaacctacaaaacataattcga

SEQ ID NO: 555045 - DNA, 25 bp, Homo sapien
cctcagtatttgttccactttggag

SEQ ID NO: 555046 - DNA, 25 bp, Homo sapien
atgcatacaagaaaactgaagcagt

SEQ ID NO: 555047 - DNA, 25 bp, Homo sapien
agaaatgcatacaagaaaactgaag

SEQ ID NO: 555048 - DNA, 25 bp, Homo sapien
aagaaaactgaagcagtggacaaga

SEQ ID NO: 555049 - DNA, 25 bp, Homo sapien
caagaaaactgaagcagtggacaag

SEQ ID NO: 555050 - DNA, 25 bp, Homo sapien
tattatccctaatacctgccaacct

SEQ ID NO: 555051 - DNA, 25 bp, Homo sapien
gactggttaatgataccaatgcatc

SEQ ID NO: 555052 - DNA, 25 bp, Homo sapien
taatgataccaatgcatcgtaaaac

SEQ ID NO: 555053 - DNA, 25 bp, Homo sapien
gccaacctactcttaatcagtggtg

SEQ ID NO: 555054 - DNA, 25 bp, Homo sapien
cttgaactcgagctgtccatttgct

SEQ ID NO: 555055 - DNA, 25 bp, Homo sapien
gaactcgagctgtccatttgctttc

SEQ ID NO: 555056 - DNA, 25 bp, Homo sapien
aatagcttgaactcgagctgtccat

SEQ ID NO: 555057 - DNA, 25 bp, Homo sapien
tagcttgaactcgagctgtccattt

SEQ ID NO: 555058 - DNA, 25 bp, Homo sapien
tttatgtacaactgtaacaatgaga

SEQ ID NO: 555059 - DNA, 25 bp, Homo sapien
tagtgaatacctatgaaacccaact

SEQ ID NO: 555060 - DNA, 25 bp, Homo sapien
tggtaaaattttagctagtgaaaca

SEQ ID NO: 555061 - DNA, 25 bp, Homo sapien
agatctatgcaatatgggagcttcc

SEQ ID NO: 555062 - DNA, 25 bp, Homo sapien
caggtcccgaaaactgggagctgca

SEQ ID NO: 555063 - DNA, 25 bp, Homo sapien
tccgaaggaccctgcgtgctggtag

SEQ ID NO: 555064 - DNA, 25 bp, Homo sapien
gaagtccggaataagggtcactgaa

SEQ ID NO: 555065 - DNA, 25 bp, Homo sapien
cagaaccgaggaaaaagacagaagg

SEQ ID NO: 555066 - DNA, 25 bp, Homo sapien
acggtcttctttaaactcgtgtgca

SEQ ID NO: 555067 - DNA, 25 bp, Homo sapien
taaactcgtgtgcatcttttaatgt

SEQ ID NO: 555068 - DNA, 25 bp, Homo sapien
tgtgcctatgttggacttgatctgc

SEQ ID NO: 555069 - DNA, 25 bp, Homo sapien
tgcatgacattatggaaatcctggg

SEQ ID NO: 555070 - DNA, 25 bp, Homo sapien
ccatttcatcaactagtttctcctt

SEQ ID NO: 555071 - DNA, 25 bp, Homo sapien
tattctaatgctgaattcttcgaag

SEQ ID NO: 555072 - DNA, 25 bp, Homo sapien
gctgaattcttcgaagttaattctt

SEQ ID NO: 555073 - DNA, 25 bp, Homo sapien
tctttccacctgtcaaataacttca

SEQ ID NO: 555074 - DNA, 25 bp, Homo sapien
ggcataattgaattacatacagtta

SEQ ID NO: 555075 - DNA, 25 bp, Homo sapien
gagtccatggcataattgaattaca

SEQ ID NO: 555076 - DNA, 25 bp, Homo sapien
tctgtttattagagtccatggcata

SEQ ID NO: 555077 - DNA, 25 bp, Homo sapien
tgtcctctgtttattagagtccatg

SEQ ID NO: 555078 - DNA, 25 bp, Homo sapien
tctcactccggagcttctcaatctg

SEQ ID NO: 555079 - DNA, 25 bp, Homo sapien
ggtgtgcagcctctagctcagacct

SEQ ID NO: 555080 - DNA, 25 bp, Homo sapien
ctcttccttcaatacgacgatctca

SEQ ID NO: 555081 - DNA, 25 bp, Homo sapien
gcactggcatggtgtgcagcctcta

SEQ ID NO: 555082 - DNA, 25 bp, Homo sapien
gcaacagaaaatcgtgttaaaacac

SEQ ID NO: 555083 - DNA, 25 bp, Homo sapien
tctcttaccaaatgtacctggaaac

SEQ ID NO: 555084 - DNA, 25 bp, Homo sapien
aaacaccatctcttaccaaatgtac

SEQ ID NO: 555085 - DNA, 25 bp, Homo sapien
gaaaatcgtgttaaaacaccatctc

SEQ ID NO: 555086 - DNA, 25 bp, Homo sapien
tacagggtgctttgacccagtggca

SEQ ID NO: 555087 - DNA, 25 bp, Homo sapien
taggtgcccgctgaactcttctgag

SEQ ID NO: 555088 - DNA, 25 bp, Homo sapien
tagcagattctttcagccgctgtgt

SEQ ID NO: 555089 - DNA, 25 bp, Homo sapien
ttgataacacgaaggaaactgtcct

SEQ ID NO: 555090 - DNA, 25 bp, Homo sapien
tgtgtctgtgagtgtagacatgaaa

SEQ ID NO: 555091 - DNA, 25 bp, Homo sapien
tgtctgtgagtgtagacatgaaagg

SEQ ID NO: 555092 - DNA, 25 bp, Homo sapien
tctgtgagtgtagacatgaaaggta

SEQ ID NO: 555093 - DNA, 25 bp, Homo sapien
gtctgtgagtgtagacatgaaaggt

SEQ ID NO: 555094 - DNA, 25 bp, Homo sapien
ctgaaaccctctctgaaacgagtat

SEQ ID NO: 555095 - DNA, 25 bp, Homo sapien
aataatactcgtttcagagtctgaa

SEQ ID NO: 555096 - DNA, 25 bp, Homo sapien
ctctgaaacgagtatgagttagaat

SEQ ID NO: 555097 - DNA, 25 bp, Homo sapien
gaagaaataatactcgtttcagagt

SEQ ID NO: 555098 - DNA, 25 bp, Homo sapien
tatttttgtttctacgaagcttagc

SEQ ID NO: 555099 - DNA, 25 bp, Homo sapien
cagtgattcaagacttattaatgag

SEQ ID NO: 555100 - DNA, 25 bp, Homo sapien
aaagaaggtcagtttcacgctgaag

SEQ ID NO: 555101 - DNA, 25 bp, Homo sapien
atggaaacaacctggcccaaactgg

SEQ ID NO: 555102 - DNA, 25 bp, Homo sapien
catctatattgtcggtggtgcacac

SEQ ID NO: 555103 - DNA, 25 bp, Homo sapien
gaaacaaagttgtccctgggtctca

SEQ ID NO: 555104 - DNA, 25 bp, Homo sapien
tctgtgggttactgtggcaatctgc

SEQ ID NO: 555105 - DNA, 25 bp, Homo sapien
acctggctccttggtaagcctcaga

SEQ ID NO: 555106 - DNA, 25 bp, Homo sapien
tctgggtccacaacttatctgttac

SEQ ID NO: 555107 - DNA, 25 bp, Homo sapien
ctggggacaaagctggtccaggccc

SEQ ID NO: 555108 - DNA, 25 bp, Homo sapien
tctctcacctcggctgcgattgcag

SEQ ID NO: 555109 - DNA, 25 bp, Homo sapien
ccattcacccaaacatggaggacag

SEQ ID NO: 555110 - DNA, 25 bp, Homo sapien
ttttcttcagtgtggcggcgttgaa

SEQ ID NO: 555111 - DNA, 25 bp, Homo sapien
aattttcttcagtgtggcggcgttg

SEQ ID NO: 555112 - DNA, 25 bp, Homo sapien
ttcttcagtgtggcggcgttgaatg

SEQ ID NO: 555113 - DNA, 25 bp, Homo sapien
attttcttcagtgtggcggcgttga

SEQ ID NO: 555114 - DNA, 25 bp, Homo sapien
gaagcactacctcttgggcgctttc

SEQ ID NO: 555115 - DNA, 25 bp, Homo sapien
acctcttgggcgctttctcgctgaa

SEQ ID NO: 555116 - DNA, 25 bp, Homo sapien
ctgaagcactacctcttgggcgctt

SEQ ID NO: 555117 - DNA, 25 bp, Homo sapien
gcgctttctcgctgaacgataccat

SEQ ID NO: 555118 - DNA, 25 bp, Homo sapien
tatagaactttagggacccctcaca

SEQ ID NO: 555119 - DNA, 25 bp, Homo sapien
tgtaagtcatataggctctcgggct

SEQ ID NO: 555120 - DNA, 25 bp, Homo sapien
cctcccgggctcatgacagctttgg

SEQ ID NO: 555121 - DNA, 25 bp, Homo sapien
gctgtgtacagcactggagaaagga

SEQ ID NO: 555122 - DNA, 25 bp, Homo sapien
cttcacaatctattcacatcacaga

SEQ ID NO: 555123 - DNA, 25 bp, Homo sapien
tcacagaacataagagtagcataca

SEQ ID NO: 555124 - DNA, 25 bp, Homo sapien
aaaataaagcttactgcaggggatc

SEQ ID NO: 555125 - DNA, 25 bp, Homo sapien
tactgcaggggatctataaattaag

SEQ ID NO: 555126 - DNA, 25 bp, Homo sapien
aaagttcagagggaaagtgtgacta

SEQ ID NO: 555127 - DNA, 25 bp, Homo sapien
tcaaacttgatagagttgaagaaat

SEQ ID NO: 555128 - DNA, 25 bp, Homo sapien
tgaagaaatgcagcactcttgggcc

SEQ ID NO: 555129 - DNA, 25 bp, Homo sapien
agacaaaggaaccacatcaaaaagt

SEQ ID NO: 555130 - DNA, 25 bp, Homo sapien
cagtgtgggcacttctcgtcttcca

SEQ ID NO: 555131 - DNA, 25 bp, Homo sapien
gcaagtactcgatggtgaactgcgc

SEQ ID NO: 555132 - DNA, 25 bp, Homo sapien
tggctttggcctcgatcatcagctg

SEQ ID NO: 555133 - DNA, 25 bp, Homo sapien
aactgcgccagacggatgagcttca

SEQ ID NO: 555134 - DNA, 25 bp, Homo sapien
cagcccggcatccccgtcgggggcg

SEQ ID NO: 555135 - DNA, 25 bp, Homo sapien
gcttgaaaaccaatccgctgcctca

SEQ ID NO: 555136 - DNA, 25 bp, Homo sapien
ttgaaaaccaatccgctgcctcagc

SEQ ID NO: 555137 - DNA, 25 bp, Homo sapien
atgcttgaaaaccaatccgctgcct

SEQ ID NO: 555138 - DNA, 25 bp, Homo sapien
tgaaaaccaatccgctgcctcagct

SEQ ID NO: 555139 - DNA, 25 bp, Homo sapien
tcaggagcgggagaaggccgggttc

SEQ ID NO: 555140 - DNA, 25 bp, Homo sapien
agccgggcggtctttacccagcctg

SEQ ID NO: 555141 - DNA, 25 bp, Homo sapien
gacgttgctatagcagcgcccaggt

SEQ ID NO: 555142 - DNA, 25 bp, Homo sapien
cggcggcggcctaaggtctgggcgt

SEQ ID NO: 555143 - DNA, 25 bp, Homo sapien
cgtctgcccgcgcagggtcagcgtg

SEQ ID NO: 555144 - DNA, 25 bp, Homo sapien
agcaaagggcgcgtctgcccgcgca

SEQ ID NO: 555145 - DNA, 25 bp, Homo sapien
ctggagcaaagggcgcgtctgcccg

SEQ ID NO: 555146 - DNA, 25 bp, Homo sapien
aagggcgcgtctgcccgcgcagggt

SEQ ID NO: 555147 - DNA, 25 bp, Homo sapien
cacagccgttcacccgaagagggta

SEQ ID NO: 555148 - DNA, 25 bp, Homo sapien
tgggtaccggctccccagggcgcca

SEQ ID NO: 555149 - DNA, 25 bp, Homo sapien
cagagaagacctcttggacgagccc

SEQ ID NO: 555150 - DNA, 25 bp, Homo sapien
tccctggcgtttggggctggacact

SEQ ID NO: 555151 - DNA, 25 bp, Homo sapien
tgcttggaccagacatcaggaattt

SEQ ID NO: 555152 - DNA, 25 bp, Homo sapien
taccacagagatcaataagctgagg

SEQ ID NO: 555153 - DNA, 25 bp, Homo sapien
tagcagcgacttgtagacctcaggc

SEQ ID NO: 555154 - DNA, 25 bp, Homo sapien
tgggggcctccagtggttaccacag

SEQ ID NO: 555155 - DNA, 25 bp, Homo sapien
tcttgctcaagtatacgtccctaga

SEQ ID NO: 555156 - DNA, 25 bp, Homo sapien
gtctgtagattctggactccatcca

SEQ ID NO: 555157 - DNA, 25 bp, Homo sapien
cgggaacaagagctgtggtctctct

SEQ ID NO: 555158 - DNA, 25 bp, Homo sapien
caggatcagcgggaacaagagctgt

SEQ ID NO: 555159 - DNA, 25 bp, Homo sapien
caagatggccggaacaggaaagaag

SEQ ID NO: 555160 - DNA, 25 bp, Homo sapien
gcggcgcctcaagtcccaggcgcat

SEQ ID NO: 555161 - DNA, 25 bp, Homo sapien
ctttccccttgcgtggatctcggtc

SEQ ID NO: 555162 - DNA, 25 bp, Homo sapien
cgtggatctcggtcacaagatggcc

SEQ ID NO: 555163 - DNA, 25 bp, Homo sapien
ctccggaccacggacgactcaggat

SEQ ID NO: 555164 - DNA, 25 bp, Homo sapien
tcttgcagggcgcaggatgaaacgt

SEQ ID NO: 555165 - DNA, 25 bp, Homo sapien
gctctagggccttccagactccgga

SEQ ID NO: 555166 - DNA, 25 bp, Homo sapien
tgaaacgtgtctggtctgggcaagt

SEQ ID NO: 555167 - DNA, 25 bp, Homo sapien
ctcttgcaggtttgagtttctgatg

SEQ ID NO: 555168 - DNA, 25 bp, Homo sapien
ggccttctggtagcgtcctcacatg

SEQ ID NO: 555169 - DNA, 25 bp, Homo sapien
gggccttctggtagcgtcctcacat

SEQ ID NO: 555170 - DNA, 25 bp, Homo sapien
agggccttctggtagcgtcctcaca

SEQ ID NO: 555171 - DNA, 25 bp, Homo sapien
gaaaataagctccacctgatgaagg

SEQ ID NO: 555172 - DNA, 25 bp, Homo sapien
caaggatccttgtaagacggaggca

SEQ ID NO: 555173 - DNA, 25 bp, Homo sapien
gatattaactttgaccacctggcca

SEQ ID NO: 555174 - DNA, 25 bp, Homo sapien
gagattatagtcatgcggccagaag

SEQ ID NO: 555175 - DNA, 25 bp, Homo sapien
tataagtgctctacttgtttctgaa

SEQ ID NO: 555176 - DNA, 25 bp, Homo sapien
taaaagcacaagtttgtaaacataa

SEQ ID NO: 555177 - DNA, 25 bp, Homo sapien
aacataaatgtggaaggatgtatat

SEQ ID NO: 555178 - DNA, 25 bp, Homo sapien
tggtggcattaacttaatgctgact

SEQ ID NO: 555179 - DNA, 25 bp, Homo sapien
actccatagagtctgacgaatgcaa

SEQ ID NO: 555180 - DNA, 25 bp, Homo sapien
catagagtctgacgaatgcaaacat

SEQ ID NO: 555181 - DNA, 25 bp, Homo sapien
tagagtctgacgaatgcaaacatat

SEQ ID NO: 555182 - DNA, 25 bp, Homo sapien
tccatagagtctgacgaatgcaaac

SEQ ID NO: 555183 - DNA, 25 bp, Homo sapien
caccattgaagacccttgctatttt

SEQ ID NO: 555184 - DNA, 25 bp, Homo sapien
ttggcaagagtgattcgtgaaaacc

SEQ ID NO: 555185 - DNA, 25 bp, Homo sapien
agatgaacattggaggaaacattcc

SEQ ID NO: 555186 - DNA, 25 bp, Homo sapien
gaaacattcccaagcattaatcact

SEQ ID NO: 555187 - DNA, 25 bp, Homo sapien
ggtcataggcagcacactggtgata

SEQ ID NO: 555188 - DNA, 25 bp, Homo sapien
tttccttaaggccagggtcataggc

SEQ ID NO: 555189 - DNA, 25 bp, Homo sapien
cagggtcataggcagcacactggtg

SEQ ID NO: 555190 - DNA, 25 bp, Homo sapien
gcagcacactggtgataactcactg

SEQ ID NO: 555191 - DNA, 25 bp, Homo sapien
tatcaggatcctaaccactttacag

SEQ ID NO: 555192 - DNA, 25 bp, Homo sapien
gctggctgccttgggtacagtacct

SEQ ID NO: 555193 - DNA, 25 bp, Homo sapien
tacacctgcatatttgtggacattg

SEQ ID NO: 555194 - DNA, 25 bp, Homo sapien
tacctcaattgaatgtctacacctg

SEQ ID NO: 555195 - DNA, 25 bp, Homo sapien
tgaatttcccctggtaagcgcaaga

SEQ ID NO: 555196 - DNA, 25 bp, Homo sapien
aggaacgccttgctctcttaagcca

SEQ ID NO: 555197 - DNA, 25 bp, Homo sapien
tcaaggcagcaaatacaggtgaagt

SEQ ID NO: 555198 - DNA, 25 bp, Homo sapien
caagattcaggatccgttctcacag

SEQ ID NO: 555199 - DNA, 25 bp, Homo sapien
tatttgttccgggacgctcagcggg

SEQ ID NO: 555200 - DNA, 25 bp, Homo sapien
gttctaatcatcagatcgccccagc

SEQ ID NO: 555201 - DNA, 25 bp, Homo sapien
gcaattacgcacttctctctggtag

SEQ ID NO: 555202 - DNA, 25 bp, Homo sapien
gcttacggctcagttcagacagtat

SEQ ID NO: 555203 - DNA, 25 bp, Homo sapien
ttggccttcccattcgtacgctgcg

SEQ ID NO: 555204 - DNA, 25 bp, Homo sapien
gcggctgcgctttcctctcgtaaca

SEQ ID NO: 555205 - DNA, 25 bp, Homo sapien
gtaacaccacgctggcgaacctgga

SEQ ID NO: 555206 - DNA, 25 bp, Homo sapien
cctggaaaggatcaaatagtcccac

SEQ ID NO: 555207 - DNA, 25 bp, Homo sapien
gccgccagaaagaaggcgattggat

SEQ ID NO: 555208 - DNA, 25 bp, Homo sapien
ttccacgttatcctatcagggacgg

SEQ ID NO: 555209 - DNA, 25 bp, Homo sapien
actcgcgagccctcggacatggtgg

SEQ ID NO: 555210 - DNA, 25 bp, Homo sapien
ccactgaggcctgagcgagagccga

SEQ ID NO: 555211 - DNA, 25 bp, Homo sapien
taaccctaatgataaagttcctcaa

SEQ ID NO: 555212 - DNA, 25 bp, Homo sapien
ccttaatgtctcagggtattcctca

SEQ ID NO: 555213 - DNA, 25 bp, Homo sapien
tattcctcaatagctattgccacag

SEQ ID NO: 555214 - DNA, 25 bp, Homo sapien
ttatataaagcacctgcacccacag

SEQ ID NO: 555215 - DNA, 25 bp, Homo sapien
ccatgactaatgataggaaaaataa

SEQ ID NO: 555216 - DNA, 25 bp, Homo sapien
ttattcccacatggcttgtaaccat

SEQ ID NO: 555217 - DNA, 25 bp, Homo sapien
ggaaaaataatcattgtacttcaac

SEQ ID NO: 555218 - DNA, 25 bp, Homo sapien
tcccacatggcttgtaaccatgact

SEQ ID NO: 555219 - DNA, 25 bp, Homo sapien
agctgaagttgtaattaaactattc

SEQ ID NO: 555220 - DNA, 25 bp, Homo sapien
gctgaagttgtaattaaactattct

SEQ ID NO: 555221 - DNA, 25 bp, Homo sapien
aagctgaagttgtaattaaactatt

SEQ ID NO: 555222 - DNA, 25 bp, Homo sapien
cctacaaaggggagtgacaagaatt

SEQ ID NO: 555223 - DNA, 25 bp, Homo sapien
tggtccctcactaatacatttctcc

SEQ ID NO: 555224 - DNA, 25 bp, Homo sapien
aggtggtccctcactaatacatttc

SEQ ID NO: 555225 - DNA, 25 bp, Homo sapien
gtcatacctgtcctacaaaggggag

SEQ ID NO: 555226 - DNA, 25 bp, Homo sapien
cggtgcctggccttgttggtctttt

SEQ ID NO: 555227 - DNA, 25 bp, Homo sapien
tagaacagtcattgattttaggcct

SEQ ID NO: 555228 - DNA, 25 bp, Homo sapien
gggatttgttaatggtttctatggc

SEQ ID NO: 555229 - DNA, 25 bp, Homo sapien
tggttgtaccttgtgcttttgctag

SEQ ID NO: 555230 - DNA, 25 bp, Homo sapien
gctgtgatctgagctaaacaaacaa

SEQ ID NO: 555231 - DNA, 25 bp, Homo sapien
cagtaatatggcctggaaatttcgt

SEQ ID NO: 555232 - DNA, 25 bp, Homo sapien
tttgtggccttccatgtcagtggga

SEQ ID NO: 555233 - DNA, 25 bp, Homo sapien
tcgttaagagggagacaggctaagc

SEQ ID NO: 555234 - DNA, 25 bp, Homo sapien
ggtatcacctagagaagttcacgca

SEQ ID NO: 555235 - DNA, 25 bp, Homo sapien
gaggcgtaccctagccacagctgtt

SEQ ID NO: 555236 - DNA, 25 bp, Homo sapien
gtgaggttacagacacggccctggt

SEQ ID NO: 555237 - DNA, 25 bp, Homo sapien
tacctgcagtggaaagccgagcaag

SEQ ID NO: 555238 - DNA, 25 bp, Homo sapien
ggatctgagacacatgatccacgtg

SEQ ID NO: 555239 - DNA, 25 bp, Homo sapien
gaaagtattctgttgggtccctgga

SEQ ID NO: 555240 - DNA, 25 bp, Homo sapien
tcttctgggcagtggcaatttgttg

SEQ ID NO: 555241 - DNA, 25 bp, Homo sapien
gcttgttggtttgagcatgggccca

SEQ ID NO: 555242 - DNA, 25 bp, Homo sapien
tgtaacatgtaaactggccactcag

SEQ ID NO: 555243 - DNA, 25 bp, Homo sapien
gggccatcaagactgtgtttacatt

SEQ ID NO: 555244 - DNA, 25 bp, Homo sapien
tagcttaatactccatgaaaatatg

SEQ ID NO: 555245 - DNA, 25 bp, Homo sapien
tatgggacctagaatactggagaag

SEQ ID NO: 555246 - DNA, 25 bp, Homo sapien
cacaggatgaggtccaaatggcact

SEQ ID NO: 555247 - DNA, 25 bp, Homo sapien
tatatcccacatgcccataaatgct

SEQ ID NO: 555248 - DNA, 25 bp, Homo sapien
ggttacatcctcaacttagttccca

SEQ ID NO: 555249 - DNA, 25 bp, Homo sapien
acctaatgaatcagactctccacag

SEQ ID NO: 555250 - DNA, 25 bp, Homo sapien
agacttccaaatcgtctcagcaggg

SEQ ID NO: 555251 - DNA, 25 bp, Homo sapien
aaagaatatgtcactgatcttaacg

SEQ ID NO: 555252 - DNA, 25 bp, Homo sapien
tgatcttaacgagacttccaaatcg

SEQ ID NO: 555253 - DNA, 25 bp, Homo sapien
tataacttaaactcattcaatacat

SEQ ID NO: 555254 - DNA, 25 bp, Homo sapien
tagcttctggcatcttaaacataaa

SEQ ID NO: 555255 - DNA, 25 bp, Homo sapien
agcttctggcatcttaaacataaaa

SEQ ID NO: 555256 - DNA, 25 bp, Homo sapien
gatgaggaagcaccggtactgactg

SEQ ID NO: 555257 - DNA, 25 bp, Homo sapien
gcaccggtactgactgaggatcctt

SEQ ID NO: 555258 - DNA, 25 bp, Homo sapien
gaggatcctttatttgctagttcag

SEQ ID NO: 555259 - DNA, 25 bp, Homo sapien
tgctagttcagtacctatatgcttc

SEQ ID NO: 555260 - DNA, 25 bp, Homo sapien
caacacgagaatagctctttgtaca

SEQ ID NO: 555261 - DNA, 25 bp, Homo sapien
tacgcaacacgagaatagctctttg

SEQ ID NO: 555262 - DNA, 25 bp, Homo sapien
cgcaacacgagaatagctctttgta

SEQ ID NO: 555263 - DNA, 25 bp, Homo sapien
actgtgatgtctattatattgtctc

SEQ ID NO: 555264 - DNA, 25 bp, Homo sapien
gatgaggtgggattccttccttctt

SEQ ID NO: 555265 - DNA, 25 bp, Homo sapien
ggatgaggtgggattccttccttct

SEQ ID NO: 555266 - DNA, 25 bp, Homo sapien
gaggtgggattccttccttcttcaa

SEQ ID NO: 555267 - DNA, 25 bp, Homo sapien
caaaatgtttctagagctactaaaa

SEQ ID NO: 555268 - DNA, 25 bp, Homo sapien
tagttgataaaaatattcctctgaa

SEQ ID NO: 555269 - DNA, 25 bp, Homo sapien
gaattgtacaagaagggagacagga

SEQ ID NO: 555270 - DNA, 25 bp, Homo sapien
tctgaattgtacaagaagggagaca

SEQ ID NO: 555271 - DNA, 25 bp, Homo sapien
ttcctctgaattgtacaagaaggga

SEQ ID NO: 555272 - DNA, 25 bp, Homo sapien
ttctctctagcttcattggaggctg

SEQ ID NO: 555273 - DNA, 25 bp, Homo sapien
tggaggctgaactctccacggtttt

SEQ ID NO: 555274 - DNA, 25 bp, Homo sapien
tcattggaggctgaactctccacgg

SEQ ID NO: 555275 - DNA, 25 bp, Homo sapien
ctctccacggtttttgtttctccat

SEQ ID NO: 555276 - DNA, 25 bp, Homo sapien
tcttgattagccacttcagcccatt

SEQ ID NO: 555277 - DNA, 25 bp, Homo sapien
tgtttgcacgttctgtctggagatt

SEQ ID NO: 555278 - DNA, 25 bp, Homo sapien
tttgtttgcacgttctgtctggaga

SEQ ID NO: 555279 - DNA, 25 bp, Homo sapien
gtttgcacgttctgtctggagattt

SEQ ID NO: 555280 - DNA, 25 bp, Homo sapien
ttttgtttgcacgttctgtctggag

SEQ ID NO: 555281 - DNA, 25 bp, Homo sapien
ttctggcttagtttccactttcgca

SEQ ID NO: 555282 - DNA, 25 bp, Homo sapien
tggcttagtttccactttcgcaggg

SEQ ID NO: 555283 - DNA, 25 bp, Homo sapien
ccttcgctgtcccttcggtggagct

SEQ ID NO: 555284 - DNA, 25 bp, Homo sapien
tgtgcagatctcctctcatgagcta

SEQ ID NO: 555285 - DNA, 25 bp, Homo sapien
taaaagtgtgtggtatactgtaccc

SEQ ID NO: 555286 - DNA, 25 bp, Homo sapien
gtttgaatttttgtccccatctata

SEQ ID NO: 555287 - DNA, 25 bp, Homo sapien
cagaatgagagattacaggctaaat

SEQ ID NO: 555288 - DNA, 25 bp, Homo sapien
agttgtagttcccaatgctggaggt

SEQ ID NO: 555289 - DNA, 25 bp, Homo sapien
tggccaataagcacaacgatatggt

SEQ ID NO: 555290 - DNA, 25 bp, Homo sapien
tgggttagcagcattccctcggtgc

SEQ ID NO: 555291 - DNA, 25 bp, Homo sapien
gtatagcaaagccacaggacataag

SEQ ID NO: 555292 - DNA, 25 bp, Homo sapien
tgttcctccaatgtaagacacctgc

SEQ ID NO: 555293 - DNA, 25 bp, Homo sapien
tagaggctgcactaatatacagtcc

SEQ ID NO: 555294 - DNA, 25 bp, Homo sapien
gagatacctagcagcgggatttctg

SEQ ID NO: 555295 - DNA, 25 bp, Homo sapien
tacttggatgaattccatagcggtg

SEQ ID NO: 555296 - DNA, 25 bp, Homo sapien
tatacagtcccaacagtagggtaaa

SEQ ID NO: 555297 - DNA, 25 bp, Homo sapien
cactgacccgaacacaataggagtt

SEQ ID NO: 555298 - DNA, 25 bp, Homo sapien
catttgttgaacacttatgtagggc

SEQ ID NO: 555299 - DNA, 25 bp, Homo sapien
gcttccctaaacagtaaagctgagg

SEQ ID NO: 555300 - DNA, 25 bp, Homo sapien
tgaaagtctctaacacactgacccg

SEQ ID NO: 555301 - DNA, 25 bp, Homo sapien
tgtcttatctcagcatcatactcca

SEQ ID NO: 555302 - DNA, 25 bp, Homo sapien
ctaatagttgtcttatctcagcatc

SEQ ID NO: 555303 - DNA, 25 bp, Homo sapien
acccattctgggacaattctggcag

SEQ ID NO: 555304 - DNA, 25 bp, Homo sapien
cacccattctgggacaattctggca

SEQ ID NO: 555305 - DNA, 25 bp, Homo sapien
cagtcttgaggaagagacttaatgg

SEQ ID NO: 555306 - DNA, 25 bp, Homo sapien
gaagagacttaatggcgacttggta

SEQ ID NO: 555307 - DNA, 25 bp, Homo sapien
accaggtttcacaccacagccagtc

SEQ ID NO: 555308 - DNA, 25 bp, Homo sapien
acttaatggcgacttggtaaatcat

SEQ ID NO: 555309 - DNA, 25 bp, Homo sapien
ggaggcatagaaacctaccattcaa

SEQ ID NO: 555310 - DNA, 25 bp, Homo sapien
tcaatagtccccacaatggacagcc

SEQ ID NO: 555311 - DNA, 25 bp, Homo sapien
tctacccctgggaacaaggatgaag

SEQ ID NO: 555312 - DNA, 25 bp, Homo sapien
tggacagcctcactacctctatctg

SEQ ID NO: 555313 - DNA, 25 bp, Homo sapien
ttcctttgctattgagttatgggag

SEQ ID NO: 555314 - DNA, 25 bp, Homo sapien
tattttcctttgctattgagttatg

SEQ ID NO: 555315 - DNA, 25 bp, Homo sapien
ttttcctttgctattgagttatggg

SEQ ID NO: 555316 - DNA, 25 bp, Homo sapien
tcctttgctattgagttatgggagt

SEQ ID NO: 555317 - DNA, 25 bp, Homo sapien
gaagaggtcagttgcgtagccagcc

SEQ ID NO: 555318 - DNA, 25 bp, Homo sapien
agaggtcagttgcgtagccagccag

SEQ ID NO: 555319 - DNA, 25 bp, Homo sapien
aagaggtcagttgcgtagccagcca

SEQ ID NO: 555320 - DNA, 25 bp, Homo sapien
agatttacacctatgttcatttcta

SEQ ID NO: 555321 - DNA, 25 bp, Homo sapien
attttagtatcttgtcagacacatg

SEQ ID NO: 555322 - DNA, 25 bp, Homo sapien
aaagatttacacctatgttcatttc

SEQ ID NO: 555323 - DNA, 25 bp, Homo sapien
caaagatttacacctatgttcattt

SEQ ID NO: 555324 - DNA, 25 bp, Homo sapien
cagtacaatactgaataggaaaggt

SEQ ID NO: 555325 - DNA, 25 bp, Homo sapien
gataaagttcatgtggtcacgattc

SEQ ID NO: 555326 - DNA, 25 bp, Homo sapien
tggtgatgactggtatgctgccttc

SEQ ID NO: 555327 - DNA, 25 bp, Homo sapien
tcccttccggttctagtgtgctgag

SEQ ID NO: 555328 - DNA, 25 bp, Homo sapien
ctagacgggatgagggccggggaga

SEQ ID NO: 555329 - DNA, 25 bp, Homo sapien
gagggccggggagagggactcctca

SEQ ID NO: 555330 - DNA, 25 bp, Homo sapien
tcctagacgggatgagggccgggga

SEQ ID NO: 555331 - DNA, 25 bp, Homo sapien
cagggtggcggctggtcagagacgc

SEQ ID NO: 555332 - DNA, 25 bp, Homo sapien
tattacttcacggatcatgactttg

SEQ ID NO: 555333 - DNA, 25 bp, Homo sapien
gcaaagatccctacacaaatgatat

SEQ ID NO: 555334 - DNA, 25 bp, Homo sapien
tccataaacagggaatacctcttca

SEQ ID NO: 555335 - DNA, 25 bp, Homo sapien
tcttctcagcaatgaacgcaagttc

SEQ ID NO: 555336 - DNA, 25 bp, Homo sapien
gtgagactctgtctcaaaaaaaaaa

SEQ ID NO: 555337 - DNA, 25 bp, Homo sapien
ccaagatagtgccattgcactccgg

SEQ ID NO: 555338 - DNA, 25 bp, Homo sapien
ctgggcaacagagtgagactctgtc

SEQ ID NO: 555339 - DNA, 25 bp, Homo sapien
caagatagtgccattgcactccggc

SEQ ID NO: 555340 - DNA, 25 bp, Homo sapien
tggagactgtgtacgggcccaacag

SEQ ID NO: 555341 - DNA, 25 bp, Homo sapien
ggctactccaatgacacaatgggca

SEQ ID NO: 555342 - DNA, 25 bp, Homo sapien
ggaagtctgctagccttgatcatag

SEQ ID NO: 555343 - DNA, 25 bp, Homo sapien
catgaatggagtagacatgctggca

SEQ ID NO: 555344 - DNA, 25 bp, Homo sapien
taaacagcagtaaattgagaaaaaa

SEQ ID NO: 555345 - DNA, 25 bp, Homo sapien
tagaaagtagaggtttgagaatgga

SEQ ID NO: 555346 - DNA, 25 bp, Homo sapien
tccaatagataattacataaacagc

SEQ ID NO: 555347 - DNA, 25 bp, Homo sapien
ttatgagcacggagttggaacagtc

SEQ ID NO: 555348 - DNA, 25 bp, Homo sapien
tgagagcttgatactggctcctgag

SEQ ID NO: 555349 - DNA, 25 bp, Homo sapien
gtttggatcttgactgagagcttga

SEQ ID NO: 555350 - DNA, 25 bp, Homo sapien
ctgaacttcttgagatccactacat

SEQ ID NO: 555351 - DNA, 25 bp, Homo sapien
gaacttcttgagatccactacatat

SEQ ID NO: 555352 - DNA, 25 bp, Homo sapien
cctgcggctatcacaaaatggagta

SEQ ID NO: 555353 - DNA, 25 bp, Homo sapien
gatatggtatttccgtcttaaaaga

SEQ ID NO: 555354 - DNA, 25 bp, Homo sapien
gatgcccagtatcctgttttccaga

SEQ ID NO: 555355 - DNA, 25 bp, Homo sapien
taaggagctccatccagatcgaaat

SEQ ID NO: 555356 - DNA, 25 bp, Homo sapien
gaaaaatattagtgcacacattgaa

SEQ ID NO: 555357 - DNA, 25 bp, Homo sapien
ttttaatatgctcaagccttctaga

SEQ ID NO: 555358 - DNA, 25 bp, Homo sapien
ccattattgtatattggcaaatgtt

SEQ ID NO: 555359 - DNA, 25 bp, Homo sapien
gaataacaaaatcattccatgccaa

SEQ ID NO: 555360 - DNA, 25 bp, Homo sapien
ggaggatggctcgaatgcaggagtc

SEQ ID NO: 555361 - DNA, 25 bp, Homo sapien
cctggagttccagctcctaggatgc

SEQ ID NO: 555362 - DNA, 25 bp, Homo sapien
ttctaacttatccatttactttata

SEQ ID NO: 555363 - DNA, 25 bp, Homo sapien
gatggctcgaatgcaggagtctgag

SEQ ID NO: 555364 - DNA, 25 bp, Homo sapien
gcatcaacaaaaatgattttgtcca

SEQ ID NO: 555365 - DNA, 25 bp, Homo sapien
tcagcatcaacaaaaatgattttgt

SEQ ID NO: 555366 - DNA, 25 bp, Homo sapien
tggtcagcatcaacaaaaatgattt

SEQ ID NO: 555367 - DNA, 25 bp, Homo sapien
ctggtcagcatcaacaaaaatgatt

SEQ ID NO: 555368 - DNA, 25 bp, Homo sapien
tatcggaatccatactctttagcca

SEQ ID NO: 555369 - DNA, 25 bp, Homo sapien
tctttagccatgtgaggaattactt

SEQ ID NO: 555370 - DNA, 25 bp, Homo sapien
tcagtctgttgacgaagccaacggg

SEQ ID NO: 555371 - DNA, 25 bp, Homo sapien
caacggggccacctatattgaacta

SEQ ID NO: 555372 - DNA, 25 bp, Homo sapien
cctatgctataaaggatgattcttg

SEQ ID NO: 555373 - DNA, 25 bp, Homo sapien
taattagctgtttcatatcaggcct

SEQ ID NO: 555374 - DNA, 25 bp, Homo sapien
cataaggttaagcacctgaggtctg

SEQ ID NO: 555375 - DNA, 25 bp, Homo sapien
gcaaatgggctgttacataaggtta

SEQ ID NO: 555376 - DNA, 25 bp, Homo sapien
cactggtgttttggtgttacgcaaa

SEQ ID NO: 555377 - DNA, 25 bp, Homo sapien
ttaaatgtcggtgagagataatttt

SEQ ID NO: 555378 - DNA, 25 bp, Homo sapien
tggtgttacgcaaaacagaaagcat

SEQ ID NO: 555379 - DNA, 25 bp, Homo sapien
tttaaatgtcggtgagagataattt

SEQ ID NO: 555380 - DNA, 25 bp, Homo sapien
tgaaggtatgaattagaaggttttc

SEQ ID NO: 555381 - DNA, 25 bp, Homo sapien
aaaatatggtttatcaagtatgtaa

SEQ ID NO: 555382 - DNA, 25 bp, Homo sapien
caagtatgtaatgtgtaaggatgaa

SEQ ID NO: 555383 - DNA, 25 bp, Homo sapien
taacagtaacaggagctcatatata

SEQ ID NO: 555384 - DNA, 25 bp, Homo sapien
tattgacaaattcactggatgggtc

SEQ ID NO: 555385 - DNA, 25 bp, Homo sapien
ggatgggtcatttggtttgctaacc

SEQ ID NO: 555386 - DNA, 25 bp, Homo sapien
tattaagtctacaaaccctgaagag

SEQ ID NO: 555387 - DNA, 25 bp, Homo sapien
tgctaacctaaacctccaaatggaa

SEQ ID NO: 555388 - DNA, 25 bp, Homo sapien
taatattatgggtttcctgtgagaa

SEQ ID NO: 555389 - DNA, 25 bp, Homo sapien
tctccttagcaggatataaaaataa

SEQ ID NO: 555390 - DNA, 25 bp, Homo sapien
ggaactgagtatcaaggaaacagag

SEQ ID NO: 555391 - DNA, 25 bp, Homo sapien
tgtatctccttagcaggatataaaa

SEQ ID NO: 555392 - DNA, 25 bp, Homo sapien
cgttcatataaatgaccagaagcaa

SEQ ID NO: 555393 - DNA, 25 bp, Homo sapien
aaaaaacgttcatataaatgaccag

SEQ ID NO: 555394 - DNA, 25 bp, Homo sapien
taaaaaacgttcatataaatgacca

SEQ ID NO: 555395 - DNA, 25 bp, Homo sapien
aaacgttcatataaatgaccagaag

SEQ ID NO: 555396 - DNA, 25 bp, Homo sapien
ttgttttctttatgcaagcttactg

SEQ ID NO: 555397 - DNA, 25 bp, Homo sapien
ttctttatgcaagcttactgtgaaa

SEQ ID NO: 555398 - DNA, 25 bp, Homo sapien
gttttctttatgcaagcttactgtg

SEQ ID NO: 555399 - DNA, 25 bp, Homo sapien
ctgaaaaaatgtttaggacatcttt

SEQ ID NO: 555400 - DNA, 25 bp, Homo sapien
cttaagtgtggaactacggcacagc

SEQ ID NO: 555401 - DNA, 25 bp, Homo sapien
gcagattttctccaccacgcagggt

SEQ ID NO: 555402 - DNA, 25 bp, Homo sapien
tgacaaagaaagcactagggaacca

SEQ ID NO: 555403 - DNA, 25 bp, Homo sapien
gacatggccatatctagtgtactga

SEQ ID NO: 555404 - DNA, 25 bp, Homo sapien
agacttctggatcaatctagtgatg

SEQ ID NO: 555405 - DNA, 25 bp, Homo sapien
gattagaggacctttgccttactta

SEQ ID NO: 555406 - DNA, 25 bp, Homo sapien
gaacttccacatactagacttctgg

SEQ ID NO: 555407 - DNA, 25 bp, Homo sapien
tatcttatccctcctagattagagg

SEQ ID NO: 555408 - DNA, 25 bp, Homo sapien
tcttcatcggtaaggatatcttcct

SEQ ID NO: 555409 - DNA, 25 bp, Homo sapien
tttttcatcttcatcggtaaggata

SEQ ID NO: 555410 - DNA, 25 bp, Homo sapien
tttcatcttcatcggtaaggatatc

SEQ ID NO: 555411 - DNA, 25 bp, Homo sapien
catcttcatcggtaaggatatcttc

SEQ ID NO: 555412 - DNA, 25 bp, Homo sapien
taaccactgaagagtcggaaaagct

SEQ ID NO: 555413 - DNA, 25 bp, Homo sapien
tgtgccactcctaggagactcttgc

SEQ ID NO: 555414 - DNA, 25 bp, Homo sapien
ctaggattcttgtctacctgaagac

SEQ ID NO: 555415 - DNA, 25 bp, Homo sapien
tagtttcctcctatggccactgtgc

SEQ ID NO: 555416 - DNA, 25 bp, Homo sapien
aactactgaaatacctagggtatgg

SEQ ID NO: 555417 - DNA, 25 bp, Homo sapien
ctgaaatacctagggtatgggtagg

SEQ ID NO: 555418 - DNA, 25 bp, Homo sapien
atacctagggtatgggtaggctgta

SEQ ID NO: 555419 - DNA, 25 bp, Homo sapien
tctaattggtttctttcataattca

SEQ ID NO: 555420 - DNA, 25 bp, Homo sapien
tattagtaccaattcaaggttcagg

SEQ ID NO: 555421 - DNA, 25 bp, Homo sapien
tatggatgtctcttccagataccgc

SEQ ID NO: 555422 - DNA, 25 bp, Homo sapien
tctctgaaggcatgttaaagctatc

SEQ ID NO: 555423 - DNA, 25 bp, Homo sapien
tcaggattccctggcctacttggct

SEQ ID NO: 555424 - DNA, 25 bp, Homo sapien
gaagctgtttaatacaacaatgata

SEQ ID NO: 555425 - DNA, 25 bp, Homo sapien
ttttgaagctgtttaatacaacaat

SEQ ID NO: 555426 - DNA, 25 bp, Homo sapien
gctgtttaatacaacaatgatatct

SEQ ID NO: 555427 - DNA, 25 bp, Homo sapien
tttgaagctgtttaatacaacaatg

SEQ ID NO: 555428 - DNA, 25 bp, Homo sapien
taggtctgcttgagagtcagttcct

SEQ ID NO: 555429 - DNA, 25 bp, Homo sapien
ctaggtctgcttgagagtcagttcc

SEQ ID NO: 555430 - DNA, 25 bp, Homo sapien
gtctgcttgagagtcagttccttca

SEQ ID NO: 555431 - DNA, 25 bp, Homo sapien
tgcttgagagtcagttccttcatgc

SEQ ID NO: 555432 - DNA, 25 bp, Homo sapien
gctgttatataccaaggctatcaca

SEQ ID NO: 555433 - DNA, 25 bp, Homo sapien
cgtaagtccaataacactagtgcat

SEQ ID NO: 555434 - DNA, 25 bp, Homo sapien
caatactacccaatcactctgaaag

SEQ ID NO: 555435 - DNA, 25 bp, Homo sapien
cacatccctgatatattgtagtgat

SEQ ID NO: 555436 - DNA, 25 bp, Homo sapien
tagagaacttttaagagtccgcaga

SEQ ID NO: 555437 - DNA, 25 bp, Homo sapien
agagccagcaaagttacggtggacc

SEQ ID NO: 555438 - DNA, 25 bp, Homo sapien
caaagttacggtggaccaactcgag

SEQ ID NO: 555439 - DNA, 25 bp, Homo sapien
gtgagttttaactactgcagagcca

SEQ ID NO: 555440 - DNA, 25 bp, Homo sapien
tgttgttttgattctcttggttgta

SEQ ID NO: 555441 - DNA, 25 bp, Homo sapien
gattctcttggttgtattacactaa

SEQ ID NO: 555442 - DNA, 25 bp, Homo sapien
attgttgttttgattctcttggttg

SEQ ID NO: 555443 - DNA, 25 bp, Homo sapien
ttctcttggttgtattacactaaaa

SEQ ID NO: 555444 - DNA, 25 bp, Homo sapien
tcagtatccaagcacctgggtttgc

SEQ ID NO: 555445 - DNA, 25 bp, Homo sapien
cttcagattttccttggtgtaacct

SEQ ID NO: 555446 - DNA, 25 bp, Homo sapien
taacctcagtatccaagcacctggg

SEQ ID NO: 555447 - DNA, 25 bp, Homo sapien
tccttggtgtaacctcagtatccaa

SEQ ID NO: 555448 - DNA, 25 bp, Homo sapien
cgaattgctcatgaatacacgaatg

SEQ ID NO: 555449 - DNA, 25 bp, Homo sapien
taaattctataaatcaattccaagt

SEQ ID NO: 555450 - DNA, 25 bp, Homo sapien
tacacgaatgatctaagaaagtatt

SEQ ID NO: 555451 - DNA, 25 bp, Homo sapien
tgagtaatatgactaaaaaccatcg

SEQ ID NO: 555452 - DNA, 25 bp, Homo sapien
tattttttgtgcctagtgtgaactg

SEQ ID NO: 555453 - DNA, 25 bp, Homo sapien
tcactattgtatcaaccacagcagg

SEQ ID NO: 555454 - DNA, 25 bp, Homo sapien
gtccttccagtagtaagtattctag

SEQ ID NO: 555455 - DNA, 25 bp, Homo sapien
tgcagaccccgaggaggctgttctg

SEQ ID NO: 555456 - DNA, 25 bp, Homo sapien
tgtggaggaagtatgtcattgtttt

SEQ ID NO: 555457 - DNA, 25 bp, Homo sapien
tggaggaagtatgtcattgtttttg

SEQ ID NO: 555458 - DNA, 25 bp, Homo sapien
ggaggaagtatgtcattgtttttgg

SEQ ID NO: 555459 - DNA, 25 bp, Homo sapien
aggaagtatgtcattgtttttggtg

SEQ ID NO: 555460 - DNA, 25 bp, Homo sapien
aatctcgctccgtcacccaggatgg

SEQ ID NO: 555461 - DNA, 25 bp, Homo sapien
aggatggagtgccatggcacagtct

SEQ ID NO: 555462 - DNA, 25 bp, Homo sapien
tcatgatccacccacgttggcctgc

SEQ ID NO: 555463 - DNA, 25 bp, Homo sapien
cccaggatggagtgccatggcacag

SEQ ID NO: 555464 - DNA, 25 bp, Homo sapien
cacagttgctgtgcactgtttcaac

SEQ ID NO: 555465 - DNA, 25 bp, Homo sapien
tttaagtgaatattatcaaggtcac

SEQ ID NO: 555466 - DNA, 25 bp, Homo sapien
tgcactgtttcaaccaaccagcctt

SEQ ID NO: 555467 - DNA, 25 bp, Homo sapien
gaggggtgattcaggaatatccaaa

SEQ ID NO: 555468 - DNA, 25 bp, Homo sapien
gaagaaacgtcattagcccctgaca

SEQ ID NO: 555469 - DNA, 25 bp, Homo sapien
aagagaagaaacgtcattagcccct

SEQ ID NO: 555470 - DNA, 25 bp, Homo sapien
tcattagcccctgacatcagttctg

SEQ ID NO: 555471 - DNA, 25 bp, Homo sapien
gaaacgtcattagcccctgacatca

SEQ ID NO: 555472 - DNA, 25 bp, Homo sapien
tgaatattcccatcaataagaatgg

SEQ ID NO: 555473 - DNA, 25 bp, Homo sapien
tattcccatcaataagaatggctca

SEQ ID NO: 555474 - DNA, 25 bp, Homo sapien
gaactgaatattcccatcaataaga

SEQ ID NO: 555475 - DNA, 25 bp, Homo sapien
aaggagaactgaatattcccatcaa

SEQ ID NO: 555476 - DNA, 25 bp, Homo sapien
aagcctgcccctacagttcatgaac

SEQ ID NO: 555477 - DNA, 25 bp, Homo sapien
aaagcctgcccctacagttcatgaa

SEQ ID NO: 555478 - DNA, 25 bp, Homo sapien
gaaagcctgcccctacagttcatga

SEQ ID NO: 555479 - DNA, 25 bp, Homo sapien
tgaaagcctgcccctacagttcatg

SEQ ID NO: 555480 - DNA, 25 bp, Homo sapien
ctcttcataggaatagggattttgc

SEQ ID NO: 555481 - DNA, 25 bp, Homo sapien
aaagcatcatactagctccactcct

SEQ ID NO: 555482 - DNA, 25 bp, Homo sapien
tccactcctttcagatatgattgct

SEQ ID NO: 555483 - DNA, 25 bp, Homo sapien
gctttggctaattccgtatttctta

SEQ ID NO: 555484 - DNA, 25 bp, Homo sapien
aatagcaatgacattgaagaacata

SEQ ID NO: 555485 - DNA, 25 bp, Homo sapien
ttctcttgaggattcgtctttataa

SEQ ID NO: 555486 - DNA, 25 bp, Homo sapien
gcaatgacattgaagaacatatcat

SEQ ID NO: 555487 - DNA, 25 bp, Homo sapien
ctcttgaggattcgtctttataaca

SEQ ID NO: 555488 - DNA, 25 bp, Homo sapien
tgtgacatcatatcgagatgcacgc

SEQ ID NO: 555489 - DNA, 25 bp, Homo sapien
gcacgcttaggcacagaggacataa

SEQ ID NO: 555490 - DNA, 25 bp, Homo sapien
ctgtgattctccctaagaaatgtga

SEQ ID NO: 555491 - DNA, 25 bp, Homo sapien
cataagggcatcaactttcataata

SEQ ID NO: 555492 - DNA, 25 bp, Homo sapien
ttctctcctaaattactaaatgtta

SEQ ID NO: 555493 - DNA, 25 bp, Homo sapien
taaatgttatcttttccaacaagta

SEQ ID NO: 555494 - DNA, 25 bp, Homo sapien
ctgcataaaaatcttcatctaaagg

SEQ ID NO: 555495 - DNA, 25 bp, Homo sapien
aatcttcatctaaaggtcctaagaa

SEQ ID NO: 555496 - DNA, 25 bp, Homo sapien
tggtgagttcgaaaaatattcactc

SEQ ID NO: 555497 - DNA, 25 bp, Homo sapien
tgctgacaatacccatttctccagg

SEQ ID NO: 555498 - DNA, 25 bp, Homo sapien
gacgtaatttaagtacatcttgaca

SEQ ID NO: 555499 - DNA, 25 bp, Homo sapien
tcttgacagaacaactggtgagttc

SEQ ID NO: 555500 - DNA, 25 bp, Homo sapien
ttgatgtaggattataaataatccc

SEQ ID NO: 555501 - DNA, 25 bp, Homo sapien
cctttgccagttgcccaagaaagct

SEQ ID NO: 555502 - DNA, 25 bp, Homo sapien
gttgcccaagaaagcttctcaaaaa

SEQ ID NO: 555503 - DNA, 25 bp, Homo sapien
tccccaaccgactatgaacacttgt

SEQ ID NO: 555504 - DNA, 25 bp, Homo sapien
aaaatacacttatccctgtggaagc

SEQ ID NO: 555505 - DNA, 25 bp, Homo sapien
tcagggttataaggacagagctccg

SEQ ID NO: 555506 - DNA, 25 bp, Homo sapien
ccccagaagggaaaacatagtcact

SEQ ID NO: 555507 - DNA, 25 bp, Homo sapien
gctaaaatttaacctgcacaagaga

SEQ ID NO: 555508 - DNA, 25 bp, Homo sapien
ccaccaacagagcatagctgctcta

SEQ ID NO: 555509 - DNA, 25 bp, Homo sapien
cagcctgccagctttggagagtcca

SEQ ID NO: 555510 - DNA, 25 bp, Homo sapien
tgctctatccgatcatggccagact

SEQ ID NO: 555511 - DNA, 25 bp, Homo sapien
tggagagtccaaacagtccagacaa

SEQ ID NO: 555512 - DNA, 25 bp, Homo sapien
gggtgagaaatgatccaccccaaca

SEQ ID NO: 555513 - DNA, 25 bp, Homo sapien
acagtctgggtgagaaatgatccac

SEQ ID NO: 555514 - DNA, 25 bp, Homo sapien
agctgttccactcagccggctctgg

SEQ ID NO: 555515 - DNA, 25 bp, Homo sapien
tctggagagtccaaacagtctgggt

SEQ ID NO: 555516 - DNA, 25 bp, Homo sapien
cctgcagtggcatgtaagtgagtca

SEQ ID NO: 555517 - DNA, 25 bp, Homo sapien
gccacgttgtgagggcacttaagta

SEQ ID NO: 555518 - DNA, 25 bp, Homo sapien
gaaattttccggtctgcaggctact

SEQ ID NO: 555519 - DNA, 25 bp, Homo sapien
gcaatggaatgaagcactctgctaa

SEQ ID NO: 555520 - DNA, 25 bp, Homo sapien
tatgtctgatcacaaggactaccag

SEQ ID NO: 555521 - DNA, 25 bp, Homo sapien
taccagagaatatatgtcacgagtc

SEQ ID NO: 555522 - DNA, 25 bp, Homo sapien
tcacgagtcatagaaaacaggtagg

SEQ ID NO: 555523 - DNA, 25 bp, Homo sapien
taaatagtggatttcgggtcactga

SEQ ID NO: 555524 - DNA, 25 bp, Homo sapien
gcaataatccagagagtgactgcag

SEQ ID NO: 555525 - DNA, 25 bp, Homo sapien
cccagaaggcttatcaaaatctgca

SEQ ID NO: 555526 - DNA, 25 bp, Homo sapien
gtgactgcagaaattatactctcat

SEQ ID NO: 555527 - DNA, 25 bp, Homo sapien
tgcattaaaaagaagttttctccca

SEQ ID NO: 555528 - DNA, 25 bp, Homo sapien
ttgcaattacagcactcttatcttg

SEQ ID NO: 555529 - DNA, 25 bp, Homo sapien
gcactcttatcttgtgaatccaaga

SEQ ID NO: 555530 - DNA, 25 bp, Homo sapien
tggttagtacgcaaaatcaaagtat

SEQ ID NO: 555531 - DNA, 25 bp, Homo sapien
tatacggggtacaacattattccta

SEQ ID NO: 555532 - DNA, 25 bp, Homo sapien
ttaaattgaggtactgctggttagt

SEQ ID NO: 555533 - DNA, 25 bp, Homo sapien
gaggtactgctggttagtacgcaaa

SEQ ID NO: 555534 - DNA, 25 bp, Homo sapien
tgcattcgtgcgatcatttaatgtg

SEQ ID NO: 555535 - DNA, 25 bp, Homo sapien
caattgcattcgtgcgatcatttaa

SEQ ID NO: 555536 - DNA, 25 bp, Homo sapien
cattcgtgcgatcatttaatgtgcc

SEQ ID NO: 555537 - DNA, 25 bp, Homo sapien
aaatcaattgcattcgtgcgatcat

SEQ ID NO: 555538 - DNA, 25 bp, Homo sapien
catggtagtaaccatttcttgagca

SEQ ID NO: 555539 - DNA, 25 bp, Homo sapien
tgagcacctattgtgagcaggacaa

SEQ ID NO: 555540 - DNA, 25 bp, Homo sapien
gaacatgctgccttgcagggtctgt

SEQ ID NO: 555541 - DNA, 25 bp, Homo sapien
acaaccagaatcatggtagtaacca

SEQ ID NO: 555542 - DNA, 25 bp, Homo sapien
aatattcatcatgtattttcttata

SEQ ID NO: 555543 - DNA, 25 bp, Homo sapien
tattttcttataaatgcttacctac

SEQ ID NO: 555544 - DNA, 25 bp, Homo sapien
ttcatcatgtattttcttataaatg

SEQ ID NO: 555545 - DNA, 25 bp, Homo sapien
tgtattttcttataaatgcttacct

SEQ ID NO: 555546 - DNA, 25 bp, Homo sapien
agcttgaggcaaaggacccaggcca

SEQ ID NO: 555547 - DNA, 25 bp, Homo sapien
tcttcatgtttaaagggttcaccat

SEQ ID NO: 555548 - DNA, 25 bp, Homo sapien
aaagggttcaccattataaagagct

SEQ ID NO: 555549 - DNA, 25 bp, Homo sapien
gggttcaccattataaagagcttga

SEQ ID NO: 555550 - DNA, 25 bp, Homo sapien
ttatatgccataggaaaaaacatcc

SEQ ID NO: 555551 - DNA, 25 bp, Homo sapien
tgctaactttatctgtcctttccaa

SEQ ID NO: 555552 - DNA, 25 bp, Homo sapien
taaaaaatatcagagtgttaaacaa

SEQ ID NO: 555553 - DNA, 25 bp, Homo sapien
gaacaccgccacatttttatatgcc

SEQ ID NO: 555554 - DNA, 25 bp, Homo sapien
gtattttggagaacactcttcacat

SEQ ID NO: 555555 - DNA, 25 bp, Homo sapien
cccaaatattagcatgaggaaatgt

SEQ ID NO: 555556 - DNA, 25 bp, Homo sapien
tccacagtgagtatattttgatcct

SEQ ID NO: 555557 - DNA, 25 bp, Homo sapien
aaatatcccaaatattagcatgagg

SEQ ID NO: 555558 - DNA, 25 bp, Homo sapien
tcccgaagggcttggcttacaggaa

SEQ ID NO: 555559 - DNA, 25 bp, Homo sapien
cgaagggcttggcttacaggaactt

SEQ ID NO: 555560 - DNA, 25 bp, Homo sapien
gggcttggcttacaggaacttgcca

SEQ ID NO: 555561 - DNA, 25 bp, Homo sapien
ctcccgaagggcttggcttacagga

SEQ ID NO: 555562 - DNA, 25 bp, Homo sapien
aatctcacaatcaatggattctttt

SEQ ID NO: 555563 - DNA, 25 bp, Homo sapien
atctcacaatcaatggattcttttg

SEQ ID NO: 555564 - DNA, 25 bp, Homo sapien
cttgcaggctgtgccacaaatttaa

SEQ ID NO: 555565 - DNA, 25 bp, Homo sapien
taattgtttagcacaacttgcaggc

SEQ ID NO: 555566 - DNA, 25 bp, Homo sapien
tgagataaggtaattagctcactga

SEQ ID NO: 555567 - DNA, 25 bp, Homo sapien
tggtcacagatatggttggattaac

SEQ ID NO: 555568 - DNA, 25 bp, Homo sapien
tcaaaacctcaattacgaaataatc

SEQ ID NO: 555569 - DNA, 25 bp, Homo sapien
tgtcagattctgtatcaaccttacc

SEQ ID NO: 555570 - DNA, 25 bp, Homo sapien
tatttccacaatgatccataacaga

SEQ ID NO: 555571 - DNA, 25 bp, Homo sapien
cagtttgctgtcaataaatgacttc

SEQ ID NO: 555572 - DNA, 25 bp, Homo sapien
taatcaaagcctagttcaagaattt

SEQ ID NO: 555573 - DNA, 25 bp, Homo sapien
ggataatatgtacttcagaagggag

SEQ ID NO: 555574 - DNA, 25 bp, Homo sapien
cctcagttgcctaatttataatgtg

SEQ ID NO: 555575 - DNA, 25 bp, Homo sapien
gctgagtaaaccttagtaaattcaa

SEQ ID NO: 555576 - DNA, 25 bp, Homo sapien
agctcgccagagagcaactccagca

SEQ ID NO: 555577 - DNA, 25 bp, Homo sapien
catcatctgtattaagaatgaacac

SEQ ID NO: 555578 - DNA, 25 bp, Homo sapien
caatatagttgaaagctcgccagag

SEQ ID NO: 555579 - DNA, 25 bp, Homo sapien
aattcttctgcaatatagttgaaag

SEQ ID NO: 555580 - DNA, 25 bp, Homo sapien
aatccaaggtatattcttgggccgg

SEQ ID NO: 555581 - DNA, 25 bp, Homo sapien
tgagaatagaaaacatcagcaagtt

SEQ ID NO: 555582 - DNA, 25 bp, Homo sapien
tcttgggccggatcaataaacagaa

SEQ ID NO: 555583 - DNA, 25 bp, Homo sapien
ctaagaggaacttcgtgagaataga

SEQ ID NO: 555584 - DNA, 25 bp, Homo sapien
tgaaaattgcgccttatggaaggta

SEQ ID NO: 555585 - DNA, 25 bp, Homo sapien
gaagtttctggcaacttgtaggcca

SEQ ID NO: 555586 - DNA, 25 bp, Homo sapien
tatggaaggtacacttccaggaaat

SEQ ID NO: 555587 - DNA, 25 bp, Homo sapien
ttgtaggccatgtaatatacaaatc

SEQ ID NO: 555588 - DNA, 25 bp, Homo sapien
ttcaaagcgctcaaacagggctgct

SEQ ID NO: 555589 - DNA, 25 bp, Homo sapien
tatttatgcaaatcaggtggtacct

SEQ ID NO: 555590 - DNA, 25 bp, Homo sapien
ttacaagaatagatctcaggcggcc

SEQ ID NO: 555591 - DNA, 25 bp, Homo sapien
tgtccaccaggctatgatacagctg

SEQ ID NO: 555592 - DNA, 25 bp, Homo sapien
cataagtatattcccaaatgtgtga

SEQ ID NO: 555593 - DNA, 25 bp, Homo sapien
tcatatcttccccattgatcccaag

SEQ ID NO: 555594 - DNA, 25 bp, Homo sapien
tagaagaatgtcgaatatctaatac

SEQ ID NO: 555595 - DNA, 25 bp, Homo sapien
ccaagattgcgaaggccattcatca

SEQ ID NO: 555596 - DNA, 25 bp, Homo sapien
tttccttctaatttcagcatatcca

SEQ ID NO: 555597 - DNA, 25 bp, Homo sapien
ttttccttctaatttcagcatatcc

SEQ ID NO: 555598 - DNA, 25 bp, Homo sapien
tccttctaatttcagcatatccaaa

SEQ ID NO: 555599 - DNA, 25 bp, Homo sapien
ttctaatttcagcatatccaaaata

SEQ ID NO: 555600 - DNA, 25 bp, Homo sapien
aagtaattataggtctaaccctcat

SEQ ID NO: 555601 - DNA, 25 bp, Homo sapien
tctcccagttctgatattctaagac

SEQ ID NO: 555602 - DNA, 25 bp, Homo sapien
aaccctcatccaaacaaatatcttg

SEQ ID NO: 555603 - DNA, 25 bp, Homo sapien
tctgatattctaagacactttgggc

SEQ ID NO: 555604 - DNA, 25 bp, Homo sapien
tcgcctggctgaattttaaatctaa

SEQ ID NO: 555605 - DNA, 25 bp, Homo sapien
taaaagcgtcataaacatccatatc

SEQ ID NO: 555606 - DNA, 25 bp, Homo sapien
catttataaatagacgagcatcgcc

SEQ ID NO: 555607 - DNA, 25 bp, Homo sapien
tatcaacacgaaggccatttataaa

SEQ ID NO: 555608 - DNA, 25 bp, Homo sapien
gttaaccagtgatagaacaatagtg

SEQ ID NO: 555609 - DNA, 25 bp, Homo sapien
taaccagtgatagaacaatagtgac

SEQ ID NO: 555610 - DNA, 25 bp, Homo sapien
tagttaaccagtgatagaacaatag

SEQ ID NO: 555611 - DNA, 25 bp, Homo sapien
aaagcaatagttaaccagtgataga

SEQ ID NO: 555612 - DNA, 25 bp, Homo sapien
ccattgtggctttactaatgtacat

SEQ ID NO: 555613 - DNA, 25 bp, Homo sapien
tttccattgtggctttactaatgta

SEQ ID NO: 555614 - DNA, 25 bp, Homo sapien
tccattgtggctttactaatgtaca

SEQ ID NO: 555615 - DNA, 25 bp, Homo sapien
ttccattgtggctttactaatgtac

SEQ ID NO: 555616 - DNA, 25 bp, Homo sapien
tataattctcacacaaagtagttag

SEQ ID NO: 555617 - DNA, 25 bp, Homo sapien
tgttctaatataggtaatgtctcca

SEQ ID NO: 555618 - DNA, 25 bp, Homo sapien
tatgatttacagatgtagttttgag

SEQ ID NO: 555619 - DNA, 25 bp, Homo sapien
tagaagcaacatcaacttttatttg

SEQ ID NO: 555620 - DNA, 25 bp, Homo sapien
tattctttatcctatgaagaaaacc

SEQ ID NO: 555621 - DNA, 25 bp, Homo sapien
attctttatcctatgaagaaaacca

SEQ ID NO: 555622 - DNA, 25 bp, Homo sapien
taattaactcacagcctttattctt

SEQ ID NO: 555623 - DNA, 25 bp, Homo sapien
ttattctttatcctatgaagaaaac

SEQ ID NO: 555624 - DNA, 25 bp, Homo sapien
tacctcggaagaaattctggaatat

SEQ ID NO: 555625 - DNA, 25 bp, Homo sapien
ctacctcggaagaaattctggaata

SEQ ID NO: 555626 - DNA, 25 bp, Homo sapien
acctcggaagaaattctggaatata

SEQ ID NO: 555627 - DNA, 25 bp, Homo sapien
gatttacagcaattctggttagaga

SEQ ID NO: 555628 - DNA, 25 bp, Homo sapien
atttacagcaattctggttagagat

SEQ ID NO: 555629 - DNA, 25 bp, Homo sapien
tgatttacagcaattctggttagag

SEQ ID NO: 555630 - DNA, 25 bp, Homo sapien
tttagagatatgctcaagcctacaa

SEQ ID NO: 555631 - DNA, 25 bp, Homo sapien
gagctaatcaactgtctgatcaaga

SEQ ID NO: 555632 - DNA, 25 bp, Homo sapien
gaacctctgaacagttatactgact

SEQ ID NO: 555633 - DNA, 25 bp, Homo sapien
tatactgacttagcatcaatagagc

SEQ ID NO: 555634 - DNA, 25 bp, Homo sapien
tttaaagttgactgaaagaggcata

SEQ ID NO: 555635 - DNA, 25 bp, Homo sapien
tataaatgacgacttctcaaattct

SEQ ID NO: 555636 - DNA, 25 bp, Homo sapien
catttaaagttgactgaaagaggca

SEQ ID NO: 555637 - DNA, 25 bp, Homo sapien
tttattatataaatgacgacttctc

SEQ ID NO: 555638 - DNA, 25 bp, Homo sapien
tctcagtaaaacaccattgttgccc

SEQ ID NO: 555639 - DNA, 25 bp, Homo sapien
tgggacaataagaggcatagcaatc

SEQ ID NO: 555640 - DNA, 25 bp, Homo sapien
tatgctaagctagtagactgctctc

SEQ ID NO: 555641 - DNA, 25 bp, Homo sapien
ttgttgcccatgcactgcgacttgt

SEQ ID NO: 555642 - DNA, 25 bp, Homo sapien
ttaatggaatcataaactggagcgg

SEQ ID NO: 555643 - DNA, 25 bp, Homo sapien
gaatcataaactggagcggacatta

SEQ ID NO: 555644 - DNA, 25 bp, Homo sapien
aaactggagcggacattatttgaga

SEQ ID NO: 555645 - DNA, 25 bp, Homo sapien
gcttttatggggaagttctgtgaaa

SEQ ID NO: 555646 - DNA, 25 bp, Homo sapien
tacacagacattagggagtcaacta

SEQ ID NO: 555647 - DNA, 25 bp, Homo sapien
aagaggactgcatactttgtttgcc

SEQ ID NO: 555648 - DNA, 25 bp, Homo sapien
agagcttcacaaaccatgctaaggg

SEQ ID NO: 555649 - DNA, 25 bp, Homo sapien
taatggatgtgcatgaaatcagtcc

SEQ ID NO: 555650 - DNA, 25 bp, Homo sapien
tttgtaaaactgcatgtcctccatt

SEQ ID NO: 555651 - DNA, 25 bp, Homo sapien
gtaaaactgcatgtcctccatttga

SEQ ID NO: 555652 - DNA, 25 bp, Homo sapien
atgaaacatgcaatagtcttaacag

SEQ ID NO: 555653 - DNA, 25 bp, Homo sapien
gaaacatgcaatagtcttaacagga

SEQ ID NO: 555654 - DNA, 25 bp, Homo sapien
gtttgttactctcaatcaggtattt

SEQ ID NO: 555655 - DNA, 25 bp, Homo sapien
gttactctcaatcaggtatttttgg

SEQ ID NO: 555656 - DNA, 25 bp, Homo sapien
catttgtttgttactctcaatcagg

SEQ ID NO: 555657 - DNA, 25 bp, Homo sapien
tttgtttgttactctcaatcaggta

SEQ ID NO: 555658 - DNA, 25 bp, Homo sapien
cccgacaagccacggtgtgtgatat

SEQ ID NO: 555659 - DNA, 25 bp, Homo sapien
tcgagtcccacttttgagtaagaac

SEQ ID NO: 555660 - DNA, 25 bp, Homo sapien
tgtcaactgtaagcgatgcaaggat

SEQ ID NO: 555661 - DNA, 25 bp, Homo sapien
cacaacggttgaactcatctacaca

SEQ ID NO: 555662 - DNA, 25 bp, Homo sapien
ttaggagccttatggcggagtcttt

SEQ ID NO: 555663 - DNA, 25 bp, Homo sapien
tgcctgcttgttttggctctcagct

SEQ ID NO: 555664 - DNA, 25 bp, Homo sapien
gtttatcagttttaggagccttatg

SEQ ID NO: 555665 - DNA, 25 bp, Homo sapien
ttgaacattattggcttttagtaat

SEQ ID NO: 555666 - DNA, 25 bp, Homo sapien
atcatatgaaaagtgattttaagta

SEQ ID NO: 555667 - DNA, 25 bp, Homo sapien
catatgaaaagtgattttaagtatc

SEQ ID NO: 555668 - DNA, 25 bp, Homo sapien
tcatatgaaaagtgattttaagtat

SEQ ID NO: 555669 - DNA, 25 bp, Homo sapien
tgaatgtcagatgtattagaactcc

SEQ ID NO: 555670 - DNA, 25 bp, Homo sapien
tcatactttatgaatgtcagatgta

SEQ ID NO: 555671 - DNA, 25 bp, Homo sapien
ctttatgaatgtcagatgtattaga

SEQ ID NO: 555672 - DNA, 25 bp, Homo sapien
tatgaatgtcagatgtattagaact

SEQ ID NO: 555673 - DNA, 25 bp, Homo sapien
gaggaatatttaccacagcttgcca

SEQ ID NO: 555674 - DNA, 25 bp, Homo sapien
aaaaatagtaaatattagctaacat

SEQ ID NO: 555675 - DNA, 25 bp, Homo sapien
taaagaggaatatttaccacagctt

SEQ ID NO: 555676 - DNA, 25 bp, Homo sapien
tatttaccacagcttgccaagttaa

SEQ ID NO: 555677 - DNA, 25 bp, Homo sapien
tcctctacagtagtattagtcacag

SEQ ID NO: 555678 - DNA, 25 bp, Homo sapien
gagaaatccttgaacttcatttgtt

SEQ ID NO: 555679 - DNA, 25 bp, Homo sapien
ttgtttcagtctcatcctctacagt

SEQ ID NO: 555680 - DNA, 25 bp, Homo sapien
ccaaagagaaatccttgaacttcat

SEQ ID NO: 555681 - DNA, 25 bp, Homo sapien
ttttaacttgggtatcatccagtgc

SEQ ID NO: 555682 - DNA, 25 bp, Homo sapien
tattctgtactcttaattgctagct

SEQ ID NO: 555683 - DNA, 25 bp, Homo sapien
atccagtgctttgtattctgtactc

SEQ ID NO: 555684 - DNA, 25 bp, Homo sapien
ttaattgctagctccacaccatacc

SEQ ID NO: 555685 - DNA, 25 bp, Homo sapien
ttgttttaaagtcagtaccacgatg

SEQ ID NO: 555686 - DNA, 25 bp, Homo sapien
tataaaaagcgaaaagagttagtca

SEQ ID NO: 555687 - DNA, 25 bp, Homo sapien
cgaaaagagttagtcaaacattttg

SEQ ID NO: 555688 - DNA, 25 bp, Homo sapien
cacgatgtatttggacataagggta

SEQ ID NO: 555689 - DNA, 25 bp, Homo sapien
gctatatagtgtactggtggaagcc

SEQ ID NO: 555690 - DNA, 25 bp, Homo sapien
tatatagtgtactggtggaagccca

SEQ ID NO: 555691 - DNA, 25 bp, Homo sapien
gggcaacaaaattgtagctatatag

SEQ ID NO: 555692 - DNA, 25 bp, Homo sapien
tagctatatagtgtactggtggaag

SEQ ID NO: 555693 - DNA, 25 bp, Homo sapien
gaatataatggcgaagaacatacag

SEQ ID NO: 555694 - DNA, 25 bp, Homo sapien
gaaatgcactaaatgttctagtacc

SEQ ID NO: 555695 - DNA, 25 bp, Homo sapien
tttcggcatagagaatcaccactgg

SEQ ID NO: 555696 - DNA, 25 bp, Homo sapien
cctcattttgagctttttcagacaa

SEQ ID NO: 555697 - DNA, 25 bp, Homo sapien
cttatgaataaccacaaatgcatta

SEQ ID NO: 555698 - DNA, 25 bp, Homo sapien
cattaattttacaggtgtgcttctt

SEQ ID NO: 555699 - DNA, 25 bp, Homo sapien
tatgaataaccacaaatgcattaca

SEQ ID NO: 555700 - DNA, 25 bp, Homo sapien
cttcttatgaataaccacaaatgca

SEQ ID NO: 555701 - DNA, 25 bp, Homo sapien
taaaaggttgatgtgtaaattgtct

SEQ ID NO: 555702 - DNA, 25 bp, Homo sapien
cttcaggattaagttgtaataagaa

SEQ ID NO: 555703 - DNA, 25 bp, Homo sapien
ggagtatgcccttatagagaaagca

SEQ ID NO: 555704 - DNA, 25 bp, Homo sapien
catctgaatagctggggagtatgcc

SEQ ID NO: 555705 - DNA, 25 bp, Homo sapien
gcttataaattgctaattcttgcac

SEQ ID NO: 555706 - DNA, 25 bp, Homo sapien
ctgtttgcttataaattgctaattc

SEQ ID NO: 555707 - DNA, 25 bp, Homo sapien
ctaattcttgcacagtttccaaaaa

SEQ ID NO: 555708 - DNA, 25 bp, Homo sapien
gcacagtttccaaaaactgccaaaa

SEQ ID NO: 555709 - DNA, 25 bp, Homo sapien
gaagctcttgcgttaagtgccacgc

SEQ ID NO: 555710 - DNA, 25 bp, Homo sapien
cccatagtaagcctaggagctgatg

SEQ ID NO: 555711 - DNA, 25 bp, Homo sapien
tgtctgaacagaactgcctacccca

SEQ ID NO: 555712 - DNA, 25 bp, Homo sapien
tgatgtcatcattacgaaactaggt

SEQ ID NO: 555713 - DNA, 25 bp, Homo sapien
aagtgggcagtcaccgacttggacg

SEQ ID NO: 555714 - DNA, 25 bp, Homo sapien
tcaccgacttggacgcggcgaccgt

SEQ ID NO: 555715 - DNA, 25 bp, Homo sapien
ctcgggccacttcgcggccaagtgg

SEQ ID NO: 555716 - DNA, 25 bp, Homo sapien
gtctcgggccacttcgcggccaagt

SEQ ID NO: 555717 - DNA, 25 bp, Homo sapien
cacgttcgtggctttcgctggcgcc

SEQ ID NO: 555718 - DNA, 25 bp, Homo sapien
acgttcgtggctttcgctggcgcca

SEQ ID NO: 555719 - DNA, 25 bp, Homo sapien
ggcacggagagaaaagcgcgagtcc

SEQ ID NO: 555720 - DNA, 25 bp, Homo sapien
acggagagaaaagcgcgagtccctc

SEQ ID NO: 555721 - DNA, 25 bp, Homo sapien
cctcggacccggtacccacagtctg

SEQ ID NO: 555722 - DNA, 25 bp, Homo sapien
tcggacccggtacccacagtctgtg

SEQ ID NO: 555723 - DNA, 25 bp, Homo sapien
tccgttactgggtgccgggtccaga

SEQ ID NO: 555724 - DNA, 25 bp, Homo sapien
ggtccagaccggcgcatgcgtgtcc

SEQ ID NO: 555725 - DNA, 25 bp, Homo sapien
cggctgcccacttccggtgggagga

SEQ ID NO: 555726 - DNA, 25 bp, Homo sapien
ggctcttcccgctgcgcggctgccc

SEQ ID NO: 555727 - DNA, 25 bp, Homo sapien
ttgctgagcggcgtcacagatgctc

SEQ ID NO: 555728 - DNA, 25 bp, Homo sapien
cagccggacactgggccacgtcgga

SEQ ID NO: 555729 - DNA, 25 bp, Homo sapien
ccgcgggtccattcccaggactttg

SEQ ID NO: 555730 - DNA, 25 bp, Homo sapien
cggtttagtgggtgcggcctggaga

SEQ ID NO: 555731 - DNA, 25 bp, Homo sapien
tggctctccagaccgaactagggct

SEQ ID NO: 555732 - DNA, 25 bp, Homo sapien
agctggctctccagaccgaactagg

SEQ ID NO: 555733 - DNA, 25 bp, Homo sapien
aagctggctctccagaccgaactag

SEQ ID NO: 555734 - DNA, 25 bp, Homo sapien
gctggctctccagaccgaactaggg

SEQ ID NO: 555735 - DNA, 25 bp, Homo sapien
tcaggaccacttgcatattgtccac

SEQ ID NO: 555736 - DNA, 25 bp, Homo sapien
aagtcaggaccacttgcatattgtc

SEQ ID NO: 555737 - DNA, 25 bp, Homo sapien
agtcaggaccacttgcatattgtcc

SEQ ID NO: 555738 - DNA, 25 bp, Homo sapien
aaagtcaggaccacttgcatattgt

SEQ ID NO: 555739 - DNA, 25 bp, Homo sapien
tagttgcagcaacgtgtaaggctga

SEQ ID NO: 555740 - DNA, 25 bp, Homo sapien
ttagtttggtgtggttgcaagcacc

SEQ ID NO: 555741 - DNA, 25 bp, Homo sapien
gccaagtgtatgaaaggcactcaaa

SEQ ID NO: 555742 - DNA, 25 bp, Homo sapien
tcaaaactgcaaatataggccgggc

SEQ ID NO: 555743 - DNA, 25 bp, Homo sapien
tatattgttagagcccatgccggac

SEQ ID NO: 555744 - DNA, 25 bp, Homo sapien
gttagagcccatgccggactccaaa

SEQ ID NO: 555745 - DNA, 25 bp, Homo sapien
cttatattgttagagcccatgccgg

SEQ ID NO: 555746 - DNA, 25 bp, Homo sapien
attgttagagcccatgccggactcc

SEQ ID NO: 555747 - DNA, 25 bp, Homo sapien
aggactggttgcctgacttctggat

SEQ ID NO: 555748 - DNA, 25 bp, Homo sapien
agaggactggttgcctgacttctgg

SEQ ID NO: 555749 - DNA, 25 bp, Homo sapien
tcaagaggactggttgcctgacttc

SEQ ID NO: 555750 - DNA, 25 bp, Homo sapien
caagaggactggttgcctgacttct

SEQ ID NO: 555751 - DNA, 25 bp, Homo sapien
tcctttccgtgtgccaggaaatgaa

SEQ ID NO: 555752 - DNA, 25 bp, Homo sapien
gtgccaggaaatgaactgaccccat

SEQ ID NO: 555753 - DNA, 25 bp, Homo sapien
ttctcctttccgtgtgccaggaaat

SEQ ID NO: 555754 - DNA, 25 bp, Homo sapien
tgtgccaggaaatgaactgacccca

SEQ ID NO: 555755 - DNA, 25 bp, Homo sapien
aatgaaggacatgtggaactggttt

SEQ ID NO: 555756 - DNA, 25 bp, Homo sapien
tatatgcaccggaagctcacaggaa

SEQ ID NO: 555757 - DNA, 25 bp, Homo sapien
agtggggctatatgcaccggaagct

SEQ ID NO: 555758 - DNA, 25 bp, Homo sapien
catgtggaactggttttggtgatga

SEQ ID NO: 555759 - DNA, 25 bp, Homo sapien
gaattttgtagtgttgttgacagct

SEQ ID NO: 555760 - DNA, 25 bp, Homo sapien
ccgcaggtgcattctatggtcttaa

SEQ ID NO: 555761 - DNA, 25 bp, Homo sapien
acagaattttgtagtgttgttgaca

SEQ ID NO: 555762 - DNA, 25 bp, Homo sapien
tggtcttaatccaagaaacagaatt

SEQ ID NO: 555763 - DNA, 25 bp, Homo sapien
tagcttacaaggtcagacaggactg

SEQ ID NO: 555764 - DNA, 25 bp, Homo sapien
tgcttagcttacaaggtcagacagg

SEQ ID NO: 555765 - DNA, 25 bp, Homo sapien
cttagcttacaaggtcagacaggac

SEQ ID NO: 555766 - DNA, 25 bp, Homo sapien
gcttagcttacaaggtcagacagga

SEQ ID NO: 555767 - DNA, 25 bp, Homo sapien
gagtacacagtacatagcaaatgct

SEQ ID NO: 555768 - DNA, 25 bp, Homo sapien
tcataggcagctatctatggtggat

SEQ ID NO: 555769 - DNA, 25 bp, Homo sapien
tataagctacatgacgacaggatcc

SEQ ID NO: 555770 - DNA, 25 bp, Homo sapien
tatggtggatgttacacagtaaggc

SEQ ID NO: 555771 - DNA, 25 bp, Homo sapien
ggaaatggagtcacttcagtagcta

SEQ ID NO: 555772 - DNA, 25 bp, Homo sapien
cttgtggttacctcaaggaaatgga

SEQ ID NO: 555773 - DNA, 25 bp, Homo sapien
cacgttttgttagcaatgtagctgc

SEQ ID NO: 555774 - DNA, 25 bp, Homo sapien
tgggacagactgtatttacacgacc

SEQ ID NO: 555775 - DNA, 25 bp, Homo sapien
tccactcggaaaataggtcgagcag

SEQ ID NO: 555776 - DNA, 25 bp, Homo sapien
tcggaaaataggtcgagcaggtcta

SEQ ID NO: 555777 - DNA, 25 bp, Homo sapien
aaaataggtcgagcaggtctaggga

SEQ ID NO: 555778 - DNA, 25 bp, Homo sapien
tgccactctccactcggaaaatagg

SEQ ID NO: 555779 - DNA, 25 bp, Homo sapien
gaggctttggcgcatgctccgtacc

SEQ ID NO: 555780 - DNA, 25 bp, Homo sapien
catgctccgtacctagggcaggttt

SEQ ID NO: 555781 - DNA, 25 bp, Homo sapien
cggagcagcggactcctcccctgga

SEQ ID NO: 555782 - DNA, 25 bp, Homo sapien
ttgctcccggccgaagggattccca

SEQ ID NO: 555783 - DNA, 25 bp, Homo sapien
ggttgtggcggtgccagcctgtgtg

SEQ ID NO: 555784 - DNA, 25 bp, Homo sapien
aaacttgcggcgagcgccgtcagcc

SEQ ID NO: 555785 - DNA, 25 bp, Homo sapien
tgtgcgagtgtgtctgcgtgcctgc

SEQ ID NO: 555786 - DNA, 25 bp, Homo sapien
ggcagtgcgactcgccgggagaggc

SEQ ID NO: 555787 - DNA, 25 bp, Homo sapien
aaagggcgcgacgtgatcgtgttcc

SEQ ID NO: 555788 - DNA, 25 bp, Homo sapien
tttcaacatcaaagggcgcgacgtg

SEQ ID NO: 555789 - DNA, 25 bp, Homo sapien
gcgacgtgatcgtgttcctccacat

SEQ ID NO: 555790 - DNA, 25 bp, Homo sapien
atcaaagggcgcgacgtgatcgtgt

SEQ ID NO: 555791 - DNA, 25 bp, Homo sapien
ctggagcagccttgtagctgcaaag

SEQ ID NO: 555792 - DNA, 25 bp, Homo sapien
gctggagcagccttgtagctgcaaa

SEQ ID NO: 555793 - DNA, 25 bp, Homo sapien
aagaacatccggctggagcagcctt

SEQ ID NO: 555794 - DNA, 25 bp, Homo sapien
ctggtgaagaacatccggctggagc

SEQ ID NO: 555795 - DNA, 25 bp, Homo sapien
ccaccggcctggcaagaaggagacg

SEQ ID NO: 555796 - DNA, 25 bp, Homo sapien
tgccaccggcctggcaagaaggaga

SEQ ID NO: 555797 - DNA, 25 bp, Homo sapien
caccggcctggcaagaaggagacgt

SEQ ID NO: 555798 - DNA, 25 bp, Homo sapien
ctgccaccggcctggcaagaaggag

SEQ ID NO: 555799 - DNA, 25 bp, Homo sapien
tcagtcctgacccagagcgaccccg

SEQ ID NO: 555800 - DNA, 25 bp, Homo sapien
tgcccctgccgatggtttcctggcg

SEQ ID NO: 555801 - DNA, 25 bp, Homo sapien
accaggtactgtcgcccgctgggtc

SEQ ID NO: 555802 - DNA, 25 bp, Homo sapien
tcctggcgtcttcagcggttggcgc

SEQ ID NO: 555803 - DNA, 25 bp, Homo sapien
gagaaacctccggatagtgcctagg

SEQ ID NO: 555804 - DNA, 25 bp, Homo sapien
gagggatgagaaacctccggatagt

SEQ ID NO: 555805 - DNA, 25 bp, Homo sapien
ccggatagtgcctaggtcctgaact

SEQ ID NO: 555806 - DNA, 25 bp, Homo sapien
cctccggatagtgcctaggtcctga

SEQ ID NO: 555807 - DNA, 25 bp, Homo sapien
cttctctgtcattgtaccgccttac

SEQ ID NO: 555808 - DNA, 25 bp, Homo sapien
ttttatgacatagctagagtcatca

SEQ ID NO: 555809 - DNA, 25 bp, Homo sapien
tatgacatagctagagtcatcaatg

SEQ ID NO: 555810 - DNA, 25 bp, Homo sapien
tgacatagctagagtcatcaatggc

SEQ ID NO: 555811 - DNA, 25 bp, Homo sapien
accattttatgacatagctagagtc

SEQ ID NO: 555812 - DNA, 25 bp, Homo sapien
gactcagcagatcgtatgtcagtgt

SEQ ID NO: 555813 - DNA, 25 bp, Homo sapien
gaaatagaggtttcttgaggaggca

SEQ ID NO: 555814 - DNA, 25 bp, Homo sapien
tcagtgtgtgagtggataggtctct

SEQ ID NO: 555815 - DNA, 25 bp, Homo sapien
ggcaactcacgttcataaaaatggg

SEQ ID NO: 555816 - DNA, 25 bp, Homo sapien
aataagttgcactggtgttagtgac

SEQ ID NO: 555817 - DNA, 25 bp, Homo sapien
tatcagaatctgatatctgtttgtt

SEQ ID NO: 555818 - DNA, 25 bp, Homo sapien
gaatctgatatctgtttgttctgtt

SEQ ID NO: 555819 - DNA, 25 bp, Homo sapien
tttgaggtatcagggaagtcaaagg

SEQ ID NO: 555820 - DNA, 25 bp, Homo sapien
tttccaaggaacttttcccagatca

SEQ ID NO: 555821 - DNA, 25 bp, Homo sapien
ttccaaggaacttttcccagatcat

SEQ ID NO: 555822 - DNA, 25 bp, Homo sapien
gaattgccaggaatagcgatgctag

SEQ ID NO: 555823 - DNA, 25 bp, Homo sapien
cctttaggacaaggagaccaccagg

SEQ ID NO: 555824 - DNA, 25 bp, Homo sapien
cgatgctaggtgtgaagttattaac

SEQ ID NO: 555825 - DNA, 25 bp, Homo sapien
agcctgttgttctactgaattgcca

SEQ ID NO: 555826 - DNA, 25 bp, Homo sapien
caagctggatgtcggctgaggctct

SEQ ID NO: 555827 - DNA, 25 bp, Homo sapien
gatttgccgattgtttgtcccatgg

SEQ ID NO: 555828 - DNA, 25 bp, Homo sapien
tcccatggatatcctctctggacag

SEQ ID NO: 555829 - DNA, 25 bp, Homo sapien
tctcctccttagttggctcctcagg

SEQ ID NO: 555830 - DNA, 25 bp, Homo sapien
aacatatttctgttgatgaagccac

SEQ ID NO: 555831 - DNA, 25 bp, Homo sapien
ttgaagacagactcacatagaggga

SEQ ID NO: 555832 - DNA, 25 bp, Homo sapien
ggtactttgtcatgccagccctagg

SEQ ID NO: 555833 - DNA, 25 bp, Homo sapien
tagtgtgtctcattcctggtgcaga

SEQ ID NO: 555834 - DNA, 25 bp, Homo sapien
ctggaagtgctggaacgctttggat

SEQ ID NO: 555835 - DNA, 25 bp, Homo sapien
tcctgcagtagctgactgcttagcc

SEQ ID NO: 555836 - DNA, 25 bp, Homo sapien
tgactgcttagccttctggaactga

SEQ ID NO: 555837 - DNA, 25 bp, Homo sapien
taactatggtatgtgaaataattcc

SEQ ID NO: 555838 - DNA, 25 bp, Homo sapien
tctgtcttagaggtgcgcaggaggc

SEQ ID NO: 555839 - DNA, 25 bp, Homo sapien
cctaggatggaggatgcttgctgcc

SEQ ID NO: 555840 - DNA, 25 bp, Homo sapien
ctcggaaggctgatcctaggatgga

SEQ ID NO: 555841 - DNA, 25 bp, Homo sapien
caggaggcacattcgactcggaagg

SEQ ID NO: 555842 - DNA, 25 bp, Homo sapien
ctgggccataaaggcgatgtcttaa

SEQ ID NO: 555843 - DNA, 25 bp, Homo sapien
tcactaatgtgatcagggagctcaa

SEQ ID NO: 555844 - DNA, 25 bp, Homo sapien
ttttattcctaaaataactctgctc

SEQ ID NO: 555845 - DNA, 25 bp, Homo sapien
caatttcagtttgacagaggtttca

SEQ ID NO: 555846 - DNA, 25 bp, Homo sapien
tcgtagctggtctgatcctcttggc

SEQ ID NO: 555847 - DNA, 25 bp, Homo sapien
tggcctcgcctacttggattgtaac

SEQ ID NO: 555848 - DNA, 25 bp, Homo sapien
tatgaaatgtcacactgggtccgca

SEQ ID NO: 555849 - DNA, 25 bp, Homo sapien
cgctggtagcccgtaggattcctgg

SEQ ID NO: 555850 - DNA, 25 bp, Homo sapien
gattttgacgggcatctcctaagtg

SEQ ID NO: 555851 - DNA, 25 bp, Homo sapien
ctgttgggattttgacgggcatctc

SEQ ID NO: 555852 - DNA, 25 bp, Homo sapien
gacgggcatctcctaagtgtctccc

SEQ ID NO: 555853 - DNA, 25 bp, Homo sapien
agtgtctcccccgagaatgtctcct

SEQ ID NO: 555854 - DNA, 25 bp, Homo sapien
tttttcagagttaggaagtgccttc

SEQ ID NO: 555855 - DNA, 25 bp, Homo sapien
tctagatggatctatgtgattcaca

SEQ ID NO: 555856 - DNA, 25 bp, Homo sapien
ctatgtgattcacagaggactggct

SEQ ID NO: 555857 - DNA, 25 bp, Homo sapien
ctctgtgtgacctctagatggatct

SEQ ID NO: 555858 - DNA, 25 bp, Homo sapien
tgtggtttatatttctggctctgcc

SEQ ID NO: 555859 - DNA, 25 bp, Homo sapien
tggccatggtattctgcctggttat

SEQ ID NO: 555860 - DNA, 25 bp, Homo sapien
gccatggtattctgcctggttatct

SEQ ID NO: 555861 - DNA, 25 bp, Homo sapien
ctgtgagttcatggcaggtggccat

SEQ ID NO: 555862 - DNA, 25 bp, Homo sapien
ttcatggcaggtggccatggtattc

SEQ ID NO: 555863 - DNA, 25 bp, Homo sapien
tattccactgaatgggtgtgtcatg

SEQ ID NO: 555864 - DNA, 25 bp, Homo sapien
aagagcatgcttccagagctgaccc

SEQ ID NO: 555865 - DNA, 25 bp, Homo sapien
tgacccactgggctcaaatcccgtt

SEQ ID NO: 555866 - DNA, 25 bp, Homo sapien
tgtcatgattcactgagccgttgcc

SEQ ID NO: 555867 - DNA, 25 bp, Homo sapien
tgggcagggacgagtgaagtggttg

SEQ ID NO: 555868 - DNA, 25 bp, Homo sapien
ggcagggacgagtgaagtggttggg

SEQ ID NO: 555869 - DNA, 25 bp, Homo sapien
gggtgggcagggacgagtgaagtgg

SEQ ID NO: 555870 - DNA, 25 bp, Homo sapien
ctaagaattgtgtcgttgtggggtg

SEQ ID NO: 555871 - DNA, 25 bp, Homo sapien
ccaaagggtaattgaactattctga

SEQ ID NO: 555872 - DNA, 25 bp, Homo sapien
aatgcatggtttgtgcaccacaata

SEQ ID NO: 555873 - DNA, 25 bp, Homo sapien
tgtaagttggcaattgagagagtcc

SEQ ID NO: 555874 - DNA, 25 bp, Homo sapien
tgtttaagtggagcgtgtttgcatt

SEQ ID NO: 555875 - DNA, 25 bp, Homo sapien
aggaggtggtggactttgcttaaga

SEQ ID NO: 555876 - DNA, 25 bp, Homo sapien
ggtggtggactttgcttaagataat

SEQ ID NO: 555877 - DNA, 25 bp, Homo sapien
gaggtggtggactttgcttaagata

SEQ ID NO: 555878 - DNA, 25 bp, Homo sapien
aggtggtggactttgcttaagataa

SEQ ID NO: 555879 - DNA, 25 bp, Homo sapien
taaccaactcatgtcccatgagctt

SEQ ID NO: 555880 - DNA, 25 bp, Homo sapien
tcatgtcccatgagcttttgatgtc

SEQ ID NO: 555881 - DNA, 25 bp, Homo sapien
caactcatgtcccatgagcttttga

SEQ ID NO: 555882 - DNA, 25 bp, Homo sapien
cattaaccaactcatgtcccatgag

SEQ ID NO: 555883 - DNA, 25 bp, Homo sapien
attcttcatacctctgcaaagtgct

SEQ ID NO: 555884 - DNA, 25 bp, Homo sapien
atacctctgcaaagtgctattgatg

SEQ ID NO: 555885 - DNA, 25 bp, Homo sapien
tctgcaaagtgctattgatgttacc

SEQ ID NO: 555886 - DNA, 25 bp, Homo sapien
tcttcatacctctgcaaagtgctat

SEQ ID NO: 555887 - DNA, 25 bp, Homo sapien
aggttgagccctgtaggaccaaggc

SEQ ID NO: 555888 - DNA, 25 bp, Homo sapien
tgtcaaccttttaaccaaccagctg

SEQ ID NO: 555889 - DNA, 25 bp, Homo sapien
gggcataagcttggaaaaatgtcaa

SEQ ID NO: 555890 - DNA, 25 bp, Homo sapien
gactagggagaggatcaccttcaag

SEQ ID NO: 555891 - DNA, 25 bp, Homo sapien
tctgaaattcaagacctatgacaat

SEQ ID NO: 555892 - DNA, 25 bp, Homo sapien
caggagtagaactgccagtaggata

SEQ ID NO: 555893 - DNA, 25 bp, Homo sapien
taaggtcgatatttcaatttcctcc

SEQ ID NO: 555894 - DNA, 25 bp, Homo sapien
ttgtaaggtcgatatttcaatttcc

SEQ ID NO: 555895 - DNA, 25 bp, Homo sapien
tgtttgtgtggcaagaaacagtttc

SEQ ID NO: 555896 - DNA, 25 bp, Homo sapien
aaaatccacatacaagcgctttttg

SEQ ID NO: 555897 - DNA, 25 bp, Homo sapien
tacaagcgctttttgggactgtctt

SEQ ID NO: 555898 - DNA, 25 bp, Homo sapien
attttgtttgtgtggcaagaaacag

SEQ ID NO: 555899 - DNA, 25 bp, Homo sapien
caagtagtaatataattcctgctga

SEQ ID NO: 555900 - DNA, 25 bp, Homo sapien
ttattttaaccatcaagtagtaata

SEQ ID NO: 555901 - DNA, 25 bp, Homo sapien
gaatttccaacactgtgtcagccct

SEQ ID NO: 555902 - DNA, 25 bp, Homo sapien
tgaatttccaacactgtgtcagccc

SEQ ID NO: 555903 - DNA, 25 bp, Homo sapien
ggaggcagaacaatgagtgaacaat

SEQ ID NO: 555904 - DNA, 25 bp, Homo sapien
caggttacggacttcatcctcaaag

SEQ ID NO: 555905 - DNA, 25 bp, Homo sapien
gaacaatgagcagcccaggttacgg

SEQ ID NO: 555906 - DNA, 25 bp, Homo sapien
gaacaatgagtgaacaatgagcagc

SEQ ID NO: 555907 - DNA, 25 bp, Homo sapien
tggttaatagctgcgatgaaatatt

SEQ ID NO: 555908 - DNA, 25 bp, Homo sapien
taatagctgcgatgaaatatttttt

SEQ ID NO: 555909 - DNA, 25 bp, Homo sapien
ggtggttaatagctgcgatgaaata

SEQ ID NO: 555910 - DNA, 25 bp, Homo sapien
ctggtggttaatagctgcgatgaaa

SEQ ID NO: 555911 - DNA, 25 bp, Homo sapien
gataggcaacactgattcaagtaaa

SEQ ID NO: 555912 - DNA, 25 bp, Homo sapien
tgcacaacagataggcaacactgat

SEQ ID NO: 555913 - DNA, 25 bp, Homo sapien
caacagataggcaacactgattcaa

SEQ ID NO: 555914 - DNA, 25 bp, Homo sapien
attggctgcacaacagataggcaac

SEQ ID NO: 555915 - DNA, 25 bp, Homo sapien
tgggggctggtgggcgctttccaga

SEQ ID NO: 555916 - DNA, 25 bp, Homo sapien
gggctggtgggcgctttccagaagt

SEQ ID NO: 555917 - DNA, 25 bp, Homo sapien
ttggcaattggtgggaagttgtggg

SEQ ID NO: 555918 - DNA, 25 bp, Homo sapien
tttggcaattggtgggaagttgtgg

SEQ ID NO: 555919 - DNA, 25 bp, Homo sapien
caatggtgtcttccctcttcttgcc

SEQ ID NO: 555920 - DNA, 25 bp, Homo sapien
tggtgtcttccctcttcttgcccat

SEQ ID NO: 555921 - DNA, 25 bp, Homo sapien
tcaatggtgtcttccctcttcttgc

SEQ ID NO: 555922 - DNA, 25 bp, Homo sapien
cttcaatggtgtcttccctcttctt

SEQ ID NO: 555923 - DNA, 25 bp, Homo sapien
tattccttgagtgaataaggcccac

SEQ ID NO: 555924 - DNA, 25 bp, Homo sapien
ttgagtgaataaggcccactctctg

SEQ ID NO: 555925 - DNA, 25 bp, Homo sapien
cagtattccttgagtgaataaggcc

SEQ ID NO: 555926 - DNA, 25 bp, Homo sapien
ccttgagtgaataaggcccactctc

SEQ ID NO: 555927 - DNA, 25 bp, Homo sapien
gctttgaatgctgacttagataatg

SEQ ID NO: 555928 - DNA, 25 bp, Homo sapien
tagataatggcggacttagtaattc

SEQ ID NO: 555929 - DNA, 25 bp, Homo sapien
gctgacttagataatggcggactta

SEQ ID NO: 555930 - DNA, 25 bp, Homo sapien
ggcggacttagtaattctcgtttca

SEQ ID NO: 555931 - DNA, 25 bp, Homo sapien
tggccctccattccgcttcagagag

SEQ ID NO: 555932 - DNA, 25 bp, Homo sapien
caaactgtagtaggtgaacgccctc

SEQ ID NO: 555933 - DNA, 25 bp, Homo sapien
gaacttatgatgctaccctgggcac

SEQ ID NO: 555934 - DNA, 25 bp, Homo sapien
tatctaatacctttccaggacggtg

SEQ ID NO: 555935 - DNA, 25 bp, Homo sapien
gccatgaaccaagcctctatcccaa

SEQ ID NO: 555936 - DNA, 25 bp, Homo sapien
catgaaccaagcctctatcccaagt

SEQ ID NO: 555937 - DNA, 25 bp, Homo sapien
tgaaccaagcctctatcccaagtgt

SEQ ID NO: 555938 - DNA, 25 bp, Homo sapien
ttgccatgaaccaagcctctatccc

SEQ ID NO: 555939 - DNA, 25 bp, Homo sapien
tgtgctcagtgatgcaacgtttgcc

SEQ ID NO: 555940 - DNA, 25 bp, Homo sapien
tgaataaaacaaatagttgcccaca

SEQ ID NO: 555941 - DNA, 25 bp, Homo sapien
tgtccaattagacgtctgtgctcag

SEQ ID NO: 555942 - DNA, 25 bp, Homo sapien
gaacaagcgatggttggcaatcact

SEQ ID NO: 555943 - DNA, 25 bp, Homo sapien
agaagacctgcacttgtgtacccct

SEQ ID NO: 555944 - DNA, 25 bp, Homo sapien
taaggtcatccgctttcatgcattc

SEQ ID NO: 555945 - DNA, 25 bp, Homo sapien
taagcagctgaacgatttctggagg

SEQ ID NO: 555946 - DNA, 25 bp, Homo sapien
ggcaaagctcactggcataaggtca

SEQ ID NO: 555947 - DNA, 25 bp, Homo sapien
cgttagcagccacagaatgagcata

SEQ ID NO: 555948 - DNA, 25 bp, Homo sapien
caaagtgtccttctgtattcccaca

SEQ ID NO: 555949 - DNA, 25 bp, Homo sapien
gcctgtctgcattagaccacgacag

SEQ ID NO: 555950 - DNA, 25 bp, Homo sapien
tatgtcatgccctgcacgttagcag

SEQ ID NO: 555951 - DNA, 25 bp, Homo sapien
caaattgtccacctttgggatatag

SEQ ID NO: 555952 - DNA, 25 bp, Homo sapien
tatagcactggcagactgcttgtac

SEQ ID NO: 555953 - DNA, 25 bp, Homo sapien
ttcttcaaacactgtaatcaaattg

SEQ ID NO: 555954 - DNA, 25 bp, Homo sapien
atagcactggcagactgcttgtacg

SEQ ID NO: 555955 - DNA, 25 bp, Homo sapien
ctgcaaattaacattatagatatgg

SEQ ID NO: 555956 - DNA, 25 bp, Homo sapien
tgcaaattaacattatagatatggt

SEQ ID NO: 555957 - DNA, 25 bp, Homo sapien
caagattgaatatgttgcactgggc

SEQ ID NO: 555958 - DNA, 25 bp, Homo sapien
aagattgaatatgttgcactgggcc

SEQ ID NO: 555959 - DNA, 25 bp, Homo sapien
ggcagtagatgttgtcaagattgaa

SEQ ID NO: 555960 - DNA, 25 bp, Homo sapien
tgtcttaatattggctttgtgggca

SEQ ID NO: 555961 - DNA, 25 bp, Homo sapien
cagtctattgttttcacccggtaga

SEQ ID NO: 555962 - DNA, 25 bp, Homo sapien
gcattcctgtgttgtcgcttggctt

SEQ ID NO: 555963 - DNA, 25 bp, Homo sapien
ggacctcgccaaatgtggtgagcat

SEQ ID NO: 555964 - DNA, 25 bp, Homo sapien
cggtagaatgggaaggacctcgcca

SEQ ID NO: 555965 - DNA, 25 bp, Homo sapien
tccctggtttaagctatgccttgca

SEQ ID NO: 555966 - DNA, 25 bp, Homo sapien
aggacagtccgtgctcctgtagctc

SEQ ID NO: 555967 - DNA, 25 bp, Homo sapien
tctcgttttggatcaagaagatgga

SEQ ID NO: 555968 - DNA, 25 bp, Homo sapien
agaagatggaccatgacttagaagc

SEQ ID NO: 555969 - DNA, 25 bp, Homo sapien
cattctcatagctggtgaaaggtgt

SEQ ID NO: 555970 - DNA, 25 bp, Homo sapien
aacctgaaaataagaggtagctaca

SEQ ID NO: 555971 - DNA, 25 bp, Homo sapien
gagaacaacaataacctgaaaataa

SEQ ID NO: 555972 - DNA, 25 bp, Homo sapien
aaagggatgaatggtacattctcat

SEQ ID NO: 555973 - DNA, 25 bp, Homo sapien
ttagatcttgtgaacgtcgcttgtg

SEQ ID NO: 555974 - DNA, 25 bp, Homo sapien
tgacattagatcttgtgaacgtcgc

SEQ ID NO: 555975 - DNA, 25 bp, Homo sapien
tgaacgtcgcttgtgttgcttactt

SEQ ID NO: 555976 - DNA, 25 bp, Homo sapien
ctgcagtgacattagatcttgtgaa

SEQ ID NO: 555977 - DNA, 25 bp, Homo sapien
ggagggaggcacattggatccaagc

SEQ ID NO: 555978 - DNA, 25 bp, Homo sapien
aggagggaggcacattggatccaag

SEQ ID NO: 555979 - DNA, 25 bp, Homo sapien
gcacattggatccaagcattctttc

SEQ ID NO: 555980 - DNA, 25 bp, Homo sapien
aggcacattggatccaagcattctt

SEQ ID NO: 555981 - DNA, 25 bp, Homo sapien
ctcttcgcaacgtgctcacttcttt

SEQ ID NO: 555982 - DNA, 25 bp, Homo sapien
tgtcctcttcgcaacgtgctcactt

SEQ ID NO: 555983 - DNA, 25 bp, Homo sapien
ttcgcaacgtgctcacttctttgtt

SEQ ID NO: 555984 - DNA, 25 bp, Homo sapien
ctctgtcctcttcgcaacgtgctca

SEQ ID NO: 555985 - DNA, 25 bp, Homo sapien
tgtgtatgcaccccgtgaacttggc

SEQ ID NO: 555986 - DNA, 25 bp, Homo sapien
ttttattgttaacctgtgccttaga

SEQ ID NO: 555987 - DNA, 25 bp, Homo sapien
ttcctctctttggatgtgtatgcac

SEQ ID NO: 555988 - DNA, 25 bp, Homo sapien
tgtgccttagatttacccaaaatga

SEQ ID NO: 555989 - DNA, 25 bp, Homo sapien
tcacatcttagagcatactgtgcta

SEQ ID NO: 555990 - DNA, 25 bp, Homo sapien
cacatcttagagcatactgtgctac

SEQ ID NO: 555991 - DNA, 25 bp, Homo sapien
gagactgcttgggagccattctgaa

SEQ ID NO: 555992 - DNA, 25 bp, Homo sapien
cttgagcaagccacctatggcgaac

SEQ ID NO: 555993 - DNA, 25 bp, Homo sapien
tgctgtcccagcaatcaatactgag

SEQ ID NO: 555994 - DNA, 25 bp, Homo sapien
tatggcgaaccacgcaagaaccttt

SEQ ID NO: 555995 - DNA, 25 bp, Homo sapien
taaaaggttggtcctgcagactcat

SEQ ID NO: 555996 - DNA, 25 bp, Homo sapien
ccatgaacttaaaaggttggtcctg

SEQ ID NO: 555997 - DNA, 25 bp, Homo sapien
ctgcattggtgaattctgacccatg

SEQ ID NO: 555998 - DNA, 25 bp, Homo sapien
attctgacccatgaacttaaaaggt

SEQ ID NO: 555999 - DNA, 25 bp, Homo sapien
gaaatgggtcaaagtactcctgtca

SEQ ID NO: 556000 - DNA, 25 bp, Homo sapien
tcacaagtgagcttttctgctacag

SEQ ID NO: 556001 - DNA, 25 bp, Homo sapien
tgaacactttaaatgggaacagatc

SEQ ID NO: 556002 - DNA, 25 bp, Homo sapien
atcaagcagggacaaagcagacaca

SEQ ID NO: 556003 - DNA, 25 bp, Homo sapien
aagctgtctccaatgtttccctgaa

SEQ ID NO: 556004 - DNA, 25 bp, Homo sapien
cttgcctgataagaccaagctgtct

SEQ ID NO: 556005 - DNA, 25 bp, Homo sapien
cgcagcatttctaggcaggaggtta

SEQ ID NO: 556006 - DNA, 25 bp, Homo sapien
tgtttccaggaggtggtttgcacgc

SEQ ID NO: 556007 - DNA, 25 bp, Homo sapien
ggctgccatggctgtcctccactca

SEQ ID NO: 556008 - DNA, 25 bp, Homo sapien
gggcagatcagcaacaaggagctgg

SEQ ID NO: 556009 - DNA, 25 bp, Homo sapien
tcaacgggggcagatcagcaacaag

SEQ ID NO: 556010 - DNA, 25 bp, Homo sapien
gcagatcagcaacaaggagctgggc

SEQ ID NO: 556011 - DNA, 25 bp, Homo sapien
aatgaggccgcggaagccatcaaac

SEQ ID NO: 556012 - DNA, 25 bp, Homo sapien
tcaaacatgatgactaagtgctcgg

SEQ ID NO: 556013 - DNA, 25 bp, Homo sapien
aattaaatttaactatagatccttg

SEQ ID NO: 556014 - DNA, 25 bp, Homo sapien
gtgctcggtattaaagtcatcacca

SEQ ID NO: 556015 - DNA, 25 bp, Homo sapien
tccctttctcatcattcattccgcc

SEQ ID NO: 556016 - DNA, 25 bp, Homo sapien
ctttctcatcattcattccgcccat

SEQ ID NO: 556017 - DNA, 25 bp, Homo sapien
cctttctcatcattcattccgccca

SEQ ID NO: 556018 - DNA, 25 bp, Homo sapien
cttccctttctcatcattcattccg

SEQ ID NO: 556019 - DNA, 25 bp, Homo sapien
tgtagacagttggagattgtggctc

SEQ ID NO: 556020 - DNA, 25 bp, Homo sapien
agctgggagcgttcgtttctttgta

SEQ ID NO: 556021 - DNA, 25 bp, Homo sapien
ttagctgggagcgttcgtttctttg

SEQ ID NO: 556022 - DNA, 25 bp, Homo sapien
ttcgtttctttgtagacagttggag

SEQ ID NO: 556023 - DNA, 25 bp, Homo sapien
gtgggagtgactgcattcacctcca

SEQ ID NO: 556024 - DNA, 25 bp, Homo sapien
tctacccttttgctgctcacatgac

SEQ ID NO: 556025 - DNA, 25 bp, Homo sapien
tagtaagtgtgggagtgactgcatt

SEQ ID NO: 556026 - DNA, 25 bp, Homo sapien
tcacctccaccactctacccttttg

SEQ ID NO: 556027 - DNA, 25 bp, Homo sapien
aatagttcctggcatcatactgagc

SEQ ID NO: 556028 - DNA, 25 bp, Homo sapien
cagaaagaagttactggcctgagct

SEQ ID NO: 556029 - DNA, 25 bp, Homo sapien
cactgtgggtcttgatattctctgg

SEQ ID NO: 556030 - DNA, 25 bp, Homo sapien
tactagacgttcaatagctacttgc

SEQ ID NO: 556031 - DNA, 25 bp, Homo sapien
tcacacgaatgaatccagcatcagg

SEQ ID NO: 556032 - DNA, 25 bp, Homo sapien
tagattcaccaatgacccctgtctg

SEQ ID NO: 556033 - DNA, 25 bp, Homo sapien
tccacaaagaatccggaggtgactg

SEQ ID NO: 556034 - DNA, 25 bp, Homo sapien
tttccacagccacgacttcctagat

SEQ ID NO: 556035 - DNA, 25 bp, Homo sapien
gacagggagggacaagtggcttcat

SEQ ID NO: 556036 - DNA, 25 bp, Homo sapien
aagacagggagggacaagtggcttc

SEQ ID NO: 556037 - DNA, 25 bp, Homo sapien
ggaagacagggagggacaagtggct

SEQ ID NO: 556038 - DNA, 25 bp, Homo sapien
ctttgtgacatggaagacagggagg

SEQ ID NO: 556039 - DNA, 25 bp, Homo sapien
tcattactcctgacacatggctgca

SEQ ID NO: 556040 - DNA, 25 bp, Homo sapien
ggtccagttacttctattacggcac

SEQ ID NO: 556041 - DNA, 25 bp, Homo sapien
tgtgggcaccaatggctgtgacatc

SEQ ID NO: 556042 - DNA, 25 bp, Homo sapien
ccagttactaaagtgagaaggtgac

SEQ ID NO: 556043 - DNA, 25 bp, Homo sapien
atgaatgcttgcttactgtgcatat

SEQ ID NO: 556044 - DNA, 25 bp, Homo sapien
tgtgcatatggtaagagctgtgcat

SEQ ID NO: 556045 - DNA, 25 bp, Homo sapien
tgcttgcttactgtgcatatggtaa

SEQ ID NO: 556046 - DNA, 25 bp, Homo sapien
tgcttactgtgcatatggtaagagc

SEQ ID NO: 556047 - DNA, 25 bp, Homo sapien
ttggaccatttaaggttcacgtgtc

SEQ ID NO: 556048 - DNA, 25 bp, Homo sapien
tctgggagcagatgtcggtttaatg

SEQ ID NO: 556049 - DNA, 25 bp, Homo sapien
gagcagatgtcggtttaatggcatc

SEQ ID NO: 556050 - DNA, 25 bp, Homo sapien
taaggttcacgtgtctgggagcaga

SEQ ID NO: 556051 - DNA, 25 bp, Homo sapien
gaagagacagatagtaccaaatctt

SEQ ID NO: 556052 - DNA, 25 bp, Homo sapien
ttcctcatgtctgaaagcatataac

SEQ ID NO: 556053 - DNA, 25 bp, Homo sapien
aatctttgctttagagcccattccc

SEQ ID NO: 556054 - DNA, 25 bp, Homo sapien
gcatataacttgtagttttctgaaa

SEQ ID NO: 556055 - DNA, 25 bp, Homo sapien
gaaagccacacttgtaatcagaacc

SEQ ID NO: 556056 - DNA, 25 bp, Homo sapien
tgtagaggcacagactacttcatcg

SEQ ID NO: 556057 - DNA, 25 bp, Homo sapien
ttcgatgaaacccagagtcttccct

SEQ ID NO: 556058 - DNA, 25 bp, Homo sapien
ccttaaaaacctgactgtagaggca

SEQ ID NO: 556059 - DNA, 25 bp, Homo sapien
cacagactacttcatcgacaattcg

SEQ ID NO: 556060 - DNA, 25 bp, Homo sapien
caatctgtaatgtgagtaatgcctc

SEQ ID NO: 556061 - DNA, 25 bp, Homo sapien
gaaagcacctcatctgtttgttctt

SEQ ID NO: 556062 - DNA, 25 bp, Homo sapien
gattggattcagcaacccaggtgtt

SEQ ID NO: 556063 - DNA, 25 bp, Homo sapien
tacagccctatgatttgaaagcacc

SEQ ID NO: 556064 - DNA, 25 bp, Homo sapien
aatggaggaaggagtcgcaaaaacg

SEQ ID NO: 556065 - DNA, 25 bp, Homo sapien
tctgcctctggacaatgtgcggctc

SEQ ID NO: 556066 - DNA, 25 bp, Homo sapien
gaatcctggtggaatccttcaatga

SEQ ID NO: 556067 - DNA, 25 bp, Homo sapien
gagtcgcaaaaacgatggcatagga

SEQ ID NO: 556068 - DNA, 25 bp, Homo sapien
gtggaaaaagccacctgcatgtgcc

SEQ ID NO: 556069 - DNA, 25 bp, Homo sapien
atgtgcccttgtgccagaattcttg

SEQ ID NO: 556070 - DNA, 25 bp, Homo sapien
catgtgcccttgtgccagaattctt

SEQ ID NO: 556071 - DNA, 25 bp, Homo sapien
gggagtggaaaaagccacctgcatg

SEQ ID NO: 556072 - DNA, 25 bp, Homo sapien
actgctgatattcccctctggctgc

SEQ ID NO: 556073 - DNA, 25 bp, Homo sapien
tactgctgatattcccctctggctg

SEQ ID NO: 556074 - DNA, 25 bp, Homo sapien
ctactgctgatattcccctctggct

SEQ ID NO: 556075 - DNA, 25 bp, Homo sapien
tctgataacctctatgactttttcg

SEQ ID NO: 556076 - DNA, 25 bp, Homo sapien
ctgataacctctatgactttttcga

SEQ ID NO: 556077 - DNA, 25 bp, Homo sapien
ccaatctgataacctctatgacttt

SEQ ID NO: 556078 - DNA, 25 bp, Homo sapien
caagccaatctgataacctctatga

SEQ ID NO: 556079 - DNA, 25 bp, Homo sapien
gaacctcacaggcaagcaaacagca

SEQ ID NO: 556080 - DNA, 25 bp, Homo sapien
tagtctcatcgagtctccagctgtg

SEQ ID NO: 556081 - DNA, 25 bp, Homo sapien
ttcgtggcatgggaggaacctcaca

SEQ ID NO: 556082 - DNA, 25 bp, Homo sapien
tcccatcaggctcaccagagcagga

SEQ ID NO: 556083 - DNA, 25 bp, Homo sapien
gatggcataatcagcatcagtcagt

SEQ ID NO: 556084 - DNA, 25 bp, Homo sapien
tattggatttgtgaacctttcagcc

SEQ ID NO: 556085 - DNA, 25 bp, Homo sapien
taagagttgcaaaggaataaggaca

SEQ ID NO: 556086 - DNA, 25 bp, Homo sapien
aggacattccagataggctttaaag

SEQ ID NO: 556087 - DNA, 25 bp, Homo sapien
gattccaacattactcttatagcca

SEQ ID NO: 556088 - DNA, 25 bp, Homo sapien
tactcttatagccaacttcccactg

SEQ ID NO: 556089 - DNA, 25 bp, Homo sapien
gagctttctgctttgattccaacat

SEQ ID NO: 556090 - DNA, 25 bp, Homo sapien
ggtggtttgatatgcactcctagag

SEQ ID NO: 556091 - DNA, 25 bp, Homo sapien
ttgccatctcagaacacttcagttg

SEQ ID NO: 556092 - DNA, 25 bp, Homo sapien
gcttcctaacaaatgcagcataagg

SEQ ID NO: 556093 - DNA, 25 bp, Homo sapien
tctatatgcttcctaacaaatgcag

SEQ ID NO: 556094 - DNA, 25 bp, Homo sapien
aattcagttaattctatatgcttcc

SEQ ID NO: 556095 - DNA, 25 bp, Homo sapien
ctcctctttctgttcttttagtctg

SEQ ID NO: 556096 - DNA, 25 bp, Homo sapien
ctctccttcattggtctcctctcct

SEQ ID NO: 556097 - DNA, 25 bp, Homo sapien
tttctctccttcattggtctcctct

SEQ ID NO: 556098 - DNA, 25 bp, Homo sapien
ctttctgttcttttagtctgtcttc

SEQ ID NO: 556099 - DNA, 25 bp, Homo sapien
tgcttggaaggtaggtcacacttgc

SEQ ID NO: 556100 - DNA, 25 bp, Homo sapien
tgtttaccttgatgatgcttggaag

SEQ ID NO: 556101 - DNA, 25 bp, Homo sapien
tatttttccgatcactagctccaac

SEQ ID NO: 556102 - DNA, 25 bp, Homo sapien
tagcatgcagacaccacttttaact

SEQ ID NO: 556103 - DNA, 25 bp, Homo sapien
tgctgctgtgcaggttgccccatcg

SEQ ID NO: 556104 - DNA, 25 bp, Homo sapien
gccccatcgagggtagttttaatga

SEQ ID NO: 556105 - DNA, 25 bp, Homo sapien
tcatcaagcttgagttggaatctaa

SEQ ID NO: 556106 - DNA, 25 bp, Homo sapien
tggaatctaagatctgtggccaccc

SEQ ID NO: 556107 - DNA, 25 bp, Homo sapien
ccactggaaagttccaacggggcag

SEQ ID NO: 556108 - DNA, 25 bp, Homo sapien
cactggaaagttccaacggggcaga

SEQ ID NO: 556109 - DNA, 25 bp, Homo sapien
agttccaacggggcagaacccacag

SEQ ID NO: 556110 - DNA, 25 bp, Homo sapien
aatgtgctgcattgccgagttctta

SEQ ID NO: 556111 - DNA, 25 bp, Homo sapien
caagaaatgtgctgcattgccgagt

SEQ ID NO: 556112 - DNA, 25 bp, Homo sapien
gcattgccgagttcttattttcacc

SEQ ID NO: 556113 - DNA, 25 bp, Homo sapien
gctgcattgccgagttcttattttc

SEQ ID NO: 556114 - DNA, 25 bp, Homo sapien
agatagagatctggagatgcttctc

SEQ ID NO: 556115 - DNA, 25 bp, Homo sapien
ccagatagagatctggagatgcttc

SEQ ID NO: 556116 - DNA, 25 bp, Homo sapien
cagatagagatctggagatgcttct

SEQ ID NO: 556117 - DNA, 25 bp, Homo sapien
cagctctttatgttggccccaggcc

SEQ ID NO: 556118 - DNA, 25 bp, Homo sapien
tcgggattggtatcaaaggcttcca

SEQ ID NO: 556119 - DNA, 25 bp, Homo sapien
tgtatgcggctccacttgagaccag

SEQ ID NO: 556120 - DNA, 25 bp, Homo sapien
tgttccttaggcacctcgggattgg

SEQ ID NO: 556121 - DNA, 25 bp, Homo sapien
gacactggtcaagtttactctcagc

SEQ ID NO: 556122 - DNA, 25 bp, Homo sapien
ggtcaagtttactctcagctcccta

SEQ ID NO: 556123 - DNA, 25 bp, Homo sapien
tgagggggcctcttattaggaatga

SEQ ID NO: 556124 - DNA, 25 bp, Homo sapien
tctcagctccctacctccagtgagg

SEQ ID NO: 556125 - DNA, 25 bp, Homo sapien
gatgattctacccattttgtgccat

SEQ ID NO: 556126 - DNA, 25 bp, Homo sapien
cagagcaactgcatgtcttcaggct

SEQ ID NO: 556127 - DNA, 25 bp, Homo sapien
tgtcttcaggctgggtattagggct

SEQ ID NO: 556128 - DNA, 25 bp, Homo sapien
ccatctgaggagcatgcgagggttc

SEQ ID NO: 556129 - DNA, 25 bp, Homo sapien
cagcgcattgaaatccactgtgaaa

SEQ ID NO: 556130 - DNA, 25 bp, Homo sapien
tcagaaacataagcttctaaaacca

SEQ ID NO: 556131 - DNA, 25 bp, Homo sapien
gctgcccacaccagcgcattgaaat

SEQ ID NO: 556132 - DNA, 25 bp, Homo sapien
tataaactctcagaaacataagctt

SEQ ID NO: 556133 - DNA, 25 bp, Homo sapien
agccaggtgctaatgttctcccctg

SEQ ID NO: 556134 - DNA, 25 bp, Homo sapien
cacagccaggtgctaatgttctccc

SEQ ID NO: 556135 - DNA, 25 bp, Homo sapien
acagccaggtgctaatgttctcccc

SEQ ID NO: 556136 - DNA, 25 bp, Homo sapien
ggcacagccaggtgctaatgttctc

SEQ ID NO: 556137 - DNA, 25 bp, Homo sapien
tggtcatgtcacttccatggccaac

SEQ ID NO: 556138 - DNA, 25 bp, Homo sapien
ggtgacagttgaccttatgataaag

SEQ ID NO: 556139 - DNA, 25 bp, Homo sapien
tatgataaagtaaatgctctgcagc

SEQ ID NO: 556140 - DNA, 25 bp, Homo sapien
tgcagcatggcaattaggacccatc

SEQ ID NO: 556141 - DNA, 25 bp, Homo sapien
ctcagactcacctccaataacccaa

SEQ ID NO: 556142 - DNA, 25 bp, Homo sapien
gttccctcagactcacctccaataa

SEQ ID NO: 556143 - DNA, 25 bp, Homo sapien
actcaaagttccctcagactcacct

SEQ ID NO: 556144 - DNA, 25 bp, Homo sapien
aaagttccctcagactcacctccaa

SEQ ID NO: 556145 - DNA, 25 bp, Homo sapien
ctacagccactcgagagtactccat

SEQ ID NO: 556146 - DNA, 25 bp, Homo sapien
taagttacctacagccactcgagag

SEQ ID NO: 556147 - DNA, 25 bp, Homo sapien
gttacctacagccactcgagagtac

SEQ ID NO: 556148 - DNA, 25 bp, Homo sapien
ccataagttacctacagccactcga

SEQ ID NO: 556149 - DNA, 25 bp, Homo sapien
catgtgagacacatcctcattgccc

SEQ ID NO: 556150 - DNA, 25 bp, Homo sapien
tctcatcaggaacagtagcagtggg

SEQ ID NO: 556151 - DNA, 25 bp, Homo sapien
gtgaactcctgatctattcctttca

SEQ ID NO: 556152 - DNA, 25 bp, Homo sapien
tacacagagcgcacaaggtttccaa

SEQ ID NO: 556153 - DNA, 25 bp, Homo sapien
cagaagaacagcttggttttcaaca

SEQ ID NO: 556154 - DNA, 25 bp, Homo sapien
gaacagcttggttttcaacagcagc

SEQ ID NO: 556155 - DNA, 25 bp, Homo sapien
gccagaagaacagcttggttttcaa

SEQ ID NO: 556156 - DNA, 25 bp, Homo sapien
gaagaacagcttggttttcaacagc

SEQ ID NO: 556157 - DNA, 25 bp, Homo sapien
gccttgtcgttcttgtccgcctcag

SEQ ID NO: 556158 - DNA, 25 bp, Homo sapien
ctgccacagcgtctccacaatagtg

SEQ ID NO: 556159 - DNA, 25 bp, Homo sapien
tagtgtagtcacgttgatctccagg

SEQ ID NO: 556160 - DNA, 25 bp, Homo sapien
cggtccttgacagccttgtcgttct

SEQ ID NO: 556161 - DNA, 25 bp, Homo sapien
ctgtcaagccatagatggtagtcac

SEQ ID NO: 556162 - DNA, 25 bp, Homo sapien
aatgcagcaggtgaagattcaagtc

SEQ ID NO: 556163 - DNA, 25 bp, Homo sapien
attcaagtctattggaagctgtcac

SEQ ID NO: 556164 - DNA, 25 bp, Homo sapien
gcagcaggtgaagattcaagtctat

SEQ ID NO: 556165 - DNA, 25 bp, Homo sapien
gtgaagattcaagtctattggaagc

SEQ ID NO: 556166 - DNA, 25 bp, Homo sapien
tcttatccaagattattttcatgaa

SEQ ID NO: 556167 - DNA, 25 bp, Homo sapien
cttatccaagattattttcatgaac

SEQ ID NO: 556168 - DNA, 25 bp, Homo sapien
ttcttatccaagattattttcatga

SEQ ID NO: 556169 - DNA, 25 bp, Homo sapien
cttcttatccaagattattttcatg

SEQ ID NO: 556170 - DNA, 25 bp, Homo sapien
gcagaggttctcaagcttcaccttg

SEQ ID NO: 556171 - DNA, 25 bp, Homo sapien
aggttctcaagcttcaccttgcact

SEQ ID NO: 556172 - DNA, 25 bp, Homo sapien
agaggttctcaagcttcaccttgca

SEQ ID NO: 556173 - DNA, 25 bp, Homo sapien
tgcagaggttctcaagcttcacctt

SEQ ID NO: 556174 - DNA, 25 bp, Homo sapien
cggtactcatcagtggggttggtca

SEQ ID NO: 556175 - DNA, 25 bp, Homo sapien
catgcggtactcatcagtggggttg

SEQ ID NO: 556176 - DNA, 25 bp, Homo sapien
gcggtactcatcagtggggttggtc

SEQ ID NO: 556177 - DNA, 25 bp, Homo sapien
ctgcatgcggtactcatcagtgggg

SEQ ID NO: 556178 - DNA, 25 bp, Homo sapien
atgcactacctcaaaggcctgcttc

SEQ ID NO: 556179 - DNA, 25 bp, Homo sapien
ttccgtgtctccttcatgcaagaga

SEQ ID NO: 556180 - DNA, 25 bp, Homo sapien
tagtaggtggatttccgtgtctcct

SEQ ID NO: 556181 - DNA, 25 bp, Homo sapien
ccttcatgcaagagacatattctaa

SEQ ID NO: 556182 - DNA, 25 bp, Homo sapien
cagggatgtagtaggtggatttccg

SEQ ID NO: 556183 - DNA, 25 bp, Homo sapien
gaaagtgcagcagctcagacaggtg

SEQ ID NO: 556184 - DNA, 25 bp, Homo sapien
aagtgcagcagctcagacaggtgtc

SEQ ID NO: 556185 - DNA, 25 bp, Homo sapien
gtgcagcagctcagacaggtgtcac

SEQ ID NO: 556186 - DNA, 25 bp, Homo sapien
ctgtgaaagtgcagcagctcagaca

SEQ ID NO: 556187 - DNA, 25 bp, Homo sapien
gagtcctcggggattccaaacatta

SEQ ID NO: 556188 - DNA, 25 bp, Homo sapien
gaatttcttgtaactctctttgtct

SEQ ID NO: 556189 - DNA, 25 bp, Homo sapien
attccaaacattagatttttagaga

SEQ ID NO: 556190 - DNA, 25 bp, Homo sapien
ggattccaaacattagatttttaga

SEQ ID NO: 556191 - DNA, 25 bp, Homo sapien
tcaaggtaccagttaacaatgtttc

SEQ ID NO: 556192 - DNA, 25 bp, Homo sapien
caaggtaccagttaacaatgtttct

SEQ ID NO: 556193 - DNA, 25 bp, Homo sapien
gctcaaggtaccagttaacaatgtt

SEQ ID NO: 556194 - DNA, 25 bp, Homo sapien
agctcaaggtaccagttaacaatgt

SEQ ID NO: 556195 - DNA, 25 bp, Homo sapien
tcaaatgttcaggggtagatcctca

SEQ ID NO: 556196 - DNA, 25 bp, Homo sapien
caaatgttcaggggtagatcctcag

SEQ ID NO: 556197 - DNA, 25 bp, Homo sapien
catactcctgggtgatgtaatcatg

SEQ ID NO: 556198 - DNA, 25 bp, Homo sapien
cagctgtgcacgatgaacacatgaa

SEQ ID NO: 556199 - DNA, 25 bp, Homo sapien
gggatgaacaacaacgccctgaatt

SEQ ID NO: 556200 - DNA, 25 bp, Homo sapien
cacagataaagttgagatcctctgg

SEQ ID NO: 556201 - DNA, 25 bp, Homo sapien
ctgattaatgtatttctctttgatc

SEQ ID NO: 556202 - DNA, 25 bp, Homo sapien
tttttcttatccttaccactgtcat

SEQ ID NO: 556203 - DNA, 25 bp, Homo sapien
cactgtcatcctcctcatttgaacc

SEQ ID NO: 556204 - DNA, 25 bp, Homo sapien
ctctttgatcttctcggttttcttt

SEQ ID NO: 556205 - DNA, 25 bp, Homo sapien
tgggtttttcctcattatatttatc

SEQ ID NO: 556206 - DNA, 25 bp, Homo sapien
cagatagagggtgatgggttagcct

SEQ ID NO: 556207 - DNA, 25 bp, Homo sapien
ggttagcctatgaactgtgagtgct

SEQ ID NO: 556208 - DNA, 25 bp, Homo sapien
gatgggttagcctatgaactgtgag

SEQ ID NO: 556209 - DNA, 25 bp, Homo sapien
tagcctatgaactgtgagtgctttt

SEQ ID NO: 556210 - DNA, 25 bp, Homo sapien
ttctaagtactctgtctggttttct

SEQ ID NO: 556211 - DNA, 25 bp, Homo sapien
tctgtctggttttctttaaggtgga

SEQ ID NO: 556212 - DNA, 25 bp, Homo sapien
gcgtctttgacccatctctcttcta

SEQ ID NO: 556213 - DNA, 25 bp, Homo sapien
taaggtggaggatcattttggtacc

SEQ ID NO: 556214 - DNA, 25 bp, Homo sapien
ggctcactgttcatcatcattgtgc

SEQ ID NO: 556215 - DNA, 25 bp, Homo sapien
ctgccatggtcagcacatacagtga

SEQ ID NO: 556216 - DNA, 25 bp, Homo sapien
gcacatacagtgaaggaacccccac

SEQ ID NO: 556217 - DNA, 25 bp, Homo sapien
aaactcccaggctcactgttcatca

SEQ ID NO: 556218 - DNA, 25 bp, Homo sapien
agataggcagaatgaaagccaacac

SEQ ID NO: 556219 - DNA, 25 bp, Homo sapien
cagataggcagaatgaaagccaaca

SEQ ID NO: 556220 - DNA, 25 bp, Homo sapien
tggcaatggtttccgaattatttat

SEQ ID NO: 556221 - DNA, 25 bp, Homo sapien
gaaatcaactttgtcatgcaaatgc

SEQ ID NO: 556222 - DNA, 25 bp, Homo sapien
taaatcctttagtctcagacttggc

SEQ ID NO: 556223 - DNA, 25 bp, Homo sapien
tatttatgaaatcaactttgtcatg

SEQ ID NO: 556224 - DNA, 25 bp, Homo sapien
gcatgatgtcagtgttcagctcttt

SEQ ID NO: 556225 - DNA, 25 bp, Homo sapien
ggcatgatgtcagtgttcagctctt

SEQ ID NO: 556226 - DNA, 25 bp, Homo sapien
ccaaagtcggggtgtattcctgagg

SEQ ID NO: 556227 - DNA, 25 bp, Homo sapien
caaagtcggggtgtattcctgaggg

SEQ ID NO: 556228 - DNA, 25 bp, Homo sapien
cactgtccaacttgtgtctgccagt

SEQ ID NO: 556229 - DNA, 25 bp, Homo sapien
gcattagaaatcaattcttgaagga

SEQ ID NO: 556230 - DNA, 25 bp, Homo sapien
tgtgtctgccagtctctcatagaga

SEQ ID NO: 556231 - DNA, 25 bp, Homo sapien
tctctcatagagaatcttgttcaag

SEQ ID NO: 556232 - DNA, 25 bp, Homo sapien
ctgagttgggcaatttctgtctgaa

SEQ ID NO: 556233 - DNA, 25 bp, Homo sapien
tttctgtctgaaaggcaaaagtctc

SEQ ID NO: 556234 - DNA, 25 bp, Homo sapien
ctccatggtgtacttcctcagacat

SEQ ID NO: 556235 - DNA, 25 bp, Homo sapien
ctcctctccatggtgtacttcctca

SEQ ID NO: 556236 - DNA, 25 bp, Homo sapien
cttataattgggtgtcagacctcac

SEQ ID NO: 556237 - DNA, 25 bp, Homo sapien
actgctgtgccccaaaatgtgaaca

SEQ ID NO: 556238 - DNA, 25 bp, Homo sapien
caggtcccagctggctacggtgtag

SEQ ID NO: 556239 - DNA, 25 bp, Homo sapien
catagtcaggtcatgaaagcaccaa

SEQ ID NO: 556240 - DNA, 25 bp, Homo sapien
tgtgtgagccttccctaccagactc

SEQ ID NO: 556241 - DNA, 25 bp, Homo sapien
aatgggatctgctcgtgattcaccg

SEQ ID NO: 556242 - DNA, 25 bp, Homo sapien
tcttgagaacaagctgccgtcgtta

SEQ ID NO: 556243 - DNA, 25 bp, Homo sapien
tgattcaccgtcattccgggaatga

SEQ ID NO: 556244 - DNA, 25 bp, Homo sapien
acttggttcccctgaggttagatct

SEQ ID NO: 556245 - DNA, 25 bp, Homo sapien
cctgaggttagatctaagtttgcca

SEQ ID NO: 556246 - DNA, 25 bp, Homo sapien
tggttcccctgaggttagatctaag

SEQ ID NO: 556247 - DNA, 25 bp, Homo sapien
gttagatctaagtttgccagtatac

SEQ ID NO: 556248 - DNA, 25 bp, Homo sapien
gagataaggcagttggatgatttgc

SEQ ID NO: 556249 - DNA, 25 bp, Homo sapien
ttggatcagtggagataaggcagtt

SEQ ID NO: 556250 - DNA, 25 bp, Homo sapien
tcacgagataaatcagttggatcag

SEQ ID NO: 556251 - DNA, 25 bp, Homo sapien
tatatacagtaagtggagcaggggc

SEQ ID NO: 556252 - DNA, 25 bp, Homo sapien
ttttttatccctgattatatgacat

SEQ ID NO: 556253 - DNA, 25 bp, Homo sapien
cctttttttatccctgattatatga

SEQ ID NO: 556254 - DNA, 25 bp, Homo sapien
gtgacacttcaaggggcaggactat

SEQ ID NO: 556255 - DNA, 25 bp, Homo sapien
gacacttcaaggggcaggactatgc

SEQ ID NO: 556256 - DNA, 25 bp, Homo sapien
ttctcgcagccggttatgcagcggt

SEQ ID NO: 556257 - DNA, 25 bp, Homo sapien
gcggttgggctgcaaaatcgaaaac

SEQ ID NO: 556258 - DNA, 25 bp, Homo sapien
ctttttctgaatatgtagcctggga

SEQ ID NO: 556259 - DNA, 25 bp, Homo sapien
cataggaaccggaagcatttgcatc

SEQ ID NO: 556260 - DNA, 25 bp, Homo sapien
caacactctcttcagcattttctcc

SEQ ID NO: 556261 - DNA, 25 bp, Homo sapien
agcattttctcccagaacaggggag

SEQ ID NO: 556262 - DNA, 25 bp, Homo sapien
ttttctcccagaacaggggagctga

SEQ ID NO: 556263 - DNA, 25 bp, Homo sapien
cattttctcccagaacaggggagct

SEQ ID NO: 556264 - DNA, 25 bp, Homo sapien
gaaagaacatgaactttggtttcca

SEQ ID NO: 556265 - DNA, 25 bp, Homo sapien
actttggtttccaaatcttgagcat

SEQ ID NO: 556266 - DNA, 25 bp, Homo sapien
ctgaaagaacatgaactttggtttc

SEQ ID NO: 556267 - DNA, 25 bp, Homo sapien
gaactttggtttccaaatcttgagc

SEQ ID NO: 556268 - DNA, 25 bp, Homo sapien
cagccggaccatcaatgccatgaag

SEQ ID NO: 556269 - DNA, 25 bp, Homo sapien
aaccaagccggcagcaactggcatt

SEQ ID NO: 556270 - DNA, 25 bp, Homo sapien
tgccatgaagacgacattgctgtgg

SEQ ID NO: 556271 - DNA, 25 bp, Homo sapien
tctcatcgtgaaagacactgtcccc

SEQ ID NO: 556272 - DNA, 25 bp, Homo sapien
tcaatagggtaacagacgtctcagc

SEQ ID NO: 556273 - DNA, 25 bp, Homo sapien
ttccacggagcgtgcacttagggag

SEQ ID NO: 556274 - DNA, 25 bp, Homo sapien
tatacctttgctcaaagactggtcc

SEQ ID NO: 556275 - DNA, 25 bp, Homo sapien
tgagcgaagaagagcacacacgcct

SEQ ID NO: 556276 - DNA, 25 bp, Homo sapien
tatgatccttcagtgttaggacagg

SEQ ID NO: 556277 - DNA, 25 bp, Homo sapien
atgatccttcagtgttaggacaggt

SEQ ID NO: 556278 - DNA, 25 bp, Homo sapien
ttatgatccttcagtgttaggacag

SEQ ID NO: 556279 - DNA, 25 bp, Homo sapien
tgtagcacgacctagaaattccttt

SEQ ID NO: 556280 - DNA, 25 bp, Homo sapien
cagacacagaaggaatgctgttggc

SEQ ID NO: 556281 - DNA, 25 bp, Homo sapien
cctttttgtcatgaagcaggaccct

SEQ ID NO: 556282 - DNA, 25 bp, Homo sapien
gcaggaccctaaagctgaaaaacat

SEQ ID NO: 556283 - DNA, 25 bp, Homo sapien
ctgcagtgactactctatcataaat

SEQ ID NO: 556284 - DNA, 25 bp, Homo sapien
cactacctcgcaatgtttaattttc

SEQ ID NO: 556285 - DNA, 25 bp, Homo sapien
tttccaaatccatgaggatcagctc

SEQ ID NO: 556286 - DNA, 25 bp, Homo sapien
ggcttcccactacctcgcaatgttt

SEQ ID NO: 556287 - DNA, 25 bp, Homo sapien
attacacctaggcacagaatagcca

SEQ ID NO: 556288 - DNA, 25 bp, Homo sapien
catccagtggcatttctacgttcag

SEQ ID NO: 556289 - DNA, 25 bp, Homo sapien
gaagtctcagtgaccagtgcaacaa

SEQ ID NO: 556290 - DNA, 25 bp, Homo sapien
gctgtgtgacatacgtgtaactgga

SEQ ID NO: 556291 - DNA, 25 bp, Homo sapien
ttcaatacaaataggcccagagtgc

SEQ ID NO: 556292 - DNA, 25 bp, Homo sapien
taccaggagttccattgagggagac

SEQ ID NO: 556293 - DNA, 25 bp, Homo sapien
tttactgagcaatctagggcaaggg

SEQ ID NO: 556294 - DNA, 25 bp, Homo sapien
caactatttgcatggacgtccttgg

SEQ ID NO: 556295 - DNA, 25 bp, Homo sapien
tctttgcttgctcaaggttcccgct

SEQ ID NO: 556296 - DNA, 25 bp, Homo sapien
tttctttgcttgctcaaggttcccg

SEQ ID NO: 556297 - DNA, 25 bp, Homo sapien
aattttctttgcttgctcaaggttc

SEQ ID NO: 556298 - DNA, 25 bp, Homo sapien
ttgcttgctcaaggttcccgcttac

SEQ ID NO: 556299 - DNA, 25 bp, Homo sapien
taccaaaggtgttcagagcagctaa

SEQ ID NO: 556300 - DNA, 25 bp, Homo sapien
ttgaaagcaggcgagattcgatccg

SEQ ID NO: 556301 - DNA, 25 bp, Homo sapien
tgatcacacagtagcggaagatgct

SEQ ID NO: 556302 - DNA, 25 bp, Homo sapien
catccgaactggtgaggtcgagaca

SEQ ID NO: 556303 - DNA, 25 bp, Homo sapien
cttgagtgggatgttttcatcagtg

SEQ ID NO: 556304 - DNA, 25 bp, Homo sapien
gggatgttttcatcagtgcaatttc

SEQ ID NO: 556305 - DNA, 25 bp, Homo sapien
gagtgggatgttttcatcagtgcaa

SEQ ID NO: 556306 - DNA, 25 bp, Homo sapien
tcatcagtgcaatttccaaaagcag

SEQ ID NO: 556307 - DNA, 25 bp, Homo sapien
tgctaaatagtctagtggctcattc

SEQ ID NO: 556308 - DNA, 25 bp, Homo sapien
gaagcatttgctaaatagtctagtg

SEQ ID NO: 556309 - DNA, 25 bp, Homo sapien
ctgcataatcggggaaatcagaagc

SEQ ID NO: 556310 - DNA, 25 bp, Homo sapien
catttgctaaatagtctagtggctc

SEQ ID NO: 556311 - DNA, 25 bp, Homo sapien
acaagagagttcagtttggcaatat

SEQ ID NO: 556312 - DNA, 25 bp, Homo sapien
tatgaatcaaatgagcagtaactcg

SEQ ID NO: 556313 - DNA, 25 bp, Homo sapien
caagaaaacaagagagttcagtttg

SEQ ID NO: 556314 - DNA, 25 bp, Homo sapien
cagtttggcaatatgaatcaaatga

SEQ ID NO: 556315 - DNA, 25 bp, Homo sapien
tcagtgctgtctcttcatgtgtatt

SEQ ID NO: 556316 - DNA, 25 bp, Homo sapien
ctcagtgctgtctcttcatgtgtat

SEQ ID NO: 556317 - DNA, 25 bp, Homo sapien
tgcaggatgtcaatatttgggtaac

SEQ ID NO: 556318 - DNA, 25 bp, Homo sapien
gctgcaggatgtcaatatttgggta

SEQ ID NO: 556319 - DNA, 25 bp, Homo sapien
agctgcaggatgtcaatatttgggt

SEQ ID NO: 556320 - DNA, 25 bp, Homo sapien
caggatgtcaatatttgggtaacac

SEQ ID NO: 556321 - DNA, 25 bp, Homo sapien
agcacacccaggaacctcacggatt

SEQ ID NO: 556322 - DNA, 25 bp, Homo sapien
cacccaggaacctcacggattggga

SEQ ID NO: 556323 - DNA, 25 bp, Homo sapien
ggaacctcacggattgggattccaa

SEQ ID NO: 556324 - DNA, 25 bp, Homo sapien
ccaggaacctcacggattgggattc

SEQ ID NO: 556325 - DNA, 25 bp, Homo sapien
tagttggtcccggaccgcagacctg

SEQ ID NO: 556326 - DNA, 25 bp, Homo sapien
ctgtgcagcctagttggtcccggac

SEQ ID NO: 556327 - DNA, 25 bp, Homo sapien
gcgtgcctgtgcagcctagttggtc

SEQ ID NO: 556328 - DNA, 25 bp, Homo sapien
accgcagacctgtcccggggaggct

SEQ ID NO: 556329 - DNA, 25 bp, Homo sapien
cgagcaagtgcgtgttctcgggtcc

SEQ ID NO: 556330 - DNA, 25 bp, Homo sapien
gcccagcgagcaagtgcgtgttctc

SEQ ID NO: 556331 - DNA, 25 bp, Homo sapien
aggcccagcgagcaagtgcgtgttc

SEQ ID NO: 556332 - DNA, 25 bp, Homo sapien
aagtgcgtgttctcgggtcctcgcc

SEQ ID NO: 556333 - DNA, 25 bp, Homo sapien
agacacagggacagcggcttccact

SEQ ID NO: 556334 - DNA, 25 bp, Homo sapien
gacacagggacagcggcttccactc

SEQ ID NO: 556335 - DNA, 25 bp, Homo sapien
tttttattgaagtcatccagatggc

SEQ ID NO: 556336 - DNA, 25 bp, Homo sapien
tccccgttggatgccacagactgat

SEQ ID NO: 556337 - DNA, 25 bp, Homo sapien
gctgacaagagacatcaaatattgg

SEQ ID NO: 556338 - DNA, 25 bp, Homo sapien
ttatctccggttccccgttggatgc

SEQ ID NO: 556339 - DNA, 25 bp, Homo sapien
tggatggttgccatcttctgttgca

SEQ ID NO: 556340 - DNA, 25 bp, Homo sapien
atggttgccatcttctgttgcagtt

SEQ ID NO: 556341 - DNA, 25 bp, Homo sapien
ctgtaagttatgaatgagctggatg

SEQ ID NO: 556342 - DNA, 25 bp, Homo sapien
gaatgagctggatggttgccatctt

SEQ ID NO: 556343 - DNA, 25 bp, Homo sapien
tttcatcgtttgtgaagtgggctcc

SEQ ID NO: 556344 - DNA, 25 bp, Homo sapien
ttttcatcgtttgtgaagtgggctc

SEQ ID NO: 556345 - DNA, 25 bp, Homo sapien
ttctttttcatcgtttgtgaagtgg

SEQ ID NO: 556346 - DNA, 25 bp, Homo sapien
ctttttcatcgtttgtgaagtgggc

SEQ ID NO: 556347 - DNA, 25 bp, Homo sapien
ctagagagtcacagccaccatctgg

SEQ ID NO: 556348 - DNA, 25 bp, Homo sapien
tccttggctcattttgataaacttg

SEQ ID NO: 556349 - DNA, 25 bp, Homo sapien
ccttggctcattttgataaacttga

SEQ ID NO: 556350 - DNA, 25 bp, Homo sapien
tcctagagagtcacagccaccatct

SEQ ID NO: 556351 - DNA, 25 bp, Homo sapien
gcctatctcaagtgggaatctgacc

SEQ ID NO: 556352 - DNA, 25 bp, Homo sapien
catcagcctcgcctatctcaagtgg

SEQ ID NO: 556353 - DNA, 25 bp, Homo sapien
gaaactttcatagagtaggccttct

SEQ ID NO: 556354 - DNA, 25 bp, Homo sapien
ctttcatagagtaggccttcttctg

SEQ ID NO: 556355 - DNA, 25 bp, Homo sapien
gcggtatccattcgccagcggactc

SEQ ID NO: 556356 - DNA, 25 bp, Homo sapien
ggacgggcaggatattaattctcca

SEQ ID NO: 556357 - DNA, 25 bp, Homo sapien
tctttgctgtccataataactccct

SEQ ID NO: 556358 - DNA, 25 bp, Homo sapien
tccacatggttcctgatgaattgga

SEQ ID NO: 556359 - DNA, 25 bp, Homo sapien
ccatagtcagtttccagggtagaat

SEQ ID NO: 556360 - DNA, 25 bp, Homo sapien
cccatagtcagtttccagggtagaa

SEQ ID NO: 556361 - DNA, 25 bp, Homo sapien
gacccatagtcagtttccagggtag

SEQ ID NO: 556362 - DNA, 25 bp, Homo sapien
tgacccatagtcagtttccagggta

SEQ ID NO: 556363 - DNA, 25 bp, Homo sapien
ctgtttgaccagtattgggactggt

SEQ ID NO: 556364 - DNA, 25 bp, Homo sapien
accagtattgggactggtgacggtt

SEQ ID NO: 556365 - DNA, 25 bp, Homo sapien
tttgaccagtattgggactggtgac

SEQ ID NO: 556366 - DNA, 25 bp, Homo sapien
cagtattgggactggtgacggtttt

SEQ ID NO: 556367 - DNA, 25 bp, Homo sapien
gacccttgtttctgtggaaagtctc

SEQ ID NO: 556368 - DNA, 25 bp, Homo sapien
ccttgtttctgtggaaagtctccca

SEQ ID NO: 556369 - DNA, 25 bp, Homo sapien
cttgtttctgtggaaagtctcccac

SEQ ID NO: 556370 - DNA, 25 bp, Homo sapien
tagacccttgtttctgtggaaagtc

SEQ ID NO: 556371 - DNA, 25 bp, Homo sapien
cctggcgtaattttaccatctgtca

SEQ ID NO: 556372 - DNA, 25 bp, Homo sapien
tctgtcatagggagtattctgggag

SEQ ID NO: 556373 - DNA, 25 bp, Homo sapien
tgggtctctcctggcgtaattttac

SEQ ID NO: 556374 - DNA, 25 bp, Homo sapien
ttaccatctgtcatagggagtattc

SEQ ID NO: 556375 - DNA, 25 bp, Homo sapien
agttcctagggtggtgccggaggag

SEQ ID NO: 556376 - DNA, 25 bp, Homo sapien
ttcctagggtggtgccggaggagaa

SEQ ID NO: 556377 - DNA, 25 bp, Homo sapien
tcagttcctagggtggtgccggagg

SEQ ID NO: 556378 - DNA, 25 bp, Homo sapien
cagttcctagggtggtgccggagga

SEQ ID NO: 556379 - DNA, 25 bp, Homo sapien
tgctggtgtttccaatagattcgat

SEQ ID NO: 556380 - DNA, 25 bp, Homo sapien
caatagattcgatgctctcagtctg

SEQ ID NO: 556381 - DNA, 25 bp, Homo sapien
tctatagaggtcagaatgtgacact

SEQ ID NO: 556382 - DNA, 25 bp, Homo sapien
aatgaaggagcctttatctatagag

SEQ ID NO: 556383 - DNA, 25 bp, Homo sapien
gagtttgcacaagcttgagaacact

SEQ ID NO: 556384 - DNA, 25 bp, Homo sapien
ggtgagtttgcacaagcttgagaac

SEQ ID NO: 556385 - DNA, 25 bp, Homo sapien
catgtcctgtgaatgttagcgtggg

SEQ ID NO: 556386 - DNA, 25 bp, Homo sapien
agcatgtcctgtgaatgttagcgtg

SEQ ID NO: 556387 - DNA, 25 bp, Homo sapien
tgttcgagctctgttttgtaagcca

SEQ ID NO: 556388 - DNA, 25 bp, Homo sapien
tgtttccttagtgttgtcgttgcct

SEQ ID NO: 556389 - DNA, 25 bp, Homo sapien
tagcctgacataggatgtttcctta

SEQ ID NO: 556390 - DNA, 25 bp, Homo sapien
gcgccgtagtcgctccatgttcgag

SEQ ID NO: 556391 - DNA, 25 bp, Homo sapien
tccacgctatccctaacttgactgt

SEQ ID NO: 556392 - DNA, 25 bp, Homo sapien
ggtcccttgtctatagccttgtctg

SEQ ID NO: 556393 - DNA, 25 bp, Homo sapien
acaccctccttagcatattgactgg

SEQ ID NO: 556394 - DNA, 25 bp, Homo sapien
cttagcatattgactggtaggtccc

SEQ ID NO: 556395 - DNA, 25 bp, Homo sapien
gtttccaactaacatctgtcaggtg

SEQ ID NO: 556396 - DNA, 25 bp, Homo sapien
taagtgaagtacataaatgcaacag

SEQ ID NO: 556397 - DNA, 25 bp, Homo sapien
aacagcagcctggttgggaaattgg

SEQ ID NO: 556398 - DNA, 25 bp, Homo sapien
tccaatctgtttttggacaaaagtc

SEQ ID NO: 556399 - DNA, 25 bp, Homo sapien
tccatttgcatgtgtggccagctgt

SEQ ID NO: 556400 - DNA, 25 bp, Homo sapien
catcctaacgggcttcacacagaac

SEQ ID NO: 556401 - DNA, 25 bp, Homo sapien
gaatgcagaagaccaatctgcccca

SEQ ID NO: 556402 - DNA, 25 bp, Homo sapien
tgtgttggtccgtcaggaatgcaga

SEQ ID NO: 556403 - DNA, 25 bp, Homo sapien
cacaggatctactggactttgttcc

SEQ ID NO: 556404 - DNA, 25 bp, Homo sapien
gcctccacaggatctactggacttt

SEQ ID NO: 556405 - DNA, 25 bp, Homo sapien
tccacaggatctactggactttgtt

SEQ ID NO: 556406 - DNA, 25 bp, Homo sapien
cctccacaggatctactggactttg

SEQ ID NO: 556407 - DNA, 25 bp, Homo sapien
acttccattggtggcattattgcct

SEQ ID NO: 556408 - DNA, 25 bp, Homo sapien
aaaatccaattgcctgcttgctgat

SEQ ID NO: 556409 - DNA, 25 bp, Homo sapien
tctctcttgccatcaagtcttgctt

SEQ ID NO: 556410 - DNA, 25 bp, Homo sapien
gcttgctgatgagggtttccatggc

SEQ ID NO: 556411 - DNA, 25 bp, Homo sapien
gtgccttctaaagctcctgggagac

SEQ ID NO: 556412 - DNA, 25 bp, Homo sapien
tgttgagagtggcataggactccca

SEQ ID NO: 556413 - DNA, 25 bp, Homo sapien
gacggatgccttcccaatatgctgg

SEQ ID NO: 556414 - DNA, 25 bp, Homo sapien
gctgcctctgcaaaacaggtgacca

SEQ ID NO: 556415 - DNA, 25 bp, Homo sapien
gaaagtgctggagcctagacctgca

SEQ ID NO: 556416 - DNA, 25 bp, Homo sapien
ggactgccaagtcatgttttacaga

SEQ ID NO: 556417 - DNA, 25 bp, Homo sapien
tttgtgggcaaaggtcgtctactcc

SEQ ID NO: 556418 - DNA, 25 bp, Homo sapien
tgtacagggtgtgctcagagatgcc

SEQ ID NO: 556419 - DNA, 25 bp, Homo sapien
gtatacactactcttgcagcctgcc

SEQ ID NO: 556420 - DNA, 25 bp, Homo sapien
tacaatgctgccacaatgcttgatg

SEQ ID NO: 556421 - DNA, 25 bp, Homo sapien
gatgtggcccttcgtcatggaactc

SEQ ID NO: 556422 - DNA, 25 bp, Homo sapien
catagagtggtgacaagaagggctt

SEQ ID NO: 556423 - DNA, 25 bp, Homo sapien
cagaagccactggttggtggatcca

SEQ ID NO: 556424 - DNA, 25 bp, Homo sapien
gaggtgaaatcataggagctgaagc

SEQ ID NO: 556425 - DNA, 25 bp, Homo sapien
caccacgcagggatatagacttatt

SEQ ID NO: 556426 - DNA, 25 bp, Homo sapien
catggaaagctcgtaggttagggat

SEQ ID NO: 556427 - DNA, 25 bp, Homo sapien
gctgtggaagagcacccataaatcc

SEQ ID NO: 556428 - DNA, 25 bp, Homo sapien
ttccagagctcagtgaaggcagagt

SEQ ID NO: 556429 - DNA, 25 bp, Homo sapien
cactggacttggctcaggagctcac

SEQ ID NO: 556430 - DNA, 25 bp, Homo sapien
tgaggcctccaaatgactgaaaagg

SEQ ID NO: 556431 - DNA, 25 bp, Homo sapien
tattttgcacagaagagtgtttagc

SEQ ID NO: 556432 - DNA, 25 bp, Homo sapien
aagagtgtttagcacagagtggagg

SEQ ID NO: 556433 - DNA, 25 bp, Homo sapien
ctattttgcacagaagagtgtttag

SEQ ID NO: 556434 - DNA, 25 bp, Homo sapien
tttgcacagaagagtgtttagcaca

SEQ ID NO: 556435 - DNA, 25 bp, Homo sapien
gcctgaatatgcttggtccacagta

SEQ ID NO: 556436 - DNA, 25 bp, Homo sapien
taagtctgtatagtacccctggcat

SEQ ID NO: 556437 - DNA, 25 bp, Homo sapien
cagaattaaataccctggccaaggt

SEQ ID NO: 556438 - DNA, 25 bp, Homo sapien
catgctgggtctgacaagagaagaa

SEQ ID NO: 556439 - DNA, 25 bp, Homo sapien
gactctctattttcctctagtcact

SEQ ID NO: 556440 - DNA, 25 bp, Homo sapien
tcccattgcacttccttaacctagg

SEQ ID NO: 556441 - DNA, 25 bp, Homo sapien
tccttagcaaagtgctttctccctg

SEQ ID NO: 556442 - DNA, 25 bp, Homo sapien
cttctgggctgattccttagcaaag

SEQ ID NO: 556443 - DNA, 25 bp, Homo sapien
gaaaaacaccagatagctcagcctg

SEQ ID NO: 556444 - DNA, 25 bp, Homo sapien
tatcaccctatgtacagaactcgcg

SEQ ID NO: 556445 - DNA, 25 bp, Homo sapien
gagttcaaaccacgagtgtcagcag

SEQ ID NO: 556446 - DNA, 25 bp, Homo sapien
tcatgcctgattacaacgacgaggg

SEQ ID NO: 556447 - DNA, 25 bp, Homo sapien
attttggttctgccaagttgatggg

SEQ ID NO: 556448 - DNA, 25 bp, Homo sapien
tagaataactgtctttgactgctca

SEQ ID NO: 556449 - DNA, 25 bp, Homo sapien
gaatctagtaccttacatagcacaa

SEQ ID NO: 556450 - DNA, 25 bp, Homo sapien
tgtagactgtgtgtgcctcaaggac

SEQ ID NO: 556451 - DNA, 25 bp, Homo sapien
tgtcactgttatcaccagaatctag

SEQ ID NO: 556452 - DNA, 25 bp, Homo sapien
ggttctgaagatccctctttgagga

SEQ ID NO: 556453 - DNA, 25 bp, Homo sapien
tgccaccatatggttctgaagatcc

SEQ ID NO: 556454 - DNA, 25 bp, Homo sapien
tctccttaactgtcctcatttccaa

SEQ ID NO: 556455 - DNA, 25 bp, Homo sapien
tccaaggtatcttttgccaccatat

SEQ ID NO: 556456 - DNA, 25 bp, Homo sapien
catattatagcacctacagacacca

SEQ ID NO: 556457 - DNA, 25 bp, Homo sapien
tgtctgattcgcattcccgtttcca

SEQ ID NO: 556458 - DNA, 25 bp, Homo sapien
tagtcctcctgtctgattcgcattc

SEQ ID NO: 556459 - DNA, 25 bp, Homo sapien
gaaacacatagtcctcctgtctgat

SEQ ID NO: 556460 - DNA, 25 bp, Homo sapien
ctttagaaacacatagtcctcctgt

SEQ ID NO: 556461 - DNA, 25 bp, Homo sapien
ttcaggtctccttccacctctgagc

SEQ ID NO: 556462 - DNA, 25 bp, Homo sapien
ttccacctctgagcttctctttctt

SEQ ID NO: 556463 - DNA, 25 bp, Homo sapien
tcttgttttgtgctcctcctccttc

SEQ ID NO: 556464 - DNA, 25 bp, Homo sapien
tcagtgttgactccccttggctcca

SEQ ID NO: 556465 - DNA, 25 bp, Homo sapien
accagaaggattcaccgacaagggc

SEQ ID NO: 556466 - DNA, 25 bp, Homo sapien
cagaaggattcaccgacaagggctg

SEQ ID NO: 556467 - DNA, 25 bp, Homo sapien
agtaatgggtagaccagaaggattc

SEQ ID NO: 556468 - DNA, 25 bp, Homo sapien
catgattagagtaatgggtagacca

SEQ ID NO: 556469 - DNA, 25 bp, Homo sapien
cttggatccccttccctttcctgca

SEQ ID NO: 556470 - DNA, 25 bp, Homo sapien
ggatccccttccctttcctgcatgc

SEQ ID NO: 556471 - DNA, 25 bp, Homo sapien
ccttccctttcctgcatgcattcat

SEQ ID NO: 556472 - DNA, 25 bp, Homo sapien
ccccttccctttcctgcatgcattc

SEQ ID NO: 556473 - DNA, 25 bp, Homo sapien
cagattgtacaatagaactggatag

SEQ ID NO: 556474 - DNA, 25 bp, Homo sapien
gattgtacaatagaactggatagtt

SEQ ID NO: 556475 - DNA, 25 bp, Homo sapien
tggaacttgagccttttgtggaacc

SEQ ID NO: 556476 - DNA, 25 bp, Homo sapien
gggctggaacttgagccttttgtgg

SEQ ID NO: 556477 - DNA, 25 bp, Homo sapien
tctttggaatctgcggagtttcaca

SEQ ID NO: 556478 - DNA, 25 bp, Homo sapien
tggcttcgagctggctgtcttcaag

SEQ ID NO: 556479 - DNA, 25 bp, Homo sapien
tggatttctttggaatctgcggagt

SEQ ID NO: 556480 - DNA, 25 bp, Homo sapien
tgtcttggtgctatgattgctttct

SEQ ID NO: 556481 - DNA, 25 bp, Homo sapien
ttacacactgcaagtgctgtgttac

SEQ ID NO: 556482 - DNA, 25 bp, Homo sapien
ttcagacgagtagggctgacgagct

SEQ ID NO: 556483 - DNA, 25 bp, Homo sapien
cagtcatcctattagggccagtttc

SEQ ID NO: 556484 - DNA, 25 bp, Homo sapien
tgtgtcagtcatcctattagggcca

SEQ ID NO: 556485 - DNA, 25 bp, Homo sapien
ttagggccagtttcagacgagtagg

SEQ ID NO: 556486 - DNA, 25 bp, Homo sapien
caacagagtttagactgtctttgct

SEQ ID NO: 556487 - DNA, 25 bp, Homo sapien
gggatttgtcggaaggaagggctgc

SEQ ID NO: 556488 - DNA, 25 bp, Homo sapien
ggaagggctgcagcttacagcaaca

SEQ ID NO: 556489 - DNA, 25 bp, Homo sapien
tgcagcttacagcaacagagtttag

SEQ ID NO: 556490 - DNA, 25 bp, Homo sapien
ttaggcctcggaagcatgtgtttac

SEQ ID NO: 556491 - DNA, 25 bp, Homo sapien
tgagggcaggctagcttttaaagct

SEQ ID NO: 556492 - DNA, 25 bp, Homo sapien
tgtgttttcactatgccgaaccata

SEQ ID NO: 556493 - DNA, 25 bp, Homo sapien
catatcaactttctcgctgagaagc

SEQ ID NO: 556494 - DNA, 25 bp, Homo sapien
taggatccaggttgtgccaccaagt

SEQ ID NO: 556495 - DNA, 25 bp, Homo sapien
cagttgctccagagccactatttag

SEQ ID NO: 556496 - DNA, 25 bp, Homo sapien
gtcgggccggtcagcacaggttttc

SEQ ID NO: 556497 - DNA, 25 bp, Homo sapien
caagttcaaggctggttgtgatggt

SEQ ID NO: 556498 - DNA, 25 bp, Homo sapien
acaatactgcaggctgcaaatccat

SEQ ID NO: 556499 - DNA, 25 bp, Homo sapien
caagcaggggaagtacaatactgca

SEQ ID NO: 556500 - DNA, 25 bp, Homo sapien
ccaagcaggggaagtacaatactgc

SEQ ID NO: 556501 - DNA, 25 bp, Homo sapien
cccaagcaggggaagtacaatactg

SEQ ID NO: 556502 - DNA, 25 bp, Homo sapien
cctgagctctgaggctgatggacga

SEQ ID NO: 556503 - DNA, 25 bp, Homo sapien
caaactatttgttgcagccgtgata

SEQ ID NO: 556504 - DNA, 25 bp, Homo sapien
tgtttatggagaccagtcccggcct

SEQ ID NO: 556505 - DNA, 25 bp, Homo sapien
tcctcaatacagcagaaacgcttgg

SEQ ID NO: 556506 - DNA, 25 bp, Homo sapien
aatggacatatcatctaaaaagctg

SEQ ID NO: 556507 - DNA, 25 bp, Homo sapien
tctcagcatactgagttttggcccc

SEQ ID NO: 556508 - DNA, 25 bp, Homo sapien
gagagcaatttctgagtctcagcat

SEQ ID NO: 556509 - DNA, 25 bp, Homo sapien
gccaacaacaggaagtcttagactc

SEQ ID NO: 556510 - DNA, 25 bp, Homo sapien
ggtgctcacacctcgtgaaagaagg

SEQ ID NO: 556511 - DNA, 25 bp, Homo sapien
gagataggcaatgacaaaggatgaa

SEQ ID NO: 556512 - DNA, 25 bp, Homo sapien
aaggcagcgtgaacagagataggca

SEQ ID NO: 556513 - DNA, 25 bp, Homo sapien
cctcgtgaaagaaggcagcgtgaac

SEQ ID NO: 556514 - DNA, 25 bp, Homo sapien
tgctactctagctgcttctttgttc

SEQ ID NO: 556515 - DNA, 25 bp, Homo sapien
ttcccacaatgcgtgctactctagc

SEQ ID NO: 556516 - DNA, 25 bp, Homo sapien
ctgggtactcaagtaccagaatggt

SEQ ID NO: 556517 - DNA, 25 bp, Homo sapien
gttctcctgggtactcaagtaccag

SEQ ID NO: 556518 - DNA, 25 bp, Homo sapien
gacaatcatgaccctatggcgcata

SEQ ID NO: 556519 - DNA, 25 bp, Homo sapien
ctatggcgcatacaagccataacat

SEQ ID NO: 556520 - DNA, 25 bp, Homo sapien
caatcatgaccctatggcgcataca

SEQ ID NO: 556521 - DNA, 25 bp, Homo sapien
atggcgcatacaagccataacattt

SEQ ID NO: 556522 - DNA, 25 bp, Homo sapien
tctgacaggaccagtatggcacctc

SEQ ID NO: 556523 - DNA, 25 bp, Homo sapien
ggagtaaccctaagcaaatcaagtg

SEQ ID NO: 556524 - DNA, 25 bp, Homo sapien
tgtctctttaggaggcgagcccctt

SEQ ID NO: 556525 - DNA, 25 bp, Homo sapien
tatatgcaacccaagacactgagct

SEQ ID NO: 556526 - DNA, 25 bp, Homo sapien
catttgaataacacactcgggcagt

SEQ ID NO: 556527 - DNA, 25 bp, Homo sapien
agtagcgctcagtcctcccgagttt

SEQ ID NO: 556528 - DNA, 25 bp, Homo sapien
tctatgtgttttggttcaacgagca

SEQ ID NO: 556529 - DNA, 25 bp, Homo sapien
tcaacgagcattttcgcagtagcgc

SEQ ID NO: 556530 - DNA, 25 bp, Homo sapien
tcccgctacagtttggagaacccag

SEQ ID NO: 556531 - DNA, 25 bp, Homo sapien
gtgagtccccttatccaggtacatg

SEQ ID NO: 556532 - DNA, 25 bp, Homo sapien
tgctgttgtccgaaccctctgtggc

SEQ ID NO: 556533 - DNA, 25 bp, Homo sapien
gataccggaattcttgtgagtcccc

SEQ ID NO: 556534 - DNA, 25 bp, Homo sapien
tctcattgcctttggatctgtgaca

SEQ ID NO: 556535 - DNA, 25 bp, Homo sapien
cttggaacaggtgtatgggcctcat

SEQ ID NO: 556536 - DNA, 25 bp, Homo sapien
aaggatcatgctattcactgtgtca

SEQ ID NO: 556537 - DNA, 25 bp, Homo sapien
tcactgtgtcatagattaaggcttc

SEQ ID NO: 556538 - DNA, 25 bp, Homo sapien
agtggtgtctgagacttgtcctcgg

SEQ ID NO: 556539 - DNA, 25 bp, Homo sapien
cctcggccccatgtggaacacagaa

SEQ ID NO: 556540 - DNA, 25 bp, Homo sapien
atccccagtccccgagaaatgtagg

SEQ ID NO: 556541 - DNA, 25 bp, Homo sapien
tgtcctcggccccatgtggaacaca

SEQ ID NO: 556542 - DNA, 25 bp, Homo sapien
ccctcctgtacgttgcttgattgac

SEQ ID NO: 556543 - DNA, 25 bp, Homo sapien
tataactggcatgtattatggagtc

SEQ ID NO: 556544 - DNA, 25 bp, Homo sapien
ctgtggggatgctactataactggc

SEQ ID NO: 556545 - DNA, 25 bp, Homo sapien
ttgagaacagttaagcttggatctg

SEQ ID NO: 556546 - DNA, 25 bp, Homo sapien
aaaatgaaagccgactgagcagggc

SEQ ID NO: 556547 - DNA, 25 bp, Homo sapien
caagttccactgcagtttaggtaga

SEQ ID NO: 556548 - DNA, 25 bp, Homo sapien
caagtgactatctgcagcggtggcc

SEQ ID NO: 556549 - DNA, 25 bp, Homo sapien
tagattgccttatggactgctcctg

SEQ ID NO: 556550 - DNA, 25 bp, Homo sapien
cctgctgaaggacatggatatcggc

SEQ ID NO: 556551 - DNA, 25 bp, Homo sapien
ggttacagtcagctttatcgccaag

SEQ ID NO: 556552 - DNA, 25 bp, Homo sapien
tatcgccaagccagtagattttctt

SEQ ID NO: 556553 - DNA, 25 bp, Homo sapien
acaggctcctccagacgggcttttt

SEQ ID NO: 556554 - DNA, 25 bp, Homo sapien
tcattcgtactggaaaaagtgaagc

SEQ ID NO: 556555 - DNA, 25 bp, Homo sapien
tgaagcagacaggaatatctccgcc

SEQ ID NO: 556556 - DNA, 25 bp, Homo sapien
tcagagtggccttaaccaaaatttc

SEQ ID NO: 556557 - DNA, 25 bp, Homo sapien
ccaaatgctgcaggttatcagagtg

SEQ ID NO: 556558 - DNA, 25 bp, Homo sapien
cagtatgtagatagaatctcaggac

SEQ ID NO: 556559 - DNA, 25 bp, Homo sapien
tagacagtatgtagatagaatctca

SEQ ID NO: 556560 - DNA, 25 bp, Homo sapien
gccttatacgagtgttctgttttaa

SEQ ID NO: 556561 - DNA, 25 bp, Homo sapien
gacctccaggaatgataatgcctta

SEQ ID NO: 556562 - DNA, 25 bp, Homo sapien
tcagaataaattaacgctctttcgc

SEQ ID NO: 556563 - DNA, 25 bp, Homo sapien
gacctttgaaatttggcagcaccct

SEQ ID NO: 556564 - DNA, 25 bp, Homo sapien
tcctgggccacttgagattccctgc

SEQ ID NO: 556565 - DNA, 25 bp, Homo sapien
gctctttcgctgaagttgtgcctcc

SEQ ID NO: 556566 - DNA, 25 bp, Homo sapien
tttgactgagacgataaaggctgca

SEQ ID NO: 556567 - DNA, 25 bp, Homo sapien
gtttcctcgctgaggctgggcctcc

SEQ ID NO: 556568 - DNA, 25 bp, Homo sapien
tcctgtgagtgtgaaatgagtgtct

SEQ ID NO: 556569 - DNA, 25 bp, Homo sapien
ttttgcagcaggtaaaacagctctg

SEQ ID NO: 556570 - DNA, 25 bp, Homo sapien
gactgttggccccagaggtgttccc

SEQ ID NO: 556571 - DNA, 25 bp, Homo sapien
gctaccagagtattccaaccctgct

SEQ ID NO: 556572 - DNA, 25 bp, Homo sapien
cagaggtgttcccttcacttttggg

SEQ ID NO: 556573 - DNA, 25 bp, Homo sapien
gaagcaggctcccattggtgctacc

SEQ ID NO: 556574 - DNA, 25 bp, Homo sapien
taatgcacacctctttccttctgaa

SEQ ID NO: 556575 - DNA, 25 bp, Homo sapien
tgatataatgcacacctctttcctt

SEQ ID NO: 556576 - DNA, 25 bp, Homo sapien
ctgtgatataatgcacacctctttc

SEQ ID NO: 556577 - DNA, 25 bp, Homo sapien
tataatgcacacctctttccttctg

SEQ ID NO: 556578 - DNA, 25 bp, Homo sapien
ttcttttcctccatgggagcccttg

SEQ ID NO: 556579 - DNA, 25 bp, Homo sapien
cccttgggagagactctgctgcctt

SEQ ID NO: 556580 - DNA, 25 bp, Homo sapien
ctctgctgcctttgaggttgagcat

SEQ ID NO: 556581 - DNA, 25 bp, Homo sapien
catgggagcccttgggagagactct

SEQ ID NO: 556582 - DNA, 25 bp, Homo sapien
tgaacttatttgttacctgccaatt

SEQ ID NO: 556583 - DNA, 25 bp, Homo sapien
caggtatgtaaggtcatttgtggca

SEQ ID NO: 556584 - DNA, 25 bp, Homo sapien
agacatcaaggctcagcaggtatgt

SEQ ID NO: 556585 - DNA, 25 bp, Homo sapien
taatctacttccagtcttcattaag

SEQ ID NO: 556586 - DNA, 25 bp, Homo sapien
agaatgtgaaaacggcccacaggca

SEQ ID NO: 556587 - DNA, 25 bp, Homo sapien
tcagtaaaaggaggatattcagcag

SEQ ID NO: 556588 - DNA, 25 bp, Homo sapien
tcaactgggcaacaacgcctagatc

SEQ ID NO: 556589 - DNA, 25 bp, Homo sapien
cagccttgggtgtgtcatttatgac

SEQ ID NO: 556590 - DNA, 25 bp, Homo sapien
catttgagtcatacacactggaaga

SEQ ID NO: 556591 - DNA, 25 bp, Homo sapien
tcaaaggcagggatctatctgtcca

SEQ ID NO: 556592 - DNA, 25 bp, Homo sapien
acttggactgaaatccacaccagca

SEQ ID NO: 556593 - DNA, 25 bp, Homo sapien
tgaaatccacatgttacctgagagg

SEQ ID NO: 556594 - DNA, 25 bp, Homo sapien
ggtgtttgaatgttatgctcagcac

SEQ ID NO: 556595 - DNA, 25 bp, Homo sapien
agatttgagtacagggatgacaggc

SEQ ID NO: 556596 - DNA, 25 bp, Homo sapien
ctgtcttatgggaaggccagtcagc

SEQ ID NO: 556597 - DNA, 25 bp, Homo sapien
catgagtaagacagaaactgtgtag

SEQ ID NO: 556598 - DNA, 25 bp, Homo sapien
taacaacccattttgagccatagag

SEQ ID NO: 556599 - DNA, 25 bp, Homo sapien
caaaactgttgcgagggctttacct

SEQ ID NO: 556600 - DNA, 25 bp, Homo sapien
tttgttgctggacgaacactggctg

SEQ ID NO: 556601 - DNA, 25 bp, Homo sapien
gaagtcctaccagctgtcatgtaag

SEQ ID NO: 556602 - DNA, 25 bp, Homo sapien
tactggccctagctgaggctcctag

SEQ ID NO: 556603 - DNA, 25 bp, Homo sapien
ccctgagggcttatgtgacccatga

SEQ ID NO: 556604 - DNA, 25 bp, Homo sapien
gaatgaatgagatcgtagcctggaa

SEQ ID NO: 556605 - DNA, 25 bp, Homo sapien
tcccacgtgggatgagcaaaggccc

SEQ ID NO: 556606 - DNA, 25 bp, Homo sapien
ccagaccactgcaatgaagcgagta

SEQ ID NO: 556607 - DNA, 25 bp, Homo sapien
caaggctttggacctctatagggat

SEQ ID NO: 556608 - DNA, 25 bp, Homo sapien
gaatgaggccctgataatggaaata

SEQ ID NO: 556609 - DNA, 25 bp, Homo sapien
gctgtgattgactcagcctgggtcc

SEQ ID NO: 556610 - DNA, 25 bp, Homo sapien
agtggtagctctgatcattgttgtc

SEQ ID NO: 556611 - DNA, 25 bp, Homo sapien
gctgccgtcagctagatacgtttcg

SEQ ID NO: 556612 - DNA, 25 bp, Homo sapien
cagacagaacttttctttggtagtg

SEQ ID NO: 556613 - DNA, 25 bp, Homo sapien
aaggtgtctgatcttcatacaagca

SEQ ID NO: 556614 - DNA, 25 bp, Homo sapien
taattcgcttgaatcccattggccc

SEQ ID NO: 556615 - DNA, 25 bp, Homo sapien
gccaaagcaatgaagcgacctctcg

SEQ ID NO: 556616 - DNA, 25 bp, Homo sapien
tatccacaatgcaatgccgttccca

SEQ ID NO: 556617 - DNA, 25 bp, Homo sapien
taaaagactcagtcgactgccaaag

SEQ ID NO: 556618 - DNA, 25 bp, Homo sapien
gccgcgttcattccaacaggtatgt

SEQ ID NO: 556619 - DNA, 25 bp, Homo sapien
gaagagacagatttaacccatgaga

SEQ ID NO: 556620 - DNA, 25 bp, Homo sapien
ggtatgtgcccttactgccctacgt

SEQ ID NO: 556621 - DNA, 25 bp, Homo sapien
cagcgtcttgcactaccagcaggct

SEQ ID NO: 556622 - DNA, 25 bp, Homo sapien
tacacattccacagagttctcctga

SEQ ID NO: 556623 - DNA, 25 bp, Homo sapien
taagccaatgcctgatactattacg

SEQ ID NO: 556624 - DNA, 25 bp, Homo sapien
acctgggcccgcctatatatacaca

SEQ ID NO: 556625 - DNA, 25 bp, Homo sapien
taaaggactcttagtgatctcctca

SEQ ID NO: 556626 - DNA, 25 bp, Homo sapien
tcctggtgggaagaccatccattga

SEQ ID NO: 556627 - DNA, 25 bp, Homo sapien
tcagcccacgatagtgaaatgaaag

SEQ ID NO: 556628 - DNA, 25 bp, Homo sapien
catcagagggaggtaaaatatttct

SEQ ID NO: 556629 - DNA, 25 bp, Homo sapien
gcttatcagagttaacatcagaggg

SEQ ID NO: 556630 - DNA, 25 bp, Homo sapien
ttttttatgagtacaagttgagtgc

SEQ ID NO: 556631 - DNA, 25 bp, Homo sapien
tacaagttgagtgccccttgatcca

SEQ ID NO: 556632 - DNA, 25 bp, Homo sapien
gtgccccttgatccaaaatgcttgg

SEQ ID NO: 556633 - DNA, 25 bp, Homo sapien
tgagtacaagttgagtgccccttga

SEQ ID NO: 556634 - DNA, 25 bp, Homo sapien
caagatctggcgccttcagggtagt

SEQ ID NO: 556635 - DNA, 25 bp, Homo sapien
gcggctgcagcgtaggtttgattct

SEQ ID NO: 556636 - DNA, 25 bp, Homo sapien
gattgatcagagcatccgtttgtgg

SEQ ID NO: 556637 - DNA, 25 bp, Homo sapien
aggactttgcacattccttaaggca

SEQ ID NO: 556638 - DNA, 25 bp, Homo sapien
cctctgaattctacaaggactttgc

SEQ ID NO: 556639 - DNA, 25 bp, Homo sapien
aaagagtcccctcaggtgtagagtc

SEQ ID NO: 556640 - DNA, 25 bp, Homo sapien
gtcaatgcatattgtccatgtctcc

SEQ ID NO: 556641 - DNA, 25 bp, Homo sapien
tcaggtgtagagtcaatgcatattg

SEQ ID NO: 556642 - DNA, 25 bp, Homo sapien
tcccctcaggtgtagagtcaatgca

SEQ ID NO: 556643 - DNA, 25 bp, Homo sapien
atgctgccacacgtcaaagacacac

SEQ ID NO: 556644 - DNA, 25 bp, Homo sapien
tgccacacgtcaaagacacactggc

SEQ ID NO: 556645 - DNA, 25 bp, Homo sapien
gctgccacacgtcaaagacacactg

SEQ ID NO: 556646 - DNA, 25 bp, Homo sapien
ctgccacacgtcaaagacacactgg

SEQ ID NO: 556647 - DNA, 25 bp, Homo sapien
ccatgcaccagccatctgctttcca

SEQ ID NO: 556648 - DNA, 25 bp, Homo sapien
gcaccagccatctgctttccacacg

SEQ ID NO: 556649 - DNA, 25 bp, Homo sapien
accagccatctgctttccacacgcc

SEQ ID NO: 556650 - DNA, 25 bp, Homo sapien
cagccatctgctttccacacgccat

SEQ ID NO: 556651 - DNA, 25 bp, Homo sapien
cactgcagaggtgccagcgtgatac

SEQ ID NO: 556652 - DNA, 25 bp, Homo sapien
aagtgaggaactaaggctcgaaagg

SEQ ID NO: 556653 - DNA, 25 bp, Homo sapien
ctgaaattcccctccagtactcttt

SEQ ID NO: 556654 - DNA, 25 bp, Homo sapien
cacaaatctgactggtggcacagac

SEQ ID NO: 556655 - DNA, 25 bp, Homo sapien
tgaggaaacacagtcgcataactcc

SEQ ID NO: 556656 - DNA, 25 bp, Homo sapien
ttctgaataaatacacagtgctctt

SEQ ID NO: 556657 - DNA, 25 bp, Homo sapien
agtcgcataactcccctccttctga

SEQ ID NO: 556658 - DNA, 25 bp, Homo sapien
cttctgaataaatacacagtgctct

SEQ ID NO: 556659 - DNA, 25 bp, Homo sapien
catccagacttagtgaatatagtgg

SEQ ID NO: 556660 - DNA, 25 bp, Homo sapien
aggaagccatccagacttagtgaat

SEQ ID NO: 556661 - DNA, 25 bp, Homo sapien
acttagtgaatatagtggatattgc

SEQ ID NO: 556662 - DNA, 25 bp, Homo sapien
gcctgtagcgttggctgatgccagc

SEQ ID NO: 556663 - DNA, 25 bp, Homo sapien
gggttcttctaagcaccctctgaag

SEQ ID NO: 556664 - DNA, 25 bp, Homo sapien
aactcatgctggtttgtgcaagcac

SEQ ID NO: 556665 - DNA, 25 bp, Homo sapien
gggatgccttcaccaatgagcagag

SEQ ID NO: 556666 - DNA, 25 bp, Homo sapien
tttggaacctctgtgtcccgtcgcc

SEQ ID NO: 556667 - DNA, 25 bp, Homo sapien
cacagatgccaagagtgtgattcgt

SEQ ID NO: 556668 - DNA, 25 bp, Homo sapien
agagtgtgattcgttttttatacca

SEQ ID NO: 556669 - DNA, 25 bp, Homo sapien
gagagttcaatagtcccagggctca

SEQ ID NO: 556670 - DNA, 25 bp, Homo sapien
agttttctggcctagatgccaggca

SEQ ID NO: 556671 - DNA, 25 bp, Homo sapien
gatagttaactacctgagaccagct

SEQ ID NO: 556672 - DNA, 25 bp, Homo sapien
gaagtaaaaccgatacctgtcctgc

SEQ ID NO: 556673 - DNA, 25 bp, Homo sapien
ccaagggcaggttcgattctagctc

SEQ ID NO: 556674 - DNA, 25 bp, Homo sapien
tggaaattcaagcacaagtactggg

SEQ ID NO: 556675 - DNA, 25 bp, Homo sapien
tattttaaatttgggatcatcgcct

SEQ ID NO: 556676 - DNA, 25 bp, Homo sapien
cattttatatgttgcacatagccta

SEQ ID NO: 556677 - DNA, 25 bp, Homo sapien
tgtgaacatattagtgattgaagta

SEQ ID NO: 556678 - DNA, 25 bp, Homo sapien
gcctatacagtacctacatagtttt

SEQ ID NO: 556679 - DNA, 25 bp, Homo sapien
aaatattctttcagccataccactg

SEQ ID NO: 556680 - DNA, 25 bp, Homo sapien
caggatataacagcacttcaccgaa

SEQ ID NO: 556681 - DNA, 25 bp, Homo sapien
cttacagtgtaaacaggagtctaat

SEQ ID NO: 556682 - DNA, 25 bp, Homo sapien
gagactaactctccacttgtatggg

SEQ ID NO: 556683 - DNA, 25 bp, Homo sapien
tattgtgagtcgtgcacatccctgc

SEQ ID NO: 556684 - DNA, 25 bp, Homo sapien
tctctagggctgaaactcggctatg

SEQ ID NO: 556685 - DNA, 25 bp, Homo sapien
tatacagcttatgtggttggcagac

SEQ ID NO: 556686 - DNA, 25 bp, Homo sapien
ggcagactggtgcttaatgacttaa

SEQ ID NO: 556687 - DNA, 25 bp, Homo sapien
gagaccccattgcagttcttgtgaa

SEQ ID NO: 556688 - DNA, 25 bp, Homo sapien
gggtaggccatctcattagtcagta

SEQ ID NO: 556689 - DNA, 25 bp, Homo sapien
caacccagaggcaagtcagaatcat

SEQ ID NO: 556690 - DNA, 25 bp, Homo sapien
gactgcttaaaggatgagaccccat

SEQ ID NO: 556691 - DNA, 25 bp, Homo sapien
ccagtcactggagaagacagtgcaa

SEQ ID NO: 556692 - DNA, 25 bp, Homo sapien
agtgagtggtaaatcctacctccag

SEQ ID NO: 556693 - DNA, 25 bp, Homo sapien
gaagtctgttcagggttacacttgg

SEQ ID NO: 556694 - DNA, 25 bp, Homo sapien
caattgtttttaggcgatgtgctga

SEQ ID NO: 556695 - DNA, 25 bp, Homo sapien
gcctcacaggtcaagaaaccatcgt

SEQ ID NO: 556696 - DNA, 25 bp, Homo sapien
taggaatcagggttttacagtcgaa

SEQ ID NO: 556697 - DNA, 25 bp, Homo sapien
tatgtttaatcagaggcatgcaggc

SEQ ID NO: 556698 - DNA, 25 bp, Homo sapien
tctcaactgtattaggagcctcaca

SEQ ID NO: 556699 - DNA, 25 bp, Homo sapien
gtgagaaaatatgctccgacctgtc

SEQ ID NO: 556700 - DNA, 25 bp, Homo sapien
tcaacctttatggtactgagcatga

SEQ ID NO: 556701 - DNA, 25 bp, Homo sapien
atgaactgtaaccaccccaagggct

SEQ ID NO: 556702 - DNA, 25 bp, Homo sapien
caaaatagagtttatgctggcatcg

SEQ ID NO: 556703 - DNA, 25 bp, Homo sapien
tcatttaggcagaatgccacggagg

SEQ ID NO: 556704 - DNA, 25 bp, Homo sapien
taatgttttgggaggaacgcctgga

SEQ ID NO: 556705 - DNA, 25 bp, Homo sapien
gctgcacgatgtttccttaaggacc

SEQ ID NO: 556706 - DNA, 25 bp, Homo sapien
taagatgcaatgctagcgacagaac

SEQ ID NO: 556707 - DNA, 25 bp, Homo sapien
ggtgggcttgcggatcctacgacta

SEQ ID NO: 556708 - DNA, 25 bp, Homo sapien
gaactgcgcatgctcggtacacagg

SEQ ID NO: 556709 - DNA, 25 bp, Homo sapien
tcacctacgattggttggcagagcg

SEQ ID NO: 556710 - DNA, 25 bp, Homo sapien
taaagcttggaggtagctctagccc

SEQ ID NO: 556711 - DNA, 25 bp, Homo sapien
caagctggaggctttactattgtca

SEQ ID NO: 556712 - DNA, 25 bp, Homo sapien
accggcaccttcatcgagaaatacg

SEQ ID NO: 556713 - DNA, 25 bp, Homo sapien
cgcgtgaagcggtgagcgagggcac

SEQ ID NO: 556714 - DNA, 25 bp, Homo sapien
ggacttctaccgcaaggagatcgag

SEQ ID NO: 556715 - DNA, 25 bp, Homo sapien
taatcgctgaactaaaatcgtgcat

SEQ ID NO: 556716 - DNA, 25 bp, Homo sapien
cctatgagatcaaagagaaggctct

SEQ ID NO: 556717 - DNA, 25 bp, Homo sapien
gatggttgtaagtgcaccgtagaca

SEQ ID NO: 556718 - DNA, 25 bp, Homo sapien
aaggaccaagttatgtgtacccagg

SEQ ID NO: 556719 - DNA, 25 bp, Homo sapien
gccagtcatcttggttgggaacaaa

SEQ ID NO: 556720 - DNA, 25 bp, Homo sapien
tgctcagcctgacaaagatgaccca

SEQ ID NO: 556721 - DNA, 25 bp, Homo sapien
caatggtggacgaactctttgcaga

SEQ ID NO: 556722 - DNA, 25 bp, Homo sapien
gagagaagtatcgtccagcgaaggc

SEQ ID NO: 556723 - DNA, 25 bp, Homo sapien
ttactgaagcgtcaaataaagctgg

SEQ ID NO: 556724 - DNA, 25 bp, Homo sapien
tgaaaaggtgctcaagctctgacat

SEQ ID NO: 556725 - DNA, 25 bp, Homo sapien
taacctctggtcttacgtgtgtaac

SEQ ID NO: 556726 - DNA, 25 bp, Homo sapien
cagaactgcaatatcactgagcctg

SEQ ID NO: 556727 - DNA, 25 bp, Homo sapien
gatcagggtttcaagaatgactgca

SEQ ID NO: 556728 - DNA, 25 bp, Homo sapien
tcagcagtcttgtgttagcactggg

SEQ ID NO: 556729 - DNA, 25 bp, Homo sapien
ggtttcccagagatatagttcacag

SEQ ID NO: 556730 - DNA, 25 bp, Homo sapien
tataaagaaatgttgcctaaggctg

SEQ ID NO: 556731 - DNA, 25 bp, Homo sapien
tcacatcaagggaatctacagaaag

SEQ ID NO: 556732 - DNA, 25 bp, Homo sapien
gcttgattgcagctagctgccctgt

SEQ ID NO: 556733 - DNA, 25 bp, Homo sapien
gacctttgatattctgtttactctc

SEQ ID NO: 556734 - DNA, 25 bp, Homo sapien
gggaaaagtctgagtgagtcacagc

SEQ ID NO: 556735 - DNA, 25 bp, Homo sapien
tatcttcctcctttagtttacttga

SEQ ID NO: 556736 - DNA, 25 bp, Homo sapien
tccctggagtggattggcctcttct

SEQ ID NO: 556737 - DNA, 25 bp, Homo sapien
gagaaacttccatggatgctcctgg

SEQ ID NO: 556738 - DNA, 25 bp, Homo sapien
gtgaaattgaggatatctggcttcc

SEQ ID NO: 556739 - DNA, 25 bp, Homo sapien
tcattttcgcctgggagccaacgag

SEQ ID NO: 556740 - DNA, 25 bp, Homo sapien
tcgagttcatctcttaactttacat

SEQ ID NO: 556741 - DNA, 25 bp, Homo sapien
tcatctatggttcccatatttttgc

SEQ ID NO: 556742 - DNA, 25 bp, Homo sapien
ctgggttgtgagctatttcctccac

SEQ ID NO: 556743 - DNA, 25 bp, Homo sapien
aactgctctcttttcgagttcatct

SEQ ID NO: 556744 - DNA, 25 bp, Homo sapien
acttgttggatctactcttctggcc

SEQ ID NO: 556745 - DNA, 25 bp, Homo sapien
tgttgacaacctgctttaccctgac

SEQ ID NO: 556746 - DNA, 25 bp, Homo sapien
tttgttccaatccatgcgccaacgg

SEQ ID NO: 556747 - DNA, 25 bp, Homo sapien
ctctggatcgtgcacaggaggccat

SEQ ID NO: 556748 - DNA, 25 bp, Homo sapien
tagggcgtaagcatccttccctgag

SEQ ID NO: 556749 - DNA, 25 bp, Homo sapien
cactgaccatttagggcgtaagcat

SEQ ID NO: 556750 - DNA, 25 bp, Homo sapien
ggcgtaagcatccttccctgagagg

SEQ ID NO: 556751 - DNA, 25 bp, Homo sapien
accatttagggcgtaagcatccttc

SEQ ID NO: 556752 - DNA, 25 bp, Homo sapien
ttcccatgattactaccaaaatgca

SEQ ID NO: 556753 - DNA, 25 bp, Homo sapien
tcccatgattactaccaaaatgcag

SEQ ID NO: 556754 - DNA, 25 bp, Homo sapien
ttattgccgttgttgtcattgcagt

SEQ ID NO: 556755 - DNA, 25 bp, Homo sapien
gtcattattgccgttgttgtcattg

SEQ ID NO: 556756 - DNA, 25 bp, Homo sapien
tcagattaagggcagggtagctacc

SEQ ID NO: 556757 - DNA, 25 bp, Homo sapien
gaaccagtaggaaattcgactccag

SEQ ID NO: 556758 - DNA, 25 bp, Homo sapien
tagctaccgctggaagaggcttggc

SEQ ID NO: 556759 - DNA, 25 bp, Homo sapien
tctctgcgccaacaaagatgccatc

SEQ ID NO: 556760 - DNA, 25 bp, Homo sapien
agttcctcccaacttgtttacactg

SEQ ID NO: 556761 - DNA, 25 bp, Homo sapien
atcagttcctcccaacttgtttaca

SEQ ID NO: 556762 - DNA, 25 bp, Homo sapien
tcagttcctcccaacttgtttacac

SEQ ID NO: 556763 - DNA, 25 bp, Homo sapien
cagttcctcccaacttgtttacact

SEQ ID NO: 556764 - DNA, 25 bp, Homo sapien
ggagagacgcaatcgaggagcttct

SEQ ID NO: 556765 - DNA, 25 bp, Homo sapien
ggagcttctccgtgttctgtctgga

SEQ ID NO: 556766 - DNA, 25 bp, Homo sapien
caaacagtggagtgtcaagggcagc

SEQ ID NO: 556767 - DNA, 25 bp, Homo sapien
ttagcagaatatccctcagagcagc

SEQ ID NO: 556768 - DNA, 25 bp, Homo sapien
caaagagaacgatctgcaagagaat

SEQ ID NO: 556769 - DNA, 25 bp, Homo sapien
cagttttaagggagttgcagaaata

SEQ ID NO: 556770 - DNA, 25 bp, Homo sapien
tagaacacatgagcagttttaaggg

SEQ ID NO: 556771 - DNA, 25 bp, Homo sapien
aacagagtggatttgtagaacacat

SEQ ID NO: 556772 - DNA, 25 bp, Homo sapien
tcgccgctgaagtagggatgacaac

SEQ ID NO: 556773 - DNA, 25 bp, Homo sapien
caattggtttactcctgggccttga

SEQ ID NO: 556774 - DNA, 25 bp, Homo sapien
tcacagtaatgagtgccaccatcgc

SEQ ID NO: 556775 - DNA, 25 bp, Homo sapien
cccttgccccaaaagtggtatgatt

SEQ ID NO: 556776 - DNA, 25 bp, Homo sapien
ctccagcttcaattgcttgcccata

SEQ ID NO: 556777 - DNA, 25 bp, Homo sapien
aacagtagattaaccaaagccaggg

SEQ ID NO: 556778 - DNA, 25 bp, Homo sapien
tctcagaaacggagaaaataacagt

SEQ ID NO: 556779 - DNA, 25 bp, Homo sapien
ggagttactaggcacattctcagaa

SEQ ID NO: 556780 - DNA, 25 bp, Homo sapien
gatagaatgtcatcaacagcacctt

SEQ ID NO: 556781 - DNA, 25 bp, Homo sapien
tagaatgtcatcaacagcaccttct

SEQ ID NO: 556782 - DNA, 25 bp, Homo sapien
aatgtcatcaacagcaccttcttcc

SEQ ID NO: 556783 - DNA, 25 bp, Homo sapien
agatagaatgtcatcaacagcacct

SEQ ID NO: 556784 - DNA, 25 bp, Homo sapien
catgcagagatcctagcattggtag

SEQ ID NO: 556785 - DNA, 25 bp, Homo sapien
gaaacagcatcagctcgagggctgg

SEQ ID NO: 556786 - DNA, 25 bp, Homo sapien
gtgaacatcttctgcggacgttggt

SEQ ID NO: 556787 - DNA, 25 bp, Homo sapien
gcatccttggtccagacagaaacag

SEQ ID NO: 556788 - DNA, 25 bp, Homo sapien
tcagccaatgcttttaaatgacatt

SEQ ID NO: 556789 - DNA, 25 bp, Homo sapien
atgcttttaaatgacattgaactac

SEQ ID NO: 556790 - DNA, 25 bp, Homo sapien
cagccaatgcttttaaatgacattg

SEQ ID NO: 556791 - DNA, 25 bp, Homo sapien
ccaatgcttttaaatgacattgaac

SEQ ID NO: 556792 - DNA, 25 bp, Homo sapien
tcagcctgggtacacttagcagcag

SEQ ID NO: 556793 - DNA, 25 bp, Homo sapien
ctaaagtgcatccataaagtgttcc

SEQ ID NO: 556794 - DNA, 25 bp, Homo sapien
tatttgacctatggagacatcacag

SEQ ID NO: 556795 - DNA, 25 bp, Homo sapien
aaaaataagctctccgtcagtggta

SEQ ID NO: 556796 - DNA, 25 bp, Homo sapien
gagatgggtggatgcctctcaaaca

SEQ ID NO: 556797 - DNA, 25 bp, Homo sapien
agatgggtggatgcctctcaaacac

SEQ ID NO: 556798 - DNA, 25 bp, Homo sapien
cgcttcccaggtgagtcaatgcctc

SEQ ID NO: 556799 - DNA, 25 bp, Homo sapien
cggtgcgcgcacacactggcctgcg

SEQ ID NO: 556800 - DNA, 25 bp, Homo sapien
tcggctcgcgcacggtgcgcgcaca

SEQ ID NO: 556801 - DNA, 25 bp, Homo sapien
ttttaagccggtctgaaaagcgcaa

SEQ ID NO: 556802 - DNA, 25 bp, Homo sapien
tgcaactgggtccatgaggtcaggt

SEQ ID NO: 556803 - DNA, 25 bp, Homo sapien
caggctttcagagtacatcagacag

SEQ ID NO: 556804 - DNA, 25 bp, Homo sapien
taactttagacaggaaacctctgcc

SEQ ID NO: 556805 - DNA, 25 bp, Homo sapien
tctgtttcaagagttcaagggctac

SEQ ID NO: 556806 - DNA, 25 bp, Homo sapien
cttgccattagtagaatgtctctga

SEQ ID NO: 556807 - DNA, 25 bp, Homo sapien
gaacttgccattagtagaatgtctc

SEQ ID NO: 556808 - DNA, 25 bp, Homo sapien
ttgccattagtagaatgtctctgaa

SEQ ID NO: 556809 - DNA, 25 bp, Homo sapien
aacttgccattagtagaatgtctct

SEQ ID NO: 556810 - DNA, 25 bp, Homo sapien
cagggacatctcgtgtcatctgttg

SEQ ID NO: 556811 - DNA, 25 bp, Homo sapien
gcagaggccttgatacaaatctcag

SEQ ID NO: 556812 - DNA, 25 bp, Homo sapien
tcaatagaggagacacaaggtagct

SEQ ID NO: 556813 - DNA, 25 bp, Homo sapien
tctcaggagctggtttgccaatggg

SEQ ID NO: 556814 - DNA, 25 bp, Homo sapien
tttctatcagttgtggccccagaga

SEQ ID NO: 556815 - DNA, 25 bp, Homo sapien
tattgggtattctgaccatcctttc

SEQ ID NO: 556816 - DNA, 25 bp, Homo sapien
agagacctgtgtaaggccagcggcc

SEQ ID NO: 556817 - DNA, 25 bp, Homo sapien
tcaatgtggtgctcaagtccctcgg

SEQ ID NO: 556818 - DNA, 25 bp, Homo sapien
tgcctagattagggtagggaacaca

SEQ ID NO: 556819 - DNA, 25 bp, Homo sapien
tttgcctagattagggtagggaaca

SEQ ID NO: 556820 - DNA, 25 bp, Homo sapien
ttgcctagattagggtagggaacac

SEQ ID NO: 556821 - DNA, 25 bp, Homo sapien
gaggtttatcaaaatcctgcaatat

SEQ ID NO: 556822 - DNA, 25 bp, Homo sapien
tcctgcaatattctgctctgtggca

SEQ ID NO: 556823 - DNA, 25 bp, Homo sapien
atcctgcaatattctgctctgtggc

SEQ ID NO: 556824 - DNA, 25 bp, Homo sapien
cctgaggtttatcaaaatcctgcaa

SEQ ID NO: 556825 - DNA, 25 bp, Homo sapien
agtgctggacagttcacgggggccc

SEQ ID NO: 556826 - DNA, 25 bp, Homo sapien
accccctgcactggacagtgctgga

SEQ ID NO: 556827 - DNA, 25 bp, Homo sapien
tgcatagaccccctgcactggacag

SEQ ID NO: 556828 - DNA, 25 bp, Homo sapien
agtctggattcacagagtggggcct

SEQ ID NO: 556829 - DNA, 25 bp, Homo sapien
agtcctcctatttgtgctacgaagt

SEQ ID NO: 556830 - DNA, 25 bp, Homo sapien
caggaagttccggtgttcttggagt

SEQ ID NO: 556831 - DNA, 25 bp, Homo sapien
tacgaagttctcagtgatgcctgaa

SEQ ID NO: 556832 - DNA, 25 bp, Homo sapien
tatttgtgctaggaagtcctcctat

SEQ ID NO: 556833 - DNA, 25 bp, Homo sapien
tccctgctcggccatcaggagcaga

SEQ ID NO: 556834 - DNA, 25 bp, Homo sapien
tccctgcgattggtgggtgctgcct

SEQ ID NO: 556835 - DNA, 25 bp, Homo sapien
tgccttgctccatggtagccttctc

SEQ ID NO: 556836 - DNA, 25 bp, Homo sapien
tctgatcaggaaagactctgacctt

SEQ ID NO: 556837 - DNA, 25 bp, Homo sapien
ccctgtcactttgtaaggcaaccac

SEQ ID NO: 556838 - DNA, 25 bp, Homo sapien
cctgtcactttgtaaggcaaccact

SEQ ID NO: 556839 - DNA, 25 bp, Homo sapien
ctgtcactttgtaaggcaaccactg

SEQ ID NO: 556840 - DNA, 25 bp, Homo sapien
gcccctgtcactttgtaaggcaacc

SEQ ID NO: 556841 - DNA, 25 bp, Homo sapien
gagtaatcaacaggaggcatcacaa

SEQ ID NO: 556842 - DNA, 25 bp, Homo sapien
gagggaaattccagctagcccagaa

SEQ ID NO: 556843 - DNA, 25 bp, Homo sapien
gacacaagaatcctgggtcatgagg

SEQ ID NO: 556844 - DNA, 25 bp, Homo sapien
tgtgaccctggatcatgcatgagcc

SEQ ID NO: 556845 - DNA, 25 bp, Homo sapien
tttgaaacttcttaaccacttgctc

SEQ ID NO: 556846 - DNA, 25 bp, Homo sapien
tcacttgtgaatcagctccattttg

SEQ ID NO: 556847 - DNA, 25 bp, Homo sapien
ccttcacttgtgaatcagctccatt

SEQ ID NO: 556848 - DNA, 25 bp, Homo sapien
ggacccttcacttgtgaatcagctc

SEQ ID NO: 556849 - DNA, 25 bp, Homo sapien
tcttctccctctactgtgcaaagca

SEQ ID NO: 556850 - DNA, 25 bp, Homo sapien
tccctctactgtgcaaagcaattct

SEQ ID NO: 556851 - DNA, 25 bp, Homo sapien
ccctctactgtgcaaagcaattctg

SEQ ID NO: 556852 - DNA, 25 bp, Homo sapien
tctccctctactgtgcaaagcaatt

SEQ ID NO: 556853 - DNA, 25 bp, Homo sapien
ccaccaaaccgaatcttaagcaaag

SEQ ID NO: 556854 - DNA, 25 bp, Homo sapien
cgaagagtcaggataggctccacca

SEQ ID NO: 556855 - DNA, 25 bp, Homo sapien
caaaatgtggactggtaaagaggca

SEQ ID NO: 556856 - DNA, 25 bp, Homo sapien
accagacagttgaaaacggaaacag

SEQ ID NO: 556857 - DNA, 25 bp, Homo sapien
gggaatggtcaggaaggaaagaagc

SEQ ID NO: 556858 - DNA, 25 bp, Homo sapien
atggtcaggaaggaaagaagcccca

SEQ ID NO: 556859 - DNA, 25 bp, Homo sapien
cttgaagtccagaattaggagggga

SEQ ID NO: 556860 - DNA, 25 bp, Homo sapien
gaaggaaagaagccccagtgttcaa

SEQ ID NO: 556861 - DNA, 25 bp, Homo sapien
ggtcaggttaccctcaaagcgaagc

SEQ ID NO: 556862 - DNA, 25 bp, Homo sapien
aacccatctcatgggcagagacaca

SEQ ID NO: 556863 - DNA, 25 bp, Homo sapien
gtcaggttaccctcaaagcgaagcc

SEQ ID NO: 556864 - DNA, 25 bp, Homo sapien
tcaggaaacccatctcatgggcaga

SEQ ID NO: 556865 - DNA, 25 bp, Homo sapien
gttaacagcagattccaaagggcag

SEQ ID NO: 556866 - DNA, 25 bp, Homo sapien
tcattggcagaaaccgggacctgct

SEQ ID NO: 556867 - DNA, 25 bp, Homo sapien
tagaggcccgttcaaggtcattggc

SEQ ID NO: 556868 - DNA, 25 bp, Homo sapien
caaagggcagtcttgttgatcagga

SEQ ID NO: 556869 - DNA, 25 bp, Homo sapien
ctggcccactttagcttcatgacct

SEQ ID NO: 556870 - DNA, 25 bp, Homo sapien
ctttagcttcatgacctgagcacat

SEQ ID NO: 556871 - DNA, 25 bp, Homo sapien
cctctgccacatctagctttggagc

SEQ ID NO: 556872 - DNA, 25 bp, Homo sapien
ccctctgccacatctagctttggag

SEQ ID NO: 556873 - DNA, 25 bp, Homo sapien
gcccaagttccaaattagccaggga

SEQ ID NO: 556874 - DNA, 25 bp, Homo sapien
gctaccacgggagcaatgcaaaagc

SEQ ID NO: 556875 - DNA, 25 bp, Homo sapien
tcacaacatgcttttgagcacaggt

SEQ ID NO: 556876 - DNA, 25 bp, Homo sapien
gccagggacctcttctgagttaaca

SEQ ID NO: 556877 - DNA, 25 bp, Homo sapien
tgggaacaacgcgttctgcctccgc

SEQ ID NO: 556878 - DNA, 25 bp, Homo sapien
cgtgatgggaacaacgcgttctgcc

SEQ ID NO: 556879 - DNA, 25 bp, Homo sapien
tctccaccgaagttgcagcgtgatg

SEQ ID NO: 556880 - DNA, 25 bp, Homo sapien
cgaagttgcagcgtgatgggaacaa

SEQ ID NO: 556881 - DNA, 25 bp, Homo sapien
cttgactgagttctctgaagttgtc

SEQ ID NO: 556882 - DNA, 25 bp, Homo sapien
agtgctgcctgctctgaggatcccc

SEQ ID NO: 556883 - DNA, 25 bp, Homo sapien
gagttctctgaagttgtctgcttcc

SEQ ID NO: 556884 - DNA, 25 bp, Homo sapien
tgcttccttggccagatctctgagt

SEQ ID NO: 556885 - DNA, 25 bp, Homo sapien
aaaagcttgcacagattggcctggc

SEQ ID NO: 556886 - DNA, 25 bp, Homo sapien
tgagaagcatggagcaatcctgaac

SEQ ID NO: 556887 - DNA, 25 bp, Homo sapien
ccctgagtcctagaatgagaagcat

SEQ ID NO: 556888 - DNA, 25 bp, Homo sapien
tgaacttgacccacggactgaagct

SEQ ID NO: 556889 - DNA, 25 bp, Homo sapien
caccagtaggagtatgttcaaacat

SEQ ID NO: 556890 - DNA, 25 bp, Homo sapien
tcctgaaggcttgcaaatggaaaga

SEQ ID NO: 556891 - DNA, 25 bp, Homo sapien
ggcaaaggcattcggaaacaggtgc

SEQ ID NO: 556892 - DNA, 25 bp, Homo sapien
ttgaatctgtagagggcaaggtcat

SEQ ID NO: 556893 - DNA, 25 bp, Homo sapien
tttccccagcaggagtaggaggtgc

SEQ ID NO: 556894 - DNA, 25 bp, Homo sapien
agcactaggtaccagttatgatcca

SEQ ID NO: 556895 - DNA, 25 bp, Homo sapien
ccaaaccgtagcaagagcactaggt

SEQ ID NO: 556896 - DNA, 25 bp, Homo sapien
ggaggcaaggatccttgccactaat

SEQ ID NO: 556897 - DNA, 25 bp, Homo sapien
tgctgtttccaagttgaaggagtca

SEQ ID NO: 556898 - DNA, 25 bp, Homo sapien
attagttcccttcgctcagtcaacg

SEQ ID NO: 556899 - DNA, 25 bp, Homo sapien
gtgaggattagttcccttcgctcag

SEQ ID NO: 556900 - DNA, 25 bp, Homo sapien
ccttcgctcagtcaacgccatgagt

SEQ ID NO: 556901 - DNA, 25 bp, Homo sapien
ctcagtcaacgccatgagtgtggtc

SEQ ID NO: 556902 - DNA, 25 bp, Homo sapien
gtatttgaacttatgataatgctgc

SEQ ID NO: 556903 - DNA, 25 bp, Homo sapien
tgttagcctcttcatgcaactcagc

SEQ ID NO: 556904 - DNA, 25 bp, Homo sapien
gatgaagtacagttgctactaccct

SEQ ID NO: 556905 - DNA, 25 bp, Homo sapien
gggcccggatctgtgcttacaccat

SEQ ID NO: 556906 - DNA, 25 bp, Homo sapien
tatttctgtaaggcgaatctggaaa

SEQ ID NO: 556907 - DNA, 25 bp, Homo sapien
ttatttctgtaaggcgaatctggaa

SEQ ID NO: 556908 - DNA, 25 bp, Homo sapien
tttatttctgtaaggcgaatctgga

SEQ ID NO: 556909 - DNA, 25 bp, Homo sapien
atttctgtaaggcgaatctggaaaa

SEQ ID NO: 556910 - DNA, 25 bp, Homo sapien
gggatgactgcacatgtgtggattc

SEQ ID NO: 556911 - DNA, 25 bp, Homo sapien
gtggattccactgagctggttgttc

SEQ ID NO: 556912 - DNA, 25 bp, Homo sapien
tgtgtggattccactgagctggttg

SEQ ID NO: 556913 - DNA, 25 bp, Homo sapien
gactgcacatgtgtggattccactg

SEQ ID NO: 556914 - DNA, 25 bp, Homo sapien
ggagtctcctagttcattatcaaga

SEQ ID NO: 556915 - DNA, 25 bp, Homo sapien
caacatttctgtatcgagggaggga

SEQ ID NO: 556916 - DNA, 25 bp, Homo sapien
ctcctgggactgtgaacgagccaca

SEQ ID NO: 556917 - DNA, 25 bp, Homo sapien
taattgctgcaaggtaatatccaac

SEQ ID NO: 556918 - DNA, 25 bp, Homo sapien
gaacaggctttcgtgtagcttcttc

SEQ ID NO: 556919 - DNA, 25 bp, Homo sapien
acactcaactcccagcgaatgtttg

SEQ ID NO: 556920 - DNA, 25 bp, Homo sapien
cctggagaacagctgagcgtcaaac

SEQ ID NO: 556921 - DNA, 25 bp, Homo sapien
tggagaacagctgagcgtcaaacat

SEQ ID NO: 556922 - DNA, 25 bp, Homo sapien
cgaatgtttgtgctggcccacatgc

SEQ ID NO: 556923 - DNA, 25 bp, Homo sapien
tatgtgtggatatcactgaacgtcc

SEQ ID NO: 556924 - DNA, 25 bp, Homo sapien
agtgacagctatcagcaacttcaga

SEQ ID NO: 556925 - DNA, 25 bp, Homo sapien
tcccatggcccggaatatgtgtgga

SEQ ID NO: 556926 - DNA, 25 bp, Homo sapien
aacttcagactgcacagcccatctg

SEQ ID NO: 556927 - DNA, 25 bp, Homo sapien
ccacaactggagcagccgggaacag

SEQ ID NO: 556928 - DNA, 25 bp, Homo sapien
atagcagccaggtgtctccacggtg

SEQ ID NO: 556929 - DNA, 25 bp, Homo sapien
tcctgcgtgtcacaatagcagccag

SEQ ID NO: 556930 - DNA, 25 bp, Homo sapien
actgtgggattgatgacctcccaca

SEQ ID NO: 556931 - DNA, 25 bp, Homo sapien
gcacaggctaattaatggtatgacc

SEQ ID NO: 556932 - DNA, 25 bp, Homo sapien
cagagactccagtgcttttgctgtt

SEQ ID NO: 556933 - DNA, 25 bp, Homo sapien
tatactgttacgtagctatactatg

SEQ ID NO: 556934 - DNA, 25 bp, Homo sapien
ggtatgacctactttgtacattaaa

SEQ ID NO: 556935 - DNA, 25 bp, Homo sapien
aactagcctgcggaggttggtcacg

SEQ ID NO: 556936 - DNA, 25 bp, Homo sapien
ttagtgttgtttgatgatgagcctt

SEQ ID NO: 556937 - DNA, 25 bp, Homo sapien
gagacacttgcccagctcaacatag

SEQ ID NO: 556938 - DNA, 25 bp, Homo sapien
cagctcaacataggagccaactagc

SEQ ID NO: 556939 - DNA, 25 bp, Homo sapien
ccagggcatgaagatccaacagggc

SEQ ID NO: 556940 - DNA, 25 bp, Homo sapien
gatggggatctgtgcaggcagaacc

SEQ ID NO: 556941 - DNA, 25 bp, Homo sapien
gggatctgtgcaggcagaacccagg

SEQ ID NO: 556942 - DNA, 25 bp, Homo sapien
gatctgtgcaggcagaacccagggc

SEQ ID NO: 556943 - DNA, 25 bp, Homo sapien
cttccatggtgtcttgggttttgtc

SEQ ID NO: 556944 - DNA, 25 bp, Homo sapien
atggtgtcttgggttttgtcccact

SEQ ID NO: 556945 - DNA, 25 bp, Homo sapien
ccatggtgtcttgggttttgtccca

SEQ ID NO: 556946 - DNA, 25 bp, Homo sapien
tccatggtgtcttgggttttgtccc

SEQ ID NO: 556947 - DNA, 25 bp, Homo sapien
taggccattcttctggagagccaca

SEQ ID NO: 556948 - DNA, 25 bp, Homo sapien
tattaaatgactccacctgcgcagt

SEQ ID NO: 556949 - DNA, 25 bp, Homo sapien
gaactctgcgtgaagggccttaatg

SEQ ID NO: 556950 - DNA, 25 bp, Homo sapien
tttgcagcacaacaccattgcccgg

SEQ ID NO: 556951 - DNA, 25 bp, Homo sapien
tatccaaggctgcagtctggtccct

SEQ ID NO: 556952 - DNA, 25 bp, Homo sapien
ggatgtgcttccctccgtgatttcc

SEQ ID NO: 556953 - DNA, 25 bp, Homo sapien
tgctacctgtgccatagtagaaggt

SEQ ID NO: 556954 - DNA, 25 bp, Homo sapien
caaccgtggactccggagtgacact

SEQ ID NO: 556955 - DNA, 25 bp, Homo sapien
tgctgcgcacacttgcccctagatg

SEQ ID NO: 556956 - DNA, 25 bp, Homo sapien
tccggcccgttggctgtaccttatc

SEQ ID NO: 556957 - DNA, 25 bp, Homo sapien
ggcccgttggctgtaccttatcctc

SEQ ID NO: 556958 - DNA, 25 bp, Homo sapien
tcctcctcattgctgcgcacacttg

SEQ ID NO: 556959 - DNA, 25 bp, Homo sapien
gagtcccgccctgtgatgctggtgc

SEQ ID NO: 556960 - DNA, 25 bp, Homo sapien
tgagtggcctttaccgccacccagg

SEQ ID NO: 556961 - DNA, 25 bp, Homo sapien
gctgctgtaatgtggagtcccgccc

SEQ ID NO: 556962 - DNA, 25 bp, Homo sapien
ggtgagtggcctttaccgccaccca

SEQ ID NO: 556963 - DNA, 25 bp, Homo sapien
agattgattaccaagtaccttctta

SEQ ID NO: 556964 - DNA, 25 bp, Homo sapien
gtgggggagattgattaccaagtac

SEQ ID NO: 556965 - DNA, 25 bp, Homo sapien
gggagattgattaccaagtaccttc

SEQ ID NO: 556966 - DNA, 25 bp, Homo sapien
ggtgggggagattgattaccaagta

SEQ ID NO: 556967 - DNA, 25 bp, Homo sapien
ccaactccggtgcccagaaacatgg

SEQ ID NO: 556968 - DNA, 25 bp, Homo sapien
ttcagctgacaggatccctcatccc

SEQ ID NO: 556969 - DNA, 25 bp, Homo sapien
tgagtgttgacttctcgttctgccc

SEQ ID NO: 556970 - DNA, 25 bp, Homo sapien
tcgttctgcccctaacagagctctg

SEQ ID NO: 556971 - DNA, 25 bp, Homo sapien
gtgtgagacaccgagcccggcccca

SEQ ID NO: 556972 - DNA, 25 bp, Homo sapien
gagatgacatttagggtccagtact

SEQ ID NO: 556973 - DNA, 25 bp, Homo sapien
cacagtcacaggaagagagatgaca

SEQ ID NO: 556974 - DNA, 25 bp, Homo sapien
ggtccagtacttagcaagactaatg

SEQ ID NO: 556975 - DNA, 25 bp, Homo sapien
gcaagactaatgtcaaggattttgt

SEQ ID NO: 556976 - DNA, 25 bp, Homo sapien
ggtgagtatcattttgtaacactta

SEQ ID NO: 556977 - DNA, 25 bp, Homo sapien
gtctgggtccctctggtgagtatca

SEQ ID NO: 556978 - DNA, 25 bp, Homo sapien
acacttaagctctttggatcttggg

SEQ ID NO: 556979 - DNA, 25 bp, Homo sapien
cacttaagctctttggatcttgggt

SEQ ID NO: 556980 - DNA, 25 bp, Homo sapien
actgtgggagctctccggcatggca

SEQ ID NO: 556981 - DNA, 25 bp, Homo sapien
agctctccggcatggcagagagatg

SEQ ID NO: 556982 - DNA, 25 bp, Homo sapien
gctctccggcatggcagagagatga

SEQ ID NO: 556983 - DNA, 25 bp, Homo sapien
ggcactgtgggagctctccggcatg

SEQ ID NO: 556984 - DNA, 25 bp, Homo sapien
tcttgcattgagatcgtcgacagcc

SEQ ID NO: 556985 - DNA, 25 bp, Homo sapien
tcatggtcttgcattgagatcgtcg

SEQ ID NO: 556986 - DNA, 25 bp, Homo sapien
tctgtaacataacatagatattagc

SEQ ID NO: 556987 - DNA, 25 bp, Homo sapien
gtcgacagccgatgccattgatttg

SEQ ID NO: 556988 - DNA, 25 bp, Homo sapien
agtccacgtggaaacagtctctccc

SEQ ID NO: 556989 - DNA, 25 bp, Homo sapien
tctaaggatgggtccacggcttcct

SEQ ID NO: 556990 - DNA, 25 bp, Homo sapien
cctggatgtgccagtaactgtgatg

SEQ ID NO: 556991 - DNA, 25 bp, Homo sapien
caaacccatatagaggccctggatg

SEQ ID NO: 556992 - DNA, 25 bp, Homo sapien
catctggccttctgggatggcaggc

SEQ ID NO: 556993 - DNA, 25 bp, Homo sapien
ctagtccctggactggtgaccgctg

SEQ ID NO: 556994 - DNA, 25 bp, Homo sapien
gggtaattctctgctgtgaagtctc

SEQ ID NO: 556995 - DNA, 25 bp, Homo sapien
gtgaccgctgcaatgtgatggcccc

SEQ ID NO: 556996 - DNA, 25 bp, Homo sapien
ctgaatgtttccatgacaggatgag

SEQ ID NO: 556997 - DNA, 25 bp, Homo sapien
gaatgtttccatgacaggatgagga

SEQ ID NO: 556998 - DNA, 25 bp, Homo sapien
ccatagaggacctcttagaggctcc

SEQ ID NO: 556999 - DNA, 25 bp, Homo sapien
cacaagtgtagggattgggaggacc

SEQ ID NO: 557000 - DNA, 25 bp, Homo sapien
tcgtatttctcgaagacttatctct

SEQ ID NO: 557001 - DNA, 25 bp, Homo sapien
gttcccatggcattcgtctttgctg

SEQ ID NO: 557002 - DNA, 25 bp, Homo sapien
tttgctgctttctcgtatttctcga

SEQ ID NO: 557003 - DNA, 25 bp, Homo sapien
ccatggcattcgtctttgctgcttt

SEQ ID NO: 557004 - DNA, 25 bp, Homo sapien
caagatataagcatcatgtggtgaa

SEQ ID NO: 557005 - DNA, 25 bp, Homo sapien
tcagtaagtactcgaggaatggcag

SEQ ID NO: 557006 - DNA, 25 bp, Homo sapien
ttaccgctctgttccagctgattga

SEQ ID NO: 557007 - DNA, 25 bp, Homo sapien
attattgttttctgtccctggttct

SEQ ID NO: 557008 - DNA, 25 bp, Homo sapien
ctgagggcttctccggtccaaacac

SEQ ID NO: 557009 - DNA, 25 bp, Homo sapien
aacaccacctctctcgctgttctct

SEQ ID NO: 557010 - DNA, 25 bp, Homo sapien
ctcgctgttctctgaggggattcaa

SEQ ID NO: 557011 - DNA, 25 bp, Homo sapien
gttctctgaggggattcaatggatt

SEQ ID NO: 557012 - DNA, 25 bp, Homo sapien
ccccacgtgcacatctcccagggat

SEQ ID NO: 557013 - DNA, 25 bp, Homo sapien
ctcccagggatttcccatgaaccat

SEQ ID NO: 557014 - DNA, 25 bp, Homo sapien
gccccacgtgcacatctcccaggga

SEQ ID NO: 557015 - DNA, 25 bp, Homo sapien
atctcccagggatttcccatgaacc

SEQ ID NO: 557016 - DNA, 25 bp, Homo sapien
tgaaaggggtaagccagtcactgaa

SEQ ID NO: 557017 - DNA, 25 bp, Homo sapien
cctgaaaggggtaagccagtcactg

SEQ ID NO: 557018 - DNA, 25 bp, Homo sapien
ctgaaaggggtaagccagtcactga

SEQ ID NO: 557019 - DNA, 25 bp, Homo sapien
gacctatctgatacacagttgttgg

SEQ ID NO: 557020 - DNA, 25 bp, Homo sapien
catcattttcggcattgtagtacaa

SEQ ID NO: 557021 - DNA, 25 bp, Homo sapien
ggaggtcagtcatggtcttaaagat

SEQ ID NO: 557022 - DNA, 25 bp, Homo sapien
tgttggtaccagaggttgcttgcag

SEQ ID NO: 557023 - DNA, 25 bp, Homo sapien
ccagtggtggcttataaattaaact

SEQ ID NO: 557024 - DNA, 25 bp, Homo sapien
tagtatggtatcatccagtggtggc

SEQ ID NO: 557025 - DNA, 25 bp, Homo sapien
tatggtatcatccagtggtggctta

SEQ ID NO: 557026 - DNA, 25 bp, Homo sapien
ttggtagtatggtatcatccagtgg

SEQ ID NO: 557027 - DNA, 25 bp, Homo sapien
gaagatgtcaccgataatgcagggc

SEQ ID NO: 557028 - DNA, 25 bp, Homo sapien
gaggtagcctctgaactcgtctgag

SEQ ID NO: 557029 - DNA, 25 bp, Homo sapien
gacttgtgcccctgaacgtatctgc

SEQ ID NO: 557030 - DNA, 25 bp, Homo sapien
gaaatccggccgttctttatctgtg

SEQ ID NO: 557031 - DNA, 25 bp, Homo sapien
catagcacccttaaaatgctcggct

SEQ ID NO: 557032 - DNA, 25 bp, Homo sapien
tgctcggctatgaaacgaacagttc

SEQ ID NO: 557033 - DNA, 25 bp, Homo sapien
gaacagttccttaacattcaacaga

SEQ ID NO: 557034 - DNA, 25 bp, Homo sapien
tggtctccggcagtgccactgagca

SEQ ID NO: 557035 - DNA, 25 bp, Homo sapien
ccagcagggtgctgtgtaaggtggt

SEQ ID NO: 557036 - DNA, 25 bp, Homo sapien
tgagctgtttcagcaaaagtctgag

SEQ ID NO: 557037 - DNA, 25 bp, Homo sapien
tgtgtaaggtggtgcagtgctgatg

SEQ ID NO: 557038 - DNA, 25 bp, Homo sapien
aaagtctgaggggtcgctccagcgt

SEQ ID NO: 557039 - DNA, 25 bp, Homo sapien
tgcacatacctctttgagatccgga

SEQ ID NO: 557040 - DNA, 25 bp, Homo sapien
tgcttctccccagtgtacatacaga

SEQ ID NO: 557041 - DNA, 25 bp, Homo sapien
ttagcagtgtcgtcttcaaggttca

SEQ ID NO: 557042 - DNA, 25 bp, Homo sapien
catgggattgcaggaagactgtcat

SEQ ID NO: 557043 - DNA, 25 bp, Homo sapien
tttaaatgtgagaattatgggaaac

SEQ ID NO: 557044 - DNA, 25 bp, Homo sapien
aatttatttaaatgtgagaattatg

SEQ ID NO: 557045 - DNA, 25 bp, Homo sapien
tatttaaatgtgagaattatgggaa

SEQ ID NO: 557046 - DNA, 25 bp, Homo sapien
ttatttaaatgtgagaattatggga

SEQ ID NO: 557047 - DNA, 25 bp, Homo sapien
gccatgggaattggacactcatggg

SEQ ID NO: 557048 - DNA, 25 bp, Homo sapien
aagccatgggaattggacactcatg

SEQ ID NO: 557049 - DNA, 25 bp, Homo sapien
ccatgggaattggacactcatgggg

SEQ ID NO: 557050 - DNA, 25 bp, Homo sapien
ctaagccatgggaattggacactca

SEQ ID NO: 557051 - DNA, 25 bp, Homo sapien
tctttggcggggttaaagatgccgc

SEQ ID NO: 557052 - DNA, 25 bp, Homo sapien
gtttcgccatcagttctttggcggg

SEQ ID NO: 557053 - DNA, 25 bp, Homo sapien
aagcttttgcagtttcgccatcagt

SEQ ID NO: 557054 - DNA, 25 bp, Homo sapien
tgcagtttcgccatcagttctttgg

SEQ ID NO: 557055 - DNA, 25 bp, Homo sapien
gatacagtagcgaccctcttcaagc

SEQ ID NO: 557056 - DNA, 25 bp, Homo sapien
tccccggtagatgtggtcgtgctcc

SEQ ID NO: 557057 - DNA, 25 bp, Homo sapien
gaaggcctggcgacatatgaaacac

SEQ ID NO: 557058 - DNA, 25 bp, Homo sapien
tcaggtagctgtggattccccggta

SEQ ID NO: 557059 - DNA, 25 bp, Homo sapien
cttggtcggccgtccttcctggaga

SEQ ID NO: 557060 - DNA, 25 bp, Homo sapien
tctctccgtgctcggggtcgcaggc

SEQ ID NO: 557061 - DNA, 25 bp, Homo sapien
ggctgagccactgtgtcgccctcgt

SEQ ID NO: 557062 - DNA, 25 bp, Homo sapien
gaaggtgcatacctggtctgcttgg

SEQ ID NO: 557063 - DNA, 25 bp, Homo sapien
gagtctcaggctcccaacggccgtg

SEQ ID NO: 557064 - DNA, 25 bp, Homo sapien
ttgagtctcaggctcccaacggccg

SEQ ID NO: 557065 - DNA, 25 bp, Homo sapien
gtctcaggctcccaacggccgtggc

SEQ ID NO: 557066 - DNA, 25 bp, Homo sapien
gtttgagtctcaggctcccaacggc

SEQ ID NO: 557067 - DNA, 25 bp, Homo sapien
tgagcgtgagttggcagccctgcct

SEQ ID NO: 557068 - DNA, 25 bp, Homo sapien
ctgagcgtgagttggcagccctgcc

SEQ ID NO: 557069 - DNA, 25 bp, Homo sapien
ccttggattgggtgcagtttgctct

SEQ ID NO: 557070 - DNA, 25 bp, Homo sapien
gaactctgcggtcccttggattggg

SEQ ID NO: 557071 - DNA, 25 bp, Homo sapien
ccgaacacccctcgcatttcggcag

SEQ ID NO: 557072 - DNA, 25 bp, Homo sapien
tcaggttgagtggactttcctggtg

SEQ ID NO: 557073 - DNA, 25 bp, Homo sapien
aacacccctcgcatttcggcagcac

SEQ ID NO: 557074 - DNA, 25 bp, Homo sapien
agcacccacgtgggcctcttgttca

SEQ ID NO: 557075 - DNA, 25 bp, Homo sapien
gcttcactatggctctaagggaggt

SEQ ID NO: 557076 - DNA, 25 bp, Homo sapien
gcatgtcctgcacatccgaggctca

SEQ ID NO: 557077 - DNA, 25 bp, Homo sapien
gaggctcaccgtatgggcccaggct

SEQ ID NO: 557078 - DNA, 25 bp, Homo sapien
tgagagaagtccctgcgaagtcctc

SEQ ID NO: 557079 - DNA, 25 bp, Homo sapien
agcttggtggcaaaccgataaggcc

SEQ ID NO: 557080 - DNA, 25 bp, Homo sapien
ctgaggacagtctttggccctggac

SEQ ID NO: 557081 - DNA, 25 bp, Homo sapien
aggacagtctttggccctggaccca

SEQ ID NO: 557082 - DNA, 25 bp, Homo sapien
tttctgaggttacaagtccagcttg

SEQ ID NO: 557083 - DNA, 25 bp, Homo sapien
tccacaccaccagggtaaatggtaa

SEQ ID NO: 557084 - DNA, 25 bp, Homo sapien
cttccctttttctcaggctgttgtt

SEQ ID NO: 557085 - DNA, 25 bp, Homo sapien
cagggtaaatggtaaaactctgaga

SEQ ID NO: 557086 - DNA, 25 bp, Homo sapien
atggtaaaactctgagaacttccct

SEQ ID NO: 557087 - DNA, 25 bp, Homo sapien
cccagctgtcgtggtgacctctgat

SEQ ID NO: 557088 - DNA, 25 bp, Homo sapien
acctctgatgctgctaggttcctca

SEQ ID NO: 557089 - DNA, 25 bp, Homo sapien
cctctgatgctgctaggttcctcat

SEQ ID NO: 557090 - DNA, 25 bp, Homo sapien
tggcaatcacccctagcccaatgaa

SEQ ID NO: 557091 - DNA, 25 bp, Homo sapien
ggttagctagatcaaccctggcaat

SEQ ID NO: 557092 - DNA, 25 bp, Homo sapien
gccaagcacacagttttggaaggga

SEQ ID NO: 557093 - DNA, 25 bp, Homo sapien
tagcccaatgaaccctgacgatcaa

SEQ ID NO: 557094 - DNA, 25 bp, Homo sapien
gacacgcccttttaggccctggtga

SEQ ID NO: 557095 - DNA, 25 bp, Homo sapien
ccctggtgatttgagtcgctgtgga

SEQ ID NO: 557096 - DNA, 25 bp, Homo sapien
ggatgtgatcccatagtttctgatt

SEQ ID NO: 557097 - DNA, 25 bp, Homo sapien
catgttcgatggaaggacacgccct

SEQ ID NO: 557098 - DNA, 25 bp, Homo sapien
tgattctgagtcagtacctcatgct

SEQ ID NO: 557099 - DNA, 25 bp, Homo sapien
attctgagtcagtacctcatgctgt

SEQ ID NO: 557100 - DNA, 25 bp, Homo sapien
gattctgagtcagtacctcatgctg

SEQ ID NO: 557101 - DNA, 25 bp, Homo sapien
ctgattctgagtcagtacctcatgc

SEQ ID NO: 557102 - DNA, 25 bp, Homo sapien
gcagttagctccacgatcttttcca

SEQ ID NO: 557103 - DNA, 25 bp, Homo sapien
cagttagctccacgatcttttccat

SEQ ID NO: 557104 - DNA, 25 bp, Homo sapien
gaccgtcgtcgcaggaaatgatcct

SEQ ID NO: 557105 - DNA, 25 bp, Homo sapien
ctttgcctgaggatcaagtgtgggc

SEQ ID NO: 557106 - DNA, 25 bp, Homo sapien
gctcctgagacttaagtagcattca

SEQ ID NO: 557107 - DNA, 25 bp, Homo sapien
ctgcagagggaactcggcgtctacg

SEQ ID NO: 557108 - DNA, 25 bp, Homo sapien
catcatatcctacgccgcagcggtg

SEQ ID NO: 557109 - DNA, 25 bp, Homo sapien
gtgacagttctgctcggtcgtttaa

SEQ ID NO: 557110 - DNA, 25 bp, Homo sapien
cctcttgcaggtagagtggccactc

SEQ ID NO: 557111 - DNA, 25 bp, Homo sapien
cgcagcggtgcctgtgcatgaaact

SEQ ID NO: 557112 - DNA, 25 bp, Homo sapien
gaacacattgatcaaaatcccacca

SEQ ID NO: 557113 - DNA, 25 bp, Homo sapien
cccgaacacattgatcaaaatccca

SEQ ID NO: 557114 - DNA, 25 bp, Homo sapien
tctcctgacagtgctgatagctcac

SEQ ID NO: 557115 - DNA, 25 bp, Homo sapien
gctcacctccaatcagaccttgaat

SEQ ID NO: 557116 - DNA, 25 bp, Homo sapien
tgttaatggtctggggccataaaga

SEQ ID NO: 557117 - DNA, 25 bp, Homo sapien
tggtctggggccataaagagccgtt

SEQ ID NO: 557118 - DNA, 25 bp, Homo sapien
gggccataaagagccgttaggataa

SEQ ID NO: 557119 - DNA, 25 bp, Homo sapien
aaagagccgttaggataatacaaca

SEQ ID NO: 557120 - DNA, 25 bp, Homo sapien
cattctctggccacgggatcctttt

SEQ ID NO: 557121 - DNA, 25 bp, Homo sapien
tcctgcattctctggccacgggatc

SEQ ID NO: 557122 - DNA, 25 bp, Homo sapien
tttttacctcccgactgatccttca

SEQ ID NO: 557123 - DNA, 25 bp, Homo sapien
ttttacctcccgactgatccttcat

SEQ ID NO: 557124 - DNA, 25 bp, Homo sapien
caggacatggcttcacatggcaggc

SEQ ID NO: 557125 - DNA, 25 bp, Homo sapien
ggcttcacatggcaggcatcaataa

SEQ ID NO: 557126 - DNA, 25 bp, Homo sapien
catggcaggcatcaataagaatacc

SEQ ID NO: 557127 - DNA, 25 bp, Homo sapien
catggcttcacatggcaggcatcaa

SEQ ID NO: 557128 - DNA, 25 bp, Homo sapien
tcaccatggtcaaagagtgtggaca

SEQ ID NO: 557129 - DNA, 25 bp, Homo sapien
ggacatgaattactgtgacctaggc

SEQ ID NO: 557130 - DNA, 25 bp, Homo sapien
tgacctaggcagtcaccccatttgt

SEQ ID NO: 557131 - DNA, 25 bp, Homo sapien
gagttccttagtattcaccccagtg

SEQ ID NO: 557132 - DNA, 25 bp, Homo sapien
agcgttttcttcaaggactctggcc

SEQ ID NO: 557133 - DNA, 25 bp, Homo sapien
gccgagtcctgcagttttacccact

SEQ ID NO: 557134 - DNA, 25 bp, Homo sapien
actgagcgtcagcattctggccgag

SEQ ID NO: 557135 - DNA, 25 bp, Homo sapien
actgtgcaggtcagcgttttcttca

SEQ ID NO: 557136 - DNA, 25 bp, Homo sapien
cttagatggatgggaggttcagttg

SEQ ID NO: 557137 - DNA, 25 bp, Homo sapien
ttacagagaacttagtgtggtcctc

SEQ ID NO: 557138 - DNA, 25 bp, Homo sapien
gagccacataagtttcatcacagtg

SEQ ID NO: 557139 - DNA, 25 bp, Homo sapien
ccctgaacaccttcatcagttttac

SEQ ID NO: 557140 - DNA, 25 bp, Homo sapien
aacttagtgtggtcctccccaggca

SEQ ID NO: 557141 - DNA, 25 bp, Homo sapien
caacatctcctacgtgcatttctaa

SEQ ID NO: 557142 - DNA, 25 bp, Homo sapien
cacggaaaatgcatagacgttgcca

SEQ ID NO: 557143 - DNA, 25 bp, Homo sapien
tctcaagtccaatgttatgcagagt

SEQ ID NO: 557144 - DNA, 25 bp, Homo sapien
gagccttccttagcttgcacggaaa

SEQ ID NO: 557145 - DNA, 25 bp, Homo sapien
ccgtggtgatccctccacaaggagg

SEQ ID NO: 557146 - DNA, 25 bp, Homo sapien
tcttctccagagagcgagagtgaag

SEQ ID NO: 557147 - DNA, 25 bp, Homo sapien
agagtgaagtgagcaggtgatatcc

SEQ ID NO: 557148 - DNA, 25 bp, Homo sapien
tcatcaggaagacggctacctctct

SEQ ID NO: 557149 - DNA, 25 bp, Homo sapien
tatgaatgttcgtagcgtactcccc

SEQ ID NO: 557150 - DNA, 25 bp, Homo sapien
catggacaggtcctctgctgtacag

SEQ ID NO: 557151 - DNA, 25 bp, Homo sapien
caacctatgtttagatggaccaccc

SEQ ID NO: 557152 - DNA, 25 bp, Homo sapien
ggaccaccctgaaagtgttgtttga

SEQ ID NO: 557153 - DNA, 25 bp, Homo sapien
tatatataccgaaagatttcccttc

SEQ ID NO: 557154 - DNA, 25 bp, Homo sapien
tgtcaataatctggtacgatggaaa

SEQ ID NO: 557155 - DNA, 25 bp, Homo sapien
tggaagcttttggacctggtaggat

SEQ ID NO: 557156 - DNA, 25 bp, Homo sapien
gatcaagcgttcttcaacataatca

SEQ ID NO: 557157 - DNA, 25 bp, Homo sapien
agtttcacaggctccttactgagtt

SEQ ID NO: 557158 - DNA, 25 bp, Homo sapien
gctcctccggtttctctttgtctga

SEQ ID NO: 557159 - DNA, 25 bp, Homo sapien
tgagtttcacaggctccttactgag

SEQ ID NO: 557160 - DNA, 25 bp, Homo sapien
gcagcgtggggctcctccggtttct

SEQ ID NO: 557161 - DNA, 25 bp, Homo sapien
ctcacaggcaatgcgaggagtcctc

SEQ ID NO: 557162 - DNA, 25 bp, Homo sapien
tctcacaggcaatgcgaggagtcct

SEQ ID NO: 557163 - DNA, 25 bp, Homo sapien
ctctcacaggcaatgcgaggagtcc

SEQ ID NO: 557164 - DNA, 25 bp, Homo sapien
cacaggcaatgcgaggagtcctcca

SEQ ID NO: 557165 - DNA, 25 bp, Homo sapien
attcaacaagccgtttttcagtgct

SEQ ID NO: 557166 - DNA, 25 bp, Homo sapien
aggtatgggtggtggcgctgggaaa

SEQ ID NO: 557167 - DNA, 25 bp, Homo sapien
aacaagccgtttttcagtgctgaga

SEQ ID NO: 557168 - DNA, 25 bp, Homo sapien
gacgccaccttgagggtggagtcct

SEQ ID NO: 557169 - DNA, 25 bp, Homo sapien
gggcctaggcattgttatttctgaa

SEQ ID NO: 557170 - DNA, 25 bp, Homo sapien
tagagtcagccgagtgagtctcagt

SEQ ID NO: 557171 - DNA, 25 bp, Homo sapien
gcttgttttatgcatgcggcgcctg

SEQ ID NO: 557172 - DNA, 25 bp, Homo sapien
gattctattgtgcagcgagggtcaa

SEQ ID NO: 557173 - DNA, 25 bp, Homo sapien
gaatccgtatagctgcacagagcct

SEQ ID NO: 557174 - DNA, 25 bp, Homo sapien
gtactgtcagcacccacgactgtgg

SEQ ID NO: 557175 - DNA, 25 bp, Homo sapien
cctggccggacacccggtgtactgt

SEQ ID NO: 557176 - DNA, 25 bp, Homo sapien
gactgtggtaaacgagcaacttgaa

SEQ ID NO: 557177 - DNA, 25 bp, Homo sapien
ctaagtttgacaaattaatgaattt

SEQ ID NO: 557178 - DNA, 25 bp, Homo sapien
atttttccagaaaactcaactgcct

SEQ ID NO: 557179 - DNA, 25 bp, Homo sapien
ccagaaaactcaactgcctggactt

SEQ ID NO: 557180 - DNA, 25 bp, Homo sapien
gaaaactcaactgcctggacttcat

SEQ ID NO: 557181 - DNA, 25 bp, Homo sapien
aaactctagagaactgctcgctgtc

SEQ ID NO: 557182 - DNA, 25 bp, Homo sapien
ggagatcactgtctcgatacacaga

SEQ ID NO: 557183 - DNA, 25 bp, Homo sapien
tagatctcatgcaaggcatccgggc

SEQ ID NO: 557184 - DNA, 25 bp, Homo sapien
tgaaggaggatgaggtccctgctct

SEQ ID NO: 557185 - DNA, 25 bp, Homo sapien
ctctctcttggtcattcaaagaaca

SEQ ID NO: 557186 - DNA, 25 bp, Homo sapien
cgcctccaggtctctaagtctttgg

SEQ ID NO: 557187 - DNA, 25 bp, Homo sapien
aactctctcttggtcattcaaagaa

SEQ ID NO: 557188 - DNA, 25 bp, Homo sapien
tgtctctcctttgagcgcctccagg

SEQ ID NO: 557189 - DNA, 25 bp, Homo sapien
aacatttatcctgctggtaactctg

SEQ ID NO: 557190 - DNA, 25 bp, Homo sapien
gatcctgtgtagataacgtgctttg

SEQ ID NO: 557191 - DNA, 25 bp, Homo sapien
tgtactgagctacacgatcctgtgt

SEQ ID NO: 557192 - DNA, 25 bp, Homo sapien
ggacagtaacagtgtactgagctac

SEQ ID NO: 557193 - DNA, 25 bp, Homo sapien
ggtctgtgagaacagggctgggtca

SEQ ID NO: 557194 - DNA, 25 bp, Homo sapien
agggatgcccaggagtaagtgacat

SEQ ID NO: 557195 - DNA, 25 bp, Homo sapien
gtgacattgttctcatagcagagcc

SEQ ID NO: 557196 - DNA, 25 bp, Homo sapien
tcatagcagagccatgttgtgctac

SEQ ID NO: 557197 - DNA, 25 bp, Homo sapien
tctctgaggtaccaggctacatgct

SEQ ID NO: 557198 - DNA, 25 bp, Homo sapien
taagaaaggtggaccccatctctga

SEQ ID NO: 557199 - DNA, 25 bp, Homo sapien
tgacttcaaacactgggccactaag

SEQ ID NO: 557200 - DNA, 25 bp, Homo sapien
tccatggagaaacctctgggtgtcc

SEQ ID NO: 557201 - DNA, 25 bp, Homo sapien
tcatttgacccttggccctccttct

SEQ ID NO: 557202 - DNA, 25 bp, Homo sapien
tcccattatcaatcaactgggaaga

SEQ ID NO: 557203 - DNA, 25 bp, Homo sapien
tataaactcccattatcaatcaact

SEQ ID NO: 557204 - DNA, 25 bp, Homo sapien
tcaactgggaagaccttcgtggatt

SEQ ID NO: 557205 - DNA, 25 bp, Homo sapien
tcgtggattaggctcgtcaccttct

SEQ ID NO: 557206 - DNA, 25 bp, Homo sapien
gcacatgcgcacactctcctttctg

SEQ ID NO: 557207 - DNA, 25 bp, Homo sapien
agaaacccccgttctcgccagagtg

SEQ ID NO: 557208 - DNA, 25 bp, Homo sapien
cgattgcaggtacaccttgccgcca

SEQ ID NO: 557209 - DNA, 25 bp, Homo sapien
ttccctgtaaaaatccgaatcagtg

SEQ ID NO: 557210 - DNA, 25 bp, Homo sapien
tgtaggactgtgatgggaactgccc

SEQ ID NO: 557211 - DNA, 25 bp, Homo sapien
atcaggcattatgtgtatactttcc

SEQ ID NO: 557212 - DNA, 25 bp, Homo sapien
cctgcgtgtgctctgcatatttgag

SEQ ID NO: 557213 - DNA, 25 bp, Homo sapien
aagccccagagctgcgcagcacggt

SEQ ID NO: 557214 - DNA, 25 bp, Homo sapien
tctgttggacttgtagggctttctc

SEQ ID NO: 557215 - DNA, 25 bp, Homo sapien
ggctttctctggtccacgtgtcact

SEQ ID NO: 557216 - DNA, 25 bp, Homo sapien
ggagccctgggcaagtacattgacc

SEQ ID NO: 557217 - DNA, 25 bp, Homo sapien
tccacgtctgtttaccatctgaaag

SEQ ID NO: 557218 - DNA, 25 bp, Homo sapien
caggaaccaggaaagctacccattc

SEQ ID NO: 557219 - DNA, 25 bp, Homo sapien
gaggtgggtcctgctttgagataac

SEQ ID NO: 557220 - DNA, 25 bp, Homo sapien
aaggcggtgacacgagtttcttgca

SEQ ID NO: 557221 - DNA, 25 bp, Homo sapien
ttgagataactctaggctggtggag

SEQ ID NO: 557222 - DNA, 25 bp, Homo sapien
caccttcgcagaccaaactgatgaa

SEQ ID NO: 557223 - DNA, 25 bp, Homo sapien
tttaagtggtatcaccttcgcagac

SEQ ID NO: 557224 - DNA, 25 bp, Homo sapien
aaattgtatgcgatgctgatgtttc

SEQ ID NO: 557225 - DNA, 25 bp, Homo sapien
actgagaaattgtatgcgatgctga

SEQ ID NO: 557226 - DNA, 25 bp, Homo sapien
aatattcagtgaatcgatttcaagg

SEQ ID NO: 557227 - DNA, 25 bp, Homo sapien
tctgtgttaatcaggtagtaggtgt

SEQ ID NO: 557228 - DNA, 25 bp, Homo sapien
aaatattcagtgaatcgatttcaag

SEQ ID NO: 557229 - DNA, 25 bp, Homo sapien
ctgtgttaatcaggtagtaggtgtt

SEQ ID NO: 557230 - DNA, 25 bp, Homo sapien
tatgaagggcgttctttgtaggtcc

SEQ ID NO: 557231 - DNA, 25 bp, Homo sapien
ccccttaggtggtgcagcgaatgca

SEQ ID NO: 557232 - DNA, 25 bp, Homo sapien
ctgagactgacaaacgtggtacccc

SEQ ID NO: 557233 - DNA, 25 bp, Homo sapien
tgtaggtcccgtagctgagactgac

SEQ ID NO: 557234 - DNA, 25 bp, Homo sapien
acatgcactggacggcacctgagac

SEQ ID NO: 557235 - DNA, 25 bp, Homo sapien
ctgtccaggacagcctgacgagcca

SEQ ID NO: 557236 - DNA, 25 bp, Homo sapien
caaagaatgtaagataactcagtgt

SEQ ID NO: 557237 - DNA, 25 bp, Homo sapien
cagactagagtgtgctggatttgcc

SEQ ID NO: 557238 - DNA, 25 bp, Homo sapien
gaggtctttacagtgcggcttctga

SEQ ID NO: 557239 - DNA, 25 bp, Homo sapien
ggtctttacagtgcggcttctgact

SEQ ID NO: 557240 - DNA, 25 bp, Homo sapien
ccgaggtctttacagtgcggcttct

SEQ ID NO: 557241 - DNA, 25 bp, Homo sapien
tctttacagtgcggcttctgacttt

SEQ ID NO: 557242 - DNA, 25 bp, Homo sapien
tgtgtaacacggattgagctgggtc

SEQ ID NO: 557243 - DNA, 25 bp, Homo sapien
ctacaggtccctcttgtgtaacacg

SEQ ID NO: 557244 - DNA, 25 bp, Homo sapien
attgagctgggtccaagctcaggca

SEQ ID NO: 557245 - DNA, 25 bp, Homo sapien
tgcccaagctacaggtccctcttgt

SEQ ID NO: 557246 - DNA, 25 bp, Homo sapien
tattgtcattgataatcttcagtgg

SEQ ID NO: 557247 - DNA, 25 bp, Homo sapien
tatggacagtatcaccagtgccttc

SEQ ID NO: 557248 - DNA, 25 bp, Homo sapien
tgaagtgcggcttatgtcatggacc

SEQ ID NO: 557249 - DNA, 25 bp, Homo sapien
cagcgtcttattgtcattgataatc

SEQ ID NO: 557250 - DNA, 25 bp, Homo sapien
cagggctgccgcactttctccattt

SEQ ID NO: 557251 - DNA, 25 bp, Homo sapien
ccagggctgccgcactttctccatt

SEQ ID NO: 557252 - DNA, 25 bp, Homo sapien
ctggcatctccctggtagaagtggc

SEQ ID NO: 557253 - DNA, 25 bp, Homo sapien
ccctggtagaagtggccattgcttt

SEQ ID NO: 557254 - DNA, 25 bp, Homo sapien
ccctccaggactcttggtctttcca

SEQ ID NO: 557255 - DNA, 25 bp, Homo sapien
acaaaccctccaggactcttggtct

SEQ ID NO: 557256 - DNA, 25 bp, Homo sapien
tcagccattggattcagacaaaccc

SEQ ID NO: 557257 - DNA, 25 bp, Homo sapien
ggactcttggtctttccagaagagc

SEQ ID NO: 557258 - DNA, 25 bp, Homo sapien
gtatcccctgtgaccgaaactgagg

SEQ ID NO: 557259 - DNA, 25 bp, Homo sapien
tcttttcgcttgtatcccctgtgac

SEQ ID NO: 557260 - DNA, 25 bp, Homo sapien
gaccgaaactgaggatcccatttgt

SEQ ID NO: 557261 - DNA, 25 bp, Homo sapien
ggatcccactctctcttttcgcttg

SEQ ID NO: 557262 - DNA, 25 bp, Homo sapien
gagtcgtggagaaactcagccggat

SEQ ID NO: 557263 - DNA, 25 bp, Homo sapien
tcgtggagaaactcagccggatcat

SEQ ID NO: 557264 - DNA, 25 bp, Homo sapien
gtcgtggagaaactcagccggatca

SEQ ID NO: 557265 - DNA, 25 bp, Homo sapien
agtcgtggagaaactcagccggatc

SEQ ID NO: 557266 - DNA, 25 bp, Homo sapien
gtttctgagcgtccttggcagcctc

SEQ ID NO: 557267 - DNA, 25 bp, Homo sapien
aaatgtgttgaccacctacccctgg

SEQ ID NO: 557268 - DNA, 25 bp, Homo sapien
tgtgatcaaaatgtgttgaccacct

SEQ ID NO: 557269 - DNA, 25 bp, Homo sapien
gatcaaaatgtgttgaccacctacc

SEQ ID NO: 557270 - DNA, 25 bp, Homo sapien
tcttggaagcatcaggccctgatga

SEQ ID NO: 557271 - DNA, 25 bp, Homo sapien
gccctgatgagctgaagcccccatt

SEQ ID NO: 557272 - DNA, 25 bp, Homo sapien
cacacagcgaagaccttctgaccta

SEQ ID NO: 557273 - DNA, 25 bp, Homo sapien
tatggcttctgacctattggccttc

SEQ ID NO: 557274 - DNA, 25 bp, Homo sapien
tctgtacgacactgctgaaagtgaa

SEQ ID NO: 557275 - DNA, 25 bp, Homo sapien
taggctgatgatttaaggagtaaac

SEQ ID NO: 557276 - DNA, 25 bp, Homo sapien
tctggtactctatcatctgtacgac

SEQ ID NO: 557277 - DNA, 25 bp, Homo sapien
ccccagcttgctgattaaatttagg

SEQ ID NO: 557278 - DNA, 25 bp, Homo sapien
cacagcaagcaggaagaatcgcagc

SEQ ID NO: 557279 - DNA, 25 bp, Homo sapien
acgccgtggttgtgtcgttgctcca

SEQ ID NO: 557280 - DNA, 25 bp, Homo sapien
tgtttaacgagggttctgaacgctg

SEQ ID NO: 557281 - DNA, 25 bp, Homo sapien
tgaacgctgggacttattgctgagg

SEQ ID NO: 557282 - DNA, 25 bp, Homo sapien
tatagattgagctttccatggcaga

SEQ ID NO: 557283 - DNA, 25 bp, Homo sapien
tgttgacacgcaagcttggcctgct

SEQ ID NO: 557284 - DNA, 25 bp, Homo sapien
tacggctgctaattggtacatagag

SEQ ID NO: 557285 - DNA, 25 bp, Homo sapien
tgatcatgggaatcaagaccccgtg

SEQ ID NO: 557286 - DNA, 25 bp, Homo sapien
tgtaaaggatggagaatgtcacagg

SEQ ID NO: 557287 - DNA, 25 bp, Homo sapien
agcgtctgccctcgcttcttcctag

SEQ ID NO: 557288 - DNA, 25 bp, Homo sapien
catctgtgcttagccgcagcgtctg

SEQ ID NO: 557289 - DNA, 25 bp, Homo sapien
ttcttcctaggggtctgaggacctc

SEQ ID NO: 557290 - DNA, 25 bp, Homo sapien
gttgtacagcggctcggtcacctcg

SEQ ID NO: 557291 - DNA, 25 bp, Homo sapien
tacagcggctcggtcacctcgcggg

SEQ ID NO: 557292 - DNA, 25 bp, Homo sapien
cagaggtgaggttgtacagcggctc

SEQ ID NO: 557293 - DNA, 25 bp, Homo sapien
tgaggttgtacagcggctcggtcac

SEQ ID NO: 557294 - DNA, 25 bp, Homo sapien
cctgggttttagagctctgtgttcg

SEQ ID NO: 557295 - DNA, 25 bp, Homo sapien
ttggatatcggtcatcgcctcttgc

SEQ ID NO: 557296 - DNA, 25 bp, Homo sapien
gtttccatcctaagccagtgtcctg

SEQ ID NO: 557297 - DNA, 25 bp, Homo sapien
tatcccttaggatgttgtttccatc

SEQ ID NO: 557298 - DNA, 25 bp, Homo sapien
atgcaccagacgttcagacccaacc

SEQ ID NO: 557299 - DNA, 25 bp, Homo sapien
tcttccccatgcaccagacgttcag

SEQ ID NO: 557300 - DNA, 25 bp, Homo sapien
tcttgacgaagccattcatcctctt

SEQ ID NO: 557301 - DNA, 25 bp, Homo sapien
gcttcacagccaagtttcttgacga

SEQ ID NO: 557302 - DNA, 25 bp, Homo sapien
tagactctacgctggccgtcttatc

SEQ ID NO: 557303 - DNA, 25 bp, Homo sapien
tccatggtggacatattggccaacg

SEQ ID NO: 557304 - DNA, 25 bp, Homo sapien
tttaattctttagactctacgctgg

SEQ ID NO: 557305 - DNA, 25 bp, Homo sapien
tggccaacgctcatgcattttaatt

SEQ ID NO: 557306 - DNA, 25 bp, Homo sapien
tcaaatcagcgaagaaggcaaaggc

SEQ ID NO: 557307 - DNA, 25 bp, Homo sapien
gaataagtagcatcggtagcgtgcc

SEQ ID NO: 557308 - DNA, 25 bp, Homo sapien
cagccttctgggagctacctgcata

SEQ ID NO: 557309 - DNA, 25 bp, Homo sapien
taaatctaagggcaagtccagctgt

SEQ ID NO: 557310 - DNA, 25 bp, Homo sapien
caatttttgtgaatcgtctctagag

SEQ ID NO: 557311 - DNA, 25 bp, Homo sapien
aggaagttggaggcacaaatcctgt

SEQ ID NO: 557312 - DNA, 25 bp, Homo sapien
ctgttttgccaatagttttgcacct

SEQ ID NO: 557313 - DNA, 25 bp, Homo sapien
tttgcagttggctaccattctggcc

SEQ ID NO: 557314 - DNA, 25 bp, Homo sapien
ccaagcccaatgctccaaggaggag

SEQ ID NO: 557315 - DNA, 25 bp, Homo sapien
tagctgctaagcagtttctggccag

SEQ ID NO: 557316 - DNA, 25 bp, Homo sapien
taaagatggagatactgagtcccca

SEQ ID NO: 557317 - DNA, 25 bp, Homo sapien
taaaggagcggaggataggcctcaa

SEQ ID NO: 557318 - DNA, 25 bp, Homo sapien
tttggcctggagttgtagacatcac

SEQ ID NO: 557319 - DNA, 25 bp, Homo sapien
tcacagatcaaaagtggcctggtgc

SEQ ID NO: 557320 - DNA, 25 bp, Homo sapien
tttaggccaaaattagcgtgacact

SEQ ID NO: 557321 - DNA, 25 bp, Homo sapien
aaaaatggtgtctctagtgagcaca

SEQ ID NO: 557322 - DNA, 25 bp, Homo sapien
tagtctccagatcaggttactctga

SEQ ID NO: 557323 - DNA, 25 bp, Homo sapien
tcagcatcttctcggcgcccggtgt

SEQ ID NO: 557324 - DNA, 25 bp, Homo sapien
tactctgatttgtcttggagtggct

SEQ ID NO: 557325 - DNA, 25 bp, Homo sapien
cgcccggtgttggagtgttacttgg

SEQ ID NO: 557326 - DNA, 25 bp, Homo sapien
gtgggcacccaacatgtaggttctc

SEQ ID NO: 557327 - DNA, 25 bp, Homo sapien
ggtgggcacccaacatgtaggttct

SEQ ID NO: 557328 - DNA, 25 bp, Homo sapien
gggcacccaacatgtaggttctcac

SEQ ID NO: 557329 - DNA, 25 bp, Homo sapien
tgggcacccaacatgtaggttctca

SEQ ID NO: 557330 - DNA, 25 bp, Homo sapien
tcaataaagcatggactcataccac

SEQ ID NO: 557331 - DNA, 25 bp, Homo sapien
cactgggaagaatgctggcttctcc

SEQ ID NO: 557332 - DNA, 25 bp, Homo sapien
gggaagaatgctggcttctccagta

SEQ ID NO: 557333 - DNA, 25 bp, Homo sapien
ggcggaacaatgaagtacgtcaata

SEQ ID NO: 557334 - DNA, 25 bp, Homo sapien
tccacgtcactgcaaagtcaaggtg

SEQ ID NO: 557335 - DNA, 25 bp, Homo sapien
gattgttctgaaccgtggcacgcct

SEQ ID NO: 557336 - DNA, 25 bp, Homo sapien
tccgtgagtgaaatgcagcaagcct

SEQ ID NO: 557337 - DNA, 25 bp, Homo sapien
tcgtttaggtacacaggtgaccctg

SEQ ID NO: 557338 - DNA, 25 bp, Homo sapien
agccatcacccctggtcgcaaatat

SEQ ID NO: 557339 - DNA, 25 bp, Homo sapien
cacccctggtcgcaaatatgttttt

SEQ ID NO: 557340 - DNA, 25 bp, Homo sapien
gccatcacccctggtcgcaaatatg

SEQ ID NO: 557341 - DNA, 25 bp, Homo sapien
atcacccctggtcgcaaatatgttt

SEQ ID NO: 557342 - DNA, 25 bp, Homo sapien
cgctttggcagagatcacggagatg

SEQ ID NO: 557343 - DNA, 25 bp, Homo sapien
ccacggtacgatgatcaagatggag

SEQ ID NO: 557344 - DNA, 25 bp, Homo sapien
tgatttccctgcagcgttgagctga

SEQ ID NO: 557345 - DNA, 25 bp, Homo sapien
gacacctttgaatactgtgcaggga

SEQ ID NO: 557346 - DNA, 25 bp, Homo sapien
ttgcaaagcaaaatgtcctctttcc

SEQ ID NO: 557347 - DNA, 25 bp, Homo sapien
atgccctcaagagtgtacagccccg

SEQ ID NO: 557348 - DNA, 25 bp, Homo sapien
tacacacatggtcctcagagaggcc

SEQ ID NO: 557349 - DNA, 25 bp, Homo sapien
cagaggtgccttggacacatctgcc

SEQ ID NO: 557350 - DNA, 25 bp, Homo sapien
tgtggcctctcggtcctcaagggtc

SEQ ID NO: 557351 - DNA, 25 bp, Homo sapien
tgggctgcagcgcatcctaacaatg

SEQ ID NO: 557352 - DNA, 25 bp, Homo sapien
gcctttacaaggtggtgcaactgct

SEQ ID NO: 557353 - DNA, 25 bp, Homo sapien
caaaacgagtgctgctctgagcttg

SEQ ID NO: 557354 - DNA, 25 bp, Homo sapien
caggcctgctcagagttgtttggag

SEQ ID NO: 557355 - DNA, 25 bp, Homo sapien
tcggactgcacagggaacacggttt

SEQ ID NO: 557356 - DNA, 25 bp, Homo sapien
tctgttaagcaaagccgagatccag

SEQ ID NO: 557357 - DNA, 25 bp, Homo sapien
gaaaacccgtgtgtcattgatcagc

SEQ ID NO: 557358 - DNA, 25 bp, Homo sapien
tgaaatcatggtacgtagtccccgg

SEQ ID NO: 557359 - DNA, 25 bp, Homo sapien
tacagaaagtaacagcccaggagag

SEQ ID NO: 557360 - DNA, 25 bp, Homo sapien
tattggcccctgcatgatacagtcc

SEQ ID NO: 557361 - DNA, 25 bp, Homo sapien
tcatctttgacttatgccgccggcc

SEQ ID NO: 557362 - DNA, 25 bp, Homo sapien
cagtaaacccgtctcaaaggctggg

SEQ ID NO: 557363 - DNA, 25 bp, Homo sapien
aactggcacacccacgggagatgtc

SEQ ID NO: 557364 - DNA, 25 bp, Homo sapien
tagagcttaaaaaccagactgcact

SEQ ID NO: 557365 - DNA, 25 bp, Homo sapien
gcttagaggccactagaccagcaga

SEQ ID NO: 557366 - DNA, 25 bp, Homo sapien
catcatctcggtgagcaagtgcgca

SEQ ID NO: 557367 - DNA, 25 bp, Homo sapien
aagcacttggccagtttgtacacag

SEQ ID NO: 557368 - DNA, 25 bp, Homo sapien
cttatgcacgccgaaagggtttccg

SEQ ID NO: 557369 - DNA, 25 bp, Homo sapien
caaatgtcagacgagagcgcttcat

SEQ ID NO: 557370 - DNA, 25 bp, Homo sapien
aaaggacggtacatctggcgcagac

SEQ ID NO: 557371 - DNA, 25 bp, Homo sapien
agttcctccaccacttagagagtat

SEQ ID NO: 557372 - DNA, 25 bp, Homo sapien
tcagtgggatgaagttcctccacca

SEQ ID NO: 557373 - DNA, 25 bp, Homo sapien
gatgaagttcctccaccacttagag

SEQ ID NO: 557374 - DNA, 25 bp, Homo sapien
tgaagttcctccaccacttagagag

SEQ ID NO: 557375 - DNA, 25 bp, Homo sapien
cccatgctggcgctcaaaagtttca

SEQ ID NO: 557376 - DNA, 25 bp, Homo sapien
tgtgcagccccaaatccgaaatctg

SEQ ID NO: 557377 - DNA, 25 bp, Homo sapien
caaaattacagattgggcatccctt

SEQ ID NO: 557378 - DNA, 25 bp, Homo sapien
aaatgcttctggctttggatctggg

SEQ ID NO: 557379 - DNA, 25 bp, Homo sapien
gtgatcacagccatagccgcgaact

SEQ ID NO: 557380 - DNA, 25 bp, Homo sapien
tgggaaacgtggatcagttcaacac

SEQ ID NO: 557381 - DNA, 25 bp, Homo sapien
tgtacttctactggccagcactggt

SEQ ID NO: 557382 - DNA, 25 bp, Homo sapien
cactggtacagatcaacttgcctta

SEQ ID NO: 557383 - DNA, 25 bp, Homo sapien
ttatgtactgtcaggtgggacgcag

SEQ ID NO: 557384 - DNA, 25 bp, Homo sapien
tagcaaaagggacctcacgtgtgca

SEQ ID NO: 557385 - DNA, 25 bp, Homo sapien
gggatcgtccttcaattgcctcaaa

SEQ ID NO: 557386 - DNA, 25 bp, Homo sapien
tgaagatgaactgtcaaggcagcag

SEQ ID NO: 557387 - DNA, 25 bp, Homo sapien
cacacagagcggcttcccagcacac

SEQ ID NO: 557388 - DNA, 25 bp, Homo sapien
agtcaggaggggcttggttcccatg

SEQ ID NO: 557389 - DNA, 25 bp, Homo sapien
cacagagcggcttcccagcacacat

SEQ ID NO: 557390 - DNA, 25 bp, Homo sapien
aggggcttggttcccatggatactc

SEQ ID NO: 557391 - DNA, 25 bp, Homo sapien
cagacaggccaagaatcaagtacca

SEQ ID NO: 557392 - DNA, 25 bp, Homo sapien
aggaggcttccagacatgacacaca

SEQ ID NO: 557393 - DNA, 25 bp, Homo sapien
taaagccgaaaaccagatagatagt

SEQ ID NO: 557394 - DNA, 25 bp, Homo sapien
cagatgaacccctaccaaggaggct

SEQ ID NO: 557395 - DNA, 25 bp, Homo sapien
tggtgtcggagatgccagggcacgc

SEQ ID NO: 557396 - DNA, 25 bp, Homo sapien
gtcggagatgccagggcacgcctcc

SEQ ID NO: 557397 - DNA, 25 bp, Homo sapien
ctctggagccgctgcacgagctggg

SEQ ID NO: 557398 - DNA, 25 bp, Homo sapien
tctggagccgctgcacgagctgggc

SEQ ID NO: 557399 - DNA, 25 bp, Homo sapien
cctttgtgatccagagtagagtcaa

SEQ ID NO: 557400 - DNA, 25 bp, Homo sapien
taatcattactgttcgaggccagaa

SEQ ID NO: 557401 - DNA, 25 bp, Homo sapien
taagtggcagccttaaattctggga

SEQ ID NO: 557402 - DNA, 25 bp, Homo sapien
gaggccagaacagagacgactagct

SEQ ID NO: 557403 - DNA, 25 bp, Homo sapien
gaagttcttgctgtcacagggccac

SEQ ID NO: 557404 - DNA, 25 bp, Homo sapien
tcaagtcaagatacagcatggctca

SEQ ID NO: 557405 - DNA, 25 bp, Homo sapien
cagtatttacaagtcccgagagggt

SEQ ID NO: 557406 - DNA, 25 bp, Homo sapien
gagagggtcagctacaatccagcac

SEQ ID NO: 557407 - DNA, 25 bp, Homo sapien
gtggcttccccgacaccagcgggct

SEQ ID NO: 557408 - DNA, 25 bp, Homo sapien
agggcctccgcgtgccctgtggctt

SEQ ID NO: 557409 - DNA, 25 bp, Homo sapien
ctgaacttgccaggtcagaggccct

SEQ ID NO: 557410 - DNA, 25 bp, Homo sapien
gggctcggctacttcccacttgaag

SEQ ID NO: 557411 - DNA, 25 bp, Homo sapien
gggcaacaggtgaaggcttattgga

SEQ ID NO: 557412 - DNA, 25 bp, Homo sapien
aggcactggcaggaccgtggctggc

SEQ ID NO: 557413 - DNA, 25 bp, Homo sapien
aacaggtgaaggcttattggagggc

SEQ ID NO: 557414 - DNA, 25 bp, Homo sapien
ctggcaggaccgtggctggccaggc

SEQ ID NO: 557415 - DNA, 25 bp, Homo sapien
gaaataattgtagataaacactgag

SEQ ID NO: 557416 - DNA, 25 bp, Homo sapien
gataaacactgagagaaaggcctct

SEQ ID NO: 557417 - DNA, 25 bp, Homo sapien
aaacagaggagaaataattgtagat

SEQ ID NO: 557418 - DNA, 25 bp, Homo sapien
tgagagaaaggcctcttcgggatgt

SEQ ID NO: 557419 - DNA, 25 bp, Homo sapien
gggacatcctaactcaacagcaggg

SEQ ID NO: 557420 - DNA, 25 bp, Homo sapien
tgacattgccacatcgggacatcct

SEQ ID NO: 557421 - DNA, 25 bp, Homo sapien
caaaacactgcagactgaggtcagc

SEQ ID NO: 557422 - DNA, 25 bp, Homo sapien
gccattctggagtgagcagacgtac

SEQ ID NO: 557423 - DNA, 25 bp, Homo sapien
ggattgtgaagatccagtccccaga

SEQ ID NO: 557424 - DNA, 25 bp, Homo sapien
gattgtgaagatccagtccccagaa

SEQ ID NO: 557425 - DNA, 25 bp, Homo sapien
attgtgaagatccagtccccagaat

SEQ ID NO: 557426 - DNA, 25 bp, Homo sapien
ttgtgaagatccagtccccagaatc

SEQ ID NO: 557427 - DNA, 25 bp, Homo sapien
tcgagtcgtcatggctctgctcggc

SEQ ID NO: 557428 - DNA, 25 bp, Homo sapien
tgctcggccttccatctcttgtacc

SEQ ID NO: 557429 - DNA, 25 bp, Homo sapien
gagtcgtcatggctctgctcggcct

SEQ ID NO: 557430 - DNA, 25 bp, Homo sapien
agctcgagtcgtcatggctctgctc

SEQ ID NO: 557431 - DNA, 25 bp, Homo sapien
aatttggaattatctcagagaaact

SEQ ID NO: 557432 - DNA, 25 bp, Homo sapien
ctttctgtattaacgtttggccaca

SEQ ID NO: 557433 - DNA, 25 bp, Homo sapien
ggccacatccaaccatataatagaa

SEQ ID NO: 557434 - DNA, 25 bp, Homo sapien
tggaattatctcagagaaactggaa

SEQ ID NO: 557435 - DNA, 25 bp, Homo sapien
ccctcttgcaagttcaatagctgtt

SEQ ID NO: 557436 - DNA, 25 bp, Homo sapien
tgcagctcggaatgaggtggttccc

SEQ ID NO: 557437 - DNA, 25 bp, Homo sapien
tcggaatgaggtggttcccctcttg

SEQ ID NO: 557438 - DNA, 25 bp, Homo sapien
tttcatggggtgcagctcggaatga

SEQ ID NO: 557439 - DNA, 25 bp, Homo sapien
ggttgccgattccacgcacttgcac

SEQ ID NO: 557440 - DNA, 25 bp, Homo sapien
tccattctcacgcttccgtggactc

SEQ ID NO: 557441 - DNA, 25 bp, Homo sapien
caggccccttcaaggttgccgattc

SEQ ID NO: 557442 - DNA, 25 bp, Homo sapien
tggactccctttctcttgtgggagc

SEQ ID NO: 557443 - DNA, 25 bp, Homo sapien
tgtcagctggccagccacgccaaag

SEQ ID NO: 557444 - DNA, 25 bp, Homo sapien
tctcttaatatagtagcgatctggg

SEQ ID NO: 557445 - DNA, 25 bp, Homo sapien
ggagataatcgagtcctttcagtat

SEQ ID NO: 557446 - DNA, 25 bp, Homo sapien
gtggattttcttctccgaatggaga

SEQ ID NO: 557447 - DNA, 25 bp, Homo sapien
tctgggtttcatctaatgggccagg

SEQ ID NO: 557448 - DNA, 25 bp, Homo sapien
agtgctccccggaaccacagaaacg

SEQ ID NO: 557449 - DNA, 25 bp, Homo sapien
cccggaaccacagaaacggagccag

SEQ ID NO: 557450 - DNA, 25 bp, Homo sapien
ctaatcgatgcaggtagggttcccc

SEQ ID NO: 557451 - DNA, 25 bp, Homo sapien
ccagacagagggcagatgtctaatc

SEQ ID NO: 557452 - DNA, 25 bp, Homo sapien
tagtgcggagcctccaccaagatat

SEQ ID NO: 557453 - DNA, 25 bp, Homo sapien
tagatctagtgcggagcctccacca

SEQ ID NO: 557454 - DNA, 25 bp, Homo sapien
atctagtgcggagcctccaccaaga

SEQ ID NO: 557455 - DNA, 25 bp, Homo sapien
agatctagtgcggagcctccaccaa

SEQ ID NO: 557456 - DNA, 25 bp, Homo sapien
agaggaggaaaaatcctgttcgcag

SEQ ID NO: 557457 - DNA, 25 bp, Homo sapien
gtgtgtttctcacaggctcaggtgg

SEQ ID NO: 557458 - DNA, 25 bp, Homo sapien
ggtgtgtttctcacaggctcaggtg

SEQ ID NO: 557459 - DNA, 25 bp, Homo sapien
gaaaaatcctgttcgcagagggcag

SEQ ID NO: 557460 - DNA, 25 bp, Homo sapien
aatgtggagtaaaggcgccggcctt

SEQ ID NO: 557461 - DNA, 25 bp, Homo sapien
ggccttccattctcccaggtgatca

SEQ ID NO: 557462 - DNA, 25 bp, Homo sapien
tcaaagcttccacgtgatgaatgtg

SEQ ID NO: 557463 - DNA, 25 bp, Homo sapien
ccagtgttggagaaaacccggattg

SEQ ID NO: 557464 - DNA, 25 bp, Homo sapien
ggatgagaactcctagaaagtggga

SEQ ID NO: 557465 - DNA, 25 bp, Homo sapien
aatcctcaggatttgctccgcacag

SEQ ID NO: 557466 - DNA, 25 bp, Homo sapien
gcgaagccctttctgcgataggaag

SEQ ID NO: 557467 - DNA, 25 bp, Homo sapien
ttctatgtgtgaagagcgaagccct

SEQ ID NO: 557468 - DNA, 25 bp, Homo sapien
tgctcctcgccgcatccagcacaga

SEQ ID NO: 557469 - DNA, 25 bp, Homo sapien
ccaccaacgcctcggtgaagatgac

SEQ ID NO: 557470 - DNA, 25 bp, Homo sapien
tctgcgacccatggagggatgcaga

SEQ ID NO: 557471 - DNA, 25 bp, Homo sapien
aaacacccagctaaaggcccaggag

SEQ ID NO: 557472 - DNA, 25 bp, Homo sapien
tgtcctcctgtctgcagacccatgg

SEQ ID NO: 557473 - DNA, 25 bp, Homo sapien
ggaaaaatgttctggtaactctgtc

SEQ ID NO: 557474 - DNA, 25 bp, Homo sapien
tgaggcatcccagaccgccactggg

SEQ ID NO: 557475 - DNA, 25 bp, Homo sapien
tggtaactctgtctccagattttct

SEQ ID NO: 557476 - DNA, 25 bp, Homo sapien
gactaagaatgtgcctgccgctcag

SEQ ID NO: 557477 - DNA, 25 bp, Homo sapien
tgagtttatgacctcctggcagcaa

SEQ ID NO: 557478 - DNA, 25 bp, Homo sapien
aggagatcccaatttaccaagagag

SEQ ID NO: 557479 - DNA, 25 bp, Homo sapien
tatggctgcctcacattaaagtggc

SEQ ID NO: 557480 - DNA, 25 bp, Homo sapien
gcacatgtaagaaccaggaatgacc

SEQ ID NO: 557481 - DNA, 25 bp, Homo sapien
gccacactaggcagagccttacaag

SEQ ID NO: 557482 - DNA, 25 bp, Homo sapien
ggaatgacctttctaatacagccac

SEQ ID NO: 557483 - DNA, 25 bp, Homo sapien
cttggaaagtcagcacgccagtggg

SEQ ID NO: 557484 - DNA, 25 bp, Homo sapien
aaatgttcagagatgtgactgcccc

SEQ ID NO: 557485 - DNA, 25 bp, Homo sapien
taaaggaaatgttcagagatgtgac

SEQ ID NO: 557486 - DNA, 25 bp, Homo sapien
actgcccccaggaacatgccacgac

SEQ ID NO: 557487 - DNA, 25 bp, Homo sapien
aggaacatgccacgactcccactga

SEQ ID NO: 557488 - DNA, 25 bp, Homo sapien
cagtccagcgtctgttgacagaagc

SEQ ID NO: 557489 - DNA, 25 bp, Homo sapien
gcacagtccagcgtctgttgacaga

SEQ ID NO: 557490 - DNA, 25 bp, Homo sapien
gtccagcgtctgttgacagaagcca

SEQ ID NO: 557491 - DNA, 25 bp, Homo sapien
cacagtccagcgtctgttgacagaa

SEQ ID NO: 557492 - DNA, 25 bp, Homo sapien
acctcctacacctgcgatggccaaa

SEQ ID NO: 557493 - DNA, 25 bp, Homo sapien
tgcctccacctcctacacctgcgat

SEQ ID NO: 557494 - DNA, 25 bp, Homo sapien
ctccacctcctacacctgcgatggc

SEQ ID NO: 557495 - DNA, 25 bp, Homo sapien
tacacctgcgatggccaaacactct

SEQ ID NO: 557496 - DNA, 25 bp, Homo sapien
ctttaaaacaacaaacacacacttg

SEQ ID NO: 557497 - DNA, 25 bp, Homo sapien
cacagtggttaacagcaatcccgct

SEQ ID NO: 557498 - DNA, 25 bp, Homo sapien
tcaaacactagcacgagactcaggt

SEQ ID NO: 557499 - DNA, 25 bp, Homo sapien
tgagaatgaagcctactgtgtggtg

SEQ ID NO: 557500 - DNA, 25 bp, Homo sapien
acaaagctgtggagtcgtcggtgac

SEQ ID NO: 557501 - DNA, 25 bp, Homo sapien
tggatggaggcaggttcgggctgat

SEQ ID NO: 557502 - DNA, 25 bp, Homo sapien
agcagagaaacaacagcctccagta

SEQ ID NO: 557503 - DNA, 25 bp, Homo sapien
cagtactccatccacatgtgcacaa

SEQ ID NO: 557504 - DNA, 25 bp, Homo sapien
catgtgcacaaggtgtggatggagg

SEQ ID NO: 557505 - DNA, 25 bp, Homo sapien
gatgtcagggtcatgtgcccactgt

SEQ ID NO: 557506 - DNA, 25 bp, Homo sapien
gtcagggtcatgtgcccactgtcca

SEQ ID NO: 557507 - DNA, 25 bp, Homo sapien
ctccgtgggagtctgtcgatgtcag

SEQ ID NO: 557508 - DNA, 25 bp, Homo sapien
gggagtctgtcgatgtcagggtcat

SEQ ID NO: 557509 - DNA, 25 bp, Homo sapien
ggcaagttcttaccgcaagctggcc

SEQ ID NO: 557510 - DNA, 25 bp, Homo sapien
cactgatgggaaccaaaggatcttc

SEQ ID NO: 557511 - DNA, 25 bp, Homo sapien
taaaggcaagttcttaccgcaagct

SEQ ID NO: 557512 - DNA, 25 bp, Homo sapien
tcttaccgcaagctggccccaaggt

SEQ ID NO: 557513 - DNA, 25 bp, Homo sapien
tggttttgcatttggcatatttatg

SEQ ID NO: 557514 - DNA, 25 bp, Homo sapien
aaagaaatcattgtggttttgcatt

SEQ ID NO: 557515 - DNA, 25 bp, Homo sapien
tcaaagaaatcattgtggttttgca

SEQ ID NO: 557516 - DNA, 25 bp, Homo sapien
gttttgcatttggcatatttatgcc

SEQ ID NO: 557517 - DNA, 25 bp, Homo sapien
tgtcagcctctgaacgggatctcaa

SEQ ID NO: 557518 - DNA, 25 bp, Homo sapien
gtactatactacaccagccttggct

SEQ ID NO: 557519 - DNA, 25 bp, Homo sapien
gatgattagcttctgtaagccctgg

SEQ ID NO: 557520 - DNA, 25 bp, Homo sapien
tcttctagggacaagtctgtcagcc

SEQ ID NO: 557521 - DNA, 25 bp, Homo sapien
tacaggtcgtcaggaaggatacagc

SEQ ID NO: 557522 - DNA, 25 bp, Homo sapien
cacagcagtgctaacgaaggaaggt

SEQ ID NO: 557523 - DNA, 25 bp, Homo sapien
taactggaacggctgcaatgagaac

SEQ ID NO: 557524 - DNA, 25 bp, Homo sapien
gcccagattcataggcaaccgtgaa

SEQ ID NO: 557525 - DNA, 25 bp, Homo sapien
aatgtctcccgtagccgaagcagct

SEQ ID NO: 557526 - DNA, 25 bp, Homo sapien
tgtggaccctggctaagcttccgga

SEQ ID NO: 557527 - DNA, 25 bp, Homo sapien
tttcccactcaaacacaaaggacag

SEQ ID NO: 557528 - DNA, 25 bp, Homo sapien
agcagctcctccgttatcaatcaca

SEQ ID NO: 557529 - DNA, 25 bp, Homo sapien
cacagctaccggcaccaattcaaat

SEQ ID NO: 557530 - DNA, 25 bp, Homo sapien
tggggcacagctaccggcaccaatt

SEQ ID NO: 557531 - DNA, 25 bp, Homo sapien
agctaccggcaccaattcaaattca

SEQ ID NO: 557532 - DNA, 25 bp, Homo sapien
agtggggcacagctaccggcaccaa

SEQ ID NO: 557533 - DNA, 25 bp, Homo sapien
gacactaggcctctgtaaatgtgca

SEQ ID NO: 557534 - DNA, 25 bp, Homo sapien
gcgaggatgcctccagcaaggcagt

SEQ ID NO: 557535 - DNA, 25 bp, Homo sapien
tgcaaaggacggtgctggccgacac

SEQ ID NO: 557536 - DNA, 25 bp, Homo sapien
cctcctcaactttgtaaaatggctg

SEQ ID NO: 557537 - DNA, 25 bp, Homo sapien
gactagcgctggtgagactcacaag

SEQ ID NO: 557538 - DNA, 25 bp, Homo sapien
ttctcaaagggatggtcaagcttga

SEQ ID NO: 557539 - DNA, 25 bp, Homo sapien
cagggccacgcctcatattttattc

SEQ ID NO: 557540 - DNA, 25 bp, Homo sapien
tattcccatgaagctcccacttaaa

SEQ ID NO: 557541 - DNA, 25 bp, Homo sapien
gtggtgtcttctgctcaactgtgga

SEQ ID NO: 557542 - DNA, 25 bp, Homo sapien
ccattaagactccactcagtgaggg

SEQ ID NO: 557543 - DNA, 25 bp, Homo sapien
cacagccccattccggatgtaaata

SEQ ID NO: 557544 - DNA, 25 bp, Homo sapien
tacaagtgtccaagggagagtcaca

SEQ ID NO: 557545 - DNA, 25 bp, Homo sapien
tgtaatcagtccctgctgcgaaccg

SEQ ID NO: 557546 - DNA, 25 bp, Homo sapien
gggtcactgccaacacttatgtaat

SEQ ID NO: 557547 - DNA, 25 bp, Homo sapien
tgccaacacttatgtaatcagtccc

SEQ ID NO: 557548 - DNA, 25 bp, Homo sapien
agtccctgctgcgaaccggcttctg

SEQ ID NO: 557549 - DNA, 25 bp, Homo sapien
tctctgagttatccgccttcccagg

SEQ ID NO: 557550 - DNA, 25 bp, Homo sapien
acaaaagtaacccagaaaagcatct

SEQ ID NO: 557551 - DNA, 25 bp, Homo sapien
caaaagtaacccagaaaagcatctc

SEQ ID NO: 557552 - DNA, 25 bp, Homo sapien
aaagcatctctgagttatccgcctt

SEQ ID NO: 557553 - DNA, 25 bp, Homo sapien
tagcattcttaaaagtcaagcgtag

SEQ ID NO: 557554 - DNA, 25 bp, Homo sapien
gacaaagtcccaccagaaatactct

SEQ ID NO: 557555 - DNA, 25 bp, Homo sapien
cacagctggtaagtgagaatatcaa

SEQ ID NO: 557556 - DNA, 25 bp, Homo sapien
tcaagcgtagataagctagctaact

SEQ ID NO: 557557 - DNA, 25 bp, Homo sapien
ctttgtcctatcagagtccttccca

SEQ ID NO: 557558 - DNA, 25 bp, Homo sapien
gaattagaacatcaaacactttcac

SEQ ID NO: 557559 - DNA, 25 bp, Homo sapien
tgagatgatggaactatcaaagcca

SEQ ID NO: 557560 - DNA, 25 bp, Homo sapien
tgatcacgaaggtcaaaacatctct

SEQ ID NO: 557561 - DNA, 25 bp, Homo sapien
gcagaacggagaagcacgttatttt

SEQ ID NO: 557562 - DNA, 25 bp, Homo sapien
tgcagaacggagaagcacgttattt

SEQ ID NO: 557563 - DNA, 25 bp, Homo sapien
ctgcagaacggagaagcacgttatt

SEQ ID NO: 557564 - DNA, 25 bp, Homo sapien
cttcagataggatccataatatttg

SEQ ID NO: 557565 - DNA, 25 bp, Homo sapien
ctttgaacacctctccaaaggagcc

SEQ ID NO: 557566 - DNA, 25 bp, Homo sapien
aaccactttctgagtccgattgtca

SEQ ID NO: 557567 - DNA, 25 bp, Homo sapien
gagtccgattgtcaatgcctttgaa

SEQ ID NO: 557568 - DNA, 25 bp, Homo sapien
agctcttctgggtctgcctttaggt

SEQ ID NO: 557569 - DNA, 25 bp, Homo sapien
gagtggccctccttttattcaaggc

SEQ ID NO: 557570 - DNA, 25 bp, Homo sapien
tccttttattcaaggccagtcccca

SEQ ID NO: 557571 - DNA, 25 bp, Homo sapien
ttcaaggccagtccccaaagctggg

SEQ ID NO: 557572 - DNA, 25 bp, Homo sapien
ggtagagtggccctccttttattca

SEQ ID NO: 557573 - DNA, 25 bp, Homo sapien
ggctctctgcccttggcaacatgct

SEQ ID NO: 557574 - DNA, 25 bp, Homo sapien
tggctctctgcccttggcaacatgc

SEQ ID NO: 557575 - DNA, 25 bp, Homo sapien
caggataaggcttcgtcagtaaccc

SEQ ID NO: 557576 - DNA, 25 bp, Homo sapien
ctccaggataaggcttcgtcagtaa

SEQ ID NO: 557577 - DNA, 25 bp, Homo sapien
caggtcagacacctcaaagcctatc

SEQ ID NO: 557578 - DNA, 25 bp, Homo sapien
tccacaggcgcgttttcatgagacg

SEQ ID NO: 557579 - DNA, 25 bp, Homo sapien
tgtgaggataacacgcccatatggt

SEQ ID NO: 557580 - DNA, 25 bp, Homo sapien
tcatgagacgcttgccaggtggaaa

SEQ ID NO: 557581 - DNA, 25 bp, Homo sapien
tatgcaggaccactgtccacaggcg

SEQ ID NO: 557582 - DNA, 25 bp, Homo sapien
ctgggcaactctcccacgggccacc

SEQ ID NO: 557583 - DNA, 25 bp, Homo sapien
gcaactctcccacgggccaccggca

SEQ ID NO: 557584 - DNA, 25 bp, Homo sapien
ccttccccactcttctctgaaccca

SEQ ID NO: 557585 - DNA, 25 bp, Homo sapien
ttccccactcttctctgaacccacc

SEQ ID NO: 557586 - DNA, 25 bp, Homo sapien
catttctaaagctggaaacctctgc

SEQ ID NO: 557587 - DNA, 25 bp, Homo sapien
tctaaagctggaaacctctgcaccc

SEQ ID NO: 557588 - DNA, 25 bp, Homo sapien
tttctaaagctggaaacctctgcac

SEQ ID NO: 557589 - DNA, 25 bp, Homo sapien
caccccaacatgcaaaccgcgtcat

SEQ ID NO: 557590 - DNA, 25 bp, Homo sapien
ccttcaccagagttggcatagaatc

SEQ ID NO: 557591 - DNA, 25 bp, Homo sapien
gttggcatagaatcttcagcaagca

SEQ ID NO: 557592 - DNA, 25 bp, Homo sapien
acctgccggcaacgtggtgaactgc

SEQ ID NO: 557593 - DNA, 25 bp, Homo sapien
gtctgttccgggatcaaacctgccg

SEQ ID NO: 557594 - DNA, 25 bp, Homo sapien
gaaagggtattctccatcggctagg

SEQ ID NO: 557595 - DNA, 25 bp, Homo sapien
aataaacaagtgaggcgagtgcagc

SEQ ID NO: 557596 - DNA, 25 bp, Homo sapien
catgagctgataaaagccggcctcc

SEQ ID NO: 557597 - DNA, 25 bp, Homo sapien
tacctctgaaggagcaggctacctg

SEQ ID NO: 557598 - DNA, 25 bp, Homo sapien
tgacactttacccttttaccatgag

SEQ ID NO: 557599 - DNA, 25 bp, Homo sapien
ttgtgagcaaagagaccatgatgtc

SEQ ID NO: 557600 - DNA, 25 bp, Homo sapien
taataaatgtaccagatgctgtccc

SEQ ID NO: 557601 - DNA, 25 bp, Homo sapien
taaacagcacgcactggtattactg

SEQ ID NO: 557602 - DNA, 25 bp, Homo sapien
cggacccgaagacgcgggtctgatc

SEQ ID NO: 557603 - DNA, 25 bp, Homo sapien
gcgcggacccgaagacgcgggtctg

SEQ ID NO: 557604 - DNA, 25 bp, Homo sapien
ggtctccatcaacagcagctgagaa

SEQ ID NO: 557605 - DNA, 25 bp, Homo sapien
tacgaaaggtcaaacagctggtctc

SEQ ID NO: 557606 - DNA, 25 bp, Homo sapien
tgcggtgccggtcatcaatggcttc

SEQ ID NO: 557607 - DNA, 25 bp, Homo sapien
gaagctgccatccacgactcagtat

SEQ ID NO: 557608 - DNA, 25 bp, Homo sapien
ttgaacggatcaccgccagaagctg

SEQ ID NO: 557609 - DNA, 25 bp, Homo sapien
tcagtatccggcagactcggtcacc

SEQ ID NO: 557610 - DNA, 25 bp, Homo sapien
aagccgacctgaggccagggtacat

SEQ ID NO: 557611 - DNA, 25 bp, Homo sapien
ccgtggcccaactgcagacacagaa

SEQ ID NO: 557612 - DNA, 25 bp, Homo sapien
ctggagtatctcatcccgccgggta

SEQ ID NO: 557613 - DNA, 25 bp, Homo sapien
actgaggtggcaggtacgttcccgt

SEQ ID NO: 557614 - DNA, 25 bp, Homo sapien
aaacctggcctcgaagtgaattggg

SEQ ID NO: 557615 - DNA, 25 bp, Homo sapien
gtatggcgtaggcatcttccccagg

SEQ ID NO: 557616 - DNA, 25 bp, Homo sapien
aaaaagtagctcaaggattccaggc

SEQ ID NO: 557617 - DNA, 25 bp, Homo sapien
tctagtcagaaaccgaagacgccaa

SEQ ID NO: 557618 - DNA, 25 bp, Homo sapien
gaaaccgcaatgagacctagctggg

SEQ ID NO: 557619 - DNA, 25 bp, Homo sapien
cactggtggcacagttcgatctggc

SEQ ID NO: 557620 - DNA, 25 bp, Homo sapien
tctgggagcacttattttaggacct

SEQ ID NO: 557621 - DNA, 25 bp, Homo sapien
gatctggcatcagcttttacctggg

SEQ ID NO: 557622 - DNA, 25 bp, Homo sapien
gccacttcaaagttagccagagcct

SEQ ID NO: 557623 - DNA, 25 bp, Homo sapien
cacttatgcaccttgtacgggatga

SEQ ID NO: 557624 - DNA, 25 bp, Homo sapien
tatttcaatgactactgccctgcca

SEQ ID NO: 557625 - DNA, 25 bp, Homo sapien
caacgctgctcaacgctatggctca

SEQ ID NO: 557626 - DNA, 25 bp, Homo sapien
tagatctagcccaccagaagctgtg

SEQ ID NO: 557627 - DNA, 25 bp, Homo sapien
gactccgggcactatactctgcagg

SEQ ID NO: 557628 - DNA, 25 bp, Homo sapien
cttagagcacatgccccaaagcagg

SEQ ID NO: 557629 - DNA, 25 bp, Homo sapien
gaaaagaacccgtggaaatgtgaca

SEQ ID NO: 557630 - DNA, 25 bp, Homo sapien
cactgcaagtggaactcgcggttac

SEQ ID NO: 557631 - DNA, 25 bp, Homo sapien
tctcaaagtgaaagtccagggtccc

SEQ ID NO: 557632 - DNA, 25 bp, Homo sapien
gaattcctgtaaatgcaaccaagtc

SEQ ID NO: 557633 - DNA, 25 bp, Homo sapien
tccagaaggtttgcaactcgcactt

SEQ ID NO: 557634 - DNA, 25 bp, Homo sapien
cccgactgcaccggggagtgagcca

SEQ ID NO: 557635 - DNA, 25 bp, Homo sapien
ggcccgactgcaccggggagtgagc

SEQ ID NO: 557636 - DNA, 25 bp, Homo sapien
ccgactgcaccggggagtgagccat

SEQ ID NO: 557637 - DNA, 25 bp, Homo sapien
gcccgactgcaccggggagtgagcc

SEQ ID NO: 557638 - DNA, 25 bp, Homo sapien
gcagggcctcgcgcgcactgccgcc

SEQ ID NO: 557639 - DNA, 25 bp, Homo sapien
cgggccgcgtctccatgcacggcgc

SEQ ID NO: 557640 - DNA, 25 bp, Homo sapien
gggccgcgacgatccgcgcggggcg

SEQ ID NO: 557641 - DNA, 25 bp, Homo sapien
cgtctccatgcacggcgccagggag

SEQ ID NO: 557642 - DNA, 25 bp, Homo sapien
ggaagctccaggcccactcagcacc

SEQ ID NO: 557643 - DNA, 25 bp, Homo sapien
ctcggaagctccaggcccactcagc

SEQ ID NO: 557644 - DNA, 25 bp, Homo sapien
aagctccaggcccactcagcaccag

SEQ ID NO: 557645 - DNA, 25 bp, Homo sapien
gctccaggcccactcagcaccagtt

SEQ ID NO: 557646 - DNA, 25 bp, Homo sapien
tccaacttgggagcgttcatacagc

SEQ ID NO: 557647 - DNA, 25 bp, Homo sapien
ccaatttgggattgttggtgcaggc

SEQ ID NO: 557648 - DNA, 25 bp, Homo sapien
gcaagattccgtggcttttatccaa

SEQ ID NO: 557649 - DNA, 25 bp, Homo sapien
cattctgcaggaaacatgcctcttc

SEQ ID NO: 557650 - DNA, 25 bp, Homo sapien
caggctgcatactgatgtagggcag

SEQ ID NO: 557651 - DNA, 25 bp, Homo sapien
cacaggctgcatactgatgtagggc

SEQ ID NO: 557652 - DNA, 25 bp, Homo sapien
tggccacaggctgcatactgatgta

SEQ ID NO: 557653 - DNA, 25 bp, Homo sapien
gccacaggctgcatactgatgtagg

SEQ ID NO: 557654 - DNA, 25 bp, Homo sapien
agtaaactgcctaacatagctcctt

SEQ ID NO: 557655 - DNA, 25 bp, Homo sapien
aactgcctaacatagctccttccaa

SEQ ID NO: 557656 - DNA, 25 bp, Homo sapien
actgcctaacatagctccttccaaa

SEQ ID NO: 557657 - DNA, 25 bp, Homo sapien
taaactgcctaacatagctccttcc

SEQ ID NO: 557658 - DNA, 25 bp, Homo sapien
cggcaatttagaacttgatcacctt

SEQ ID NO: 557659 - DNA, 25 bp, Homo sapien
aacggcaatttagaacttgatcacc

SEQ ID NO: 557660 - DNA, 25 bp, Homo sapien
aaacggcaatttagaacttgatcac

SEQ ID NO: 557661 - DNA, 25 bp, Homo sapien
acggcaatttagaacttgatcacct

SEQ ID NO: 557662 - DNA, 25 bp, Homo sapien
aaatttcatccatcaatatggaaat

SEQ ID NO: 557663 - DNA, 25 bp, Homo sapien
ttcatccatcaatatggaaatattt

SEQ ID NO: 557664 - DNA, 25 bp, Homo sapien
tttaaaatttcatccatcaatatgg

SEQ ID NO: 557665 - DNA, 25 bp, Homo sapien
ttttaaaatttcatccatcaatatg

SEQ ID NO: 557666 - DNA, 25 bp, Homo sapien
aggcgtgtgatgtccgagaaactcg

SEQ ID NO: 557667 - DNA, 25 bp, Homo sapien
taaacgtgaatgtaggagacggcca

SEQ ID NO: 557668 - DNA, 25 bp, Homo sapien
catacaccacagcacgaggcgtgtg

SEQ ID NO: 557669 - DNA, 25 bp, Homo sapien
tcgtttcaccgtggcatcaccaggc

SEQ ID NO: 557670 - DNA, 25 bp, Homo sapien
accccacaaagcacggacatcaggg

SEQ ID NO: 557671 - DNA, 25 bp, Homo sapien
caaagcacggacatcagggatggtg

SEQ ID NO: 557672 - DNA, 25 bp, Homo sapien
tgtcaccaccccacaaagcacggac

SEQ ID NO: 557673 - DNA, 25 bp, Homo sapien
tttgctggttaagtgggagccccac

SEQ ID NO: 557674 - DNA, 25 bp, Homo sapien
gacagaggcatatcgtcggggccac

SEQ ID NO: 557675 - DNA, 25 bp, Homo sapien
cactcttcggatgcttcaaaatctg

SEQ ID NO: 557676 - DNA, 25 bp, Homo sapien
agtctatccgaggtcctgacttggg

SEQ ID NO: 557677 - DNA, 25 bp, Homo sapien
tggggaactgacaggatgctccaga

SEQ ID NO: 557678 - DNA, 25 bp, Homo sapien
ctgtttgcaaatgaccctgtgtcta

SEQ ID NO: 557679 - DNA, 25 bp, Homo sapien
tgtttgcaaatgaccctgtgtctaa

SEQ ID NO: 557680 - DNA, 25 bp, Homo sapien
agtcagcccctctgaaatcttcaca

SEQ ID NO: 557681 - DNA, 25 bp, Homo sapien
agcccctctgaaatcttcacactcc

SEQ ID NO: 557682 - DNA, 25 bp, Homo sapien
caagtcagcccctctgaaatcttca

SEQ ID NO: 557683 - DNA, 25 bp, Homo sapien
tcagcccctctgaaatcttcacact

SEQ ID NO: 557684 - DNA, 25 bp, Homo sapien
tttctgacctctcaatgtcagcaaa

SEQ ID NO: 557685 - DNA, 25 bp, Homo sapien
agtctgccctttctgacctctcaat

SEQ ID NO: 557686 - DNA, 25 bp, Homo sapien
gccctttctgacctctcaatgtcag

SEQ ID NO: 557687 - DNA, 25 bp, Homo sapien
tctgccctttctgacctctcaatgt

SEQ ID NO: 557688 - DNA, 25 bp, Homo sapien
cctctgtgtgagaggatccagctgc

SEQ ID NO: 557689 - DNA, 25 bp, Homo sapien
ctaagaccccatcggtgtctcctct

SEQ ID NO: 557690 - DNA, 25 bp, Homo sapien
aagaccccatcggtgtctcctctcc

SEQ ID NO: 557691 - DNA, 25 bp, Homo sapien
ggcctctgtgtgagaggatccagct

SEQ ID NO: 557692 - DNA, 25 bp, Homo sapien
ggggatttggcccagttatgtgctt

SEQ ID NO: 557693 - DNA, 25 bp, Homo sapien
accatggggatttggcccagttatg

SEQ ID NO: 557694 - DNA, 25 bp, Homo sapien
ccatggggatttggcccagttatgt

SEQ ID NO: 557695 - DNA, 25 bp, Homo sapien
catggtgtggcaaggggtgcaccgt

SEQ ID NO: 557696 - DNA, 25 bp, Homo sapien
tgtcatcgcatggtgaagttctgct

SEQ ID NO: 557697 - DNA, 25 bp, Homo sapien
tgaagttctgctgcactaatataac

SEQ ID NO: 557698 - DNA, 25 bp, Homo sapien
ttgaccgtcaccatcaatatctgct

SEQ ID NO: 557699 - DNA, 25 bp, Homo sapien
tgatcatttcgtcaacctcttcatc

SEQ ID NO: 557700 - DNA, 25 bp, Homo sapien
gccaactctgccattactatcagca

SEQ ID NO: 557701 - DNA, 25 bp, Homo sapien
ctgcttctgtgggatgccgcctaag

SEQ ID NO: 557702 - DNA, 25 bp, Homo sapien
ggatgccgcctaagagacctcattt

SEQ ID NO: 557703 - DNA, 25 bp, Homo sapien
gggaagccaactctgccattactat

SEQ ID NO: 557704 - DNA, 25 bp, Homo sapien
gtcagccatgctgaaagcgctaccg

SEQ ID NO: 557705 - DNA, 25 bp, Homo sapien
ctgaaagcgctaccggtttccgaga

SEQ ID NO: 557706 - DNA, 25 bp, Homo sapien
taaataagcttatttgaattctaca

SEQ ID NO: 557707 - DNA, 25 bp, Homo sapien
ctttgtcaaatagtaaataagctta

SEQ ID NO: 557708 - DNA, 25 bp, Homo sapien
tttctgcacccacttgaaagcagag

SEQ ID NO: 557709 - DNA, 25 bp, Homo sapien
tgcacccacttgaaagcagaggccc

SEQ ID NO: 557710 - DNA, 25 bp, Homo sapien
tctgcacccacttgaaagcagaggc

SEQ ID NO: 557711 - DNA, 25 bp, Homo sapien
gcacccacttgaaagcagaggccct

SEQ ID NO: 557712 - DNA, 25 bp, Homo sapien
gaagggcttcgcctagatggagact

SEQ ID NO: 557713 - DNA, 25 bp, Homo sapien
ctgacctgacaggaatcggctccac

SEQ ID NO: 557714 - DNA, 25 bp, Homo sapien
tcgcctagatggagactgacctgac

SEQ ID NO: 557715 - DNA, 25 bp, Homo sapien
cagtgatgtcatcgagccctggaac

SEQ ID NO: 557716 - DNA, 25 bp, Homo sapien
tgtgattagccgcaaactagaccca

SEQ ID NO: 557717 - DNA, 25 bp, Homo sapien
gattagccgcaaactagacccaaac

SEQ ID NO: 557718 - DNA, 25 bp, Homo sapien
cagtttgtgattagccgcaaactag

SEQ ID NO: 557719 - DNA, 25 bp, Homo sapien
aacagtttgtgattagccgcaaact

SEQ ID NO: 557720 - DNA, 25 bp, Homo sapien
ctagctgatccgactgctggccagt

SEQ ID NO: 557721 - DNA, 25 bp, Homo sapien
tagctgatccgactgctggccagtt

SEQ ID NO: 557722 - DNA, 25 bp, Homo sapien
cattacaatgtggtctgtttgctgg

SEQ ID NO: 557723 - DNA, 25 bp, Homo sapien
tcatccaggtctgcgtcaggtggtc

SEQ ID NO: 557724 - DNA, 25 bp, Homo sapien
tatcccgtttgtctccctgaaggtc

SEQ ID NO: 557725 - DNA, 25 bp, Homo sapien
ggatttcctggatcaacttttctca

SEQ ID NO: 557726 - DNA, 25 bp, Homo sapien
gatccacgaccaggagtgtaggaac

SEQ ID NO: 557727 - DNA, 25 bp, Homo sapien
aggaagtttgggcagatccacgacc

SEQ ID NO: 557728 - DNA, 25 bp, Homo sapien
gaactctttgttcacgttggaggat

SEQ ID NO: 557729 - DNA, 25 bp, Homo sapien
tcacgttggaggatagaagaccacg

SEQ ID NO: 557730 - DNA, 25 bp, Homo sapien
ctgctgctccaccatggtcagttct

SEQ ID NO: 557731 - DNA, 25 bp, Homo sapien
tccaaccagatgcccacaaggctga

SEQ ID NO: 557732 - DNA, 25 bp, Homo sapien
tgctccaccatggtcagttctgctg

SEQ ID NO: 557733 - DNA, 25 bp, Homo sapien
tccaccatggtcagttctgctggag

SEQ ID NO: 557734 - DNA, 25 bp, Homo sapien
ggaactctgttcctgtagatttggg

SEQ ID NO: 557735 - DNA, 25 bp, Homo sapien
caatattttgatgccgatagagcat

SEQ ID NO: 557736 - DNA, 25 bp, Homo sapien
agatttgggctcaatattttgatgc

SEQ ID NO: 557737 - DNA, 25 bp, Homo sapien
tgttcctgtagatttgggctcaata

SEQ ID NO: 557738 - DNA, 25 bp, Homo sapien
cagctgccatattgattaagtgtag

SEQ ID NO: 557739 - DNA, 25 bp, Homo sapien
ttgattaagtgtagaagcaggcttg

SEQ ID NO: 557740 - DNA, 25 bp, Homo sapien
gagccccactctctagattgagaag

SEQ ID NO: 557741 - DNA, 25 bp, Homo sapien
tctagattgagaaggttctgctcct

SEQ ID NO: 557742 - DNA, 25 bp, Homo sapien
tgcaaacagtttgcccggacctcac

SEQ ID NO: 557743 - DNA, 25 bp, Homo sapien
ccatgttttcctacaaatgtgcttt

SEQ ID NO: 557744 - DNA, 25 bp, Homo sapien
gccatgttttcctacaaatgtgctt

SEQ ID NO: 557745 - DNA, 25 bp, Homo sapien
tctggggaacttgcaaacagtttgc

SEQ ID NO: 557746 - DNA, 25 bp, Homo sapien
gcccatgttttcgaaacaggaagcc

SEQ ID NO: 557747 - DNA, 25 bp, Homo sapien
tctaaagaaaagctccgggagctgg

SEQ ID NO: 557748 - DNA, 25 bp, Homo sapien
tccggcttctcagacgcccatgttt

SEQ ID NO: 557749 - DNA, 25 bp, Homo sapien
ctgagagaagtgcctgacctttgtc

SEQ ID NO: 557750 - DNA, 25 bp, Homo sapien
ggatctcggttccatctaccagcca

SEQ ID NO: 557751 - DNA, 25 bp, Homo sapien
aaggcaccagctggcggacaggatc

SEQ ID NO: 557752 - DNA, 25 bp, Homo sapien
cttcctgaagacgaaaacaggctga

SEQ ID NO: 557753 - DNA, 25 bp, Homo sapien
atggcaaggccgtctctgccccaag

SEQ ID NO: 557754 - DNA, 25 bp, Homo sapien
tagaaaatagcgttcacggccgggc

SEQ ID NO: 557755 - DNA, 25 bp, Homo sapien
ccaatggagtgtcctgctacctggg

SEQ ID NO: 557756 - DNA, 25 bp, Homo sapien
tacgttcacttttggccttggctcc

SEQ ID NO: 557757 - DNA, 25 bp, Homo sapien
cataatttaaacacaggtagggact

SEQ ID NO: 557758 - DNA, 25 bp, Homo sapien
ctgtttctgtgaattggcccctgac

SEQ ID NO: 557759 - DNA, 25 bp, Homo sapien
tgtttctgtgaattggcccctgaca

SEQ ID NO: 557760 - DNA, 25 bp, Homo sapien
tttctgtgaattggcccctgacatg

SEQ ID NO: 557761 - DNA, 25 bp, Homo sapien
ctgtgaattggcccctgacatgaaa

SEQ ID NO: 557762 - DNA, 25 bp, Homo sapien
agtatagaaccgagccatgatggca

SEQ ID NO: 557763 - DNA, 25 bp, Homo sapien
aaaaattacacagacgaccagaagc

SEQ ID NO: 557764 - DNA, 25 bp, Homo sapien
gaccagaagcaacgcggcaaataga

SEQ ID NO: 557765 - DNA, 25 bp, Homo sapien
gagcttcgatctccgctgggttgat

SEQ ID NO: 557766 - DNA, 25 bp, Homo sapien
gcccctgccacgatgagcacaatga

SEQ ID NO: 557767 - DNA, 25 bp, Homo sapien
tcctgcctgaagcaccgacttcatg

SEQ ID NO: 557768 - DNA, 25 bp, Homo sapien
gcaccgacttcatgttggaaggagc

SEQ ID NO: 557769 - DNA, 25 bp, Homo sapien
cctgccacgatgagcacaatgatgt

SEQ ID NO: 557770 - DNA, 25 bp, Homo sapien
atgggcgtttcgtgaagcagatcac

SEQ ID NO: 557771 - DNA, 25 bp, Homo sapien
tgggcgtttcgtgaagcagatcacc

SEQ ID NO: 557772 - DNA, 25 bp, Homo sapien
gatgggcgtttcgtgaagcagatca

SEQ ID NO: 557773 - DNA, 25 bp, Homo sapien
cgatgggcgtttcgtgaagcagatc

SEQ ID NO: 557774 - DNA, 25 bp, Homo sapien
gagaagaccacttcgccacaggtga

SEQ ID NO: 557775 - DNA, 25 bp, Homo sapien
ccatgttaactgtgttggctgaaat

SEQ ID NO: 557776 - DNA, 25 bp, Homo sapien
atatgagaattccaatcccgtgaca

SEQ ID NO: 557777 - DNA, 25 bp, Homo sapien
gcgggatttgcagagccatgttaac

SEQ ID NO: 557778 - DNA, 25 bp, Homo sapien
ctgttcgaacaggtaaattgagttt

SEQ ID NO: 557779 - DNA, 25 bp, Homo sapien
aactgttcgaacaggtaaattgagt

SEQ ID NO: 557780 - DNA, 25 bp, Homo sapien
actgttcgaacaggtaaattgagtt

SEQ ID NO: 557781 - DNA, 25 bp, Homo sapien
aaactgttcgaacaggtaaattgag

SEQ ID NO: 557782 - DNA, 25 bp, Homo sapien
tgaagacacgttcaggaggattttt

SEQ ID NO: 557783 - DNA, 25 bp, Homo sapien
tttgaagacacgttcaggaggattt

SEQ ID NO: 557784 - DNA, 25 bp, Homo sapien
atttgaagacacgttcaggaggatt

SEQ ID NO: 557785 - DNA, 25 bp, Homo sapien
ttgaagacacgttcaggaggatttt

SEQ ID NO: 557786 - DNA, 25 bp, Homo sapien
ttcctttggactatataggtataag

SEQ ID NO: 557787 - DNA, 25 bp, Homo sapien
tcctttggactatataggtataagc

SEQ ID NO: 557788 - DNA, 25 bp, Homo sapien
cttcctttggactatataggtataa

SEQ ID NO: 557789 - DNA, 25 bp, Homo sapien
cctttggactatataggtataagca

SEQ ID NO: 557790 - DNA, 25 bp, Homo sapien
ggttgacattgtggcggaatctctg

SEQ ID NO: 557791 - DNA, 25 bp, Homo sapien
cattgtggcggaatctctgttgagc

SEQ ID NO: 557792 - DNA, 25 bp, Homo sapien
ttgaaattaggttgacattgtggcg

SEQ ID NO: 557793 - DNA, 25 bp, Homo sapien
cggaatctctgttgagcttattgtg

SEQ ID NO: 557794 - DNA, 25 bp, Homo sapien
tgtagctgctgatgtttgcataaac

SEQ ID NO: 557795 - DNA, 25 bp, Homo sapien
aaaaaactggtatgtgctggcattg

SEQ ID NO: 557796 - DNA, 25 bp, Homo sapien
tgcataaactttcccactcattgtg

SEQ ID NO: 557797 - DNA, 25 bp, Homo sapien
tgatgagctcgttaaaagtatttac

SEQ ID NO: 557798 - DNA, 25 bp, Homo sapien
agaaaaccatctgtcttgtaactga

SEQ ID NO: 557799 - DNA, 25 bp, Homo sapien
acagaaaaccatctgtcttgtaact

SEQ ID NO: 557800 - DNA, 25 bp, Homo sapien
aacagaaaaccatctgtcttgtaac

SEQ ID NO: 557801 - DNA, 25 bp, Homo sapien
cagaaaaccatctgtcttgtaactg

SEQ ID NO: 557802 - DNA, 25 bp, Homo sapien
tacaaagtcccgtgaggctacgctt

SEQ ID NO: 557803 - DNA, 25 bp, Homo sapien
catacaaccctagtgaccaggacgg

SEQ ID NO: 557804 - DNA, 25 bp, Homo sapien
gcacggatggctgattacagacccc

SEQ ID NO: 557805 - DNA, 25 bp, Homo sapien
tgttccaggctatagacgaccctga

SEQ ID NO: 557806 - DNA, 25 bp, Homo sapien
tataagagtcttccaacttgcagta

SEQ ID NO: 557807 - DNA, 25 bp, Homo sapien
tcaacacccgtaattttggtcaaca

SEQ ID NO: 557808 - DNA, 25 bp, Homo sapien
tgggacatgccctactttgctgatg

SEQ ID NO: 557809 - DNA, 25 bp, Homo sapien
tggtcaacatggttatatacccagg

SEQ ID NO: 557810 - DNA, 25 bp, Homo sapien
ctcactgcaacccccgtctaccagg

SEQ ID NO: 557811 - DNA, 25 bp, Homo sapien
cactgcaacccccgtctaccaggtt

SEQ ID NO: 557812 - DNA, 25 bp, Homo sapien
tgcaacccccgtctaccaggttcaa

SEQ ID NO: 557813 - DNA, 25 bp, Homo sapien
cccccgtctaccaggttcaagcaat

SEQ ID NO: 557814 - DNA, 25 bp, Homo sapien
tctggcttctggttaagaccatcct

SEQ ID NO: 557815 - DNA, 25 bp, Homo sapien
gcttctggttaagaccatcctttac

SEQ ID NO: 557816 - DNA, 25 bp, Homo sapien
tttttctggcttctggttaagacca

SEQ ID NO: 557817 - DNA, 25 bp, Homo sapien
tttctggcttctggttaagaccatc

SEQ ID NO: 557818 - DNA, 25 bp, Homo sapien
cactagaagcgtgtggcgttggccc

SEQ ID NO: 557819 - DNA, 25 bp, Homo sapien
gcgttggccctgcttgaagtcgtca

SEQ ID NO: 557820 - DNA, 25 bp, Homo sapien
cagtgactggtgatccaggagaaga

SEQ ID NO: 557821 - DNA, 25 bp, Homo sapien
ccttgtcagtttgtttacatcaaaa

SEQ ID NO: 557822 - DNA, 25 bp, Homo sapien
cttacagacaccgtcatgaggtttt

SEQ ID NO: 557823 - DNA, 25 bp, Homo sapien
ccttacagacaccgtcatgaggttt

SEQ ID NO: 557824 - DNA, 25 bp, Homo sapien
acagacaccgtcatgaggtttttgg

SEQ ID NO: 557825 - DNA, 25 bp, Homo sapien
tacagacaccgtcatgaggtttttg

SEQ ID NO: 557826 - DNA, 25 bp, Homo sapien
gacattgggccaagtgtcaccatct

SEQ ID NO: 557827 - DNA, 25 bp, Homo sapien
ttgggccaagtgtcaccatctctcc

SEQ ID NO: 557828 - DNA, 25 bp, Homo sapien
agacattgggccaagtgtcaccatc

SEQ ID NO: 557829 - DNA, 25 bp, Homo sapien
cattgggccaagtgtcaccatctct

SEQ ID NO: 557830 - DNA, 25 bp, Homo sapien
gaacgctccacctaaatccaccagg

SEQ ID NO: 557831 - DNA, 25 bp, Homo sapien
catgggagaaccaggggacaactca

SEQ ID NO: 557832 - DNA, 25 bp, Homo sapien
ttctgaacgctccacctaaatccac

SEQ ID NO: 557833 - DNA, 25 bp, Homo sapien
taatccccttcatgctgaagaaaga

SEQ ID NO: 557834 - DNA, 25 bp, Homo sapien
atcgatttccacctgcacgatggca

SEQ ID NO: 557835 - DNA, 25 bp, Homo sapien
gccaggaccatgccaactgccatct

SEQ ID NO: 557836 - DNA, 25 bp, Homo sapien
ggccaggaccatgccaactgccatc

SEQ ID NO: 557837 - DNA, 25 bp, Homo sapien
cgatttccacctgcacgatggcagc

SEQ ID NO: 557838 - DNA, 25 bp, Homo sapien
caatgaccattcctatcatctgcgt

SEQ ID NO: 557839 - DNA, 25 bp, Homo sapien
atttctagaaactatggttcaggtg

SEQ ID NO: 557840 - DNA, 25 bp, Homo sapien
caggtgatactccagattacaatga

SEQ ID NO: 557841 - DNA, 25 bp, Homo sapien
tatcatctgcgtagagaagaaagcc

SEQ ID NO: 557842 - DNA, 25 bp, Homo sapien
tgaagccacattttgcaatgagagg

SEQ ID NO: 557843 - DNA, 25 bp, Homo sapien
gagggtacagcacagcatcgaagat

SEQ ID NO: 557844 - DNA, 25 bp, Homo sapien
tcgggaccatgatcacgatcaggat

SEQ ID NO: 557845 - DNA, 25 bp, Homo sapien
tcacgatcaggatggcgttcacggt

SEQ ID NO: 557846 - DNA, 25 bp, Homo sapien
tgatcgggctgaatttcaagagctc

SEQ ID NO: 557847 - DNA, 25 bp, Homo sapien
catctgatcgggctgaatttcaaga

SEQ ID NO: 557848 - DNA, 25 bp, Homo sapien
gatcgggctgaatttcaagagctcc

SEQ ID NO: 557849 - DNA, 25 bp, Homo sapien
tctgatcgggctgaatttcaagagc

SEQ ID NO: 557850 - DNA, 25 bp, Homo sapien
attttcccggacatagttgttgcct

SEQ ID NO: 557851 - DNA, 25 bp, Homo sapien
ttttcccggacatagttgttgcctg

SEQ ID NO: 557852 - DNA, 25 bp, Homo sapien
gattttcccggacatagttgttgcc

SEQ ID NO: 557853 - DNA, 25 bp, Homo sapien
tttcccggacatagttgttgcctgc

SEQ ID NO: 557854 - DNA, 25 bp, Homo sapien
tcaaacaaggcccagaacattggga

SEQ ID NO: 557855 - DNA, 25 bp, Homo sapien
aacatcaccctcgtaaccatcttaa

SEQ ID NO: 557856 - DNA, 25 bp, Homo sapien
aatatacaggaacatcaccctcgta

SEQ ID NO: 557857 - DNA, 25 bp, Homo sapien
cctcgtaaccatcttaatttgggag

SEQ ID NO: 557858 - DNA, 25 bp, Homo sapien
ttgggaaatgccttactccgatgcc

SEQ ID NO: 557859 - DNA, 25 bp, Homo sapien
gatgcctaaatctatttttgatggc

SEQ ID NO: 557860 - DNA, 25 bp, Homo sapien
cagtgctccctcttgggaaatgcct

SEQ ID NO: 557861 - DNA, 25 bp, Homo sapien
gccttactccgatgcctaaatctat

SEQ ID NO: 557862 - DNA, 25 bp, Homo sapien
gggaagcacatttcaattaaactac

SEQ ID NO: 557863 - DNA, 25 bp, Homo sapien
gaacttcttgtacatcccactgcca

SEQ ID NO: 557864 - DNA, 25 bp, Homo sapien
accgatgcacttggccactttaccc

SEQ ID NO: 557865 - DNA, 25 bp, Homo sapien
aacttcttgtacatcccactgccaa

SEQ ID NO: 557866 - DNA, 25 bp, Homo sapien
aaaggccagtgggtaacaagcttgt

SEQ ID NO: 557867 - DNA, 25 bp, Homo sapien
ggccagtgggtaacaagcttgttta

SEQ ID NO: 557868 - DNA, 25 bp, Homo sapien
cccaaaggccagtgggtaacaagct

SEQ ID NO: 557869 - DNA, 25 bp, Homo sapien
ccaaaggccagtgggtaacaagctt

SEQ ID NO: 557870 - DNA, 25 bp, Homo sapien
ggatggtcttgttagtttgtcacca

SEQ ID NO: 557871 - DNA, 25 bp, Homo sapien
gattcaaatgtggacaggatggtct

SEQ ID NO: 557872 - DNA, 25 bp, Homo sapien
ctctatggagcattagcaagcacaa

SEQ ID NO: 557873 - DNA, 25 bp, Homo sapien
tcttgttagtttgtcaccagtaaca

SEQ ID NO: 557874 - DNA, 25 bp, Homo sapien
tttatctgagcagttcttttggaaa

SEQ ID NO: 557875 - DNA, 25 bp, Homo sapien
ctgatagttactgacactgtcccat

SEQ ID NO: 557876 - DNA, 25 bp, Homo sapien
gatagttactgacactgtcccattc

SEQ ID NO: 557877 - DNA, 25 bp, Homo sapien
ctctgatagttactgacactgtccc

SEQ ID NO: 557878 - DNA, 25 bp, Homo sapien
tacaattttgcccagtaaactcttc

SEQ ID NO: 557879 - DNA, 25 bp, Homo sapien
atacaattttgcccagtaaactctt

SEQ ID NO: 557880 - DNA, 25 bp, Homo sapien
caatacaattttgcccagtaaactc

SEQ ID NO: 557881 - DNA, 25 bp, Homo sapien
aatacaattttgcccagtaaactct

SEQ ID NO: 557882 - DNA, 25 bp, Homo sapien
aacgaagaagacacggacttggcct

SEQ ID NO: 557883 - DNA, 25 bp, Homo sapien
gaagcacttactccagattccaacg

SEQ ID NO: 557884 - DNA, 25 bp, Homo sapien
aggctaaaatggcagctacggccac

SEQ ID NO: 557885 - DNA, 25 bp, Homo sapien
gatggcttagactctccagtggtca

SEQ ID NO: 557886 - DNA, 25 bp, Homo sapien
gaagttcctttcaggtatctcttac

SEQ ID NO: 557887 - DNA, 25 bp, Homo sapien
aacagaagttcctttcaggtatctc

SEQ ID NO: 557888 - DNA, 25 bp, Homo sapien
aaagaccaacagaagttcctttcag

SEQ ID NO: 557889 - DNA, 25 bp, Homo sapien
ccaacagaagttcctttcaggtatc

SEQ ID NO: 557890 - DNA, 25 bp, Homo sapien
tccagcattaatagccaagtaaaag

SEQ ID NO: 557891 - DNA, 25 bp, Homo sapien
aacttccagcattaatagccaagta

SEQ ID NO: 557892 - DNA, 25 bp, Homo sapien
cttccagcattaatagccaagtaaa

SEQ ID NO: 557893 - DNA, 25 bp, Homo sapien
aaacttccagcattaatagccaagt

SEQ ID NO: 557894 - DNA, 25 bp, Homo sapien
ccagtcccgagagctatcagggcca

SEQ ID NO: 557895 - DNA, 25 bp, Homo sapien
tgatctccaccaaacgcagacacac

SEQ ID NO: 557896 - DNA, 25 bp, Homo sapien
tggccctcttcaaactgatctccac

SEQ ID NO: 557897 - DNA, 25 bp, Homo sapien
ctatcagggccaggccgatcaagga

SEQ ID NO: 557898 - DNA, 25 bp, Homo sapien
cattaatggagcttactgaggtgac

SEQ ID NO: 557899 - DNA, 25 bp, Homo sapien
gactgcttgtccaattgtgtagaca

SEQ ID NO: 557900 - DNA, 25 bp, Homo sapien
catcatggttgtggtctgtgaggtc

SEQ ID NO: 557901 - DNA, 25 bp, Homo sapien
tagacaatggagagcgacacaatgg

SEQ ID NO: 557902 - DNA, 25 bp, Homo sapien
tttcccagccacgagtcggcgataa

SEQ ID NO: 557903 - DNA, 25 bp, Homo sapien
ccgagaattggcgtcaggtagcaca

SEQ ID NO: 557904 - DNA, 25 bp, Homo sapien
gcacagagccacaaacgtatggtag

SEQ ID NO: 557905 - DNA, 25 bp, Homo sapien
tcggcgataagagctccgagaattg

SEQ ID NO: 557906 - DNA, 25 bp, Homo sapien
aggaaaatctttcgcaaaactcatt

SEQ ID NO: 557907 - DNA, 25 bp, Homo sapien
aatctttcgcaaaactcattgacca

SEQ ID NO: 557908 - DNA, 25 bp, Homo sapien
ttcgcaaaactcattgaccacgatg

SEQ ID NO: 557909 - DNA, 25 bp, Homo sapien
caaaactcattgaccacgatgaaga

SEQ ID NO: 557910 - DNA, 25 bp, Homo sapien
gcagattcagtaacttaccggtgac

SEQ ID NO: 557911 - DNA, 25 bp, Homo sapien
caagcacaggattgaaatacacccc

SEQ ID NO: 557912 - DNA, 25 bp, Homo sapien
gtccatagccacaaaggagcaccag

SEQ ID NO: 557913 - DNA, 25 bp, Homo sapien
ggcagccaacgcagattcagtaact

SEQ ID NO: 557914 - DNA, 25 bp, Homo sapien
caagcgtgtgttttgcaagctcggt

SEQ ID NO: 557915 - DNA, 25 bp, Homo sapien
ccagcctgaaggtgcaaagcgtcat

SEQ ID NO: 557916 - DNA, 25 bp, Homo sapien
gtggacttgggctgtctttcacacc

SEQ ID NO: 557917 - DNA, 25 bp, Homo sapien
aagcgccagtgtccggcgaatagga

SEQ ID NO: 557918 - DNA, 25 bp, Homo sapien
agccaagggaagactgtaccaggaa

SEQ ID NO: 557919 - DNA, 25 bp, Homo sapien
tggagcatcgccttacctggtaagc

SEQ ID NO: 557920 - DNA, 25 bp, Homo sapien
gaaaagtgggacactcctgccttaa

SEQ ID NO: 557921 - DNA, 25 bp, Homo sapien
gctgaagcagagtggagcatcgcct

SEQ ID NO: 557922 - DNA, 25 bp, Homo sapien
ggggtcctcctgctgggaccgccat

SEQ ID NO: 557923 - DNA, 25 bp, Homo sapien
aggggtcctcctgctgggaccgcca

SEQ ID NO: 557924 - DNA, 25 bp, Homo sapien
caggggtcctcctgctgggaccgcc

SEQ ID NO: 557925 - DNA, 25 bp, Homo sapien
tcagttgcaaacagagaggaccagt

SEQ ID NO: 557926 - DNA, 25 bp, Homo sapien
acgcatcaattcatttggaaaggag

SEQ ID NO: 557927 - DNA, 25 bp, Homo sapien
gaggaccagttgcagactagaacgc

SEQ ID NO: 557928 - DNA, 25 bp, Homo sapien
tgcctctaacagctctcgggattgg

SEQ ID NO: 557929 - DNA, 25 bp, Homo sapien
tcgccccgcttcccgccgccgcgta

SEQ ID NO: 557930 - DNA, 25 bp, Homo sapien
agctccgagtctttagcccggccgg

SEQ ID NO: 557931 - DNA, 25 bp, Homo sapien
cgcgtagctccgagtctttagcccg

SEQ ID NO: 557932 - DNA, 25 bp, Homo sapien
cgtagctccgagtctttagcccggc

SEQ ID NO: 557933 - DNA, 25 bp, Homo sapien
gccccgcgtagctccgagtctttag

SEQ ID NO: 557934 - DNA, 25 bp, Homo sapien
agggctcctgcgacctgccggcggg

SEQ ID NO: 557935 - DNA, 25 bp, Homo sapien
acctgccggcgggacgtgctcctgg

SEQ ID NO: 557936 - DNA, 25 bp, Homo sapien
ctcctgcgacctgccggcgggacgt

SEQ ID NO: 557937 - DNA, 25 bp, Homo sapien
ccggcgggacgtgctcctggcaggt

SEQ ID NO: 557938 - DNA, 25 bp, Homo sapien
agttgctaccctgcgagatatcccg

SEQ ID NO: 557939 - DNA, 25 bp, Homo sapien
ttgctaccctgcgagatatcccggg

SEQ ID NO: 557940 - DNA, 25 bp, Homo sapien
cctgcgagatatcccgggcgtagaa

SEQ ID NO: 557941 - DNA, 25 bp, Homo sapien
ctaccctgcgagatatcccgggcgt

SEQ ID NO: 557942 - DNA, 25 bp, Homo sapien
gagtggctcaccaccacagttaggg

SEQ ID NO: 557943 - DNA, 25 bp, Homo sapien
taggaacagtgtgctactggaccgc

SEQ ID NO: 557944 - DNA, 25 bp, Homo sapien
caacataggatgcaagagtggctcg

SEQ ID NO: 557945 - DNA, 25 bp, Homo sapien
gagtggctcgccaagtcagttagga

SEQ ID NO: 557946 - DNA, 25 bp, Homo sapien
gattaaacaagtatctgtgcactga

SEQ ID NO: 557947 - DNA, 25 bp, Homo sapien
tccaggaggccgtcagatgatgtct

SEQ ID NO: 557948 - DNA, 25 bp, Homo sapien
gatctcacatgtcccacgtttctca

SEQ ID NO: 557949 - DNA, 25 bp, Homo sapien
tcagccccgtgataggaactgtgag

SEQ ID NO: 557950 - DNA, 25 bp, Homo sapien
gcttgtcattgaagacttctgttcc

SEQ ID NO: 557951 - DNA, 25 bp, Homo sapien
tccattttgcttgtcattgaagact

SEQ ID NO: 557952 - DNA, 25 bp, Homo sapien
tgaagacttctgttccaacacttac

SEQ ID NO: 557953 - DNA, 25 bp, Homo sapien
ccagtgaatcccctgcattccacag

SEQ ID NO: 557954 - DNA, 25 bp, Homo sapien
tacatttctcgtgcgtagcattttg

SEQ ID NO: 557955 - DNA, 25 bp, Homo sapien
tctcgtgcgtagcattttggcagcc

SEQ ID NO: 557956 - DNA, 25 bp, Homo sapien
aggtttgctacatttctcgtgcgta

SEQ ID NO: 557957 - DNA, 25 bp, Homo sapien
gcattttggcagcctgatccaagac

SEQ ID NO: 557958 - DNA, 25 bp, Homo sapien
ggtcattacgtagacaatggacatc

SEQ ID NO: 557959 - DNA, 25 bp, Homo sapien
catcgtggtcattacatagataatg

SEQ ID NO: 557960 - DNA, 25 bp, Homo sapien
catagacaattgacatcttcatggt

SEQ ID NO: 557961 - DNA, 25 bp, Homo sapien
tgtagtcaacacatagacaatggac

SEQ ID NO: 557962 - DNA, 25 bp, Homo sapien
tcagcaatgtctttttaatacagat

SEQ ID NO: 557963 - DNA, 25 bp, Homo sapien
gaatgtttaattacagcagggcagt

SEQ ID NO: 557964 - DNA, 25 bp, Homo sapien
aatgtttaattacagcagggcagtg

SEQ ID NO: 557965 - DNA, 25 bp, Homo sapien
agaatgtttaattacagcagggcag

SEQ ID NO: 557966 - DNA, 25 bp, Homo sapien
atgtttaattacagcagggcagtga

SEQ ID NO: 557967 - DNA, 25 bp, Homo sapien
cactaaatctcctggttcactggta

SEQ ID NO: 557968 - DNA, 25 bp, Homo sapien
cagctcagcctcgaggcaaaaggtc

SEQ ID NO: 557969 - DNA, 25 bp, Homo sapien
taagtccagctcaagagtgtctacc

SEQ ID NO: 557970 - DNA, 25 bp, Homo sapien
tattcaacctgaatgtgccacagga

SEQ ID NO: 557971 - DNA, 25 bp, Homo sapien
tcacacgaccgaagacgagctggtc

SEQ ID NO: 557972 - DNA, 25 bp, Homo sapien
tgtgaagggaattcggtaagacgct

SEQ ID NO: 557973 - DNA, 25 bp, Homo sapien
ggtcatcccgtgaaccattgtgctt

SEQ ID NO: 557974 - DNA, 25 bp, Homo sapien
gagtcccactgatggcgttgaagat

SEQ ID NO: 557975 - DNA, 25 bp, Homo sapien
ttgactgggacacaacctagccttg

SEQ ID NO: 557976 - DNA, 25 bp, Homo sapien
tgagtgatgtgcagccggaaagcct

SEQ ID NO: 557977 - DNA, 25 bp, Homo sapien
tcccctggaaacatcgaaagcaagt

SEQ ID NO: 557978 - DNA, 25 bp, Homo sapien
tactgagggcaacacaaggttacca

SEQ ID NO: 557979 - DNA, 25 bp, Homo sapien
ttctctagtgcccaatgtcggcacc

SEQ ID NO: 557980 - DNA, 25 bp, Homo sapien
tactttcatcttctctagtgcccaa

SEQ ID NO: 557981 - DNA, 25 bp, Homo sapien
atcttctctagtgcccaatgtcggc

SEQ ID NO: 557982 - DNA, 25 bp, Homo sapien
tcatcttctctagtgcccaatgtcg

SEQ ID NO: 557983 - DNA, 25 bp, Homo sapien
agctttttctaagtcagattatcag

SEQ ID NO: 557984 - DNA, 25 bp, Homo sapien
aagtaatagctttttctaagtcaga

SEQ ID NO: 557985 - DNA, 25 bp, Homo sapien
cattatgccaatgtctgtagttgct

SEQ ID NO: 557986 - DNA, 25 bp, Homo sapien
ttcctctgcccatgtactgtcatta

SEQ ID NO: 557987 - DNA, 25 bp, Homo sapien
gaacgtgttagcatggaggagaaaa

SEQ ID NO: 557988 - DNA, 25 bp, Homo sapien
tgaacgtgttagcatggaggagaaa

SEQ ID NO: 557989 - DNA, 25 bp, Homo sapien
aacgtgttagcatggaggagaaaaa

SEQ ID NO: 557990 - DNA, 25 bp, Homo sapien
ctgaacgtgttagcatggaggagaa

SEQ ID NO: 557991 - DNA, 25 bp, Homo sapien
aggatcactccacaaacggccctgg

SEQ ID NO: 557992 - DNA, 25 bp, Homo sapien
aactgtcaggggataggatcactcc

SEQ ID NO: 557993 - DNA, 25 bp, Homo sapien
gggataggatcactccacaaacggc

SEQ ID NO: 557994 - DNA, 25 bp, Homo sapien
aaatgtactaactaaactgtcaggg

SEQ ID NO: 557995 - DNA, 25 bp, Homo sapien
gttagctgttcccaaatgacctggg

SEQ ID NO: 557996 - DNA, 25 bp, Homo sapien
ccgtagataacagcatatgggcaat

SEQ ID NO: 557997 - DNA, 25 bp, Homo sapien
gataattccttaaaccaggttggca

SEQ ID NO: 557998 - DNA, 25 bp, Homo sapien
gcttaggaaacatggccacctctta

SEQ ID NO: 557999 - DNA, 25 bp, Homo sapien
cctaaccaagaactccaagttgttg

SEQ ID NO: 558000 - DNA, 25 bp, Homo sapien
agttgttggagccagtgcggccctc

SEQ ID NO: 558001 - DNA, 25 bp, Homo sapien
caagaactccaagttgttggagcca

SEQ ID NO: 558002 - DNA, 25 bp, Homo sapien
aactccaagttgttggagccagtgc

SEQ ID NO: 558003 - DNA, 25 bp, Homo sapien
ttcttcctgatactcgagctggtct

SEQ ID NO: 558004 - DNA, 25 bp, Homo sapien
gctaaggcttgaccgcaagcttcca

SEQ ID NO: 558005 - DNA, 25 bp, Homo sapien
tgatttcagaaagctccttcgccat

SEQ ID NO: 558006 - DNA, 25 bp, Homo sapien
tcagacgttcgtttaccgctaaggc

SEQ ID NO: 558007 - DNA, 25 bp, Homo sapien
catctaagaaagctcgcgcatatgc

SEQ ID NO: 558008 - DNA, 25 bp, Homo sapien
tcgcgcatatgctagtgggccagca

SEQ ID NO: 558009 - DNA, 25 bp, Homo sapien
tcactttattgtcaggatatcgctt

SEQ ID NO: 558010 - DNA, 25 bp, Homo sapien
aaaacttccttaagcagcttcactt

SEQ ID NO: 558011 - DNA, 25 bp, Homo sapien
gatgcgcttcttcacataagggaag

SEQ ID NO: 558012 - DNA, 25 bp, Homo sapien
tcagtgtggtgctggtacatgacag

SEQ ID NO: 558013 - DNA, 25 bp, Homo sapien
tcttactcatctcgtcaatggccac

SEQ ID NO: 558014 - DNA, 25 bp, Homo sapien
caatggccacctcgatggggttcag

SEQ ID NO: 558015 - DNA, 25 bp, Homo sapien
tatcagtgaaaggtgaagggttccc

SEQ ID NO: 558016 - DNA, 25 bp, Homo sapien
gaaacacagagttccgatgggccac

SEQ ID NO: 558017 - DNA, 25 bp, Homo sapien
catatgtcacgtacttataggcctg

SEQ ID NO: 558018 - DNA, 25 bp, Homo sapien
agtggtcctggtctctagttagcaa

SEQ ID NO: 558019 - DNA, 25 bp, Homo sapien
cccgcagatacagagcattgctcat

SEQ ID NO: 558020 - DNA, 25 bp, Homo sapien
tcccgcagatacagagcattgctca

SEQ ID NO: 558021 - DNA, 25 bp, Homo sapien
ctctctctgaagcgcactctctgtc

SEQ ID NO: 558022 - DNA, 25 bp, Homo sapien
ctctctgaagcgcactctctgtccc

SEQ ID NO: 558023 - DNA, 25 bp, Homo sapien
tgagctcgaaagacccttccagtcc

SEQ ID NO: 558024 - DNA, 25 bp, Homo sapien
gctctttggcgaggtgtccgggctc

SEQ ID NO: 558025 - DNA, 25 bp, Homo sapien
gggtggctaactgagctcgaaagac

SEQ ID NO: 558026 - DNA, 25 bp, Homo sapien
tgaatccctctggacagctctttgg

SEQ ID NO: 558027 - DNA, 25 bp, Homo sapien
gacgtgagtcacctggatgtatgca

SEQ ID NO: 558028 - DNA, 25 bp, Homo sapien
cccggtctgcgtaaatggcatctca

SEQ ID NO: 558029 - DNA, 25 bp, Homo sapien
atctcaaacatgaagcggcggatgt

SEQ ID NO: 558030 - DNA, 25 bp, Homo sapien
cggcggatgttgtgggatctctcaa

SEQ ID NO: 558031 - DNA, 25 bp, Homo sapien
cagaaccaaatttatccgagtacag

SEQ ID NO: 558032 - DNA, 25 bp, Homo sapien
cagaatcctgtatcattttgacatt

SEQ ID NO: 558033 - DNA, 25 bp, Homo sapien
ctctgagaaatttccgacagcggtg

SEQ ID NO: 558034 - DNA, 25 bp, Homo sapien
gagtacagtttaaggagtctctgag

SEQ ID NO: 558035 - DNA, 25 bp, Homo sapien
tccacatctgtttcactgtctgtaa

SEQ ID NO: 558036 - DNA, 25 bp, Homo sapien
ctgtttcactgtctgtaaactggta

SEQ ID NO: 558037 - DNA, 25 bp, Homo sapien
ctccacatctgtttcactgtctgta

SEQ ID NO: 558038 - DNA, 25 bp, Homo sapien
tttcactgtctgtaaactggtattg

SEQ ID NO: 558039 - DNA, 25 bp, Homo sapien
gacttaggacagtctgcagaatgga

SEQ ID NO: 558040 - DNA, 25 bp, Homo sapien
ttttaaaggacttaggacagtctgc

SEQ ID NO: 558041 - DNA, 25 bp, Homo sapien
tctgcagaatggacaggaggctcac

SEQ ID NO: 558042 - DNA, 25 bp, Homo sapien
gtctgcagaatggacaggaggctca

SEQ ID NO: 558043 - DNA, 25 bp, Homo sapien
cgagtgcatgacctcggtcactttg

SEQ ID NO: 558044 - DNA, 25 bp, Homo sapien
tcactttgctgtaggcccggtgcag

SEQ ID NO: 558045 - DNA, 25 bp, Homo sapien
ctgcccgaagaaggctacccggaag

SEQ ID NO: 558046 - DNA, 25 bp, Homo sapien
gcgtgtcatacagatgggccagcct

SEQ ID NO: 558047 - DNA, 25 bp, Homo sapien
tgtcggcgatgagctcgtagcgctc

SEQ ID NO: 558048 - DNA, 25 bp, Homo sapien
cctccgcttctcataaatggggatg

SEQ ID NO: 558049 - DNA, 25 bp, Homo sapien
aagtttgtagatgtcggcgatgagc

SEQ ID NO: 558050 - DNA, 25 bp, Homo sapien
tctgcgcactgctcaaggagctcca

SEQ ID NO: 558051 - DNA, 25 bp, Homo sapien
caactgatcataagtgtgtgggtcc

SEQ ID NO: 558052 - DNA, 25 bp, Homo sapien
ctctattggattgcctttgaacctc

SEQ ID NO: 558053 - DNA, 25 bp, Homo sapien
tgttccattgatatatgtgcccatc

SEQ ID NO: 558054 - DNA, 25 bp, Homo sapien
aataccattcgatgagagactatgc

SEQ ID NO: 558055 - DNA, 25 bp, Homo sapien
gtcagcaacatcaaacaaaaggtac

SEQ ID NO: 558056 - DNA, 25 bp, Homo sapien
acaaaaggtactgagtactccacag

SEQ ID NO: 558057 - DNA, 25 bp, Homo sapien
aaaattacatgacacggagaaaatg

SEQ ID NO: 558058 - DNA, 25 bp, Homo sapien
acagtctagggatttgacaactcac

SEQ ID NO: 558059 - DNA, 25 bp, Homo sapien
atcccctagagctattgtggactga

SEQ ID NO: 558060 - DNA, 25 bp, Homo sapien
tcccctagagctattgtggactgaa

SEQ ID NO: 558061 - DNA, 25 bp, Homo sapien
ccctagagctattgtggactgaatc

SEQ ID NO: 558062 - DNA, 25 bp, Homo sapien
cccctagagctattgtggactgaat

SEQ ID NO: 558063 - DNA, 25 bp, Homo sapien
taatccaatcaagatgagagacaag

SEQ ID NO: 558064 - DNA, 25 bp, Homo sapien
aatccaatcaagatgagagacaaga

SEQ ID NO: 558065 - DNA, 25 bp, Homo sapien
ttaatccaatcaagatgagagacaa

SEQ ID NO: 558066 - DNA, 25 bp, Homo sapien
tctcttgaagtgcaagggctacaac

SEQ ID NO: 558067 - DNA, 25 bp, Homo sapien
tatgccccattaagtcaaaagtaaa

SEQ ID NO: 558068 - DNA, 25 bp, Homo sapien
tattaacatccgtctagtaaacaga

SEQ ID NO: 558069 - DNA, 25 bp, Homo sapien
aatggtatgactagggtgattacac

SEQ ID NO: 558070 - DNA, 25 bp, Homo sapien
cctccagcatgatattgaatagtca

SEQ ID NO: 558071 - DNA, 25 bp, Homo sapien
gccagctatgcactcccagaataaa

SEQ ID NO: 558072 - DNA, 25 bp, Homo sapien
gcaggtattatggtcttgtttccaa

SEQ ID NO: 558073 - DNA, 25 bp, Homo sapien
aaccctacgtggtcatgatgcattt

SEQ ID NO: 558074 - DNA, 25 bp, Homo sapien
tggaggcctcctcgtcgatgtttgg

SEQ ID NO: 558075 - DNA, 25 bp, Homo sapien
cgatgtttggggtaatgaccctgaa

SEQ ID NO: 558076 - DNA, 25 bp, Homo sapien
accctgaaggcggtgcatccttgtc

SEQ ID NO: 558077 - DNA, 25 bp, Homo sapien
tggacatcctgcatccccacgtctt

SEQ ID NO: 558078 - DNA, 25 bp, Homo sapien
aggcaggcgctatggctgtggggga

SEQ ID NO: 558079 - DNA, 25 bp, Homo sapien
ggagaaggggcggctcccactggac

SEQ ID NO: 558080 - DNA, 25 bp, Homo sapien
gcaggcgctatggctgtgggggaga

SEQ ID NO: 558081 - DNA, 25 bp, Homo sapien
agaaggggcggctcccactggactg

SEQ ID NO: 558082 - DNA, 25 bp, Homo sapien
catgaggaaatgcatcacctgataa

SEQ ID NO: 558083 - DNA, 25 bp, Homo sapien
aaacatgaggaaatgcatcacctga

SEQ ID NO: 558084 - DNA, 25 bp, Homo sapien
atgaggaaatgcatcacctgataaa

SEQ ID NO: 558085 - DNA, 25 bp, Homo sapien
ggaaatgcatcacctgataaaaggt

SEQ ID NO: 558086 - DNA, 25 bp, Homo sapien
tgagatattctgccactagggctgt

SEQ ID NO: 558087 - DNA, 25 bp, Homo sapien
gagatattctgccactagggctgtt

SEQ ID NO: 558088 - DNA, 25 bp, Homo sapien
gatattctgccactagggctgttac

SEQ ID NO: 558089 - DNA, 25 bp, Homo sapien
attctgccactagggctgttacgtg

SEQ ID NO: 558090 - DNA, 25 bp, Homo sapien
aacaggctctgttaggtgtaattag

SEQ ID NO: 558091 - DNA, 25 bp, Homo sapien
cagttctccccaaggacattcggag

SEQ ID NO: 558092 - DNA, 25 bp, Homo sapien
gggacaggcatggaaccagttctcc

SEQ ID NO: 558093 - DNA, 25 bp, Homo sapien
aggatgctatgcgaccacggaggca

SEQ ID NO: 558094 - DNA, 25 bp, Homo sapien
ctgagagatcgccatttttgacatg

SEQ ID NO: 558095 - DNA, 25 bp, Homo sapien
tcttcctgagctcgggcgtgctggc

SEQ ID NO: 558096 - DNA, 25 bp, Homo sapien
tgctggcataggatttggccaggct

SEQ ID NO: 558097 - DNA, 25 bp, Homo sapien
tggccatgctgtcgagccacgtctt

SEQ ID NO: 558098 - DNA, 25 bp, Homo sapien
ttagcaccgtgcgtatccttttggt

SEQ ID NO: 558099 - DNA, 25 bp, Homo sapien
caccgtgcgtatccttttggttaag

SEQ ID NO: 558100 - DNA, 25 bp, Homo sapien
gccattagcaccgtgcgtatccttt

SEQ ID NO: 558101 - DNA, 25 bp, Homo sapien
gcggtggccattagcaccgtgcgta

SEQ ID NO: 558102 - DNA, 25 bp, Homo sapien
ccaatgccaacaacgtctgctatca

SEQ ID NO: 558103 - DNA, 25 bp, Homo sapien
gccaacaacgtctgctatcagctgg

SEQ ID NO: 558104 - DNA, 25 bp, Homo sapien
actgctggaatctggttcccccaat

SEQ ID NO: 558105 - DNA, 25 bp, Homo sapien
aatgccaacaacgtctgctatcagc

SEQ ID NO: 558106 - DNA, 25 bp, Homo sapien
ggagttacagcacttgagaatctcg

SEQ ID NO: 558107 - DNA, 25 bp, Homo sapien
taatcaaagttgttcctcatcagga

SEQ ID NO: 558108 - DNA, 25 bp, Homo sapien
gaatctcgtaacacagagccgcaca

SEQ ID NO: 558109 - DNA, 25 bp, Homo sapien
cgctctcccttcatagaatgttgag

SEQ ID NO: 558110 - DNA, 25 bp, Homo sapien
cacaggtagacatcaaaaacttttt

SEQ ID NO: 558111 - DNA, 25 bp, Homo sapien
tttttaaagccgtttcagactgatg

SEQ ID NO: 558112 - DNA, 25 bp, Homo sapien
ataaattaaggaccttaaggcagtg

SEQ ID NO: 558113 - DNA, 25 bp, Homo sapien
aggattatgtccatggtcggccagg

SEQ ID NO: 558114 - DNA, 25 bp, Homo sapien
cacacattgacggctttgttagaca

SEQ ID NO: 558115 - DNA, 25 bp, Homo sapien
cacattgacggctttgttagacata

SEQ ID NO: 558116 - DNA, 25 bp, Homo sapien
acacattgacggctttgttagacat

SEQ ID NO: 558117 - DNA, 25 bp, Homo sapien
acattgacggctttgttagacatac

SEQ ID NO: 558118 - DNA, 25 bp, Homo sapien
tgaatgtgaaaggtaaaactagaac

SEQ ID NO: 558119 - DNA, 25 bp, Homo sapien
aactagaaccacgaacagcaaattg

SEQ ID NO: 558120 - DNA, 25 bp, Homo sapien
gaaccacgaacagcaaattgataca

SEQ ID NO: 558121 - DNA, 25 bp, Homo sapien
ggtaaaactagaaccacgaacagca

SEQ ID NO: 558122 - DNA, 25 bp, Homo sapien
acctcagtagcaatgttggcttcaa

SEQ ID NO: 558123 - DNA, 25 bp, Homo sapien
gttggcttcaagtaatgactggtgc

SEQ ID NO: 558124 - DNA, 25 bp, Homo sapien
taaatagagaaagcgtgtccagagc

SEQ ID NO: 558125 - DNA, 25 bp, Homo sapien
agaacatctgcgtccgagtggccat

SEQ ID NO: 558126 - DNA, 25 bp, Homo sapien
ctgcatgaattacaacacaagatta

SEQ ID NO: 558127 - DNA, 25 bp, Homo sapien
ttaactactcctggctgaaagcctg

SEQ ID NO: 558128 - DNA, 25 bp, Homo sapien
tcttggtctagatcaccaacaggtg

SEQ ID NO: 558129 - DNA, 25 bp, Homo sapien
catcggtacgcttgcctgagtcata

SEQ ID NO: 558130 - DNA, 25 bp, Homo sapien
tcagattcatacagacatcggtacg

SEQ ID NO: 558131 - DNA, 25 bp, Homo sapien
atgctgacacatcggcgaacctcct

SEQ ID NO: 558132 - DNA, 25 bp, Homo sapien
aataatgctgacacatcggcgaacc

SEQ ID NO: 558133 - DNA, 25 bp, Homo sapien
tacctgcatagttcaaatgaataat

SEQ ID NO: 558134 - DNA, 25 bp, Homo sapien
gttacctgcatagttcaaatgaata

SEQ ID NO: 558135 - DNA, 25 bp, Homo sapien
ttttgagtatatgtttaaagcatcc

SEQ ID NO: 558136 - DNA, 25 bp, Homo sapien
ggaatttaatgatcacctatattca

SEQ ID NO: 558137 - DNA, 25 bp, Homo sapien
gtacagtaaaggaatttaatgatca

SEQ ID NO: 558138 - DNA, 25 bp, Homo sapien
cagtaaaggaatttaatgatcacct

SEQ ID NO: 558139 - DNA, 25 bp, Homo sapien
tatggctaccaactccgtgtggcag

SEQ ID NO: 558140 - DNA, 25 bp, Homo sapien
gatctatgtcatattggttggccca

SEQ ID NO: 558141 - DNA, 25 bp, Homo sapien
tatctgagcaaaggaggtccagcag

SEQ ID NO: 558142 - DNA, 25 bp, Homo sapien
caggcgaggactagaagaatcagct

SEQ ID NO: 558143 - DNA, 25 bp, Homo sapien
tagaaacagcacacaatgccttgtc

SEQ ID NO: 558144 - DNA, 25 bp, Homo sapien
ggcttgcaagtgaagcaacctcata

SEQ ID NO: 558145 - DNA, 25 bp, Homo sapien
aacaaaaagggtcttggcttgcaag

SEQ ID NO: 558146 - DNA, 25 bp, Homo sapien
taacacttaaactgcacccggacaa

SEQ ID NO: 558147 - DNA, 25 bp, Homo sapien
ccaagcacacttgatatctttctca

SEQ ID NO: 558148 - DNA, 25 bp, Homo sapien
tctacagaaattccaagcacacttg

SEQ ID NO: 558149 - DNA, 25 bp, Homo sapien
cattgtctacagaaattccaagcac

SEQ ID NO: 558150 - DNA, 25 bp, Homo sapien
aagcacacttgatatctttctcaca

SEQ ID NO: 558151 - DNA, 25 bp, Homo sapien
ggtgaaagaaatccatcccgaatgt

SEQ ID NO: 558152 - DNA, 25 bp, Homo sapien
cacagtagtgcaaggattaacatcc

SEQ ID NO: 558153 - DNA, 25 bp, Homo sapien
gaagggaactgtgccatgagctctt

SEQ ID NO: 558154 - DNA, 25 bp, Homo sapien
tcttgagaacggctggctatggacc

SEQ ID NO: 558155 - DNA, 25 bp, Homo sapien
aaaagtgagagagttatccaggctg

SEQ ID NO: 558156 - DNA, 25 bp, Homo sapien
tgcccagctgctgcaatctggcatg

SEQ ID NO: 558157 - DNA, 25 bp, Homo sapien
tgtggttaaaagtgagagagttatc

SEQ ID NO: 558158 - DNA, 25 bp, Homo sapien
cagctgctgcaatctggcatgcatc

SEQ ID NO: 558159 - DNA, 25 bp, Homo sapien
gatcatgaactatgggtcccaaccc

SEQ ID NO: 558160 - DNA, 25 bp, Homo sapien
aatgtctgagactttcgatcatgaa

SEQ ID NO: 558161 - DNA, 25 bp, Homo sapien
gagactttcgatcatgaactatggg

SEQ ID NO: 558162 - DNA, 25 bp, Homo sapien
ctttcgatcatgaactatgggtccc

SEQ ID NO: 558163 - DNA, 25 bp, Homo sapien
gacgtgttacactgcagcgagacgg

SEQ ID NO: 558164 - DNA, 25 bp, Homo sapien
aaatgcattggaagacacagagaac

SEQ ID NO: 558165 - DNA, 25 bp, Homo sapien
gcaaagcacctgatgatccagaagc

SEQ ID NO: 558166 - DNA, 25 bp, Homo sapien
tactaatggttagtgttctgacgac

SEQ ID NO: 558167 - DNA, 25 bp, Homo sapien
gagaagagccacacactttgttaaa

SEQ ID NO: 558168 - DNA, 25 bp, Homo sapien
ggaaggagaagagccacacactttg

SEQ ID NO: 558169 - DNA, 25 bp, Homo sapien
aaggagaagagccacacactttgtt

SEQ ID NO: 558170 - DNA, 25 bp, Homo sapien
ggagaagagccacacactttgttaa

SEQ ID NO: 558171 - DNA, 25 bp, Homo sapien
gagtgacgctactcaccagggagtt

SEQ ID NO: 558172 - DNA, 25 bp, Homo sapien
tctgcggtggcaatccaagggcctg

SEQ ID NO: 558173 - DNA, 25 bp, Homo sapien
acttcgccggtaggaatgcagacca

SEQ ID NO: 558174 - DNA, 25 bp, Homo sapien
gaagacgttgctggtataaggacac

SEQ ID NO: 558175 - DNA, 25 bp, Homo sapien
tatgtatcgcttccccatgtactgg

SEQ ID NO: 558176 - DNA, 25 bp, Homo sapien
tcgcttccccatgtactggaactgg

SEQ ID NO: 558177 - DNA, 25 bp, Homo sapien
ctggctatgtatcgcttccccatgt

SEQ ID NO: 558178 - DNA, 25 bp, Homo sapien
ttccccatgtactggaactggtgca

SEQ ID NO: 558179 - DNA, 25 bp, Homo sapien
agaggcccacgaccgacaggatcgt

SEQ ID NO: 558180 - DNA, 25 bp, Homo sapien
agcgcagaggcccacgaccgacagg

SEQ ID NO: 558181 - DNA, 25 bp, Homo sapien
aagccccatcctgtgtagctgtcag

SEQ ID NO: 558182 - DNA, 25 bp, Homo sapien
gtgtagctgtcagtgtggtggtggc

SEQ ID NO: 558183 - DNA, 25 bp, Homo sapien
atgctgctgggatgtaatgggatac

SEQ ID NO: 558184 - DNA, 25 bp, Homo sapien
tgttttagggccaagaccatgagaa

SEQ ID NO: 558185 - DNA, 25 bp, Homo sapien
ttacctctcatgtaaaacaggcacg

SEQ ID NO: 558186 - DNA, 25 bp, Homo sapien
gaaaagcagtatctacccaattcag

SEQ ID NO: 558187 - DNA, 25 bp, Homo sapien
tcagatattgtaaaaaaatccataa

SEQ ID NO: 558188 - DNA, 25 bp, Homo sapien
tattgtaaaaaaatccataagttca

SEQ ID NO: 558189 - DNA, 25 bp, Homo sapien
ttgtaaaaaaatccataagttcaga

SEQ ID NO: 558190 - DNA, 25 bp, Homo sapien
agatattgtaaaaaaatccataagt

SEQ ID NO: 558191 - DNA, 25 bp, Homo sapien
gttgaagccttgttccaatatgtaa

SEQ ID NO: 558192 - DNA, 25 bp, Homo sapien
tgttgaagccttgttccaatatgta

SEQ ID NO: 558193 - DNA, 25 bp, Homo sapien
tgaagccttgttccaatatgtaaac

SEQ ID NO: 558194 - DNA, 25 bp, Homo sapien
aagccttgttccaatatgtaaacaa

SEQ ID NO: 558195 - DNA, 25 bp, Homo sapien
tgtaggcctctaaaccctggagtgt

SEQ ID NO: 558196 - DNA, 25 bp, Homo sapien
taaacctctgtgtgaacccttaaca

SEQ ID NO: 558197 - DNA, 25 bp, Homo sapien
taagttctctgaagcgaaacagctg

SEQ ID NO: 558198 - DNA, 25 bp, Homo sapien
tggacatataacctaaagccgggct

SEQ ID NO: 558199 - DNA, 25 bp, Homo sapien
tccagaggaacagactctggctact

SEQ ID NO: 558200 - DNA, 25 bp, Homo sapien
ctggctacttgaggctggccatcag

SEQ ID NO: 558201 - DNA, 25 bp, Homo sapien
gccatcagggtatggtgagcccccg

SEQ ID NO: 558202 - DNA, 25 bp, Homo sapien
ggtgggaccaccctgcagacccctg

SEQ ID NO: 558203 - DNA, 25 bp, Homo sapien
atgacgctgccattcactgctctgg

SEQ ID NO: 558204 - DNA, 25 bp, Homo sapien
agacgaagcggccagcggcatgggc

SEQ ID NO: 558205 - DNA, 25 bp, Homo sapien
agcggcatgggcaatgacgctgcca

SEQ ID NO: 558206 - DNA, 25 bp, Homo sapien
gacgctgccattcactgctctgggc

SEQ ID NO: 558207 - DNA, 25 bp, Homo sapien
cgagcaaaacagaaatctccatttt

SEQ ID NO: 558208 - DNA, 25 bp, Homo sapien
agtgctgaaacgagcaaaacagaaa

SEQ ID NO: 558209 - DNA, 25 bp, Homo sapien
tgctgaaacgagcaaaacagaaatc

SEQ ID NO: 558210 - DNA, 25 bp, Homo sapien
aacgagcaaaacagaaatctccatt

SEQ ID NO: 558211 - DNA, 25 bp, Homo sapien
gctctttaagatgtagaggaaacac

SEQ ID NO: 558212 - DNA, 25 bp, Homo sapien
tatcacagcgaaccacggaatttcc

SEQ ID NO: 558213 - DNA, 25 bp, Homo sapien
cggaatttcccaatgtgctactttg

SEQ ID NO: 558214 - DNA, 25 bp, Homo sapien
taggctcttaatctcagactggtca

SEQ ID NO: 558215 - DNA, 25 bp, Homo sapien
ttagtggcaaaactggtatggatgc

SEQ ID NO: 558216 - DNA, 25 bp, Homo sapien
tagtggcaaaactggtatggatgca

SEQ ID NO: 558217 - DNA, 25 bp, Homo sapien
agtggcaaaactggtatggatgcac

SEQ ID NO: 558218 - DNA, 25 bp, Homo sapien
ttgatcagagccactggagaactta

SEQ ID NO: 558219 - DNA, 25 bp, Homo sapien
tcagagccactggagaacttagtac

SEQ ID NO: 558220 - DNA, 25 bp, Homo sapien
gatcagagccactggagaacttagt

SEQ ID NO: 558221 - DNA, 25 bp, Homo sapien
tgatcagagccactggagaacttag

SEQ ID NO: 558222 - DNA, 25 bp, Homo sapien
ctctggcaaaggtggaatcattaga

SEQ ID NO: 558223 - DNA, 25 bp, Homo sapien
caagcagagtgccttcggagcagct

SEQ ID NO: 558224 - DNA, 25 bp, Homo sapien
cccggtttttcctggctgactggca

SEQ ID NO: 558225 - DNA, 25 bp, Homo sapien
cttcagcactgcgtatgacacaagc

SEQ ID NO: 558226 - DNA, 25 bp, Homo sapien
aatctgtgcttatgagagatcctct

SEQ ID NO: 558227 - DNA, 25 bp, Homo sapien
ggctgttacccgaatctgtgcttat

SEQ ID NO: 558228 - DNA, 25 bp, Homo sapien
gatcctctcgaatcagcatttctca

SEQ ID NO: 558229 - DNA, 25 bp, Homo sapien
tttctggaaggctgttacccgaatc

SEQ ID NO: 558230 - DNA, 25 bp, Homo sapien
cacaagcaggaaaagaatactcagg

SEQ ID NO: 558231 - DNA, 25 bp, Homo sapien
gaaagcaacttagacttcaaggtcc

SEQ ID NO: 558232 - DNA, 25 bp, Homo sapien
catccgggacctttatttcagggca

SEQ ID NO: 558233 - DNA, 25 bp, Homo sapien
ttcaaggtcctaccacacaagtgtg

SEQ ID NO: 558234 - DNA, 25 bp, Homo sapien
ctattggctccaagacactttcaga

SEQ ID NO: 558235 - DNA, 25 bp, Homo sapien
aagacactttcagagtgatggtgga

SEQ ID NO: 558236 - DNA, 25 bp, Homo sapien
tattggctccaagacactttcagag

SEQ ID NO: 558237 - DNA, 25 bp, Homo sapien
acactttcagagtgatggtggagag

SEQ ID NO: 558238 - DNA, 25 bp, Homo sapien
cgtcaccagcggattcacagctggt

SEQ ID NO: 558239 - DNA, 25 bp, Homo sapien
cccttctgcggcgtcaccagcggat

SEQ ID NO: 558240 - DNA, 25 bp, Homo sapien
tgttgtccagggtgcttcccttctg

SEQ ID NO: 558241 - DNA, 25 bp, Homo sapien
gtgcttcccttctgcggcgtcacca

SEQ ID NO: 558242 - DNA, 25 bp, Homo sapien
ttcaatcagcagaccaaacagaggc

SEQ ID NO: 558243 - DNA, 25 bp, Homo sapien
gtgacacatccctcacattgatccg

SEQ ID NO: 558244 - DNA, 25 bp, Homo sapien
tcaatcagcagaccaaacagaggca

SEQ ID NO: 558245 - DNA, 25 bp, Homo sapien
ggtgacacatccctcacattgatcc

SEQ ID NO: 558246 - DNA, 25 bp, Homo sapien
ctgatggcgatcagacggacctccc

SEQ ID NO: 558247 - DNA, 25 bp, Homo sapien
tgatggcgatcagacggacctcccg

SEQ ID NO: 558248 - DNA, 25 bp, Homo sapien
gcgatcagacggacctcccggaact

SEQ ID NO: 558249 - DNA, 25 bp, Homo sapien
atggcgatcagacggacctcccgga

SEQ ID NO: 558250 - DNA, 25 bp, Homo sapien
ccattagcagtttggtggcatcctt

SEQ ID NO: 558251 - DNA, 25 bp, Homo sapien
ttctctcggaattcagaagcagttg

SEQ ID NO: 558252 - DNA, 25 bp, Homo sapien
aggtgccattagcagtttggtggca

SEQ ID NO: 558253 - DNA, 25 bp, Homo sapien
ttagtgtgtttctctcggaattcag

SEQ ID NO: 558254 - DNA, 25 bp, Homo sapien
caaatggcattggtaagttcaacgg

SEQ ID NO: 558255 - DNA, 25 bp, Homo sapien
catggttgcacactacacggagaaa

SEQ ID NO: 558256 - DNA, 25 bp, Homo sapien
gttcaacggaatataatgttcatgg

SEQ ID NO: 558257 - DNA, 25 bp, Homo sapien
cacactacacggagaaattcaaact

SEQ ID NO: 558258 - DNA, 25 bp, Homo sapien
aaaacagctaatgtagttgttgatc

SEQ ID NO: 558259 - DNA, 25 bp, Homo sapien
gacaaagcccctgtccatgaaggtg

SEQ ID NO: 558260 - DNA, 25 bp, Homo sapien
tgcttgaagacaaagcccctgtcca

SEQ ID NO: 558261 - DNA, 25 bp, Homo sapien
aatgtagttgttgatctgcttgaag

SEQ ID NO: 558262 - DNA, 25 bp, Homo sapien
tttacaacggtttccactgcatgat

SEQ ID NO: 558263 - DNA, 25 bp, Homo sapien
gatgcctctggattatctcgaaact

SEQ ID NO: 558264 - DNA, 25 bp, Homo sapien
tatgattcgcgttcttagatgcctc

SEQ ID NO: 558265 - DNA, 25 bp, Homo sapien
caggaaatctctggtttcgcagcaa

SEQ ID NO: 558266 - DNA, 25 bp, Homo sapien
cattttcattcccaaagatcagtct

SEQ ID NO: 558267 - DNA, 25 bp, Homo sapien
ttcattcccaaagatcagtcttctc

SEQ ID NO: 558268 - DNA, 25 bp, Homo sapien
atcattttcattcccaaagatcagt

SEQ ID NO: 558269 - DNA, 25 bp, Homo sapien
ttttcattcccaaagatcagtcttc

SEQ ID NO: 558270 - DNA, 25 bp, Homo sapien
gcttttccaaggcttcctcggagag

SEQ ID NO: 558271 - DNA, 25 bp, Homo sapien
agggctttaggcctgaaccatcaac

SEQ ID NO: 558272 - DNA, 25 bp, Homo sapien
ccagtgtctgctttacgggaggaaa

SEQ ID NO: 558273 - DNA, 25 bp, Homo sapien
gagagcccagatcccttgtgcagga

SEQ ID NO: 558274 - DNA, 25 bp, Homo sapien
gacccacggtcagaaaggaacacac

SEQ ID NO: 558275 - DNA, 25 bp, Homo sapien
ggcaccagtccagagacaagaccag

SEQ ID NO: 558276 - DNA, 25 bp, Homo sapien
gagacaagaccagtcatctcagggc

SEQ ID NO: 558277 - DNA, 25 bp, Homo sapien
ggacccacggtcagaaaggaacaca

SEQ ID NO: 558278 - DNA, 25 bp, Homo sapien
tctgccccaacgagatggataatct

SEQ ID NO: 558279 - DNA, 25 bp, Homo sapien
cgagatggataatctcagagtctgt

SEQ ID NO: 558280 - DNA, 25 bp, Homo sapien
gccccaacgagatggataatctcag

SEQ ID NO: 558281 - DNA, 25 bp, Homo sapien
gcgcatctgccccaacgagatggat

SEQ ID NO: 558282 - DNA, 25 bp, Homo sapien
ctatcaaatgctgagccatagattt

SEQ ID NO: 558283 - DNA, 25 bp, Homo sapien
ttctctatcaaatgctgagccatag

SEQ ID NO: 558284 - DNA, 25 bp, Homo sapien
tttggagttctctatcaaatgctga

SEQ ID NO: 558285 - DNA, 25 bp, Homo sapien
catagatttgatcagtacatcaaag

SEQ ID NO: 558286 - DNA, 25 bp, Homo sapien
tgtgctcagcgtggcacaaccagca

SEQ ID NO: 558287 - DNA, 25 bp, Homo sapien
ccaacggtgaatggcagatgtcttc

SEQ ID NO: 558288 - DNA, 25 bp, Homo sapien
tgccgggaaactggacacctgtgct

SEQ ID NO: 558289 - DNA, 25 bp, Homo sapien
gcacattatgatcagagccaacggt

SEQ ID NO: 558290 - DNA, 25 bp, Homo sapien
gaaatcggcagaaggcttgagaatc

SEQ ID NO: 558291 - DNA, 25 bp, Homo sapien
ctgtcttgtattcagaggcaacata

SEQ ID NO: 558292 - DNA, 25 bp, Homo sapien
aaggcttgagaatcgtggtcatgga

SEQ ID NO: 558293 - DNA, 25 bp, Homo sapien
aacatatggctcagccttatacgcg

SEQ ID NO: 558294 - DNA, 25 bp, Homo sapien
atggcactgggcaaccacatgaata

SEQ ID NO: 558295 - DNA, 25 bp, Homo sapien
ctgggcaaccacatgaataatgacc

SEQ ID NO: 558296 - DNA, 25 bp, Homo sapien
ggcactgggcaaccacatgaataat

SEQ ID NO: 558297 - DNA, 25 bp, Homo sapien
cactgggcaaccacatgaataatga

SEQ ID NO: 558298 - DNA, 25 bp, Homo sapien
aacagctggtttaggatagtgggca

SEQ ID NO: 558299 - DNA, 25 bp, Homo sapien
gcaagaaggcgatcatcacgtggcc

SEQ ID NO: 558300 - DNA, 25 bp, Homo sapien
gttaaccgcgacttcttcctgtgtg

SEQ ID NO: 558301 - DNA, 25 bp, Homo sapien
gctctggtgaggactcggaacagct

SEQ ID NO: 558302 - DNA, 25 bp, Homo sapien
gctccagattcggttttctgacagt

SEQ ID NO: 558303 - DNA, 25 bp, Homo sapien
gcttgggctccagattcggttttct

SEQ ID NO: 558304 - DNA, 25 bp, Homo sapien
ccagattcggttttctgacagtact

SEQ ID NO: 558305 - DNA, 25 bp, Homo sapien
tgggctccagattcggttttctgac

SEQ ID NO: 558306 - DNA, 25 bp, Homo sapien
ttttcagcagtggcttgcctccatc

SEQ ID NO: 558307 - DNA, 25 bp, Homo sapien
cccatttaatttccggaccataatg

SEQ ID NO: 558308 - DNA, 25 bp, Homo sapien
agtggcttgcctccatctacccatt

SEQ ID NO: 558309 - DNA, 25 bp, Homo sapien
tcagcagtggcttgcctccatctac

SEQ ID NO: 558310 - DNA, 25 bp, Homo sapien
gatttccaagtctctatttttccgc

SEQ ID NO: 558311 - DNA, 25 bp, Homo sapien
tttccgctgagacaccactagttca

SEQ ID NO: 558312 - DNA, 25 bp, Homo sapien
aaaatgcccaaactgtaattctgac

SEQ ID NO: 558313 - DNA, 25 bp, Homo sapien
aactgctaacagcactgtcttcaat

SEQ ID NO: 558314 - DNA, 25 bp, Homo sapien
ctgcccatcccaagctcctggtagc

SEQ ID NO: 558315 - DNA, 25 bp, Homo sapien
tagcccgaaggaaggttcgccgaga

SEQ ID NO: 558316 - DNA, 25 bp, Homo sapien
ttcgccgagaccgggatgtgctgct

SEQ ID NO: 558317 - DNA, 25 bp, Homo sapien
gctcctggtagccaagatagcccga

SEQ ID NO: 558318 - DNA, 25 bp, Homo sapien
taaaatgccctaaatgtaatctctg

SEQ ID NO: 558319 - DNA, 25 bp, Homo sapien
cactgtgagtgtatgaaaacttatg

SEQ ID NO: 558320 - DNA, 25 bp, Homo sapien
gcaagccaatgtaaaaccgtctgat

SEQ ID NO: 558321 - DNA, 25 bp, Homo sapien
taatctctgcagaacattgtctaca

SEQ ID NO: 558322 - DNA, 25 bp, Homo sapien
ggtgggcagactgcttgagctcacg

SEQ ID NO: 558323 - DNA, 25 bp, Homo sapien
cagactgcttgagctcacgagttcg

SEQ ID NO: 558324 - DNA, 25 bp, Homo sapien
tgggcagactgcttgagctcacgag

SEQ ID NO: 558325 - DNA, 25 bp, Homo sapien
agaccagcctgggcaacatggcgaa

SEQ ID NO: 558326 - DNA, 25 bp, Homo sapien
aaattcatttaaagatccctttgca

SEQ ID NO: 558327 - DNA, 25 bp, Homo sapien
catatccgttacctataaaattcat

SEQ ID NO: 558328 - DNA, 25 bp, Homo sapien
aaattacatatgcaacccagacatg

SEQ ID NO: 558329 - DNA, 25 bp, Homo sapien
ggaaattcagaatcttaatacaatt

SEQ ID NO: 558330 - DNA, 25 bp, Homo sapien
gtttcaacgacatccctcttcttcg

SEQ ID NO: 558331 - DNA, 25 bp, Homo sapien
cttgggtttcaacgacatccctctt

SEQ ID NO: 558332 - DNA, 25 bp, Homo sapien
gtcacagctgacatggaagaatgtg

SEQ ID NO: 558333 - DNA, 25 bp, Homo sapien
tcctttacttgagttgtcacagctg

SEQ ID NO: 558334 - DNA, 25 bp, Homo sapien
cagcaaaggcgcttcttgtgaaaac

SEQ ID NO: 558335 - DNA, 25 bp, Homo sapien
tgcagcaaaggcgcttcttgtgaaa

SEQ ID NO: 558336 - DNA, 25 bp, Homo sapien
agcaaaggcgcttcttgtgaaaact

SEQ ID NO: 558337 - DNA, 25 bp, Homo sapien
gcccaccaggtctgccataaatgca

SEQ ID NO: 558338 - DNA, 25 bp, Homo sapien
caatgcaaatcgcaatatttctagc

SEQ ID NO: 558339 - DNA, 25 bp, Homo sapien
ttgaattcaatgcaaatcgcaatat

SEQ ID NO: 558340 - DNA, 25 bp, Homo sapien
atctttgaattcaatgcaaatcgca

SEQ ID NO: 558341 - DNA, 25 bp, Homo sapien
gaattcaatgcaaatcgcaatattt

SEQ ID NO: 558342 - DNA, 25 bp, Homo sapien
caaacgtgatgggagttttactgca

SEQ ID NO: 558343 - DNA, 25 bp, Homo sapien
tgtgttttggtatgcagggcacaaa

SEQ ID NO: 558344 - DNA, 25 bp, Homo sapien
tctgactgtcgtatttcaagtactt

SEQ ID NO: 558345 - DNA, 25 bp, Homo sapien
taaacgtaaaggtgattggtgtaga

SEQ ID NO: 558346 - DNA, 25 bp, Homo sapien
ttgtaatgtctagattgcctaaaat

SEQ ID NO: 558347 - DNA, 25 bp, Homo sapien
tagggaagtctgaggaaacattatc

SEQ ID NO: 558348 - DNA, 25 bp, Homo sapien
aagtctgaggaaacattatcaattg

SEQ ID NO: 558349 - DNA, 25 bp, Homo sapien
caattgtaatgtctagattgcctaa

SEQ ID NO: 558350 - DNA, 25 bp, Homo sapien
ctgggagcttagccatcttctcagg

SEQ ID NO: 558351 - DNA, 25 bp, Homo sapien
actgggagcttagccatcttctcag

SEQ ID NO: 558352 - DNA, 25 bp, Homo sapien
tgggagcttagccatcttctcaggt

SEQ ID NO: 558353 - DNA, 25 bp, Homo sapien
cactgggagcttagccatcttctca

SEQ ID NO: 558354 - DNA, 25 bp, Homo sapien
gacttcctgtattggctcgttaaaa

SEQ ID NO: 558355 - DNA, 25 bp, Homo sapien
gaggctcaaactctctcttaggaaa

SEQ ID NO: 558356 - DNA, 25 bp, Homo sapien
gaatggtatcatcaactagcagtcc

SEQ ID NO: 558357 - DNA, 25 bp, Homo sapien
tatctaagtgtttctgcagccggtc

SEQ ID NO: 558358 - DNA, 25 bp, Homo sapien
tctgctcccatcactttcaaattag

SEQ ID NO: 558359 - DNA, 25 bp, Homo sapien
tagtgaccatgtgaagccccactcc

SEQ ID NO: 558360 - DNA, 25 bp, Homo sapien
attagtgaccatgtgaagccccact

SEQ ID NO: 558361 - DNA, 25 bp, Homo sapien
tgctcccatcactttcaaattagtg

SEQ ID NO: 558362 - DNA, 25 bp, Homo sapien
ccccttctccaattccctacgtgag

SEQ ID NO: 558363 - DNA, 25 bp, Homo sapien
ggaaggctaacccagcaggcctcat

SEQ ID NO: 558364 - DNA, 25 bp, Homo sapien
taaaactgtcagatagtgactggga

SEQ ID NO: 558365 - DNA, 25 bp, Homo sapien
cacctatatggtccaggaaccctgg

SEQ ID NO: 558366 - DNA, 25 bp, Homo sapien
ctccaaacaggggaaacatcaagac

SEQ ID NO: 558367 - DNA, 25 bp, Homo sapien
ttcacgtcgctgtgaaggctgaagc

SEQ ID NO: 558368 - DNA, 25 bp, Homo sapien
acctttttgagcctcttgacaaggg

SEQ ID NO: 558369 - DNA, 25 bp, Homo sapien
tgacaagggatttcacgtcgctgtg

SEQ ID NO: 558370 - DNA, 25 bp, Homo sapien
gtcttgcctgtagatggcagaaaat

SEQ ID NO: 558371 - DNA, 25 bp, Homo sapien
catcattggatagcttattgctgtc

SEQ ID NO: 558372 - DNA, 25 bp, Homo sapien
ttgcctgtagatggcagaaaatctg

SEQ ID NO: 558373 - DNA, 25 bp, Homo sapien
ctgcaagtaacttgagcatgtcatc

SEQ ID NO: 558374 - DNA, 25 bp, Homo sapien
aagcaaatggcattctatactgtcc

SEQ ID NO: 558375 - DNA, 25 bp, Homo sapien
gcaaatggcattctatactgtccta

SEQ ID NO: 558376 - DNA, 25 bp, Homo sapien
atactgtcctagtctttggcatgcc

SEQ ID NO: 558377 - DNA, 25 bp, Homo sapien
aatggcattctatactgtcctagtc

SEQ ID NO: 558378 - DNA, 25 bp, Homo sapien
tatgactctgtaggccatcaaacct

SEQ ID NO: 558379 - DNA, 25 bp, Homo sapien
cagccacaggaaggatctagaagga

SEQ ID NO: 558380 - DNA, 25 bp, Homo sapien
tgcgttctgacaagacctccggtga

SEQ ID NO: 558381 - DNA, 25 bp, Homo sapien
caaaaccaaagtgtgctatagcatc

SEQ ID NO: 558382 - DNA, 25 bp, Homo sapien
aattctggccacaagaaatatatct

SEQ ID NO: 558383 - DNA, 25 bp, Homo sapien
ctcagcgcaatgtgtgatgctcccc

SEQ ID NO: 558384 - DNA, 25 bp, Homo sapien
aacttttcatatatggctcagcgca

SEQ ID NO: 558385 - DNA, 25 bp, Homo sapien
tctggccacaagaaatatatctgga

SEQ ID NO: 558386 - DNA, 25 bp, Homo sapien
gaaatcggcagaaatcttccggttg

SEQ ID NO: 558387 - DNA, 25 bp, Homo sapien
gaaatggttcaggtctacgtggaaa

SEQ ID NO: 558388 - DNA, 25 bp, Homo sapien
gacgtggtggcgagcatttgcctca

SEQ ID NO: 558389 - DNA, 25 bp, Homo sapien
cttcggatactgcatggcggcttca

SEQ ID NO: 558390 - DNA, 25 bp, Homo sapien
cacagcattgcaaattgaaagataa

SEQ ID NO: 558391 - DNA, 25 bp, Homo sapien
aatcattgcacttgacaaggatcct

SEQ ID NO: 558392 - DNA, 25 bp, Homo sapien
tgcacttgacaaggatcctttttcc

SEQ ID NO: 558393 - DNA, 25 bp, Homo sapien
tccttcttcattttcggcaacacag

SEQ ID NO: 558394 - DNA, 25 bp, Homo sapien
tgggcatctgggtccaaataaaaaa

SEQ ID NO: 558395 - DNA, 25 bp, Homo sapien
ctgagcaatgaccaagtcactcatc

SEQ ID NO: 558396 - DNA, 25 bp, Homo sapien
ctaatctacggtgatggaggtcaaa

SEQ ID NO: 558397 - DNA, 25 bp, Homo sapien
agagggtctcaggtacaagctagcc

SEQ ID NO: 558398 - DNA, 25 bp, Homo sapien
cacaggaaggtctagaaaagtcaaa

SEQ ID NO: 558399 - DNA, 25 bp, Homo sapien
tacaaatgcgaactccagtgagctc

SEQ ID NO: 558400 - DNA, 25 bp, Homo sapien
tgagaacagccatgttgtcttaaaa

SEQ ID NO: 558401 - DNA, 25 bp, Homo sapien
ggagggtcgccatttcactctagta

SEQ ID NO: 558402 - DNA, 25 bp, Homo sapien
caaggacacaagtacaaggacagtc

SEQ ID NO: 558403 - DNA, 25 bp, Homo sapien
gtaacagagtaagagtgcaaagggc

SEQ ID NO: 558404 - DNA, 25 bp, Homo sapien
ttcaacagcattcaacgaagagcag

SEQ ID NO: 558405 - DNA, 25 bp, Homo sapien
caacgaagagcagaagatataagac

SEQ ID NO: 558406 - DNA, 25 bp, Homo sapien
cagcattcaacgaagagcagaagat

SEQ ID NO: 558407 - DNA, 25 bp, Homo sapien
agcagaagatataagacgatgttac

SEQ ID NO: 558408 - DNA, 25 bp, Homo sapien
ggtagctatctaaaccggaaccaga

SEQ ID NO: 558409 - DNA, 25 bp, Homo sapien
caagttccggcaggtagctatctaa

SEQ ID NO: 558410 - DNA, 25 bp, Homo sapien
ggcaggtagctatctaaaccggaac

SEQ ID NO: 558411 - DNA, 25 bp, Homo sapien
cttggcaagttccggcaggtagcta

SEQ ID NO: 558412 - DNA, 25 bp, Homo sapien
tcgcttttcttgcattgcagcttca

SEQ ID NO: 558413 - DNA, 25 bp, Homo sapien
gcttcaaagttgagctggaggatct

SEQ ID NO: 558414 - DNA, 25 bp, Homo sapien
gctcaaaagcaaaacgcctgacttt

SEQ ID NO: 558415 - DNA, 25 bp, Homo sapien
cttcgtgagagtcgccatttcgctt

SEQ ID NO: 558416 - DNA, 25 bp, Homo sapien
gttgaatcaggtggaaaaatcgtct

SEQ ID NO: 558417 - DNA, 25 bp, Homo sapien
tgaacgacacccatacaggaatcca

SEQ ID NO: 558418 - DNA, 25 bp, Homo sapien
gacacccatacaggaatccagaaat

SEQ ID NO: 558419 - DNA, 25 bp, Homo sapien
attcaaattataggatccatcgcca

SEQ ID NO: 558420 - DNA, 25 bp, Homo sapien
catgttgcctttgtacagccagcca

SEQ ID NO: 558421 - DNA, 25 bp, Homo sapien
cacgctgatggcactgttcatgttg

SEQ ID NO: 558422 - DNA, 25 bp, Homo sapien
gcttggtgatcccacccttctggga

SEQ ID NO: 558423 - DNA, 25 bp, Homo sapien
ggtcacgctgatggcactgttcatg

SEQ ID NO: 558424 - DNA, 25 bp, Homo sapien
tctttgtcgacctcctcgtcaactt

SEQ ID NO: 558425 - DNA, 25 bp, Homo sapien
catagacatgaactggaagtttatc

SEQ ID NO: 558426 - DNA, 25 bp, Homo sapien
tcatctttgtcgacctcctcgtcaa

SEQ ID NO: 558427 - DNA, 25 bp, Homo sapien
caacttcatagacatgaactggaag

SEQ ID NO: 558428 - DNA, 25 bp, Homo sapien
tcggaagctgtcgaaactctcctga

SEQ ID NO: 558429 - DNA, 25 bp, Homo sapien
gccagtcagagttataggttttgat

SEQ ID NO: 558430 - DNA, 25 bp, Homo sapien
ttatagttcacaagatgccagtcag

SEQ ID NO: 558431 - DNA, 25 bp, Homo sapien
gaaactctcctgagtaatcttcata

SEQ ID NO: 558432 - DNA, 25 bp, Homo sapien
tatcgaccctgtcgtctcaggatgg

SEQ ID NO: 558433 - DNA, 25 bp, Homo sapien
tgagcatatgtatcgaccctgtcgt

SEQ ID NO: 558434 - DNA, 25 bp, Homo sapien
gcactgttgagcatatgtatcgacc

SEQ ID NO: 558435 - DNA, 25 bp, Homo sapien
cgccttcgcaggcactgttgagcat

SEQ ID NO: 558436 - DNA, 25 bp, Homo sapien
gaacagtcttctaggatctctaggt

SEQ ID NO: 558437 - DNA, 25 bp, Homo sapien
aagagatttgagttgagagccagga

SEQ ID NO: 558438 - DNA, 25 bp, Homo sapien
ccacagttctgtgaatatggaattc

SEQ ID NO: 558439 - DNA, 25 bp, Homo sapien
tctaagtctgttcctctcaaatggt

SEQ ID NO: 558440 - DNA, 25 bp, Homo sapien
gggtcctgcctctaagatggtctgc

SEQ ID NO: 558441 - DNA, 25 bp, Homo sapien
gtcctgcctctaagatggtctgctc

SEQ ID NO: 558442 - DNA, 25 bp, Homo sapien
ggggtcctgcctctaagatggtctg

SEQ ID NO: 558443 - DNA, 25 bp, Homo sapien
ctggggtcctgcctctaagatggtc

SEQ ID NO: 558444 - DNA, 25 bp, Homo sapien
aggttcaattgttattgttctcagc

SEQ ID NO: 558445 - DNA, 25 bp, Homo sapien
aagcccaggaggttcgagcaagact

SEQ ID NO: 558446 - DNA, 25 bp, Homo sapien
cctcactgagttaaccctaggttca

SEQ ID NO: 558447 - DNA, 25 bp, Homo sapien
tcttcaggagcattccctgggcctg

SEQ ID NO: 558448 - DNA, 25 bp, Homo sapien
tagattctataatccatcttgttgg

SEQ ID NO: 558449 - DNA, 25 bp, Homo sapien
atcttgttggtggtcttgaggtggg

SEQ ID NO: 558450 - DNA, 25 bp, Homo sapien
ctaacatagattctataatccatct

SEQ ID NO: 558451 - DNA, 25 bp, Homo sapien
aacatagattctataatccatcttg

SEQ ID NO: 558452 - DNA, 25 bp, Homo sapien
tccttcaacagtgccacccttcact

SEQ ID NO: 558453 - DNA, 25 bp, Homo sapien
ttctctggtccttcaacagtgccac

SEQ ID NO: 558454 - DNA, 25 bp, Homo sapien
ttcaacagtgccacccttcactctg

SEQ ID NO: 558455 - DNA, 25 bp, Homo sapien
ctggtccttcaacagtgccaccctt

SEQ ID NO: 558456 - DNA, 25 bp, Homo sapien
gtgtgtcctgctcccgcataacatg

SEQ ID NO: 558457 - DNA, 25 bp, Homo sapien
catgttcaatcacatcccctacagt

SEQ ID NO: 558458 - DNA, 25 bp, Homo sapien
tccgctgagttctctggctcctgag

SEQ ID NO: 558459 - DNA, 25 bp, Homo sapien
gaggcatcatggttccgctgagttc

SEQ ID NO: 558460 - DNA, 25 bp, Homo sapien
tctttagggaccttacataggtgga

SEQ ID NO: 558461 - DNA, 25 bp, Homo sapien
tctccatttatccctcgatggacac

SEQ ID NO: 558462 - DNA, 25 bp, Homo sapien
ttatccactgagcataacctcctca

SEQ ID NO: 558463 - DNA, 25 bp, Homo sapien
cctcctcagggtccatccatattgt

SEQ ID NO: 558464 - DNA, 25 bp, Homo sapien
tcaattgctgtgctgtctgtcagag

SEQ ID NO: 558465 - DNA, 25 bp, Homo sapien
aatttcatgtatgaggtctcccagg

SEQ ID NO: 558466 - DNA, 25 bp, Homo sapien
tagattggaaatccccagttcacat

SEQ ID NO: 558467 - DNA, 25 bp, Homo sapien
ctttagattggaaatccccagttca

SEQ ID NO: 558468 - DNA, 25 bp, Homo sapien
agattggaaatccccagttcacata

SEQ ID NO: 558469 - DNA, 25 bp, Homo sapien
tttagattggaaatccccagttcac

SEQ ID NO: 558470 - DNA, 25 bp, Homo sapien
taggctctttggggtgacttttaca

SEQ ID NO: 558471 - DNA, 25 bp, Homo sapien
tctgcaccagtgaagtcacaccatt

SEQ ID NO: 558472 - DNA, 25 bp, Homo sapien
gcttgtcgtgtttctgccacgagga

SEQ ID NO: 558473 - DNA, 25 bp, Homo sapien
tctttggatgcgtaaaacaaaggcc

SEQ ID NO: 558474 - DNA, 25 bp, Homo sapien
tcacaccattaattctttggatgcg

SEQ ID NO: 558475 - DNA, 25 bp, Homo sapien
cttctgctccttctttgctaaaagt

SEQ ID NO: 558476 - DNA, 25 bp, Homo sapien
tctttttcagattttctagaaccaa

SEQ ID NO: 558477 - DNA, 25 bp, Homo sapien
tgctaaaagtgcctgctttgcctga

SEQ ID NO: 558478 - DNA, 25 bp, Homo sapien
ctctttttcagattttctagaacca

SEQ ID NO: 558479 - DNA, 25 bp, Homo sapien
agatccccaagcgacaggatctgat

SEQ ID NO: 558480 - DNA, 25 bp, Homo sapien
acagatggcagagatccccaagcga

SEQ ID NO: 558481 - DNA, 25 bp, Homo sapien
cagacaatatgggatttcaagtggt

SEQ ID NO: 558482 - DNA, 25 bp, Homo sapien
ttcaagtggtctctaaagggtagga

SEQ ID NO: 558483 - DNA, 25 bp, Homo sapien
tagcctgaaagagcggcacacagca

SEQ ID NO: 558484 - DNA, 25 bp, Homo sapien
cacagcttcttgttagtctcttaac

SEQ ID NO: 558485 - DNA, 25 bp, Homo sapien
taaccacaggccatagcctgaaaga

SEQ ID NO: 558486 - DNA, 25 bp, Homo sapien
tcttgttagtctcttaaccacaggc

SEQ ID NO: 558487 - DNA, 25 bp, Homo sapien
gagtcttcttctggacgatgacatt

SEQ ID NO: 558488 - DNA, 25 bp, Homo sapien
tagtcgagtggctcaattagctttg

SEQ ID NO: 558489 - DNA, 25 bp, Homo sapien
gcagcatctcccgtaaacagtcgtt

SEQ ID NO: 558490 - DNA, 25 bp, Homo sapien
aaagtcatcgtaagggaagagcagc

SEQ ID NO: 558491 - DNA, 25 bp, Homo sapien
gcaggtactacttaaaccagggctc

SEQ ID NO: 558492 - DNA, 25 bp, Homo sapien
accagggctcatgggtgaatccgag

SEQ ID NO: 558493 - DNA, 25 bp, Homo sapien
tactacttaaaccagggctcatggg

SEQ ID NO: 558494 - DNA, 25 bp, Homo sapien
taaaccagggctcatgggtgaatcc

SEQ ID NO: 558495 - DNA, 25 bp, Homo sapien
taatgaaagaactcctagtgacctc

SEQ ID NO: 558496 - DNA, 25 bp, Homo sapien
gctgctggaagcacttccgggacac

SEQ ID NO: 558497 - DNA, 25 bp, Homo sapien
ctcaggtcacttaatgaaagaactc

SEQ ID NO: 558498 - DNA, 25 bp, Homo sapien
ctcctagtgacctcatagggcagag

SEQ ID NO: 558499 - DNA, 25 bp, Homo sapien
ttgttggtggagctgctccggggcc

SEQ ID NO: 558500 - DNA, 25 bp, Homo sapien
tggttgttggtggagctgctccggg

SEQ ID NO: 558501 - DNA, 25 bp, Homo sapien
ccatcagcaccatcatgtttgaaac

SEQ ID NO: 558502 - DNA, 25 bp, Homo sapien
tcatgtttgaaaccctgagaattca

SEQ ID NO: 558503 - DNA, 25 bp, Homo sapien
tgtcaagtttgcaggaaggatcctc

SEQ ID NO: 558504 - DNA, 25 bp, Homo sapien
gaagttgtcaagtttgcaggaagga

SEQ ID NO: 558505 - DNA, 25 bp, Homo sapien
tcttgaagttgtcaagtttgcagga

SEQ ID NO: 558506 - DNA, 25 bp, Homo sapien
caagtttgcaggaaggatcctcatt

SEQ ID NO: 558507 - DNA, 25 bp, Homo sapien
gtttaagtgttgtctgcctaagtgt

SEQ ID NO: 558508 - DNA, 25 bp, Homo sapien
gagctgctgatggtttaagtgttgt

SEQ ID NO: 558509 - DNA, 25 bp, Homo sapien
gatggtttaagtgttgtctgcctaa

SEQ ID NO: 558510 - DNA, 25 bp, Homo sapien
gctgatggtttaagtgttgtctgcc

SEQ ID NO: 558511 - DNA, 25 bp, Homo sapien
tcagctgctttaagcagtgaaatcc

SEQ ID NO: 558512 - DNA, 25 bp, Homo sapien
ctaagttacatcagctgctttaagc

SEQ ID NO: 558513 - DNA, 25 bp, Homo sapien
tacatcagctgctttaagcagtgaa

SEQ ID NO: 558514 - DNA, 25 bp, Homo sapien
aagttacatcagctgctttaagcag

SEQ ID NO: 558515 - DNA, 25 bp, Homo sapien
cagttcctttttgacacttctacta

SEQ ID NO: 558516 - DNA, 25 bp, Homo sapien
tacttgtcctgcatttatcagcctg

SEQ ID NO: 558517 - DNA, 25 bp, Homo sapien
tctgcttccacttcgccctgagctg

SEQ ID NO: 558518 - DNA, 25 bp, Homo sapien
tgcaggggggactcaatcaccagtt

SEQ ID NO: 558519 - DNA, 25 bp, Homo sapien
tctgcaactggaacagctgcgagtc

SEQ ID NO: 558520 - DNA, 25 bp, Homo sapien
tgaaaacgcaagtcagaaagtctgc

SEQ ID NO: 558521 - DNA, 25 bp, Homo sapien
caggcatgccagtggtccaaggaag

SEQ ID NO: 558522 - DNA, 25 bp, Homo sapien
tctcggctgaaaacgcaagtcagaa

SEQ ID NO: 558523 - DNA, 25 bp, Homo sapien
ctatttgttgggtcaaaataccctg

SEQ ID NO: 558524 - DNA, 25 bp, Homo sapien
tacaaagcgcttcagcaacttagca

SEQ ID NO: 558525 - DNA, 25 bp, Homo sapien
aagcgcttcagcaacttagcatcaa

SEQ ID NO: 558526 - DNA, 25 bp, Homo sapien
gcttcagcaacttagcatcaaccat

SEQ ID NO: 558527 - DNA, 25 bp, Homo sapien
cattacaaagcgcttcagcaactta

SEQ ID NO: 558528 - DNA, 25 bp, Homo sapien
gaatgctgatagcaggtttgtcatc

SEQ ID NO: 558529 - DNA, 25 bp, Homo sapien
tctcctctttcatgagaccctccag

SEQ ID NO: 558530 - DNA, 25 bp, Homo sapien
gttctcctctttcatgagaccctcc

SEQ ID NO: 558531 - DNA, 25 bp, Homo sapien
tctttcatgagaccctccagaatat

SEQ ID NO: 558532 - DNA, 25 bp, Homo sapien
tcctctttcatgagaccctccagaa

SEQ ID NO: 558533 - DNA, 25 bp, Homo sapien
cctagaacacgccgcttcgcagggc

SEQ ID NO: 558534 - DNA, 25 bp, Homo sapien
cacgccgcttcgcagggcacctgtg

SEQ ID NO: 558535 - DNA, 25 bp, Homo sapien
cctgcaggcccacacgtctcaggaa

SEQ ID NO: 558536 - DNA, 25 bp, Homo sapien
tagaacacgccgcttcgcagggcac

SEQ ID NO: 558537 - DNA, 25 bp, Homo sapien
aaatcactgagctgtggccctctgt

SEQ ID NO: 558538 - DNA, 25 bp, Homo sapien
cgaacactgtaaaatcactgagctg

SEQ ID NO: 558539 - DNA, 25 bp, Homo sapien
cctctgtggatcacctcactttcct

SEQ ID NO: 558540 - DNA, 25 bp, Homo sapien
taaagcgaacactgtaaaatcactg

SEQ ID NO: 558541 - DNA, 25 bp, Homo sapien
gcctgtatccttctgtaacacaaca

SEQ ID NO: 558542 - DNA, 25 bp, Homo sapien
cacaaagagtatgatttggacagaa

SEQ ID NO: 558543 - DNA, 25 bp, Homo sapien
gcatctgcacaaactatcagcgttt

SEQ ID NO: 558544 - DNA, 25 bp, Homo sapien
taagaccattcctgcatactttgcc

SEQ ID NO: 558545 - DNA, 25 bp, Homo sapien
agcaaggaaaggccttcagcctgag

SEQ ID NO: 558546 - DNA, 25 bp, Homo sapien
tcagcaaggaaaggccttcagcctg

SEQ ID NO: 558547 - DNA, 25 bp, Homo sapien
tctcagcaaggaaaggccttcagcc

SEQ ID NO: 558548 - DNA, 25 bp, Homo sapien
ctctcagcaaggaaaggccttcagc

SEQ ID NO: 558549 - DNA, 25 bp, Homo sapien
atcaagggcaccactaccacggagt

SEQ ID NO: 558550 - DNA, 25 bp, Homo sapien
tgcatctgatcaagggcaccactac

SEQ ID NO: 558551 - DNA, 25 bp, Homo sapien
tcctctgcgcttgcatctgatcaag

SEQ ID NO: 558552 - DNA, 25 bp, Homo sapien
cactaccacggagtcagaagatggg

SEQ ID NO: 558553 - DNA, 25 bp, Homo sapien
tgtcaacatatgtctggctgattat

SEQ ID NO: 558554 - DNA, 25 bp, Homo sapien
gtactcctagtaacacatactacta

SEQ ID NO: 558555 - DNA, 25 bp, Homo sapien
catgaatcttgttcttgttgtacta

SEQ ID NO: 558556 - DNA, 25 bp, Homo sapien
caggtgtgtgtcaacatatgtctgg

SEQ ID NO: 558557 - DNA, 25 bp, Homo sapien
tttgtccccactcattttgacaaaa

SEQ ID NO: 558558 - DNA, 25 bp, Homo sapien
gaaaggtctcagcatttctgcatgc

SEQ ID NO: 558559 - DNA, 25 bp, Homo sapien
gaaactctgagatatatttgtcccc

SEQ ID NO: 558560 - DNA, 25 bp, Homo sapien
gcttcgctgtaccaagcagctgctg

SEQ ID NO: 558561 - DNA, 25 bp, Homo sapien
cagccaggaggagatcaatagttct

SEQ ID NO: 558562 - DNA, 25 bp, Homo sapien
ggaggagatcaatagttctgaatct

SEQ ID NO: 558563 - DNA, 25 bp, Homo sapien
catccccaaggtgtggatgttcagt

SEQ ID NO: 558564 - DNA, 25 bp, Homo sapien
gaatcacactagtagtgcaacccat

SEQ ID NO: 558565 - DNA, 25 bp, Homo sapien
ctttcaaaaacggtgcggatgcctt

SEQ ID NO: 558566 - DNA, 25 bp, Homo sapien
aattgtatgctgtatattcaagggc

SEQ ID NO: 558567 - DNA, 25 bp, Homo sapien
tcttcgtgacaagcagtcaccggta

SEQ ID NO: 558568 - DNA, 25 bp, Homo sapien
tcttccgaaacaggctcccactgta

SEQ ID NO: 558569 - DNA, 25 bp, Homo sapien
cttccttggctcttccgaaacaggc

SEQ ID NO: 558570 - DNA, 25 bp, Homo sapien
tcccactgtaccatcttcgtgacaa

SEQ ID NO: 558571 - DNA, 25 bp, Homo sapien
cacaagatgacacacctcggatgca

SEQ ID NO: 558572 - DNA, 25 bp, Homo sapien
tacatgtggctctactggaaaactg

SEQ ID NO: 558573 - DNA, 25 bp, Homo sapien
tctgagctgccgtactagaatccgc

SEQ ID NO: 558574 - DNA, 25 bp, Homo sapien
gaaaactgccggctcctgtgatttg

SEQ ID NO: 558575 - DNA, 25 bp, Homo sapien
tcttcaaaatttcgacttattgcat

SEQ ID NO: 558576 - DNA, 25 bp, Homo sapien
cttcaaaatttcgacttattgcata

SEQ ID NO: 558577 - DNA, 25 bp, Homo sapien
taatcttcaaaatttcgacttattg

SEQ ID NO: 558578 - DNA, 25 bp, Homo sapien
aacataatcttcaaaatttcgactt

SEQ ID NO: 558579 - DNA, 25 bp, Homo sapien
gggtgatggctaaggggtccagtgt

SEQ ID NO: 558580 - DNA, 25 bp, Homo sapien
tgatggctaaggggtccagtgttct

SEQ ID NO: 558581 - DNA, 25 bp, Homo sapien
ggtgatggctaaggggtccagtgtt

SEQ ID NO: 558582 - DNA, 25 bp, Homo sapien
atggctaaggggtccagtgttcttt

SEQ ID NO: 558583 - DNA, 25 bp, Homo sapien
catttcatgtatgaatcatatcctg

SEQ ID NO: 558584 - DNA, 25 bp, Homo sapien
cagcacatatcagagggtacatcaa

SEQ ID NO: 558585 - DNA, 25 bp, Homo sapien
gagggtacatcaatccaaagttgaa

SEQ ID NO: 558586 - DNA, 25 bp, Homo sapien
tgaatcatttcatgtatgaatcata

SEQ ID NO: 558587 - DNA, 25 bp, Homo sapien
gagggccaagccatctatcccaatt

SEQ ID NO: 558588 - DNA, 25 bp, Homo sapien
tcctggcactgcatatgcagaagag

SEQ ID NO: 558589 - DNA, 25 bp, Homo sapien
tattatgttagggaggtctggacct

SEQ ID NO: 558590 - DNA, 25 bp, Homo sapien
taaaaatcggctctattgaggccag

SEQ ID NO: 558591 - DNA, 25 bp, Homo sapien
taacagagtactctagcagagtacc

SEQ ID NO: 558592 - DNA, 25 bp, Homo sapien
cacgggaatgaattcctgctatatt

SEQ ID NO: 558593 - DNA, 25 bp, Homo sapien
cctttaacagtgtgctacacgggaa

SEQ ID NO: 558594 - DNA, 25 bp, Homo sapien
cagaactgagtcacatggtctcatt

SEQ ID NO: 558595 - DNA, 25 bp, Homo sapien
aaaagttgagttttacatgtgatcc

SEQ ID NO: 558596 - DNA, 25 bp, Homo sapien
atcccattcataatggccatctttg

SEQ ID NO: 558597 - DNA, 25 bp, Homo sapien
tgagttttacatgtgatcccattca

SEQ ID NO: 558598 - DNA, 25 bp, Homo sapien
tacatgtgatcccattcataatggc

SEQ ID NO: 558599 - DNA, 25 bp, Homo sapien
atcctcatgctcaggcccactgaag

SEQ ID NO: 558600 - DNA, 25 bp, Homo sapien
tcctcatgctcaggcccactgaagg

SEQ ID NO: 558601 - DNA, 25 bp, Homo sapien
gattttgacagaagcccatcctcat

SEQ ID NO: 558602 - DNA, 25 bp, Homo sapien
gacagaagcccatcctcatgctcag

SEQ ID NO: 558603 - DNA, 25 bp, Homo sapien
taagtggcttcagtccaaggagtgc

SEQ ID NO: 558604 - DNA, 25 bp, Homo sapien
tgcttagggcattccaaaacacacc

SEQ ID NO: 558605 - DNA, 25 bp, Homo sapien
gcaaaggtggttcacacatagccaa

SEQ ID NO: 558606 - DNA, 25 bp, Homo sapien
tcaggtgtcactactatcccaggcc

SEQ ID NO: 558607 - DNA, 25 bp, Homo sapien
gctgaacggggatccttcccagatt

SEQ ID NO: 558608 - DNA, 25 bp, Homo sapien
gggacgtgagtcccacggtctgctt

SEQ ID NO: 558609 - DNA, 25 bp, Homo sapien
tgcacatcagctgcctcccgtcagt

SEQ ID NO: 558610 - DNA, 25 bp, Homo sapien
acatgtccagcgcaaggacactgtc

SEQ ID NO: 558611 - DNA, 25 bp, Homo sapien
ctcatcactcttatttgtccctact

SEQ ID NO: 558612 - DNA, 25 bp, Homo sapien
cagtgtggtcagccttgtcatcggg

SEQ ID NO: 558613 - DNA, 25 bp, Homo sapien
cttccaacctcagaatatctggcca

SEQ ID NO: 558614 - DNA, 25 bp, Homo sapien
tggtcagccttgtcatcgggaggca

SEQ ID NO: 558615 - DNA, 25 bp, Homo sapien
tgtggtcagccttgtcatcgggagg

SEQ ID NO: 558616 - DNA, 25 bp, Homo sapien
ctagagttcattccatatttcaggc

SEQ ID NO: 558617 - DNA, 25 bp, Homo sapien
tctctccactctattgatgctaatg

SEQ ID NO: 558618 - DNA, 25 bp, Homo sapien
ctctccactctattgatgctaatga

SEQ ID NO: 558619 - DNA, 25 bp, Homo sapien
gtctctccactctattgatgctaat

SEQ ID NO: 558620 - DNA, 25 bp, Homo sapien
ggattcgccgttgggatgaagtctc

SEQ ID NO: 558621 - DNA, 25 bp, Homo sapien
cctcagtagggattcgccgttggga

SEQ ID NO: 558622 - DNA, 25 bp, Homo sapien
cattactccttcagtcaaaccactt

SEQ ID NO: 558623 - DNA, 25 bp, Homo sapien
ggatgaagtctctcccattactcct

SEQ ID NO: 558624 - DNA, 25 bp, Homo sapien
aataaaatagattaccactaacatc

SEQ ID NO: 558625 - DNA, 25 bp, Homo sapien
ataaaatagattaccactaacatca

SEQ ID NO: 558626 - DNA, 25 bp, Homo sapien
ttggctattatccataatactacta

SEQ ID NO: 558627 - DNA, 25 bp, Homo sapien
ataatactactaagaacacacaagt

SEQ ID NO: 558628 - DNA, 25 bp, Homo sapien
ttctacaacaggatatcgccatccg

SEQ ID NO: 558629 - DNA, 25 bp, Homo sapien
tgaggggcacttgtctgcattcgct

SEQ ID NO: 558630 - DNA, 25 bp, Homo sapien
gctttctcaataccaaatgggttac

SEQ ID NO: 558631 - DNA, 25 bp, Homo sapien
cactgctcgtaacaggaaaacttgc

SEQ ID NO: 558632 - DNA, 25 bp, Homo sapien
cagccactgtcagataagggaccga

SEQ ID NO: 558633 - DNA, 25 bp, Homo sapien
caaatattccattggcaggcagccc

SEQ ID NO: 558634 - DNA, 25 bp, Homo sapien
aatctactctctactactctgcggg

SEQ ID NO: 558635 - DNA, 25 bp, Homo sapien
cgaacgatgaaaagcaagcctgggt

SEQ ID NO: 558636 - DNA, 25 bp, Homo sapien
tgtgggtacccaggtgtccaaacac

SEQ ID NO: 558637 - DNA, 25 bp, Homo sapien
actcccacaagtcaccggacaccat

SEQ ID NO: 558638 - DNA, 25 bp, Homo sapien
gtgtgggtacccaggtgtccaaaca

SEQ ID NO: 558639 - DNA, 25 bp, Homo sapien
tccaccctgcgactcccacaagtca

SEQ ID NO: 558640 - DNA, 25 bp, Homo sapien
catcagggctccctttgcctcgggt

SEQ ID NO: 558641 - DNA, 25 bp, Homo sapien
tcagggctccctttgcctcgggtga

SEQ ID NO: 558642 - DNA, 25 bp, Homo sapien
ggctccctttgcctcgggtgagcat

SEQ ID NO: 558643 - DNA, 25 bp, Homo sapien
gtcatcagggctccctttgcctcgg

SEQ ID NO: 558644 - DNA, 25 bp, Homo sapien
cacaactcatcttgtcacaggtcag

SEQ ID NO: 558645 - DNA, 25 bp, Homo sapien
ggtttcacgctgaggagcactccct

SEQ ID NO: 558646 - DNA, 25 bp, Homo sapien
tctgaagccttctactaagacctgt

SEQ ID NO: 558647 - DNA, 25 bp, Homo sapien
gttgacacaccaacctgtccgcagg

SEQ ID NO: 558648 - DNA, 25 bp, Homo sapien
aacactgtcaggaatctccgcctct

SEQ ID NO: 558649 - DNA, 25 bp, Homo sapien
tagtaacttcgaggagaaaccaaca

SEQ ID NO: 558650 - DNA, 25 bp, Homo sapien
gaaggaaatctcaacaccaatgtgt

SEQ ID NO: 558651 - DNA, 25 bp, Homo sapien
tcatgccacctcttacacatgaagg

SEQ ID NO: 558652 - DNA, 25 bp, Homo sapien
tgtgatattctgtcccttcaataac

SEQ ID NO: 558653 - DNA, 25 bp, Homo sapien
gagcttattctacactaacaaattt

SEQ ID NO: 558654 - DNA, 25 bp, Homo sapien
taaaatgacctagattaacagagct

SEQ ID NO: 558655 - DNA, 25 bp, Homo sapien
tttctcaagccacatcataatttta

SEQ ID NO: 558656 - DNA, 25 bp, Homo sapien
tcactgtgccctgctattacactct

SEQ ID NO: 558657 - DNA, 25 bp, Homo sapien
caagtatgctagagaaaacattatt

SEQ ID NO: 558658 - DNA, 25 bp, Homo sapien
cactctattcttacaatcaagtatg

SEQ ID NO: 558659 - DNA, 25 bp, Homo sapien
tgtgccctgctattacactctattc

SEQ ID NO: 558660 - DNA, 25 bp, Homo sapien
cataaagtacagtgtgcattgagcc

SEQ ID NO: 558661 - DNA, 25 bp, Homo sapien
ccgtatcttaaagggatccatgcca

SEQ ID NO: 558662 - DNA, 25 bp, Homo sapien
aagcactagtttccatgagacctct

SEQ ID NO: 558663 - DNA, 25 bp, Homo sapien
gcgctacggtcccttccataaagta

SEQ ID NO: 558664 - DNA, 25 bp, Homo sapien
tccccatacggatttacagacaatc

SEQ ID NO: 558665 - DNA, 25 bp, Homo sapien
aaagatccccatacggatttacaga

SEQ ID NO: 558666 - DNA, 25 bp, Homo sapien
aagatccccatacggatttacagac

SEQ ID NO: 558667 - DNA, 25 bp, Homo sapien
gatccccatacggatttacagacaa

SEQ ID NO: 558668 - DNA, 25 bp, Homo sapien
caaaaaatatgactgagcccctgct

SEQ ID NO: 558669 - DNA, 25 bp, Homo sapien
taggccaggacatgcgagtacagtt

SEQ ID NO: 558670 - DNA, 25 bp, Homo sapien
gaagtgagagctttttacctcctgg

SEQ ID NO: 558671 - DNA, 25 bp, Homo sapien
acggtgaaccaacagtccagggagg

SEQ ID NO: 558672 - DNA, 25 bp, Homo sapien
gagacattaagcaacagtccaaggg

SEQ ID NO: 558673 - DNA, 25 bp, Homo sapien
ttgtacccgggagttcaaaggctgc

SEQ ID NO: 558674 - DNA, 25 bp, Homo sapien
ttaagtagctggtagaatatacgcc

SEQ ID NO: 558675 - DNA, 25 bp, Homo sapien
ccattggtggaataagggactctag

SEQ ID NO: 558676 - DNA, 25 bp, Homo sapien
ttcatacaacaaagcccggccagaa

SEQ ID NO: 558677 - DNA, 25 bp, Homo sapien
tcttagaccttcatacaacaaagcc

SEQ ID NO: 558678 - DNA, 25 bp, Homo sapien
cagaacttatgtggcaggtgcacct

SEQ ID NO: 558679 - DNA, 25 bp, Homo sapien
caaagcccggccagaacttatgtgg

SEQ ID NO: 558680 - DNA, 25 bp, Homo sapien
ccggcttactcagcgcccgggtgaa

SEQ ID NO: 558681 - DNA, 25 bp, Homo sapien
gggtgaacttccgagtctccgccga

SEQ ID NO: 558682 - DNA, 25 bp, Homo sapien
cagcgcccgggtgaacttccgagtc

SEQ ID NO: 558683 - DNA, 25 bp, Homo sapien
acttccgagtctccgccgaggcggg

SEQ ID NO: 558684 - DNA, 25 bp, Homo sapien
gcggccgccaggtgcgccctcggcg

SEQ ID NO: 558685 - DNA, 25 bp, Homo sapien
ctctgcaccgtgtcacgccccaagg

SEQ ID NO: 558686 - DNA, 25 bp, Homo sapien
gctgctcgccgcgagtccggccgcc

SEQ ID NO: 558687 - DNA, 25 bp, Homo sapien
tcgctccgggcgaccgtgcgtgtgg

SEQ ID NO: 558688 - DNA, 25 bp, Homo sapien
ccaggcggacctggacggagcgtcc

SEQ ID NO: 558689 - DNA, 25 bp, Homo sapien
atgtggcaccgatcggaacccgcgg

SEQ ID NO: 558690 - DNA, 25 bp, Homo sapien
tggacggagcgtccctgctcggaac

SEQ ID NO: 558691 - DNA, 25 bp, Homo sapien
ttatttatgtggcaccgatcggaac

SEQ ID NO: 558692 - DNA, 25 bp, Homo sapien
cgcccgttgccttccgatggacagt

SEQ ID NO: 558693 - DNA, 25 bp, Homo sapien
agagtggtggtcttgaaaacccagt

SEQ ID NO: 558694 - DNA, 25 bp, Homo sapien
gatggacagttccttacctgccggg

SEQ ID NO: 558695 - DNA, 25 bp, Homo sapien
agcctgactgaacggcggctctgct

SEQ ID NO: 558696 - DNA, 25 bp, Homo sapien
gcgcctcccgcccaaatacccagag

SEQ ID NO: 558697 - DNA, 25 bp, Homo sapien
tacccagaggtttcatagccgccat

SEQ ID NO: 558698 - DNA, 25 bp, Homo sapien
caaatacccagaggtttcatagccg

SEQ ID NO: 558699 - DNA, 25 bp, Homo sapien
cgcctcccgcccaaatacccagagg

SEQ ID NO: 558700 - DNA, 25 bp, Homo sapien
cctaacactggcctgaagcgtaatc

SEQ ID NO: 558701 - DNA, 25 bp, Homo sapien
gaaaataccgatctagcgcagagag

SEQ ID NO: 558702 - DNA, 25 bp, Homo sapien
tgttcggtgagagcaactcagctcg

SEQ ID NO: 558703 - DNA, 25 bp, Homo sapien
gagagcaaaacacctccgttctggg

SEQ ID NO: 558704 - DNA, 25 bp, Homo sapien
cttagcacaactgtgaatggtatca

SEQ ID NO: 558705 - DNA, 25 bp, Homo sapien
ttagcacaactgtgaatggtatcat

SEQ ID NO: 558706 - DNA, 25 bp, Homo sapien
cgaactttggaccaattttgagaag

SEQ ID NO: 558707 - DNA, 25 bp, Homo sapien
atgaacacgaactttggaccaattt

SEQ ID NO: 558708 - DNA, 25 bp, Homo sapien
acacgaactttggaccaattttgag

SEQ ID NO: 558709 - DNA, 25 bp, Homo sapien
cacgaactttggaccaattttgaga

SEQ ID NO: 558710 - DNA, 25 bp, Homo sapien
gaaacctggagggtagttgactcca

SEQ ID NO: 558711 - DNA, 25 bp, Homo sapien
tagttgactccacaaagtactttac

SEQ ID NO: 558712 - DNA, 25 bp, Homo sapien
caaagtactttacatagctgggcta

SEQ ID NO: 558713 - DNA, 25 bp, Homo sapien
tatagaaagaaatccggaagtctct

SEQ ID NO: 558714 - DNA, 25 bp, Homo sapien
tctgcgggaattgacggaccatggt

SEQ ID NO: 558715 - DNA, 25 bp, Homo sapien
cactgctgccacttgttggaacaca

SEQ ID NO: 558716 - DNA, 25 bp, Homo sapien
gaacacctggtaatcctgccacaag

SEQ ID NO: 558717 - DNA, 25 bp, Homo sapien
gattcttaaatctcccagggttgct

SEQ ID NO: 558718 - DNA, 25 bp, Homo sapien
aggatgaaggcatgtgacacatcag

SEQ ID NO: 558719 - DNA, 25 bp, Homo sapien
gatgaaggcatgtgacacatcaggc

SEQ ID NO: 558720 - DNA, 25 bp, Homo sapien
atgaaggcatgtgacacatcaggct

SEQ ID NO: 558721 - DNA, 25 bp, Homo sapien
ggatgaaggcatgtgacacatcagg

SEQ ID NO: 558722 - DNA, 25 bp, Homo sapien
tagaaaaatcgatataagccacatt

SEQ ID NO: 558723 - DNA, 25 bp, Homo sapien
agaaaaatcgatataagccacatta

SEQ ID NO: 558724 - DNA, 25 bp, Homo sapien
gaaaaatcgatataagccacattac

SEQ ID NO: 558725 - DNA, 25 bp, Homo sapien
atatgctcccaattctggtaacagt

SEQ ID NO: 558726 - DNA, 25 bp, Homo sapien
cctgttctgtttgatagtcataaac

SEQ ID NO: 558727 - DNA, 25 bp, Homo sapien
tgaaaagatttgacctcactgattc

SEQ ID NO: 558728 - DNA, 25 bp, Homo sapien
tccatattgctcttaacctccaagc

SEQ ID NO: 558729 - DNA, 25 bp, Homo sapien
catattgctcttaacctccaagctg

SEQ ID NO: 558730 - DNA, 25 bp, Homo sapien
ccatattgctcttaacctccaagct

SEQ ID NO: 558731 - DNA, 25 bp, Homo sapien
gaagcgaaggcaggaatactcaaag

SEQ ID NO: 558732 - DNA, 25 bp, Homo sapien
ttccatctgtaaaggcgggacaact

SEQ ID NO: 558733 - DNA, 25 bp, Homo sapien
cagaatcccctcgtggttaccataa

SEQ ID NO: 558734 - DNA, 25 bp, Homo sapien
gctcatgctgctaccaagaaccaat

SEQ ID NO: 558735 - DNA, 25 bp, Homo sapien
ctcgactccgtagagaattgggatc

SEQ ID NO: 558736 - DNA, 25 bp, Homo sapien
tccgtagagaattgggatcctgatg

SEQ ID NO: 558737 - DNA, 25 bp, Homo sapien
gactccgtagagaattgggatcctg

SEQ ID NO: 558738 - DNA, 25 bp, Homo sapien
tcgactccgtagagaattgggatcc

SEQ ID NO: 558739 - DNA, 25 bp, Homo sapien
ctgcaggcagtacttctcatagctt

SEQ ID NO: 558740 - DNA, 25 bp, Homo sapien
caggcagtacttctcatagctttca

SEQ ID NO: 558741 - DNA, 25 bp, Homo sapien
gcaggcagtacttctcatagctttc

SEQ ID NO: 558742 - DNA, 25 bp, Homo sapien
ttactgcaggcagtacttctcatag

SEQ ID NO: 558743 - DNA, 25 bp, Homo sapien
cccatctaggtgatccccagccttc

SEQ ID NO: 558744 - DNA, 25 bp, Homo sapien
gctcccccatctaggtgatccccag

SEQ ID NO: 558745 - DNA, 25 bp, Homo sapien
tggctcccccatctaggtgatcccc

SEQ ID NO: 558746 - DNA, 25 bp, Homo sapien
tcccccatctaggtgatccccagcc

SEQ ID NO: 558747 - DNA, 25 bp, Homo sapien
ctggtggccgccacaatataatcag

SEQ ID NO: 558748 - DNA, 25 bp, Homo sapien
tgaccccacttgatttgggtgggat

SEQ ID NO: 558749 - DNA, 25 bp, Homo sapien
gccgccacaatataatcagtgctgg

SEQ ID NO: 558750 - DNA, 25 bp, Homo sapien
agtgctggcatgaccccacttgatt

SEQ ID NO: 558751 - DNA, 25 bp, Homo sapien
tgtcattgatggcaggcttcccgtt

SEQ ID NO: 558752 - DNA, 25 bp, Homo sapien
gatgggattgtcattgatggcaggc

SEQ ID NO: 558753 - DNA, 25 bp, Homo sapien
tgaggtcattgatagtgacaatatc

SEQ ID NO: 558754 - DNA, 25 bp, Homo sapien
cagagttggcatccctggtgaccag

SEQ ID NO: 558755 - DNA, 25 bp, Homo sapien
tgcccaccctggaagtagtacctag

SEQ ID NO: 558756 - DNA, 25 bp, Homo sapien
tgtgcttggcccatgcatagagcag

SEQ ID NO: 558757 - DNA, 25 bp, Homo sapien
gagatgctactggtgtcccaactgc

SEQ ID NO: 558758 - DNA, 25 bp, Homo sapien
tatggcctggaagcaatgggttata

SEQ ID NO: 558759 - DNA, 25 bp, Homo sapien
tgggctcaccctttcacagtagaag

SEQ ID NO: 558760 - DNA, 25 bp, Homo sapien
caacagaaatgatatgcaccaggag

SEQ ID NO: 558761 - DNA, 25 bp, Homo sapien
tttacccagcagagggagtatccac

SEQ ID NO: 558762 - DNA, 25 bp, Homo sapien
tctgcaaagcttatccacgtgtctg

SEQ ID NO: 558763 - DNA, 25 bp, Homo sapien
gccaccagttagcatgttcaggtcc

SEQ ID NO: 558764 - DNA, 25 bp, Homo sapien
cctcaggatgcagagtagatgtaca

SEQ ID NO: 558765 - DNA, 25 bp, Homo sapien
tgagcagagtctggatgccatacca

SEQ ID NO: 558766 - DNA, 25 bp, Homo sapien
caatcaaggtatggatcactgcaga

SEQ ID NO: 558767 - DNA, 25 bp, Homo sapien
taacatgcgttctcacataattgca

SEQ ID NO: 558768 - DNA, 25 bp, Homo sapien
cattgtgcaaccatctaatcagggt

SEQ ID NO: 558769 - DNA, 25 bp, Homo sapien
tcatttagctgggtagtgtggtcaa

SEQ ID NO: 558770 - DNA, 25 bp, Homo sapien
cagtgtgatggttccatacatatac

SEQ ID NO: 558771 - DNA, 25 bp, Homo sapien
agggcagaagcgcagggtcgctccg

SEQ ID NO: 558772 - DNA, 25 bp, Homo sapien
cgggaacaaagaggcggctggacgg

SEQ ID NO: 558773 - DNA, 25 bp, Homo sapien
agtccggaagctcgccagggcagaa

SEQ ID NO: 558774 - DNA, 25 bp, Homo sapien
cacacatttaaaaaccgtgactttg

SEQ ID NO: 558775 - DNA, 25 bp, Homo sapien
cggaaagacacaacgcgcgtggaag

SEQ ID NO: 558776 - DNA, 25 bp, Homo sapien
caagtgtgaggctctcgggagctac

SEQ ID NO: 558777 - DNA, 25 bp, Homo sapien
gagattagaagtggcgctcctgccc

SEQ ID NO: 558778 - DNA, 25 bp, Homo sapien
ggtagccagcttcgagggaccgccc

SEQ ID NO: 558779 - DNA, 25 bp, Homo sapien
tcaggcggttctgaccgccatcgtt

SEQ ID NO: 558780 - DNA, 25 bp, Homo sapien
tggagaggtgagccctcccctaccg

SEQ ID NO: 558781 - DNA, 25 bp, Homo sapien
gaaggagggcgctgacccagcgggc

SEQ ID NO: 558782 - DNA, 25 bp, Homo sapien
ccgccatcgtttcaacctggagagg

SEQ ID NO: 558783 - DNA, 25 bp, Homo sapien
tcacagaaatatagtccactggcat

SEQ ID NO: 558784 - DNA, 25 bp, Homo sapien
tcagctcaatcaaagcccagtactt

SEQ ID NO: 558785 - DNA, 25 bp, Homo sapien
ccttgaagccacagtatcacttaaa

SEQ ID NO: 558786 - DNA, 25 bp, Homo sapien
aacagtcagctcaatcaaagcccag

SEQ ID NO: 558787 - DNA, 25 bp, Homo sapien
caccaccagcaattgtagccttgat

SEQ ID NO: 558788 - DNA, 25 bp, Homo sapien
cagcaattgtagccttgatgagaat

SEQ ID NO: 558789 - DNA, 25 bp, Homo sapien
ttgtagccttgatgagaatccaatt

SEQ ID NO: 558790 - DNA, 25 bp, Homo sapien
gcaattgtagccttgatgagaatcc

SEQ ID NO: 558791 - DNA, 25 bp, Homo sapien
tgacgaggggtaatatacactttac

SEQ ID NO: 558792 - DNA, 25 bp, Homo sapien
tctgtgacccgtcgtcctagatttc

SEQ ID NO: 558793 - DNA, 25 bp, Homo sapien
acagcggcagttgcacccacatgtc

SEQ ID NO: 558794 - DNA, 25 bp, Homo sapien
cacatgtctgtgacccgtcgtccta

SEQ ID NO: 558795 - DNA, 25 bp, Homo sapien
tacacagcggcagttgcacccacat

SEQ ID NO: 558796 - DNA, 25 bp, Homo sapien
ccttcccagccttaccgtcagccat

SEQ ID NO: 558797 - DNA, 25 bp, Homo sapien
gagtccttcccagccttaccgtcag

SEQ ID NO: 558798 - DNA, 25 bp, Homo sapien
gtccttcccagccttaccgtcagcc

SEQ ID NO: 558799 - DNA, 25 bp, Homo sapien
ggagtccttcccagccttaccgtca

SEQ ID NO: 558800 - DNA, 25 bp, Homo sapien
ccgtggtgagatcccaccatctact

SEQ ID NO: 558801 - DNA, 25 bp, Homo sapien
gacccgtggtgagatcccaccatct

SEQ ID NO: 558802 - DNA, 25 bp, Homo sapien
tcagacccgtggtgagatcccacca

SEQ ID NO: 558803 - DNA, 25 bp, Homo sapien
ctaatcagacccgtggtgagatccc

SEQ ID NO: 558804 - DNA, 25 bp, Homo sapien
tgtgcgtatgaaccacttcctggct

SEQ ID NO: 558805 - DNA, 25 bp, Homo sapien
cgaagattactagtgacttgcccca

SEQ ID NO: 558806 - DNA, 25 bp, Homo sapien
gaggccgaagattactagtgacttg

SEQ ID NO: 558807 - DNA, 25 bp, Homo sapien
tgcttgggttctgtgcgtatgaacc

SEQ ID NO: 558808 - DNA, 25 bp, Homo sapien
tgtttaacaaacactcttgactgcc

SEQ ID NO: 558809 - DNA, 25 bp, Homo sapien
cgccagtatgtgagcacctccttca

SEQ ID NO: 558810 - DNA, 25 bp, Homo sapien
tatgtgtcaggtcctattggaggca

SEQ ID NO: 558811 - DNA, 25 bp, Homo sapien
tgtgcaaccgatgtctataactctt

SEQ ID NO: 558812 - DNA, 25 bp, Homo sapien
gaagcgtgctttgaggcaaacccag

SEQ ID NO: 558813 - DNA, 25 bp, Homo sapien
tgcaagccggtagccagttaccagt

SEQ ID NO: 558814 - DNA, 25 bp, Homo sapien
gacccttaggagtgtggtacaggaa

SEQ ID NO: 558815 - DNA, 25 bp, Homo sapien
cagtgaatgcagaggtacagtcagt

SEQ ID NO: 558816 - DNA, 25 bp, Homo sapien
ttcaagagaaaagggacttgatagt

SEQ ID NO: 558817 - DNA, 25 bp, Homo sapien
cattgacgccagagtagttagtgaa

SEQ ID NO: 558818 - DNA, 25 bp, Homo sapien
aagggacttgatagtattatacaga

SEQ ID NO: 558819 - DNA, 25 bp, Homo sapien
acagaatatccattgacgccagagt

SEQ ID NO: 558820 - DNA, 25 bp, Homo sapien
tgtcagaaatcttgaggcaggtggc

SEQ ID NO: 558821 - DNA, 25 bp, Homo sapien
tagtgaccgtagactaccagatcgg

SEQ ID NO: 558822 - DNA, 25 bp, Homo sapien
tatgaataatgaccaagtagcaccc

SEQ ID NO: 558823 - DNA, 25 bp, Homo sapien
tagagaatcacatccagacacgtgc

SEQ ID NO: 558824 - DNA, 25 bp, Homo sapien
taaaagggacaggttgatcttgatt

SEQ ID NO: 558825 - DNA, 25 bp, Homo sapien
tgttaaaagggacaggttgatcttg

SEQ ID NO: 558826 - DNA, 25 bp, Homo sapien
aagggacaggttgatcttgattgtt

SEQ ID NO: 558827 - DNA, 25 bp, Homo sapien
ctgttaaaagggacaggttgatctt

SEQ ID NO: 558828 - DNA, 25 bp, Homo sapien
cagcttgttggtaggcatgatactt

SEQ ID NO: 558829 - DNA, 25 bp, Homo sapien
cttgttggtaggcatgatacttaga

SEQ ID NO: 558830 - DNA, 25 bp, Homo sapien
tttacagcttgttggtaggcatgat

SEQ ID NO: 558831 - DNA, 25 bp, Homo sapien
tgttggtaggcatgatacttagaaa

SEQ ID NO: 558832 - DNA, 25 bp, Homo sapien
agtacgtaaagccaagtcttccagg

SEQ ID NO: 558833 - DNA, 25 bp, Homo sapien
gctgttttctagtgcacaattggga

SEQ ID NO: 558834 - DNA, 25 bp, Homo sapien
tttgtgtcatggtcagcagatcaag

SEQ ID NO: 558835 - DNA, 25 bp, Homo sapien
tagactgttagagcaatagatgagc

SEQ ID NO: 558836 - DNA, 25 bp, Homo sapien
tcctgtacttacaaaccatcttgag

SEQ ID NO: 558837 - DNA, 25 bp, Homo sapien
ttttcccacgttatgctcaagctgt

SEQ ID NO: 558838 - DNA, 25 bp, Homo sapien
ctgtttttatgtagcttgtcaccaa

SEQ ID NO: 558839 - DNA, 25 bp, Homo sapien
tattgattgtgctctgcaaacacag

SEQ ID NO: 558840 - DNA, 25 bp, Homo sapien
gaagtcacacttagcataagctccc

SEQ ID NO: 558841 - DNA, 25 bp, Homo sapien
acttctgtcgaagggatatctttga

SEQ ID NO: 558842 - DNA, 25 bp, Homo sapien
ggtgctgggctgactttaattgctg

SEQ ID NO: 558843 - DNA, 25 bp, Homo sapien
gtttccagtgtaacgcttggcgtcg

SEQ ID NO: 558844 - DNA, 25 bp, Homo sapien
tcttgtagctacctttttcaggaag

SEQ ID NO: 558845 - DNA, 25 bp, Homo sapien
gcaggtttccttagcacttggtacc

SEQ ID NO: 558846 - DNA, 25 bp, Homo sapien
cactgtctcccacctgatggcatgg

SEQ ID NO: 558847 - DNA, 25 bp, Homo sapien
aagctgggctggttgttcatccctg

SEQ ID NO: 558848 - DNA, 25 bp, Homo sapien
aggcccagagtttgcagtgtgacat

SEQ ID NO: 558849 - DNA, 25 bp, Homo sapien
tgaaatcagtcctggaaccactgaa

SEQ ID NO: 558850 - DNA, 25 bp, Homo sapien
caggcccagagtttgcagtgtgaca

SEQ ID NO: 558851 - DNA, 25 bp, Homo sapien
gtgaaatcagtcctggaaccactga

SEQ ID NO: 558852 - DNA, 25 bp, Homo sapien
aagccaggggcccatgagcctttgc

SEQ ID NO: 558853 - DNA, 25 bp, Homo sapien
caggggcccatgagcctttgcatag

SEQ ID NO: 558854 - DNA, 25 bp, Homo sapien
ctttgcatagagtttggacccacca

SEQ ID NO: 558855 - DNA, 25 bp, Homo sapien
gcatagagtttggacccaccagcct

SEQ ID NO: 558856 - DNA, 25 bp, Homo sapien
gataggagccggcaggataggagct

SEQ ID NO: 558857 - DNA, 25 bp, Homo sapien
ttctgtaggactgtggataggagcc

SEQ ID NO: 558858 - DNA, 25 bp, Homo sapien
tgcatggaagcctgaatgcgtccag

SEQ ID NO: 558859 - DNA, 25 bp, Homo sapien
gataggagcttggaggctgcatgga

SEQ ID NO: 558860 - DNA, 25 bp, Homo sapien
taatcaacctttagaggaagacgtg

SEQ ID NO: 558861 - DNA, 25 bp, Homo sapien
tatttttaagtcgacctcttggaga

SEQ ID NO: 558862 - DNA, 25 bp, Homo sapien
gctcatacagcttcttgcgctcagc

SEQ ID NO: 558863 - DNA, 25 bp, Homo sapien
gaactctcccttgtatgcttataaa

SEQ ID NO: 558864 - DNA, 25 bp, Homo sapien
cctctgtcaccacccgcaagcctca

SEQ ID NO: 558865 - DNA, 25 bp, Homo sapien
gagtatttcaggcactcttgcccca

SEQ ID NO: 558866 - DNA, 25 bp, Homo sapien
agtatttcaggcactcttgccccat

SEQ ID NO: 558867 - DNA, 25 bp, Homo sapien
tcaccacccgcaagcctcatcaagc

SEQ ID NO: 558868 - DNA, 25 bp, Homo sapien
tgcccacagccgtgtatgaacagtg

SEQ ID NO: 558869 - DNA, 25 bp, Homo sapien
taacaagacagtgagaggatgccca

SEQ ID NO: 558870 - DNA, 25 bp, Homo sapien
tgtatcacccgattcatggagaaaa

SEQ ID NO: 558871 - DNA, 25 bp, Homo sapien
tggttaggagaatgccccggaaata

SEQ ID NO: 558872 - DNA, 25 bp, Homo sapien
taaaaagtatgttacagtattaaca

SEQ ID NO: 558873 - DNA, 25 bp, Homo sapien
caaaacattggtgttattgagggaa

SEQ ID NO: 558874 - DNA, 25 bp, Homo sapien
taacatctggcaatatataatctat

SEQ ID NO: 558875 - DNA, 25 bp, Homo sapien
tatataatctattcagtcctttcta

SEQ ID NO: 558876 - DNA, 25 bp, Homo sapien
gcttacttccgagttggagatggga

SEQ ID NO: 558877 - DNA, 25 bp, Homo sapien
gctttataagggaagtcctgcaaag

SEQ ID NO: 558878 - DNA, 25 bp, Homo sapien
gaatactaattggaagctgaacaat

SEQ ID NO: 558879 - DNA, 25 bp, Homo sapien
tacattgggagttattaagagcgcc

SEQ ID NO: 558880 - DNA, 25 bp, Homo sapien
taagtttcccacgagcccaatgatg

SEQ ID NO: 558881 - DNA, 25 bp, Homo sapien
tttgaacaatgacgaccaaggctag

SEQ ID NO: 558882 - DNA, 25 bp, Homo sapien
caatgaagcggtcaatactcaggca

SEQ ID NO: 558883 - DNA, 25 bp, Homo sapien
tagaaatcgatacactgacttgccg

SEQ ID NO: 558884 - DNA, 25 bp, Homo sapien
tggaagtcaccaaaattaaggggca

SEQ ID NO: 558885 - DNA, 25 bp, Homo sapien
caccaaaattaaggggcactttcag

SEQ ID NO: 558886 - DNA, 25 bp, Homo sapien
caaaattaaggggcactttcagcat

SEQ ID NO: 558887 - DNA, 25 bp, Homo sapien
tcaccaaaattaaggggcactttca

SEQ ID NO: 558888 - DNA, 25 bp, Homo sapien
gttgtgtgccattcccgcccttctg

SEQ ID NO: 558889 - DNA, 25 bp, Homo sapien
cccaggcaaaccacaagctctgtgt

SEQ ID NO: 558890 - DNA, 25 bp, Homo sapien
gtgtcatgacacacaagttccctca

SEQ ID NO: 558891 - DNA, 25 bp, Homo sapien
tgcctctggtcagcgagcagtccct

SEQ ID NO: 558892 - DNA, 25 bp, Homo sapien
taaacggctttattaggtgcgaagc

SEQ ID NO: 558893 - DNA, 25 bp, Homo sapien
agaagtgtgcagtcctaccagtaag

SEQ ID NO: 558894 - DNA, 25 bp, Homo sapien
tccaaaaagtgcagtgaacccgcag

SEQ ID NO: 558895 - DNA, 25 bp, Homo sapien
tactaattagctctaggaagccaga

SEQ ID NO: 558896 - DNA, 25 bp, Homo sapien
gctgtgagtagttgtccaaactgaa

SEQ ID NO: 558897 - DNA, 25 bp, Homo sapien
gtagtagctgtgagtagttgtccaa

SEQ ID NO: 558898 - DNA, 25 bp, Homo sapien
tgactcgttcgggtctctgtgtagt

SEQ ID NO: 558899 - DNA, 25 bp, Homo sapien
cgttcgggtctctgtgtagtagctg

SEQ ID NO: 558900 - DNA, 25 bp, Homo sapien
acatccttggcacgcatttgattca

SEQ ID NO: 558901 - DNA, 25 bp, Homo sapien
cttggcacgcatttgattcactgat

SEQ ID NO: 558902 - DNA, 25 bp, Homo sapien
gaggagtcagagaagtcttgtggga

SEQ ID NO: 558903 - DNA, 25 bp, Homo sapien
cgtgacatccttggcacgcatttga

SEQ ID NO: 558904 - DNA, 25 bp, Homo sapien
tatgagtaggatttgctatagcaga

SEQ ID NO: 558905 - DNA, 25 bp, Homo sapien
catgtggaattcgaagagcactcca

SEQ ID NO: 558906 - DNA, 25 bp, Homo sapien
aatagcccgtttctgcatttgattc

SEQ ID NO: 558907 - DNA, 25 bp, Homo sapien
tccatgtaaccaaatagcccgtttc

SEQ ID NO: 558908 - DNA, 25 bp, Homo sapien
ccactgggtgagatgtagcccctgt

SEQ ID NO: 558909 - DNA, 25 bp, Homo sapien
gggctatgacgttgtgggctctcaa

SEQ ID NO: 558910 - DNA, 25 bp, Homo sapien
gggctctcaagccatccaatactta

SEQ ID NO: 558911 - DNA, 25 bp, Homo sapien
ttaaatcagtatcacccactgggtg

SEQ ID NO: 558912 - DNA, 25 bp, Homo sapien
ccttggtaagtgtgcagaactttga

SEQ ID NO: 558913 - DNA, 25 bp, Homo sapien
acaatgccagcgatgaacctgggct

SEQ ID NO: 558914 - DNA, 25 bp, Homo sapien
tgtgtgtccttggtaagtgtgcaga

SEQ ID NO: 558915 - DNA, 25 bp, Homo sapien
caatgccagcgatgaacctgggctg

SEQ ID NO: 558916 - DNA, 25 bp, Homo sapien
aaataagtgtgctgtgactggcagt

SEQ ID NO: 558917 - DNA, 25 bp, Homo sapien
cattggacatagacctaagtaggct

SEQ ID NO: 558918 - DNA, 25 bp, Homo sapien
gctcttccttgggtgaactagaatg

SEQ ID NO: 558919 - DNA, 25 bp, Homo sapien
tatcacatcattgccaagcatggga

SEQ ID NO: 558920 - DNA, 25 bp, Homo sapien
tatgtctatgctcttaaaagatagc

SEQ ID NO: 558921 - DNA, 25 bp, Homo sapien
gcccggcctatgtctatgctcttaa

SEQ ID NO: 558922 - DNA, 25 bp, Homo sapien
ggcctatgtctatgctcttaaaaga

SEQ ID NO: 558923 - DNA, 25 bp, Homo sapien
ccggcctatgtctatgctcttaaaa

SEQ ID NO: 558924 - DNA, 25 bp, Homo sapien
ttacaatgtgtactgccttactagg

SEQ ID NO: 558925 - DNA, 25 bp, Homo sapien
tatagtggtagaatacctggactgc

SEQ ID NO: 558926 - DNA, 25 bp, Homo sapien
gttctctatagtggtagaatacctg

SEQ ID NO: 558927 - DNA, 25 bp, Homo sapien
aatgtgtactgccttactaggttct

SEQ ID NO: 558928 - DNA, 25 bp, Homo sapien
ttcccttagccacaccactaggatg

SEQ ID NO: 558929 - DNA, 25 bp, Homo sapien
tgaggccccattcatcagcaatgga

SEQ ID NO: 558930 - DNA, 25 bp, Homo sapien
catgattctggagggcaatcttggg

SEQ ID NO: 558931 - DNA, 25 bp, Homo sapien
tcatcaagatatttaactggtcctc

SEQ ID NO: 558932 - DNA, 25 bp, Homo sapien
ggcccacaggcctcaggttgaacaa

SEQ ID NO: 558933 - DNA, 25 bp, Homo sapien
tgctctagtccctgtgcttttctga

SEQ ID NO: 558934 - DNA, 25 bp, Homo sapien
ttgtgttggaccacattgaaagctg

SEQ ID NO: 558935 - DNA, 25 bp, Homo sapien
gcttttctgagtcccacaggactct

SEQ ID NO: 558936 - DNA, 25 bp, Homo sapien
gaagctctctgaccaatactggtgg

SEQ ID NO: 558937 - DNA, 25 bp, Homo sapien
gacagttagactgcttgggaagctc

SEQ ID NO: 558938 - DNA, 25 bp, Homo sapien
tcttgcctgcttatgccagagttca

SEQ ID NO: 558939 - DNA, 25 bp, Homo sapien
tccctccgtgagtttgtggccaact

SEQ ID NO: 558940 - DNA, 25 bp, Homo sapien
cagccgacatgtactgtttctttgc

SEQ ID NO: 558941 - DNA, 25 bp, Homo sapien
ccgcacacagccgacatgtactgtt

SEQ ID NO: 558942 - DNA, 25 bp, Homo sapien
cacacagccgacatgtactgtttct

SEQ ID NO: 558943 - DNA, 25 bp, Homo sapien
cacagccgacatgtactgtttcttt

SEQ ID NO: 558944 - DNA, 25 bp, Homo sapien
gagtcattttgctacttgcagctgt

SEQ ID NO: 558945 - DNA, 25 bp, Homo sapien
attttgctacttgcagctgtgatca

SEQ ID NO: 558946 - DNA, 25 bp, Homo sapien
ctcagagtcattttgctacttgcag

SEQ ID NO: 558947 - DNA, 25 bp, Homo sapien
cagagtcattttgctacttgcagct

SEQ ID NO: 558948 - DNA, 25 bp, Homo sapien
gagtgtgcctttggcatggtttcac

SEQ ID NO: 558949 - DNA, 25 bp, Homo sapien
cataatcacattgaaggagggaaaa

SEQ ID NO: 558950 - DNA, 25 bp, Homo sapien
tcagtaacgtttgtaccggatatac

SEQ ID NO: 558951 - DNA, 25 bp, Homo sapien
ggatataccctcagtctaatgaaga

SEQ ID NO: 558952 - DNA, 25 bp, Homo sapien
catgcactggttcaaggttctggag

SEQ ID NO: 558953 - DNA, 25 bp, Homo sapien
gccatgagcatgaaaagacccgaag

SEQ ID NO: 558954 - DNA, 25 bp, Homo sapien
aacttgttttcgaatctcctgggag

SEQ ID NO: 558955 - DNA, 25 bp, Homo sapien
ccaagctgttccaggccagaggact

SEQ ID NO: 558956 - DNA, 25 bp, Homo sapien
tccatcctcaatggccagtttttgg

SEQ ID NO: 558957 - DNA, 25 bp, Homo sapien
tcctcaatggccagtttttggctgg

SEQ ID NO: 558958 - DNA, 25 bp, Homo sapien
agtttttggctggatgctatggccc

SEQ ID NO: 558959 - DNA, 25 bp, Homo sapien
tgctatggcccgctctcgggctgct

SEQ ID NO: 558960 - DNA, 25 bp, Homo sapien
cagatgccagtctcaagtagtgggc

SEQ ID NO: 558961 - DNA, 25 bp, Homo sapien
gatatagacaagcatcccgatgaag

SEQ ID NO: 558962 - DNA, 25 bp, Homo sapien
agtttgacatgtaccatcctccagg

SEQ ID NO: 558963 - DNA, 25 bp, Homo sapien
tccaagttggctacaaatcgagggt

SEQ ID NO: 558964 - DNA, 25 bp, Homo sapien
cacaagtcacggcagaacagcagtt

SEQ ID NO: 558965 - DNA, 25 bp, Homo sapien
tcgtcaggaacatgcgcttggcagg

SEQ ID NO: 558966 - DNA, 25 bp, Homo sapien
tattcctgtctgaaccgccggagtg

SEQ ID NO: 558967 - DNA, 25 bp, Homo sapien
agtcaaatgtccaaaacgtagccgg

SEQ ID NO: 558968 - DNA, 25 bp, Homo sapien
tcatgttcatgagggccacggtggc

SEQ ID NO: 558969 - DNA, 25 bp, Homo sapien
taagaacatagaacctctggcctgg

SEQ ID NO: 558970 - DNA, 25 bp, Homo sapien
ctccgctcggcacaggatggcaggt

SEQ ID NO: 558971 - DNA, 25 bp, Homo sapien
agaccacgtgctccgctaagaacat

SEQ ID NO: 558972 - DNA, 25 bp, Homo sapien
tcactgggttctcccagctgtgctg

SEQ ID NO: 558973 - DNA, 25 bp, Homo sapien
agctgtgctgcacagcttccaggtg

SEQ ID NO: 558974 - DNA, 25 bp, Homo sapien
ctgtgctgcacagcttccaggtgat

SEQ ID NO: 558975 - DNA, 25 bp, Homo sapien
ccagctgtgctgcacagcttccagg

SEQ ID NO: 558976 - DNA, 25 bp, Homo sapien
gcatcaagagcaagggcatcgtctg

SEQ ID NO: 558977 - DNA, 25 bp, Homo sapien
tgcagcagcaccaaggtccagatgg

SEQ ID NO: 558978 - DNA, 25 bp, Homo sapien
cgaggactgactccatgctgctgta

SEQ ID NO: 558979 - DNA, 25 bp, Homo sapien
cccacagaagccaatggcaaaggcc

SEQ ID NO: 558980 - DNA, 25 bp, Homo sapien
ccatgaggtagaccccccgtaggtg

SEQ ID NO: 558981 - DNA, 25 bp, Homo sapien
ccccgtaggtgtcggtgtagagcac

SEQ ID NO: 558982 - DNA, 25 bp, Homo sapien
agcacaaacgccgtcagcctgcaga

SEQ ID NO: 558983 - DNA, 25 bp, Homo sapien
gcagagccccttgccgaaaggccag

SEQ ID NO: 558984 - DNA, 25 bp, Homo sapien
aggcaaagggcaaggatgtttccca

SEQ ID NO: 558985 - DNA, 25 bp, Homo sapien
acagagagcgtcatgcgggccactg

SEQ ID NO: 558986 - DNA, 25 bp, Homo sapien
tgtgtagaacagagagcgtcatgcg

SEQ ID NO: 558987 - DNA, 25 bp, Homo sapien
agcagtgccggaagccatctcacgt

SEQ ID NO: 558988 - DNA, 25 bp, Homo sapien
aggaagactactcacgccagcagtg

SEQ ID NO: 558989 - DNA, 25 bp, Homo sapien
gtcagatgctgacttgaagggcacc

SEQ ID NO: 558990 - DNA, 25 bp, Homo sapien
ttctgcagtcagatgctgacttgaa

SEQ ID NO: 558991 - DNA, 25 bp, Homo sapien
tctgcagtcagatgctgacttgaag

SEQ ID NO: 558992 - DNA, 25 bp, Homo sapien
gcagtcagatgctgacttgaagggc

SEQ ID NO: 558993 - DNA, 25 bp, Homo sapien
agttgactgtgtacaagtgatggag

SEQ ID NO: 558994 - DNA, 25 bp, Homo sapien
tgggcgcagccacgggctctaagtt

SEQ ID NO: 558995 - DNA, 25 bp, Homo sapien
ccacgggctctaagttgactgtgta

SEQ ID NO: 558996 - DNA, 25 bp, Homo sapien
gctctaagttgactgtgtacaagtg

SEQ ID NO: 558997 - DNA, 25 bp, Homo sapien
cagttacaaggcagtcgaagctggg

SEQ ID NO: 558998 - DNA, 25 bp, Homo sapien
ttacaaggcagtcgaagctggggct

SEQ ID NO: 558999 - DNA, 25 bp, Homo sapien
tgaaggatgcagagactttgggcca

SEQ ID NO: 559000 - DNA, 25 bp, Homo sapien
tcagttacaaggcagtcgaagctgg

SEQ ID NO: 559001 - DNA, 25 bp, Homo sapien
tctgtggtttgcacgtctgtgttcc

SEQ ID NO: 559002 - DNA, 25 bp, Homo sapien
tggcaccgctatcgcatctctgtgg

SEQ ID NO: 559003 - DNA, 25 bp, Homo sapien
tgatttctgcctcgctctgtgcctg

SEQ ID NO: 559004 - DNA, 25 bp, Homo sapien
gctacccttgaagtggcttcacaag

SEQ ID NO: 559005 - DNA, 25 bp, Homo sapien
caagcatctgcttagctccctgtgc

SEQ ID NO: 559006 - DNA, 25 bp, Homo sapien
ttcccacaggacacatcaagcatct

SEQ ID NO: 559007 - DNA, 25 bp, Homo sapien
ggacacatcaagcatctgcttagct

SEQ ID NO: 559008 - DNA, 25 bp, Homo sapien
ttcttcccacaggacacatcaagca

SEQ ID NO: 559009 - DNA, 25 bp, Homo sapien
ctgtgatcctactgtgcggacagct

SEQ ID NO: 559010 - DNA, 25 bp, Homo sapien
attggtcatctctgacccgcaggcg

SEQ ID NO: 559011 - DNA, 25 bp, Homo sapien
ggtcatctctgacccgcaggcggga

SEQ ID NO: 559012 - DNA, 25 bp, Homo sapien
atggggaacgggctctcttgaggct

SEQ ID NO: 559013 - DNA, 25 bp, Homo sapien
gatggggaacgggctctcttgaggc

SEQ ID NO: 559014 - DNA, 25 bp, Homo sapien
tcacatcctccacactaacactgat

SEQ ID NO: 559015 - DNA, 25 bp, Homo sapien
ctccacactaacactgatcccaagg

SEQ ID NO: 559016 - DNA, 25 bp, Homo sapien
catcctccacactaacactgatccc

SEQ ID NO: 559017 - DNA, 25 bp, Homo sapien
agctatggtccctcacatcctccac

SEQ ID NO: 559018 - DNA, 25 bp, Homo sapien
cacttgtgaaagtgcgcccaaggac

SEQ ID NO: 559019 - DNA, 25 bp, Homo sapien
tcctcccgggtatcagaaagcatgg

SEQ ID NO: 559020 - DNA, 25 bp, Homo sapien
caaccacttagtgttagccagcaga

SEQ ID NO: 559021 - DNA, 25 bp, Homo sapien
gcagggtttctcacgggaagtcaca

SEQ ID NO: 559022 - DNA, 25 bp, Homo sapien
cagaaaggcctcgtgactcaggagt

SEQ ID NO: 559023 - DNA, 25 bp, Homo sapien
taaaaaaggtcccatgactcgtgtc

SEQ ID NO: 559024 - DNA, 25 bp, Homo sapien
tacggtggcctgagtctgttactgc

SEQ ID NO: 559025 - DNA, 25 bp, Homo sapien
tccagacggcgaggaaatacatttc

SEQ ID NO: 559026 - DNA, 25 bp, Homo sapien
gtcagagggcccgagttccgataag

SEQ ID NO: 559027 - DNA, 25 bp, Homo sapien
tcagtaagaaaaacagcctttcagg

SEQ ID NO: 559028 - DNA, 25 bp, Homo sapien
gaaaaacagcctttcaggcctgcac

SEQ ID NO: 559029 - DNA, 25 bp, Homo sapien
taagccgctgtttgctaacgtaggt

SEQ ID NO: 559030 - DNA, 25 bp, Homo sapien
aaaggcctgatgtctgcgggaagct

SEQ ID NO: 559031 - DNA, 25 bp, Homo sapien
ctacacaggtataaccgcgggccct

SEQ ID NO: 559032 - DNA, 25 bp, Homo sapien
ccgcgggccctgagtcaggtgaaag

SEQ ID NO: 559033 - DNA, 25 bp, Homo sapien
aagaaaagtcttacgccattggctg

SEQ ID NO: 559034 - DNA, 25 bp, Homo sapien
tcttctacacgggtttgcttttcac

SEQ ID NO: 559035 - DNA, 25 bp, Homo sapien
agctgctacagcttcttctacacgg

SEQ ID NO: 559036 - DNA, 25 bp, Homo sapien
tacagcttcttctacacgggtttgc

SEQ ID NO: 559037 - DNA, 25 bp, Homo sapien
tgctacagcttcttctacacgggtt

SEQ ID NO: 559038 - DNA, 25 bp, Homo sapien
ggtgcctgcctggtcgtcaaatctt

SEQ ID NO: 559039 - DNA, 25 bp, Homo sapien
tactggaataattgcagcaggtgcc
